(19) United States
(12) Patent Application Publication
(10) Pub. No.: US 2023/0041030 A1
(43) Pub. Date: Feb. 9, 2023

(54) ANTIGEN-BINDING PROTEINS TARGETING SHARED NEOANTIGENS

(71) Applicant: Gritstone bio, Inc., Emeryville, CA (US)

(72) Inventors: Karin Jooss, Emeryville, CA (US); Aleksandra Katarzyna Nowicka, Watertown, MA (US); Abubakar Jalloh, Somerville, MA (US); Roman Yelensky, Newton, MA (US); James Xin Sun, Newton, MA (US); Jennifer Busby, Burlington, MA (US); Matthew Joseph Davis, Scituate, MA (US)

(21) Appl. No.: 17/744,354

(22) Filed: May 13, 2022

Related U.S. Application Data
(63) Continuation of application No. PCT/US2020/060605, filed on Nov. 13, 2020.
(60) Provisional application No. 63/030,774, filed on May 27, 2020.
(60) Provisional application No. 62/936,303, filed on Nov. 15, 2019.

(51) Int. Cl. C07K 16/28; C12N 5/0783; C12N 15/85; A61P 35/00

(52) U.S. Cl. CPC C07K 16/2833; C12N 5/0636; C12N 15/85; A61P 35/00; C07K 2317/565

(57) ABSTRACT

Provided herein are target HLA-PEPTIDE antigens, e.g., HLA-PEPTIDE neoantigens and shared tumor HLA-PEPTIDE antigens, and antigen binding proteins (ABPs) that bind the target HLA-PEPTIDE antigens. Also disclosed are methods for identifying target HLA-PEPTIDE antigens as well as identifying one or more antigen binding proteins that bind a given HLA-PEPTIDE target antigen.

### RELATED APPLICATIONS

[0001] This application is continuation of International Application No. PCT/US20/60605, filed Nov. 13, 2020, which claims the benefit of U.S. Provisional Application Nos: 62/936,303 filed Nov. 15, 2019 and 63/030,774 filed May 27, 2020, each of which is hereby incorporated in its entirety by reference for all purposes.

### SEQUENCE LISTING

[0002] The instant application contains a Sequence Listing which has been filed electronically in ASCII format and is hereby incorporated by reference in its entirety. Said ASCII copy, created on Nov. 13, 2020, is named GSO-080WO_SL.txt and is 6,925,625 bytes in size.

### BACKGROUND

[0003] It is recognized that MHCs display intracellularly processed protein fragments on the cell surface. In humans, MHC is referred to as human leukocyte antigen or HLA. In particular, MHC class I molecules are expressed on the surface of virtually all nucleated cells in the body. They are dimeric molecules comprising a transmembrane heavy chain, comprising the peptide antigen binding cleft, and a smaller extracellular chain termed beta2-microglobulin. MHC class I molecules present peptides derived from the degradation of cytosolic proteins by the proteasome, a multi-unit structure in the cytoplasm, (Niedermann G., 2002. Curr Top Microbiol Immunol. 268:91-136; for processing of bacterial antigens, refer to Wick M J, and Ljunggren H G., 1999. Immunol Rev. 172:153-62). Cleaved peptides are transported into the lumen of the endoplasmic reticulum (ER) by the transporter associated with antigen processing (TAP) where they are bound to the groove of the assembled class I molecule, and the resultant MHC/peptide complex is transported to the cell membrane to enable antigen presentation to T lymphocytes (Yewdell J W., 2001. Trends Cell Biol. 11:294-7; Yewdell J W. and Bennink J R., 2001. Curr Opin Immunol. 13:13-8). Alternatively, cleaved peptides can be loaded onto MHC class I molecules in a TAP-independent manner and can also present extracellularly-derived proteins through a process of cross-presentation.

[0004] MHC genes are highly polymorphic across species populations, comprising multiple common alleles for each individual gene. As such, a given MHC allele/peptide complex comprising a specific HLA subtype and a specific peptide fragment presents a novel protein structure on the cell surface that can be targeted by a novel antigen-binding protein (e.g., TCRs or antigen binding fragments thereof). However, such TCR-based approaches first require the identification of the complex's structure (peptide sequence and MHC subtype).

[0005] Tumor cells can express neoantigens and may display such antigens on the surface of the tumor cell via MHC presentation. Such tumor-associated neoantigens, comprising the novel protein structure formed by the peptide-MHC subtype complex, can be used for development of novel immunotherapeutic reagents for the specific targeting of tumor cells. For example, tumor-associated antigens can be used to identify therapeutic antigen binding proteins, e.g., TCRs, or antigen-binding fragments thereof. However, accurate identification of such neoantigens has been challenging.

[0006] Initial methods have been proposed incorporating mutation-based analysis using next-generation sequencing, RNA gene expression, and prediction of MHC binding affinity of candidate neoantigen peptides⁸. However, these proposed methods can fail to model the entirety of the epitope generation process, which contains many steps (e.g., TAP transport, proteasomal cleavage, and/or TCR recognition) in addition to gene expression and MHC binding⁹. Consequently, existing methods are likely to suffer from reduced low positive predictive value (PPV).

[0007] Indeed, analyses of peptides presented by tumor cells performed by multiple groups have shown that <5% of peptides predicted to be presented using gene expression and MHC binding affinity are actually found on the tumor surface MHC^{10,11}. This low correlation between binding predicted and actual MHC presentation was further reinforced by recent observations of the lack of predictive accuracy improvement of binding-restricted neoantigens for checkpoint inhibitor response over the number of mutations alone.¹²

[0008] This low positive predictive value (PPV) of existing methods for predicting presentation presents a problem for neoantigen-based immunotherapy design. If immunotherapies are designed using predictions with a low PPV, many of them will be clinically ineffective.

[0009] Accordingly, there is a need for the discovery and identification of tumor-associated HLA-peptide complexes with high positive predictive value, and a need for the development of TCR-based immunotherapies targeting such complexes.

### SUMMARY

[0010] Provided herein is an antigen binding protein (ABP) that specifically binds to an HLA-PEPTIDE antigen comprising an HLA-restricted peptide complexed with an HLA Class I molecule, wherein the HLA-restricted peptide is located in the peptide binding groove of an α1/α2 heterodimer portion of the HLA Class I molecule, wherein the HLA Class I molecule and the HLA-restricted peptide are each selected from an HLA-PEPTIDE antigen as described in any one of SEQ ID NOs:10,755 to 29,364, and wherein the ABP comprises a T cell receptor (TCR) or antigen-binding fragment thereof.

[0011] In some aspects, the HLA-restricted peptide is between about 5-15 amino acids in length. In some aspects, the HLA-restricted peptide is between about 8-12 amino acids in length, optionally 8, 9, 10, 11, or 12 amino acids in length.

[0012] In some aspects, the HLA-PEPTIDE antigen is selected from the group consisting of a RAS_G12D MHC Class I antigen comprising HLA-A*11:01 and the restricted peptide VVVGADGVGK; a RAS_G12V MHC Class I antigen comprising HLA-A*11:01 and the restricted peptide VVVGAVGVGK; a RAS_G12C MHC Class I antigen comprising HLA-A*02:01 and the restricted peptide KLVVVGACGV; a CTNNB1_S45P MHC Class I antigen comprising HLA-A*03:01 and the restricted peptide TTAPPLSGK; a RAS_G12D MHC Class I antigen comprising HLA-A*11:01 and the restricted peptide VVGADGVGK; a RAS_G12V MHC Class I antigen comprising HLA-A*11:01 and the restricted peptide VVGAVGVGK; a RAS_G12V MHC Class I antigen comprising HLA-C*01:02 and the restricted peptide AVGVGKSAL; a RAS_G12V MHC Class I antigen comprising HLA-A*03:01 and the restricted peptide VVVGAVGVGK; a TP53_K132N MHC Class I antigen comprising HLA-A*24:02 and the restricted peptide TYSPALNNMF; a CTNNB1_S37Y MHC Class I antigen comprising HLA-A*02:01 and the restricted peptide YLDSGIHYGA; a RAS_G12C MHC Class I antigen comprising HLA-A*03:01 and the restricted peptide VVVGACGVGK; a RAS_G12C MHC Class I antigen comprising HLA-A*11:01 and the restricted peptide VVVGACGVGK; a RAS_G12D MHC Class I antigen comprising HLA-A*03:01 and the restricted peptide VVVGADGVGK; a RAS_Q61H MHC Class I antigen comprising HLA-A*01:01 and the restricted peptide ILDTAGHEEY; and a TP53_R213L MHC Class I antigen comprising A*02:01 and the restricted peptide YLDDRNTFL.

[0013] In some aspects, the restricted peptide comprises a RAS_G12A mutation, and wherein the HLA Class I molecule is HLA-A*02:01; the restricted peptide comprises a RAS_G12A mutation, and wherein the HLA Class I molecule is HLA-A*02:06; the restricted peptide comprises a RAS_G12A mutation, and wherein the HLA Class I molecule is HLA-B*27:05; the restricted peptide comprises a RAS_G12A mutation, and wherein the HLA Class I molecule is HLA-B*35:01; the restricted peptide comprises a RAS_G12A mutation, and wherein the HLA Class I molecule is HLA-B*41:02; the restricted peptide comprises a RAS_G12A mutation, and wherein the HLA Class I molecule is HLA-B*48:01; the restricted peptide comprises a RAS_G12A mutation, and wherein the HLA Class I molecule is HLA-C*08:03; the restricted peptide comprises a RAS_G12C mutation, and wherein the HLA Class I molecule is HLA-A*02:01; the restricted peptide comprises a RAS_G12C mutation, and wherein the HLA Class I molecule is HLA-A*02:01; the restricted peptide comprises a RAS_G12C mutation, and wherein the HLA Class I molecule is HLA-A*03:02; the restricted peptide comprises a RAS_G12C mutation, and wherein the HLA Class I molecule is HLA-A*68:01; the restricted peptide comprises a RAS_G12C mutation, and wherein the HLA Class I molecule is HLA-B*27:05; the restricted peptide comprises a RAS_G12D mutation, and wherein the HLA Class I molecule is HLA-A*02:01; the restricted peptide comprises a RAS_G12D mutation, and wherein the HLA Class I molecule is HLA-A*02:05; the restricted peptide comprises a RAS_G12D mutation, and wherein the HLA Class I molecule is HLA-A*03:01; the restricted peptide comprises a RAS_G12D mutation, and wherein the HLA Class I molecule is HLA-A*11:01; the restricted peptide comprises a RAS_G12D mutation, and wherein the HLA Class I molecule is HLA-A*11:01; the restricted peptide comprises a RAS_G12D mutation, and wherein the HLA Class I molecule is HLA-A*26:01; the restricted peptide comprises a RAS_G12D mutation, and wherein the HLA Class I molecule is HLA-A*31:01; the restricted peptide comprises a RAS_G12D mutation, and wherein the HLA Class I molecule is HLA-A*68:01; the restricted peptide comprises a RAS_G12D mutation, and wherein the HLA Class I molecule is HLA-B*07:02; the restricted peptide comprises a RAS_G12D mutation, and wherein the HLA Class I molecule is HLA-B*08:01; the restricted peptide comprises a RAS_G12D mutation, and wherein the HLA Class I molecule is HLA-B*13:02; the restricted peptide comprises a RAS_G12D mutation, and wherein the HLA Class I molecule is HLA-B*15:01; the restricted peptide comprises a RAS_G12D mutation, and wherein the HLA Class I molecule is HLA-B*27:05; the restricted peptide comprises a RAS_G12D mutation, and wherein the HLA Class I molecule is HLA-B*35:01; the restricted peptide comprises a RAS_G12D mutation, and wherein the HLA Class I molecule is HLA-B*37:01; the restricted peptide comprises a RAS_G12D mutation, and wherein the HLA Class I molecule is HLA-B*38:01; the restricted peptide comprises a RAS_G12D mutation, and wherein the HLA Class I molecule is HLA-B*40:01; the restricted peptide comprises a RAS_G12D mutation, and wherein the HLA Class I molecule is HLA-B*40:02; the restricted peptide comprises a RAS_G12D mutation, and wherein the HLA Class I molecule is HLA-B*44:02; the restricted peptide comprises a RAS_G12D mutation, and wherein the HLA Class I molecule is HLA-B*44:03; the restricted peptide comprises a RAS_G12D mutation, and wherein the HLA Class I molecule is HLA-B*48:01; the restricted peptide comprises a RAS_G12D mutation, and wherein the HLA Class I molecule is HLA-B*50:01; the restricted peptide comprises a RAS_G12D mutation, and wherein the HLA Class I molecule is HLA-B*57:01; the restricted peptide comprises a RAS_G12D mutation, and wherein the HLA Class I molecule is HLA-C*01:02; the restricted peptide comprises a RAS_G12D mutation, and wherein the HLA Class I molecule is HLA-C*02:02; the restricted peptide comprises a RAS_G12D mutation, and wherein the HLA Class I molecule is HLA-C*03:03; the restricted peptide comprises a RAS_G12D mutation, and wherein the HLA Class I molecule is HLA-C*03:04; the restricted peptide comprises a RAS_G12D mutation, and wherein the HLA Class I molecule is HLA-C*04:01; the restricted peptide comprises a RAS_G12D mutation, and wherein the HLA Class I molecule is HLA-C*05:01; the restricted peptide comprises a RAS_G12D mutation, and wherein the HLA Class I molecule is HLA-C*07:04; the restricted peptide comprises a RAS_G12D mutation, and wherein the HLA Class I molecule is HLA-C*08:02; the restricted peptide comprises a RAS_G12D mutation, and wherein the HLA Class I molecule is HLA-C*08:03; the restricted peptide comprises a RAS_G12D mutation, and wherein the HLA Class I molecule is HLA-C*16:01; the restricted peptide comprises a RAS_G12D mutation, and wherein the HLA Class I molecule is HLA-C*17:01; the restricted peptide comprises a RAS_G12D mutation, and wherein the HLA Class I molecule is HLA-B*41:02; the restricted peptide comprises a RAS_G12D mutation, and wherein the HLA Class I molecule is HLA-C*07:04; the restricted peptide comprises a RAS_G12V mutation, and wherein the HLA Class I molecule is HLA-A*02:01; the restricted peptide comprises a RAS_G12V mutation, and wherein the HLA Class I molecule is HLA-A*02:05; the restricted peptide comprises a RAS_G12V mutation, and wherein the HLA Class I molecule is HLA-A*02:06; the restricted peptide comprises a RAS_G12V mutation, and wherein the HLA Class I molecule is HLA-A*03:01; the restricted peptide comprises a RAS_G12V mutation, and wherein the HLA Class I molecule is HLA-A*03:01; the restricted peptide comprises a RAS_G12V mutation, and wherein the HLA Class I molecule is HLA-A*11:01; the restricted peptide comprises a RAS_G12V mutation, and wherein the HLA Class I molecule is HLA-A*11:01; the restricted peptide comprises a RAS_G12V mutation, and wherein the HLA Class I molecule is HLA-A*25:01; the restricted peptide comprises a RAS_G12V mutation, and wherein the HLA Class I molecule is HLA-A*26:01; the restricted peptide comprises a RAS_G12V mutation, and wherein the HLA Class I molecule is HLA-A*30:01; the restricted peptide comprises a RAS_G12V mutation, and wherein the HLA Class I molecule is HLA-A*31:01; the restricted peptide comprises a RAS_G12V mutation, and wherein the HLA Class I molecule is HLA-A*31:01; the restricted peptide comprises a RAS_G12V mutation, and wherein the HLA Class I molecule is HLA-A*32:01; the restricted peptide comprises a RAS_G12V mutation, and wherein the HLA Class I molecule is HLA-A*68:02; the restricted peptide comprises a RAS_G12V mutation, and wherein the HLA Class I molecule is HLA-B*07:02; the restricted peptide comprises a RAS_G12V mutation, and wherein the HLA Class I molecule is HLA-B*08:01; the restricted peptide comprises a RAS_G12V mutation, and wherein the HLA Class I molecule is HLA-B*13:02; the restricted peptide comprises a RAS_G12V mutation, and wherein the HLA Class I molecule is HLA-B*14:02; the restricted peptide comprises a RAS_G12V mutation, and wherein the HLA Class I molecule is HLA-B*15:01; the restricted peptide comprises a RAS_G12V mutation, and wherein the HLA Class I molecule is HLA-B*27:05; the restricted peptide comprises a RAS_G12V mutation, and wherein the HLA Class I molecule is HLA-B*39:01; the restricted peptide comprises a RAS_G12V mutation, and wherein the HLA Class I molecule is HLA-B*40:01; the restricted peptide comprises a RAS_G12V mutation, and wherein the HLA Class I molecule is HLA-B*40:02; the restricted peptide comprises a RAS_G12V mutation, and wherein the HLA Class I molecule is HLA-B*41:02; the restricted peptide comprises a RAS_G12V mutation, and wherein the HLA Class I molecule is HLA-B*44:05; the restricted peptide comprises a RAS_G12V mutation, and wherein the HLA Class I molecule is HLA-B*50:01; the restricted peptide comprises a RAS_G12V mutation, and wherein the HLA Class I molecule is HLA-B*51:01; the restricted peptide comprises a RAS_G12V mutation, and wherein the HLA Class I molecule is HLA-C*01:02; the restricted peptide comprises a RAS_G12V mutation, and wherein the HLA Class I molecule is HLA-C*01:02; the restricted peptide comprises a RAS_G12V mutation, and wherein the HLA Class I molecule is HLA-C*03:03; the restricted peptide comprises a RAS_G12V mutation, and wherein the HLA Class I molecule is HLA-C*03:04; the restricted peptide comprises a RAS_G12V mutation, and wherein the HLA Class I molecule is HLA-C*08:02; the restricted peptide comprises a RAS_G12V mutation, and wherein the HLA Class I molecule is HLA-C*14:02; the restricted peptide comprises a RAS_G12V mutation, and wherein the HLA Class I molecule is HLA-C*17:01; the restricted peptide comprises a KRAS_G13D mutation, and wherein the HLA Class I molecule is HLA-A*02:01; the restricted peptide comprises a KRAS_G13D mutation, and wherein the HLA Class I molecule is HLA-B*07:02; the restricted peptide comprises a KRAS_G13D mutation, and wherein the HLA Class I molecule is HLA-B*08:01; the restricted peptide comprises a KRAS_G13D mutation, and wherein the HLA Class I molecule is HLA-B*35:01; the restricted peptide comprises a KRAS_G13D mutation, and wherein the HLA Class I molecule is HLA-B*35:03; the restricted peptide comprises a KRAS_G13D mutation, and wherein the HLA Class I molecule is HLA-B*35:08; the restricted peptide comprises a KRAS_G13D mutation, and wherein the HLA Class I molecule is HLA-B*38:01; the restricted peptide comprises a KRAS_G13D mutation, and wherein the HLA Class I molecule is HLA-C*04:01; the restricted peptide comprises a KRAS_Q61H mutation, and wherein the HLA Class I molecule is HLA-A*01:01; the restricted peptide comprises a KRAS_Q61H mutation, and wherein the HLA Class I molecule is HLA-A*02:01; the restricted peptide comprises a KRAS_Q61H mutation, and wherein the HLA Class I molecule is HLA-A*23:01; the restricted peptide comprises a KRAS_Q61H mutation, and wherein the HLA Class I molecule is HLA-A*29:01; the restricted peptide comprises a KRAS_Q61H mutation, and wherein the HLA Class I molecule is HLA-A*30:02; the restricted peptide comprises a KRAS_Q61H mutation, and wherein the HLA Class I molecule is HLA-A*33:01; the restricted peptide comprises a KRAS_Q61H mutation, and wherein the HLA Class I molecule is HLA-A*68:01; the restricted peptide comprises a KRAS_Q61H mutation, and wherein the HLA Class I molecule is HLA-B*07:02; the restricted peptide comprises a KRAS_Q61H mutation, and wherein the HLA Class I molecule is HLA-B*08:01; the restricted peptide comprises a KRAS_Q61H mutation, and wherein the HLA Class I molecule is HLA-B*18:01; the restricted peptide comprises a KRAS_Q61H mutation, and wherein the HLA Class I molecule is HLA-B*35:01; the restricted peptide comprises a KRAS_Q61H mutation, and wherein the HLA Class I molecule is HLA-B*38:01; the restricted peptide comprises a KRAS_Q61H mutation, and wherein the HLA Class I molecule is HLA-B*40:01; the restricted peptide comprises a KRAS_Q61H mutation, and wherein the HLA Class I molecule is HLA-B*44:02; the restricted peptide comprises a KRAS_Q61H mutation, and wherein the HLA Class I molecule is HLA-C*03:04; the restricted peptide comprises a KRAS_Q61H mutation, and wherein the HLA Class I molecule is HLA-C*05:01; or the restricted peptide comprises a KRAS_Q61H mutation, and wherein the HLA Class I molecule is HLA-C*08:02.

[0014] In some aspects, the restricted peptide comprises a KRAS_G13D mutation, and wherein the HLA Class I molecule is C*08:02 or A*11:01; the restricted peptide comprises a KRAS_Q61K mutation, and wherein the HLA Class I molecule is A*01:01; the restricted peptide comprises a NRAS_Q61K mutation, and wherein the HLA Class I molecule is A*01:01; the restricted peptide comprises a TP53_R249M mutation, and wherein the HLA Class I molecule is B*35:12, B*35:03, or B*35:01; the restricted peptide comprises a CTNNB1_S45P mutation, and wherein the HLA Class I molecule is A*03:01, A*11:01, A*68:01, or A*03:02; the restricted peptide comprises a CTNNB1_S45F mutation, and wherein the HLA Class I molecule is A*03:01, A*11:01, or A*68:01; the restricted peptide comprises a ERBB2_Y772_A775dup mutation, and wherein the HLA Class I molecule is B*18:01; the restricted peptide comprises a KRAS_G12D mutation, and wherein the HLA Class I molecule is A*11:01, A*03:01, or C*08:02; the restricted peptide comprises a NRAS_G12D mutation, and wherein the HLA Class I molecule is A*11:01, A*03:01, or C*08:02; the restricted peptide comprises a KRAS_Q61D mutation, and wherein the HLA Class I molecule is A*01:01; the restricted peptide comprises a NRAS_Q61D mutation, and wherein the HLA Class I molecule is A*01:01; the restricted peptide comprises a CTNNB1_T41A mutation, and wherein the HLA Class I molecule is A*03:01, A*03:02, A*11:01, B*15:10, C*03:03, or C*03:04; the restricted peptide comprises a TP53_K132N mutation, and wherein the HLA Class I molecule is A*24:02 or A*23:01; the restricted peptide comprises a KRAS_G12A mutation, and wherein the HLA Class I molecule is A*03:01 or A*11:01; the restricted peptide comprises a KRAS_Q61L mutation, and wherein the HLA Class I molecule is A*01:01; the restricted peptide comprises a NRAS_Q61L mutation, and wherein the HLA Class I molecule is A*01:01; the restricted peptide comprises a TP53_R213L mutation, and wherein the HLA Class I molecule is A*02:07, C*08:02, or A*02:01; the restricted peptide comprises a BRAF_G466V mutation, and wherein the HLA Class I molecule is B*15:01, or B*15:03; the restricted peptide comprises a KRAS_G12V mutation, and wherein the HLA Class I molecule is A*03:01, A*03:02, A*11:01, or C*01:02; the restricted peptide comprises a KRAS_Q61H mutation, and wherein the HLA Class I molecule is A*01:01; the restricted peptide comprises a NRAS_Q61H mutation, and wherein the HLA Class I molecule is A*01:01; the restricted peptide comprises a CTNNB1_S37F mutation, and wherein the HLA Class I molecule is A*01:01, A*23:01, A*24:02, B*15:10, B*39:06, C*05:01, C*14:02, or C*14:03; the restricted peptide comprises a TP53_S127Y mutation, and wherein the HLA Class I molecule is A*11:01 or A*03:01; the restricted peptide comprises a TP53_K132E mutation, and wherein the HLA Class I molecule is A*24:02, C*14:03, or A*23:01; the restricted peptide comprises a KRAS_G12C mutation, and wherein the HLA Class I molecule is A*02:01, A*11:01, or A*03:01; the restricted peptide comprises a NRAS_G12C mutation, and wherein the HLA Class I molecule is A*02:01, A*11:01, or A*03:01; the restricted peptide comprises a EGFR_L858D mutation, and wherein the HLA Class I molecule is A*11:01, or A*03:01; the restricted peptide comprises a TP53_Y220C mutation, and wherein the HLA Class I molecule is A*02:01; or the restricted peptide comprises a TP53_R175H mutation, and wherein the HLA Class I molecule is A*02:01.

[0015] In some aspects, the HLA-PEPTIDE antigen is selected from: a CTNNB1_S45P MHC Class I antigen comprising A*11:01 and the restricted peptide TTAPPLSGK; a CTNNB1_T41AMHC Class I antigen comprising A*11:01 and the restricted peptide ATAPSLSGK; a RAS_G12D MHC Class I antigen comprising A*11:01 and the restricted peptide VVVGADGVGK; a RAS_G12V MHC Class I antigen comprising A*03:01 and the restricted peptide VVGAVGVGK; a RAS_G12V MHC Class I antigen comprising A*03:01 and the restricted peptide VVVGAVGVGK; a RAS_G12V MHC Class I antigen comprising A*11:01 and the restricted peptide VVGAVGVGK; a RAS_G12V MHC Class I antigen comprising A*11:01 and the restricted peptide VVVGAVGVGK; a KRAS_Q61R MHC Class I antigen comprising A*01:01 and the restricted peptide ILDTAGREEY; and a TP53_R213L MHC Class I antigen comprising A*02:01 and the restricted peptide YLDDRNTFL.

[0016] In some aspects, the HLA-restricted peptide comprises a RAS G12 mutation. In some aspects, the G12 mutation is a G12C, a G12D, a G12V, or a G12A mutation. In some aspects, the HLA-PEPTIDE antigen comprises an HLA Class I molecule selected from HLA-A*02:01, HLA-A*11:01, HLA-A*31:01, HLA-C*01:02, and HLA-A*03:01. In some aspects, the RAS G12 mutation is any one or more of: a KRAS, NRAS, and HRAS mutation. In some aspects, the HLA-PEPTIDE antigen is selected from: a RAS_G12C MHC Class I antigen comprising HLA-A*02:01 and the restricted peptide KLVVVGACGV; a RAS_G12C MHC Class I antigen comprising HLA-A*03:01 and the restricted peptide VVVGACGVGK; a RAS_G12C MHC Class I antigen comprising HLA-A*11:01 and the restricted peptide VVVGACGVGK; a RAS_G12D MHC Class I antigen comprising HLA-A*11:01 and the restricted peptide VVVGADGVGK; a RAS_G12D MHC Class I antigen comprising HLA-A*11:01 and the restricted peptide VVGADGVGK; a RAS_G12D MHC Class I antigen comprising HLA-A*03:01 and the restricted peptide VVVGADGVGK; a RAS_G12V MHC Class I antigen comprising HLA-A*11:01 and the restricted peptide VVVGAVGVGK; a RAS_G12V MHC Class I antigen comprising HLA-A*31:01 and the restricted peptide VVVGAVGVGK; a RAS_G12V MHC Class I antigen comprising HLA-A*11:01 and the restricted peptide VVGAVGVGK; a RAS_G12V MHC Class I antigen comprising HLA-C*01:02 and the restricted peptide AVGVGKSAL; and a RAS_G12V MHC Class I antigen comprising HLA-A*03:01 and the restricted peptide VVVGAVGVGK. In some aspects, the HLA-PEPTIDE antigen is selected from: a RAS_G12C MHC Class I antigen comprising HLA-A*02:01 and the restricted peptide KLVVVGACGV; a RAS_G12D MHC Class I antigen comprising HLA-A*11:01 and the restricted peptide VVVGADGVGK; a RAS_G12D MHC Class I antigen comprising HLA-A*11:01 and the restricted peptide VVGADGVGK; a RAS_G12V MHC Class I antigen comprising HLA-A*11:01 and the restricted peptide VVVGAVGVGK; a RAS_G12V MHC Class I antigen comprising HLA-A*31:01 and the restricted peptide VVVGAVGVGK; a RAS_G12V MHC Class I antigen comprising HLA-A*11:01 and the restricted peptide VVGAVGVGK; a RAS_G12V MHC Class I antigen comprising HLA-C*01:02 and the restricted peptide AVGVGKSAL; and a RAS_G12V MHC Class I antigen comprising HLA-A*03:01 and the restricted peptide VVVGAVGVGK. In some aspects, the HLA-PEPTIDE antigen is selected from: a RAS_G12C MHC Class I antigen comprising HLA-A*02:01 and the restricted peptide KLVVVGACGV; a RAS_G12D MHC Class I antigen comprising HLA-A*11:01 and the restricted peptide VVVGADGVGK; and a RAS_G12V MHC Class I antigen comprising HLA-A*11:01 and the restricted peptide VVVGAVGVGK. In some aspects, the HLA-PEPTIDE antigen is a RAS_G12C MHC Class I antigen comprising HLA-A*02:01 and the restricted peptide KLVVVGACGV. In some aspects, the HLA-PEPTIDE antigen is a RAS_G12D MHC Class I antigen comprising HLA-A*11:01 and the restricted peptide VVVGADGVGK. In some aspects, the HLA-PEPTIDE antigen is a RAS_G12V MHC Class I antigen comprising HLA-A*11:01 and the restricted peptide VVVGAVGVGK.

[0017] In some aspects, the HLA-restricted peptide comprises a RAS Q61 mutation. In some aspects, the Q61 mutation is a Q61H, a Q61K, a Q61R, or a Q61L mutation. In some aspects, the HLA-PEPTIDE antigen is a RAS_Q61H MHC Class I antigen comprising HLA-A*01:01 and the restricted peptide ILDTAGHEEY.

[0018] In some aspects, the HLA-restricted peptide comprises a TP53 mutation. In some aspects, the TP53 mutation comprises a R213L, S127Y, Y220C, R175H, or R249M mutation. In some aspects, the HLA-PEPTIDE antigen is a TP53 R213L MHC Class I antigen comprising A*02:01 and the restricted peptide YLDDRNTFL.

[0019] In some aspects, the antigen binding protein binds to the HLA-PEPTIDE antigen through at least one contact point with the HLA Class I molecule and through at least one contact point with the HLA-restricted peptide.

[0020] In some aspects, the antigen binding protein binds to a RAS_G12C MHC Class I antigen comprising HLA-A*02:01 and the restricted peptide KLVVVGACGV, and wherein the ABP binds to the RAS_G12C MHC Class I antigen at a higher affinity than an HLA-PEPTIDE antigen comprising a different RAS G12 mutation. In some aspects, the ABP binds to the RAS_G12C MHC Class I antigen at a higher affinity than an HLA-PEPTIDE antigen comprising the restricted peptide KLVVVGAVGV and an HLA-A2 molecule In some aspects, the ABP does not bind to an HLA-PEPTIDE antigen comprising the restricted peptide KLVVVGAVGV and an HLA-A2 molecule.

[0021] In some aspects, the antigen binding protein is linked to a scaffold, optionally wherein the scaffold comprises serum albumin or Fc, optionally wherein Fc is human Fc and is an IgG (IgG1, IgG2, IgG3, IgG4), an IgA (IgA1, IgA2), an IgD, an IgE, or an IgM isotype Fc.

[0022] In some aspects, the antigen binding protein is linked to a scaffold via a linker, optionally wherein the linker is a peptide linker, optionally wherein the peptide linker is a hinge region of a human antibody.

[0023] In some aspects, the TCR or antigen-binding portion thereof comprises a TCR variable region. In some aspects, the TCR or antigen-binding portion thereof comprises one or more TCR complementarity determining regions (CDRs). In some aspects, the TCR comprises an alpha chain and a beta chain. In some aspects, the TCR comprises a gamma chain and a delta chain. In some aspects, the TCR comprises a single chain TCR (scTCR). In some aspects, the TCR comprises recombinant TCR sequences. In some aspects, the TCR comprises human TCR sequences, optionally wherein the human TCR sequences are fully-human TCR sequences. In some aspects, the TCR comprises a modified TCRα constant (TRAC) region, a modified TCRP constant (TRBC) region, or a modified TRAC region and a modified TRBC region.

[0024] In some aspects, the antigen binding protein comprises a modification that extends half-life.

[0025] In some aspects, the antigen binding protein is a portion of a chimeric antigen receptor (CAR) comprising: an extracellular portion comprising the antigen binding protein; and an intracellular signaling domain. In some aspects, the intracellular signaling domain comprises an ITAM. In some aspects, the intracellular signaling domain comprises a signaling domain of a zeta chain of a CD3-zeta (CD3) chain.

[0026] In some aspects, the antigen binding protein further comprises a transmembrane domain linking the extracellular domain and the intracellular signaling domain. In some aspects, the transmembrane domain comprises a transmembrane portion of CD28.

[0027] In some aspects, the antigen binding protein further comprises an intracellular signaling domain of a T cell costimulatory molecule. In some aspects, the T cell costimulatory molecule is CD28, 4-1BB, OX-40, ICOS, or any combination thereof.

[0028] Also provided for herein is a medicament comprising any one of the ABPs described herein.

[0029] Also provided for herein is an ABP for use in treatment of cancer, optionally wherein the cancer expresses or is predicted to express the HLA-PEPTIDE antigen a medicament, comprising any one of the ABPs described herein. In some aspects, the cancer is selected from a solid tumor and a hematological tumor.

[0030] Also provided for herein is an antigen binding protein (ABP) that competes for binding with any one of the ABPs described herein.

[0031] Also provided for herein is an antigen binding protein (ABP) that binds the same HLA-PEPTIDE antigen epitope bound by any one of the ABPs described herein.

[0032] Also provided for herein is an engineered cell expressing a receptor comprising the antigen binding protein of any one of the ABPs described herein. In some aspects, the engineered cell is a T cell. In some aspects, the T cell is selected from the group consisting of: a naive T (TN) cell, an effector T cell (TEFF), a memory T cell, a stem cell memory T cell (TSCM), a central memory T cell (TCM), an effector memory T cell (TEM), a terminally differentiated effector memory T cell, a tumor-infiltrating lymphocyte (TIL), an immature T cell, a mature T cell, a helper T cell, a cytotoxic T cell, a mucosa-associated invariant T (MALT) cell, a regulatory T cell (Treg), a TH1 cell, a TH2 cell, a TH3 cell, a TH17 cell, a TH9 cell, a TH22 cell, a follicular helper T cell, an natural killer T cell (NKT), an alpha-beta T cell, and a gamma-delta T cell. In some aspects, the T cell is a cytotoxic T cell (CTL). In some aspects, the engineered cell is a human cell or a human-derived cell. In some aspects, the engineered cell is an autologous cell of a subject. In some aspects, the subject is known or suspected to have cancer. In some aspects, the autologous cell is an isolated cell from a subject. In some aspects, the isolated cell is an an ex vivo cultured cell, optionally wherein the vivo cultured cell is a stimulated cell. In some aspects, the autologous cell is an in vivo-engineered cell. In some aspects, the antigen binding protein is expressed from a heterologous promoter. In some aspects, the ABP comprises a T cell receptor (TCR) or an antigen-binding portion thereof, and wherein a polynucleotide encoding the T cell receptor (TCR) or antigen-binding portion thereof is inserted in an endogenous TCR locus. In some aspects, the engineered cell does not express an endogenous ABP.

[0033] Also provided for herein is an isolated polynucleotide or set of polynucleotides encoding the ABP of any one of the ABPs described herein. Also provided for herein is a vector or set of vectors comprising any one of the polynucleotides or set of polynucleotides described herein. Also provided for herein is a virus comprising any one of the polynucleotides or set of polynucleotides described herein. In some aspects, the virus is a filamentous phage.

[0034] Also provided for herein is a yeast cell comprising any one of the polynucleotides or set of polynucleotides described herein.

[0035] Also provided for herein is a host cell comprising any one of the polynucleotides or set of polynucleotides described herein, optionally wherein the host cell is CHO or HEK293, or optionally wherein the host cell is a T cell.

[0036] Also provided for herein is a method of producing an antigen binding protein comprising expressing the antigen binding protein with any one of the host cells described herein and isolating the expressed antigen binding protein.

[0037] Also provided for herein is a pharmaceutical composition comprising any one of the antigen binding proteins described herein and a pharmaceutically acceptable excipient.

[0038] Also provided for herein is a method of treating cancer in a subject, comprising administering to the subject any one of the antigen binding proteins described herein, any one of the engineered cells described herein, or any one of the pharmaceutical compositions described herein, optionally wherein the cancer is selected from a solid tumor and a hematological tumor.

[0039] Also provided for herein is a method of stimulating an immune response in a subject, comprising administering to the subject any one of the antigen binding proteins described herein, any one of the engineered cells described herein, or any one of the pharmaceutical compositions described herein, optionally wherein the cancer is selected from a solid tumor and a hematological tumor.

[0040] Also provided for herein is a method of killing a target cell in a subject, comprising administering to the subject any one of the antigen binding proteins described herein, any one of the engineered cells described herein, or any one of the pharmaceutical compositions described herein, optionally wherein the cancer is selected from a solid tumor and a hematological tumor.

[0041] In some aspects, the subject is a human subject.

[0042] In some aspects, the cancer expresses or is predicted to express an HLA-PEPTIDE antigen or HLA Class I molecule as described in any one of In some aspects, the cancer expresses or is predicted to express an HLA-PEPTIDE antigen comprising an HLA-restricted peptide complexed with an HLA Class I molecule, wherein the HLA-restricted peptide is located in the peptide binding groove of an α1/α2 heterodimer portion of the HLA Class I molecule, wherein the HLA Class I molecule and the HLA-restricted peptide are each selected from an HLA-PEPTIDE antigen as described in any one of SEQ ID NOs:10,755 to 29,364, and wherein the ABP binds to the HLA-PEPTIDE antigen. In some aspects, the HLA-PEPTIDE antigen is selected from the group consisting of: a RAS_G12C MHC Class I antigen comprising HLA-A*02:01 and the restricted peptide KLVVVGACGV; a RAS_G12D MHC Class I antigen comprising HLA-A*11:01 and the restricted peptide VVVGADGVGK; a RAS_G12V MHC Class I antigen comprising HLA-A*11:01 and the restricted peptide VVVGAVGVGK; a CTNNB1_S45P MHC Class I antigen comprising HLA-A*03:01 and the restricted peptide TTAPPLSGK; a RAS_G12D MHC Class I antigen comprising HLA-A*11:01 and the restricted peptide VVGADGVGK; a RAS_G12V MHC Class I antigen comprising HLA-A*11:01 and the restricted peptide VVGAVGVGK; a RAS_G12V MHC Class I antigen comprising HLA-C*01:02 and the restricted peptide AVGVGKSAL; a RAS_G12V MHC Class I antigen comprising HLA-A*03:01 and the restricted peptide VVVGAVGVGK; a TP53_K132N MHC Class I antigen comprising HLA-A*24:02 and the restricted peptide TYSPALNNMF; a CTNNB1_S37Y MHC Class I antigen comprising HLA-A*02:01 and the restricted peptide YLDSGIHYGA; a RAS_G12C MHC Class I antigen comprising HLA-A*03:01 and the restricted peptide VVVGACGVGK; a RAS_G12C MHC Class I antigen comprising HLA-A*11:01 and the restricted peptide VVVGACGVGK; a RAS_G12D MHC Class I antigen comprising HLA-A*03:01 and the restricted peptide VVVGADGVGK; a RAS_Q61H MHC Class I antigen comprising HLA-A*01:01 and the restricted peptide ILDTAGHEEY; and a TP53_R213L MHC Class I antigen comprising A*02:01 and the restricted peptide YLDDRNTFL.

[0043] In some aspects, the restricted peptide comprises a RAS_G12A mutation, and wherein the HLA Class I molecule is HLA-A*02:01; the restricted peptide comprises a RAS_G12A mutation, and wherein the HLA Class I molecule is HLA-A*02:06; the restricted peptide comprises a RAS_G12A mutation, and wherein the HLA Class I molecule is HLA-B*27:05; the restricted peptide comprises a RAS_G12A mutation, and wherein the HLA Class I molecule is HLA-B*35:01; the restricted peptide comprises a RAS_G12A mutation, and wherein the HLA Class I molecule is HLA-B*41:02; the restricted peptide comprises a RAS_G12A mutation, and wherein the HLA Class I molecule is HLA-B*48:01; the restricted peptide comprises a RAS_G12A mutation, and wherein the HLA Class I molecule is HLA-C*08:03; the restricted peptide comprises a RAS_G12C mutation, and wherein the HLA Class I molecule is HLA-A*02:01; the restricted peptide comprises a RAS_G12C mutation, and wherein the HLA Class I molecule is HLA-A*02:01; the restricted peptide comprises a RAS_G12C mutation, and wherein the HLA Class I molecule is HLA-A*03:01; the restricted peptide comprises a RAS_G12C mutation, and wherein the HLA Class I molecule is HLA-A*03:02; the restricted peptide comprises a RAS_G12C mutation, and wherein the HLA Class I molecule is HLA-A*68:01; the restricted peptide comprises a RAS_G12C mutation, and wherein the HLA Class I molecule is HLA-B*27:05; the restricted peptide comprises a RAS_G12D mutation, and wherein the HLA Class I molecule is HLA-A*02:01; the restricted peptide comprises a RAS_G12D mutation, and wherein the HLA Class I molecule is HLA-A*02:05; the restricted peptide comprises a RAS_G12D mutation, and wherein the HLA Class I molecule is HLA-A*03:01; the restricted peptide comprises a RAS_G12D mutation, and wherein the HLA Class I molecule is HLA-A*11:01; the restricted peptide comprises a RAS_G12D mutation, and wherein the HLA Class I molecule is HLA-A*11:01; the restricted peptide comprises a RAS_G12D mutation, and wherein the HLA Class I molecule is HLA-A*26:01; the restricted peptide comprises a RAS_G12D mutation, and wherein the HLA Class I molecule is HLA-A*31:01; the restricted peptide comprises a RAS_G12D mutation, and wherein the HLA Class I molecule is HLA-A*68:01; the restricted peptide comprises a RAS_G12D mutation, and wherein the HLA Class I molecule is HLA-B*07:02; the restricted peptide comprises a RAS_G12D mutation, and wherein the HLA Class I molecule is HLA-B*08:01; the restricted peptide comprises a RAS_G12D mutation, and wherein the HLA Class I molecule is HLA-B*13:02; the restricted peptide comprises a RAS_G12D mutation, and wherein the HLA Class I molecule is HLA-B*15:01; the restricted peptide comprises a RAS_G12D mutation, and wherein the HLA Class I molecule is HLA-B*27:05; the restricted peptide comprises a RAS_G12D mutation, and wherein the HLA Class I molecule is HLA-B*35:01; the restricted peptide comprises a RAS_G12D mutation, and wherein the HLA Class I molecule is HLA-B*37:01; the restricted peptide comprises a RAS_G12D mutation, and wherein the HLA Class I molecule is HLA-B*38:01; the restricted peptide comprises a RAS_G12D mutation, and wherein the HLA Class I molecule is HLA-B*40:01; the restricted peptide comprises a RAS_G12D mutation, and wherein the HLA Class I molecule is HLA-B*40:02; the restricted peptide comprises a RAS_G12D mutation, and wherein the HLA Class I molecule is HLA-B*44:02; the restricted peptide comprises a RAS_G12D mutation, and wherein the HLA Class I molecule is HLA-B*44:03; the restricted peptide comprises a RAS_G12D mutation, and wherein the HLA Class I molecule is HLA-B*48:01; the restricted peptide comprises a RAS_G12D mutation, and wherein the HLA Class I molecule is HLA-B*50:01; the restricted peptide comprises a RAS_G12D mutation, and wherein the HLA Class I molecule is HLA-B*57:01; the restricted peptide comprises a RAS_G12D mutation, and wherein the HLA Class I molecule is HLA-C*01:02; the restricted peptide comprises a RAS_G12D mutation, and wherein the HLA Class I molecule is HLA-C*02:02; the restricted peptide comprises a RAS_G12D mutation, and wherein the HLA Class I molecule is HLA-C*03:03; the restricted peptide comprises a RAS_G12D mutation, and wherein the HLA Class I molecule is HLA-C*03:04; the restricted peptide comprises a RAS_G12D mutation, and wherein the HLA Class I molecule is HLA-C*04:01; the restricted peptide comprises a RAS_G12D mutation, and wherein the HLA Class I molecule is HLA-C*05:01; the restricted peptide comprises a RAS_G12D mutation, and wherein the HLA Class I molecule is HLA-C*07:04; the restricted peptide comprises a RAS_G12D mutation, and wherein the HLA Class I molecule is HLA-C*08:02; the restricted peptide comprises a RAS_G12D mutation, and wherein the HLA Class I molecule is HLA-C*08:03; the restricted peptide comprises a RAS_G12D mutation, and wherein the HLA Class I molecule is HLA-C*16:01; the restricted peptide comprises a RAS_G12D mutation, and wherein the HLA Class I molecule is HLA-C*17:01; the restricted peptide comprises a RAS_G12D mutation, and wherein the HLA Class I molecule is HLA-B*41:02; the restricted peptide comprises a RAS_G12D mutation, and wherein the HLA Class I molecule is HLA-C*07:04; the restricted peptide comprises a RAS_G12V mutation, and wherein the HLA Class I molecule is HLA-A*02:01; the restricted peptide comprises a RAS_G12V mutation, and wherein the HLA Class I molecule is HLA-A*02:05; the restricted peptide comprises a RAS_G12V mutation, and wherein the HLA Class I molecule is HLA-A*02:06; the restricted peptide comprises a RAS_G12V mutation, and wherein the HLA Class I molecule is HLA-A*03:01; the restricted peptide comprises a RAS_G12V mutation, and wherein the HLA Class I molecule is HLA-A*03:01; the restricted peptide comprises a RAS_G12V mutation, and wherein the HLA Class I molecule is HLA-A*11:01; the restricted peptide comprises a RAS_G12V mutation, and wherein the HLA Class I molecule is HLA-A*11:01; the restricted peptide comprises a RAS_G12V mutation, and wherein the HLA Class I molecule is HLA-A*25:01; the restricted peptide comprises a RAS_G12V mutation, and wherein the HLA Class I molecule is HLA-A*26:01; the restricted peptide comprises a RAS_G12V mutation, and wherein the HLA Class I molecule is HLA-A*30:01; the restricted peptide comprises a RAS_G12V mutation, and wherein the HLA Class I molecule is HLA-A*31:01; the restricted peptide comprises a RAS_G12V mutation, and wherein the HLA Class I molecule is HLA-A*31:01; the restricted peptide comprises a RAS_G12V mutation, and wherein the HLA Class I molecule is HLA-A*32:01; the restricted peptide comprises a RAS_G12V mutation, and wherein the HLA Class I molecule is HLA-A*68:02; the restricted peptide comprises a RAS_G12V mutation, and wherein the HLA Class I molecule is HLA-B*07:02; the restricted peptide comprises a RAS_G12V mutation, and wherein the HLA Class I molecule is HLA-B*08:01; the restricted peptide comprises a RAS_G12V mutation, and wherein the HLA Class I molecule is HLA-B*13:02; the restricted peptide comprises a RAS_G12V mutation, and wherein the HLA Class I molecule is HLA-B*14:02; the restricted peptide comprises a RAS_G12V mutation, and wherein the HLA Class I molecule is HLA-B*15:01; the restricted peptide comprises a RAS_G12V mutation, and wherein the HLA Class I molecule is HLA-B*27:05; the restricted peptide comprises a RAS_G12V mutation, and wherein the HLA Class I molecule is HLA-B*39:01; the restricted peptide comprises a RAS_G12V mutation, and wherein the HLA Class I molecule is HLA-B*40:01; the restricted peptide comprises a RAS_G12V mutation, and wherein the HLA Class I molecule is HLA-B*40:02; the restricted peptide comprises a RAS_G12V mutation, and wherein the HLA Class I molecule is HLA-B*41:02; the restricted peptide comprises a RAS_G12V mutation, and wherein the HLA Class I molecule is HLA-B*44:05; the restricted peptide comprises a RAS_G12V mutation, and wherein the HLA Class I molecule is HLA-B*50:01; the restricted peptide comprises a RAS_G12V mutation, and wherein the HLA Class I molecule is HLA-B*51:01; the restricted peptide comprises a RAS_G12V mutation, and wherein the HLA Class I molecule is HLA-C*01:02; the restricted peptide comprises a RAS_G12V mutation, and wherein the HLA Class I molecule is HLA-C*01:02; the restricted peptide comprises a RAS_G12V mutation, and wherein the HLA Class I molecule is HLA-C*03:03; the restricted peptide comprises a RAS_G12V mutation, and wherein the HLA Class I molecule is HLA-C*03:04; the restricted peptide comprises a RAS_G12V mutation, and wherein the HLA Class I molecule is HLA-C*08:02; the restricted peptide comprises a RAS_G12V mutation, and wherein the HLA Class I molecule is HLA-C*14:02; the restricted peptide comprises a RAS_G12V mutation, and wherein the HLA Class I molecule is HLA-C*17:01; the restricted peptide comprises a KRAS_G13D mutation, and wherein the HLA Class I molecule is HLA-A*02:01; the restricted peptide comprises a KRAS_G13D mutation, and wherein the HLA Class I molecule is HLA-B*07:02; the restricted peptide comprises a KRAS_G13D mutation, and wherein the HLA Class I molecule is HLA-B*08:01; the restricted peptide comprises a KRAS_G13D mutation, and wherein the HLA Class I molecule is HLA-B*35:01; the restricted peptide comprises a KRAS_G13D mutation, and wherein the HLA Class I molecule is HLA-B*35:03; the restricted peptide comprises a KRAS_G13D mutation, and wherein the HLA Class I molecule is HLA-B*35:08; the restricted peptide comprises a KRAS_G13D mutation, and wherein the HLA Class I molecule is HLA-B*38:01; the restricted peptide comprises a KRAS_G13D mutation, and wherein the HLA Class I molecule is HLA-C*04:01; the restricted peptide comprises a KRAS_Q61H mutation, and wherein the HLA Class I molecule is HLA-A*01:01; the restricted peptide comprises a KRAS_Q61H mutation, and wherein the HLA Class I molecule is HLA-A*02:01; the restricted peptide comprises a KRAS_Q61H mutation, and wherein the HLA Class I molecule is HLA-A*23:01; the restricted peptide comprises a KRAS_Q61H mutation, and wherein the HLA Class I molecule is HLA-A*29:01; the restricted peptide comprises a KRAS_Q61H mutation, and wherein the HLA Class I molecule is HLA-A*30:02; the restricted peptide comprises a KRAS_Q61H mutation, and wherein the HLA Class I molecule is HLA-A*33:01; the restricted peptide comprises a KRAS_Q61H mutation, and wherein the HLA Class I molecule is HLA-A*68:01; the restricted peptide comprises a KRAS_Q61H mutation, and wherein the HLA Class I molecule is HLA-B*07:02; the restricted peptide comprises a KRAS_Q61H mutation, and wherein the HLA Class I molecule is HLA-B*08:01; the restricted peptide comprises a KRAS_Q61H mutation, and wherein the HLA Class I molecule is HLA-B*18:01; the restricted peptide comprises a KRAS_Q61H mutation, and wherein the HLA Class I molecule is HLA-B*35:01; the restricted peptide comprises a KRAS_Q61H mutation, and wherein the HLA Class I molecule is HLA-B*38:01; the restricted peptide comprises a KRAS_Q61H mutation, and wherein the HLA Class I molecule is HLA-B*40:01; the restricted peptide comprises a KRAS_Q61H mutation, and wherein the HLA Class I molecule is HLA-B*44:02; the restricted peptide comprises a KRAS_Q61H mutation, and wherein the HLA Class I molecule is HLA-C*03:04; the restricted peptide comprises a KRAS_Q61H mutation, and wherein the HLA Class I molecule is HLA-C*05:01; or the restricted peptide comprises a KRAS_Q61H mutation, and wherein the HLA Class I molecule is HLA-C*08:02.

[0044] In some aspects, the restricted peptide comprises a KRAS_G13D mutation, and wherein the HLA Class I molecule is C*08:02 or A*11:01; the restricted peptide comprises a KRAS_Q61K mutation, and wherein the HLA Class I molecule is A*01:01; the restricted peptide comprises a NRAS_Q61K mutation, and wherein the HLA Class I molecule is A*01:01; the restricted peptide comprises a TP53_R249M mutation, and wherein the HLA Class I molecule is B*35:12, B*35:03, or B*35:01; the restricted peptide comprises a CTNNB1_S45P mutation, and wherein the HLA Class I molecule is A*03:01, A*11:01, A*68:01, or A*03:02; the restricted peptide comprises a CTNNB1_S45F mutation, and wherein the HLA Class I molecule is A*03:01, A*11:01, or A*68:01; the restricted peptide comprises a ERBB2_Y772_A775dup mutation, and wherein the HLA Class I molecule is B*18:01; the restricted peptide comprises a KRAS_G12D mutation, and wherein the HLA Class I molecule is A*11:01, A*03:01, or C*08:02; the restricted peptide comprises a NRAS_G12D mutation, and wherein the HLA Class I molecule is A*11:01, A*03:01, or C*08:02; the restricted peptide comprises a KRAS_Q61D mutation, and wherein the HLA Class I molecule is A*01:01; the restricted peptide comprises a NRAS_Q61D mutation, and wherein the HLA Class I molecule is A*01:01; the restricted peptide comprises a CTNNB1_T41A mutation, and wherein the HLA Class I molecule is A*03:01, A*0302, A*11:01, B*15:10, C*03:03, or C*03:04; the restricted peptide comprises a TP53_K132N mutation, and wherein the HLA Class I molecule is A*24:02 or A*23:01; the restricted peptide comprises a KRAS_G12A mutation, and wherein the HLA Class I molecule is A*03:01 or A*11:01; the restricted peptide comprises a KRAS_Q61L mutation, and wherein the HLA Class I molecule is A*01:01; the restricted peptide comprises a NRAS_Q61L mutation, and wherein the HLA Class I molecule is A*01:01; the restricted peptide comprises a TP53_R213L mutation, and wherein the HLA Class I molecule is A*02:07, C*08:02, or A*02:01; the restricted peptide comprises a BRAF_G466V mutation, and wherein the HLA Class I molecule is B*15:01, or B*15:03; the restricted peptide comprises a KRAS_G12V mutation, and wherein the HLA Class I molecule is A*03:01, A*03:02, A*11:01, or C*01:02; the restricted peptide comprises a KRAS_Q61H mutation, and wherein the HLA Class I molecule is A*01:01; the restricted peptide comprises a NRAS_Q61H mutation, and wherein the HLA Class I molecule is A*01:01; the restricted peptide comprises a CTNNB1_S37F mutation, and wherein the HLA Class I molecule is A*01:01, A*23:01, A*24:02, B*15:10, B*39:06, C*05:01, C*14:02, or C*14:03; the restricted peptide comprises a TP53_S127Y mutation, and wherein the HLA Class I molecule is A*11:01 or A*03:01; the restricted peptide comprises a TP53_K132E mutation, and wherein the HLA Class I molecule is A*24:02, C*14:03, or A*23:01; the restricted peptide comprises a KRAS_G12C mutation, and wherein the HLA Class I molecule is A*02:01, A*11:01, or A*03:01; the restricted peptide comprises a NRAS_G12C mutation, and wherein the HLA Class I molecule is A*02:01, A*11:01, or A*03:01; the restricted peptide comprises a EGFR_L858D mutation, and wherein the HLA Class I molecule is A*11:01, or A*03:01; the restricted peptide comprises a TP53_Y220C mutation, and wherein the HLA Class I molecule is A*02:01; or

[0045] the restricted peptide comprises a TP53_R175H mutation, and wherein the HLA Class I molecule is A*02:01.

[0046] In some aspects, the HLA-PEPTIDE antigen is selected from: a CTNNB1_S45P MHC Class I antigen comprising A*11:01 and the restricted peptide TTAPPLSGK; a CTNNB1_T41A MHC Class I antigen comprising A*11:01 and the restricted peptide ATAPSLSGK; a RAS_G12D MHC Class I antigen comprising A*11:01 and the restricted peptide VVVGADGVGK; a RAS_G12V MHC Class I antigen comprising A*03:01 and the restricted peptide VVGAVGVGK; a RAS_G12V MHC Class I antigen comprising A*03:01 and the restricted peptide VVVGAVGVGK; a RAS_G12V MHC Class I antigen comprising A*11:01 and the restricted peptide VVGAVGVGK; a RAS_G12V MHC Class I antigen comprising A*11:01 and the restricted peptide VVVGAVGVGK; a KRAS_Q61R MHC Class I antigen comprising A*01:01 and the restricted peptide ILDTAGREEY; and a TP53_R213L MHC Class I antigen comprising A*02:01 and the restricted peptide YLDDRNTFL.

[0047] In some aspects, the HLA-PEPTIDE antigen comprises an HLA-restricted peptide which is a peptide fragment of RAS comprising a RAS G12 mutation. In some aspects, the G12 mutation is a G12C, a G12D, a G12V, or a G12A mutation. In some aspects, the HLA-PEPTIDE antigen comprises an HLA Class I molecule selected from HLA-A*02:01, HLA-A*11:01, HLA-A*31:01, HLA-C*01:02, and HLA-A*03:01. In some aspects, the RAS G12 mutation is any one or more of a KRAS, NRAS, and HRAS mutation. In some aspects, the HLA-PEPTIDE antigen is selected from: a RAS_G12C MHC Class I antigen comprising HLA-A*02:01 and the restricted peptide KLVVVGACGV; a RAS_G12C MHC Class I antigen comprising HLA-A*03:01 and the restricted peptide VVVGACGVGK; a RAS_G12C MHC Class I antigen comprising HLA-A*11:01 and the restricted peptide VVVGACGVGK; a RAS_G12D MHC Class I antigen comprising HLA-A*11:01 and the restricted peptide VVVGADGVGK; a RAS_G12D MHC Class I antigen comprising HLA-A*11:01 and the restricted peptide VVGADGVGK; a RAS_G12D MHC Class I antigen comprising HLA-A*03:01 and the restricted peptide VVVGADGVGK; a RAS_G12V MHC Class I antigen comprising HLA-A*11:01 and the restricted peptide VVVGAVGVGK; a RAS_G12V MHC Class I antigen comprising HLA-A*31:01 and the restricted peptide VVVGAVGVGK; a RAS_G12V MHC Class I antigen comprising HLA-A*11:01 and the restricted peptide VVGAVGVGK; a RAS_G12V MHC Class I antigen comprising HLA-C*01:02 and the restricted peptide AVGVGKSAL; and a RAS_G12V MHC Class I antigen comprising HLA-A*03:01 and the restricted peptide VVVGAVGVGK. In some aspects, the HLA-PEPTIDE antigen is selected from: a RAS_G12C MHC Class I antigen comprising HLA-A*02:01 and the restricted peptide KLVVVGACGV; a RAS_G12D MHC Class I antigen comprising HLA-A*11:01 and the restricted peptide VVVGADGVGK; a RAS_G12D MHC Class I antigen comprising HLA-A*11:01 and the restricted peptide VVGADGVGK; a RAS_G12V MHC Class I antigen comprising HLA-A*11:01 and the restricted peptide VVVGAVGVGK; a RAS_G12V MHC Class I antigen comprising HLA-A*31:01 and the restricted peptide VVVGAVGVGK; a RAS_G12V MHC Class I antigen comprising HLA-A*11:01 and the restricted peptide VVGAVGVGK; a RAS_G12V MHC Class I antigen comprising HLA-C*01:02 and the restricted peptide AVGVGKSAL; and a RAS_G12V MHC Class I antigen comprising HLA-A*03:01 and the restricted peptide VVVGAVGVGK. In some aspects, the HLA-PEPTIDE antigen is selected from: a RAS_G12C MHC Class I antigen comprising HLA-A*02:01 and the restricted peptide KLVVVGACGV; a RAS_G12D MHC Class I antigen comprising HLA-A*11:01 and the restricted peptide VVVGADGVGK; or a RAS_G12V MHC Class I antigen comprising HLA-A*11:01 and the restricted peptide VVVGAVGVGK. In some aspects, the antigen binding protein binds to a RAS_G12C MHC Class I antigen comprising HLA-A*02:01 and the restricted peptide KLVVVGACGV, and wherein the ABP binds to the RAS_G12C MHC Class I antigen at a higher affinity than an HLA-PEPTIDE antigen comprising a different RAS G12 mutation. In some aspects, the ABP binds to the RAS_G12C MHC Class I antigen at a higher affinity than an HLA-PEPTIDE antigen comprising the restricted peptide KLVVVGAVGV and an HLA-A2 molecule. In some aspects, the ABP does not bind to an HLA-PEPTIDE antigen comprising the restricted peptide KLVVVGAVGV and an HLA-A2 molecule.

[0048] In some aspects, the HLA-PEPTIDE antigen comprises an HLA-restricted peptide which is a peptide fragment of RAS comprising a RAS Q61 mutation. In some aspects, the Q61 mutation is a Q61H, a Q61K, a Q61R, or a Q61L mutation. In some aspects, the HLA-PEPTIDE antigen is a RAS_Q61H MHC Class I antigen comprising HLA-A*01:01 and the restricted peptide ILDTAGHEEY.

[0049] In some aspects, the HLA-PEPTIDE antigen comprises an HLA-restricted peptide which is a peptide fragment of TP53 comprising a TP53 mutation. In some aspects, the TP53 mutation comprises a R213L, S127Y, Y220C, R175H, or R249M mutation. In some aspects, the HLA-PEPTIDE antigen is a TP53 R213L MHC Class I antigen comprising A*02:01 and the restricted peptide YLDDRNTFL.

[0050] In some aspects, the method comprises, prior to the administering, determining or having determined the presence of any one or more of the HLA-PEPTIDE antigen, the peptide of the HLA-PEPTIDE antigen, the somatic mutation associated with the HLA-PEPTIDE antigen, and the HLA molecule of the HLA-PEPTIDE antigen in a biological sample obtained from the subject.

[0051] In some aspects, the biological sample is a blood sample or a tumor sample. In some aspects, the blood sample is a plasma or serum sample.

[0052] In some aspects, the determining comprises RNASeq, microarray, PCR, Nanostring, in situ hybridization (ISH), Mass spectrometry, sequencing, or immunohistochemistry (IHC).

[0053] In some aspects of the method, the method comprises, after having determined the presence of the HLA-PEPTIDE antigen, peptide, or HLA in the biological sample obtained from the subject, administering to the subject an ABP that selectively binds to the HLA-PEPTIDE antigen.

[0054] Also provided herein is a kit comprising the antigen binding protein disclosed herein or a pharmaceutical composition disclosed herein and instructions for use.

[0055] Also provided herein is a system, comprising: an isolated HLA-PEPTIDE antigen comprising an HLA-restricted peptide complexed with an HLA Class I molecule, wherein the HLA-restricted peptide is located in the peptide binding groove of an α1/α2 heterodimer portion of the HLA Class I molecule, and wherein the HLA-PEPTIDE antigen is selected from an HLA-PEPTIDE antigen described in any one of SEQ ID NOs:10,755 to 29,364; and a phage display library.

[0056] In some aspects, the HLA-PEPTIDE antigen is attached to a solid support. In some aspects, the solid support comprises a bead, well, membrane, tube, column, plate, sepharose, magnetic bead, cell, or chip. In some aspects, the HLA-PEPTIDE antigen comprises a first member of an affinity binding pair and the solid support comprises a second member of the affinity binding pair. In some aspects, the first member is streptavidin and the second member is biotin.

[0057] In some aspects, the phage display library is a human library. In some aspects, the phage display library is a humanized library.

[0058] In some aspects, the system further comprises a negative control HLA-PEPTIDE antigen comprising an HLA-restricted peptide complexed with an HLA Class I molecule, wherein the HLA-restricted peptide is located in the peptide binding groove of an α1/α2 heterodimer portion of the HLA Class I molecule, and wherein the negative control HLA-PEPTIDE antigen comprises a different restricted peptide, a different HLA Class I molecule, or a different restricted peptide and a different HLA Class I molecule. In some aspects, the negative control HLA-PEPTIDE antigen comprises a different restricted peptide but the same HLA Class I molecule as the HLA-PEPTIDE antigen.

[0059] In some aspects, the system comprises a reaction mixture, the reaction mixture comprising the HLA-PEPTIDE antigen and a plurality of phages from the phage display library.

[0060] Also provided herein is use of a system disclosed herein for identifying an antigen binding protein that selectively binds the isolated HLA-PEPTIDE antigen.

[0061] Also provided herein is a composition comprising an HLA-PEPTIDE antigen as described by any one of SEQ ID NOs:10,755 to 29,364, wherein the HLA-PEPTIDE antigen is covalently linked to an affinity tag. In some aspects, the affinity tag is a biotin tag.

[0062] Also provided herein is a composition comprising an HLA-PEPTIDE antigen as described by any one of SEQ ID NOs:10,755 to 29,364 complexed with a detectable label. In some aspects, the detectable label comprises a β₂-microglobulin binding molecule. In some aspects, the β₂-microglobulin binding molecule is a labeled antibody. In some aspects, the labeled antibody is a fluorochrome-labeled antibody.

[0063] Also provided herein is a composition comprising an HLA-PEPTIDE antigen as described by any one of SEQ ID NOs:10,755 to 29,364 attached to a solid support. In some aspects, the solid support comprises a bead, well, membrane, tube, column, plate, sepharose, magnetic bead, cell, or chip. In some aspects, the HLA-PEPTIDE antigen comprises a first member of an affinity binding pair and the solid support comprises a second member of the affinity binding pair. In some aspects, the first member is streptavidin and the second member is biotin.

[0064] Also provided herein is a host cell comprising a heterologous HLA-PEPTIDE antigen as described by any one of SEQ ID NOs:10,755-29,364. Also provided herein is a host cell which expresses an HLA subtype as defined by any one of the HLA-PEPTIDE antigens described in SEQ ID NOs:10,755-29,364. Also provided herein is a host cell comprising a polynucleotide encoding an HLA-restricted peptide as defined by any one of the HLA-PEPTIDE antigens in SEQ ID NOs:10,755-29,364.

[0065] In some aspects, the host cell does not comprise endogenous MHC. In some aspects, the host cell comprises an exogenous HLA. In some aspects, the host cell is a K562 or A375 cell. In some aspects, the host cell is a cultured cell from a tumor cell line. In some aspects, the tumor cell line expresses an HLA subtype as defined by the same HLA-PEPTIDE antigen that describes the HLA-restricted peptide. In some aspects, the tumor cell line is selected from the group consisting of HCC-1599, NCI-H510A, A375, LN229, NCI-H358, ZR-75-1, MS751, OE19, MOR, BV173, MCF-7, NCI-H82, Colo829, SK-MEL-28, KYSE270, 59M, and NCI-H146.

[0066] Also provided herein is a cell culture system comprising a host cell disclosed herein, and a cell culture medium. In some aspects, the host cell expresses an HLA subtype as defined by any one of the HLA-PEPTIDE antigens in SEQ ID NOs:10,755-21,015 and SEQ ID NOs: 21,016-29,364, and wherein the cell culture medium comprises a restricted peptide as defined by the same HLA-PEPTIDE antigen as the HLA subtype. In some aspects, the host cell is a K562 cell which comprises an exogenous HLA, wherein the exogenous HLA is an HLA subtype as defined by any one of the HLA-PEPTIDE antigens in SEQ ID NOs:10,755-29,364, and the cell culture medium comprises a restricted peptide as defined by the same HLA-PEPTIDE antigen defining the HLA subtype.

[0067] Also provided herein is a method of identifying an antigen binding protein disclosed herein, comprising providing at least one HLA-PEPTIDE antigen described in SEQ ID NOs:10,755-29,364; and binding the at least one target with the antigen binding protein, thereby identifying the antigen binding protein.

[0068] In some aspects, the antigen binding protein is present in a phage display library comprising a plurality of distinct antigen binding proteins. In some aspects, the phage display library is substantially free of antigen binding proteins that non-specifically bind the HLA of the HLA-PEPTIDE antigen.

[0069] In some aspects, the binding step is performed more than once, optionally at least three times.

[0070] In some aspects, the method further comprises contacting the antigen binding protein with one or more peptide-HLA complexes that are distinct from the HLA-PEPTIDE antigen to determine if the antigen binding protein selectively binds the HLA-PEPTIDE antigen, optionally wherein selectivity is determined by measuring binding affinity of the antigen binding protein to soluble target HLA-PEPTIDE complexes versus soluble HLA-PEPTIDE complexes that are distinct from target complexes, optionally wherein selectivity is determined by measuring binding affinity of the antigen binding protein to target HLA-PEPTIDE complexes expressed on the surface of one or more cells versus HLA-PEPTIDE complexes that are distinct from target complexes expressed on the surface of one or more cells.

[0071] Also provided herein is a method of identifying an antigen binding protein disclosed herein, comprising obtaining at least one HLA-PEPTIDE antigen described in SEQ ID NOs:10,755-29,364; administering the HLA-PEPTIDE antigen to a subject, optionally in combination with an adjuvant; and isolating the antigen binding protein from the subject.

[0072] In some aspects, isolating the antigen binding protein comprises screening the serum of the subject to identify the antigen binding protein.

[0073] In some aspects, the method further comprises contacting the antigen binding protein with one or more peptide-HLA complexes that are distinct from the HLA-PEPTIDE antigen to determine if the antigen binding protein selectively binds to the HLA-PEPTIDE antigen, optionally wherein selectivity is determined by measuring binding affinity of the antigen binding protein to the HLA-PEPTIDE antigen versus soluble HLA-PEPTIDE complexes that are distinct from the HLA-PEPTIDE antigen, optionally wherein selectivity is determined by measuring binding affinity of the antigen binding protein to the HLA-PEPTIDE antigen expressed on the surface of one or more cells versus HLA-PEPTIDE complexes that are distinct from the HLA-PEPTIDE antigen expressed on the surface of one or more cells.

[0074] In some aspects, the subject is a mouse, a rabbit, or a llama.

[0075] In some aspects, isolating the antigen binding protein comprises isolating a B cell from the subject that expresses the antigen binding protein and optionally directly cloning sequences encoding the antigen binding protein from the isolated B cell. In some aspects, the method further comprises creating a hybridoma using the B cell. In some aspects, the method further comprises cloning CDRs from the B cell. In some aspects, the method further comprises immortalizing the B cell, optionally via EBV transformation.

[0076] In some aspects, the method further comprises creating a library that comprises the antigen binding protein of the B cell, optionally wherein the library is phage display or yeast display.

[0077] In some aspects, the method further comprises humanizing the antigen binding protein.

[0078] Also provided herein is a method of identifying an antigen binding protein disclosed herein, comprising obtaining a cell comprising the antigen binding protein; contacting the cell with an HLA-multimer comprising at least one HLA-PEPTIDE antigen described in SEQ ID NOs:10,755-29,364; and identifying the antigen binding protein via binding between the HLA-multimer and the antigen binding protein. In some aspects, the method further comprises contacting the cell comprising the antigen binding protein with an HLA-multimer comprising a corresponding wildtype sequence of the at least one HLA-PEPTIDE antigen described in SEQ ID NOs:10,755-29,364, and excluding the antigen binding protein if the antigen binding protein binds the HLA-multimer comprising the corresponding wildtype sequence

[0079] Also provided herein is a method of identifying an antigen binding protein disclosed herein, comprising providing at least one HLA-PEPTIDE antigen described in SEQ ID NOs:10,755-29,364; and identifying the antigen binding protein using the target.

[0080] Also provided herein is an antigen binding protein (ABP) that specifically binds to an HLA-PEPTIDE antigen comprising an HLA-restricted peptide complexed with an HLA Class I molecule, wherein the HLA-restricted peptide is located in the peptide binding groove of an α1/α2 heterodimer portion of the HLA Class I molecule, wherein the HLA Class I molecule and the HLA-restricted peptide are each selected from an HLA-PEPTIDE antigen as described in any one of SEQ ID NOs:10,755 to 29,364, and wherein the ABP comprises an alpha-CDR3 amino acid sequence and corresponding beta-CDR3 amino acid sequence selected from the group consisting of the sequences shown in Tables 1C. 10, 1C. 2, 1C. 3, and 1D.

[0081] In some aspects, the ABP further comprises an alpha variable (“V”) segment, an alpha joining (“J”) segment, a beta variable (“V”) segment, a beta joining (“J”) segment, optionally a beta diversity (“D”) segment, and optionally a beta constant region selected from the group consisting of the regions shown in Tables 1C. 1, 1C. 2, 1C. 3, and 1D corresponding to the alpha-CDR3 amino acid sequence and corresponding beta-CDR3 amino acid sequence. In some aspects, the ABP comprises an alpha variable region and corresponding beta variable region comprising the amino acid sequences selected from the sequences shown in Tables 1A. 1, 1A. 2, 1A. 3, and 1B corresponding to the alpha-CDR3 amino acid sequence and corresponding beta-CDR3 amino acid sequence.

[0082] Also provided herein is an antigen binding protein (ABP) that specifically binds to an HLA-PEPTIDE antigen comprising an HLA-restricted RAS peptide complexed with an HLA Class I molecule, wherein the HLA-restricted peptide is located in the peptide binding groove of an α1/α2 heterodimer portion of the HLA Class I molecule, wherein the HLA-restricted RAS peptide comprises at least one alteration that makes HLA-restricted RAS peptide sequence distinct from the corresponding peptide sequence of a wild-type RAS peptide, and wherein the ABP comprises an alpha-CDR3 amino acid sequence and corresponding beta-CDR3 amino acid sequence selected from the group consisting of the sequences shown in Tables 1C. 1, 1C. 2, 1C. 3, and 1D.

[0083] In some aspects, the HLA-PEPTIDE antigen is selected from Table 5A. In some aspects, the HLA-PEPTIDE antigen is selected from Table 5B. In some aspects, the HLA-PEPTIDE antigen is selected from Table 6. In some aspects, HLA-PEPTIDE antigen is selected from Table 7.

[0084] In some aspects, HLA-restricted peptide comprises a RAS G12 mutation. In some aspects, the G12 mutation is a G12C, a G12D, a G12V, or a G12A mutation In some aspects, the HLA-PEPTIDE antigen comprises an HLA Class I molecule selected from HLA-A*02:01, HLA-A*11:01, HLA-A*31:01, HLA-C*01:02, and HLA-A*03:01. In some aspects, the RAS G12 mutation is any one or more of: a KRAS, NRAS, and HRAS mutation.

[0085] In some aspects, the HLA-PEPTIDE antigen is a RAS_G12C MHC Class I antigen comprising HLA-A*02:01 and the restricted peptide KLVVVGACGV. In some aspects, the ABP comprises an alpha-CDR3 amino acid sequence and corresponding beta-CDR3 amino acid sequence selected from the group consisting of the sequences shown in Table 1C. 2. In some aspects, ABP further comprises an alpha variable (“V”) segment, an alpha joining (“J”) segment, a beta variable (“V”) segment, a beta joining (“J”) segment, optionally a beta diversity (“D”) segment, and optionally a beta constant region selected from the group consisting of the regions shown in Table 1C. 2 corresponding to the alpha-CDR3 amino acid sequence and corresponding beta-CDR3 amino acid sequence. In some aspects, the ABP comprises an alpha variable region and corresponding beta variable region comprising the amino acid sequences selected from the sequences shown in Table 1A. 2 corresponding to the alpha-CDR3 amino acid sequence and corresponding beta-CDR3 amino acid sequence.

[0086] In some aspects, the HLA-PEPTIDE antigen is a RAS_G12V MHC Class I antigen comprising HLA-A*11:01 and the restricted peptide VVGAVGVGK. In some aspects, the ABP comprises an alpha-CDR3 amino acid sequence and corresponding beta-CDR3 amino acid sequence selected from the group consisting of the sequences shown in Table 1C. 3. In some aspects, the ABP further comprises an alpha variable (“V”) segment, an alpha joining (“J”) segment, a beta variable (“V”) segment, a beta joining (“J”) segment, optionally a beta diversity (“D”) segment, and optionally a beta constant region selected from the group consisting of the regions shown in Table 1C. 3 corresponding to the alpha-CDR3 amino acid sequence and corresponding beta-CDR3 amino acid sequence. In some aspects, the ABP comprises an alpha variable region and corresponding beta variable region comprising the amino acid sequences selected from the sequences shown in Table 1A. 3 corresponding to the alpha-CDR3 amino acid sequence and corresponding beta-CDR3 amino acid sequence.

### BRIEF DESCRIPTION OF THE SEVERAL VIEWS OF THE DRAWINGS

[0087] These and other features, aspects, and advantages of the present invention will become better understood with regard to the following description, and accompanying drawings, where:

[0088] FIG. 1 shows the general structure of a Human Leukocyte Antigen (HLA) Class I molecule. By User atropos235 on en.wikipedia—Own work, CC BY 2.5, https://conimons.wikimedia.org/w/index.php?curid=1805424

[0089] FIG. 2 depicts flow-cytometry analysis of enriched naïve and memory T cells. Shown are cells labeled using a pool of 6 neoantigen-MHC tetramers (“HLA/SNA”) to identify neoantigen specific T cells (left panel, X-axis) and a pool of MHC-tetramers for the corresponding wildtype peptides (“HLA/wild-type”; left panel, Y-axis). Also shown are cells labeled for the memory T cell phenotype marker CD45RO (right panel).

[0090] FIG. 3A depicts flow-cytometry analysis of expanded T cells that were previously sorted using a pool of 6 neoantigen-MHC tetramers (“HLA/SNA”). Shown are the expanded cells labeled with each of the 6 neoantigen-MHC tetramers and their corresponding wildtype peptide-MHC tetramer.

[0091] FIG. 3B depicts flow-cytometry analysis of expanded T cells that were previously sorted using neoantigen-MHC tetramers (“HLA/SNA”). Shown are the expanded cells labeled with each of the 4 neoantigen-MHC tetramers and their corresponding wildtype peptide-MHC tetramer.

[0092] FIG. 4 depicts the correlation between EDGE score and the probability of detection of candidate shared neoantigen peptides by targeted Mass Spectrometry.

[0093] FIG. 5A depicts flow cytometry gating strategy for detecting CD8+ T cells.

[0094] FIG. 5B depicts flow cytometry results demonstrating that a large proportion of CD8+ T cells exhibit binding to the RAS G12V:HLA*1101 pHLA.

[0095] FIG. 6 depicts depicts flow-cytometry analysis of expanded T cells that were previously sorted using a single neoantigen-MHC tetramer for two different donors. Shown are expanded cells labeled with each of 3 neoantigen-MHC tetramers and their corresponding wildtype peptide-MHC tetramer.

[0096] FIG. 7 shows titration of DOX administration in regulating expression of a representative neoantigen under a Tet-On system in multiple K562-HLA cell-lines.

[0097] FIG. 8 shows a representative KRAS G12V peptide VVGAVGVGK observed by mass-spectrometry in a HLA-A*11:01 expressing K562 cell line. Top panels shows detection was DOX dependent (left column no DOX; right panel DOX added), and bottom panels show detection of the heavy peptide control standard was equivalent.

[0098] FIG. 9 depicts expanded naïve CD8 T gated on CD137+ following neoantigen (left panel) and DMSO (right panel) stimulation.

[0099] FIG. 10 illustrates a summary of in silico analysis for shared TCR sequences among (i) neoantigen-tetramer labeled cells; (ii) CD137+ neoantigen-stimulated cells; and (iii) CD137+ DMSO-stimulated cells.

[0100] FIG. 11A depicts a representative flow cytometry assessment for TCR clone 01CA019_064_F05_0047. Shown are activation markers CD25 (left panels), CD69 (middle panels), and CD137 (right panels) in primary T cells transduced with the indicated TCR and stimulated with a cognate neoantigen (bottom panels) or corresponding wildtype peptide (top panels.

[0101] FIG. 11B depicts a representative flow cytometry assessment for TCR clone 01CA019_064_F05_0005. Shown are activation markers CD25 (left panels), CD69 (middle panels), and CD137 (right panels) in primary T cells transduced with the indicated TCR and stimulated with a cognate neoantigen (bottom panels) or corresponding wildtype peptide (top panels.

[0102] FIG. 12 depicts proliferation of primary T cells transduced with indicated candidate TCRs. Shown is the percentage of T cells with diluted CellTrace Violet dye following co-culture with peptide-loaded APCs.

### DETAILED DESCRIPTION

[0103] Unless otherwise defined, all terms of art, notations and other scientific terminology used herein are intended to have the meanings commonly understood by those of skill in the art. In some cases, terms with commonly understood meanings are defined herein for clarity and/or for ready reference, and the inclusion of such definitions herein should not necessarily be construed to represent a difference over what is generally understood in the art. The techniques and procedures described or referenced herein are generally well understood and commonly employed using conventional methodologies by those skilled in the art, such as, for example, the widely utilized molecular cloning methodologies described in Sambrook et al., Molecular Cloning: A Laboratory Manual 4th ed. (2012) Cold Spring Harbor Laboratory Press, Cold Spring Harbor, N.Y. As appropriate, procedures involving the use of commercially available kits and reagents are generally carried out in accordance with manufacturer-defined protocols and conditions unless otherwise noted.

[0104] As used herein, the singular forms “a,” “an,” and “the” include the plural referents unless the context clearly indicates otherwise. The terms “include,” “such as,” and the like are intended to convey inclusion without limitation, unless otherwise specifically indicated.

[0105] As used herein, the term “comprising” also specifically includes embodiments “consisting of” and “consisting essentially of” the recited elements, unless specifically indicated otherwise.

[0106] The term “about” indicates and encompasses an indicated value and a range above and below that value. In certain embodiments, the term “about” indicates the designated value ±10%, ±5%, or ±1%. In certain embodiments, where applicable, the term “about” indicates the designated value(s)±one standard deviation of that value(s).

[0107] The term “antigen binding protein” or “ABP” is used herein in its broadest sense and includes certain types of molecules comprising one or more antigen-binding domains that specifically bind to an antigen or epitope.

[0108] In some embodiments, the ABP comprises a TCR. In some embodiments, the ABP consists of a TCR. In some embodiments, the ABP consists essentially of a TCR. An ABP specifically includes intact TCR, TCR fragments, and ABP fragments. In some embodiments, the ABP comprises an alternative scaffold. In some embodiments, the ABP consists of an alternative scaffold. In some embodiments, the ABP consists essentially of an alternative scaffold. In some embodiments, the ABP comprises a TCRfragment. In some embodiments, the ABP consists of a TCRfragment. In some embodiments, the ABP consists essentially of a TCRfragment.

[0109] An “HLA-PEPTIDE ABP,” “anti-HLA-PEPTIDE ABP,” or “HLA-PEPTIDE-specific ABP” is an ABP, as provided herein, which specifically binds to the antigen HLA-PEPTIDE. An ABP includes proteins comprising one or more antigen-binding domains that specifically bind to an antigen or epitope via a variable region, such as a variable region derived from a T cell (e.g., a TCR).

[0110] As used herein, “variable region” refers to a variable sequence that arises from a recombination event, for example, it can include a V, J, and/or D segment of a T cell receptor (TCR) sequence from a T cell, such as an activated T cell.

[0111] The term “antigen-binding domain” means the portion of an ABP that is capable of specifically binding to an antigen or epitope. An antigen-binding domain can include TCR CDRs, e.g., αCDR1, αCDR2, αCDR3, βCDR1, βCDR2, and βCDR3. TCR CDRs are described herein.

[0112] The amino acid sequence boundaries of a TCR CDR can be determined by one of skill in the art using any of a number of known numbering schemes, including but not limited to the IMGT unique numbering, as described by LeFranc, M.-P, Immunol Today. 1997 November; 18(11):509; Lefranc, M.-P., “IMGT Locus on Focus: A new section of Experimental and Clinical Immunogenetics”, Exp. Clin. Immunogenet., 15, 1-7 (1998); Lefranc and Lefranc, The T Cell Receptor FactsBook; and M.-P. Lefranc/Developmental and Comparative Immunology 27 (2003) 55-77, all of which are incorporated by reference.

[0113] An “ABP fragment” comprises a portion of an intact ABP, such as the antigen-binding or variable region of an intact ABP. ABP fragments include, for example, TCR fragments.

[0114] The term “alternative scaffold” refers to a molecule in which one or more regions may be diversified to produce one or more antigen-binding domains that specifically bind to an antigen or epitope. In some embodiments, the antigen-binding domain binds the antigen or epitope with specificity and affinity similar to that of an ABP. Exemplary alternative scaffolds include those derived from fibronectin (e.g., Adnectins™), the β-sandwich (e.g., iMab), lipocalin (e.g., Anticalins®), EETI-II/AGRP, BPTI/LACI-D1/ITI-D2 (e.g., Kunitz domains), thioredoxin peptide aptamers, protein A (e.g., Affibody®), ankyrin repeats (e.g., DARPins), gamma-B-crystallin/ubiquitin (e.g., Affilins), CTLD₃ (e.g., Tetranectins), Fynomers, and (LDLR-A module) (e.g., Avimers). Additional information on alternative scaffolds is provided in Binz et al., Nat. Biotechnol., 2005 23: 1257-1268; Skerra, Current Opin. in Biotech., 2007 18:295-304; and Silacci et al., J. Biol. Chem., 2014, 289:14392-14398; each of which is incorporated by reference in its entirety. An alternative scaffold is one type of ABP.

[0115] “Affinity” refers to the strength of the sum total of non-covalent interactions between a single binding site of a molecule (e.g., an ABP) and its binding partner (e.g., an antigen or epitope). Unless indicated otherwise, as used herein, “affinity” refers to intrinsic binding affinity, which reflects a 1:1 interaction between members of a binding pair (e.g., ABP and antigen or epitope). The affinity of a molecule X for its partner Y can be represented by the dissociation equilibrium constant (K_{D}). The kinetic components that contribute to the dissociation equilibrium constant are described in more detail below. Affinity can be measured by common methods known in the art, including those described herein, such as surface plasmon resonance (SPR) technology (e.g., BIACORE®) or biolayer interferometry (e.g., FORTEBIO®).

[0116] With regard to the binding of an ABP to a target molecule, the terms “bind,” “specific binding,” “specifically binds to,” “specific for,” “selectively binds,” and “selective for” a particular antigen (e.g., a polypeptide target) or an epitope on a particular antigen mean binding that is measurably different from a non-specific or non-selective interaction (e.g., with a non-target molecule). Specific binding can be measured, for example, by measuring binding to a target molecule and comparing it to binding to a non-target molecule. Specific binding can also be determined by competition with a control molecule that mimics the epitope recognized on the target molecule. In that case, specific binding is indicated if the binding of the ABP to the target molecule is competitively inhibited by the control molecule.

[0117] In some aspects, the affinity of a HLA-PEPTIDE ABP for a non-target molecule is less than about 50% of the affinity for HLA-PEPTIDE. In some aspects, the affinity of a HLA-PEPTIDE ABP for a non-target molecule is less than about 40% of the affinity for HLA-PEPTIDE. In some aspects, the affinity of a HLA-PEPTIDE ABP for a non-target molecule is less than about 30% of the affinity for HLA-PEPTIDE. In some aspects, the affinity of a HLA-PEPTIDE ABP for a non-target molecule is less than about 20% of the affinity for HLA-PEPTIDE. In some aspects, the affinity of a HLA-PEPTIDE ABP for a non-target molecule is less than about 10% of the affinity for HLA-PEPTIDE. In some aspects, the affinity of a HLA-PEPTIDE ABP for a non-target molecule is less than about 1% of the affinity for HLA-PEPTIDE. In some aspects, the affinity of a HLA-PEPTIDE ABP for a non-target molecule is less than about 0.1% of the affinity for HLA-PEPTIDE.

[0118] The term “k_{d}” (sec⁻¹), as used herein, refers to the dissociation rate constant of a particular ABP—antigen interaction. This value is also referred to as the k_{off} value.

[0119] The term “kₐ” (M⁻¹×sec⁻¹), as used herein, refers to the association rate constant of a particular ABP-antigen interaction. This value is also referred to as the kₒₙ value.

[0120] The term “K_{D}” (M), as used herein, refers to the dissociation equilibrium constant of a particular ABP-antigen interaction. K_{D}=k_{d}/kₐ. In some embodiments, the affinity of an ABP is described in terms of the K_{D} for an interaction between such ABP and its antigen. For clarity, as known in the art, a smaller K_{D} value indicates a higher affinity interaction, while a larger K_{D} value indicates a lower affinity interaction.

[0121] The term “K_{A}” (M⁻¹), as used herein, refers to the association equilibrium constant of a particular ABP-antigen interaction. K_{A}=kₐ/k_{d}.

[0122] An “immunoconjugate” is an ABP conjugated to one or more heterologous molecule(s), such as a therapeutic (cytokine, for example) or diagnostic agent.

[0123] When used herein in the context of two or more ABPs, the term “competes with” or “cross-competes with” indicates that the two or more ABPs compete for binding to an antigen (e.g., HLA-PEPTIDE). In one exemplary assay, HLA-PEPTIDE is coated on a surface and contacted with a first HLA-PEPTIDE ABP, after which a second HLA-PEPTIDE ABP is added. In another exemplary assay, a first HLA-PEPTIDE ABP is coated on a surface and contacted with HLA-PEPTIDE, and then a second HLA-PEPTIDE ABP is added. If the presence of the first HLA-PEPTIDE ABP reduces binding of the second HLA-PEPTIDE ABP, in either assay, then the ABPs compete with each other. The term “competes with” also includes combinations of ABPs where one ABP reduces binding of another ABP, but where no competition is observed when the ABPs are added in the reverse order. However, in some embodiments, the first and second ABPs inhibit binding of each other, regardless of the order in which they are added. In some embodiments, one ABP reduces binding of another ABP to its antigen by at least 25%, at least 50%, at least 60%, at least 70%, at least 80%, at least 85%, at least 90%, or at least 95%. A skilled artisan can select the concentrations of the ABPs used in the competition assays based on the affinities of the ABPs for HLA-PEPTIDE and the valency of the ABPs. The assays described in this definition are illustrative, and a skilled artisan can utilize any suitable assay to determine if ABPs compete with each other. Suitable assays are described, for example, in Cox et al., “Immunoassay Methods,” in Assay Guidance Manual [Internet], Updated Dec. 24, 2014 (www.ncbi.nlm.nih.gov/books/NBK92434/; accessed Sep. 29, 2015); Silman et al., Cytometry, 2001, 44:30-37; and Finco et al., J. Pharm. Biomed. Anal., 2011, 54:351-358; each of which is incorporated by reference in its entirety.

[0124] The term “epitope” means a portion of an antigen that specifically binds to an ABP. Epitopes frequently consist of surface-accessible amino acid residues and/or sugar side chains and may have specific three dimensional structural characteristics, as well as specific charge characteristics. Conformational and non-conformational epitopes are distinguished in that the binding to the former but not the latter may be lost in the presence of denaturing solvents. An epitope may comprise amino acid residues that are directly involved in the binding, and other amino acid residues, which are not directly involved in the binding. The epitope to which an ABP binds can be determined using known techniques for epitope determination such as, for example, testing for ABP binding to HLA-PEPTIDE variants with different point-mutations, or to chimeric HLA-PEPTIDE variants.

[0125] As used herein, the term percent “identity,” in the context of two or more nucleic acid or polypeptide sequences, refer to two or more sequences or subsequences that have a specified percentage of nucleotides or amino acid residues that are the same, when compared and aligned for maximum correspondence, as measured using one of the sequence comparison algorithms described below (e.g., BLASTP and BLASTN or other algorithms available to persons of skill) or by visual inspection. Depending on the application, the percent “identity” can exist over a region of the sequence being compared, e.g., over a functional domain, or, alternatively, exist over the full length of the two sequences to be compared.

[0126] For sequence comparison, typically one sequence acts as a reference sequence to which test sequences are compared. When using a sequence comparison algorithm, test and reference sequences are input into a computer, subsequence coordinates are designated, if necessary, and sequence algorithm program parameters are designated. The sequence comparison algorithm then calculates the percent sequence identity for the test sequence(s) relative to the reference sequence, based on the designated program parameters.

[0127] Alternatively, sequence similarity or dissimilarity can be established by the combined presence or absence of particular nucleotides, or, for translated sequences, amino acids at selected sequence positions (e.g., sequence motifs).

[0128] Optimal alignment of sequences for comparison can be conducted, e.g., by the local homology algorithm of Smith & Waterman, Adv. Appl. Math. 2:482 (1981), by the homology alignment algorithm of Needleman & Wunsch, J. Mol. Biol. 48:443 (1970), by the search for similarity method of Pearson & Lipman, Proc. Nat'l. Acad. Sci. USA 85:2444 (1988), by computerized implementations of these algorithms (GAP, BESTFIT, FASTA, and TFASTA in the Wisconsin Genetics Software Package, Genetics Computer Group, 575 Science Dr., Madison, Wis.), or by visual inspection (see generally Ausubel et al., infra).

[0129] One example of an algorithm that is suitable for determining percent sequence identity and sequence similarity is the BLAST algorithm, which is described in Altschul et al., J. Mol. Biol. 215:403-410 (1990). Software for performing BLAST analyses is publicly available through the National Center for Biotechnology Information.

[0130] A “conservative substitution” or a “conservative amino acid substitution,” refers to the substitution an amino acid with a chemically or functionally similar amino acid. Conservative substitution tables providing similar amino acids are well known in the art. By way of example, the groups of amino acids provided in Tables 2-4 are, in some embodiments, considered conservative substitutions for one another.

TABLE 2
Selected groups of amino acids that are considered conservative
substitutions for one another, in certain embodiments.

| | |
|---|---|
| Acidic Residues | D and E |
| Basic Residues | K, R, and H |
| Hydrophilic Uncharged Residues | S, T, N, and Q |
| Aliphatic Uncharged Residues | G, A, V, L, and I |
| Non-polar Uncharged Residues | C, M, and P |
| Aromatic Residues | F, Y, and W |

TABLE 3
Additional selected groups of amino acids that
are considered conservative substitutions
for one another, in certain embodiments.

| | |
|---|---|
| Group 1 | A, S, and T |
| Group 2 | D and E |
| Group 3 | N and Q |
| Group 4 | R and K |
| Group 5 | I, L, and M |
| Group 6 | F, Y, and W |

TABLE 4
Further selected groups of amino acids that are considered conservative
substitutions for one another, in certain embodiments.

| | |
|---|---|
| Group A | A and G |
| Group B | D and E |
| Group C | N and Q |
| Group D | R, K, and H |
| Group E | I, L, M, V |
| Group F | F, Y, and W |
| Group G | S and T |
| Group H | C and M |

[0131] Additional conservative substitutions may be found, for example, in Creighton, Proteins: Structures and Molecular Properties 2nd ed. (1993) W. H. Freeman & Co., New York, N.Y. An ABP generated by making one or more conservative substitutions of amino acid residues in a parent ABP is referred to as a “conservatively modified variant.”

[0132] The term “amino acid” refers to the twenty common naturally occurring amino acids. Naturally occurring amino acids include alanine (Ala; A), arginine (Arg; R), asparagine (Asn; N), aspartic acid (Asp; D), cysteine (Cys; C); glutamic acid (Glu; E), glutamine (Gln; Q), Glycine (Gly; G); histidine (His; H), isoleucine (Ile; I), leucine (Leu; L), lysine (Lys; K), methionine (Met; M), phenylalanine (Phe; F), proline (Pro; P), serine (Ser; S), threonine (Thr; T), tryptophan (Trp; W), tyrosine (Tyr; Y), and valine (Val; V).

[0133] The term “vector,” as used herein, refers to a nucleic acid molecule capable of propagating another nucleic acid to which it is linked. The term includes the vector as a self-replicating nucleic acid structure as well as the vector incorporated into the genome of a host cell into which it has been introduced. Certain vectors are capable of directing the expression of nucleic acids to which they are operatively linked. Such vectors are referred to herein as “expression vectors.”

[0134] The terms “host cell,” “host cell line,” and “host cell culture” are used interchangeably and refer to cells into which an exogenous nucleic acid has been introduced, and the progeny of such cells. Host cells include “transformants” (or “transformed cells”) and “transfectants” (or “transfected cells”), which each include the primary transformed or transfected cell and progeny derived therefrom. Such progeny may not be completely identical in nucleic acid content to a parent cell, and may contain mutations.

[0135] The term “treating” (and variations thereof such as “treat” or “treatment”) refers to clinical intervention in an attempt to alter the natural course of a disease or condition in a subject in need thereof. Treatment can be performed both for prophylaxis and during the course of clinical pathology. Desirable effects of treatment include preventing occurrence or recurrence of disease, alleviation of symptoms, diminishment of any direct or indirect pathological consequences of the disease, preventing metastasis, decreasing the rate of disease progression, amelioration or palliation of the disease state, and remission or improved prognosis.

[0136] As used herein, the term “therapeutically effective amount” or “effective amount” refers to an amount of an ABP or pharmaceutical composition provided herein that, when administered to a subject, is effective to treat a disease or disorder.

[0137] As used herein, the term “subject” means a mammalian subject. Exemplary subjects include humans, monkeys, dogs, cats, mice, rats, cows, horses, camels, goats, rabbits, and sheep. In certain embodiments, the subject is a human. In some embodiments the subject has a disease or condition that can be treated with an ABP provided herein. In some aspects, the disease or condition is a cancer. In some aspects, the disease or condition is a viral infection.

[0138] The term “package insert” is used to refer to instructions customarily included in commercial packages of therapeutic or diagnostic products (e.g., kits) that contain information about the indications, usage, dosage, administration, combination therapy, contraindications and/or warnings concerning the use of such therapeutic or diagnostic products.

[0139] The term “tumor” refers to all neoplastic cell growth and proliferation, whether malignant or benign, and all pre-cancerous and cancerous cells and tissues. The terms “cancer,” “cancerous,” “cell proliferative disorder,” “proliferative disorder” and “tumor” are not mutually exclusive as referred to herein. The terms “cell proliferative disorder” and “proliferative disorder” refer to disorders that are associated with some degree of abnormal cell proliferation. In some embodiments, the cell proliferative disorder is a cancer. In some aspects, the tumor is a solid tumor. In some aspects, the tumor is a hematologic malignancy.

[0140] The term “pharmaceutical composition” refers to a preparation which is in such form as to permit the biological activity of an active ingredient contained therein to be effective in treating a subject, and which contains no additional components which are unacceptably toxic to the subject in the amounts provided in the pharmaceutical composition.

[0141] The terms “modulate” and “modulation” refer to reducing or inhibiting or, alternatively, activating or increasing, a recited variable.

[0142] The terms “increase” and “activate” refer to an increase of 10%, 20%, 30%, 40%, 50%, 60%, 70%, 75%, 80%, 85%, 90%, 95%, 100%, 2-fold, 3-fold, 4-fold, 5-fold, 10-fold, 20-fold, 50-fold, 100-fold, or greater in a recited variable.

[0143] The terms “reduce” and “inhibit” refer to a decrease of 10%, 20%, 30%, 40%, 50%, 60%, 70%, 75%, 80%, 85%, 90%, 95%, 2-fold, 3-fold, 4-fold, 5-fold, 10-fold, 20-fold, 50-fold, 100-fold, or greater in a recited variable.

[0144] The term “agonize” refers to the activation of receptor signaling to induce a biological response associated with activation of the receptor. An “agonist” is an entity that binds to and agonizes a receptor.

[0145] The term “antagonize” refers to the inhibition of receptor signaling to inhibit a biological response associated with activation of the receptor. An “antagonist” is an entity that binds to and antagonizes a receptor.

[0146] The terms “nucleic acids” and “polynucleotides” may be used interchangeably herein to refer to polymeric form of nucleotides of any length, either deoxyribonucleotides or ribonucleotides, or analogs thereof. Polynucleotides can include, but are not limited to coding or non-coding regions of a gene or gene fragment, loci (locus) defined from linkage analysis, exons, introns, messenger RNA (mRNA), cDNA, recombinant polynucleotides, branched polynucleotides, plasmids, vectors, isolated DNA, isolated RNA, nucleic acid probes, and primers. A polynucleotide may comprise modified nucleotides, such as methylated nucleotides and nucleotide analogs. Exemplary modified nucleotides include, e.g., 5-fluorouracil, 5-bromouracil, 5-chlorouracil, 5-iodouracil, hypoxanthine, xanthine, 4-acetylcytosine, 5-(carboxyhydroxymethyl) uracil, 5-carboxymethylaminomethyl-2-thiouridine, 5-carboxymethylaminomethyluracil, dihydrouracil, beta-D-galactosylqueosine, inosine, N6-isopentenyladenine, 1-methylguanine, 1-methylinosine, 2,2-dimethylguanine, 2-methyladenine, 2-methylguanine, 3-methylcytosine, 5-methylcytosine, N6-substituted adenine, 7-methylguanine, 5-methylaminomethyluracil, 5-methoxyaminomethyl-2-thiouracil, beta-D-mannosylqueosine, 5′-methoxycarboxymethyluracil, 5-methoxyuracil, 2-methylthioN6- isopentenyladenine, uracil-5-oxyacetic acid (v), wybutoxosine, pseudouracil, queosine, 2- thiocytosine, 5-methyl-2-thiouracil, 2-thiouracil, 4-thiouracil, 5-methyluracil, uracil-5- oxyacetic acid methylester, 3-(3-amino-3-N-2-carboxypropyl) uracil, and 2,6-diaminopurine.

[0147] As used herein the term “antigen” is a substance that induces an immune response. An antigen can be a neoantigen. An antigen can be a “shared antigen” that is an antigen found among a specific population, e.g., a specific population of cancer patients. Antigens can include HLA-PEPTIDE antigens.

[0148] As used herein the term “neoantigen” is an antigen that has at least one alteration that makes it distinct from the corresponding wild-type antigen, e.g., via mutation in a tumor cell or post-translational modification specific to a tumor cell. In some embodiments, the alteration occurs in tumor or cancer cells. In some embodiments, the alteration does not occur in a non-tumor or a non-cancer cell. In some embodiments, the alteration is absent from normal tissue. A neoantigen can include a polypeptide sequence or a nucleotide sequence. A mutation can include a frameshift or nonframeshift indel, missense or nonsense substitution, splice site alteration, genomic rearrangement or gene fusion, or any genomic or expression alteration giving rise to a neoORF. A mutation can also include a splice variant. Post-translational modifications specific to a tumor cell can include aberrant phosphorylation.

[0149] Post-translational modifications specific to a tumor cell can also include a proteasome-generated spliced antigen. See Liepe et al., A large fraction of HLA class I ligands are proteasome-generated spliced peptides; Science. 2016 Oct. 21; 354(6310):354-358. A neoantigen can be a shared neoantigen if it can be found among multiple patients in a specific population (e.g., a specific population of cancer patients). Neoantigens can include HLA-PEPTIDE neoantigens.

[0150] As used herein, the terms “HLA-PEPTIDE,” “pHLA,” “peptide-HLA,” and “peptide-HLA complex,” are used interchangeably herein to refer to an antigen comprising an HLA-restricted peptide complexed with an HLA Class I molecule, wherein the HLA-restricted peptide is located in the peptide binding groove of an α1/α2 heterodimer portion of the HLA Class I molecule. Such antigens are defined by a specific HLA-restricted peptide having a defined amino acid sequence complexed with a specific HLA Class I subtype.

[0151] In some embodiments, an “HLA-PEPTIDE neoantigen,” a “pHLA neoantigen,” and a “peptide-HLA neoantigen” are used interchangeably herein to refer to an HLA-PEPTIDE that comprises at least one alteration that makes it distinct from the corresponding wild-type HLA-PEPTIDE antigen, e.g., via mutation in a tumor cell or post-translational modification specific to a tumor cell. In some embodiments, the at least one alteration is in the restricted peptide sequence, such that the restricted peptide of the HLA-PEPTIDE neoantigen is distinguished from a corresponding restricted peptide sequence without the alteration, e.g., a restricted peptide containing the wild-type sequence.

[0152] Exemplary HLA-PEPTIDE neoantigens and shared HLA-PEPTIDE neoantigens are shown in Table A (SEQ ID NO:10,755-21,015), in the AACR GENIE Results (SEQ ID NO:21,016-29,357), and in SEQ ID NOs 29358-29364; corresponding genes and somatic alterations associated with each antigen are also shown. Such pHLA neoantigens and shared pHLA neoantigens are useful for inducing an immune response in a subject via administration. The subject can be identified for administration through the use of various diagnostic methods, e.g., patient selection methods described herein.

[0153] As used herein the term “tumor antigen” is a antigen present in a subject's tumor cell or tissue but not in the subject's corresponding normal cell or tissue, or derived from a polypeptide known to or have been found to have altered expression in a tumor cell or cancerous tissue in comparison to a normal cell or tissue.

[0154] As used herein the term “candidate antigen” is a mutation or other aberration giving rise to a sequence that may represent an antigen.

[0155] As used herein the term “coding region” is the portion(s) of a gene that encode protein.

[0156] As used herein the term “coding mutation” is a mutation occurring in a coding region.

[0157] As used herein the term “ORF” means open reading frame.

[0158] As used herein the term “NEO-ORF” is a tumor-specific ORF arising from a mutation or other aberration such as splicing.

[0159] As used herein the term “missense mutation” is a mutation causing a substitution from one amino acid to another.

[0160] As used herein the term “nonsense mutation” is a mutation causing a substitution from an amino acid to a stop codon or causing removal of a canonical start codon.

[0161] As used herein the term “frameshift mutation” is a mutation causing a change in the frame of the protein.

[0162] As used herein the term “indel” is an insertion or deletion of one or more nucleic acids.

[0163] As used herein the term “non-stop or read-through” is a mutation causing the removal of the natural stop codon.

[0164] HLA-Peptide Antigens

[0165] The major histocompatibility complex (MHC) is a complex encoded by a group of linked loci, which are collectively termed H-2 in the mouse and HLA in humans. The two principal classes of the MHC antigens, class I and class II, each comprise a set of cell surface glycoproteins which play a role in determining tissue type and transplant compatibility. In transplantation reactions, cytotoxic T-cells (CTLs) respond mainly against class I glycoproteins, while helper T-cells respond mainly against class II glycoproteins.

[0166] Human major histocompatibility complex (MHC) class I molecules, referred to interchangeably herein as HLA Class I molecules, are expressed on the surface of nearly all cells. These molecules function in presenting peptides which are mainly derived from endogenously synthesized proteins to, e.g., CD8+ T cells via an interaction with the alpha-beta T-cell receptor. The class I MHC molecule comprises a heterodimer composed of a 46-kDa α chain which is non-covalently associated with the 12-kDa light chain beta-2 microglobulin. The α chain generally comprises α1 and α2 domains which form a groove for presenting an HLA-restricted peptide, and an 03 plasma membrane-spanning domain which interacts with the CD8 co-receptor of T-cells. FIG. 1 depicts the general structure of a Class I HLA molecule. Some TCRs can bind MHC class I independently of CD8 coreceptor (see, e.g., Kerry S E, Buslepp J, Cramer L A, et al. Interplay between TCR Affinity and Necessity of Coreceptor Ligation: High-Affinity Peptide-MHC/TCR Interaction Overcomes Lack of CD8 Engagement. Journal of immunology (Baltimore, Md.: 1950). 2003; 171(9):4493-4503.)

[0167] Class I MHC-restricted peptides (also referred to interchangeably herein as HLA-restricted antigens, HLA-restricted peptides, antigenic peptides, MHC-restricted antigens, restricted peptides, or peptides) generally bind to the heavy chain alpha1-alpha2 groove via about two or three anchor residues that interact with corresponding binding pockets in the MHC molecule. The beta-2 microglobulin chain plays an important role in MHC class I intracellular transport, peptide binding, and conformational stability. For most class I molecules, the formation of a heterotrimeric complex of the MHC class I heavy chain, peptide (self, non-self, and/or antigenic) and beta-2 microglobulin leads to protein maturation and export to the cell-surface.

[0168] Binding of a given HLA subtype to an HLA-restricted peptide forms a complex with a unique and novel surface that can be specifically recognized by an ABP such as, e.g., a TCR on a T cell.

[0169] Accordingly, provided herein are HLA-PEPTIDE antigens comprising a specific HLA-restricted peptide having a defined amino acid sequence complexed with a specific HLA subtype.

[0170] HLA-PEPTIDE antigens identified herein may be useful for cancer immunotherapy. In some embodiments, the HLA-PEPTIDE antigens identified herein are presented on the surface of a tumor cell. The HLA-PEPTIDE antigens identified herein may be expressed by tumor cells in a human subject. The HLA-PEPTIDE antigens identified herein may be expressed by tumor cells in a population of human subjects. For example, the HLA-PEPTIDE antigens identified herein may be shared HLA-PEPTIDE antigens which are commonly expressed in a population of human subjects with cancer.

[0171] The HLA-PEPTIDE antigens identified herein may have a prevalence with an individual tumor type The prevalence with an individual tumor type may be about 0.1%, 0.2%0, 0.3%0, 0.4%0, 0.5%0, 0.6%0, 0.7%0, 0.8%0, 0.9%, 1%, 1%, 2%, 3%, 4%, 5%, 6%, 7%, 8%, 9%, 10%, 11%, 12%, 13%, 14%, 15%, 16%, 17%, 18%, 19%, 20%, 21%, 22%, 23%, 24%, 25%, 26%, 27%, 28%, 29%, 30%, 31%, 32%, 33%, 34%, 35%, 36%, 37%, 38%, 39%, 40%, 41%, 42%, 43%, 44%, 45%, 46%, 47%, 48%, 49%, 50%, 51%, 52%, 53%, 54%, 55%, 56%, 57%, 58%, 59%, 60%, 61%, 62%, 63%, 64%, 65%, 66%, 67%, 68%, 69%, 70%, 71%, 72%, 73%, 74%, 75%, 76%, 77%, 78%, 79%, 80%, 81%, 82%, 83%, 84%, 85%, 86%, 87%, 88%, 89%, 90%, 91%, 92%, 93%, 94%, 95%, 96%, 97%, 98%, 99%, or 100%. The prevalence with an individual tumor type may be about 0.1%-100%, 0.2-50%, 0.5-25%, or 1-10%.

[0172] Exemplary HLA Class I Subtypes of the pHLA Neoantigens

[0173] In humans, there are many MHC haplotypes (referred to interchangeably herein as MHC subtypes, HLA subtypes, MHC types, and HLA types). Exemplary HLA subtypes include, by way of example only, 2 digit, 4 digit, 6 digit, and 8 digit subtypes. A full list of HLA Class Alleles can be found on http://hla.alleles.org/alleles/. For example, a full list of HLA Class I Alleles can be found on http://hla.alleles.org/alleles/class1.html. Exemplary HLA Class I subtypes include any of the HLA subtypes disclosed in in Table A (see SEQ ID NO:10,755-21,015) in the AACR GENIE results (see SEQ ID NO: 21,016-29,357), and in SEQ ID NOs: 29358-29364 disclosed herein. Table A neoantigens and the AACR GENIE Results are disclosed in PCT/US2019/033830, filed on May 23, 2019, which application is hereby incorporated by reference in its entirety.

[0174] Exemplary HLA-Restricted Peptides

[0175] The HLA-restricted peptides (referred to interchangeably herein) as “restricted peptides” can be peptide fragments of tumor-associated neoantigens, e.g., shared neoantigens. The peptide fragments can include any of the amino acid sequences disclosed in Table A (see SEQ ID NO:10,755-21,015), in the AACR GENIE results (see SEQ ID NO: 21,016-29,357), and in SEQ ID NOs: 29358-29364 disclosed herein. Table A neoantigens and the AACR GENIE Results are disclosed in PCT/US2019/033830, filed on May 23, 2019, which application is hereby incorporated by reference in its entirety.

[0176] Accordingly, disclosed herein are isolated peptides that comprise tumor specific mutations identified by the methods disclosed herein, peptides that comprise known tumor specific mutations, and mutant polypeptides or fragments thereof identified by methods disclosed herein. Neoantigen peptides can be described in the context of their coding sequence where a neoantigen includes the nucleotide sequence (e.g., DNA or RNA) that codes for the related polypeptide sequence.

[0177] Also disclosed herein are peptides, e.g., restricted peptides derived from any polypeptide known to or have been found to have altered expression in a tumor cell or cancerous tissue in comparison to a normal cell or tissue, for example any polypeptide known to or have been found to be aberrantly expressed in a tumor cell or cancerous tissue in comparison to a normal cell or tissue. Suitable polypeptides from which the restricted peptides can be derived can be found for example in the COSMIC database. COSMIC curates comprehensive information on somatic mutations in human cancer. In some embodiments, the restricted peptide contains the tumor specific mutation.

[0178] One or more restricted peptides can comprise at least one of a binding affinity with MHC with an IC50 value of less than 1000 nM, for MHC Class I peptides a length of 8-15, 8, 9, 10, 11, 12, 13, 14, or 15 amino acids, presence of sequence motifs within or near the peptide promoting proteasome cleavage, and presence or sequence motifs promoting TAP transport.

[0179] The restricted peptides may have a size of about 5, about 6, about 7, about 8, about 9, about 10, about 11, about 12, about 13, about 14, or about 15 amino acid residues, and any range derivable therein. In particular embodiments, the restricted peptide has a size of about 8, about 9, about 10, about 11, or about 12 amino molecule residues. The restricted peptide may be about 5-15 amino acids in length, preferably may be about 7-13 amino acids in length, or more preferably may be about 8-12 amino acids in length.

[0180] Exemplary Shared HLA-PEPTIDE Neoantigens

[0181] Exemplary shared HLA-PEPTIDE neoantigens are shown in Table A (see SEQ ID NO:10,755-21,015), in the AACR GENIE results (see SEQ ID NO: 21,016-29,357), and in SEQ ID NOs: 29358-29364 disclosed herein. Table A neoantigens and the AACR GENIE Results are disclosed in PCT/US2019/033830, filed on May 23, 2019, which application is hereby incorporated by reference in its entirety.

[0182] One or more HLA-PEPTIDE neoantigens can be presented on the surface of a tumor.

[0183] One or more HLA-PEPTIDE neoantigens can be immunogenic in a subject having a tumor, e.g., capable of eliciting a T cell response or a B cell response in the subject.

[0184] If desirable, a longer peptide can be designed in several ways. In one case, when presentation likelihoods of peptides on HLA alleles are predicted or known, a longer peptide could consist of either: (1) individual presented peptides with an extensions of 2-5 amino acids toward the N- and C-terminus of each corresponding gene product; (2) a concatenation of some or all of the presented peptides with extended sequences for each. In another case, when sequencing reveals a long (>10 residues) neoepitope sequence present in the tumor (e.g. due to a frameshift, read-through or intron inclusion that leads to a novel peptide sequence), a longer peptide would consist of: (3) the entire stretch of novel tumor-specific amino acids—thus bypassing the need for computational or in vitro test-based selection of the strongest HLA-presented shorter peptide. In both cases, use of a longer peptide allows endogenous processing by patient cells and may lead to more effective antigen presentation and induction of T cell responses.

[0185] Antigenic peptides and polypeptides can be presented on an HLA protein. In some aspects antigenic peptides and polypeptides are presented on an HLA protein with greater affinity than a wild-type peptide. In some aspects, a antigenic peptide or polypeptide can have an IC50 of at least less than 5000 nM, at least less than 1000 nM, at least less than 500 nM, at least less than 250 nM, at least less than 200 nM, at least less than 150 nM, at least less than 100 nM, at least less than 50 nM or less.

[0186] In some aspects, antigenic peptides and polypeptides do not induce an autoimmune response and/or invoke immunological tolerance when administered to a subject.

[0187] Also provided are compositions comprising at least two or more antigenic peptides. In some embodiments the composition contains at least two distinct peptides. At least two distinct peptides can be derived from the same polypeptide. By distinct polypeptides is meant that the peptide vary by length, amino acid sequence, or both. The peptides are derived from any polypeptide known to or have been found to contain a tumor specific mutation or peptides derived from any polypeptide known to or have been found to have altered expression in a tumor cell or cancerous tissue in comparison to a normal cell or tissue, for example any polypeptide known to or have been found to be aberrantly expressed in a tumor cell or cancerous tissue in comparison to a normal cell or tissue. Suitable polypeptides from which the antigenic peptides can be derived can be found for example in the COSMIC database or the AACR Genomics Evidence Neoplasia Information Exchange (GENIE) database. COSMIC curates comprehensive information on somatic mutations in human cancer. AACR GENIE aggregates and links clinical-grade cancer genomic data with clinical outcomes from tens of thousands of cancer patients. The peptide contains the tumor specific mutation. In some aspects the tumor specific mutation is a driver mutation for a particular cancer type.

[0188] Antigenic peptides and polypeptides having a desired activity or property can be modified to provide certain desired attributes, e.g., improved pharmacological characteristics, while increasing or at least retaining substantially all of the biological activity of the unmodified peptide to bind the desired MHC molecule and activate the appropriate T cell. For instance, antigenic peptide and polypeptides can be subject to various changes, such as substitutions, either conservative or non-conservative, where such changes might provide for certain advantages in their use, such as improved MHC binding, stability or presentation. By conservative substitutions is meant replacing an amino acid residue with another which is biologically and/or chemically similar, e.g., one hydrophobic residue for another, or one polar residue for another. The substitutions include combinations such as Gly, Ala; Val, Ile, Leu, Met; Asp, Glu; Asn, Gln; Ser, Thr; Lys, Arg; and Phe, Tyr. The effect of single amino acid substitutions may also be probed using D-amino acids. Such modifications can be made using well known peptide synthesis procedures, as described in e.g., Merrifield, Science 232:341-347 (1986), Barany & Merrifield, The Peptides, Gross & Meienhofer, eds. (N.Y., Academic Press), pp. 1-284 (1979); and Stewart & Young, Solid Phase Peptide Synthesis, (Rockford, Ill., Pierce), 2d Ed. (1984).

[0189] Modifications of peptides and polypeptides with various amino acid mimetics or unnatural amino acids can be particularly useful in increasing the stability of the peptide and polypeptide in vivo. Stability can be assayed in a number of ways. For instance, peptidases and various biological media, such as human plasma and serum, have been used to test stability. See, e.g., Verhoef et al., Eur. J. Drug Metab Pharmacokin. 11:291-302 (1986). Half-life of the peptides can be conveniently determined using a 25% human serum (v/v) assay. The protocol is generally as follows. Pooled human serum (Type AB, non-heat inactivated) is delipidated by centrifugation before use. The serum is then diluted to 25% with RPMI tissue culture media and used to test peptide stability. At predetermined time intervals a small amount of reaction solution is removed and added to either 6% aqueous trichloracetic acid or ethanol. The cloudy reaction sample is cooled (4 degrees C.) for 15 minutes and then spun to pellet the precipitated serum proteins. The presence of the peptides is then determined by reversed-phase HPLC using stability-specific chromatography conditions.

[0190] The peptides and polypeptides can be modified to provide desired attributes other than improved serum half-life. For instance, the ability of the peptides to induce CTL activity can be enhanced by linkage to a sequence which contains at least one epitope that is capable of inducing a T helper cell response. Immunogenic peptides/T helper conjugates can be linked by a spacer molecule. The spacer is typically comprised of relatively small, neutral molecules, such as amino acids or amino acid mimetics, which are substantially uncharged under physiological conditions. The spacers are typically selected from, e.g., Ala, Gly, or other neutral spacers of nonpolar amino acids or neutral polar amino acids. It will be understood that the optionally present spacer need not be comprised of the same residues and thus can be a hetero- or homo-oligomer. When present, the spacer will usually be at least one or two residues, more usually three to six residues. Alternatively, the peptide can be linked to the T helper peptide without a spacer.

[0191] An antigenic peptide can be linked to the T helper peptide either directly or via a spacer either at the amino or carboxy terminus of the peptide. The amino terminus of either the antigenic peptide or the T helper peptide can be acylated. Exemplary T helper peptides include tetanus toxoid 830-843, influenza 307-319, malaria circumsporozoite 382-398 and 378-389.

[0192] Proteins or peptides can be made by any technique known to those of skill in the art, including the expression of proteins, polypeptides or peptides through standard molecular biological techniques, the isolation of proteins or peptides from natural sources, or the chemical synthesis of proteins or peptides. The nucleotide and protein, polypeptide and peptide sequences corresponding to various genes have been previously disclosed, and can be found at computerized databases known to those of ordinary skill in the art. One such database is the National Center for Biotechnology Information's Genbank and GenPept databases located at the National Institutes of Health website. The coding regions for known genes can be amplified and/or expressed using the techniques disclosed herein or as would be known to those of ordinary skill in the art. Alternatively, various commercial preparations of proteins, polypeptides and peptides are known to those of skill in the art.

[0193] In some embodiments, an antigen can include a nucleic acid (e.g. polynucleotide) that encodes a antigenic peptide or portion thereof. The polynucleotide can be, e.g., DNA, cDNA, PNA, CNA, RNA (e.g., mRNA), either single- and/or double-stranded, or native or stabilized forms of polynucleotides, such as, e.g., polynucleotides with a phosphorothiate backbone, or combinations thereof and it may or may not contain introns.

[0194] A still further aspect provides an expression vector capable of expressing a polypeptide or portion thereof. Expression vectors for different cell types are well known in the art and can be selected without undue experimentation. Generally, DNA is inserted into an expression vector, such as a plasmid, in proper orientation and correct reading frame for expression. If necessary, DNA can be linked to the appropriate transcriptional and translational regulatory control nucleotide sequences recognized by the desired host, although such controls are generally available in the expression vector. The vector is then introduced into the host through standard techniques. Guidance can be found e.g. in Sambrook et al. (1989) Molecular Cloning, A Laboratory Manual, Cold Spring Harbor Laboratory, Cold Spring Harbor, N.Y.

[0195] HLA Class I molecules which do not associate with a restricted peptide ligand are generally unstable. Accordingly, the association of the restricted peptide with the α1/α2 groove of the HLA molecule may stabilize the non-covalent association of the β₂-microglobulin subunit of the HLA subtype with the α-subunit of the HLA subtype.

[0196] Stability of the non-covalent association of the β₂-microglobulin subunit of the HLA subtype with the α-subunit of the HLA subtype can be determined using any suitable means. For example, such stability may be assessed by dissolving insoluble aggregates of HLA molecules in high concentrations of urea (e.g., about 8M urea), and determining the ability of the HLA molecule to refold in the presence of the restricted peptide during urea removal, e.g., urea removal by dialysis. Such refolding approaches are described in, e.g., Proc. Natl. Acad. Sci. USA Vol. 89, pp. 3429-3433, April 1992, hereby incorporated by reference.

[0197] For other example, such stability may be assessed using conditional HLA Class I ligands. Conditional HLA Class I ligands are generally designed as short restricted peptides which stabilize the association of the β2 and a subunits of the HLA Class I molecule by binding to the α1/α2 groove of the HLA molecule, and which contain one or more amino acid modifications allowing cleavage of the restricted peptide upon exposure to a conditional stimulus. Upon cleavage of the conditional ligand, the β2 and α-subunits of the HLA molecule dissociate, unless such conditional ligand is exchanged for a restricted peptide which binds to the α1/α2 groove and stabilizes the HLA molecule. Conditional ligands can be designed by introducing amino acid modifications in either known HLA peptide ligands or in predicted high-affinity HLA peptide ligands. For HLA alleles for which structural information is available, water-accessibility of side chains may also be used to select positions for introduction of the amino acid modifications. Use of conditional HLA ligands may be advantageous by allowing the batch preparation of stable HLA-peptide complexes which may be used to interrogate test restricted peptides in a high throughput manner. Conditional HLA Class I ligands, and methods of production, are described in, e.g., Proc Natl Acad Sci USA. 2008 Mar. 11; 105(10): 3831-3836; Proc Natl Acad Sci USA. 2008 Mar. 11; 105(10): 3825-3830; J Exp Med. 2018 May 7; 215(5): 1493-1504; Choo, J. A. L. et al. Bioorthogonal cleavage and exchange of major histocompatibility complex ligands by employing azobenzene-containing peptides. Angew Chem Int Ed Engl 53, 13390-13394 (2014); Amore, A. et al. Development of a Hypersensitive Periodate-Cleavable Amino Acid that is Methionine- and Disulfide-Compatible and its Application in MHC Exchange Reagents for T Cell Characterisation. ChemBioChem 14, 123-131 (2012); Rodenko, B. et al. Class I Major Histocompatibility Complexes Loaded by a Periodate Trigger. J Am Chem Soc 131, 12305-12313 (2009); and Chang, C. X. L. et al. Conditional ligands for Asian HLA variants facilitate the definition of CD8+ T-cell responses in acute and chronic viral diseases. Eur J Immunol 43, 1109-1120 (2013). These references are incorporated by reference in their entirety.

[0198] Accordingly, in some embodiments, the ability of an HLA-restricted peptide described herein, e.g., described in Table A (SEQ ID NO:10,755-21,015), AACR GENIE results (SEQ ID NOs: 21,016-29,357), or in SEQ ID NOs: 29358-29364, to stabilize the association of the β₂- and α-subunits of the HLA molecule, is assessed by performing a conditional ligand mediated-exchange reaction and assay for HLA stability. HLA stability can be assayed using any suitable method, including, e.g., mass spectrometry analysis, immunoassays (e.g., ELISA), size exclusion chromatography, and HLA multimer staining followed by flow cytometry assessment of T cells.

[0199] Other exemplary methods for assessing stability of the non-covalent association of the β₂-microglobulin subunit of the HLA subtype with the α-subunit of the HLA subtype include peptide exchange using dipeptides. Peptide exchange using dipeptides has been described in, e.g., Proc Natl Acad Sci USA. 2013 Sep. 17, 110(38):15383-8; Proc Natl Acad Sci USA. 2015 Jan. 6, 112(1):202-7, which is hereby incorporated by reference.

[0200] The HLA-PEPTIDE antigen may be isolated and/or in substantially pure form. For example, the HLA-PEPTIDE antigens may be isolated from their natural environment, or may be produced by means of a technical process. In some cases, the HLA-PEPTIDE antigen is provided in a form which is substantially free of other peptides or proteins.

[0201] The HLA-PEPTIDE antigens may be presented in soluble form, and optionally may be a recombinant HLA-PEPTIDE antigen complex. The skilled artisan may use any suitable method for producing and purifying recombinant HLA-PEPTIDE antigens. Suitable methods include, e.g., use of E. coli expression systems, insect cells, and the like. Other methods include synthetic production, e.g., using cell free systems. An exemplary suitable cell free system is described in WO2017089756, which is hereby incorporated by reference in its entirety.

[0202] Also provided herein are compositions comprising an HLA-PEPTIDE antigen.

[0203] In some cases, the composition comprises an HLA-PEPTIDE antigen attached to a solid support. Exemplary solid supports include, but are not limited to, beads, wells, membranes, tubes, columns, plates, sepharose, magnetic beads, and chips. Exemplary solid supports are described in, e.g., Catalysts 2018, 8, 92; doi:10.3390/cata18020092, which is hereby incorporated by reference in its entirety.

[0204] The HLA-PEPTIDE antigen may be attached to the solid support by any suitable methods known in the art. In some cases, the HLA-PEPTIDE antigen is covalently attached to the solid support.

[0205] In some cases, the HLA-PEPTIDE antigen is attached to the solid support by way of an affinity binding pair. Affinity binding pairs generally involved specific interactions between two molecules. A ligand having an affinity for its binding partner molecule can be covalently attached to the solid support, and thus used as bait for immobilizing. Common affinity binding pairs include, e.g., streptavidin and biotin, avidin and biotin; polyhistidine tags with metal ions such as copper, nickel, zinc, and cobalt; and the like. Accordingly, provided herein are compositions comprising an HLA-PEPTIDE antigen disclosed herein, wherein the HLA-PEPTIDE antigen is covalently linked to an affinity tag.

[0206] The HLA-PEPTIDE antigen may comprise a detectable label. In some embodiments, the HLA-PEPTIDE antigen is complexed with the detectable label. In some embodiments, the detectable label comprises a β₂-microglobulin binding molecule. e.g., a labeled antibody, e.g., a fluorochrome labeled antibody.

[0207] Also provided herein are pharmaceutical compositions comprising HLA-PEPTIDE antigens.

[0208] The composition comprising an HLA-PEPTIDE antigen may be a pharmaceutical composition. Such a composition may comprise multiple HLA-PEPTIDE antigens.

[0209] Exemplary pharmaceutical compositions are described herein. The composition may be capable of eliciting an immune response. The composition may comprise an adjuvant. Suitable adjuvants include, but are not limited to 1018 ISS, alum, aluminium salts, Amplivax, AS15, BCG, CP-870,893, CpG7909, CyaA, dSLIM, GM-CSF, IC30, IC31, Imiquimod, ImuFact IMP321, IS Patch, ISS, ISCOMATRIX, JuvImmune, LipoVac, MF59, monophosphoryl lipid A, Montanide IMS 1312, Montanide ISA 206, Montanide ISA 50V, Montanide ISA-51, OK-432, OM-174, OM-197-MP-EC, ONTAK, PepTel vector system, PLG microparticles, resiquimod, SRL172, Virosomes and other Virus-like particles, YF-17D, VEGF trap, R848, beta-glucan, Pam3Cys, Aquila's QS21 stimulon (Aquila Biotech, Worcester, Mass., USA) which is derived from saponin, mycobacterial extracts and synthetic bacterial cell wall mimics, and other proprietary adjuvants such as Ribi's Detox. Quil or Superfos. Adjuvants such as incomplete Freund's or GM-CSF are useful. Several immunological adjuvants (e.g., MF59) specific for dendritic cells and their preparation have been described previously (Dupuis M, et al., Cell Immunol. 1998; 186(1):18-27; Allison A C; Dev Biol Stand. 1998; 92:3-11). Also cytokines can be used. Several cytokines have been directly linked to influencing dendritic cell migration to lymphoid tissues (e.g., TNF-alpha), accelerating the maturation of dendritic cells into efficient antigen-presenting cells for T-lymphocytes (e.g., GM-CSF, IL-1 and IL-4) (U.S. Pat. No. 5,849,589, specifically incorporated herein by reference in its entirety) and acting as immunoadjuvants (e.g., IL-12) (Gabrilovich D I, et al., J Immunother Emphasis Tumor Immunol. 1996 (6):414-418). HLA surface expression and processing of intracellular proteins into peptides to present on HLA can also be enhanced by interferon-gamma (IFN-γ). See, e.g., York I A, Goldberg A L, Mo X Y, Rock K L. Proteolysis and class I major histocompatibility complex antigen presentation. Immunol Rev. 1999; 172:49-66; and Rock K L, Goldberg A L. Degradation of cell proteins and the generation of MHC class I-presented peptides. Ann Rev Immunol. 1999; 17:12. 739-779, which are incorporated herein by reference in their entirety.

[0210] Also provided herein are host cells comprising an HLA-PEPTIDE antigen disclosed herein. In some embodiments, the host cell comprises a polynucleotide encoding an HLA-restricted peptide as defined by the HLA-PEPTIDE antigen. In some embodiments, the polynucleotide is heterologous to the host cell. In some embodiments, the host cell does not comprise endogenous MHC. In some embodiments, the host cell comprises an exogenous HLA Class I molecule. In some embodiments, the host cell is a K562 or A375 cell. In some embodiments, the host cell is a cultured cell from a tumor cell line. In some embodiments, the tumor cell line expresses an HLA subtype as defined by the HLA-PEPTIDE antigen.

[0211] Also provided herein are cell culture systems comprising a host cell disclosed herein and a cell culture medium. In some embodiments, the host cell expresses the HLA Class I subtype as defined by the HLA-PEPTIDE antigen and the cell culture medium comprises the restricted peptide as defined by the HLA-PEPTIDE antigen.

[0212] ABPs

[0213] Also provided herein are ABPs that specifically bind to an HLA-PEPTIDE antigen disclosed herein. In some embodiments, an ABP disclosed herein specifically binds to an HLA-PEPTIDE neoantigen comprising an HLA-restricted peptide complexed with an HLA Class I molecule, wherein the HLA-restricted peptide is located in the peptide binding groove of an α1/α2 heterodimer portion of the HLA Class I molecule, wherein the HLA Class I molecule and the HLA-restricted peptide are each selected from an HLA-PEPTIDE neoantigen as described in any one of SEQ ID NOs:10,755 to 29,364, and wherein the ABP comprises a TCR or antigen-binding fragment thereof. For example, for an ABP disclosed herein, the target of the ABP is an HLA Class I molecule and the associated HLA-restricted peptide that are each selected from a single HLA-PEPTIDE neoantigen described in any one of the aforementioned SEQ ID NOs, i.e., the HLA Class I molecule and the HLA-restricted peptide are each selected from the same SEQ ID NO. For example, the target of an ABP against SEQ ID NO: 19865 would bind to HLA-A*11:01 in complex with a restricted peptide of the sequence: VVVGADGVGK.

[0214] The HLA-PEPTIDE neoantigen may be expressed on the surface of any suitable target cell including a tumor cell.

[0215] In some embodiments, the ABP specifically binds a complex comprising HLA and an HLA-restricted peptide (HLA-PEPTIDE), e.g., derived from a tumor. In some embodiments, the ABP does not bind to the HLA in the absence of the HLA-restricted peptide. In some embodiments, the ABP does not bind HLA-restricted peptide in the absence of the HLA. In some embodiments, the ABP binds tumor cells presenting human MHC complexed with the HLA—restricted peptide, optionally wherein the HLA restricted peptide is a tumor antigen characterizing the cancer. In some aspects, the ABP binds a complex comprising HLA and HLA-restricted peptide when naturally presented on a cell such as a tumor cell.

[0216] An ABP can bind to each portion of an HLA-PEPTIDE complex (i.e., HLA and peptide representing each portion of the complex), which when bound together form a novel target and protein surface for interaction with and binding by the ABP, distinct from a surface presented by the peptide alone or HLA subtype alone. Generally the novel target and protein surface formed by binding of HLA to peptide does not exist in the absence of each portion of the HLA-PEPTIDE complex. In some embodiments, the ABP binds to the HLA-PEPTIDE neoantigen through at least one contact point with the HLA Class I molecule and through at least one contact point with the HLA-restricted peptide.

[0217] In some embodiments, an ABP provided herein modulates binding of HLA-PEPTIDE to one or more ligands of HLA-PEPTIDE.

[0218] In more particular embodiments, the ABP specifically binds to a neoantigen described in Table 5A. In more particular embodiments, the ABP specifically binds to a neoantigen described in Table 5B. In more particular embodiments, the ABP specifically binds to a neoantigen described in Table 6. In more particular embodiments, the ABP specifically binds to a neoantigen described in Table 7.

[0219] In some embodiments of the ABP, the HLA-restricted peptide comprises a RAS mutation. In some embodiments of the ABP, the RAS mutation is a RAS G12 mutation. The RAS may be KRAS, NRAS, or HRAS. In some embodiments of the ABP, the HLA-restricted peptide comprises a RAS G12 mutation. In some embodiments of the ABP, the HLA-restricted peptide comprises a NRAS G12 mutation. In some embodiments of the ABP, the HLA-restricted peptide comprises a HRAS G12 mutation. Because amino acid positions 1-50 of HRAS, KRAS, and NRAS are identical, a skilled artisan understands that an HLA-Class I restricted peptide comprising a RAS G12 mutation corresponds to the KRAS G12, NRAS G12, and HRAS G12 mutation. By way of example only, SEQ ID NO: 14954, described as a KRAS G12C neoantigen, and SEQ ID NO: 14955, described as an NRAS G12C neoantigen, both have identical HLA-PEPTIDE pairings (HLA-A*02:01_KLVVVGACGV). Accordingly, SEQ ID NOs 14954 and 14955 describe identical KRAS/NRAS/HRAS G12C HLA-PEPTIDE neoantigens.

[0220] In some embodiments, the G12 mutation is a G12C, a G12D, a G12V, or a G12A mutation. In some embodiments wherein the HLA-restricted peptide comprises the RAS G12 mutation, the HLA Class I molecule is selected from HLA-A*02:01, HLA-A*11:01, HLA-A*31:01, HLA-C*01:02, and HLA-A*03:01.

[0221] In particular embodiments of the ABP, the HLA-PEPTIDE neoantigen is selected from: a RAS_G12C MHC Class I antigen comprising HLA-A*02:01 and the restricted peptide Lys Leu Val Val Val Gly Ala Cys Gly Val; a RAS_G12D MHC Class I antigen comprising HLA-A*11:01 and the restricted peptide Val Val Val Gly Ala Asp Gly Val Gly Lys; a RAS_G12D MHC Class I antigen comprising HLA-A*11:01 and the restricted peptide Val Val Gly Ala Asp Gly Val Gly Lys; a RAS_G12V MHC Class I antigen comprising HLA-A*11:01 and the restricted peptide Val Val Val Gly Ala Val Gly Val Gly Lys; a RAS_G12V MHC Class I antigen comprising HLA-A*31:01 and the restricted peptide Val Val Val Gly Ala Val Gly Val Gly Lys; a RAS_G12V MHC Class I antigen comprising HLA-A*11:01 and the restricted peptide Val Val Gly Ala Val Gly Val Gly Lys; a RAS_G12V MHC Class I antigen comprising HLA-C*01:02 and the restricted peptide Ala Val Gly Val Gly Lys Ser Ala Leu; and a RAS_G12V MHC Class I antigen comprising HLA-A*03:01 and the restricted peptide Val Val Val Gly Ala Val Gly Val Gly Lys.

[0222] In some embodiments of the ABP, the HLA-PEPTIDE neoantigen is selected from: a RAS_G12C MHC Class I antigen comprising HLA-A*02:01 and the restricted peptide Lys Leu Val Val Val Gly Ala Cys Gly Val; a RAS_G12D MHC Class I antigen comprising HLA-A*11:01 and the restricted peptide Val Val Val Gly Ala Asp Gly Val Gly Lys; a RAS_G12D MHC Class I antigen comprising HLA-A*11:01 and the restricted peptide Val Val Gly Ala Asp Gly Val Gly Lys; a RAS_G12V MHC Class I antigen comprising HLA-A*11:01 and the restricted peptide Val Val Val Gly Ala Val Gly Val Gly Lys; a RAS_G12V MHC Class I antigen comprising HLA-A*31:01 and the restricted peptide Val Val Val Gly Ala Val Gly Val Gly Lys; a RAS_G12V MHC Class I antigen comprising HLA-A*11:01 and the restricted peptide Val Val Gly Ala Val Gly Val Gly Lys; a RAS_G12V MHC Class I antigen comprising HLA-C*01:02 and the restricted peptide Ala Val Gly Val Gly Lys Ser Ala Leu; and a RAS_G12V MHC Class I antigen comprising HLA-A*03:01 and the restricted peptide Val Val Val Gly Ala Val Gly Val Gly Lys.

[0223] In some embodiments of the ABP, the HLA-PEPTIDE neoantigen is selected from: a RAS_G12C MHC Class I antigen comprising HLA-A*02:01 and the restricted peptide Lys Leu Val Val Val Gly Ala Cys Gly Val; a RAS_G12D MHC Class I antigen comprising HLA-A*11:01 and the restricted peptide Val Val Val Gly Ala Asp Gly Val Gly Lys; and a RAS_G12V MHC Class I antigen comprising HLA-A*11:01 and the restricted peptide Val Val Val Gly Ala Val Gly Val Gly Lys. In some embodiments of the ABP, the antigen comprises HLA-A*02:01 and the restricted peptide Lys Leu Val Val Val Gly Ala Cys Gly Val. In some embodiments of the ABP, the antigen comprises HLA-A*11:01 and the restricted peptide Val Val Val Gly Ala Asp Gly Val Gly Lys. In some embodiments of the ABP, the antigen comprises HLA-A*11:01 and the restricted peptide Val Val Val Gly Ala Val Gly Val Gly Lys.

[0224] In some embodiments of an ABP that binds to a RAS_G12C MHC Class I antigen comprising HLA-A*02:01 and the restricted peptide Lys Leu Val Val Val Gly Ala Cys Gly Val, the ABP binds to such RAS_G12 MHC Class I antigen at a higher affinity than a RAS_G12C MHC Class I antigen comprising the restricted peptide Lys Leu Val Val Val Gly Ala Cys Gly Val and a different HLA subtype. In some embodiments, the ABP binds to such RAS_G12 MHC Class I antigen at a higher affinity than a RAS_G12C MHC Class I antigen comprising the restricted peptide Lys Leu Val Val Val Gly Ala Cys Gly Val and a different HLA-A2 subtype. In some embodiments, the ABP does not bind to a RAS_G12C MHC Class I antigen comprising the restricted peptide Lys Leu Val Val Val Gly Ala Cys Gly Val and a different HLA-A2 subtype.

[0225] In some embodiments of an ABP that binds to an antigen comprising a particular RAS G12 mutation, the ABP does not binds to the particular antigen at a lower affinity than an antigen comprising a different RAS G12 mutation. For example, an ABP that binds to a RAS_G12C MHC Class I antigen comprising HLA-A*02:01 and the restricted peptide Lys Leu Val Val Val Gly Ala Cys Gly Val does not bind to that RAS_G12C MHC Class I antigen at a lower affinity than an antigen comprising a different RAS G12 mutation. In some embodiments of an ABP that binds to an antigen comprising a particular RAS G12 mutation, the ABP binds to the particular antigen at a higher affinity than an antigen comprising a different RAS G12 mutation. For example, an ABP that binds to a RAS_G12C MHC Class I antigen comprising HLA-A*02:01 and the restricted peptide Lys Leu Val Val Val Gly Ala Cys Gly Val may bind to that RAS_G12C MHC Class I antigen at a higher affinity than an antigen comprising a different RAS G12 mutation. In some embodiments, the ABP binds a RAS_G12C MHC Class I antigen comprising HLA-A*02:01 and the restricted peptide Lys Leu Val Val Val Gly Ala Cys Gly Val at a higher affinity than an antigen comprising the restricted peptide KLVVVGAVGV and an HLA-A2 molecule. In particular embodiments, such ABP does not bind to an antigen comprising the restricted peptide KLVVVGAVGV and an HLA-A2 molecule.

[0226] In some embodiments, the higher affinity is at least 2-fold, at least 5-fold, or at least 10-fold.

[0227] Affinity differences can be determined by any means known in the art. In some embodiments, such affinity differences are assessed by MSD-ECL, SPR, BLI, or flow cytometry.

[0228] In some embodiments, an ABP is an ABP that competes with an illustrative ABP provided herein. In some aspects, the ABP that competes with the illustrative ABP provided herein binds the same epitope as an illustrative ABP provided herein.

[0229] In some embodiments, the ABPs described herein are referred to herein as “variants.” In some embodiments, a variant is derived from any of the sequences provided herein, wherein one or more conservative amino acid substitutions are made. Conservative amino acid substitutions are described herein. In preferred embodiments, the non-conservative amino acid substitution does not interfere with or inhibit the biological activity of the functional variant. In yet more preferred embodiments, the non-conservative amino acid substitution enhances the biological activity of the functional variant, such that the biological activity of the functional variant is increased as compared to the parent ABP.

[0230] TCRs

[0231] In an aspect, the ABPs provided herein, e.g., ABPs that specifically bind HLA-PEPTIDE targets disclosed herein, include T cell receptors (TCRs). The TCRs may be isolated and purified.

[0232] In a majority of T-cells, the TCR is a heterodimer polypeptide having an alpha (α) chain and beta-(β) chain, encoded by TRA and TRB, respectively. The alpha chain generally comprises an alpha variable region, encoded by TRAV, an alpha joining region, encoded by TRAJ, and an alpha constant region, encoded by TRAC. The beta chain generally comprises a beta variable region, encoded by TRBV, a beta diversity region, encoded by TRBD, a beta joining region, encoded by TRBJ, and a beta constant region, encoded by TRBC. The TCR-alpha chain is generated by VJ recombination of alpha V and J segments, and the beta chain receptor is generated by V(D)J recombination of beta V, D, and J segments. Additional TCR diversity stems from junctional diversity. Several bases may be deleted and others added (called N and P nucleotides) at each of the junctions. In a minority of T-cells, the TCRs include gamma and delta chains. The TCR gamma chain is generated by VJ recombination, and the TCR delta chain is generated by V(D)J recombination (Kenneth Murphy, Paul Travers, and Mark Walport, Janeway's Immunology 7th edition, Garland Science, 2007, which is herein incorporated by reference in its entirety). The antigen binding site of a TCR generally comprises six complementarity determining regions (CDRs). The alpha chain contributes three CDRs, alpha (“α”) CDR1, αCDR2, and αCDR3. The beta chain also contributes three CDR: beta (“β”) CDR1, βCDR2, and βCDR3. In general, the αCDR3 and βCDR3 are the regions most affected by V(D)J recombination and account for most of the variation in a TCR repertoire.

[0233] TCRs can specifically recognize HLA-PEPTIDE targets, such as an HLA-PEPTIDE target disclosed in Table 7, Table A, the AACR GENIE Results, or SEQ ID NOs 29358-29364 described herein (SEQ ID NOs: 10,755-29,364); thus TCRs can be ABPs that specifically bind to HLA-PEPTIDE. TCRs can be soluble, e.g., similar to an antibody secreted by a B cell. TCRs can also be membrane-bound, e.g., on a cell such as a T cell or natural killer (NK) cell. Thus, TCRs can be used in a context that corresponds to soluble antibodies and/or membrane-bound CARs.

[0234] Any of the TCRs disclosed herein may comprise an alpha variable (“V”) segment, an alpha joining (“J”) segment, optionally an alpha constant region, a beta variable (“V”) segment, optionally a beta diversity (“D”) segment, a beta joining (“J”) segment, and optionally a beta constant region.

[0235] In some embodiments, the TCR or CAR is a recombinant TCR or CAR. The recombinant TCR or CAR may include any of the TCRs identified herein but include one or more modifications. Exemplary modifications, e.g., amino acid substitutions, are described herein. Amino acid substitutions described herein may be made with reference to IMGT nomenclature and amino acid numbering as found at www.imgt.org.

[0236] The recombinant TCR or CAR may be a human TCR or CAR, comprising fully human sequences, e.g., natural human sequences. The recombinant TCR or CAR may retain its natural human variable domain sequences but contain modifications to the a constant region, β constant region, or both α and β constant regions. Such modifications to the TCR constant regions may improve TCR assembly and expression for TCR gene therapy by, e.g., driving preferential pairings of the exogenous TCR chains.

[0237] In some embodiments, the α and β constant regions are modified by substituting the entire human constant region sequences for mouse constant region sequences. Such “murinized” TCRs and methods of making them are described in Cancer Res. 2006 Sep. 1; 66(17):8878-86, which is hereby incorporated by reference in its entirety.

[0238] In some embodiments, the α and β constant regions are modified by making one or more amino acid substitutions in the human TCR α constant (TRAC) region, the TCR β constant (TRBC) region, or the TRAC and TRAB regions, which swap particular human residues for murine residues (human→murine amino acid exchange). The one or more amino acid substitutions in the TRAC region may include a Ser substitution at residue 90, an Asp substitution at residue 91, a Val substitution at residue 92, a Pro substitution at residue 93, or any combination thereof. The one or more amino acid substitutions in the human TRBC region may include a Lys substitution at residue 18, an Ala substitution at residue 22, an Ile substitution at residue 133, a His substitution at residue 139, or any combination of the above. Such targeted amino acid substitutions are described in J Immunol Jun. 1, 2010, 184 (11) 6223-6231, which is hereby incorporated by reference in its entirety.

[0239] In some embodiments, the human TRAC contains an Asp substitution at residue 210 and the human TRBC contains a Lys substitution at residue 134. Such substitutions may promote the formation of a salt bridge between the alpha and beta chains and formation of the TCR interchain disulfide bond. These targeted substitutions are described in J Immunol Jun. 1, 2010, 184 (11) 6232-6241, which is hereby incorporated by reference in its entirety.

[0240] In some embodiments, the human TRAC and human TRBC regions are modified to contain introduced cysteines which may improve preferential pairing of the exogenous TCR chains through formation of an additional disulfide bond. For example, the human TRAC may contain a Cys substitution at residue 48 and the human TRBC may contain a Cys substitution at residue 57, described in Cancer Res. 2007 Apr. 15; 67(8):3898-903 and Blood. 2007 Mar. 15; 109(6):2331-8, which are hereby incorporated by reference in their entirety.

[0241] The recombinant TCR or CAR may comprise other modifications to the α and 3 chains.

[0242] In some embodiments, the α and β chains are modified by linking the extracellular domains of the α and β chains to a complete human CD3((CD3-zeta) molecule. Such modifications are described in J Immunol Jun. 1, 2008, 180 (11) 7736-7746; Gene Ther. 2000 August; 7(16):1369-77; and The Open Gene Therapy Journal, 2011, 4: 11-22, which are hereby incorporated by reference in their entirety.

[0243] In some embodiments, the α chain is modified by introducing hydrophobic amino acid substitutions in the transmembrane region of the α chain, as described in J Immunol Jun. 1, 2012, 188 (11) 5538-5546; hereby incorporated by reference in their entirety.

[0244] The alpha or beta chain may be modified by altering any one of the N-glycosylation sites in the amino acid sequence, as described in J Exp Med. 2009 Feb. 16; 206(2): 463-475; hereby incorporated by reference in its entirety.

[0245] The alpha and beta chain may each comprise a dimerization domain, e.g., a heterologous dimerization domain. Such a heterologous domain may be a leucine zipper, a 5H3 domain or hydrophobic proline rich counter domains, or other similar modalities, as known in the art. In one example, the alpha and beta chains may be modified by introducing 30mer segments to the carboxyl termini of the alpha and beta extracellular domains, wherein the segments selectively associate to form a stable leucine zipper. Such modifications are described in PNAS Nov. 22, 1994. 91 (24) 11408-11412; https://doi.org/10.1073/pnas. 91.24.11408; hereby incorporated by reference in its entirety.

[0246] TCRs identified herein may be modified to include mutations that result in increased affinity or half-life, such as those described in WO2012/013913, hereby incorporated by reference in its entirety.

[0247] The recombinant TCR or CAR may be a single chain TCR (scTCR). Such scTCR may comprise an α chain variable region sequence fused to the N terminus of a TCR α chain constant region extracellular sequence, a TCR β chain variable region fused to the N terminus of a TCR β chain constant region extracellular sequence, and a linker sequence linking the C terminus of the a segment to the N terminus of the β segment, or vice versa. In some embodiments, the constant region extracellular sequences of the α and β segments of the scTCR are linked by a disulfide bond. In some embodiments, the length of the linker sequence and the position of the disulfide bond being such that the variable region sequences of the α and β segments are mutually orientated substantially as in native a T cell receptors. Exemplary scTCRs are described in U.S. Pat. No. 7,569,664, which is hereby incorporated by reference in its entirety.

[0248] In some cases, the variable regions of the scTCR may be covalently joined by a short peptide linker, such as described in Gene Therapy volume 7, pages 1369-1377 (2000). The short peptide linker may be a serine rich or glycine rich linker. For example, the linker may be (Gly₄Ser)₃, as described in Cancer Gene Therapy (2004) 11, 487-496, incorporated by reference in its entirety.

[0249] The recombinant TCR or antigen binding fragment thereof may be expressed as a fusion protein. For instance, the TCR or antigen binding fragment thereof may be fused with a toxin. Such fusion proteins are described in Cancer Res. 2002 Mar. 15; 62(6):1757-60. The TCR or antigen binding fragment thereof may be fused with an antibody Fc region. Such fusion proteins are described in J Immunol May 1, 2017, 198 (1 Supplement) 120.9.

[0250] The antigen recognition domain of a receptor such as a TCR or CAR can be linked to one or more intracellular signaling components, such as signaling components that mimic activation through an antigen receptor complex, such as a TCR complex and/or signal via another cell surface receptor. For example, the HLA-PEPTIDE-specific binding component (e.g., an ABP such as a TCR) can be linked to one or more transmembrane and/or intracellular signaling domains. In some embodiments, the transmembrane domain is fused to the extracellular domain. In one embodiment, a transmembrane domain that naturally is associated with one of the domains in the receptor, e.g., CAR, is used. In some instances, the transmembrane domain is selected or modified by amino acid substitution to avoid binding of such domains to the transmembrane domains of the same or different surface membrane proteins to minimize interactions with other members of the receptor complex.

[0251] The transmembrane domain in some embodiments is derived either from a natural or from a synthetic source. Where the source is natural, the domain in some aspects is derived from any membrane-bound or transmembrane protein. Transmembrane regions include those derived from (i.e. comprise at least the transmembrane region(s) of) the alpha, beta or zeta chain of the T-cell receptor, CD28, CD3 epsilon, CD45, CD4, CD5, CDS, CD9, CD 16, CD22, CD33, CD37, CD64, CD80, CD86, CD 134, CD137, and/or CD 154. Alternatively the transmembrane domain in some embodiments is synthetic. In some aspects, the synthetic transmembrane domain comprises predominantly hydrophobic residues such as leucine and valine. In some aspects, a triplet of phenylalanine, tryptophan and valine will be found at each end of a synthetic transmembrane domain. In some embodiments, the linkage is by linkers, spacers, and/or transmembrane domain(s).

[0252] Among the intracellular signaling domains are those that mimic or approximate a signal through a natural antigen receptor, a signal through such a receptor in combination with a costimulatory receptor, and/or a signal through a costimulatory receptor alone. In some embodiments, a short oligo- or polypeptide linker, for example, a linker of between 2 and 10 amino acids in length, such as one containing glycines and serines, e.g., glycine-serine doublet, is present and forms a linkage between the transmembrane domain and the cytoplasmic signaling domain of the receptor.

[0253] The receptor, e.g., the TCR or CAR, can include at least one intracellular signaling component or components. In some embodiments, the receptor includes an intracellular component of a TCR complex, such as a TCR CD3 chain that mediates T-cell activation and cytotoxicity, e.g., CD3 zeta chain. For example, the HLA-PEPTIDE-binding ABP (e.g., a TCR or CAR) is linked to one or more cell signaling modules. In some embodiments, cell signaling modules include CD3 transmembrane domain, CD3 intracellular signaling domains, and/or other CD transmembrane domains. In some embodiments, the receptor, e.g., a TCR or CAR, further includes a portion of one or more additional molecules such as Fc receptor-gamma, CD8, CD4, CD25, or CD16. For example, in some aspects, the TCR or CAR includes a chimeric molecule between CD3-zeta or Fc receptor-gamma and CD8, CD4, CD25 or CD16.

[0254] In some embodiments, upon ligation of the TCR or CAR, the cytoplasmic domain or intracellular signaling domain of the receptor activates at least one of the normal effector functions or responses of the immune cell, e.g., T cell engineered to express the receptor. For example, in some contexts, the receptor induces a function of a T cell such as cytolytic activity or T-helper activity, such as secretion of cytokines or other factors. In some embodiments, a truncated portion of an intracellular signaling domain of an antigen receptor component or costimulatory molecule is used in place of an intact immunostimulatory chain, for example, if it transduces the effector function signal. In some embodiments, the intracellular signaling domain or domains include the cytoplasmic sequences of the T cell receptor (TCR), and in some aspects also those of co-receptors that in the natural context act in concert with such receptor to initiate signal transduction following antigen receptor engagement, and/or any derivative or variant of such molecules, and/or any synthetic sequence that has the same functional capability.

[0255] In the context of a natural TCR, full activation generally requires not only signaling through the TCR, but also a costimulatory signal. Thus, in some embodiments, to promote full activation, a component for generating secondary or co-stimulatory signal is also included in the receptor. In other embodiments, the receptor does not include a component for generating a costimulatory signal. In some aspects, an additional receptor is expressed in the same cell and provides the component for generating the secondary or costimulatory signal.

[0256] T cell activation is in some aspects described as being mediated by two classes of cytoplasmic signaling sequences: those that initiate antigen-dependent primary activation through the TCR (primary cytoplasmic signaling sequences), and those that act in an antigen-independent manner to provide a secondary or co-stimulatory signal (secondary cytoplasmic signaling sequences). In some aspects, the receptor includes one or both of such signaling components.

[0257] In some aspects, the receptor includes a primary cytoplasmic signaling sequence that regulates primary activation of the TCR complex. Primary cytoplasmic signaling sequences that act in a stimulatory manner may contain signaling motifs which are known as immunoreceptor tyrosine-based activation motifs or ITAMs. Examples of ITAM containing primary cytoplasmic signaling sequences include those derived from TCR or CD3 zeta, FcR gamma, FcR beta, CD3 gamma, CD3 delta, CD3 epsilon, CDS, CD22, CD79a, CD79b, and CD66d. In some embodiments, cytoplasmic signaling molecule(s) in the CAR contain(s) a cytoplasmic signaling domain, portion thereof, or sequence derived from CD3 zeta.

[0258] In some embodiments, the receptor includes a signaling domain and/or transmembrane portion of a costimulatory receptor, such as CD28, 4-1BB, OX40, DAP10, and ICOS. In some aspects, the same receptor includes both the activating and costimulatory components.

[0259] In some embodiments, the activating domain is included within one receptor, whereas the costimulatory component is provided by another receptor recognizing another antigen. In some embodiments, the receptors include activating or stimulatory receptors, and costimulatory receptors, both expressed on the same cell (see WO2014/055668). In some aspects, the HLA-PEPTIDE-targeting receptor is the stimulatory or activating receptor; in other aspects, it is the costimulatory receptor. In some embodiments, the cells further include inhibitory receptors (e.g., iCARs, see Fedorov et al., Sci. Transl. Medicine, 5(215) (December, 2013), such as a receptor recognizing an antigen other than HLA-PEPTIDE, whereby an activating signal delivered through the HLA-PEPTIDE-targeting receptor is diminished or inhibited by binding of the inhibitory receptor to its ligand, e.g., to reduce off-target effects.

[0260] In certain embodiments, the intracellular signaling domain comprises a CD28 transmembrane and signaling domain linked to a CD3 (e.g., CD3-zeta) intracellular domain. In some embodiments, the intracellular signaling domain comprises a chimeric CD28 and CD137 (4-1BB, TNFRSF9) co-stimulatory domains, linked to a CD3 zeta intracellular domain.

[0261] In some embodiments, the receptor encompasses one or more, e.g., two or more, costimulatory domains and an activation domain, e.g., primary activation domain, in the cytoplasmic portion. Exemplary receptors include intracellular components of CD3-zeta, CD28, and 4-1BB.

[0262] In some embodiments, the CAR (or other antigen receptor such as a TCR) further includes a marker, such as a cell surface marker, which may be used to confirm transduction or engineering of the cell to express the receptor, such as a truncated version of a cell surface receptor, such as truncated EGFR (tEGFR). In some aspects, the marker includes all or part (e.g., truncated form) of CD34, a nerve growth factor receptor (NGFR), or epidermal growth factor receptor (e.g., tEGFR). In some embodiments, the nucleic acid encoding the marker is operably linked to a polynucleotide encoding for a linker sequence, such as a cleavable linker sequence or a ribosomal skip sequence, e.g., T2A. See WO2014031687. In some embodiments, introduction of a construct encoding the CAR and EGFRt separated by a T2A ribosome switch can express two proteins from the same construct, such that the EGFRt can be used as a marker to detect cells expressing such construct. In some embodiments, a marker, and optionally a linker sequence, can be any as disclosed in published patent application No. WO2014031687. For example, the marker can be a truncated EGFR (tEGFR) that is, optionally, linked to a linker sequence, such as a T2A ribosomal skip sequence.

[0263] In some embodiments, the marker is a molecule, e.g., cell surface protein, not naturally found on T cells or not naturally found on the surface of T cells, or a portion thereof.

[0264] In some embodiments, the molecule is a non-self molecule, e.g., non-self protein, i.e., one that is not recognized as “self” by the immune system of the host into which the cells will be adoptively transferred.

[0265] In some embodiments, the marker serves no therapeutic function and/or produces no effect other than to be used as a marker for genetic engineering, e.g., for selecting cells successfully engineered. In other embodiments, the marker may be a therapeutic molecule or molecule otherwise exerting some desired effect, such as a ligand for a cell to be encountered in vivo, such as a costimulatory or immune checkpoint molecule to enhance and/or dampen responses of the cells upon adoptive transfer and encounter with ligand.

[0266] The TCR or CAR may comprise one or modified synthetic amino acids in place of one or more naturally-occurring amino acids. Exemplary modified amino acids include, but are not limited to, aminocyclohexane carboxylic acid, norleucine, α-amino n-decanoic acid, homoserine, S-acetylaminomethylcysteine, trans-3- and trans-4-hydroxyproline, 4-aminophenylalanine, 4- nitrophenylalanine, 4-chlorophenylalanine, 4-carboxyphenylalanine, (3-phenylserine (3-hydroxyphenylalanine, phenylglycine, α-naphthylalanine, cyclohexylalanine, cyclohexylglycine, indoline-2-carboxylic acid, 1,2,3,4-tetrahydroisoquinoline-3-carboxylic acid, aminomalonic acid, aminomalonic acid monoamide, N′-benzyl-N’-methyl-lysine, N′,N′-dibenzyl-lysine, 6- hydroxylysine, omithine, α-aminocyclopentane carboxylic acid, α-aminocyclohexane carboxylic acid, α-aminocycloheptane carboxylic acid, α-(2-amino-2-norbomane)-carboxylic acid, α,γ-diaminobutyric acid, α,γ-diaminopropionic acid, homophenylalanine, and α-tertbutylglycine.

[0267] In some cases, CARs are referred to as first, second, and/or third generation CARs. In some aspects, a first generation CAR is one that solely provides a CD3-chain induced signal upon antigen binding; in some aspects, a second-generation CARs is one that provides such a signal and costimulatory signal, such as one including an intracellular signaling domain from a costimulatory receptor such as CD28 or CD137; in some aspects, a third generation CAR in some aspects is one that includes multiple costimulatory domains of different costimulatory receptors.

[0268] In some embodiments, the chimeric antigen receptor includes an extracellular portion containing a TCR or fragment described herein. In some aspects, the chimeric antigen receptor includes an extracellular portion containing a TCR or fragment described herein and an intracellular signaling domain. In some embodiments, the intracellular domain contains an ITAM. In some aspects, the intracellular signaling domain includes a signaling domain of a zeta chain of a CD3-zeta (CD3) chain. In some embodiments, the chimeric antigen receptor includes a transmembrane domain linking the extracellular domain and the intracellular signaling domain.

[0269] In some aspects, the transmembrane domain contains a transmembrane portion of CD28. The extracellular domain and transmembrane can be linked directly or indirectly. In some embodiments, the extracellular domain and transmembrane are linked by a spacer, such as any described herein. In some embodiments, the chimeric antigen receptor contains an intracellular domain of a T cell costimulatory molecule, such as between the transmembrane domain and intracellular signaling domain. In some aspects, the T cell costimulatory molecule is CD28 or 41BB.

[0270] In some embodiments, the CAR contains a TCR, e.g., a TCR fragment, a transmembrane domain that is or contains a transmembrane portion of CD28 or a functional variant thereof, and an intracellular signaling domain containing a signaling portion of CD28 or functional variant thereof and a signaling portion of CD3 zeta or functional variant thereof. In some embodiments, the CAR contains a TCR, e.g., a TCR fragment, a transmembrane domain that is or contains a transmembrane portion of CD28 or a functional variant thereof, and an intracellular signaling domain containing a signaling portion of a 4-1BB or functional variant thereof and a signaling portion of CD3 zeta or functional variant thereof. In some such embodiments, the receptor further includes a spacer containing a portion of an Ig molecule, such as a human Ig molecule, such as an Ig hinge, e.g. an IgG4 hinge, such as a hinge-only spacer.

[0271] In some embodiments, the transmembrane domain of the receptor, e.g., the TCR or CAR, is a transmembrane domain of human CD28 or variant thereof, e.g., a 27-amino acid transmembrane domain of a human CD28 (Accession No.: P10747.1).

[0272] In some embodiments, the chimeric antigen receptor contains an intracellular domain of a T cell costimulatory molecule. In some aspects, the T cell costimulatory molecule is CD28 or 41BB.

[0273] In some embodiments, the intracellular signaling domain comprises an intracellular costimulatory signaling domain of human CD28 or functional variant or portion thereof, such as a 41 amino acid domain thereof and/or such a domain with an LL to GG substitution at positions 186-187 of a native CD28 protein. In some embodiments, the intracellular domain comprises an intracellular costimulatory signaling domain of 41BB or functional variant or portion thereof, such as a 42-amino acid cytoplasmic domain of a human 4-1BB (Accession No. Q07011.1) or functional variant or portion thereof.

[0274] In some embodiments, the intracellular signaling domain comprises a human CD3 zeta stimulatory signaling domain or functional variant thereof, such as a 112 AA cytoplasmic domain of isoform 3 of human CD3.zeta. (Accession No.: P20963.2) or a CD3 zeta signaling domain as described in U.S. Pat. No. 7,446,190 or 8,911,993.

[0275] In some aspects, the spacer contains only a hinge region of an IgG, such as only a hinge of IgG4 or IgG1. In other embodiments, the spacer is an Ig hinge, e.g., and IgG4 hinge, linked to a CH2 and/or CH3 domains. In some embodiments, the spacer is an Ig hinge, e.g., an IgG4 hinge, linked to CH2 and CH3 domains. In some embodiments, the spacer is an Ig hinge, e.g., an IgG4 hinge, linked to a CH3 domain only. In some embodiments, the spacer is or comprises a glycine-serine rich sequence or other flexible linker such as known flexible linkers.

[0276] For example, in some embodiments, the CAR includes a TCR or fragment thereof, such as any of the HLA-PEPTIDE specific TCRs, a spacer such as any of the Ig-hinge containing spacers, a CD28 transmembrane domain, a CD28 intracellular signaling domain, and a CD3 zeta signaling domain. In some embodiments, the CAR includes a TCR or fragment, such as any of the HLA-PEPTIDE specific TCRs, a spacer such as any of the Ig-hinge containing spacers, a CD28 transmembrane domain, a CD28 intracellular signaling domain, and a CD3 zeta signaling domain.

[0277] Nucleotides, Vectors, Host Cells, and Related Methods

[0278] Also provided are isolated nucleic acids encoding the ABPs or antigens disclosed herein, vectors comprising the nucleic acids, and host cells comprising the vectors and nucleic acids, as well as recombinant techniques for the production of the ABPs.

[0279] The nucleic acids may be recombinant. The recombinant nucleic acids may be constructed outside living cells by joining natural or synthetic nucleic acid segments to nucleic acid molecules that can replicate in a living cell, or replication products thereof. For purposes herein, the replication can be in vitro replication or in vivo replication.

[0280] For recombinant production of an ABP, the nucleic acid(s) encoding it may be isolated and inserted into a replicable vector for further cloning (i.e., amplification of the DNA) or expression. In some aspects, the nucleic acid may be produced by homologous recombination, for example as described in U.S. Pat. No. 5,204,244, incorporated by reference in its entirety.

[0281] Many different vectors are known in the art. The vector components generally include one or more of the following: a signal sequence, an origin of replication, one or more marker genes, an enhancer element, a promoter, and a transcription termination sequence, for example as described in U.S. Pat. No. 5,534,615, incorporated by reference in its entirety.

[0282] Exemplary vectors or constructs suitable for expressing an ABP, e.g., a CAR, or antigen binding fragment thereof, include, e.g., the pUC series (Fermentas Life Sciences), the pBluescript series (Stratagene, LaJolla, Calif.), the pET series (Novagen, Madison, Wis.), the pGEX series (Pharmacia Biotech, Uppsala, Sweden), and the pEX series (Clontech, Palo Alto, Calif.). Bacteriophage vectors, such as AGT1O, AGT11, AZapII (Stratagene), AEMBL4, and ANMI 149, are also suitable for expressing an ABP disclosed herein.

[0283] Illustrative examples of suitable host cells are provided below. These host cells are not meant to be limiting, and any suitable host cell may be used to produce the ABPs provided herein.

[0284] Suitable host cells include any prokaryotic (e.g., bacterial), lower eukaryotic (e.g., yeast), or higher eukaryotic (e.g., mammalian) cells. Suitable prokaryotes include eubacteria, such as Gram-negative or Gram-positive organisms, for example, Enterobacteriaceae such as Escherichia (E. coli), Enterobacter, Erwinia, Klebsiella, Proteus, Salmonella (S. typhimurium), Serratia (S. marcescans), Shigella, Bacilli (B. subtilis and B. licheniformis), Pseudomonas (P. aeruginosa), and Streptomyces. One useful E. coli cloning host is E. coli 294, although other strains such as E. coli B, E. coli X1776, and E. coli W3110 are also suitable.

[0285] In addition to prokaryotes, eukaryotic microbes such as filamentous fungi or yeast are also suitable cloning or expression hosts for ABP-encoding vectors. Saccharomyces cerevisiae, or common baker's yeast, is a commonly used lower eukaryotic host microorganism. However, a number of other genera, species, and strains are available and useful, such as Schizosaccharomyces pombe, Kluyveromyces (K lactis, K. fragilis, K. bulgaricus K. wickeramii, K. waltii, K. drosophilarum, K. thermotolerans, and K. marxianus), Yarrowia, Pichia pastoris, Candida (C. albicans), Trichoderma reesia, Neurospora crassa, Schwanniomyces (S. occidentalis), and filamentous fungi such as, for example Penicillium, Tolypocladium, and Aspergillus (A. nidulans and A. niger).

[0286] Useful mammalian host cells include COS-7 cells, HEK293 cells; baby hamster kidney (BHK) cells; Chinese hamster ovary (CHO); mouse sertoli cells; African green monkey kidney cells (VERO-76), and the like.

[0287] The host cells used to produce the HLA-PEPTIDE ABP may be cultured in a variety of media. Commercially available media such as, for example, Ham's F10, Minimal Essential Medium (MEM), RPMI-1640, and Dulbecco's Modified Eagle's Medium (DMEM) are suitable for culturing the host cells. In addition, any of the media described in Ham et al., Meth. Enz., 1979, 58:44; Barnes et al., Anal. Biochem., 1980, 102:255; and U.S. Pat. Nos. 4,767,704, 4,657,866, 4,927,762, 4,560,655, and 5,122,469; or WO 90/03430 and WO 87/00195 may be used. Each of the foregoing references is incorporated by reference in its entirety.

[0288] Any of these media may be supplemented as necessary with hormones and/or other growth factors (such as insulin, transferrin, or epidermal growth factor), salts (such as sodium chloride, calcium, magnesium, and phosphate), buffers (such as HEPES), nucleotides (such as adenosine and thymidine), antibiotics, trace elements (defined as inorganic compounds usually present at final concentrations in the micromolar range), and glucose or an equivalent energy source. Any other necessary supplements may also be included at appropriate concentrations that would be known to those skilled in the art.

[0289] The culture conditions, such as temperature, pH, and the like, are those previously used with the host cell selected for expression, and will be apparent to the ordinarily skilled artisan.

[0290] When using recombinant techniques, the ABP can be produced intracellularly, in the periplasmic space, or directly secreted into the medium. If the ABP is produced intracellularly, as a first step, the particulate debris, either host cells or lysed fragments, is removed, for example, by centrifugation or ultrafiltration. For example, Carter et al. (Bio Technology, 1992, 10:163-167, incorporated by reference in its entirety) describes a procedure for isolating ABPs which are secreted to the periplasmic space of E. coli. Briefly, cell paste is thawed in the presence of sodium acetate (pH 3.5), EDTA, and phenylmethylsulfonylfluoride (PMSF) over about 30 min. Cell debris can be removed by centrifugation.

[0291] In some embodiments, the ABP is produced in a cell-free system. In some aspects, the cell-free system is an in vitro transcription and translation system as described in Yin et al., mAbs, 2012, 4:217-225, incorporated by reference in its entirety. In some aspects, the cell-free system utilizes a cell-free extract from a eukaryotic cell or from a prokaryotic cell. In some aspects, the prokaryotic cell is E. coli. Cell-free expression of the ABP may be useful, for example, where the ABP accumulates in a cell as an insoluble aggregate, or where yields from periplasmic expression are low.

[0292] Where the ABP is secreted into the medium, supernatants from such expression systems are generally first concentrated using a commercially available protein concentration filter, for example, an Amicon® or Millipore® Pellcon® ultrafiltration unit. A protease inhibitor such as PMSF may be included in any of the foregoing steps to inhibit proteolysis and antibiotics may be included to prevent the growth of adventitious contaminants.

[0293] The ABP composition prepared from the cells can be purified using, for example, hydroxylapatite chromatography, gel electrophoresis, dialysis, and affinity chromatography, with affinity chromatography being a particularly useful purification technique. The suitability of protein A as an affinity ligand depends on the species and isotype of any immunoglobulin Fc domain that is present in the ABP. Protein A can be used to purify ABPs that comprise human γ1, γ2, or γ4 heavy chains (Lindmark et al., J. Immunol. Meth., 1983, 62:1-13, incorporated by reference in its entirety). Protein G is useful for all mouse isotypes and for human γ3 (Guss et al., EMBO J., 1986, 5:1567-1575, incorporated by reference in its entirety).

[0294] The matrix to which the affinity ligand is attached is most often agarose, but other matrices are available. Mechanically stable matrices such as controlled pore glass or poly(styrenedivinyl)benzene allow for faster flow rates and shorter processing times than can be achieved with agarose. Where the ABP comprises a CH3 domain, the BakerBond ABX® resin is useful for purification.

[0295] Other techniques for protein purification, such as fractionation on an ion-exchange column, ethanol precipitation, Reverse Phase HPLC, chromatography on silica, chromatography on heparin Sepharose*, chromatofocusing, SDS-PAGE, and ammonium sulfate precipitation are also available, and can be applied by one of skill in the art.

[0296] Following any preliminary purification step(s), the mixture comprising the ABP of interest and contaminants may be subjected to low pH hydrophobic interaction chromatography using an elution buffer at a pH between about 2.5 to about 4.5, generally performed at low salt concentrations (e.g., from about 0 to about 0.25 M salt).

[0297] Methods of Making HLA-PEPTIDE ABPs

### HLA-PEPTIDE Antigen Preparation

[0298] The HLA-PEPTIDE antigen used for isolation or creation of the ABPs provided herein may be intact HLA-PEPTIDE or a fragment of HLA-PEPTIDE. The HLA-PEPTIDE antigen may be, for example, in the form of isolated protein or a protein expressed on the surface of a cell.

[0299] In some embodiments, the HLA-PEPTIDE antigen is anon-naturally occurring variant of HLA-PEPTIDE, such as a HLA-PEPTIDE protein having an amino acid sequence or post-translational modification that does not occur in nature.

[0300] In some embodiments, the HLA-PEPTIDE antigen is truncated by removal of, for example, intracellular or membrane-spanning sequences, or signal sequences. In some embodiments, the HLA-PEPTIDE antigen is fused at its C-terminus to a human IgG1 Fc domain or a polyhistidine tag.

[0301] Methods and Systems for Identifying ABPs

[0302] ABPs that bind HLA-PEPTIDE can be identified using any method known in the art, e.g., phage display, immunization of a subject, or isolation of an ABP expressing cell and subsequent sequencing of the ABP.

[0303] One method of identifying an antigen binding protein includes providing at least one HLA-PEPTIDE target; and binding the at least one target with an antigen binding protein, thereby identifying the antigen binding protein. The antigen binding protein can be present in a library comprising a plurality of distinct antigen binding proteins.

[0304] In some embodiments, the library is a phage display library. The phage display library can be developed so that it is substantially free of antigen binding proteins that non-specifically bind the HLA of the HLA-PEPTIDE target. The antigen binding protein can be present in a yeast display library comprising a plurality of distinct antigen binding proteins. The yeast display library can be developed so that it is substantially free of antigen binding proteins that non-specifically bind the HLA of the HLA-PEPTIDE target.

[0305] In some embodiments, the library is a yeast display library.

[0306] In some aspects, the binding step is performed more than once, optionally at least three times, e.g., at least 1, 2, 3, 4, 5, 6, 7, 8, 9, or 10×.

[0307] In addition, the method can also include contacting the antigen binding protein with one or more peptide-HLA complexes that are distinct from the HLA-PEPTIDE target to determine if the antigen binding protein selectively binds the HLA-PEPTIDE target.

[0308] Accordingly, provided herein are systems for identifying an ABP that selectively binds one or more antigens described herein. In some embodiments, the system comprises (a) an isolated antigen comprising an HLA-restricted peptide complexed with an HLA Class I molecule, wherein the HLA-restricted peptide is located in the peptide binding groove of an α1/α2 heterodimer portion of the HLA Class I molecule, and wherein the antigen is selected from an antigen described in any one of SEQ ID NOs:10,755 to 29,364; and (b) a library comprising a plurality of distinct antigen binding proteins. In some embodiments, the library is a phage display library.

[0309] In some embodiments of the system, the antigen is attached to a solid support. The solid support can comprise, e.g., a bead, well, membrane, tube, column, plate, sepharose, magnetic bead, cell, or chip. In some embodiments, the antigen comprises a first member of an affinity binding pair and the solid support comprises a second member of the affinity binding pair. In some embodiments, the first member is streptavidin and the second member is biotin. In some embodiments, the antigen attached to a solid support is an HLA-multimer (e.g., a tetramer) comprising at least one HLA-PEPTIDE target.

[0310] In some embodiments of the system, the library (e.g., the phage display library) is a human library. In some embodiments of the system, the library (e.g., the phage display library) is a humanized library.

[0311] In some embodiments, the system further comprises a negative control antigen comprising an HLA-restricted peptide complexed with an HLA Class I molecule, wherein the HLA-restricted peptide is located in the peptide binding groove of an α1/α2 heterodimer portion of the HLA Class I molecule, and wherein the negative control antigen comprises a different restricted peptide, a different HLA Class I molecule, or a different restricted peptide and a different HLA Class I molecule. In some embodiments, the negative control antigen comprises a different restricted peptide but the same HLA Class I molecule as the antigen.

[0312] In some embodiments, the system comprises a reaction mixture, the reaction mixture comprising the antigen and a plurality of phages from the phage display library.

[0313] Another method of identifying an antigen binding protein can include obtaining at least one HLA-PEPTIDE target; administering the HLA-PEPTIDE target to a subject (e.g., a mouse, rabbit or a llama), optionally in combination with an adjuvant; and isolating the antigen binding protein from the subject. Isolating the antigen binding protein can include screening the serum of the subject to identify the antigen binding protein. The method can also include contacting the antigen binding protein with one or more peptide-HLA complexes that are distinct from the HLA-PEPTIDE target, e.g., to determine if the antigen binding protein selectively binds to the HLA-PEPTIDE target. An antigen binding protein that is identified can be humanized.

[0314] In some aspects, isolating the antigen binding protein comprises isolating a T cell from the subject that expresses the antigen binding protein. The T cell can be used to create a hybridoma. The T cell can also be used for cloning one or more of its CDRs. The T cell can also be immortalized, for example, by using EBV transformation. Sequences encoding an antigen binding protein can be cloned from immortalized T cells or can be cloned directly from T cells isolated from an immunized subject. A library that comprises the antigen binding protein of the T cell can also be created, optionally wherein the library is phage display or yeast display.

[0315] Another method of identifying an antigen binding protein can include obtaining a cell comprising the antigen binding protein (ABP); contacting the cell with an HLA-multimer (e.g., a tetramer) comprising at least one HLA-PEPTIDE target; and identifying the antigen binding protein via binding between the HLA-multimer and the antigen binding protein.

[0316] Another method of identifying an antigen binding protein can include obtaining a cell comprising the antigen binding protein (ABP) and determining the sequence of the ABP. For example, the method can include contacting the cell with an HLA-multimer (e.g., a tetramer) comprising at least one HLA-PEPTIDE target; isolating the cell, optionally using flow cytometry (e.g. fluorescent activated cell sorting “FACS”), magnetic separation, or single cell separation; and sequencing polynucleotides from the isolated cell to determine the sequence of the ABP.

[0317] In some embodiments, isolation is carried out by enrichment for a particular cell population by positive selection, or depletion of a particular cell population, by negative selection. In some embodiments, positive or negative selection is accomplished by incubating cells with one or more antibodies or other binding agent that specifically bind to one or more surface markers expressed or expressed (marker+) at a relatively higher level (marker^{high}) on the positively or negatively selected cells, respectively. For example, a population of cells known or suspected to contain T cells can be positively sorted based on binding to a tetramer containing a HLA-PEPTIDE of interest (e.g., a neoantigen). FACS isolation can also include removing cells that bind to a HLA-PEPTIDE target that is not of interest. For example, cells can be positively sorted based on binding to a tetramer containing a HLA-PEPTIDE of interest (e.g., a neoantigen) and negatively sorted based on binding to a tetramer containing a HLA-PEPTIDE not of interest (e.g., the wildtype peptide sequence corresponding to a neoantigen of interest).

[0318] Isolation of cells expressing an ABP-containing protein (e.g, FACS-based isolation of T cells), can include isolation of subject-derived cells. Subject-derived cells can be isolated from a variety of biological samples including, but not limited to, body fluids, such as blood, plasma, serum, cerebrospinal fluid, synovial fluid, urine and sweat, tissue and organ samples. The biological sample can be a sample obtained directly from a biological source or a sample that is processed. The sample from which the subject-derived cells are derived or isolated can be a blood or a blood-derived sample, or can be derived from an apheresis or leukapheresis product. Exemplary samples include whole blood, peripheral blood mononuclear cells (PBMCs), leukocytes, bone marrow, thymus, tissue biopsy, tumor, leukemia, lymphoma, lymph node, gut associated lymphoid tissue, mucosa associated lymphoid tissue, spleen, other lymphoid tissues, liver, lung, stomach, intestine, colon, kidney, pancreas, breast, bone, prostate, cervix, testes, ovaries, tonsil, or other organ, and/or cells derived therefrom. Exemplary cells and cell populations expressing an ABP-containing protein include, but are not limited to, an activated T cell, a tumor infiltrating lymphocyte (TIL), a PBMC, a cultured (e.g., expanded) T cell, a naive T (TN) cell, an effector T cell (TEFF), a memory T cell, a stem cell memory T cell (TSCM), a central memory T cell (TCM), an effector memory T cell (TEM), a terminally differentiated effector memory T cell, an immature T cell, a mature T cell, a helper T cell, a cytotoxic T cell, a mucosa-associated invariant T (MALT) cell, a regulatory T cell (Treg), a TH1 cell, a TH2 cell, a TH3 cell, a TH17 cell, a TH9 cell, a TH22 cell, a follicular helper T cell, an natural killer T cell (NKT), an alpha-beta T cell, and a gamma-delta T cell.

[0319] Sequencing of cells expressing an ABP-containing protein can carried out by techniques known to those skilled in the art, such as the Chromium Single Cell Immune Profiling system (10× Genomics).

[0320] Another method of identifying an antigen binding protein can include obtaining one or more cells comprising the antigen binding protein; activating the one or more cells with at least one HLA-PEPTIDE target presented on at least one antigen presenting cell (APC); and identifying the antigen binding protein via selection of one or more cells activated by interaction with at least one HLA-PEPTIDE target.

[0321] The cell can be, e.g., a T cell, optionally a CTL, or an NK cell, for example. The method can further include isolating the cell, optionally using flow cytometry, magnetic separation, or single cell separation. The method can further include sequencing the antigen binding protein.

[0322] Methods for Engineering Cells with ABPs

[0323] Also provided are methods, nucleic acids, compositions, and kits, for expressing the ABPs, including receptors comprising TCRs, CARs, and the like, and for producing genetically engineered cells expressing such ABPs. The genetic engineering generally involves introduction of a nucleic acid encoding the recombinant or engineered component into the cell, such as by retroviral transduction, transfection, or transformation.

[0324] In some embodiments, gene transfer is accomplished by first stimulating the cell, such as by combining it with a stimulus that induces a response such as proliferation, survival, and/or activation, e.g., as measured by expression of a cytokine or activation marker, followed by transduction of the activated cells, and expansion in culture to numbers sufficient for clinical applications.

[0325] In some contexts, overexpression of a stimulatory factor (for example, a lymphokine or a cytokine) may be toxic to a subject. Thus, in some contexts, the engineered cells include segments that cause the cells to be susceptible to negative selection in vivo, such as upon administration in adoptive immunotherapy. For example in some aspects, the cells are engineered so that they can be eliminated as a result of a change in the in vivo condition of the patient to which they are administered. The negative selectable phenotype may result from the insertion of a gene that confers sensitivity to an administered agent, for example, a compound. Negative selectable genes include the Herpes simplex virus type I thymidine kinase (HSV-I TK) gene (Wigler et al., Cell II: 223, 1977) which confers ganciclovir sensitivity; the cellular hypoxanthine phosphribosyltransferase (HPRT) gene, the cellular adenine phosphoribosyltransferase (APRT) gene, bacterial cytosine deaminase, (Mullen et al., Proc. Natl. Acad. Sci. USA. 89:33 (1992)).

[0326] In some aspects, the cells are further engineered to promote expression of cytokines or other factors. Various methods for the introduction of genetically engineered components, such as antigen receptors (e.g., TCRs), are well known and may be used with the provided methods and compositions. Exemplary methods include those for transfer of nucleic acids encoding the receptors, including via viral, e.g., retroviral or lentiviral transduction, transposons, nuclease mediated gene-editing (e.g., CRISPR, TALEN, meganuclease, or ZFN editing systems), and electroporation. For example, nuclease mediated gene-editing, particularly for editing T cells, is described in more detail in international applications WO/2018/232356 and PCT/US2018/058230, herein incorporated by reference for all purposes.

[0327] In some embodiments, recombinant nucleic acids are transferred into cells using recombinant infectious virus particles, such as, e.g., vectors derived from simian virus 40 (SV40), adenoviruses, adeno-associated virus (AAV). In some embodiments, recombinant nucleic acids are transferred into T cells using recombinant lentiviral vectors or retroviral vectors, such as gamma-retroviral vectors (see, e.g., Koste et al. (2014) Gene Therapy 2014 Apr. 3. doi: 10.1038/gt. 2014.25; Carlens et al. (2000) Exp Hematol 28(10): 1137-46; Alonso-Camino et al. (2013) Mol Ther Nucl Acids 2, e93; Park et al., Trends Biotechnol. 2011 Nov. 29(11): 550-557.

[0328] In some embodiments, the retroviral vector has a long terminal repeat sequence (LTR), e.g., a retroviral vector derived from the Moloney murine leukemia virus (MoMLV), myeloproliferative sarcoma virus (MPSV), murine embryonic stem cell virus (MESV), murine stem cell virus (MSCV), spleen focus forming virus (SFFV), or adeno-associated virus (AAV). Most retroviral vectors are derived from murine retroviruses. In some embodiments, the retroviruses include those derived from any avian or mammalian cell source. The retroviruses typically are amphotropic, meaning that they are capable of infecting host cells of several species, including humans. In one embodiment, the gene to be expressed replaces the retroviral gag, pol and/or env sequences. A number of illustrative retroviral systems have been described (e.g., U.S. Pat. Nos. 5,219,740; 6,207,453; 5,219,740; Miller and Rosman (1989) BioTechniques 7:980-990; Miller, A. D. (1990) Human Gene Therapy 1:5-14; Scarpa et al. (1991) Virology 180:849-852; Burns et al. (1993) Proc. Natl. Acad. Sci. USA 90:8033-8037; and Boris-Lawrie and Temin (1993) Cur. Opin. Genet. Develop. 3:102-109.

[0329] Methods of lentiviral transduction are known. Exemplary methods are described in, e.g., Wang et al. (2012) J. Immunother. 35(9): 689-701; Cooper et al. (2003) Blood. 101:1637-1644; Verhoeyen et al. (2009) Methods Mol Biol. 506: 97-114; and Cavalieri et al. (2003) Blood. 102(2): 497-505.

[0330] In some embodiments, recombinant nucleic acids are transferred into T cells via electroporation (see, e.g., Chicaybam et al, (2013) PLoS ONE 8(3): e60298; Van Tedeloo et al. (2000) Gene Therapy 7(16): 1431-1437; and Roth et al. (2018) Nature 559:405-409). In some embodiments, recombinant nucleic acids are transferred into T cells via transposition (see, e.g., Manuri et al. (2010) Hum Gene Ther 21(4): 427-437; Sharma et al. (2013) Molec Ther Nucl Acids 2, e74; and Huang et al. (2009) Methods Mol Biol 506: 115-126). Other methods of introducing and expressing genetic material in immune cells include calcium phosphate transfection (e.g., as described in Current Protocols in Molecular Biology, John Wiley & Sons, New York. N.Y.), protoplast fusion, cationic liposome-mediated transfection; tungsten particle-facilitated microparticle bombardment (Johnston, Nature, 346: 776-777 (1990)); and strontium phosphate DNA co-precipitation (Brash et al., Mol. Cell Biol., 7: 2031-2034 (1987)).

[0331] Other approaches and vectors for transfer of the nucleic acids encoding the recombinant products are those described, e.g., in international patent application, Publication No.: WO2014055668, and U.S. Pat. No. 7,446,190.

[0332] Among additional nucleic acids, e.g., genes for introduction are those to improve the efficacy of therapy, such as by promoting viability and/or function of transferred cells; genes to provide a genetic marker for selection and/or evaluation of the cells, such as to assess in vivo survival or localization; genes to improve safety, for example, by making the cell susceptible to negative selection in vivo as described by Lupton S. D. et al., Mol. and Cell Biol., 11:6 (1991); and Riddell et al., Human Gene Therapy 3:319-338 (1992); see also the publications of PCT/US91/08442 and PCT/US94/05601 by Lupton et al. describing the use of bifunctional selectable fusion genes derived from fusing a dominant positive selectable marker with a negative selectable marker. See, e.g., Riddell et al., U.S. Pat. No. 6,040,177, at columns 14-17.

[0333] Preparation of Engineered Cells

[0334] In some embodiments, preparation of the engineered cells includes one or more culture and/or preparation steps. The cells for introduction of the HLA-PEPTIDE-ABP, e.g., TCRs, can be isolated from a sample, such as a biological sample, e.g., one obtained from or derived from a subject. In some embodiments, the subject from which the cell is isolated is one having the disease or condition or in need of a cell therapy or to which cell therapy will be administered. The subject in some embodiments is a human in need of a particular therapeutic intervention, such as the adoptive cell therapy for which cells are being isolated, processed, and/or engineered.

[0335] Accordingly, the cells in some embodiments are primary cells, e.g., primary human cells. The samples include tissue, fluid, and other samples taken directly from the subject, as well as samples resulting from one or more processing steps, such as separation, centrifugation, genetic engineering (e.g. transduction with viral vector), washing, and/or incubation. The biological sample can be a sample obtained directly from a biological source or a sample that is processed. Biological samples include, but are not limited to, body fluids, such as blood, plasma, serum, cerebrospinal fluid, synovial fluid, urine and sweat, tissue and organ samples, including processed samples derived therefrom.

[0336] In some aspects, the sample from which the cells are derived or isolated is blood or a blood-derived sample, or is or is derived from an apheresis or leukapheresis product. Exemplary samples include whole blood, peripheral blood mononuclear cells (PBMCs), leukocytes, bone marrow, thymus, tissue biopsy, tumor, leukemia, lymphoma, lymph node, gut associated lymphoid tissue, mucosa associated lymphoid tissue, spleen, other lymphoid tissues, liver, lung, stomach, intestine, colon, kidney, pancreas, breast, bone, prostate, cervix, testes, ovaries, tonsil, or other organ, and/or cells derived therefrom. Samples include, in the context of cell therapy, e.g., adoptive cell therapy, samples from autologous and allogeneic sources.

[0337] In some embodiments, the cells are derived from cell lines, e.g., T cell lines. The cells in some embodiments are obtained from a xenogeneic source, for example, from mouse, rat, non-human primate, or pig.

[0338] In some embodiments, isolation of the cells includes one or more preparation and/or non-affinity based cell separation steps. In some examples, cells are washed, centrifuged, and/or incubated in the presence of one or more reagents, for example, to remove unwanted components, enrich for desired components, lyse or remove cells sensitive to particular reagents. In some examples, cells are separated based on one or more property, such as density, adherent properties, size, sensitivity and/or resistance to particular components.

[0339] In some examples, cells from the circulating blood of a subject are obtained, e.g., by apheresis or leukapheresis. The samples, in some aspects, contain lymphocytes, including T cells, monocytes, granulocytes, B cells, other nucleated white blood cells, red blood cells, and/or platelets, and in some aspects contains cells other than red blood cells and platelets.

[0340] In some embodiments, the blood cells collected from the subject are washed, e.g., to remove the plasma fraction and to place the cells in an appropriate buffer or media for subsequent processing steps. In some embodiments, the cells are washed with phosphate buffered saline (PBS). In some embodiments, the wash solution lacks calcium and/or magnesium and/or many or all divalent cations. In some aspects, a washing step is accomplished a semi-automated “flow-through” centrifuge (for example, the Cobe 2991 cell processor, Baxter) according to the manufacturer's instructions. In some aspects, a washing step is accomplished by tangential flow filtration (TFF) according to the manufacturer's instructions. In some embodiments, the cells are resuspended in a variety of biocompatible buffers after washing, such as, for example, Ca++/Mg++ free PBS. In certain embodiments, components of a blood cell sample are removed and the cells directly resuspended in culture media.

[0341] In some embodiments, the methods include density-based cell separation methods, such as the preparation of white blood cells from peripheral blood by lysing the red blood cells and centrifugation through a Percoll or Ficoll gradient.

[0342] In some embodiments, the isolation methods include the separation of different cell types based on the expression or presence in the cell of one or more specific molecules, such as surface markers, e.g., surface proteins, intracellular markers, or nucleic acid. In some embodiments, any known method for separation based on such markers may be used. In some embodiments, the separation is affinity- or immunoaffinity-based separation. For example, the isolation in some aspects includes separation of cells and cell populations based on the cells' expression or expression level of one or more markers, typically cell surface markers, for example, by incubation with an antibody or binding partner that specifically binds to such markers, followed generally by washing steps and separation of cells having bound the antibody or binding partner, from those cells having not bound to the antibody or binding partner.

[0343] Such separation steps can be based on positive selection, in which the cells having bound the reagents are retained for further use, and/or negative selection, in which the cells having not bound to the antibody or binding partner are retained. In some examples, both fractions are retained for further use. In some aspects, negative selection can be particularly useful where no antibody is available that specifically identifies a cell type in a heterogeneous population, such that separation is best carried out based on markers expressed by cells other than the desired population.

[0344] The separation need not result in 100% enrichment or removal of a particular cell population or cells expressing a particular marker. For example, positive selection of or enrichment for cells of a particular type, such as those expressing a marker, refers to increasing the number or percentage of such cells, but need not result in a complete absence of cells not expressing the marker. Likewise, negative selection, removal, or depletion of cells of a particular type, such as those expressing a marker, refers to decreasing the number or percentage of such cells, but need not result in a complete removal of all such cells.

[0345] In some examples, multiple rounds of separation steps are carried out, where the positively or negatively selected fraction from one step is subjected to another separation step, such as a subsequent positive or negative selection. In some examples, a single separation step can deplete cells expressing multiple markers simultaneously, such as by incubating cells with a plurality of antibodies or binding partners, each specific for a marker targeted for negative selection. Likewise, multiple cell types can simultaneously be positively selected by incubating cells with a plurality of antibodies or binding partners expressed on the various cell types.

[0346] For example, in some aspects, specific subpopulations of T cells, such as cells positive or expressing high levels of one or more surface markers, e.g., CD28+, CD62L+, CCR7+, CD27+, CD127+, CD4+, CD8+, CD45RA+, and/or CD45RO+ T cells, are isolated by positive or negative selection techniques.

[0347] For example, CD3+, CD28+ T cells can be positively selected using CD3/CD28 conjugated magnetic beads (e.g., DYNABEADS.® M-450 CD3/CD28 T Cell Expander).

[0348] In some embodiments, isolation is carried out by enrichment for a particular cell population by positive selection, or depletion of a particular cell population, by negative selection. In some embodiments, positive or negative selection is accomplished by incubating cells with one or more antibodies or other binding agent that specifically bind to one or more surface markers expressed or expressed (marker+) at a relatively higher level (marker^{high}) on the positively or negatively selected cells, respectively.

[0349] In some embodiments, T cells are separated from a peripheral blood mononuclear cell (PBMC) sample by negative selection of markers expressed on non-T cells, such as B cells, monocytes, or other white blood cells, such as CD14. In some aspects, a CD4+ or CD8+ selection step is used to separate CD4+ helper and CD8+ cytotoxic T cells. Such CD4+ and CD8+ populations can be further sorted into sub-populations by positive or negative selection for markers expressed or expressed to a relatively higher degree on one or more naive, memory, and/or effector T cell subpopulations.

[0350] In some embodiments, CD8+ cells are further enriched for or depleted of naive, central memory, effector memory, and/or central memory stem cells, such as by positive or negative selection based on surface antigens associated with the respective subpopulation. In some embodiments, enrichment for central memory T (TCM) cells is carried out to increase efficacy, such as to improve long-term survival, expansion, and/or engraftment following administration, which in some aspects is particularly robust in such sub-populations. See Terakura et al. (2012) Blood. 1:72-82; Wang et al. (2012) J Immunother. 35(9):689-701. In some embodiments, combining TCM-enriched CD8+ T cells and CD4+ T cells further enhances efficacy.

[0351] In embodiments, memory T cells are present in both CD62L+ and CD62L-subsets of CD8+ peripheral blood lymphocytes. Peripheral blood mononuclear cell (PBMC) can be enriched for or depleted of CD62L-CD8+ and/or CD62L+CD8+ fractions, such as using anti-CD8 and anti-CD62L antibodies.

[0352] In some embodiments, the enrichment for central memory T (TCM) cells is based on positive or high surface expression of CD45RO, CD62L, CCR7, CD28, CD3, and/or CD 127; in some aspects, it is based on negative selection for cells expressing or highly expressing CD45RA and/or granzyme B. In some aspects, isolation of a CD8+ population enriched for TCM cells is carried out by depletion of cells expressing CD4, CD14, CD45RA, and positive selection or enrichment for cells expressing CD62L. In one aspect, enrichment for central memory T (TCM) cells is carried out starting with a negative fraction of cells selected based on CD4 expression, which is subjected to a negative selection based on expression of CD14 and CD45RA, and a positive selection based on CD62L. Such selections in some aspects are carried out simultaneously and in other aspects are carried out sequentially, in either order. In some aspects, the same CD4 expression-based selection step used in preparing the CD8+ cell population or subpopulation, also is used to generate the CD4+ cell population or sub-population, such that both the positive and negative fractions from the CD4-based separation are retained and used in subsequent steps of the methods, optionally following one or more further positive or negative selection steps.

[0353] In a particular example, a sample of PBMCs or other white blood cell sample is subjected to selection of CD4+ cells, where both the negative and positive fractions are retained. The negative fraction then is subjected to negative selection based on expression of CD14 and CD45RA or ROR1, and positive selection based on a marker characteristic of central memory T cells, such as CD62L or CCR7, where the positive and negative selections are carried out in either order. 100,1339 CD4+T helper cells are sorted into naive, central memory, and effector cells by identifying cell populations that have cell surface antigens. CD4+ lymphocytes can be obtained by standard methods. In some embodiments, naive CD4+T lymphocytes are CD45RO−, CD45RA+, CD62L+, CD4+ T cells. In some embodiments, central memory CD4+ cells are CD62L+ and CD45RO+. In some embodiments, effector CD4+ cells are CD62L- and CD45RO−.

[0354] In one example, to enrich for CD4+ cells by negative selection, a monoclonal antibody cocktail typically includes antibodies to CD14, CD20, CD11b, CD16, HLA-DR, and CD8. In some embodiments, the antibody or binding partner is bound to a solid support or matrix, such as a magnetic bead or paramagnetic bead, to allow for separation of cells for positive and/or negative selection. For example, in some embodiments, the cells and cell populations are separated or isolated using immune-magnetic (or affinity-magnetic) separation techniques (reviewed in Methods in Molecular Medicine, vol. 58: Metastasis Research Protocols, Vol. 2: Cell Behavior In Vitro and In Vivo, p 17-25 Edited by: S. A. Brooks and U. Schumacher Humana Press Inc., Totowa, N.J.).

[0355] In some aspects, the sample or composition of cells to be separated is incubated with small, magnetizable or magnetically responsive material, such as magnetically responsive particles or microparticles, such as paramagnetic beads (e.g., such as Dynabeads or MACS beads). The magnetically responsive material, e.g., particle, generally is directly or indirectly attached to a binding partner, e.g., an antibody, that specifically binds to a molecule, e.g., surface marker, present on the cell, cells, or population of cells that it is desired to separate, e.g., that it is desired to negatively or positively select.

[0356] In some embodiments, the magnetic particle or bead comprises a magnetically responsive material bound to a specific binding member, such as an antibody or other binding partner. There are many well-known magnetically responsive materials used in magnetic separation methods. Suitable magnetic particles include those described in Molday, U.S. Pat. No. 4,452,773, and in European Patent Specification EP 452342 B, which are hereby incorporated by reference. Colloidal sized particles, such as those described in Owen U.S. Pat. No. 4,795,698, and Liberti et al., U.S. Pat. No. 5,200,084 are other examples.

[0357] The incubation generally is carried out under conditions whereby the antibodies or binding partners, or molecules, such as secondary antibodies or other reagents, which specifically bind to such antibodies or binding partners, which are attached to the magnetic particle or bead, specifically bind to cell surface molecules if present on cells within the sample.

[0358] In some aspects, the sample is placed in a magnetic field, and those cells having magnetically responsive or magnetizable particles attached thereto will be attracted to the magnet and separated from the unlabeled cells. For positive selection, cells that are attracted to the magnet are retained; for negative selection, cells that are not attracted (unlabeled cells) are retained. In some aspects, a combination of positive and negative selection is performed during the same selection step, where the positive and negative fractions are retained and further processed or subject to further separation steps.

[0359] In certain embodiments, the magnetically responsive particles are coated in primary antibodies or other binding partners, secondary antibodies, lectins, enzymes, or streptavidin. In certain embodiments, the magnetic particles are attached to cells via a coating of primary antibodies specific for one or more markers. In certain embodiments, the cells, rather than the beads, are labeled with a primary antibody or binding partner, and then cell-type specific secondary antibody- or other binding partner (e.g., streptavidin)-coated magnetic particles, are added. In certain embodiments, streptavidin-coated magnetic particles are used in conjunction with biotinylated primary or secondary antibodies.

[0360] In some embodiments, the magnetically responsive particles are left attached to the cells that are to be subsequently incubated, cultured and/or engineered; in some aspects, the particles are left attached to the cells for administration to a patient. In some embodiments, the magnetizable or magnetically responsive particles are removed from the cells. Methods for removing magnetizable particles from cells are known and include, e.g., the use of competing non-labeled antibodies, magnetizable particles or antibodies conjugated to cleavable linkers, etc. In some embodiments, the magnetizable particles are biodegradable.

[0361] In some embodiments, the affinity-based selection is via magnetic-activated cell sorting (MACS) (Miltenyi Biotech, Auburn, Calif.). Magnetic Activated Cell Sorting (MACS) systems are capable of high-purity selection of cells having magnetized particles attached thereto. In certain embodiments, MACS operates in a mode wherein the non-target and target species are sequentially eluted after the application of the external magnetic field. That is, the cells attached to magnetized particles are held in place while the unattached species are eluted. Then, after this first elution step is completed, the species that were trapped in the magnetic field and were prevented from being eluted are freed in some manner such that they can be eluted and recovered. In certain embodiments, the non-target cells are labelled and depleted from the heterogeneous population of cells.

[0362] In certain embodiments, the isolation or separation is carried out using a system, device, or apparatus that carries out one or more of the isolation, cell preparation, separation, processing, incubation, culture, and/or formulation steps of the methods. In some aspects, the system is used to carry out each of these steps in a closed or sterile environment, for example, to minimize error, user handling and/or contamination. In one example, the system is a system as described in International Patent Application, Publication Number WO2009/072003, or US 20110003380 A1.

[0363] In some embodiments, the system or apparatus carries out one or more, e.g., all, of the isolation, processing, engineering, and formulation steps in an integrated or self-contained system, and/or in an automated or programmable fashion. In some aspects, the system or apparatus includes a computer and/or computer program in communication with the system or apparatus, which allows a user to program, control, assess the outcome of, and/or adjust various aspects of the processing, isolation, engineering, and formulation steps.

[0364] In some aspects, the separation and/or other steps is carried out using CliniMACS system (Miltenyi Biotec), for example, for automated separation of cells on a clinical-scale level in a closed and sterile system. Components can include an integrated microcomputer, magnetic separation unit, peristaltic pump, and various pinch valves. The integrated computer in some aspects controls all components of the instrument and directs the system to perform repeated procedures in a standardized sequence. The magnetic separation unit in some aspects includes a movable permanent magnet and a holder for the selection column. The peristaltic pump controls the flow rate throughout the tubing set and, together with the pinch valves, ensures the controlled flow of buffer through the system and continual suspension of cells.

[0365] The CliniMACS system in some aspects uses antibody-coupled magnetizable particles that are supplied in a sterile, non-pyrogenic solution. In some embodiments, after labelling of cells with magnetic particles the cells are washed to remove excess particles. A cell preparation bag is then connected to the tubing set, which in turn is connected to a bag containing buffer and a cell collection bag. The tubing set consists of pre-assembled sterile tubing, including a pre-column and a separation column, and are for single use only. After initiation of the separation program, the system automatically applies the cell sample onto the separation column. Labeled cells are retained within the column, while unlabeled cells are removed by a series of washing steps. In some embodiments, the cell populations for use with the methods described herein are unlabeled and are not retained in the column. In some embodiments, the cell populations for use with the methods described herein are labeled and are retained in the column. In some embodiments, the cell populations for use with the methods described herein are eluted from the column after removal of the magnetic field, and are collected within the cell collection bag.

[0366] In certain embodiments, separation and/or other steps are carried out using the CliniMACS Prodigy system (Miltenyi Biotec). The CliniMACS Prodigy system in some aspects is equipped with a cell processing unity that permits automated washing and fractionation of cells by centrifugation. The CliniMACS Prodigy system can also include an onboard camera and image recognition software that determines the optimal cell fractionation endpoint by discerning the macroscopic layers of the source cell product. For example, peripheral blood may be automatically separated into erythrocytes, white blood cells and plasma layers. The CliniMACS Prodigy system can also include an integrated cell cultivation chamber which accomplishes cell culture protocols such as, e.g., cell differentiation and expansion, antigen loading, and long-term cell culture. Input ports can allow for the sterile removal and replenishment of media and cells can be monitored using an integrated microscope. See, e.g., Klebanoff et al. (2012) J Immunother. 35(9): 651-660, Terakura et al. (2012) Blood. 1:72-82, and Wang et al. (2012) J Immunother. 35(9):689-701.

[0367] In some embodiments, a cell population described herein is collected and enriched (or depleted) via flow cytometry, in which cells stained for multiple cell surface markers are carried in a fluidic stream. In some embodiments, a cell population described herein is collected and enriched (or depleted) via preparative scale fluorescence activated cell sorting (FACS). In certain embodiments, a cell population described herein is collected and enriched (or depleted) by use of microelectromechanical systems (MEMS) chips in combination with a FACS-based detection system (see, e.g., WO 2010/033140, Cho et al. (2010) Lab Chip 10, 1567-1573; and Godin et al. (2008) J Biophoton. 1(5):355-376. In both cases, cells can be labeled with multiple markers, allowing for the isolation of well-defined T cell subsets at high purity.

[0368] In some embodiments, the antibodies or binding partners are labeled with one or more detectable marker, to facilitate separation for positive and/or negative selection. For example, separation may be based on binding to fluorescently labeled antibodies. In some examples, separation of cells based on binding of antibodies or other binding partners specific for one or more cell surface markers are carried in a fluidic stream, such as by fluorescence-activated cell sorting (FACS), including preparative scale (FACS) and/or microelectromechanical systems (MEMS) chips, e.g., in combination with a flow-cytometric detection system. Such methods allow for positive and negative selection based on multiple markers simultaneously.

[0369] In some embodiments, the preparation methods include steps for freezing, e.g., cryopreserving, the cells, either before or after isolation, incubation, and/or engineering. In some embodiments, the freeze and subsequent thaw step removes granulocytes and, to some extent, monocytes in the cell population. In some embodiments, the cells are suspended in a freezing solution, e.g., following a washing step to remove plasma and platelets. Any of a variety of known freezing solutions and parameters in some aspects may be used. One example involves using PBS containing 20% DMSO and 8% human serum albumin (HSA), or other suitable cell freezing media. This can then be diluted 1:1 with media so that the final concentration of DMSO and HSA are 10% and 4%, respectively. Other examples include Cryostor®, CTL-Cryo™ ABC freezing media, and the like. The cells are then frozen to −80 degrees C. at a rate of 1 degree per minute and stored in the vapor phase of a liquid nitrogen storage tank.

[0370] In some embodiments, the provided methods include cultivation, incubation, culture, and/or genetic engineering steps. For example, in some embodiments, provided are methods for incubating and/or engineering the depleted cell populations and culture-initiating compositions.

[0371] Thus, in some embodiments, the cell populations are incubated in a culture-initiating composition. The incubation and/or engineering may be carried out in a culture vessel, such as a unit, chamber, well, column, tube, tubing set, valve, vial, culture dish, bag, or other container for culture or cultivating cells.

[0372] In some embodiments, the cells are incubated and/or cultured prior to or in connection with genetic engineering. The incubation steps can include culture, cultivation, stimulation, activation, and/or propagation. In some embodiments, the compositions or cells are incubated in the presence of stimulating conditions or a stimulatory agent. Such conditions include those designed to induce proliferation, expansion, activation, and/or survival of cells in the population, to mimic antigen exposure, and/or to prime the cells for genetic engineering, such as for the introduction of a recombinant antigen receptor.

[0373] The conditions can include one or more of particular media, temperature, oxygen content, carbon dioxide content, time, agents, e.g., nutrients, amino acids, antibiotics, ions, and/or stimulatory factors, such as cytokines, chemokines, antigens, binding partners, fusion proteins, recombinant soluble receptors, and any other agents designed to activate the cells.

[0374] In some embodiments, the stimulating conditions or agents include one or more agent, e.g., ligand, which is capable of activating an intracellular signaling domain of a TCR complex. In some aspects, the agent turns on or initiates TCR/CD3 intracellular signaling cascade in a T cell. Such agents can include antibodies, such as those specific for a TCR component and/or costimulatory receptor, e.g., anti-CD3, anti-CD28, for example, bound to solid support such as a bead, and/or one or more cytokines. Optionally, the expansion method may further comprise the step of adding anti-CD3 and/or anti CD28 antibody to the culture medium (e.g., at a concentration of at least about 0.5 ng/ml). In some embodiments, the stimulating agents include IL-2 and/or IL-15, for example, an IL-2 concentration of at least about 10 units/mL.

[0375] In some aspects, incubation is carried out in accordance with techniques such as those described in U.S. Pat. No. 6,040,177 to Riddell et al., Klebanoff et al. (2012) J Immunother. 35(9): 651-660, Terakura et al. (2012) Blood. 1:72-82, and/or Wang et al. (2012) J Immunother. 35(9):689-701.

[0376] In some embodiments, the T cells are expanded by adding to the culture-initiating composition feeder cells, such as non-dividing peripheral blood mononuclear cells (PBMC), (e.g., such that the resulting population of cells contains at least about 5, 10, 20, or 40 or more PBMC feeder cells for each T lymphocyte in the initial population to be expanded); and incubating the culture (e.g. for a time sufficient to expand the numbers of T cells). In some aspects, the non-dividing feeder cells can comprise gamma-irradiated PBMC feeder cells. In some embodiments, the PBMC are irradiated with gamma rays in the range of about 3000 to 3600 rads to prevent cell division. In some embodiments, the PBMC feeder cells are inactivated with Mytomicin C. In some aspects, the feeder cells are added to culture medium prior to the addition of the populations of T cells.

[0377] In some embodiments, the stimulating conditions include temperature suitable for the growth of human T lymphocytes, for example, at least about 25 degrees Celsius, generally at least about 30 degrees, and generally at or about 37 degrees Celsius. Optionally, the incubation may further comprise adding non-dividing EBV-transformed lymphoblastoid cells (LCL) as feeder cells. LCL can be irradiated with gamma rays in the range of about 6000 to 10,000 rads. The LCL feeder cells in some aspects is provided in any suitable amount, such as a ratio of LCL feeder cells to initial T lymphocytes of at least about 10:1.

[0378] In embodiments, antigen-specific T cells, such as antigen-specific CD4+ and/or CD8+ T cells, are obtained by stimulating naive or antigen specific T lymphocytes with antigen. For example, antigen-specific T cell lines or clones can be generated to cytomegalovirus antigens by isolating T cells from infected subjects and stimulating the cells in vitro with the same antigen.

[0379] Assays

[0380] A variety of assays known in the art may be used to identify and characterize an HLA-PEPTIDE ABP provided herein.

### Binding, Competition, and Epitope Mapping Assays

[0381] Specific antigen-binding activity of an ABP provided herein may be evaluated by any suitable method, including using SPR, BLI, RIA, Carterra biosensor, and MSD-SET, as described elsewhere in this disclosure. Additionally, antigen-binding activity may be evaluated by ELISA assays, using flow cytometry, and/or Western blot assays.

[0382] Assays for measuring competition between two ABPs, or an ABP and another molecule (e.g., one or more ligands of HLA-PEPTIDE such as a TCR) are described elsewhere in this disclosure and, for example, in Harlow and Lane, ABPs: A Laboratory Manual ch. 14, 1988, Cold Spring Harbor Laboratory, Cold Spring Harbor, N.Y, incorporated by reference in its entirety.

[0383] Assays for mapping the epitopes to which an ABP provided herein bind are described, for example, in Morris “Epitope Mapping Protocols,” in Methods in Molecular Biology vol. 66, 1996, Humana Press, Totowa, N.J., incorporated by reference in its entirety.

[0384] In some embodiments, the epitope is determined by peptide competition. In some embodiments, the epitope is determined by mass spectrometry. In some embodiments, the epitope is determined by mutagenesis. In some embodiments, the epitope is determined by crystallography.

### Assays for Effector Functions

[0385] Effector function following treatment with an ABP and/or cell provided herein may be evaluated using a variety of in vitro and in vivo assays known in the art, including those described in Ravetch and Kinet, Annu. Rev. Immunol., 1991, 9:457-492; U.S. Pat. Nos. 5,500,362, 5,821,337; Hellstrom et al., Proc. Nat'l Acad. Sci. USA, 1986, 83:7059-7063; Hellstrom et al., Proc. Nat'l Acad. Sci. USA, 1985, 82:1499-1502; Bruggemann et al., J. Exp. Med., 1987, 166:1351-1361; Clynes et al., Proc. Nat'l Acad. Sci. USA, 1998, 95:652-656; WO 2006/029879; WO 2005/100402; Gazzano-Santoro et al., J. Immunol. Methods, 1996, 202:163-171; Cragg et al., Blood, 2003, 101:1045-1052; Cragg et al. Blood, 2004, 103:2738-2743; and Petkova et al., Int'l. Immunol., 2006, 18:1759-1769; each of which is incorporated by reference in its entirety.

[0386] Pharmaceutical Compositions

[0387] An ABP, cell, or HLA-PEPTIDE target provided herein can be formulated in any appropriate pharmaceutical composition and administered by any suitable route of administration. Suitable routes of administration include, but are not limited to, the intra-arterial, intradermal, intramuscular, intraperitoneal, intravenous, nasal, parenteral, pulmonary, and subcutaneous routes.

[0388] The pharmaceutical composition may comprise one or more pharmaceutical excipients. Any suitable pharmaceutical excipient may be used, and one of ordinary skill in the art is capable of selecting suitable pharmaceutical excipients. Accordingly, the pharmaceutical excipients provided below are intended to be illustrative, and not limiting. Additional pharmaceutical excipients include, for example, those described in the Handbook of Pharmaceutical Excipients, Sheskey et al. (Eds.) 8th Ed. (2017), incorporated by reference in its entirety.

[0389] In some embodiments, the pharmaceutical composition comprises a carrier.

[0390] Methods of Treatment

[0391] For therapeutic applications, ABPs and/or cells are administered to a mammal, generally a human, in a pharmaceutically acceptable dosage form such as those known in the art and those discussed above. For example, ABPs and/or cells may be administered to a human intravenously as a bolus or by continuous infusion over a period of time, by intramuscular, intraperitoneal, intra-cerebrospinal, subcutaneous, intra-articular, intrasynovial, intrathecal, or intratumoral routes. The ABPs also are suitably administered by peritumoral, intralesional, or perilesional routes, to exert local as well as systemic therapeutic effects. The intraperitoneal route may be particularly useful, for example, in the treatment of ovarian tumors.

[0392] The ABPs and/or cells provided herein can be useful for the treatment of any disease or condition involving HLA-PEPTIDE antigen. In some embodiments, the disease or condition is a disease or condition that can benefit from treatment with an anti-HLA-PEPTIDE ABP and/or cell. In some embodiments, the disease or condition is a tumor. In some embodiments, the disease or condition is a cell proliferative disorder. In some embodiments, the disease or condition is a cancer.

[0393] In some embodiments, the ABPs and/or cells provided herein are provided for use as a medicament. In some embodiments, the ABPs and/or cells provided herein are provided for use in the manufacture or preparation of a medicament. In some embodiments, the medicament is for the treatment of a disease or condition that can benefit from an anti-HLA-PEPTIDE ABP and/or cell. In some embodiments, the disease or condition is a tumor. In some embodiments, the disease or condition is a cell proliferative disorder. In some embodiments, the disease or condition is a cancer.

[0394] Provided herein is a method of treating a disease or condition in a subject in need thereof by administering an effective amount of an ABP and/or cell provided herein to the subject. In some aspects, the disease or condition is a cancer.

[0395] Also provided herein is a method of treating a disease or condition in a subject in need thereof by administering an effective amount of an ABP and/or cell provided herein to the subject, wherein the disease or condition is a cancer, and the cancer is selected from a solid tumor and a hematological tumor.

[0396] Also provided herein is a method of modulating an immune response in a subject in need thereof, comprising administering to the subject an effective amount of an ABP and/or cell or a pharmaceutical composition disclosed herein.

[0397] A modulated immune response in the subject may be evaluated by any means known in the art.

[0398] In some embodiments, a modulated immune response in the subject comprises an increase in or induction of antibody-dependent cellular toxicity (ADCC), e.g., of a target cell with surface expression of the neoantigen target of the ABP. ADCC can be evaluated by any means known in the art.

[0399] In some embodiments, a modulated immune response in the subject comprises an increase in or induction of complement dependent cytotoxicity (CDC), e.g., of a target cell with surface expression of the neoantigen target of the ABP. CDC can be evaluated by any means known in the art.

[0400] By way of example only, immune response in the subject can be evaluated by evaluating lymphocytes obtained from the subject or the subject's tumor for binding to the HLA-PEPTIDE antigen. In some embodiments, tumor-infiltrating lymphocytes from the subject or evaluated for binding to the HLA-PEPTIDE antigen. By way of other example only, modulated immune response in the subject can include an expansion of pre-existing neoantigen-specific T cell population, a broader repertoire of new T-cell specificities in the subject, or both. Methods for evaluating such modulated immune response are described in Ott et al., An immunogenic personal neoantigen vaccine for patients with melanoma. Nature 547, 217-221 (13 Jul. 2017), which is hereby incorporated be reference in its entirety. Methods for evaluating immune response are also described in Sahin et al., Personalized RNA mutanome vaccines mobilize poly-specific therapeutic immunity against cancer, Nature 547, 222-226 (13 Jul. 2017), which is hereby incorporated by reference in its entirety.

[0401] To perform immune monitoring, PBMCs are commonly used. PBMCs can be isolated before prime vaccination, and after prime vaccination (e.g. 4 weeks and 8 weeks). PBMCs can be harvested just prior to boost vaccinations and after each boost vaccination (e.g. 4 weeks and 8 weeks).

[0402] In some embodiments, a modulated immune response in the subject comprises a modulated T cell response. T cell responses can be measured using one or more methods known in the art such as ELISpot, intracellular cytokine staining, cytokine secretion and cell surface capture, T cell proliferation, MHC multimer staining, or by cytotoxicity assay. T cell responses to HLA-PEPTIDE antigens disclosed herein can be monitored from PBMCs by measuring induction of cytokines, such as IFN-gamma, using an ELISpot assay. Specific CD4 or CD8 T cell responses to HLA-PEPTIDE antigens disclosed herein can be monitored from PBMCs by measuring induction of cytokines captured intracellularly or extracellularly, such as IFN-gamma, using flow cytometry. Specific CD4 or CD8 T cell responses to HLA-PEPTIDE antigens disclosed herein can be monitored from PBMCs by measuring T cell populations expressing T cell receptors specific for epitope/MHC class I complexes using MHC multimer staining. Specific CD4 or CD8 T cell responses to HLA-PEPTIDE antigens disclosed herein can be monitored from PBMCs by measuring the ex vivo expansion of T cell populations following 3H-thymidine, bromodeoxyuridine and carboxyfluoresceine-diacetate-succinimidylester (CFSE) incorporation. The antigen recognition capacity and lytic activity of PBMC-derived T cells that are specific HLA-PEPTIDE antigens disclosed herein can be assessed functionally by chromium release assay or alternative colorimetric cytotoxicity assays.

[0403] In particular embodiments, immune response in the subject is evaluated by enzyme linked immunospot (ELISPOT) analysis.

[0404] Also provided herein is a method of killing a target cell in a subject in need thereof, comprising administering to the subject an effective amount of an ABP and/or cell or a pharmaceutical composition disclosed herein. In some embodiments, the subject has cancer.

[0405] In some embodiments, the target cell is a cancer cell.

[0406] In some embodiments, the cancer or cancer cell expresses or is predicted to express an HLA-PEPTIDE antigen or HLA Class I molecule as described in any one of SEQ ID NOs:10,755 to 29,364. In some embodiments, the cancer or cancer cell is determined or predicted to comprise the somatic mutation in the gene that is associated with the HLA-PEPTIDE antigen. In some embodiments, the ABP selectively binds to the HLA-PEPTIDE antigen. In some embodiments, the ABP selectively binds to the HLA Class I subtype comprised in the HLA-PEPTIDE antigen.

[0407] In some embodiments, prior to administering the ABP to the subject, the cancer or cancer cell of the subject, or a biological sample from the subject, is determined to express the HLA-PEPTIDE antigen. In some embodiments, prior to administering the ABP to the subject, the cancer or cancer cell of the subject, or a biological sample from the subject, is determined to comprise the HLA Class I subtype of the HLA-PEPTIDE antigen. By way of example only, prior to administering an ABP that selectively binds to RAS G12D neoantigen HLA-A*11:01_VVVGADGVGK (“SNA30”), the cancer or cancer cell of the subject, or a biological sample from the subject, is determined to comprise HLA-A*11:01. In some embodiments, prior to administering the ABP to the subject, the cancer or cancer cell of the subject, or a biological sample from the subject, is determined to comprise the somatic mutation in the gene that is associated with the HLA-PEPTIDE antigen. By way of example only, prior to administering an ABP that selectively binds to RAS G12D neoantigen HLA-A*11:01_VVVGADGVGK (“SNA30”), the cancer or cancer cell of the subject, or a biological sample from the subject, is determined to comprise a RAS G12D mutation. In some embodiments, prior to administering the ABP to the subject, the cancer or cancer cell of the subject, or a biological sample from the subject, is determined to comprise the HLA Class I subtype of the HLA-PEPTIDE antigen and the cancer or cancer cell of the subject expresses or is predicted to express the gene associated with the somatic alteration encompassed by the HLA-PEPTIDE antigen. By way of example only, prior to administering an ABP that selectively binds to RAS G12D neoantigen HLA-A*11:01_VVVGADGVGK (“SNA30”), the cancer or cancer cell of the subject, or a biological sample from the subject is determined to comprise HLA-A*11:01 and the cancer or cancer cell of the subject expresses RAS, e.g., KRAS, NRAS, or HRAS. In some embodiments, prior to administering the ABP to the subject, the cancer, cancer cell, or biological sample of the subject is determined to comprise the somatic mutation in the gene that is associated with the HLA-PEPTIDE antigen, and the subject is determined to express the HLA Class I subtype comprised in the HLA-PEPTIDE antigen. By way of example only, prior to administering an ABP that selectively binds to RAS G12D neoantigen HLA-A*11:01_VVVGADGVGK (“SNA30”), the cancer or cancer cell of the subject, or a biological sample from the subject is determined to comprise HLA-A*11:01 and a RAS G12D mutation. In some embodiments, a biological sample obtained from the subject is determined to be positive for the HLA-PEPTIDE antigen or HLA Class I subtype comprised in the HLA-PEPTIDE antigen. In some embodiments, a cancer or cancer cell of the subject is determined to express the gene associated with the somatic alteration, the mutation, or both the gene and the somatic alteration, above a predefined threshold. In some embodiments, loss of the HLA Class I subtype in the cancer or cancer cell of the subject is not detected.

[0408] Biological samples include, but are not limited to, body fluids, such as blood, plasma, serum, cerebrospinal fluid, synovial fluid, urine and sweat, tissue and organ samples, including processed samples derived therefrom. In some embodiments, the biological sample comprises a tumor sample, e.g., a solid tumor sample. In some embodiments, the solid tumor sample is a fresh tumor sample. In some embodiments, the solid tumor sample is a frozen tumor sample. In some embodiments, the tumor sample is a formalin-fixed, paraffin-embedded (FFPE) sample. In some embodiments, the tumor sample is a tumor biopsy or resection preserved in an agent formulated to prevent RNA degradation in the sample. Such agents are known in the art, and include, but are not limited to, RNAlater. In some embodiments, the biological sample is a liquid sample. In particular embodiments, the liquid sample is a blood sample. In particular embodiments, the blood sample is a whole blood sample. In particular embodiments, the blood sample is a plasma sample. In particular embodiments, the blood sample is a serum sample.

[0409] By way of example only, if a cancer, cancer cell, or biological sample of the subject is determined to comprise a CREB3L1 V414I mutation, the subject may be selected for treatment with an ABP that selectively binds the HLA-PEPTIDE neoantigen designated as SEQ ID NO: 10755. By way of other example only, if the subject is determined to express the HLA Class I allele HLA-A*02:06, the subject may be selected for treatment with an ABP that selectively binds the HLA-PEPTIDE neoantigen designated as SEQ ID NO: 10755. By way of yet other example only, if the subject is determined to express the HLA Class I allele HLA-A*02:06 and a cancer, cancer cell, or biological sample of the subject is determined to comprise a CREB3L1 V414I mutation, the subject may be selected for treatment with an ABP that selectively binds the HLA-PEPTIDE neoantigen designated as SEQ ID NO: 10755.

[0410] By way of example only, if a cancer, cancer cell, or biological sample of the subject is determined to comprise a RAS G12C mutation, the subject may be selected for treatment with an ABP that selectively binds the HLA-PEPTIDE neoantigen designated as SEQ ID NO: 14954 and 14955. By way of other example only, if the subject is determined to express the HLA Class I allele HLA-A*02:01, the subject may be selected for treatment with an ABP that selectively binds the HLA-PEPTIDE neoantigen designated as SEQ ID NO: 14954 and 14955. By way of yet other example only, if the subject is determined to express the HLA Class I allele HLA-A*02:01 and a cancer, cancer cell, or biological sample of the subject is determined to comprise a RAS G12C mutation, the subject may be selected for treatment with an ABP that selectively binds the HLA-PEPTIDE neoantigen designated as SEQ ID NO: 14954 and 14955.

[0411] By way of example only, if a cancer, cancer cell, or biological sample of the subject is determined to comprise a RAS G12D mutation, the subject may be selected for treatment with an ABP that selectively binds the HLA-PEPTIDE neoantigen designated as SEQ ID NO: 19865. By way of other example only, if the subject is determined to express the HLA Class I allele HLA-A*11:01, the subject may be selected for treatment with an ABP that selectively binds the HLA-PEPTIDE neoantigen designated as SEQ ID NO: 19865. By way of yet other example only, if the subject is determined to express the HLA Class I allele HLA-A*11:01 and a cancer, cancer cell, or biological sample of the subject is determined to comprise a RAS G12D mutation, the subject may be selected for treatment with an ABP that selectively binds the HLA-PEPTIDE neoantigen designated as SEQ ID NO: 19865.

[0412] By way of example only, if a cancer, cancer cell, or biological sample of the subject is determined to comprise a RAS G12V mutation, the subject may be selected for treatment with an ABP that selectively binds the HLA-PEPTIDE neoantigen designated as SEQ ID NO: 19,976. By way of other example only, if the subject is determined to express the HLA Class I allele HLA-A*11:01, the subject may be selected for treatment with an ABP that selectively binds the HLA-PEPTIDE neoantigen designated as SEQ ID NO: 19,976. By way of yet other example only, if the subject is determined to express the HLA Class I allele HLA-A*11:01 and a cancer, cancer cell, or biological sample of the subject is determined to comprise a RAS G12V mutation, the subject may be selected for treatment with an ABP that selectively binds the HLA-PEPTIDE neoantigen designated as SEQ ID NO: 19,976.

[0413] Expression of the antigen, presence of the somatic mutation in the gene associated with the antigen, or expression of the HLA Class I subtype comprised in the antigen can be determined by any means known in the art.

[0414] Expression or presence of the antigen can be determined at the RNA or protein level by any means known in the art. Exemplary methods include, but are not limited to RNASeq, microarray, PCR, Nanostring, in situ hybridization (ISH), Mass spectrometry, or immunohistochemistry (IHC). Thresholds for positivity of gene expression is established by several methods, including: (1) predicted probability of presentation of the epitope by the HLA allele at various gene expression levels, (2) correlation of gene expression and HLA epitope presentation as measured by mass spectrometry, and/or (3) clinical benefits of ABP-based immunotherapy attained for patients expressing the genes at various levels.

[0415] For example, presence of the somatic mutation associated with the antigen can be determined by sequencing. In some embodiments, polynucleotides are isolated from the biological sample and sequenced. The polynucleotides can comprise DNA. The polynucleotides can comprise cDNA. The polynucleotides can comprise RNA. The sequencing can comprise whole exome sequencing, whole genome sequencing, targeted sequencing of a panel of cancer genes, or targeted sequencing of a single cancer gene. Exemplary gene panels include, but are not limited to FoundationOne, FoundationOne CDx, Guardant 360, Guardant OMNI, and MSK IMPACT. Presence of the somatic mutation associated with the antigen can also be determined by PCR based assays such as Cobas® KRAS Mutation Test. Presence of the somatic mutation associated with the antigen can also be determined by mass-spec based assays such as MassARRAY, described in Ibarrola-Villava, Maider et al. “Determination of somatic oncogenic mutations linked to target-based therapies using MassARRAY technology.” Oncotarget vol. 7, 16 (2016): 22543-55. doi:10.18632/oncotarget. 8002, which is hereby incorporated by reference in its entirety.

[0416] For example, presence of the HLA Class I subtype in the subject or biological sample of the subject can be determined by sequencing, e.g., next generation sequencing (NGS) of the HLA genes and analysis with a bioinformatic tool such as OptiType, standard sequence-specific oligonucleotide (SSO) and sequence-specific primer (SSP) technologies, or any other methods known in the art.

[0417] Combination Therapies

[0418] In some embodiments, an ABP and/or cell provided herein is administered with at least one additional therapeutic agent. Any suitable additional therapeutic agent may be administered with an ABP and/or cell provided herein. In some embodiments, the additional therapeutic agent is an ABP.

[0419] Diagnostic Methods

[0420] Also provided are methods for predicting and/or detecting the presence of a given HLA-PEPTIDE on a cell from a subject. Such methods may be used, for example, to predict and evaluate responsiveness to treatment with an ABP and/or cell provided herein.

[0421] In some embodiments, a blood or tumor sample is obtained from a subject and the fraction of cells expressing HLA-PEPTIDE is determined. In some aspects, the relative amount of HLA-PEPTIDE expressed by such cells is determined. The fraction of cells expressing HLA-PEPTIDE and the relative amount of HLA-PEPTIDE expressed by such cells can be determined by any suitable method. In some embodiments, flow cytometry is used to make such measurements. In some embodiments, fluorescence assisted cell sorting (FACS) is used to make such measurement. See Li et al., J. Autoimmunity, 2003, 21:83-92 for methods of evaluating expression of HLA-PEPTIDE in peripheral blood.

[0422] In some embodiments, detecting the presence of a given HLA-PEPTIDE on a cell from a subject is performed using immunoprecipitation and mass spectrometry. This can be performed by obtaining a tumor sample (e.g., a frozen tumor sample) such as a primary tumor specimen and applying immunoprecipitation to isolate one or more peptides. The HLA alleles of the tumor sample can be determined experimentally or obtained from a third party source. The one or more peptides can be subjected to mass spectrometry (MS) to determine their sequence(s). The spectra from the MS can then be searched against a database. An example is provided in the Examples section below.

[0423] In some embodiments, predicting the presence of a given HLA-PEPTIDE on a cell from a subject is performed using a computer-based model applied to the peptide sequence and/or RNA measurements of one or more genes comprising that peptide sequence (e.g., RNA seq or RT-PCR, or nanostring) from a tumor sample. The model used can be as described in international patent application no. PCT/US2016/067159, herein incorporated by reference, in its entirety, for all purposes.

[0424] Kits

[0425] Also provided are kits comprising an ABP and/or cell provided herein. The kits may be used for the treatment, prevention, and/or diagnosis of a disease or disorder, as described herein.

[0426] In some embodiments, the kit comprises a container and a label or package insert on or associated with the container. Suitable containers include, for example, bottles, vials, syringes, and IV solution bags. The containers may be formed from a variety of materials, such as glass or plastic. The container holds a composition that is by itself, or when combined with another composition, effective for treating, preventing and/or diagnosing a disease or disorder. The container may have a sterile access port. For example, if the container is an intravenous solution bag or a vial, it may have a port that can be pierced by a needle. At least one active agent in the composition is an ABP provided herein. The label or package insert indicates that the composition is used for treating the selected condition.

[0427] In some embodiments, the kit comprises (a) a first container with a first composition contained therein, wherein the first composition comprises an ABP and/or cell provided herein; and (b) a second container with a second composition contained therein, wherein the second composition comprises a further therapeutic agent. The kit in this embodiment can further comprise a package insert indicating that the compositions can be used to treat a particular condition, e.g., cancer.

[0428] Alternatively, or additionally, the kit may further comprise a second (or third) container comprising a pharmaceutically-acceptable excipient. In some aspects, the excipient is a buffer. The kit may further include other materials desirable from a commercial and user standpoint, including filters, needles, and syringes.

### EXAMPLES

[0429] Below are examples of specific embodiments for carrying out the present invention. The examples are offered for illustrative purposes only, and are not intended to limit the scope of the present invention in any way. Efforts have been made to ensure accuracy with respect to numbers used (e.g., amounts, temperatures, etc.), but some experimental error and deviation should, of course, be allowed for.

[0430] The practice of the present invention will employ, unless otherwise indicated, conventional methods of protein chemistry, biochemistry, recombinant DNA techniques and pharmacology, within the skill of the art. Such techniques are explained fully in the literature. See, e.g., T. E. Creighton, Proteins: Structures and Molecular Properties (W.H. Freeman and Company, 1993); A. L. Lehninger, Biochemistry (Worth Publishers, Inc., current addition); Sambrook, et al., Molecular Cloning: A Laboratory Manual (2nd Edition, 1989); Methods In Enzymology (S. Colowick and N. Kaplan eds., Academic Press, Inc.); Remington's Pharmaceutical Sciences, 18th Edition (Easton, Pa.: Mack Publishing Company, 1990); Carey and Sundberg Advanced Organic Chemistry 3^{rd} Ed. (Plenum Press) Vols A and B(1992).

### Example 1: Identification of Shared HLA-PEPTIDE Neoantigens

[0431] We identified shared HLA-PEPTIDE neoantigens using a series of steps. We obtained a list of common driver mutations classified as “confirmed somatic” from the COSMIC database. For each mutation, we generated candidate neoepitopes (8 to 11-mer peptides), used a TPM of 100, and ran our EDGE prediction model (a model trained on HLA presented peptides sequenced by MS/MS, as described in U.S. Pat. No. 10,055,540, US Application Pub. No. US20200010849A1, international patent application publications WO/2018/195357 and WO/2018/208856, U.S. application Ser. No. 16/606,577, and international patent application PCT/US2020/021508, each herein incorporated by reference, in their entirety, for all purposes) across all modeled HLA alleles. Note that each peptide contained at least one mutant amino acid and was not a self-peptide. We then recorded any peptide with an HLA allele that has an EDGE score >0.001. The results are shown in Table A. A total of 10261 shared HLA-PEPTIDE neoantigen sequences were thus identified and are described in SEQ ID NO: 10,755-21,015. The corresponding HLA allele(s) for each sequence are shown.

[0432] The initial list provided in Table A was further analyzed for level of neoantigen/HLA prevalence in the patient population. “Antigen/HLA prevalence” or “is calculated as the frequency of a given mutation “(A)” in a given population multiplied by the frequency of an HLA allele “(B)” in the given population. Antigen/HLA prevalence can also refer to mutation/HLA prevalence or neoantigen/HLA prevalence. As part of this analysis, for each mutation, its (A) frequency was obtained across common tumor types in TCGA and recorded at its highest frequency amongst tumor types. (B) For each HLA allele in EDGE, the HLA allele frequency TCGA (a predominantly Caucasian population) was recorded. HLA allele frequencies are described in more detail in Shukla, S. A. et al. (Nat. Biotechnol. 33, 1152-1158 2015), herein incorporated by reference for all purposes. The neoantigen/HLA prevalence was calculated as (A) multiplied by (B). Any restricted peptide/HLA pair in Table A that is >0.1% prevalence using this methodology is identified with a “Most Common 1” (2387/10261).

[0433] Additionally, we characterized the prevalence of cancer driver mutations across a large cohort of patient samples representative of the advanced cancer patient population relevant for potential clinical studies. EDGE prediction was performed using the publicly-released AACR Genie v4.1 dataset, which has over 40,000 patients sequenced on NGS cancer gene panels ranging from 50 to 500 genes, from major academic cancer centers including Dana-Farber, Johns Hopkins, MD Anderson, MSKCC, and Vanderbilt. We selected base substitution and indel mutations in lung, microsatellite stable colon, and pancreatic cancers, and required coverage across multiple gene panels. We analyzed each neoantigen peptide paired with each of greater than 90 Class I HLA alleles covered in our EDGE antigen presentation prediction model and recorded the epitopes and corresponding HLA alleles with an EDGE probability of HLA presentation score of >0.001. We then determined the neoantigen/HLA prevalence of those peptide with an EDGE score >0.001, calculated as A*B, where A is the highest frequency of the mutation amongst the three tumor types and B is the HLA allele frequency. We used HLA allele frequencies representative of the population in the USA by examining HLA alleles from the TCGA population and tabulating the frequency for each HLA allele (Shukla, S. A. et al.). Peptides and corresponding HLA alleles that demonstrated a neoantigen/HLA prevalence >0.01% from the analysis are described in SEQ ID NO:21,016-29,357 and referred to as AACR GENIE Results.

### Example 2: Validation of Shared HLA-PEPTIDE Neoantigen Presentation

[0434] Mass spectrometry (MS) validation of candidate shared HLA-PEPTIDE neoantigens was performed using targeted mass spectrometry methods. Nearly 500 frozen resected lung, colorectal and pancreatic tumor samples were homogenized and used for both RNASeq transcriptome sequencing and immunoprecipitation of the HLA/peptide complexes. A peptide target list was generated for each sample by analysis of the transcriptome, whereby recurrent cancer driver mutations, as defined in the AACR Genie v4.1 dataset, were identified and RNA expression levels assessed. The EDGE model of antigen presentation was then applied to the mutation sequence and expression data to prioritize peptides for the targeting list. The peptides from the HLA molecules were eluted and collected using size exclusion to isolate the presented peptides prior to mass spectrometry. Synthetic heavy labeled peptide with the same amino acid sequence was co-loaded with each sample for targeted mass spectrometry. Both coelution of the heavy labeled peptide with the experimental peptide and analysis of the fragmentation pattern we were used to validate a candidate epitope. Mass spectrometry analysis methods are described in more detail in Gillete et al. (Nat Methods. 2013 January; 10(1):28-34), herein incorporated by reference in its entirety for all purposes.

[0435] Shared HLA-PEPTIDE neoantigens from driver mutations validated in this manner with sufficient prevalence for further consideration are summarized in Table 5A below, along with sample tumor type and associated HLA alleles.

TABLE 5A
Expression of MS-validated HLA-PEPTIDE neoantigens

| Patient | Tumor | Presenting | Gene_ | Peptide Elution | Targeted |
|---|---|---|---|---|---|
| ID | Type | HLA* | Mutation | Time (min.) | Peptide |
| A0002082 | CRC | HLA-A*03:01 | CTNNB1_S45P | 17.2 | TTAPPLSGK |
| A0001877 | Lung | HLA-A*02:01 | KRAS_G12C | 46.7 | KLVVVGACGV |
| A0002129 | Lung | HLA-A*02:01 | KRAS_G12C | 46.5 | KLVVVGACGV |
| A0001947 | CRC | HLA-A*11:01 | KRAS_G12D | 12 (pep. #1) | VVGADGVGK |
| A0001947 | CRC | HLA-A*11:01 | KRAS_G12D | 23.4 (pep. #2) | VVVGADGVGK |
| A0001474 | Gastric | HLA-A*11:01 | KRAS_G12V | 30.4 | VVVGAVGVGK |
| A0001730 | Pancreatic | HLA-A*11:01 | KRAS_G12V | 18.4 (pep. #1) | VVGAVGVGK |
| A0001730 | Pancreatic | HLA-A*11:01 | KRAS_G12V | 31.6 (pep. #2) | VVVGAVGVGK |
| A0001896 | Lung | HLA-C*01:02 | KRAS_G12V | 23.6 | AVGVGKSAL |
| A0001966 | CRC | HLA-A*03:01 | KRAS_G12V | 27.8 | VVVGAVGVGK |
| A0001973 | Ovarian | HLA-A*24:02 | TP53_K132N | 97.7 | TYSPALNNMF |
| A0001983 | Ovarian | HLA-A*02:01 | CTNNB1_S37Y | 50.9 | YLDSGIHYGA |
| A0000799 | CRC | HLA-B*08:01 | CHD4_K73fs | 43.3 | TVRAATIL |

*When the same peptide was predicted to be presented by multiple HLA alleles for a patient and detected by MS/MS, it was inferrec 1 to be presented by the highest scoring HLA allele by EDGE or both alleles if the scores were sufficiently close

[0436] Selected HLA-PEPTIDE neoantigens were also validated by in vitro assay. Briefly, cell lines were engineered to express a single specific HLA alleles and inducibly express a candidate shared neoantigen according to methods described below.

[0437] Materials and Methods for validation of selected HLA-PEPTIDE neoantigens by in vitro assay.

[0438] Single HLA allele expressing K562 cell lines were created by traditional transfection methods using reagent kits and the instructions provided.

[0439] To create virus particles for transduction of the HLA genes into K562 cells the plasmids were transfection into Phoenix-ampho cells. Phoenix-ampho cells were introduced into 6 well plates at a density of 5×10⁵ cells per well and incubated at 37C overnight prior to transfection. 10 ug of purified DNA was mixed with 10 uL Plus Reagent and brought to 100 uL with pre-warmed Opti-MEM media. Lipofectamine reagent was prepared by mixing 8 uL of Lipofectamine with 92 uL of the pre-warmed Opti-MEM. Both mixtures were incubated at room temperature for 15 prior to mixing the 100 uL of Lipofectamine reagent with the 100 uL of DNA solution and allowing the combined solution to incubate at room temperature for another 15 min. The Phoenix-ampho cells were washed gently by aspirating the media and adding 6 mL of pre-warmed Opti-MEM media to wash the cells. The media was removed from the plated cells. 800 uL of the pre-warmed Opti-MEM was added to the DNA/Lipofectamine mixture to make 1 mL and that solution was added to the plated cells. After the plate was incubated for 3 hrs at 37C, 3 mL of complete media was added and the cells were incubated overnight at 37C. The complete media was exchanged after the incubation and the cells incubated for another 2 days. Virus particles were collected after the supernatant was passed through a 45 um filter into a new 6 well plate. 20 uL of Plus reagent and 8 uL of Lipofectamine was added to each well with a 15 min room temperature incubation after each addition.

[0440] K562 cells were suspended complete media at a concentration of 5×10⁶ per mL. 100 uL of K562 cells were added to each well of the 6 well plate containing the virus particles. The plate was centrifuged at 700×g for 20 min and the cells were incubated for 6 hrs at 37C. Cells and virus were collected and transferred to T25 flasks with the addition of 7 mL of complete media. The cells were incubated for 3 days prior to a media change which included selection with Puromyocin antibiotic. Live cells were collected and passaged to create stocks of K562 cells expressing a single HLA allele. Overall 25 of these cell lines were created, each with a different HLA expressed, to provide a reagent pool for future experiments.

[0441] A shared neoantigen cassette was created to express 20 shared neoantigens with the mutation centered in a 25mer amino acid chain and was created with no linkers between the entries. This cassette was subcloned into a lentiviral Tet-One Inducible Expression vector system (Clontech) and lentivirus was produced in 293T cells by cotransfecting the shared neoantigen expression vector with ViraPower (Thermo) packaging plasmids according to manufacturer's specifications. Single HLA Allele expressing K562 cell lines were then transduced with this virus as described above and single cell clones were characterized for shared neoantigen expression. Briefly, expression of the shared neoantigen cassette was placed under control of a doxycycline (DOX)-controlled TRE3G promoter, where administration of DOX leads to expression of the neoantigens via stabilization of the Tet-On 3G transactivator protein that is constitutively expressed on the same plasmid. The TREG3 promoter—Tet-On 3G transactivator system allows titration of DOX to control the level of expression. As shown in FIG. 7, expression of a representative neoantigen increased as the concentration of DOX administered increased, demonstrating regulatable expression.

[0442] Cells containing both the single HLA allele and the shared neoantigen cassette were grown to ˜2.5×10⁸ cells and pelleted into 15 mL vials. Additionally, cells were plated in limited dilution to prepare single clones of the HLA/Cassette pairing. These single clones were tested to achieve a variety of expression levels of the cassette. Use of cell lines with differing expression levels of the cassette allows for analysis of the system at close to endogenous expression levels. Single clones were also grown to ˜2.5×10⁸ cells and pelleted into 15 mL vials. All pellets were washed 2× with cold PBS and frozen to allow for processing for mass spectrometry detection of HLA peptides. Expression levels of the HLA and the cassette was performed using SmartSeq or Tagman assays with appropriate probes.

[0443] For isolation of HLA peptides, each cell pellet was lysed with lysis buffer and centrifuged at 20,000×g for 1 hr to clarify the lysate and the HLA peptide complexes were enriched. Heavy peptides—peptides synthesized with amino acids containing isotopically heavy amino acids—were added to the peptides prior to analysis by MS to aid in confirmation of the identity of the peptides detected.

[0444] As shown in FIG. 8, a representative KRAS G12V peptide VVGAVGVGK was observed by mass-spectrometry in a HLA-A*11:01 expressing K562 cell line, in a DOX-dependent manner (FIG. 8, top panels). Detection of the heavy peptide control standard was equivalent (FIG. 8, bottom panels). Thus, validation of HLA-specific presentation of predicted neoantigens was demonstrated using the single-HLA K562 in vitro system.

[0445] The in vitro system described above was used to validate HLA-specific presentation of predicted neoantigens.

[0446] Results are shown in Table 5B, below.

TABLE 5B
Validated HLA-PEPTIDE neoantigens by in vitro assay

| | HLA | Peptide | Peptide |
|---|---|---|---|
| Gene | Type | Detected | sequence |
| CTNNB1_S45P | A*11:01 | 9-mer | TTAPPLSGK |
| CTNNB1_T41A | A*11:01 | 9-mer | ATAPSLSGK |
| KRAS_G12D | A*11:01 | 10-mer | VVVGADGVGK |
| KRAS_G12V | A*03:01 | 9-mer | VVGAVGVGK |
| KRAS_G12V | A*03:01 | 10-mer | VVVGAVGVGK |
| KRAS_G12V | A*11:01 | 9-mer | VVGAVGVGK |
| KRAS_G12V | A*11:01 | 10-mer | VVVGAVGVGK |
| KRAS_Q61R | A*01:01 | 10-mer | ILDTAGREEY |
| TP53_R213L | A*02:01 | 9-mer | YLDDRNTFL |

[0447] We further evaluated the MS data with respect to mutations for which peptides were not detected in order to assess the value of narrowly targeting patients with specific HLAs for treatment, e.g., requiring patients to have at least one validated or predicted HLA allele that presents a restricted peptide disclosed herein.

[0448] For example, in the case of KRAS, we counted the number of patient samples in which KRAS restricted peptides for particular HLA alleles were detected or not detected. (When the same peptide was predicted to be presented by multiple HLA alleles for a patient and detected by MS/MS, it was inferred to be presented by the highest scoring HLA allele by EDGE or both alleles if the scores were sufficiently close). Results are presented in Table 6. Based on these results, several common HLA alleles are not expected to present a given KRAS restricted peptide and these KRAS restricted peptide/HLA pairs can be excluded for purposes of selection criteria for immunotherapy design and patient selection in this instance. For example, Table 7 directed to selected HLA-PEPTIDE neoantigen targets for immunotherapy does not include predicted HLA-PEPTIDE neoantigen HLA-A*02:01_RAS G12D, on the basis that the restricted peptide was not detected in 17 samples tested, and likewise did not include G12V/A*02:01 on the basis that the peptide was not detected in 9 samples tested. In contrast, neoantigen/HLA pair G12D/A*11:01 was considered validated on the basis that the peptide was detected in ⅕ samples tested, and likewise G12V/A*11:01 was considered validated on the basis that the peptide was detected in 2/6 samples tested.

[0449] These results highlight the importance of identifying the relevant restricted peptide/HLA pairs for proper HLA type selection in patient selection for treatment with a shared neoantigen immunotherapy, such as that described in Table 7. Specifically, several common KRAS restricted peptide/HLA pairs were excluded for purposes of selection criteria in this case as the MS data suggested a shared HLA-PEPTIDE neoantigen ABP would unlikely provide a benefit to a patient with that predicted KRAS neoantigen/HLA pair (e.g., G12D/A*02:01 or G12V/A*02:01).

TABLE 6

| | | HLA Peptide | Number of tested |
|---|---|---|---|
| Gene | | confirmation | patient samples |
| mutation | HLA | by MS/MS | with MS/MS result |
| KRAS_G12A | HLA-A*02:01 | N | 2 |
| KRAS_G12A | HLA-A*02:06 | N | 1 |
| KRAS_G12A | HLA-A*03:01 | N | 3 |
| KRAS_G12A | HLA-B*27:05 | N | 1 |
| KRAS_G12A | HLA-B*35:01 | N | 1 |
| KRAS_G12A | HLA-B*41:02 | N | 1 |
| KRAS_G12A | HLA-B*48:01 | N | 1 |
| KRAS_G12A | HLA-C*08:03 | N | 1 |
| KRAS_G12C | HLA-A*02:01 | Y | 2 |
| KRAS_G12C | HLA-A*02:01 | N | 2 |
| KRAS_G12C | HLA-A*03:01 | N | 8 |
| KRAS_G12C | HLA-A*03:02 | N | 1 |
| KRAS_G12C | HLA-A*68:01 | N | 1 |
| KRAS_G12C | HLA-B*27:05 | N | 1 |
| KRAS_G12D | HLA-A*02:01 | N | 17 |
| KRAS_G12D | HLA-A*02:05 | N | 2 |
| KRAS_G12D | HLA-A*03:01 | N | 4 |
| KRAS_G12D | HLA-A*11:01 | Y | 1 |
| KRAS_G12D | HLA-A*11:01 | N | 4 |
| KRAS_G12D | HLA-A*26:01 | N | 2 |
| KRAS_G12D | HLA-A*31:01 | N | 4 |
| KRAS_G12D | HLA-A*68:01 | N | 3 |
| KRAS_G12D | HLA-B*07:02 | N | 4 |
| KRAS_G12D | HLA-B*08:01 | N | 1 |
| KRAS_G12D | HLA-B*13:02 | N | 1 |
| KRAS_G12D | HLA-B*15:01 | N | 5 |
| KRAS_G12D | HLA-B*27:05 | N | 2 |
| KRAS_G12D | HLA-B*35:01 | N | 2 |
| KRAS_G12D | HLA-B*37:01 | N | 1 |
| KRAS_G12D | HLA-B*38:01 | N | 2 |
| KRAS_G12D | HLA-B*40:01 | N | 3 |
| KRAS_G12D | HLA-B*40:02 | N | 3 |
| KRAS_G12D | HLA-B*44:02 | N | 1 |
| KRAS_G12D | HLA-B*44:03 | N | 4 |
| KRAS_G12D | HLA-B*48:01 | N | 1 |
| KRAS_G12D | HLA-B*50:01 | N | 1 |
| KRAS_G12D | HLA-B*57:01 | N | 1 |
| KRAS_G12D | HLA-C*01:02 | N | 1 |
| KRAS_G12D | HLA-C*02:02 | N | 1 |
| KRAS_G12D | HLA-C*03:03 | N | 3 |
| KRAS_G12D | HLA-C*03:04 | N | 2 |
| KRAS_G12D | HLA-C*04:01 | N | 8 |
| KRAS_G12D | HLA-C*05:01 | N | 2 |
| KRAS_G12D | HLA-C*07:04 | N | 1 |
| KRAS_G12D | HLA-C*08:02 | N | 2 |
| KRAS_G12D | HLA-C*08:03 | N | 1 |
| KRAS_G12D | HLA-C*16:01 | N | 1 |
| KRAS_G12D | HLA-C*17:01 | N | 1 |
| KRAS_G12R | HLA-B*41:02 | N | 1 |
| KRAS_G12R | HLA-C*07:04 | N | 1 |
| KRAS_G12V | HLA-A*02:01 | N | 9 |
| KRAS_G12V | HLA-A*02:05 | N | 1 |
| KRAS_G12V | HLA-A*02:06 | N | 1 |
| KRAS_G12V | HLA-A*03:01 | Y | 1 |
| KRAS_G12V | HLA-A*03:01 | N | 4 |
| KRAS_G12V | HLA-A*11:01 | Y | 2 |
| KRAS_G12V | HLA-A*11:01 | N | 4 |
| KRAS_G12V | HLA-A*25:01 | N | 3 |
| KRAS_G12V | HLA-A*26:01 | N | 2 |
| KRAS_G12V | HLA-A*30:01 | N | 2 |
| KRAS_G12V | HLA-A*31:01 | N | 2 |
| KRAS_G12V | HLA-A*32:01 | N | 1 |
| KRAS_G12V | HLA-A*68:02 | N | 1 |
| KRAS_G12V | HLA-B*07:02 | N | 6 |
| KRAS_G12V | HLA-B*08:01 | N | 1 |
| KRAS_G12V | HLA-B*13:02 | N | 2 |
| KRAS_G12V | HLA-B*14:02 | N | 1 |
| KRAS_G12V | HLA-B*15:01 | N | 2 |
| KRAS_G12V | HLA-B*27:05 | N | 2 |
| KRAS_G12V | HLA-B*39:01 | N | 1 |
| KRAS_G12V | HLA-B*40:01 | N | 1 |
| KRAS_G12V | HLA-B*40:02 | N | 1 |
| KRAS_G12V | HLA-B*41:02 | N | 1 |
| KRAS_G12V | HLA-B*44:05 | N | 1 |
| KRAS_G12V | HLA-B*50:01 | N | 1 |
| KRAS_G12V | HLA-B*51:01 | N | 1 |
| KRAS_G12V | HLA-C*01:02 | Y | 1 |
| KRAS_G12V | HLA-C*01:02 | N | 1 |
| KRAS_G12V | HLA-C*03:03 | N | 1 |
| KRAS_G12V | HLA-C*03:04 | N | 2 |
| KRAS_G12V | HLA-C*08:02 | N | 2 |
| KRAS_G12V | HLA-C*14:02 | N | 1 |
| KRAS_G12V | HLA-C*17:01 | N | 2 |
| KRAS_G13D | HLA-A*02:01 | N | 2 |
| KRAS_G13D | HLA-B*07:02 | N | 1 |
| KRAS_G13D | HLA-B*08:01 | N | 1 |
| KRAS_G13D | HLA-B*35:01 | N | 1 |
| KRAS_G13D | HLA-B*35:03 | N | 1 |
| KRAS_G13D | HLA-B*35:08 | N | 1 |
| KRAS_G13D | HLA-B*38:01 | N | 1 |
| KRAS_G13D | HLA-C*04:01 | N | 3 |
| KRAS_Q61H | HLA-A*01:01 | N | 1 |
| KRAS_Q61H | HLA-A*02:01 | N | 2 |
| KRAS_Q61H | HLA-A*23:01 | N | 2 |
| KRAS_Q61H | HLA-A*29:01 | N | 1 |
| KRAS_Q61H | HLA-A*30:02 | N | 1 |
| KRAS_Q61H | HLA-A*33:01 | N | 1 |
| KRAS_Q61H | HLA-A*68:01 | N | 1 |
| KRAS_Q61H | HLA-B*07:02 | N | 1 |
| KRAS_Q61H | HLA-B*08:01 | N | 1 |
| KRAS_Q61H | HLA-B*18:01 | N | 1 |
| KRAS_Q61H | HLA-B*35:01 | N | 1 |
| KRAS_Q61H | HLA-B*38:01 | N | 1 |
| KRAS_Q61H | HLA-B*40:01 | N | 1 |
| KRAS_Q61H | HLA-B*44:02 | N | 1 |
| KRAS_Q61H | HLA-C*03:04 | N | 1 |
| KRAS_Q61H | HLA-C*05:01 | N | 2 |
| KRAS_Q61H | HLA-C*08:02 | N | 1 |

### Example 3: Selection of Shared HLA-PEPTIDE Neoantigens for Immunotherapy

[0450] A selection of clinically useful HLA-PEPTIDE neoantigen targets for immunotherapy (“GO-005”) containing 20 shared HLA-PEPTIDE neoantigens was constructed. Table 7 describes features of the HLA-PEPTIDE neoantigens selected for the selection. Shared HLA-PEPTIDE neoantigens directly detected on the surface of tumor cells by mass spectrometry, as described above in Table 5A, were included in the cassette and the HLA of the epitope was added to the eligible HLA list for the mutations. HLA-PEPTIDE neoantigens not independently verified as being presented in our assays were considered validated and added if there was compelling literature evidence of tumor presentation (e.g., tumor-infiltrating lymphocytes (TIL) recognizing the neoantigen). KRAS G12D presented by HLA-C*08:02 was considered validated and added based on literature evidence of adoptive cell therapy targeting this HLA-PEPTIDE neoantigen causing tumor regression in a patient with CRC (Tran et al. N Engl J Med. 2016 Dec. 8; 375(23): 2255-2262). HLA-PEPTIDE neoantigens with validated HLA alleles occupied 6 out of 20 slots.

[0451] Additional, rarer HLA-PEPTIDE neoantigens predicted to be presented by tumor cells, but not yet validated by MS, were used to complement the initial set. Mutations with high EDGE scores were prioritized for inclusion as predicted HLA-PEPTIDE neoantigens given the strong dependence we observed between EDGE score and probability of detection of candidate shared HLA-PEPTIDE neoantigen peptides by targeted mass spectrometry (MS) validation experiments described herein. Results showing the correlation between EDGE score and the probability of detection of candidate shared HLA-PEPTIDE neoantigen peptides by targeted MS are shown in FIG. 4. Specifically, predicted HLA-PEPTIDE neoantigens with an EDGE HLA presentation score of at least 0.3 and the highest cumulative neoantigen/HLA prevalence across NSCLC, CRC and Pancreatic cancer were included in the selection. Combined HLA frequency was required to be at least 5-10% (e.g., there are 11% of the American population harboring HLA alleles B1501 or B1503). Of note, KRAS and NRAS harbors the same sequence around codons 12, 13, and 61. Validated HLAs, predicted HLAs with an EDGE score of at least 0.3, the mean EDGE score of the predicted HLAs, and neoantigen/HLA prevalence in the three cancer populations are also presented in Table 7.

[0452] Table 7 (below) depicts 20 exemplary shared HLA-PEPTIDE neoantigens comprising a cancer-related mutation and a particular HLA Class I allele, based on EDGE Score and prevalence in cancer patient populations. The exemplary shared HLA-PEPTIDE neoantigens are particularly useful targets for cancer immunotherapy, e.g., by treatment with an ABP that selectively binds the HLA-PEPTIDE neoantigen.

TABLE 7
Selected Shared HLA-PEPTIDE neoantigens

| | | | | Neo-Ag/ | Neo-Ag/ | Neo-Ag/ |
|---|---|---|---|---|---|---|
| | | | | HLA | HLA | HLA |
| | | Validated | Predicted | Prevalence | Prevalence | Prevalence |
| Slot | Mutation | HLA | HLA | in Lung | in CRC | in Pancreas |
| 1 | KRAS_G13D | A1101 | C0802 | 0.07% | 0.39% | 0.06% |
| 2 | KRAS_Q61K | A0101 | — | 0.05% | 0.37% | 0.00% |
| | NRAS_Q61K | | | | | |
| 3 | TP53_R249M | — | B3512, | 0.04% | 0.00% | 0.00% |
| | | | B3503, | | | |
| | | | B3501 | | | |
| 4 | CTNNB1_S45P | A0301, | A6801, | 0.13% | 0.00% | 0.00% |
| | | A1101 | A0302, | | | |
| 5 | CTNNB1_S45F | A1101 | A0301, | 0.08% | 0.27% | 0.00% |
| | | | A6801 | | | |
| 6 | ERBB2_Y772_A775dup | — | B1801 | 0.11% | 0.00% | 0.00% |
| 7 | KRAS_G12D | A1101, | — | 0.79% | 2.28% | 5.45% |
| | NRAS_G12D | A0301, | | | | |
| | | C0802 | | | | |
| 8 | KRAS_Q61R | A0101 | — | 0.06% | 0.33% | 0.47% |
| | NRAS_Q61R | | | | | |
| 9 | CTNNB1_T41A | A1101 | A0301, | 0.00% | 0.27% | 0.00% |
| | | | A0302, | | | |
| | | | B1510, | | | |
| | | | C0303, | | | |
| | | | C0304 | | | |
| 10 | TP53_K132N | A2402 | A2301 | 0.04% | 0.00% | 0.00% |
| 11 | KRAS_G12A | A0301, | — | 0.58% | 0.49% | 0.00% |
| | | A1101 | | | | |
| 12 | KRAS_Q61L | — | A0101 | 0.22% | 0.08% | 0.00% |
| | NRAS_Q61L | | | | | |
| 13 | TP53_R213L | A0201 | A0207, | 0.09% | 0.18% | 0.00% |
| | | | C0802 | | | |
| 14 | BRAF_G466V | — | B1501, | 0.03% | 0.05% | 0.00% |
| | | | B1503 | | | |
| 15 | KRAS_G12V | A0301, | A0302 | 2.56% | 3.43% | 9.89% |
| | | A1101, | | | | |
| | | C0102 | | | | |
| 16 | KRAS_Q61H | A0101 | — | 0.42% | 0.28% | 0.91% |
| | NRAS_Q61H | | | | | |
| 17 | CTNNB1_S37F | A0101 | A2301, | 0.29% | 0.00% | 0.00% |
| | | | A2402 | | | |
| | | | B1510, | | | |
| | | | B3906 | | | |
| | | | C0501, | | | |
| | | | C1402 | | | |
| | | | C1403 | | | |
| 18 | TP53_S127Y | — | A1101, | 0.04% | 0.00% | 0.00% |
| | | | A0301 | | | |
| 19 | TP53_K132E | — | A2402, | 0.00% | 0.05% | 0.00% |
| | | | C1403, | | | |
| | | | A2301 | | | |
| 20 | KRAS_G12C | A0201, | — | 5.00% | 1.46% | 0.63% |
| | NRAS_G12C | A0301, | | | | |
| | | A1101 | | | | |

[0453] Additionally, we determined the total population of patients with at least one HLA allele identified (i.e., either validated or predicted) to present at least one shared neoantigen from Table 7 (i.e., the HLA-PEPTIDE neoantigen comprising both the mutation and the HLA allele, referred to herein as GO-005 targeted patient population) and compared it to the population of patients with the mutations (agnostic of whether the patient had the identified allele). To estimate the GO-005 targeted patient population, we collected patient mutation data from AACR Genie. As such patients do not have matching HLA alleles, we sampled HLA alleles from the TCGA population and paired it to the AACR Genie dataset. Then given a tumor type, any patient from AACR Genie with matching both mutation and HLA was labeled positive, and any patient that doesn't meet the criteria was labeled negative. The percent positives give the overall addressable patient population, per tumor type, in Table 8.

[0454] It can be readily appreciated from Table 8 that only a subset of patients who carry a particular mutation also carry the HLA allele likely to present that mutation as a HLA-PEPTIDE neoantigen. Patients with the mutation, but without the appropriate HLA allele are less likely to benefit from therapy. As an example, whereas an estimated ˜60% of pancreatic cancer patients carry appropriate mutations/neoantigens, more than 2 out of 3 of these patients do not carry the corresponding HLA allele(s). Therefore, an ABP-based immunotherapy strategy that considers the relevant mutation and HLA allele pairs as proposed will target primarily those patients who may benefit. Thus, consideration of epitope presentation by validated or high-scoring predicted HLA is an important step in determining the potential efficacy of a shared HLA-PEPTIDE neoantigen ABP.

TABLE 8
Neoantigen/HLA Prevalence in Target Populations

| | MSS CRC | Pancreas | Lung |
|---|---|---|---|
| GO-005 Targeted Patient | 9.0% | 17.4% | 10.6% |
| Population (cumulative | | | |
| neoantigen/HLA prevalence) | | | |
| HLA agnostic patient population | 35.1% | 60.8% | 32.0% |
| (mutation frequency only) | | | |

### Example 4: Evaluation of Immune Response Induction by Shared HLA-PEPTIDE Neoantigens

[0455] We evaluated whether HLA-PEPTIDE neoantigens induce an immune response in patients. We obtained dissociated tumor cells from a patient with lung adenocarcinoma. Tumor cells were sequenced to determine the patient's HLA and identify mutations. The patient expressed HLA-A*11:01 and we identified the KRAS G12V mutation in the tumor. Simultaneously, we sorted and expanded CD45+ cells from the tumor which represent tumor infiltrating lymphocytes (TIL). Expanded TILs were stained with mutated peptide HLA-A*11:01 tetramers to assess immunogenicity of this mutation in the patient. FIG. 5 shows the flow cytometry gating strategy on CD8+ cells (FIG. 5A) and the staining of CD8+ cells by KRAS-G12V/HLA-A*11:01 tetramer (FIG. 5B). A large portion (greater than 66%) of CD8+ T cells demonstrate binding to the KRAS G12V:HLA*1101 tetramer, indicating the ability of CD8+ T cells to recognize the HLA-PEPTIDE neoantigen and indicating a pre-existing immune response to the HLA-PEPTIDE neoantigen.

[0456] In addition, CD8+ cells in the expanded TILs were labeled with the KRAS-G12V/HLA-A*11:01 tetramer and sorted. The TCRs were sequenced using 10× Genomics single cell resolution paired immune TCR profiling approach (Chromium Single Cell A Chip Kit, Chromium Single Cell 5′ Library & Gel Bead Kit, Chromium Single Cell 5′ Library Construction kit, Chromium Single Cell 5′ Feature Barcode Library Kit [10× Genomics]). Sequencing reads were processed through the 10× provided software Cell Ranger. Sequencing reads were tagged with a Chromium cellular barcodes and UMIs, which are used to assemble the V(D)J transcripts cell by cell. The assembled contigs for each cell were then annotated by mapping the assembled contigs to the Ensemble v87 V(D)J reference sequences. Clonotypes were defined as alpha, beta chain pairs containing unique CDR3 sequences. Clonotypes were filtered for single alpha and single beta chain pairs present at frequency above 2 cells to yield the final list of clonotypes per target peptide in a specific donor. As shown in Table 1B and 1D, multiple TCR sequences were identified for KRAS-G12V/HLA-A*11:01, including to different G12V epitopes. The results demonstrate that neoantigen-specific TCRs can be identified from subject samples, such as TILs.

### Example 5: Selection of Shared HLA-PEPTIDE Neoantigens and Patient Populations for HLA-PEPTIDE Neoantigen-Specific Immunotherapy

[0457] An ABP (e.g. a TCR), or a cell engineered to express an ABP (e.g., a T cell, such as a autologous T cell, engineered to express an antigen/neoantigen specific TCR), to a HLA-PEPTIDE neoantigen as described in Table 7, Table A, the AACR GENIE Results, or SEQ ID NOs 29358-29364 described herein (SEQ ID NOs: 10,755-29,364) is administered to a cancer patient. The ABP is administered to a patient, e.g., to treat cancer. In certain instances the patient is selected, e.g., using a companion diagnostic or a commonly use cancer gene panel NGS assay such as FoundationOne, FoundationOne CDx, Guardant 360, Guardant OMNI, or MSK IMPACT. Exemplary patient selection criteria are described below.

### Patient Selection

[0458] Patient selection for ABP administration is performed by consideration of tumor gene expression, somatic mutation status, and patient HLA type. Specifically, a patient is considered eligible for the ABP-based immunotherapy therapy if the patient has cancer, and if:
[0459] (a) one or more cells of the patient expresses or is known to express an HLA Class I molecule as described in any one of SEQ ID NOs:10,755 to 29,364. In such cases, the patient may be administered an ABP that targets a HLA-PEPTIDE neoantigen described herein, such that the HLA-PEPTIDE neoantigen comprises the same HLA Class I molecule expressed by the one or more cells of the patient. By way of example only, a patient is considered eligible for ABP-based immunotherapy by administration of an ABP that selectively binds to RAS G12D neoantigen HLA-A*11:01_VVVGADGVGK (“SNA30”) if one or more cells of the patient expresses or is known to express HLA-A*11:01.
[0460] (b) one or more cells of the patient expresses or is known to express an HLA Class I molecule as described in any one of SEQ ID NOs:10,755 to 29,364, and the cancer expresses or is predicted to express a gene associated with a somatic mutation. By way of example only, a patient is considered eligible for ABP-based immunotherapy by administration of an ABP that selectively binds to RAS G12D neoantigen HLA-A*11:01_VVVGADGVGK (“SNA30”) if one or more cells of the patient expresses or is known to express HLA-A*11:01 and the cancer expresses or is predicted to express KRAS.
[0461] (c) one or more cells of the patient expresses or is known to express an HLA Class I molecule as described in any one of SEQ ID NOs:10,755 to 29,364, and the patient tumor or tumor nucleic acid carries the somatic mutation associated with the SEQ ID NO. By way of example only, a patient is considered eligible for ABP-based immunotherapy by administration of an ABP that selectively binds to RAS G12D neoantigen HLA-A*11:01_VVVGADGVGK (“SNA30”) if one or more cells of the patient expresses or is known to express HLA-A*11:01 and a tumor sample from the patient harbors the RAS G12D somatic mutation.
[0462] (d) Same as (b) or (c), but also requiring that the patient tumor expresses the gene with the mutation above a certain threshold (e.g., 1 TPM or 10 TPM), or
[0463] (e) Same as (b) or (c), but also requiring that the patient tumor expresses the mutation above a certain threshold (e.g., at least 1 mutated read observed at the level of RNA)
[0464] (f) Same as (b) or (c), but also requiring both additional criteria in (c) and (d)
[0465] (g) Any of the above, but also optionally requiring that loss of the presenting HLA allele is not detected in the tumor

[0466] Gene expression may be measured at the RNA or protein level by methods including, but not limited to RNASeq, microarray, PCR, Nanostring, ISH, Mass spectrometry, or IHC. Thresholds for positivity of gene expression is established by several methods, including: (1) predicted probability of presentation of the epitope by the HLA allele at various gene expression levels, (2) correlation of gene expression and HLA epitope presentation as measured by mass spectrometry, and/or (3) clinical benefits of ABP-based immunotherapy attained for patients expressing the genes at various levels.

[0467] Somatic mutational status may be assessed by any of the established methods, including exome sequencing (NGS DNASeq), targeted exome sequencing (panel of genes), transcriptome sequencing (RNASeq), Sanger sequencing, PCR-based genotyping assays (e.g., Tagman or droplet digital PCR), Mass-spectrometry based methods (e.g., by Sequenom), next generation sequencing, massively parallel sequencing, or any other method known to those skilled in the art.

### Example 6: Identification of TCRs that Bind HLA-PEPTIDE Target Neoantigens

### Methods

[0468] Peripheral blood mononuclear cells (PBMCs) were obtained by processing leukapheresis samples from healthy donors. Frozen PBMCs were thawed and enriched for different subsets of T cells through negative depletion using the following magnetic-activated cell sorting (MACS) systems (Miltenyi Biotech), as indicated below: (i) Pan T Cell Isolation Kit to enrich for naïve and memory CD4 and CD8 T cells; or a (ii) Naïve CD8 T Cell Isolation Kit & CD4 depletion kit to enrich for naïve CD8 T cells. Enriched T cells were labeled either with a single neoantigen-MHC tetramer or a pool of neoantigen-MHC tetramers of interest, as indicated below, as well as stained with live/dead and lineage markers and sorted by FACS. In addition, in some experiments the enriched T cells were labeled with a peptide-MHC tetramer containing the wildtype peptide corresponding to the neoantigen(s) of interest. Sorted T cells were polyclonally expanded with feeder cells and IL-2 for 2-3 weeks.

[0469] Following polyclonal expansion, the resulting cells were either:

[0470] a. labeled again with a target peptide-MHC tetramer and resorted (bulk resort) for peptide-MHC tetramer labeled cells

[0471] b. stimulated with neoantigen (10 μM) loaded PBMCs (or a DMSO control) and resorted (bulk resort) for CD137 upregulation after a day of stimulation

[0472] Cells isolated after resort were sequenced using 10× Genomics single cell resolution paired immune TCR profiling approach (Chromium Single Cell A Chip Kit, Chromium Single Cell 5′ Library & Gel Bead Kit, Chromium Single Cell 5′ Library Construction kit, Chromium Single Cell 5′ Feature Barcode Library Kit [10× Genomics]). Sequencing reads were processed through the 10× provided software Cell Ranger. Sequencing reads were tagged with a Chromium cellular barcodes and UMIs, which are used to assemble the V(D)J transcripts cell by cell. The assembled contigs for each cell were then annotated by mapping the assembled contigs to the Ensemble v87 V(D)J reference sequences. Clonotypes were defined as alpha, beta chain pairs containing unique CDR3 sequences. Clonotypes were filtered for single alpha and single beta chain pairs present at frequency above 2 cells to yield the final list of clonotypes per target peptide in a specific donor.

### Results

[0473] Isolation of neoantigen specific T cells from healthy donors (i.e., donors generally considered in good health with no history of tumor) was assessed. A Pan T Cell Isolation Kit was used to enrich for naïve and memory CD4 and CD8 T cells. As shown in FIG. 2, enriched naïve and memory T cells were effectively labeled using a pool of 6 neoantigen-MHC tetramers to identify neoantigen specific T cells (FIG. 2, left panel, X-axis). The neoantigen-MHC tetramer pool contained A*01:01/KRAS Q61H/K/L/R, A*02:01/KRAS G12C, and A*02:01/TP53 R213L. The labeling also demonstrated effective separation of neoantigen specific T cells from T cells specific for the corresponding wildtype peptide (wildtype specific T cells FIG. 2 left panel, Y-axis), where the wildtype peptide-MHC tetramers were A*01:01/KRAS Q61, A*02:01/KRAS G12; and A*02:01/TP53 R213. Gating on neoantigen-MHC tetramer^{h} (“SNA/HLA^{hi}”) cells also demonstrated that about two-thirds of the neoantigen specific T cells from healthy donors were naïve, while a third demonstrated a memory T cell phenotype (64.2% CD45RO⁻ versus 32.4% CD45RO*; FIG. 2 right panel), indicating that memory T cells (CD45RA-CD45RO+) can be a source of neoantigen-specific TCRs even from a healthy donor who has no history of KRAS or TP53 mutation.

[0474] Two weeks after the initial round of pooled sorting/isolation and T cell expansion, cells were divided and individually labeled with each of the 6 neoantigen-MHC tetramers. As shown in FIG. 3A, the expanded cells demonstrated the presence of at least 5 out of the 6 neoantigen specific T cells (A*01:01/KRAS Q61K/L/R/H and A*02:01/TP53 R213L), although the neoantigen specific T cells represented a generally small portion of the total CD8 population (2% or less). To increase frequency of the neoantigen-specific T cells, sorted/isolated peptide-MHC positive cells were expanded an additional week. As shown in FIG. 3B, the expanded cells demonstrated the presence of neoantigen specific T cells (A*01:01/KRAS Q61L/R/H and A*02:01/TP53 R213L), with the neoantigen specific T cells representing between about 5-24% of the total CD8 population. The labeled cell populations were resorted and subsequently processed to for TCR sequencing at single cell level, as described above.

[0475] In addition, isolation of neoantigen specific T cells from a naïve population of T cells isolated from healthy donors was also assessed using labeling with a single neoantigen-MHC tetramer. A Naïve CD8 T Cell Isolation Kit & CD4 depletion kit were used to enrich for naïve CD8 T cells. The neoantigen-MHC tetramers used were A*11:01/KRAS G12V, A*03:01/KRAS G12V-9mer; and A*03:01/KRAS G12V-10mer. As shown in FIG. 6, two weeks after the initial round of sorting/isolation and T cell expansion using a single neoantigen-MHC tetramer, relabeling of the expanded cells demonstrated a large population (30-55% of the total CD8 T cell population) of neoantigen specific T cells.

[0476] The results of the sorting/isolation experiments demonstrate that while a pooled sorting/isolation method using a mixture of neoantigen-MHC tetramers can be used to isolate neoantigen specific T cells, sorting/isolation using a single neoantigen-MHC tetramer can result in a higher frequency of neoantigen specific T cells.

[0477] Next, the TCR sequencing was assessed for the various cell populations isolated as described above. Cells identified using the CTNNB1_S45P tetramer HLA-A*03:01/TTAPPLSGK were also processed. The neoantigen-tetramer labeled expanded cell populations were resorted and subsequently processed for TCR sequencing at single cell level, as described above. As shown in Tables 1A. 1-1A. 3 and Tables 1C. 1-1C. 3, multiple TCR sequences were identified for HLA-A*02:01/KLVVVGACGV, HLA-A*03:01/TTAPPLSGK, HLA-A*03:01/VVGAVGVGK, HLA-A*03:01/VVVGAVGVGK, and HLA-A*11:01/VVGAVGVGK. The results demonstrate that neoantigen-specific TCRs can be identified in a naïve population of T cells from healthy donor cells, including to TCRs specific for different epitopes and/or different HLAs.

[0478] In addition to neoantigen-tetramer labeling of T cells for resorting, cells were resorted based on functional signaling to a cognate peptide. Expanded naïve CD8 T cells that were originally enriched using the single neoantigen-MHC tetramers A*11:01/KRAS G12V were stimulated using PBMCs loaded with the VVGAVGVGK peptide or with DMSO (non-specific signaling control). Functional signaling was determined using CD137 upregulation as a marker. As shown in FIG. 9, after a day of stimulation, cells were gated on CD137+ for neoantigen (FIG. 9 left panel) and DMSO (FIG. 9 right panel) stimulated cells and resorted then sequenced for TCRs, as described above. The TCR sequences determined for (i) neoantigen-tetramer labeled cells; (ii) CD137+ neoantigen-stimulated cells; and (iii) CD137+ DMSO-stimulated cells were compared in silico for shared TCR sequences. A summary of the results is presented in FIG. 10. Specific tetramer binding determined TCR sequences for 94 clonotypes, and of those, 6 TCR sequences were shared with those cells that demonstrated peptide-specific functional signaling. The results demonstrate that functional neoantigen-specific TCRs were identified.

### Example 7: Additional Identification of TCRs that Bind HLA-PEPTIDE Target Neoantigens

[0479] Antigen-specific TCRs are identified using the methods described herein, including identification of neoantigen-specific TCRs. For example, TCRs specific for any of SEQ ID NOs:10,755 to 29,364 bound to their cognate HLA allele. The general workflow for identifying antigen-specific TCRs is below:

[0480] 1) T cells are isolated from HLA-matched healthy donor using magnetic-activated cell sorting (MACS) using: (i) Pan T Cell Isolation Kit to enrich for naïve and memory CD4 and CD8 T cells; (ii) Naïve Pan T Cell Isolation Kit to enrich for naïve T cells; (iii) Naïve CD8 T Cell Isolation Kit & CD4 depletion kit to enrich for naïve CD8 T cells; or (iv) CD8 T Cell Isolation Kit & CD4 depletion kit to enrich for naïve and memory CD8 T cells

[0481] a) Alternatively, the source of antigen-specific T cells, may include:
[0482] i) healthy donor's memory T cells
[0483] ii) single positive CD4 T cells as well as CD4/CD8 double positive T cells
[0484] iii) patient-derived, tumor infiltrating lymphocytes (TILs) processed from commercial dissociated tumor cells (DTCs)
[0485] iv) patient-derived PBMC, such as patients vaccinated with an antigen/neoantigen of interest
[0486] v) T cells are not limited to those harboring conventional αβ heterodimeric TCRs, but can include those with rare TCR configurations such as homodimers (e.g., ββ), heterodimers (e.g., γδ), trimers (βββ), and other combinations of TCR chains

[0487] 2) peptide-MHC multimers are generated either by using prefolded monomers or commercially available monomers (e.g., Flex-T monomers—BioLegend)

[0488] 3) Peptide-MHC multimers binding T cells are sorted using fluorescence-activated cell sorting (FACS) method.

[0489] 4) Sorted T cells are polyclonally expanded with feeder cells and interleukins (IL2 and/or combination of IL7/IL15) for 2-3 weeks. Expansion may also be done in an antigen-specific manner using primary (whole PBMC, DCs, B cells, monocytes) and/or artificial antigen presenting cells (K562, T2, etc.).

[0490] 5) Post expansion, the resulting cells are exposed to cognate peptide-MHC multimers, and multimer binding cells are sorted (also called re-sort).

[0491] 6) Re-sorted T cells are sequenced at single cell level (e.g., using 10× Genomics systems, as described above) to obtain TCR sequences containing αβ heterodimeric TCRs or rare TCR configurations such as homodimers (e.g., ββ), heterodimers (e.g., γδ), trimers (ααβ), and other combinations of TCR chains.

[0492] a) Expanded T cells may also be divided into 2 or more populations e.g., populations of the cells are:
[0493] i) sequenced at single cell level to obtain TCR sequences.
[0494] ii) stimulated with physiological concentration of peptide and autologous APCs (PBMCs, B cells, monocytes, DCs). Captured functionally responding cells, e.g. those that secrete cytokines as an example but not limited to IFNg, TNF alpha or IL-2 are sequenced at single cell level to obtain TCR sequences and profile upregulation of activation marker mRNA transcripts.
[0495] iii) alternatively, or in addition to cytokines, expression of activation markers (e.g. CD137, CD69 or others) could be used as a sign of stimulated T cell functional response. Selected functional cells are sequenced at single cell level (e.g., using 10× Genomics systems, as described above) to obtain TCR sequences and profile upregulation of activation marker mRNA transcripts

[0496] b) Identified TCR sequences undergo quality control steps to identify high-quality and/or specific candidates, with criteria including some or all of the criteria below:
[0497] i) excluding sequences with multiple and/or missing TRA or TRB chains;
[0498] ii) excluding sequences with internal stop codons;
[0499] iii) excluding sequences with TRA or TRB chains less than 90 amino acids in length;
[0500] iv) excluding double counting sequences associated with biological and/or technical replicates (i.e., only include sequence once)
[0501] v) annotating sequences with a CDR3 of a known epitope (e.g., known CDR3s found in a CDR3 database, such as VDJdb);
[0502] vi) excluding sequences associated with a bystander TCR (e.g., TCRs associated with T cells that are non-specific, such as activated by DMSO pulsed APCs).

### Example 8: Screening and Validation of TCRs that Bind HLA-PEPTIDE Target Neoantigens

### Methods

[0503] Candidate TCR sequences for screening were identified from healthy donors, as described above. Briefly, TCR clonotypes existing in a multimer-binding population and/or in an activated T cell population meeting the criteria for screening were selected. Criteria include excluding from the candidate library: sequences with multiple and/or missing TRA or TRB chains; sequences with internal stop codons; sequences with TRA or TRB chains less than 90 amino acids in length; sequences associated with a bystander TCR. Additionally, sequences with a CDR3 annotated to be associated a known epitope were not screened.

[0504] Lentiviral transduction: For screening assays, a CD8+ Jurkat KO (endogenous TCR knock-out) cell line was transduced with lentivirus to express antigen-specific TCRs. The HIV-derived lentivirus transfer vector was obtained from SBI Biosciences and modified to remove the EFlα promoter and introduce an MSCV promoter followed by a multiple cloning site (MCS) and the TCR constant alpha sequence. Lentivirus support plasmids expressing VSV-G (pCMV-VsvG), Rev (pRSV-Rev) and Gag-pol (pCgpV) were used to produce virus (ViraPower Lentiviral Packaging Mix; ThermoFisher). Lentivirus was prepared by transfection of 80% confluent 10 cm² plates of HEK293 cells with Lipofectamine 2000 (Thermo Fisher), using 36 μl of lipofectamine and 3 pg of the TCR containing plasmid (confirmed by Sanger sequencing) and 9 pg of ViraPower Lentiviral Packaging mix. 10 mL of the virus-containing media were harvested after 48 hours, filtered and concentrated using the Lenti-X system (Clontech), and the virus was resuspended in 100-200 μl of fresh medium. Following viral titering using qPCR, concentrated viral supernatant was added to Jurkat cells. Cells were spun at 1500×g for 45 minutes with 8 pg/mL polybrene at a density of 8×10⁵ cells/mL. Following spinfection, media was added to bring the cell density to 4×10⁵ cells/mL with a final concentration of 4 μg/mL polybrene. Cells were incubated overnight, and the media was completely refreshed after 16 hours. After 72 hours, TCR expression was assessed and, if needed, cells were sorted to obtain high TCR-expression populations. For validation assays, primary T cells from healthy donors were transduced with lentivirus to express antigen-specific TCRs.

[0505] Signaling assays: antigen presenting cells K562 cells, constitutively expressing HLA-A*02:01 or HLA-A*11:01, as indicated, were loaded with the indicated mutant or wildtype peptide at 10 μM, or the indicated concentration for antigen titration experiments, for 1 hour. Transduced Jurkat cells or primary T cells were co-cultured overnight (˜20 hours) with the peptide-loaded APCs at a 1:1 ratio of 75,000 TCR-expressing Jurkat cells to 75,000 APCs or a 1:4 ratio of 50,000 primary T cells to 200,000 APCs per well in 96-well plates. After co-culture, the T cell activation markers CD25, CD69, CD137 were measured using flow cytometry (antibodies from BioLegend) and IL-2 cytokine production assessed by MSD (Meso Scale Diagnostics V-PLEX Human IL-2 Kit). For proliferation assays, transduced primary T cells were labeled with CellTrace Violet dye (ThermoFisher) prior to incubation with peptide-loaded APCs. After co-culture, dilution of the CellTrace Violet dye was assessed using flow cytometry to determine proliferation.

### Results

[0506] Candidate TCR sequences were identified from healthy donors and selected for screening. Candidates for screening included those sequences shown in Table 1A. 2 and Table 1A. 3.

[0507] For screening, CD8+ Jurkat KO (endogenous TCR knock-out) cells were transduced with the candidate TCR sequences. Signaling assays using a candidate TCR's cognate neoantigen peptide or corresponding wildtype peptide were performed to assess specificity and functionality. In addition, signaling was assessed for TCRs that do not recognize a cognate peptide (“negative TCRs”) and MART-1/Melan-A specific TCR DMF5 (MART-1/DMF5 TCR described in detail in Johnson et al. “Gene Transfer of Tumor-Reactive TCR Confers Both High Avidity and Tumor Reactivity to Nonreactive Peripheral Blood Mononuclear Cells and Tumor-Infiltrating Lymphocytes” J Immunol 2006 Nov. 1; 177(9):6548-59, herein incorporated by reference for all purposes). As shown in Table 9, activation markers and cytokine production were noticeably increased when stimulated with cognate RAS G12C and G12V neoantigens in comparison to stimulation with corresponding wildtype peptides. Notably, signaling for several candidate TCRs were comparable to the well-established MART-1/DMF5 control (fold change peptide vs DMSO vehicle only) and demonstrably better than negative TCR signaling. Accordingly, the data demonstrate that functional and specific TCR candidates were identified through screening TCR sequences isolated from healthy donors.

[0508] Following initial screening in Jurkat cells, TCR candidates that demonstrated functional and specific signaling were further validated in primary T cells. As shown in Table 9, activation markers in primary T cells were noticeably increased when stimulated with cognate RAS G12C and G12V neoantigens in comparison to stimulation with corresponding wildtype peptides. Notably, signaling for candidate TCRs assayed were demonstrably better than negative TCR signaling. Representative flow cytometry assessments are shown in FIG. 11A (clone 01CA019_064_F05_0005) and FIG. 11B (01CA019_064_F05_0047). Proliferation in primary T cells was also assessed for two of the TCR candidates. As shown in FIG. 12, clones 01CA019_064_F05_0047 and 01CA019_064_F05_0005 demonstrated proliferation in response to neoantigen stimulation relative to stimulation without antigen.

TABLE 9
Screening and Validation Signaling Assay Summary for TCR Candidates

| | | | | |
|---|---|---|---|---|
| | CD25 Fold | CD69 Fold | IL2 Fold | Primary T Cell |
| TCR ID | Change | Change | Change | (CD25/69/137) |

HLA-A*0201 MART-1 TCRs (Control)

| | | | |
|---|---|---|---|
| DMF5 | 235x | 45x | 33x |

HLA-A*0201/KLVVVGACGV G12C TCRs

| | | | | |
|---|---|---|---|---|
| 01CA019_064_F05_0005 | 168x | 27x | 30x | 5x, 8x, 3x |
| “TCR66” | | | | |
| 0ICAO19_064_F05_0047 | 25x | 17x | 11X | 4x, 10x, 3x |
| “TCR61” | | | | |
| 01CA019_064_F05_0104 | 15x | 38x | 5x | |
| “TCR10” | | | | |

HLA-A*1101/VVGAVGVGK G12V TCRs

| | | | | |
|---|---|---|---|---|
| 01CA018_064_F10_0022 | 161x | 51x | 26x | 4.5x, 6x, 3x |
| “TCR27” | | | | |
| 01CA018_064_F10_0001 | 107x | 31x | 65x | 2.5x, 4.5x, 3x |
| “TCR56” | | | | |

Negative TCRs (Control)

| | | | | |
|---|---|---|---|---|
| Negative TCR | 0.7x | 1.2x | 0.2x | 1x, 1x, 1.2x |

*Fold-change is calculated a difference in signal of cognate neoantigen peptide reative to corresponding wildtype peptide

### Sequence Tables

TABLE A

| | | | HLA | Restricted |
|---|---|---|---|---|
| SEQ | | | Class 1 | Peptide amino |
| ID NO: | Gene | Mutation | subtype | acid sequence |
| 29358 | CTNNB1 | S37Y point | HLA-A* | YLDSGIHYGA |
| | | mutation | 02:01 | |
| 29359 | CHD4 | CHD4_K73fs | HLA-B* | TVRAATIL |
| | | | 08:01 | |
| 29360 | CTNNB1 | CTNNB_1S45P | A*11:01 | TTAPPLSGK |
| 29361 | CTNNB1 | CTNNB1_T41A | A*11:01 | ATAPSLSGK |
| 29362 | RAS | RAS_G12V | A*03:01 | VVGAVGVGK |
| 29363 | KRAS/ | KRAS/ | A*01:01 | ILDTAGREEY |
| | NRAS | NRAS_Q61R | | |
| 29364 | TP53 | TP53_R213L | A*02:01 | YLDDRNTFL |

[0510] Refer to Sequence Listing, SEQ ID NOS. 10,755-21,015.

[0511] Table A includes HLA-PEPTIDE neoantigens, wherein a specific restricted peptide having a specific amino acid sequence is predicted to associate with a given HLA allele with an EDGE score >0.001. The restricted peptide corresponds to a peptide fragment containing a somatic mutation associated with a cancer.

[0512] For clarity, each HLA-PEPTIDE neoantigen in Table A is assigned a unique SEQ ID NO. Each of the above sequence identifiers is associated with the Table identifier (i.e., Table A), the HLA Class I subtype, the gene name corresponding to the restricted peptide, the somatic mutation, whether the prevalence of the peptide:HLA pair was 0.1% or greater (noted as “1”) or less than 0.1% (noted as “0”), and the amino acid sequence of the restricted peptide. For example, the HLA-PEPTIDE neoantigen designated as SEQ ID NO: 10755 is a CREB3L1 V414I neoantigen that is HLA-PEPTIDE target HLA-A*02:06_AADGIYTA. As indicated by SEQ ID NO: 10755, the restricted peptide AADGIYTA contains the V414I mutation in the protein encoded by gene CREB3L1, and the HLA-PEPTIDE target has a prevalence less than 0.1%.

[0513] Table A HLA-PEPTIDE neoantigens are disclosed in PCT/US2019/033830, filed on May 23, 2019, which application is hereby incorporated by reference in its entirety.

[0514] AACR GENIE Results

[0515] Refer to Sequence Listing, SEQ ID NOS. 21,016-29,357.

[0516] AACR GENIE results includes HLA-PEPTIDE neoantigens wherein a specific restricted peptide having a specific amino acid sequence is predicted to associate with a given HLA allele with an EDGE score >0.001 and prevalence >0.10%. The restricted peptide corresponds to a peptide fragment containing a somatic mutation associated with a cancer.

[0517] For clarity, each HLA-PEPTIDE neoantigen in the AACR GENIE results is assigned a unique SEQ ID. NO. Each of the above sequence identifiers includes a designation as an AACR GENIE result, the gene name corresponding to the restricted peptide, the type and nature of somatic mutation, the HLA Class I subtype, and the amino acid sequence of the restricted peptide. For the AACR GENIE results, the HLA Class I subtype designation is expressed as a single letter followed by a 4-digit code.

[0518] For clarity, the designation “p.” indicates a change in the protein sequence, the designation “fs*number” stands for a frameshift mutation causing a stop codon in [the designated number] of amino acids, the designation “dup” stands for an in-frame sequence insertion of a sequence flanked by the designated amino acids, and the designation “del” stands for an in-frame sequence deletion of the designated amino acids.

[0519] For example, the HLA-PEPTIDE neoantigen designated as SEQ ID NO: 21016 is a ACVR1 neoantigen carrying point mutation S290L (denoted as “ACVR1_p.S290L”) that is HLA-PEPTIDE target HLA-A*29:02_HYHEMGLLY. As indicated by SEQ ID NO: 21016, the restricted peptide HYHEMGLLY contains the S290L point mutation in the protein encoded by gene ACVR1.

[0520] For example, the HLA-PEPTIDE neoantigen designated as SEQ ID NO: 25566 is an NF1 neoantigen carrying insertion or deletion mutation Y2285Tfs*5 (denoted as “NF1_p.Y2285Tfs*5”) resulting in an HLA-PEPTIDE target HLA-A*11:01_KGPDTTVKF. As indicated by SEQ ID NO: 25566, the restricted peptide KGPDTTVKF contains the substitution Y2285T and subsequent sequence that is frameshifted from the normal reading frame of the NF1 gene, resulting in a stop codon in 5 amino acids.

[0521] For example, the HLA-PEPTIDE neoantigen designated as SEQ ID NO: 22713 is a CDKN2A neoantigen carrying an in-frame sequence insertion T18_A19dup (denoted as “CDKN2A_p.T18_A19dup”), resulting in the HLA-PEPTIDE target HLA-A*68:01_ATATAAARGR. As indicated by SEQ ID NO: 22713, the restricted peptide ATATAAARGR contains an insertion of amino acids T and A at amino acid positions 18 and 19, and its surrounding sequence in the CDKN2A protein.

[0522] For example, the HLA-PEPTIDE neoantigen designated as SEQ ID NO: 23233 is a CTNNB1 neoantigen carrying an in-frame sequence deletion S45del (denoted as “CTNNB1_p.S45del”), resulting in and HLA-PEPTIDE target HLA-A*03:01_TTTAPLSGK. As indicated by SEQ ID NO: 23233, the restricted peptide TTTAPLSGK includes the deletion S45del and its surrounding sequence in the CTNNB1 gene.

[0523] SEQ ID NOs 29358-29364

TABLE 1A.1
Alpha VJ and beta V(D)J sequences for TCRs isolated
from healthy donors

| Clone ID | Alpha | Beta |
|---|---|---|
| 01CA0WT_066_ | MEKNPLAAPLLILWFHLDCVSSILNV | MSNQVLCCVVLCFLGANTVDGGITQS |
| F03_0008 | EQSPQSLHVQEGDSTNFTCSFPSSNF | PKYLFRKEGQNVTLSCEQNLNHDAMY |
| | YALHWYRWETAKSPEALFVMTLNG | WYRQDPGQGLRLIYYSQIVNDFQKGD |
| | DEKKKGRISATLNTKEGYSYLYIKGS | IAEGYSVSREKKESFPLTVTSAQKNPT |
| | QPEDSATYLCAFPMDSNYQLIWGAG | AFYLCASSLGVHGYTFGSGTRLTVV |
| | TKLIIKP | |
| 01CA019_064_ | MWGVFLLYVSMKMGGTTGQNIDQP | MGFRLLCCVAFCLLGAGPVDSGVTQT |
| F05_1114 | TEMTATEGAIVQINCTYQTSGFNGLF | PKHLITATGQRVTLRCSPRSGDLSVYW |
| | WYQQHAGEAPTFLSYNVLDGLEEK | YQQSLDQGLQFLIQYYNGEERAKGNIL |
| | GRFSSFLSRSKGYSYLLLKELQMKD | ERFSAQQFPDLHSELNLSSLELGDSAL |
| | SASYLCAVSSGNTGKLIFGQGTTLQ | YFCASSVAGDSLTDTQYFGPGTRLTVL |
| | VKPD | |
| 01CA0DP_064_ | MACPGFLWALVISTCLEFSMAQTVT | MGTSLLCWVVLGFLGTDHTGAGVSQS |
| F04_0003 | QSQPEMSVQEAETVTLSCTYDTSES | PRYKVTKRGQDVALRCDPISGHVSLY |
| | DYYLFWYKQPPSRQMILVIRQEAYK | WYRQALGQGPEFLTYFNYEAQQDKSG |
| | QQNATENRFSVNFQKAAKSFSLKIS | LPNDRFSAERPEGSISTLTIQRTEQRD |
| | DSQLGDAAMYFCAPITGAGSYQLTF | SAMYRCASSLAFQESNTGELFFGEGSR |
| | GKGTKLSVIP | LTVL |
| 01DB008_064_ | MKSLRVLLVILWLQLSWVWSQQKE | MGTRLFFYVALCLLWAGHRDAGITQS |
| G02_0013 | VEQNSGPLSVPEGAIASLNCTYSDRG | PRYKITETGRQVTLMCHQTWSHSYMF |
| | SQSFFWYRQYSGKSPELIMFIYSNGD | WYRQDLGHGLRLIYYSAAADITDKGE |
| | KEDGRFTAQLNKASQYVSLLIRDSQ | VPDGYVVSRSKTENFPLTLESATRSQT |
| | PSDSATYLCAALNSGGYQKVTFGTG | SVYFCASSPGLNEQFFGPGTRLTVL |
| | TKLQVIP | |
| 01DB008_064_ | MKSLRVLLVILWLQLSWVWSQQKE | MGTSLLCWMALCLLGADHADTGVSQ |
| G02_0023 | VEQNSGPLSVPEGAIASLNCTYSDRG | NPRHKITKRGQNVTFRCDPISEHNRLY |
| | SQSFFWYRQYSGKSPELIMFIYSNGD | WYRQTLGQGPEFLTYFQNEAQLEKSR |
| | KEDGRFTAQLNKASQYVSLLIRDSQ | LLSDRFSAERPKGSFSTLEIQRTEQGD |
| | PSDSATYLCAVGTNDMRFGAGTRLT | SAMYLCASTSPPEAFFGQGTRLTVV |
| | VKP | |
| 01CA018_064_ | MWGVFLLYVSMKMGGTTGQNIDQP | MGTSLLCWMALCLLGADHADTGVSQ |
| H10_0018 | TEMTATEGAIVQINCTYQTSGFNGLF | NPRHKITKRGQNVTFRCDPISEHNRLY |
| | WYQQHAGEAPTFLSYNVLDGLEEK | WYRQTLGQGPEFLTYFQNEAQLEKSR |
| | GRFSSFLSRSKGYSYLLLKELQMKD | LLSDRFSAERPKGSFSTLEIQRTEQGD |
| | SASYLCAVRGSNDYKLSFGAGTTVT | SAMYLCASSSDNVKNYGYTFGSGTRLT |
| | VRA | W |
| 01CA018_064_ | MKSLRVLLVILWLQLSWVWSQQKE | MGFRLLCCVAFCLLGAGPVDSGVTQT |
| H10_0014 | VEQNSGPLSVPEGAIASLNCTYSDRG | PKHLITATGQRVTLRCSPRSGDLSVYW |
| | SQSFFWYRQYSGKSPELIMFIYSNGD | YQQSLDQGLQFLIQYYNGEERAKGNIL |
| | KEDGRFTAQLNKASQYVSLLIRDSQ | ERFSAQQFPDLHSELNLSSLELGDSAL |
| | PSDSATYLCAVRNNNDMRFGAGTR | YFCASSVGSDTQYFGPGTRLTVL |
| | LTVKP | |
| 01CA018_022_ | MWGAFLLYVSMKMGGTAGQSLEQ | MLLLLLLLGPGSGLGAVVSQHPSWVI |
| E04_0155 | PSEVTAVEGAIVQINCTYQTSGFYGL | CKSGTSVKIECRSLDFQATTMFWYRQ |
| | SWYQQHDGGAPTFLSYNALDGLEE | FPKKSLMLMATSNEGSKATYEQGVEK |
| | TGRFSSFLSRSDSYGYLLLQELQMK | DKFLINHASLTLSTLTVTSAHPEDSSF |
| | DSASYFCAGFTSGTYKYIFGTGTRLK | YICSARVSFGVMNTEAFFGQGTRLTVV |
| | VLA | |
| 01CA018_022_ | MMKSLRVLLVILWLQLSWVWSQQK | MASLLFFCGAFYLLGTGSMDADVTQT |
| E04_0030 | EVEQDPGPLSVPEGAIVSLNCTYSNS | PRNRITKTGKRIMLECSQTKGHDRMY |
| | AFQYFMWYRQYSRKGPELLMYTYS | WYRQDPGLGLRLIYYSFDVKDINKGEI |
| | SGNKEDGRFTAQVDKSSKYISLFIRD | SDGYSVSRQAQAKFSLSLESAIPNQTA |
| | SQPSDSATYLCASYNNNDMRFGAGT | LYFCATSGRTGGNLETQYFGPGTRLLV |
| | RLTVKP | L |
| 01CADMS_064_ | METLLGLLILWLQLQWVSSKQEVTQ | MLLLLLLLGPGSGLGAVVSQHPSWVI |
| F09_0013 | IPAALSVPEGENLVLNCSFTDSAIYN | CKSGTSVKIECRSLDFQATTMFWYRQ |
| | LQWFRQDPGKGLTSLLLIQSSQREQT | FPKQSLMLMATSNEGSKATYEQGVEK |
| | SGRLNASLDKSSGRSTLYIAASQPGD | DKFLINHASLTLSTLTVTSAHPEDSSF |
| | SATYLCASSNYGGSQGNLIFGKGTK | YICSARAAAAYEQYFGPGTRLTVT |
| | LSVKP | |
| 01CA0WT_064_ | MLLLLVPAFQVIFTLGGTRAQSVTQ | MSLGLLCCGAFSLLWAGPVNAGVTQT |
| F06_0020 | LDSQVPVFEEAPVELRCNYSSSVSVY | PKFRVLKTGQSMTLLCAQDMNHEYM |
| | LFWYVQYPNQGLQLLLKYLSGSTLV | YWYRQDPGMGLRLIHYSVGEGTTAK |
| | KGINGFEAEFNKSQTSFHLRKPSVHI | GEVPDGYNVSRLKKQNFLLGLESAAP |
| | SDTAEYFCAVSEMGGTSYGKLTFGQ | SQTSVYFCASSRTGTAYQPQHFGDGT |
| | GTILTVHP | RLSIL |
| 01CA018_064_ | MWGVFLLYVSMKMGGTTGQNIDQP | MGSRLLCWVLLCLLGAGPVKAGVTQ |
| G01_0167 | TEMTATEGAIVQINCTYQTSGFNGLF | TPRYLIKTRGQQVTLSCSPISGHRSVS |
| | WYQQHAGEAPTFLSYNVLDGLEEK | WYQQTPGQGLQFLFEYFSETQRNKGN |
| | GRFSSFLSRSKGYSYLLLKELQMKD | FPGRFSGRQFSNSRSEMNVSTLELGDS |
| | SASYLCAVDTGFQKLVFGTGTRLLV | ALYLCASSLGSPEAFFGQGTRLTVV |
| | SP | |

TABLE 1A.2
Alpha VJC and beta V(D)JC sequences for TCRs isolated from healthy
donors-G12C/HLA-A*0201

| | Alpha | Beta |
|---|---|---|
| Clone ID | (Constant Region Bolded) | (Constant Region Bolded) |
| 01CA019_064_ | MKTFAGFSFLFLWLQLDCMSRGED | MLLLLLLLGPGSGLGAVVSQHPSWVI |
| F05_0104 | VEQSLFLSVREGDSSVINCTYTDSSS | CKSGTSVKIECRSLDFQATTMFWYRQ |
| | TYLYWYKQEPGAGLQLLTYIFSNMD | FPKQSLMLMATSNEGSKATYEQGVEK |
| | MKQDQRLTVLLNKKDKHLSLRIADT | DKFLINHASLTLSTLTVTSAHPEDSSFY |
| | QTGDSAIYFCAERVNTDKLIFGTGTR | ICSASTGDSGNTIYFGEGSWLTVVEDL |
| | LQVFPNIQNPDPAVYQLRDSKSSDK | NKVFPPEVAVFEPSEAEISHTQKATL |
| | SVCLFTDFDSQTNVSQSKDSDVYIT | VCLATGFFPDHVELSWWVNGKEVH |
| | DKCVLDMRSMDFKSNSAVAWSNK | SGVCTDPQPLKEQPALNDSRYCLSS |
| | SDFACANAFNNSIIPEDTFFPSPESS | RLRVSATFWQNPRNHFRCQVQFYG |
| | CDVKLVEKSFETDTNLNFQNLSVI | LSENDEWTQDRAKPVTQIVSAEAW |
| | GFRILLLKVAGFNLLMTLRLWSS | GRADCGFTSVSYQQGVLSATILYEIL |
| | | LGKATLYAVLVSALVLMAMVKRKDF |
| 01CA019_064_ | MSLSSLLKVVTASLWLGPGIAQKITQ | MGFRLLCCVAFCLLGAGPVDSGVTQT |
| F05_0047 | TQPGMFVQEKEAVTLDCTYDTSDQS | PKHLITATGQRVTLRCSPRSGDLSVYW |
| | YGLFWYKQPSSGEMIFLIYQGSYDE | YQQ SLDQGLQFLIQYYNGEERAKGNIL |
| | QNATEGRYSLNFQKARKSANLVISA | ERFSAQQFPDLHSELNLSSLELGDSAL |
| | SQLGDSAMYFCAMRELNTDKLIFGT | YFCASSQWDSSGNTIYFGEGSWLTVV |
| | GTRLQVFPNIQNPDPAVYQLRDSKS | EDLNKVFPPEVAVFEPSEAEISHTQK |
| | SDKSVCLFTDFDSQTNVSQSKDSD | ATLVCLATGFFPDHVELSWWVNGK |
| | VYITDKCVLDMRSMDFKSNSAVA | EVHSGVCTDPQPLKEQPALNDSRYC |
| | WSNKSDFACANAFNNSIIPEDTFFP | LSSRLRVSATFWQNPRNHFRCQVQF |
| | SPESSCDVKLVEKSFETDTNLNFQ | YGLSENDEWTQDRAKPVTQIVSAEA |
| | NLSVIGFRILLLKVAGFNLLMTLR | WGRADCGFTSVSYQQGVLSATILYE |
| | LWSS | ILLGKATLYAVLVSALVLMAMVKR |
| | | KDF |
| 01CA019_064_ | MSLSSLLKVVTASLWLGPGIAQKITQ | MGTRLLFWVAFCLLGADHTGAGVSQ |
| F05_0064 | TQPGMFVQEKEAVTLDCTYDTSDQS | SPSNKVTEKGKDVELRCDPISGHTALY |
| | YGLFWYKQPSSGEMIFLIYQGSYDE | WYRQSLGQGLEFLIYFQGNSAPDKSG |
| | QNATEGRYSLNFQKARKSANLVISA | LPSDRFSAERTGGSVSTLTIQRTQQEDS |
| | SQLGDSAMYFCAMREPRSYNTDKLI | AVYLCASSLVSQVGYGYTFGSGTRLT |
| | FGTGTRLQVFPNIQNPDPAVYQLRD | VVEDLNKVFPPEVAVFEPSEAEISHT |
| | SKSSDKSVCLFTDFDSQTNVSQSKD | QKATLVCLATGFFPDHVELSWWVN |
| | SDVYITDKCVLDMRSMDFKSNSAV | GKEVHSGVCTDPQPLKEQPALNDSR |
| | AWSNKSDFACANAFNNSIIPEDTFF | YCLSSRLRVSATFWQNPRNHFRCQV |
| | PSPESSCDVKLVEKSFETDTNLNFQ | QFYGLSENDEWTQDRAKPVTQIVSA |
| | NLSVIGFRILLLKVAGFNLLMTLR | EAWGRADCGFTSVSYQQGVLSATIL |
| | LWSS | YEILLGKATLYAVLVSALVLMAMV |
| | | KRKDF |
| 01CA019_064_ | MSLSSLLKVVTASLWLGPGIAQKITQ | MGFRLLCCVAFCLLGAGPVDSGVTQT |
| F05_0005 | TQPGMFVQEKEAVTLDCTYDTSDQS | PKHLITATGQRVTLRCSPRSGDLSVYW |
| | YGLFWYKQPSSGEMIFLIYQGSYDE | YQQSLDQGLQFLIQYYNGEERAKGNIL |
| | QNATEGRYSLNFQKARKSANLVISA | ERFSAQQFPDLHSELNLSSLELGDSAL |
| | SQLGDSAMYFCAMREESSYKLIFGS | YFCASSVAGDSLTDTQYFGPGTRLTVL |
| | GTRLLVRPDIQNPDPAVYQLRDSKS | EDLKNVFPPKVAVFEPSEAEISHTQK |
| | SDKSVCLFTDFDSQTNVSQSKDSD | ATLVCLATGFYPDHVELSWWVNGK |
| | VYITDKCVLDMRSMDFKSNSAVA | EVHSGVCTDPQPLKEQPALNDSRYC |
| | WSNKSDFACANAFNNSIIPEDTFFP | LSSRLRVSATFWQNPRNHFRCQVQF |
| | SPESSCDVKLVEKSFETDTNLNFQ | YGLSENDEWTQDRAKPVTQIVSAEA |
| | NLSVIGFRILLLKVAGFNLLMTLR | WGRADCGFTSESYQQGVLSATILYE |
| | LWSS | ILLGKATLYAVLVSALVLMAMVKR |
| | | KDSRG |

TABLE 1A.3
Alpha VJC and beta V(D)JC sequences for TCRs isolated from healthy
donors-G12V/HLA-A*1101

| | Alpha | Beta |
|---|---|---|
| Clone ID | (Constant Region Bolded) | (Constant Region Bolded) |
| 01CA018_064_ | MAFWLRRLGLHFRPHLGRRMESFLG | MGPQLLGYVVLCLLGAGPLEAQVTQ |
| F08_0007 | GVLLILWLQVDWVKSQKIEQNSEAL | NPRYLITVTGKKLTVTCSQNMNHEY |
| | NIQEGKTATLTCNYTNYSPAYLQWY | MSWYRQDPGLGLRQIYYSMNVEVTD |
| | RQDPGRGPVFLLLIRENEKEKRKERL | KGDVPEGYKVSRKEKRNFPLILESPSP |
| | KVTFDTTLKQSLFHITASQPADSATYL | NQTSLYFCASSLVGNEQFFGPGTRLT |
| | CALGYSSASKIIFGSGTRLSIRPNIQNP | VLEDLKNVFPPKVAVFEPSEAEISH |
| | DPAVYQLRDSKSSDKSVCLFTDFDS | TQKATLVCLATGFYPDHVELSWW |
| | QTNVSQSKDSDVYITDKCVLDMRS | VNGKEVHSGVCTDPQPLKEQPALN |
| | MDFKSNSAVAWSNKSDFACANAFN | DSRYCLSSRLRVSATFWQNPRNHF |
| | NSIIPEDTFFPSPESSCDVKLVEKSFE | RCQVQFYGLSENDEWTQDRAKPV |
| | TDTNLNFQNLSVIGFRILLLKVAGF | TQIVSAEAWGRADCGFTSESYQQG |
| | NLLMTLRLWSS | VLSATILYEILLGKATLYAVLVSAL |
| | | VLMAMVKRKDSRG |
| 01CA018_064_ | MAMLLGASVLILWLQPDWVNSQQK | MGSRLLCWVLLCLLGAGPVKAGVTQ |
| F10_0022 | NDDQQVKQNSPSLSVQEGRISILNCD | TPRYLIKTRGQQVTLSCSPISGHRSVS |
| | YTNSMFDYFLWYKKYPAEGPTFLISIS | WYQQTPGQGLQFLFEYFSETQRNKG |
| | SIKDKNEDGRFTVFLNKSAKHLSLHI | NFPGRFSGRQFSNSRSEMNVSTLELG |
| | VPSQPGDSAVYFCAANGGFQKLVFG | DSALYLCASSSGRTEAFFGQGTRLTV |
| | TGTRLLVSPNIQNPDPAVYQLRDSKS | VEDLNKVFPPEVAVFEPSEAEISHT |
| | SDKSVCLFTDFDSQTNVSQSKDSDV | QKATLVCLATGFFPDHVELSWWV |
| | YITDKCVLDMRSMDFKSNSAVAWS | NGKEVHSGVCTDPQPLKEQPALND |
| | NKSDFACANAFNNSIIPEDTFFPSPE | SRYCLSSRLRVSATFWQNPRNHFR |
| | SSCDVKLVEKSFETDTNLNFQNLSV | CQVQFYGLSENDEWTQDRAKPVT |
| | IGFRILLLKVAGFNLLMTLRLWSS | QIVSAEAWGRADCGFTSVSYQQGV |
| | | LSATILYEILLGKATLYAVLVSALV |
| | | LMAMVKRKDF |
| 01CA018_064_ | METLLGVSLVILWLQLARVNSQQGE | MGTRLLCWAALCLLGAELTEAGVAQ |
| F10_0004 | EDPQALSIQEGENATMNCSYKTSINN | SPRYKIIEKRQSVAFWCNPISGHATLY |
| | LQWYRQNSGRGLVHLILIRSNEREKH | WYQQILGQGPKLLIQFQNNGVVDDS |
| | SGRLRVTLDTSKKSSSLLITASRAADT | QLPKDRFSAERLKGVDSTLKIQPAKL |
| | ASYFCATDAGTGGFKTIFGAGTRLFV | EDSAVYLCASSLESSYEQYFGPGTRL |
| | KANIQNPDPAVYQLRDSKSSDKSVC | TVTEDLNKVFPPEVAVFEPSEAEISH |
| | LFTDFDSQTNVSQSKDSDVYITDKC | TQKATLVCLATGFFPDHVELSWW |
| | VLDMRSMDFKSNSAVAWSNKSDFA | VNGKEVHSGVCTDPQPLKEQPALN |
| | CANAFNNSIIPEDTFFPSPESSCDVK | DSRYCLSSRLRVSATFWQNPRNHF |
| | LVEKSFETDTNLNFQNLSVIGFRILL | RCQVQFYGLSENDEWTQDRAKPV |
| | LKVAGFNLLMTLRLWSS | TQIVSAEAWGRADCGFTSVSYQQG |
| | | VLSATILYEILLGKATLYAVLVSAL |
| | | VLMAMVKRKDF |
| 01CA018_064_ | METLLGVSLVILWLQLARVNSQQGE | MGTRLLCWAALCLLGAELTEAGVAQ |
| F10_0005 | EDPQALSIQEGENATMNCSYKTSINN | SPRYKIIEKRQSVAFWCNPISGHATLY |
| | LQWYRQNSGRGLVHLILIRSNEREKH | WYQQILGQGPKLLIQFQNNGVVDDS |
| | SGRLRVTLDTSKKSSSLLITASRAADT | QLPKDRFSAERLKGVDSTLKIQPAKL |
| | ASYFCATDRGSSNTGKLIFGQGTTLQ | EDSAVYLCASSLEISYEQYFGPGTRLT |
| | VKPDNIQNPDPAVYQLRDSKSSDKS | VTEDLKNVFPPKVAVFEPSEAEISH |
| | VCLFTDFDSQTNVSQSKDSDVYITD | TQKATLVCLATGFYPDHVELSWW |
| | KCVLDMRSMDFKSNSAVAWSNKSD | VNGKEVHSGVCTDPQPLKEQPALN |
| | FACANAFNNSIIPEDTFFPSPESSCDV | DSRYCLSSRLRVSATFWQNPRNHF |
| | KLVEKSFETDTNLNFQNLSVIGFRIL | RCQVQFYGLSENDEWTQDRAKPV |
| | LLKVAGFNLLMTLRLWSS | TQIVSAEAWGRADCGFTSESYQQG |
| | | VLSATILYEILLGKATLYAVLVSAL |
| | | VLMAMVKRKDSRG |
| 01CA018_064_ | METLLGVSLVILWLQLARVNSQQGE | MGTRLLCWAALCLLGAELTEAGVAQ |
| F10_0002 | EDPQALSIQEGENATMNCSYKTSINN | SPRYKIIEKRQSVAFWCNPISGHATLY |
| | LQWYRQNSGRGLVHLILIRSNEREKH | WYQQILGQGPKLLIQFQNNGVVDDS |
| | SGRLRVTLDTSKKSSSLLITASRAADT | QLPKDRFSAERLKGVDSTLKIQPAKL |
| | ASYFCATDSQTGANNLFFGTGTRLTV | EDSAVYLCASSLGDTYEQYFGPGTRL |
| | IPYIQNPDPAVYQLRDSKSSDKSVCL | TVTEDLKNVFPPKVAVFEPSEAEISH |
| | FTDFDSQTNVSQSKDSDVYITDKCV | TQKATLVCLATGFYPDHVELSWW |
| | LDMRSMDFKSNSAVAWSNKSDFAC | VNGKEVHSGVCTDPQPLKEQPALN |
| | ANAFNNSIIPEDTFFPSPESSCDVKL | DSRYCLSSRLRVSATFWQNPRNHF |
| | VEKSFETDTNLNFQNLSVIGFRILLL | RCQVQFYGLSENDEWTQDRAKPV |
| | KVAGFNLLMTLRLWSS | TQIVSAEAWGRADCGFTSESYQQG |
| | | VLSATILYEILLGKATLYAVLVSAL |
| | | VLMAMVKRKDSRG |
| 01CA018_064_ | METLLGVSLVILWLQLARVNSQQGE | MGTRLLCWAALCLLGAELTEAGVAQ |
| F10_0001 | EDPQALSIQEGENATMNCSYKTSINN | SPRYKIIEKRQSVAFWCNPISGHATLY |
| | LQWYRQNSGRGLVHLILIRSNEREKH | WYQQILGQGPKLLIQFQNNGVVDDS |
| | SGRLRVTLDTSKKSSSLLITASRAADT | QLPKDRFSAERLKGVDSTLKIQPAKL |
| | ASYFCATDPRELSFGAGTTVTVRANI | EDSAVYLCASSLESSYEQYFGPGTRL |
| | QNPDPAVYQLRDSKSSDKSVCLFTD | TVTEDLKNVFPPKVAVFEPSEAEISH |
| | FDSQTNVSQSKDSDVYITDKCVLDM | TQKATLVCLATGFYPDHVELSWW |
| | RSMDFKSNSAVAWSNKSDFACANA | VNGKEVHSGVCTDPQPLKEQPALN |
| | FNNSIIPEDTFFPSPESSCDVKLVEKS | DSRYCLSSRLRVSATFWQNPRNHF |
| | FETDTNLNFQNLSVIGFRILLLKVA | RCQVQFYGLSENDEWTQDRAKPV |
| | GFNLLMTLRLWSS | TQIVSAEAWGRADCGFTSESYQQG |
| | | VLSATILYEILLGKATLYAVLVSAL |
| | | VLMAMVKRKDSRG |

TABLE 1B
Alpha VJ and beta V(D)J sequences for TCRs isolated from TILs
derived from subjects with cancer

| Clone ID | Alpha | Beta |
|---|---|---|
| 01CA018_074_ | MWGVFLLYVSMKMGGTTGQ | MGCRLLCCAVLCLLGAVPMET |
| E09_0061 | NIDQPTEMTATEGAIVQINCTY | GVTQTPRHLVMGMTNKKSLK |
| | QTSGFNGLFWYQQHAGEAPTF | CEQHLGHNAMYWYKQSAKKP |
| | LSYNVLDGLEEKGRFSSFLSRS | LELMFVYSLEERVENNSVPSRF |
| | KGYSYLLLKELQMKDSASYLC | SPECPNSSHLFLHLHTLQPEDS |
| | AVTDSNYQLIWGAGTKLIIKP | ALYLCASSQGTGSGANVLTFG |
| | | AGSRLTVL |
| 01CA018_074_ | METLLGLLILWLQLQWVSSKQ | MLLLLLLLGPGSGLGAVVSQH |
| E09_0035 | EVTQIPAALSVPEGENLVLNCS | PSWVICKSGTSVKIECRSLDFQ |
| | FTDSAIYNLQWFRQDPGKGLT | ATTMFWYRQFPKQSLMLMAT |
| | SLLLIQSSQREQTSGRLNASLD | SNEGSKATYEQGVEKDKFLIN |
| | KSSGRSTLYIAASQPGDSATYL | HASLTLSTLTVTSAHPEDSSFYI |
| | CAGPNTGNQFYFGTGTSLTVIP | CSAPPGSPYEQYFGPGTRLTVT |
| 01CA0DP_074_ | MWGVFLLYVSMKMGGTTGQ | MGCRLLCCVVFCLLQAGPLDT |
| E12_0114 | NIDQPTEMTATEGAIVQINCTY | AVSQTPKYLVTQMGNDKSIKC |
| | QTSGFNGLFWYQQHAGEAPTF | EQNLGHDTMYWYKQDSKKFL |
| | LSYNVLDGLEEKGRFSSFLSRS | KIMFSYNNKELIINETVPNRFSP |
| | KGYSYLLLKELQMKDSASYLC | KSPDKAHLNLHINSLELGDSAV |
| | AVRGGSYIPTFGRGTSLIVHP | YFCASSQSEAGQGYGYTFGSG |
| | | TRLTVV |
| 01CA0DP_074_ | MTSIRAVFIFLWLQLDLVNGEN | MGPQLLGYVVLCLLGAGPLEA |
| E12_0160 | VEQHPSTLSVQEGDSAVIKCTY | QVTQNPRYLITVTGKKLTVTCS |
| | SDSASNYFPWYKQELGKGPQL | QNMNHEYMSWYRQDPGLGLR |
| | IIDIRSNVGEKKDQRIAVTLNKT | QIYYSMNVEVTDKGDVPEGYK |
| | AKHFSLHITETQPEDSAVYFCA | VSRKEKRNFPLILESPSPNQTSL |
| | AGGGGADGLTFGKGTHLIIQP | YFCASSDWEEGRSEQYFGPGT |
| | | RLTVT |

TABLE 1C.1
V(D)J Segments and CDR3 Sequences for TCRs isolated from healthy donors

| Clone ID | pHLA | TRA-V | TRA-J | TRB-V | TRB-D | TRB-J | αCDR3 | βCDR3 |
|---|---|---|---|---|---|---|---|---|
| 01CA0WT_066_ | HLA-A*02:01/ | TRAV24 | TRAJ33 | TRBV19 | None* | TRBJ1-2 | CAFPMDSNYQLIW | CASSLGVHGYTF |
| F03_0008 | KLVVVGACGV | | | | | | | |
| 01CA019_064_ | HLA-*02:01/ | TRAV1-2 | TRAJ37 | TRBV9 | TRBDI | TRBJ2-3 | CAVSSGNTGKLIF | CASSVAGDSLTD |
| F05_1114 | KLVVVGACGV | | | | | | | TQYF |
| 01CA0DP_064_ | HLA-A*02:01/ | TRAV38- | TRAJ28 | TRBV7-6 | None | TRBJ2-2 | CAPITGAGSYQLTF | CASSLAFQESNT |
| F04_0003 | KLVVVGACGV | 2DV8 | | | | | | GELFF |
| 01DB008_064_ | HLA-A*03:01/ | TRAV12-2 | TRAJ13 | TRBV10-2 | TRBD2 | TRBJ2-1 | CAALNSGGYQKVTF | CASSPGLNEQFF |
| G02_0013 | TTAPPLSGK | | | | | | | |
| 01DB008_064_ | HLA-A*03:01/ | TRAV12-2 | TRAJ43 | TRBV7-9 | None | TRBJ1-1 | CAVGTNDMRF | CASTSPPEAFF |
| G02_0023 | TTAPPLSGK | | | | | | | |
| 01CA018_064_ | HLA-A*03:01/ | TRAV1-2 | TRAJ20 | TRBV7-9 | None | TRBH-2 | CAVRGSNDYKLSF | CASSSDNVKNYG |
| H10_0018 | WGAVGVGK | | | | | | | YTF |
| 01CA018_064_ | HLA-A*03:01/ | TRAV12-2 | TRAJ43 | TRBV9 | None | TRBJ2-3 | CAVRNNNDMRF | CASSVGSDTQYF |
| H10_0014 | WGAVGVGK | | | | | | | |
| 01CA018_022_ | HLA-A*03:01/ | TRAV1-1 | TRAJ40 | TRBV20-1 | None | TRBJ1-1 | CAGFTSGTYKYIF | CSARVSFGVMNT |
| E04_0155 | VVVGAVGVGK | | | | | | | EAFF |
| 01CA018_022_ | HLA-A*03:01/ | TRAV12-3 | TRAJ43 | TRBV24-1 | TRBDI | TRBJ2-5 | CASYNNNDMRF | CATSGRTGGNLE |
| E04_0030 | VVVGAVGVGK | | | | | | | TQYF |
| 01CADMS_064_ | HLA-A* 11:01/ | TRAV21 | TRAJ42 | TRBV20-1 | TRBD2 | TRBJ2-7 | CASSNYGGSQGNL | CSARAAAAYEQYF |
| F09_0013 | WGAVGVGK | | | | | | IF | |
| 01CA0WT_064_ | HLA-A* 11:01/ | TRAV8-6 | TRAJ52 | TRBV6-3 | TRBDI | TRBJ1-5 | CAVSEMGGTSYGK | CASSRTGTAYQP |
| F06_0020 | WGAVGVGK | | | | | | LTF | QHF |
| 01CA018_064_ | HLA-A* 11:01/ | TRAV1-2 | TRAJ8 | TRBV5-1 | None | TRBJ1-1 | CAVDTGFQKLVF | CASSLGSPEAFF |
| G01_0167 | WGAVGVGK | | | | | | | |

*“None” indicates sequence analysis did not map to a known TRB-D gene

TABLE 1C.2
V(D)J Segments and CDR3 Sequences for TCRs isolated from healthy donors-G12C

| Clone ID | pHLA | TRA-V | TRA-J | TRB-V | TRB-D | TRB-J | TRB-C | αCDR3 | βCDR3 |
|---|---|---|---|---|---|---|---|---|---|
| 01CA019_064_ | HLA-A*02:01/ | TRAV5 | TRAJ34 | TRBV20-1 | TRBD1 | TRBJ1 | TRBC1 | CAERVNTD | CSASTGDS |
| F05_0104 | KLVVVGACGV | | | | | | | KLIF | GNTIYF |
| 01CA019_064_ | HLA-*02:01/ | TRAV14DV4 | TRAJ34 | TRBV9 | TRBD1 | TRBJ1-3 | TRBC1 | CAMRELNT | CASSQWDS |
| F05_0047 | KLVVVGACGV | | | | | | | DKLIF | SGNTIYF |
| 01CA019_064_ | HLA-A*02:01/ | TRAV14DV4 | TRAJ34 | TRBV7-2 | TRBD1 | TRBJ1-2 | TRBC1 | CAMREPRS | CASSLVSQ |
| F05_0064 | KLVVVGACGV | | | | | | | YNTDKLIF | VGYGYTF |
| 01CA019_064_ | HLA-A*02:01/ | TRAV14DV4 | TRAJ12 | TRBV9 | TRBD1 | TRBJ2-3 | TRBC2 | CAMREESS | CASSVAGD |
| F05_0005 | KLVVVGACGV | | | | | | | YKLIF | SLTDTQYF |

TABLE 1C.3
V(D)J Segments and CDR3 Sequences for TCRs isolated from healthy donors-G12V

| Clone ID | pHLA | TRA-V | TRA-J | TRB-V | TRB-D | TRB-J | TRB-C | αCDR3 | βCDR3 |
|---|---|---|---|---|---|---|---|---|---|
| 01CA018_064_ | HLA-A*11:01/ | TRAV6 | TRAJ3 | TRBV27 | None* | TRBJ2-1 | TRBC2 | CALGYSSA | CASSLVG |
| F08_0007 | VVGAVGVGK | | | | | | | SKIIF | NEQFF |
| 01CA018_064_ | HLA-A*11:01/ | TRAV29DV5 | TRAJ8 | TRBV5-1 | None | TRBJ1-1 | TRBC1 | CAANGGFQ | CASSSGR |
| F10_0022 | VVGAVGVGK | | | | | | | KLVF | TEAFF |
| 01CA018_064_ | HLA-A*11:01/ | TRAV17 | TRAJ9 | TRBVH-2 | TRBD1 | TRBJ2-7 | TRBC1 | CATDAGTG | CASSLES |
| F10_0004 | VVGAVGVGK | | | | | | | GFKTIF | SYEQYF |
| 01CA018_064_ | HLA-A*11:01/ | TRAV17 | TRAJ37 | TRBVH-2 | TRBD2 | TRBJ2-7 | TRBC2 | CATDRGSS | CASSLEI |
| F10_0005 | VVGAVGVGK | | | | | | | NTGKLIF | SYEQYF |
| 01CA018_064_ | HLA-A*11:01/ | TRAV17 | TRAJ36 | TRBVH-2 | None | TRBJ2-7 | TRBC2 | CATDSQTG | CASSLGD |
| F10 0002 | VVGAVGVGK | | | | | | | ANNLFF | TYEQYF |
| 01CA018_064_ | HLA-A*11:01/ | TRAV17 | TRAJ20 | TRBVH-2 | None | TRBJ2-7 | TRBC2 | CATDPREL | CASSLES |
| F10_0001 | VVGAVGVGK | | | | | | | SF | SYEQYF |

*“None” indicates sequence analysis did not map to a known TRB-D gene

TABLE ID
V(D)J Segments and CDR3 Sequences for TCRs isolated from TILs derived
from subjects with cancer

| Clone ID | pHLA | TRA-V | TRA-J | TRB-V | TRB-D | TRB-J | αCDR3 | βCDR3 |
|---|---|---|---|---|---|---|---|---|
| 01CA018_074_ | HLA-A*11:01/ | TRAV1-2 | TRAJ33 | TRBV4-3 | TRBD1 | TRBJ2-6 | CAVTDSN | CASSQGTG |
| E09_0061 | VVGAVGVGK | | | | | | YQLIW | SGANVLTF |
| 01CA018_074_ | HLA-A*11:01/ | TRAV21 | TRAJ49 | TRBV20-1 | None* | TRBJ2-7 | CAGPNTG | CSAPPGSP |
| E09_0035 | VVGAVGVGK | | | | | | NQFYF | YEQYF |
| 01CA0DP_074_ | HLA-A*11:01/ | TRAV1-2 | TRAJ6 | TRBV3-1 | TRBD2 | TRBH-2 | CAVRGGS | CASSQSEA |
| E12_0114 | VVVGAVGVGK | | | | | | YIPTF | GQGYGYTF |
| 01CA0DP_074_ | HLA-A*11:01/ | TRAV13-1 | TRAJ45 | TRBV27 | TRBD2 | TRBJ2-7 | CAAGGGG | CASSDWEE |
| E12_0160 | VVVGAVGVGK | | | | | | ADGLTF | GRSEQYF |

*“None” indicates sequence analysis did not map to a known TRB-D gene indicates sequence analysis did not map to a known TRB-D gene

### REFERENCES

[0524] 1. Desrichard, A., Snyder, A. & Chan, T. A. Cancer Neoantigens and Applications for Immunotherapy. Clin. Cancer Res. Off J. Am. Assoc. Cancer Res. (2015). doi:10.1158/1078-0432.CCR-14-3175
[0525] 2. Schumacher, T. N. & Schreiber, R. D. Neoantigens in cancer immunotherapy. Science 348, 69-74 (2015).
[0526] 3. Gubin, M. M., Artyomov, M. N., Mardis, E. R. & Schreiber, R. D. Tumor neoantigens: building a framework for personalized cancer immunotherapy. J Clin. Invest. 125, 3413-3421 (2015).
[0527] 4. Rizvi, N. A. et al. Cancer immunology. Mutational landscape determines sensitivity to PD-1 blockade in non-small cell lung cancer. Science 348, 124-128 (2015).
[0528] 5. Snyder, A. et al. Genetic basis for clinical response to CTLA-4 blockade in melanoma. N. Engl. J. Med. 371, 2189-2199 (2014).
[0529] 6. Carreno, B. M. et al. Cancer immunotherapy. A dendritic cell vaccine increases the breadth and diversity of melanoma neoantigen-specific T cells. Science 348, 803-808 (2015).
[0530] 7. Tran, E. et al. Cancer immunotherapy based on mutation-specific CD4+ T cells in a patient with epithelial cancer. Science 344, 641-645 (2014).
[0531] 8. Hacohen, N. & Wu, C. J.-Y. United States Patent Application: 20110293637 —COMPOSITIONS AND METHODS OF IDENTIFYING TUMOR SPECIFIC NEOANTIGENS. (A1). at <http://appft1.uspto.gov/netacgi/nph-Parser?Sect1=PTO1&Sect2=HITOFF&d=PGO1&p=1&u=/netahtml/PTO/srchnum.html&r=1 &f=G&1=50&s1=20110293637.PGNR.>
[0532] 9. Lundegaard, C., Hoof, I., Lund, O. & Nielsen, M. State of the art and challenges in sequence based T-cell epitope prediction. Immunome Res. 6 Suppl 2, S3 (2010).
[0533] 10. Yadav, M. et al. Predicting immunogenic tumour mutations by combining mass spectrometry and exome sequencing. Nature 515, 572-576 (2014).
[0534] 11. Bassani-Sternberg, M., Pletscher-Frankild, S., Jensen, L. J. & Mann, M. Mass spectrometry of human leukocyte antigen class I peptidomes reveals strong effects of protein abundance and turnover on antigen presentation. Mol. Cell. Proteomics MCP 14, 658-673 (2015).
[0535] 12. Van Allen, E. M. et al. Genomic correlates of response to CTLA-4 blockade in metastatic melanoma. Science 350, 207-211 (2015).
[0536] 13. Yoshida, K. & Ogawa, S. Splicing factor mutations and cancer. Wiley Interdiscip. Rev. RNA 5, 445-459 (2014).
[0537] 14. Cancer Genome Atlas Research Network. Comprehensive molecular profiling of lung adenocarcinoma. Nature 511, 543-550 (2014).
[0538] 15. Rajasagi, M. et al. Systematic identification of personal tumor-specific neoantigens in chronic lymphocytic leukemia. Blood 124, 453-462 (2014).
[0539] 16. Downing, S. R. et al. U.S. patent application Ser. No. 01/202,08706 —OPTIMIZATION OF MULTIGENE ANALYSIS OF TUMOR SAMPLES. (A1). at <http://appft1.uspto.gov/netacgi/nph-Parser?Sect1=PTO1&Sect2=HITOFF&d=PGO1&p=1&u=/netahtml/PTO/srchnum.html&r=1 &f=G&1=50&s1=20120208706.PGNR.>
[0540] 17. Target Capture for NextGen Sequencing—IDT. at <http://www.idtdna.com/pages/products/nextgen/target-capture>
[0541] 18. Shukla, S. A. et al. Comprehensive analysis of cancer-associated somatic mutations in class I HLA genes. Nat. Biotechnol. 33, 1152-1158 (2015).
[0542] 19. Cieslik, M. et al. The use of exome capture RNA-seq for highly degraded RNA with application to clinical cancer sequencing. Genome Res. 25, 1372-1381 (2015).
[0543] 20. Bodini, M. et al. The hidden genomic landscape of acute myeloid leukemia: subclonal structure revealed by undetected mutations. Blood 125, 600-605 (2015).
[0544] 21. Saunders, C. T. et al. Strelka: accurate somatic small-variant calling from sequenced tumor-normal sample pairs. Bioinforma. Oxf. Engl. 28, 1811-1817 (2012).
[0545] 22. Cibulskis, K. et al. Sensitive detection of somatic point mutations in impure and heterogeneous cancer samples. Nat. Biotechnol. 31, 213-219 (2013).
[0546] 23. Wilkerson, M. D. et al. Integrated RNA and DNA sequencing improves mutation detection in low purity tumors. Nucleic Acids Res. 42, e107 (2014).
[0547] 24. Mose, L. E., Wilkerson, M. D., Hayes, D. N., Perou, C. M. & Parker, J. S. ABRA: improved coding indel detection via assembly-based realignment. Bioinforma. Oxf Engl. 30, 2813-2815 (2014).
[0548] 25. Ye, K., Schulz, M. H., Long, Q., Apweiler, R. & Ning, Z. Pindel: a pattern growth approach to detect break points of large deletions and medium sized insertions from paired-end short reads. Bioinforma. Oxf Engl. 25, 2865-2871 (2009).
[0549] 26. Lam, H. Y. K. et al. Nucleotide-resolution analysis of structural variants using BreakSeq and a breakpoint library. Nat. Biotechnol. 28, 47-55 (2010).
[0550] 27. Frampton, G. M. et al. Development and validation of a clinical cancer genomic profiling test based on massively parallel DNA sequencing. Nat. Biotechnol. 31, 1023-1031 (2013).
[0551] 28. Boegel, S. et al. HLA typing from RNA-Seq sequence reads. Genome Med. 4, 102 (2012).
[0552] 29. Liu, C. et al. ATHLATES: accurate typing of human leukocyte antigen through exome sequencing. Nucleic Acids Res. 41, e142 (2013).
[0553] 30. Mayor, N. P. et al. HLA Typing for the Next Generation. PloS One 10, e0127153 (2015).
[0554] 31. Roy, C. K., Olson, S., Graveley, B. R., Zamore, P. D. & Moore, M. J. Assessing long-distance RNA sequence connectivity via RNA-templated DNA-DNA ligation. eLife 4, (2015).
[0555] 32. Song, L. & Florea, L. CLASS: constrained transcript assembly of RNA-seq reads. BMC Bioinformatics 14 Suppl 5, S14 (2013).
[0556] 33. Maretty, L., Sibbesen, J. A. & Krogh, A. Bayesian transcriptome assembly. Genome Biol. 15, 501 (2014).
[0557] 34. Pertea, M. et al. StringTie enables improved reconstruction of a transcriptome from RNA-seq reads. Nat. Biotechnol. 33, 290-295 (2015).
[0558] 35. Roberts, A., Pimentel, H., Trapnell, C. & Pachter, L. Identification of novel transcripts in annotated genomes using RNA-Seq. Bioinforma. Oxf Engl. (2011). doi:10.1093/bioinformatics/btr355
[0559] 36. Vitting-Seerup, K., Porse, B. T., Sandelin, A. & Waage, J. spliceR: an R package for classification of alternative splicing and prediction of coding potential from RNA-seq data. BMC Bioinformatics 15, 81 (2014).
[0560] 37. Rivas, M. A. et al. Human genomics. Effect of predicted protein-truncating genetic variants on the human transcriptome. Science 348, 666-669 (2015).
[0561] 38. Skelly, D. A., Johansson, M., Madeoy, J., Wakefield, J. & Akey, J. M. A powerful and flexible statistical framework for testing hypotheses of allele-specific gene expression from RNA-seq data. Genome Res. 21, 1728-1737 (2011).
[0562] 39. Anders, S., Pyl, P. T. & Huber, W. HTSeq—a Python framework to work with high-throughput sequencing data. Bioinforma. Oxf Engl. 31, 166-169 (2015).
[0563] 40. Furney, S. J. et al. SF3B1 mutations are associated with alternative splicing in uveal melanoma. Cancer Discov. (2013). doi:10.1158/2159-8290.CD-13-0330
[0564] 41. Zhou, Q. et al. A chemical genetics approach for the functional assessment of novel cancer genes. Cancer Res. (2015). doi:10.1158/0008-5472.CAN-14-2930
[0565] 42. Maguire, S. L. et al. SF3B1 mutations constitute a novel therapeutic target in breast cancer. J. Pathol. 235, 571-580 (2015).
[0566] 43. Carithers, L. J. et al. A Novel Approach to High-Quality Postmortem Tissue Procurement: The GTEx Project. Biopreservation Biobanking 13, 311-319 (2015).
[0567] 44. Xu, G. et al. RNA CoMPASS: a dual approach for pathogen and host transcriptome analysis of RNA-seq datasets. PloS One 9, e89445 (2014).
[0568] 45. Andreatta, M. & Nielsen, M. Gapped sequence alignment using artificial neural networks: application to the MHC class I system. Bioinforma. Oxf. Engl. (2015). doi:10.1093/bioinformatics/btv639
[0569] 46. Jorgensen, K. W., Rasmussen, M., Buus, S. & Nielsen, M. NetMHCstab—predicting stability of peptide-MHC-I complexes; impacts for cytotoxic T lymphocyte epitope discovery. Immunology 141, 18-26 (2014).
[0570] 47. Larsen, M. V. et al. An integrative approach to CTL epitope prediction: a combined algorithm integrating MHC class I binding, TAP transport efficiency, and proteasomal cleavage predictions. Eur. J. Immunol. 35, 2295-2303 (2005).
[0571] 48. Nielsen, M., Lundegaard, C., Lund, O. & Keşmir, C. The role of the proteasome in generating cytotoxic T-cell epitopes: insights obtained from improved predictions of proteasomal cleavage. Immunogenetics 57, 33-41 (2005).
[0572] 49. Boisvert, F.-M. et al. A Quantitative Spatial Proteomics Analysis of Proteome Turnover in Human Cells. Mol. Cell. Proteomics 11, M111.011429-M111.011429 (2012).
[0573] 50. Duan, F. et al. Genomic and bioinformatic profiling of mutational neoepitopes reveals new rules to predict anticancer immunogenicity. J. Exp. Med. 211, 2231-2248 (2014).
[0574] 51. Janeway's Immunobiology: 9780815345312: Medicine & Health Science Books @Amazon.com. at <http://www.amazon.com/Janeways-Immunobiology-Kenneth-Murphy/dp/0815345313>
[0575] 52. Calis, J. J. A. et al. Properties of MHC Class I Presented Peptides That Enhance Immunogenicity. PLoS Comput. Biol. 9, e1003266 (2013).
[0576] 53. Zhang, J. et al. Intratumor heterogeneity in localized lung adenocarcinomas delineated by multiregion sequencing. Science 346, 256-259 (2014)
[0577] 54. Walter, M. J. et al. Clonal architecture of secondary acute myeloid leukemia. N. Engl. J. Med. 366, 1090-1098 (2012).
[0578] 55. Hunt D F, Henderson R A, Shabanowitz J, Sakaguchi K, Michel H, Sevilir N, Cox A L, Appella E, Engelhard V H. Characterization of peptides bound to the class I MHC molecule HLA-A2.1 by mass spectrometry. Science 1992. 255: 1261-1263.
[0579] 56. Zarling A L, Polefrone J M, Evans A M, Mikesh L M, Shabanowitz J, Lewis S T, Engelhard V H, Hunt D F. Identification of class I MHC-associated phosphopeptides as targets for cancer immunotherapy. Proc Natl Acad Sci USA. 2006 Oct. 3; 103(40):14889-94.
[0580] 57. Bassani-Sternberg M, Pletscher-Frankild S, Jensen L J, Mann M. Mass spectrometry of human leukocyte antigen class I peptidomes reveals strong effects of protein abundance and turnover on antigen presentation. Mol Cell Proteomics. 2015 March; 14(3):658-73. doi: 10.1074/mcp.M 114.042812.
[0581] 58. Abelin J G, Trantham P D, Penny S A, Patterson A M, Ward S T, Hildebrand W H, Cobbold M, Bai D L, Shabanowitz J, Hunt D F. Complementary IMAC enrichment methods for HLA-associated phosphopeptide identification by mass spectrometry. Nat Protoc. 2015 September; 10(9):1308-18. doi: 10.1038/nprot. 2015.086. Epub 2015 Aug. 6
[0582] 59. Barnstable C J, Bodmer W F, Brown G, Galfre G, Milstein C, Williams A F, Ziegler A. Production of monoclonal antibodies to group A erythrocytes, HLA and other human cell surface antigens-new tools for genetic analysis. Cell. 1978 May; 14(1):9-20.
[0583] 60. Goldman J M, Hibbin J, Kearney L, Orchard K, Th'ng K H. HLA-D R monoclonal antibodies inhibit the proliferation of normal and chronic granulocytic leukaemia myeloid progenitor cells. Br J Haematol. 1982 November; 52(3):411-20.
[0584] 61. Eng J K, Jahan T A, Hoopmann M R. Comet: an open-source MS/MS sequence database search tool. Proteomics. 2013 January; 13(1):22-4. doi: 10.1002/pmic. 201200439. Epub 2012 Dec. 4.
[0585] 62. Eng J K, Hoopmann M R, Jahan T A, Egertson J D, Noble W S, MacCoss M J. A deeper look into Comet—implementation and features. J Am Soc Mass Spectrom. 2015 November; 26(11):1865-74. doi: 10.1007/s13361-015-1179-x. Epub 2015 Jun. 27.
[0586] 63. Lukas Käll, Jesse Canterbury, Jason Weston, William Stafford Noble and Michael J. MacCoss. Semi-supervised learning for peptide identification from shotgun proteomics datasets. Nature Methods 4:923-925, November 2007
[0587] 64. Lukas Käll, John D. Storey, Michael J. MacCoss and William Stafford Noble. Assigning confidence measures to peptides identified by tandem mass spectrometry. Journal of Proteome Research, 7(1):29-34, January 2008
[0588] 65. Lukas Käll, John D. Storey and William Stafford Noble. Nonparametric estimation of posterior error probabilities associated with peptides identified by tandem mass spectrometry. Bioinformatics, 24(16):i42-i48, August 2008
[0589] 66. Kinney R M, B J Johnson, V L Brown, D W Trent. Nucleotide Sequence of the 26 S mRNA of the Virulent Trinidad Donkey Strain of Venezuelan Equine Encephalitis Virus and Deduced Sequence of the Encoded Structural Proteins. Virology 152 (2), 400-413. 1986 Jul. 30.
[0590] 67. Jill E Slansky, Frédérique M Rattis, Lisa F Boyd, Tarek Fahmy, Elizabeth M Jaffee, Jonathan P Schneck, David H Margulies, Drew M Pardoll. Enhanced Antigen-Specific Antitumor Immunity with Altered Peptide Ligands that Stabilize the MHC-Peptide-TCR Complex. Immunity, Volume 13, Issue 4, 1 Oct. 2000, Pages 529-538.
[0591] 68. A Y Huang, P H Gulden, A S Woods, M C Thomas, C D Tong, W Wang, V H Engelhard, G Pasternack, R Cotter, D Hunt, D M Pardoll, and E M Jaffee. The immunodominant major histocompatibility complex class I-restricted antigen of a murine colon tumor derives from an endogenous retroviral gene product. Proc Natl Acad Sci USA; 93(18): 9730-9735, 1996 Sep. 3.
[0592] 69. JOHNSON, BARBARA J. B., RICHARD M. KINNEY, CRYSTLE L. KOST AND DENNIS W. TRENT. Molecular Determinants of Alphavirus Neurovirulence: Nucleotide and Deduced Protein Sequence Changes during Attenuation of Venezuelan Equine Encephalitis Virus. J Gen Virol 67:1951-1960, 1986.
[0593] 70. Aarnoudse, C. A., Krüse, M., Konopitzky, R., Brouwenstijn, N., and Schrier, P. I. (2002). TCR reconstitution in Jurkat reporter cells facilitates the identification of novel tumor antigens by cDNA expression cloning. Int J Cancer 99, 7-13.
[0594] 71. Alexander, J., Sidney, J., Southwood, S., Ruppert, J., Oseroff, C., Maewal, A., Snoke, K., Serra, H. M., Kubo, R. T., and Sette, A. (1994). Development of high potency universal DR-restricted helper epitopes by modification of high affinity DR-blocking peptides. Immunity 1, 751-761.
[0595] 72. Banu, N., Chia, A., Ho, Z. Z., Garcia, A. T., Paravasivam, K., Grotenbreg, G. M., Bertoletti, A., and Gehring, A. J. (2014). Building and optimizing a virus-specific T cell receptor library for targeted immunotherapy in viral infections. Scientific Reports 4, 4166.
[0596] 73. Cornet, S., Miconnet, I., Menez, J., Lemonnier, F., and Kosmatopoulos, K. (2006). Optimal organization of a polypeptide-based candidate cancer vaccine composed of cryptic tumor peptides with enhanced immunogenicity. Vaccine 24, 2102-2109.
[0597] 74. Depla, E., van der Aa, A., Livingston, B. D., Crimi, C., Allosery, K., de Brabandere, V., Krakover, J., Murthy, S., Huang, M., Power, S., et al. (2008). Rational design of a multiepitope vaccine encoding T-lymphocyte epitopes for treatment of chronic hepatitis B virus infections. Journal of Virology 82, 435-450.
[0598] 75. Ishioka, G. Y., Fikes, J., Hermanson, G., Livingston, B., Crimi, C., Qin, M., del Guercio, M. F., Oseroff, C., Dahlberg, C., Alexander, J., et al. (1999). Utilization of MHC class I transgenic mice for development of minigene DNA vaccines encoding multiple HLA-restricted CTL epitopes. J Immunol 162, 3915-3925.
[0599] 76. Janetzki, S., Price, L., Schroeder, H., Britten, C. M., Welters, M. J. P., and Hoos, A. (2015). Guidelines for the automated evaluation of Elispot assays. Nat Protoc 10, 1098-1115.
[0600] 77. Lyons, G. E., Moore, T., Brasic, N., Li, M., Roszkowski, J. J., and Nishimura, M. I. (2006). Influence of human CD8 on antigen recognition by T-cell receptor-transduced cells. Cancer Res 66, 11455-11461.
[0601] 78. Nagai, K., Ochi, T., Fujiwara, H., An, J., Shirakata, T., Mineno, J., Kuzushima, K., Shiku, H., Melenhorst, J. J., Gostick, E., et al. (2012). Aurora kinase A-specific T-cell receptor gene transfer redirects T lymphocytes to display effective antileukemia reactivity. Blood 119, 368-376.
[0602] 79. Panina-Bordignon, P., Tan, A., Termijtelen, A., Demotz, S., Corradin, G., and Lanzavecchia, A. (1989). Universally immunogenic T cell epitopes: promiscuous binding to human MHC class II and promiscuous recognition by T cells. Eur J Immunol 19, 2237-2242.
[0603] 80. Vitiello, A., Marchesini, D., Furze, J., Sherman, L. A., and Chesnut, R. W. (1991). Analysis of the HLA-restricted influenza-specific cytotoxic T lymphocyte response in transgenic mice carrying a chimeric human-mouse class I major histocompatibility complex. J Exp Med 173, 1007-1015.
[0604] 81. Yachi, P. P., Ampudia, J., Zal, T., and Gascoigne, N. R. J. (2006). Altered peptide ligands induce delayed CD8-T cell receptor interaction—a role for CD8 in distinguishing antigen quality. Immunity 25, 203-211.
[0605] 82. Pushko P, Parker M, Ludwig G V, Davis N L, Johnston R E, Smith J F. Replicon-helper systems from attenuated Venezuelan equine encephalitis virus: expression of heterologous genes in vitro and immunization against heterologous pathogens in vivo. Virology. 1997 Dec. 22; 239(2):389-401.
[0606] 83. Strauss, J H and E G Strauss. The alphaviruses: gene expression, replication, and evolution. Microbiol Rev. 1994 September; 58(3): 491-562.
[0607] 84. Rhême C, Ehrengruber M U, Grandgirard D. Alphaviral cytotoxicity and its implication in vector development. Exp Physiol. 2005 January; 90(1):45-52. Epub 2004 Nov. 12.
[0608] 85. Riley, Michael K. I I, and Wilfred Vermerris. Recent Advances in Nanomaterials for Gene Delivery—A Review. Nanomaterials 2017, 7(5), 94.
[0609] 86. Frolov I, Hardy R, Rice C M. Cis-acting RNA elements at the 5′ end of Sindbis virus genome RNA regulate minus- and plus-strand RNA synthesis. RNA. 2001 November; 7(11):1638-51.
[0610] 87. Jose J, Snyder J E, Kuhn R J. A structural and functional perspective of alphavirus replication and assembly. Future Microbiol. 2009 September; 4(7):837-56.
[0611] 88. Bo Li and C. olin N. Dewey. RSEM: accurate transcript quantification from RNA-Seq data with or without a reference genome. BMC Bioinformatics, 12:323, August 2011
[0612] 89. Hillary Pearson, Tariq Daouda, Diana Paola Granados, Chantal Durette, Eric Bonneil, Mathieu Courcelles, Anja Rodenbrock, Jean-Philippe Laverdure, Caroline Côté, Sylvie Mader, Sébastien Lemieux, Pierre Thibault, and Claude Perreault. MHC class I-associated peptides derive from selective regions of the human genome. The Journal of Clinical Investigation, 2016,
[0613] 90. Juliane Liepe, Fabio Marino, John Sidney, Anita Jeko, Daniel E. Bunting, Alessandro Sette, Peter M. Kloetzel, Michael P. H. Stumpf, Albert J. R. Heck, Michele Mishto. A large fraction of HLA class I ligands are proteasome-generated spliced peptides. Science, 21, October 2016.
[0614] 91. Mommen G P., Marino, F., Meiring H D., Poelen, M C., van Gaans-van den Brink, J A., Mohammed S., Heck A J., and van Els C A. Sampling From the Proteome to the Human Leukocyte Antigen-D R (HLA-D R) Ligandome Proceeds Via High Specificity. Mol Cell Proteomics 15(4): 1412-1423, April 2016.
[0615] 92. Sebastian Kreiter, Mathias Vormehr, Niels van de Roemer, Mustafa Diken, Martin Löwer, Jan Diekmann, Sebastian Boegel, Barbara Schrörs, Fulvia Vascotto, John C. Castle, Arbel D. Tadmor, Stephen P. Schoenberger, Christoph Huber, Özlem Túreci, and Ugur Sahin. Mutant MHC class I I epitopes drive therapeutic immune responses to caner. Nature 520, 692-696, April 2015.
[0616] 93. Tran E., Turcotte S., Gros A., Robbins P. F., Lu Y. C., Dudley M E., Wunderlich J R., Somerville R. P., Hogan K., Hinrichs C. S., Parkhurst M. R., Yang J. C., Rosenberg S. A. Cancer immunotherapy based on mutation-specific CD4+ T cells in a patient with epithelial cancer. Science 344(6184) 641-645, May 2014.
[0617] 94. Andreatta M., Karosiene E., Rasmussen M., Stryhn A., Buus S., Nielsen M. Accurate pan-specific prediction of peptide-MHC class II binding affinity with improved binding core identification. Immunogenetics 67(11-12) 641-650, November 2015.
[0618] 95. Nielsen, M., Lund, O. N N-align. An artificial neural network-based alignment algorithm for MHC class I I peptide binding prediction. BMC Bioinformatics 10:296, September 2009.
[0619] 96. Nielsen, M., Lundegaard, C., Lund, O. Prediction of MHC class II binding affinity using SMM-align, a novel stabilization matrix alignment method. BMC Bioinformatics 8:238, July 2007.
[0620] 97. Zhang, J., et al. PEAKS D B: de novo sequencing assisted database search for sensitive and accurate peptide identification. Molecular & Cellular Proteomics. 11(4):1-8. Jan. 2, 2012.
[0621] 98. Jensen, Kamilla Kjaergaard, et al. “Improved Methods for Prediting Peptide Binding Affinity to MHC Class I I Molecules.” Immunology, 2018, doi:10.1111/imm. 12889.
[0622] 99. Carter, S. L., Cibulskis, K., Helman, E., McKenna, A., Shen, H., Zack, T., Laird, P. W., Onofrio, R. C., Winckler, W., Weir, B. A., et al. (2012). Absolute quantification of somatic DNA alterations in human cancer. Nat. Biotechnol. 30, 413-421
[0623] 100. McGranahan, N., Rosenthal, R., Hiley, C. T., Rowan, A. J., Watkins, T. B. K., Wilson, G. A., Birkbak, N. J., Veeriah, S., Van Loo, P., Herrero, J., et al. (2017). Allele-Specific HLA Loss and Immune Escape in Lung Cancer Evolution. Cell 171, 1259-1271.ell.
[0624] 101. Shukla, S. A., Rooney, M. S., Rajasagi, M., Tiao, G., Dixon, P. M., Lawrence, M. S., Stevens, J., Lane, W. J., Dellagatta, J. L., Steelman, S., et al. (2015). Comprehensive analysis of cancer-associated somatic mutations in class I HLA genes. Nat. Biotechnol. 33, 1152-1158.
[0625] 102. Van Loo, P., Nordgard, S. H., Lingjorde, O. C., Russnes, H. G., Rye, I. H., Sun, W., Weigman, V. J., Marynen, P., Zetterberg, A., Naume, B., et al. (2010). Allele-specific copy number analysis of tumors. Proc. Natl. Acad. Sci. U.S.A 107, 16910-16915.
[0626] 103. Van Loo, P., Nordgard, S. H., Lingjærde, O. C., Russnes, H. G., Rye, I. H., Sun, W., Weigman, V. J., Marynen, P., Zetterberg, A., Naume, B., et al. (2010). Allele-specific copy number analysis of tumors. Proc. Natl. Acad. Sci. U.S.A 107, 16910-16915.

1. An antigen binding protein (ABP) that specifically binds to an HLA-PEPTIDE antigen comprising an HLA-restricted peptide complexed with an HLA Class I molecule, wherein the HLA-restricted peptide is located in the peptide binding groove of an α1/α2 heterodimer portion of the HLA Class I molecule, wherein the HLA Class I molecule and the HLA-restricted peptide are each selected from an HLA-PEPTIDE antigen as described in any one of SEQ ID NOs:10,755 to 29,364, and wherein the ABP comprises a T cell receptor (TCR) or antigen-binding fragment thereof.

2-3. (canceled)

4. The ABP of claim 1, wherein the HLA-PEPTIDE antigen is selected from the group consisting of:
a. a RAS_G12D MHC Class I antigen comprising HLA-A*11:01 and the restricted peptide VVVGADGVGK;
b. a RAS_G12V MHC Class I antigen comprising HLA-A*11:01 and the restricted peptide VVVGAVGVGK;
c. a RAS_G12C MHC Class I antigen comprising HLA-A*02:01 and the restricted peptide KLVVVGACGV;
d. a CTNNB1_S45P MHC Class I antigen comprising HLA-A*03:01 and the restricted peptide TTAPPLSGK;
e. a RAS_G12D MHC Class I antigen comprising HLA-A*11:01 and the restricted peptide VVGADGVGK;
f. a RAS_G12V MHC Class I antigen comprising HLA-A*11:01 and the restricted peptide VVGAVGVGK;
g. a RAS_G12V MHC Class I antigen comprising HLA-C*01:02 and the restricted peptide AVGVGKSAL;
h. a RAS_G12V MHC Class I antigen comprising HLA-A*03:01 and the restricted peptide VVVGAVGVGK;
i. a TP53_K132N MHC Class I antigen comprising HLA-A*24:02 and the restricted peptide TYSPALNNMF;
j. a CTNNB1_S37Y MHC Class I antigen comprising HLA-A*02:01 and the restricted peptide YLDSGIHYGA;
k. a RAS_G12C MHC Class I antigen comprising HLA-A*03:01 and the restricted peptide VVVGACGVGK;
l. a RAS_G12C MHC Class I antigen comprising HLA-A*11:01 and the restricted peptide VVVGACGVGK;
m. a RAS_G12D MHC Class I antigen comprising HLA-A*03:01 and the restricted peptide VVVGADGVGK;
n. a RAS_Q61H MHC Class I antigen comprising HLA-A*01:01 and the restricted peptide ILDTAGHEEY; and
o. a TP53_R213L MHC Class I antigen comprising A*02:01 and the restricted peptide YLDDRNTFL.

5-7. (canceled)

8. The ABP of claim 1, wherein the HLA-restricted peptide comprises a RAS G12 mutation, optionally wherein the G12 mutation is a G12C, a G12D, a G12V, or a G12A mutation.

9-50. (canceled)

51. An engineered cell expressing a receptor comprising the antigen binding protein of claim 1.

52. The engineered cell of claim 51, wherein the engineered cell is a T cell, optionally wherein the T cell is selected from the group consisting of: a naive T (TN) cell, an effector T cell (TEFF), a memory T cell, a stem cell memory T cell (TSCM), a central memory T cell (TCM), an effector memory T cell (TEM), a terminally differentiated effector memory T cell, a tumor-infiltrating lymphocyte (TIL), an immature T cell, a mature T cell, a helper T cell, a cytotoxic T cell (CTL), a mucosa-associated invariant T (MALT) cell, a regulatory T cell (Treg), a TH1 cell, a TH2 cell, a TH3 cell, a TH17 cell, a TH9 cell, a TH22 cell, a follicular helper T cell, an natural killer T cell (NKT), an alpha-beta T cell, and a gamma-delta T cell.

53-55. (canceled)

56. The engineered cell of claim 51, wherein the engineered cell is an autologous cell of a subject.

57. The engineered cell of claim 56, wherein the subject is known or suspected to have cancer.

58-61. (canceled)

62. The engineered cell of claim 56, wherein the ABP comprises a T cell receptor (TCR) or an antigen-binding portion thereof, and wherein a polynucleotide encoding the T cell receptor (TCR) or antigen-binding portion thereof is inserted in an endogenous TCR locus.

63. (canceled)

64. An isolated polynucleotide or set of polynucleotides encoding the ABP of claim 1 or an antigen-binding portion thereof.

65-70. (canceled)

71. A pharmaceutical composition comprising the antigen binding protein of claim 1 and a pharmaceutically acceptable excipient.

72. (canceled)

73. A method of stimulating an immune response in a subject, comprising administering to the subject an antigen binding protein (ABP) that specifically binds to an HLA-PEPTIDE antigen comprising an HLA-restricted peptide complexed with an HLA Class I molecule, wherein the HLA-restricted peptide is located in the peptide binding groove of an α1/α2 heterodimer portion of the HLA Class I molecule, wherein the HLA Class I molecule and the HLA-restricted peptide are each selected from an HLA-PEPTIDE antigen as described in any one of SEQ ID NOs:10,755 to 29,364, and wherein the ABP comprises a T cell receptor (TCR) or antigen-binding fragment thereof, optionally wherein the subject has cancer, optionally wherein the cancer is selected from a solid tumor and a hematological tumor.

74-75. (canceled)

76. The method of claim 73, wherein the cancer expresses or is predicted to express an HLA-PEPTIDE antigen or HLA Class I molecule as described in any one of SEQ ID NOs:10,755 to 29,364, and wherein the ABP binds to the HLA-PEPTIDE antigen, optionally wherein the cancer expresses or is predicted to express an HLA-PEPTIDE antigen comprising an HLA-restricted peptide complexed with an HLA Class I molecule, wherein the HLA-restricted peptide is located in the peptide binding groove of an α1/α2 heterodimer portion of the HLA Class I molecule, wherein the HLA Class I molecule and the HLA-restricted peptide are each selected from an HLA-PEPTIDE antigen as described in any one of SEQ ID NOs:10,755 to 29,364, and wherein the ABP binds to the HLA-PEPTIDE antigen.

77-154. (canceled)

155. The ABP of claim 1, ABP comprises an alpha-CDR3 amino acid sequence and corresponding beta-CDR3 amino acid sequence selected from the group consisting of the sequences shown in Tables 1C. 2 and 1C. 3.

156. The ABP of claim 155, wherein the ABP further comprises an alpha variable (“V”) segment, an alpha joining (“J”) segment, a beta variable (“V”) segment, a beta joining (“J”) segment, optionally a beta diversity (“D”) segment, and optionally a beta constant region selected from the group consisting of the regions shown in Tables 1C. 2 and 1C. 3 corresponding to the alpha-CDR3 amino acid sequence and corresponding beta-CDR3 amino acid sequence.

157. The ABP of claim 155, wherein the ABP comprises an alpha variable region and corresponding beta variable region comprising the amino acid sequences selected from the sequences shown in Tables 1A. 2 and 1A. 3 corresponding to the alpha-CDR3 amino acid sequence and corresponding beta-CDR3 amino acid sequence.

158. An antigen binding protein (ABP) that specifically binds to an HLA-PEPTIDE antigen comprising an HLA-restricted RAS peptide complexed with an HLA Class I molecule, wherein the HLA-restricted peptide is located in the peptide binding groove of an α1/α2 heterodimer portion of the HLA Class I molecule, wherein the HLA-restricted RAS peptide comprises at least one alteration that makes HLA-restricted RAS peptide sequence distinct from the corresponding peptide sequence of a wild-type RAS peptide, and wherein the ABP comprises an alpha-CDR3 amino acid sequence and corresponding beta-CDR3 amino acid sequence selected from the group consisting of the sequences shown in Tables 1C. 2 and 1C. 3.

159. (canceled)

160. The ABP of claim 158, wherein the HLA-PEPTIDE antigen is (a) a RAS_G12C MHC Class I antigen comprising HLA-A*02:01 and the restricted peptide KLVVVGACGV, or (b) a RAS G12V MHC Class I antigen comprising HLA-A*11:01 and the restricted peptide VVGAVGVGK.

161. The ABP of claim 160, wherein the ABP comprises an alpha-CDR3 amino acid sequence and corresponding beta-CDR3 amino acid sequence selected from the group consisting of the sequences shown in Table 1C. 2 or Table 1C. 3.

162. The ABP of claim 161, wherein the ABP further comprises an alpha variable (“V”) segment, an alpha joining (“J”) segment, a beta variable (“V”) segment, a beta joining (“J”) segment, optionally a beta diversity (“D”) segment, and optionally a beta constant region selected from the group consisting of the regions shown in Table 1C. 2 or Table 1C. 3 corresponding to the alpha-CDR3 amino acid sequence and corresponding beta-CDR3 amino acid sequence.

163. The ABP of claim 161, wherein the ABP comprises an alpha variable region and corresponding beta variable region comprising the amino acid sequences selected from the sequences shown in Table 1A. 2 or Table 1A. 3 corresponding to the alpha-CDR3 amino acid sequence and corresponding beta-CDR3 amino acid sequence.

164-167. (canceled)

The application's sequence listing, which the Patent Office published only in electronic form, follows.

SEQUENCE LISTING (29357 sequences)

SEQ ID NO: 1 - DNA, 36519 bp, Artificial Sequence
  Description of Artificial Sequence: Synthetic polynucleotide
ccatcttcaataatatacctcaaactttttgtgcgcgttaatatgcaaatgaggcgtttgaatttggggaggaagggcggtgattggtcgagggatgagcgaccgttaggggcggggcgagtgacgttttgatgacgtggttgcgaggaggagccagtttgcaagttctcgtgggaaaagtgacgtcaaacgaggtgtggtttgaacacggaaatactcaattttcccgcgctctctgacaggaaatgaggtgtttctgggcggatgcaagtgaaaacgggccattttcgcgcgaaaactgaatgaggaagtgaaaatctgagtaatttcgcgtttatggcagggaggagtatttgccgagggccgagtagactttgaccgattacgtgggggtttcgattaccgtgtttttcacctaaatttccgcgtacggtgtcaaagtccggtgtttttacgtaggtgtcagctgatcgccagggtatttaaacctgcgctctccagtcaagaggccactcttgagtgccagcgagaagagttttctcctccgcgccgcgagtcagatctacactttgaaagatgaggcacctgagagacctgcccgatgagaaaatcatcatcgcttccgggaacgagattctggaactggtggtaaatgccatgatgggcgacgaccctccggagccccccaccccatttgagacaccttcgctgcacgatttgtatgatctggaggtggatgtgcccgaggacgatcccaatgaggaggcggtaaatgatttttttagcgatgccgcgctgctagctgccgaggaggcttcgagctctagctcagacagcgactcttcactgcatacccctagacccggcagaggtgagaaaaagatccccgagcttaaaggggaagagatggacttgcgctgctatgaggaatgcttgcccccgagcgatgatgaggacgagcaggcgatccagaacgcagcgagccagggagtgcaagccgccagcgagagctttgcgctggactgcccgcctctgcccggacacggctgtaagtcttgtgaatttcatcgcatgaatactggagataaagctgtgttgtgtgcactttgctatatgagagcttacaaccattgtgtttacagtaagtgtgattaagttgaactttagagggaggcagagagcagggtgactgggcgatgactggtttatttatgtatatatgttctttatataggtcccgtctctgacgcagatgatgagacccccactacaaagtccacttcgtcacccccagaaattggcacatctccacctgagaatattgttagaccagttcctgttagagccactgggaggagagcagctgtggaatgtttggatgacttgctacagggtggggttgaacctttggacttgtgtacccggaaacgccccaggcactaagtgccacacatgtgtgtttacttgaggtgatgtcagtatttatagggtgtggagtgcaataaaaaatgtgttgactttaagtgcgtggtttatgactcaggggtggggactgtgagtatataagcaggtgcagacctgtgtggttagctcagagcggcatggagatttggacggtcttggaagactttcacaagactagacagctgctagagaacgcctcgaacggagtctcttacctgtggagattctgcttcggtggcgacctagctaggctagtctacagggccaaacaggattatagtgaacaatttgaggttattttgagagagtgttctggtctttttgacgctcttaacttgggccatcagtctcactttaaccagaggatttcgagagcccttgattttactactcctggcagaaccactgcagcagtagccttttttgcttttattcttgacaaatggagtcaagaaacccatttcagcagggattaccagctggatttcttagcagtagctttgtggagaacatggaagtgccagcgcctgaatgcaatctccggctacttgccggtacagccgctagacactctgaggatcctgaatctccaggagagtcccagggcacgccaacgtcgccagcagcagcagcaggaggaggatcaagaagagaacccgagagccggcctggaccctccggcggaggaggaggagtagctgacctgtttcctgaactgcgccgggtgctgactaggtcttcgagtggtcgggagagggggattaagcgggagaggcatgatgagactaatcacagaactgaactgactgtgggtctgatgagtcgcaagcgcccagaaacagtgtggtggcatgaggtgcagtcgactggcacagatgaggtgtcggtgatgcatgagaggttttctctagaacaagtcaagacttgttggttagagcctgaggatgattgggaggtagccatcaggaattatgccaagctggctctgaggccagacaagaagtacaagattactaagctgataaatatcagaaatgcctgctacatctcagggaatggggctgaagtggagatctgtctccaggaaagggtggctttcagatgctgcatgatgaatatgtacccgggagtggtgggcatggatggggttacctttatgaacatgaggttcaggggagatgggtataatggcacggtctttatggccaataccaagctgacagtccatggctgctccttctttgggtttaataacacctgcatcgaggcctggggtcaggtcggtgtgaggggctgcagtttttcagccaactggatgggggtcgtgggcaggaccaagagtatgctgtccgtgaagaaatgcttgtttgagaggtgccacctgggggtgatgagcgagggcgaagccagaatccgccactgcgcctctaccgagacgggctgctttgtgctgtgcaagggcaatgctaagatcaagcataatatgatctgtggagcctcggacgagcgcggctaccagatgctgacctgcgccggcgggaacagccatatgctggccaccgtacatgtggcttcccatgctcgcaagccctggcccgagttcgagcacaatgtcatgaccaggtgcaatatgcatctggggtcccgccgaggcatgttcatgccctaccagtgcaacctgaattatgtgaaggtgctgctggagcccgatgccatgtccagagtgagcctgacgggggtgtttgacatgaatgtggaggtgtggaagattctgagatatgatgaatccaagaccaggtgccgagcctgcgagtgcggagggaagcatgccaggttccagcccgtgtgtgtggatgtgacggaggacctgcgacccgatcatttggtgttgccctgcaccgggacggagttcggttccagcggggaagaatctgactagagtgagtagtgttctggggcgggggaggacctgcatgagggccagaataactgaaatctgtgcttttctgtgtgttgcagcagcatgagcggaagcggctcctttgagggaggggtattcagcccttatctgacggggcgtctcccctcctgggcgggagtgcgtcagaatgtgatgggatccacggtggacggccggcccgtgcagcccgcgaactcttcaaccctgacctatgcaaccctgagctcttcgtcgttggacgcagctgccgccgcagctgctgcatctgccgccagcgccgtgcgcggaatggccatgggcgccggctactacggcactctggtggccaactcgagttccaccaataatcccgccagcctgaacgaggagaagctgttgctgctgatggcccagctcgaggccttgacccagcgcctgggcgagctgacccagcaggtggctcagctgcaggagcagacgcgggccgcggttgccacggtgaaatccaaataaaaaatgaatcaataaataaacggagacggttgttgattttaacacagagtctgaatctttatttgatttttcgcgcgcggtaggccctggaccaccggtctcgatcattgagcacccggtggatcttttccaggacccggtagaggtgggcttggatgttgaggtacatgggcatgagcccgtcccgggggtggaggtagctccattgcagggcctcgtgctcgggggtggtgttgtaaatcacccagtcatagcaggggcgcagggcatggtgttgcacaatatctttgaggaggagactgatggccacgggcagccctttggtgtaggtgtttacaaatctgttgagctgggagggatgcatgcggggggagatgaggtgcatcttggcctggatcttgagattggcgatgttaccgcccagatcccgcctggggttcatgttgtgcaggaccaccagcacggtgtatccggtgcacttggggaatttatcatgcaacttggaagggaaggcgtgaaagaatttggcgacgcctttgtgcccgcccaggttttccatgcactcatccatgatgatggcgatgggcccgtgggcggcggcctgggcaaagacgtttcgggggtcggacacatcatagttgtggtcctgggtgaggtcatcataggccattttaatgaatttggggcggagggtgccggactgggggacaaaggtaccctcgatcccgggggcgtagttcccctcacagatctgcatctcccaggctttgagctcggagggggggatcatgtccacctgcggggcgataaagaacacggtttccggggcgggggagatgagctgggccgaaagcaagttccggagcagctgggacttgccgcagccggtggggccgtagatgaccccgatgaccggctgcaggtggtagttgagggagagacagctgccgtcctcccggaggaggggggccacctcgttcatcatctcgcgcacgtgcatgttctcgcgcaccagttccgccaggaggcgctctccccccagggataggagctcctggagcgaggcgaagtttttcagcggcttgagtccgtcggccatgggcattttggagagggtttgttgcaagagttccaggcggtcccagagctcggtgatgtgctctacggcatctcgatccagcagacctcctcgtttcgcgggttgggacggctgcgggagtagggcaccagacgatgggcgtccagcgcagccagggtccggtccttccagggtcgcagcgtccgcgtcagggtggtctccgtcacggtgaaggggtgcgcgccgggctgggcgcttgcgagggtgcgcttcaggctcatccggctggtcgaaaaccgctcccgatcggcgccctgcgcgtcggccaggtagcaattgaccatgagttcgtagttgagcgcctcggccgcgtggcctttggcgcggagcttacctttggaagtctgcccgcaggcgggacagaggagggacttgagggcgtagagcttgggggcgaggaagacggactcgggggcgtaggcgtccgcgccgcagtgggcgcagacggtctcgcactccacgagccaggtgaggtcgggctggtcggggtcaaaaaccagtttcccgccgttctttttgatgcgtttcttacctttggtctccatgagctcgtgtccccgctgggtgacaaagaggctgtccgtgtccccgtagaccgactttatgggccggtcctcgagcggtgtgccgcggtcctcctcgtagaggaaccccgcccactccgagacgaaagcccgggtccaggccagcacgaaggaggccacgtgggacgggtagcggtcgttgtccaccagcgggtccaccttttccagggtatgcaaacacatgtccccctcgtccacatccaggaaggtgattggcttgtaagtgtaggccacgtgaccgggggtcccggccgggggggtataaaagggtgcgggtccctgctcgtcctcactgtcttccggatcgctgtccaggagcgccagctgttggggtaggtattccctctcgaaggcgggcatgacctcggcactcaggttgtcagtttctagaaacgaggaggatttgatattgacggtgccggcggagatgcctttcaagagcccctcgtccatctggtcagaaaagacgatctttttgttgtcgagcttggtggcgaaggagccgtagagggcgttggagaggagcttggcgatggagcgcatggtctggtttttttccttgtcggcgcgctccttggcggcgatgttgagctgcacgtactcgcgcgccacgcacttccattcggggaagacggtggtcagctcgtcgggcacgattctgacctgccagccccgattatgcagggtgatgaggtccacactggtggccacctcgccgcgcaggggctcattagtccagcagaggcgtccgcccttgcgcgagcagaaggggggcagggggtccagcatgacctcgtcgggggggtcggcatcgatggtgaagatgccgggcaggaggtcggggtcaaagtagctgatggaagtggccagatcgtccagggcagcttgccattcgcgcacggccagcgcgcgctcgtagggactgaggggcgtgccccagggcatgggatgggtaagcgcggaggcgtacatgccgcagatgtcgtagacgtagaggggctcctcgaggatgccgatgtaggtggggtagcagcgccccccgcggatgctggcgcgcacgtagtcatacagctcgtgcgagggggcgaggagccccgggcccaggttggtgcgactgggcttttcggcgcggtagacgatctggcggaaaatggcatgcgagttggaggagatggtgggcctttggaagatgttgaagtgggcgtggggcagtccgaccgagtcgcggatgaagtgggcgtaggagtcttgcagcttggcgacgagctcggcggtgactaggacgtccagagcgcagtagtcgagggtctcctggatgatgtcatacttgagctgtcccttttgtttccacagctcgcggttgagaaggaactcttcgcggtccttccagtactcttcgagggggaacccgtcctgatctgcacggtaagagcctagcatgtagaactggttgacggccttgtaggcgcagcagcccttctccacggggagggcgtaggcctgggcggccttgcgcagggaggtgtgcgtgagggcgaaagtgtccctgaccatgaccttgaggaactggtgcttgaagtcgatatcgtcgcagcccccctgctcccagagctggaagtccgtgcgcttcttgtaggcggggttgggcaaagcgaaagtaacatcgttgaagaggatcttgcccgcgcggggcataaagttgcgagtgatgcggaaaggttggggcacctcggcccggttgttgatgacctgggcggcgagcacgatctcgtcgaagccgttgatgttgtggcccacgatgtagagttccacgaatcgcggacggcccttgacgtggggcagtttcttgagctcctcgtaggtgagctcgtcggggtcgctgagcccgtgctgctcgagcgcccagtcggcgagatgggggttggcgcggaggaaggaagtccagagatccacggccagggcggtttgcagacggtcccggtactgacggaactgctgcccgacggccattttttcgggggtgacgcagtagaaggtgcgggggtccccgtgccagcgatcccatttgagctggagggcgagatcgagggcgagctcgacgagccggtcgtccccggagagtttcatgaccagcatgaaggggacgagctgcttgccgaaggaccccatccaggtgtaggtttccacatcgtaggtgaggaagagcctttcggtgcgaggatgcgagccgatggggaagaactggatctcctgccaccaattggaggaatggctgttgatgtgatggaagtagaaatgccgacggcgcgccgaacactcgtgcttgtgtttatacaagcggccacagtgctcgcaacgctgcacgggatgcacgtgctgcacgagctgtacctgagttcctttgacgaggaatttcagtgggaagtggagtcgtggcgcctgcatctcgtgctgtactacgtcgtggtggtcggcctggccctcttctgcctcgatggtggtcatgctgacgagcccgcgcgggaggcaggtccagacctcggcgcgagcgggtcggagagcgaggacgagggcgcgcaggccggagctgtccagggtcctgagacgctgcggagtcaggtcagtgggcagcggcggcgcgcggttgacttgcaggagtttttccagggcgcgcgggaggtccagatggtacttgatctccaccgcgccattggtggcgacgtcgatggcttgcagggtcccgtgcccctggggtgtgaccaccgtcccccgtttcttcttgggcggctggggcgacgggggcggtgcctcttccatggttagaagcggcggcgaggacgcgcgccgggcggcaggggcggctcggggcccggaggcaggggcggcaggggcacgtcggcgccgcgcgcgggtaggttctggtactgcgcccggagaagactggcgtgagcgacgacgcgacggttgacgtcctggatctgacgcctctgggtgaaggccacgggacccgtgagtttgaacctgaaagagagttcgacagaatcaatctcggtatcgttgacggcggcctgccgcaggatctcttgcacgtcgcccgagttgtcctggtaggcgatctcggtcatgaactgctcgatctcctcctcttgaaggtctccgcggccggcgcgctccacggtggccgcgaggtcgttggagatgcggcccatgagctgcgagaaggcgttcatgcccgcctcgttccagacgcggctgtagaccacgacgccctcgggatcgcgggcgcgcatgaccacctgggcgaggttgagctccacgtggcgcgtgaagaccgcgtagttgcagaggcgctggtagaggtagttgagcgtggtggcgatgtgctcggtgacgaagaaatacatgatccagcggcggagcggcatctcgctgacgtcgcccagcgcctccaaacgttccatggcctcgtaaaagtccacggcgaagttgaaaaactgggagttgcgcgccgagacggtcaactcctcctccagaagacggatgagctcggcgatggtggcgcgcacctcgcgctcgaaggcccccgggagttcctccacttcctcttcttcctcctccactaacatctcttctacttcctcctcaggcggcagtggtggcgggggagggggcctgcgtcgccggcggcgcacgggcagacggtcgatgaagcgctcgatggtctcgccgcgccggcgtcgcatggtctcggtgacggcgcgcccgtcctcgcggggccgcagcgtgaagacgccgccgcgcatctccaggtggccgggggggtccccgttgggcagggagagggcgctgacgatgcatcttatcaattgccccgtagggactccgcgcaaggacctgagcgtctcgagatccacgggatctgaaaaccgctgaacgaaggcttcgagccagtcgcagtcgcaaggtaggctgagcacggtttcttctggcgggtcatgttggttgggagcggggcgggcgatgctgctggtgatgaagttgaaataggcggttctgagacggcggatggtggcgaggagcaccaggtctttgggcccggcttgctggatgcgcagacggtcggccatgccccaggcgtggtcctgacacctggccaggtccttgtagtagtcctgcatgagccgctccacgggcacctcctcctcgcccgcgcggccgtgcatgcgcgtgagcccgaagccgcgctggggctggacgagcgccaggtcggcgacgacgcgctcggcgaggatggcttgctggatctgggtgagggtggtctggaagtcatcaaagtcgacgaagcggtggtaggctccggtgttgatggtgtaggagcagttggccatgacggaccagttgacggtctggtggcccggacgcacgagctcgtggtacttgaggcgcgagtaggcgcgcgtgtcgaagatgtagtcgttgcaggtgcgcaccaggtactggtagccgatgaggaagtgcggcggcggctggcggtagagcggccatcgctcggtggcgggggcgccgggcgcgaggtcctcgagcatggtgcggtggtagccgtagatgtacctggacatccaggtgatgccggcggcggtggtggaggcgcgcgggaactcgcggacgcggttccagatgttgcgcagcggcaggaagtagttcatggtgggcacggtctggcccgtgaggcgcgcgcagtcgtggatgctctatacgggcaaaaacgaaagcggtcagcggctcgactccgtggcctggaggctaagcgaacgggttgggctgcgcgtgtaccccggttcgaatctcgaatcaggctggagccgcagctaacgtggtattggcactcccgtctcgacccaagcctgcaccaaccctccaggatacggaggcgggtcgttttgcaacttttttttggaggccggatgagactagtaagcgcggaaagcggccgaccgcgatggctcgctgccgtagtctggagaagaatcgccagggttgcgttgcggtgtgccccggttcgaggccggccggattccgcggctaacgagggcgtggctgccccgtcgtttccaagaccccatagccagccgacttctccagttacggagcgagcccctcttttgttttgtttgtttttgccagatgcatcccgtactgcggcagatgcgcccccaccaccctccaccgcaacaacagccccctccacagccggcgcttctgcccccgccccagcagcaacttccagccacgaccgccgcggccgccgtgagcggggctggacagagttatgatcaccagctggccttggaagagggcgaggggctggcgcgcctgggggcgtcgtcgccggagcggcacccgcgcgtgcagatgaaaagggacgctcgcgaggcctacgtgcccaagcagaacctgttcagagacaggagcggcgaggagcccgaggagatgcgcgcggcccggttccacgcggggcgggagctgcggcgcggcctggaccgaaagagggtgctgagggacgaggatttcgaggcggacgagctgacggggatcagccccgcgcgcgcgcacgtggccgcggccaacctggtcacggcgtacgagcagaccgtgaaggaggagagcaacttccaaaaatccttcaacaaccacgtgcgcaccctgatcgcgcgcgaggaggtgaccctgggcctgatgcacctgtgggacctgctggaggccatcgtgcagaaccccaccagcaagccgctgacggcgcagctgttcctggtggtgcagcatagtcgggacaacgaagcgttcagggaggcgctgctgaatatcaccgagcccgagggccgctggctcctggacctggtgaacattctgcagagcatcgtggtgcaggagcgcgggctgccgctgtccgagaagctggcggccatcaacttctcggtgctgagtttgggcaagtactacgctaggaagatctacaagaccccgtacgtgcccatagacaaggaggtgaagatcgacgggttttacatgcgcatgaccctgaaagtgctgaccctgagcgacgatctgggggtgtaccgcaacgacaggatgcaccgtgcggtgagcgccagcaggcggcgcgagctgagcgaccaggagctgatgcatagtctgcagcgggccctgaccggggccgggaccgagggggagagctactttgacatgggcgcggacctgcactggcagcccagccgccgggccttggaggcggcggcaggaccctacgtagaagaggtggacgatgaggtggacgaggagggcgagtacctggaagactgatggcgcgaccgtatttttgctagatgcaacaacaacagccacctcctgatcccgcgatgcgggcggcgctgcagagccagccgtccggcattaactcctcggacgattggacccaggccatgcaacgcatcatggcgctgacgacccgcaaccccgaagcctttagacagcagccccaggccaaccggctctcggccatcctggaggccgtggtgccctcgcgctccaaccccacgcacgagaaggtcctggccatcgtgaacgcgctggtggagaacaaggccatccgcggcgacgaggccggcctggtgtacaacgcgctgctggagcgcgtggcccgctacaacagcaccaacgtgcagaccaacctggaccgcatggtgaccgacgtgcgcgaggccgtggcccagcgcgagcggttccaccgcgagtccaacctgggatccatggtggcgctgaacgccttcctcagcacccagcccgccaacgtgccccggggccaggaggactacaccaacttcatcagcgccctgcgcctgatggtgaccgaggtgccccagagcgaggtgtaccagtccgggccggactacttcttccagaccagtcgccagggcttgcagaccgtgaacctgagccaggctttcaagaacttgcagggcctgtggggcgtgcaggccccggtcggggaccgcgcgacggtgtcgagcctgctgacgccgaactcgcgcctgctgctgctgctggtggcccccttcacggacagcggcagcatcaaccgcaactcgtacctgggctacctgattaacctgtaccgcgaggccatcggccaggcgcacgtggacgagcagacctaccaggagatcacccacgtgagccgcgccctgggccaggacgacccgggcaacctggaagccaccctgaactttttgctgaccaaccggtcgcagaagatcccgccccagtacgcgctcagcaccgaggaggagcgcatcctgcgttacgtgcagcagagcgtgggcctgttcctgatgcaggagggggccacccccagcgccgcgctcgacatgaccgcgcgcaacatggagcccagcatgtacgccagcaaccgcccgttcatcaataaactgatggactacttgcatcgggcggccgccatgaactctgactatttcaccaacgccatcctgaatccccactggctcccgccgccggggttctacacgggcgagtacgacatgcccgaccccaatgacgggttcctgtgggacgatgtggacagcagcgtgttctccccccgaccgggtgctaacgagcgccccttgtggaagaaggaaggcagcgaccgacgcccgtcctcggcgctgtccggccgcgagggtgctgccgcggcggtgcccgaggccgccagtcctttcccgagcttgcccttctcgctgaacagtatccgcagcagcgagctgggcaggatcacgcgcccgcgcttgctgggcgaagaggagtacttgaatgactcgctgttgagacccgagcgggagaagaacttccccaataacgggatagaaagcctggtggacaagatgagccgctggaagacgtatgcgcaggagcacagggacgatccccgggcgtcgcagggggccacgagccggggcagcgccgcccgtaaacgccggtggcacgacaggcagcggggacagatgtgggacgatgaggactccgccgacgacagcagcgtgttggacttgggtgggagtggtaacccgttcgctcacctgcgcccccgtatcgggcgcatgatgtaagagaaaccgaaaataaatgatactcaccaaggccatggcgaccagcgtgcgttcgtttcttctctgttgttgttgtatctagtatgatgaggcgtgcgtacccggagggtcctcctccctcgtacgagagcgtgatgcagcaggcgatggcggcggcggcgatgcagcccccgctggaggctccttacgtgcccccgcggtacctggcgcctacggaggggcggaacagcattcgttactcggagctggcacccttgtacgataccacccggttgtacctggtggacaacaagtcggcggacatcgcctcgctgaactaccagaacgaccacagcaacttcctgaccaccgtggtgcagaacaatgacttcacccccacggaggccagcacccagaccatcaactttgacgagcgctcgcggtggggcggccagctgaaaaccatcatgcacaccaacatgcccaacgtgaacgagttcatgtacagcaacaagttcaaggcgcgggtgatggtctcccgcaagacccccaatggggtgacagtgacagaggattatgatggtagtcaggatgagctgaagtatgaatgggtggaatttgagctgcccgaaggcaacttctcggtgaccatgaccatcgacctgatgaacaacgccatcatcgacaattacttggcggtggggcggcagaacggggtgctggagagcgacatcggcgtgaagttcgacactaggaacttcaggctgggctgggaccccgtgaccgagctggtcatgcccggggtgtacaccaacgaggctttccatcccgatattgtcttgctgcccggctgcggggtggacttcaccgagagccgcctcagcaacctgctgggcattcgcaagaggcagcccttccaggaaggcttccagatcatgtacgaggatctggaggggggcaacatccccgcgctcctggatgtcgacgcctatgagaaaagcaaggaggatgcagcagctgaagcaactgcagccgtagctaccgcctctaccgaggtcaggggcgataattttgcaagcgccgcagcagtggcagcggccgaggcggctgaaaccgaaagtaagatagtcattcagccggtggagaaggatagcaagaacaggagctacaacgtactaccggacaagataaacaccgcctaccgcagctggtacctagcctacaactatggcgaccccgagaagggcgtgcgctcctggacgctgctcaccacctcggacgtcacctgcggcgtggagcaagtctactggtcgctgcccgacatgatgcaagacccggtcaccttccgctccacgcgtcaagttagcaactacccggtggtgggcgccgagctcctgcccgtctactccaagagcttcttcaacgagcaggccgtctactcgcagcagctgcgcgccttcacctcgcttacgcacgtcttcaaccgcttccccgagaaccagatcctcgtccgcccgcccgcgcccaccattaccaccgtcagtgaaaacgttcctgctctcacagatcacgggaccctgccgctgcgcagcagtatccggggagtccagcgcgtgaccgttactgacgccagacgccgcacctgcccctacgtctacaaggccctgggcatagtcgcgccgcgcgtcctctcgagccgcaccttctaaatgtccattctcatctcgcccagtaataacaccggttggggcctgcgcgcgcccagcaagatgtacggaggcgctcgccaacgctccacgcaacaccccgtgcgcgtgcgcgggcacttccgcgctccctggggcgccctcaagggccgcgtgcggtcgcgcaccaccgtcgacgacgtgatcgaccaggtggtggccgacgcgcgcaactacacccccgccgccgcgcccgtctccaccgtggacgccgtcatcgacagcgtggtggccgacgcgcgccggtacgcccgcgccaagagccggcggcggcgcatcgcccggcggcaccggagcacccccgccatgcgcgcggcgcgagccttgctgcgcagggccaggcgcacgggacgcagggccatgctcagggcggccagacgcgcggcttcaggcgccagcgccggcaggacccggagacgcgcggccacggcggcggcagcggccatcgccagcatgtcccgcccgcggcgagggaacgtgtactgggtgcgcgacgccgccaccggtgtgcgcgtgcccgtgcgcacccgcccccctcgcacttgaagatgttcacttcgcgatgttgatgtgtcccagcggcgaggaggatgtccaagcgcaaattcaaggaagagatgctccaggtcatcgcgcctgagatctacggccctgcggtggtgaaggaggaaagaaagccccgcaaaatcaagcgggtcaaaaaggacaaaaaggaagaagaaagtgatgtggacggattggtggagtttgtgcgcgagttcgccccccggcggcgcgtgcagtggcgcgggcggaaggtgcaaccggtgctgagacccggcaccaccgtggtcttcacgcccggcgagcgctccggcaccgcttccaagcgctcctacgacgaggtgtacggggatgatgatattctggagcaggcggccgagcgcctgggcgagtttgcttacggcaagcgcagccgttccgcaccgaaggaagaggcggtgtccatcccgctggaccacggcaaccccacgccgagcctcaagcccgtgaccttgcagcaggtgctgccgaccgcggcgccgcgccgggggttcaagcgcgagggcgaggatctgtaccccaccatgcagctgatggtgcccaagcgccagaagctggaagacgtgctggagaccatgaaggtggacccggacgtgcagcccgaggtcaaggtgcggcccatcaagcaggtggccccgggcctgggcgtgcagaccgtggacatcaagattcccacggagcccatggaaacgcagaccgagcccatgatcaagcccagcaccagcaccatggaggtgcagacggatccctggatgccatcggctcctagtcgaagaccccggcgcaagtacggcgcggccagcctgctgatgcccaactacgcgctgcatccttccatcatccccacgccgggctaccgcggcacgcgcttctaccgcggtcataccagcagccgccgccgcaagaccaccactcgccgccgccgtcgccgcaccgccgctgcaaccacccctgccgccctggtgcggagagtgtaccgccgcggccgcgcacctctgaccctgccgcgcgcgcgctaccacccgagcatcgccatttaaactttcgcctgctttgcagatcaatggccctcacatgccgccttcgcgttcccattacgggctaccgaggaagaaaaccgcgccgtagaaggctggcggggaacgggatgcgtcgccaccaccaccggcggcggcgcgccatcagcaagcggttggggggaggcttcctgcccgcgctgatccccatcatcgccgcggcgatcggggcgatccccggcattgcttccgtggcggtgcaggcctctcagcgccactgagacacacttggaaacatcttgtaataaaccaatggactctgacgctcctggtcctgtgatgtgttttcgtagacagatggaagacatcaatttttcgtccctggctccgcgacacggcacgcggccgttcatgggcacctggagcgacatcggcaccagccaactgaacgggggcgccttcaattggagcagtctctggagcgggcttaagaatttcgggtccacgcttaaaacctatggcagcaaggcgtggaacagcaccacagggcaggcgctgagggataagctgaaagagcagaacttccagcagaaggtggtcgatgggctcgcctcgggcatcaacggggtggtggacctggccaaccaggccgtgcagcggcagatcaacagccgcctggacccggtgccgcccgccggctccgtggagatgccgcaggtggaggaggagctgcctcccctggacaagcggggcgagaagcgaccccgccccgatgcggaggagacgctgctgacgcacacggacgagccgcccccgtacgaggaggcggtgaaactgggtctgcccaccacgcggcccatcgcgcccctggccaccggggtgctgaaacccgaaaagcccgcgaccctggacttgcctcctccccagccttcccgcccctctacagtggctaagcccctgccgccggtggccgtggcccgcgcgcgacccgggggcaccgcccgccctcatgcgaactggcagagcactctgaacagcatcgtgggtctgggagtgcagagtgtgaagcgccgccgctgctattaaacctaccgtagcgcttaacttgcttgtctgtgtgtgtatgtattatgtcgccgccgccgctgtccaccagaaggaggagtgaagaggcgcgtcgccgagttgcaagatggccaccccatcgatgctgccccagtgggcgtacatgcacatcgccggacaggacgcttcggagtacctgagtccgggtctggtgcagtttgcccgcgccacagacacctacttcagtctggggaacaagtttaggaaccccacggtggcgcccacgcacgatgtgaccaccgaccgcagccagcggctgacgctgcgcttcgtgcccgtggaccgcgaggacaacacctactcgtacaaagtgcgctacacgctggccgtgggcgacaaccgcgtgctggacatggccagcacctactttgacatccgcggcgtgctggatcggggccctagcttcaaaccctactccggcaccgcctacaacagtctggcccccaagggagcacccaacacttgtcagtggacatataaagccgatggtgaaactgccacagaaaaaacctatacatatggaaatgcacccgtgcagggcattaacatcacaaaagatggtattcaacttggaactgacaccgatgatcagccaatctacgcagataaaacctatcagcctgaacctcaagtgggtgatgctgaatggcatgacatcactggtactgatgaaaagtatggaggcagagctcttaagcctgataccaaaatgaagccttgttatggttcttttgccaagcctactaataaagaaggaggtcaggcaaatgtgaaaacaggaacaggcactactaaagaatatgacatagacatggctttctttgacaacagaagtgcggctgctgctggcctagctccagaaattgttttgtatactgaaaatgtggatttggaaactccagatacccatattgtatacaaagcaggcacagatgacagcagctcttctattaatttgggtcagcaagccatgcccaacagacctaactacattggtttcagagacaactttatcgggctcatgtactacaacagcactggcaatatgggggtgctggccggtcaggcttctcagctgaatgctgtggttgacttgcaagacagaaacaccgagctgtcctaccagctcttgcttgactctctgggtgacagaacccggtatttcagtatgtggaatcaggcggtggacagctatgatcctgatgtgcgcattattgaaaatcatggtgtggaggatgaacttcccaactattgtttccctctggatgctgttggcagaacagatacttatcagggaattaaggctaatggaactgatcaaaccacatggaccaaagatgacagtgtcaatgatgctaatgagataggcaagggtaatccattcgccatggaaatcaacatccaagccaacctgtggaggaacttcctctacgccaacgtggccctgtacctgcccgactcttacaagtacacgccggccaatgttaccctgcccaccaacaccaacacctacgattacatgaacggccgggtggtggcgccctcgctggtggactcctacatcaacatcggggcgcgctggtcgctggatcccatggacaacgtgaaccccttcaaccaccaccgcaatgcggggctgcgctaccgctccatgctcctgggcaacgggcgctacgtgcccttccacatccaggtgccccagaaatttttcgccatcaagagcctcctgctcctgcccgggtcctacacctacgagtggaacttccgcaaggacgtcaacatgatcctgcagagctccctcggcaacgacctgcgcacggacggggcctccatctccttcaccagcatcaacctctacgccaccttcttccccatggcgcacaacacggcctccacgctcgaggccatgctgcgcaacgacaccaacgaccagtccttcaacgactacctctcggcggccaacatgctctaccccatcccggccaacgccaccaacgtgcccatctccatcccctcgcgcaactgggccgccttccgcggctggtccttcacgcgtctcaagaccaaggagacgccctcgctgggctccgggttcgacccctacttcgtctactcgggctccatcccctacctcgacggcaccttctacctcaaccacaccttcaagaaggtctccatcaccttcgactcctccgtcagctggcccggcaacgaccggctcctgacgcccaacgagttcgaaatcaagcgcaccgtcgacggcgagggctacaacgtggcccagtgcaacatgaccaaggactggttcctggtccagatgctggcccactacaacatcggctaccagggcttctacgtgcccgagggctacaaggaccgcatgtactccttcttccgcaacttccagcccatgagccgccaggtggtggacgaggtcaactacaaggactaccaggccgtcaccctggcctaccagcacaacaactcgggcttcgtcggctacctcgcgcccaccatgcgccagggccagccctaccccgccaactacccctacccgctcatcggcaagagcgccgtcaccagcgtcacccagaaaaagttcctctgcgacagggtcatgtggcgcatccccttctccagcaacttcatgtccatgggcgcgctcaccgacctcggccagaacatgctctatgccaactccgcccacgcgctagacatgaatttcgaagtcgaccccatggatgagtccacccttctctatgttgtcttcgaagtcttcgacgtcgtccgagtgcaccagccccaccgcggcgtcatcgaggccgtctacctgcgcacccccttctcggccggtaacgccaccacctaagctcttgcttcttgcaagccatggccgcgggctccggcgagcaggagctcagggccatcatccgcgacctgggctgcgggccctacttcctgggcaccttcgataagcgcttcccgggattcatggccccgcacaagctggcctgcgccatcgtcaacacggccggccgcgagaccgggggcgagcactggctggccttcgcctggaacccgcgctcgaacacctgctacctcttcgaccccttcgggttctcggacgagcgcctcaagcagatctaccagttcgagtacgagggcctgctgcgccgcagcgccctggccaccgaggaccgctgcgtcaccctggaaaagtccacccagaccgtgcagggtccgcgctcggccgcctgcgggctcttctgctgcatgttcctgcacgccttcgtgcactggcccgaccgccccatggacaagaaccccaccatgaacttgctgacgggggtgcccaacggcatgctccagtcgccccaggtggaacccaccctgcgccgcaaccaggaggcgctctaccgcttcctcaactcccactccgcctactttcgctcccaccgcgcgcgcatcgagaaggccaccgccttcgaccgcatgaatcaagacatgtaaaccgtgtgtgtatgttaaatgtctttaataaacagcactttcatgttacacatgcatctgagatgatttatttagaaatcgaaagggttctgccgggtctcggcatggcccgcgggcagggacacgttgcggaactggtacttggccagccacttgaactcggggatcagcagtttgggcagcggggtgtcggggaaggagtcggtccacagcttccgcgtcagttgcagggcgcccagcaggtcgggcgcggagatcttgaaatcgcagttgggacccgcgttctgcgcgcgggagttgcggtacacggggttgcagcactggaacaccatcagggccgggtgcttcacgctcgccagcaccgtcgcgtcggtgatgctctccacgtcgaggtcctcggcgttggccatcccgaagggggtcatcttgcaggtctgccttcccatggtgggcacgcacccgggcttgtggttgcaatcgcagtgcagggggatcagcatcatctgggcctggtcggcgttcatccccgggtacatggccttcatgaaagcctccaattgcctgaacgcctgctgggccttggctccctcggtgaagaagaccccgcaggacttgctagagaactggttggtggcgcacccggcgtcgtgcacgcagcagcgcgcgtcgttgttggccagctgcaccacgctgcgcccccagcggttctgggtgatcttggcccggtcggggttctccttcagcgcgcgctgcccgttctcgctcgccacatccatctcgatcatgtgctccttctggatcatggtggtcccgtgcaggcaccgcagcttgccctcggcctcggtgcacccgtgcagccacagcgcgcacccggtgcactcccagttcttgtgggcgatctgggaatgcgcgtgcacgaagccctgcaggaagcggcccatcatggtggtcagggtcttgttgctagtgaaggtcagcggaatgccgcggtgctcctcgttgatgtacaggtggcagatgcggcggtacacctcgccctgctcgggcatcagctggaagttggctttcaggtcggtctccacgcggtagcggtccatcagcatagtcatgatttccatacccttctcccaggccgagacgatgggcaggctcatagggttcttcaccatcatcttagcgctagcagccgcggccagggggtcgctctcgtccagggtctcaaagctccgcttgccgtccttctcggtgatccgcaccggggggtagctgaagcccacggccgccagctcctcctcggcctgtctttcgtcctcgctgtcctggctgacgtcctgcaggaccacatgcttggtcttgcggggtttcttcttgggcggcagcggcggcggagatgttggagatggcgagggggagcgcgagttctcgctcaccactactatctcttcctcttcttggtccgaggccacgcggcggtaggtatgtctcttcgggggcagaggcggaggcgacgggctctcgccgccgcgacttggcggatggctggcagagccccttccgcgttcgggggtgcgctcccggcggcgctctgactgacttcctccgcggccggccattgtgttctcctagggaggaacaacaagcatggagactcagccatcgccaacctcgccatctgcccccaccgccgacgagaagcagcagcagcagaatgaaagcttaaccgccccgccgcccagccccgccacctccgacgcggccgtcccagacatgcaagagatggaggaatccatcgagattgacctgggctatgtgacgcccgcggagcacgaggaggagctggcagtgcgcttttcacaagaagagatacaccaagaacagccagagcaggaagcagagaatgagcagagtcaggctgggctcgagcatgacggcgactacctccacctgagcgggggggaggacgcgctcatcaagcatctggcccggcaggccaccatcgtcaaggatgcgctgctcgaccgcaccgaggtgcccctcagcgtggaggagctcagccgcgcctacgagttgaacctcttctcgccgcgcgtgccccccaagcgccagcccaatggcacctgcgagcccaacccgcgcctcaacttctacccggtcttcgcggtgcccgaggccctggccacctaccacatctttttcaagaaccaaaagatccccgtctcctgccgcgccaaccgcacccgcgccgacgcccttttcaacctgggtcccggcgcccgcctacctgatatcgcctccttggaagaggttcccaagatcttcgagggtctgggcagcgacgagactcgggccgcgaacgctctgcaaggagaaggaggagagcatgagcaccacagcgccctggtcgagttggaaggcgacaacgcgcggctggcggtgctcaaacgcacggtcgagctgacccatttcgcctacccggctctgaacctgccccccaaagtcatgagcgcggtcatggaccaggtgctcatcaagcgcgcgtcgcccatctccgaggacgagggcatgcaagactccgaggagggcaagcccgtggtcagcgacgagcagctggcccggtggctgggtcctaatgctagtccccagagtttggaagagcggcgcaaactcatgatggccgtggtcctggtgaccgtggagctggagtgcctgcgccgcttcttcgccgacgcggagaccctgcgcaaggtcgaggagaacctgcactacctcttcaggcacgggttcgtgcgccaggcctgcaagatctccaacgtggagctgaccaacctggtctcctacatgggcatcttgcacgagaaccgcctggggcagaacgtgctgcacaccaccctgcgcggggaggcccggcgcgactacatccgcgactgcgtctacctctacctctgccacacctggcagacgggcatgggcgtgtggcagcagtgtctggaggagcagaacctgaaagagctctgcaagctcctgcagaagaacctcaagggtctgtggaccgggttcgacgagcgcaccaccgcctcggacctggccgacctcattttccccgagcgcctcaggctgacgctgcgcaacggcctgcccgactttatgagccaaagcatgttgcaaaactttcgctctttcatcctcgaacgctccggaatcctgcccgccacctgctccgcgctgccctcggacttcgtgccgctgaccttccgcgagtgccccccgccgctgtggagccactgctacctgctgcgcctggccaactacctggcctaccactcggacgtgatcgaggacgtcagcggcgagggcctgctcgagtgccactgccgctgcaacctctgcacgccgcaccgctccctggcctgcaacccccagctgctgagcgagacccagatcatcggcaccttcgagttgcaagggcccagcgaaggcgagggttcagccgccaaggggggtctgaaactcaccccggggctgtggacctcggcctacttgcgcaagttcgtgcccgaggactaccatcccttcgagatcaggttctacgaggaccaatcccatccgcccaaggccgagctgtcggcctgcgtcatcacccagggggcgatcctggcccaattgcaagccatccagaaatcccgccaagaattcttgctgaaaaagggccgcggggtctacctcgacccccagaccggtgaggagctcaaccccggcttcccccaggatgccccgaggaaacaagaagctgaaagtggagctgccgcccgtggaggatttggaggaagactgggagaacagcagtcaggcagaggaggaggagatggaggaagactgggacagcactcaggcagaggaggacagcctgcaagacagtctggaggaagacgaggaggaggcagaggaggaggtggaagaagcagccgccgccagaccgtcgtcctcggcgggggagaaagcaagcagcacggataccatctccgctccgggtcggggtcccgctcgaccacacagtagatgggacgagaccggacgattcccgaaccccaccacccagaccggtaagaaggagcggcagggatacaagtcctggcgggggcacaaaaacgccatcgtctcctgcttgcaggcctgcgggggcaacatctccttcacccggcgctacctgctcttccaccgcggggtgaactttccccgcaacatcttgcattactaccgtcacctccacagcccctactacttccaagaagaggcagcagcagcagaaaaagaccagcagaaaaccagcagctagaaaatccacagcggcggcagcaggtggactgaggatcgcggcgaacgagccggcgcaaacccgggagctgaggaaccggatctttcccaccctctatgccatcttccagcagagtcgggggcaggagcaggaactgaaagtcaagaaccgttctctgcgctcgctcacccgcagttgtctgtatcacaagagcgaagaccaacttcagcgcactctcgaggacgccgaggctctcttcaacaagtactgcgcgctcactcttaaagagtagcccgcgcccgcccagtcgcagaaaaaggcgggaattacgtcacctgtgcccttcgccctagccgcctccacccatcatcatgagcaaagagattcccacgccttacatgtggagctaccagccccagatgggcctggccgccggtgccgcccaggactactccacccgcatgaattggctcagcgccgggcccgcgatgatctcacgggtgaatgacatccgcgcccaccgaaaccagatactcctagaacagtcagcgctcaccgccacgccccgcaatcacctcaatccgcgtaattggcccgccgccctggtgtaccaggaaattccccagcccacgaccgtactacttccgcgagacgcccaggccgaagtccagctgactaactcaggtgtccagctggcgggcggcgccaccctgtgtcgtcaccgccccgctcagggtataaagcggctggtgatccggggcagaggcacacagctcaacgacgaggtggtgagctcttcgctgggtctgcgacctgacggagtcttccaactcgccggatcggggagatcttccttcacgcctcgtcaggccgtcctgactttggagagttcgtcctcgcagccccgctcgggtggcatcggcactctccagttcgtggaggagttcactccctcggtctacttcaaccccttctccggctcccccggccactacccggacgagttcatcccgaacttcgacgccatcagcgagtcggtggacggctacgattgaatgtcccatggtggcgcagctgacctagctcggcttcgacacctggaccactgccgccgcttccgctgcttcgctcgggatctcgccgagtttgcctactttgagctgcccgaggagcaccctcagggcccggcccacggagtgcggatcgtcgtcgaagggggcctcgactcccacctgcttcggatcttcagccagcgtccgatcctggtcgagcgcgagcaaggacagacccttctgactctgtactgcatctgcaaccaccccggcctgcatgaaagtctttgttgtctgctgtgtactgagtataataaaagctgagatcagcgactactccggacttccgtgtgttcctgaatccatcaaccagtctttgttcttcaccgggaacgagaccgagctccagctccagtgtaagccccacaagaagtacctcacctggctgttccagggctccccgatcgccgttgtcaaccactgcgacaacgacggagtcctgctgagcggccctgccaaccttactttttccacccgcagaagcaagctccagctcttccaacccttcctccccgggacctatcagtgcgtctcgggaccctgccatcacaccttccacctgatcccgaataccacagcgtcgctccccgctactaacaaccaaactaacctccaccaacgccaccgtcgcgacctttctgaatctaatactaccacccacaccggaggtgagctccgaggtcaaccaacctctgggatttactacggcccctgggaggtggttgggttaatagcgctaggcctagttgcgggtgggcttttggttctctgctacctatacctcccttgctgttcgtacttagtggtgctgtgttgctggtttaagaaatggggaagatcaccctagtgagctgcggtgcgctggtggcggtgttgctttcgattgtgggactgggcggtgcggctgtagtgaaggagaaggccgatccctgcttgcatttcaatcccaacaaatgccagctgagttttcagcccgatggcaatcggtgcgcggtactgatcaagtgcggatgggaatgcgagaacgtgagaatcgagtacaataacaagactcggaacaatactctcgcgtccgtgtggcagcccggggaccccgagtggtacaccgtctctgtccccggtgctgacggctccccgcgcaccgtgaataatactttcatttttgcgcacatgtgcgacacggtcatgtggatgagcaagcagtacgatatgtggccccccacgaaggagaacatcgtggtcttctccatcgcttacagcctgtgcacggcgctaatcaccgctatcgtgtgcctgagcattcacatgctcatcgctattcgccccagaaataatgccgaaaaagaaaaacagccataacgttttttttcacacctttttcagaccatggcctctgttaaatttttgcttttatttgccagtctcattgccgtcattcatggaatgagtaatgagaaaattactatttacactggcactaatcacacattgaaaggtccagaaaaagccacagaagtttcatggtattgttattttaatgaatcagatgtatctactgaactctgtggaaacaataacaaaaaaaatgagagcattactctcatcaagtttcaatgtggatctgacttaaccctaattaacatcactagagactatgtaggtatgtattatggaactacagcaggcatttcggacatggaattttatcaagtttctgtgtctgaacccaccacgcctagaatgaccacaaccacaaaaactacacctgttaccactatgcagctcactaccaataacatttttgccatgcgtcaaatggtcaacaatagcactcaacccaccccacccagtgaggaaattcccaaatccatgattggcattattgttgctgtagtggtgtgcatgttgatcatcgccttgtgcatggtgtactatgccttctgctacagaaagcacagactgaacgacaagctggaacacttactaagtgttgaattttaattttttagaaccatgaagatcctaggccttttaattttttctatcattacctctgctctatgcaattctgacaatgaggacgttactgtcgttgtcggatcaaattatacactgaaaggtccagcgaagggtatgctttcgtggtattgctattttggatctgacactacagaaactgaattatgcaatcttaagaatggcaaaattcaaaattctaaaattaacaattatatatgcaatggtactgatctgatactcctcaatatcacgaaatcatatgctggcagttacacctgccctggagatgatgctgacagtatgattttttacaaagtaactgttgttgatcccactactccacctccacccaccacaactactcacaccacacacacagatcaaaccgcagcagaggaggcagcaaagttagccttgcaggtccaagacagttcatttgttggcattacccctacacctgatcagcggtgtccggggctgctagtcagcggcattgtcggtgtgctttcgggattagcagtcataatcatctgcatgttcatttttgcttgctgctatagaaggctttaccgacaaaaatcagacccactgctgaacctctatgtttaattttttccagagtcatgaaggcagttagcgctctagttttttgttctttgattggcattgttttttgcaatcctattcctaaagttagctttattaaagatgtgaatgttactgaggggggcaatgtgacactggtaggtgtagagggtgctgaaaacaccacctggacaaaataccacctcaatgggtggaaagatatttgcaattggagtgtattagtttatacatgtgagggagttaatcttaccattgtcaatgccacctcagctcaaaatggtagaattcaaggacaaagtgtcagtgtatctaatgggtattttacccaacatacttttatctatgacgttaaagtcataccactgcctacgcctagcccacctagcactaccacacagacaacccacactacacagacaaccacatacagtacattaaatcagcctaccaccactacagcagcagaggttgccagctcgtctggggtccgagtggcatttttgatgtgggccccatctagcagtcccactgctagtaccaatgagcagactactgaatttttgtccactgtcgagagccacaccacagctacctccagtgccttctctagcaccgccaatctctcctcgctttcctctacaccaatcagtcccgctactactcctagccccgctcctcttcccactcccctgaagcaaacagacggcggcatgcaatggcagatcaccctgctcattgtgatcgggttggtcatcctggccgtgttgctctactacatcttctgccgccgcattcccaacgcgcaccgcaagccggtctacaagcccatcattgtcgggcagccggagccgcttcaggtggaagggggtctaaggaatcttctcttctcttttacagtatggtgattgaactatgattcctagacaattcttgatcactattcttatctgcctcctccaagtctgtgccaccctcgctctggtggccaacgccagtccagactgtattgggcccttcgcctcctacgtgctctttgccttcaccacctgcatctgctgctgtagcatagtctgcctgcttatcaccttcttccagttcattgactggatctttgtgcgcatcgcctacctgcgccaccacccccagtaccgcgaccagcgagtggcgcggctgctcaggctcctctgataagcatgcgggctctgctacttctcgcgcttctgctgttagtgctcccccgtcccgtcgacccccggtcccccacccagtcccccgaggaggtccgcaaatgcaaattccaagaaccctggaaattcctcaaatgctaccgccaaaaatcagacatgcatcccagctggatcatgatcattgggatcgtgaacattctggcctgcaccctcatctcctttgtgatttacccctgctttgactttggttggaactcgccagaggcgctctatctcccgcctgaacctgacacaccaccacagcaacctcaggcacacgcactaccaccactacagcctaggccacaatacatgcccatattagactatgaggccgagccacagcgacccatgctccccgctattagttacttcaatctaaccggcggagatgactgacccactggccaacaacaacgtcaacgaccttctcctggacatggacggccgcgcctcggagcagcgactcgcccaacttcgcattcgccagcagcaggagagagccgtcaaggagctgcaggatgcggtggccatccaccagtgcaagagaggcatcttctgcctggtgaaacaggccaagatctcctacgaggtcactccaaacgaccatcgcctctcctacgagctcctgcagcagcgccagaagttcacctgcctggtcggagtcaaccccatcgtcatcacccagcagtctggcgataccaaggggtgcatccactgctcctgcgactcccccgactgcgtccacactctgatcaagaccctctgcggcctccgcgacctcctccccatgaactaatcacccccttatccagtgaaataaagatcatattgatgatgattttacagaaataaaaaataatcatttgatttgaaataaagatacaatcatattgatgatttgagtttaacaaaaaaataaagaatcacttacttgaaatctgataccaggtctctgtccatgttttctgccaacaccacttcactcccctcttcccagctctggtactgcaggccccggcgggctgcaaacttcctccacacgctgaaggggatgtcaaattcctcctgtccctcaatcttcattttatcttctatcagatgtccaaaaagcgcgtccgggtggatgatgacttcgaccccgtctacccctacgatgcagacaacgcaccgaccgtgcccttcatcaacccccccttcgtctcttcagatggattccaagagaagcccctgggggtgttgtccctgcgactggccgaccccgtcaccaccaagaacggggaaatcaccctcaagctgggagagggggtggacctcgattcctcgggaaaactcatctccaacacggccaccaaggccgccgcccctctcagtttttccaacaacaccatttcccttaacatggatcaccccttttacactaaagatggaaaattatccttacaagtttctccaccattaaatatactgagaacaagcattctaaacacactagctttaggttttggatcaggtttaggactccgtggctctgccttggcagtacagttagtctctccacttacatttgatactgatggaaacataaagcttaccttagacagaggtttgcatgttacaacaggagatgcaattgaaagcaacataagctgggctaaaggtttaaaatttgaagatggagccatagcaaccaacattggaaatgggttagagtttggaagcagtagtacagaaacaggtgttgatgatgcttacccaatccaagttaaacttggatctggccttagctttgacagtacaggagccataatggctggtaacaaagaagacgataaactcactttgtggacaacacctgatccatcaccaaactgtcaaatactcgcagaaaatgatgcaaaactaacactttgcttgactaaatgtggtagtcaaatactggccactgtgtcagtcttagttgtaggaagtggaaacctaaaccccattactggcaccgtaagcagtgctcaggtgtttctacgttttgatgcaaacggtgttcttttaacagaacattctacactaaaaaaatactgggggtataggcagggagatagcatagatggcactccatataccaatgctgtaggattcatgcccaatttaaaagcttatccaaagtcacaaagttctactactaaaaataatatagtagggcaagtatacatgaatggagatgtttcaaaacctatgcttctcactataaccctcaatggtactgatgacagcaacagtacatattcaatgtcattttcatacacctggactaatggaagctatgttggagcaacatttggggctaactcttataccttctcatacatcgcccaagaatgaacactgtatcccaccctgcatgccaacccttcccaccccactctgtggaacaaactctgaaacacaaaataaaataaagttcaagtgttttattgattcaacagttttacaggattcgagcagttatttttcctccaccctcccaggacatggaatacaccaccctctccccccgcacagccttgaacatctgaatgccattggtgatggacatgcttttggtctccacgttccacacagtttcagagcgagccagtctcgggtcggtcagggagatgaaaccctccgggcactcccgcatctgcacctcacagctcaacagctgaggattgtcctcggtggtcgggatcacggttatctggaagaagcagaagagcggcggtgggaatcatagtccgcgaacgggatcggccggtggtgtcgcatcaggccccgcagcagtcgctgccgccgccgctccgtcaagctgctgctcagggggtccgggtccagggactccctcagcatgatgcccacggccctcagcatcagtcgtctggtgcggcgggcgcagcagcgcatgcggatctcgctcaggtcgctgcagtacgtgcaacacagaaccaccaggttgttcaacagtccatagttcaacacgctccagccgaaactcatcgcgggaaggatgctacccacgtggccgtcgtaccagatcctcaggtaaatcaagtggtgccccctccagaacacgctgcccacgtacatgatctccttgggcatgtggcggttcaccacctcccggtaccacatcaccctctggttgaacatgcagccccggatgatcctgcggaaccacagggccagcaccgccccgcccgccatgcagcgaagagaccccgggtcccggcaatggcaatggaggacccaccgctcgtacccgtggatcatctgggagctgaacaagtctatgttggcacagcacaggcatatgctcatgcatctcttcagcactctcaactcctcgggggtcaaaaccatatcccagggcacggggaactcttgcaggacagcgaaccccgcagaacagggcaatcctcgcacagaacttacattgtgcatggacagggtatcgcaatcaggcagcaccgggtgatcctccaccagagaagcgcgggtctcggtctcctcacagcgtggtaagggggccggccgatacgggtgatggcgggacgcggctgatcgtgttcgcgaccgtgtcatgatgcagttgctttcggacattttcgtacttgctgtagcagaacctggtccgggcgctgcacaccgatcgccggcggcggtctcggcgcttggaacgctcggtgttgaaattgtaaaacagccactctctcagaccgtgcagcagatctagggcctcaggagtgatgaagatcccatcatgcctgatggctctgatcacatcgaccaccgtggaatgggccagacccagccagatgatgcaattttgttgggtttcggtgacggcgggggagggaagaacaggaagaaccatgattaacttttaatccaaacggtctcggagtacttcaaaatgaagatcgcggagatggcacctctcgcccccgctgtgttggtggaaaataacagccaggtcaaaggtgatacggttctcgagatgttccacggtggcttccagcaaagcctccacgcgcacatccagaaacaagacaatagcgaaagcgggagggttctctaattcctcaatcatcatgttacactcctgcaccatccccagataattttcatttttccagccttgaatgattcgaactagttcctgaggtaaatccaagccagccatgataaagagctcgcgcagagcgccctccaccggcattcttaagcacaccctcataattccaagatattctgctcctggttcacctgcagcagattgacaagcggaatatcaaaatctctgccgcgatccctgagctcctccctcagcaataactgtaagtactctttcatatcctctccgaaatttttagccataggaccaccaggaataagattagggcaagccacagtacagataaaccgaagtcctccccagtgagcattgccaaatgcaagactgctataagcatgctggctagacccggtgatatcttccagataactggacagaaaatcgcccaggcaatttttaagaaaatcaacaaaagaaaaatcctccaggtggacgtttagagcctcgggaacaacgatgaagtaaatgcaagcggtgcgttccagcatggttagttagctgatctgtagaaaaaacaaaaatgaacattaaaccatgctagcctggcgaacaggtgggtaaatcgttctctccagcaccaggcaggccacggggtctccggcgcgaccctcgtaaaaattgtcgctatgattgaaaaccatcacagagagacgttcccggtggccggcgtgaatgattcgacaagatgaatacacccccggaacattggcgtccgcgagtgaaaaaaagcgcccgaggaagcaataaggcactacaatgctcagtctcaagtccagcaaagcgatgccatgcggatgaagcacaaaattctcaggtgcgtacaaaatgtaattactcccctcctgcacaggcagcaaagcccccgatccctccaggtacacatacaaagcctcagcgtccatagcttaccgagcagcagcacacaacaggcgcaagagtcagagaaaggctgagctctaacctgtccacccgctctctgctcaatatatagcccagatctacactgacgtaaaggccaaagtctaaaaatacccgccaaataatcacacacgcccagcacacgcccagaaaccggtgacacactcaaaaaaatacgcgcacttcctcaaacgcccaaaactgccgtcatttccgggttcccacgctacgtcatcaaaacacgactttcaaattccgtcgaccgttaaaaacgtcacccgccccgcccctaacggtcgcccgtctctcagccaatcagcgccccgcatccccaaattcaaacacctcatttgcatattaacgcgcacaaaaagtttgaggtatattattgatgatgg

SEQ ID NO: 2 - DNA, 31588 bp, Artificial Sequence
  Description of Artificial Sequence: Synthetic polynucleotide
ccatcttcaataatatacctcaaactttttgtgcgcgttaatatgcaaatgaggcgtttgaatttggggaggaagggcggtgattggtcgagggatgagcgaccgttaggggcggggcgagtgacgttttgatgacgtggttgcgaggaggagccagtttgcaagttctcgtgggaaaagtgacgtcaaacgaggtgtggtttgaacacggaaatactcaattttcccgcgctctctgacaggaaatgaggtgtttctgggcggatgcaagtgaaaacgggccattttcgcgcgaaaactgaatgaggaagtgaaaatctgagtaatttcgcgtttatggcagggaggagtatttgccgagggccgagtagactttgaccgattacgtgggggtttcgattaccgtgtttttcacctaaatttccgcgtacggtgtcaaagtccggtgtttttacgtaggtgtcagctgatcgccagggtatttaaacctgcgctctccagtcaagaggccactcttgagtgccagcgagaagagttttctcctccgcgccgcgagtcagatctacactttgaaagtagggataacagggtaatgacattgattattgactagttgttaatagtaatcaattacggggtcattagttcatagcccatatatggagttccgcgttacataacttacggtaaatggcccgcctggctgaccgcccaacgacccccgcccattgacgtcaataatgacgtatgttcccatagtaacgccaatagggactttccattgacgtcaatgggtggagtatttacggtaaactgcccacttggcagtacatcaagtgtatcatatgccaagtccgccccctattgacgtcaatgacggtaaatggcccgcctggcattatgcccagtacatgaccttacgggactttcctacttggcagtacatctacgtattagtcatcgctattaccatggtgatgcggttttggcagtacaccaatgggcgtggatagcggtttgactcacggggatttccaagtctccaccccattgacgtcaatgggagtttgttttggcaccaaaatcaacgggactttccaaaatgtcgtaataaccccgccccgttgacgcaaatgggcggtaggcgtgtacggtgggaggtctatataagcagagctcgtttagtgaaccgtcagatcgcctggaacgccatccacgctgttttgacctccatagaagacagcgatcgcgccaccatggccgggatgttccaggcactgtccgaaggctgcacaccctatgatattaaccagatgctgaatgtcctgggagaccaccaggtctctggcctggagcagctggagagcatcatcaacttcgagaagctgaccgagtggacaagctccaatgtgatgcctatcctgtccccactgaccaagggcatcctgggcttcgtgtttaccctgacagtgccttctgagcggggcctgtcttgcatcagcgaggcagacgcaaccacaccagagtccgccaatctgggcgaggagatcctgtctcagctgtacctgtggccccgggtgacatatcactccccttcttacgcctatcaccagttcgagcggagagccaagtacaagagacacttcccaggctttggccagtctctgctgttcggctaccccgtgtacgtgttcggcgattgcgtgcagggcgactgggatgccatccggtttagatactgcgcaccacctggatatgcactgctgaggtgtaacgacaccaattattccgccctgctggcagtgggcgccctggagggccctcgcaatcaggattggctgggcgtgccaaggcagctggtgacacgcatgcaggccatccagaacgcaggcctgtgcaccctggtggcaatgctggaggagacaatcttctggctgcaggcctttctgatggccctgaccgacagcggccccaagacaaacatcatcgtggattcccagtacgtgatgggcatctccaagccttctttccaggagtttgtggactgggagaacgtgagcccagagctgaattccaccgatcagccattctggcaggcaggaatcctggcaaggaacctggtgcctatggtggccacagtgcagggccagaatctgaagtaccagggccagagcctggtcatcagcgcctccatcatcgtgtttaacctgctggagctggagggcgactatcgggacgatggcaacgtgtgggtgcacaccccactgagccccagaacactgaacgcctgggtgaaggccgtggaggagaagaagggcatcccagtgcacctggagctggcctccatgaccaatatggagctgatgtctagcatcgtgcaccagcaggtgaggacatacggacccgtgttcatgtgcctgggaggcctgctgaccatggtggcaggagccgtgtggctgacagtgcgggtgctggagctgttcagagccgcccagctggccaacgatgtggtgctgcagatcatggagctgtgcggagcagcctttcgccaggtgtgccacaccacagtgccatggcccaatgcctccctgacccccaagtggaacaatgagacaacacagcctcagatcgccaactgtagcgtgtacgacttcttcgtgtggctgcactactatagcgtgagggataccctgtggccccgcgtgacataccacatgaataagtacgcctatcacatgctggagaggcgcgccaagtataagagaggccctggcccaggcgcaaagtttgtggcagcatggaccctgaaggccgccgccggccccggccccggccagtatatcaaggctaacagtaagttcattggaatcacagagctgggacccggacctggataatgagtttaaactcccatttaaatgtgagggttaatgcttcgagcagacatgataagatacattgatgagtttggacaaaccacaactagaatgcagtgaaaaaaatgctttatttgtgaaatttgtgatgctattgctttatttgtaaccattataagctgcaataaacaagttaacaacaacaattgcattcattttatgtttcaggttcagggggagatgtgggaggttttttaaagcaagtaaaacctctacaaatgtggtaaaataactataacggtcctaaggtagcgagtgagtagtgttctggggcgggggaggacctgcatgagggccagaataactgaaatctgtgcttttctgtgtgttgcagcagcatgagcggaagcggctcctttgagggaggggtattcagcccttatctgacggggcgtctcccctcctgggcgggagtgcgtcagaatgtgatgggatccacggtggacggccggcccgtgcagcccgcgaactcttcaaccctgacctatgcaaccctgagctcttcgtcgttggacgcagctgccgccgcagctgctgcatctgccgccagcgccgtgcgcggaatggccatgggcgccggctactacggcactctggtggccaactcgagttccaccaataatcccgccagcctgaacgaggagaagctgttgctgctgatggcccagctcgaggccttgacccagcgcctgggcgagctgacccagcaggtggctcagctgcaggagcagacgcgggccgcggttgccacggtgaaatccaaataaaaaatgaatcaataaataaacggagacggttgttgattttaacacagagtctgaatctttatttgatttttcgcgcgcggtaggccctggaccaccggtctcgatcattgagcacccggtggatcttttccaggacccggtagaggtgggcttggatgttgaggtacatgggcatgagcccgtcccgggggtggaggtagctccattgcagggcctcgtgctcgggggtggtgttgtaaatcacccagtcatagcaggggcgcagggcatggtgttgcacaatatctttgaggaggagactgatggccacgggcagccctttggtgtaggtgtttacaaatctgttgagctgggagggatgcatgcggggggagatgaggtgcatcttggcctggatcttgagattggcgatgttaccgcccagatcccgcctggggttcatgttgtgcaggaccaccagcacggtgtatccggtgcacttggggaatttatcatgcaacttggaagggaaggcgtgaaagaatttggcgacgcctttgtgcccgcccaggttttccatgcactcatccatgatgatggcgatgggcccgtgggcggcggcctgggcaaagacgtttcgggggtcggacacatcatagttgtggtcctgggtgaggtcatcataggccattttaatgaatttggggcggagggtgccggactgggggacaaaggtaccctcgatcccgggggcgtagttcccctcacagatctgcatctcccaggctttgagctcggagggggggatcatgtccacctgcggggcgataaagaacacggtttccggggcgggggagatgagctgggccgaaagcaagttccggagcagctgggacttgccgcagccggtggggccgtagatgaccccgatgaccggctgcaggtggtagttgagggagagacagctgccgtcctcccggaggaggggggccacctcgttcatcatctcgcgcacgtgcatgttctcgcgcaccagttccgccaggaggcgctctccccccagggataggagctcctggagcgaggcgaagtttttcagcggcttgagtccgtcggccatgggcattttggagagggtttgttgcaagagttccaggcggtcccagagctcggtgatgtgctctacggcatctcgatccagcagacctcctcgtttcgcgggttgggacggctgcgggagtagggcaccagacgatgggcgtccagcgcagccagggtccggtccttccagggtcgcagcgtccgcgtcagggtggtctccgtcacggtgaaggggtgcgcgccgggctgggcgcttgcgagggtgcgcttcaggctcatccggctggtcgaaaaccgctcccgatcggcgccctgcgcgtcggccaggtagcaattgaccatgagttcgtagttgagcgcctcggccgcgtggcctttggcgcggagcttacctttggaagtctgcccgcaggcgggacagaggagggacttgagggcgtagagcttgggggcgaggaagacggactcgggggcgtaggcgtccgcgccgcagtgggcgcagacggtctcgcactccacgagccaggtgaggtcgggctggtcggggtcaaaaaccagtttcccgccgttctttttgatgcgtttcttacctttggtctccatgagctcgtgtccccgctgggtgacaaagaggctgtccgtgtccccgtagaccgactttatgggccggtcctcgagcggtgtgccgcggtcctcctcgtagaggaaccccgcccactccgagacgaaagcccgggtccaggccagcacgaaggaggccacgtgggacgggtagcggtcgttgtccaccagcgggtccaccttttccagggtatgcaaacacatgtccccctcgtccacatccaggaaggtgattggcttgtaagtgtaggccacgtgaccgggggtcccggccgggggggtataaaagggtgcgggtccctgctcgtcctcactgtcttccggatcgctgtccaggagcgccagctgttggggtaggtattccctctcgaaggcgggcatgacctcggcactcaggttgtcagtttctagaaacgaggaggatttgatattgacggtgccggcggagatgcctttcaagagcccctcgtccatctggtcagaaaagacgatctttttgttgtcgagcttggtggcgaaggagccgtagagggcgttggagaggagcttggcgatggagcgcatggtctggtttttttccttgtcggcgcgctccttggcggcgatgttgagctgcacgtactcgcgcgccacgcacttccattcggggaagacggtggtcagctcgtcgggcacgattctgacctgccagccccgattatgcagggtgatgaggtccacactggtggccacctcgccgcgcaggggctcattagtccagcagaggcgtccgcccttgcgcgagcagaaggggggcagggggtccagcatgacctcgtcgggggggtcggcatcgatggtgaagatgccgggcaggaggtcggggtcaaagtagctgatggaagtggccagatcgtccagggcagcttgccattcgcgcacggccagcgcgcgctcgtagggactgaggggcgtgccccagggcatgggatgggtaagcgcggaggcgtacatgccgcagatgtcgtagacgtagaggggctcctcgaggatgccgatgtaggtggggtagcagcgccccccgcggatgctggcgcgcacgtagtcatacagctcgtgcgagggggcgaggagccccgggcccaggttggtgcgactgggcttttcggcgcggtagacgatctggcggaaaatggcatgcgagttggaggagatggtgggcctttggaagatgttgaagtgggcgtggggcagtccgaccgagtcgcggatgaagtgggcgtaggagtcttgcagcttggcgacgagctcggcggtgactaggacgtccagagcgcagtagtcgagggtctcctggatgatgtcatacttgagctgtcccttttgtttccacagctcgcggttgagaaggaactcttcgcggtccttccagtactcttcgagggggaacccgtcctgatctgcacggtaagagcctagcatgtagaactggttgacggccttgtaggcgcagcagcccttctccacggggagggcgtaggcctgggcggccttgcgcagggaggtgtgcgtgagggcgaaagtgtccctgaccatgaccttgaggaactggtgcttgaagtcgatatcgtcgcagcccccctgctcccagagctggaagtccgtgcgcttcttgtaggcggggttgggcaaagcgaaagtaacatcgttgaagaggatcttgcccgcgcggggcataaagttgcgagtgatgcggaaaggttggggcacctcggcccggttgttgatgacctgggcggcgagcacgatctcgtcgaagccgttgatgttgtggcccacgatgtagagttccacgaatcgcggacggcccttgacgtggggcagtttcttgagctcctcgtaggtgagctcgtcggggtcgctgagcccgtgctgctcgagcgcccagtcggcgagatgggggttggcgcggaggaaggaagtccagagatccacggccagggcggtttgcagacggtcccggtactgacggaactgctgcccgacggccattttttcgggggtgacgcagtagaaggtgcgggggtccccgtgccagcgatcccatttgagctggagggcgagatcgagggcgagctcgacgagccggtcgtccccggagagtttcatgaccagcatgaaggggacgagctgcttgccgaaggaccccatccaggtgtaggtttccacatcgtaggtgaggaagagcctttcggtgcgaggatgcgagccgatggggaagaactggatctcctgccaccaattggaggaatggctgttgatgtgatggaagtagaaatgccgacggcgcgccgaacactcgtgcttgtgtttatacaagcggccacagtgctcgcaacgctgcacgggatgcacgtgctgcacgagctgtacctgagttcctttgacgaggaatttcagtgggaagtggagtcgtggcgcctgcatctcgtgctgtactacgtcgtggtggtcggcctggccctcttctgcctcgatggtggtcatgctgacgagcccgcgcgggaggcaggtccagacctcggcgcgagcgggtcggagagcgaggacgagggcgcgcaggccggagctgtccagggtcctgagacgctgcggagtcaggtcagtgggcagcggcggcgcgcggttgacttgcaggagtttttccagggcgcgcgggaggtccagatggtacttgatctccaccgcgccattggtggcgacgtcgatggcttgcagggtcccgtgcccctggggtgtgaccaccgtcccccgtttcttcttgggcggctggggcgacgggggcggtgcctcttccatggttagaagcggcggcgaggacgcgcgccgggcggcaggggcggctcggggcccggaggcaggggcggcaggggcacgtcggcgccgcgcgcgggtaggttctggtactgcgcccggagaagactggcgtgagcgacgacgcgacggttgacgtcctggatctgacgcctctgggtgaaggccacgggacccgtgagtttgaacctgaaagagagttcgacagaatcaatctcggtatcgttgacggcggcctgccgcaggatctcttgcacgtcgcccgagttgtcctggtaggcgatctcggtcatgaactgctcgatctcctcctcttgaaggtctccgcggccggcgcgctccacggtggccgcgaggtcgttggagatgcggcccatgagctgcgagaaggcgttcatgcccgcctcgttccagacgcggctgtagaccacgacgccctcgggatcgcgggcgcgcatgaccacctgggcgaggttgagctccacgtggcgcgtgaagaccgcgtagttgcagaggcgctggtagaggtagttgagcgtggtggcgatgtgctcggtgacgaagaaatacatgatccagcggcggagcggcatctcgctgacgtcgcccagcgcctccaaacgttccatggcctcgtaaaagtccacggcgaagttgaaaaactgggagttgcgcgccgagacggtcaactcctcctccagaagacggatgagctcggcgatggtggcgcgcacctcgcgctcgaaggcccccgggagttcctccacttcctcttcttcctcctccactaacatctcttctacttcctcctcaggcggcagtggtggcgggggagggggcctgcgtcgccggcggcgcacgggcagacggtcgatgaagcgctcgatggtctcgccgcgccggcgtcgcatggtctcggtgacggcgcgcccgtcctcgcggggccgcagcgtgaagacgccgccgcgcatctccaggtggccgggggggtccccgttgggcagggagagggcgctgacgatgcatcttatcaattgccccgtagggactccgcgcaaggacctgagcgtctcgagatccacgggatctgaaaaccgctgaacgaaggcttcgagccagtcgcagtcgcaaggtaggctgagcacggtttcttctggcgggtcatgttggttgggagcggggcgggcgatgctgctggtgatgaagttgaaataggcggttctgagacggcggatggtggcgaggagcaccaggtctttgggcccggcttgctggatgcgcagacggtcggccatgccccaggcgtggtcctgacacctggccaggtccttgtagtagtcctgcatgagccgctccacgggcacctcctcctcgcccgcgcggccgtgcatgcgcgtgagcccgaagccgcgctggggctggacgagcgccaggtcggcgacgacgcgctcggcgaggatggcttgctggatctgggtgagggtggtctggaagtcatcaaagtcgacgaagcggtggtaggctccggtgttgatggtgtaggagcagttggccatgacggaccagttgacggtctggtggcccggacgcacgagctcgtggtacttgaggcgcgagtaggcgcgcgtgtcgaagatgtagtcgttgcaggtgcgcaccaggtactggtagccgatgaggaagtgcggcggcggctggcggtagagcggccatcgctcggtggcgggggcgccgggcgcgaggtcctcgagcatggtgcggtggtagccgtagatgtacctggacatccaggtgatgccggcggcggtggtggaggcgcgcgggaactcgcggacgcggttccagatgttgcgcagcggcaggaagtagttcatggtgggcacggtctggcccgtgaggcgcgcgcagtcgtggatgctctatacgggcaaaaacgaaagcggtcagcggctcgactccgtggcctggaggctaagcgaacgggttgggctgcgcgtgtaccccggttcgaatctcgaatcaggctggagccgcagctaacgtggtattggcactcccgtctcgacccaagcctgcaccaaccctccaggatacggaggcgggtcgttttgcaacttttttttggaggccggatgagactagtaagcgcggaaagcggccgaccgcgatggctcgctgccgtagtctggagaagaatcgccagggttgcgttgcggtgtgccccggttcgaggccggccggattccgcggctaacgagggcgtggctgccccgtcgtttccaagaccccatagccagccgacttctccagttacggagcgagcccctcttttgttttgtttgtttttgccagatgcatcccgtactgcggcagatgcgcccccaccaccctccaccgcaacaacagccccctccacagccggcgcttctgcccccgccccagcagcaacttccagccacgaccgccgcggccgccgtgagcggggctggacagagttatgatcaccagctggccttggaagagggcgaggggctggcgcgcctgggggcgtcgtcgccggagcggcacccgcgcgtgcagatgaaaagggacgctcgcgaggcctacgtgcccaagcagaacctgttcagagacaggagcggcgaggagcccgaggagatgcgcgcggcccggttccacgcggggcgggagctgcggcgcggcctggaccgaaagagggtgctgagggacgaggatttcgaggcggacgagctgacggggatcagccccgcgcgcgcgcacgtggccgcggccaacctggtcacggcgtacgagcagaccgtgaaggaggagagcaacttccaaaaatccttcaacaaccacgtgcgcaccctgatcgcgcgcgaggaggtgaccctgggcctgatgcacctgtgggacctgctggaggccatcgtgcagaaccccaccagcaagccgctgacggcgcagctgttcctggtggtgcagcatagtcgggacaacgaagcgttcagggaggcgctgctgaatatcaccgagcccgagggccgctggctcctggacctggtgaacattctgcagagcatcgtggtgcaggagcgcgggctgccgctgtccgagaagctggcggccatcaacttctcggtgctgagtttgggcaagtactacgctaggaagatctacaagaccccgtacgtgcccatagacaaggaggtgaagatcgacgggttttacatgcgcatgaccctgaaagtgctgaccctgagcgacgatctgggggtgtaccgcaacgacaggatgcaccgtgcggtgagcgccagcaggcggcgcgagctgagcgaccaggagctgatgcatagtctgcagcgggccctgaccggggccgggaccgagggggagagctactttgacatgggcgcggacctgcactggcagcccagccgccgggccttggaggcggcggcaggaccctacgtagaagaggtggacgatgaggtggacgaggagggcgagtacctggaagactgatggcgcgaccgtatttttgctagatgcaacaacaacagccacctcctgatcccgcgatgcgggcggcgctgcagagccagccgtccggcattaactcctcggacgattggacccaggccatgcaacgcatcatggcgctgacgacccgcaaccccgaagcctttagacagcagccccaggccaaccggctctcggccatcctggaggccgtggtgccctcgcgctccaaccccacgcacgagaaggtcctggccatcgtgaacgcgctggtggagaacaaggccatccgcggcgacgaggccggcctggtgtacaacgcgctgctggagcgcgtggcccgctacaacagcaccaacgtgcagaccaacctggaccgcatggtgaccgacgtgcgcgaggccgtggcccagcgcgagcggttccaccgcgagtccaacctgggatccatggtggcgctgaacgccttcctcagcacccagcccgccaacgtgccccggggccaggaggactacaccaacttcatcagcgccctgcgcctgatggtgaccgaggtgccccagagcgaggtgtaccagtccgggccggactacttcttccagaccagtcgccagggcttgcagaccgtgaacctgagccaggctttcaagaacttgcagggcctgtggggcgtgcaggccccggtcggggaccgcgcgacggtgtcgagcctgctgacgccgaactcgcgcctgctgctgctgctggtggcccccttcacggacagcggcagcatcaaccgcaactcgtacctgggctacctgattaacctgtaccgcgaggccatcggccaggcgcacgtggacgagcagacctaccaggagatcacccacgtgagccgcgccctgggccaggacgacccgggcaacctggaagccaccctgaactttttgctgaccaaccggtcgcagaagatcccgccccagtacgcgctcagcaccgaggaggagcgcatcctgcgttacgtgcagcagagcgtgggcctgttcctgatgcaggagggggccacccccagcgccgcgctcgacatgaccgcgcgcaacatggagcccagcatgtacgccagcaaccgcccgttcatcaataaactgatggactacttgcatcgggcggccgccatgaactctgactatttcaccaacgccatcctgaatccccactggctcccgccgccggggttctacacgggcgagtacgacatgcccgaccccaatgacgggttcctgtgggacgatgtggacagcagcgtgttctccccccgaccgggtgctaacgagcgccccttgtggaagaaggaaggcagcgaccgacgcccgtcctcggcgctgtccggccgcgagggtgctgccgcggcggtgcccgaggccgccagtcctttcccgagcttgcccttctcgctgaacagtatccgcagcagcgagctgggcaggatcacgcgcccgcgcttgctgggcgaagaggagtacttgaatgactcgctgttgagacccgagcgggagaagaacttccccaataacgggatagaaagcctggtggacaagatgagccgctggaagacgtatgcgcaggagcacagggacgatccccgggcgtcgcagggggccacgagccggggcagcgccgcccgtaaacgccggtggcacgacaggcagcggggacagatgtgggacgatgaggactccgccgacgacagcagcgtgttggacttgggtgggagtggtaacccgttcgctcacctgcgcccccgtatcgggcgcatgatgtaagagaaaccgaaaataaatgatactcaccaaggccatggcgaccagcgtgcgttcgtttcttctctgttgttgttgtatctagtatgatgaggcgtgcgtacccggagggtcctcctccctcgtacgagagcgtgatgcagcaggcgatggcggcggcggcgatgcagcccccgctggaggctccttacgtgcccccgcggtacctggcgcctacggaggggcggaacagcattcgttactcggagctggcacccttgtacgataccacccggttgtacctggtggacaacaagtcggcggacatcgcctcgctgaactaccagaacgaccacagcaacttcctgaccaccgtggtgcagaacaatgacttcacccccacggaggccagcacccagaccatcaactttgacgagcgctcgcggtggggcggccagctgaaaaccatcatgcacaccaacatgcccaacgtgaacgagttcatgtacagcaacaagttcaaggcgcgggtgatggtctcccgcaagacccccaatggggtgacagtgacagaggattatgatggtagtcaggatgagctgaagtatgaatgggtggaatttgagctgcccgaaggcaacttctcggtgaccatgaccatcgacctgatgaacaacgccatcatcgacaattacttggcggtggggcggcagaacggggtgctggagagcgacatcggcgtgaagttcgacactaggaacttcaggctgggctgggaccccgtgaccgagctggtcatgcccggggtgtacaccaacgaggctttccatcccgatattgtcttgctgcccggctgcggggtggacttcaccgagagccgcctcagcaacctgctgggcattcgcaagaggcagcccttccaggaaggcttccagatcatgtacgaggatctggaggggggcaacatccccgcgctcctggatgtcgacgcctatgagaaaagcaaggaggatgcagcagctgaagcaactgcagccgtagctaccgcctctaccgaggtcaggggcgataattttgcaagcgccgcagcagtggcagcggccgaggcggctgaaaccgaaagtaagatagtcattcagccggtggagaaggatagcaagaacaggagctacaacgtactaccggacaagataaacaccgcctaccgcagctggtacctagcctacaactatggcgaccccgagaagggcgtgcgctcctggacgctgctcaccacctcggacgtcacctgcggcgtggagcaagtctactggtcgctgcccgacatgatgcaagacccggtcaccttccgctccacgcgtcaagttagcaactacccggtggtgggcgccgagctcctgcccgtctactccaagagcttcttcaacgagcaggccgtctactcgcagcagctgcgcgccttcacctcgcttacgcacgtcttcaaccgcttccccgagaaccagatcctcgtccgcccgcccgcgcccaccattaccaccgtcagtgaaaacgttcctgctctcacagatcacgggaccctgccgctgcgcagcagtatccggggagtccagcgcgtgaccgttactgacgccagacgccgcacctgcccctacgtctacaaggccctgggcatagtcgcgccgcgcgtcctctcgagccgcaccttctaaatgtccattctcatctcgcccagtaataacaccggttggggcctgcgcgcgcccagcaagatgtacggaggcgctcgccaacgctccacgcaacaccccgtgcgcgtgcgcgggcacttccgcgctccctggggcgccctcaagggccgcgtgcggtcgcgcaccaccgtcgacgacgtgatcgaccaggtggtggccgacgcgcgcaactacacccccgccgccgcgcccgtctccaccgtggacgccgtcatcgacagcgtggtggccgacgcgcgccggtacgcccgcgccaagagccggcggcggcgcatcgcccggcggcaccggagcacccccgccatgcgcgcggcgcgagccttgctgcgcagggccaggcgcacgggacgcagggccatgctcagggcggccagacgcgcggcttcaggcgccagcgccggcaggacccggagacgcgcggccacggcggcggcagcggccatcgccagcatgtcccgcccgcggcgagggaacgtgtactgggtgcgcgacgccgccaccggtgtgcgcgtgcccgtgcgcacccgcccccctcgcacttgaagatgttcacttcgcgatgttgatgtgtcccagcggcgaggaggatgtccaagcgcaaattcaaggaagagatgctccaggtcatcgcgcctgagatctacggccctgcggtggtgaaggaggaaagaaagccccgcaaaatcaagcgggtcaaaaaggacaaaaaggaagaagaaagtgatgtggacggattggtggagtttgtgcgcgagttcgccccccggcggcgcgtgcagtggcgcgggcggaaggtgcaaccggtgctgagacccggcaccaccgtggtcttcacgcccggcgagcgctccggcaccgcttccaagcgctcctacgacgaggtgtacggggatgatgatattctggagcaggcggccgagcgcctgggcgagtttgcttacggcaagcgcagccgttccgcaccgaaggaagaggcggtgtccatcccgctggaccacggcaaccccacgccgagcctcaagcccgtgaccttgcagcaggtgctgccgaccgcggcgccgcgccgggggttcaagcgcgagggcgaggatctgtaccccaccatgcagctgatggtgcccaagcgccagaagctggaagacgtgctggagaccatgaaggtggacccggacgtgcagcccgaggtcaaggtgcggcccatcaagcaggtggccccgggcctgggcgtgcagaccgtggacatcaagattcccacggagcccatggaaacgcagaccgagcccatgatcaagcccagcaccagcaccatggaggtgcagacggatccctggatgccatcggctcctagtcgaagaccccggcgcaagtacggcgcggccagcctgctgatgcccaactacgcgctgcatccttccatcatccccacgccgggctaccgcggcacgcgcttctaccgcggtcataccagcagccgccgccgcaagaccaccactcgccgccgccgtcgccgcaccgccgctgcaaccacccctgccgccctggtgcggagagtgtaccgccgcggccgcgcacctctgaccctgccgcgcgcgcgctaccacccgagcatcgccatttaaactttcgcctgctttgcagatcaatggccctcacatgccgccttcgcgttcccattacgggctaccgaggaagaaaaccgcgccgtagaaggctggcggggaacgggatgcgtcgccaccaccaccggcggcggcgcgccatcagcaagcggttggggggaggcttcctgcccgcgctgatccccatcatcgccgcggcgatcggggcgatccccggcattgcttccgtggcggtgcaggcctctcagcgccactgagacacacttggaaacatcttgtaataaaccaatggactctgacgctcctggtcctgtgatgtgttttcgtagacagatggaagacatcaatttttcgtccctggctccgcgacacggcacgcggccgttcatgggcacctggagcgacatcggcaccagccaactgaacgggggcgccttcaattggagcagtctctggagcgggcttaagaatttcgggtccacgcttaaaacctatggcagcaaggcgtggaacagcaccacagggcaggcgctgagggataagctgaaagagcagaacttccagcagaaggtggtcgatgggctcgcctcgggcatcaacggggtggtggacctggccaaccaggccgtgcagcggcagatcaacagccgcctggacccggtgccgcccgccggctccgtggagatgccgcaggtggaggaggagctgcctcccctggacaagcggggcgagaagcgaccccgccccgatgcggaggagacgctgctgacgcacacggacgagccgcccccgtacgaggaggcggtgaaactgggtctgcccaccacgcggcccatcgcgcccctggccaccggggtgctgaaacccgaaaagcccgcgaccctggacttgcctcctccccagccttcccgcccctctacagtggctaagcccctgccgccggtggccgtggcccgcgcgcgacccgggggcaccgcccgccctcatgcgaactggcagagcactctgaacagcatcgtgggtctgggagtgcagagtgtgaagcgccgccgctgctattaaacctaccgtagcgcttaacttgcttgtctgtgtgtgtatgtattatgtcgccgccgccgctgtccaccagaaggaggagtgaagaggcgcgtcgccgagttgcaagatggccaccccatcgatgctgccccagtgggcgtacatgcacatcgccggacaggacgcttcggagtacctgagtccgggtctggtgcagtttgcccgcgccacagacacctacttcagtctggggaacaagtttaggaaccccacggtggcgcccacgcacgatgtgaccaccgaccgcagccagcggctgacgctgcgcttcgtgcccgtggaccgcgaggacaacacctactcgtacaaagtgcgctacacgctggccgtgggcgacaaccgcgtgctggacatggccagcacctactttgacatccgcggcgtgctggatcggggccctagcttcaaaccctactccggcaccgcctacaacagtctggcccccaagggagcacccaacacttgtcagtggacatataaagccgatggtgaaactgccacagaaaaaacctatacatatggaaatgcacccgtgcagggcattaacatcacaaaagatggtattcaacttggaactgacaccgatgatcagccaatctacgcagataaaacctatcagcctgaacctcaagtgggtgatgctgaatggcatgacatcactggtactgatgaaaagtatggaggcagagctcttaagcctgataccaaaatgaagccttgttatggttcttttgccaagcctactaataaagaaggaggtcaggcaaatgtgaaaacaggaacaggcactactaaagaatatgacatagacatggctttctttgacaacagaagtgcggctgctgctggcctagctccagaaattgttttgtatactgaaaatgtggatttggaaactccagatacccatattgtatacaaagcaggcacagatgacagcagctcttctattaatttgggtcagcaagccatgcccaacagacctaactacattggtttcagagacaactttatcgggctcatgtactacaacagcactggcaatatgggggtgctggccggtcaggcttctcagctgaatgctgtggttgacttgcaagacagaaacaccgagctgtcctaccagctcttgcttgactctctgggtgacagaacccggtatttcagtatgtggaatcaggcggtggacagctatgatcctgatgtgcgcattattgaaaatcatggtgtggaggatgaacttcccaactattgtttccctctggatgctgttggcagaacagatacttatcagggaattaaggctaatggaactgatcaaaccacatggaccaaagatgacagtgtcaatgatgctaatgagataggcaagggtaatccattcgccatggaaatcaacatccaagccaacctgtggaggaacttcctctacgccaacgtggccctgtacctgcccgactcttacaagtacacgccggccaatgttaccctgcccaccaacaccaacacctacgattacatgaacggccgggtggtggcgccctcgctggtggactcctacatcaacatcggggcgcgctggtcgctggatcccatggacaacgtgaaccccttcaaccaccaccgcaatgcggggctgcgctaccgctccatgctcctgggcaacgggcgctacgtgcccttccacatccaggtgccccagaaatttttcgccatcaagagcctcctgctcctgcccgggtcctacacctacgagtggaacttccgcaaggacgtcaacatgatcctgcagagctccctcggcaacgacctgcgcacggacggggcctccatctccttcaccagcatcaacctctacgccaccttcttccccatggcgcacaacacggcctccacgctcgaggccatgctgcgcaacgacaccaacgaccagtccttcaacgactacctctcggcggccaacatgctctaccccatcccggccaacgccaccaacgtgcccatctccatcccctcgcgcaactgggccgccttccgcggctggtccttcacgcgtctcaagaccaaggagacgccctcgctgggctccgggttcgacccctacttcgtctactcgggctccatcccctacctcgacggcaccttctacctcaaccacaccttcaagaaggtctccatcaccttcgactcctccgtcagctggcccggcaacgaccggctcctgacgcccaacgagttcgaaatcaagcgcaccgtcgacggcgagggctacaacgtggcccagtgcaacatgaccaaggactggttcctggtccagatgctggcccactacaacatcggctaccagggcttctacgtgcccgagggctacaaggaccgcatgtactccttcttccgcaacttccagcccatgagccgccaggtggtggacgaggtcaactacaaggactaccaggccgtcaccctggcctaccagcacaacaactcgggcttcgtcggctacctcgcgcccaccatgcgccagggccagccctaccccgccaactacccctacccgctcatcggcaagagcgccgtcaccagcgtcacccagaaaaagttcctctgcgacagggtcatgtggcgcatccccttctccagcaacttcatgtccatgggcgcgctcaccgacctcggccagaacatgctctatgccaactccgcccacgcgctagacatgaatttcgaagtcgaccccatggatgagtccacccttctctatgttgtcttcgaagtcttcgacgtcgtccgagtgcaccagccccaccgcggcgtcatcgaggccgtctacctgcgcacccccttctcggccggtaacgccaccacctaagctcttgcttcttgcaagccatggccgcgggctccggcgagcaggagctcagggccatcatccgcgacctgggctgcgggccctacttcctgggcaccttcgataagcgcttcccgggattcatggccccgcacaagctggcctgcgccatcgtcaacacggccggccgcgagaccgggggcgagcactggctggccttcgcctggaacccgcgctcgaacacctgctacctcttcgaccccttcgggttctcggacgagcgcctcaagcagatctaccagttcgagtacgagggcctgctgcgccgcagcgccctggccaccgaggaccgctgcgtcaccctggaaaagtccacccagaccgtgcagggtccgcgctcggccgcctgcgggctcttctgctgcatgttcctgcacgccttcgtgcactggcccgaccgccccatggacaagaaccccaccatgaacttgctgacgggggtgcccaacggcatgctccagtcgccccaggtggaacccaccctgcgccgcaaccaggaggcgctctaccgcttcctcaactcccactccgcctactttcgctcccaccgcgcgcgcatcgagaaggccaccgccttcgaccgcatgaatcaagacatgtaaaccgtgtgtgtatgttaaatgtctttaataaacagcactttcatgttacacatgcatctgagatgatttatttagaaatcgaaagggttctgccgggtctcggcatggcccgcgggcagggacacgttgcggaactggtacttggccagccacttgaactcggggatcagcagtttgggcagcggggtgtcggggaaggagtcggtccacagcttccgcgtcagttgcagggcgcccagcaggtcgggcgcggagatcttgaaatcgcagttgggacccgcgttctgcgcgcgggagttgcggtacacggggttgcagcactggaacaccatcagggccgggtgcttcacgctcgccagcaccgtcgcgtcggtgatgctctccacgtcgaggtcctcggcgttggccatcccgaagggggtcatcttgcaggtctgccttcccatggtgggcacgcacccgggcttgtggttgcaatcgcagtgcagggggatcagcatcatctgggcctggtcggcgttcatccccgggtacatggccttcatgaaagcctccaattgcctgaacgcctgctgggccttggctccctcggtgaagaagaccccgcaggacttgctagagaactggttggtggcgcacccggcgtcgtgcacgcagcagcgcgcgtcgttgttggccagctgcaccacgctgcgcccccagcggttctgggtgatcttggcccggtcggggttctccttcagcgcgcgctgcccgttctcgctcgccacatccatctcgatcatgtgctccttctggatcatggtggtcccgtgcaggcaccgcagcttgccctcggcctcggtgcacccgtgcagccacagcgcgcacccggtgcactcccagttcttgtgggcgatctgggaatgcgcgtgcacgaagccctgcaggaagcggcccatcatggtggtcagggtcttgttgctagtgaaggtcagcggaatgccgcggtgctcctcgttgatgtacaggtggcagatgcggcggtacacctcgccctgctcgggcatcagctggaagttggctttcaggtcggtctccacgcggtagcggtccatcagcatagtcatgatttccatacccttctcccaggccgagacgatgggcaggctcatagggttcttcaccatcatcttagcgctagcagccgcggccagggggtcgctctcgtccagggtctcaaagctccgcttgccgtccttctcggtgatccgcaccggggggtagctgaagcccacggccgccagctcctcctcggcctgtctttcgtcctcgctgtcctggctgacgtcctgcaggaccacatgcttggtcttgcggggtttcttcttgggcggcagcggcggcggagatgttggagatggcgagggggagcgcgagttctcgctcaccactactatctcttcctcttcttggtccgaggccacgcggcggtaggtatgtctcttcgggggcagaggcggaggcgacgggctctcgccgccgcgacttggcggatggctggcagagccccttccgcgttcgggggtgcgctcccggcggcgctctgactgacttcctccgcggccggccattgtgttctcctagggaggaacaacaagcatggagactcagccatcgccaacctcgccatctgcccccaccgccgacgagaagcagcagcagcagaatgaaagcttaaccgccccgccgcccagccccgccacctccgacgcggccgtcccagacatgcaagagatggaggaatccatcgagattgacctgggctatgtgacgcccgcggagcacgaggaggagctggcagtgcgcttttcacaagaagagatacaccaagaacagccagagcaggaagcagagaatgagcagagtcaggctgggctcgagcatgacggcgactacctccacctgagcgggggggaggacgcgctcatcaagcatctggcccggcaggccaccatcgtcaaggatgcgctgctcgaccgcaccgaggtgcccctcagcgtggaggagctcagccgcgcctacgagttgaacctcttctcgccgcgcgtgccccccaagcgccagcccaatggcacctgcgagcccaacccgcgcctcaacttctacccggtcttcgcggtgcccgaggccctggccacctaccacatctttttcaagaaccaaaagatccccgtctcctgccgcgccaaccgcacccgcgccgacgcccttttcaacctgggtcccggcgcccgcctacctgatatcgcctccttggaagaggttcccaagatcttcgagggtctgggcagcgacgagactcgggccgcgaacgctctgcaaggagaaggaggagagcatgagcaccacagcgccctggtcgagttggaaggcgacaacgcgcggctggcggtgctcaaacgcacggtcgagctgacccatttcgcctacccggctctgaacctgccccccaaagtcatgagcgcggtcatggaccaggtgctcatcaagcgcgcgtcgcccatctccgaggacgagggcatgcaagactccgaggagggcaagcccgtggtcagcgacgagcagctggcccggtggctgggtcctaatgctagtccccagagtttggaagagcggcgcaaactcatgatggccgtggtcctggtgaccgtggagctggagtgcctgcgccgcttcttcgccgacgcggagaccctgcgcaaggtcgaggagaacctgcactacctcttcaggcacgggttcgtgcgccaggcctgcaagatctccaacgtggagctgaccaacctggtctcctacatgggcatcttgcacgagaaccgcctggggcagaacgtgctgcacaccaccctgcgcggggaggcccggcgcgactacatccgcgactgcgtctacctctacctctgccacacctggcagacgggcatgggcgtgtggcagcagtgtctggaggagcagaacctgaaagagctctgcaagctcctgcagaagaacctcaagggtctgtggaccgggttcgacgagcgcaccaccgcctcggacctggccgacctcattttccccgagcgcctcaggctgacgctgcgcaacggcctgcccgactttatgagccaaagcatgttgcaaaactttcgctctttcatcctcgaacgctccggaatcctgcccgccacctgctccgcgctgccctcggacttcgtgccgctgaccttccgcgagtgccccccgccgctgtggagccactgctacctgctgcgcctggccaactacctggcctaccactcggacgtgatcgaggacgtcagcggcgagggcctgctcgagtgccactgccgctgcaacctctgcacgccgcaccgctccctggcctgcaacccccagctgctgagcgagacccagatcatcggcaccttcgagttgcaagggcccagcgaaggcgagggttcagccgccaaggggggtctgaaactcaccccggggctgtggacctcggcctacttgcgcaagttcgtgcccgaggactaccatcccttcgagatcaggttctacgaggaccaatcccatccgcccaaggccgagctgtcggcctgcgtcatcacccagggggcgatcctggcccaattgcaagccatccagaaatcccgccaagaattcttgctgaaaaagggccgcggggtctacctcgacccccagaccggtgaggagctcaaccccggcttcccccaggatgccccgaggaaacaagaagctgaaagtggagctgccgcccgtggaggatttggaggaagactgggagaacagcagtcaggcagaggaggaggagatggaggaagactgggacagcactcaggcagaggaggacagcctgcaagacagtctggaggaagacgaggaggaggcagaggaggaggtggaagaagcagccgccgccagaccgtcgtcctcggcgggggagaaagcaagcagcacggataccatctccgctccgggtcggggtcccgctcgaccacacagtagatgggacgagaccggacgattcccgaaccccaccacccagaccggtaagaaggagcggcagggatacaagtcctggcgggggcacaaaaacgccatcgtctcctgcttgcaggcctgcgggggcaacatctccttcacccggcgctacctgctcttccaccgcggggtgaactttccccgcaacatcttgcattactaccgtcacctccacagcccctactacttccaagaagaggcagcagcagcagaaaaagaccagcagaaaaccagcagctagaaaatccacagcggcggcagcaggtggactgaggatcgcggcgaacgagccggcgcaaacccgggagctgaggaaccggatctttcccaccctctatgccatcttccagcagagtcgggggcaggagcaggaactgaaagtcaagaaccgttctctgcgctcgctcacccgcagttgtctgtatcacaagagcgaagaccaacttcagcgcactctcgaggacgccgaggctctcttcaacaagtactgcgcgctcactcttaaagagtagcccgcgcccgcccagtcgcagaaaaaggcgggaattacgtcacctgtgcccttcgccctagccgcctccacccatcatcatgagcaaagagattcccacgccttacatgtggagctaccagccccagatgggcctggccgccggtgccgcccaggactactccacccgcatgaattggctcagcgccgggcccgcgatgatctcacgggtgaatgacatccgcgcccaccgaaaccagatactcctagaacagtcagcgctcaccgccacgccccgcaatcacctcaatccgcgtaattggcccgccgccctggtgtaccaggaaattccccagcccacgaccgtactacttccgcgagacgcccaggccgaagtccagctgactaactcaggtgtccagctggcgggcggcgccaccctgtgtcgtcaccgccccgctcagggtataaagcggctggtgatccggggcagaggcacacagctcaacgacgaggtggtgagctcttcgctgggtctgcgacctgacggagtcttccaactcgccggatcggggagatcttccttcacgcctcgtcaggccgtcctgactttggagagttcgtcctcgcagccccgctcgggtggcatcggcactctccagttcgtggaggagttcactccctcggtctacttcaaccccttctccggctcccccggccactacccggacgagttcatcccgaacttcgacgccatcagcgagtcggtggacggctacgattgaaactaatcacccccttatccagtgaaataaagatcatattgatgatgattttacagaaataaaaaataatcatttgatttgaaataaagatacaatcatattgatgatttgagtttaacaaaaaaataaagaatcacttacttgaaatctgataccaggtctctgtccatgttttctgccaacaccacttcactcccctcttcccagctctggtactgcaggccccggcgggctgcaaacttcctccacacgctgaaggggatgtcaaattcctcctgtccctcaatcttcattttatcttctatcagatgtccaaaaagcgcgtccgggtggatgatgacttcgaccccgtctacccctacgatgcagacaacgcaccgaccgtgcccttcatcaacccccccttcgtctcttcagatggattccaagagaagcccctgggggtgttgtccctgcgactggccgaccccgtcaccaccaagaacggggaaatcaccctcaagctgggagagggggtggacctcgattcctcgggaaaactcatctccaacacggccaccaaggccgccgcccctctcagtttttccaacaacaccatttcccttaacatggatcaccccttttacactaaagatggaaaattatccttacaagtttctccaccattaaatatactgagaacaagcattctaaacacactagctttaggttttggatcaggtttaggactccgtggctctgccttggcagtacagttagtctctccacttacatttgatactgatggaaacataaagcttaccttagacagaggtttgcatgttacaacaggagatgcaattgaaagcaacataagctgggctaaaggtttaaaatttgaagatggagccatagcaaccaacattggaaatgggttagagtttggaagcagtagtacagaaacaggtgttgatgatgcttacccaatccaagttaaacttggatctggccttagctttgacagtacaggagccataatggctggtaacaaagaagacgataaactcactttgtggacaacacctgatccatcaccaaactgtcaaatactcgcagaaaatgatgcaaaactaacactttgcttgactaaatgtggtagtcaaatactggccactgtgtcagtcttagttgtaggaagtggaaacctaaaccccattactggcaccgtaagcagtgctcaggtgtttctacgttttgatgcaaacggtgttcttttaacagaacattctacactaaaaaaatactgggggtataggcagggagatagcatagatggcactccatataccaatgctgtaggattcatgcccaatttaaaagcttatccaaagtcacaaagttctactactaaaaataatatagtagggcaagtatacatgaatggagatgtttcaaaacctatgcttctcactataaccctcaatggtactgatgacagcaacagtacatattcaatgtcattttcatacacctggactaatggaagctatgttggagcaacatttggggctaactcttataccttctcatacatcgcccaagaatgaacactgtatcccaccctgcatgccaacccttcccaccccactctgtggaacaaactctgaaacacaaaataaaataaagttcaagtgttttattgattcaacagttttacaggattcgagcagttatttttcctccaccctcccaggacatggaatacaccaccctctccccccgcacagccttgaacatctgaatgccattggtgatggacatgcttttggtctccacgttccacacagtttcagagcgagccagtctcgggtcggtcagggagatgaaaccctccgggcactcccgcatctgcacctcacagctcaacagctgaggattgtcctcggtggtcgggatcacggttatctggaagaagcagaagagcggcggtgggaatcatagtccgcgaacgggatcggccggtggtgtcgcatcaggccccgcagcagtcgctgccgccgccgctccgtcaagctgctgctcagggggtccgggtccagggactccctcagcatgatgcccacggccctcagcatcagtcgtctggtgcggcgggcgcagcagcgcatgcggatctcgctcaggtcgctgcagtacgtgcaacacagaaccaccaggttgttcaacagtccatagttcaacacgctccagccgaaactcatcgcgggaaggatgctacccacgtggccgtcgtaccagatcctcaggtaaatcaagtggtgccccctccagaacacgctgcccacgtacatgatctccttgggcatgtggcggttcaccacctcccggtaccacatcaccctctggttgaacatgcagccccggatgatcctgcggaaccacagggccagcaccgccccgcccgccatgcagcgaagagaccccgggtcccggcaatggcaatggaggacccaccgctcgtacccgtggatcatctgggagctgaacaagtctatgttggcacagcacaggcatatgctcatgcatctcttcagcactctcaactcctcgggggtcaaaaccatatcccagggcacggggaactcttgcaggacagcgaaccccgcagaacagggcaatcctcgcacagaacttacattgtgcatggacagggtatcgcaatcaggcagcaccgggtgatcctccaccagagaagcgcgggtctcggtctcctcacagcgtggtaagggggccggccgatacgggtgatggcgggacgcggctgatcgtgttcgcgaccgtgtcatgatgcagttgctttcggacattttcgtacttgctgtagcagaacctggtccgggcgctgcacaccgatcgccggcggcggtctcggcgcttggaacgctcggtgttgaaattgtaaaacagccactctctcagaccgtgcagcagatctagggcctcaggagtgatgaagatcccatcatgcctgatggctctgatcacatcgaccaccgtggaatgggccagacccagccagatgatgcaattttgttgggtttcggtgacggcgggggagggaagaacaggaagaaccatgattaacttttaatccaaacggtctcggagtacttcaaaatgaagatcgcggagatggcacctctcgcccccgctgtgttggtggaaaataacagccaggtcaaaggtgatacggttctcgagatgttccacggtggcttccagcaaagcctccacgcgcacatccagaaacaagacaatagcgaaagcgggagggttctctaattcctcaatcatcatgttacactcctgcaccatccccagataattttcatttttccagccttgaatgattcgaactagttcctgaggtaaatccaagccagccatgataaagagctcgcgcagagcgccctccaccggcattcttaagcacaccctcataattccaagatattctgctcctggttcacctgcagcagattgacaagcggaatatcaaaatctctgccgcgatccctgagctcctccctcagcaataactgtaagtactctttcatatcctctccgaaatttttagccataggaccaccaggaataagattagggcaagccacagtacagataaaccgaagtcctccccagtgagcattgccaaatgcaagactgctataagcatgctggctagacccggtgatatcttccagataactggacagaaaatcgcccaggcaatttttaagaaaatcaacaaaagaaaaatcctccaggtggacgtttagagcctcgggaacaacgatgaagtaaatgcaagcggtgcgttccagcatggttagttagctgatctgtagaaaaaacaaaaatgaacattaaaccatgctagcctggcgaacaggtgggtaaatcgttctctccagcaccaggcaggccacggggtctccggcgcgaccctcgtaaaaattgtcgctatgattgaaaaccatcacagagagacgttcccggtggccggcgtgaatgattcgacaagatgaatacacccccggaacattggcgtccgcgagtgaaaaaaagcgcccgaggaagcaataaggcactacaatgctcagtctcaagtccagcaaagcgatgccatgcggatgaagcacaaaattctcaggtgcgtacaaaatgtaattactcccctcctgcacaggcagcaaagcccccgatccctccaggtacacatacaaagcctcagcgtccatagcttaccgagcagcagcacacaacaggcgcaagagtcagagaaaggctgagctctaacctgtccacccgctctctgctcaatatatagcccagatctacactgacgtaaaggccaaagtctaaaaatacccgccaaataatcacacacgcccagcacacgcccagaaaccggtgacacactcaaaaaaatacgcgcacttcctcaaacgcccaaaactgccgtcatttccgggttcccacgctacgtcatcaaaacacgactttcaaattccgtcgaccgttaaaaacgtcacccgccccgcccctaacggtcgcccgtctctcagccaatcagcgccccgcatccccaaattcaaacacctcatttgcatattaacgcgcacaaaaagtttgagg

SEQ ID NO: 3 - DNA, 11447 bp, Venezuelan equine encephalitis virus
atgggcggcgcatgagagaagcccagaccaattacctacccaaaatggagaaagttcacgttgacatcgaggaagacagcccattcctcagagctttgcagcggagcttcccgcagtttgaggtagaagccaagcaggtcactgataatgaccatgctaatgccagagcgttttcgcatctggcttcaaaactgatcgaaacggaggtggacccatccgacacgatccttgacattggaagtgcgcccgcccgcagaatgtattctaagcacaagtatcattgtatctgtccgatgagatgtgcggaagatccggacagattgtataagtatgcaactaagctgaagaaaaactgtaaggaaataactgataaggaattggacaagaaaatgaaggagctcgccgccgtcatgagcgaccctgacctggaaactgagactatgtgcctccacgacgacgagtcgtgtcgctacgaagggcaagtcgctgtttaccaggatgtatacgcggttgacggaccgacaagtctctatcaccaagccaataagggagttagagtcgcctactggataggctttgacaccaccccttttatgtttaagaacttggctggagcatatccatcatactctaccaactgggccgacgaaaccgtgttaacggctcgtaacataggcctatgcagctctgacgttatggagcggtcacgtagagggatgtccattcttagaaagaagtatttgaaaccatccaacaatgttctattctctgttggctcgaccatctaccacgagaagagggacttactgaggagctggcacctgccgtctgtatttcacttacgtggcaagcaaaattacacatgtcggtgtgagactatagttagttgcgacgggtacgtcgttaaaagaatagctatcagtccaggcctgtatgggaagccttcaggctatgctgctacgatgcaccgcgagggattcttgtgctgcaaagtgacagacacattgaacggggagagggtctcttttcccgtgtgcacgtatgtgccagctacattgtgtgaccaaatgactggcatactggcaacagatgtcagtgcggacgacgcgcaaaaactgctggttgggctcaaccagcgtatagtcgtcaacggtcgcacccagagaaacaccaataccatgaaaaattaccttttgcccgtagtggcccaggcatttgctaggtgggcaaaggaatataaggaagatcaagaagatgaaaggccactaggactacgagatagacagttagtcatggggtgttgttgggcttttagaaggcacaagataacatctatttataagcgcccggatacccaaaccatcatcaaagtgaacagcgatttccactcattcgtgctgcccaggataggcagtaacacattggagatcgggctgagaacaagaatcaggaaaatgttagaggagcacaaggagccgtcacctctcattaccgccgaggacgtacaagaagctaagtgcgcagccgatgaggctaaggaggtgcgtgaagccgaggagttgcgcgcagctctaccacctttggcagctgatgttgaggagcccactctggaagccgatgtcgacttgatgttacaagaggctggggccggctcagtggagacacctcgtggcttgataaaggttaccagctacgctggcgaggacaagatcggctcttacgctgtgctttctccgcaggctgtactcaagagtgaaaaattatcttgcatccaccctctcgctgaacaagtcatagtgataacacactctggccgaaaagggcgttatgccgtggaaccataccatggtaaagtagtggtgccagagggacatgcaatacccgtccaggactttcaagctctgagtgaaagtgccaccattgtgtacaacgaacgtgagttcgtaaacaggtacctgcaccatattgccacacatggaggagcgctgaacactgatgaagaatattacaaaactgtcaagcccagcgagcacgacggcgaatacctgtacgacatcgacaggaaacagtgcgtcaagaaagaactagtcactgggctagggctcacaggcgagctggtggatcctcccttccatgaattcgcctacgagagtctgagaacacgaccagccgctccttaccaagtaccaaccataggggtgtatggcgtgccaggatcaggcaagtctggcatcattaaaagcgcagtcaccaaaaaagatctagtggtgagcgccaagaaagaaaactgtgcagaaattataagggacgtcaagaaaatgaaagggctggacgtcaatgccagaactgtggactcagtgctcttgaatggatgcaaacaccccgtagagaccctgtatattgacgaagcttttgcttgtcatgcaggtactctcagagcgctcatagccattataagacctaaaaaggcagtgctctgcggggatcccaaacagtgcggtttttttaacatgatgtgcctgaaagtgcattttaaccacgagatttgcacacaagtcttccacaaaagcatctctcgccgttgcactaaatctgtgacttcggtcgtctcaaccttgttttacgacaaaaaaatgagaacgacgaatccgaaagagactaagattgtgattgacactaccggcagtaccaaacctaagcaggacgatctcattctcacttgtttcagagggtgggtgaagcagttgcaaatagattacaaaggcaacgaaataatgacggcagctgcctctcaagggctgacccgtaaaggtgtgtatgccgttcggtacaaggtgaatgaaaatcctctgtacgcacccacctcagaacatgtgaacgtcctactgacccgcacggaggaccgcatcgtgtggaaaacactagccggcgacccatggataaaaacactgactgccaagtaccctgggaatttcactgccacgatagaggagtggcaagcagagcatgatgccatcatgaggcacatcttggagagaccggaccctaccgacgtcttccagaataaggcaaacgtgtgttgggccaaggctttagtgccggtgctgaagaccgctggcatagacatgaccactgaacaatggaacactgtggattattttgaaacggacaaagctcactcagcagagatagtattgaaccaactatgcgtgaggttctttggactcgatctggactccggtctattttctgcacccactgttccgttatccattaggaataatcactgggataactccccgtcgcctaacatgtacgggctgaataaagaagtggtccgtcagctctctcgcaggtacccacaactgcctcgggcagttgccactggaagagtctatgacatgaacactggtacactgcgcaattatgatccgcgcataaacctagtacctgtaaacagaagactgcctcatgctttagtcctccaccataatgaacacccacagagtgacttttcttcattcgtcagcaaattgaagggcagaactgtcctggtggtcggggaaaagttgtccgtcccaggcaaaatggttgactggttgtcagaccggcctgaggctaccttcagagctcggctggatttaggcatcccaggtgatgtgcccaaatatgacataatatttgttaatgtgaggaccccatataaataccatcactatcagcagtgtgaagaccatgccattaagcttagcatgttgaccaagaaagcttgtctgcatctgaatcccggcggaacctgtgtcagcataggttatggttacgctgacagggccagcgaaagcatcattggtgctatagcgcggcagttcaagttttcccgggtatgcaaaccgaaatcctcacttgaagagacggaagttctgtttgtattcattgggtacgatcgcaaggcccgtacgcacaatccttacaagctttcatcaaccttgaccaacatttatacaggttccagactccacgaagccggatgtgcaccctcatatcatgtggtgcgaggggatattgccacggccaccgaaggagtgattataaatgctgctaacagcaaaggacaacctggcggaggggtgtgcggagcgctgtataagaaattcccggaaagcttcgatttacagccgatcgaagtaggaaaagcgcgactggtcaaaggtgcagctaaacatatcattcatgccgtaggaccaaacttcaacaaagtttcggaggttgaaggtgacaaacagttggcagaggcttatgagtccatcgctaagattgtcaacgataacaattacaagtcagtagcgattccactgttgtccaccggcatcttttccgggaacaaagatcgactaacccaatcattgaaccatttgctgacagctttagacaccactgatgcagatgtagccatatactgcagggacaagaaatgggaaatgactctcaaggaagcagtggctaggagagaagcagtggaggagatatgcatatccgacgactcttcagtgacagaacctgatgcagagctggtgagggtgcatccgaagagttctttggctggaaggaagggctacagcacaagcgatggcaaaactttctcatatttggaagggaccaagtttcaccaggcggccaaggatatagcagaaattaatgccatgtggcccgttgcaacggaggccaatgagcaggtatgcatgtatatcctcggagaaagcatgagcagtattaggtcgaaatgccccgtcgaagagtcggaagcctccacaccacctagcacgctgccttgcttgtgcatccatgccatgactccagaaagagtacagcgcctaaaagcctcacgtccagaacaaattactgtgtgctcatcctttccattgccgaagtatagaatcactggtgtgcagaagatccaatgctcccagcctatattgttctcaccgaaagtgcctgcgtatattcatccaaggaagtatctcgtggaaacaccaccggtagacgagactccggagccatcggcagagaaccaatccacagaggggacacctgaacaaccaccacttataaccgaggatgagaccaggactagaacgcctgagccgatcatcatcgaagaggaagaagaggatagcataagtttgctgtcagatggcccgacccaccaggtgctgcaagtcgaggcagacattcacgggccgccctctgtatctagctcatcctggtccattcctcatgcatccgactttgatgtggacagtttatccatacttgacaccctggagggagctagcgtgaccagcggggcaacgtcagccgagactaactcttacttcgcaaagagtatggagtttctggcgcgaccggtgcctgcgcctcgaacagtattcaggaaccctccacatcccgctccgcgcacaagaacaccgtcacttgcacccagcagggcctgctcgagaaccagcctagtttccaccccgccaggcgtgaatagggtgatcactagagaggagctcgaggcgcttaccccgtcacgcactcctagcaggtcggtctcgagaaccagcctggtctccaacccgccaggcgtaaatagggtgattacaagagaggagtttgaggcgttcgtagcacaacaacaatgacggtttgatgcgggtgcatacatcttttcctccgacaccggtcaagggcatttacaacaaaaatcagtaaggcaaacggtgctatccgaagtggtgttggagaggaccgaattggagatttcgtatgccccgcgcctcgaccaagaaaaagaagaattactacgcaagaaattacagttaaatcccacacctgctaacagaagcagataccagtccaggaaggtggagaacatgaaagccataacagctagacgtattctgcaaggcctagggcattatttgaaggcagaaggaaaagtggagtgctaccgaaccctgcatcctgttcctttgtattcatctagtgtgaaccgtgccttttcaagccccaaggtcgcagtggaagcctgtaacgccatgttgaaagagaactttccgactgtggcttcttactgtattattccagagtacgatgcctatttggacatggttgacggagcttcatgctgcttagacactgccagtttttgccctgcaaagctgcgcagctttccaaagaaacactcctatttggaacccacaatacgatcggcagtgccttcagcgatccagaacacgctccagaacgtcctggcagctgccacaaaaagaaattgcaatgtcacgcaaatgagagaattgcccgtattggattcggcggcctttaatgtggaatgcttcaagaaatatgcgtgtaataatgaatattgggaaacgtttaaagaaaaccccatcaggcttactgaagaaaacgtggtaaattacattaccaaattaaaaggaccaaaagctgctgctctttttgcgaagacacataatttgaatatgttgcaggacataccaatggacaggtttgtaatggacttaaagagagacgtgaaagtgactccaggaacaaaacatactgaagaacggcccaaggtacaggtgatccaggctgccgatccgctagcaacagcgtatctgtgcggaatccaccgagagctggttaggagattaaatgcggtcctgcttccgaacattcatacactgtttgatatgtcggctgaagactttgacgctattatagccgagcacttccagcctggggattgtgttctggaaactgacatcgcgtcgtttgataaaagtgaggacgacgccatggctctgaccgcgttaatgattctggaagacttaggtgtggacgcagagctgttgacgctgattgaggcggctttcggcgaaatttcatcaatacatttgcccactaaaactaaatttaaattcggagccatgatgaaatctggaatgttcctcacactgtttgtgaacacagtcattaacattgtaatcgcaagcagagtgttgagagaacggctaaccggatcaccatgtgcagcattcattggagatgacaatatcgtgaaaggagtcaaatcggacaaattaatggcagacaggtgcgccacctggttgaatatggaagtcaagattatagatgctgtggtgggcgagaaagcgccttatttctgtggagggtttattttgtgtgactccgtgaccggcacagcgtgccgtgtggcagaccccctaaaaaggctgtttaagcttggcaaacctctggcagcagacgatgaacatgatgatgacaggagaagggcattgcatgaagagtcaacacgctggaaccgagtgggtattctttcagagctgtgcaaggcagtagaatcaaggtatgaaaccgtaggaacttccatcatagttatggccatgactactctagctagcagtgttaaatcattcagctacctgagaggggcccctataactctctacggctaacctgaatggactacgacatagtctagtccgccaagatgttcccgttccagccaatgtatccgatgcagccaatgccctatcgcaacccgttcgcggccccgcgcaggccctggttccccagaaccgacccttttctggcgatgcaggtgcaggaattaacccgctcgatggctaacctgacgttcaagcaacgccgggacgcgccacctgaggggccatccgctaagaaaccgaagaaggaggcctcgcaaaaacagaaagggggaggccaagggaagaagaagaagaaccaagggaagaagaaggctaagacagggccgcctaatccgaaggcacagaatggaaacaagaagaagaccaacaagaaaccaggcaagagacagcgcatggtcatgaaattggaatctgacaagacgttcccaatcatgttggaagggaagataaacggctacgcttgtgtggtcggagggaagttattcaggccgatgcatgtggaaggcaagatcgacaacgacgttctggccgcgcttaagacgaagaaagcatccaaatacgatcttgagtatgcagatgtgccacagaacatgcgggccgatacattcaaatacacccatgagaaaccccaaggctattacagctggcatcatggagcagtccaatatgaaaatgggcgtttcacggtgccgaaaggagttggggccaagggagacagcggacgacccattctggataaccagggacgggtggtcgctattgtgctgggaggtgtgaatgaaggatctaggacagccctttcagtcgtcatgtggaacgagaagggagttaccgtgaagtatactccggagaactgcgagcaatggtcactagtgaccaccatgtgtctgctcgccaatgtgacgttcccatgtgctcaaccaccaatttgctacgacagaaaaccagcagagactttggccatgctcagcgttaacgttgacaacccgggctacgatgagctgctggaagcagctgttaagtgccccggaaggaaaaggagatccaccgaggagctgtttaaggagtataagctaacgcgcccttacatggccagatgcatcagatgtgcagttgggagctgccatagtccaatagcaatcgaggcagtaaagagcgacgggcacgacggttatgttagacttcagacttcctcgcagtatggcctggattcctccggcaacttaaagggcaggaccatgcggtatgacatgcacgggaccattaaagagataccactacatcaagtgtcactccatacatctcgcccgtgtcacattgtggatgggcacggttatttcctgcttgccaggtgcccggcaggggactccatcaccatggaatttaagaaagattccgtcacacactcctgctcggtgccgtatgaagtgaaatttaatcctgtaggcagagaactctatactcatcccccagaacacggagtagagcaagcgtgccaagtctacgcacatgatgcacagaacagaggagcttatgtcgagatgcacctcccgggctcagaagtggacagcagtttggtttccttgagcggcagttcagtcaccgtgacacctcctgttgggactagcgccctggtggaatgcgagtgtggcggcacaaagatctccgagaccatcaacaagacaaaacagttcagccagtgcacaaagaaggagcagtgcagagcatatcggctgcagaacgataagtgggtgtataattctgacaaactgcccaaagcagcgggagccaccttaaaaggaaaactgcatgtcccattcttgctggcagacggcaaatgcaccgtgcctctagcaccagaacctatgataacctttggtttcagatcagtgtcactgaaactgcaccctaagaatcccacatatctaaccacccgccaacttgctgatgagcctcactacacgcacgagctcatatctgaaccagctgttaggaattttaccgtcaccgaaaaagggtgggagtttgtatggggaaaccacccgccgaaaaggttttgggcacaggaaacagcacccggaaatccacatgggctaccgcacgaggtgataactcattattaccacagataccctatgtccaccatcctgggtttgtcaatttgtgccgccattgcaaccgtttccgttgcagcgtctacctggctgttttgcagatctagagttgcgtgcctaactccttaccggctaacacctaacgctaggataccattttgtctggctgtgctttgctgcgcccgcactgcccgggccgagaccacctgggagtccttggatcacctatggaacaataaccaacagatgttctggattcaattgctgatccctctggccgccttgatcgtagtgactcgcctgctcaggtgcgtgtgctgtgtcgtgccttttttagtcatggccggcgccgcaggcgccggcgcctacgagcacgcgaccacgatgccgagccaagcgggaatctcgtataacactatagtcaacagagcaggctacgcaccactccctatcagcataacaccaacaaagatcaagctgatacctacagtgaacttggagtacgtcacctgccactacaaaacaggaatggattcaccagccatcaaatgctgcggatctcaggaatgcactccaacttacaggcctgatgaacagtgcaaagtcttcacaggggtttacccgttcatgtggggtggtgcatattgcttttgcgacactgagaacacccaagtcagcaaggcctacgtaatgaaatctgacgactgccttgcggatcatgctgaagcatataaagcgcacacagcctcagtgcaggcgttcctcaacatcacagtgggagaacactctattgtgactaccgtgtatgtgaatggagaaactcctgtgaatttcaatggggtcaaattaactgcaggtccgctttccacagcttggacaccctttgatcgcaaaatcgtgcagtatgccggggagatctataattatgattttcctgagtatggggcaggacaaccaggagcatttggagatatacaatccagaacagtctcaagctcagatctgtatgccaataccaacctagtgctgcagagacccaaagcaggagcgatccacgtgccatacactcaggcaccttcgggttttgagcaatggaagaaagataaagctccatcattgaaatttaccgcccctttcggatgcgaaatatatacaaaccccattcgcgccgaaaactgtgctgtagggtcaattccattagcctttgacattcccgacgccttgttcaccagggtgtcagaaacaccgacactttcagcggccgaatgcactcttaacgagtgcgtgtattcttccgactttggtgggatcgccacggtcaagtactcggccagcaagtcaggcaagtgcgcagtccatgtgccatcagggactgctaccctaaaagaagcagcagtcgagctaaccgagcaagggtcggcgactatccatttctcgaccgcaaatatccacccggagttcaggctccaaatatgcacatcatatgttacgtgcaaaggtgattgtcaccccccgaaagaccatattgtgacacaccctcagtatcacgcccaaacatttacagccgcggtgtcaaaaaccgcgtggacgtggttaacatccctgctgggaggatcagccgtaattattataattggcttggtgctggctactattgtggccatgtacgtgctgaccaaccagaaacataattgaatacagcagcaattggcaagctgcttacatagaactcgcggcgattggcatgccgccttaaaatttttattttattttttcttttcttttccgaatcggattttgtttttaatatttc

SEQ ID NO: 4 - DNA, 9577 bp, Artificial Sequence
  Description of Artificial Sequence: Synthetic polynucleotide
atgggcggcgcatgagagaagcccagaccaattacctacccaaaatggagaaagttcacgttgacatcgaggaagacagcccattcctcagagctttgcagcggagcttcccgcagtttgaggtagaagccaagcaggtcactgataatgaccatgctaatgccagagcgttttcgcatctggcttcaaaactgatcgaaacggaggtggacccatccgacacgatccttgacattggaagtgcgcccgcccgcagaatgtattctaagcacaagtatcattgtatctgtccgatgagatgtgcggaagatccggacagattgtataagtatgcaactaagctgaagaaaaactgtaaggaaataactgataaggaattggacaagaaaatgaaggagctcgccgccgtcatgagcgaccctgacctggaaactgagactatgtgcctccacgacgacgagtcgtgtcgctacgaagggcaagtcgctgtttaccaggatgtatacgcggttgacggaccgacaagtctctatcaccaagccaataagggagttagagtcgcctactggataggctttgacaccaccccttttatgtttaagaacttggctggagcatatccatcatactctaccaactgggccgacgaaaccgtgttaacggctcgtaacataggcctatgcagctctgacgttatggagcggtcacgtagagggatgtccattcttagaaagaagtatttgaaaccatccaacaatgttctattctctgttggctcgaccatctaccacgagaagagggacttactgaggagctggcacctgccgtctgtatttcacttacgtggcaagcaaaattacacatgtcggtgtgagactatagttagttgcgacgggtacgtcgttaaaagaatagctatcagtccaggcctgtatgggaagccttcaggctatgctgctacgatgcaccgcgagggattcttgtgctgcaaagtgacagacacattgaacggggagagggtctcttttcccgtgtgcacgtatgtgccagctacattgtgtgaccaaatgactggcatactggcaacagatgtcagtgcggacgacgcgcaaaaactgctggttgggctcaaccagcgtatagtcgtcaacggtcgcacccagagaaacaccaataccatgaaaaattaccttttgcccgtagtggcccaggcatttgctaggtgggcaaaggaatataaggaagatcaagaagatgaaaggccactaggactacgagatagacagttagtcatggggtgttgttgggcttttagaaggcacaagataacatctatttataagcgcccggatacccaaaccatcatcaaagtgaacagcgatttccactcattcgtgctgcccaggataggcagtaacacattggagatcgggctgagaacaagaatcaggaaaatgttagaggagcacaaggagccgtcacctctcattaccgccgaggacgtacaagaagctaagtgcgcagccgatgaggctaaggaggtgcgtgaagccgaggagttgcgcgcagctctaccacctttggcagctgatgttgaggagcccactctggaagccgatgtcgacttgatgttacaagaggctggggccggctcagtggagacacctcgtggcttgataaaggttaccagctacgctggcgaggacaagatcggctcttacgctgtgctttctccgcaggctgtactcaagagtgaaaaattatcttgcatccaccctctcgctgaacaagtcatagtgataacacactctggccgaaaagggcgttatgccgtggaaccataccatggtaaagtagtggtgccagagggacatgcaatacccgtccaggactttcaagctctgagtgaaagtgccaccattgtgtacaacgaacgtgagttcgtaaacaggtacctgcaccatattgccacacatggaggagcgctgaacactgatgaagaatattacaaaactgtcaagcccagcgagcacgacggcgaatacctgtacgacatcgacaggaaacagtgcgtcaagaaagaactagtcactgggctagggctcacaggcgagctggtggatcctcccttccatgaattcgcctacgagagtctgagaacacgaccagccgctccttaccaagtaccaaccataggggtgtatggcgtgccaggatcaggcaagtctggcatcattaaaagcgcagtcaccaaaaaagatctagtggtgagcgccaagaaagaaaactgtgcagaaattataagggacgtcaagaaaatgaaagggctggacgtcaatgccagaactgtggactcagtgctcttgaatggatgcaaacaccccgtagagaccctgtatattgacgaagcttttgcttgtcatgcaggtactctcagagcgctcatagccattataagacctaaaaaggcagtgctctgcggggatcccaaacagtgcggtttttttaacatgatgtgcctgaaagtgcattttaaccacgagatttgcacacaagtcttccacaaaagcatctctcgccgttgcactaaatctgtgacttcggtcgtctcaaccttgttttacgacaaaaaaatgagaacgacgaatccgaaagagactaagattgtgattgacactaccggcagtaccaaacctaagcaggacgatctcattctcacttgtttcagagggtgggtgaagcagttgcaaatagattacaaaggcaacgaaataatgacggcagctgcctctcaagggctgacccgtaaaggtgtgtatgccgttcggtacaaggtgaatgaaaatcctctgtacgcacccacctcagaacatgtgaacgtcctactgacccgcacggaggaccgcatcgtgtggaaaacactagccggcgacccatggataaaaacactgactgccaagtaccctgggaatttcactgccacgatagaggagtggcaagcagagcatgatgccatcatgaggcacatcttggagagaccggaccctaccgacgtcttccagaataaggcaaacgtgtgttgggccaaggctttagtgccggtgctgaagaccgctggcatagacatgaccactgaacaatggaacactgtggattattttgaaacggacaaagctcactcagcagagatagtattgaaccaactatgcgtgaggttctttggactcgatctggactccggtctattttctgcacccactgttccgttatccattaggaataatcactgggataactccccgtcgcctaacatgtacgggctgaataaagaagtggtccgtcagctctctcgcaggtacccacaactgcctcgggcagttgccactggaagagtctatgacatgaacactggtacactgcgcaattatgatccgcgcataaacctagtacctgtaaacagaagactgcctcatgctttagtcctccaccataatgaacacccacagagtgacttttcttcattcgtcagcaaattgaagggcagaactgtcctggtggtcggggaaaagttgtccgtcccaggcaaaatggttgactggttgtcagaccggcctgaggctaccttcagagctcggctggatttaggcatcccaggtgatgtgcccaaatatgacataatatttgttaatgtgaggaccccatataaataccatcactatcagcagtgtgaagaccatgccattaagcttagcatgttgaccaagaaagcttgtctgcatctgaatcccggcggaacctgtgtcagcataggttatggttacgctgacagggccagcgaaagcatcattggtgctatagcgcggcagttcaagttttcccgggtatgcaaaccgaaatcctcacttgaagagacggaagttctgtttgtattcattgggtacgatcgcaaggcccgtacgcacaatccttacaagctttcatcaaccttgaccaacatttatacaggttccagactccacgaagccggatgtgcaccctcatatcatgtggtgcgaggggatattgccacggccaccgaaggagtgattataaatgctgctaacagcaaaggacaacctggcggaggggtgtgcggagcgctgtataagaaattcccggaaagcttcgatttacagccgatcgaagtaggaaaagcgcgactggtcaaaggtgcagctaaacatatcattcatgccgtaggaccaaacttcaacaaagtttcggaggttgaaggtgacaaacagttggcagaggcttatgagtccatcgctaagattgtcaacgataacaattacaagtcagtagcgattccactgttgtccaccggcatcttttccgggaacaaagatcgactaacccaatcattgaaccatttgctgacagctttagacaccactgatgcagatgtagccatatactgcagggacaagaaatgggaaatgactctcaaggaagcagtggctaggagagaagcagtggaggagatatgcatatccgacgactcttcagtgacagaacctgatgcagagctggtgagggtgcatccgaagagttctttggctggaaggaagggctacagcacaagcgatggcaaaactttctcatatttggaagggaccaagtttcaccaggcggccaaggatatagcagaaattaatgccatgtggcccgttgcaacggaggccaatgagcaggtatgcatgtatatcctcggagaaagcatgagcagtattaggtcgaaatgccccgtcgaagagtcggaagcctccacaccacctagcacgctgccttgcttgtgcatccatgccatgactccagaaagagtacagcgcctaaaagcctcacgtccagaacaaattactgtgtgctcatcctttccattgccgaagtatagaatcactggtgtgcagaagatccaatgctcccagcctatattgttctcaccgaaagtgcctgcgtatattcatccaaggaagtatctcgtggaaacaccaccggtagacgagactccggagccatcggcagagaaccaatccacagaggggacacctgaacaaccaccacttataaccgaggatgagaccaggactagaacgcctgagccgatcatcatcgaagaggaagaagaggatagcataagtttgctgtcagatggcccgacccaccaggtgctgcaagtcgaggcagacattcacgggccgccctctgtatctagctcatcctggtccattcctcatgcatccgactttgatgtggacagtttatccatacttgacaccctggagggagctagcgtgaccagcggggcaacgtcagccgagactaactcttacttcgcaaagagtatggagtttctggcgcgaccggtgcctgcgcctcgaacagtattcaggaaccctccacatcccgctccgcgcacaagaacaccgtcacttgcacccagcagggcctgctcgagaaccagcctagtttccaccccgccaggcgtgaatagggtgatcactagagaggagctcgaggcgcttaccccgtcacgcactcctagcaggtcggtctcgagaaccagcctggtctccaacccgccaggcgtaaatagggtgattacaagagaggagtttgaggcgttcgtagcacaacaacaatgacggtttgatgcgggtgcatacatcttttcctccgacaccggtcaagggcatttacaacaaaaatcagtaaggcaaacggtgctatccgaagtggtgttggagaggaccgaattggagatttcgtatgccccgcgcctcgaccaagaaaaagaagaattactacgcaagaaattacagttaaatcccacacctgctaacagaagcagataccagtccaggaaggtggagaacatgaaagccataacagctagacgtattctgcaaggcctagggcattatttgaaggcagaaggaaaagtggagtgctaccgaaccctgcatcctgttcctttgtattcatctagtgtgaaccgtgccttttcaagccccaaggtcgcagtggaagcctgtaacgccatgttgaaagagaactttccgactgtggcttcttactgtattattccagagtacgatgcctatttggacatggttgacggagcttcatgctgcttagacactgccagtttttgccctgcaaagctgcgcagctttccaaagaaacactcctatttggaacccacaatacgatcggcagtgccttcagcgatccagaacacgctccagaacgtcctggcagctgccacaaaaagaaattgcaatgtcacgcaaatgagagaattgcccgtattggattcggcggcctttaatgtggaatgcttcaagaaatatgcgtgtaataatgaatattgggaaacgtttaaagaaaaccccatcaggcttactgaagaaaacgtggtaaattacattaccaaattaaaaggaccaaaagctgctgctctttttgcgaagacacataatttgaatatgttgcaggacataccaatggacaggtttgtaatggacttaaagagagacgtgaaagtgactccaggaacaaaacatactgaagaacggcccaaggtacaggtgatccaggctgccgatccgctagcaacagcgtatctgtgcggaatccaccgagagctggttaggagattaaatgcggtcctgcttccgaacattcatacactgtttgatatgtcggctgaagactttgacgctattatagccgagcacttccagcctggggattgtgttctggaaactgacatcgcgtcgtttgataaaagtgaggacgacgccatggctctgaccgcgttaatgattctggaagacttaggtgtggacgcagagctgttgacgctgattgaggcggctttcggcgaaatttcatcaatacatttgcccactaaaactaaatttaaattcggagccatgatgaaatctggaatgttcctcacactgtttgtgaacacagtcattaacattgtaatcgcaagcagagtgttgagagaacggctaaccggatcaccatgtgcagcattcattggagatgacaatatcgtgaaaggagtcaaatcggacaaattaatggcagacaggtgcgccacctggttgaatatggaagtcaagattatagatgctgtggtgggcgagaaagcgccttatttctgtggagggtttattttgtgtgactccgtgaccggcacagcgtgccgtgtggcagaccccctaaaaaggctgtttaagcttggcaaacctctggcagcagacgatgaacatgatgatgacaggagaagggcattgcatgaagagtcaacacgctggaaccgagtgggtattctttcagagctgtgcaaggcagtagaatcaaggtatgaaaccgtaggaacttccatcatagttatggccatgactactctagctagcagtgttaaatcattcagctacctgagaggggcccctataactctctacggctaacctgaatggactacgactctagaatagtctttaattaagccaccatggcaggcatgtttcaggcgctgagcgaaggctgcaccccgtatgatattaaccagatgctgaacgtgctgggcgatcatcaggtctcaggccttgagcagcttgagagtataatcaactttgaaaaactgactgaatggaccagttctaatgttatgcctatcctgtctcctctgacaaagggcatcctgggcttcgtgtttaccctgaccgtgccttctgagagaggacttagctgcattagcgaagcggatgcgaccaccccggaaagcgcgaacctgggcgaagaaattctgagccagctgtatctttggccaagggtgacctaccattcccctagttatgcttaccaccaatttgaaagacgagccaaatataaaagacacttccccggctttggccagagcctgctgtttggctaccctgtgtacgtgttcggcgattgcgtgcagggcgattgggatgcgattcgctttcgctattgcgcgccgccgggctatgcgctgctgcgctgcaacgataccaactatagcgctctgctggctgtgggggccctagaaggacccaggaatcaggactggcttggtgtcccaagacaacttgtaactcggatgcaggctattcagaatgccggcctgtgtaccctggtggccatgctggaagagacaatcttctggctgcaagcgtttctgatggcgctgaccgatagcggcccgaaaaccaacattattgtggatagccagtatgtgatgggcattagcaaaccgagctttcaggaatttgtggattgggaaaacgtgagcccggaactgaacagcaccgatcagccgttttggcaagccggaatcctggccagaaatctggtgcctatggtggccacagtgcagggccagaacctgaagtaccagggtcagtcactagtcatctctgcttctatcattgtcttcaacctgctggaactggaaggtgattatcgagatgatggcaacgtgtgggtgcataccccgctgagcccgcgcaccctgaacgcgtgggtgaaagcggtggaagaaaaaaaaggtattccagttcacctagagctggccagtatgaccaacatggagctcatgagcagtattgtgcatcagcaggtcagaacatacggccccgtgttcatgtgtctcggcggactgcttacaatggtggctggtgctgtgtggctgacagtgcgagtgctcgagctgttccgggccgcgcagctggccaacgacgtggtcctccagatcatggagctttgtggtgcagcgtttcgccaggtgtgccataccaccgtgccgtggccgaacgcgagcctgaccccgaaatggaacaacgaaaccacccagccccagatcgccaactgcagcgtgtatgacttttttgtgtggctccattattattctgttcgagacacactttggccaagggtgacctaccatatgaacaaatatgcgtatcatatgctggaaagacgagccaaatataaaagaggaccaggacctggcgctaaatttgtggccgcctggacactgaaagccgctgctggtcctggacctggccagtacatcaaggccaacagcaagttcatcggcatcaccgaactcggacccggaccaggctgatgattcgaacggccgtatcacgcccaaacatttacagccgcggtgtcaaaaaccgcgtggacgtggttaacatccctgctgggaggatcagccgtaattattataattggcttggtgctggctactattgtggccatgtacgtgctgaccaaccagaaacataattgaatacagcagcaattggcaagctgcttacatagaactcgcggcgattggcatgccgccttaaaatttttattttattttttcttttcttttccgaatcggattttgtttttaatatttcaaaaaaaaaaaaaaaaaaaaaaaaaaaaaaaaaaaaaaaaaaaaaaaaaaaaaaaaaaaaaaaaaaaaaaaaaaaaaaaa

SEQ ID NO: 5 - DNA, 11447 bp, Venezuelan equine encephalitis virus; identical to SEQ ID NO: 3

SEQ ID NO: 6 - DNA, 7894 bp, Artificial Sequence
  Description of Artificial Sequence: Synthetic polynucleotide
atgggcggcgcatgagagaagcccagaccaattacctacccaaaatggagaaagttcacgttgacatcgaggaagacagcccattcctcagagctttgcagcggagcttcccgcagtttgaggtagaagccaagcaggtcactgataatgaccatgctaatgccagagcgttttcgcatctggcttcaaaactgatcgaaacggaggtggacccatccgacacgatccttgacattggaagtgcgcccgcccgcagaatgtattctaagcacaagtatcattgtatctgtccgatgagatgtgcggaagatccggacagattgtataagtatgcaactaagctgaagaaaaactgtaaggaaataactgataaggaattggacaagaaaatgaaggagctcgccgccgtcatgagcgaccctgacctggaaactgagactatgtgcctccacgacgacgagtcgtgtcgctacgaagggcaagtcgctgtttaccaggatgtatacgcggttgacggaccgacaagtctctatcaccaagccaataagggagttagagtcgcctactggataggctttgacaccaccccttttatgtttaagaacttggctggagcatatccatcatactctaccaactgggccgacgaaaccgtgttaacggctcgtaacataggcctatgcagctctgacgttatggagcggtcacgtagagggatgtccattcttagaaagaagtatttgaaaccatccaacaatgttctattctctgttggctcgaccatctaccacgagaagagggacttactgaggagctggcacctgccgtctgtatttcacttacgtggcaagcaaaattacacatgtcggtgtgagactatagttagttgcgacgggtacgtcgttaaaagaatagctatcagtccaggcctgtatgggaagccttcaggctatgctgctacgatgcaccgcgagggattcttgtgctgcaaagtgacagacacattgaacggggagagggtctcttttcccgtgtgcacgtatgtgccagctacattgtgtgaccaaatgactggcatactggcaacagatgtcagtgcggacgacgcgcaaaaactgctggttgggctcaaccagcgtatagtcgtcaacggtcgcacccagagaaacaccaataccatgaaaaattaccttttgcccgtagtggcccaggcatttgctaggtgggcaaaggaatataaggaagatcaagaagatgaaaggccactaggactacgagatagacagttagtcatggggtgttgttgggcttttagaaggcacaagataacatctatttataagcgcccggatacccaaaccatcatcaaagtgaacagcgatttccactcattcgtgctgcccaggataggcagtaacacattggagatcgggctgagaacaagaatcaggaaaatgttagaggagcacaaggagccgtcacctctcattaccgccgaggacgtacaagaagctaagtgcgcagccgatgaggctaaggaggtgcgtgaagccgaggagttgcgcgcagctctaccacctttggcagctgatgttgaggagcccactctggaagccgatgtcgacttgatgttacaagaggctggggccggctcagtggagacacctcgtggcttgataaaggttaccagctacgctggcgaggacaagatcggctcttacgctgtgctttctccgcaggctgtactcaagagtgaaaaattatcttgcatccaccctctcgctgaacaagtcatagtgataacacactctggccgaaaagggcgttatgccgtggaaccataccatggtaaagtagtggtgccagagggacatgcaatacccgtccaggactttcaagctctgagtgaaagtgccaccattgtgtacaacgaacgtgagttcgtaaacaggtacctgcaccatattgccacacatggaggagcgctgaacactgatgaagaatattacaaaactgtcaagcccagcgagcacgacggcgaatacctgtacgacatcgacaggaaacagtgcgtcaagaaagaactagtcactgggctagggctcacaggcgagctggtggatcctcccttccatgaattcgcctacgagagtctgagaacacgaccagccgctccttaccaagtaccaaccataggggtgtatggcgtgccaggatcaggcaagtctggcatcattaaaagcgcagtcaccaaaaaagatctagtggtgagcgccaagaaagaaaactgtgcagaaattataagggacgtcaagaaaatgaaagggctggacgtcaatgccagaactgtggactcagtgctcttgaatggatgcaaacaccccgtagagaccctgtatattgacgaagcttttgcttgtcatgcaggtactctcagagcgctcatagccattataagacctaaaaaggcagtgctctgcggggatcccaaacagtgcggtttttttaacatgatgtgcctgaaagtgcattttaaccacgagatttgcacacaagtcttccacaaaagcatctctcgccgttgcactaaatctgtgacttcggtcgtctcaaccttgttttacgacaaaaaaatgagaacgacgaatccgaaagagactaagattgtgattgacactaccggcagtaccaaacctaagcaggacgatctcattctcacttgtttcagagggtgggtgaagcagttgcaaatagattacaaaggcaacgaaataatgacggcagctgcctctcaagggctgacccgtaaaggtgtgtatgccgttcggtacaaggtgaatgaaaatcctctgtacgcacccacctcagaacatgtgaacgtcctactgacccgcacggaggaccgcatcgtgtggaaaacactagccggcgacccatggataaaaacactgactgccaagtaccctgggaatttcactgccacgatagaggagtggcaagcagagcatgatgccatcatgaggcacatcttggagagaccggaccctaccgacgtcttccagaataaggcaaacgtgtgttgggccaaggctttagtgccggtgctgaagaccgctggcatagacatgaccactgaacaatggaacactgtggattattttgaaacggacaaagctcactcagcagagatagtattgaaccaactatgcgtgaggttctttggactcgatctggactccggtctattttctgcacccactgttccgttatccattaggaataatcactgggataactccccgtcgcctaacatgtacgggctgaataaagaagtggtccgtcagctctctcgcaggtacccacaactgcctcgggcagttgccactggaagagtctatgacatgaacactggtacactgcgcaattatgatccgcgcataaacctagtacctgtaaacagaagactgcctcatgctttagtcctccaccataatgaacacccacagagtgacttttcttcattcgtcagcaaattgaagggcagaactgtcctggtggtcggggaaaagttgtccgtcccaggcaaaatggttgactggttgtcagaccggcctgaggctaccttcagagctcggctggatttaggcatcccaggtgatgtgcccaaatatgacataatatttgttaatgtgaggaccccatataaataccatcactatcagcagtgtgaagaccatgccattaagcttagcatgttgaccaagaaagcttgtctgcatctgaatcccggcggaacctgtgtcagcataggttatggttacgctgacagggccagcgaaagcatcattggtgctatagcgcggcagttcaagttttcccgggtatgcaaaccgaaatcctcacttgaagagacggaagttctgtttgtattcattgggtacgatcgcaaggcccgtacgcacaatccttacaagctttcatcaaccttgaccaacatttatacaggttccagactccacgaagccggatgtgcaccctcatatcatgtggtgcgaggggatattgccacggccaccgaaggagtgattataaatgctgctaacagcaaaggacaacctggcggaggggtgtgcggagcgctgtataagaaattcccggaaagcttcgatttacagccgatcgaagtaggaaaagcgcgactggtcaaaggtgcagctaaacatatcattcatgccgtaggaccaaacttcaacaaagtttcggaggttgaaggtgacaaacagttggcagaggcttatgagtccatcgctaagattgtcaacgataacaattacaagtcagtagcgattccactgttgtccaccggcatcttttccgggaacaaagatcgactaacccaatcattgaaccatttgctgacagctttagacaccactgatgcagatgtagccatatactgcagggacaagaaatgggaaatgactctcaaggaagcagtggctaggagagaagcagtggaggagatatgcatatccgacgactcttcagtgacagaacctgatgcagagctggtgagggtgcatccgaagagttctttggctggaaggaagggctacagcacaagcgatggcaaaactttctcatatttggaagggaccaagtttcaccaggcggccaaggatatagcagaaattaatgccatgtggcccgttgcaacggaggccaatgagcaggtatgcatgtatatcctcggagaaagcatgagcagtattaggtcgaaatgccccgtcgaagagtcggaagcctccacaccacctagcacgctgccttgcttgtgcatccatgccatgactccagaaagagtacagcgcctaaaagcctcacgtccagaacaaattactgtgtgctcatcctttccattgccgaagtatagaatcactggtgtgcagaagatccaatgctcccagcctatattgttctcaccgaaagtgcctgcgtatattcatccaaggaagtatctcgtggaaacaccaccggtagacgagactccggagccatcggcagagaaccaatccacagaggggacacctgaacaaccaccacttataaccgaggatgagaccaggactagaacgcctgagccgatcatcatcgaagaggaagaagaggatagcataagtttgctgtcagatggcccgacccaccaggtgctgcaagtcgaggcagacattcacgggccgccctctgtatctagctcatcctggtccattcctcatgcatccgactttgatgtggacagtttatccatacttgacaccctggagggagctagcgtgaccagcggggcaacgtcagccgagactaactcttacttcgcaaagagtatggagtttctggcgcgaccggtgcctgcgcctcgaacagtattcaggaaccctccacatcccgctccgcgcacaagaacaccgtcacttgcacccagcagggcctgctcgagaaccagcctagtttccaccccgccaggcgtgaatagggtgatcactagagaggagctcgaggcgcttaccccgtcacgcactcctagcaggtcggtctcgagaaccagcctggtctccaacccgccaggcgtaaatagggtgattacaagagaggagtttgaggcgttcgtagcacaacaacaatgacggtttgatgcgggtgcatacatcttttcctccgacaccggtcaagggcatttacaacaaaaatcagtaaggcaaacggtgctatccgaagtggtgttggagaggaccgaattggagatttcgtatgccccgcgcctcgaccaagaaaaagaagaattactacgcaagaaattacagttaaatcccacacctgctaacagaagcagataccagtccaggaaggtggagaacatgaaagccataacagctagacgtattctgcaaggcctagggcattatttgaaggcagaaggaaaagtggagtgctaccgaaccctgcatcctgttcctttgtattcatctagtgtgaaccgtgccttttcaagccccaaggtcgcagtggaagcctgtaacgccatgttgaaagagaactttccgactgtggcttcttactgtattattccagagtacgatgcctatttggacatggttgacggagcttcatgctgcttagacactgccagtttttgccctgcaaagctgcgcagctttccaaagaaacactcctatttggaacccacaatacgatcggcagtgccttcagcgatccagaacacgctccagaacgtcctggcagctgccacaaaaagaaattgcaatgtcacgcaaatgagagaattgcccgtattggattcggcggcctttaatgtggaatgcttcaagaaatatgcgtgtaataatgaatattgggaaacgtttaaagaaaaccccatcaggcttactgaagaaaacgtggtaaattacattaccaaattaaaaggaccaaaagctgctgctctttttgcgaagacacataatttgaatatgttgcaggacataccaatggacaggtttgtaatggacttaaagagagacgtgaaagtgactccaggaacaaaacatactgaagaacggcccaaggtacaggtgatccaggctgccgatccgctagcaacagcgtatctgtgcggaatccaccgagagctggttaggagattaaatgcggtcctgcttccgaacattcatacactgtttgatatgtcggctgaagactttgacgctattatagccgagcacttccagcctggggattgtgttctggaaactgacatcgcgtcgtttgataaaagtgaggacgacgccatggctctgaccgcgttaatgattctggaagacttaggtgtggacgcagagctgttgacgctgattgaggcggctttcggcgaaatttcatcaatacatttgcccactaaaactaaatttaaattcggagccatgatgaaatctggaatgttcctcacactgtttgtgaacacagtcattaacattgtaatcgcaagcagagtgttgagagaacggctaaccggatcaccatgtgcagcattcattggagatgacaatatcgtgaaaggagtcaaatcggacaaattaatggcagacaggtgcgccacctggttgaatatggaagtcaagattatagatgctgtggtgggcgagaaagcgccttatttctgtggagggtttattttgtgtgactccgtgaccggcacagcgtgccgtgtggcagaccccctaaaaaggctgtttaagcttggcaaacctctggcagcagacgatgaacatgatgatgacaggagaagggcattgcatgaagagtcaacacgctggaaccgagtgggtattctttcagagctgtgcaaggcagtagaatcaaggtatgaaaccgtaggaacttccatcatagttatggccatgactactctagctagcagtgttaaatcattcagctacctgagaggggcccctataactctctacggctaacctgaatggactacgactatcacgcccaaacatttacagccgcggtgtcaaaaaccgcgtggacgtggttaacatccctgctgggaggatcagccgtaattattataattggcttggtgctggctactattgtggccatgtacgtgctgaccaaccagaaacataattgaatacagcagcaattggcaagctgcttacatagaactcgcggcgattggcatgccgccttaaaatttttattttattttttcttttcttttccgaatcggattttgtttttaatatttcaaaaaaaaaaaaaaaaaaaaaaaaaaaaaaaaaaaaaaaaaaaaaaaaaaaaaaaaaaaaaaaaaaaaaaaaaaaaaaaa

SEQ ID NO: 7 - DNA, 7893 bp, Artificial Sequence
  Description of Artificial Sequence: Synthetic polynucleotide
ataggcggcgcatgagagaagcccagaccaattacctacccaaaatggagaaagttcacgttgacatcgaggaagacagcccattcctcagagctttgcagcggagcttcccgcagtttgaggtagaagccaagcaggtcactgataatgaccatgctaatgccagagcgttttcgcatctggcttcaaaactgatcgaaacggaggtggacccatccgacacgatccttgacattggaagtgcgcccgcccgcagaatgtattctaagcacaagtatcattgtatctgtccgatgagatgtgcggaagatccggacagattgtataagtatgcaactaagctgaagaaaaactgtaaggaaataactgataaggaattggacaagaaaatgaaggagctcgccgccgtcatgagcgaccctgacctggaaactgagactatgtgcctccacgacgacgagtcgtgtcgctacgaagggcaagtcgctgtttaccaggatgtatacgcggttgacggaccgacaagtctctatcaccaagccaataagggagttagagtcgcctactggataggctttgacaccaccccttttatgtttaagaacttggctggagcatatccatcatactctaccaactgggccgacgaaaccgtgttaacggctcgtaacataggcctatgcagctctgacgttatggagcggtcacgtagagggatgtccattcttagaaagaagtatttgaaaccatccaacaatgttctattctctgttggctcgaccatctaccacgagaagagggacttactgaggagctggcacctgccgtctgtatttcacttacgtggcaagcaaaattacacatgtcggtgtgagactatagttagttgcgacgggtacgtcgttaaaagaatagctatcagtccaggcctgtatgggaagccttcaggctatgctgctacgatgcaccgcgagggattcttgtgctgcaaagtgacagacacattgaacggggagagggtctcttttcccgtgtgcacgtatgtgccagctacattgtgtgaccaaatgactggcatactggcaacagatgtcagtgcggacgacgcgcaaaaactgctggttgggctcaaccagcgtatagtcgtcaacggtcgcacccagagaaacaccaataccatgaaaaattaccttttgcccgtagtggcccaggcatttgctaggtgggcaaaggaatataaggaagatcaagaagatgaaaggccactaggactacgagatagacagttagtcatggggtgttgttgggcttttagaaggcacaagataacatctatttataagcgcccggatacccaaaccatcatcaaagtgaacagcgatttccactcattcgtgctgcccaggataggcagtaacacattggagatcgggctgagaacaagaatcaggaaaatgttagaggagcacaaggagccgtcacctctcattaccgccgaggacgtacaagaagctaagtgcgcagccgatgaggctaaggaggtgcgtgaagccgaggagttgcgcgcagctctaccacctttggcagctgatgttgaggagcccactctggaagccgatgtcgacttgatgttacaagaggctggggccggctcagtggagacacctcgtggcttgataaaggttaccagctacgatggcgaggacaagatcggctcttacgctgtgctttctccgcaggctgtactcaagagtgaaaaattatcttgcatccaccctctcgctgaacaagtcatagtgataacacactctggccgaaaagggcgttatgccgtggaaccataccatggtaaagtagtggtgccagagggacatgcaatacccgtccaggactttcaagctctgagtgaaagtgccaccattgtgtacaacgaacgtgagttcgtaaacaggtacctgcaccatattgccacacatggaggagcgctgaacactgatgaagaatattacaaaactgtcaagcccagcgagcacgacggcgaatacctgtacgacatcgacaggaaacagtgcgtcaagaaagaactagtcactgggctagggctcacaggcgagctggtggatcctcccttccatgaattcgcctacgagagtctgagaacacgaccagccgctccttaccaagtaccaaccataggggtgtatggcgtgccaggatcaggcaagtctggcatcattaaaagcgcagtcaccaaaaaagatctagtggtgagcgccaagaaagaaaactgtgcagaaattataagggacgtcaagaaaatgaaagggctggacgtcaatgccagaactgtggactcagtgctcttgaatggatgcaaacaccccgtagagaccctgtatattgacgaagcttttgcttgtcatgcaggtactctcagagcgctcatagccattataagacctaaaaaggcagtgctctgcggggatcccaaacagtgcggtttttttaacatgatgtgcctgaaagtgcattttaaccacgagatttgcacacaagtcttccacaaaagcatctctcgccgttgcactaaatctgtgacttcggtcgtctcaaccttgttttacgacaaaaaaatgagaacgacgaatccgaaagagactaagattgtgattgacactaccggcagtaccaaacctaagcaggacgatctcattctcacttgtttcagagggtgggtgaagcagttgcaaatagattacaaaggcaacgaaataatgacggcagctgcctctcaagggctgacccgtaaaggtgtgtatgccgttcggtacaaggtgaatgaaaatcctctgtacgcacccacctcagaacatgtgaacgtcctactgacccgcacggaggaccgcatcgtgtggaaaacactagccggcgacccatggataaaaacactgactgccaagtaccctgggaatttcactgccacgatagaggagtggcaagcagagcatgatgccatcatgaggcacatcttggagagaccggaccctaccgacgtcttccagaataaggcaaacgtgtgttgggccaaggctttagtgccggtgctgaagaccgctggcatagacatgaccactgaacaatggaacactgtggattattttgaaacggacaaagctcactcagcagagatagtattgaaccaactatgcgtgaggttctttggactcgatctggactccggtctattttctgcacccactgttccgttatccattaggaataatcactgggataactccccgtcgcctaacatgtacgggctgaataaagaagtggtccgtcagctctctcgcaggtacccacaactgcctcgggcagttgccactggaagagtctatgacatgaacactggtacactgcgcaattatgatccgcgcataaacctagtacctgtaaacagaagactgcctcatgctttagtcctccaccataatgaacacccacagagtgacttttcttcattcgtcagcaaattgaagggcagaactgtcctggtggtcggggaaaagttgtccgtcccaggcaaaatggttgactggttgtcagaccggcctgaggctaccttcagagctcggctggatttaggcatcccaggtgatgtgcccaaatatgacataatatttgttaatgtgaggaccccatataaataccatcactatcagcagtgtgaagaccatgccattaagcttagcatgttgaccaagaaagcttgtctgcatctgaatcccggcggaacctgtgtcagcataggttatggttacgctgacagggccagcgaaagcatcattggtgctatagcgcggcagttcaagttttcccgggtatgcaaaccgaaatcctcacttgaagagacggaagttctgtttgtattcattgggtacgatcgcaaggcccgtacgcacaatccttacaagctttcatcaaccttgaccaacatttatacaggttccagactccacgaagccggatgtgcaccctcatatcatgtggtgcgaggggatattgccacggccaccgaaggagtgattataaatgctgctaacagcaaaggacaacctggcggaggggtgtgcggagcgctgtataagaaattcccggaaagcttcgatttacagccgatcgaagtaggaaaagcgcgactggtcaaaggtgcagctaaacatatcattcatgccgtaggaccaaacttcaacaaagtttcggaggttgaaggtgacaaacagttggcagaggcttatgagtccatcgctaagattgtcaacgataacaattacaagtcagtagcgattccactgttgtccaccggcatcttttccgggaacaaagatcgactaacccaatcattgaaccatttgctgacagctttagacaccactgatgcagatgtagccatatactgcagggacaagaaatgggaaatgactctcaaggaagcagtggctaggagagaagcagtggaggagatatgcatatccgacgactcttcagtgacagaacctgatgcagagctggtgagggtgcatccgaagagttctttggctggaaggaagggctacagcacaagcgatggcaaaactttctcatatttggaagggaccaagtttcaccaggcggccaaggatatagcagaaattaatgccatgtggcccgttgcaacggaggccaatgagcaggtatgcatgtatatcctcggagaaagcatgagcagtattaggtcgaaatgccccgtcgaagagtcggaagcctccacaccacctagcacgctgccttgcttgtgcatccatgccatgactccagaaagagtacagcgcctaaaagcctcacgtccagaacaaattactgtgtgctcatcctttccattgccgaagtatagaatcactggtgtgcagaagatccaatgctcccagcctatattgttctcaccgaaagtgcctgcgtatattcatccaaggaagtatctcgtggaaacaccaccggtagacgagactccggagccatcggcagagaaccaatccacagaggggacacctgaacaaccaccacttataaccgaggatgagaccaggactagaacgcctgagccgatcatcatcgaagaggaagaagaggatagcataagtttgctgtcagatggcccgacccaccaggtgctgcaagtcgaggcagacattcacgggccgccctctgtatctagctcatcctggtccattcctcatgcatccgactttgatgtggacagtttatccatacttgacaccctggagggagctagcgtgaccagcggggcaacgtcagccgagactaactcttacttcgcaaagagtatggagtttctggcgcgaccggtgcctgcgcctcgaacagtattcaggaaccctccacatcccgctccgcgcacaagaacaccgtcacttgcacccagcagggcctgctcgagaaccagcctagtttccaccccgccaggcgtgaatagggtgatcactagagaggagctcgaggcgcttaccccgtcacgcactcctagcaggtcggtctcgagaaccagcctggtctccaacccgccaggcgtaaatagggtgattacaagagaggagtttgaggcgttcgtagcacaacaacaatgacggtttgatgcgggtgcatacatcttttcctccgacaccggtcaagggcatttacaacaaaaatcagtaaggcaaacggtgctatccgaagtggtgttggagaggaccgaattggagatttcgtatgccccgcgcctcgaccaagaaaaagaagaattactacgcaagaaattacagttaaatcccacacctgctaacagaagcagataccagtccaggaaggtggagaacatgaaagccataacagctagacgtattctgcaaggcctagggcattatttgaaggcagaaggaaaagtggagtgctaccgaaccctgcatcctgttcctttgtattcatctagtgtgaaccgtgccttttcaagccccaaggtcgcagtggaagcctgtaacgccatgttgaaagagaactttccgactgtggcttcttactgtattattccagagtacgatgcctatttggacatggttgacggagcttcatgctgcttagacactgccagtttttgccctgcaaagctgcgcagctttccaaagaaacactcctatttggaacccacaatacgatcggcagtgccttcagcgatccagaacacgctccagaacgtcctggcagctgccacaaaaagaaattgcaatgtcacgcaaatgagagaattgcccgtattggattcggcggcctttaatgtggaatgcttcaagaaatatgcgtgtaataatgaatattgggaaacgtttaaagaaaaccccatcaggcttactgaagaaaacgtggtaaattacattaccaaattaaaaggaccaaaagctgctgctctttttgcgaagacacataatttgaatatgttgcaggacataccaatggacaggtttgtaatggacttaaagagagacgtgaaagtgactccaggaacaaaacatactgaagaacggcccaaggtacaggtgatccaggctgccgatccgctagcaacagcgtatctgtgcggaatccaccgagagctggttaggagattaaatgcggtcctgcttccgaacattcatacactgtttgatatgtcggctgaagactttgacgctattatagccgagcacttccagcctggggattgtgttctggaaactgacatcgcgtcgtttgataaaagtgaggacgacgccatggctctgaccgcgttaatgattctggaagacttaggtgtggacgcagagctgttgacgctgattgaggcggctttcggcgaaatttcatcaatacatttgcccactaaaactaaatttaaattcggagccatgatgaaatctggaatgttcctcacactgtttgtgaacacagtcattaacattgtaatcgcaagcagagtgttgagagaacggctaaccggatcaccatgtgcagcattcattggagatgacaatatcgtgaaaggagtcaaatcggacaaattaatggcagacaggtgcgccacctggttgaatatggaagtcaagattatagatgctgtggtgggcgagaaagcgccttatttctgtggagggtttattttgtgtgactccgtgaccggcacagcgtgccgtgtggcagaccccctaaaaaggctgtttaagcttggcaaacctctggcagcagacgatgaacatgatgatgacaggagaagggcattgcatgaagagtcaacacgctggaaccgagtgggtattctttcagagctgtgcaaggcagtagaatcaaggtatgaaaccgtaggaacttccatcatagttatggccatgactactctagctagcagtgttaaatcattcagctacctgagaggggcccctataactctctacggctaacctgaatggactacgactatcacgcccaaacatttacagccgcggtgtcaaaaaccgcgtggacgtggttaacatccctgctgggaggatcagccgtaattattataattggcttggtgctggctactattgtggccatgtacgtgctgaccaaccagaaacataattgaatacagcagcaattggcaagctgcttacatagaactcgcggcgattggcatgccgccttaaaatttttattttatttttcttttcttttccgaatcggattttgtttttaatatttcaaaaaaaaaaaaaaaaaaaaaaaaaaaaaaaaaaaaaaaaaaaaaaaaaaaaaaaaaaaaaaaaaaaaaaaaaaaaaaaa

SEQ ID NO: 8 - DNA, 7927 bp, Artificial Sequence
  Description of Artificial Sequence: Synthetic polynucleotide
taatacgactcactataggatgggcggcgcatgagagaagcccagaccaattacctacccaaaatggagaaagttcacgttgacatcgaggaagacagcccattcctcagagctttgcagcggagcttcccgcagtttgaggtagaagccaagcaggtcactgataatgaccatgctaatgccagagcgttttcgcatctggcttcaaaactgatcgaaacggaggtggacccatccgacacgatccttgacattggaagtgcgcccgcccgcagaatgtattctaagcacaagtatcattgtatctgtccgatgagatgtgcggaagatccggacagattgtataagtatgcaactaagctgaagaaaaactgtaaggaaataactgataaggaattggacaagaaaatgaaggagctcgccgccgtcatgagcgaccctgacctggaaactgagactatgtgcctccacgacgacgagtcgtgtcgctacgaagggcaagtcgctgtttaccaggatgtatacgcggttgacggaccgacaagtctctatcaccaagccaataagggagttagagtcgcctactggataggctttgacaccaccccttttatgtttaagaacttggctggagcatatccatcatactctaccaactgggccgacgaaaccgtgttaacggctcgtaacataggcctatgcagctctgacgttatggagcggtcacgtagagggatgtccattcttagaaagaagtatttgaaaccatccaacaatgttctattctctgttggctcgaccatctaccacgagaagagggacttactgaggagctggcacctgccgtctgtatttcacttacgtggcaagcaaaattacacatgtcggtgtgagactatagttagttgcgacgggtacgtcgttaaaagaatagctatcagtccaggcctgtatgggaagccttcaggctatgctgctacgatgcaccgcgagggattcttgtgctgcaaagtgacagacacattgaacggggagagggtctcttttcccgtgtgcacgtatgtgccagctacattgtgtgaccaaatgactggcatactggcaacagatgtcagtgcggacgacgcgcaaaaactgctggttgggctcaaccagcgtatagtcgtcaacggtcgcacccagagaaacaccaataccatgaaaaattaccttttgcccgtagtggcccaggcatttgctaggtgggcaaaggaatataaggaagatcaagaagatgaaaggccactaggactacgagatagacagttagtcatggggtgttgttgggcttttagaaggcacaagataacatctatttataagcgcccggatacccaaaccatcatcaaagtgaacagcgatttccactcattcgtgctgcccaggataggcagtaacacattggagatcgggctgagaacaagaatcaggaaaatgttagaggagcacaaggagccgtcacctctcattaccgccgaggacgtacaagaagctaagtgcgcagccgatgaggctaaggaggtgcgtgaagccgaggagttgcgcgcagctctaccacctttggcagctgatgttgaggagcccactctggaagccgatgtcgacttgatgttacaagaggctggggccggctcagtggagacacctcgtggcttgataaaggttaccagctacgctggcgaggacaagatcggctcttacgctgtgctttctccgcaggctgtactcaagagtgaaaaattatcttgcatccaccctctcgctgaacaagtcatagtgataacacactctggccgaaaagggcgttatgccgtggaaccataccatggtaaagtagtggtgccagagggacatgcaatacccgtccaggactttcaagctctgagtgaaagtgccaccattgtgtacaacgaacgtgagttcgtaaacaggtacctgcaccatattgccacacatggaggagcgctgaacactgatgaagaatattacaaaactgtcaagcccagcgagcacgacggcgaatacctgtacgacatcgacaggaaacagtgcgtcaagaaagaactagtcactgggctagggctcacaggcgagctggtggatcctcccttccatgaattcgcctacgagagtctgagaacacgaccagccgctccttaccaagtaccaaccataggggtgtatggcgtgccaggatcaggcaagtctggcatcattaaaagcgcagtcaccaaaaaagatctagtggtgagcgccaagaaagaaaactgtgcagaaattataagggacgtcaagaaaatgaaagggctggacgtcaatgccagaactgtggactcagtgctcttgaatggatgcaaacaccccgtagagaccctgtatattgacgaagcttttgcttgtcatgcaggtactctcagagcgctcatagccattataagacctaaaaaggcagtgctctgcggggatcccaaacagtgcggtttttttaacatgatgtgcctgaaagtgcattttaaccacgagatttgcacacaagtcttccacaaaagcatctctcgccgttgcactaaatctgtgacttcggtcgtctcaaccttgttttacgacaaaaaaatgagaacgacgaatccgaaagagactaagattgtgattgacactaccggcagtaccaaacctaagcaggacgatctcattctcacttgtttcagagggtgggtgaagcagttgcaaatagattacaaaggcaacgaaataatgacggcagctgcctctcaagggctgacccgtaaaggtgtgtatgccgttcggtacaaggtgaatgaaaatcctctgtacgcacccacctcagaacatgtgaacgtcctactgacccgcacggaggaccgcatcgtgtggaaaacactagccggcgacccatggataaaaacactgactgccaagtaccctgggaatttcactgccacgatagaggagtggcaagcagagcatgatgccatcatgaggcacatcttggagagaccggaccctaccgacgtcttccagaataaggcaaacgtgtgttgggccaaggctttagtgccggtgctgaagaccgctggcatagacatgaccactgaacaatggaacactgtggattattttgaaacggacaaagctcactcagcagagatagtattgaaccaactatgcgtgaggttctttggactcgatctggactccggtctattttctgcacccactgttccgttatccattaggaataatcactgggataactccccgtcgcctaacatgtacgggctgaataaagaagtggtccgtcagctctctcgcaggtacccacaactgcctcgggcagttgccactggaagagtctatgacatgaacactggtacactgcgcaattatgatccgcgcataaacctagtacctgtaaacagaagactgcctcatgctttagtcctccaccataatgaacacccacagagtgacttttcttcattcgtcagcaaattgaagggcagaactgtcctggtggtcggggaaaagttgtccgtcccaggcaaaatggttgactggttgtcagaccggcctgaggctaccttcagagctcggctggatttaggcatcccaggtgatgtgcccaaatatgacataatatttgttaatgtgaggaccccatataaataccatcactatcagcagtgtgaagaccatgccattaagcttagcatgttgaccaagaaagcttgtctgcatctgaatcccggcggaacctgtgtcagcataggttatggttacgctgacagggccagcgaaagcatcattggtgctatagcgcggcagttcaagttttcccgggtatgcaaaccgaaatcctcacttgaagagacggaagttctgtttgtattcattgggtacgatcgcaaggcccgtacgcacaatccttacaagctttcatcaaccttgaccaacatttatacaggttccagactccacgaagccggatgtgcaccctcatatcatgtggtgcgaggggatattgccacggccaccgaaggagtgattataaatgctgctaacagcaaaggacaacctggcggaggggtgtgcggagcgctgtataagaaattcccggaaagcttcgatttacagccgatcgaagtaggaaaagcgcgactggtcaaaggtgcagctaaacatatcattcatgccgtaggaccaaacttcaacaaagtttcggaggttgaaggtgacaaacagttggcagaggcttatgagtccatcgctaagattgtcaacgataacaattacaagtcagtagcgattccactgttgtccaccggcatcttttccgggaacaaagatcgactaacccaatcattgaaccatttgctgacagctttagacaccactgatgcagatgtagccatatactgcagggacaagaaatgggaaatgactctcaaggaagcagtggctaggagagaagcagtggaggagatatgcatatccgacgactcttcagtgacagaacctgatgcagagctggtgagggtgcatccgaagagttctttggctggaaggaagggctacagcacaagcgatggcaaaactttctcatatttggaagggaccaagtttcaccaggcggccaaggatatagcagaaattaatgccatgtggcccgttgcaacggaggccaatgagcaggtatgcatgtatatcctcggagaaagcatgagcagtattaggtcgaaatgccccgtcgaagagtcggaagcctccacaccacctagcacgctgccttgcttgtgcatccatgccatgactccagaaagagtacagcgcctaaaagcctcacgtccagaacaaattactgtgtgctcatcctttccattgccgaagtatagaatcactggtgtgcagaagatccaatgctcccagcctatattgttctcaccgaaagtgcctgcgtatattcatccaaggaagtatctcgtggaaacaccaccggtagacgagactccggagccatcggcagagaaccaatccacagaggggacacctgaacaaccaccacttataaccgaggatgagaccaggactagaacgcctgagccgatcatcatcgaagaggaagaagaggatagcataagtttgctgtcagatggcccgacccaccaggtgctgcaagtcgaggcagacattcacgggccgccctctgtatctagctcatcctggtccattcctcatgcatccgactttgatgtggacagtttatccatacttgacaccctggagggagctagcgtgaccagcggggcaacgtcagccgagactaactcttacttcgcaaagagtatggagtttctggcgcgaccggtgcctgcgcctcgaacagtattcaggaaccctccacatcccgctccgcgcacaagaacaccgtcacttgcacccagcagggcctgctcgagaaccagcctagtttccaccccgccaggcgtgaatagggtgatcactagagaggagctcgaggcgcttaccccgtcacgcactcctagcaggtcggtctcgagaaccagcctggtctccaacccgccaggcgtaaatagggtgattacaagagaggagtttgaggcgttcgtagcacaacaacaatgacggtttgatgcgggtgcatacatcttttcctccgacaccggtcaagggcatttacaacaaaaatcagtaaggcaaacggtgctatccgaagtggtgttggagaggaccgaattggagatttcgtatgccccgcgcctcgaccaagaaaaagaagaattactacgcaagaaattacagttaaatcccacacctgctaacagaagcagataccagtccaggaaggtggagaacatgaaagccataacagctagacgtattctgcaaggcctagggcattatttgaaggcagaaggaaaagtggagtgctaccgaaccctgcatcctgttcctttgtattcatctagtgtgaaccgtgccttttcaagccccaaggtcgcagtggaagcctgtaacgccatgttgaaagagaactttccgactgtggcttcttactgtattattccagagtacgatgcctatttggacatggttgacggagcttcatgctgcttagacactgccagtttttgccctgcaaagctgcgcagctttccaaagaaacactcctatttggaacccacaatacgatcggcagtgccttcagcgatccagaacacgctccagaacgtcctggcagctgccacaaaaagaaattgcaatgtcacgcaaatgagagaattgcccgtattggattcggcggcctttaatgtggaatgcttcaagaaatatgcgtgtaataatgaatattgggaaacgtttaaagaaaaccccatcaggcttactgaagaaaacgtggtaaattacattaccaaattaaaaggaccaaaagctgctgctctttttgcgaagacacataatttgaatatgttgcaggacataccaatggacaggtttgtaatggacttaaagagagacgtgaaagtgactccaggaacaaaacatactgaagaacggcccaaggtacaggtgatccaggctgccgatccgctagcaacagcgtatctgtgcggaatccaccgagagctggttaggagattaaatgcggtcctgcttccgaacattcatacactgtttgatatgtcggctgaagactttgacgctattatagccgagcacttccagcctggggattgtgttctggaaactgacatcgcgtcgtttgataaaagtgaggacgacgccatggctctgaccgcgttaatgattctggaagacttaggtgtggacgcagagctgttgacgctgattgaggcggctttcggcgaaatttcatcaatacatttgcccactaaaactaaatttaaattcggagccatgatgaaatctggaatgttcctcacactgtttgtgaacacagtcattaacattgtaatcgcaagcagagtgttgagagaacggctaaccggatcaccatgtgcagcattcattggagatgacaatatcgtgaaaggagtcaaatcggacaaattaatggcagacaggtgcgccacctggttgaatatggaagtcaagattatagatgctgtggtgggcgagaaagcgccttatttctgtggagggtttattttgtgtgactccgtgaccggcacagcgtgccgtgtggcagaccccctaaaaaggctgtttaagcttggcaaacctctggcagcagacgatgaacatgatgatgacaggagaagggcattgcatgaagagtcaacacgctggaaccgagtgggtattctttcagagctgtgcaaggcagtagaatcaaggtatgaaaccgtaggaacttccatcatagttatggccatgactactctagctagcagtgttaaatcattcagctacctgagaggggcccctataactctctacggctaacctgaatggactacgactatcacgcccaaacatttacagccgcggtgtcaaaaaccgcgtggacgtggttaacatccctgctgggaggatcagccgtaattattataattggcttggtgctggctactattgtggccatgtacgtgctgaccaaccagaaacataattgaatacagcagcaattggcaagctgcttacatagaactcgcggcgattggcatgccgccttaaaatttttattttattttttcttttcttttccgaatcggattttgtttttaatatttcaaaaaaaaaaaaaaaaaaaaaaaaaaaaaaaaaaaaaaaaaaaaaaaaaaaaaaaaaaaaaaaaaaaaaaaaaaaaaaaatacgtagtttaaac

SEQ ID NO: 9 - DNA, 7926 bp, Artificial Sequence
  Description of Artificial Sequence: Synthetic polynucleotide
taatacgactcactataggataggcggcgcatgagagaagcccagaccaattacctacccaaaatggagaaagttcacgttgacatcgaggaagacagcccattcctcagagctttgcagcggagcttcccgcagtttgaggtagaagccaagcaggtcactgataatgaccatgctaatgccagagcgttttcgcatctggcttcaaaactgatcgaaacggaggtggacccatccgacacgatccttgacattggaagtgcgcccgcccgcagaatgtattctaagcacaagtatcattgtatctgtccgatgagatgtgcggaagatccggacagattgtataagtatgcaactaagctgaagaaaaactgtaaggaaataactgataaggaattggacaagaaaatgaaggagctcgccgccgtcatgagcgaccctgacctggaaactgagactatgtgcctccacgacgacgagtcgtgtcgctacgaagggcaagtcgctgtttaccaggatgtatacgcggttgacggaccgacaagtctctatcaccaagccaataagggagttagagtcgcctactggataggctttgacaccaccccttttatgtttaagaacttggctggagcatatccatcatactctaccaactgggccgacgaaaccgtgttaacggctcgtaacataggcctatgcagctctgacgttatggagcggtcacgtagagggatgtccattcttagaaagaagtatttgaaaccatccaacaatgttctattctctgttggctcgaccatctaccacgagaagagggacttactgaggagctggcacctgccgtctgtatttcacttacgtggcaagcaaaattacacatgtcggtgtgagactatagttagttgcgacgggtacgtcgttaaaagaatagctatcagtccaggcctgtatgggaagccttcaggctatgctgctacgatgcaccgcgagggattcttgtgctgcaaagtgacagacacattgaacggggagagggtctcttttcccgtgtgcacgtatgtgccagctacattgtgtgaccaaatgactggcatactggcaacagatgtcagtgcggacgacgcgcaaaaactgctggttgggctcaaccagcgtatagtcgtcaacggtcgcacccagagaaacaccaataccatgaaaaattaccttttgcccgtagtggcccaggcatttgctaggtgggcaaaggaatataaggaagatcaagaagatgaaaggccactaggactacgagatagacagttagtcatggggtgttgttgggcttttagaaggcacaagataacatctatttataagcgcccggatacccaaaccatcatcaaagtgaacagcgatttccactcattcgtgctgcccaggataggcagtaacacattggagatcgggctgagaacaagaatcaggaaaatgttagaggagcacaaggagccgtcacctctcattaccgccgaggacgtacaagaagctaagtgcgcagccgatgaggctaaggaggtgcgtgaagccgaggagttgcgcgcagctctaccacctttggcagctgatgttgaggagcccactctggaagccgatgtcgacttgatgttacaagaggctggggccggctcagtggagacacctcgtggcttgataaaggttaccagctacgatggcgaggacaagatcggctcttacgctgtgctttctccgcaggctgtactcaagagtgaaaaattatcttgcatccaccctctcgctgaacaagtcatagtgataacacactctggccgaaaagggcgttatgccgtggaaccataccatggtaaagtagtggtgccagagggacatgcaatacccgtccaggactttcaagctctgagtgaaagtgccaccattgtgtacaacgaacgtgagttcgtaaacaggtacctgcaccatattgccacacatggaggagcgctgaacactgatgaagaatattacaaaactgtcaagcccagcgagcacgacggcgaatacctgtacgacatcgacaggaaacagtgcgtcaagaaagaactagtcactgggctagggctcacaggcgagctggtggatcctcccttccatgaattcgcctacgagagtctgagaacacgaccagccgctccttaccaagtaccaaccataggggtgtatggcgtgccaggatcaggcaagtctggcatcattaaaagcgcagtcaccaaaaaagatctagtggtgagcgccaagaaagaaaactgtgcagaaattataagggacgtcaagaaaatgaaagggctggacgtcaatgccagaactgtggactcagtgctcttgaatggatgcaaacaccccgtagagaccctgtatattgacgaagcttttgcttgtcatgcaggtactctcagagcgctcatagccattataagacctaaaaaggcagtgctctgcggggatcccaaacagtgcggtttttttaacatgatgtgcctgaaagtgcattttaaccacgagatttgcacacaagtcttccacaaaagcatctctcgccgttgcactaaatctgtgacttcggtcgtctcaaccttgttttacgacaaaaaaatgagaacgacgaatccgaaagagactaagattgtgattgacactaccggcagtaccaaacctaagcaggacgatctcattctcacttgtttcagagggtgggtgaagcagttgcaaatagattacaaaggcaacgaaataatgacggcagctgcctctcaagggctgacccgtaaaggtgtgtatgccgttcggtacaaggtgaatgaaaatcctctgtacgcacccacctcagaacatgtgaacgtcctactgacccgcacggaggaccgcatcgtgtggaaaacactagccggcgacccatggataaaaacactgactgccaagtaccctgggaatttcactgccacgatagaggagtggcaagcagagcatgatgccatcatgaggcacatcttggagagaccggaccctaccgacgtcttccagaataaggcaaacgtgtgttgggccaaggctttagtgccggtgctgaagaccgctggcatagacatgaccactgaacaatggaacactgtggattattttgaaacggacaaagctcactcagcagagatagtattgaaccaactatgcgtgaggttctttggactcgatctggactccggtctattttctgcacccactgttccgttatccattaggaataatcactgggataactccccgtcgcctaacatgtacgggctgaataaagaagtggtccgtcagctctctcgcaggtacccacaactgcctcgggcagttgccactggaagagtctatgacatgaacactggtacactgcgcaattatgatccgcgcataaacctagtacctgtaaacagaagactgcctcatgctttagtcctccaccataatgaacacccacagagtgacttttcttcattcgtcagcaaattgaagggcagaactgtcctggtggtcggggaaaagttgtccgtcccaggcaaaatggttgactggttgtcagaccggcctgaggctaccttcagagctcggctggatttaggcatcccaggtgatgtgcccaaatatgacataatatttgttaatgtgaggaccccatataaataccatcactatcagcagtgtgaagaccatgccattaagcttagcatgttgaccaagaaagcttgtctgcatctgaatcccggcggaacctgtgtcagcataggttatggttacgctgacagggccagcgaaagcatcattggtgctatagcgcggcagttcaagttttcccgggtatgcaaaccgaaatcctcacttgaagagacggaagttctgtttgtattcattgggtacgatcgcaaggcccgtacgcacaatccttacaagctttcatcaaccttgaccaacatttatacaggttccagactccacgaagccggatgtgcaccctcatatcatgtggtgcgaggggatattgccacggccaccgaaggagtgattataaatgctgctaacagcaaaggacaacctggcggaggggtgtgcggagcgctgtataagaaattcccggaaagcttcgatttacagccgatcgaagtaggaaaagcgcgactggtcaaaggtgcagctaaacatatcattcatgccgtaggaccaaacttcaacaaagtttcggaggttgaaggtgacaaacagttggcagaggcttatgagtccatcgctaagattgtcaacgataacaattacaagtcagtagcgattccactgttgtccaccggcatcttttccgggaacaaagatcgactaacccaatcattgaaccatttgctgacagctttagacaccactgatgcagatgtagccatatactgcagggacaagaaatgggaaatgactctcaaggaagcagtggctaggagagaagcagtggaggagatatgcatatccgacgactcttcagtgacagaacctgatgcagagctggtgagggtgcatccgaagagttctttggctggaaggaagggctacagcacaagcgatggcaaaactttctcatatttggaagggaccaagtttcaccaggcggccaaggatatagcagaaattaatgccatgtggcccgttgcaacggaggccaatgagcaggtatgcatgtatatcctcggagaaagcatgagcagtattaggtcgaaatgccccgtcgaagagtcggaagcctccacaccacctagcacgctgccttgcttgtgcatccatgccatgactccagaaagagtacagcgcctaaaagcctcacgtccagaacaaattactgtgtgctcatcctttccattgccgaagtatagaatcactggtgtgcagaagatccaatgctcccagcctatattgttctcaccgaaagtgcctgcgtatattcatccaaggaagtatctcgtggaaacaccaccggtagacgagactccggagccatcggcagagaaccaatccacagaggggacacctgaacaaccaccacttataaccgaggatgagaccaggactagaacgcctgagccgatcatcatcgaagaggaagaagaggatagcataagtttgctgtcagatggcccgacccaccaggtgctgcaagtcgaggcagacattcacgggccgccctctgtatctagctcatcctggtccattcctcatgcatccgactttgatgtggacagtttatccatacttgacaccctggagggagctagcgtgaccagcggggcaacgtcagccgagactaactcttacttcgcaaagagtatggagtttctggcgcgaccggtgcctgcgcctcgaacagtattcaggaaccctccacatcccgctccgcgcacaagaacaccgtcacttgcacccagcagggcctgctcgagaaccagcctagtttccaccccgccaggcgtgaatagggtgatcactagagaggagctcgaggcgcttaccccgtcacgcactcctagcaggtcggtctcgagaaccagcctggtctccaacccgccaggcgtaaatagggtgattacaagagaggagtttgaggcgttcgtagcacaacaacaatgacggtttgatgcgggtgcatacatcttttcctccgacaccggtcaagggcatttacaacaaaaatcagtaaggcaaacggtgctatccgaagtggtgttggagaggaccgaattggagatttcgtatgccccgcgcctcgaccaagaaaaagaagaattactacgcaagaaattacagttaaatcccacacctgctaacagaagcagataccagtccaggaaggtggagaacatgaaagccataacagctagacgtattctgcaaggcctagggcattatttgaaggcagaaggaaaagtggagtgctaccgaaccctgcatcctgttcctttgtattcatctagtgtgaaccgtgccttttcaagccccaaggtcgcagtggaagcctgtaacgccatgttgaaagagaactttccgactgtggcttcttactgtattattccagagtacgatgcctatttggacatggttgacggagcttcatgctgcttagacactgccagtttttgccctgcaaagctgcgcagctttccaaagaaacactcctatttggaacccacaatacgatcggcagtgccttcagcgatccagaacacgctccagaacgtcctggcagctgccacaaaaagaaattgcaatgtcacgcaaatgagagaattgcccgtattggattcggcggcctttaatgtggaatgcttcaagaaatatgcgtgtaataatgaatattgggaaacgtttaaagaaaaccccatcaggcttactgaagaaaacgtggtaaattacattaccaaattaaaaggaccaaaagctgctgctctttttgcgaagacacataatttgaatatgttgcaggacataccaatggacaggtttgtaatggacttaaagagagacgtgaaagtgactccaggaacaaaacatactgaagaacggcccaaggtacaggtgatccaggctgccgatccgctagcaacagcgtatctgtgcggaatccaccgagagctggttaggagattaaatgcggtcctgcttccgaacattcatacactgtttgatatgtcggctgaagactttgacgctattatagccgagcacttccagcctggggattgtgttctggaaactgacatcgcgtcgtttgataaaagtgaggacgacgccatggctctgaccgcgttaatgattctggaagacttaggtgtggacgcagagctgttgacgctgattgaggcggctttcggcgaaatttcatcaatacatttgcccactaaaactaaatttaaattcggagccatgatgaaatctggaatgttcctcacactgtttgtgaacacagtcattaacattgtaatcgcaagcagagtgttgagagaacggctaaccggatcaccatgtgcagcattcattggagatgacaatatcgtgaaaggagtcaaatcggacaaattaatggcagacaggtgcgccacctggttgaatatggaagtcaagattatagatgctgtggtgggcgagaaagcgccttatttctgtggagggtttattttgtgtgactccgtgaccggcacagcgtgccgtgtggcagaccccctaaaaaggctgtttaagcttggcaaacctctggcagcagacgatgaacatgatgatgacaggagaagggcattgcatgaagagtcaacacgctggaaccgagtgggtattctttcagagctgtgcaaggcagtagaatcaaggtatgaaaccgtaggaacttccatcatagttatggccatgactactctagctagcagtgttaaatcattcagctacctgagaggggcccctataactctctacggctaacctgaatggactacgactatcacgcccaaacatttacagccgcggtgtcaaaaaccgcgtggacgtggttaacatccctgctgggaggatcagccgtaattattataattggcttggtgctggctactattgtggccatgtacgtgctgaccaaccagaaacataattgaatacagcagcaattggcaagctgcttacatagaactcgcggcgattggcatgccgccttaaaatttttattttatttttcttttcttttccgaatcggattttgtttttaatatttcaaaaaaaaaaaaaaaaaaaaaaaaaaaaaaaaaaaaaaaaaaaaaaaaaaaaaaaaaaaaaaaaaaaaaaaaaaaaaaaatacgtagtttaaac

SEQ ID NO: 10 - DNA, 36519 bp, Artificial Sequence
  Description of Artificial Sequence: Synthetic polynucleotide
ccatcttcaataatatacctcaaactttttgtgcgcgttaatatgcaaatgaggcgtttgaatttggggaggaagggcggtgattggtcgagggatgagcgaccgttaggggcggggcgagtgacgttttgatgacgtggttgcgaggaggagccagtttgcaagttctcgtgggaaaagtgacgtcaaacgaggtgtggtttgaacacggaaatactcaattttcccgcgctctctgacaggaaatgaggtgtttctgggcggatgcaagtgaaaacgggccattttcgcgcgaaaactgaatgaggaagtgaaaatctgagtaatttcgcgtttatggcagggaggagtatttgccgagggccgagtagactttgaccgattacgtgggggtttcgattaccgtgtttttcacctaaatttccgcgtacggtgtcaaagtccggtgtttttacgtaggtgtcagctgatcgccagggtatttaaacctgcgctctccagtcaagaggccactcttgagtgccagcgagaagagttttctcctccgcgccgcgagtcagatctacactttgaaagatgaggcacctgagagacctgcccgatgagaaaatcatcatcgcttccgggaacgagattctggaactggtggtaaatgccatgatgggcgacgaccctccggagccccccaccccatttgagacaccttcgctgcacgatttgtatgatctggaggtggatgtgcccgaggacgatcccaatgaggaggcggtaaatgatttttttagcgatgccgcgctgctagctgccgaggaggcttcgagctctagctcagacagcgactcttcactgcatacccctagacccggcagaggtgagaaaaagatccccgagcttaaaggggaagagatggacttgcgctgctatgaggaatgcttgcccccgagcgatgatgaggacgagcaggcgatccagaacgcagcgagccagggagtgcaagccgccagcgagagctttgcgctggactgcccgcctctgcccggacacggctgtaagtcttgtgaatttcatcgcatgaatactggagataaagctgtgttgtgtgcactttgctatatgagagcttacaaccattgtgtttacagtaagtgtgattaagttgaactttagagggaggcagagagcagggtgactgggcgatgactggtttatttatgtatatatgttctttatataggtcccgtctctgacgcagatgatgagacccccactacaaagtccacttcgtcacccccagaaattggcacatctccacctgagaatattgttagaccagttcctgttagagccactgggaggagagcagctgtggaatgtttggatgacttgctacagggtggggttgaacctttggacttgtgtacccggaaacgccccaggcactaagtgccacacatgtgtgtttacttgaggtgatgtcagtatttatagggtgtggagtgcaataaaaaatgtgttgactttaagtgcgtggtttatgactcaggggtggggactgtgagtatataagcaggtgcagacctgtgtggttagctcagagcggcatggagatttggacggtcttggaagactttcacaagactagacagctgctagagaacgcctcgaacggagtctcttacctgtggagattctgcttcggtggcgacctagctaggctagtctacagggccaaacaggattatagtgaacaatttgaggttattttgagagagtgttctggtctttttgacgctcttaacttgggccatcagtctcactttaaccagaggatttcgagagcccttgattttactactcctggcagaaccactgcagcagtagccttttttgcttttattcttgacaaatggagtcaagaaacccatttcagcagggattaccagctggatttcttagcagtagctttgtggagaacatggaagtgccagcgcctgaatgcaatctccggctacttgccggtacagccgctagacactctgaggatcctgaatctccaggagagtcccagggcacgccaacgtcgccagcagcagcagcaggaggaggatcaagaagagaacccgagagccggcctggaccctccggcggaggaggaggagtagctgacctgtttcctgaactgcgccgggtgctgactaggtcttcgagtggtcgggagagggggattaagcgggagaggcatgatgagactaatcacagaactgaactgactgtgggtctgatgagtcgcaagcgcccagaaacagtgtggtggcatgaggtgcagtcgactggcacagatgaggtgtcggtgatgcatgagaggttttctctagaacaagtcaagacttgttggttagagcctgaggatgattgggaggtagccatcaggaattatgccaagctggctctgaggccagacaagaagtacaagattactaagctgataaatatcagaaatgcctgctacatctcagggaatggggctgaagtggagatctgtctccaggaaagggtggctttcagatgctgcatgatgaatatgtacccgggagtggtgggcatggatggggttacctttatgaacatgaggttcaggggagatgggtataatggcacggtctttatggccaataccaagctgacagtccatggctgctccttctttgggtttaataacacctgcatcgaggcctggggtcaggtcggtgtgaggggctgcagtttttcagccaactggatgggggtcgtgggcaggaccaagagtatgctgtccgtgaagaaatgcttgtttgagaggtgccacctgggggtgatgagcgagggcgaagccagaatccgccactgcgcctctaccgagacgggctgctttgtgctgtgcaagggcaatgctaagatcaagcataatatgatctgtggagcctcggacgagcgcggctaccagatgctgacctgcgccggcgggaacagccatatgctggccaccgtacatgtggcttcccatgctcgcaagccctggcccgagttcgagcacaatgtcatgaccaggtgcaatatgcatctggggtcccgccgaggcatgttcatgccctaccagtgcaacctgaattatgtgaaggtgctgctggagcccgatgccatgtccagagtgagcctgacgggggtgtttgacatgaatgtggaggtgtggaagattctgagatatgatgaatccaagaccaggtgccgagcctgcgagtgcggagggaagcatgccaggttccagcccgtgtgtgtggatgtgacggaggacctgcgacccgatcatttggtgttgccctgcaccgggacggagttcggttccagcggggaagaatctgactagagtgagtagtgttctggggcgggggaggacctgcatgagggccagaataactgaaatctgtgcttttctgtgtgttgcagcagcatgagcggaagcggctcctttgagggaggggtattcagcccttatctgacggggcgtctcccctcctgggcgggagtgcgtcagaatgtgatgggatccacggtggacggccggcccgtgcagcccgcgaactcttcaaccctgacctatgcaaccctgagctcttcgtcgttggacgcagctgccgccgcagctgctgcatctgccgccagcgccgtgcgcggaatggccatgggcgccggctactacggcactctggtggccaactcgagttccaccaataatcccgccagcctgaacgaggagaagctgttgctgctgatggcccagctcgaggccttgacccagcgcctgggcgagctgacccagcaggtggctcagctgcaggagcagacgcgggccgcggttgccacggtgaaatccaaataaaaaatgaatcaataaataaacggagacggttgttgattttaacacagagtctgaatctttatttgatttttcgcgcgcggtaggccctggaccaccggtctcgatcattgagcacccggtggatcttttccaggacccggtagaggtgggcttggatgttgaggtacatgggcatgagcccgtcccgggggtggaggtagctccattgcagggcctcgtgctcgggggtggtgttgtaaatcacccagtcatagcaggggcgcagggcatggtgttgcacaatatctttgaggaggagactgatggccacgggcagccctttggtgtaggtgtttacaaatctgttgagctgggagggatgcatgcggggggagatgaggtgcatcttggcctggatcttgagattggcgatgttaccgcccagatcccgcctggggttcatgttgtgcaggaccaccagcacggtgtatccggtgcacttggggaatttatcatgcaacttggaagggaaggcgtgaaagaatttggcgacgcctttgtgcccgcccaggttttccatgcactcatccatgatgatggcgatgggcccgtgggcggcggcctgggcaaagacgtttcgggggtcggacacatcatagttgtggtcctgggtgaggtcatcataggccattttaatgaatttggggcggagggtgccggactgggggacaaaggtaccctcgatcccgggggcgtagttcccctcacagatctgcatctcccaggctttgagctcggagggggggatcatgtccacctgcggggcgataaagaacacggtttccggggcgggggagatgagctgggccgaaagcaagttccggagcagctgggacttgccgcagccggtggggccgtagatgaccccgatgaccggctgcaggtggtagttgagggagagacagctgccgtcctcccggaggaggggggccacctcgttcatcatctcgcgcacgtgcatgttctcgcgcaccagttccgccaggaggcgctctccccccagggataggagctcctggagcgaggcgaagtttttcagcggcttgagtccgtcggccatgggcattttggagagggtttgttgcaagagttccaggcggtcccagagctcggtgatgtgctctacggcatctcgatccagcagacctcctcgtttcgcgggttgggacggctgcgggagtagggcaccagacgatgggcgtccagcgcagccagggtccggtccttccagggtcgcagcgtccgcgtcagggtggtctccgtcacggtgaaggggtgcgcgccgggctgggcgcttgcgagggtgcgcttcaggctcatccggctggtcgaaaaccgctcccgatcggcgccctgcgcgtcggccaggtagcaattgaccatgagttcgtagttgagcgcctcggccgcgtggcctttggcgcggagcttacctttggaagtctgcccgcaggcgggacagaggagggacttgagggcgtagagcttgggggcgaggaagacggactcgggggcgtaggcgtccgcgccgcagtgggcgcagacggtctcgcactccacgagccaggtgaggtcgggctggtcggggtcaaaaaccagtttcccgccgttctttttgatgcgtttcttacctttggtctccatgagctcgtgtccccgctgggtgacaaagaggctgtccgtgtccccgtagaccgactttatgggccggtcctcgagcggtgtgccgcggtcctcctcgtagaggaaccccgcccactccgagacgaaagcccgggtccaggccagcacgaaggaggccacgtgggacgggtagcggtcgttgtccaccagcgggtccaccttttccagggtatgcaaacacatgtccccctcgtccacatccaggaaggtgattggcttgtaagtgtaggccacgtgaccgggggtcccggccgggggggtataaaagggtgcgggtccctgctcgtcctcactgtcttccggatcgctgtccaggagcgccagctgttggggtaggtattccctctcgaaggcgggcatgacctcggcactcaggttgtcagtttctagaaacgaggaggatttgatattgacggtgccggcggagatgcctttcaagagcccctcgtccatctggtcagaaaagacgatctttttgttgtcgagcttggtggcgaaggagccgtagagggcgttggagaggagcttggcgatggagcgcatggtctggtttttttccttgtcggcgcgctccttggcggcgatgttgagctgcacgtactcgcgcgccacgcacttccattcggggaagacggtggtcagctcgtcgggcacgattctgacctgccagccccgattatgcagggtgatgaggtccacactggtggccacctcgccgcgcaggggctcattagtccagcagaggcgtccgcccttgcgcgagcagaaggggggcagggggtccagcatgacctcgtcgggggggtcggcatcgatggtgaagatgccgggcaggaggtcggggtcaaagtagctgatggaagtggccagatcgtccagggcagcttgccattcgcgcacggccagcgcgcgctcgtagggactgaggggcgtgccccagggcatgggatgggtaagcgcggaggcgtacatgccgcagatgtcgtagacgtagaggggctcctcgaggatgccgatgtaggtggggtagcagcgccccccgcggatgctggcgcgcacgtagtcatacagctcgtgcgagggggcgaggagccccgggcccaggttggtgcgactgggcttttcggcgcggtagacgatctggcggaaaatggcatgcgagttggaggagatggtgggcctttggaagatgttgaagtgggcgtggggcagtccgaccgagtcgcggatgaagtgggcgtaggagtcttgcagcttggcgacgagctcggcggtgactaggacgtccagagcgcagtagtcgagggtctcctggatgatgtcatacttgagctgtcccttttgtttccacagctcgcggttgagaaggaactcttcgcggtccttccagtactcttcgagggggaacccgtcctgatctgcacggtaagagcctagcatgtagaactggttgacggccttgtaggcgcagcagcccttctccacggggagggcgtaggcctgggcggccttgcgcagggaggtgtgcgtgagggcgaaagtgtccctgaccatgaccttgaggaactggtgcttgaagtcgatatcgtcgcagcccccctgctcccagagctggaagtccgtgcgcttcttgtaggcggggttgggcaaagcgaaagtaacatcgttgaagaggatcttgcccgcgcggggcataaagttgcgagtgatgcggaaaggttggggcacctcggcccggttgttgatgacctgggcggcgagcacgatctcgtcgaagccgttgatgttgtggcccacgatgtagagttccacgaatcgcggacggcccttgacgtggggcagtttcttgagctcctcgtaggtgagctcgtcggggtcgctgagcccgtgctgctcgagcgcccagtcggcgagatgggggttggcgcggaggaaggaagtccagagatccacggccagggcggtttgcagacggtcccggtactgacggaactgctgcccgacggccattttttcgggggtgacgcagtagaaggtgcgggggtccccgtgccagcgatcccatttgagctggagggcgagatcgagggcgagctcgacgagccggtcgtccccggagagtttcatgaccagcatgaaggggacgagctgcttgccgaaggaccccatccaggtgtaggtttccacatcgtaggtgaggaagagcctttcggtgcgaggatgcgagccgatggggaagaactggatctcctgccaccaattggaggaatggctgttgatgtgatggaagtagaaatgccgacggcgcgccgaacactcgtgcttgtgtttatacaagcggccacagtgctcgcaacgctgcacgggatgcacgtgctgcacgagctgtacctgagttcctttgacgaggaatttcagtgggaagtggagtcgtggcgcctgcatctcgtgctgtactacgtcgtggtggtcggcctggccctcttctgcctcgatggtggtcatgctgacgagcccgcgcgggaggcaggtccagacctcggcgcgagcgggtcggagagcgaggacgagggcgcgcaggccggagctgtccagggtcctgagacgctgcggagtcaggtcagtgggcagcggcggcgcgcggttgacttgcaggagtttttccagggcgcgcgggaggtccagatggtacttgatctccaccgcgccattggtggcgacgtcgatggcttgcagggtcccgtgcccctggggtgtgaccaccgtcccccgtttcttcttgggcggctggggcgacgggggcggtgcctcttccatggttagaagcggcggcgaggacgcgcgccgggcggcaggggcggctcggggcccggaggcaggggcggcaggggcacgtcggcgccgcgcgcgggtaggttctggtactgcgcccggagaagactggcgtgagcgacgacgcgacggttgacgtcctggatctgacgcctctgggtgaaggccacgggacccgtgagtttgaacctgaaagagagttcgacagaatcaatctcggtatcgttgacggcggcctgccgcaggatctcttgcacgtcgcccgagttgtcctggtaggcgatctcggtcatgaactgctcgatctcctcctcttgaaggtctccgcggccggcgcgctccacggtggccgcgaggtcgttggagatgcggcccatgagctgcgagaaggcgttcatgcccgcctcgttccagacgcggctgtagaccacgacgccctcgggatcgcgggcgcgcatgaccacctgggcgaggttgagctccacgtggcgcgtgaagaccgcgtagttgcagaggcgctggtagaggtagttgagcgtggtggcgatgtgctcggtgacgaagaaatacatgatccagcggcggagcggcatctcgctgacgtcgcccagcgcctccaaacgttccatggcctcgtaaaagtccacggcgaagttgaaaaactgggagttgcgcgccgagacggtcaactcctcctccagaagacggatgagctcggcgatggtggcgcgcacctcgcgctcgaaggcccccgggagttcctccacttcctcttcttcctcctccactaacatctcttctacttcctcctcaggcggcagtggtggcgggggagggggcctgcgtcgccggcggcgcacgggcagacggtcgatgaagcgctcgatggtctcgccgcgccggcgtcgcatggtctcggtgacggcgcgcccgtcctcgcggggccgcagcgtgaagacgccgccgcgcatctccaggtggccgggggggtccccgttgggcagggagagggcgctgacgatgcatcttatcaattgccccgtagggactccgcgcaaggacctgagcgtctcgagatccacgggatctgaaaaccgctgaacgaaggcttcgagccagtcgcagtcgcaaggtaggctgagcacggtttcttctggcgggtcatgttggttgggagcggggcgggcgatgctgctggtgatgaagttgaaataggcggttctgagacggcggatggtggcgaggagcaccaggtctttgggcccggcttgctggatgcgcagacggtcggccatgccccaggcgtggtcctgacacctggccaggtccttgtagtagtcctgcatgagccgctccacgggcacctcctcctcgcccgcgcggccgtgcatgcgcgtgagcccgaagccgcgctggggctggacgagcgccaggtcggcgacgacgcgctcggcgaggatggcttgctggatctgggtgagggtggtctggaagtcatcaaagtcgacgaagcggtggtaggctccggtgttgatggtgtaggagcagttggccatgacggaccagttgacggtctggtggcccggacgcacgagctcgtggtacttgaggcgcgagtaggcgcgcgtgtcgaagatgtagtcgttgcaggtgcgcaccaggtactggtagccgatgaggaagtgcggcggcggctggcggtagagcggccatcgctcggtggcgggggcgccgggcgcgaggtcctcgagcatggtgcggtggtagccgtagatgtacctggacatccaggtgatgccggcggcggtggtggaggcgcgcgggaactcgcggacgcggttccagatgttgcgcagcggcaggaagtagttcatggtgggcacggtctggcccgtgaggcgcgcgcagtcgtggatgctctatacgggcaaaaacgaaagcggtcagcggctcgactccgtggcctggaggctaagcgaacgggttgggctgcgcgtgtaccccggttcgaatctcgaatcaggctggagccgcagctaacgtggtattggcactcccgtctcgacccaagcctgcaccaaccctccaggatacggaggcgggtcgttttgcaacttttttttggaggccggatgagactagtaagcgcggaaagcggccgaccgcgatggctcgctgccgtagtctggagaagaatcgccagggttgcgttgcggtgtgccccggttcgaggccggccggattccgcggctaacgagggcgtggctgccccgtcgtttccaagaccccatagccagccgacttctccagttacggagcgagcccctcttttgttttgtttgtttttgccagatgcatcccgtactgcggcagatgcgcccccaccaccctccaccgcaacaacagccccctccacagccggcgcttctgcccccgccccagcagcaacttccagccacgaccgccgcggccgccgtgagcggggctggacagagttatgatcaccagctggccttggaagagggcgaggggctggcgcgcctgggggcgtcgtcgccggagcggcacccgcgcgtgcagatgaaaagggacgctcgcgaggcctacgtgcccaagcagaacctgttcagagacaggagcggcgaggagcccgaggagatgcgcgcggcccggttccacgcggggcgggagctgcggcgcggcctggaccgaaagagggtgctgagggacgaggatttcgaggcggacgagctgacggggatcagccccgcgcgcgcgcacgtggccgcggccaacctggtcacggcgtacgagcagaccgtgaaggaggagagcaacttccaaaaatccttcaacaaccacgtgcgcaccctgatcgcgcgcgaggaggtgaccctgggcctgatgcacctgtgggacctgctggaggccatcgtgcagaaccccaccagcaagccgctgacggcgcagctgttcctggtggtgcagcatagtcgggacaacgaagcgttcagggaggcgctgctgaatatcaccgagcccgagggccgctggctcctggacctggtgaacattctgcagagcatcgtggtgcaggagcgcgggctgccgctgtccgagaagctggcggccatcaacttctcggtgctgagtttgggcaagtactacgctaggaagatctacaagaccccgtacgtgcccatagacaaggaggtgaagatcgacgggttttacatgcgcatgaccctgaaagtgctgaccctgagcgacgatctgggggtgtaccgcaacgacaggatgcaccgtgcggtgagcgccagcaggcggcgcgagctgagcgaccaggagctgatgcatagtctgcagcgggccctgaccggggccgggaccgagggggagagctactttgacatgggcgcggacctgcactggcagcccagccgccgggccttggaggcggcggcaggaccctacgtagaagaggtggacgatgaggtggacgaggagggcgagtacctggaagactgatggcgcgaccgtatttttgctagatgcaacaacaacagccacctcctgatcccgcgatgcgggcggcgctgcagagccagccgtccggcattaactcctcggacgattggacccaggccatgcaacgcatcatggcgctgacgacccgcaaccccgaagcctttagacagcagccccaggccaaccggctctcggccatcctggaggccgtggtgccctcgcgctccaaccccacgcacgagaaggtcctggccatcgtgaacgcgctggtggagaacaaggccatccgcggcgacgaggccggcctggtgtacaacgcgctgctggagcgcgtggcccgctacaacagcaccaacgtgcagaccaacctggaccgcatggtgaccgacgtgcgcgaggccgtggcccagcgcgagcggttccaccgcgagtccaacctgggatccatggtggcgctgaacgccttcctcagcacccagcccgccaacgtgccccggggccaggaggactacaccaacttcatcagcgccctgcgcctgatggtgaccgaggtgccccagagcgaggtgtaccagtccgggccggactacttcttccagaccagtcgccagggcttgcagaccgtgaacctgagccaggctttcaagaacttgcagggcctgtggggcgtgcaggccccggtcggggaccgcgcgacggtgtcgagcctgctgacgccgaactcgcgcctgctgctgctgctggtggcccccttcacggacagcggcagcatcaaccgcaactcgtacctgggctacctgattaacctgtaccgcgaggccatcggccaggcgcacgtggacgagcagacctaccaggagatcacccacgtgagccgcgccctgggccaggacgacccgggcaacctggaagccaccctgaactttttgctgaccaaccggtcgcagaagatcccgccccagtacgcgctcagcaccgaggaggagcgcatcctgcgttacgtgcagcagagcgtgggcctgttcctgatgcaggagggggccacccccagcgccgcgctcgacatgaccgcgcgcaacatggagcccagcatgtacgccagcaaccgcccgttcatcaataaactgatggactacttgcatcgggcggccgccatgaactctgactatttcaccaacgccatcctgaatccccactggctcccgccgccggggttctacacgggcgagtacgacatgcccgaccccaatgacgggttcctgtgggacgatgtggacagcagcgtgttctccccccgaccgggtgctaacgagcgccccttgtggaagaaggaaggcagcgaccgacgcccgtcctcggcgctgtccggccgcgagggtgctgccgcggcggtgcccgaggccgccagtcctttcccgagcttgcccttctcgctgaacagtatccgcagcagcgagctgggcaggatcacgcgcccgcgcttgctgggcgaagaggagtacttgaatgactcgctgttgagacccgagcgggagaagaacttccccaataacgggatagaaagcctggtggacaagatgagccgctggaagacgtatgcgcaggagcacagggacgatccccgggcgtcgcagggggccacgagccggggcagcgccgcccgtaaacgccggtggcacgacaggcagcggggacagatgtgggacgatgaggactccgccgacgacagcagcgtgttggacttgggtgggagtggtaacccgttcgctcacctgcgcccccgtatcgggcgcatgatgtaagagaaaccgaaaataaatgatactcaccaaggccatggcgaccagcgtgcgttcgtttcttctctgttgttgttgtatctagtatgatgaggcgtgcgtacccggagggtcctcctccctcgtacgagagcgtgatgcagcaggcgatggcggcggcggcgatgcagcccccgctggaggctccttacgtgcccccgcggtacctggcgcctacggaggggcggaacagcattcgttactcggagctggcacccttgtacgataccacccggttgtacctggtggacaacaagtcggcggacatcgcctcgctgaactaccagaacgaccacagcaacttcctgaccaccgtggtgcagaacaatgacttcacccccacggaggccagcacccagaccatcaactttgacgagcgctcgcggtggggcggccagctgaaaaccatcatgcacaccaacatgcccaacgtgaacgagttcatgtacagcaacaagttcaaggcgcgggtgatggtctcccgcaagacccccaatggggtgacagtgacagaggattatgatggtagtcaggatgagctgaagtatgaatgggtggaatttgagctgcccgaaggcaacttctcggtgaccatgaccatcgacctgatgaacaacgccatcatcgacaattacttggcggtggggcggcagaacggggtgctggagagcgacatcggcgtgaagttcgacactaggaacttcaggctgggctgggaccccgtgaccgagctggtcatgcccggggtgtacaccaacgaggctttccatcccgatattgtcttgctgcccggctgcggggtggacttcaccgagagccgcctcagcaacctgctgggcattcgcaagaggcagcccttccaggaaggcttccagatcatgtacgaggatctggaggggggcaacatccccgcgctcctggatgtcgacgcctatgagaaaagcaaggaggatgcagcagctgaagcaactgcagccgtagctaccgcctctaccgaggtcaggggcgataattttgcaagcgccgcagcagtggcagcggccgaggcggctgaaaccgaaagtaagatagtcattcagccggtggagaaggatagcaagaacaggagctacaacgtactaccggacaagataaacaccgcctaccgcagctggtacctagcctacaactatggcgaccccgagaagggcgtgcgctcctggacgctgctcaccacctcggacgtcacctgcggcgtggagcaagtctactggtcgctgcccgacatgatgcaagacccggtcaccttccgctccacgcgtcaagttagcaactacccggtggtgggcgccgagctcctgcccgtctactccaagagcttcttcaacgagcaggccgtctactcgcagcagctgcgcgccttcacctcgcttacgcacgtcttcaaccgcttccccgagaaccagatcctcgtccgcccgcccgcgcccaccattaccaccgtcagtgaaaacgttcctgctctcacagatcacgggaccctgccgctgcgcagcagtatccggggagtccagcgcgtgaccgttactgacgccagacgccgcacctgcccctacgtctacaaggccctgggcatagtcgcgccgcgcgtcctctcgagccgcaccttctaaatgtccattctcatctcgcccagtaataacaccggttggggcctgcgcgcgcccagcaagatgtacggaggcgctcgccaacgctccacgcaacaccccgtgcgcgtgcgcgggcacttccgcgctccctggggcgccctcaagggccgcgtgcggtcgcgcaccaccgtcgacgacgtgatcgaccaggtggtggccgacgcgcgcaactacacccccgccgccgcgcccgtctccaccgtggacgccgtcatcgacagcgtggtggccgacgcgcgccggtacgcccgcgccaagagccggcggcggcgcatcgcccggcggcaccggagcacccccgccatgcgcgcggcgcgagccttgctgcgcagggccaggcgcacgggacgcagggccatgctcagggcggccagacgcgcggcttcaggcgccagcgccggcaggacccggagacgcgcggccacggcggcggcagcggccatcgccagcatgtcccgcccgcggcgagggaacgtgtactgggtgcgcgacgccgccaccggtgtgcgcgtgcccgtgcgcacccgcccccctcgcacttgaagatgttcacttcgcgatgttgatgtgtcccagcggcgaggaggatgtccaagcgcaaattcaaggaagagatgctccaggtcatcgcgcctgagatctacggccctgcggtggtgaaggaggaaagaaagccccgcaaaatcaagcgggtcaaaaaggacaaaaaggaagaagaaagtgatgtggacggattggtggagtttgtgcgcgagttcgccccccggcggcgcgtgcagtggcgcgggcggaaggtgcaaccggtgctgagacccggcaccaccgtggtcttcacgcccggcgagcgctccggcaccgcttccaagcgctcctacgacgaggtgtacggggatgatgatattctggagcaggcggccgagcgcctgggcgagtttgcttacggcaagcgcagccgttccgcaccgaaggaagaggcggtgtccatcccgctggaccacggcaaccccacgccgagcctcaagcccgtgaccttgcagcaggtgctgccgaccgcggcgccgcgccgggggttcaagcgcgagggcgaggatctgtaccccaccatgcagctgatggtgcccaagcgccagaagctggaagacgtgctggagaccatgaaggtggacccggacgtgcagcccgaggtcaaggtgcggcccatcaagcaggtggccccgggcctgggcgtgcagaccgtggacatcaagattcccacggagcccatggaaacgcagaccgagcccatgatcaagcccagcaccagcaccatggaggtgcagacggatccctggatgccatcggctcctagtcgaagaccccggcgcaagtacggcgcggccagcctgctgatgcccaactacgcgctgcatccttccatcatccccacgccgggctaccgcggcacgcgcttctaccgcggtcataccagcagccgccgccgcaagaccaccactcgccgccgccgtcgccgcaccgccgctgcaaccacccctgccgccctggtgcggagagtgtaccgccgcggccgcgcacctctgaccctgccgcgcgcgcgctaccacccgagcatcgccatttaaactttcgcctgctttgcagatcaatggccctcacatgccgccttcgcgttcccattacgggctaccgaggaagaaaaccgcgccgtagaaggctggcggggaacgggatgcgtcgccaccaccaccggcggcggcgcgccatcagcaagcggttggggggaggcttcctgcccgcgctgatccccatcatcgccgcggcgatcggggcgatccccggcattgcttccgtggcggtgcaggcctctcagcgccactgagacacacttggaaacatcttgtaataaaccaatggactctgacgctcctggtcctgtgatgtgttttcgtagacagatggaagacatcaatttttcgtccctggctccgcgacacggcacgcggccgttcatgggcacctggagcgacatcggcaccagccaactgaacgggggcgccttcaattggagcagtctctggagcgggcttaagaatttcgggtccacgcttaaaacctatggcagcaaggcgtggaacagcaccacagggcaggcgctgagggataagctgaaagagcagaacttccagcagaaggtggtcgatgggctcgcctcgggcatcaacggggtggtggacctggccaaccaggccgtgcagcggcagatcaacagccgcctggacccggtgccgcccgccggctccgtggagatgccgcaggtggaggaggagctgcctcccctggacaagcggggcgagaagcgaccccgccccgatgcggaggagacgctgctgacgcacacggacgagccgcccccgtacgaggaggcggtgaaactgggtctgcccaccacgcggcccatcgcgcccctggccaccggggtgctgaaacccgaaaagcccgcgaccctggacttgcctcctccccagccttcccgcccctctacagtggctaagcccctgccgccggtggccgtggcccgcgcgcgacccgggggcaccgcccgccctcatgcgaactggcagagcactctgaacagcatcgtgggtctgggagtgcagagtgtgaagcgccgccgctgctattaaacctaccgtagcgcttaacttgcttgtctgtgtgtgtatgtattatgtcgccgccgccgctgtccaccagaaggaggagtgaagaggcgcgtcgccgagttgcaagatggccaccccatcgatgctgccccagtgggcgtacatgcacatcgccggacaggacgcttcggagtacctgagtccgggtctggtgcagtttgcccgcgccacagacacctacttcagtctggggaacaagtttaggaaccccacggtggcgcccacgcacgatgtgaccaccgaccgcagccagcggctgacgctgcgcttcgtgcccgtggaccgcgaggacaacacctactcgtacaaagtgcgctacacgctggccgtgggcgacaaccgcgtgctggacatggccagcacctactttgacatccgcggcgtgctggatcggggccctagcttcaaaccctactccggcaccgcctacaacagtctggcccccaagggagcacccaacacttgtcagtggacatataaagccgatggtgaaactgccacagaaaaaacctatacatatggaaatgcacccgtgcagggcattaacatcacaaaagatggtattcaacttggaactgacaccgatgatcagccaatctacgcagataaaacctatcagcctgaacctcaagtgggtgatgctgaatggcatgacatcactggtactgatgaaaagtatggaggcagagctcttaagcctgataccaaaatgaagccttgttatggttcttttgccaagcctactaataaagaaggaggtcaggcaaatgtgaaaacaggaacaggcactactaaagaatatgacatagacatggctttctttgacaacagaagtgcggctgctgctggcctagctccagaaattgttttgtatactgaaaatgtggatttggaaactccagatacccatattgtatacaaagcaggcacagatgacagcagctcttctattaatttgggtcagcaagccatgcccaacagacctaactacattggtttcagagacaactttatcgggctcatgtactacaacagcactggcaatatgggggtgctggccggtcaggcttctcagctgaatgctgtggttgacttgcaagacagaaacaccgagctgtcctaccagctcttgcttgactctctgggtgacagaacccggtatttcagtatgtggaatcaggcggtggacagctatgatcctgatgtgcgcattattgaaaatcatggtgtggaggatgaacttcccaactattgtttccctctggatgctgttggcagaacagatacttatcagggaattaaggctaatggaactgatcaaaccacatggaccaaagatgacagtgtcaatgatgctaatgagataggcaagggtaatccattcgccatggaaatcaacatccaagccaacctgtggaggaacttcctctacgccaacgtggccctgtacctgcccgactcttacaagtacacgccggccaatgttaccctgcccaccaacaccaacacctacgattacatgaacggccgggtggtggcgccctcgctggtggactcctacatcaacatcggggcgcgctggtcgctggatcccatggacaacgtgaaccccttcaaccaccaccgcaatgcggggctgcgctaccgctccatgctcctgggcaacgggcgctacgtgcccttccacatccaggtgccccagaaatttttcgccatcaagagcctcctgctcctgcccgggtcctacacctacgagtggaacttccgcaaggacgtcaacatgatcctgcagagctccctcggcaacgacctgcgcacggacggggcctccatctccttcaccagcatcaacctctacgccaccttcttccccatggcgcacaacacggcctccacgctcgaggccatgctgcgcaacgacaccaacgaccagtccttcaacgactacctctcggcggccaacatgctctaccccatcccggccaacgccaccaacgtgcccatctccatcccctcgcgcaactgggccgccttccgcggctggtccttcacgcgtctcaagaccaaggagacgccctcgctgggctccgggttcgacccctacttcgtctactcgggctccatcccctacctcgacggcaccttctacctcaaccacaccttcaagaaggtctccatcaccttcgactcctccgtcagctggcccggcaacgaccggctcctgacgcccaacgagttcgaaatcaagcgcaccgtcgacggcgagggctacaacgtggcccagtgcaacatgaccaaggactggttcctggtccagatgctggcccactacaacatcggctaccagggcttctacgtgcccgagggctacaaggaccgcatgtactccttcttccgcaacttccagcccatgagccgccaggtggtggacgaggtcaactacaaggactaccaggccgtcaccctggcctaccagcacaacaactcgggcttcgtcggctacctcgcgcccaccatgcgccagggccagccctaccccgccaactacccctacccgctcatcggcaagagcgccgtcaccagcgtcacccagaaaaagttcctctgcgacagggtcatgtggcgcatccccttctccagcaacttcatgtccatgggcgcgctcaccgacctcggccagaacatgctctatgccaactccgcccacgcgctagacatgaatttcgaagtcgaccccatggatgagtccacccttctctatgttgtcttcgaagtcttcgacgtcgtccgagtgcaccagccccaccgcggcgtcatcgaggccgtctacctgcgcacccccttctcggccggtaacgccaccacctaagctcttgcttcttgcaagccatggccgcgggctccggcgagcaggagctcagggccatcatccgcgacctgggctgcgggccctacttcctgggcaccttcgataagcgcttcccgggattcatggccccgcacaagctggcctgcgccatcgtcaacacggccggccgcgagaccgggggcgagcactggctggccttcgcctggaacccgcgctcgaacacctgctacctcttcgaccccttcgggttctcggacgagcgcctcaagcagatctaccagttcgagtacgagggcctgctgcgccgcagcgccctggccaccgaggaccgctgcgtcaccctggaaaagtccacccagaccgtgcagggtccgcgctcggccgcctgcgggctcttctgctgcatgttcctgcacgccttcgtgcactggcccgaccgccccatggacaagaaccccaccatgaacttgctgacgggggtgcccaacggcatgctccagtcgccccaggtggaacccaccctgcgccgcaaccaggaggcgctctaccgcttcctcaactcccactccgcctactttcgctcccaccgcgcgcgcatcgagaaggccaccgccttcgaccgcatgaatcaagacatgtaaaccgtgtgtgtatgttaaatgtctttaataaacagcactttcatgttacacatgcatctgagatgatttatttagaaatcgaaagggttctgccgggtctcggcatggcccgcgggcagggacacgttgcggaactggtacttggccagccacttgaactcggggatcagcagtttgggcagcggggtgtcggggaaggagtcggtccacagcttccgcgtcagttgcagggcgcccagcaggtcgggcgcggagatcttgaaatcgcagttgggacccgcgttctgcgcgcgggagttgcggtacacggggttgcagcactggaacaccatcagggccgggtgcttcacgctcgccagcaccgtcgcgtcggtgatgctctccacgtcgaggtcctcggcgttggccatcccgaagggggtcatcttgcaggtctgccttcccatggtgggcacgcacccgggcttgtggttgcaatcgcagtgcagggggatcagcatcatctgggcctggtcggcgttcatccccgggtacatggccttcatgaaagcctccaattgcctgaacgcctgctgggccttggctccctcggtgaagaagaccccgcaggacttgctagagaactggttggtggcgcacccggcgtcgtgcacgcagcagcgcgcgtcgttgttggccagctgcaccacgctgcgcccccagcggttctgggtgatcttggcccggtcggggttctccttcagcgcgcgctgcccgttctcgctcgccacatccatctcgatcatgtgctccttctggatcatggtggtcccgtgcaggcaccgcagcttgccctcggcctcggtgcacccgtgcagccacagcgcgcacccggtgcactcccagttcttgtgggcgatctgggaatgcgcgtgcacgaagccctgcaggaagcggcccatcatggtggtcagggtcttgttgctagtgaaggtcagcggaatgccgcggtgctcctcgttgatgtacaggtggcagatgcggcggtacacctcgccctgctcgggcatcagctggaagttggctttcaggtcggtctccacgcggtagcggtccatcagcatagtcatgatttccatacccttctcccaggccgagacgatgggcaggctcatagggttcttcaccatcatcttagcgctagcagccgcggccagggggtcgctctcgtccagggtctcaaagctccgcttgccgtccttctcggtgatccgcaccggggggtagctgaagcccacggccgccagctcctcctcggcctgtctttcgtcctcgctgtcctggctgacgtcctgcaggaccacatgcttggtcttgcggggtttcttcttgggcggcagcggcggcggagatgttggagatggcgagggggagcgcgagttctcgctcaccactactatctcttcctcttcttggtccgaggccacgcggcggtaggtatgtctcttcgggggcagaggcggaggcgacgggctctcgccgccgcgacttggcggatggctggcagagccccttccgcgttcgggggtgcgctcccggcggcgctctgactgacttcctccgcggccggccattgtgttctcctagggaggaacaacaagcatggagactcagccatcgccaacctcgccatctgcccccaccgccgacgagaagcagcagcagcagaatgaaagcttaaccgccccgccgcccagccccgccacctccgacgcggccgtcccagacatgcaagagatggaggaatccatcgagattgacctgggctatgtgacgcccgcggagcacgaggaggagctggcagtgcgcttttcacaagaagagatacaccaagaacagccagagcaggaagcagagaatgagcagagtcaggctgggctcgagcatgacggcgactacctccacctgagcgggggggaggacgcgctcatcaagcatctggcccggcaggccaccatcgtcaaggatgcgctgctcgaccgcaccgaggtgcccctcagcgtggaggagctcagccgcgcctacgagttgaacctcttctcgccgcgcgtgccccccaagcgccagcccaatggcacctgcgagcccaacccgcgcctcaacttctacccggtcttcgcggtgcccgaggccctggccacctaccacatctttttcaagaaccaaaagatccccgtctcctgccgcgccaaccgcacccgcgccgacgcccttttcaacctgggtcccggcgcccgcctacctgatatcgcctccttggaagaggttcccaagatcttcgagggtctgggcagcgacgagactcgggccgcgaacgctctgcaaggagaaggaggagagcatgagcaccacagcgccctggtcgagttggaaggcgacaacgcgcggctggcggtgctcaaacgcacggtcgagctgacccatttcgcctacccggctctgaacctgccccccaaagtcatgagcgcggtcatggaccaggtgctcatcaagcgcgcgtcgcccatctccgaggacgagggcatgcaagactccgaggagggcaagcccgtggtcagcgacgagcagctggcccggtggctgggtcctaatgctagtccccagagtttggaagagcggcgcaaactcatgatggccgtggtcctggtgaccgtggagctggagtgcctgcgccgcttcttcgccgacgcggagaccctgcgcaaggtcgaggagaacctgcactacctcttcaggcacgggttcgtgcgccaggcctgcaagatctccaacgtggagctgaccaacctggtctcctacatgggcatcttgcacgagaaccgcctggggcagaacgtgctgcacaccaccctgcgcggggaggcccggcgcgactacatccgcgactgcgtctacctctacctctgccacacctggcagacgggcatgggcgtgtggcagcagtgtctggaggagcagaacctgaaagagctctgcaagctcctgcagaagaacctcaagggtctgtggaccgggttcgacgagcgcaccaccgcctcggacctggccgacctcattttccccgagcgcctcaggctgacgctgcgcaacggcctgcccgactttatgagccaaagcatgttgcaaaactttcgctctttcatcctcgaacgctccggaatcctgcccgccacctgctccgcgctgccctcggacttcgtgccgctgaccttccgcgagtgccccccgccgctgtggagccactgctacctgctgcgcctggccaactacctggcctaccactcggacgtgatcgaggacgtcagcggcgagggcctgctcgagtgccactgccgctgcaacctctgcacgccgcaccgctccctggcctgcaacccccagctgctgagcgagacccagatcatcggcaccttcgagttgcaagggcccagcgaaggcgagggttcagccgccaaggggggtctgaaactcaccccggggctgtggacctcggcctacttgcgcaagttcgtgcccgaggactaccatcccttcgagatcaggttctacgaggaccaatcccatccgcccaaggccgagctgtcggcctgcgtcatcacccagggggcgatcctggcccaattgcaagccatccagaaatcccgccaagaattcttgctgaaaaagggccgcggggtctacctcgacccccagaccggtgaggagctcaaccccggcttcccccaggatgccccgaggaaacaagaagctgaaagtggagctgccgcccgtggaggatttggaggaagactgggagaacagcagtcaggcagaggaggaggagatggaggaagactgggacagcactcaggcagaggaggacagcctgcaagacagtctggaggaagacgaggaggaggcagaggaggaggtggaagaagcagccgccgccagaccgtcgtcctcggcgggggagaaagcaagcagcacggataccatctccgctccgggtcggggtcccgctcgaccacacagtagatgggacgagaccggacgattcccgaaccccaccacccagaccggtaagaaggagcggcagggatacaagtcctggcgggggcacaaaaacgccatcgtctcctgcttgcaggcctgcgggggcaacatctccttcacccggcgctacctgctcttccaccgcggggtgaactttccccgcaacatcttgcattactaccgtcacctccacagcccctactacttccaagaagaggcagcagcagcagaaaaagaccagcagaaaaccagcagctagaaaatccacagcggcggcagcaggtggactgaggatcgcggcgaacgagccggcgcaaacccgggagctgaggaaccggatctttcccaccctctatgccatcttccagcagagtcgggggcaggagcaggaactgaaagtcaagaaccgttctctgcgctcgctcacccgcagttgtctgtatcacaagagcgaagaccaacttcagcgcactctcgaggacgccgaggctctcttcaacaagtactgcgcgctcactcttaaagagtagcccgcgcccgcccagtcgcagaaaaaggcgggaattacgtcacctgtgcccttcgccctagccgcctccacccatcatcatgagcaaagagattcccacgccttacatgtggagctaccagccccagatgggcctggccgccggtgccgcccaggactactccacccgcatgaattggctcagcgccgggcccgcgatgatctcacgggtgaatgacatccgcgcccaccgaaaccagatactcctagaacagtcagcgctcaccgccacgccccgcaatcacctcaatccgcgtaattggcccgccgccctggtgtaccaggaaattccccagcccacgaccgtactacttccgcgagacgcccaggccgaagtccagctgactaactcaggtgtccagctggcgggcggcgccaccctgtgtcgtcaccgccccgctcagggtataaagcggctggtgatccggggcagaggcacacagctcaacgacgaggtggtgagctcttcgctgggtctgcgacctgacggagtcttccaactcgccggatcggggagatcttccttcacgcctcgtcaggccgtcctgactttggagagttcgtcctcgcagccccgctcgggtggcatcggcactctccagttcgtggaggagttcactccctcggtctacttcaaccccttctccggctcccccggccactacccggacgagttcatcccgaacttcgacgccatcagcgagtcggtggacggctacgattgaatgtcccatggtggcgcagctgacctagctcggcttcgacacctggaccactgccgccgcttccgctgcttcgctcgggatctcgccgagtttgcctactttgagctgcccgaggagcaccctcagggcccggcccacggagtgcggatcgtcgtcgaagggggcctcgactcccacctgcttcggatcttcagccagcgtccgatcctggtcgagcgcgagcaaggacagacccttctgactctgtactgcatctgcaaccaccccggcctgcatgaaagtctttgttgtctgctgtgtactgagtataataaaagctgagatcagcgactactccggacttccgtgtgttcctgaatccatcaaccagtctttgttcttcaccgggaacgagaccgagctccagctccagtgtaagccccacaagaagtacctcacctggctgttccagggctccccgatcgccgttgtcaaccactgcgacaacgacggagtcctgctgagcggccctgccaaccttactttttccacccgcagaagcaagctccagctcttccaacccttcctccccgggacctatcagtgcgtctcgggaccctgccatcacaccttccacctgatcccgaataccacagcgtcgctccccgctactaacaaccaaactaacctccaccaacgccaccgtcgcgacctttctgaatctaatactaccacccacaccggaggtgagctccgaggtcaaccaacctctgggatttactacggcccctgggaggtggttgggttaatagcgctaggcctagttgcgggtgggcttttggttctctgctacctatacctcccttgctgttcgtacttagtggtgctgtgttgctggtttaagaaatggggaagatcaccctagtgagctgcggtgcgctggtggcggtgttgctttcgattgtgggactgggcggtgcggctgtagtgaaggagaaggccgatccctgcttgcatttcaatcccaacaaatgccagctgagttttcagcccgatggcaatcggtgcgcggtactgatcaagtgcggatgggaatgcgagaacgtgagaatcgagtacaataacaagactcggaacaatactctcgcgtccgtgtggcagcccggggaccccgagtggtacaccgtctctgtccccggtgctgacggctccccgcgcaccgtgaataatactttcatttttgcgcacatgtgcgacacggtcatgtggatgagcaagcagtacgatatgtggccccccacgaaggagaacatcgtggtcttctccatcgcttacagcctgtgcacggcgctaatcaccgctatcgtgtgcctgagcattcacatgctcatcgctattcgccccagaaataatgccgaaaaagaaaaacagccataacgttttttttcacacctttttcagaccatggcctctgttaaatttttgcttttatttgccagtctcattgccgtcattcatggaatgagtaatgagaaaattactatttacactggcactaatcacacattgaaaggtccagaaaaagccacagaagtttcatggtattgttattttaatgaatcagatgtatctactgaactctgtggaaacaataacaaaaaaaatgagagcattactctcatcaagtttcaatgtggatctgacttaaccctaattaacatcactagagactatgtaggtatgtattatggaactacagcaggcatttcggacatggaattttatcaagtttctgtgtctgaacccaccacgcctagaatgaccacaaccacaaaaactacacctgttaccactatgcagctcactaccaataacatttttgccatgcgtcaaatggtcaacaatagcactcaacccaccccacccagtgaggaaattcccaaatccatgattggcattattgttgctgtagtggtgtgcatgttgatcatcgccttgtgcatggtgtactatgccttctgctacagaaagcacagactgaacgacaagctggaacacttactaagtgttgaattttaattttttagaaccatgaagatcctaggccttttaattttttctatcattacctctgctctatgcaattctgacaatgaggacgttactgtcgttgtcggatcaaattatacactgaaaggtccagcgaagggtatgctttcgtggtattgctattttggatctgacactacagaaactgaattatgcaatcttaagaatggcaaaattcaaaattctaaaattaacaattatatatgcaatggtactgatctgatactcctcaatatcacgaaatcatatgctggcagttacacctgccctggagatgatgctgacagtatgattttttacaaagtaactgttgttgatcccactactccacctccacccaccacaactactcacaccacacacacagatcaaaccgcagcagaggaggcagcaaagttagccttgcaggtccaagacagttcatttgttggcattacccctacacctgatcagcggtgtccggggctgctagtcagcggcattgtcggtgtgctttcgggattagcagtcataatcatctgcatgttcatttttgcttgctgctatagaaggctttaccgacaaaaatcagacccactgctgaacctctatgtttaattttttccagagtcatgaaggcagttagcgctctagttttttgttctttgattggcattgttttttgcaatcctattcctaaagttagctttattaaagatgtgaatgttactgaggggggcaatgtgacactggtaggtgtagagggtgctgaaaacaccacctggacaaaataccacctcaatgggtggaaagatatttgcaattggagtgtattagtttatacatgtgagggagttaatcttaccattgtcaatgccacctcagctcaaaatggtagaattcaaggacaaagtgtcagtgtatctaatgggtattttacccaacatacttttatctatgacgttaaagtcataccactgcctacgcctagcccacctagcactaccacacagacaacccacactacacagacaaccacatacagtacattaaatcagcctaccaccactacagcagcagaggttgccagctcgtctggggtccgagtggcatttttgatgttggccccatctagcagtcccactgctagtaccaatgagcagactactgaatttttgtccactgtcgagagccacaccacagctacctccagtgccttctctagcaccgccaatctctcctcgctttcctctacaccaatcagtcccgctactactcctagccccgctcctcttcccactcccctgaagcaaacagacggcggcatgcaatggcagatcaccctgctcattgtgatcgggttggtcatcctggccgtgttgctctactacatcttctgccgccgcattcccaacgcgcaccgcaagccggtctacaagcccatcattgtcgggcagccggagccgcttcaggtggaagggggtctaaggaatcttctcttctcttttacagtatggtgattgaactatgattcctagacaattcttgatcactattcttatctgcctcctccaagtctgtgccaccctcgctctggtggccaacgccagtccagactgtattgggcccttcgcctcctacgtgctctttgccttcaccacctgcatctgctgctgtagcatagtctgcctgcttatcaccttcttccagttcattgactggatctttgtgcgcatcgcctacctgcgccaccacccccagtaccgcgaccagcgagtggcgcggctgctcaggctcctctgataagcatgcgggctctgctacttctcgcgcttctgctgttagtgctcccccgtcccgtcgacccccggtcccccacccagtcccccgaggaggtccgcaaatgcaaattccaagaaccctggaaattcctcaaatgctaccgccaaaaatcagacatgcatcccagctggatcatgatcattgggatcgtgaacattctggcctgcaccctcatctcctttgtgatttacccctgctttgactttggttggaactcgccagaggcgctctatctcccgcctgaacctgacacaccaccacagcaacctcaggcacacgcactaccaccactacagcctaggccacaatacatgcccatattagactatgaggccgagccacagcgacccatgctccccgctattagttacttcaatctaaccggcggagatgactgacccactggccaacaacaacgtcaacgaccttctcctggacatggacggccgcgcctcggagcagcgactcgcccaacttcgcattcgccagcagcaggagagagccgtcaaggagctgcaggatgcggtggccatccaccagtgcaagagaggcatcttctgcctggtgaaacaggccaagatctcctacgaggtcactccaaacgaccatcgcctctcctacgagctcctgcagcagcgccagaagttcacctgcctggtcggagtcaaccccatcgtcatcacccagcagtctggcgataccaaggggtgcatccactgctcctgcgactcccccgactgcgtccacactctgatcaagaccctctgcggcctccgcgacctcctccccatgaactaatcacccccttatccagtgaaataaagatcatattgatgatgattttacagaaataaaaaataatcatttgatttgaaataaagatacaatcatattgatgatttgagtttaacaaaaaaataaagaatcacttacttgaaatctgataccaggtctctgtccatgttttctgccaacaccacttcactcccctcttcccagctctggtactgcaggccccggcgggctgcaaacttcctccacacgctgaaggggatgtcaaattcctcctgtccctcaatcttcattttatcttctatcagatgtccaaaaagcgcgtccgggtggatgatgacttcgaccccgtctacccctacgatgcagacaacgcaccgaccgtgcccttcatcaacccccccttcgtctcttcagatggattccaagagaagcccctgggggtgttgtccctgcgactggccgaccccgtcaccaccaagaacggggaaatcaccctcaagctgggagagggggtggacctcgattcctcgggaaaactcatctccaacacggccaccaaggccgccgcccctctcagtttttccaacaacaccatttcccttaacatggatcaccccttttacactaaagatggaaaattatccttacaagtttctccaccattaaatatactgagaacaagcattctaaacacactagctttaggttttggatcaggtttaggactccgtggctctgccttggcagtacagttagtctctccacttacatttgatactgatggaaacataaagcttaccttagacagaggtttgcatgttacaacaggagatgcaattgaaagcaacataagctgggctaaaggtttaaaatttgaagatggagccatagcaaccaacattggaaatgggttagagtttggaagcagtagtacagaaacaggtgttgatgatgcttacccaatccaagttaaacttggatctggccttagctttgacagtacaggagccataatggctggtaacaaagaagacgataaactcactttgtggacaacacctgatccatcaccaaactgtcaaatactcgcagaaaatgatgcaaaactaacactttgcttgactaaatgtggtagtcaaatactggccactgtgtcagtcttagttgtaggaagtggaaacctaaaccccattactggcaccgtaagcagtgctcaggtgtttctacgttttgatgcaaacggtgttcttttaacagaacattctacactaaaaaaatactgggggtataggcagggagatagcatagatggcactccatataccaatgctgtaggattcatgcccaatttaaaagcttatccaaagtcacaaagttctactactaaaaataatatagtagggcaagtatacatgaatggagatgtttcaaaacctatgcttctcactataaccctcaatggtactgatgacagcaacagtacatattcaatgtcattttcatacacctggactaatggaagctatgttggagcaacatttggggctaactcttataccttctcatacatcgcccaagaatgaacactgtatcccaccctgcatgccaacccttcccaccccactctgtggaacaaactctgaaacacaaaataaaataaagttcaagtgttttattgattcaacagttttacaggattcgagcagttatttttcctccaccctcccaggacatggaatacaccaccctctccccccgcacagccttgaacatctgaatgccattggtgatggacatgcttttggtctccacgttccacacagtttcagagcgagccagtctcgggtcggtcagggagatgaaaccctccgggcactcccgcatctgcacctcacagctcaacagctgaggattgtcctcggtggtcgggatcacggttatctggaagaagcagaagagcggcggtgggaatcatagtccgcgaacgggatcggccggtggtgtcgcatcaggccccgcagcagtcgctgccgccgccgctccgtcaagctgctgctcagggggtccgggtccagggactccctcagcatgatgcccacggccctcagcatcagtcgtctggtgcggcgggcgcagcagcgcatgcggatctcgctcaggtcgctgcagtacgtgcaacacagaaccaccaggttgttcaacagtccatagttcaacacgctccagccgaaactcatcgcgggaaggatgctacccacgtggccgtcgtaccagatcctcaggtaaatcaagtggtgccccctccagaacacgctgcccacgtacatgatctccttgggcatgtggcggttcaccacctcccggtaccacatcaccctctggttgaacatgcagccccggatgatcctgcggaaccacagggccagcaccgccccgcccgccatgcagcgaagagaccccgggtcccggcaatggcaatggaggacccaccgctcgtacccgtggatcatctgggagctgaacaagtctatgttggcacagcacaggcatatgctcatgcatctcttcagcactctcaactcctcgggggtcaaaaccatatcccagggcacggggaactcttgcaggacagcgaaccccgcagaacagggcaatcctcgcacagaacttacattgtgcatggacagggtatcgcaatcaggcagcaccgggtgatcctccaccagagaagcgcgggtctcggtctcctcacagcgtggtaagggggccggccgatacgggtgatggcgggacgcggctgatcgtgttcgcgaccgtgtcatgatgcagttgctttcggacattttcgtacttgctgtagcagaacctggtccgggcgctgcacaccgatcgccggcggcggtctcggcgcttggaacgctcggtgttgaaattgtaaaacagccactctctcagaccgtgcagcagatctagggcctcaggagtgatgaagatcccatcatgcctgatggctctgatcacatcgaccaccgtggaatgggccagacccagccagatgatgcaattttgttgggtttcggtgacggcgggggagggaagaacaggaagaaccatgattaacttttaatccaaacggtctcggagtacttcaaaatgaagatcgcggagatggcacctctcgcccccgctgtgttggtggaaaataacagccaggtcaaaggtgatacggttctcgagatgttccacggtggcttccagcaaagcctccacgcgcacatccagaaacaagacaatagcgaaagcgggagggttctctaattcctcaatcatcatgttacactcctgcaccatccccagataattttcatttttccagccttgaatgattcgaactagttcctgaggtaaatccaagccagccatgataaagagctcgcgcagagcgccctccaccggcattcttaagcacaccctcataattccaagatattctgctcctggttcacctgcagcagattgacaagcggaatatcaaaatctctgccgcgatccctgagctcctccctcagcaataactgtaagtactctttcatatcctctccgaaatttttagccataggaccaccaggaataagattagggcaagccacagtacagataaaccgaagtcctccccagtgagcattgccaaatgcaagactgctataagcatgctggctagacccggtgatatcttccagataactggacagaaaatcgcccaggcaatttttaagaaaatcaacaaaagaaaaatcctccaggtggacgtttagagcctcgggaacaacgatgaagtaaatgcaagcggtgcgttccagcatggttagttagctgatctgtagaaaaaacaaaaatgaacattaaaccatgctagcctggcgaacaggtgggtaaatcgttctctccagcaccaggcaggccacggggtctccggcgcgaccctcgtaaaaattgtcgctatgattgaaaaccatcacagagagacgttcccggtggccggcgtgaatgattcgacaagatgaatacacccccggaacattggcgtccgcgagtgaaaaaaagcgcccgaggaagcaataaggcactacaatgctcagtctcaagtccagcaaagcgatgccatgcggatgaagcacaaaattctcaggtgcgtacaaaatgtaattactcccctcctgcacaggcagcaaagcccccgatccctccaggtacacatacaaagcctcagcgtccatagcttaccgagcagcagcacacaacaggcgcaagagtcagagaaaggctgagctctaacctgtccacccgctctctgctcaatatatagcccagatctacactgacgtaaaggccaaagtctaaaaatacccgccaaataatcacacacgcccagcacacgcccagaaaccggtgacacactcaaaaaaatacgcgcacttcctcaaacgcccaaaactgccgtcatttccgggttcccacgctacgtcatcaaaacacgactttcaaattccgtcgaccgttaaaaacgtcacccgccccgcccctaacggtcgcccgtctctcagccaatcagcgccccgcatccccaaattcaaacacctcatttgcatattaacgcgcacaaaaagtttgaggtatattattgatgatgg

SEQ ID NO: 11 - DNA, 31867 bp, Artificial Sequence
  Description of Artificial Sequence: Synthetic polynucleotide
ccatcttcaataatatacctcaaactttttgtgcgcgttaatatgcaaatgaggcgtttgaatttggggaggaagggcggtgattggtcgagggatgagcgaccgttaggggcggggcgagtgacgttttgatgacgtggttgcgaggaggagccagtttgcaagttctcgtgggaaaagtgacgtcaaacgaggtgtggtttgaacacggaaatactcaattttcccgcgctctctgacaggaaatgaggtgtttctgggcggatgcaagtgaaaacgggccattttcgcgcgaaaactgaatgaggaagtgaaaatctgagtaatttcgcgtttatggcagggaggagtatttgccgagggccgagtagactttgaccgattacgtgggggtttcgattaccgtgtttttcacctaaatttccgcgtacggtgtcaaagtccggtgtttttacgtaggtgtcagctgatcgccagggtatttaaacctgcgctctccagtcaagaggccactcttgagtgccagcgagaagagttttctcctccgcgccgcgagtcagatctacactttgaaagtagggataacagggtaatgacattgattattgactagttgttaatagtaatcaattacggggtcattagttcatagcccatatatggagttccgcgttacataacttacggtaaatggcccgcctggctgaccgcccaacgacccccgcccattgacgtcaataatgacgtatgttcccatagtaacgccaatagggactttccattgacgtcaatgggtggagtatttacggtaaactgcccacttggcagtacatcaagtgtatcatatgccaagtccgccccctattgacgtcaatgacggtaaatggcccgcctggcattatgcccagtacatgaccttacgggactttcctacttggcagtacatctacgtattagtcatcgctattaccatggtgatgcggttttggcagtacaccaatgggcgtggatagcggtttgactcacggggatttccaagtctccaccccattgacgtcaatgggagtttgttttggcaccaaaatcaacgggactttccaaaatgtcgtaataaccccgccccgttgacgcaaatgggcggtaggcgtgtacggtgggaggtctatataagcagagctcgtttagtgaaccgtcagatcgcctggaacgccatccacgctgttttgacctccatagaagacagcgatcgcgccaccatggtgagcaagggcgaggagctgttcaccggggtggtgcccatcctggtcgagctggacggcgacgtaaacggccacaagttcagcgtgtccggcgagggcgagggcgatgccacctacggcaagctgaccctgaagttcatctgcaccaccggcaagctgcccgtgccctggcccaccctcgtgaccaccctgacctacggcgtgcagtgcttcagccgctaccccgaccacatgaagcagcacgacttcttcaagtccgccatgcccgaaggctacgtccaggagcgcaccatcttcttcaaggacgacggcaactacaagacccgcgccgaggtgaagttcgagggcgacaccctggtgaaccgcatcgagctgaagggcatcgacttcaaggaggacggcaacatcctggggcacaagctggagtacaactacaacagccacaacgtctatatcatggccgacaagcagaagaacggcatcaaggtgaacttcaagatccgccacaacatcgaggacggcagcgtgcagctcgccgaccactaccagcagaacacccccatcggcgacggccccgtgctgctgcccgacaaccactacctgagcacccagtccgccctgagcaaagaccccaacgagaagcgcgatcacatggtcctgctggagttcgtgaccgccgccgggatcactctcggcatggacgagctttacaagtagtgagtttaaactcccatttaaatgtgagggttaatgcttcgagcagacatgataagatacattgatgagtttggacaaaccacaactagaatgcagtgaaaaaaatgctttatttgtgaaatttgtgatgctattgctttatttgtaaccattataagctgcaataaacaagttaacaacaacaattgcattcattttatgtttcaggttcagggggagatgtgggaggttttttaaagcaagtaaaacctctacaaatgtggtaaaataactataacggtcctaaggtagcgagtgagtagtgttctggggcgggggaggacctgcatgagggccagaataactgaaatctgtgcttttctgtgtgttgcagcagcatgagcggaagcggctcctttgagggaggggtattcagcccttatctgacggggcgtctcccctcctgggcgggagtgcgtcagaatgtgatgggatccacggtggacggccggcccgtgcagcccgcgaactcttcaaccctgacctatgcaaccctgagctcttcgtcgttggacgcagctgccgccgcagctgctgcatctgccgccagcgccgtgcgcggaatggccatgggcgccggctactacggcactctggtggccaactcgagttccaccaataatcccgccagcctgaacgaggagaagctgttgctgctgatggcccagctcgaggccttgacccagcgcctgggcgagctgacccagcaggtggctcagctgcaggagcagacgcgggccgcggttgccacggtgaaatccaaataaaaaatgaatcaataaataaacggagacggttgttgattttaacacagagtctgaatctttatttgatttttcgcgcgcggtaggccctggaccaccggtctcgatcattgagcacccggtggatcttttccaggacccggtagaggtgggcttggatgttgaggtacatgggcatgagcccgtcccgggggtggaggtagctccattgcagggcctcgtgctcgggggtggtgttgtaaatcacccagtcatagcaggggcgcagggcatggtgttgcacaatatctttgaggaggagactgatggccacgggcagccctttggtgtaggtgtttacaaatctgttgagctgggagggatgcatgcggggggagatgaggtgcatcttggcctggatcttgagattggcgatgttaccgcccagatcccgcctggggttcatgttgtgcaggaccaccagcacggtgtatccggtgcacttggggaatttatcatgcaacttggaagggaaggcgtgaaagaatttggcgacgcctttgtgcccgcccaggttttccatgcactcatccatgatgatggcgatgggcccgtgggcggcggcctgggcaaagacgtttcgggggtcggacacatcatagttgtggtcctgggtgaggtcatcataggccattttaatgaatttggggcggagggtgccggactgggggacaaaggtaccctcgatcccgggggcgtagttcccctcacagatctgcatctcccaggctttgagctcggagggggggatcatgtccacctgcggggcgataaagaacacggtttccggggcgggggagatgagctgggccgaaagcaagttccggagcagctgggacttgccgcagccggtggggccgtagatgaccccgatgaccggctgcaggtggtagttgagggagagacagctgccgtcctcccggaggaggggggccacctcgttcatcatctcgcgcacgtgcatgttctcgcgcaccagttccgccaggaggcgctctccccccagggataggagctcctggagcgaggcgaagtttttcagcggcttgagtccgtcggccatgggcattttggagagggtttgttgcaagagttccaggcggtcccagagctcggtgatgtgctctacggcatctcgatccagcagacctcctcgtttcgcgggttgggacggctgcgggagtagggcaccagacgatgggcgtccagcgcagccagggtccggtccttccagggtcgcagcgtccgcgtcagggtggtctccgtcacggtgaaggggtgcgcgccgggctgggcgcttgcgagggtgcgcttcaggctcatccggctggtcgaaaaccgctcccgatcggcgccctgcgcgtcggccaggtagcaattgaccatgagttcgtagttgagcgcctcggccgcgtggcctttggcgcggagcttacctttggaagtctgcccgcaggcgggacagaggagggacttgagggcgtagagcttgggggcgaggaagacggactcgggggcgtaggcgtccgcgccgcagtgggcgcagacggtctcgcactccacgagccaggtgaggtcgggctggtcggggtcaaaaaccagtttcccgccgttctttttgatgcgtttcttacctttggtctccatgagctcgtgtccccgctgggtgacaaagaggctgtccgtgtccccgtagaccgactttatgggccggtcctcgagcggtgtgccgcggtcctcctcgtagaggaaccccgcccactccgagacgaaagcccgggtccaggccagcacgaaggaggccacgtgggacgggtagcggtcgttgtccaccagcgggtccaccttttccagggtatgcaaacacatgtccccctcgtccacatccaggaaggtgattggcttgtaagtgtaggccacgtgaccgggggtcccggccgggggggtataaaagggtgcgggtccctgctcgtcctcactgtcttccggatcgctgtccaggagcgccagctgttggggtaggtattccctctcgaaggcgggcatgacctcggcactcaggttgtcagtttctagaaacgaggaggatttgatattgacggtgccggcggagatgcctttcaagagcccctcgtccatctggtcagaaaagacgatctttttgttgtcgagcttggtggcgaaggagccgtagagggcgttggagaggagcttggcgatggagcgcatggtctggtttttttccttgtcggcgcgctccttggcggcgatgttgagctgcacgtactcgcgcgccacgcacttccattcggggaagacggtggtcagctcgtcgggcacgattctgacctgccagccccgattatgcagggtgatgaggtccacactggtggccacctcgccgcgcaggggctcattagtccagcagaggcgtccgcccttgcgcgagcagaaggggggcagggggtccagcatgacctcgtcgggggggtcggcatcgatggtgaagatgccgggcaggaggtcggggtcaaagtagctgatggaagtggccagatcgtccagggcagcttgccattcgcgcacggccagcgcgctctcgtagggactgaggggcgtgccccagggcatgggatgggtaagcgcggaggcgtacatgccgcagatgtcgtagacgtagaggggctcctcgaggatgccgatgtaggtggggtagcagcgccccccgcggatgctggcgcgcacgtagtcatacagctcgtgcgagggggcgaggagccccgggcccaggttggtgcgactgggcttttcggcgcggtagacgatctggcggaaaatggcatgcgagttggaggagatggtgggcctttggaagatgttgaagtgggcgtggggcagtccgaccgagtcgcggatgaagtgggcgtaggagtcttgcagcttggcgacgagctcggcggtgactaggacgtccagagcgcagtagtcgagggtctcctggatgatgtcatacttgagctgtcccttttgtttccacagctcgcggttgagaaggaactcttcgcggtccttccagtactcttcgagggggaacccgtcctgatctgcacggtaagagcctagcatgtagaactggttgacggccttgtaggcgcagcagcccttctccacggggagggcgtaggcctgggcggccttgcgcagggaggtgtgcgtgagggcgaaagtgtccctgaccatgaccttgaggaactggtgcttgaagtcgatatcgtcgcagcccccctgctcccagagctggaagtccgtgcgcttcttgtaggcggggttgggcaaagcgaaagtaacatcgttgaagaggatcttgcccgcgcggggcataaagttgcgagtgatgcggaaaggttggggcacctcggcccggttgttgatgacctgggcggcgagcacgatctcgtcgaagccgttgatgttgtggcccacgatgtagagttccacgaatcgcggacggcccttgacgtggggcagtttcttgagctcctcgtaggtgagctcgtcggggtcgctgagcccgtgctgctcgagcgcccagtcggcgagatgggggttggcgcggaggaaggaagtccagagatccacggccagggcggtttgcagacggtcccggtactgacggaactgctgcccgacggccattttttcgggggtgacgcagtagaaggtgcgggggtccccgtgccagcgatcccatttgagctggagggcgagatcgagggcgagctcgacgagccggtcgtccccggagagtttcatgaccagcatgaaggggacgagctgcttgccgaaggaccccatccaggtgtaggtttccacatcgtaggtgaggaagagcctttcggtgcgaggatgcgagccgatggggaagaactggatctcctgccaccaattggaggaatggctgttgatgtgatggaagtagaaatgccgacggcgcgccgaacactcgtgcttgtgtttatacaagcggccacagtgctcgcaacgctgcacgggatgcacgtgctgcacgagctgtacctgagttcctttgacgaggaatttcagtgggaagtggagtcgtggcgcctgcatctcgtgctgtactacgtcgtggtggtcggcctggccctcttctgcctcgatggtggtcatgctgacgagcccgcgcgggaggcaggtccagacctcggcgcgagcgggtcggagagcgaggacgagggcgcgcaggccggagctgtccagggtcctgagacgctgcggagtcaggtcagtgggcagcggcggcgcgcggttgacttgcaggagtttttccagggcgcgcgggaggtccagatggtacttgatctccaccgcgccattggtggcgacgtcgatggcttgcagggtcccgtgcccctggggtgtgaccaccgtcccccgtttcttcttgggcggctggggcgacgggggcggtgcctcttccatggttagaagcggcggcgaggacgcgcgccgggcggcaggggcggctcggggcccggaggcaggggcggcaggggcacgtcggcgccgcgcgcgggtaggttctggtactgcgcccggagaagactggcgtgagcgacgacgcgacggttgacgtcctggatctgacgcctctgggtgaaggccacgggacccgtgagtttgaacctgaaagagagttcgacagaatcaatctcggtatcgttgacggcggcctgccgcaggatctcttgcacgtcgcccgagttgtcctggtaggcgatctcggtcatgaactgctcgatctcctcctcttgaaggtctccgcggccggcgcgctccacggtggccgcgaggtcgttggagatgcggcccatgagctgcgagaaggcgttcatgcccgcctcgttccagacgcggctgtagaccacgacgccctcgggatcgcgggcgcgcatgaccacctgggcgaggttgagctccacgtggcgcgtgaagaccgcgtagttgcagaggcgctggtagaggtagttgagcgtggtggcgatgtgctcggtgacgaagaaatacatgatccagcggcggagcggcatctcgctgacgtcgcccagcgcctccaaacgttccatggcctcgtaaaagtccacggcgaagttgaaaaactgggagttgcgcgccgagacggtcaactcctcctccagaagacggatgagctcggcgatggtggcgcgcacctcgcgctcgaaggcccccgggagttcctccacttcctcttcttcctcctccactaacatctcttctacttcctcctcaggcggcagtggtggcgggggagggggcctgcgtcgccggcggcgcacgggcagacggtcgatgaagcgctcgatggtctcgccgcgccggcgtcgcatggtctcggtgacggcgcgcccgtcctcgcggggccgcagcgtgaagacgccgccgcgcatctccaggtggccgggggggtccccgttgggcagggagagggcgctgacgatgcatcttatcaattgccccgtagggactccgcgcaaggacctgagcgtctcgagatccacgggatctgaaaaccgctgaacgaaggcttcgagccagtcgcagtcgcaaggtaggctgagcacggtttcttctggcgggtcatgttggttgggagcggggcgggcgatgctgctggtgatgaagttgaaataggcggttctgagacggcggatggtggcgaggagcaccaggtctttgggcccggcttgctggatgcgcagacggtcggccatgccccaggcgtggtcctgacacctggccaggtccttgtagtagtcctgcatgagccgctccacgggcacctcctcctcgcccgcgcggccgtgcatgcgcgtgagcccgaagccgcgctggggctggacgagcgccaggtcggcgacgacgcgctcggcgaggatggcttgctggatctgggtgagggtggtctggaagtcatcaaagtcgacgaagcggtggtaggctccggtgttgatggtgtaggagcagttggccatgacggaccagttgacggtctggtggcccggacgcacgagctcgtggtacttgaggcgcgagtaggcgcgcgtgtcgaagatgtagtcgttgcaggtgcgcaccaggtactggtagccgatgaggaagtgcggcggcggctggcggtagagcggccatcgctcggtggcgggggcgccgggcgcgaggtcctcgagcatggtgcggtggtagccgtagatgtacctggacatccaggtgatgccggcggcggtggtggaggcgcgcgggaactcgcggacgcggttccagatgttgcgcagcggcaggaagtagttcatggtgggcacggtctggcccgtgaggcgcgcgcagtcgtggatgctctatacgggcaaaaacgaaagcggtcagcggctcgactccgtggcctggaggctaagcgaacgggttgggctgcgcgtgtaccccggttcgaatctcgaatcaggctggagccgcagctaacgtggtattggcactcccgtctcgacccaagcctgcaccaaccctccaggatacggaggcgggtcgttttgcaacttttttttggaggccggatgagactagtaagcgcggaaagcggccgaccgcgatggctcgctgccgtagtctggagaagaatcgccagggttgcgttgcggtgtgccccggttcgaggccggccggattccgcggctaacgagggcgtggctgccccgtcgtttccaagaccccatagccagccgacttctccagttacggagcgagcccctcttttgttttgtttgtttttgccagatgcatcccgtactgcggcagatgcgcccccaccaccctccaccgcaacaacagccccctccacagccggcgcttctgcccccgccccagcagcaacttccagccacgaccgccgcggccgccgtgagcggggctggacagagttatgatcaccagctggccttggaagagggcgaggggctggcgcgcctgggggcgtcgtcgccggagcggcacccgcgcgtgcagatgaaaagggacgctcgcgaggcctacgtgcccaagcagaacctgttcagagacaggagcggcgaggagcccgaggagatgcgcgcggcccggttccacgcggggcgggagctgcggcgcggcctggaccgaaagagggtgctgagggacgaggatttcgaggcggacgagctgacggggatcagccccgcgcgcgcgcacgtggccgcggccaacctggtcacggcgtacgagcagaccgtgaaggaggagagcaacttccaaaaatccttcaacaaccacgtgcgcaccctgatcgcgcgcgaggaggtgaccctgggcctgatgcacctgtgggacctgctggaggccatcgtgcagaaccccaccagcaagccgctgacggcgcagctgttcctggtggtgcagcatagtcgggacaacgaagcgttcagggaggcgctgctgaatatcaccgagcccgagggccgctggctcctggacctggtgaacattctgcagagcatcgtggtgcaggagcgcgggctgccgctgtccgagaagctggcggccatcaacttctcggtgctgagtttgggcaagtactacgctaggaagatctacaagaccccgtacgtgcccatagacaaggaggtgaagatcgacgggttttacatgcgcatgaccctgaaagtgctgaccctgagcgacgatctgggggtgtaccgcaacgacaggatgcaccgtgcggtgagcgccagcaggcggcgcgagctgagcgaccaggagctgatgcatagtctgcagcgggccctgaccggggccgggaccgagggggagagctactttgacatgggcgcggacctgcactggcagcccagccgccgggccttggaggcggcggcaggaccctacgtagaagaggtggacgatgaggtggacgaggagggcgagtacctggaagactgatggcgcgaccgtatttttgctagatgcaacaacaacagccacctcctgatcccgcgatgcgggcggcgctgcagagccagccgtccggcattaactcctcggacgattggacccaggccatgcaacgcatcatggcgctgacgacccgcaaccccgaagcctttagacagcagccccaggccaaccggctctcggccatcctggaggccgtggtgccctcgcgctccaaccccacgcacgagaaggtcctggccatcgtgaacgcgctggtggagaacaaggccatccgcggcgacgaggccggcctggtgtacaacgcgctgctggagcgcgtggcccgctacaacagcaccaacgtgcagaccaacctggaccgcatggtgaccgacgtgcgcgaggccgtggcccagcgcgagcggttccaccgcgagtccaacctgggatccatggtggcgctgaacgccttcctcagcacccagcccgccaacgtgccccggggccaggaggactacaccaacttcatcagcgccctgcgcctgatggtgaccgaggtgccccagagcgaggtgtaccagtccgggccggactacttcttccagaccagtcgccagggcttgcagaccgtgaacctgagccaggctttcaagaacttgcagggcctgtggggcgtgcaggccccggtcggggaccgcgcgacggtgtcgagcctgctgacgccgaactcgcgcctgctgctgctgctggtggcccccttcacggacagcggcagcatcaaccgcaactcgtacctgggctacctgattaacctgtaccgcgaggccatcggccaggcgcacgtggacgagcagacctaccaggagatcacccacgtgagccgcgccctgggccaggacgacccgggcaacctggaagccaccctgaactttttgctgaccaaccggtcgcagaagatcccgccccagtacgcgctcagcaccgaggaggagcgcatcctgcgttacgtgcagcagagcgtgggcctgttcctgatgcaggagggggccacccccagcgccgcgctcgacatgaccgcgcgcaacatggagcccagcatgtacgccagcaaccgcccgttcatcaataaactgatggactacttgcatcgggcggccgccatgaactctgactatttcaccaacgccatcctgaatccccactggctcccgccgccggggttctacacgggcgagtacgacatgcccgaccccaatgacgggttcctgtgggacgatgtggacagcagcgtgttctccccccgaccgggtgctaacgagcgccccttgtggaagaaggaaggcagcgaccgacgcccgtcctcggcgctgtccggccgcgagggtgctgccgcggcggtgcccgaggccgccagtcctttcccgagcttgcccttctcgctgaacagtatccgcagcagcgagctgggcaggatcacgcgcccgcgcttgctgggcgaagaggagtacttgaatgactcgctgttgagacccgagcgggagaagaacttccccaataacgggatagaaagcctggtggacaagatgagccgctggaagacgtatgcgcaggagcacagggacgatccccgggcgtcgcagggggccacgagccggggcagcgccgcccgtaaacgccggtggcacgacaggcagcggggacagatgtgggacgatgaggactccgccgacgacagcagcgtgttggacttgggtgggagtggtaacccgttcgctcacctgcgcccccgtatcgggcgcatgatgtaagagaaaccgaaaataaatgatactcaccaaggccatggcgaccagcgtgcgttcgtttcttctctgttgttgttgtatctagtatgatgaggcgtgcgtacccggagggtcctcctccctcgtacgagagcgtgatgcagcaggcgatggcggcggcggcgatgcagcccccgctggaggctccttacgtgcccccgcggtacctggcgcctacggaggggcggaacagcattcgttactcggagctggcacccttgtacgataccacccggttgtacctggtggacaacaagtcggcggacatcgcctcgctgaactaccagaacgaccacagcaacttcctgaccaccgtggtgcagaacaatgacttcacccccacggaggccagcacccagaccatcaactttgacgagcgctcgcggtggggcggccagctgaaaaccatcatgcacaccaacatgcccaacgtgaacgagttcatgtacagcaacaagttcaaggcgcgggtgatggtctcccgcaagacccccaatggggtgacagtgacagaggattatgatggtagtcaggatgagctgaagtatgaatgggtggaatttgagctgcccgaaggcaacttctcggtgaccatgaccatcgacctgatgaacaacgccatcatcgacaattacttggcggtggggcggcagaacggggtgctggagagcgacatcggcgtgaagttcgacactaggaacttcaggctgggctgggaccccgtgaccgagctggtcatgcccggggtgtacaccaacgaggctttccatcccgatattgtcttgctgcccggctgcggggtggacttcaccgagagccgcctcagcaacctgctgggcattcgcaagaggcagcccttccaggaaggcttccagatcatgtacgaggatctggaggggggcaacatccccgcgctcctggatgtcgacgcctatgagaaaagcaaggaggatgcagcagctgaagcaactgcagccgtagctaccgcctctaccgaggtcaggggcgataattttgcaagcgccgcagcagtggcagcggccgaggcggctgaaaccgaaagtaagatagtcattcagccggtggagaaggatagcaagaacaggagctacaacgtactaccggacaagataaacaccgcctaccgcagctggtacctagcctacaactatggcgaccccgagaagggcgtgcgctcctggacgctgctcaccacctcggacgtcacctgcggcgtggagcaagtctactggtcgctgcccgacatgatgcaagacccggtcaccttccgctccacgcgtcaagttagcaactacccggtggtgggcgccgagctcctgcccgtctactccaagagcttcttcaacgagcaggccgtctactcgcagcagctgcgcgccttcacctcgcttacgcacgtcttcaaccgcttccccgagaaccagatcctcgtccgcccgcccgcgcccaccattaccaccgtcagtgaaaacgttcctgctctcacagatcacgggaccctgccgctgcgcagcagtatccggggagtccagcgcgtgaccgttactgacgccagacgccgcacctgcccctacgtctacaaggccctgggcatagtcgcgccgcgcgtcctctcgagccgcaccttctaaatgtccattctcatctcgcccagtaataacaccggttggggcctgcgcgcgcccagcaagatgtacggaggcgctcgccaacgctccacgcaacaccccgtgcgcgtgcgcgggcacttccgcgctccctggggcgccctcaagggccgcgtgcggtcgcgcaccaccgtcgacgacgtgatcgaccaggtggtggccgacgcgcgcaactacacccccgccgccgcgcccgtctccaccgtggacgccgtcatcgacagcgtggtggccgacgcgcgccggtacgcccgcgccaagagccggcggcggcgcatcgcccggcggcaccggagcacccccgccatgcgcgcggcgcgagccttgctgcgcagggccaggcgcacgggacgcagggccatgctcagggcggccagacgcgcggcttcaggcgccagcgccggcaggacccggagacgcgcggccacggcggcggcagcggccatcgccagcatgtcccgcccgcggcgagggaacgtgtactgggtgcgcgacgccgccaccggtgtgcgcgtgcccgtgcgcacccgcccccctcgcacttgaagatgttcacttcgcgatgttgatgtgtcccagcggcgaggaggatgtccaagcgcaaattcaaggaagagatgctccaggtcatcgcgcctgagatctacggccctgcggtggtgaaggaggaaagaaagccccgcaaaatcaagcgggtcaaaaaggacaaaaaggaagaagaaagtgatgtggacggattggtggagtttgtgcgcgagttcgccccccggcggcgcgtgcagtggcgcgggcggaaggtgcaaccggtgctgagacccggcaccaccgtggtcttcacgcccggcgagcgctccggcaccgcttccaagcgctcctacgacgaggtgtacggggatgatgatattctggagcaggcggccgagcgcctgggcgagtttgcttacggcaagcgcagccgttccgcaccgaaggaagaggcggtgtccatcccgctggaccacggcaaccccacgccgagcctcaagcccgtgaccttgcagcaggtgctgccgaccgcggcgccgcgccgggggttcaagcgcgagggcgaggatctgtaccccaccatgcagctgatggtgcccaagcgccagaagctggaagacgtgctggagaccatgaaggtggacccggacgtgcagcccgaggtcaaggtgcggcccatcaagcaggtggccccgggcctgggcgtgcagaccgtggacatcaagattcccacggagcccatggaaacgcagaccgagcccatgatcaagcccagcaccagcaccatggaggtgcagacggatccctggatgccatcggctcctagtcgaagaccccggcgcaagtacggcgcggccagcctgctgatgcccaactacgcgctgcatccttccatcatccccacgccgggctaccgcggcacgcgcttctaccgcggtcataccagcagccgccgccgcaagaccaccactcgccgccgccgtcgccgcaccgccgctgcaaccacccctgccgccctggtgcggagagtgtaccgccgcggccgcgcacctctgaccctgccgcgcgcgcgctaccacccgagcatcgccatttaaactttcgcctgctttgcagatcaatggccctcacatgccgccttcgcgttcccattacgggctaccgaggaagaaaaccgcgccgtagaaggctggcggggaacgggatgcgtcgccaccaccaccggcggcggcgcgccatcagcaagcggttggggggaggcttcctgcccgcgctgatccccatcatcgccgcggcgatcggggcgatccccggcattgcttccgtggcggtgcaggcctctcagcgccactgagacacacttggaaacatcttgtaataaaccaatggactctgacgctcctggtcctgtgatgtgttttcgtagacagatggaagacatcaatttttcgtccctggctccgcgacacggcacgcggccgttcatgggcacctggagcgacatcggcaccagccaactgaacgggggcgccttcaattggagcagtctctggagcgggcttaagaatttcgggtccacgcttaaaacctatggcagcaaggcgtggaacagcaccacagggcaggcgctgagggataagctgaaagagcagaacttccagcagaaggtggtcgatgggctcgcctcgggcatcaacggggtggtggacctggccaaccaggccgtgcagcggcagatcaacagccgcctggacccggtgccgcccgccggctccgtggagatgccgcaggtggaggaggagctgcctcccctggacaagcggggcgagaagcgaccccgccccgatgcggaggagacgctgctgacgcacacggacgagccgcccccgtacgaggaggcggtgaaactgggtctgcccaccacgcggcccatcgcgcccctggccaccggggtgctgaaacccgaaaagcccgcgaccctggacttgcctcctccccagccttcccgcccctctacagtggctaagcccctgccgccggtggccgtggcccgcgcgcgacccgggggcaccgcccgccctcatgcgaactggcagagcactctgaacagcatcgtgggtctgggagtgcagagtgtgaagcgccgccgctgctattaaacctaccgtagcgcttaacttgcttgtctgtgtgtgtatgtattatgtcgccgccgccgctgtccaccagaaggaggagtgaagaggcgcgtcgccgagttgcaagatggccaccccatcgatgctgccccagtgggcgtacatgcacatcgccggacaggacgcttcggagtacctgagtccgggtctggtgcagtttgcccgcgccacagacacctacttcagtctggggaacaagtttaggaaccccacggtggcgcccacgcacgatgtgaccaccgaccgcagccagcggctgacgctgcgcttcgtgcccgtggaccgcgaggacaacacctactcgtacaaagtgcgctacacgctggccgtgggcgacaaccgcgtgctggacatggccagcacctactttgacatccgcggcgtgctggatcggggccctagcttcaaaccctactccggcaccgcctacaacagtctggcccccaagggagcacccaacacttgtcagtggacatataaagccgatggtgaaactgccacagaaaaaacctatacatatggaaatgcacccgtgcagggcattaacatcacaaaagatggtattcaacttggaactgacaccgatgatcagccaatctacgcagataaaacctatcagcctgaacctcaagtgggtgatgctgaatggcatgacatcactggtactgatgaaaagtatggaggcagagctcttaagcctgataccaaaatgaagccttgttatggttcttttgccaagcctactaataaagaaggaggtcaggcaaatgtgaaaacaggaacaggcactactaaagaatatgacatagacatggctttctttgacaacagaagtgcggctgctgctggcctagctccagaaattgttttgtatactgaaaatgtggatttggaaactccagatacccatattgtatacaaagcaggcacagatgacagcagctcttctattaatttgggtcagcaagccatgcccaacagacctaactacattggtttcagagacaactttatcgggctcatgtactacaacagcactggcaatatgggggtgctggccggtcaggcttctcagctgaatgctgtggttgacttgcaagacagaaacaccgagctgtcctaccagctcttgcttgactctctgggtgacagaacccggtatttcagtatgtggaatcaggcggtggacagctatgatcctgatgtgcgcattattgaaaatcatggtgtggaggatgaacttcccaactattgtttccctctggatgctgttggcagaacagatacttatcagggaattaaggctaatggaactgatcaaaccacatggaccaaagatgacagtgtcaatgatgctaatgagataggcaagggtaatccattcgccatggaaatcaacatccaagccaacctgtggaggaacttcctctacgccaacgtggccctgtacctgcccgactcttacaagtacacgccggccaatgttaccctgcccaccaacaccaacacctacgattacatgaacggccgggtggtggcgccctcgctggtggactcctacatcaacatcggggcgcgctggtcgctggatcccatggacaacgtgaaccccttcaaccaccaccgcaatgcggggctgcgctaccgctccatgctcctgggcaacgggcgctacgtgcccttccacatccaggtgccccagaaatttttcgccatcaagagcctcctgctcctgcccgggtcctacacctacgagtggaacttccgcaaggacgtcaacatgatcctgcagagctccctcggcaacgacctgcgcacggacggggcctccatctccttcaccagcatcaacctctacgccaccttcttccccatggcgcacaacacggcctccacgctcgaggccatgctgcgcaacgacaccaacgaccagtccttcaacgactacctctcggcggccaacatgctctaccccatcccggccaacgccaccaacgtgcccatctccatcccctcgcgcaactgggccgccttccgcggctggtccttcacgcgtctcaagaccaaggagacgccctcgctgggctccgggttcgacccctacttcgtctactcgggctccatcccctacctcgacggcaccttctacctcaaccacaccttcaagaaggtctccatcaccttcgactcctccgtcagctggcccggcaacgaccggctcctgacgcccaacgagttcgaaatcaagcgcaccgtcgacggcgagggctacaacgtggcccagtgcaacatgaccaaggactggttcctggtccagatgctggcccactacaacatcggctaccagggcttctacgtgcccgagggctacaaggaccgcatgtactccttcttccgcaacttccagcccatgagccgccaggtggtggacgaggtcaactacaaggactaccaggccgtcaccctggcctaccagcacaacaactcgggcttcgtcggctacctcgcgcccaccatgcgccagggccagccctaccccgccaactacccctacccgctcatcggcaagagcgccgtcaccagcgtcacccagaaaaagttcctctgcgacagggtcatgtggcgcatccccttctccagcaacttcatgtccatgggcgcgctcaccgacctcggccagaacatgctctatgccaactccgcccacgcgctagacatgaatttcgaagtcgaccccatggatgagtccacccttctctatgttgtcttcgaagtcttcgacgtcgtccgagtgcaccagccccaccgcggcgtcatcgaggccgtctacctgcgcacccccttctcggccggtaacgccaccacctaagctcttgcttcttgcaagccatggccgcgggctccggcgagcaggagctcagggccatcatccgcgacctgggctgcgggccctacttcctgggcaccttcgataagcgcttcccgggattcatggccccgcacaagctggcctgcgccatcgtcaacacggccggccgcgagaccgggggcgagcactggctggccttcgcctggaacccgcgctcgaacacctgctacctcttcgaccccttcgggttctcggacgagcgcctcaagcagatctaccagttcgagtacgagggcctgctgcgccgcagcgccctggccaccgaggaccgctgcgtcaccctggaaaagtccacccagaccgtgcagggtccgcgctcggccgcctgcgggctcttctgctgcatgttcctgcacgccttcgtgcactggcccgaccgccccatggacaagaaccccaccatgaacttgctgacgggggtgcccaacggcatgctccagtcgccccaggtggaacccaccctgcgccgcaaccaggaggcgctctaccgcttcctcaactcccactccgcctactttcgctcccaccgcgcgcgcatcgagaaggccaccgccttcgaccgcatgaatcaagacatgtaaaccgtgtgtgtatgttaaatgtctttaataaacagcactttcatgttacacatgcatctgagatgatttatttagaaatcgaaagggttctgccgggtctcggcatggcccgcgggcagggacacgttgcggaactggtacttggccagccacttgaactcggggatcagcagtttgggcagcggggtgtcggggaaggagtcggtccacagcttccgcgtcagttgcagggcgcccagcaggtcgggcgcggagatcttgaaatcgcagttgggacccgcgttctgcgcgcgggagttgcggtacacggggttgcagcactggaacaccatcagggccgggtgcttcacgctcgccagcaccgtcgcgtcggtgatgctctccacgtcgaggtcctcggcgttggccatcccgaagggggtcatcttgcaggtctgccttcccatggtgggcacgcacccgggcttgtggttgcaatcgcagtgcagggggatcagcatcatctgggcctggtcggcgttcatccccgggtacatggccttcatgaaagcctccaattgcctgaacgcctgctgggccttggctccctcggtgaagaagaccccgcaggacttgctagagaactggttggtggcgcacccggcgtcgtgcacgcagcagcgcgcgtcgttgttggccagctgcaccacgctgcgcccccagcggttctgggtgatcttggcccggtcggggttctccttcagcgcgcgctgcccgttctcgctcgccacatccatctcgatcatgtgctccttctggatcatggtggtcccgtgcaggcaccgcagcttgccctcggcctcggtgcacccgtgcagccacagcgcgcacccggtgcactcccagttcttgtgggcgatctgggaatgcgcgtgcacgaagccctgcaggaagcggcccatcatggtggtcagggtcttgttgctagtgaaggtcagcggaatgccgcggtgctcctcgttgatgtacaggtggcagatgcggcggtacacctcgccctgctcgggcatcagctggaagttggctttcaggtcggtctccacgcggtagcggtccatcagcatagtcatgatttccatacccttctcccaggccgagacgatgggcaggctcatagggttcttcaccatcatcttagcgctagcagccgcggccagggggtcgctctcgtccagggtctcaaagctccgcttgccgtccttctcggtgatccgcaccggggggtagctgaagcccacggccgccagctcctcctcggcctgtctttcgtcctcgctgtcctggctgacgtcctgcaggaccacatgcttggtcttgcggggtttcttcttgggcggcagcggcggcggagatgttggagatggcgagggggagcgcgagttctcgctcaccactactatctcttcctcttcttggtccgaggccacgcggcggtaggtatgtctcttcgggggcagaggcggaggcgacgggctctcgccgccgcgacttggcggatggctggcagagccccttccgcgttcgggggtgcgctcccggcggcgctctgactgacttcctccgcggccggccattgtgttctcctagggaggaacaacaagcatggagactcagccatcgccaacctcgccatctgcccccaccgccgacgagaagcagcagcagcagaatgaaagcttaaccgccccgccgcccagccccgccacctccgacgcggccgtcccagacatgcaagagatggaggaatccatcgagattgacctgggctatgtgacgcccgcggagcacgaggaggagctggcagtgcgcttttcacaagaagagatacaccaagaacagccagagcaggaagcagagaatgagcagagtcaggctgggctcgagcatgacggcgactacctccacctgagcgggggggaggacgcgctcatcaagcatctggcccggcaggccaccatcgtcaaggatgcgctgctcgaccgcaccgaggtgcccctcagcgtggaggagctcagccgcgcctacgagttgaacctcttctcgccgcgcgtgccccccaagcgccagcccaatggcacctgcgagcccaacccgcgcctcaacttctacccggtcttcgcggtgcccgaggccctggccacctaccacatctttttcaagaaccaaaagatccccgtctcctgccgcgccaaccgcacccgcgccgacgcccttttcaacctgggtcccggcgcccgcctacctgatatcgcctccttggaagaggttcccaagatcttcgagggtctgggcagcgacgagactcgggccgcgaacgctctgcaaggagaaggaggagagcatgagcaccacagcgccctggtcgagttggaaggcgacaacgcgcggctggcggtgctcaaacgcacggtcgagctgacccatttcgcctacccggctctgaacctgccccccaaagtcatgagcgcggtcatggaccaggtgctcatcaagcgcgcgtcgcccatctccgaggacgagggcatgcaagactccgaggagggcaagcccgtggtcagcgacgagcagctggcccggtggctgggtcctaatgctagtccccagagtttggaagagcggcgcaaactcatgatggccgtggtcctggtgaccgtggagctggagtgcctgcgccgcttcttcgccgacgcggagaccctgcgcaaggtcgaggagaacctgcactacctcttcaggcacgggttcgtgcgccaggcctgcaagatctccaacgtggagctgaccaacctggtctcctacatgggcatcttgcacgagaaccgcctggggcagaacgtgctgcacaccaccctgcgcggggaggcccggcgcgactacatccgcgactgcgtctacctctacctctgccacacctggcagacgggcatgggcgtgtggcagcagtgtctggaggagcagaacctgaaagagctctgcaagctcctgcagaagaacctcaagggtctgtggaccgggttcgacgagcgcaccaccgcctcggacctggccgacctcattttccccgagcgcctcaggctgacgctgcgcaacggcctgcccgactttatgagccaaagcatgttgcaaaactttcgctctttcatcctcgaacgctccggaatcctgcccgccacctgctccgcgctgccctcggacttcgtgccgctgaccttccgcgagtgccccccgccgctgtggagccactgctacctgctgcgcctggccaactacctggcctaccactcggacgtgatcgaggacgtcagcggcgagggcctgctcgagtgccactgccgctgcaacctctgcacgccgcaccgctccctggcctgcaacccccagctgctgagcgagacccagatcatcggcaccttcgagttgcaagggcccagcgaaggcgagggttcagccgccaaggggggtctgaaactcaccccggggctgtggacctcggcctacttgcgcaagttcgtgcccgaggactaccatcccttcgagatcaggttctacgaggaccaatcccatccgcccaaggccgagctgtcggcctgcgtcatcacccagggggcgatcctggcccaattgcaagccatccagaaatcccgccaagaattcttgctgaaaaagggccgcggggtctacctcgacccccagaccggtgaggagctcaaccccggcttcccccaggatgccccgaggaaacaagaagctgaaagtggagctgccgcccgtggaggatttggaggaagactgggagaacagcagtcaggcagaggaggaggagatggaggaagactgggacagcactcaggcagaggaggacagcctgcaagacagtctggaggaagacgaggaggaggcagaggaggaggtggaagaagcagccgccgccagaccgtcgtcctcggcgggggagaaagcaagcagcacggataccatctccgctccgggtcggggtcccgctcgaccacacagtagatgggacgagaccggacgattcccgaaccccaccacccagaccggtaagaaggagcggcagggatacaagtcctggcgggggcacaaaaacgccatcgtctcctgcttgcaggcctgcgggggcaacatctccttcacccggcgctacctgctcttccaccgcggggtgaactttccccgcaacatcttgcattactaccgtcacctccacagcccctactacttccaagaagaggcagcagcagcagaaaaagaccagcagaaaaccagcagctagaaaatccacagcggcggcagcaggtggactgaggatcgcggcgaacgagccggcgcaaacccgggagctgaggaaccggatctttcccaccctctatgccatcttccagcagagtcgggggcaggagcaggaactgaaagtcaagaaccgttctctgcgctcgctcacccgcagttgtctgtatcacaagagcgaagaccaacttcagcgcactctcgaggacgccgaggctctcttcaacaagtactgcgcgctcactcttaaagagtagcccgcgcccgcccagtcgcagaaaaaggcgggaattacgtcacctgtgcccttcgccctagccgcctccacccatcatcatgagcaaagagattcccacgccttacatgtggagctaccagccccagatgggcctggccgccggtgccgcccaggactactccacccgcatgaattggctcagcgccgggcccgcgatgatctcacgggtgaatgacatccgcgcccaccgaaaccagatactcctagaacagtcagcgctcaccgccacgccccgcaatcacctcaatccgcgtaattggcccgccgccctggtgtaccaggaaattccccagcccacgaccgtactacttccgcgagacgcccaggccgaagtccagctgactaactcaggtgtccagctggcgggcggcgccaccctgtgtcgtcaccgccccgctcagggtataaagcggctggtgatccggggcagaggcacacagctcaacgacgaggtggtgagctcttcgctgggtctgcgacctgacggagtcttccaactcgccggatcggggagatcttccttcacgcctcgtcaggccgtcctgactttggagagttcgtcctcgcagccccgctcgggtggcatcggcactctccagttcgtggaggagttcactccctcggtctacttcaaccccttctccggctcccccggccactacccggacgagttcatcccgaacttcgacgccatcagcgagtcggtggacggctacgattgaatgtcccatggtggcgcagctgacctagctcggcttcgacacctggaccactgccgccgcttccgctgcttcgctcgggatctcgccgagtttgcctactttgagctgcccgaggagcaccctcagggcccggcccacggagtgcggatcgtcgtcgaagggggcctcgactcccacctgcttcggatcttcagccagcgtccgatcctggtcgagcgcgagcaaggacagacccttctgactctgtactgcatctgcaaccaccccggcctgcatgaaagtctttgttgtctgctgtgtactgagtataataaaagctgagatcagcgactactccggacttccgtgtgttcctgaatccatcaaccagtctttgttcttcaccgggaacgagaccgagctccagctccagtgtaagccccacaagaagtacctcacctggctgttccagggctccccgatcgccgttgtcaaccactgcgacaacgacggagtcctgctgagcggccctgccaaccttactttttccacccgcagaagcaagctccagctcttccaacccttcctccccgggacctatcagtgcgtctcgggaccctgccatcacaccttccacctgatcccgaataccacagcgtcgctccccgctactaacaaccaaactaacctccaccaacgccaccgtcgcgacggccacaatacatgcccatattagactatgaggccgagccacagcgacccatgctccccgctattagttacttcaatctaaccggcggagatgactgacccactggccaacaacaacgtcaacgaccttctcctggacatggacggccgcgcctcggagcagcgactcgcccaacttcgcattcgccagcagcaggagagagccgtcaaggagctgcaggatgcggtggccatccaccagtgcaagagaggcatcttctgcctggtgaaacaggccaagatctcctacgaggtcactccaaacgaccatcgcctctcctacgagctcctgcagcagcgccagaagttcacctgcctggtcggagtcaaccccatcgtcatcacccagcagtctggcgataccaaggggtgcatccactgctcctgcgactcccccgactgcgtccacactctgatcaagaccctctgcggcctccgcgacctcctccccatgaactaatcacccccttatccagtgaaataaagatcatattgatgatgattttacagaaataaaaaataatcatttgatttgaaataaagatacaatcatattgatgatttgagtttaacaaaaaaataaagaatcacttacttgaaatctgataccaggtctctgtccatgttttctgccaacaccacttcactcccctcttcccagctctggtactgcaggccccggcgggctgcaaacttcctccacacgctgaaggggatgtcaaattcctcctgtccctcaatcttcattttatcttctatcagatgtccaaaaagcgcgtccgggtggatgatgacttcgaccccgtctacccctacgatgcagacaacgcaccgaccgtgcccttcatcaacccccccttcgtctcttcagatggattccaagagaagcccctgggggtgttgtccctgcgactggccgaccccgtcaccaccaagaacggggaaatcaccctcaagctgggagagggggtggacctcgattcctcgggaaaactcatctccaacacggccaccaaggccgccgcccctctcagtttttccaacaacaccatttcccttaacatggatcaccccttttacactaaagatggaaaattatccttacaagtttctccaccattaaatatactgagaacaagcattctaaacacactagctttaggttttggatcaggtttaggactccgtggctctgccttggcagtacagttagtctctccacttacatttgatactgatggaaacataaagcttaccttagacagaggtttgcatgttacaacaggagatgcaattgaaagcaacataagctgggctaaaggtttaaaatttgaagatggagccatagcaaccaacattggaaatgggttagagtttggaagcagtagtacagaaacaggtgttgatgatgcttacccaatccaagttaaacttggatctggccttagctttgacagtacaggagccataatggctggtaacaaagaagacgataaactcactttgtggacaacacctgatccatcaccaaactgtcaaatactcgcagaaaatgatgcaaaactaacactttgcttgactaaatgtggtagtcaaatactggccactgtgtcagtcttagttgtaggaagtggaaacctaaaccccattactggcaccgtaagcagtgctcaggtgtttctacgttttgatgcaaacggtgttcttttaacagaacattctacactaaaaaaatactgggggtataggcagggagatagcatagatggcactccatataccaatgctgtaggattcatgcccaatttaaaagcttatccaaagtcacaaagttctactactaaaaataatatagtagggcaagtatacatgaatggagatgtttcaaaacctatgcttctcactataaccctcaatggtactgatgacagcaacagtacatattcaatgtcattttcatacacctggactaatggaagctatgttggagcaacatttggggctaactcttataccttctcatacatcgcccaagaatgaacactgtatcccaccctgcatgccaacccttcccaccccactctgtggaacaaactctgaaacacaaaataaaataaagttcaagtgttttattgattcaacagttttacaggattcgagcagttatttttcctccaccctcccaggacatggaatacaccaccctctccccccgcacagccttgaacatctgaatgccattggtgatggacatgcttttggtctccacgttccacacagtttcagagcgagccagtctcgggtcggtcagggagatgaaaccctccgggcactcccgcatctgcacctcacagctcaacagctgaggattgtcctcggtggtcgggatcacggttatctggaagaagcagaagagcggcggtgggaatcatagtccgcgaacgggatcggccggtggtgtcgcatcaggccccgcagcagtcgctgccgccgccgctccgtcaagctgctgctcagggggtccgggtccagggactccctcagcatgatgcccacggccctcagcatcagtcgtctggtgcggcgggcgcagcagcgcatgcggatctcgctcaggtcgctgcagtacgtgcaacacagaaccaccaggttgttcaacagtccatagttcaacacgctccagccgaaactcatcgcgggaaggatgctacccacgtggccgtcgtaccagatcctcaggtaaatcaagtggtgccccctccagaacacgctgcccacgtacatgatctccttgggcatgtggcggttcaccacctcccggtaccacatcaccctctggttgaacatgcagccccggatgatcctgcggaaccacagggccagcaccgccccgcccgccatgcagcgaagagaccccgggtcccggcaatggcaatggaggacccaccgctcgtacccgtggatcatctgggagctgaacaagtctatgttggcacagcacaggcatatgctcatgcatctcttcagcactctcaactcctcgggggtcaaaaccatatcccagggcacggggaactcttgcaggacagcgaaccccgcagaacagggcaatcctcgcacagaacttacattgtgcatggacagggtatcgcaatcaggcagcaccgggtgatcctccaccagagaagcgcgggtctcggtctcctcacagcgtggtaagggggccggccgatacgggtgatggcgggacgcggctgatcgtgttcgcgaccgtgtcatgatgcagttgctttcggacattttcgtacttgctgtagcagaacctggtccgggcgctgcacaccgatcgccggcggcggtctcggcgcttggaacgctcggtgttgaaattgtaaaacagccactctctcagaccgtgcagcagatctagggcctcaggagtgatgaagatcccatcatgcctgatggctctgatcacatcgaccaccgtggaatgggccagacccagccagatgatgcaattttgttgggtttcggtgacggcgggggagggaagaacaggaagaaccatgattaacttttaatccaaacggtctcggagtacttcaaaatgaagatcgcggagatggcacctctcgcccccgctgtgttggtggaaaataacagccaggtcaaaggtgatacggttctcgagatgttccacggtggcttccagcaaagcctccacgcgcacatccagaaacaagacaatagcgaaagcgggagggttctctaattcctcaatcatcatgttacactcctgcaccatccccagataattttcatttttccagccttgaatgattcgaactagttcgtgaggtaaatccaagccagccatgataaagagctcgcgcagagcgccctccaccggcattcttaagcacaccctcataattccaagatattctgctcctggttcacctgcagcagattgacaagcggaatatcaaaatctctgccgcgatccctgagctcctccctcagcaataactgtaagtactctttcatatcctctccgaaatttttagccataggaccaccaggaataagattagggcaagccacagtacagataaaccgaagtcctccccagtgagcattgccaaatgcaagactgctataagcatgctggctagacccggtgatatcttccagataactggacagaaaatcgcccaggcaatttttaagaaaatcaacaaaagaaaaatcctccaggtggacgtttagagcctcgggaacaacgatgaagtaaatgcaagcggtgcgttccagcatggttagttagctgatctgtagaaaaaacaaaaatgaacattaaaccatgctagcctggcgaacaggtgggtaaatcgttctctccagcaccaggcaggccacggggtctccggcgcgaccctcgtaaaaattgtcgctatgattgaaaaccatcacagagagacgttcccggtggccggcgtgaatgattcgacaagatgaatacacccccggaacattggcgtccgcgagtgaaaaaaagcgcccgaggaagcaataaggcactacaatgctcagtctcaagtccagcaaagcgatgccatgcggatgaagcacaaaattctcaggtgcgtacaaaatgtaattactcccctcctgcacaggcagcaaagcccccgatccctccaggtacacatacaaagcctcagcgtccatagcttaccgagcagcagcacacaacaggcgcaagagtcagagaaaggctgagctctaacctgtccacccgctctctgctcaatatatagcccagatctacactgacgtaaaggccaaagtctaaaaatacccgccaaataatcacacacgcccagcacacgcccagaaaccggtgacacactcaaaaaaatacgcgcacttcctcaaacgcccaaaactgccgtcatttccgggttcccacgctacgtcatcaaaacacgactttcaaattccgtcgaccgttaaaaacgtcacccgccccgcccctaacggtcgcccgtctctcagccaatcagcgccccgcatccccaaattcaaacacctcatttgcatattaacgcgcacaaaaagtttgaggtatattattgatgatgg

SEQ ID NO: 12 - DNA, 32788 bp, Artificial Sequence
  Description of Artificial Sequence: Synthetic polynucleotide
ccatcttcaataatatacctcaaactttttgtgcgcgttaatatgcaaatgaggcgtttgaatttggggaggaagggcggtgattggtcgagggatgagcgaccgttaggggcggggcgagtgacgttttgatgacgtggttgcgaggaggagccagtttgcaagttctcgtgggaaaagtgacgtcaaacgaggtgtggtttgaacacggaaatactcaattttcccgcgctctctgacaggaaatgaggtgtttctgggcggatgcaagtgaaaacgggccattttcgcgcgaaaactgaatgaggaagtgaaaatctgagtaatttcgcgtttatggcagggaggagtatttgccgagggccgagtagactttgaccgattacgtgggggtttcgattaccgtgtttttcacctaaatttccgcgtacggtgtcaaagtccggtgtttttacgtaggtgtcagctgatcgccagggtatttaaacctgcgctctccagtcaagaggccactcttgagtgccagcgagaagagttttctcctccgcgccgcgagtcagatctacactttgaaagtagggataacagggtaatgacattgattattgactagttgttaatagtaatcaattacggggtcattagttcatagcccatatatggagttccgcgttacataacttacggtaaatggcccgcctggctgaccgcccaacgacccccgcccattgacgtcaataatgacgtatgttcccatagtaacgccaatagggactttccattgacgtcaatgggtggagtatttacggtaaactgcccacttggcagtacatcaagtgtatcatatgccaagtccgccccctattgacgtcaatgacggtaaatggcccgcctggcattatgcccagtacatgaccttacgggactttcctacttggcagtacatctacgtattagtcatcgctattaccatggtgatgcggttttggcagtacaccaatgggcgtggatagcggtttgactcacggggatttccaagtctccaccccattgacgtcaatgggagtttgttttggcaccaaaatcaacgggactttccaaaatgtcgtaataaccccgccccgttgacgcaaatgggcggtaggcgtgtacggtgggaggtctatataagcagagctcgtttagtgaaccgtcagatcgcctggaacgccatccacgctgttttgacctccatagaagacagcgatcgcgccaccatggccgggatgttccaggcactgtccgaaggctgcacaccctatgatattaaccagatgctgaatgtcctgggagaccaccaggtctctggcctggagcagctggagagcatcatcaacttcgagaagctgaccgagtggacaagctccaatgtgatgcctatcctgtccccactgaccaagggcatcctgggcttcgtgtttaccctgacagtgccttctgagcggggcctgtcttgcatcagcgaggcagacgcaaccacaccagagtccgccaatctgggcgaggagatcctgtctcagctgtacctgtggccccgggtgacatatcactccccttcttacgcctatcaccagttcgagcggagagccaagtacaagagacacttcccaggctttggccagtctctgctgttcggctaccccgtgtacgtgttcggcgattgcgtgcagggcgactgggatgccatccggtttagatactgcgcaccacctggatatgcactgctgaggtgtaacgacaccaattattccgccctgctggcagtgggcgccctggagggccctcgcaatcaggattggctgggcgtgccaaggcagctggtgacacgcatgcaggccatccagaacgcaggcctgtgcaccctggtggcaatgctggaggagacaatcttctggctgcaggcctttctgatggccctgaccgacagcggccccaagacaaacatcatcgtggattcccagtacgtgatgggcatctccaagccttctttccaggagtttgtggactgggagaacgtgagcccagagctgaattccaccgatcagccattctggcaggcaggaatcctggcaaggaacctggtgcctatggtggccacagtgcagggccagaatctgaagtaccagggccagagcctggtcatcagcgcctccatcatcgtgtttaacctgctggagctggagggcgactatcgggacgatggcaacgtgtgggtgcacaccccactgagccccagaacactgaacgcctgggtgaaggccgtggaggagaagaagggcatcccagtgcacctggagctggcctccatgaccaatatggagctgatgtctagcatcgtgcaccagcaggtgaggacatacggacccgtgttcatgtgcctgggaggcctgctgaccatggtggcaggagccgtgtggctgacagtgcgggtgctggagctgttcagagccgcccagctggccaacgatgtggtgctgcagatcatggagctgtgcggagcagcctttcgccaggtgtgccacaccacagtgccatggcccaatgcctccctgacccccaagtggaacaatgagacaacacagcctcagatcgccaactgtagcgtgtacgacttcttcgtgtggctgcactactatagcgtgagggataccctgtggccccgcgtgacataccacatgaataagtacgcctatcacatgctggagaggcgcgccaagtataagagaggccctggcccaggcgcaaagtttgtggcagcatggaccctgaaggccgccgccggccccggccccggccagtatatcaaggctaacagtaagttcattggaatcacagagctgggacccggacctggataatgagtttaaactcccatttaaatgtgagggttaatgcttcgagcagacatgataagatacattgatgagtttggacaaaccacaactagaatgcagtgaaaaaaatgctttatttgtgaaatttgtgatgctattgctttatttgtaaccattataagctgcaataaacaagttaacaacaacaattgcattcattttatgtttcaggttcagggggagatgtgggaggttttttaaagcaagtaaaacctctacaaatgtggtaaaataactataacggtcctaaggtagcgagtgagtagtgttctggggcgggggaggacctgcatgagggccagaataactgaaatctgtgcttttctgtgtgttgcagcagcatgagcggaagcggctcctttgagggaggggtattcagcccttatctgacggggcgtctcccctcctgggcgggagtgcgtcagaatgtgatgggatccacggtggacggccggcccgtgcagcccgcgaactcttcaaccctgacctatgcaaccctgagctcttcgtcgttggacgcagctgccgccgcagctgctgcatctgccgccagcgccgtgcgcggaatggccatgggcgccggctactacggcactctggtggccaactcgagttccaccaataatcccgccagcctgaacgaggagaagctgttgctgctgatggcccagctcgaggccttgacccagcgcctgggcgagctgacccagcaggtggctcagctgcaggagcagacgcgggccgcggttgccacggtgaaatccaaataaaaaatgaatcaataaataaacggagacggttgttgattttaacacagagtctgaatctttatttgatttttcgcgcgcggtaggccctggaccaccggtctcgatcattgagcacccggtggatcttttccaggacccggtagaggtgggcttggatgttgaggtacatgggcatgagcccgtcccgggggtggaggtagctccattgcagggcctcgtgctcgggggtggtgttgtaaatcacccagtcatagcaggggcgcagggcatggtgttgcacaatatctttgaggaggagactgatggccacgggcagccctttggtgtaggtgtttacaaatctgttgagctgggagggatgcatgcggggggagatgaggtgcatcttggcctggatcttgagattggcgatgttaccgcccagatcccgcctggggttcatgttgtgcaggaccaccagcacggtgtatccggtgcacttggggaatttatcatgcaacttggaagggaaggcgtgaaagaatttggcgacgcctttgtgcccgcccaggttttccatgcactcatccatgatgatggcgatgggcccgtgggcggcggcctgggcaaagacgtttcgggggtcggacacatcatagttgtggtcctgggtgaggtcatcataggccattttaatgaatttggggcggagggtgccggactgggggacaaaggtaccctcgatcccgggggcgtagttcccctcacagatctgcatctcccaggctttgagctcggagggggggatcatgtccacctgcggggcgataaagaacacggtttccggggcgggggagatgagctgggccgaaagcaagttccggagcagctgggacttgccgcagccggtggggccgtagatgaccccgatgaccggctgcaggtggtagttgagggagagacagctgccgtcctcccggaggaggggggccacctcgttcatcatctcgcgcacgtgcatgttctcgcgcaccagttccgccaggaggcgctctccccccagggataggagctcctggagcgaggcgaagtttttcagcggcttgagtccgtcggccatgggcattttggagagggtttgttgcaagagttccaggcggtcccagagctcggtgatgtgctctacggcatctcgatccagcagacctcctcgtttcgcgggttgggacggctgcgggagtagggcaccagacgatgggcgtccagcgcagccagggtccggtccttccagggtcgcagcgtccgcgtcagggtggtctccgtcacggtgaaggggtgcgcgccgggctgggcgcttgcgagggtgcgcttcaggctcatccggctggtcgaaaaccgctcccgatcggcgccctgcgcgtcggccaggtagcaattgaccatgagttcgtagttgagcgcctcggccgcgtggcctttggcgcggagcttacctttggaagtctgcccgcaggcgggacagaggagggacttgagggcgtagagcttgggggcgaggaagacggactcgggggcgtaggcgtccgcgccgcagtgggcgcagacggtctcgcactccacgagccaggtgaggtcgggctggtcggggtcaaaaaccagtttcccgccgttctttttgatgcgtttcttacctttggtctccatgagctcgtgtccccgctgggtgacaaagaggctgtccgtgtccccgtagaccgactttatgggccggtcctcgagcggtgtgccgcggtcctcctcgtagaggaaccccgcccactccgagacgaaagcccgggtccaggccagcacgaaggaggccacgtgggacgggtagcggtcgttgtccaccagcgggtccaccttttccagggtatgcaaacacatgtccccctcgtccacatccaggaaggtgattggcttgtaagtgtaggccacgtgaccgggggtcccggccgggggggtataaaagggtgcgggtccctgctcgtcctcactgtcttccggatcgctgtccaggagcgccagctgttggggtaggtattccctctcgaaggcgggcatgacctcggcactcaggttgtcagtttctagaaacgaggaggatttgatattgacggtgccggcggagatgcctttcaagagcccctcgtccatctggtcagaaaagacgatctttttgttgtcgagcttggtggcgaaggagccgtagagggcgttggagaggagcttggcgatggagcgcatggtctggtttttttccttgtcggcgcgctccttggcggcgatgttgagctgcacgtactcgcgcgccacgcacttccattcggggaagacggtggtcagctcgtcgggcacgattctgacctgccagccccgattatgcagggtgatgaggtccacactggtggccacctcgccgcgcaggggctcattagtccagcagaggcgtccgcccttgcgcgagcagaaggggggcagggggtccagcatgacctcgtcgggggggtcggcatcgatggtgaagatgccgggcaggaggtcggggtcaaagtagctgatggaagtggccagatcgtccagggcagcttgccattcgcgcacggccagcgcgctctcgtagggactgaggggcgtgccccagggcatgggatgggtaagcgcggaggcgtacatgccgcagatgtcgtagacgtagaggggctcctcgaggatgccgatgtaggtggggtagcagcgccccccgcggatgctggcgcgcacgtagtcatacagctcgtgcgagggggcgaggagccccgggcccaggttggtgcgactgggcttttcggcgcggtagacgatctggcggaaaatggcatgcgagttggaggagatggtgggcctttggaagatgttgaagtgggcgtggggcagtccgaccgagtcgcggatgaagtgggcgtaggagtcttgcagcttggcgacgagctcggcggtgactaggacgtccagagcgcagtagtcgagggtctcctggatgatgtcatacttgagctgtcccttttgtttccacagctcgcggttgagaaggaactcttcgcggtccttccagtactcttcgagggggaacccgtcctgatctgcacggtaagagcctagcatgtagaactggttgacggccttgtaggcgcagcagcccttctccacggggagggcgtaggcctgggcggccttgcgcagggaggtgtgcgtgagggcgaaagtgtccctgaccatgaccttgaggaactggtgcttgaagtcgatatcgtcgcagcccccctgctcccagagctggaagtccgtgcgcttcttgtaggcggggttgggcaaagcgaaagtaacatcgttgaagaggatcttgcccgcgcggggcataaagttgcgagtgatgcggaaaggttggggcacctcggcccggttgttgatgacctgggcggcgagcacgatctcgtcgaagccgttgatgttgtggcccacgatgtagagttccacgaatcgcggacggcccttgacgtggggcagtttcttgagctcctcgtaggtgagctcgtcggggtcgctgagcccgtgctgctcgagcgcccagtcggcgagatgggggttggcgcggaggaaggaagtccagagatccacggccagggcggtttgcagacggtcccggtactgacggaactgctgcccgacggccattttttcgggggtgacgcagtagaaggtgcgggggtccccgtgccagcgatcccatttgagctggagggcgagatcgagggcgagctcgacgagccggtcgtccccggagagtttcatgaccagcatgaaggggacgagctgcttgccgaaggaccccatccaggtgtaggtttccacatcgtaggtgaggaagagcctttcggtgcgaggatgcgagccgatggggaagaactggatctcctgccaccaattggaggaatggctgttgatgtgatggaagtagaaatgccgacggcgcgccgaacactcgtgcttgtgtttatacaagcggccacagtgctcgcaacgctgcacgggatgcacgtgctgcacgagctgtacctgagttcctttgacgaggaatttcagtgggaagtggagtcgtggcgcctgcatctcgtgctgtactacgtcgtggtggtcggcctggccctcttctgcctcgatggtggtcatgctgacgagcccgcgcgggaggcaggtccagacctcggcgcgagcgggtcggagagcgaggacgagggcgcgcaggccggagctgtccagggtcctgagacgctgcggagtcaggtcagtgggcagcggcggcgcgcggttgacttgcaggagtttttccagggcgcgcgggaggtccagatggtacttgatctccaccgcgccattggtggcgacgtcgatggcttgcagggtcccgtgcccctggggtgtgaccaccgtcccccgtttcttcttgggcggctggggcgacgggggcggtgcctcttccatggttagaagcggcggcgaggacgcgcgccgggcggcaggggcggctcggggcccggaggcaggggcggcaggggcacgtcggcgccgcgcgcgggtaggttctggtactgcgcccggagaagactggcgtgagcgacgacgcgacggttgacgtcctggatctgacgcctctgggtgaaggccacgggacccgtgagtttgaacctgaaagagagttcgacagaatcaatctcggtatcgttgacggcggcctgccgcaggatctcttgcacgtcgcccgagttgtcctggtaggcgatctcggtcatgaactgctcgatctcctcctcttgaaggtctccgcggccggcgcgctccacggtggccgcgaggtcgttggagatgcggcccatgagctgcgagaaggcgttcatgcccgcctcgttccagacgcggctgtagaccacgacgccctcgggatcgcgggcgcgcatgaccacctgggcgaggttgagctccacgtggcgcgtgaagaccgcgtagttgcagaggcgctggtagaggtagttgagcgtggtggcgatgtgctcggtgacgaagaaatacatgatccagcggcggagcggcatctcgctgacgtcgcccagcgcctccaaacgttccatggcctcgtaaaagtccacggcgaagttgaaaaactgggagttgcgcgccgagacggtcaactcctcctccagaagacggatgagctcggcgatggtggcgcgcacctcgcgctcgaaggcccccgggagttcctccacttcctcttcttcctcctccactaacatctcttctacttcctcctcaggcggcagtggtggcgggggagggggcctgcgtcgccggcggcgcacgggcagacggtcgatgaagcgctcgatggtctcgccgcgccggcgtcgcatggtctcggtgacggcgcgcccgtcctcgcggggccgcagcgtgaagacgccgccgcgcatctccaggtggccgggggggtccccgttgggcagggagagggcgctgacgatgcatcttatcaattgccccgtagggactccgcgcaaggacctgagcgtctcgagatccacgggatctgaaaaccgctgaacgaaggcttcgagccagtcgcagtcgcaaggtaggctgagcacggtttcttctggcgggtcatgttggttgggagcggggcgggcgatgctgctggtgatgaagttgaaataggcggttctgagacggcggatggtggcgaggagcaccaggtctttgggcccggcttgctggatgcgcagacggtcggccatgccccaggcgtggtcctgacacctggccaggtccttgtagtagtcctgcatgagccgctccacgggcacctcctcctcgcccgcgcggccgtgcatgcgcgtgagcccgaagccgcgctggggctggacgagcgccaggtcggcgacgacgcgctcggcgaggatggcttgctggatctgggtgagggtggtctggaagtcatcaaagtcgacgaagcggtggtaggctccggtgttgatggtgtaggagcagttggccatgacggaccagttgacggtctggtggcccggacgcacgagctcgtggtacttgaggcgcgagtaggcgcgcgtgtcgaagatgtagtcgttgcaggtgcgcaccaggtactggtagccgatgaggaagtgcggcggcggctggcggtagagcggccatcgctcggtggcgggggcgccgggcgcgaggtcctcgagcatggtgcggtggtagccgtagatgtacctggacatccaggtgatgccggcggcggtggtggaggcgcgcgggaactcgcggacgcggttccagatgttgcgcagcggcaggaagtagttcatggtgggcacggtctggcccgtgaggcgcgcgcagtcgtggatgctctatacgggcaaaaacgaaagcggtcagcggctcgactccgtggcctggaggctaagcgaacgggttgggctgcgcgtgtaccccggttcgaatctcgaatcaggctggagccgcagctaacgtggtattggcactcccgtctcgacccaagcctgcaccaaccctccaggatacggaggcgggtcgttttgcaacttttttttggaggccggatgagactagtaagcgcggaaagcggccgaccgcgatggctcgctgccgtagtctggagaagaatcgccagggttgcgttgcggtgtgccccggttcgaggccggccggattccgcggctaacgagggcgtggctgccccgtcgtttccaagaccccatagccagccgacttctccagttacggagcgagcccctcttttgttttgtttgtttttgccagatgcatcccgtactgcggcagatgcgcccccaccaccctccaccgcaacaacagccccctccacagccggcgcttctgcccccgccccagcagcaacttccagccacgaccgccgcggccgccgtgagcggggctggacagagttatgatcaccagctggccttggaagagggcgaggggctggcgcgcctgggggcgtcgtcgccggagcggcacccgcgcgtgcagatgaaaagggacgctcgcgaggcctacgtgcccaagcagaacctgttcagagacaggagcggcgaggagcccgaggagatgcgcgcggcccggttccacgcggggcgggagctgcggcgcggcctggaccgaaagagggtgctgagggacgaggatttcgaggcggacgagctgacggggatcagccccgcgcgcgcgcacgtggccgcggccaacctggtcacggcgtacgagcagaccgtgaaggaggagagcaacttccaaaaatccttcaacaaccacgtgcgcaccctgatcgcgcgcgaggaggtgaccctgggcctgatgcacctgtgggacctgctggaggccatcgtgcagaaccccaccagcaagccgctgacggcgcagctgttcctggtggtgcagcatagtcgggacaacgaagcgttcagggaggcgctgctgaatatcaccgagcccgagggccgctggctcctggacctggtgaacattctgcagagcatcgtggtgcaggagcgcgggctgccgctgtccgagaagctggcggccatcaacttctcggtgctgagtttgggcaagtactacgctaggaagatctacaagaccccgtacgtgcccatagacaaggaggtgaagatcgacgggttttacatgcgcatgaccctgaaagtgctgaccctgagcgacgatctgggggtgtaccgcaacgacaggatgcaccgtgcggtgagcgccagcaggcggcgcgagctgagcgaccaggagctgatgcatagtctgcagcgggccctgaccggggccgggaccgagggggagagctactttgacatgggcgcggacctgcactggcagcccagccgccgggccttggaggcggcggcaggaccctacgtagaagaggtggacgatgaggtggacgaggagggcgagtacctggaagactgatggcgcgaccgtatttttgctagatgcaacaacaacagccacctcctgatcccgcgatgcgggcggcgctgcagagccagccgtccggcattaactcctcggacgattggacccaggccatgcaacgcatcatggcgctgacgacccgcaaccccgaagcctttagacagcagccccaggccaaccggctctcggccatcctggaggccgtggtgccctcgcgctccaaccccacgcacgagaaggtcctggccatcgtgaacgcgctggtggagaacaaggccatccgcggcgacgaggccggcctggtgtacaacgcgctgctggagcgcgtggcccgctacaacagcaccaacgtgcagaccaacctggaccgcatggtgaccgacgtgcgcgaggccgtggcccagcgcgagcggttccaccgcgagtccaacctgggatccatggtggcgctgaacgccttcctcagcacccagcccgccaacgtgccccggggccaggaggactacaccaacttcatcagcgccctgcgcctgatggtgaccgaggtgccccagagcgaggtgtaccagtccgggccggactacttcttccagaccagtcgccagggcttgcagaccgtgaacctgagccaggctttcaagaacttgcagggcctgtggggcgtgcaggccccggtcggggaccgcgcgacggtgtcgagcctgctgacgccgaactcgcgcctgctgctgctgctggtggcccccttcacggacagcggcagcatcaaccgcaactcgtacctgggctacctgattaacctgtaccgcgaggccatcggccaggcgcacgtggacgagcagacctaccaggagatcacccacgtgagccgcgccctgggccaggacgacccgggcaacctggaagccaccctgaactttttgctgaccaaccggtcgcagaagatcccgccccagtacgcgctcagcaccgaggaggagcgcatcctgcgttacgtgcagcagagcgtgggcctgttcctgatgcaggagggggccacccccagcgccgcgctcgacatgaccgcgcgcaacatggagcccagcatgtacgccagcaaccgcccgttcatcaataaactgatggactacttgcatcgggcggccgccatgaactctgactatttcaccaacgccatcctgaatccccactggctcccgccgccggggttctacacgggcgagtacgacatgcccgaccccaatgacgggttcctgtgggacgatgtggacagcagcgtgttctccccccgaccgggtgctaacgagcgccccttgtggaagaaggaaggcagcgaccgacgcccgtcctcggcgctgtccggccgcgagggtgctgccgcggcggtgcccgaggccgccagtcctttcccgagcttgcccttctcgctgaacagtatccgcagcagcgagctgggcaggatcacgcgcccgcgcttgctgggcgaagaggagtacttgaatgactcgctgttgagacccgagcgggagaagaacttccccaataacgggatagaaagcctggtggacaagatgagccgctggaagacgtatgcgcaggagcacagggacgatccccgggcgtcgcagggggccacgagccggggcagcgccgcccgtaaacgccggtggcacgacaggcagcggggacagatgtgggacgatgaggactccgccgacgacagcagcgtgttggacttgggtgggagtggtaacccgttcgctcacctgcgcccccgtatcgggcgcatgatgtaagagaaaccgaaaataaatgatactcaccaaggccatggcgaccagcgtgcgttcgtttcttctctgttgttgttgtatctagtatgatgaggcgtgcgtacccggagggtcctcctccctcgtacgagagcgtgatgcagcaggcgatggcggcggcggcgatgcagcccccgctggaggctccttacgtgcccccgcggtacctggcgcctacggaggggcggaacagcattcgttactcggagctggcacccttgtacgataccacccggttgtacctggtggacaacaagtcggcggacatcgcctcgctgaactaccagaacgaccacagcaacttcctgaccaccgtggtgcagaacaatgacttcacccccacggaggccagcacccagaccatcaactttgacgagcgctcgcggtggggcggccagctgaaaaccatcatgcacaccaacatgcccaacgtgaacgagttcatgtacagcaacaagttcaaggcgcgggtgatggtctcccgcaagacccccaatggggtgacagtgacagaggattatgatggtagtcaggatgagctgaagtatgaatgggtggaatttgagctgcccgaaggcaacttctcggtgaccatgaccatcgacctgatgaacaacgccatcatcgacaattacttggcggtggggcggcagaacggggtgctggagagcgacatcggcgtgaagttcgacactaggaacttcaggctgggctgggaccccgtgaccgagctggtcatgcccggggtgtacaccaacgaggctttccatcccgatattgtcttgctgcccggctgcggggtggacttcaccgagagccgcctcagcaacctgctgggcattcgcaagaggcagcccttccaggaaggcttccagatcatgtacgaggatctggaggggggcaacatccccgcgctcctggatgtcgacgcctatgagaaaagcaaggaggatgcagcagctgaagcaactgcagccgtagctaccgcctctaccgaggtcaggggcgataattttgcaagcgccgcagcagtggcagcggccgaggcggctgaaaccgaaagtaagatagtcattcagccggtggagaaggatagcaagaacaggagctacaacgtactaccggacaagataaacaccgcctaccgcagctggtacctagcctacaactatggcgaccccgagaagggcgtgcgctcctggacgctgctcaccacctcggacgtcacctgcggcgtggagcaagtctactggtcgctgcccgacatgatgcaagacccggtcaccttccgctccacgcgtcaagttagcaactacccggtggtgggcgccgagctcctgcccgtctactccaagagcttcttcaacgagcaggccgtctactcgcagcagctgcgcgccttcacctcgcttacgcacgtcttcaaccgcttccccgagaaccagatcctcgtccgcccgcccgcgcccaccattaccaccgtcagtgaaaacgttcctgctctcacagatcacgggaccctgccgctgcgcagcagtatccggggagtccagcgcgtgaccgttactgacgccagacgccgcacctgcccctacgtctacaaggccctgggcatagtcgcgccgcgcgtcctctcgagccgcaccttctaaatgtccattctcatctcgcccagtaataacaccggttggggcctgcgcgcgcccagcaagatgtacggaggcgctcgccaacgctccacgcaacaccccgtgcgcgtgcgcgggcacttccgcgctccctggggcgccctcaagggccgcgtgcggtcgcgcaccaccgtcgacgacgtgatcgaccaggtggtggccgacgcgcgcaactacacccccgccgccgcgcccgtctccaccgtggacgccgtcatcgacagcgtggtggccgacgcgcgccggtacgcccgcgccaagagccggcggcggcgcatcgcccggcggcaccggagcacccccgccatgcgcgcggcgcgagccttgctgcgcagggccaggcgcacgggacgcagggccatgctcagggcggccagacgcgcggcttcaggcgccagcgccggcaggacccggagacgcgcggccacggcggcggcagcggccatcgccagcatgtcccgcccgcggcgagggaacgtgtactgggtgcgcgacgccgccaccggtgtgcgcgtgcccgtgcgcacccgcccccctcgcacttgaagatgttcacttcgcgatgttgatgtgtcccagcggcgaggaggatgtccaagcgcaaattcaaggaagagatgctccaggtcatcgcgcctgagatctacggccctgcggtggtgaaggaggaaagaaagccccgcaaaatcaagcgggtcaaaaaggacaaaaaggaagaagaaagtgatgtggacggattggtggagtttgtgcgcgagttcgccccccggcggcgcgtgcagtggcgcgggcggaaggtgcaaccggtgctgagacccggcaccaccgtggtcttcacgcccggcgagcgctccggcaccgcttccaagcgctcctacgacgaggtgtacggggatgatgatattctggagcaggcggccgagcgcctgggcgagtttgcttacggcaagcgcagccgttccgcaccgaaggaagaggcggtgtccatcccgctggaccacggcaaccccacgccgagcctcaagcccgtgaccttgcagcaggtgctgccgaccgcggcgccgcgccgggggttcaagcgcgagggcgaggatctgtaccccaccatgcagctgatggtgcccaagcgccagaagctggaagacgtgctggagaccatgaaggtggacccggacgtgcagcccgaggtcaaggtgcggcccatcaagcaggtggccccgggcctgggcgtgcagaccgtggacatcaagattcccacggagcccatggaaacgcagaccgagcccatgatcaagcccagcaccagcaccatggaggtgcagacggatccctggatgccatcggctcctagtcgaagaccccggcgcaagtacggcgcggccagcctgctgatgcccaactacgcgctgcatccttccatcatccccacgccgggctaccgcggcacgcgcttctaccgcggtcataccagcagccgccgccgcaagaccaccactcgccgccgccgtcgccgcaccgccgctgcaaccacccctgccgccctggtgcggagagtgtaccgccgcggccgcgcacctctgaccctgccgcgcgcgcgctaccacccgagcatcgccatttaaactttcgcctgctttgcagatcaatggccctcacatgccgccttcgcgttcccattacgggctaccgaggaagaaaaccgcgccgtagaaggctggcggggaacgggatgcgtcgccaccaccaccggcggcggcgcgccatcagcaagcggttggggggaggcttcctgcccgcgctgatccccatcatcgccgcggcgatcggggcgatccccggcattgcttccgtggcggtgcaggcctctcagcgccactgagacacacttggaaacatcttgtaataaaccaatggactctgacgctcctggtcctgtgatgtgttttcgtagacagatggaagacatcaatttttcgtccctggctccgcgacacggcacgcggccgttcatgggcacctggagcgacatcggcaccagccaactgaacgggggcgccttcaattggagcagtctctggagcgggcttaagaatttcgggtccacgcttaaaacctatggcagcaaggcgtggaacagcaccacagggcaggcgctgagggataagctgaaagagcagaacttccagcagaaggtggtcgatgggctcgcctcgggcatcaacggggtggtggacctggccaaccaggccgtgcagcggcagatcaacagccgcctggacccggtgccgcccgccggctccgtggagatgccgcaggtggaggaggagctgcctcccctggacaagcggggcgagaagcgaccccgccccgatgcggaggagacgctgctgacgcacacggacgagccgcccccgtacgaggaggcggtgaaactgggtctgcccaccacgcggcccatcgcgcccctggccaccggggtgctgaaacccgaaaagcccgcgaccctggacttgcctcctccccagccttcccgcccctctacagtggctaagcccctgccgccggtggccgtggcccgcgcgcgacccgggggcaccgcccgccctcatgcgaactggcagagcactctgaacagcatcgtgggtctgggagtgcagagtgtgaagcgccgccgctgctattaaacctaccgtagcgcttaacttgcttgtctgtgtgtgtatgtattatgtcgccgccgccgctgtccaccagaaggaggagtgaagaggcgcgtcgccgagttgcaagatggccaccccatcgatgctgccccagtgggcgtacatgcacatcgccggacaggacgcttcggagtacctgagtccgggtctggtgcagtttgcccgcgccacagacacctacttcagtctggggaacaagtttaggaaccccacggtggcgcccacgcacgatgtgaccaccgaccgcagccagcggctgacgctgcgcttcgtgcccgtggaccgcgaggacaacacctactcgtacaaagtgcgctacacgctggccgtgggcgacaaccgcgtgctggacatggccagcacctactttgacatccgcggcgtgctggatcggggccctagcttcaaaccctactccggcaccgcctacaacagtctggcccccaagggagcacccaacacttgtcagtggacatataaagccgatggtgaaactgccacagaaaaaacctatacatatggaaatgcacccgtgcagggcattaacatcacaaaagatggtattcaacttggaactgacaccgatgatcagccaatctacgcagataaaacctatcagcctgaacctcaagtgggtgatgctgaatggcatgacatcactggtactgatgaaaagtatggaggcagagctcttaagcctgataccaaaatgaagccttgttatggttcttttgccaagcctactaataaagaaggaggtcaggcaaatgtgaaaacaggaacaggcactactaaagaatatgacatagacatggctttctttgacaacagaagtgcggctgctgctggcctagctccagaaattgttttgtatactgaaaatgtggatttggaaactccagatacccatattgtatacaaagcaggcacagatgacagcagctcttctattaatttgggtcagcaagccatgcccaacagacctaactacattggtttcagagacaactttatcgggctcatgtactacaacagcactggcaatatgggggtgctggccggtcaggcttctcagctgaatgctgtggttgacttgcaagacagaaacaccgagctgtcctaccagctcttgcttgactctctgggtgacagaacccggtatttcagtatgtggaatcaggcggtggacagctatgatcctgatgtgcgcattattgaaaatcatggtgtggaggatgaacttcccaactattgtttccctctggatgctgttggcagaacagatacttatcagggaattaaggctaatggaactgatcaaaccacatggaccaaagatgacagtgtcaatgatgctaatgagataggcaagggtaatccattcgccatggaaatcaacatccaagccaacctgtggaggaacttcctctacgccaacgtggccctgtacctgcccgactcttacaagtacacgccggccaatgttaccctgcccaccaacaccaacacctacgattacatgaacggccgggtggtggcgccctcgctggtggactcctacatcaacatcggggcgcgctggtcgctggatcccatggacaacgtgaaccccttcaaccaccaccgcaatgcggggctgcgctaccgctccatgctcctgggcaacgggcgctacgtgcccttccacatccaggtgccccagaaatttttcgccatcaagagcctcctgctcctgcccgggtcctacacctacgagtggaacttccgcaaggacgtcaacatgatcctgcagagctccctcggcaacgacctgcgcacggacggggcctccatctccttcaccagcatcaacctctacgccaccttcttccccatggcgcacaacacggcctccacgctcgaggccatgctgcgcaacgacaccaacgaccagtccttcaacgactacctctcggcggccaacatgctctaccccatcccggccaacgccaccaacgtgcccatctccatcccctcgcgcaactgggccgccttccgcggctggtccttcacgcgtctcaagaccaaggagacgccctcgctgggctccgggttcgacccctacttcgtctactcgggctccatcccctacctcgacggcaccttctacctcaaccacaccttcaagaaggtctccatcaccttcgactcctccgtcagctggcccggcaacgaccggctcctgacgcccaacgagttcgaaatcaagcgcaccgtcgacggcgagggctacaacgtggcccagtgcaacatgaccaaggactggttcctggtccagatgctggcccactacaacatcggctaccagggcttctacgtgcccgagggctacaaggaccgcatgtactccttcttccgcaacttccagcccatgagccgccaggtggtggacgaggtcaactacaaggactaccaggccgtcaccctggcctaccagcacaacaactcgggcttcgtcggctacctcgcgcccaccatgcgccagggccagccctaccccgccaactacccctacccgctcatcggcaagagcgccgtcaccagcgtcacccagaaaaagttcctctgcgacagggtcatgtggcgcatccccttctccagcaacttcatgtccatgggcgcgctcaccgacctcggccagaacatgctctatgccaactccgcccacgcgctagacatgaatttcgaagtcgaccccatggatgagtccacccttctctatgttgtcttcgaagtcttcgacgtcgtccgagtgcaccagccccaccgcggcgtcatcgaggccgtctacctgcgcacccccttctcggccggtaacgccaccacctaagctcttgcttcttgcaagccatggccgcgggctccggcgagcaggagctcagggccatcatccgcgacctgggctgcgggccctacttcctgggcaccttcgataagcgcttcccgggattcatggccccgcacaagctggcctgcgccatcgtcaacacggccggccgcgagaccgggggcgagcactggctggccttcgcctggaacccgcgctcgaacacctgctacctcttcgaccccttcgggttctcggacgagcgcctcaagcagatctaccagttcgagtacgagggcctgctgcgccgcagcgccctggccaccgaggaccgctgcgtcaccctggaaaagtccacccagaccgtgcagggtccgcgctcggccgcctgcgggctcttctgctgcatgttcctgcacgccttcgtgcactggcccgaccgccccatggacaagaaccccaccatgaacttgctgacgggggtgcccaacggcatgctccagtcgccccaggtggaacccaccctgcgccgcaaccaggaggcgctctaccgcttcctcaactcccactccgcctactttcgctcccaccgcgcgcgcatcgagaaggccaccgccttcgaccgcatgaatcaagacatgtaaaccgtgtgtgtatgttaaatgtctttaataaacagcactttcatgttacacatgcatctgagatgatttatttagaaatcgaaagggttctgccgggtctcggcatggcccgcgggcagggacacgttgcggaactggtacttggccagccacttgaactcggggatcagcagtttgggcagcggggtgtcggggaaggagtcggtccacagcttccgcgtcagttgcagggcgcccagcaggtcgggcgcggagatcttgaaatcgcagttgggacccgcgttctgcgcgcgggagttgcggtacacggggttgcagcactggaacaccatcagggccgggtgcttcacgctcgccagcaccgtcgcgtcggtgatgctctccacgtcgaggtcctcggcgttggccatcccgaagggggtcatcttgcaggtctgccttcccatggtgggcacgcacccgggcttgtggttgcaatcgcagtgcagggggatcagcatcatctgggcctggtcggcgttcatccccgggtacatggccttcatgaaagcctccaattgcctgaacgcctgctgggccttggctccctcggtgaagaagaccccgcaggacttgctagagaactggttggtggcgcacccggcgtcgtgcacgcagcagcgcgcgtcgttgttggccagctgcaccacgctgcgcccccagcggttctgggtgatcttggcccggtcggggttctccttcagcgcgcgctgcccgttctcgctcgccacatccatctcgatcatgtgctccttctggatcatggtggtcccgtgcaggcaccgcagcttgccctcggcctcggtgcacccgtgcagccacagcgcgcacccggtgcactcccagttcttgtgggcgatctgggaatgcgcgtgcacgaagccctgcaggaagcggcccatcatggtggtcagggtcttgttgctagtgaaggtcagcggaatgccgcggtgctcctcgttgatgtacaggtggcagatgcggcggtacacctcgccctgctcgggcatcagctggaagttggctttcaggtcggtctccacgcggtagcggtccatcagcatagtcatgatttccatacccttctcccaggccgagacgatgggcaggctcatagggttcttcaccatcatcttagcgctagcagccgcggccagggggtcgctctcgtccagggtctcaaagctccgcttgccgtccttctcggtgatccgcaccggggggtagctgaagcccacggccgccagctcctcctcggcctgtctttcgtcctcgctgtcctggctgacgtcctgcaggaccacatgcttggtcttgcggggtttcttcttgggcggcagcggcggcggagatgttggagatggcgagggggagcgcgagttctcgctcaccactactatctcttcctcttcttggtccgaggccacgcggcggtaggtatgtctcttcgggggcagaggcggaggcgacgggctctcgccgccgcgacttggcggatggctggcagagccccttccgcgttcgggggtgcgctcccggcggcgctctgactgacttcctccgcggccggccattgtgttctcctagggaggaacaacaagcatggagactcagccatcgccaacctcgccatctgcccccaccgccgacgagaagcagcagcagcagaatgaaagcttaaccgccccgccgcccagccccgccacctccgacgcggccgtcccagacatgcaagagatggaggaatccatcgagattgacctgggctatgtgacgcccgcggagcacgaggaggagctggcagtgcgcttttcacaagaagagatacaccaagaacagccagagcaggaagcagagaatgagcagagtcaggctgggctcgagcatgacggcgactacctccacctgagcgggggggaggacgcgctcatcaagcatctggcccggcaggccaccatcgtcaaggatgcgctgctcgaccgcaccgaggtgcccctcagcgtggaggagctcagccgcgcctacgagttgaacctcttctcgccgcgcgtgccccccaagcgccagcccaatggcacctgcgagcccaacccgcgcctcaacttctacccggtcttcgcggtgcccgaggccctggccacctaccacatctttttcaagaaccaaaagatccccgtctcctgccgcgccaaccgcacccgcgccgacgcccttttcaacctgggtcccggcgcccgcctacctgatatcgcctccttggaagaggttcccaagatcttcgagggtctgggcagcgacgagactcgggccgcgaacgctctgcaaggagaaggaggagagcatgagcaccacagcgccctggtcgagttggaaggcgacaacgcgcggctggcggtgctcaaacgcacggtcgagctgacccatttcgcctacccggctctgaacctgccccccaaagtcatgagcgcggtcatggaccaggtgctcatcaagcgcgcgtcgcccatctccgaggacgagggcatgcaagactccgaggagggcaagcccgtggtcagcgacgagcagctggcccggtggctgggtcctaatgctagtccccagagtttggaagagcggcgcaaactcatgatggccgtggtcctggtgaccgtggagctggagtgcctgcgccgcttcttcgccgacgcggagaccctgcgcaaggtcgaggagaacctgcactacctcttcaggcacgggttcgtgcgccaggcctgcaagatctccaacgtggagctgaccaacctggtctcctacatgggcatcttgcacgagaaccgcctggggcagaacgtgctgcacaccaccctgcgcggggaggcccggcgcgactacatccgcgactgcgtctacctctacctctgccacacctggcagacgggcatgggcgtgtggcagcagtgtctggaggagcagaacctgaaagagctctgcaagctcctgcagaagaacctcaagggtctgtggaccgggttcgacgagcgcaccaccgcctcggacctggccgacctcattttccccgagcgcctcaggctgacgctgcgcaacggcctgcccgactttatgagccaaagcatgttgcaaaactttcgctctttcatcctcgaacgctccggaatcctgcccgccacctgctccgcgctgccctcggacttcgtgccgctgaccttccgcgagtgccccccgccgctgtggagccactgctacctgctgcgcctggccaactacctggcctaccactcggacgtgatcgaggacgtcagcggcgagggcctgctcgagtgccactgccgctgcaacctctgcacgccgcaccgctccctggcctgcaacccccagctgctgagcgagacccagatcatcggcaccttcgagttgcaagggcccagcgaaggcgagggttcagccgccaaggggggtctgaaactcaccccggggctgtggacctcggcctacttgcgcaagttcgtgcccgaggactaccatcccttcgagatcaggttctacgaggaccaatcccatccgcccaaggccgagctgtcggcctgcgtcatcacccagggggcgatcctggcccaattgcaagccatccagaaatcccgccaagaattcttgctgaaaaagggccgcggggtctacctcgacccccagaccggtgaggagctcaaccccggcttcccccaggatgccccgaggaaacaagaagctgaaagtggagctgccgcccgtggaggatttggaggaagactgggagaacagcagtcaggcagaggaggaggagatggaggaagactgggacagcactcaggcagaggaggacagcctgcaagacagtctggaggaagacgaggaggaggcagaggaggaggtggaagaagcagccgccgccagaccgtcgtcctcggcgggggagaaagcaagcagcacggataccatctccgctccgggtcggggtcccgctcgaccacacagtagatgggacgagaccggacgattcccgaaccccaccacccagaccggtaagaaggagcggcagggatacaagtcctggcgggggcacaaaaacgccatcgtctcctgcttgcaggcctgcgggggcaacatctccttcacccggcgctacctgctcttccaccgcggggtgaactttccccgcaacatcttgcattactaccgtcacctccacagcccctactacttccaagaagaggcagcagcagcagaaaaagaccagcagaaaaccagcagctagaaaatccacagcggcggcagcaggtggactgaggatcgcggcgaacgagccggcgcaaacccgggagctgaggaaccggatctttcccaccctctatgccatcttccagcagagtcgggggcaggagcaggaactgaaagtcaagaaccgttctctgcgctcgctcacccgcagttgtctgtatcacaagagcgaagaccaacttcagcgcactctcgaggacgccgaggctctcttcaacaagtactgcgcgctcactcttaaagagtagcccgcgcccgcccagtcgcagaaaaaggcgggaattacgtcacctgtgcccttcgccctagccgcctccacccatcatcatgagcaaagagattcccacgccttacatgtggagctaccagccccagatgggcctggccgccggtgccgcccaggactactccacccgcatgaattggctcagcgccgggcccgcgatgatctcacgggtgaatgacatccgcgcccaccgaaaccagatactcctagaacagtcagcgctcaccgccacgccccgcaatcacctcaatccgcgtaattggcccgccgccctggtgtaccaggaaattccccagcccacgaccgtactacttccgcgagacgcccaggccgaagtccagctgactaactcaggtgtccagctggcgggcggcgccaccctgtgtcgtcaccgccccgctcagggtataaagcggctggtgatccggggcagaggcacacagctcaacgacgaggtggtgagctcttcgctgggtctgcgacctgacggagtcttccaactcgccggatcggggagatcttccttcacgcctcgtcaggccgtcctgactttggagagttcgtcctcgcagccccgctcgggtggcatcggcactctccagttcgtggaggagttcactccctcggtctacttcaaccccttctccggctcccccggccactacccggacgagttcatcccgaacttcgacgccatcagcgagtcggtggacggctacgattgaatgtcccatggtggcgcagctgacctagctcggcttcgacacctggaccactgccgccgcttccgctgcttcgctcgggatctcgccgagtttgcctactttgagctgcccgaggagcaccctcagggcccggcccacggagtgcggatcgtcgtcgaagggggcctcgactcccacctgcttcggatcttcagccagcgtccgatcctggtcgagcgcgagcaaggacagacccttctgactctgtactgcatctgcaaccaccccggcctgcatgaaagtctttgttgtctgctgtgtactgagtataataaaagctgagatcagcgactactccggacttccgtgtgttcctgaatccatcaaccagtctttgttcttcaccgggaacgagaccgagctccagctccagtgtaagccccacaagaagtacctcacctggctgttccagggctccccgatcgccgttgtcaaccactgcgacaacgacggagtcctgctgagcggccctgccaaccttactttttccacccgcagaagcaagctccagctcttccaacccttcctccccgggacctatcagtgcgtctcgggaccctgccatcacaccttccacctgatcccgaataccacagcgtcgctccccgctactaacaaccaaactaacctccaccaacgccaccgtcgcgacggccacaatacatgcccatattagactatgaggccgagccacagcgacccatgctccccgctattagttacttcaatctaaccggcggagatgactgacccactggccaacaacaacgtcaacgaccttctcctggacatggacggccgcgcctcggagcagcgactcgcccaacttcgcattcgccagcagcaggagagagccgtcaaggagctgcaggatgcggtggccatccaccagtgcaagagaggcatcttctgcctggtgaaacaggccaagatctcctacgaggtcactccaaacgaccatcgcctctcctacgagctcctgcagcagcgccagaagttcacctgcctggtcggagtcaaccccatcgtcatcacccagcagtctggcgataccaaggggtgcatccactgctcctgcgactcccccgactgcgtccacactctgatcaagaccctctgcggcctccgcgacctcctccccatgaactaatcacccccttatccagtgaaataaagatcatattgatgatgattttacagaaataaaaaataatcatttgatttgaaataaagatacaatcatattgatgatttgagtttaacaaaaaaataaagaatcacttacttgaaatctgataccaggtctctgtccatgttttctgccaacaccacttcactcccctcttcccagctctggtactgcaggccccggcgggctgcaaacttcctccacacgctgaaggggatgtcaaattcctcctgtccctcaatcttcattttatcttctatcagatgtccaaaaagcgcgtccgggtggatgatgacttcgaccccgtctacccctacgatgcagacaacgcaccgaccgtgcccttcatcaacccccccttcgtctcttcagatggattccaagagaagcccctgggggtgttgtccctgcgactggccgaccccgtcaccaccaagaacggggaaatcaccctcaagctgggagagggggtggacctcgattcctcgggaaaactcatctccaacacggccaccaaggccgccgcccctctcagtttttccaacaacaccatttcccttaacatggatcaccccttttacactaaagatggaaaattatccttacaagtttctccaccattaaatatactgagaacaagcattctaaacacactagctttaggttttggatcaggtttaggactccgtggctctgccttggcagtacagttagtctctccacttacatttgatactgatggaaacataaagcttaccttagacagaggtttgcatgttacaacaggagatgcaattgaaagcaacataagctgggctaaaggtttaaaatttgaagatggagccatagcaaccaacattggaaatgggttagagtttggaagcagtagtacagaaacaggtgttgatgatgcttacccaatccaagttaaacttggatctggccttagctttgacagtacaggagccataatggctggtaacaaagaagacgataaactcactttgtggacaacacctgatccatcaccaaactgtcaaatactcgcagaaaatgatgcaaaactaacactttgcttgactaaatgtggtagtcaaatactggccactgtgtcagtcttagttgtaggaagtggaaacctaaaccccattactggcaccgtaagcagtgctcaggtgtttctacgttttgatgcaaacggtgttcttttaacagaacattctacactaaaaaaatactgggggtataggcagggagatagcatagatggcactccatataccaatgctgtaggattcatgcccaatttaaaagcttatccaaagtcacaaagttctactactaaaaataatatagtagggcaagtatacatgaatggagatgtttcaaaacctatgcttctcactataaccctcaatggtactgatgacagcaacagtacatattcaatgtcattttcatacacctggactaatggaagctatgttggagcaacatttggggctaactcttataccttctcatacatcgcccaagaatgaacactgtatcccaccctgcatgccaacccttcccaccccactctgtggaacaaactctgaaacacaaaataaaataaagttcaagtgttttattgattcaacagttttacaggattcgagcagttatttttcctccaccctcccaggacatggaatacaccaccctctccccccgcacagccttgaacatctgaatgccattggtgatggacatgcttttggtctccacgttccacacagtttcagagcgagccagtctcgggtcggtcagggagatgaaaccctccgggcactcccgcatctgcacctcacagctcaacagctgaggattgtcctcggtggtcgggatcacggttatctggaagaagcagaagagcggcggtgggaatcatagtccgcgaacgggatcggccggtggtgtcgcatcaggccccgcagcagtcgctgccgccgccgctccgtcaagctgctgctcagggggtccgggtccagggactccctcagcatgatgcccacggccctcagcatcagtcgtctggtgcggcgggcgcagcagcgcatgcggatctcgctcaggtcgctgcagtacgtgcaacacagaaccaccaggttgttcaacagtccatagttcaacacgctccagccgaaactcatcgcgggaaggatgctacccacgtggccgtcgtaccagatcctcaggtaaatcaagtggtgccccctccagaacacgctgcccacgtacatgatctccttgggcatgtggcggttcaccacctcccggtaccacatcaccctctggttgaacatgcagccccggatgatcctgcggaaccacagggccagcaccgccccgcccgccatgcagcgaagagaccccgggtcccggcaatggcaatggaggacccaccgctcgtacccgtggatcatctgggagctgaacaagtctatgttggcacagcacaggcatatgctcatgcatctcttcagcactctcaactcctcgggggtcaaaaccatatcccagggcacggggaactcttgcaggacagcgaaccccgcagaacagggcaatcctcgcacagaacttacattgtgcatggacagggtatcgcaatcaggcagcaccgggtgatcctccaccagagaagcgcgggtctcggtctcctcacagcgtggtaagggggccggccgatacgggtgatggcgggacgcggctgatcgtgttcgcgaccgtgtcatgatgcagttgctttcggacattttcgtacttgctgtagcagaacctggtccgggcgctgcacaccgatcgccggcggcggtctcggcgcttggaacgctcggtgttgaaattgtaaaacagccactctctcagaccgtgcagcagatctagggcctcaggagtgatgaagatcccatcatgcctgatggctctgatcacatcgaccaccgtggaatgggccagacccagccagatgatgcaattttgttgggtttcggtgacggcgggggagggaagaacaggaagaaccatgattaacttttaatccaaacggtctcggagtacttcaaaatgaagatcgcggagatggcacctctcgcccccgctgtgttggtggaaaataacagccaggtcaaaggtgatacggttctcgagatgttccacggtggcttccagcaaagcctccacgcgcacatccagaaacaagacaatagcgaaagcgggagggttctctaattcctcaatcatcatgttacactcctgcaccatccccagataattttcatttttccagccttgaatgattcgaactagttcgtgaggtaaatccaagccagccatgataaagagctcgcgcagagcgccctccaccggcattcttaagcacaccctcataattccaagatattctgctcctggttcacctgcagcagattgacaagcggaatatcaaaatctctgccgcgatccctgagctcctccctcagcaataactgtaagtactctttcatatcctctccgaaatttttagccataggaccaccaggaataagattagggcaagccacagtacagataaaccgaagtcctccccagtgagcattgccaaatgcaagactgctataagcatgctggctagacccggtgatatcttccagataactggacagaaaatcgcccaggcaatttttaagaaaatcaacaaaagaaaaatcctccaggtggacgtttagagcctcgggaacaacgatgaagtaaatgcaagcggtgcgttccagcatggttagttagctgatctgtagaaaaaacaaaaatgaacattaaaccatgctagcctggcgaacaggtgggtaaatcgttctctccagcaccaggcaggccacggggtctccggcgcgaccctcgtaaaaattgtcgctatgattgaaaaccatcacagagagacgttcccggtggccggcgtgaatgattcgacaagatgaatacacccccggaacattggcgtccgcgagtgaaaaaaagcgcccgaggaagcaataaggcactacaatgctcagtctcaagtccagcaaagcgatgccatgcggatgaagcacaaaattctcaggtgcgtacaaaatgtaattactcccctcctgcacaggcagcaaagcccccgatccctccaggtacacatacaaagcctcagcgtccatagcttaccgagcagcagcacacaacaggcgcaagagtcagagaaaggctgagctctaacctgtccacccgctctctgctcaatatatagcccagatctacactgacgtaaaggccaaagtctaaaaatacccgccaaataatcacacacgcccagcacacgcccagaaaccggtgacacactcaaaaaaatacgcgcacttcctcaaacgcccaaaactgccgtcatttccgggttcccacgctacgtcatcaaaacacgactttcaaattccgtcgaccgttaaaaacgtcacccgccccgcccctaacggtcgcccgtctctcagccaatcagcgccccgcatccccaaattcaaacacctcatttgcatattaacgcgcacaaaaagtttgaggtatattattgatgatgg

SEQ ID NO: 13 - DNA, 30684 bp, Artificial Sequence
  Description of Artificial Sequence: Synthetic polynucleotide
ccatcttcaataatatacctcaaactttttgtgcgcgttaatatgcaaatgaggcgtttgaatttggggaggaagggcggtgattggtcgagggatgagcgaccgttaggggcggggcgagtgacgttttgatgacgtggttgcgaggaggagccagtttgcaagttctcgtgggaaaagtgacgtcaaacgaggtgtggtttgaacacggaaatactcaattttcccgcgctctctgacaggaaatgaggtgtttctgggcggatgcaagtgaaaacgggccattttcgcgcgaaaactgaatgaggaagtgaaaatctgagtaatttcgcgtttatggcagggaggagtatttgccgagggccgagtagactttgaccgattacgtgggggtttcgattaccgtgtttttcacctaaatttccgcgtacggtgtcaaagtccggtgtttttacgtaggtgtcagctgatcgccagggtatttaaacctgcgctctccagtcaagaggccactcttgagtgccagcgagaagagttttctcctccgcgccgcgagtcagatctacactttgaaagtagggataacagggtaatgacattgattattgactagttgttaatagtaatcaattacggggtcattagttcatagcccatatatggagttccgcgttacataacttacggtaaatggcccgcctggctgaccgcccaacgacccccgcccattgacgtcaataatgacgtatgttcccatagtaacgccaatagggactttccattgacgtcaatgggtggagtatttacggtaaactgcccacttggcagtacatcaagtgtatcatatgccaagtccgccccctattgacgtcaatgacggtaaatggcccgcctggcattatgcccagtacatgaccttacgggactttcctacttggcagtacatctacgtattagtcatcgctattaccatggtgatgcggttttggcagtacaccaatgggcgtggatagcggtttgactcacggggatttccaagtctccaccccattgacgtcaatgggagtttgttttggcaccaaaatcaacgggactttccaaaatgtcgtaataaccccgccccgttgacgcaaatgggcggtaggcgtgtacggtgggaggtctatataagcagagctcgtttagtgaaccgtcagatcgcctggaacgccatccacgctgttttgacctccatagaagacagcgatcgcgccaccatggtgagcaagggcgaggagctgttcaccggggtggtgcccatcctggtcgagctggacggcgacgtaaacggccacaagttcagcgtgtccggcgagggcgagggcgatgccacctacggcaagctgaccctgaagttcatctgcaccaccggcaagctgcccgtgccctggcccaccctcgtgaccaccctgacctacggcgtgcagtgcttcagccgctaccccgaccacatgaagcagcacgacttcttcaagtccgccatgcccgaaggctacgtccaggagcgcaccatcttcttcaaggacgacggcaactacaagacccgcgccgaggtgaagttcgagggcgacaccctggtgaaccgcatcgagctgaagggcatcgacttcaaggaggacggcaacatcctggggcacaagctggagtacaactacaacagccacaacgtctatatcatggccgacaagcagaagaacggcatcaaggtgaacttcaagatccgccacaacatcgaggacggcagcgtgcagctcgccgaccactaccagcagaacacccccatcggcgacggccccgtgctgctgcccgacaaccactacctgagcacccagtccgccctgagcaaagaccccaacgagaagcgcgatcacatggtcctgctggagttcgtgaccgccgccgggatcactctcggcatggacgagctttacaagtagtgagtttaaactcccatttaaatgtgagggttaatgcttcgagcagacatgataagatacattgatgagtttggacaaaccacaactagaatgcagtgaaaaaaatgctttatttgtgaaatttgtgatgctattgctttatttgtaaccattataagctgcaataaacaagttaacaacaacaattgcattcattttatgtttcaggttcagggggagatgtgggaggttttttaaagcaagtaaaacctctacaaatgtggtaaaataactataacggtcctaaggtagcgagtgagtagtgttctggggcgggggaggacctgcatgagggccagaataactgaaatctgtgcttttctgtgtgttgcagcagcatgagcggaagcggctcctttgagggaggggtattcagcccttatctgacggggcgtctcccctcctgggcgggagtgcgtcagaatgtgatgggatccacggtggacggccggcccgtgcagcccgcgaactcttcaaccctgacctatgcaaccctgagctcttcgtcgttggacgcagctgccgccgcagctgctgcatctgccgccagcgccgtgcgcggaatggccatgggcgccggctactacggcactctggtggccaactcgagttccaccaataatcccgccagcctgaacgaggagaagctgttgctgctgatggcccagctcgaggccttgacccagcgcctgggcgagctgacccagcaggtggctcagctgcaggagcagacgcgggccgcggttgccacggtgaaatccaaataaaaaatgaatcaataaataaacggagacggttgttgattttaacacagagtctgaatctttatttgatttttcgcgcgcggtaggccctggaccaccggtctcgatcattgagcacccggtggatcttttccaggacccggtagaggtgggcttggatgttgaggtacatgggcatgagcccgtcccgggggtggaggtagctccattgcagggcctcgtgctcgggggtggtgttgtaaatcacccagtcatagcaggggcgcagggcatggtgttgcacaatatctttgaggaggagactgatggccacgggcagccctttggtgtaggtgtttacaaatctgttgagctgggagggatgcatgcggggggagatgaggtgcatcttggcctggatcttgagattggcgatgttaccgcccagatcccgcctggggttcatgttgtgcaggaccaccagcacggtgtatccggtgcacttggggaatttatcatgcaacttggaagggaaggcgtgaaagaatttggcgacgcctttgtgcccgcccaggttttccatgcactcatccatgatgatggcgatgggcccgtgggcggcggcctgggcaaagacgtttcgggggtcggacacatcatagttgtggtcctgggtgaggtcatcataggccattttaatgaatttggggcggagggtgccggactgggggacaaaggtaccctcgatcccgggggcgtagttcccctcacagatctgcatctcccaggctttgagctcggagggggggatcatgtccacctgcggggcgataaagaacacggtttccggggcgggggagatgagctgggccgaaagcaagttccggagcagctgggacttgccgcagccggtggggccgtagatgaccccgatgaccggctgcaggtggtagttgagggagagacagctgccgtcctcccggaggaggggggccacctcgttcatcatctcgcgcacgtgcatgttctcgcgcaccagttccgccaggaggcgctctccccccagggataggagctcctggagcgaggcgaagtttttcagcggcttgagtccgtcggccatgggcattttggagagggtttgttgcaagagttccaggcggtcccagagctcggtgatgtgctctacggcatctcgatccagcagacctcctcgtttcgcgggttgggacggctgcgggagtagggcaccagacgatgggcgtccagcgcagccagggtccggtccttccagggtcgcagcgtccgcgtcagggtggtctccgtcacggtgaaggggtgcgcgccgggctgggcgcttgcgagggtgcgcttcaggctcatccggctggtcgaaaaccgctcccgatcggcgccctgcgcgtcggccaggtagcaattgaccatgagttcgtagttgagcgcctcggccgcgtggcctttggcgcggagcttacctttggaagtctgcccgcaggcgggacagaggagggacttgagggcgtagagcttgggggcgaggaagacggactcgggggcgtaggcgtccgcgccgcagtgggcgcagacggtctcgcactccacgagccaggtgaggtcgggctggtcggggtcaaaaaccagtttcccgccgttctttttgatgcgtttcttacctttggtctccatgagctcgtgtccccgctgggtgacaaagaggctgtccgtgtccccgtagaccgactttatgggccggtcctcgagcggtgtgccgcggtcctcctcgtagaggaaccccgcccactccgagacgaaagcccgggtccaggccagcacgaaggaggccacgtgggacgggtagcggtcgttgtccaccagcgggtccaccttttccagggtatgcaaacacatgtccccctcgtccacatccaggaaggtgattggcttgtaagtgtaggccacgtgaccgggggtcccggccgggggggtataaaagggtgcgggtccctgctcgtcctcactgtcttccggatcgctgtccaggagcgccagctgttggggtaggtattccctctcgaaggcgggcatgacctcggcactcaggttgtcagtttctagaaacgaggaggatttgatattgacggtgccggcggagatgcctttcaagagcccctcgtccatctggtcagaaaagacgatctttttgttgtcgagcttggtggcgaaggagccgtagagggcgttggagaggagcttggcgatggagcgcatggtctggtttttttccttgtcggcgcgctccttggcggcgatgttgagctgcacgtactcgcgcgccacgcacttccattcggggaagacggtggtcagctcgtcgggcacgattctgacctgccagccccgattatgcagggtgatgaggtccacactggtggccacctcgccgcgcaggggctcattagtccagcagaggcgtccgcccttgcgcgagcagaaggggggcagggggtccagcatgacctcgtcgggggggtcggcatcgatggtgaagatgccgggcaggaggtcggggtcaaagtagctgatggaagtggccagatcgtccagggcagcttgccattcgcgcacggccagcgcgcgctcgtagggactgaggggcgtgccccagggcatgggatgggtaagcgcggaggcgtacatgccgcagatgtcgtagacgtagaggggctcctcgaggatgccgatgtaggtggggtagcagcgccccccgcggatgctggcgcgcacgtagtcatacagctcgtgcgagggggcgaggagccccgggcccaggttggtgcgactgggcttttcggcgcggtagacgatctggcggaaaatggcatgcgagttggaggagatggtgggcctttggaagatgttgaagtgggcgtggggcagtccgaccgagtcgcggatgaagtgggcgtaggagtcttgcagcttggcgacgagctcggcggtgactaggacgtccagagcgcagtagtcgagggtctcctggatgatgtcatacttgagctgtcccttttgtttccacagctcgcggttgagaaggaactcttcgcggtccttccagtactcttcgagggggaacccgtcctgatctgcacggtaagagcctagcatgtagaactggttgacggccttgtaggcgcagcagcccttctccacggggagggcgtaggcctgggcggccttgcgcagggaggtgtgcgtgagggcgaaagtgtccctgaccatgaccttgaggaactggtgcttgaagtcgatatcgtcgcagcccccctgctcccagagctggaagtccgtgcgcttcttgtaggcggggttgggcaaagcgaaagtaacatcgttgaagaggatcttgcccgcgcggggcataaagttgcgagtgatgcggaaaggttggggcacctcggcccggttgttgatgacctgggcggcgagcacgatctcgtcgaagccgttgatgttgtggcccacgatgtagagttccacgaatcgcggacggcccttgacgtggggcagtttcttgagctcctcgtaggtgagctcgtcggggtcgctgagcccgtgctgctcgagcgcccagtcggcgagatgggggttggcgcggaggaaggaagtccagagatccacggccagggcggtttgcagacggtcccggtactgacggaactgctgcccgacggccattttttcgggggtgacgcagtagaaggtgcgggggtccccgtgccagcgatcccatttgagctggagggcgagatcgagggcgagctcgacgagccggtcgtccccggagagtttcatgaccagcatgaaggggacgagctgcttgccgaaggaccccatccaggtgtaggtttccacatcgtaggtgaggaagagcctttcggtgcgaggatgcgagccgatggggaagaactggatctcctgccaccaattggaggaatggctgttgatgtgatggaagtagaaatgccgacggcgcgccgaacactcgtgcttgtgtttatacaagcggccacagtgctcgcaacgctgcacgggatgcacgtgctgcacgagctgtacctgagttcctttgacgaggaatttcagtgggaagtggagtcgtggcgcctgcatctcgtgctgtactacgtcgtggtggtcggcctggccctcttctgcctcgatggtggtcatgctgacgagcccgcgcgggaggcaggtccagacctcggcgcgagcgggtcggagagcgaggacgagggcgcgcaggccggagctgtccagggtcctgagacgctgcggagtcaggtcagtgggcagcggcggcgcgcggttgacttgcaggagtttttccagggcgcgcgggaggtccagatggtacttgatctccaccgcgccattggtggcgacgtcgatggcttgcagggtcccgtgcccctggggtgtgaccaccgtcccccgtttcttcttgggcggctggggcgacgggggcggtgcctcttccatggttagaagcggcggcgaggacgcgcgccgggcggcaggggcggctcggggcccggaggcaggggcggcaggggcacgtcggcgccgcgcgcgggtaggttctggtactgcgcccggagaagactggcgtgagcgacgacgcgacggttgacgtcctggatctgacgcctctgggtgaaggccacgggacccgtgagtttgaacctgaaagagagttcgacagaatcaatctcggtatcgttgacggcggcctgccgcaggatctcttgcacgtcgcccgagttgtcctggtaggcgatctcggtcatgaactgctcgatctcctcctcttgaaggtctccgcggccggcgcgctccacggtggccgcgaggtcgttggagatgcggcccatgagctgcgagaaggcgttcatgcccgcctcgttccagacgcggctgtagaccacgacgccctcgggatcgcgggcgcgcatgaccacctgggcgaggttgagctccacgtggcgcgtgaagaccgcgtagttgcagaggcgctggtagaggtagttgagcgtggtggcgatgtgctcggtgacgaagaaatacatgatccagcggcggagcggcatctcgctgacgtcgcccagcgcctccaaacgttccatggcctcgtaaaagtccacggcgaagttgaaaaactgggagttgcgcgccgagacggtcaactcctcctccagaagacggatgagctcggcgatggtggcgcgcacctcgcgctcgaaggcccccgggagttcctccacttcctcttcttcctcctccactaacatctcttctacttcctcctcaggcggcagtggtggcgggggagggggcctgcgtcgccggcggcgcacgggcagacggtcgatgaagcgctcgatggtctcgccgcgccggcgtcgcatggtctcggtgacggcgcgcccgtcctcgcggggccgcagcgtgaagacgccgccgcgcatctccaggtggccgggggggtccccgttgggcagggagagggcgctgacgatgcatcttatcaattgccccgtagggactccgcgcaaggacctgagcgtctcgagatccacgggatctgaaaaccgctgaacgaaggcttcgagccagtcgcagtcgcaaggtaggctgagcacggtttcttctggcgggtcatgttggttgggagcggggcgggcgatgctgctggtgatgaagttgaaataggcggttctgagacggcggatggtggcgaggagcaccaggtctttgggcccggcttgctggatgcgcagacggtcggccatgccccaggcgtggtcctgacacctggccaggtccttgtagtagtcctgcatgagccgctccacgggcacctcctcctcgcccgcgcggccgtgcatgcgcgtgagcccgaagccgcgctggggctggacgagcgccaggtcggcgacgacgcgctcggcgaggatggcttgctggatctgggtgagggtggtctggaagtcatcaaagtcgacgaagcggtggtaggctccggtgttgatggtgtaggagcagttggccatgacggaccagttgacggtctggtggcccggacgcacgagctcgtggtacttgaggcgcgagtaggcgcgcgtgtcgaagatgtagtcgttgcaggtgcgcaccaggtactggtagccgatgaggaagtgcggcggcggctggcggtagagcggccatcgctcggtggcgggggcgccgggcgcgaggtcctcgagcatggtgcggtggtagccgtagatgtacctggacatccaggtgatgccggcggcggtggtggaggcgcgcgggaactcgcggacgcggttccagatgttgcgcagcggcaggaagtagttcatggtgggcacggtctggcccgtgaggcgcgcgcagtcgtggatgctctatacgggcaaaaacgaaagcggtcagcggctcgactccgtggcctggaggctaagcgaacgggttgggctgcgcgtgtaccccggttcgaatctcgaatcaggctggagccgcagctaacgtggtattggcactcccgtctcgacccaagcctgcaccaaccctccaggatacggaggcgggtcgttttgcaacttttttttggaggccggatgagactagtaagcgcggaaagcggccgaccgcgatggctcgctgccgtagtctggagaagaatcgccagggttgcgttgcggtgtgccccggttcgaggccggccggattccgcggctaacgagggcgtggctgccccgtcgtttccaagaccccatagccagccgacttctccagttacggagcgagcccctcttttgttttgtttgtttttgccagatgcatcccgtactgcggcagatgcgcccccaccaccctccaccgcaacaacagccccctccacagccggcgcttctgcccccgccccagcagcaacttccagccacgaccgccgcggccgccgtgagcggggctggacagagttatgatcaccagctggccttggaagagggcgaggggctggcgcgcctgggggcgtcgtcgccggagcggcacccgcgcgtgcagatgaaaagggacgctcgcgaggcctacgtgcccaagcagaacctgttcagagacaggagcggcgaggagcccgaggagatgcgcgcggcccggttccacgcggggcgggagctgcggcgcggcctggaccgaaagagggtgctgagggacgaggatttcgaggcggacgagctgacggggatcagccccgcgcgcgcgcacgtggccgcggccaacctggtcacggcgtacgagcagaccgtgaaggaggagagcaacttccaaaaatccttcaacaaccacgtgcgcaccctgatcgcgcgcgaggaggtgaccctgggcctgatgcacctgtgggacctgctggaggccatcgtgcagaaccccaccagcaagccgctgacggcgcagctgttcctggtggtgcagcatagtcgggacaacgaagcgttcagggaggcgctgctgaatatcaccgagcccgagggccgctggctcctggacctggtgaacattctgcagagcatcgtggtgcaggagcgcgggctgccgctgtccgagaagctggcggccatcaacttctcggtgctgagtttgggcaagtactacgctaggaagatctacaagaccccgtacgtgcccatagacaaggaggtgaagatcgacgggttttacatgcgcatgaccctgaaagtgctgaccctgagcgacgatctgggggtgtaccgcaacgacaggatgcaccgtgcggtgagcgccagcaggcggcgcgagctgagcgaccaggagctgatgcatagtctgcagcgggccctgaccggggccgggaccgagggggagagctactttgacatgggcgcggacctgcactggcagcccagccgccgggccttggaggcggcggcaggaccctacgtagaagaggtggacgatgaggtggacgaggagggcgagtacctggaagactgatggcgcgaccgtatttttgctagatgcaacaacaacagccacctcctgatcccgcgatgcgggcggcgctgcagagccagccgtccggcattaactcctcggacgattggacccaggccatgcaacgcatcatggcgctgacgacccgcaaccccgaagcctttagacagcagccccaggccaaccggctctcggccatcctggaggccgtggtgccctcgcgctccaaccccacgcacgagaaggtcctggccatcgtgaacgcgctggtggagaacaaggccatccgcggcgacgaggccggcctggtgtacaacgcgctgctggagcgcgtggcccgctacaacagcaccaacgtgcagaccaacctggaccgcatggtgaccgacgtgcgcgaggccgtggcccagcgcgagcggttccaccgcgagtccaacctgggatccatggtggcgctgaacgccttcctcagcacccagcccgccaacgtgccccggggccaggaggactacaccaacttcatcagcgccctgcgcctgatggtgaccgaggtgccccagagcgaggtgtaccagtccgggccggactacttcttccagaccagtcgccagggcttgcagaccgtgaacctgagccaggctttcaagaacttgcagggcctgtggggcgtgcaggccccggtcggggaccgcgcgacggtgtcgagcctgctgacgccgaactcgcgcctgctgctgctgctggtggcccccttcacggacagcggcagcatcaaccgcaactcgtacctgggctacctgattaacctgtaccgcgaggccatcggccaggcgcacgtggacgagcagacctaccaggagatcacccacgtgagccgcgccctgggccaggacgacccgggcaacctggaagccaccctgaactttttgctgaccaaccggtcgcagaagatcccgccccagtacgcgctcagcaccgaggaggagcgcatcctgcgttacgtgcagcagagcgtgggcctgttcctgatgcaggagggggccacccccagcgccgcgctcgacatgaccgcgcgcaacatggagcccagcatgtacgccagcaaccgcccgttcatcaataaactgatggactacttgcatcgggcggccgccatgaactctgactatttcaccaacgccatcctgaatccccactggctcccgccgccggggttctacacgggcgagtacgacatgcccgaccccaatgacgggttcctgtgggacgatgtggacagcagcgtgttctccccccgaccgggtgctaacgagcgccccttgtggaagaaggaaggcagcgaccgacgcccgtcctcggcgctgtccggccgcgagggtgctgccgcggcggtgcccgaggccgccagtcctttcccgagcttgcccttctcgctgaacagtatccgcagcagcgagctgggcaggatcacgcgcccgcgcttgctgggcgaagaggagtacttgaatgactcgctgttgagacccgagcgggagaagaacttccccaataacgggatagaaagcctggtggacaagatgagccgctggaagacgtatgcgcaggagcacagggacgatccccgggcgtcgcagggggccacgagccggggcagcgccgcccgtaaacgccggtggcacgacaggcagcggggacagatgtgggacgatgaggactccgccgacgacagcagcgtgttggacttgggtgggagtggtaacccgttcgctcacctgcgcccccgtatcgggcgcatgatgtaagagaaaccgaaaataaatgatactcaccaaggccatggcgaccagcgtgcgttcgtttcttctctgttgttgttgtatctagtatgatgaggcgtgcgtacccggagggtcctcctccctcgtacgagagcgtgatgcagcaggcgatggcggcggcggcgatgcagcccccgctggaggctccttacgtgcccccgcggtacctggcgcctacggaggggcggaacagcattcgttactcggagctggcacccttgtacgataccacccggttgtacctggtggacaacaagtcggcggacatcgcctcgctgaactaccagaacgaccacagcaacttcctgaccaccgtggtgcagaacaatgacttcacccccacggaggccagcacccagaccatcaactttgacgagcgctcgcggtggggcggccagctgaaaaccatcatgcacaccaacatgcccaacgtgaacgagttcatgtacagcaacaagttcaaggcgcgggtgatggtctcccgcaagacccccaatggggtgacagtgacagaggattatgatggtagtcaggatgagctgaagtatgaatgggtggaatttgagctgcccgaaggcaacttctcggtgaccatgaccatcgacctgatgaacaacgccatcatcgacaattacttggcggtggggcggcagaacggggtgctggagagcgacatcggcgtgaagttcgacactaggaacttcaggctgggctgggaccccgtgaccgagctggtcatgcccggggtgtacaccaacgaggctttccatcccgatattgtcttgctgcccggctgcggggtggacttcaccgagagccgcctcagcaacctgctgggcattcgcaagaggcagcccttccaggaaggcttccagatcatgtacgaggatctggaggggggcaacatccccgcgctcctggatgtcgacgcctatgagaaaagcaaggaggatgcagcagctgaagcaactgcagccgtagctaccgcctctaccgaggtcaggggcgataattttgcaagcgccgcagcagtggcagcggccgaggcggctgaaaccgaaagtaagatagtcattcagccggtggagaaggatagcaagaacaggagctacaacgtactaccggacaagataaacaccgcctaccgcagctggtacctagcctacaactatggcgaccccgagaagggcgtgcgctcctggacgctgctcaccacctcggacgtcacctgcggcgtggagcaagtctactggtcgctgcccgacatgatgcaagacccggtcaccttccgctccacgcgtcaagttagcaactacccggtggtgggcgccgagctcctgcccgtctactccaagagcttcttcaacgagcaggccgtctactcgcagcagctgcgcgccttcacctcgcttacgcacgtcttcaaccgcttccccgagaaccagatcctcgtccgcccgcccgcgcccaccattaccaccgtcagtgaaaacgttcctgctctcacagatcacgggaccctgccgctgcgcagcagtatccggggagtccagcgcgtgaccgttactgacgccagacgccgcacctgcccctacgtctacaaggccctgggcatagtcgcgccgcgcgtcctctcgagccgcaccttctaaatgtccattctcatctcgcccagtaataacaccggttggggcctgcgcgcgcccagcaagatgtacggaggcgctcgccaacgctccacgcaacaccccgtgcgcgtgcgcgggcacttccgcgctccctggggcgccctcaagggccgcgtgcggtcgcgcaccaccgtcgacgacgtgatcgaccaggtggtggccgacgcgcgcaactacacccccgccgccgcgcccgtctccaccgtggacgccgtcatcgacagcgtggtggccgacgcgcgccggtacgcccgcgccaagagccggcggcggcgcatcgcccggcggcaccggagcacccccgccatgcgcgcggcgcgagccttgctgcgcagggccaggcgcacgggacgcagggccatgctcagggcggccagacgcgcggcttcaggcgccagcgccggcaggacccggagacgcgcggccacggcggcggcagcggccatcgccagcatgtcccgcccgcggcgagggaacgtgtactgggtgcgcgacgccgccaccggtgtgcgcgtgcccgtgcgcacccgcccccctcgcacttgaagatgttcacttcgcgatgttgatgtgtcccagcggcgaggaggatgtccaagcgcaaattcaaggaagagatgctccaggtcatcgcgcctgagatctacggccctgcggtggtgaaggaggaaagaaagccccgcaaaatcaagcgggtcaaaaaggacaaaaaggaagaagaaagtgatgtggacggattggtggagtttgtgcgcgagttcgccccccggcggcgcgtgcagtggcgcgggcggaaggtgcaaccggtgctgagacccggcaccaccgtggtcttcacgcccggcgagcgctccggcaccgcttccaagcgctcctacgacgaggtgtacggggatgatgatattctggagcaggcggccgagcgcctgggcgagtttgcttacggcaagcgcagccgttccgcaccgaaggaagaggcggtgtccatcccgctggaccacggcaaccccacgccgagcctcaagcccgtgaccttgcagcaggtgctgccgaccgcggcgccgcgccgggggttcaagcgcgagggcgaggatctgtaccccaccatgcagctgatggtgcccaagcgccagaagctggaagacgtgctggagaccatgaaggtggacccggacgtgcagcccgaggtcaaggtgcggcccatcaagcaggtggccccgggcctgggcgtgcagaccgtggacatcaagattcccacggagcccatggaaacgcagaccgagcccatgatcaagcccagcaccagcaccatggaggtgcagacggatccctggatgccatcggctcctagtcgaagaccccggcgcaagtacggcgcggccagcctgctgatgcccaactacgcgctgcatccttccatcatccccacgccgggctaccgcggcacgcgcttctaccgcggtcataccagcagccgccgccgcaagaccaccactcgccgccgccgtcgccgcaccgccgctgcaaccacccctgccgccctggtgcggagagtgtaccgccgcggccgcgcacctctgaccctgccgcgcgcgcgctaccacccgagcatcgccatttaaactttcgcctgctttgcagatcaatggccctcacatgccgccttcgcgttcccattacgggctaccgaggaagaaaaccgcgccgtagaaggctggcggggaacgggatgcgtcgccaccaccaccggcggcggcgcgccatcagcaagcggttggggggaggcttcctgcccgcgctgatccccatcatcgccgcggcgatcggggcgatccccggcattgcttccgtggcggtgcaggcctctcagcgccactgagacacacttggaaacatcttgtaataaaccaatggactctgacgctcctggtcctgtgatgtgttttcgtagacagatggaagacatcaatttttcgtccctggctccgcgacacggcacgcggccgttcatgggcacctggagcgacatcggcaccagccaactgaacgggggcgccttcaattggagcagtctctggagcgggcttaagaatttcgggtccacgcttaaaacctatggcagcaaggcgtggaacagcaccacagggcaggcgctgagggataagctgaaagagcagaacttccagcagaaggtggtcgatgggctcgcctcgggcatcaacggggtggtggacctggccaaccaggccgtgcagcggcagatcaacagccgcctggacccggtgccgcccgccggctccgtggagatgccgcaggtggaggaggagctgcctcccctggacaagcggggcgagaagcgaccccgccccgatgcggaggagacgctgctgacgcacacggacgagccgcccccgtacgaggaggcggtgaaactgggtctgcccaccacgcggcccatcgcgcccctggccaccggggtgctgaaacccgaaaagcccgcgaccctggacttgcctcctccccagccttcccgcccctctacagtggctaagcccctgccgccggtggccgtggcccgcgcgcgacccgggggcaccgcccgccctcatgcgaactggcagagcactctgaacagcatcgtgggtctgggagtgcagagtgtgaagcgccgccgctgctattaaacctaccgtagcgcttaacttgcttgtctgtgtgtgtatgtattatgtcgccgccgccgctgtccaccagaaggaggagtgaagaggcgcgtcgccgagttgcaagatggccaccccatcgatgctgccccagtgggcgtacatgcacatcgccggacaggacgcttcggagtacctgagtccgggtctggtgcagtttgcccgcgccacagacacctacttcagtctggggaacaagtttaggaaccccacggtggcgcccacgcacgatgtgaccaccgaccgcagccagcggctgacgctgcgcttcgtgcccgtggaccgcgaggacaacacctactcgtacaaagtgcgctacacgctggccgtgggcgacaaccgcgtgctggacatggccagcacctactttgacatccgcggcgtgctggatcggggccctagcttcaaaccctactccggcaccgcctacaacagtctggcccccaagggagcacccaacacttgtcagtggacatataaagccgatggtgaaactgccacagaaaaaacctatacatatggaaatgcacccgtgcagggcattaacatcacaaaagatggtattcaacttggaactgacaccgatgatcagccaatctacgcagataaaacctatcagcctgaacctcaagtgggtgatgctgaatggcatgacatcactggtactgatgaaaagtatggaggcagagctcttaagcctgataccaaaatgaagccttgttatggttcttttgccaagcctactaataaagaaggaggtcaggcaaatgtgaaaacaggaacaggcactactaaagaatatgacatagacatggctttctttgacaacagaagtgcggctgctgctggcctagctccagaaattgttttgtatactgaaaatgtggatttggaaactccagatacccatattgtatacaaagcaggcacagatgacagcagctcttctattaatttgggtcagcaagccatgcccaacagacctaactacattggtttcagagacaactttatcgggctcatgtactacaacagcactggcaatatgggggtgctggccggtcaggcttctcagctgaatgctgtggttgacttgcaagacagaaacaccgagctgtcctaccagctcttgcttgactctctgggtgacagaacccggtatttcagtatgtggaatcaggcggtggacagctatgatcctgatgtgcgcattattgaaaatcatggtgtggaggatgaacttcccaactattgtttccctctggatgctgttggcagaacagatacttatcagggaattaaggctaatggaactgatcaaaccacatggaccaaagatgacagtgtcaatgatgctaatgagataggcaagggtaatccattcgccatggaaatcaacatccaagccaacctgtggaggaacttcctctacgccaacgtggccctgtacctgcccgactcttacaagtacacgccggccaatgttaccctgcccaccaacaccaacacctacgattacatgaacggccgggtggtggcgccctcgctggtggactcctacatcaacatcggggcgcgctggtcgctggatcccatggacaacgtgaaccccttcaaccaccaccgcaatgcggggctgcgctaccgctccatgctcctgggcaacgggcgctacgtgcccttccacatccaggtgccccagaaatttttcgccatcaagagcctcctgctcctgcccgggtcctacacctacgagtggaacttccgcaaggacgtcaacatgatcctgcagagctccctcggcaacgacctgcgcacggacggggcctccatctccttcaccagcatcaacctctacgccaccttcttccccatggcgcacaacacggcctccacgctcgaggccatgctgcgcaacgacaccaacgaccagtccttcaacgactacctctcggcggccaacatgctctaccccatcccggccaacgccaccaacgtgcccatctccatcccctcgcgcaactgggccgccttccgcggctggtccttcacgcgtctcaagaccaaggagacgccctcgctgggctccgggttcgacccctacttcgtctactcgggctccatcccctacctcgacggcaccttctacctcaaccacaccttcaagaaggtctccatcaccttcgactcctccgtcagctggcccggcaacgaccggctcctgacgcccaacgagttcgaaatcaagcgcaccgtcgacggcgagggctacaacgtggcccagtgcaacatgaccaaggactggttcctggtccagatgctggcccactacaacatcggctaccagggcttctacgtgcccgagggctacaaggaccgcatgtactccttcttccgcaacttccagcccatgagccgccaggtggtggacgaggtcaactacaaggactaccaggccgtcaccctggcctaccagcacaacaactcgggcttcgtcggctacctcgcgcccaccatgcgccagggccagccctaccccgccaactacccctacccgctcatcggcaagagcgccgtcaccagcgtcacccagaaaaagttcctctgcgacagggtcatgtggcgcatccccttctccagcaacttcatgtccatgggcgcgctcaccgacctcggccagaacatgctctatgccaactccgcccacgcgctagacatgaatttcgaagtcgaccccatggatgagtccacccttctctatgttgtcttcgaagtcttcgacgtcgtccgagtgcaccagccccaccgcggcgtcatcgaggccgtctacctgcgcacccccttctcggccggtaacgccaccacctaagctcttgcttcttgcaagccatggccgcgggctccggcgagcaggagctcagggccatcatccgcgacctgggctgcgggccctacttcctgggcaccttcgataagcgcttcccgggattcatggccccgcacaagctggcctgcgccatcgtcaacacggccggccgcgagaccgggggcgagcactggctggccttcgcctggaacccgcgctcgaacacctgctacctcttcgaccccttcgggttctcggacgagcgcctcaagcagatctaccagttcgagtacgagggcctgctgcgccgcagcgccctggccaccgaggaccgctgcgtcaccctggaaaagtccacccagaccgtgcagggtccgcgctcggccgcctgcgggctcttctgctgcatgttcctgcacgccttcgtgcactggcccgaccgccccatggacaagaaccccaccatgaacttgctgacgggggtgcccaacggcatgctccagtcgccccaggtggaacccaccctgcgccgcaaccaggaggcgctctaccgcttcctcaactcccactccgcctactttcgctcccaccgcgcgcgcatcgagaaggccaccgccttcgaccgcatgaatcaagacatgtaaaccgtgtgtgtatgttaaatgtctttaataaacagcactttcatgttacacatgcatctgagatgatttatttagaaatcgaaagggttctgccgggtctcggcatggcccgcgggcagggacacgttgcggaactggtacttggccagccacttgaactcggggatcagcagtttgggcagcggggtgtcggggaaggagtcggtccacagcttccgcgtcagttgcagggcgcccagcaggtcgggcgcggagatcttgaaatcgcagttgggacccgcgttctgcgcgcgggagttgcggtacacggggttgcagcactggaacaccatcagggccgggtgcttcacgctcgccagcaccgtcgcgtcggtgatgctctccacgtcgaggtcctcggcgttggccatcccgaagggggtcatcttgcaggtctgccttcccatggtgggcacgcacccgggcttgtggttgcaatcgcagtgcagggggatcagcatcatctgggcctggtcggcgttcatccccgggtacatggccttcatgaaagcctccaattgcctgaacgcctgctgggccttggctccctcggtgaagaagaccccgcaggacttgctagagaactggttggtggcgcacccggcgtcgtgcacgcagcagcgcgcgtcgttgttggccagctgcaccacgctgcgcccccagcggttctgggtgatcttggcccggtcggggttctccttcagcgcgcgctgcccgttctcgctcgccacatccatctcgatcatgtgctccttctggatcatggtggtcccgtgcaggcaccgcagcttgccctcggcctcggtgcacccgtgcagccacagcgcgcacccggtgcactcccagttcttgtgggcgatctgggaatgcgcgtgcacgaagccctgcaggaagcggcccatcatggtggtcagggtcttgttgctagtgaaggtcagcggaatgccgcggtgctcctcgttgatgtacaggtggcagatgcggcggtacacctcgccctgctcgggcatcagctggaagttggctttcaggtcggtctccacgcggtagcggtccatcagcatagtcatgatttccatacccttctcccaggccgagacgatgggcaggctcatagggttcttcaccatcatcttagcgctagcagccgcggccagggggtcgctctcgtccagggtctcaaagctccgcttgccgtccttctcggtgatccgcaccggggggtagctgaagcccacggccgccagctcctcctcggcctgtctttcgtcctcgctgtcctggctgacgtcctgcaggaccacatgcttggtcttgcggggtttcttcttgggcggcagcggcggcggagatgttggagatggcgagggggagcgcgagttctcgctcaccactactatctcttcctcttcttggtccgaggccacgcggcggtaggtatgtctcttcgggggcagaggcggaggcgacgggctctcgccgccgcgacttggcggatggctggcagagccccttccgcgttcgggggtgcgctcccggcggcgctctgactgacttcctccgcggccggccattgtgttctcctagggaggaacaacaagcatggagactcagccatcgccaacctcgccatctgcccccaccgccgacgagaagcagcagcagcagaatgaaagcttaaccgccccgccgcccagccccgccacctccgacgcggccgtcccagacatgcaagagatggaggaatccatcgagattgacctgggctatgtgacgcccgcggagcacgaggaggagctggcagtgcgcttttcacaagaagagatacaccaagaacagccagagcaggaagcagagaatgagcagagtcaggctgggctcgagcatgacggcgactacctccacctgagcgggggggaggacgcgctcatcaagcatctggcccggcaggccaccatcgtcaaggatgcgctgctcgaccgcaccgaggtgcccctcagcgtggaggagctcagccgcgcctacgagttgaacctcttctcgccgcgcgtgccccccaagcgccagcccaatggcacctgcgagcccaacccgcgcctcaacttctacccggtcttcgcggtgcccgaggccctggccacctaccacatctttttcaagaaccaaaagatccccgtctcctgccgcgccaaccgcacccgcgccgacgcccttttcaacctgggtcccggcgcccgcctacctgatatcgcctccttggaagaggttcccaagatcttcgagggtctgggcagcgacgagactcgggccgcgaacgctctgcaaggagaaggaggagagcatgagcaccacagcgccctggtcgagttggaaggcgacaacgcgcggctggcggtgctcaaacgcacggtcgagctgacccatttcgcctacccggctctgaacctgccccccaaagtcatgagcgcggtcatggaccaggtgctcatcaagcgcgcgtcgcccatctccgaggacgagggcatgcaagactccgaggagggcaagcccgtggtcagcgacgagcagctggcccggtggctgggtcctaatgctagtccccagagtttggaagagcggcgcaaactcatgatggccgtggtcctggtgaccgtggagctggagtgcctgcgccgcttcttcgccgacgcggagaccctgcgcaaggtcgaggagaacctgcactacctcttcaggcacgggttcgtgcgccaggcctgcaagatctccaacgtggagctgaccaacctggtctcctacatgggcatcttgcacgagaaccgcctggggcagaacgtgctgcacaccaccctgcgcggggaggcccggcgcgactacatccgcgactgcgtctacctctacctctgccacacctggcagacgggcatgggcgtgtggcagcagtgtctggaggagcagaacctgaaagagctctgcaagctcctgcagaagaacctcaagggtctgtggaccgggttcgacgagcgcaccaccgcctcggacctggccgacctcattttccccgagcgcctcaggctgacgctgcgcaacggcctgcccgactttatgagccaaagcatgttgcaaaactttcgctctttcatcctcgaacgctccggaatcctgcccgccacctgctccgcgctgccctcggacttcgtgccgctgaccttccgcgagtgccccccgccgctgtggagccactgctacctgctgcgcctggccaactacctggcctaccactcggacgtgatcgaggacgtcagcggcgagggcctgctcgagtgccactgccgctgcaacctctgcacgccgcaccgctccctggcctgcaacccccagctgctgagcgagacccagatcatcggcaccttcgagttgcaagggcccagcgaaggcgagggttcagccgccaaggggggtctgaaactcaccccggggctgtggacctcggcctacttgcgcaagttcgtgcccgaggactaccatcccttcgagatcaggttctacgaggaccaatcccatccgcccaaggccgagctgtcggcctgcgtcatcacccagggggcgatcctggcccaattgcaagccatccagaaatcccgccaagaattcttgctgaaaaagggccgcggggtctacctcgacccccagaccggtgaggagctcaaccccggcttcccccaggatgccccgaggaaacaagaagctgaaagtggagctgccgcccgtggaggatttggaggaagactgggagaacagcagtcaggcagaggaggaggagatggaggaagactgggacagcactcaggcagaggaggacagcctgcaagacagtctggaggaagacgaggaggaggcagaggaggaggtggaagaagcagccgccgccagaccgtcgtcctcggcgggggagaaagcaagcagcacggataccatctccgctccgggtcggggtcccgctcgaccacacagtagatgggacgagaccggacgattcccgaaccccaccacccagaccggtaagaaggagcggcagggatacaagtcctggcgggggcacaaaaacgccatcgtctcctgcttgcaggcctgcgggggcaacatctccttcacccggcgctacctgctcttccaccgcggggtgaactttccccgcaacatcttgcattactaccgtcacctccacagcccctactacttccaagaagaggcagcagcagcagaaaaagaccagcagaaaaccagcagctagaaaatccacagcggcggcagcaggtggactgaggatcgcggcgaacgagccggcgcaaacccgggagctgaggaaccggatctttcccaccctctatgccatcttccagcagagtcgggggcaggagcaggaactgaaagtcaagaaccgttctctgcgctcgctcacccgcagttgtctgtatcacaagagcgaagaccaacttcagcgcactctcgaggacgccgaggctctcttcaacaagtactgcgcgctcactcttaaagagtagcccgcgcccgcccagtcgcagaaaaaggcgggaattacgtcacctgtgcccttcgccctagccgcctccacccatcatcatgagcaaagagattcccacgccttacatgtggagctaccagccccagatgggcctggccgccggtgccgcccaggactactccacccgcatgaattggctcagcgccgggcccgcgatgatctcacgggtgaatgacatccgcgcccaccgaaaccagatactcctagaacagtcagcgctcaccgccacgccccgcaatcacctcaatccgcgtaattggcccgccgccctggtgtaccaggaaattccccagcccacgaccgtactacttccgcgagacgcccaggccgaagtccagctgactaactcaggtgtccagctggcgggcggcgccaccctgtgtcgtcaccgccccgctcagggtataaagcggctggtgatccggggcagaggcacacagctcaacgacgaggtggtgagctcttcgctgggtctgcgacctgacggagtcttccaactcgccggatcggggagatcttccttcacgcctcgtcaggccgtcctgactttggagagttcgtcctcgcagccccgctcgggtggcatcggcactctccagttcgtggaggagttcactccctcggtctacttcaaccccttctccggctcccccggccactacccggacgagttcatcccgaacttcgacgccatcagcgagtcggtggacggctacgattgaaactaatcacccccttatccagtgaaataaagatcatattgatgatgattttacagaaataaaaaataatcatttgatttgaaataaagatacaatcatattgatgatttgagtttaacaaaaaaataaagaatcacttacttgaaatctgataccaggtctctgtccatgttttctgccaacaccacttcactcccctcttcccagctctggtactgcaggccccggcgggctgcaaacttcctccacacgctgaaggggatgtcaaattcctcctgtccctcaatcttcattttatcttctatcagatgtccaaaaagcgcgtccgggtggatgatgacttcgaccccgtctacccctacgatgcagacaacgcaccgaccgtgcccttcatcaacccccccttcgtctcttcagatggattccaagagaagcccctgggggtgttgtccctgcgactggccgaccccgtcaccaccaagaacggggaaatcaccctcaagctgggagagggggtggacctcgattcctcgggaaaactcatctccaacacggccaccaaggccgccgcccctctcagtttttccaacaacaccatttcccttaacatggatcaccccttttacactaaagatggaaaattatccttacaagtttctccaccattaaatatactgagaacaagcattctaaacacactagctttaggttttggatcaggtttaggactccgtggctctgccttggcagtacagttagtctctccacttacatttgatactgatggaaacataaagcttaccttagacagaggtttgcatgttacaacaggagatgcaattgaaagcaacataagctgggctaaaggtttaaaatttgaagatggagccatagcaaccaacattggaaatgggttagagtttggaagcagtagtacagaaacaggtgttgatgatgcttacccaatccaagttaaacttggatctggccttagctttgacagtacaggagccataatggctggtaacaaagaagacgataaactcactttgtggacaacacctgatccatcaccaaactgtcaaatactcgcagaaaatgatgcaaaactaacactttgcttgactaaatgtggtagtcaaatactggccactgtgtcagtcttagttgtaggaagtggaaacctaaaccccattactggcaccgtaagcagtgctcaggtgtttctacgttttgatgcaaacggtgttcttttaacagaacattctacactaaaaaaatactgggggtataggcagggagatagcatagatggcactccatataccaatgctgtaggattcatgcccaatttaaaagcttatccaaagtcacaaagttctactactaaaaataatatagtagggcaagtatacatgaatggagatgtttcaaaacctatgcttctcactataaccctcaatggtactgatgacagcaacagtacatattcaatgtcattttcatacacctggactaatggaagctatgttggagcaacatttggggctaactcttataccttctcatacatcgcccaagaatgaacactgtatcccaccctgcatgccaacccttcccaccccactctgtggaacaaactctgaaacacaaaataaaataaagttcaagtgttttattgattcaacagttttacaggattcgagcagttatttttcctccaccctcccaggacatggaatacaccaccctctccccccgcacagccttgaacatctgaatgccattggtgatggacatgcttttggtctccacgttccacacagtttcagagcgagccagtctcgggtcggtcagggagatgaaaccctccgggcactcccgcatctgcacctcacagctcaacagctgaggattgtcctcggtggtcgggatcacggttatctggaagaagcagaagagcggcggtgggaatcatagtccgcgaacgggatcggccggtggtgtcgcatcaggccccgcagcagtcgctgccgccgccgctccgtcaagctgctgctcagggggtccgggtccagggactccctcagcatgatgcccacggccctcagcatcagtcgtctggtgcggcgggcgcagcagcgcatgcggatctcgctcaggtcgctgcagtacgtgcaacacagaaccaccaggttgttcaacagtccatagttcaacacgctccagccgaaactcatcgcgggaaggatgctacccacgtggccgtcgtaccagatcctcaggtaaatcaagtggtgccccctccagaacacgctgcccacgtacatgatctccttgggcatgtggcggttcaccacctcccggtaccacatcaccctctggttgaacatgcagccccggatgatcctgcggaaccacagggccagcaccgccccgcccgccatgcagcgaagagaccccgggtcccggcaatggcaatggaggacccaccgctcgtacccgtggatcatctgggagctgaacaagtctatgttggcacagcacaggcatatgctcatgcatctcttcagcactctcaactcctcgggggtcaaaaccatatcccagggcacggggaactcttgcaggacagcgaaccccgcagaacagggcaatcctcgcacagaacttacattgtgcatggacagggtatcgcaatcaggcagcaccgggtgatcctccaccagagaagcgcgggtctcggtctcctcacagcgtggtaagggggccggccgatacgggtgatggcgggacgcggctgatcgtgttcgcgaccgtgtcatgatgcagttgctttcggacattttcgtacttgctgtagcagaacctggtccgggcgctgcacaccgatcgccggcggcggtctcggcgcttggaacgctcggtgttgaaattgtaaaacagccactctctcagaccgtgcagcagatctagggcctcaggagtgatgaagatcccatcatgcctgatggctctgatcacatcgaccaccgtggaatgggccagacccagccagatgatgcaattttgttgggtttcggtgacggcgggggagggaagaacaggaagaaccatgattaacttttaatccaaacggtctcggagtacttcaaaatgaagatcgcggagatggcacctctcgcccccgctgtgttggtggaaaataacagccaggtcaaaggtgatacggttctcgagatgttccacggtggcttccagcaaagcctccacgcgcacatccagaaacaagacaatagcgaaagcgggagggttctctaattcctcaatcatcatgttacactcctgcaccatccccagataattttcatttttccagccttgaatgattcgaactagttcctgaggtaaatccaagccagccatgataaagagctcgcgcagagcgccctccaccggcattcttaagcacaccctcataattccaagatattctgctcctggttcacctgcagcagattgacaagcggaatatcaaaatctctgccgcgatccctgagctcctccctcagcaataactgtaagtactctttcatatcctctccgaaatttttagccataggaccaccaggaataagattagggcaagccacagtacagataaaccgaagtcctccccagtgagcattgccaaatgcaagactgctataagcatgctggctagacccggtgatatcttccagataactggacagaaaatcgcccaggcaatttttaagaaaatcaacaaaagaaaaatcctccaggtggacgtttagagcctcgggaacaacgatgaagtaaatgcaagcggtgcgttccagcatggttagttagctgatctgtagaaaaaacaaaaatgaacattaaaccatgctagcctggcgaacaggtgggtaaatcgttctctccagcaccaggcaggccacggggtctccggcgcgaccctcgtaaaaattgtcgctatgattgaaaaccatcacagagagacgttcccggtggccggcgtgaatgattcgacaagatgaatacacccccggaacattggcgtccgcgagtgaaaaaaagcgcccgaggaagcaataaggcactacaatgctcagtctcaagtccagcaaagcgatgccatgcggatgaagcacaaaattctcaggtgcgtacaaaatgtaattactcccctcctgcacaggcagcaaagcccccgatccctccaggtacacatacaaagcctcagcgtccatagcttaccgagcagcagcacacaacaggcgcaagagtcagagaaaggctgagctctaacctgtccacccgctctctgctcaatatatagcccagatctacactgacgtaaaggccaaagtctaaaaatacccgccaaataatcacacacgcccagcacacgcccagaaaccggtgacacactcaaaaaaatacgcgcacttcctcaaacgcccaaaactgccgtcatttccgggttcccacgctacgtcatcaaaacacgactttcaaattccgtcgaccgttaaaaacgtcacccgccccgcccctaacggtcgcccgtctctcagccaatcagcgccccgcatccccaaattcaaacacctcatttgcatattaacgcgcacaaaaagtttgaggtatattattgatgatgg

SEQ ID NO: 14 - DNA, 8602 bp, Artificial Sequence
  Description of Artificial Sequence: Synthetic polynucleotide
atgggcggcgcatgagagaagcccagaccaattacctacccaaaatggagaaagttcacgttgacatcgaggaagacagcccattcctcagagctttgcagcggagcttcccgcagtttgaggtagaagccaagcaggtcactgataatgaccatgctaatgccagagcgttttcgcatctggcttcaaaactgatcgaaacggaggtggacccatccgacacgatccttgacattggaagtgcgcccgcccgcagaatgtattctaagcacaagtatcattgtatctgtccgatgagatgtgcggaagatccggacagattgtataagtatgcaactaagctgaagaaaaactgtaaggaaataactgataaggaattggacaagaaaatgaaggagctcgccgccgtcatgagcgaccctgacctggaaactgagactatgtgcctccacgacgacgagtcgtgtcgctacgaagggcaagtcgctgtttaccaggatgtatacgcggttgacggaccgacaagtctctatcaccaagccaataagggagttagagtcgcctactggataggctttgacaccaccccttttatgtttaagaacttggctggagcatatccatcatactctaccaactgggccgacgaaaccgtgttaacggctcgtaacataggcctatgcagctctgacgttatggagcggtcacgtagagggatgtccattcttagaaagaagtatttgaaaccatccaacaatgttctattctctgttggctcgaccatctaccacgagaagagggacttactgaggagctggcacctgccgtctgtatttcacttacgtggcaagcaaaattacacatgtcggtgtgagactatagttagttgcgacgggtacgtcgttaaaagaatagctatcagtccaggcctgtatgggaagccttcaggctatgctgctacgatgcaccgcgagggattcttgtgctgcaaagtgacagacacattgaacggggagagggtctcttttcccgtgtgcacgtatgtgccagctacattgtgtgaccaaatgactggcatactggcaacagatgtcagtgcggacgacgcgcaaaaactgctggttgggctcaaccagcgtatagtcgtcaacggtcgcacccagagaaacaccaataccatgaaaaattaccttttgcccgtagtggcccaggcatttgctaggtgggcaaaggaatataaggaagatcaagaagatgaaaggccactaggactacgagatagacagttagtcatggggtgttgttgggcttttagaaggcacaagataacatctatttataagcgcccggatacccaaaccatcatcaaagtgaacagcgatttccactcattcgtgctgcccaggataggcagtaacacattggagatcgggctgagaacaagaatcaggaaaatgttagaggagcacaaggagccgtcacctctcattaccgccgaggacgtacaagaagctaagtgcgcagccgatgaggctaaggaggtgcgtgaagccgaggagttgcgcgcagctctaccacctttggcagctgatgttgaggagcccactctggaagccgatgtcgacttgatgttacaagaggctggggccggctcagtggagacacctcgtggcttgataaaggttaccagctacgctggcgaggacaagatcggctcttacgctgtgctttctccgcaggctgtactcaagagtgaaaaattatcttgcatccaccctctcgctgaacaagtcatagtgataacacactctggccgaaaagggcgttatgccgtggaaccataccatggtaaagtagtggtgccagagggacatgcaatacccgtccaggactttcaagctctgagtgaaagtgccaccattgtgtacaacgaacgtgagttcgtaaacaggtacctgcaccatattgccacacatggaggagcgctgaacactgatgaagaatattacaaaactgtcaagcccagcgagcacgacggcgaatacctgtacgacatcgacaggaaacagtgcgtcaagaaagaactagtcactgggctagggctcacaggcgagctggtggatcctcccttccatgaattcgcctacgagagtctgagaacacgaccagccgctccttaccaagtaccaaccataggggtgtatggcgtgccaggatcaggcaagtctggcatcattaaaagcgcagtcaccaaaaaagatctagtggtgagcgccaagaaagaaaactgtgcagaaattataagggacgtcaagaaaatgaaagggctggacgtcaatgccagaactgtggactcagtgctcttgaatggatgcaaacaccccgtagagaccctgtatattgacgaagcttttgcttgtcatgcaggtactctcagagcgctcatagccattataagacctaaaaaggcagtgctctgcggggatcccaaacagtgcggtttttttaacatgatgtgcctgaaagtgcattttaaccacgagatttgcacacaagtcttccacaaaagcatctctcgccgttgcactaaatctgtgacttcggtcgtctcaaccttgttttacgacaaaaaaatgagaacgacgaatccgaaagagactaagattgtgattgacactaccggcagtaccaaacctaagcaggacgatctcattctcacttgtttcagagggtgggtgaagcagttgcaaatagattacaaaggcaacgaaataatgacggcagctgcctctcaagggctgacccgtaaaggtgtgtatgccgttcggtacaaggtgaatgaaaatcctctgtacgcacccacctcagaacatgtgaacgtcctactgacccgcacggaggaccgcatcgtgtggaaaacactagccggcgacccatggataaaaacactgactgccaagtaccctgggaatttcactgccacgatagaggagtggcaagcagagcatgatgccatcatgaggcacatcttggagagaccggaccctaccgacgtcttccagaataaggcaaacgtgtgttgggccaaggctttagtgccggtgctgaagaccgctggcatagacatgaccactgaacaatggaacactgtggattattttgaaacggacaaagctcactcagcagagatagtattgaaccaactatgcgtgaggttctttggactcgatctggactccggtctattttctgcacccactgttccgttatccattaggaataatcactgggataactccccgtcgcctaacatgtacgggctgaataaagaagtggtccgtcagctctctcgcaggtacccacaactgcctcgggcagttgccactggaagagtctatgacatgaacactggtacactgcgcaattatgatccgcgcataaacctagtacctgtaaacagaagactgcctcatgctttagtcctccaccataatgaacacccacagagtgacttttcttcattcgtcagcaaattgaagggcagaactgtcctggtggtcggggaaaagttgtccgtcccaggcaaaatggttgactggttgtcagaccggcctgaggctaccttcagagctcggctggatttaggcatcccaggtgatgtgcccaaatatgacataatatttgttaatgtgaggaccccatataaataccatcactatcagcagtgtgaagaccatgccattaagcttagcatgttgaccaagaaagcttgtctgcatctgaatcccggcggaacctgtgtcagcataggttatggttacgctgacagggccagcgaaagcatcattggtgctatagcgcggcagttcaagttttcccgggtatgcaaaccgaaatcctcacttgaagagacggaagttctgtttgtattcattgggtacgatcgcaaggcccgtacgcacaatccttacaagctttcatcaaccttgaccaacatttatacaggttccagactccacgaagccggatgtgcaccctcatatcatgtggtgcgaggggatattgccacggccaccgaaggagtgattataaatgctgctaacagcaaaggacaacctggcggaggggtgtgcggagcgctgtataagaaattcccggaaagcttcgatttacagccgatcgaagtaggaaaagcgcgactggtcaaaggtgcagctaaacatatcattcatgccgtaggaccaaacttcaacaaagtttcggaggttgaaggtgacaaacagttggcagaggcttatgagtccatcgctaagattgtcaacgataacaattacaagtcagtagcgattccactgttgtccaccggcatcttttccgggaacaaagatcgactaacccaatcattgaaccatttgctgacagctttagacaccactgatgcagatgtagccatatactgcagggacaagaaatgggaaatgactctcaaggaagcagtggctaggagagaagcagtggaggagatatgcatatccgacgactcttcagtgacagaacctgatgcagagctggtgagggtgcatccgaagagttctttggctggaaggaagggctacagcacaagcgatggcaaaactttctcatatttggaagggaccaagtttcaccaggcggccaaggatatagcagaaattaatgccatgtggcccgttgcaacggaggccaatgagcaggtatgcatgtatatcctcggagaaagcatgagcagtattaggtcgaaatgccccgtcgaagagtcggaagcctccacaccacctagcacgctgccttgcttgtgcatccatgccatgactccagaaagagtacagcgcctaaaagcctcacgtccagaacaaattactgtgtgctcatcctttccattgccgaagtatagaatcactggtgtgcagaagatccaatgctcccagcctatattgttctcaccgaaagtgcctgcgtatattcatccaaggaagtatctcgtggaaacaccaccggtagacgagactccggagccatcggcagagaaccaatccacagaggggacacctgaacaaccaccacttataaccgaggatgagaccaggactagaacgcctgagccgatcatcatcgaagaggaagaagaggatagcataagtttgctgtcagatggcccgacccaccaggtgctgcaagtcgaggcagacattcacgggccgccctctgtatctagctcatcctggtccattcctcatgcatccgactttgatgtggacagtttatccatacttgacaccctggagggagctagcgtgaccagcggggcaacgtcagccgagactaactcttacttcgcaaagagtatggagtttctggcgcgaccggtgcctgcgcctcgaacagtattcaggaaccctccacatcccgctccgcgcacaagaacaccgtcacttgcacccagcagggcctgctcgagaaccagcctagtttccaccccgccaggcgtgaatagggtgatcactagagaggagctcgaggcgcttaccccgtcacgcactcctagcaggtcggtctcgagaaccagcctggtctccaacccgccaggcgtaaatagggtgattacaagagaggagtttgaggcgttcgtagcacaacaacaatgacggtttgatgcgggtgcatacatcttttcctccgacaccggtcaagggcatttacaacaaaaatcagtaaggcaaacggtgctatccgaagtggtgttggagaggaccgaattggagatttcgtatgccccgcgcctcgaccaagaaaaagaagaattactacgcaagaaattacagttaaatcccacacctgctaacagaagcagataccagtccaggaaggtggagaacatgaaagccataacagctagacgtattctgcaaggcctagggcattatttgaaggcagaaggaaaagtggagtgctaccgaaccctgcatcctgttcctttgtattcatctagtgtgaaccgtgccttttcaagccccaaggtcgcagtggaagcctgtaacgccatgttgaaagagaactttccgactgtggcttcttactgtattattccagagtacgatgcctatttggacatggttgacggagcttcatgctgcttagacactgccagtttttgccctgcaaagctgcgcagctttccaaagaaacactcctatttggaacccacaatacgatcggcagtgccttcagcgatccagaacacgctccagaacgtcctggcagctgccacaaaaagaaattgcaatgtcacgcaaatgagagaattgcccgtattggattcggcggcctttaatgtggaatgcttcaagaaatatgcgtgtaataatgaatattgggaaacgtttaaagaaaaccccatcaggcttactgaagaaaacgtggtaaattacattaccaaattaaaaggaccaaaagctgctgctctttttgcgaagacacataatttgaatatgttgcaggacataccaatggacaggtttgtaatggacttaaagagagacgtgaaagtgactccaggaacaaaacatactgaagaacggcccaaggtacaggtgatccaggctgccgatccgctagcaacagcgtatctgtgcggaatccaccgagagctggttaggagattaaatgcggtcctgcttccgaacattcatacactgtttgatatgtcggctgaagactttgacgctattatagccgagcacttccagcctggggattgtgttctggaaactgacatcgcgtcgtttgataaaagtgaggacgacgccatggctctgaccgcgttaatgattctggaagacttaggtgtggacgcagagctgttgacgctgattgaggcggctttcggcgaaatttcatcaatacatttgcccactaaaactaaatttaaattcggagccatgatgaaatctggaatgttcctcacactgtttgtgaacacagtcattaacattgtaatcgcaagcagagtgttgagagaacggctaaccggatcaccatgtgcagcattcattggagatgacaatatcgtgaaaggagtcaaatcggacaaattaatggcagacaggtgcgccacctggttgaatatggaagtcaagattatagatgctgtggtgggcgagaaagcgccttatttctgtggagggtttattttgtgtgactccgtgaccggcacagcgtgccgtgtggcagaccccctaaaaaggctgtttaagcttggcaaacctctggcagcagacgatgaacatgatgatgacaggagaagggcattgcatgaagagtcaacacgctggaaccgagtgggtattctttcagagctgtgcaaggcagtagaatcaaggtatgaaaccgtaggaacttccatcatagttatggccatgactactctagctagcagtgttaaatcattcagctacctgagaggggcccctataactctctacggctaacctgaatggactacgactctagaatagtctttaattaaagtccgccatatgaggccaccatgcagatcttcgtgaagaccctgaccggcaagaccatcaccctagaggtggagcccagtgacaccatcgagaacgtgaaggccaagatccaggataaagagggcatcccccctgaccagcagaggctgatctttgccggcaagcagctggaagatggccgcaccctctctgattacaacatccagaaggagtcaaccctgcacctggtccttcgcctgagaggtggcgctgcttacagtataatcaactttgaaaaactggctgcttacggcatcctgggctttgtgtttacactggctgcctacctgctgtttggctatcctgtgtacgtggccgcttatggactgtgtaccctggtggccatgctggctgcttacaatctggtgcctatggtggccacagtggccgcctattgtcttggcggactgctgacaatggtggcagcctacagcccgagctatgcgtatcatcagtttgcagcctacggcccaggaccaggcgctaaatttgtggctgcctggacactgaaagccgccgctggaccaggtcctggacagtacatcaaggccaacagcaagttcatcggcatcaccgaactcggcccaggaccaggctatccctacgatgtgcctgattacgcctgatagtgatgattcgaacggccgtatcacgcccaaacatttacagccgcggtgtcaaaaaccgcgtggacgtggttaacatccctgctgggaggatcagccgtaattattataattggcttggtgctggctactattgtggccatgtacgtgctgaccaaccagaaacataattgaatacagcagcaattggcaagctgcttacatagaactcgcggcgattggcatgccgccttaaaatttttattttattttttcttttcttttccgaatcggattttgtttttaatatttcaaaaaaaaaaaaaaaaaaaaaaaaaaaaaaaaaaaaaaaaaaaaaaaaaaaaaaaaaaaaaaaaaaaaaaaaaaaaaaaa

SEQ ID NO: 15 - DNA, 9595 bp, Artificial Sequence
  Description of Artificial Sequence: Synthetic polynucleotide
atgggcggcgcatgagagaagcccagaccaattacctacccaaaatggagaaagttcacgttgacatcgaggaagacagcccattcctcagagctttgcagcggagcttcccgcagtttgaggtagaagccaagcaggtcactgataatgaccatgctaatgccagagcgttttcgcatctggcttcaaaactgatcgaaacggaggtggacccatccgacacgatccttgacattggaagtgcgcccgcccgcagaatgtattctaagcacaagtatcattgtatctgtccgatgagatgtgcggaagatccggacagattgtataagtatgcaactaagctgaagaaaaactgtaaggaaataactgataaggaattggacaagaaaatgaaggagctcgccgccgtcatgagcgaccctgacctggaaactgagactatgtgcctccacgacgacgagtcgtgtcgctacgaagggcaagtcgctgtttaccaggatgtatacgcggttgacggaccgacaagtctctatcaccaagccaataagggagttagagtcgcctactggataggctttgacaccaccccttttatgtttaagaacttggctggagcatatccatcatactctaccaactgggccgacgaaaccgtgttaacggctcgtaacataggcctatgcagctctgacgttatggagcggtcacgtagagggatgtccattcttagaaagaagtatttgaaaccatccaacaatgttctattctctgttggctcgaccatctaccacgagaagagggacttactgaggagctggcacctgccgtctgtatttcacttacgtggcaagcaaaattacacatgtcggtgtgagactatagttagttgcgacgggtacgtcgttaaaagaatagctatcagtccaggcctgtatgggaagccttcaggctatgctgctacgatgcaccgcgagggattcttgtgctgcaaagtgacagacacattgaacggggagagggtctcttttcccgtgtgcacgtatgtgccagctacattgtgtgaccaaatgactggcatactggcaacagatgtcagtgcggacgacgcgcaaaaactgctggttgggctcaaccagcgtatagtcgtcaacggtcgcacccagagaaacaccaataccatgaaaaattaccttttgcccgtagtggcccaggcatttgctaggtgggcaaaggaatataaggaagatcaagaagatgaaaggccactaggactacgagatagacagttagtcatggggtgttgttgggcttttagaaggcacaagataacatctatttataagcgcccggatacccaaaccatcatcaaagtgaacagcgatttccactcattcgtgctgcccaggataggcagtaacacattggagatcgggctgagaacaagaatcaggaaaatgttagaggagcacaaggagccgtcacctctcattaccgccgaggacgtacaagaagctaagtgcgcagccgatgaggctaaggaggtgcgtgaagccgaggagttgcgcgcagctctaccacctttggcagctgatgttgaggagcccactctggaagccgatgtcgacttgatgttacaagaggctggggccggctcagtggagacacctcgtggcttgataaaggttaccagctacgctggcgaggacaagatcggctcttacgctgtgctttctccgcaggctgtactcaagagtgaaaaattatcttgcatccaccctctcgctgaacaagtcatagtgataacacactctggccgaaaagggcgttatgccgtggaaccataccatggtaaagtagtggtgccagagggacatgcaatacccgtccaggactttcaagctctgagtgaaagtgccaccattgtgtacaacgaacgtgagttcgtaaacaggtacctgcaccatattgccacacatggaggagcgctgaacactgatgaagaatattacaaaactgtcaagcccagcgagcacgacggcgaatacctgtacgacatcgacaggaaacagtgcgtcaagaaagaactagtcactgggctagggctcacaggcgagctggtggatcctcccttccatgaattcgcctacgagagtctgagaacacgaccagccgctccttaccaagtaccaaccataggggtgtatggcgtgccaggatcaggcaagtctggcatcattaaaagcgcagtcaccaaaaaagatctagtggtgagcgccaagaaagaaaactgtgcagaaattataagggacgtcaagaaaatgaaagggctggacgtcaatgccagaactgtggactcagtgctcttgaatggatgcaaacaccccgtagagaccctgtatattgacgaagcttttgcttgtcatgcaggtactctcagagcgctcatagccattataagacctaaaaaggcagtgctctgcggggatcccaaacagtgcggtttttttaacatgatgtgcctgaaagtgcattttaaccacgagatttgcacacaagtcttccacaaaagcatctctcgccgttgcactaaatctgtgacttcggtcgtctcaaccttgttttacgacaaaaaaatgagaacgacgaatccgaaagagactaagattgtgattgacactaccggcagtaccaaacctaagcaggacgatctcattctcacttgtttcagagggtgggtgaagcagttgcaaatagattacaaaggcaacgaaataatgacggcagctgcctctcaagggctgacccgtaaaggtgtgtatgccgttcggtacaaggtgaatgaaaatcctctgtacgcacccacctcagaacatgtgaacgtcctactgacccgcacggaggaccgcatcgtgtggaaaacactagccggcgacccatggataaaaacactgactgccaagtaccctgggaatttcactgccacgatagaggagtggcaagcagagcatgatgccatcatgaggcacatcttggagagaccggaccctaccgacgtcttccagaataaggcaaacgtgtgttgggccaaggctttagtgccggtgctgaagaccgctggcatagacatgaccactgaacaatggaacactgtggattattttgaaacggacaaagctcactcagcagagatagtattgaaccaactatgcgtgaggttctttggactcgatctggactccggtctattttctgcacccactgttccgttatccattaggaataatcactgggataactccccgtcgcctaacatgtacgggctgaataaagaagtggtccgtcagctctctcgcaggtacccacaactgcctcgggcagttgccactggaagagtctatgacatgaacactggtacactgcgcaattatgatccgcgcataaacctagtacctgtaaacagaagactgcctcatgctttagtcctccaccataatgaacacccacagagtgacttttcttcattcgtcagcaaattgaagggcagaactgtcctggtggtcggggaaaagttgtccgtcccaggcaaaatggttgactggttgtcagaccggcctgaggctaccttcagagctcggctggatttaggcatcccaggtgatgtgcccaaatatgacataatatttgttaatgtgaggaccccatataaataccatcactatcagcagtgtgaagaccatgccattaagcttagcatgttgaccaagaaagcttgtctgcatctgaatcccggcggaacctgtgtcagcataggttatggttacgctgacagggccagcgaaagcatcattggtgctatagcgcggcagttcaagttttcccgggtatgcaaaccgaaatcctcacttgaagagacggaagttctgtttgtattcattgggtacgatcgcaaggcccgtacgcacaatccttacaagctttcatcaaccttgaccaacatttatacaggttccagactccacgaagccggatgtgcaccctcatatcatgtggtgcgaggggatattgccacggccaccgaaggagtgattataaatgctgctaacagcaaaggacaacctggcggaggggtgtgcggagcgctgtataagaaattcccggaaagcttcgatttacagccgatcgaagtaggaaaagcgcgactggtcaaaggtgcagctaaacatatcattcatgccgtaggaccaaacttcaacaaagtttcggaggttgaaggtgacaaacagttggcagaggcttatgagtccatcgctaagattgtcaacgataacaattacaagtcagtagcgattccactgttgtccaccggcatcttttccgggaacaaagatcgactaacccaatcattgaaccatttgctgacagctttagacaccactgatgcagatgtagccatatactgcagggacaagaaatgggaaatgactctcaaggaagcagtggctaggagagaagcagtggaggagatatgcatatccgacgactcttcagtgacagaacctgatgcagagctggtgagggtgcatccgaagagttctttggctggaaggaagggctacagcacaagcgatggcaaaactttctcatatttggaagggaccaagtttcaccaggcggccaaggatatagcagaaattaatgccatgtggcccgttgcaacggaggccaatgagcaggtatgcatgtatatcctcggagaaagcatgagcagtattaggtcgaaatgccccgtcgaagagtcggaagcctccacaccacctagcacgctgccttgcttgtgcatccatgccatgactccagaaagagtacagcgcctaaaagcctcacgtccagaacaaattactgtgtgctcatcctttccattgccgaagtatagaatcactggtgtgcagaagatccaatgctcccagcctatattgttctcaccgaaagtgcctgcgtatattcatccaaggaagtatctcgtggaaacaccaccggtagacgagactccggagccatcggcagagaaccaatccacagaggggacacctgaacaaccaccacttataaccgaggatgagaccaggactagaacgcctgagccgatcatcatcgaagaggaagaagaggatagcataagtttgctgtcagatggcccgacccaccaggtgctgcaagtcgaggcagacattcacgggccgccctctgtatctagctcatcctggtccattcctcatgcatccgactttgatgtggacagtttatccatacttgacaccctggagggagctagcgtgaccagcggggcaacgtcagccgagactaactcttacttcgcaaagagtatggagtttctggcgcgaccggtgcctgcgcctcgaacagtattcaggaaccctccacatcccgctccgcgcacaagaacaccgtcacttgcacccagcagggcctgctcgagaaccagcctagtttccaccccgccaggcgtgaatagggtgatcactagagaggagctcgaggcgcttaccccgtcacgcactcctagcaggtcggtctcgagaaccagcctggtctccaacccgccaggcgtaaatagggtgattacaagagaggagtttgaggcgttcgtagcacaacaacaatgacggtttgatgcgggtgcatacatcttttcctccgacaccggtcaagggcatttacaacaaaaatcagtaaggcaaacggtgctatccgaagtggtgttggagaggaccgaattggagatttcgtatgccccgcgcctcgaccaagaaaaagaagaattactacgcaagaaattacagttaaatcccacacctgctaacagaagcagataccagtccaggaaggtggagaacatgaaagccataacagctagacgtattctgcaaggcctagggcattatttgaaggcagaaggaaaagtggagtgctaccgaaccctgcatcctgttcctttgtattcatctagtgtgaaccgtgccttttcaagccccaaggtcgcagtggaagcctgtaacgccatgttgaaagagaactttccgactgtggcttcttactgtattattccagagtacgatgcctatttggacatggttgacggagcttcatgctgcttagacactgccagtttttgccctgcaaagctgcgcagctttccaaagaaacactcctatttggaacccacaatacgatcggcagtgccttcagcgatccagaacacgctccagaacgtcctggcagctgccacaaaaagaaattgcaatgtcacgcaaatgagagaattgcccgtattggattcggcggcctttaatgtggaatgcttcaagaaatatgcgtgtaataatgaatattgggaaacgtttaaagaaaaccccatcaggcttactgaagaaaacgtggtaaattacattaccaaattaaaaggaccaaaagctgctgctctttttgcgaagacacataatttgaatatgttgcaggacataccaatggacaggtttgtaatggacttaaagagagacgtgaaagtgactccaggaacaaaacatactgaagaacggcccaaggtacaggtgatccaggctgccgatccgctagcaacagcgtatctgtgcggaatccaccgagagctggttaggagattaaatgcggtcctgcttccgaacattcatacactgtttgatatgtcggctgaagactttgacgctattatagccgagcacttccagcctggggattgtgttctggaaactgacatcgcgtcgtttgataaaagtgaggacgacgccatggctctgaccgcgttaatgattctggaagacttaggtgtggacgcagagctgttgacgctgattgaggcggctttcggcgaaatttcatcaatacatttgcccactaaaactaaatttaaattcggagccatgatgaaatctggaatgttcctcacactgtttgtgaacacagtcattaacattgtaatcgcaagcagagtgttgagagaacggctaaccggatcaccatgtgcagcattcattggagatgacaatatcgtgaaaggagtcaaatcggacaaattaatggcagacaggtgcgccacctggttgaatatggaagtcaagattatagatgctgtggtgggcgagaaagcgccttatttctgtggagggtttattttgtgtgactccgtgaccggcacagcgtgccgtgtggcagaccccctaaaaaggctgtttaagcttggcaaacctctggcagcagacgatgaacatgatgatgacaggagaagggcattgcatgaagagtcaacacgctggaaccgagtgggtattctttcagagctgtgcaaggcagtagaatcaaggtatgaaaccgtaggaacttccatcatagttatggccatgactactctagctagcagtgttaaatcattcagctacctgagaggggcccctataactctctacggctaacctgaatggactacgactctagaatagtctttaattaaagtccgccatatgagatggaagatgccaaaaacattaagaagggcccagcgccattctacccactcgaagacgggaccgccggcgagcagctgcacaaagccatgaagcgctacgccctggtgcccggcaccatcgcctttaccgacgcacatatcgaggtggacattacctacgccgagtacttcgagatgagcgttcggctggcagaagctatgaagcgctatgggctgaatacaaaccatcggatcgtggtgtgcagcgagaatagcttgcagttcttcatgcccgtgttgggtgccctgttcatcggtgtggctgtggccccagctaacgacatctacaacgagcgcgagctgctgaacagcatgggcatcagccagcccaccgtcgtattcgtgagcaagaaagggctgcaaaagatcctcaacgtgcaaaagaagctaccgatcatacaaaagatcatcatcatggatagcaagaccgactaccagggcttccaaagcatgtacaccttcgtgacttcccatttgccacccggcttcaacgagtacgacttcgtgcccgagagcttcgaccgggacaaaaccatcgccctgatcatgaacagtagtggcagtaccggattgcccaagggcgtagccctaccgcaccgcaccgcttgtgtccgattcagtcatgcccgcgaccccatcttcggcaaccagatcatccccgacaccgctatcctcagcgtggtgccatttcaccacggcttcggcatgttcaccacgctgggctacttgatctgcggctttcgggtcgtgctcatgtaccgcttcgaggaggagctattcttgcgcagcttgcaagactataagattcaatctgccctgctggtgcccacactatttagcttcttcgctaagagcactctcatcgacaagtacgacctaagcaacttgcacgagatcgccagcggcggggcgccgctcagcaaggaggtaggtgaggccgtggccaaacgcttccacctaccaggcatccgccagggctacggcctgacagaaacaaccagcgccattctgatcacccccgaaggggacgacaagcctggcgcagtaggcaaggtggtgcccttcttcgaggctaaggtggtggacttggacaccggtaagacactgggtgtgaaccagcgcggcgagctgtgcgtccgtggccccatgatcatgagcggctacgttaacaaccccgaggctacaaacgctctcatcgacaaggacggctggctgcacagcggcgacatcgcctactgggacgaggacgagcacttcttcatcgtggaccggctgaagagcctgatcaaatacaagggctaccaggtagccccagccgaactggagagcatcctgctgcaacaccccaacatcttcgacgccggggtcgccggcctgcccgacgacgatgccggcgagctgcccgccgcagtcgtcgtgctggaacacggtaaaaccatgaccgagaaggagatcgtggactatgtggccagccaggttacaaccgccaagaagctgcgcggtggtgttgtgttcgtggacgaggtgcctaaaggactgaccggcaagttggacgcccgcaagatccgcgagattctcattaaggccaagaagggcggcaagatcgccgtgtaattcgaacggccgtatcacgcccaaacatttacagccgcggtgtcaaaaaccgcgtggacgtggttaacatccctgctgggaggatcagccgtaattattataattggcttggtgctggctactattgtggccatgtacgtgctgaccaaccagaaacataattgaatacagcagcaattggcaagctgcttacatagaactcgcggcgattggcatgccgccttaaaatttttattttattttttcttttcttttccgaatcggattttgtttttaatatttcaaaaaaaaaaaaaaaaaaaaaaaaaaaaaaaaaaaaaaaaaaaaaaaaaaaaaaaaaaaaaaaaaaaaaaaaaaaaaaaa

SEQ ID NO: 16 - protein, 139 aa, Artificial Sequence
  Description of Artificial Sequence: Synthetic polypeptide
PSSLSASVGDRVTITCRASQSINSYLDWYQQKPGKAPKLLIYAASSLQSGVPSRFSGSGSGTDFTLTISSLQPEDFATYYCQQYYSTPFTFGPGTKVEIKRTVAAPSVFIFPPSDEQLKSGTASVVCLLNNFYPREAKV

SEQ ID NO: 17 - protein, 167 aa, Artificial Sequence
  Description of Artificial Sequence: Synthetic polypeptide
GVVQPGRSLRLSCAASGFTFSSYGMHWVRQAPGKGLEWVAVIWYDGSNKYYADSVKGRFTISRDNSKNTLYLQMNSLRAEDTAVYYCARDPRGATLYYYYYGMDVWGQGTTVTVSSASTKGPSVFPLAPCSRSTSESTAALGCLVKDYFPEPVTVSWNSGALTSGVH

SEQ ID NO: 18 - protein, 10 aa, Artificial Sequence
  Description of Artificial Sequence: Synthetic peptide
GFTFSSYGMH

SEQ ID NO: 19 - protein, 15 aa, Artificial Sequence
  Description of Artificial Sequence: Synthetic peptide
VIWYDGSNKYYADSV

SEQ ID NO: 20 - protein, 16 aa, Artificial Sequence
  Description of Artificial Sequence: Synthetic peptide
DPRGATLYYYYYGMDV

SEQ ID NO: 21 - protein, 11 aa, Artificial Sequence
  Description of Artificial Sequence: Synthetic peptide
RASQSINSYLD

SEQ ID NO: 22 - protein, 7 aa, Artificial Sequence
  Description of Artificial Sequence: Synthetic peptide
AASSLQS

SEQ ID NO: 23 - protein, 9 aa, Artificial Sequence
  Description of Artificial Sequence: Synthetic peptide
QQYYSTPFT

SEQ ID NO: 24 - protein, 108 aa, Artificial Sequence
  Description of Artificial Sequence: Synthetic polypeptide
EIVLTQSPGTLSLSPGERATLSCRASQRVSSSYLAWYQQKPGQAPRLLIYDASSRATGIPDRFSGSGSGTDFTLTISRLEPEDFAVYYCQQYGSLPWTFGQGTKVEIK

SEQ ID NO: 25 - protein, 121 aa, Artificial Sequence
  Description of Artificial Sequence: Synthetic polypeptide
EVQLVESGGGLVQPGGSLRLSCAASGFTFSRYWMSWVRQAPGKGLEWVANIKQDGSEKYYVDSVKGRFTISRDNAKNSLYLQMNSLRAEDTAVYYCAREGGWFGELAFDYWGQGTLVTVSS

SEQ ID NO: 26 - protein, 5 aa, Artificial Sequence
  Description of Artificial Sequence: Synthetic peptide
RYWMS

SEQ ID NO: 27 - protein, 17 aa, Artificial Sequence
  Description of Artificial Sequence: Synthetic peptide
NIKQDGSEKYYVDSVKG

SEQ ID NO: 28 - protein, 12 aa, Artificial Sequence
  Description of Artificial Sequence: Synthetic peptide
EGGWFGELAFDY

SEQ ID NO: 29 - protein, 12 aa, Artificial Sequence
  Description of Artificial Sequence: Synthetic peptide
RASQRVSSSYLA

SEQ ID NO: 30 - protein, 7 aa, Artificial Sequence
  Description of Artificial Sequence: Synthetic peptide
DASSRAT

SEQ ID NO: 31 - protein, 9 aa, Artificial Sequence
  Description of Artificial Sequence: Synthetic peptide
QQYGSLPWT

SEQ ID NO: 32 - DNA, 2019 bp, Artificial Sequence
  Description of Artificial Sequence: Synthetic polynucleotide
gcccgggcatttaaatgcgatcgcatcgattacgactctagaatagtctagtccgcaggccaccatgcagatcttcgtgaagaccctgaccggcaagaccatcaccctagaggtggagcccagtgacaccatcgagaacgtgaaggccaagatccaggataaagagggcatcccccctgaccagcagaggctgatctttgccggcaagcagctggaagatggccgcaccctctctgattacaacatccagaaggagtcaaccctgcacctggtccttcgcctgagaggtgccatgtttcaggcgctgagcgaaggctgcaccccgtatgatattaaccagatgctgaacgtgctgggcgatcatcaggtctcaggccttgagcagcttgagagtataatcaactttgaaaaactgactgaatggaccagttctaatgttatgcctatcctgtctcctctgacaaagggcatcctgggcttcgtgtttaccctgaccgtgccttctgagagaggacttagctgcattagcgaagcggatgcgaccaccccggaaagcgcgaacctgggcgaagaaattctgagccagctgtatctttggccaagggtgacctaccattcccctagttatgcttaccaccaatttgaaagacgagccaaatataaaagacacttccccggctttggccagagcctgctgtttggctaccctgtgtacgtgttcggcgattgcgtgcagggcgattgggatgcgattcgctttcgctattgcgcgccgccgggctatgcgctgctgcgctgcaacgataccaactatagcgctctgctggctgtgggggccctagaaggacccaggaatcaggactggcttggtgtcccaagacaacttgtaactcggatgcaggctattcagaatgccggcctgtgtaccctggtggccatgctggaagagacaatcttctggctgcaagcgtttctgatggcgctgaccgatagcggcccgaaaaccaacattattgtggatagccagtatgtgatgggcattagcaaaccgagctttcaggaatttgtggattgggaaaacgtgagcccggaactgaacagcaccgatcagccgttttggcaagccggaatcctggccagaaatctggtgcctatggtggccacagtgcagggccagaacctgaagtaccagggtcagtcactagtcatctctgcttctatcattgtcttcaacctgctggaactggaaggtgattatcgagatgatggcaacgtgtgggtgcataccccgctgagcccgcgcaccctgaacgcgtgggtgaaagcggtggaagaaaaaaaaggtattccagttcacctagagctggccagtatgaccaacatggagctcatgagcagtattgtgcatcagcaggtcagaacatacggccccgtgttcatgtgtctcggcggactgcttacaatggtggctggtgctgtgtggctgacagtgcgagtgctcgagctgttccgggccgcgcagctggccaacgacgtggtcctccagatcatggagctttgtggtgcagcgtttcgccaggtgtgccataccaccgtgccgtggccgaacgcgagcctgaccccgaaatggaacaacgaaaccacccagccccagatcgccaactgcagcgtgtatgacttttttgtgtggctccattattattctgttcgagacacactttggccaagggtgacctaccatatgaacaaatatgcgtatcatatgctggaaagacgagccaaatataaaagaggaccaggacctggcgctaaatttgtggccgcctggacactgaaagccgctgctggtcctggacctggccagtacatcaaggccaacagcaagttcatcggcatcaccgaactcggacccggaccaggctgatgatttcgaaatttaaataagcttgcggccgctagggataacagggtaattatcacgcccaaacatttacagccgcggtgtcaaaaaccgcgtgg

SEQ ID NO: 33 - protein, 619 aa, Artificial Sequence
  Description of Artificial Sequence: Synthetic polypeptide
MQIFVKTLTGKTITLEVEPSDTIENVKAKIQDKEGIPPDQQRLIFAGKQLEDGRTLSDYNIQKESTLHLVLRLRGAMFQALSEGCTPYDINQMLNVLGDHQVSGLEQLESIINFEKLTEWTSSNVMPILSPLTKGILGFVFTLTVPSERGLSCISEADATTPESANLGEEILSQLYLWPRVTYHSPSYAYHQFERRAKYKRHFPGFGQSLLFGYPVYVFGDCVQGDWDAIRFRYCAPPGYALLRCNDTNYSALLAVGALEGPRNQDWLGVPRQLVTRMQAIQNAGLCTLVAMLEETIFWLQAFLMALTDSGPKTNIIVDSQYVMGISKPSFQEFVDWENVSPELNSTDQPFWQAGILARNLVPMVATVQGQNLKYQGQSLVISASIIVFNLLELEGDYRDDGNVWVHTPLSPRTLNAWVKAVEEKKGIPVHLELASMTNMELMSSIVHQQVRTYGPVFMCLGGLLTMVAGAVWLTVRVLELFRAAQLANDVVLQIMELCGAAFRQVCHTTVPWPNASLTPKWNNETTQPQIANCSVYDFFVWLHYYSVRDTLWPRVTYHMNKYAYHMLERRAKYKRGPGPGAKFVAAWTLKAAAGPGPGQYIKANSKFIGITELGPGPG

SEQ ID NO: 34 - DNA, 1638 bp, Artificial Sequence
  Description of Artificial Sequence: Synthetic polynucleotide
atggccgggatgttccaggcactgtccgaaggctgcacaccctatgatattaaccagatgctgaatgtcctgggagaccaccaggtctctggcctggagcagctggagagcatcatcaacttcgagaagctgaccgagtggacaagctccaatgtgatgcctatcctgtccccactgaccaagggcatcctgggcttcgtgtttaccctgacagtgccttctgagcggggcctgtcttgcatcagcgaggcagacgcaaccacaccagagtccgccaatctgggcgaggagatcctgtctcagctgtacctgtggccccgggtgacatatcactccccttcttacgcctatcaccagttcgagcggagagccaagtacaagagacacttcccaggctttggccagtctctgctgttcggctaccccgtgtacgtgttcggcgattgcgtgcagggcgactgggatgccatccggtttagatactgcgcaccacctggatatgcactgctgaggtgtaacgacaccaattattccgccctgctggcagtgggcgccctggagggccctcgcaatcaggattggctgggcgtgccaaggcagctggtgacacgcatgcaggccatccagaacgcaggcctgtgcaccctggtggcaatgctggaggagacaatcttctggctgcaggcctttctgatggccctgaccgacagcggccccaagacaaacatcatcgtggattcccagtacgtgatgggcatctccaagccttctttccaggagtttgtggactgggagaacgtgagcccagagctgaattccaccgatcagccattctggcaggcaggaatcctggcaaggaacctggtgcctatggtggccacagtgcagggccagaatctgaagtaccagggccagagcctggtcatcagcgcctccatcatcgtgtttaacctgctggagctggagggcgactatcgggacgatggcaacgtgtgggtgcacaccccactgagccccagaacactgaacgcctgggtgaaggccgtggaggagaagaagggcatcccagtgcacctggagctggcctccatgaccaatatggagctgatgtctagcatcgtgcaccagcaggtgaggacatacggacccgtgttcatgtgcctgggaggcctgctgaccatggtggcaggagccgtgtggctgacagtgcgggtgctggagctgttcagagccgcccagctggccaacgatgtggtgctgcagatcatggagctgtgcggagcagcctttcgccaggtgtgccacaccacagtgccatggcccaatgcctccctgacccccaagtggaacaatgagacaacacagcctcagatcgccaactgtagcgtgtacgacttcttcgtgtggctgcactactatagcgtgagggataccctgtggccccgcgtgacataccacatgaataagtacgcctatcacatgctggagaggcgcgccaagtataagagaggccctggcccaggcgcaaagtttgtggcagcatggaccctgaaggccgccgccggccccggccccggccagtatatcaaggctaacagtaagttcattggaatcacagagctgggacccggacctgga

SEQ ID NO: 35 - protein, 546 aa, Artificial Sequence
  Description of Artificial Sequence: Synthetic polypeptide
MAGMFQALSEGCTPYDINQMLNVLGDHQVSGLEQLESIINFEKLTEWTSSNVMPILSPLTKGILGFVFTLTVPSERGLSCISEADATTPESANLGEEILSQLYLWPRVTYHSPSYAYHQFERRAKYKRHFPGFGQSLLFGYPVYVFGDCVQGDWDAIRFRYCAPPGYALLRCNDTNYSALLAVGALEGPRNQDWLGVPRQLVTRMQAIQNAGLCTLVAMLEETIFWLQAFLMALTDSGPKTNIIVDSQYVMGISKPSFQEFVDWENVSPELNSTDQPFWQAGILARNLVPMVATVQGQNLKYQGQSLVISASIIVFNLLELEGDYRDDGNVWVHTPLSPRTLNAWVKAVEEKKGIPVHLELASMTNMELMSSIVHQQVRTYGPVFMCLGGLLTMVAGAVWLTVRVLELFRAAQLANDVVLQIMELCGAAFRQVCHTTVPWPNASLTPKWNNETTQPQIANCSVYDFFVWLHYYSVRDTLWPRVTYHMNKYAYHMLERRAKYKRGPGPGAKFVAAWTLKAAAGPGPGQYIKANSKFIGITELGPGPG

SEQ ID NO: 36 - DNA, 2019 bp, Artificial Sequence
  Description of Artificial Sequence: Synthetic polynucleotide
gcccgggcatttaaatgcgatcgcatcgattacgactctagaatagtctagtccgcaggccaccatgcagatcttcgtgaagaccctgaccggcaagaccatcaccctagaggtggagcccagtgacaccatcgagaacgtgaaggccaagatccaggataaagagggcatcccccctgaccagcagaggctgatctttgccggcaagcagctggaagatggccgcaccctctctgattacaacatccagaaggagtcaaccctgcacctggtccttcgcctgagaggtgccatgtttcaggcgctgagcgaaggctgcaccccgtatgatattaaccagatgctgaacgtgctgggcgatcatcagtttaagcacatcaaagcctttgaccggacatttgctaacaacccaggtcccatggttgtgtttgccacacctgggcctatcctgtctcctctgacaaagggcatcctgggcttcgtgtttaccctgaccgtgccttctgagagaggacttagctgcattagcgaagcggatgcgaccaccccggaaagcgcgaacctgggcgaagaaattctgagccagctgtatctttggccaagggtgacctaccattcccctagttatgcttaccaccaatttgaaagacgagccaaatataaaagacacttccccggctttggccagagcctgctgtttggctaccctgtgtacgtgttcggcgattgcgtgcagggcgattgggatgcgattcgctttcgctattgcgcgccgccgggctatgcgctgctgcgctgcaacgataccaactatagcgctctgctggctgtgggggccctagaaggacccaggaatcaggactggcttggtgtcccaagacaacttgtaactcggatgcaggctattcagaatgccggcctgtgtaccctggtggccatgctggaagagacaatcttctggctgcaagcgtttctgatggcgctgaccgatagcggcccgaaaaccaacattattgtggatagccagtatgtgatgggcattagcaaaccgagctttcaggaatttgtggattgggaaaacgtgagcccggaactgaacagcaccgatcagccgttttggcaagccggaatcctggccagaaatctggtgcctatggtggccacagtgcagggccagaacctgaagtaccagggtcagtcactagtcatctctgcttctatcattgtcttcaacctgctggaactggaaggtgattatcgagatgatggcaacgtgtgggtgcataccccgctgagcccgcgcaccctgaacgcgtgggtgaaagcggtggaagaaaaaaaaggtattccagttcacctagagctggccagtatgaccaacatggagctcatgagcagtattgtgcatcagcaggtcagaacatacggccccgtgttcatgtgtctcggcggactgcttacaatggtggctggtgctgtgtggctgacagtgcgagtgctcgagctgttccgggccgcgcagctggccaacgacgtggtcctccagatcatggagctttgtggtgcagcgtttcgccaggtgtgccataccaccgtgccgtggccgaacgcgagcctgaccccgaaatggaacaacgaaaccacccagccccagatcgccaactgcagcgtgtatgacttttttgtgtggctccattattattctgttcgagacacactttggccaagggtgacctaccatatgaacaaatatgcgtatcatatgctggaaagacgagccaaatataaaagaggaccaggacctggcgctaaatttgtggccgcctggacactgaaagccgctgctggtcctggacctggccagtacatcaaggccaacagcaagttcatcggcatcaccgaactcggacccggaccaggctgatgatttcgaaatttaaataagcttgcggccgctagggataacagggtaattatcacgcccaaacatttacagccgcggtgtcaaaaaccgcgtgg

SEQ ID NO: 37 - protein, 619 aa, Artificial Sequence
  Description of Artificial Sequence: Synthetic polypeptide
MQIFVKTLTGKTITLEVEPSDTIENVKAKIQDKEGIPPDQQRLIFAGKQLEDGRTLSDYNIQKESTLHLVLRLRGAMFQALSEGCTPYDINQMLNVLGDHQFKHIKAFDRTFANNPGPMVVFATPGPILSPLTKGILGFVFTLTVPSERGLSCISEADATTPESANLGEEILSQLYLWPRVTYHSPSYAYHQFERRAKYKRHFPGFGQSLLFGYPVYVFGDCVQGDWDAIRFRYCAPPGYALLRCNDTNYSALLAVGALEGPRNQDWLGVPRQLVTRMQAIQNAGLCTLVAMLEETIFWLQAFLMALTDSGPKTNIIVDSQYVMGISKPSFQEFVDWENVSPELNSTDQPFWQAGILARNLVPMVATVQGQNLKYQGQSLVISASIIVFNLLELEGDYRDDGNVWVHTPLSPRTLNAWVKAVEEKKGIPVHLELASMTNMELMSSIVHQQVRTYGPVFMCLGGLLTMVAGAVWLTVRVLELFRAAQLANDVVLQIMELCGAAFRQVCHTTVPWPNASLTPKWNNETTQPQIANCSVYDFFVWLHYYSVRDTLWPRVTYHMNKYAYHMLERRAKYKRGPGPGAKFVAAWTLKAAAGPGPGQYIKANSKFIGITELGPGPG

SEQ ID NO: 38 - DNA, 228 bp, Artificial Sequence
  Description of Artificial Sequence: Synthetic polynucleotide
atgcagatcttcgtgaagaccctgaccggcaagaccatcaccctagaggtggagcccagtgacaccatcgagaacgtgaaggccaagatccaggataaagagggcatcccccctgaccagcagaggctgatctttgccggcaagcagctggaagatggccgcaccctctctgattacaacatccagaaggagtcaaccctgcacctggtccttcgcctgagaggtggc

SEQ ID NO: 39 - DNA, 228 bp, Artificial Sequence
  Description of Artificial Sequence: Synthetic polynucleotide
atgcagatcttcgtgaagaccctgaccggcaagaccatcaccctagaggtggagcccagtgacaccatcgagaacgtgaaggccaagatccaggataaagagggcatcccccctgaccagcagaggctgatctttgccggcaagcagctggaagatggccgcaccctctctgattacaacatccagaaggagtcaaccctgcacctggtccttcgcctgagaggtgcc

SEQ ID NO: 40 - DNA, 78 bp, Homo sapiens
atggccgtcatggcgccccgaaccctcgtcctgctactctcgggggctctggccctgacccagacctgggcgggctct

SEQ ID NO: 41 - DNA, 201 bp, Homo sapiens
ccgtcttcccagcccaccatccccatcgtgggcatcattgctggcctggttctctttggagctgtgatcactggagctgtggtcgctgctgtgatgtggaggaggaagagctcagatagaaaaggagggagctactctcaggctgcaagcagtgacagtgcccagggctctgatgtgtctctcacagcttgtaaagtgtga

SEQ ID NO: 42 - DNA, 60 bp, Artificial Sequence
  Description of Artificial Sequence: Synthetic oligonucleotide
atggagaccgatacactgctgctgtgggtgctgctcctgtgggtgccaggaagcacaggc

SEQ ID NO: 43 - DNA, 3178 bp, Homo sapiens
ggcaccgattcggggcctgcccggacttcgccgcacgctgcagaacctcgcccagcgcccaccatgccccggcagctcagcgcggcggccgcgctcttcgcgtccctggccgtaattttgcacgatggcagtcaaatgagagcaaaagcatttccagaaaccagagattattctcaacctactgcagcagcaacagtacaggacataaaaaaacctgtccagcaaccagctaagcaagcacctcaccaaactttagcagcaagattcatggatggtcatatcacctttcaaacagcggccacagtaaaaattccaacaactaccccagcaactacaaaaaacactgcaaccaccagcccaattacctacaccctggtcacaacccaggccacacccaacaactcacacacagctcctccagttactgaagttacagtcggccctagcttagccccttattcactgccacccaccatcaccccaccagctcatacagctggaaccagttcatcaaccgtcagccacacaactgggaacaccactcaacccagtaaccagaccacccttccagcaactttatcgatagcactgcacaaaagcacaaccggtcagaagcctgatcaacccacccatgccccaggaacaacggcagctgcccacaataccacccgcacagctgcacctgcctccacggttcctgggcccacccttgcacctcagccatcgtcagtcaagactggaatttatcaggttctaaacggaagcagactctgtataaaagcagagatggggatacagctgattgttcaagacaaggagtcggttttttcacctcggagatacttcaacatcgaccccaacgcaacgcaagcctctgggaactgtggcacccgaaaatccaaccttctgttgaattttcagggcggatttgtgaatctcacatttaccaaggatgaagaatcatattatatcagtgaagtgggagcctatttgaccgtctcagatccagagacagtttaccaaggaatcaaacatgcggtggtgatgttccagacagcagtcgggcattccttcaagtgcgtgagtgaacagagcctccagttgtcagcccacctgcaggtgaaaacaaccgatgtccaacttcaagcctttgattttgaagatgaccactttggaaatgtggatgagtgctcgtctgactacacaattgtgcttcctgtgattggggccatcgtggttggtctctgccttatgggtatgggtgtctataaaatccgcctaaggtgtcaatcatctggataccagagaatctaattgttgcccggggggaatgaaaataatggaatttagagaactctttcatcccttccaggatggatgttgggaaattccctcagagtgtgggtccttcaaacaatgtaaaccaccatcttctattcaaatgaagtgagtcatgtgtgatttaagttcaggcagcacatcaatttctaaatactttttgtttattttatgaaagatatagtgagctgtttattttctagtttcctttagaatattttagccactcaaagtcaacatttgagatatgttgaattaacataatatatgtaaagtagaataagccttcaaattataaaccaagggtcaattgtaactaatactactgtgtgtgcattgaagattttattttacccttgatcttaacaaagcctttgctttgttatcaaatggactttcagtgcttttactatctgtgttttatggtttcatgtaacatacatattcctggtgtagcacttaactccttttccactttaaatttgtttttgttttttgagacggagtttcactcttgtcacccaggctggagtacagtggcacgatctcggcttatggcaacctccgcctcccgggttcaagtgattctcctgcttcagcttcccgagtagctgggattacaggcacacactaccacgcctggctaatttttgtatttttattatagacgggtttcaccatgttggccagactggtcttgaactcttgacctcaggtgatccacccacctcagcctcccaaagtgctgggattacaggcatgagccattgcgcccggccttaaatgttttttttaatcatcaaaaagaacaacatatctcaggttgtctaagtgtttttatgtaaaaccaacaaaaagaacaaatcagcttatattttttatcttgatgactcctgctccagaattgctagactaagaattaggtggctacagatggtagaactaaacaataagcaagagacaataataatggcccttaattattaacaaagtgccagagtctaggctaagcactttatctatatctcatttcattctcacaacttataagtgaatgagtaaactgagacttaagggaactgaatcacttaaatgtcacctggctaactgatggcagagccagagcttgaattcatgttggtctgacatcaaggtctttggtcttctccctacaccaagttacctacaagaacaatgacaccacactctgcctgaaggctcacacctcataccagcatacgctcaccttacagggaaatgggtttatccaggatcatgagacattagggtagatgaaaggagagctttgcagataacaaaatagcctatccttaataaatcctccactctctggaaggagactgaggggctttgtaaaacattagtcagttgctcatttttatgggattgcttagctgggctgtaaagatgaaggcatcaaataaactcaaagtatttttaaatttttttgataatagagaaacttcgctaaccaactgttctttcttgagtgtatagccccatcttgtggtaacttgctgcttctgcacttcatatccatatttcctattgttcactttattctgtagagcagcctgccaagaattttatttctgctgttttttttgctgctaaagaaaggaactaagtcaggatgttaacagaaaagtccacataaccctagaattcttagtcaaggaataattcaagtcagcctagagaccatgttgactttcctcatgtgtttccttatgactcagtaagttggcaaggtcctgactttagtcttaataaaacattgaattgtagtaaaggtttttgcaataaaaacttactttgg

SEQ ID NO: 44 - DNA, 1858 bp, Mus sp.
attccggaggtgaaaaacaatggcacaacgtgtataatggccagcttctctgcctcctttctgaccacctacgagactgcgaatggttctcagatcgtgaacatttccctgccagcctctgcagaagtactgaaaaatggcagttcttgtggtaaagaaaatgtttctgaccccagcctcacaattacttttggaagaggatatttactgacactcaacttcacaaaaaatacaacacgttacagtgtccagcatatgtattttacatataacttgtcagatacagaacattttcccaatgccatcagcaaagagatctacaccatggattccacaactgacatcaaggcagacatcaacaaagcataccggtgtgtcagtgatatccgggtctacatgaagaatgtgaccgttgtgctccgggatgccactatccaggcctacctgtcgagtggcaacttcagcaaggaagagacacactgcacacaggatggaccttccccaaccactgggccacccagcccctcaccaccacttgtgcccacaaaccccactgtatccaagtacaatgttactggtaacaacggaacctgcctgctggcctctatggcactgcaactgaatatcacctacctgaaaaaggacaacaagacggtgaccagagcgttcaacatcagcccaaatgacacatctagtgggagttgcggtatcaacttggtgaccctgaaagtggagaacaagaacagagccctggaattgcagtttgggatgaatgccagctctagcctgtttttcttgcaaggagtgcgcttgaatatgactcttcctgatgccctagtgcccacattcagcatctccaaccattcactgaaagctcttcaggccactgtgggaaactcatacaagtgcaacactgaggaacacatctttgtcagcaagatgctctccctcaatgtcttcagtgtgcaggtccaggctttcaaggtggacagtgacaggtttgggtctgtggaagagtgtgttcaggatggtaacaacatgttgatccccattgctgtgggcggtgccctggcagggctgatcctcatcgtcctcattgcctacctcattggcaggaagaggagtcacgccggctatcagaccatctagcctggtgggcaggtgcaccagagatgcacaggggcctgttctcacatccccaagcttagataggtgtggaagggaggcacactttctggcaaactgttttaaaatctgctttatcaaatgtgaagttcatcttgcaacatttactatgcacaaaggaataactattgaaatgacggtgttaattttgctaactgggttaaatattgatgagaaggctccactgatttgacttttaagacttggtgtttggttcttcattcttttactcagatttaagcctatcaaagggatactctggtccagaccttggcctggcaagggtggctgatggttaggctgcacacacttaagaagcaacgggagcagggaaggcttgcacacaggcacgcacagggtcaacctctggacacttggcttgggctacctggccttgggggggctgaactctggcatctggctgggtacacacccccccaatttctgtgctctgccacccgtgagctgccactttcctaaatagaaaatggcattatttttatttacttttttgtaaagtgatttccagtcttgtgttggcgttcagggtggccctgtctctgcactgtgtacaataatagattcacactgctgacgtgtcttgcagcgtaggtgggttgtacactgggcatcagctcacgtaatgcattgcctgtaacgatgctaataaaaa

SEQ ID NO: 45 - DNA, 2339 bp, Homo sapiens
ggcccaaccgccgcccgcgcccccgctctccgcaccgtacccggccgcctcgcgccatggcggcccccggcagcgcccggcgacccctgctgctgctactgctgttgctgctgctcggcctcatgcattgtgcgtcagcagcaatgtttatggtgaaaaatggcaacgggaccgcgtgcataatggccaacttctctgctgccttctcagtgaactacgacaccaagagtggccctaagaacatgacctttgacctgccatcagatgccacagtggtgctcaaccgcagctcctgtggaaaagagaacacttctgaccccagtctcgtgattgcttttggaagaggacatacactcactctcaatttcacgagaaatgcaacacgttacagcgtccagctcatgagttttgtttataacttgtcagacacacaccttttccccaatgcgagctccaaagaaatcaagactgtggaatctataactgacatcagggcagatatagataaaaaatacagatgtgttagtggcacccaggtccacatgaacaacgtgaccgtaacgctccatgatgccaccatccaggcgtacctttccaacagcagcttcagcaggggagagacacgctgtgaacaagacaggccttccccaaccacagcgccccctgcgccacccagcccctcgccctcacccgtgcccaagagcccctctgtggacaagtacaacgtgagcggcaccaacgggacctgcctgctggccagcatggggctgcagctgaacctcacctatgagaggaaggacaacacgacggtgacaaggcttctcaacatcaaccccaacaagacctcggccagcgggagctgcggcgcccacctggtgactctggagctgcacagcgagggcaccaccgtcctgctcttccagttcgggatgaatgcaagttctagccggtttttcctacaaggaatccagttgaatacaattcttcctgacgccagagaccctgcctttaaagctgccaacggctccctgcgagcgctgcaggccacagtcggcaattcctacaagtgcaacgcggaggagcacgtccgtgtcacgaaggcgttttcagtcaatatattcaaagtgtgggtccaggctttcaaggtggaaggtggccagtttggctctgtggaggagtgtctgctggacgagaacagcatgctgatccccatcgctgtgggtggtgccctggcggggctggtcctcatcgtcctcatcgcctacctcgtcggcaggaagaggagtcacgcaggctaccagactatctagcctggtgcacgcaggcacagcagctgcaggggcctctgttcctttctctgggcttagggtcctgtcgaaggggaggcacactttctggcaaacgtttctcaaatctgcttcatccaatgtgaagttcatcttgcagcatttactatgcacaacagagtaactatcgaaatgacggtgttaattttgctaactgggttaaatattttgctaactggttaaacattaatatttaccaaagtaggattttgagggtgggggtgctctctctgagggggtgggggtgccgctgtctctgaggggtgggggtgccgctgtctctgaggggtgggggtgccgctctctctgagggggtgggggtgccgctttctctgagggggtgggggtgccgctctctctgagggggtgggggtgctgctctctccgaggggtggaatgccgctgtctctgaggggtgggggtgccgctctaaattggctccatatcatttgagtttagggttctggtgtttggtttcttcattctttactgcactcagatttaagccttacaaagggaaagcctctggccgtcacacgtaggacgcatgaaggtcactcgtggtgaggctgacatgctcacacattacaacagtagagagggaaaatcctaagacagaggaactccagagatgagtgtctggagcgcttcagttcagctttaaaggccaggacgggccacacgtggctggcggcctcgttccagtggcggcacgtccttgggcgtctctaatgtctgcagctcaagggctggcacttttttaaatataaaaatgggtgttatttttatttttttttgtaaagtgatttttggtcttctgttgacattcggggtgatcctgttctgcgctgtgtacaatgtgagatcggtgcgttctcctgatgttttgccgtggcttggggattgtacacgggaccagctcacgtaatgcattgcctgtaacaatgtaataaaaagcctctttcttttaaaaaaaaaaaaaaaaaaaaaaaa

SEQ ID NO: 46 - DNA, 45 bp, Artificial Sequence
  Description of Artificial Sequence: Synthetic oligonucleotide
cagtacatcaaggccaacagcaagttcatcggcatcaccgaactc

SEQ ID NO: 47 - protein, 15 aa, Artificial Sequence
  Description of Artificial Sequence: Synthetic peptide
QYIKANSKFIGITEL

SEQ ID NO: 48 - DNA, 39 bp, Artificial Sequence
  Description of Artificial Sequence: Synthetic oligonucleotide
gctaaatttgtggctgcctggacactgaaagccgccgct

SEQ ID NO: 49 - protein, 13 aa, Artificial Sequence
  Description of Artificial Sequence: Synthetic peptide
AKFVAAWTLKAAA

SEQ ID NO: 50 - DNA, 593 bp, Woodchuck hepatitis virus
aatcaacctctggattacaaaatttgtgaaagattgactggtattcttaactatgttgctccttttacgctatgtggatacgctgctttaatgcctttgtatcatgctattgcttcccgtatggctttcattttctcctccttgtataaatcctggttgctgtctctttatgaggagttgtggcccgttgtcaggcaacgtggcgtggtgtgcactgtgtttgctgacgcaacccccactggttggggcattgccaccacctgtcagctcctttccgggactttcgctttccccctccctattgccacggcggaactcatcgccgcctgccttgcccgctgctggacaggggctcggctgttgggcactgacaattccgtggtgttgtcggggaagctgacgtcctttccatggctgctcgcctgtgttgccacctggattctgcgcgggacgtccttctgctacgtcccttcggccctcaatccagcggaccttccttcccgcggcctgctgccggctctgcggcctcttccgcgtcttcgccttcgccctcagacgagtcggatctccctttgggccgcctccccgcctgt

SEQ ID NO: 51 - DNA, 589 bp, Artificial Sequence
  Description of Artificial Sequence: Synthetic polynucleotide
tctcccccccccccctctccctcccccccccctaacgttactggccgaagccgcttggaataaggccggtgtgcgtttgtctatatgttattttccaccatattgccgtcttttggcaatgtgagggcccggaaacctggccctgtcttcttgacgagcattcctaggggtctttcccctctcgccaaaggaatgcaaggtctgttgaatgtcgtgaaggaagcagttcctctggaagcttcttgaagacaaacaacgtctgtagcgaccctttgcaggcagcggaaccccccacctggcgacaggtgcctctgcggccaaaagccacgtgtataagatacacctgcaaaggcggcacaaccccagtgccacgttgtgagttggatagttgtggaaagagtcaaatggctctcctcaagcgtattcaacaaggggctgaaggatgcccagaaggtaccccattgtatgggatctgatctggggcctcggtgcacatgctttacatgtgtttagtcgaggttaaaaaaacgtctaggccccccgaaccacggggacgtggttttcctttgaaaaacacgatgataatatg

SEQ ID NO: 52 - DNA, 720 bp, Artificial Sequence
  Description of Artificial Sequence: Synthetic polynucleotide
atggtgagcaagggcgaggagctgttcaccggggtggtgcccatcctggtcgagctggacggcgacgtaaacggccacaagttcagcgtgtccggcgagggcgagggcgatgccacctacggcaagctgaccctgaagttcatctgcaccaccggcaagctgcccgtgccctggcccaccctcgtgaccaccctgacctacggcgtgcagtgcttcagccgctaccccgaccacatgaagcagcacgacttcttcaagtccgccatgcccgaaggctacgtccaggagcgcaccatcttcttcaaggacgacggcaactacaagacccgcgccgaggtgaagttcgagggcgacaccctggtgaaccgcatcgagctgaagggcatcgacttcaaggaggacggcaacatcctggggcacaagctggagtacaactacaacagccacaacgtctatatcatggccgacaagcagaagaacggcatcaaggtgaacttcaagatccgccacaacatcgaggacggcagcgtgcagctcgccgaccactaccagcagaacacccccatcggcgacggccccgtgctgctgcccgacaaccactacctgagcacccagtccgccctgagcaaagaccccaacgagaagcgcgatcacatggtcctgctggagttcgtgaccgccgccgggatcactctcggcatggacgagctgtacaagtag

SEQ ID NO: 53 - DNA, 1563 bp, Artificial Sequence
  Description of Artificial Sequence: Synthetic polynucleotide
atgctgctgctgctgctgctgctgggcctgaggctacagctctccctgggcatcatcccagttgaggaggagaacccggacttctggaaccgcgaggcagccgaggccctgggtgccgccaagaagctgcagcctgcacagacagccgccaagaacctcatcatcttcctgggcgatgggatgggggtgtctacggtgacagctgccaggatcctaaaagggcagaagaaggacaaactggggcctgagatacccctggccatggaccgcttcccatatgtggctctgtccaagacatacaatgtagacaaacatgtgccagacagtggagccacagccacggcctacctgtgcggggtcaagggcaacttccagaccattggcttgagtgcagccgcccgctttaaccagtgcaacacgacacgcggcaacgaggtcatctccgtgatgaatcgggccaagaaagcagggaagtcagtgggagtggtaaccaccacacgagtgcagcacgcctcgccagccggcacctacgcccacacggtgaaccgcaactggtactcggacgccgacgtgcctgcctcggcccgccaggaggggtgccaggacatcgctacgcagctcatctccaacatggacattgacgtgatcctaggtggaggccgaaagtacatgtttcgcatgggaaccccagaccctgagtacccagatgactacagccaaggtgggaccaggctggacgggaagaatctggtgcaggaatggctggcgaagcgccagggtgcccggtatgtgtggaaccgcactgagctcatgcaggcttccctggacccgtctgtgacccatctcatgggtctctttgagcctggagacatgaaatacgagatccaccgagactccacactggacccctccctgatggagatgacagaggctgccctgcgcctgctgagcaggaacccccgcggcttcttcctcttcgtggagggtggtcgcatcgaccatggtcatcatgaaagcagggcttaccgggcactgactgagacgatcatgttcgacgacgccattgagagggcgggccagctcaccagcgaggaggacacgctgagcctcgtcactgccgaccactcccacgtcttctccttcggaggctaccccctgcgagggagctccatcttcgggctggcccctggcaaggcccgggacaggaaggcctacacggtcctcctatacggaaacggtccaggctatgtgctcaaggacggcgcccggccggatgttaccgagagcgagagcgggagccccgagtatcggcagcagtcagcagtgcccctggacgaagagacccacgcaggcgaggacgtggcggtgttcgcgcgcggcccgcaggcgcacctggttcacggcgtgcaggagcagaccttcatagcgcacgtcatggccttcgccgcctgcctggagccctacaccgcctgcgacctggcgccccccgccggcaccaccgacgccgcgcacccgggttactctagagtcggggcggccggccgcttcgagcagacatgataa

SEQ ID NO: 54 - DNA, 1653 bp, Artificial Sequence
  Description of Artificial Sequence: Synthetic polynucleotide
atggaagatgccaaaaacattaagaagggcccagcgccattctacccactcgaagacgggaccgccggcgagcagctgcacaaagccatgaagcgctacgccctggtgcccggcaccatcgcctttaccgacgcacatatcgaggtggacattacctacgccgagtacttcgagatgagcgttcggctggcagaagctatgaagcgctatgggctgaatacaaaccatcggatcgtggtgtgcagcgagaatagcttgcagttcttcatgcccgtgttgggtgccctgttcatcggtgtggctgtggccccagctaacgacatctacaacgagcgcgagctgctgaacagcatgggcatcagccagcccaccgtcgtattcgtgagcaagaaagggctgcaaaagatcctcaacgtgcaaaagaagctaccgatcatacaaaagatcatcatcatggatagcaagaccgactaccagggcttccaaagcatgtacaccttcgtgacttcccatttgccacccggcttcaacgagtacgacttcgtgcccgagagcttcgaccgggacaaaaccatcgccctgatcatgaacagtagtggcagtaccggattgcccaagggcgtagccctaccgcaccgcaccgcttgtgtccgattcagtcatgcccgcgaccccatcttcggcaaccagatcatccccgacaccgctatcctcagcgtggtgccatttcaccacggcttcggcatgttcaccacgctgggctacttgatctgcggctttcgggtcgtgctcatgtaccgcttcgaggaggagctattcttgcgcagcttgcaagactataagattcaatctgccctgctggtgcccacactatttagcttcttcgctaagagcactctcatcgacaagtacgacctaagcaacttgcacgagatcgccagcggcggggcgccgctcagcaaggaggtaggtgaggccgtggccaaacgcttccacctaccaggcatccgccagggctacggcctgacagaaacaaccagcgccattctgatcacccccgaaggggacgacaagcctggcgcagtaggcaaggtggtgcccttcttcgaggctaaggtggtggacttggacaccggtaagacactgggtgtgaaccagcgcggcgagctgtgcgtccgtggccccatgatcatgagcggctacgttaacaaccccgaggctacaaacgctctcatcgacaaggacggctggctgcacagcggcgacatcgcctactgggacgaggacgagcacttcttcatcgtggaccggctgaagagcctgatcaaatacaagggctaccaggtagccccagccgaactggagagcatcctgctgcaacaccccaacatcttcgacgccggggtcgccggcctgcccgacgacgatgccggcgagctgcccgccgcagtcgtcgtgctggaacacggtaaaaccatgaccgagaaggagatcgtggactatgtggccagccaggttacaaccgccaagaagctgcgcggtggtgttgtgttcgtggacgaggtgcctaaaggactgaccggcaagttggacgcccgcaagatccgcgagattctcattaaggccaagaagggcggcaagatcgccgtgtaa

SEQ ID NO: 55 - DNA, 66 bp, Foot-and-mouth disease virus
gtaaagcaaacactgaactttgaccttctcaagttggctggagacgttgagtccaatcctgggccc

SEQ ID NO: 56 - protein, 5 aa, Artificial Sequence
  Description of Artificial Sequence: Synthetic peptide
GPGPG

SEQ ID NO: 57 - protein, 8 aa, Homo sapiens
  Table 1.2; ACTL8; ENSG00000117148; HLA -B*37:01
ADQLQMSL

SEQ ID NO: 58 - protein, 9 aa, Homo sapiens
  Table 1.2; ACTL8; ENSG00000117148; HLA -A*30:02,HLA-B*37:01,HLA-B*44:02,HLA-B*44:03,HLA-C*07:01, HLA-C*16:02,HLA-C*16:04
ADQLQMSLY

SEQ ID NO: 59 - protein, 8 aa, Homo sapiens
  Table 1.2; ACTL8; ENSG00000117148; HLA -A*30:02,HLA-A*32:01,HLA-B*46:01
AGQDLSAY

SEQ ID NO: 60 - protein, 11 aa, Homo sapiens
  Table 1.2; ACTL8; ENSG00000117148; HLA -A*03:01,HLA-A*03:02,HLA-A*11:01,HLA-A*31:01,HLA-B*27:02
AGQDLSAYLLK

SEQ ID NO: 61 - protein, 10 aa, Homo sapiens
  Table 1.2; ACTL8; ENSG00000117148; HLA -B*27:02,HLA-B*44:02
AHLSTYQSEW

SEQ ID NO: 62 - protein, 9 aa, Homo sapiens
  Table 1.2; ACTL8; ENSG00000117148; HLA -A*02:01,HLA-B*55:01
AIVESVESC

SEQ ID NO: 63 - protein, 8 aa, Homo sapiens
  Table 1.2; ACTL8; ENSG00000117148; HLA -A*01:01,HLA-A*32:01,HLA-B*15:01,HLA-B*39:01,HLA-C*05:01
ALDESNTY

SEQ ID NO: 64 - protein, 9 aa, Homo sapiens
  Table 1.2; ACTL8; ENSG00000117148; HLA -A*01:01,HLA-A*02:01
ALDESNTYQ

SEQ ID NO: 65 - protein, 10 aa, Homo sapiens
  Table 1.2; ACTL8; ENSG00000117148; HLA -A*02:01,HLA-A*02:03,HLA-A*02:04,HLA-A*02:07,HLA-B*38:01, HLA-B*39:01,HLA-B*55:01,HLA-C*05:01
ALDESNTYQL

SEQ ID NO: 66 - protein, 11 aa, Homo sapiens
  Table 1.2; ACTL8; ENSG00000117148; HLA -A*01:01
ALDESNTYQLP

SEQ ID NO: 67 - protein, 8 aa, Homo sapiens
  Table 1.2; ACTL8; ENSG00000117148; HLA -B*58:01
ASGKTLEF

SEQ ID NO: 68 - protein, 9 aa, Homo sapiens
  Table 1.2; ACTL8; ENSG00000117148; HLA -A*01:01
ASGLLTGVV

SEQ ID NO: 69 - protein, 10 aa, Homo sapiens
  Table 1.2; ACTL8; ENSG00000117148; HLA -B*40:02
ASGLLTGVVV

SEQ ID NO: 70 - protein, 9 aa, Homo sapiens
  Table 1.2; ACTL8; ENSG00000117148; HLA -B*58:01
ASVVAHLST

SEQ ID NO: 71 - protein, 10 aa, Homo sapiens
  Table 1.2; ACTL8; ENSG00000117148; HLA -A*01:01,HLA-A*25:01,HLA-A*26:01,HLA-A*30:02,HLA-B*15:01, HLA-B*15:03,HLA-B*46:01,HLA-B*58:01,HLA-C*16:04
ASVVAHLSTY

SEQ ID NO: 72 - protein, 9 aa, Homo sapiens
  Table 1.2; ACTL8; ENSG00000117148; HLA -A*11:01,HLA-A*31:01,HLA-A*68:01,HLA-C*07:06
ATVWEGSNR

SEQ ID NO: 73 - protein, 11 aa, Homo sapiens
  Table 1.2; ACTL8; ENSG00000117148; HLA -B*57:01,HLA-B*58:01
ATVWEGSNRNF

SEQ ID NO: 74 - protein, 9 aa, Homo sapiens
  Table 1.2; ACTL8; ENSG00000117148; HLA -A*30:02
AVTQMNKCY

SEQ ID NO: 75 - protein, 8 aa, Homo sapiens
  Table 1.2; ACTL8; ENSG00000117148; HLA -A*23:01,HLA-A*24:02
AYLLKSLF

SEQ ID NO: 76 - protein, 9 aa, Homo sapiens
  Table 1.2; ACTL8; ENSG00000117148; HLA -A*30:01,HLA-B*18:01,HLA-B*40:01,HLA-B*40:02,HLA-B*44:02, HLA-B*44:03,HLA-B*49:01
CEISLRPLL

SEQ ID NO: 77 - protein, 10 aa, Homo sapiens
  Table 1.2; ACTL8; ENSG00000117148; HLA -B*49:01
CEISLRPLLV

SEQ ID NO: 78 - protein, 9 aa, Homo sapiens
  Table 1.2; ACTL8; ENSG00000117148; HLA -B*15:03,HLA-B*39:01
CKENPGPSY

SEQ ID NO: 79 - protein, 8 aa, Homo sapiens
  Table 1.2; ACTL8; ENSG00000117148; HLA -A*02:01,HLA-A*02:03
CLFQLETV

SEQ ID NO: 80 - protein, 10 aa, Homo sapiens
  Table 1.2; ACTL8; ENSG00000117148; HLA -A*02:01,HLA-A*02:03,HLA-A*02:04
CLFQLETVAV

SEQ ID NO: 81 - protein, 8 aa, Homo sapiens
  Table 1.2; ACTL8; ENSG00000117148; HLA -A*30:01,HLA-B*18:01,HLA-B*27:05,HLA-B*37:01,HLA-B*40:01
DESNTYQL

SEQ ID NO: 82 - protein, 8 aa, Homo sapiens
  Table 1.2; ACTL8; ENSG00000117148; HLA -A*33:01,HLA-A*33:03
DHGSGFLK

SEQ ID NO: 83 - protein, 10 aa, Homo sapiens
  Table 1.2; ACTL8; ENSG00000117148; HLA -B*38:01,HLA-B*39:01
DHVSSTKATV

SEQ ID NO: 84 - protein, 11 aa, Homo sapiens
  Table 1.2; ACTL8; ENSG00000117148; HLA -A*25:01,HLA-A*33:01,HLA-B*38:01,HLA-B*39:01,HLA-C*07:01
DHVSSTKATVW

SEQ ID NO: 85 - protein, 10 aa, Homo sapiens
  Table 1.2; ACTL8; ENSG00000117148; HLA -A*01:01,HLA-A*26:01
DICHPDTFSY

SEQ ID NO: 86 - protein, 8 aa, Homo sapiens
  Table 1.2; ACTL8; ENSG00000117148; HLA -B*15:01,HLA-B*15:03,HLA-B*18:01,HLA-C*04:01,HLA-C*07:01
DQLQMSLY

SEQ ID NO: 87 - protein, 8 aa, Homo sapiens
  Table 1.2; ACTL8; ENSG00000117148; HLA -A*33:01,HLA-A*33:03,HLA-A*68:01
DSGYGLTR

SEQ ID NO: 88 - protein, 9 aa, Homo sapiens
  Table 1.2; ACTL8; ENSG00000117148; HLA -A*11:01,HLA-A*26:01,HLA-A*31:01,HLA-A*33:01,HLA-A*33:03, HLA-A*68:01,HLA-A*68:02,HLA-C*07:06
DTFSYPIER

SEQ ID NO: 89 - protein, 10 aa, Homo sapiens
  Table 1.2; ACTL8; ENSG00000117148; HLA -A*68:02
DTFSYPIERG

SEQ ID NO: 90 - protein, 11 aa, Homo sapiens
  Table 1.2; ACTL8; ENSG00000117148; HLA -A*33:01
DTFSYPIERGR

SEQ ID NO: 91 - protein, 8 aa, Homo sapiens
  Table 1.2; ACTL8; ENSG00000117148; HLA -A*33:01,HLA-A*33:03
EALDFRER

SEQ ID NO: 92 - protein, 9 aa, Homo sapiens
  Table 1.2; ACTL8; ENSG00000117148; HLA -A*30:01,HLA-B*18:01,HLA-B*37:01,HLA-B*38:01,HLA-B*40:01, HLA-B*40:02,HLA-B*44:02,HLA-B*44:03,HLA-B*49:01
EEYGEHMRM

SEQ ID NO: 93 - protein, 10 aa, Homo sapiens
  Table 1.2; ACTL8; ENSG00000117148; HLA -A*25:01,HLA-A*26:01,HLA-A*29:02,HLA-A*30:02
EFAGQDLSAY

SEQ ID NO: 94 - protein, 9 aa, Homo sapiens
  Table 1.2; ACTL8; ENSG00000117148; HLA -B*08:01
EGSNRNFSV

SEQ ID NO: 95 - protein, 10 aa, Homo sapiens
  Table 1.2; ACTL8; ENSG00000117148; HLA -A*25:01
EGSNRNFSVW

SEQ ID NO: 96 - protein, 9 aa, Homo sapiens
  Table 1.2; ACTL8; ENSG00000117148; HLA -A*68:02
EILFELLHV

SEQ ID NO: 97 - protein, 8 aa, Homo sapiens
  Table 1.2; ACTL8; ENSG00000117148; HLA -B*08:01
EISLRPLL

SEQ ID NO: 98 - protein, 9 aa, Homo sapiens
  Table 1.2; ACTL8; ENSG00000117148; HLA -A*68:02
EISLRPLLV

SEQ ID NO: 99 - protein, 10 aa, Homo sapiens
  Table 1.2; ACTL8; ENSG00000117148; HLA -A*25:01,HLA-A*26:01
ELMGDHVSST

SEQ ID NO: 100 - protein, 11 aa, Homo sapiens
  Table 1.2; ACTL8; ENSG00000117148; HLA -A*03:02,HLA-A*26:01,HLA-A*33:03,HLA-A*68:01
ELMGDHVSSTK

SEQ ID NO: 101 - protein, 8 aa, Homo sapiens
  Table 1.2; ACTL8; ENSG00000117148; HLA -B*51:01
EMFFSPQV

SEQ ID NO: 102 - protein, 9 aa, Homo sapiens
  Table 1.2; ACTL8; ENSG00000117148; HLA -A*33:01,HLA-A*33:03,HLA-A*68:01
ENPGPSYAR

SEQ ID NO: 103 - protein, 9 aa, Homo sapiens
  Table 1.2; ACTL8; ENSG00000117148; HLA -B*08:01
EPADRKKML

SEQ ID NO: 104 - protein, 9 aa, Homo sapiens
  Table 1.2; ACTL8; ENSG00000117148; HLA -B*51:01
EPQMVFPNI

SEQ ID NO: 105 - protein, 8 aa, Homo sapiens
  Table 1.2; ACTL8; ENSG00000117148; HLA -B*13:02,HLA-B*39:01
EQEVPPVI

SEQ ID NO: 106 - protein, 9 aa, Homo sapiens
  Table 1.2; ACTL8; ENSG00000117148; HLA -B*38:01,HLA-B*39:01
EQEVPPVII

SEQ ID NO: 107 - protein, 9 aa, Homo sapiens
  Table 1.2; ACTL8; ENSG00000117148; HLA -A*33:03,HLA-A*68:01,HLA-C*07:06
EQPGPSIPR

SEQ ID NO: 108 - protein, 8 aa, Homo sapiens
  Table 1.2; ACTL8; ENSG00000117148; HLA -A*33:03
ESCEISLR

SEQ ID NO: 109 - protein, 8 aa, Homo sapiens
  Table 1.2; ACTL8; ENSG00000117148; HLA -A*25:01,HLA-A*26:01,HLA-A*33:03,HLA-B*18:01
ETVAVTQM

SEQ ID NO: 110 - protein, 9 aa, Homo sapiens
  Table 1.2; ACTL8; ENSG00000117148; HLA -A*68:02
ETVAVTQMN

SEQ ID NO: 111 - protein, 10 aa, Homo sapiens
  Table 1.2; ACTL8; ENSG00000117148; HLA -A*01:01,HLA-A*03:02,HLA-A*11:01,HLA-A*33:01,HLA-A*33:03, HLA-A*68:01,HLA-A*68:02,HLA-B*27:02,HLA-C*07:06
ETVAVTQMNK

SEQ ID NO: 112 - protein, 9 aa, Homo sapiens
  Table 1.2; ACTL8; ENSG00000117148; HLA -A*26:01
EVPPVIITE

SEQ ID NO: 113 - protein, 10 aa, Homo sapiens
  Table 1.2; ACTL8; ENSG00000117148; HLA -A*25:01,HLA-A*26:01,HLA-A*68:01,HLA-A*68:02
EVPPVIITET

SEQ ID NO: 114 - protein, 8 aa, Homo sapiens
  Table 1.2; ACTL8; ENSG00000117148; HLA -A*24:02,HLA-C*07:01
EYGEHMRM

SEQ ID NO: 115 - protein, 9 aa, Homo sapiens
  Table 1.2; ACTL8; ENSG00000117148; HLA -A*01:01,HLA-A*25:01,HLA-A*26:01,HLA-A*29:02,HLA-A*30:02, HLA-B*15:01,HLA-B*15:03,HLA-B*35:01,HLA-B*39:01,HLA-B*46:01, HLA-B*55:01,HLA-C*02:02,HLA-C*03:03,HLA-C*07:04
FAGQDLSAY

SEQ ID NO: 116 - protein, 9 aa, Homo sapiens
  Table 1.2; ACTL8; ENSG00000117148; HLA -A*02:01,HLA-A*02:03,HLA-A*02:04,HLA-A*02:07,HLA-A*30:01, HLA-B*13:02,HLA-B*18:01,HLA-B*37:01,HLA-B*40:01,HLA-B*40:02, HLA-B*49:01,HLA-B*51:01,HLA-B*54:01
FELLHVPSV

SEQ ID NO: 117 - protein, 10 aa, Homo sapiens
  Table 1.2; ACTL8; ENSG00000117148; HLA -A*30:01,HLA-B*40:01
FELLHVPSVL

SEQ ID NO: 118 - protein, 8 aa, Homo sapiens
  Table 1.2; ACTL8; ENSG00000117148; HLA -A*30:01,HLA-B*18:01,HLA-B*40:01,HLA-B*40:02,HLA-B*49:01
FEQPGPSI

SEQ ID NO: 119 - protein, 9 aa, Homo sapiens
  Table 1.2; ACTL8; ENSG00000117148; HLA -B*49:01
FEQPGPSIP

SEQ ID NO: 120 - protein, 10 aa, Homo sapiens
  Table 1.2; ACTL8; ENSG00000117148; HLA -A*11:01,HLA-A*31:01,HLA-A*33:01,HLA-A*33:03,HLA-A*68:01, HLA-B*27:02,HLA-C*07:06
FEQPGPSIPR

SEQ ID NO: 121 - protein, 9 aa, Homo sapiens
  Table 1.2; ACTL8; ENSG00000117148; HLA -A*25:01,HLA-A*32:01,HLA-B*46:01
FLKAGTAGW

SEQ ID NO: 122 - protein, 8 aa, Homo sapiens
  Table 1.2; ACTL8; ENSG00000117148; HLA -B*51:01
FPNIVNYL

SEQ ID NO: 123 - protein, 9 aa, Homo sapiens
  Table 1.2; ACTL8; ENSG00000117148; HLA -B*54:01
FPNIVNYLP

SEQ ID NO: 124 - protein, 8 aa, Homo sapiens
  Table 1.2; ACTL8; ENSG00000117148; HLA -A*02:01,HLA-A*30:01,HLA-B*13:02
FQLETVAV

SEQ ID NO: 125 - protein, 9 aa, Homo sapiens
  Table 1.2; ACTL8; ENSG00000117148; HLA -A*02:01,HLA-B*27:05,HLA-C*07:04
FQLETVAVT

SEQ ID NO: 126 - protein, 10 aa, Homo sapiens
  Table 1.2; ACTL8; ENSG00000117148; HLA -B*27:05
FQLETVAVTQ

SEQ ID NO: 127 - protein, 11 aa, Homo sapiens
  Table 1.2; ACTL8; ENSG00000117148; HLA -A*02:01,HLA-A*02:04,HLA-B*13:02,HLA-B*39:01,HLA-C*07:04
FQLETVAVTQM

SEQ ID NO: 128 - protein, 9 aa, Homo sapiens
  Table 1.2; ACTL8; ENSG00000117148; HLA -A*68:02,HLA-B*54:01
FSVWLGASV

SEQ ID NO: 129 - protein, 11 aa, Homo sapiens
  Table 1.2; ACTL8; ENSG00000117148; HLA -B*54:01
FSVWLGASVVA

SEQ ID NO: 130 - protein, 9 aa, Homo sapiens
  Table 1.2; ACTL8; ENSG00000117148; HLA -A*31:01
FSYPIERGR

SEQ ID NO: 131 - protein, 8 aa, Homo sapiens
  Table 1.2; ACTL8; ENSG00000117148; HLA -B*37:01
GASVVAHL

SEQ ID NO: 132 - protein, 11 aa, Homo sapiens
  Table 1.2; ACTL8; ENSG00000117148; HLA -A*30:02,HLA-B*15:01,HLA-B*15:03,HLA-B*46:01,HLA-C*04:01, HLA-C*16:04
GASVVAHLSTY

SEQ ID NO: 133 - protein, 8 aa, Homo sapiens
  Table 1.2; ACTL8; ENSG00000117148; HLA -B*27:05
GDHVSSTK

SEQ ID NO: 134 - protein, 11 aa, Homo sapiens
  Table 1.2; ACTL8; ENSG00000117148; HLA -A*03:02,HLA-A*11:01
GGNTLYPGFTK

SEQ ID NO: 135 - protein, 8 aa, Homo sapiens
  Table 1.2; ACTL8; ENSG00000117148; HLA -A*02:01,HLA-A*02:04,HLA-B*13:02
GLLTGVVV

SEQ ID NO: 136 - protein, 10 aa, Homo sapiens
  Table 1.2; ACTL8; ENSG00000117148; HLA -A*02:01
GLLTGVVVDS

SEQ ID NO: 137 - protein, 8 aa, Homo sapiens
  Table 1.2; ACTL8; ENSG00000117148; HLA -B*37:01
GLTRVQPF

SEQ ID NO: 138 - protein, 10 aa, Homo sapiens
  Table 1.2; ACTL8; ENSG00000117148; HLA -B*27:02,HLA-B*27:05
GNTLYPGFTK

SEQ ID NO: 139 - protein, 9 aa, Homo sapiens
  Table 1.2; ACTL8; ENSG00000117148; HLA -B*07:02
GPSIPRAIV

SEQ ID NO: 140 - protein, 11 aa, Homo sapiens
  Table 1.2; ACTL8; ENSG00000117148; HLA -B*07:02
GPSYARRRVSL

SEQ ID NO: 141 - protein, 8 aa, Homo sapiens
  Table 1.2; ACTL8; ENSG00000117148; HLA -B*38:01
GQDLSAYL

SEQ ID NO: 142 - protein, 9 aa, Homo sapiens
  Table 1.2; ACTL8; ENSG00000117148; HLA -A*02:07,HLA-B*13:02,HLA-B*15:01,HLA-B*27:05,HLA-B*38:01, HLA-B*39:01,HLA-B*40:01,HLA-B*40:02,HLA-C*04:01
GQDLSAYLL

SEQ ID NO: 143 - protein, 10 aa, Homo sapiens
  Table 1.2; ACTL8; ENSG00000117148; HLA -A*11:01,HLA-B*27:02
GQDLSAYLLK

SEQ ID NO: 144 - protein, 9 aa, Homo sapiens
  Table 1.2; ACTL8; ENSG00000117148; HLA -B*27:05
GRPLPASGK

SEQ ID NO: 145 - protein, 9 aa, Homo sapiens
  Table 1.2; ACTL8; ENSG00000117148; HLA -A*25:01,HLA-A*32:01,HLA-B*57:01,HLA-B*58:01
GSNRNFSVW

SEQ ID NO: 146 - protein, 9 aa, Homo sapiens
  Table 1.2; ACTL8; ENSG00000117148; HLA -B*46:01
GSRVELTPM

SEQ ID NO: 147 - protein, 11 aa, Homo sapiens
  Table 1.2; ACTL8; ENSG00000117148; HLA -A*31:01
GSRVELTPMQR

SEQ ID NO: 148 - protein, 8 aa, Homo sapiens
  Table 1.2; ACTL8; ENSG00000117148; HLA -B*15:01
GVVVDSGY

SEQ ID NO: 149 - protein, 9 aa, Homo sapiens
  Table 1.2; ACTL8; ENSG00000117148; HLA -A*24:02
GWNEPQMVF

SEQ ID NO: 150 - protein, 10 aa, Homo sapiens
  Table 1.2; ACTL8; ENSG00000117148; HLA -A*24:02
GYGLTRVQPF

SEQ ID NO: 151 - protein, 9 aa, Homo sapiens
  Table 1.2; ACTL8; ENSG00000117148; HLA -A*25:01,HLA-A*32:01,HLA-B*57:01
HLSTYQSEW

SEQ ID NO: 152 - protein, 11 aa, Homo sapiens
  Table 1.2; ACTL8; ENSG00000117148; HLA -A*29:02
HVMACGGNTLY

SEQ ID NO: 153 - protein, 11 aa, Homo sapiens
  Table 1.2; ACTL8; ENSG00000117148; HLA -A*02:07,HLA-A*68:02
HVPSVLLADQL

SEQ ID NO: 154 - protein, 9 aa, Homo sapiens
  Table 1.2; ACTL8; ENSG00000117148; HLA -A*02:03,HLA-A*32:01,HLA-A*68:02,HLA-B*13:02,HLA-B*51:01
HVSSTKATV

SEQ ID NO: 155 - protein, 10 aa, Homo sapiens
  Table 1.2; ACTL8; ENSG00000117148; HLA -A*25:01,HLA-A*32:01,HLA-A*68:01,HLA-B*44:03,HLA-B*57:01, HLA-B*58:01
HVSSTKATVW

SEQ ID NO: 156 - protein, 9 aa, Homo sapiens
  Table 1.2; ACTL8; ENSG00000117148; HLA -A*29:02,HLA-A*30:02,HLA-A*32:01,HLA-B*46:01
ICHPDTFSY

SEQ ID NO: 157 - protein, 8 aa, Homo sapiens
  Table 1.2; ACTL8; ENSG00000117148; HLA -C*06:02
IDHGSGFL

SEQ ID NO: 158 - protein, 9 aa, Homo sapiens
  Table 1.2; ACTL8; ENSG00000117148; HLA -A*03:01,HLA-A*03:02,HLA-A*11:01,HLA-A*33:01,HLA-B*27:02, HLA-C*07:01
IDHGSGFLK

SEQ ID NO: 159 - protein, 9 aa, Homo sapiens
  Table 1.2; ACTL8; ENSG00000117148; HLA -A*24:02,HLA-B*37:01
IDICHPDTF

SEQ ID NO: 160 - protein, 9 aa, Homo sapiens
  Table 1.2; ACTL8; ENSG00000117148; HLA -B*44:02
IERGRILNW

SEQ ID NO: 161 - protein, 8 aa, Homo sapiens
  Table 1.2; ACTL8; ENSG00000117148; HLA -C*05:01
IIDHGSGF

SEQ ID NO: 162 - protein, 9 aa, Homo sapiens
  Table 1.2; ACTL8; ENSG00000117148; HLA -A*01:01,HLA-A*02:07,HLA-C*05:01
IIDHGSGFL

SEQ ID NO: 163 - protein, 10 aa, Homo sapiens
  Table 1.2; ACTL8; ENSG00000117148; HLA -A*01:01,HLA-A*03:01,HLA-A*03:02,HLA-A*11:01
IIDHGSGFLK

SEQ ID NO: 164 - protein, 11 aa, Homo sapiens
  Table 1.2; ACTL8; ENSG00000117148; HLA -A*02:07
IIDHGSGFLKA

SEQ ID NO: 165 - protein, 8 aa, Homo sapiens
  Table 1.2; ACTL8; ENSG00000117148; HLA -A*02:04
ILFELLHV

SEQ ID NO: 166 - protein, 11 aa, Homo sapiens
  Table 1.2; ACTL8; ENSG00000117148; HLA -A*02:01,HLA-A*02:03,HLA-A*02:04
ILFELLHVPSV

SEQ ID NO: 167 - protein, 9 aa, Homo sapiens
  Table 1.2; ACTL8; ENSG00000117148; HLA -A*01:01,HLA-A*03:01,HLA-A*03:02,HLA-A*29:02,HLA-A*30:02, HLA-A*32:01,HLA-B*15:01,HLA-B*15:03,HLA-B*46:01,HLA-C*07:04
ILNWEGVQY

SEQ ID NO: 168 - protein, 10 aa, Homo sapiens
  Table 1.2; ACTL8; ENSG00000117148; HLA -A*02:01,HLA-A*02:03,HLA-A*02:04
ILNWEGVQYL

SEQ ID NO: 169 - protein, 9 aa, Homo sapiens
  Table 1.2; ACTL8; ENSG00000117148; HLA -B*07:02,HLA-B*08:01,HLA-B*51:01,HLA-B*54:01,HLA-B*55:01, HLA-B*56:01,HLA-C*07:02
IPRAIVESV

SEQ ID NO: 170 - protein, 10 aa, Homo sapiens
  Table 1.2; ACTL8; ENSG00000117148; HLA -C*05:01
IVESVESCEI

SEQ ID NO: 171 - protein, 8 aa, Homo sapiens
  Table 1.2; ACTL8; ENSG00000117148; HLA -A*30:02,HLA-A*32:01,HLA-B*15:03,HLA-B*18:01,HLA-B*27:02, HLA-B*37:01,HLA-B*39:01,HLA-B*44:02,HLA-B*44:03
KENPGPSY

SEQ ID NO: 172 - protein, 9 aa, Homo sapiens
  Table 1.2; ACTL8; ENSG00000117148; HLA -B*37:01,HLA-B*40:02,HLA-B*49:01
KENPGPSYA

SEQ ID NO: 173 - protein, 10 aa, Homo sapiens
  Table 1.2; ACTL8; ENSG00000117148; HLA -A*03:02,HLA-A*31:01,HLA-B*27:05,HLA-B*37:01,HLA-B*40:01, HLA-B*44:02,HLA-B*44:03
KENPGPSYAR

SEQ ID NO: 174 - protein, 11 aa, Homo sapiens
  Table 1.2; ACTL8; ENSG00000117148; HLA -A*31:01
KENPGPSYARR

SEQ ID NO: 175 - protein, 9 aa, Homo sapiens
  Table 1.2; ACTL8; ENSG00000117148; HLA -A*02:01,HLA-A*02:04,HLA-A*02:07
KMLEILFEL

SEQ ID NO: 176 - protein, 10 aa, Homo sapiens
  Table 1.2; ACTL8; ENSG00000117148; HLA -A*02:01,HLA-A*02:04,HLA-A*02:07
KMLEILFELL

SEQ ID NO: 177 - protein, 10 aa, Homo sapiens
  Table 1.2; ACTL8; ENSG00000117148; HLA -A*32:01,HLA-B*40:02,HLA-B*57:01,HLA-B*58:01
KTLEFAGQDL

SEQ ID NO: 178 - protein, 9 aa, Homo sapiens
  Table 1.2; ACTL8; ENSG00000117148; HLA -A*01:01,HLA-A*02:07,HLA-B*35:03,HLA-B*38:01,HLA-B*39:01, HLA-C*03:03,HLA-C*03:04,HLA-C*05:01
LADQLQMSL

SEQ ID NO: 179 - protein, 10 aa, Homo sapiens
  Table 1.2; ACTL8; ENSG00000117148; HLA -A*01:01,HLA-B*27:02
LADQLQMSLY

SEQ ID NO: 180 - protein, 9 aa, Homo sapiens
  Table 1.2; ACTL8; ENSG00000117148; HLA -B*38:01,HLA-B*40:01
LDESNTYQL

SEQ ID NO: 181 - protein, 8 aa, Homo sapiens
  Table 1.2; ACTL8; ENSG00000117148; HLA -A*30:01,HLA-B*18:01,HLA-B*37:01,HLA-B*40:01,HLA-B*40:02, HLA-B*49:01
LEFAGQDL

SEQ ID NO: 182 - protein, 10 aa, Homo sapiens
  Table 1.2; ACTL8; ENSG00000117148; HLA -A*30:01,HLA-B*40:01,HLA-B*40:02,HLA-B*49:01
LEFAGQDLSA

SEQ ID NO: 183 - protein, 11 aa, Homo sapiens
  Table 1.2; ACTL8; ENSG00000117148; HLA -A*30:02,HLA-B*15:01,HLA-B*15:03,HLA-B*18:01,HLA-B*27:02, HLA-B*40:01,HLA-B*44:02,HLA-B*44:03,HLA-B*46:01,HLA-B*49:01, HLA-C*16:04
LEFAGQDLSAY

SEQ ID NO: 184 - protein, 8 aa, Homo sapiens
  Table 1.2; ACTL8; ENSG00000117148; HLA -B*18:01,HLA-B*49:01
LEILFELL

SEQ ID NO: 185 - protein, 8 aa, Homo sapiens
  Table 1.2; ACTL8; ENSG00000117148; HLA -B*18:01,HLA-C*07:04
LETVAVTQ

SEQ ID NO: 186 - protein, 9 aa, Homo sapiens
  Table 1.2; ACTL8; ENSG00000117148; HLA -A*30:01,HLA-B*18:01,HLA-B*37:01,HLA-B*40:01,HLA-B*40:02, HLA-B*44:03,HLA-B*49:01,HLA-C*04:01
LETVAVTQM

SEQ ID NO: 187 - protein, 11 aa, Homo sapiens
  Table 1.2; ACTL8; ENSG00000117148; HLA -B*27:02
LETVAVTQMNK

SEQ ID NO: 188 - protein, 9 aa, Homo sapiens
  Table 1.2; ACTL8; ENSG00000117148; HLA -C*14:02
LFQLETVAV

SEQ ID NO: 189 - protein, 9 aa, Homo sapiens
  Table 1.2; ACTL8; ENSG00000117148; HLA -A*02:01,HLA-A*02:03,HLA-A*02:04,HLA-A*23:01,HLA-A*30:01, HLA-A*32:01,HLA-A*68:02,HLA-B*07:02,HLA-B*27:05,HLA-B*35:03, HLA-B*40:01,HLA-B*58:01,HLA-C*02:02,HLA-C*03:03,HLA-C*03:04,
  HLA-C*06:02,HLA-C*07:04,HLA-C*12:03,HLA-C*14:02,HLA-C*16:02
LGASVVAHL

SEQ ID NO: 190 - protein, 10 aa, Homo sapiens
  Table 1.2; ACTL8; ENSG00000117148; HLA -A*02:01,HLA-A*02:03,HLA-A*02:04
LLADQLQMSL

SEQ ID NO: 191 - protein, 11 aa, Homo sapiens
  Table 1.2; ACTL8; ENSG00000117148; HLA -A*01:01,HLA-A*29:02,HLA-A*30:02,HLA-B*15:01
LLADQLQMSLY

SEQ ID NO: 192 - protein, 8 aa, Homo sapiens
  Table 1.2; ACTL8; ENSG00000117148; HLA -B*08:01
LLHVPSVL

SEQ ID NO: 193 - protein, 9 aa, Homo sapiens
  Table 1.2; ACTL8; ENSG00000117148; HLA -A*02:01,HLA-A*02:04,HLA-A*02:07
LLHVPSVLL

SEQ ID NO: 194 - protein, 11 aa, Homo sapiens
  Table 1.2; ACTL8; ENSG00000117148; HLA -A*01:01,HLA-A*30:02,HLA-C*07:01
LLTGVVVDSGY

SEQ ID NO: 195 - protein, 9 aa, Homo sapiens
  Table 1.2; ACTL8; ENSG00000117148; HLA -A*02:01,HLA-A*02:03
LLVSHVMAC

SEQ ID NO: 196 - protein, 9 aa, Homo sapiens
  Table 1.2; ACTL8; ENSG00000117148; HLA -A*02:01,HLA-A*02:03,HLA-A*32:01
LMGDHVSST

SEQ ID NO: 197 - protein, 10 aa, Homo sapiens
  Table 1.2; ACTL8; ENSG00000117148; HLA -A*03:01,HLA-A*03:02
LMGDHVSSTK

SEQ ID NO: 198 - protein, 8 aa, Homo sapiens
  Table 1.2; ACTL8; ENSG00000117148; HLA -B*07:02,HLA-B*08:01,HLA-B*35:03,HLA-B*51:01,HLA-C*07:02
LPASGKTL

SEQ ID NO: 199 - protein, 10 aa, Homo sapiens
  Table 1.2; ACTL8; ENSG00000117148; HLA -B*07:02,HLA-B*35:01,HLA-B*35:03,HLA-B*56:01,HLA-C*07:02
LPASGKTLEF

SEQ ID NO: 200 - protein, 11 aa, Homo sapiens
  Table 1.2; ACTL8; ENSG00000117148; HLA -B*56:01
LPASGKTLEFA

SEQ ID NO: 201 - protein, 11 aa, Homo sapiens
  Table 1.2; ACTL8; ENSG00000117148; HLA -B*35:01,HLA-B*55:01
LPCKENPGPSY

SEQ ID NO: 202 - protein, 9 aa, Homo sapiens
  Table 1.2; ACTL8; ENSG00000117148; HLA -B*07:02,HLA-B*08:01,HLA-B*35:01,HLA-B*35:03,HLA-B*38:01, HLA-B*39:01,HLA-B*40:01,HLA-B*51:01,HLA-B*55:01,HLA-B*56:01, HLA-C*05:01,HLA-C*07:02
LPDGSRVEL

SEQ ID NO: 203 - protein, 8 aa, Homo sapiens
  Table 1.2; ACTL8; ENSG00000117148; HLA -B*57:01,HLA-B*58:01
LSTYQSEW

SEQ ID NO: 204 - protein, 10 aa, Homo sapiens
  Table 1.2; ACTL8; ENSG00000117148; HLA -A*01:01,HLA-C*07:01
LTGVVVDSGY

SEQ ID NO: 205 - protein, 9 aa, Homo sapiens
  Table 1.2; ACTL8; ENSG00000117148; HLA -A*24:02
LYPGFTKRL

SEQ ID NO: 206 - protein, 10 aa, Homo sapiens
  Table 1.2; ACTL8; ENSG00000117148; HLA -A*24:02
LYPGFTKRLF

SEQ ID NO: 207 - protein, 8 aa, Homo sapiens
  Table 1.2; ACTL8; ENSG00000117148; HLA -C*03:04
MACGGNTL

SEQ ID NO: 208 - protein, 9 aa, Homo sapiens
  Table 1.2; ACTL8; ENSG00000117148; HLA -A*01:01,HLA-A*26:01,HLA-A*29:02,HLA-A*30:02,HLA-B*15:01, HLA-B*15:03,HLA-B*35:01,HLA-B*39:01,HLA-B*46:01,HLA-B*55:01, HLA-C*02:02,HLA-C*07:01,HLA-C*07:04
MACGGNTLY

SEQ ID NO: 209 - protein, 8 aa, Homo sapiens
  Table 1.2; ACTL8; ENSG00000117148; HLA -A*23:01
MFFSPQVF

SEQ ID NO: 210 - protein, 9 aa, Homo sapiens
  Table 1.2; ACTL8; ENSG00000117148; HLA -A*02:07
MLEILFELL

SEQ ID NO: 211 - protein, 8 aa, Homo sapiens
  Table 1.2; ACTL8; ENSG00000117148; HLA -B*08:01,HLA-B*15:01,HLA-B*15:03,HLA-B*18:01,HLA-B*46:01, HLA-C*16:01
MQRVAPEM

SEQ ID NO: 212 - protein, 9 aa, Homo sapiens
  Table 1.2; ACTL8; ENSG00000117148; HLA -B*15:01,HLA-B*15:03
MQRVAPEMF

SEQ ID NO: 213 - protein, 9 aa, Homo sapiens
  Table 1.2; ACTL8; ENSG00000117148; HLA -A*11:01,HLA-A*25:01,HLA-A*26:01,HLA-A*29:02,HLA-A*30:02, HLA-A*32:01,HLA-A*33:03,HLA-A*68:01,HLA-B*15:01,HLA-B*35:01, HLA-B*44:03,HLA-B*46:01,HLA-B*57:01,HLA-B*58:01,HLA-C*02:02,
  HLA-C*07:04,HLA-C*07:06,HLA-C*12:03
MVFPNIVNY

SEQ ID NO: 214 - protein, 10 aa, Homo sapiens
  Table 1.2; ACTL8; ENSG00000117148; HLA -A*25:01,HLA-A*26:01,HLA-A*68:02
MVFPNIVNYL

SEQ ID NO: 215 - protein, 8 aa, Homo sapiens
  Table 1.2; ACTL8; ENSG00000117148; HLA -A*33:03,HLA-B*35:01
NPGPSYAR

SEQ ID NO: 216 - protein, 9 aa, Homo sapiens
  Table 1.2; ACTL8; ENSG00000117148; HLA -A*03:01,HLA-A*03:02,HLA-A*11:01,HLA-A*33:01,HLA-A*33:03, HLA-A*68:01,HLA-C*07:06
NTLYPGFTK

SEQ ID NO: 217 - protein, 10 aa, Homo sapiens
  Table 1.2; ACTL8; ENSG00000117148; HLA -A*33:01,HLA-A*33:03,HLA-A*68:01
NTLYPGFTKR

SEQ ID NO: 218 - protein, 10 aa, Homo sapiens
  Table 1.2; ACTL8; ENSG00000117148; HLA -A*11:01,HLA-A*33:01,HLA-A*33:03,HLA-A*68:01
NTYQLPDGSR

SEQ ID NO: 219 - protein, 11 aa, Homo sapiens
  Table 1.2; ACTL8; ENSG00000117148; HLA -A*68:02
NTYQLPDGSRV

SEQ ID NO: 220 - protein, 10 aa, Homo sapiens
  Table 1.2; ACTL8; ENSG00000117148; HLA -A*30:02
PCKENPGPSY

SEQ ID NO: 221 - protein, 8 aa, Homo sapiens
  Table 1.2; ACTL8; ENSG00000117148; HLA -B*07:02
PDGSRVEL

SEQ ID NO: 222 - protein, 9 aa, Homo sapiens
  Table 1.2; ACTL8; ENSG00000117148; HLA -B*49:01
PEMFFSPQV

SEQ ID NO: 223 - protein, 11 aa, Homo sapiens
  Table 1.2; ACTL8; ENSG00000117148; HLA -A*24:02,HLA-B*07:02
PLPASGKTLEF

SEQ ID NO: 224 - protein, 8 aa, Homo sapiens
  Table 1.2; ACTL8; ENSG00000117148; HLA -A*30:01,HLA-B*37:01,HLA-B*40:02
QDLSAYLL

SEQ ID NO: 225 - protein, 8 aa, Homo sapiens
  Table 1.2; ACTL8; ENSG00000117148; HLA -A*30:01,HLA-B*40:01,HLA-B*49:01
QEVPPVII

SEQ ID NO: 226 - protein, 9 aa, Homo sapiens
  Table 1.2; ACTL8; ENSG00000117148; HLA -B*49:01
QEVPPVIIT

SEQ ID NO: 227 - protein, 10 aa, Homo sapiens
  Table 1.2; ACTL8; ENSG00000117148; HLA -A*31:01
QGRPLPASGK

SEQ ID NO: 228 - protein, 9 aa, Homo sapiens
  Table 1.2; ACTL8; ENSG00000117148; HLA -A*03:02
QLETVAVTQ

SEQ ID NO: 229 - protein, 10 aa, Homo sapiens
  Table 1.2; ACTL8; ENSG00000117148; HLA -B*55:01
QLETVAVTQM

SEQ ID NO: 230 - protein, 10 aa, Homo sapiens
  Table 1.2; ACTL8; ENSG00000117148; HLA -A*02:01,HLA-A*02:03,HLA-A*02:07,HLA-B*07:02,HLA-C*01:02
QLPDGSRVEL

SEQ ID NO: 231 - protein, 9 aa, Homo sapiens
  Table 1.2; ACTL8; ENSG00000117148; HLA -B*07:02
QPFHQGRPL

SEQ ID NO: 232 - protein, 11 aa, Homo sapiens
  Table 1.2; ACTL8; ENSG00000117148; HLA -B*07:02,HLA-B*54:01,HLA-B*56:01
QPFHQGRPLPA

SEQ ID NO: 233 - protein, 9 aa, Homo sapiens
  Table 1.2; ACTL8; ENSG00000117148; HLA -B*54:01,HLA-B*55:01,HLA-B*56:01
QPGPSIPRA

SEQ ID NO: 234 - protein, 10 aa, Homo sapiens
  Table 1.2; ACTL8; ENSG00000117148; HLA -B*07:02,HLA-B*56:01
QPGPSIPRAI

SEQ ID NO: 235 - protein, 11 aa, Homo sapiens
  Table 1.2; ACTL8; ENSG00000117148; HLA -A*30:02,HLA-A*32:01,HLA-B*15:01,HLA-B*15:03,HLA-B*27:05, HLA-B*38:01,HLA-B*39:01,HLA-C*07:04
QQSALDESNTY

SEQ ID NO: 236 - protein, 10 aa, Homo sapiens
  Table 1.2; ACTL8; ENSG00000117148; HLA -A*01:01,HLA-A*30:02,HLA-B*15:01
QSALDESNTY

SEQ ID NO: 237 - protein, 10 aa, Homo sapiens
  Table 1.2; ACTL8; ENSG00000117148; HLA -A*01:01
QSEWMSREEY

SEQ ID NO: 238 - protein, 10 aa, Homo sapiens
  Table 1.2; ACTL8; ENSG00000117148; HLA -A*25:01,HLA-A*26:01,HLA-B*13:02,HLA-B*51:01
QVFEQPGPSI

SEQ ID NO: 239 - protein, 8 aa, Homo sapiens
  Table 1.2; ACTL8; ENSG00000117148; HLA -B*37:01
RELMGDHV

SEQ ID NO: 240 - protein, 8 aa, Homo sapiens
  Table 1.2; ACTL8; ENSG00000117148; HLA -B*18:01,HLA-B*37:01
REQEVPPV

SEQ ID NO: 241 - protein, 9 aa, Homo sapiens
  Table 1.2; ACTL8; ENSG00000117148; HLA -A*30:01,HLA-B*13:02,HLA-B*18:01,HLA-B*37:01,HLA-B*38:01, HLA-B*40:01,HLA-B*40:02,HLA-B*44:02,HLA-B*44:03,HLA-B*49:01, HLA-C*16:04
REQEVPPVI

SEQ ID NO: 242 - protein, 10 aa, Homo sapiens
  Table 1.2; ACTL8; ENSG00000117148; HLA -A*30:01,HLA-B*40:01,HLA-B*44:02,HLA-B*49:01
REQEVPPVII

SEQ ID NO: 243 - protein, 10 aa, Homo sapiens
  Table 1.2; ACTL8; ENSG00000117148; HLA -A*29:02
RILNWEGVQY

SEQ ID NO: 244 - protein, 11 aa, Homo sapiens
  Table 1.2; ACTL8; ENSG00000117148; HLA -A*02:04
RILNWEGVQYL

SEQ ID NO: 245 - protein, 8 aa, Homo sapiens
  Table 1.2; ACTL8; ENSG00000117148; HLA -B*07:02,HLA-B*08:01,HLA-B*51:01
RPLLVSHV

SEQ ID NO: 246 - protein, 9 aa, Homo sapiens
  Table 1.2; ACTL8; ENSG00000117148; HLA -B*07:02,HLA-B*08:01,HLA-B*35:01,HLA-B*35:03,HLA-B*54:01, HLA-B*55:01,HLA-B*56:01,HLA-C*07:02
RPLLVSHVM

SEQ ID NO: 247 - protein, 10 aa, Homo sapiens
  Table 1.2; ACTL8; ENSG00000117148; HLA -B*54:01,HLA-B*56:01
RPLLVSHVMA

SEQ ID NO: 248 - protein, 10 aa, Homo sapiens
  Table 1.2; ACTL8; ENSG00000117148; HLA -B*07:02,HLA-C*07:02
RPLPASGKTL

SEQ ID NO: 249 - protein, 11 aa, Homo sapiens
  Table 1.2; ACTL8; ENSG00000117148; HLA -B*57:01
RTVIIDHGSGF

SEQ ID NO: 250 - protein, 9 aa, Homo sapiens
  Table 1.2; ACTL8; ENSG00000117148; HLA -A*03:01,HLA-A*03:02,HLA-A*11:01,HLA-A*31:01
RVELTPMQR

SEQ ID NO: 251 - protein, 9 aa, Homo sapiens
  Table 1.2; ACTL8; ENSG00000117148; HLA -A*03:02,HLA-A*11:01,HLA-A*31:01
RVQPFHQGR

SEQ ID NO: 252 - protein, 9 aa, Homo sapiens
  Table 1.2; ACTL8; ENSG00000117148; HLA -A*23:01,HLA-A*25:01,HLA-A*26:01,HLA-A*29:02,HLA-A*30:02, HLA-A*32:01,HLA-B*15:01,HLA-B*15:03,HLA-B*18:01,HLA-B*27:02, HLA-B*27:05,HLA-B*35:01,HLA-B*35:03,HLA-B*38:01,HLA-B*39:01,
  HLA-B*46:01,HLA-B*55:01,HLA-B*58:01,HLA-C*01:02,HLA-C*02:02, HLA-C*03:03,HLA-C*03:04,HLA-C*05:01,HLA-C*07:06,HLA-C*12:03, HLA-C*14:02,HLA-C*16:01,HLA-C*16:02,HLA-C*16:04
SALDESNTY

SEQ ID NO: 253 - protein, 11 aa, Homo sapiens
  Table 1.2; ACTL8; ENSG00000117148; HLA -A*02:01,HLA-A*02:04,HLA-B*35:03
SALDESNTYQL

SEQ ID NO: 254 - protein, 8 aa, Homo sapiens
  Table 1.2; ACTL8; ENSG00000117148; HLA -B*08:01,HLA-B*51:01,HLA-C*03:04
SAYLLKSL

SEQ ID NO: 255 - protein, 9 aa, Homo sapiens
  Table 1.2; ACTL8; ENSG00000117148; HLA -B*08:01,HLA-B*51:01,HLA-B*57:01,HLA-C*02:02,HLA-C*12:03
SAYLLKSLF

SEQ ID NO: 256 - protein, 10 aa, Homo sapiens
  Table 1.2; ACTL8; ENSG00000117148; HLA -A*03:01
SAYLLKSLFK

SEQ ID NO: 257 - protein, 9 aa, Homo sapiens
  Table 1.2; ACTL8; ENSG00000117148; HLA -A*30:02,HLA-B*15:01,HLA-B*15:03,HLA-B*18:01,HLA-B*27:02, HLA-B*44:02,HLA-B*44:03,HLA-C*16:04
SEWMSREEY

SEQ ID NO: 258 - protein, 9 aa, Homo sapiens
  Table 1.2; ACTL8; ENSG00000117148; HLA -B*46:01
SGLLTGVVV

SEQ ID NO: 259 - protein, 8 aa, Homo sapiens
  Table 1.2; ACTL8; ENSG00000117148; HLA -B*51:01
SGYGLTRV

SEQ ID NO: 260 - protein, 9 aa, Homo sapiens
  Table 1.2; ACTL8; ENSG00000117148; HLA -C*06:02
SGYGLTRVQ

SEQ ID NO: 261 - protein, 11 aa, Homo sapiens
  Table 1.2; ACTL8; ENSG00000117148; HLA -B*38:01
SHVMACGGNTL

SEQ ID NO: 262 - protein, 9 aa, Homo sapiens
  Table 1.2; ACTL8; ENSG00000117148; HLA -A*31:01
SLRPLLVSH

SEQ ID NO: 263 - protein, 10 aa, Homo sapiens
  Table 1.2; ACTL8; ENSG00000117148; HLA -A*02:03
SLRPLLVSHV

SEQ ID NO: 264 - protein, 9 aa, Homo sapiens
  Table 1.2; ACTL8; ENSG00000117148; HLA -A*02:03,HLA-A*03:01,HLA-B*13:02
SLYASGLLT

SEQ ID NO: 265 - protein, 10 aa, Homo sapiens
  Table 1.2; ACTL8; ENSG00000117148; HLA -A*02:01,HLA-A*02:03
SLYASGLLTG

SEQ ID NO: 266 - protein, 11 aa, Homo sapiens
  Table 1.2; ACTL8; ENSG00000117148; HLA -A*02:01,HLA-A*02:03,HLA-A*02:04,HLA-A*02:07,HLA-B*13:02, HLA-B*55:01
SLYASGLLTGV

SEQ ID NO: 267 - protein, 10 aa, Homo sapiens
  Table 1.2; ACTL8; ENSG00000117148; HLA -B*27:05
SRVELTPMQR

SEQ ID NO: 268 - protein, 8 aa, Homo sapiens
  Table 1.2; ACTL8; ENSG00000117148; HLA -A*32:01,HLA-B*57:01,HLA-B*58:01
SSTKATVW

SEQ ID NO: 269 - protein, 10 aa, Homo sapiens
  Table 1.2; ACTL8; ENSG00000117148; HLA -A*03:01,HLA-A*11:01,HLA-A*31:01,HLA-A*33:01,HLA-A*33:03, HLA-A*68:01,HLA-C*07:06
STYQSEWMSR

SEQ ID NO: 270 - protein, 9 aa, Homo sapiens
  Table 1.2; ACTL8; ENSG00000117148; HLA -A*01:01,HLA-A*02:03,HLA-A*03:01,HLA-A*03:02,HLA-A*11:01, HLA-A*23:01,HLA-A*24:02,HLA-A*25:01,HLA-A*26:01,HLA-A*29:02, HLA-A*30:02,HLA-A*32:01,HLA-A*68:01,HLA-B*15:01,HLA-B*15:03,
  HLA-B*18:01,HLA-B*27:02,HLA-B*35:01,HLA-B*39:01,HLA-B*44:02, HLA-B*44:03,HLA-B*46:01,HLA-B*55:01,HLA-B*57:01,HLA-B*58:01, HLA-C*01:02,HLA-C*02:02,HLA-C*03:03,HLA-C*03:04,HLA-C*07:04, HLA-C*07:06,HLA-C*12:03,HLA-C*14:02,HLA-C*16:01,HLA-C*16:02,
  HLA-C*16:04
SVVAHLSTY

SEQ ID NO: 271 - protein, 8 aa, Homo sapiens
  Table 1.2; ACTL8; ENSG00000117148; HLA -B*56:01
SVWLGASV

SEQ ID NO: 272 - protein, 9 aa, Homo sapiens
  Table 1.2; ACTL8; ENSG00000117148; HLA -A*02:01,HLA-A*02:03,HLA-A*68:02,HLA-B*13:02,HLA-B*51:01, HLA-B*54:01,HLA-B*55:01,HLA-B*56:01
SVWLGASVV

SEQ ID NO: 273 - protein, 10 aa, Homo sapiens
  Table 1.2; ACTL8; ENSG00000117148; HLA -B*54:01,HLA-B*56:01
SVWLGASVVA

SEQ ID NO: 274 - protein, 9 aa, Homo sapiens
  Table 1.2; ACTL8; ENSG00000117148; HLA -B*35:03,HLA-B*55:01
TAGWNEPQM

SEQ ID NO: 275 - protein, 9 aa, Homo sapiens
  Table 1.2; ACTL8; ENSG00000117148; HLA -B*18:01
TETPLREPA

SEQ ID NO: 276 - protein, 9 aa, Homo sapiens
  Table 1.2; ACTL8; ENSG00000117148; HLA -A*01:01,HLA-A*30:02,HLA-B*15:01,HLA-B*15:03,HLA-B*35:01, HLA-B*46:01,HLA-C*04:01
TGVVVDSGY

SEQ ID NO: 277 - protein, 9 aa, Homo sapiens
  Table 1.2; ACTL8; ENSG00000117148; HLA -B*39:01,HLA-C*01:02
TLEFAGQDL

SEQ ID NO: 278 - protein, 8 aa, Homo sapiens
  Table 1.2; ACTL8; ENSG00000117148; HLA -A*03:01,HLA-A*03:02,HLA-A*11:01,HLA-B*27:05
TLYPGFTK

SEQ ID NO: 279 - protein, 9 aa, Homo sapiens
  Table 1.2; ACTL8; ENSG00000117148; HLA -A*03:01,HLA-A*03:02,HLA-A*11:01,HLA-A*31:01,HLA-A*33:01, HLA-A*33:03,HLA-A*68:01
TLYPGFTKR

SEQ ID NO: 280 - protein, 10 aa, Homo sapiens
  Table 1.2; ACTL8; ENSG00000117148; HLA -A*02:01,HLA-A*02:03,HLA-A*02:04,HLA-A*03:01
TLYPGFTKRL

SEQ ID NO: 281 - protein, 8 aa, Homo sapiens
  Table 1.2; ACTL8; ENSG00000117148; HLA -B*08:01,HLA-B*56:01
TPMQRVAP

SEQ ID NO: 282 - protein, 10 aa, Homo sapiens
  Table 1.2; ACTL8; ENSG00000117148; HLA -B*07:02,HLA-B*35:01,HLA-B*35:03,HLA-B*55:01,HLA-C*07:02
TPMQRVAPEM

SEQ ID NO: 283 - protein, 9 aa, Homo sapiens
  Table 1.2; ACTL8; ENSG00000117148; HLA -A*03:01,HLA-A*03:02,HLA-A*11:01,HLA-A*31:01,HLA-A*33:03, HLA-A*68:01,HLA-C*06:02,HLA-C*07:06
TVAVTQMNK

SEQ ID NO: 284 - protein, 10 aa, Homo sapiens
  Table 1.2; ACTL8; ENSG00000117148; HLA -A*25:01,HLA-A*26:01,HLA-A*32:01,HLA-B*15:01
TVIIDHGSGF

SEQ ID NO: 285 - protein, 8 aa, Homo sapiens
  Table 1.2; ACTL8; ENSG00000117148; HLA -A*31:01,HLA-A*33:03
TVWEGSNR

SEQ ID NO: 286 - protein, 10 aa, Homo sapiens
  Table 1.2; ACTL8; ENSG00000117148; HLA -A*25:01,HLA-B*57:01,HLA-B*58:01
TVWEGSNRNF

SEQ ID NO: 287 - protein, 9 aa, Homo sapiens
  Table 1.2; ACTL8; ENSG00000117148; HLA -A*33:01,HLA-A*33:03
TYQLPDGSR

SEQ ID NO: 288 - protein, 9 aa, Homo sapiens
  Table 1.2; ACTL8; ENSG00000117148; HLA -A*31:01,HLA-A*33:01,HLA-A*33:03
TYQSEWMSR

SEQ ID NO: 289 - protein, 11 aa, Homo sapiens
  Table 1.2; ACTL8; ENSG00000117148; HLA -B*57:01
VAHLSTYQSEW

SEQ ID NO: 290 - protein, 8 aa, Homo sapiens
  Table 1.2; ACTL8; ENSG00000117148; HLA -A*11:01,HLA-B*27:02
VAVTQMNK

SEQ ID NO: 291 - protein, 10 aa, Homo sapiens
  Table 1.2; ACTL8; ENSG00000117148; HLA -B*58:01,HLA-C*16:02
VAVTQMNKCY

SEQ ID NO: 292 - protein, 9 aa, Homo sapiens
  Table 1.2; ACTL8; ENSG00000117148; HLA -A*30:01,HLA-B*44:02,HLA-B*44:03,HLA-B*49:01
VELTPMQRV

SEQ ID NO: 293 - protein, 9 aa, Homo sapiens
  Table 1.2; ACTL8; ENSG00000117148; HLA -A*30:01,HLA-B*13:02,HLA-B*40:01,HLA-B*49:01
VESVESCEI

SEQ ID NO: 294 - protein, 11 aa, Homo sapiens
  Table 1.2; ACTL8; ENSG00000117148; HLA -B*40:01
VESVESCEISL

SEQ ID NO: 295 - protein, 9 aa, Homo sapiens
  Table 1.2; ACTL8; ENSG00000117148; HLA -A*23:01,HLA-A*24:02,HLA-B*38:01,HLA-C*14:02
VFEQPGPSI

SEQ ID NO: 296 - protein, 8 aa, Homo sapiens
  Table 1.2; ACTL8; ENSG00000117148; HLA -A*23:01,HLA-A*29:02,HLA-C*14:02
VFPNIVNY

SEQ ID NO: 297 - protein, 9 aa, Homo sapiens
  Table 1.2; ACTL8; ENSG00000117148; HLA -A*23:01,HLA-A*24:02
VFPNIVNYL

SEQ ID NO: 298 - protein, 9 aa, Homo sapiens
  Table 1.2; ACTL8; ENSG00000117148; HLA -A*02:07,HLA-A*23:01,HLA-A*24:02,HLA-A*25:01,HLA-A*26:01, HLA-A*29:02,HLA-A*30:02,HLA-A*32:01,HLA-B*07:02,HLA-B*15:01, HLA-B*15:03,HLA-B*37:01,HLA-B*44:02,HLA-B*44:03,HLA-B*46:01,
  HLA-B*58:01,HLA-C*01:02,HLA-C*02:02,HLA-C*03:03,HLA-C*03:04, HLA-C*05:01,HLA-C*07:04,HLA-C*14:02,HLA-C*16:04
VIIDHGSGF

SEQ ID NO: 299 - protein, 10 aa, Homo sapiens
  Table 1.2; ACTL8; ENSG00000117148; HLA -A*02:03,HLA-A*03:01
VIIDHGSGFL

SEQ ID NO: 300 - protein, 11 aa, Homo sapiens
  Table 1.2; ACTL8; ENSG00000117148; HLA -A*03:01,HLA-A*03:02,HLA-A*11:01,HLA-A*31:01
VIIDHGSGFLK

SEQ ID NO: 301 - protein, 9 aa, Homo sapiens
  Table 1.2; ACTL8; ENSG00000117148; HLA -A*11:01
VIITETPLR

SEQ ID NO: 302 - protein, 9 aa, Homo sapiens
  Table 1.2; ACTL8; ENSG00000117148; HLA -A*02:01,HLA-A*23:01,HLA-B*13:02
VLLADQLQM

SEQ ID NO: 303 - protein, 11 aa, Homo sapiens
  Table 1.2; ACTL8; ENSG00000117148; HLA -A*02:01
VLLADQLQMSL

SEQ ID NO: 304 - protein, 9 aa, Homo sapiens
  Table 1.2; ACTL8; ENSG00000117148; HLA -C*01:02,HLA-C*14:02
VMACGGNTL

SEQ ID NO: 305 - protein, 10 aa, Homo sapiens
  Table 1.2; ACTL8; ENSG00000117148; HLA -A*01:01,HLA-A*29:02,HLA-B*15:01,HLA-B*46:01,HLA-C*07:04
VMACGGNTLY

SEQ ID NO: 306 - protein, 9 aa, Homo sapiens
  Table 1.2; ACTL8; ENSG00000117148; HLA -B*51:01,HLA-B*56:01
VPPVIITET

SEQ ID NO: 307 - protein, 8 aa, Homo sapiens
  Table 1.2; ACTL8; ENSG00000117148; HLA -B*56:01
VPQNLGEA

SEQ ID NO: 308 - protein, 9 aa, Homo sapiens
  Table 1.2; ACTL8; ENSG00000117148; HLA -B*07:02,HLA-B*35:01,HLA-B*35:03,HLA-B*39:01,HLA-B*56:01, HLA-C*01:02,HLA-C*07:02,HLA-C*14:02
VPQNLGEAL

SEQ ID NO: 309 - protein, 11 aa, Homo sapiens
  Table 1.2; ACTL8; ENSG00000117148; HLA -B*27:02,HLA-B*35:01
VPQNLGEALDF

SEQ ID NO: 310 - protein, 9 aa, Homo sapiens
  Table 1.2; ACTL8; ENSG00000117148; HLA -A*25:01,HLA-A*32:01,HLA-B*57:01,HLA-B*58:01,HLA-C*12:03, HLA-C*16:01
VSSTKATVW

SEQ ID NO: 311 - protein, 8 aa, Homo sapiens
  Table 1.2; ACTL8; ENSG00000117148; HLA -A*25:01,HLA-A*30:02,HLA-A*32:01,HLA-B*15:01,HLA-B*15:03, HLA-B*39:01,HLA-B*46:01,HLA-B*58:01,HLA-C*07:01,HLA-C*07:04, HLA-C*12:03
VVAHLSTY

SEQ ID NO: 312 - protein, 8 aa, Homo sapiens
  Table 1.2; ACTL8; ENSG00000117148; HLA -A*02:07,HLA-B*38:01,HLA-B*39:01,HLA-C*04:01,HLA-C*05:01
VVDSGYGL

SEQ ID NO: 313 - protein, 9 aa, Homo sapiens
  Table 1.2; ACTL8; ENSG00000117148; HLA -A*01:01,HLA-C*05:01
VVDSGYGLT

SEQ ID NO: 314 - protein, 10 aa, Homo sapiens
  Table 1.2; ACTL8; ENSG00000117148; HLA -A*01:01,HLA-A*03:01,HLA-A*03:02,HLA-A*11:01,HLA-A*68:01
VVDSGYGLTR

SEQ ID NO: 315 - protein, 11 aa, Homo sapiens
  Table 1.2; ACTL8; ENSG00000117148; HLA -A*01:01,HLA-A*02:01,HLA-A*02:07,HLA-C*05:01
VVDSGYGLTRV

SEQ ID NO: 316 - protein, 8 aa, Homo sapiens
  Table 1.2; ACTL8; ENSG00000117148; HLA -B*39:01
VVVDSGYG

SEQ ID NO: 317 - protein, 9 aa, Homo sapiens
  Table 1.2; ACTL8; ENSG00000117148; HLA -A*02:01,HLA-A*02:03,HLA-A*02:04,HLA-A*02:07,HLA-A*23:01, HLA-A*25:01,HLA-A*26:01,HLA-A*30:01,HLA-A*32:01,HLA-A*68:02, HLA-B*13:02,HLA-B*15:01,HLA-B*15:03,HLA-B*27:05,HLA-B*35:03,
  HLA-B*38:01,HLA-B*39:01,HLA-B*40:01,HLA-B*46:01,HLA-B*55:01, HLA-B*58:01,HLA-C*01:02,HLA-C*03:03,HLA-C*03:04,HLA-C*07:04, HLA-C*14:02
VVVDSGYGL

SEQ ID NO: 318 - protein, 11 aa, Homo sapiens
  Table 1.2; ACTL8; ENSG00000117148; HLA -A*03:01,HLA-A*03:02,HLA-A*11:01,HLA-A*31:01,HLA-A*33:01, HLA-A*33:03,HLA-A*68:01,HLA-B*27:02,HLA-C*07:06
VVVDSGYGLTR

SEQ ID NO: 319 - protein, 11 aa, Homo sapiens
  Table 1.2; ACTL8; ENSG00000117148; HLA -A*23:01
VWLGASVVAHL

SEQ ID NO: 320 - protein, 8 aa, Homo sapiens
  Table 1.2; ACTL8; ENSG00000117148; HLA -B*08:01
YARRRVSL

SEQ ID NO: 321 - protein, 9 aa, Homo sapiens
  Table 1.2; ACTL8; ENSG00000117148; HLA -A*02:01,HLA-A*02:03,HLA-A*02:04,HLA-A*02:07,HLA-A*26:01, HLA-A*32:01,HLA-A*68:02,HLA-B*13:02,HLA-B*27:05,HLA-B*39:01, HLA-B*46:01,HLA-B*49:01,HLA-B*51:01,HLA-B*54:01,HLA-B*55:01,
  HLA-B*56:01,HLA-C*02:02,HLA-C*06:02,HLA-C*12:03,HLA-C*16:02, HLA-C*16:04
YASGLLTGV

SEQ ID NO: 322 - protein, 11 aa, Homo sapiens
  Table 1.2; ACTL8; ENSG00000117148; HLA -A*68:02,HLA-B*35:03,HLA-B*39:01,HLA-B*54:01
YASGLLTGVVV

SEQ ID NO: 323 - protein, 9 aa, Homo sapiens
  Table 1.2; ACTL8; ENSG00000117148; HLA -A*02:04,HLA-A*23:01,HLA-A*24:02,HLA-A*31:01,HLA-A*33:01, HLA-B*08:01,HLA-B*37:01,HLA-B*40:02,HLA-B*46:01,HLA-B*57:01, HLA-C*02:02,HLA-C*03:04,HLA-C*07:01,HLA-C*07:04,HLA-C*12:03,
  HLA-C*16:01
YGLTRVQPF

SEQ ID NO: 324 - protein, 9 aa, Homo sapiens
  Table 1.2; ACTL8; ENSG00000117148; HLA -A*02:07
YLWSFVLEN

SEQ ID NO: 325 - protein, 8 aa, Homo sapiens
  Table 1.2; ACTL8; ENSG00000117148; HLA -B*51:01
YPIERGRI

SEQ ID NO: 326 - protein, 9 aa, Homo sapiens
  Table 1.2; ACTL8; ENSG00000117148; HLA -B*07:02,HLA-B*08:01,HLA-B*35:01,HLA-B*35:03,HLA-B*51:01, HLA-B*54:01,HLA-C*03:04,HLA-C*07:02
YPIERGRIL

SEQ ID NO: 327 - protein, 9 aa, Homo sapiens
  Table 1.2; ACTL8; ENSG00000117148; HLA -A*02:01,HLA-A*02:04,HLA-B*13:02,HLA-B*27:05,HLA-B*37:01, HLA-B*38:01
YQLPDGSRV

SEQ ID NO: 328 - protein, 11 aa, Homo sapiens
  Table 1.2; ACTL8; ENSG00000117148; HLA -A*02:01,HLA-A*02:04,HLA-A*24:02,HLA-A*30:01,HLA-B*38:01, HLA-B*39:01
YQLPDGSRVEL

SEQ ID NO: 329 - protein, 11 aa, Homo sapiens
  Table 1.2; ACTL8; ENSG00000117148; HLA -B*15:01
YQSEWMSREEY

SEQ ID NO: 330 - protein, 9 aa, Homo sapiens
  Table 1.2; ACTL8; ENSG00000117148; HLA -A*02:07,HLA-A*26:01
YVPQNLGEA

SEQ ID NO: 331 - protein, 10 aa, Homo sapiens
  Table 1.2; ACTL8; ENSG00000117148; HLA -A*02:07,HLA-A*25:01,HLA-C*01:02
YVPQNLGEAL

SEQ ID NO: 332 - protein, 9 aa, Homo sapiens
  Table 1.2; ADAM2; ENSG00000104755; HLA -A*11:01,HLA-B*27:02
ADVSLYNEK

SEQ ID NO: 333 - protein, 9 aa, Homo sapiens
  Table 1.2; ADAM2; ENSG00000104755; HLA -A*03:02,HLA-A*11:01,HLA-A*31:01,HLA-A*33:01,HLA-A*33:03, HLA-A*68:01,HLA-C*07:06
AGGVVLHPR

SEQ ID NO: 334 - protein, 8 aa, Homo sapiens
  Table 1.2; ADAM2; ENSG00000104755; HLA -B*13:02
AIFVSFNI

SEQ ID NO: 335 - protein, 8 aa, Homo sapiens
  Table 1.2; ADAM2; ENSG00000104755; HLA -B*08:01,HLA-B*37:01
AIMVKVNF

SEQ ID NO: 336 - protein, 9 aa, Homo sapiens
  Table 1.2; ADAM2; ENSG00000104755; HLA -B*15:03
AKYIEMHVI

SEQ ID NO: 337 - protein, 9 aa, Homo sapiens
  Table 1.2; ADAM2; ENSG00000104755; HLA -A*23:01,HLA-A*30:01,HLA-A*32:01,HLA-B*08:01,HLA-B*13:02, HLA-B*15:01,HLA-B*15:03,HLA-B*27:05,HLA-B*37:01,HLA-B*38:01, HLA-B*39:01,HLA-B*40:01,HLA-B*40:02,HLA-B*46:01,HLA-C*02:02,
  HLA-C*03:03,HLA-C*03:04,HLA-C*07:04,HLA-C*12:03,HLA-C*14:02
ANYAGGVVL

SEQ ID NO: 338 - protein, 10 aa, Homo sapiens
  Table 1.2; ADAM2; ENSG00000104755; HLA -A*03:02
ANYAGGVVLH

SEQ ID NO: 339 - protein, 8 aa, Homo sapiens
  Table 1.2; ADAM2; ENSG00000104755; HLA -B*13:02
AQKVFQLI

SEQ ID NO: 340 - protein, 10 aa, Homo sapiens
  Table 1.2; ADAM2; ENSG00000104755; HLA -B*13:02
AQLLSLSMGI

SEQ ID NO: 341 - protein, 11 aa, Homo sapiens
  Table 1.2; ADAM2; ENSG00000104755; HLA -B*57:01,HLA-B*58:01
ASDHADSQKMW

SEQ ID NO: 342 - protein, 10 aa, Homo sapiens
  Table 1.2; ADAM2; ENSG00000104755; HLA -A*03:01,HLA-A*03:02,HLA-A*11:01
ASYKIVIEGK

SEQ ID NO: 343 - protein, 9 aa, Homo sapiens
  Table 1.2; ADAM2; ENSG00000104755; HLA -C*16:02
ATTGEANEL

SEQ ID NO: 344 - protein, 8 aa, Homo sapiens
  Table 1.2; ADAM2; ENSG00000104755; HLA -A*23:01
AVILAQLL

SEQ ID NO: 345 - protein, 10 aa, Homo sapiens
  Table 1.2; ADAM2; ENSG00000104755; HLA -A*25:01
AVILAQLLSL

SEQ ID NO: 346 - protein, 8 aa, Homo sapiens
  Table 1.2; ADAM2; ENSG00000104755; HLA -B*37:01
CDIATCRF

SEQ ID NO: 347 - protein, 9 aa, Homo sapiens
  Table 1.2; ADAM2; ENSG00000104755; HLA -B*13:02
CQCSGAVCI

SEQ ID NO: 348 - protein, 9 aa, Homo sapiens
  Table 1.2; ADAM2; ENSG00000104755; HLA -B*57:01
CSFEDFAHF

SEQ ID NO: 349 - protein, 9 aa, Homo sapiens
  Table 1.2; ADAM2; ENSG00000104755; HLA -A*03:01,HLA-A*11:01
CVLIAIMVK

SEQ ID NO: 350 - protein, 9 aa, Homo sapiens
  Table 1.2; ADAM2; ENSG00000104755; HLA -A*01:01,HLA-A*03:01,HLA-A*11:01,HLA-A*25:01,HLA-A*26:01, HLA-A*29:02,HLA-A*30:02,HLA-A*32:01,HLA-B*15:01,HLA-C*07:04
CVSSSYLGY

SEQ ID NO: 351 - protein, 8 aa, Homo sapiens
  Table 1.2; ADAM2; ENSG00000104755; HLA -B*51:01
DANYAGGV

SEQ ID NO: 352 - protein, 9 aa, Homo sapiens
  Table 1.2; ADAM2; ENSG00000104755; HLA -A*33:01,HLA-B*35:03,HLA-B*51:01,HLA-C*01:02
DANYAGGVV

SEQ ID NO: 353 - protein, 10 aa, Homo sapiens
  Table 1.2; ADAM2; ENSG00000104755; HLA -A*33:01,HLA-A*68:01,HLA-B*35:01,HLA-B*35:03,HLA-B*38:01, HLA-B*39:01,HLA-B*51:01,HLA-C*03:04,HLA-C*07:06
DANYAGGVVL

SEQ ID NO: 354 - protein, 11 aa, Homo sapiens
  Table 1.2; ADAM2; ENSG00000104755; HLA -A*33:01,HLA-A*68:01
DANYAGGVVLH

SEQ ID NO: 355 - protein, 8 aa, Homo sapiens
  Table 1.2; ADAM2; ENSG00000104755; HLA -B*18:01
DENKIATT

SEQ ID NO: 356 - protein, 9 aa, Homo sapiens
  Table 1.2; ADAM2; ENSG00000104755; HLA -B*18:01
DENKIATTG

SEQ ID NO: 357 - protein, 11 aa, Homo sapiens
  Table 1.2; ADAM2; ENSG00000104755; HLA -B*27:02
DEQPESESEPK

SEQ ID NO: 358 - protein, 8 aa, Homo sapiens
  Table 1.2; ADAM2; ENSG00000104755; HLA -A*33:01,HLA-A*33:03
DFAHFISK

SEQ ID NO: 359 - protein, 10 aa, Homo sapiens
  Table 1.2; ADAM2; ENSG00000104755; HLA -A*33:01
DFAHFISKQK

SEQ ID NO: 360 - protein, 8 aa, Homo sapiens
  Table 1.2; ADAM2; ENSG00000104755; HLA -B*38:01,HLA-B*39:01
DHADSQKM

SEQ ID NO: 361 - protein, 9 aa, Homo sapiens
  Table 1.2; ADAM2; ENSG00000104755; HLA -B*38:01
DHADSQKMW

SEQ ID NO: 362 - protein, 9 aa, Homo sapiens
  Table 1.2; ADAM2; ENSG00000104755; HLA -A*01:01,HLA-A*25:01,HLA-A*26:01,HLA-B*08:01
DIESRDLSF

SEQ ID NO: 363 - protein, 9 aa, Homo sapiens
  Table 1.2; ADAM2; ENSG00000104755; HLA -A*02:03,HLA-A*68:02,HLA-B*08:01
DLSFKLQSV

SEQ ID NO: 364 - protein, 8 aa, Homo sapiens
  Table 1.2; ADAM2; ENSG00000104755; HLA -B*08:01,HLA-B*54:01
DPFFKQQA

SEQ ID NO: 365 - protein, 9 aa, Homo sapiens
  Table 1.2; ADAM2; ENSG00000104755; HLA -A*68:01,HLA-A*68:02,HLA-B*08:01,HLA-B*35:01,HLA-B*35:03, HLA-B*51:01,HLA-B*54:01,HLA-B*55:01,HLA-B*56:01
DPFFKQQAV

SEQ ID NO: 366 - protein, 10 aa, Homo sapiens
  Table 1.2; ADAM2; ENSG00000104755; HLA -A*01:01,HLA-C*07:01
DQDFQNFCHY

SEQ ID NO: 367 - protein, 9 aa, Homo sapiens
  Table 1.2; ADAM2; ENSG00000104755; HLA -A*23:01,HLA-A*33:01,HLA-A*68:02,HLA-B*51:01,HLA-B*54:01
DSLPVQITV

SEQ ID NO: 368 - protein, 9 aa, Homo sapiens
  Table 1.2; ADAM2; ENSG00000104755; HLA -A*25:01,HLA-A*26:01,HLA-A*33:01,HLA-A*33:03,HLA-A*68:01, HLA-A*68:02,HLA-B*18:01,HLA-B*35:01,HLA-C*12:03
DTFGKEVEF

SEQ ID NO: 369 - protein, 8 aa, Homo sapiens
  Table 1.2; ADAM2; ENSG00000104755; HLA -A*03:02,HLA-A*33:01,HLA-A*33:03,HLA-A*68:01
DTTVVAQK

SEQ ID NO: 370 - protein, 9 aa, Homo sapiens
  Table 1.2; ADAM2; ENSG00000104755; HLA -A*25:01,HLA-A*26:01,HLA-A*33:01,HLA-A*33:03,HLA-A*68:01, HLA-A*68:02,HLA-B*13:02,HLA-B*51:01
DTTVVAQKV

SEQ ID NO: 371 - protein, 10 aa, Homo sapiens
  Table 1.2; ADAM2; ENSG00000104755; HLA -A*25:01,HLA-A*26:01
DTTVVAQKVF

SEQ ID NO: 372 - protein, 8 aa, Homo sapiens
  Table 1.2; ADAM2; ENSG00000104755; HLA -A*25:01,HLA-A*26:01,HLA-B*35:01
DVAFLLVY

SEQ ID NO: 373 - protein, 9 aa, Homo sapiens
  Table 1.2; ADAM2; ENSG00000104755; HLA -A*33:01,HLA-A*33:03,HLA-A*68:01,HLA-A*68:02
DVAFLLVYR

SEQ ID NO: 374 - protein, 8 aa, Homo sapiens
  Table 1.2; ADAM2; ENSG00000104755; HLA -B*51:01
EAIHFSGV

SEQ ID NO: 375 - protein, 10 aa, Homo sapiens
  Table 1.2; ADAM2; ENSG00000104755; HLA -A*25:01,HLA-A*68:01,HLA-A*68:02
EAIHFSGVKI

SEQ ID NO: 376 - protein, 9 aa, Homo sapiens
  Table 1.2; ADAM2; ENSG00000104755; HLA -A*23:01,HLA-A*24:02,HLA-A*25:01,HLA-A*26:01,HLA-A*30:02, HLA-A*32:01,HLA-A*33:01,HLA-A*33:03,HLA-A*68:01,HLA-A*68:02, HLA-B*18:01,HLA-B*27:02,HLA-B*35:01,HLA-B*35:03,HLA-B*38:01,
  HLA-B*44:02,HLA-B*44:03,HLA-B*46:01,HLA-B*51:01,HLA-B*57:01, HLA-B*58:01,HLA-C*07:06,HLA-C*16:04
EANELLHTF

SEQ ID NO: 377 - protein, 10 aa, Homo sapiens
  Table 1.2; ADAM2; ENSG00000104755; HLA -A*33:01,HLA-A*33:03,HLA-A*68:01,HLA-A*68:02
EANELLHTFL

SEQ ID NO: 378 - protein, 11 aa, Homo sapiens
  Table 1.2; ADAM2; ENSG00000104755; HLA -A*33:01
EANELLHTFLR

SEQ ID NO: 379 - protein, 9 aa, Homo sapiens
  Table 1.2; ADAM2; ENSG00000104755; HLA -A*33:01
ECYSHLNSK

SEQ ID NO: 380 - protein, 9 aa, Homo sapiens
  Table 1.2; ADAM2; ENSG00000104755; HLA -A*03:01,HLA-A*11:01,HLA-A*33:01,HLA-A*33:03,HLA-A*68:01, HLA-A*68:02,HLA-B*37:01
EDFAHFISK

SEQ ID NO: 381 - protein, 8 aa, Homo sapiens
  Table 1.2; ADAM2; ENSG00000104755; HLA -B*18:01
EECDLPEY

SEQ ID NO: 382 - protein, 9 aa, Homo sapiens
  Table 1.2; ADAM2; ENSG00000104755; HLA -A*25:01,HLA-A*26:01,HLA-A*30:02,HLA-A*32:01,HLA-B*15:01, HLA-B*15:03,HLA-B*18:01,HLA-B*35:01,HLA-B*44:02,HLA-B*44:03, HLA-B*46:01,HLA-C*16:04
EGIESQASY

SEQ ID NO: 383 - protein, 10 aa, Homo sapiens
  Table 1.2; ADAM2; ENSG00000104755; HLA -A*68:01
EGIESQASYK

SEQ ID NO: 384 - protein, 9 aa, Homo sapiens
  Table 1.2; ADAM2; ENSG00000104755; HLA -B*08:01
EGKPYTVNL

SEQ ID NO: 385 - protein, 8 aa, Homo sapiens
  Table 1.2; ADAM2; ENSG00000104755; HLA -B*08:01,HLA-B*51:01
EGYPKSVV

SEQ ID NO: 386 - protein, 9 aa, Homo sapiens
  Table 1.2; ADAM2; ENSG00000104755; HLA -A*25:01,HLA-A*26:01,HLA-A*30:01,HLA-B*08:01,HLA-B*15:03, HLA-B*18:01,HLA-B*35:01,HLA-B*35:03,HLA-B*37:01,HLA-B*39:01, HLA-B*40:02,HLA-B*46:01,HLA-B*51:01,HLA-C*02:02,HLA-C*03:03,
  HLA-C*03:04,HLA-C*07:04,HLA-C*12:03,HLA-C*16:01
EGYPKSVVM

SEQ ID NO: 387 - protein, 10 aa, Homo sapiens
  Table 1.2; ADAM2; ENSG00000104755; HLA -A*68:02
EGYPKSVVMV

SEQ ID NO: 388 - protein, 8 aa, Homo sapiens
  Table 1.2; ADAM2; ENSG00000104755; HLA -C*07:01
EHVIYQVK

SEQ ID NO: 389 - protein, 10 aa, Homo sapiens
  Table 1.2; ADAM2; ENSG00000104755; HLA -B*15:03,HLA-B*38:01
EKSNYVGATF

SEQ ID NO: 390 - protein, 8 aa, Homo sapiens
  Table 1.2; ADAM2; ENSG00000104755; HLA -A*33:01,HLA-A*33:03
EMHVIVEK

SEQ ID NO: 391 - protein, 11 aa, Homo sapiens
  Table 1.2; ADAM2; ENSG00000104755; HLA -A*01:01
EMHVIVEKQLY

SEQ ID NO: 392 - protein, 9 aa, Homo sapiens
  Table 1.2; ADAM2; ENSG00000104755; HLA -A*23:01,HLA-A*25:01,HLA-A*26:01,HLA-A*33:03,HLA-B*35:01, HLA-B*35:03,HLA-B*55:01
EPLESSVGF

SEQ ID NO: 393 - protein, 11 aa, Homo sapiens
  Table 1.2; ADAM2; ENSG00000104755; HLA -A*33:03
EPLESSVGFEH

SEQ ID NO: 394 - protein, 9 aa, Homo sapiens
  Table 1.2; ADAM2; ENSG00000104755; HLA -A*25:01,HLA-A*26:01,HLA-A*33:03,HLA-B*35:01,HLA-B*55:01, HLA-C*03:03
EPQQDFAKY

SEQ ID NO: 395 - protein, 9 aa, Homo sapiens
  Table 1.2; ADAM2; ENSG00000104755; HLA -A*33:03
ESLAVILAQ

SEQ ID NO: 396 - protein, 10 aa, Homo sapiens
  Table 1.2; ADAM2; ENSG00000104755; HLA -A*33:03,HLA-A*68:02
ESLAVILAQL

SEQ ID NO: 397 - protein, 10 aa, Homo sapiens
  Table 1.2; ADAM2; ENSG00000104755; HLA -A*68:01
ETCCDIATCR

SEQ ID NO: 398 - protein, 10 aa, Homo sapiens
  Table 1.2; ADAM2; ENSG00000104755; HLA -A*01:01,HLA-A*25:01,HLA-A*26:01
EVEFGPSECY

SEQ ID NO: 399 - protein, 9 aa, Homo sapiens
  Table 1.2; ADAM2; ENSG00000104755; HLA -A*33:01
FAHFISKQK

SEQ ID NO: 400 - protein, 8 aa, Homo sapiens
  Table 1.2; ADAM2; ENSG00000104755; HLA -B*37:01,HLA-B*38:01,HLA-B*49:01
FDSLPVQI

SEQ ID NO: 401 - protein, 10 aa, Homo sapiens
  Table 1.2; ADAM2; ENSG00000104755; HLA -A*68:02
FDSLPVQITV

SEQ ID NO: 402 - protein, 8 aa, Homo sapiens
  Table 1.2; ADAM2; ENSG00000104755; HLA -B*49:01
FEDFAHFI

SEQ ID NO: 403 - protein, 9 aa, Homo sapiens
  Table 1.2; ADAM2; ENSG00000104755; HLA -A*01:01,HLA-B*18:01
FEECDLPEY

SEQ ID NO: 404 - protein, 8 aa, Homo sapiens
  Table 1.2; ADAM2; ENSG00000104755; HLA -A*30:01,HLA-B*13:02,HLA-B*18:01,HLA-B*37:01,HLA-B*40:02, HLA-B*49:01
FEHVIYQV

SEQ ID NO: 405 - protein, 9 aa, Homo sapiens
  Table 1.2; ADAM2; ENSG00000104755; HLA -B*40:02
FEHVIYQVK

SEQ ID NO: 406 - protein, 8 aa, Homo sapiens
  Table 1.2; ADAM2; ENSG00000104755; HLA -B*18:01,HLA-B*37:01,HLA-B*49:01
FENVSYGI

SEQ ID NO: 407 - protein, 8 aa, Homo sapiens
  Table 1.2; ADAM2; ENSG00000104755; HLA -A*02:04
FLLQIPRA

SEQ ID NO: 408 - protein, 11 aa, Homo sapiens
  Table 1.2; ADAM2; ENSG00000104755; HLA -A*02:04
FLLQIPRATII

SEQ ID NO: 409 - protein, 9 aa, Homo sapiens
  Table 1.2; ADAM2; ENSG00000104755; HLA -A*02:01,HLA-A*02:03,HLA-A*02:04,HLA-A*02:07
FLLSGLGGL

SEQ ID NO: 410 - protein, 11 aa, Homo sapiens
  Table 1.2; ADAM2; ENSG00000104755; HLA -A*02:04,HLA-A*29:02
FLLSGLGGLRM

SEQ ID NO: 411 - protein, 8 aa, Homo sapiens
  Table 1.2; ADAM2; ENSG00000104755; HLA -A*02:07
FLPHNFRV

SEQ ID NO: 412 - protein, 9 aa, Homo sapiens
  Table 1.2; ADAM2; ENSG00000104755; HLA -A*02:07,HLA-A*29:02
FLPHNFRVY

SEQ ID NO: 413 - protein, 11 aa, Homo sapiens
  Table 1.2; ADAM2; ENSG00000104755; HLA -A*29:02
FLPHNFRVYSY

SEQ ID NO: 414 - protein, 9 aa, Homo sapiens
  Table 1.2; ADAM2; ENSG00000104755; HLA -A*02:03,HLA-A*02:04
FLRWKTSYL

SEQ ID NO: 415 - protein, 8 aa, Homo sapiens
  Table 1.2; ADAM2; ENSG00000104755; HLA -B*54:01
FPPVAIPA

SEQ ID NO: 416 - protein, 9 aa, Homo sapiens
  Table 1.2; ADAM2; ENSG00000104755; HLA -A*02:03,HLA-A*68:02
FVSFNITII

SEQ ID NO: 417 - protein, 10 aa, Homo sapiens
  Table 1.2; ADAM2; ENSG00000104755; HLA -A*25:01,HLA-A*30:01,HLA-A*30:02,HLA-B*15:01,HLA-B*18:01, HLA-B*27:02,HLA-B*27:05,HLA-B*37:01,HLA-B*38:01,HLA-B*40:01, HLA-B*40:02,HLA-B*44:02,HLA-B*44:03,HLA-B*49:01,HLA-B*57:01,
  HLA-C*02:02,HLA-C*16:04
GEANELLHTF

SEQ ID NO: 418 - protein, 11 aa, Homo sapiens
  Table 1.2; ADAM2; ENSG00000104755; HLA -A*30:01,HLA-B*40:01,HLA-B*44:02,HLA-B*49:01
GEANELLHTFL

SEQ ID NO: 419 - protein, 9 aa, Homo sapiens
  Table 1.2; ADAM2; ENSG00000104755; HLA -A*03:01,HLA-A*03:02
GIESQASYK

SEQ ID NO: 420 - protein, 9 aa, Homo sapiens
  Table 1.2; ADAM2; ENSG00000104755; HLA -A*03:02,HLA-A*11:01,HLA-B*27:02
GITYDDINK

SEQ ID NO: 421 - protein, 9 aa, Homo sapiens
  Table 1.2; ADAM2; ENSG00000104755; HLA -B*15:03
GKPYTVNLM

SEQ ID NO: 422 - protein, 8 aa, Homo sapiens
  Table 1.2; ADAM2; ENSG00000104755; HLA -B*13:02
GLTNAIFV

SEQ ID NO: 423 - protein, 10 aa, Homo sapiens
  Table 1.2; ADAM2; ENSG00000104755; HLA -A*02:04,HLA-A*23:01,HLA-A*24:02,HLA-A*25:01,HLA-A*29:02, HLA-B*15:03
GLTNAIFVSF

SEQ ID NO: 424 - protein, 8 aa, Homo sapiens
  Table 1.2; ADAM2; ENSG00000104755; HLA -B*13:02
GNFPPVAI

SEQ ID NO: 425 - protein, 9 aa, Homo sapiens
  Table 1.2; ADAM2; ENSG00000104755; HLA -B*07:02
GPSECYSHL

SEQ ID NO: 426 - protein, 10 aa, Homo sapiens
  Table 1.2; ADAM2; ENSG00000104755; HLA -A*01:01,HLA-A*03:01,HLA-A*03:02,HLA-A*11:01,HLA-A*68:01, HLA-B*27:02,HLA-C*07:06
GSDTTVVAQK

SEQ ID NO: 427 - protein, 11 aa, Homo sapiens
  Table 1.2; ADAM2; ENSG00000104755; HLA -A*01:01
GSDTTVVAQKV

SEQ ID NO: 428 - protein, 10 aa, Homo sapiens
  Table 1.2; ADAM2; ENSG00000104755; HLA -A*11:01
GSIDSGNFPP

SEQ ID NO: 429 - protein, 11 aa, Homo sapiens
  Table 1.2; ADAM2; ENSG00000104755; HLA -A*11:01
GSIDSGNFPPV

SEQ ID NO: 430 - protein, 10 aa, Homo sapiens
  Table 1.2; ADAM2; ENSG00000104755; HLA -A*25:01,HLA-A*26:01,HLA-A*29:02,HLA-A*30:02,HLA-A*32:01, HLA-B*15:01,HLA-B*15:03,HLA-B*39:01,HLA-B*46:01,HLA-B*57:01, HLA-C*07:01,HLA-C*07:04
GVLQFENVSY

SEQ ID NO: 431 - protein, 9 aa, Homo sapiens
  Table 1.2; ADAM2; ENSG00000104755; HLA -B*13:02
GVVLHPRTI

SEQ ID NO: 432 - protein, 8 aa, Homo sapiens
  Table 1.2; ADAM2; ENSG00000104755; HLA -A*33:03
GYIEGYPK

SEQ ID NO: 433 - protein, 9 aa, Homo sapiens
  Table 1.2; ADAM2; ENSG00000104755; HLA -A*24:02
GYPKSVVMV

SEQ ID NO: 434 - protein, 9 aa, Homo sapiens
  Table 1.2; ADAM2; ENSG00000104755; HLA -A*29:02
HDVAFLLVY

SEQ ID NO: 435 - protein, 9 aa, Homo sapiens
  Table 1.2; ADAM2; ENSG00000104755; HLA -B*15:03
HKKADVSLY

SEQ ID NO: 436 - protein, 8 aa, Homo sapiens
  Table 1.2; ADAM2; ENSG00000104755; HLA -B*08:01
HLNSKTDV

SEQ ID NO: 437 - protein, 9 aa, Homo sapiens
  Table 1.2; ADAM2; ENSG00000104755; HLA -A*02:01,HLA-A*02:03,HLA-B*55:01
HMGSDTTVV

SEQ ID NO: 438 - protein, 9 aa, Homo sapiens
  Table 1.2; ADAM2; ENSG00000104755; HLA -A*33:01
HNQPRLDPF

SEQ ID NO: 439 - protein, 10 aa, Homo sapiens
  Table 1.2; ADAM2; ENSG00000104755; HLA -B*07:02,HLA-C*07:02
HPRTISLESL

SEQ ID NO: 440 - protein, 8 aa, Homo sapiens
  Table 1.2; ADAM2; ENSG00000104755; HLA -B*08:01
HVIVEKQL

SEQ ID NO: 441 - protein, 9 aa, Homo sapiens
  Table 1.2; ADAM2; ENSG00000104755; HLA -A*01:01,HLA-A*25:01,HLA-A*26:01,HLA-A*29:02,HLA-A*30:02, HLA-A*32:01,HLA-B*15:01,HLA-B*15:03,HLA-B*35:01,HLA-B*44:03, HLA-B*46:01,HLA-B*55:01,HLA-B*57:01,HLA-B*58:01,HLA-C*03:03
HVIVEKQLY

SEQ ID NO: 442 - protein, 9 aa, Homo sapiens
  Table 1.2; ADAM2; ENSG00000104755; HLA -A*03:01,HLA-A*03:02,HLA-A*11:01
HVIYQVKHK

SEQ ID NO: 443 - protein, 9 aa, Homo sapiens
  Table 1.2; ADAM2; ENSG00000104755; HLA -A*29:02,HLA-A*30:02,HLA-C*14:02
HYQGYIEGY

SEQ ID NO: 444 - protein, 9 aa, Homo sapiens
  Table 1.2; ADAM2; ENSG00000104755; HLA -A*23:01,HLA-A*24:02,HLA-A*32:01,HLA-B*15:03,HLA-B*35:01, HLA-B*46:01,HLA-B*57:01,HLA-B*58:01,HLA-C*02:02,HLA-C*12:03, HLA-C*16:01
IAIMVKVNF

SEQ ID NO: 445 - protein, 10 aa, Homo sapiens
  Table 1.2; ADAM2; ENSG00000104755; HLA -B*35:03,HLA-C*03:03,HLA-C*03:04,HLA-C*16:02
IATTGEANEL

SEQ ID NO: 446 - protein, 8 aa, Homo sapiens
  Table 1.2; ADAM2; ENSG00000104755; HLA -A*30:01,HLA-B*13:02,HLA-B*18:01,HLA-B*37:01,HLA-B*40:01, HLA-B*40:02,HLA-B*49:01
IEGKPYTV

SEQ ID NO: 447 - protein, 10 aa, Homo sapiens
  Table 1.2; ADAM2; ENSG00000104755; HLA -A*30:01,HLA-B*40:01
IEGKPYTVNL

SEQ ID NO: 448 - protein, 8 aa, Homo sapiens
  Table 1.2; ADAM2; ENSG00000104755; HLA -B*49:01
IEGYPKSV

SEQ ID NO: 449 - protein, 9 aa, Homo sapiens
  Table 1.2; ADAM2; ENSG00000104755; HLA -A*30:01,HLA-B*40:01,HLA-B*40:02,HLA-B*49:01
IEGYPKSVV

SEQ ID NO: 450 - protein, 10 aa, Homo sapiens
  Table 1.2; ADAM2; ENSG00000104755; HLA -A*30:01,HLA-B*40:01
IEGYPKSVVM

SEQ ID NO: 451 - protein, 9 aa, Homo sapiens
  Table 1.2; ADAM2; ENSG00000104755; HLA -A*03:02,HLA-A*11:01,HLA-B*18:01
IEMHVIVEK

SEQ ID NO: 452 - protein, 11 aa, Homo sapiens
  Table 1.2; ADAM2; ENSG00000104755; HLA -B*44:02,HLA-B*44:03
IEMHVIVEKQL

SEQ ID NO: 453 - protein, 8 aa, Homo sapiens
  Table 1.2; ADAM2; ENSG00000104755; HLA -B*37:01
IENIYHSK

SEQ ID NO: 454 - protein, 8 aa, Homo sapiens
  Table 1.2; ADAM2; ENSG00000104755; HLA -B*49:01
IEPLESSV

SEQ ID NO: 455 - protein, 10 aa, Homo sapiens
  Table 1.2; ADAM2; ENSG00000104755; HLA -A*30:01,HLA-B*18:01,HLA-B*37:01,HLA-B*40:01,HLA-B*44:02, HLA-B*44:03
IEPLESSVGF

SEQ ID NO: 456 - protein, 9 aa, Homo sapiens
  Table 1.2; ADAM2; ENSG00000104755; HLA -A*30:01,HLA-B*13:02,HLA-B*37:01,HLA-B*38:01,HLA-B*40:01, HLA-B*40:02,HLA-B*44:02,HLA-B*44:03,HLA-B*49:01
IESQASYKI

SEQ ID NO: 457 - protein, 10 aa, Homo sapiens
  Table 1.2; ADAM2; ENSG00000104755; HLA -B*49:01
IESQASYKIV

SEQ ID NO: 458 - protein, 11 aa, Homo sapiens
  Table 1.2; ADAM2; ENSG00000104755; HLA -B*49:01
IESQASYKIVI

SEQ ID NO: 459 - protein, 8 aa, Homo sapiens
  Table 1.2; ADAM2; ENSG00000104755; HLA -B*18:01,HLA-B*37:01
IESRDLSF

SEQ ID NO: 460 - protein, 9 aa, Homo sapiens
  Table 1.2; ADAM2; ENSG00000104755; HLA -A*23:01,HLA-A*24:02
IFVSFNITI

SEQ ID NO: 461 - protein, 11 aa, Homo sapiens
  Table 1.2; ADAM2; ENSG00000104755; HLA -A*23:01,HLA-B*57:01
IGLTNAIFVSF

SEQ ID NO: 462 - protein, 8 aa, Homo sapiens
  Table 1.2; ADAM2; ENSG00000104755; HLA -B*38:01
IHFSGVKI

SEQ ID NO: 463 - protein, 9 aa, Homo sapiens
  Table 1.2; ADAM2; ENSG00000104755; HLA -B*46:01
IIKEGIESQ

SEQ ID NO: 464 - protein, 10 aa, Homo sapiens
  Table 1.2; ADAM2; ENSG00000104755; HLA -A*02:03
IIKEGIESQA

SEQ ID NO: 465 - protein, 9 aa, Homo sapiens
  Table 1.2; ADAM2; ENSG00000104755; HLA -B*57:01
IILSSLELW

SEQ ID NO: 466 - protein, 9 aa, Homo sapiens
  Table 1.2; ADAM2; ENSG00000104755; HLA -A*03:01
IIYANISGH

SEQ ID NO: 467 - protein, 11 aa, Homo sapiens
  Table 1.2; ADAM2; ENSG00000104755; HLA -B*15:03
IKEGIESQASY

SEQ ID NO: 468 - protein, 9 aa, Homo sapiens
  Table 1.2; ADAM2; ENSG00000104755; HLA -A*23:01,HLA-A*30:02,HLA-A*32:01,HLA-B*15:01,HLA-B*15:03, HLA-B*46:01,HLA-B*57:01
IMKPLDQDF

SEQ ID NO: 469 - protein, 9 aa, Homo sapiens
  Table 1.2; ADAM2; ENSG00000104755; HLA -A*02:04,HLA-A*02:07,HLA-A*03:01,HLA-A*03:02,HLA-A*23:01, HLA-A*24:02,HLA-A*29:02,HLA-A*30:02,HLA-A*31:01,HLA-A*32:01, HLA-B*15:01,HLA-B*15:03,HLA-B*37:01,HLA-B*38:01,HLA-B*46:01,
  HLA-B*55:01,HLA-B*57:01,HLA-B*58:01,HLA-C*01:02,HLA-C*02:02, HLA-C*04:01,HLA-C*07:04,HLA-C*12:03,HLA-C*14:02,HLA-C*16:01, HLA-C*16:02
IMNPEAIHF

SEQ ID NO: 470 - protein, 9 aa, Homo sapiens
  Table 1.2; ADAM2; ENSG00000104755; HLA -A*31:01
IMVKVNFQR

SEQ ID NO: 471 - protein, 9 aa, Homo sapiens
  Table 1.2; ADAM2; ENSG00000104755; HLA -B*54:01
IPFFIIFCV

SEQ ID NO: 472 - protein, 8 aa, Homo sapiens
  Table 1.2; ADAM2; ENSG00000104755; HLA -B*35:01
IPRATIIY

SEQ ID NO: 473 - protein, 9 aa, Homo sapiens
  Table 1.2; ADAM2; ENSG00000104755; HLA -B*07:02,HLA-B*54:01,HLA-B*55:01,HLA-B*56:01
IPRATIIYA

SEQ ID NO: 474 - protein, 9 aa, Homo sapiens
  Table 1.2; ADAM2; ENSG00000104755; HLA -C*05:01
ISDSGYTQC

SEQ ID NO: 475 - protein, 9 aa, Homo sapiens
  Table 1.2; ADAM2; ENSG00000104755; HLA -B*08:01
ISKQKSQCL

SEQ ID NO: 476 - protein, 8 aa, Homo sapiens
  Table 1.2; ADAM2; ENSG00000104755; HLA -B*08:01,HLA-B*46:01
ITIILSSL

SEQ ID NO: 477 - protein, 11 aa, Homo sapiens
  Table 1.2; ADAM2; ENSG00000104755; HLA -B*57:01
ITIILSSLELW

SEQ ID NO: 478 - protein, 10 aa, Homo sapiens
  Table 1.2; ADAM2; ENSG00000104755; HLA -A*25:01,HLA-B*57:01
ITVPEKIRSI

SEQ ID NO: 479 - protein, 8 aa, Homo sapiens
  Table 1.2; ADAM2; ENSG00000104755; HLA -A*03:01,HLA-A*03:02,HLA-A*11:01
ITYDDINK

SEQ ID NO: 480 - protein, 9 aa, Homo sapiens
  Table 1.2; ADAM2; ENSG00000104755; HLA -A*02:03,HLA-A*68:02
ITYDDINKC

SEQ ID NO: 481 - protein, 9 aa, Homo sapiens
  Table 1.2; ADAM2; ENSG00000104755; HLA -A*03:02
IVEKQLYNH

SEQ ID NO: 482 - protein, 8 aa, Homo sapiens
  Table 1.2; ADAM2; ENSG00000104755; HLA -B*15:01,HLA-B*46:01
IVIEGKPY

SEQ ID NO: 483 - protein, 10 aa, Homo sapiens
  Table 1.2; ADAM2; ENSG00000104755; HLA -A*02:01,HLA-A*02:03,HLA-A*02:04,HLA-A*02:07,HLA-A*23:01, HLA-A*25:01,HLA-A*26:01,HLA-A*32:01,HLA-A*68:02,HLA-B*13:02, HLA-B*49:01,HLA-B*51:01,HLA-B*55:01,HLA-B*56:01,HLA-C*02:02,
  HLA-C*12:03
IVIEGKPYTV

SEQ ID NO: 484 - protein, 9 aa, Homo sapiens
  Table 1.2; ADAM2; ENSG00000104755; HLA -A*23:01,HLA-A*24:02,HLA-A*29:02,HLA-A*32:01,HLA-B*58:01, HLA-C*04:01,HLA-C*14:02,HLA-C*16:02
IYANISGHL

SEQ ID NO: 485 - protein, 10 aa, Homo sapiens
  Table 1.2; ADAM2; ENSG00000104755; HLA -A*23:01,HLA-A*24:02
IYANISGHLC

SEQ ID NO: 486 - protein, 11 aa, Homo sapiens
  Table 1.2; ADAM2; ENSG00000104755; HLA -A*23:01,HLA-A*24:02
IYANISGHLCI

SEQ ID NO: 487 - protein, 9 aa, Homo sapiens
  Table 1.2; ADAM2; ENSG00000104755; HLA -A*24:02
IYHSKPMRW

SEQ ID NO: 488 - protein, 10 aa, Homo sapiens
  Table 1.2; ADAM2; ENSG00000104755; HLA -A*03:02,HLA-A*11:01,HLA-B*27:02
KADVSLYNEK

SEQ ID NO: 489 - protein, 10 aa, Homo sapiens
  Table 1.2; ADAM2; ENSG00000104755; HLA -A*32:01,HLA-B*37:01,HLA-B*40:02,HLA-B*44:02,HLA-B*44:03, HLA-C*16:01,HLA-C*16:02
KDIESRDLSF

SEQ ID NO: 490 - protein, 10 aa, Homo sapiens
  Table 1.2; ADAM2; ENSG00000104755; HLA -A*30:02,HLA-B*27:02,HLA-B*40:01,HLA-B*44:02,HLA-B*44:03, HLA-C*16:04
KEGIESQASY

SEQ ID NO: 491 - protein, 11 aa, Homo sapiens
  Table 1.2; ADAM2; ENSG00000104755; HLA -A*03:02
KEGIESQASYK

SEQ ID NO: 492 - protein, 10 aa, Homo sapiens
  Table 1.2; ADAM2; ENSG00000104755; HLA -A*30:01,HLA-B*40:01,HLA-B*40:02,HLA-B*49:01
KEVEFGPSEC

SEQ ID NO: 493 - protein, 11 aa, Homo sapiens
  Table 1.2; ADAM2; ENSG00000104755; HLA -A*30:01,HLA-A*30:02,HLA-B*15:01,HLA-B*15:03,HLA-B*18:01, HLA-B*27:02,HLA-B*44:02,HLA-B*44:03,HLA-C*16:04
KEVEFGPSECY

SEQ ID NO: 494 - protein, 11 aa, Homo sapiens
  Table 1.2; ADAM2; ENSG00000104755; HLA -B*27:05,HLA-B*40:01,HLA-B*58:01,HLA-C*01:02
KIATTGEANEL

SEQ ID NO: 495 - protein, 8 aa, Homo sapiens
  Table 1.2; ADAM2; ENSG00000104755; HLA -B*15:03
KKADVSLY

SEQ ID NO: 496 - protein, 11 aa, Homo sapiens
  Table 1.2; ADAM2; ENSG00000104755; HLA -A*03:02,HLA-A*32:01,HLA-B*15:01
KLQSVEPQQDF

SEQ ID NO: 497 - protein, 8 aa, Homo sapiens
  Table 1.2; ADAM2; ENSG00000104755; HLA -B*57:01
KNFLPHNF

SEQ ID NO: 498 - protein, 10 aa, Homo sapiens
  Table 1.2; ADAM2; ENSG00000104755; HLA -A*23:01,HLA-A*24:02,HLA-A*30:02,HLA-B*35:01,HLA-B*57:01
KPLDQDFQNF

SEQ ID NO: 499 - protein, 8 aa, Homo sapiens
  Table 1.2; ADAM2; ENSG00000104755; HLA -B*08:01,HLA-B*37:01,HLA-B*51:01,HLA-B*55:01
KPYTVNLM

SEQ ID NO: 500 - protein, 10 aa, Homo sapiens
  Table 1.2; ADAM2; ENSG00000104755; HLA -A*03:01
KPYTVNLMQK

SEQ ID NO: 501 - protein, 10 aa, Homo sapiens
  Table 1.2; ADAM2; ENSG00000104755; HLA -A*03:02
KQQAVCGNAK

SEQ ID NO: 502 - protein, 9 aa, Homo sapiens
  Table 1.2; ADAM2; ENSG00000104755; HLA -A*23:01,HLA-A*24:02,HLA-A*30:02,HLA-A*31:01,HLA-A*32:01, HLA-B*15:01,HLA-B*15:03,HLA-B*27:02,HLA-B*37:01,HLA-B*46:01, HLA-B*57:01,HLA-B*58:01,HLA-C*01:02,HLA-C*03:03,HLA-C*03:04,
  HLA-C*16:01,HLA-C*16:04
KSNYVGATF

SEQ ID NO: 503 - protein, 9 aa, Homo sapiens
  Table 1.2; ADAM2; ENSG00000104755; HLA -B*58:01
KSVVMVSTC

SEQ ID NO: 504 - protein, 8 aa, Homo sapiens
  Table 1.2; ADAM2; ENSG00000104755; HLA -A*31:01
KTSYLVLR

SEQ ID NO: 505 - protein, 8 aa, Homo sapiens
  Table 1.2; ADAM2; ENSG00000104755; HLA -A*23:01,HLA-A*24:02
KYIEMHVI

SEQ ID NO: 506 - protein, 9 aa, Homo sapiens
  Table 1.2; ADAM2; ENSG00000104755; HLA -A*24:02
KYIEMHVIV

SEQ ID NO: 507 - protein, 11 aa, Homo sapiens
  Table 1.2; ADAM2; ENSG00000104755; HLA -A*31:01
KYIEMHVIVEK

SEQ ID NO: 508 - protein, 9 aa, Homo sapiens
  Table 1.2; ADAM2; ENSG00000104755; HLA -C*02:02,HLA-C*12:03
LAVILAQLL

SEQ ID NO: 509 - protein, 8 aa, Homo sapiens
  Table 1.2; ADAM2; ENSG00000104755; HLA -B*37:01
LDQDFQNF

SEQ ID NO: 510 - protein, 8 aa, Homo sapiens
  Table 1.2; ADAM2; ENSG00000104755; HLA -A*30:01,HLA-B*18:01,HLA-B*37:01,HLA-B*40:01,HLA-B*49:01
LESLAVIL

SEQ ID NO: 511 - protein, 9 aa, Homo sapiens
  Table 1.2; ADAM2; ENSG00000104755; HLA -B*49:01
LESLAVILA

SEQ ID NO: 512 - protein, 9 aa, Homo sapiens
  Table 1.2; ADAM2; ENSG00000104755; HLA -B*18:01
LESSVGFEH

SEQ ID NO: 513 - protein, 10 aa, Homo sapiens
  Table 1.2; ADAM2; ENSG00000104755; HLA -B*49:01
LESSVGFEHV

SEQ ID NO: 514 - protein, 9 aa, Homo sapiens
  Table 1.2; ADAM2; ENSG00000104755; HLA -A*24:02,HLA-A*29:02
LFIPFFIIF

SEQ ID NO: 515 - protein, 8 aa, Homo sapiens
  Table 1.2; ADAM2; ENSG00000104755; HLA -B*08:01
LFMSKERM

SEQ ID NO: 516 - protein, 10 aa, Homo sapiens
  Table 1.2; ADAM2; ENSG00000104755; HLA -A*01:01,HLA-B*15:01
LLSLSMGITY

SEQ ID NO: 517 - protein, 8 aa, Homo sapiens
  Table 1.2; ADAM2; ENSG00000104755; HLA -B*35:01,HLA-B*54:01
LPHNFRVY

SEQ ID NO: 518 - protein, 10 aa, Homo sapiens
  Table 1.2; ADAM2; ENSG00000104755; HLA -A*29:02,HLA-B*35:01,HLA-B*54:01
LPHNFRVYSY

SEQ ID NO: 519 - protein, 8 aa, Homo sapiens
  Table 1.2; ADAM2; ENSG00000104755; HLA -B*54:01,HLA-B*56:01
LPVQITVP

SEQ ID NO: 520 - protein, 10 aa, Homo sapiens
  Table 1.2; ADAM2; ENSG00000104755; HLA -B*27:02
LPVQITVPEK

SEQ ID NO: 521 - protein, 11 aa, Homo sapiens
  Table 1.2; ADAM2; ENSG00000104755; HLA -B*51:01
LPVQITVPEKI

SEQ ID NO: 522 - protein, 8 aa, Homo sapiens
  Table 1.2; ADAM2; ENSG00000104755; HLA -A*30:02,HLA-A*32:01,HLA-B*15:01,HLA-B*15:03,HLA-B*18:01, HLA-B*39:01,HLA-B*46:01,HLA-C*14:02
LQFENVSY

SEQ ID NO: 523 - protein, 9 aa, Homo sapiens
  Table 1.2; ADAM2; ENSG00000104755; HLA -A*24:02,HLA-B*13:02
LQIPRATII

SEQ ID NO: 524 - protein, 10 aa, Homo sapiens
  Table 1.2; ADAM2; ENSG00000104755; HLA -B*15:01,HLA-B*15:03
LQIPRATIIY

SEQ ID NO: 525 - protein, 10 aa, Homo sapiens
  Table 1.2; ADAM2; ENSG00000104755; HLA -B*27:02
LRMDSNFDSL

SEQ ID NO: 526 - protein, 9 aa, Homo sapiens
  Table 1.2; ADAM2; ENSG00000104755; HLA -A*01:01
LSGLGGLRM

SEQ ID NO: 527 - protein, 9 aa, Homo sapiens
  Table 1.2; ADAM2; ENSG00000104755; HLA -A*01:01,HLA-A*03:01,HLA-A*29:02,HLA-A*30:02,HLA-A*32:01, HLA-B*15:01,HLA-B*15:03,HLA-B*35:01,HLA-B*46:01,HLA-B*57:01, HLA-B*58:01,HLA-C*02:02,HLA-C*07:01,HLA-C*12:03,HLA-C*16:01
LSLSMGITY

SEQ ID NO: 528 - protein, 9 aa, Homo sapiens
  Table 1.2; ADAM2; ENSG00000104755; HLA -A*23:01,HLA-A*24:02,HLA-A*25:01,HLA-A*26:01,HLA-A*29:02, HLA-A*30:02,HLA-A*31:01,HLA-A*32:01,HLA-A*33:03,HLA-A*68:02, HLA-B*15:01,HLA-B*35:01,HLA-B*46:01,HLA-B*57:01,HLA-B*58:01,
  HLA-C*02:02,HLA-C*12:03,HLA-C*16:04
LTNAIFVSF

SEQ ID NO: 529 - protein, 10 aa, Homo sapiens
  Table 1.2; ADAM2; ENSG00000104755; HLA -B*57:01
LVLRPHDVAF

SEQ ID NO: 530 - protein, 9 aa, Homo sapiens
  Table 1.2; ADAM2; ENSG00000104755; HLA -A*03:01,HLA-A*29:02,HLA-A*30:02,HLA-B*15:01
LVYREKSNY

SEQ ID NO: 531 - protein, 10 aa, Homo sapiens
  Table 1.2; ADAM2; ENSG00000104755; HLA -A*31:01,HLA-A*33:01,HLA-A*33:03
LYNEKDIESR

SEQ ID NO: 532 - protein, 8 aa, Homo sapiens
  Table 1.2; ADAM2; ENSG00000104755; HLA -B*37:01
MDSNFDSL

SEQ ID NO: 533 - protein, 10 aa, Homo sapiens
  Table 1.2; ADAM2; ENSG00000104755; HLA -A*11:01,HLA-B*27:02
MGITYDDINK

SEQ ID NO: 534 - protein, 9 aa, Homo sapiens
  Table 1.2; ADAM2; ENSG00000104755; HLA -B*35:03,HLA-B*54:01
MGSDTTVVA

SEQ ID NO: 535 - protein, 11 aa, Homo sapiens
  Table 1.2; ADAM2; ENSG00000104755; HLA -A*03:01,HLA-A*03:02,HLA-A*11:01,HLA-A*31:01,HLA-A*33:01, HLA-A*33:03,HLA-A*68:01,HLA-B*27:02,HLA-B*27:05,HLA-C*07:06
MGSDTTVVAQK

SEQ ID NO: 536 - protein, 9 aa, Homo sapiens
  Table 1.2; ADAM2; ENSG00000104755; HLA -B*38:01
MHVIVEKQL

SEQ ID NO: 537 - protein, 8 aa, Homo sapiens
  Table 1.2; ADAM2; ENSG00000104755; HLA -A*31:01,HLA-A*33:01,HLA-A*33:03
MVKVNFQR

SEQ ID NO: 538 - protein, 9 aa, Homo sapiens
  Table 1.2; ADAM2; ENSG00000104755; HLA -A*68:02
NAIFVSFNI

SEQ ID NO: 539 - protein, 10 aa, Homo sapiens
  Table 1.2; ADAM2; ENSG00000104755; HLA -A*30:01
NEKDIESRDL

SEQ ID NO: 540 - protein, 8 aa, Homo sapiens
  Table 1.2; ADAM2; ENSG00000104755; HLA -B*37:01
NELLHTFL

SEQ ID NO: 541 - protein, 10 aa, Homo sapiens
  Table 1.2; ADAM2; ENSG00000104755; HLA -B*44:02,HLA-B*44:03
NELLHTFLRW

SEQ ID NO: 542 - protein, 9 aa, Homo sapiens
  Table 1.2; ADAM2; ENSG00000104755; HLA -A*02:07,HLA-A*23:01,HLA-A*24:02,HLA-A*32:01,HLA-B*35:01, HLA-B*35:03,HLA-B*38:01,HLA-B*55:01,HLA-C*04:01,HLA-C*05:01, HLA-C*07:04
NFDSLPVQI

SEQ ID NO: 543 - protein, 10 aa, Homo sapiens
  Table 1.2; ADAM2; ENSG00000104755; HLA -A*29:02
NFLPHNFRVY

SEQ ID NO: 544 - protein, 9 aa, Homo sapiens
  Table 1.2; ADAM2; ENSG00000104755; HLA -C*14:02
NFPPVAIPA

SEQ ID NO: 545 - protein, 8 aa, Homo sapiens
  Table 1.2; ADAM2; ENSG00000104755; HLA -B*39:01
NHMGSDTT

SEQ ID NO: 546 - protein, 9 aa, Homo sapiens
  Table 1.2; ADAM2; ENSG00000104755; HLA -B*38:01,HLA-B*39:01
NHMGSDTTV

SEQ ID NO: 547 - protein, 10 aa, Homo sapiens
  Table 1.2; ADAM2; ENSG00000104755; HLA -B*38:01,HLA-B*39:01
NHMGSDTTVV

SEQ ID NO: 548 - protein, 11 aa, Homo sapiens
  Table 1.2; ADAM2; ENSG00000104755; HLA -B*38:01,HLA-B*39:01
NHMGSDTTVVA

SEQ ID NO: 549 - protein, 9 aa, Homo sapiens
  Table 1.2; ADAM2; ENSG00000104755; HLA -A*68:02,HLA-C*01:02
NITIILSSL

SEQ ID NO: 550 - protein, 8 aa, Homo sapiens
  Table 1.2; ADAM2; ENSG00000104755; HLA -B*08:01
NLMQKNFL

SEQ ID NO: 551 - protein, 9 aa, Homo sapiens
  Table 1.2; ADAM2; ENSG00000104755; HLA -A*24:02
NQPRLDPFF

SEQ ID NO: 552 - protein, 9 aa, Homo sapiens
  Table 1.2; ADAM2; ENSG00000104755; HLA -A*30:02,HLA-A*32:01,HLA-B*15:01,HLA-B*15:03,HLA-B*46:01
NQRCVSSSY

SEQ ID NO: 553 - protein, 9 aa, Homo sapiens
  Table 1.2; ADAM2; ENSG00000104755; HLA -B*35:03
NVSYGIEPL

SEQ ID NO: 554 - protein, 8 aa, Homo sapiens
  Table 1.2; ADAM2; ENSG00000104755; HLA -A*23:01,HLA-B*35:03,HLA-B*39:01,HLA-C*03:04,HLA-C*14:02
NYAGGVVL

SEQ ID NO: 555 - protein, 9 aa, Homo sapiens
  Table 1.2; ADAM2; ENSG00000104755; HLA -A*29:02,HLA-A*33:03
NYAGGVVLH

SEQ ID NO: 556 - protein, 11 aa, Homo sapiens
  Table 1.2; ADAM2; ENSG00000104755; HLA -A*31:01,HLA-A*33:01,HLA-A*33:03
NYAGGVVLHPR

SEQ ID NO: 557 - protein, 10 aa, Homo sapiens
  Table 1.2; ADAM2; ENSG00000104755; HLA -A*33:03
NYVGATFQGK

SEQ ID NO: 558 - protein, 9 aa, Homo sapiens
  Table 1.2; ADAM2; ENSG00000104755; HLA -B*49:01
PEAIHFSGV

SEQ ID NO: 559 - protein, 9 aa, Homo sapiens
  Table 1.2; ADAM2; ENSG00000104755; HLA -A*02:07
PLDQDFQNF

SEQ ID NO: 560 - protein, 8 aa, Homo sapiens
  Table 1.2; ADAM2; ENSG00000104755; HLA -A*30:02
PQQDFAKY

SEQ ID NO: 561 - protein, 9 aa, Homo sapiens
  Table 1.2; ADAM2; ENSG00000104755; HLA -A*03:02,HLA-A*11:01
PVQITVPEK

SEQ ID NO: 562 - protein, 8 aa, Homo sapiens
  Table 1.2; ADAM2; ENSG00000104755; HLA -B*08:01
QASYKIVI

SEQ ID NO: 563 - protein, 9 aa, Homo sapiens
  Table 1.2; ADAM2; ENSG00000104755; HLA -C*07:01
QCSGAVCIM

SEQ ID NO: 564 - protein, 9 aa, Homo sapiens
  Table 1.2; ADAM2; ENSG00000104755; HLA -A*30:01,HLA-B*37:01
QDFAKYIEM

SEQ ID NO: 565 - protein, 9 aa, Homo sapiens
  Table 1.2; ADAM2; ENSG00000104755; HLA -B*37:01,HLA-B*44:02,HLA-B*44:03
QDFQNFCHY

SEQ ID NO: 566 - protein, 9 aa, Homo sapiens
  Table 1.2; ADAM2; ENSG00000104755; HLA -A*03:01,HLA-A*03:02,HLA-A*11:01,HLA-A*31:01,HLA-A*33:01, HLA-B*27:02,HLA-B*27:05
QGYIEGYPK

SEQ ID NO: 567 - protein, 9 aa, Homo sapiens
  Table 1.2; ADAM2; ENSG00000104755; HLA -A*02:01,HLA-A*02:03,HLA-A*02:04,HLA-A*02:07,HLA-A*23:01, HLA-A*25:01,HLA-A*32:01,HLA-B*13:02,HLA-B*15:01,HLA-B*46:01
QLIGLTNAI

SEQ ID NO: 568 - protein, 9 aa, Homo sapiens
  Table 1.2; ADAM2; ENSG00000104755; HLA -B*13:02
QLLSLSMGI

SEQ ID NO: 569 - protein, 11 aa, Homo sapiens
  Table 1.2; ADAM2; ENSG00000104755; HLA -A*29:02,HLA-A*30:02
QLLSLSMGITY

SEQ ID NO: 570 - protein, 9 aa, Homo sapiens
  Table 1.2; ADAM2; ENSG00000104755; HLA -B*15:01,HLA-B*39:01,HLA-B*46:01,HLA-B*57:01,HLA-B*58:01
QSVEPQQDF

SEQ ID NO: 571 - protein, 11 aa, Homo sapiens
  Table 1.2; ADAM2; ENSG00000104755; HLA -A*11:01,HLA-B*27:02
QSVEPQQDFAK

SEQ ID NO: 572 - protein, 9 aa, Homo sapiens
  Table 1.2; ADAM2; ENSG00000104755; HLA -B*57:01,HLA-B*58:01
RATIIYANI

SEQ ID NO: 573 - protein, 9 aa, Homo sapiens
  Table 1.2; ADAM2; ENSG00000104755; HLA -B*40:02
REKSNYVGA

SEQ ID NO: 574 - protein, 11 aa, Homo sapiens
  Table 1.2; ADAM2; ENSG00000104755; HLA -B*40:02,HLA-B*44:02,HLA-B*57:01
REKSNYVGATF

SEQ ID NO: 575 - protein, 11 aa, Homo sapiens
  Table 1.2; ADAM2; ENSG00000104755; HLA -B*15:01
RGVLQFENVSY

SEQ ID NO: 576 - protein, 11 aa, Homo sapiens
  Table 1.2; ADAM2; ENSG00000104755; HLA -A*02:07
RLDPFFKQQAV

SEQ ID NO: 577 - protein, 11 aa, Homo sapiens
  Table 1.2; ADAM2; ENSG00000104755; HLA -A*02:07
RLPERRYIENI

SEQ ID NO: 578 - protein, 9 aa, Homo sapiens
  Table 1.2; ADAM2; ENSG00000104755; HLA -A*02:07
RMDSNFDSL

SEQ ID NO: 579 - protein, 11 aa, Homo sapiens
  Table 1.2; ADAM2; ENSG00000104755; HLA -A*29:02
RPHDVAFLLVY

SEQ ID NO: 580 - protein, 9 aa, Homo sapiens
  Table 1.2; ADAM2; ENSG00000104755; HLA -A*02:04
RVLFLLSGL

SEQ ID NO: 581 - protein, 10 aa, Homo sapiens
  Table 1.2; ADAM2; ENSG00000104755; HLA -A*02:03,HLA-A*03:01
RVYSYSGTGI

SEQ ID NO: 582 - protein, 10 aa, Homo sapiens
  Table 1.2; ADAM2; ENSG00000104755; HLA -A*31:01,HLA-B*57:01
RYIENIYHSK

SEQ ID NO: 583 - protein, 9 aa, Homo sapiens
  Table 1.2; ADAM2; ENSG00000104755; HLA -A*30:02,HLA-C*16:01
SASCPENHY

SEQ ID NO: 584 - protein, 9 aa, Homo sapiens
  Table 1.2; ADAM2; ENSG00000104755; HLA -B*37:01
SDHADSQKM

SEQ ID NO: 585 - protein, 10 aa, Homo sapiens
  Table 1.2; ADAM2; ENSG00000104755; HLA -B*44:02,HLA-B*44:03
SDHADSQKMW

SEQ ID NO: 586 - protein, 9 aa, Homo sapiens
  Table 1.2; ADAM2; ENSG00000104755; HLA -B*37:01
SDLWPGGSI

SEQ ID NO: 587 - protein, 8 aa, Homo sapiens
  Table 1.2; ADAM2; ENSG00000104755; HLA -B*37:01
SDTTVVAQ

SEQ ID NO: 588 - protein, 9 aa, Homo sapiens
  Table 1.2; ADAM2; ENSG00000104755; HLA -A*03:01,HLA-A*03:02,HLA-A*11:01,HLA-A*68:01,HLA-B*27:02, HLA-B*27:05,HLA-C*07:06,HLA-C*16:02
SDTTVVAQK

SEQ ID NO: 589 - protein, 9 aa, Homo sapiens
  Table 1.2; ADAM2; ENSG00000104755; HLA -A*24:02
SFEDFAHFI

SEQ ID NO: 590 - protein, 11 aa, Homo sapiens
  Table 1.2; ADAM2; ENSG00000104755; HLA -A*31:01
SFEDFAHFISK

SEQ ID NO: 591 - protein, 11 aa, Homo sapiens
  Table 1.2; ADAM2; ENSG00000104755; HLA -A*30:02
SGNCGISDSGY

SEQ ID NO: 592 - protein, 9 aa, Homo sapiens
  Table 1.2; ADAM2; ENSG00000104755; HLA -B*27:05,HLA-C*16:02
SGTGIMKPL

SEQ ID NO: 593 - protein, 9 aa, Homo sapiens
  Table 1.2; ADAM2; ENSG00000104755; HLA -B*39:01
SHLNSKTDV

SEQ ID NO: 594 - protein, 10 aa, Homo sapiens
  Table 1.2; ADAM2; ENSG00000104755; HLA -A*01:01,HLA-A*02:01,HLA-A*02:07
SIDSGNFPPV

SEQ ID NO: 595 - protein, 9 aa, Homo sapiens
  Table 1.2; ADAM2; ENSG00000104755; HLA -A*02:01,HLA-A*02:03,HLA-A*02:04,HLA-A*02:07,HLA-A*68:02, HLA-B*55:01
SLAVILAQL

SEQ ID NO: 596 - protein, 9 aa, Homo sapiens
  Table 1.2; ADAM2; ENSG00000104755; HLA -A*02:04,HLA-A*02:07,HLA-B*35:03
SLESLAVIL

SEQ ID NO: 597 - protein, 8 aa, Homo sapiens
  Table 1.2; ADAM2; ENSG00000104755; HLA -A*30:02,HLA-B*15:01,HLA-B*15:03,HLA-B*18:01,HLA-C*16:01
SLSMGITY

SEQ ID NO: 598 - protein, 11 aa, Homo sapiens
  Table 1.2; ADAM2; ENSG00000104755; HLA -A*31:01,HLA-A*68:01
SLYNEKDIESR

SEQ ID NO: 599 - protein, 10 aa, Homo sapiens
  Table 1.2; ADAM2; ENSG00000104755; HLA -A*68:02,HLA-B*13:02
SNFDSLPVQI

SEQ ID NO: 600 - protein, 8 aa, Homo sapiens
  Table 1.2; ADAM2; ENSG00000104755; HLA -A*23:01,HLA-A*25:01,HLA-A*32:01,HLA-B*15:01,HLA-B*15:03, HLA-B*18:01,HLA-B*37:01,HLA-B*46:01,HLA-C*01:02,HLA-C*03:03, HLA-C*03:04,HLA-C*04:01,HLA-C*14:02
SNYVGATF

SEQ ID NO: 601 - protein, 11 aa, Homo sapiens
  Table 1.2; ADAM2; ENSG00000104755; HLA -A*11:01
SNYVGATFQGK

SEQ ID NO: 602 - protein, 9 aa, Homo sapiens
  Table 1.2; ADAM2; ENSG00000104755; HLA -A*30:01,HLA-A*32:01,HLA-B*13:02,HLA-B*38:01,HLA-B*39:01, HLA-C*06:02,HLA-C*16:01
SQASYKIVI

SEQ ID NO: 603 - protein, 10 aa, Homo sapiens
  Table 1.2; ADAM2; ENSG00000104755; HLA -A*01:01,HLA-A*30:02
SSASCPENHY

SEQ ID NO: 604 - protein, 9 aa, Homo sapiens
  Table 1.2; ADAM2; ENSG00000104755; HLA -A*68:02,HLA-B*13:02
SSVGFEHVI

SEQ ID NO: 605 - protein, 10 aa, Homo sapiens
  Table 1.2; ADAM2; ENSG00000104755; HLA -A*03:02,HLA-A*11:01
SVEPQQDFAK

SEQ ID NO: 606 - protein, 11 aa, Homo sapiens
  Table 1.2; ADAM2; ENSG00000104755; HLA -A*01:01,HLA-A*25:01,HLA-A*26:01,HLA-A*29:02,HLA-A*30:02
SVEPQQDFAKY

SEQ ID NO: 607 - protein, 9 aa, Homo sapiens
  Table 1.2; ADAM2; ENSG00000104755; HLA -A*29:02
SVGFEHVIY

SEQ ID NO: 608 - protein, 11 aa, Homo sapiens
  Table 1.2; ADAM2; ENSG00000104755; HLA -A*68:02
SVGFEHVIYQV

SEQ ID NO: 609 - protein, 9 aa, Homo sapiens
  Table 1.2; ADAM2; ENSG00000104755; HLA -A*31:01,HLA-A*33:01,HLA-A*33:03
SYKIVIEGK

SEQ ID NO: 610 - protein, 9 aa, Homo sapiens
  Table 1.2; ADAM2; ENSG00000104755; HLA -A*23:01,HLA-C*04:01,HLA-C*14:02
SYLPPDCSV

SEQ ID NO: 611 - protein, 8 aa, Homo sapiens
  Table 1.2; ADAM2; ENSG00000104755; HLA -C*04:01,HLA-C*14:02
SYSGTGIM

SEQ ID NO: 612 - protein, 9 aa, Homo sapiens
  Table 1.2; ADAM2; ENSG00000104755; HLA -A*03:01,HLA-A*03:02,HLA-A*11:01,HLA-A*31:01,HLA-A*33:03, HLA-A*68:01
SYSGTGIMK

SEQ ID NO: 613 - protein, 10 aa, Homo sapiens
  Table 1.2; ADAM2; ENSG00000104755; HLA -C*06:02
SYSGTGIMKP

SEQ ID NO: 614 - protein, 9 aa, Homo sapiens
  Table 1.2; ADAM2; ENSG00000104755; HLA -C*16:01
TCTGLRGVL

SEQ ID NO: 615 - protein, 8 aa, Homo sapiens
  Table 1.2; ADAM2; ENSG00000104755; HLA -B*37:01,HLA-C*16:02
TDTFGKEV

SEQ ID NO: 616 - protein, 9 aa, Homo sapiens
  Table 1.2; ADAM2; ENSG00000104755; HLA -C*04:01
TDVSGNCGI

SEQ ID NO: 617 - protein, 9 aa, Homo sapiens
  Table 1.2; ADAM2; ENSG00000104755; HLA -A*29:02
TFLRWKTSY

SEQ ID NO: 618 - protein, 9 aa, Homo sapiens
  Table 1.2; ADAM2; ENSG00000104755; HLA -B*13:02
TISLESLAV

SEQ ID NO: 619 - protein, 8 aa, Homo sapiens
  Table 1.2; ADAM2; ENSG00000104755; HLA -B*18:01
TNAIFVSF

SEQ ID NO: 620 - protein, 8 aa, Homo sapiens
  Table 1.2; ADAM2; ENSG00000104755; HLA -C*01:02
TTGEANEL

SEQ ID NO: 621 - protein, 9 aa, Homo sapiens
  Table 1.2; ADAM2; ENSG00000104755; HLA -A*23:01,HLA-A*32:01,HLA-B*15:03,HLA-B*57:01,HLA-B*58:01, HLA-C*16:01
TTVVAQKVF

SEQ ID NO: 622 - protein, 11 aa, Homo sapiens
  Table 1.2; ADAM2; ENSG00000104755; HLA -A*68:02
TTVVAQKVFQL

SEQ ID NO: 623 - protein, 9 aa, Homo sapiens
  Table 1.2; ADAM2; ENSG00000104755; HLA -A*02:03,HLA-A*02:07,HLA-A*25:01,HLA-A*26:01,HLA-B*08:01, HLA-B*51:01
TVPEKIRSI

SEQ ID NO: 624 - protein, 8 aa, Homo sapiens
  Table 1.2; ADAM2; ENSG00000104755; HLA -A*31:01
VAFLLVYR

SEQ ID NO: 625 - protein, 8 aa, Homo sapiens
  Table 1.2; ADAM2; ENSG00000104755; HLA -B*37:01
VAQKVFQL

SEQ ID NO: 626 - protein, 9 aa, Homo sapiens
  Table 1.2; ADAM2; ENSG00000104755; HLA -A*23:01,HLA-A*24:02,HLA-B*13:02,HLA-B*51:01,HLA-B*58:01
VAQKVFQLI

SEQ ID NO: 627 - protein, 11 aa, Homo sapiens
  Table 1.2; ADAM2; ENSG00000104755; HLA -A*24:02
VCIMNPEAIHF

SEQ ID NO: 628 - protein, 8 aa, Homo sapiens
  Table 1.2; ADAM2; ENSG00000104755; HLA -B*49:01,HLA-C*12:03
VEFGPSEC

SEQ ID NO: 629 - protein, 9 aa, Homo sapiens
  Table 1.2; ADAM2; ENSG00000104755; HLA -A*26:01,HLA-A*29:02,HLA-A*30:01,HLA-A*30:02,HLA-A*32:01, HLA-B*15:01,HLA-B*15:03,HLA-B*18:01,HLA-B*27:02,HLA-B*35:01, HLA-B*37:01,HLA-B*39:01,HLA-B*40:01,HLA-B*40:02,HLA-B*44:02,
  HLA-B*44:03,HLA-B*46:01,HLA-B*49:01,HLA-C*02:02,HLA-C*07:04, HLA-C*16:04
VEFGPSECY

SEQ ID NO: 630 - protein, 9 aa, Homo sapiens
  Table 1.2; ADAM2; ENSG00000104755; HLA -A*30:01,HLA-B*40:02,HLA-B*44:02
VEKQLYNHM

SEQ ID NO: 631 - protein, 10 aa, Homo sapiens
  Table 1.2; ADAM2; ENSG00000104755; HLA -A*26:01,HLA-A*30:02,HLA-B*18:01,HLA-B*44:02,HLA-B*44:03
VEPQQDFAKY

SEQ ID NO: 632 - protein, 8 aa, Homo sapiens
  Table 1.2; ADAM2; ENSG00000104755; HLA -B*08:01,HLA-B*15:01,HLA-B*15:03,HLA-B*18:01,HLA-B*35:01, HLA-B*46:01,HLA-C*12:03
VGFEHVIY

SEQ ID NO: 633 - protein, 10 aa, Homo sapiens
  Table 1.2; ADAM2; ENSG00000104755; HLA -A*02:01,HLA-A*02:03,HLA-A*02:04,HLA-A*68:02
VGFEHVIYQV

SEQ ID NO: 634 - protein, 9 aa, Homo sapiens
  Table 1.2; ADAM2; ENSG00000104755; HLA -A*02:01,HLA-A*02:03,HLA-A*02:04,HLA-A*02:07,HLA-B*08:01, HLA-B*13:02,HLA-B*39:01,HLA-B*55:01,HLA-C*05:01,HLA-C*12:03, HLA-C*16:02
VIEGKPYTV

SEQ ID NO: 635 - protein, 9 aa, Homo sapiens
  Table 1.2; ADAM2; ENSG00000104755; HLA -A*02:01,HLA-A*02:04,HLA-A*02:07,HLA-A*03:01,HLA-A*23:01, HLA-A*24:02
VILAQLLSL

SEQ ID NO: 636 - protein, 8 aa, Homo sapiens
  Table 1.2; ADAM2; ENSG00000104755; HLA -A*32:01,HLA-B*08:01,HLA-B*15:01,HLA-B*15:03,HLA-B*39:01
VIVEKQLY

SEQ ID NO: 637 - protein, 8 aa, Homo sapiens
  Table 1.2; ADAM2; ENSG00000104755; HLA -A*03:01
VIYQVKHK

SEQ ID NO: 638 - protein, 9 aa, Homo sapiens
  Table 1.2; ADAM2; ENSG00000104755; HLA -A*03:01
VIYQVKHKK

SEQ ID NO: 639 - protein, 9 aa, Homo sapiens
  Table 1.2; ADAM2; ENSG00000104755; HLA -B*15:03
VKIFSNCSF

SEQ ID NO: 640 - protein, 11 aa, Homo sapiens
  Table 1.2; ADAM2; ENSG00000104755; HLA -A*02:03,HLA-A*02:04
VLFLLSGLGGL

SEQ ID NO: 641 - protein, 9 aa, Homo sapiens
  Table 1.2; ADAM2; ENSG00000104755; HLA -A*02:01,HLA-A*02:03,HLA-A*02:04,HLA-A*02:07,HLA-A*03:01, HLA-A*32:01,HLA-B*07:02,HLA-B*08:01,HLA-B*37:01,HLA-B*40:02, HLA-B*46:01,HLA-C*01:02
VLHPRTISL

SEQ ID NO: 642 - protein, 9 aa, Homo sapiens
  Table 1.2; ADAM2; ENSG00000104755; HLA -A*02:01,HLA-A*02:03,HLA-A*02:04,HLA-A*02:07,HLA-A*68:02, HLA-B*13:02,HLA-B*55:01,HLA-C*02:02
VLIAIMVKV

SEQ ID NO: 643 - protein, 9 aa, Homo sapiens
  Table 1.2; ADAM2; ENSG00000104755; HLA -A*01:01,HLA-A*03:02,HLA-A*29:02,HLA-A*30:02,HLA-A*32:01, HLA-B*15:01,HLA-B*15:03,HLA-B*39:01,HLA-B*46:01,HLA-B*58:01, HLA-C*07:04,HLA-C*14:02
VLQFENVSY

SEQ ID NO: 644 - protein, 9 aa, Homo sapiens
  Table 1.2; ADAM2; ENSG00000104755; HLA -A*23:01,HLA-A*32:01,HLA-B*07:02,HLA-B*08:01,HLA-B*15:01, HLA-B*15:03,HLA-B*37:01,HLA-B*46:01,HLA-B*57:01,HLA-C*07:04
VLRPHDVAF

SEQ ID NO: 645 - protein, 10 aa, Homo sapiens
  Table 1.2; ADAM2; ENSG00000104755; HLA -A*02:03,HLA-A*02:04,HLA-A*03:01
VLRPHDVAFL

SEQ ID NO: 646 - protein, 11 aa, Homo sapiens
  Table 1.2; ADAM2; ENSG00000104755; HLA -A*02:04
VLRPHDVAFLL

SEQ ID NO: 647 - protein, 9 aa, Homo sapiens
  Table 1.2; ADAM2; ENSG00000104755; HLA -A*02:03,HLA-B*13:02,HLA-B*15:03,HLA-B*46:01,HLA-B*55:01
VMVSTCTGL

SEQ ID NO: 648 - protein, 8 aa, Homo sapiens
  Table 1.2; ADAM2; ENSG00000104755; HLA -B*51:01
VPEKIRSI

SEQ ID NO: 649 - protein, 9 aa, Homo sapiens
  Table 1.2; ADAM2; ENSG00000104755; HLA -B*51:01
VPEKIRSII

SEQ ID NO: 650 - protein, 9 aa, Homo sapiens
  Table 1.2; ADAM2; ENSG00000104755; HLA -A*02:03,HLA-A*23:01,HLA-A*24:02,HLA-A*30:01,HLA-A*32:01, HLA-B*13:02,HLA-B*38:01,HLA-B*49:01,HLA-C*06:02
VQITVPEKI

SEQ ID NO: 651 - protein, 9 aa, Homo sapiens
  Table 1.2; ADAM2; ENSG00000104755; HLA -A*02:03,HLA-B*13:02,HLA-B*27:05
VQTGHPCGL

SEQ ID NO: 652 - protein, 9 aa, Homo sapiens
  Table 1.2; ADAM2; ENSG00000104755; HLA -A*23:01,HLA-A*68:02,HLA-C*12:03
VSFNITIIL

SEQ ID NO: 653 - protein, 8 aa, Homo sapiens
  Table 1.2; ADAM2; ENSG00000104755; HLA -A*01:01
VSSSYLGY

SEQ ID NO: 654 - protein, 9 aa, Homo sapiens
  Table 1.2; ADAM2; ENSG00000104755; HLA -A*02:01,HLA-A*02:03,HLA-A*02:04,HLA-A*02:07,HLA-A*68:02, HLA-B*08:01
VVAQKVFQL

SEQ ID NO: 655 - protein, 10 aa, Homo sapiens
  Table 1.2; ADAM2; ENSG00000104755; HLA -B*08:01
VVLHPRTISL

SEQ ID NO: 656 - protein, 9 aa, Homo sapiens
  Table 1.2; ADAM2; ENSG00000104755; HLA -A*24:02
VYREKSNYV

SEQ ID NO: 657 - protein, 9 aa, Homo sapiens
  Table 1.2; ADAM2; ENSG00000104755; HLA -A*23:01,HLA-A*24:02,HLA-C*04:01,HLA-C*14:02
VYSYSGTGI

SEQ ID NO: 658 - protein, 10 aa, Homo sapiens
  Table 1.2; ADAM2; ENSG00000104755; HLA -C*14:02
VYSYSGTGIM

SEQ ID NO: 659 - protein, 8 aa, Homo sapiens
  Table 1.2; ADAM2; ENSG00000104755; HLA -C*07:01,HLA-C*07:04,HLA-C*12:03
YAGGVVLH

SEQ ID NO: 660 - protein, 10 aa, Homo sapiens
  Table 1.2; ADAM2; ENSG00000104755; HLA -A*31:01,HLA-A*33:01,HLA-A*33:03,HLA-A*68:01
YAGGVVLHPR

SEQ ID NO: 661 - protein, 8 aa, Homo sapiens
  Table 1.2; ADAM2; ENSG00000104755; HLA -B*08:01,HLA-B*40:02,HLA-B*46:01,HLA-B*51:01,HLA-C*01:02, HLA-C*03:03,HLA-C*03:04,HLA-C*07:04,HLA-C*16:01,HLA-C*16:02
YANISGHL

SEQ ID NO: 662 - protein, 9 aa, Homo sapiens
  Table 1.2; ADAM2; ENSG00000104755; HLA -C*03:04
YANISGHLC

SEQ ID NO: 663 - protein, 10 aa, Homo sapiens
  Table 1.2; ADAM2; ENSG00000104755; HLA -B*51:01
YANISGHLCI

SEQ ID NO: 664 - protein, 10 aa, Homo sapiens
  Table 1.2; ADAM2; ENSG00000104755; HLA -A*68:02,HLA-B*54:01
YGIEPLESSV

SEQ ID NO: 665 - protein, 9 aa, Homo sapiens
  Table 1.2; ADAM2; ENSG00000104755; HLA -A*01:01,HLA-A*02:01,HLA-A*02:03,HLA-A*02:04,HLA-A*02:07, HLA-B*13:02,HLA-B*40:02,HLA-B*51:01,HLA-B*55:01,HLA-C*03:03, HLA-C*03:04,HLA-C*05:01,HLA-C*12:03,HLA-C*16:02
YIEGYPKSV

SEQ ID NO: 666 - protein, 9 aa, Homo sapiens
  Table 1.2; ADAM2; ENSG00000104755; HLA -A*01:01,HLA-A*02:07,HLA-A*03:02,HLA-A*11:01,HLA-A*68:01, HLA-B*27:02
YIENIYHSK

SEQ ID NO: 667 - protein, 10 aa, Homo sapiens
  Table 1.2; ADAM2; ENSG00000104755; HLA -B*15:03
YKIVIEGKPY

SEQ ID NO: 668 - protein, 9 aa, Homo sapiens
  Table 1.2; ADAM2; ENSG00000104755; HLA -A*02:03,HLA-A*02:04
YLVLRPHDV

SEQ ID NO: 669 - protein, 8 aa, Homo sapiens
  Table 1.2; ADAM2; ENSG00000104755; HLA -B*08:01,HLA-B*51:01,HLA-B*54:01,HLA-B*56:01
YPKSVVMV

SEQ ID NO: 670 - protein, 9 aa, Homo sapiens
  Table 1.2; ADAM2; ENSG00000104755; HLA -B*54:01
YPKSVVMVS

SEQ ID NO: 671 - protein, 10 aa, Homo sapiens
  Table 1.2; ADAM2; ENSG00000104755; HLA -B*54:01,HLA-B*56:01
YPKSVVMVST

SEQ ID NO: 672 - protein, 8 aa, Homo sapiens
  Table 1.2; ADAM2; ENSG00000104755; HLA -A*01:01,HLA-A*30:02,HLA-B*15:01,HLA-B*15:03,HLA-B*18:01, HLA-C*07:01,HLA-C*07:04
YQGYIEGY

SEQ ID NO: 673 - protein, 10 aa, Homo sapiens
  Table 1.2; ADAM2; ENSG00000104755; HLA -B*27:02
YQGYIEGYPK

SEQ ID NO: 674 - protein, 8 aa, Homo sapiens
  Table 1.2; ADAM2; ENSG00000104755; HLA -A*01:01,HLA-A*03:02,HLA-A*11:01
YSGTGIMK

SEQ ID NO: 675 - protein, 8 aa, Homo sapiens
  Table 1.2; ADAM2; ENSG00000104755; HLA -B*13:02,HLA-B*51:01,HLA-C*03:03,HLA-C*03:04
YSYSGTGI

SEQ ID NO: 676 - protein, 9 aa, Homo sapiens
  Table 1.2; ADAM2; ENSG00000104755; HLA -A*01:01,HLA-B*39:01,HLA-B*40:01,HLA-B*40:02,HLA-B*46:01, HLA-C*02:02,HLA-C*03:03,HLA-C*03:04,HLA-C*12:03
YSYSGTGIM

SEQ ID NO: 677 - protein, 10 aa, Homo sapiens
  Table 1.2; ADAM2; ENSG00000104755; HLA -A*01:01,HLA-A*03:01,HLA-A*03:02,HLA-A*11:01,HLA-A*68:01, HLA-B*27:02,HLA-C*07:06
YSYSGTGIMK

SEQ ID NO: 678 - protein, 9 aa, Homo sapiens
  Table 1.2; ADAM2; ENSG00000104755; HLA -A*01:01,HLA-A*03:01,HLA-A*03:02,HLA-A*11:01,HLA-A*68:01
YVGATFQGK

SEQ ID NO: 679 - protein, 10 aa, Homo sapiens
  Table 1.2; ADAM2; ENSG00000104755; HLA -A*26:01
YVGATFQGKM

SEQ ID NO: 680 - protein, 9 aa, Homo sapiens
  Table 1.2; ADAM2; ENSG00000104755; HLA -A*68:02,HLA-B*13:02
YVGKFLLQI

SEQ ID NO: 681 - protein, 10 aa, Homo sapiens
  Table 1.2; ADAM2; ENSG00000104755; HLA -A*02:03
YVQTGHPCGL

SEQ ID NO: 682 - protein, 8 aa, Homo sapiens
  Table 1.2; ADAM7; ENSG00000069206; HLA -A*11:01,HLA-B*37:01
ADDTVYRR

SEQ ID NO: 683 - protein, 8 aa, Homo sapiens
  Table 1.2; ADAM7; ENSG00000069206; HLA -B*38:01
AHQLGHNL

SEQ ID NO: 684 - protein, 9 aa, Homo sapiens
  Table 1.2; ADAM7; ENSG00000069206; HLA -A*01:01,HLA-A*30:02,HLA-B*15:01
AIESHDICY

SEQ ID NO: 685 - protein, 10 aa, Homo sapiens
  Table 1.2; ADAM7; ENSG00000069206; HLA -A*03:01,HLA-A*03:02,HLA-A*11:01
AIESHDICYK

SEQ ID NO: 686 - protein, 9 aa, Homo sapiens
  Table 1.2; ADAM7; ENSG00000069206; HLA -B*07:02,HLA-B*35:01,HLA-B*35:03,HLA-B*55:01
APVACEETL

SEQ ID NO: 687 - protein, 9 aa, Homo sapiens
  Table 1.2; ADAM7; ENSG00000069206; HLA -B*58:01
ASISTCNGL

SEQ ID NO: 688 - protein, 10 aa, Homo sapiens
  Table 1.2; ADAM7; ENSG00000069206; HLA -B*49:01
CEETLHVTNI

SEQ ID NO: 689 - protein, 11 aa, Homo sapiens
  Table 1.2; ADAM7; ENSG00000069206; HLA -A*29:02,HLA-A*30:02
CFYQGSIVHEY

SEQ ID NO: 690 - protein, 9 aa, Homo sapiens
  Table 1.2; ADAM7; ENSG00000069206; HLA -C*01:02
CLPYYSTSI

SEQ ID NO: 691 - protein, 9 aa, Homo sapiens
  Table 1.2; ADAM7; ENSG00000069206; HLA -A*29:02
CMLNIPFPY

SEQ ID NO: 692 - protein, 8 aa, Homo sapiens
  Table 1.2; ADAM7; ENSG00000069206; HLA -B*08:01
CPSGKCVM

SEQ ID NO: 693 - protein, 9 aa, Homo sapiens
  Table 1.2; ADAM7; ENSG00000069206; HLA -B*13:02
CQIKKAGSI

SEQ ID NO: 694 - protein, 9 aa, Homo sapiens
  Table 1.2; ADAM7; ENSG00000069206; HLA -A*01:01,HLA-A*30:02,HLA-A*32:01,HLA-B*15:01,HLA-B*58:01, HLA-C*16:01,HLA-C*16:02
CSQNQYHQY

SEQ ID NO: 695 - protein, 9 aa, Homo sapiens
  Table 1.2; ADAM7; ENSG00000069206; HLA -A*01:01,HLA-A*11:01
CTELNFTRK

SEQ ID NO: 696 - protein, 8 aa, Homo sapiens
  Table 1.2; ADAM7; ENSG00000069206; HLA -A*33:01
DAHTCVLK

SEQ ID NO: 697 - protein, 8 aa, Homo sapiens
  Table 1.2; ADAM7; ENSG00000069206; HLA -B*18:01
DDDILKTY

SEQ ID NO: 698 - protein, 9 aa, Homo sapiens
  Table 1.2; ADAM7; ENSG00000069206; HLA -B*38:01,HLA-B*49:01
DEAIESHDI

SEQ ID NO: 699 - protein, 11 aa, Homo sapiens
  Table 1.2; ADAM7; ENSG00000069206; HLA -B*18:01
DEAIESHDICY

SEQ ID NO: 700 - protein, 8 aa, Homo sapiens
  Table 1.2; ADAM7; ENSG00000069206; HLA -B*18:01
DECDFPEM

SEQ ID NO: 701 - protein, 8 aa, Homo sapiens
  Table 1.2; ADAM7; ENSG00000069206; HLA -B*18:01,HLA-B*37:01
DEGEHLVF

SEQ ID NO: 702 - protein, 10 aa, Homo sapiens
  Table 1.2; ADAM7; ENSG00000069206; HLA -B*18:01,HLA-B*44:02,HLA-B*44:03
DEGEHLVFKY

SEQ ID NO: 703 - protein, 8 aa, Homo sapiens
  Table 1.2; ADAM7; ENSG00000069206; HLA -B*18:01
DEKYVELF

SEQ ID NO: 704 - protein, 8 aa, Homo sapiens
  Table 1.2; ADAM7; ENSG00000069206; HLA -B*35:01,HLA-B*35:03,HLA-C*04:01
DFDHVVLL

SEQ ID NO: 705 - protein, 9 aa, Homo sapiens
  Table 1.2; ADAM7; ENSG00000069206; HLA -A*25:01,HLA-A*33:01,HLA-A*68:01,HLA-B*18:01,HLA-B*44:03, HLA-B*51:01,HLA-C*04:01
DGSIPALKF

SEQ ID NO: 706 - protein, 9 aa, Homo sapiens
  Table 1.2; ADAM7; ENSG00000069206; HLA -B*38:01
DLLPDTNII

SEQ ID NO: 707 - protein, 11 aa, Homo sapiens
  Table 1.2; ADAM7; ENSG00000069206; HLA -A*33:01
DLLPDTNIIAN

SEQ ID NO: 708 - protein, 8 aa, Homo sapiens
  Table 1.2; ADAM7; ENSG00000069206; HLA -B*51:01
DPQKNATV

SEQ ID NO: 709 - protein, 8 aa, Homo sapiens
  Table 1.2; ADAM7; ENSG00000069206; HLA -B*18:01
DQFRVNGF

SEQ ID NO: 710 - protein, 9 aa, Homo sapiens
  Table 1.2; ADAM7; ENSG00000069206; HLA -A*01:01,HLA-B*35:03,HLA-B*38:01,HLA-B*39:01,HLA-C*05:01
DSDGSIPAL

SEQ ID NO: 711 - protein, 10 aa, Homo sapiens
  Table 1.2; ADAM7; ENSG00000069206; HLA -A*01:01,HLA-A*68:01
DSDGSIPALK

SEQ ID NO: 712 - protein, 11 aa, Homo sapiens
  Table 1.2; ADAM7; ENSG00000069206; HLA -A*01:01,HLA-A*33:01
DSDGSIPALKF

SEQ ID NO: 713 - protein, 9 aa, Homo sapiens
  Table 1.2; ADAM7; ENSG00000069206; HLA -A*01:01,HLA-A*26:01,HLA-A*68:01,HLA-A*68:02,HLA-B*39:01, HLA-B*54:01
DSTDIGLVA

SEQ ID NO: 714 - protein, 8 aa, Homo sapiens
  Table 1.2; ADAM7; ENSG00000069206; HLA -A*33:01,HLA-A*33:03,HLA-A*68:01,HLA-C*07:06
DTNIIANR

SEQ ID NO: 715 - protein, 9 aa, Homo sapiens
  Table 1.2; ADAM7; ENSG00000069206; HLA -A*26:01,HLA-A*33:01,HLA-A*33:03,HLA-A*68:01
DTNIIANRM

SEQ ID NO: 716 - protein, 9 aa, Homo sapiens
  Table 1.2; ADAM7; ENSG00000069206; HLA -A*68:02,HLA-B*51:01
EAFTRHPQI

SEQ ID NO: 717 - protein, 8 aa, Homo sapiens
  Table 1.2; ADAM7; ENSG00000069206; HLA -B*51:01
EAIESHDI

SEQ ID NO: 718 - protein, 10 aa, Homo sapiens
  Table 1.2; ADAM7; ENSG00000069206; HLA -A*01:01,HLA-A*25:01,HLA-A*26:01,HLA-A*29:02,HLA-A*33:01, HLA-A*33:03,HLA-A*68:01,HLA-B*15:01,HLA-B*35:01,HLA-B*35:03, HLA-B*44:03,HLA-B*55:01,HLA-B*58:01,HLA-C*07:06
EAIESHDICY

SEQ ID NO: 719 - protein, 11 aa, Homo sapiens
  Table 1.2; ADAM7; ENSG00000069206; HLA -A*33:01,HLA-A*68:01
EAIESHDICYK

SEQ ID NO: 720 - protein, 8 aa, Homo sapiens
  Table 1.2; ADAM7; ENSG00000069206; HLA -B*37:01
EDSKIKGI

SEQ ID NO: 721 - protein, 9 aa, Homo sapiens
  Table 1.2; ADAM7; ENSG00000069206; HLA -B*44:02,HLA-B*44:03,HLA-B*49:01
EEDSKIKGI

SEQ ID NO: 722 - protein, 8 aa, Homo sapiens
  Table 1.2; ADAM7; ENSG00000069206; HLA -B*18:01,HLA-B*49:01
EEELLYEI

SEQ ID NO: 723 - protein, 10 aa, Homo sapiens
  Table 1.2; ADAM7; ENSG00000069206; HLA -B*40:01,HLA-B*44:02,HLA-B*44:03
EEELLYEIKL

SEQ ID NO: 724 - protein, 8 aa, Homo sapiens
  Table 1.2; ADAM7; ENSG00000069206; HLA -B*18:01
EEGQAPVA

SEQ ID NO: 725 - protein, 9 aa, Homo sapiens
  Table 1.2; ADAM7; ENSG00000069206; HLA -A*30:01
EEGQAPVAC

SEQ ID NO: 726 - protein, 9 aa, Homo sapiens
  Table 1.2; ADAM7; ENSG00000069206; HLA -A*30:01,HLA-B*18:01,HLA-B*40:01,HLA-B*40:02,HLA-B*44:02, HLA-B*44:03
EELLYEIKL

SEQ ID NO: 727 - protein, 9 aa, Homo sapiens
  Table 1.2; ADAM7; ENSG00000069206; HLA -A*30:01,HLA-B*18:01,HLA-B*37:01,HLA-B*40:01,HLA-B*40:02, HLA-B*44:02,HLA-B*44:03,HLA-B*49:01
EETLHVTNI

SEQ ID NO: 728 - protein, 11 aa, Homo sapiens
  Table 1.2; ADAM7; ENSG00000069206; HLA -B*44:02
EETLHVTNITI

SEQ ID NO: 729 - protein, 11 aa, Homo sapiens
  Table 1.2; ADAM7; ENSG00000069206; HLA -A*23:01,HLA-A*24:02
EFLGSNYSETF

SEQ ID NO: 730 - protein, 9 aa, Homo sapiens
  Table 1.2; ADAM7; ENSG00000069206; HLA -A*01:01,HLA-A*29:02,HLA-A*33:01
EGEHLVFKY

SEQ ID NO: 731 - protein, 9 aa, Homo sapiens
  Table 1.2; ADAM7; ENSG00000069206; HLA -A*33:01,HLA-A*33:03
EGQQLVRPK

SEQ ID NO: 732 - protein, 11 aa, Homo sapiens
  Table 1.2; ADAM7; ENSG00000069206; HLA -A*26:01
ELFDDEAIESH

SEQ ID NO: 733 - protein, 11 aa, Homo sapiens
  Table 1.2; ADAM7; ENSG00000069206; HLA -A*01:01,HLA-A*26:01
ELFIVADDTVY

SEQ ID NO: 734 - protein, 10 aa, Homo sapiens
  Table 1.2; ADAM7; ENSG00000069206; HLA -A*33:01,HLA-A*33:03
ELLYEIKLNR

SEQ ID NO: 735 - protein, 10 aa, Homo sapiens
  Table 1.2; ADAM7; ENSG00000069206; HLA -A*23:01,HLA-A*25:01,HLA-A*26:01,HLA-A*68:02
ELYSNIETTL

SEQ ID NO: 736 - protein, 9 aa, Homo sapiens
  Table 1.2; ADAM7; ENSG00000069206; HLA -B*35:01,HLA-B*35:03,HLA-B*55:01
EPILPEIHF

SEQ ID NO: 737 - protein, 9 aa, Homo sapiens
  Table 1.2; ADAM7; ENSG00000069206; HLA -A*26:01
ESHDICYKM

SEQ ID NO: 738 - protein, 11 aa, Homo sapiens
  Table 1.2; ADAM7; ENSG00000069206; HLA -A*25:01,HLA-A*26:01
ETFYSMKGEAF

SEQ ID NO: 739 - protein, 10 aa, Homo sapiens
  Table 1.2; ADAM7; ENSG00000069206; HLA -A*25:01,HLA-A*26:01
ETLGVENKGY

SEQ ID NO: 740 - protein, 11 aa, Homo sapiens
  Table 1.2; ADAM7; ENSG00000069206; HLA -A*26:01,HLA-A*33:01
ETLGVENKGYF

SEQ ID NO: 741 - protein, 10 aa, Homo sapiens
  Table 1.2; ADAM7; ENSG00000069206; HLA -A*68:02
ETLHVTNITI

SEQ ID NO: 742 - protein, 9 aa, Homo sapiens
  Table 1.2; ADAM7; ENSG00000069206; HLA -A*25:01
ETTLLRFSF

SEQ ID NO: 743 - protein, 9 aa, Homo sapiens
  Table 1.2; ADAM7; ENSG00000069206; HLA -A*29:02
FFRINDQRY

SEQ ID NO: 744 - protein, 10 aa, Homo sapiens
  Table 1.2; ADAM7; ENSG00000069206; HLA -A*02:01,HLA-A*02:04,HLA-A*02:07,HLA-A*30:01,HLA-B*27:05, HLA-B*38:01,HLA-B*40:01,HLA-B*40:02,HLA-C*01:02,HLA-C*07:04
FILGVEGQQL

SEQ ID NO: 745 - protein, 11 aa, Homo sapiens
  Table 1.2; ADAM7; ENSG00000069206; HLA -A*68:02
FILGVEGQQLV

SEQ ID NO: 746 - protein, 9 aa, Homo sapiens
  Table 1.2; ADAM7; ENSG00000069206; HLA -A*01:01,HLA-A*26:01,HLA-B*15:01,HLA-B*15:03,HLA-B*35:01, HLA-B*35:03,HLA-B*46:01,HLA-B*55:01,HLA-C*02:02,HLA-C*03:03, HLA-C*07:04
FIVADDTVY

SEQ ID NO: 747 - protein, 10 aa, Homo sapiens
  Table 1.2; ADAM7; ENSG00000069206; HLA -A*68:01,HLA-A*68:02,HLA-B*27:02
FIVADDTVYR

SEQ ID NO: 748 - protein, 11 aa, Homo sapiens
  Table 1.2; ADAM7; ENSG00000069206; HLA -A*01:01
FLGSNYSETFY

SEQ ID NO: 749 - protein, 9 aa, Homo sapiens
  Table 1.2; ADAM7; ENSG00000069206; HLA -A*02:01,HLA-A*02:03,HLA-A*02:04,HLA-B*13:02
FLYHDSTDI

SEQ ID NO: 750 - protein, 11 aa, Homo sapiens
  Table 1.2; ADAM7; ENSG00000069206; HLA -A*02:01,HLA-A*02:03,HLA-A*02:04,HLA-A*02:07
FLYHDSTDIGL

SEQ ID NO: 751 - protein, 9 aa, Homo sapiens
  Table 1.2; ADAM7; ENSG00000069206; HLA -B*15:03,HLA-B*35:01,HLA-B*55:01,HLA-C*07:01
FPCKNSEGY

SEQ ID NO: 752 - protein, 10 aa, Homo sapiens
  Table 1.2; ADAM7; ENSG00000069206; HLA -B*54:01
FPYNFHDFQF

SEQ ID NO: 753 - protein, 9 aa, Homo sapiens
  Table 1.2; ADAM7; ENSG00000069206; HLA -A*30:02,HLA-B*46:01
FSKCSQNQY

SEQ ID NO: 754 - protein, 9 aa, Homo sapiens
  Table 1.2; ADAM7; ENSG00000069206; HLA -A*02:07,HLA-A*25:01
FVNMIYKTL

SEQ ID NO: 755 - protein, 10 aa, Homo sapiens
  Table 1.2; ADAM7; ENSG00000069206; HLA -A*23:01,HLA-A*24:02,HLA-A*26:01,HLA-A*29:02,HLA-A*30:02, HLA-A*33:01,HLA-A*33:03,HLA-B*46:01,HLA-C*02:02,HLA-C*14:02
FYQGSIVHEY

SEQ ID NO: 756 - protein, 9 aa, Homo sapiens
  Table 1.2; ADAM7; ENSG00000069206; HLA -A*23:01,HLA-A*24:02,HLA-C*14:02
FYSMKGEAF

SEQ ID NO: 757 - protein, 9 aa, Homo sapiens
  Table 1.2; ADAM7; ENSG00000069206; HLA -A*30:01,HLA-B*40:02,HLA-B*49:01
GECLNMEKV

SEQ ID NO: 758 - protein, 10 aa, Homo sapiens
  Table 1.2; ADAM7; ENSG00000069206; HLA -B*44:02,HLA-B*44:03
GECLNMEKVY

SEQ ID NO: 759 - protein, 8 aa, Homo sapiens
  Table 1.2; ADAM7; ENSG00000069206; HLA -A*30:01,HLA-B*37:01,HLA-B*40:01,HLA-B*40:02,HLA-B*49:01
GEDKTYHL

SEQ ID NO: 760 - protein, 8 aa, Homo sapiens
  Table 1.2; ADAM7; ENSG00000069206; HLA -B*18:01,HLA-B*27:02,HLA-B*37:01,HLA-B*44:02,HLA-B*44:03
GEHLVFKY

SEQ ID NO: 761 - protein, 10 aa, Homo sapiens
  Table 1.2; ADAM7; ENSG00000069206; HLA -A*29:02
GFFRINDQRY

SEQ ID NO: 762 - protein, 10 aa, Homo sapiens
  Table 1.2; ADAM7; ENSG00000069206; HLA -A*03:01,HLA-A*03:02,HLA-A*11:01,HLA-A*26:01,HLA-A*68:01, HLA-B*27:02,HLA-B*27:05,HLA-C*07:06
GIADPNQSAK

SEQ ID NO: 763 - protein, 9 aa, Homo sapiens
  Table 1.2; ADAM7; ENSG00000069206; HLA -B*13:02
GIGVLILLV

SEQ ID NO: 764 - protein, 9 aa, Homo sapiens
  Table 1.2; ADAM7; ENSG00000069206; HLA -A*02:01,HLA-A*02:03,HLA-B*13:02
GMVNFVNMI

SEQ ID NO: 765 - protein, 10 aa, Homo sapiens
  Table 1.2; ADAM7; ENSG00000069206; HLA -A*29:02,HLA-A*30:02
GMVNFVNMIY

SEQ ID NO: 766 - protein, 11 aa, Homo sapiens
  Table 1.2; ADAM7; ENSG00000069206; HLA -A*03:01
GMVNFVNMIYK

SEQ ID NO: 767 - protein, 9 aa, Homo sapiens
  Table 1.2; ADAM7; ENSG00000069206; HLA -B*27:05
GQAPVACEE

SEQ ID NO: 768 - protein, 11 aa, Homo sapiens
  Table 1.2; ADAM7; ENSG00000069206; HLA -B*13:02,HLA-B*27:05,HLA-B*38:01
GQAPVACEETL

SEQ ID NO: 769 - protein, 8 aa, Homo sapiens
  Table 1.2; ADAM7; ENSG00000069206; HLA -A*03:02
GQQLVRPK

SEQ ID NO: 770 - protein, 8 aa, Homo sapiens
  Table 1.2; ADAM7; ENSG00000069206; HLA -B*57:01,HLA-B*58:01
GSIPALKF

SEQ ID NO: 771 - protein, 10 aa, Homo sapiens
  Table 1.2; ADAM7; ENSG00000069206; HLA -A*11:01,HLA-A*31:01
GSIPALKFSK

SEQ ID NO: 772 - protein, 9 aa, Homo sapiens
  Table 1.2; ADAM7; ENSG00000069206; HLA -A*01:01,HLA-A*29:02,HLA-A*30:02,HLA-B*15:01,HLA-B*58:01
GSNYSETFY

SEQ ID NO: 773 - protein, 9 aa, Homo sapiens
  Table 1.2; ADAM7; ENSG00000069206; HLA -A*68:01,HLA-C*07:06
GVEGQQLVR

SEQ ID NO: 774 - protein, 11 aa, Homo sapiens
  Table 1.2; ADAM7; ENSG00000069206; HLA -A*03:01,HLA-A*03:02,HLA-A*11:01
GVEGQQLVRPK

SEQ ID NO: 775 - protein, 9 aa, Homo sapiens
  Table 1.2; ADAM7; ENSG00000069206; HLA -A*29:02,HLA-A*30:02
GVLILLVRY

SEQ ID NO: 776 - protein, 9 aa, Homo sapiens
  Table 1.2; ADAM7; ENSG00000069206; HLA -A*23:01,HLA-A*24:02,HLA-B*13:02
GYFGDEQQI

SEQ ID NO: 777 - protein, 9 aa, Homo sapiens
  Table 1.2; ADAM7; ENSG00000069206; HLA -B*18:01,HLA-B*44:02,HLA-B*44:03
HDDDILKTY

SEQ ID NO: 778 - protein, 8 aa, Homo sapiens
  Table 1.2; ADAM7; ENSG00000069206; HLA -B*37:01
HDSTDIGL

SEQ ID NO: 779 - protein, 8 aa, Homo sapiens
  Table 1.2; ADAM7; ENSG00000069206; HLA -A*01:01,HLA-B*18:01,HLA-B*44:02,HLA-B*44:03
HEDKIELY

SEQ ID NO: 780 - protein, 9 aa, Homo sapiens
  Table 1.2; ADAM7; ENSG00000069206; HLA -A*23:01,HLA-A*30:01,HLA-B*13:02,HLA-B*15:03,HLA-B*18:01, HLA-B*37:01,HLA-B*38:01,HLA-B*39:01,HLA-B*40:01,HLA-B*40:02, HLA-B*44:02,HLA-B*44:03,HLA-B*49:01,HLA-B*51:01,HLA-C*02:02,
  HLA-C*12:03,HLA-C*16:04
HEYDSAASI

SEQ ID NO: 781 - protein, 11 aa, Homo sapiens
  Table 1.2; ADAM7; ENSG00000069206; HLA -A*30:01,HLA-B*18:01,HLA-B*40:02,HLA-B*49:01
HEYDSAASIST

SEQ ID NO: 782 - protein, 9 aa, Homo sapiens
  Table 1.2; ADAM7; ENSG00000069206; HLA -A*33:03
HFLNKPASK

SEQ ID NO: 783 - protein, 9 aa, Homo sapiens
  Table 1.2; ADAM7; ENSG00000069206; HLA -A*02:03
HLKDPQKNA

SEQ ID NO: 784 - protein, 11 aa, Homo sapiens
  Table 1.2; ADAM7; ENSG00000069206; HLA -A*02:03
HLKDPQKNATV

SEQ ID NO: 785 - protein, 9 aa, Homo sapiens
  Table 1.2; ADAM7; ENSG00000069206; HLA -B*35:01,HLA-B*35:03
HPQIMDHCF

SEQ ID NO: 786 - protein, 9 aa, Homo sapiens
  Table 1.2; ADAM7; ENSG00000069206; HLA -B*13:02,HLA-B*15:03,HLA-B*37:01
HQLGHNLGM

SEQ ID NO: 787 - protein, 9 aa, Homo sapiens
  Table 1.2; ADAM7; ENSG00000069206; HLA -A*11:01,HLA-A*68:01
HTHDDDILK

SEQ ID NO: 788 - protein, 11 aa, Homo sapiens
  Table 1.2; ADAM7; ENSG00000069206; HLA -A*01:01,HLA-A*25:01,HLA-A*26:01,HLA-A*30:02,HLA-B*57:01
HTHDDDILKTY

SEQ ID NO: 789 - protein, 9 aa, Homo sapiens
  Table 1.2; ADAM7; ENSG00000069206; HLA -A*68:02,HLA-B*13:02
HVTLVGIEI

SEQ ID NO: 790 - protein, 10 aa, Homo sapiens
  Table 1.2; ADAM7; ENSG00000069206; HLA -B*57:01
HVTLVGIEIW

SEQ ID NO: 791 - protein, 9 aa, Homo sapiens
  Table 1.2; ADAM7; ENSG00000069206; HLA -A*02:03,HLA-A*26:01,HLA-A*68:01,HLA-A*68:02,HLA-B*13:02
HVTNITILV

SEQ ID NO: 792 - protein, 10 aa, Homo sapiens
  Table 1.2; ADAM7; ENSG00000069206; HLA -A*68:02,HLA-B*13:02
HVTNITILVV

SEQ ID NO: 793 - protein, 11 aa, Homo sapiens
  Table 1.2; ADAM7; ENSG00000069206; HLA -A*68:02
HVTNITILVVV

SEQ ID NO: 794 - protein, 9 aa, Homo sapiens
  Table 1.2; ADAM7; ENSG00000069206; HLA -B*57:01
HVVLLSGKW

SEQ ID NO: 795 - protein, 8 aa, Homo sapiens
  Table 1.2; ADAM7; ENSG00000069206; HLA -C*05:01
IADPNQSA

SEQ ID NO: 796 - protein, 9 aa, Homo sapiens
  Table 1.2; ADAM7; ENSG00000069206; HLA -A*01:01,HLA-A*03:01,HLA-A*03:02,HLA-A*11:01,HLA-A*33:01, HLA-A*68:01,HLA-B*27:02,HLA-B*27:05,HLA-B*35:01,HLA-B*39:01, HLA-B*51:01,HLA-B*57:01,HLA-B*58:01,HLA-C*03:03,HLA-C*03:04,
  HLA-C*05:01,HLA-C*07:06,HLA-C*16:02
IADPNQSAK

SEQ ID NO: 797 - protein, 9 aa, Homo sapiens
  Table 1.2; ADAM7; ENSG00000069206; HLA -A*23:01,HLA-A*24:02,HLA-B*58:01,HLA-C*03:04,HLA-C*16:02
IANRMAHQL

SEQ ID NO: 798 - protein, 11 aa, Homo sapiens
  Table 1.2; ADAM7; ENSG00000069206; HLA -A*30:01,HLA-B*40:01,HLA-B*49:01
IELYSNIETTL

SEQ ID NO: 799 - protein, 8 aa, Homo sapiens
  Table 1.2; ADAM7; ENSG00000069206; HLA -B*18:01
IESHDICY

SEQ ID NO: 800 - protein, 8 aa, Homo sapiens
  Table 1.2; ADAM7; ENSG00000069206; HLA -B*18:01,HLA-B*37:01
IETTLLRF

SEQ ID NO: 801 - protein, 10 aa, Homo sapiens
  Table 1.2; ADAM7; ENSG00000069206; HLA -B*44:02
IETTLLRFSF

SEQ ID NO: 802 - protein, 8 aa, Homo sapiens
  Table 1.2; ADAM7; ENSG00000069206; HLA -A*23:01
IFLMILLI

SEQ ID NO: 803 - protein, 8 aa, Homo sapiens
  Table 1.2; ADAM7; ENSG00000069206; HLA -B*51:01
IGVLILLV

SEQ ID NO: 804 - protein, 9 aa, Homo sapiens
  Table 1.2; ADAM7; ENSG00000069206; HLA -A*02:07,HLA-B*38:01,HLA-B*39:01,HLA-C*05:01
IHDEKYVEL

SEQ ID NO: 805 - protein, 10 aa, Homo sapiens
  Table 1.2; ADAM7; ENSG00000069206; HLA -B*38:01
IHDEKYVELF

SEQ ID NO: 806 - protein, 9 aa, Homo sapiens
  Table 1.2; ADAM7; ENSG00000069206; HLA -A*02:03,HLA-A*02:04,HLA-B*46:01
ILKTYEEEL

SEQ ID NO: 807 - protein, 11 aa, Homo sapiens
  Table 1.2; ADAM7; ENSG00000069206; HLA -A*29:02
ILKTYEEELLY

SEQ ID NO: 808 - protein, 8 aa, Homo sapiens
  Table 1.2; ADAM7; ENSG00000069206; HLA -A*02:04,HLA-A*02:07
ILPEIHFL

SEQ ID NO: 809 - protein, 10 aa, Homo sapiens
  Table 1.2; ADAM7; ENSG00000069206; HLA -A*02:07,HLA-A*03:01
ILPEIHFLNK

SEQ ID NO: 810 - protein, 9 aa, Homo sapiens
  Table 1.2; ADAM7; ENSG00000069206; HLA -A*02:07
ILVVVLVLV

SEQ ID NO: 811 - protein, 10 aa, Homo sapiens
  Table 1.2; ADAM7; ENSG00000069206; HLA -B*35:01,HLA-B*54:01
IPFPYNFHDF

SEQ ID NO: 812 - protein, 8 aa, Homo sapiens
  Table 1.2; ADAM7; ENSG00000069206; HLA -B*07:02,HLA-B*08:01
IPQVKEKF

SEQ ID NO: 813 - protein, 9 aa, Homo sapiens
  Table 1.2; ADAM7; ENSG00000069206; HLA -A*23:01,HLA-B*15:03,HLA-B*46:01,HLA-B*51:01,HLA-B*58:01, HLA-C*02:02,HLA-C*03:03,HLA-C*03:04
ISYPGGMCL

SEQ ID NO: 814 - protein, 9 aa, Homo sapiens
  Table 1.2; ADAM7; ENSG00000069206; HLA -A*68:02
ITILVVVLV

SEQ ID NO: 815 - protein, 8 aa, Homo sapiens
  Table 1.2; ADAM7; ENSG00000069206; HLA -B*15:01,HLA-B*15:03,HLA-B*39:01
IVADDTVY

SEQ ID NO: 816 - protein, 9 aa, Homo sapiens
  Table 1.2; ADAM7; ENSG00000069206; HLA -A*03:01,HLA-A*03:02,HLA-A*11:01,HLA-A*26:01,HLA-A*31:01, HLA-A*33:01,HLA-A*33:03,HLA-A*68:01,HLA-A*68:02,HLA-B*27:02, HLA-B*27:05,HLA-B*57:01,HLA-C*07:06
IVADDTVYR

SEQ ID NO: 817 - protein, 10 aa, Homo sapiens
  Table 1.2; ADAM7; ENSG00000069206; HLA -A*03:02,HLA-A*11:01,HLA-A*33:03,HLA-A*68:01,HLA-A*68:02, HLA-C*07:06
IVADDTVYRR

SEQ ID NO: 818 - protein, 9 aa, Homo sapiens
  Table 1.2; ADAM7; ENSG00000069206; HLA -B*54:01
IVHEYDSAA

SEQ ID NO: 819 - protein, 8 aa, Homo sapiens
  Table 1.2; ADAM7; ENSG00000069206; HLA -C*01:02,HLA-C*04:01,HLA-C*14:02
IYCTGGEL

SEQ ID NO: 820 - protein, 11 aa, Homo sapiens
  Table 1.2; ADAM7; ENSG00000069206; HLA -A*24:02
IYCTGGELSSL

SEQ ID NO: 821 - protein, 9 aa, Homo sapiens
  Table 1.2; ADAM7; ENSG00000069206; HLA -A*23:01,HLA-A*24:02
IYKTLNIHV

SEQ ID NO: 822 - protein, 11 aa, Homo sapiens
  Table 1.2; ADAM7; ENSG00000069206; HLA -A*23:01,HLA-A*24:02
IYKTLNIHVTL

SEQ ID NO: 823 - protein, 10 aa, Homo sapiens
  Table 1.2; ADAM7; ENSG00000069206; HLA -A*30:02
KCSQNQYHQY

SEQ ID NO: 824 - protein, 8 aa, Homo sapiens
  Table 1.2; ADAM7; ENSG00000069206; HLA -B*37:01
KDFDHVVL

SEQ ID NO: 825 - protein, 9 aa, Homo sapiens
  Table 1.2; ADAM7; ENSG00000069206; HLA -A*02:01,HLA-A*02:04,HLA-A*02:07,HLA-A*30:01,HLA-A*68:02, HLA-B*37:01,HLA-B*40:01,HLA-B*40:02
KDFDHVVLL

SEQ ID NO: 826 - protein, 9 aa, Homo sapiens
  Table 1.2; ADAM7; ENSG00000069206; HLA -B*37:01
KDLLPDTNI

SEQ ID NO: 827 - protein, 9 aa, Homo sapiens
  Table 1.2; ADAM7; ENSG00000069206; HLA -B*37:01
KDPQKNATV

SEQ ID NO: 828 - protein, 9 aa, Homo sapiens
  Table 1.2; ADAM7; ENSG00000069206; HLA -B*37:01
KDQFRVNGF

SEQ ID NO: 829 - protein, 8 aa, Homo sapiens
  Table 1.2; ADAM7; ENSG00000069206; HLA -B*37:01,HLA-B*40:02
KDYKPTCM

SEQ ID NO: 830 - protein, 11 aa, Homo sapiens
  Table 1.2; ADAM7; ENSG00000069206; HLA -A*23:01
KFILGVEGQQL

SEQ ID NO: 831 - protein, 10 aa, Homo sapiens
  Table 1.2; ADAM7; ENSG00000069206; HLA -B*13:02,HLA-B*40:02,HLA-B*58:01,HLA-C*06:02
KGYFGDEQQI

SEQ ID NO: 832 - protein, 11 aa, Homo sapiens
  Table 1.2; ADAM7; ENSG00000069206; HLA -A*31:01
KGYFGDEQQIR

SEQ ID NO: 833 - protein, 9 aa, Homo sapiens
  Table 1.2; ADAM7; ENSG00000069206; HLA -A*03:01,HLA-B*08:01
KLNRKTLVL

SEQ ID NO: 834 - protein, 11 aa, Homo sapiens
  Table 1.2; ADAM7; ENSG00000069206; HLA -A*30:01,HLA-B*15:01,HLA-B*15:03,HLA-B*27:05,HLA-B*38:01, HLA-B*39:01,HLA-B*40:01,HLA-B*58:01
KQVQSPPTETL

SEQ ID NO: 835 - protein, 9 aa, Homo sapiens
  Table 1.2; ADAM7; ENSG00000069206; HLA -A*02:01,HLA-A*02:04,HLA-A*02:07,HLA-A*23:01,HLA-A*24:02, HLA-A*31:01,HLA-A*32:01,HLA-A*68:02,HLA-B*57:01,HLA-B*58:01, HLA-C*12:03
KTLNIHVTL

SEQ ID NO: 836 - protein, 9 aa, Homo sapiens
  Table 1.2; ADAM7; ENSG00000069206; HLA -A*31:01,HLA-B*57:01
KTLVLHLLR

SEQ ID NO: 837 - protein, 9 aa, Homo sapiens
  Table 1.2; ADAM7; ENSG00000069206; HLA -A*01:01,HLA-A*03:01,HLA-A*11:01,HLA-A*29:02,HLA-A*30:02, HLA-B*57:01,HLA-B*58:01
KTYEEELLY

SEQ ID NO: 838 - protein, 11 aa, Homo sapiens
  Table 1.2; ADAM7; ENSG00000069206; HLA -A*02:01
KTYEEELLYEI

SEQ ID NO: 839 - protein, 10 aa, Homo sapiens
  Table 1.2; ADAM7; ENSG00000069206; HLA -A*03:01,HLA-A*03:02,HLA-A*11:01
KTYHLKDPQK

SEQ ID NO: 840 - protein, 11 aa, Homo sapiens
  Table 1.2; ADAM7; ENSG00000069206; HLA -A*23:01,HLA-A*24:02,HLA-A*29:02
KYSDEGEHLVF

SEQ ID NO: 841 - protein, 10 aa, Homo sapiens
  Table 1.2; ADAM7; ENSG00000069206; HLA -A*29:02
LFIVADDTVY

SEQ ID NO: 842 - protein, 8 aa, Homo sapiens
  Table 1.2; ADAM7; ENSG00000069206; HLA -B*08:01
LGMQHDEF

SEQ ID NO: 843 - protein, 10 aa, Homo sapiens
  Table 1.2; ADAM7; ENSG00000069206; HLA -B*27:02
LGSNYSETFY

SEQ ID NO: 844 - protein, 8 aa, Homo sapiens
  Table 1.2; ADAM7; ENSG00000069206; HLA -C*03:03,HLA-C*03:04
LGVEGQQL

SEQ ID NO: 845 - protein, 9 aa, Homo sapiens
  Table 1.2; ADAM7; ENSG00000069206; HLA -A*24:02
LIPQVKEKF

SEQ ID NO: 846 - protein, 10 aa, Homo sapiens
  Table 1.2; ADAM7; ENSG00000069206; HLA -A*02:03,HLA-A*02:04
LLGEDKTYHL

SEQ ID NO: 847 - protein, 9 aa, Homo sapiens
  Table 1.2; ADAM7; ENSG00000069206; HLA -A*03:01,HLA-A*03:02
LLIPQVKEK

SEQ ID NO: 848 - protein, 9 aa, Homo sapiens
  Table 1.2; ADAM7; ENSG00000069206; HLA -A*02:07
LLPDTNIIA

SEQ ID NO: 849 - protein, 10 aa, Homo sapiens
  Table 1.2; ADAM7; ENSG00000069206; HLA -A*02:07
LLPDTNIIAN

SEQ ID NO: 850 - protein, 11 aa, Homo sapiens
  Table 1.2; ADAM7; ENSG00000069206; HLA -A*02:07,HLA-A*03:01,HLA-A*31:01,HLA-A*33:03,HLA-A*68:01, HLA-A*68:02
LLPDTNIIANR

SEQ ID NO: 851 - protein, 9 aa, Homo sapiens
  Table 1.2; ADAM7; ENSG00000069206; HLA -A*03:01,HLA-A*29:02,HLA-A*31:01
LLYEIKLNR

SEQ ID NO: 852 - protein, 10 aa, Homo sapiens
  Table 1.2; ADAM7; ENSG00000069206; HLA -A*03:01
LLYEIKLNRK

SEQ ID NO: 853 - protein, 9 aa, Homo sapiens
  Table 1.2; ADAM7; ENSG00000069206; HLA -A*02:01,HLA-A*02:03,HLA-A*02:04,HLA-A*02:07
LMILLIPQV

SEQ ID NO: 854 - protein, 9 aa, Homo sapiens
  Table 1.2; ADAM7; ENSG00000069206; HLA -A*23:01,HLA-A*24:02
LNIPFPYNF

SEQ ID NO: 855 - protein, 8 aa, Homo sapiens
  Table 1.2; ADAM7; ENSG00000069206; HLA -B*55:01
LPDTNIIA

SEQ ID NO: 856 - protein, 9 aa, Homo sapiens
  Table 1.2; ADAM7; ENSG00000069206; HLA -B*55:01
LPDTNIIAN

SEQ ID NO: 857 - protein, 10 aa, Homo sapiens
  Table 1.2; ADAM7; ENSG00000069206; HLA -A*33:03,HLA-A*68:01,HLA-B*27:02,HLA-C*07:06
LPDTNIIANR

SEQ ID NO: 858 - protein, 11 aa, Homo sapiens
  Table 1.2; ADAM7; ENSG00000069206; HLA -B*35:01,HLA-B*35:03,HLA-B*55:01
LPDTNIIANRM

SEQ ID NO: 859 - protein, 9 aa, Homo sapiens
  Table 1.2; ADAM7; ENSG00000069206; HLA -B*51:01
LPGCIFLMI

SEQ ID NO: 860 - protein, 8 aa, Homo sapiens
  Table 1.2; ADAM7; ENSG00000069206; HLA -B*35:03,HLA-B*51:01,HLA-B*54:01,HLA-B*56:01
LPYYSTSI

SEQ ID NO: 861 - protein, 9 aa, Homo sapiens
  Table 1.2; ADAM7; ENSG00000069206; HLA -B*35:03,HLA-B*51:01,HLA-B*54:01
LPYYSTSII

SEQ ID NO: 862 - protein, 10 aa, Homo sapiens
  Table 1.2; ADAM7; ENSG00000069206; HLA -B*51:01
LPYYSTSIIK

SEQ ID NO: 863 - protein, 9 aa, Homo sapiens
  Table 1.2; ADAM7; ENSG00000069206; HLA -A*29:02,HLA-A*30:02,HLA-B*27:02,HLA-B*27:05,HLA-C*02:02, HLA-C*16:04
LRVPYGANY

SEQ ID NO: 864 - protein, 11 aa, Homo sapiens
  Table 1.2; ADAM7; ENSG00000069206; HLA -A*01:01
LSSLLGEDKTY

SEQ ID NO: 865 - protein, 9 aa, Homo sapiens
  Table 1.2; ADAM7; ENSG00000069206; HLA -A*25:01
LVIVGIGVL

SEQ ID NO: 866 - protein, 10 aa, Homo sapiens
  Table 1.2; ADAM7; ENSG00000069206; HLA -A*23:01,HLA-A*24:02,HLA-A*29:02,HLA-A*30:02,HLA-B*46:01, HLA-C*07:01,HLA-C*14:02
LYSHVQGISY

SEQ ID NO: 867 - protein, 9 aa, Homo sapiens
  Table 1.2; ADAM7; ENSG00000069206; HLA -A*23:01,HLA-A*24:02,HLA-A*32:01,HLA-B*35:03,HLA-B*38:01, HLA-B*58:01,HLA-C*14:02
LYSNIETTL

SEQ ID NO: 868 - protein, 10 aa, Homo sapiens
  Table 1.2; ADAM7; ENSG00000069206; HLA -A*23:01,HLA-A*24:02
LYSNIETTLL

SEQ ID NO: 869 - protein, 9 aa, Homo sapiens
  Table 1.2; ADAM7; ENSG00000069206; HLA -A*68:02,HLA-B*08:01,HLA-B*35:01,HLA-B*35:03,HLA-B*38:01, HLA-C*02:02,HLA-C*16:02
MAHQLGHNL

SEQ ID NO: 870 - protein, 10 aa, Homo sapiens
  Table 1.2; ADAM7; ENSG00000069206; HLA -A*25:01,HLA-A*30:01,HLA-B*35:03,HLA-B*38:01
MDSDGSIPAL

SEQ ID NO: 871 - protein, 8 aa, Homo sapiens
  Table 1.2; ADAM7; ENSG00000069206; HLA -A*02:04,HLA-B*51:01,HLA-B*54:01
MILLIPQV

SEQ ID NO: 872 - protein, 8 aa, Homo sapiens
  Table 1.2; ADAM7; ENSG00000069206; HLA -B*51:01
MIYKTLNI

SEQ ID NO: 873 - protein, 10 aa, Homo sapiens
  Table 1.2; ADAM7; ENSG00000069206; HLA -A*68:02
MIYKTLNIHV

SEQ ID NO: 874 - protein, 9 aa, Homo sapiens
  Table 1.2; ADAM7; ENSG00000069206; HLA -A*01:01,HLA-A*29:02,HLA-A*30:02
MVNFVNMIY

SEQ ID NO: 875 - protein, 10 aa, Homo sapiens
  Table 1.2; ADAM7; ENSG00000069206; HLA -A*03:01,HLA-A*03:02,HLA-A*11:01
MVNFVNMIYK

SEQ ID NO: 876 - protein, 8 aa, Homo sapiens
  Table 1.2; ADAM7; ENSG00000069206; HLA -B*18:01
NENPVDGH

SEQ ID NO: 877 - protein, 10 aa, Homo sapiens
  Table 1.2; ADAM7; ENSG00000069206; HLA -A*30:01,HLA-B*18:01,HLA-B*27:02,HLA-B*27:05,HLA-B*37:01, HLA-B*38:01,HLA-B*39:01,HLA-B*40:01,HLA-B*40:02,HLA-B*44:02, HLA-B*44:03,HLA-C*16:04
NENPVDGHGL

SEQ ID NO: 878 - protein, 9 aa, Homo sapiens
  Table 1.2; ADAM7; ENSG00000069206; HLA -B*49:01
NESEEDSKI

SEQ ID NO: 879 - protein, 10 aa, Homo sapiens
  Table 1.2; ADAM7; ENSG00000069206; HLA -A*23:01
NFVNMIYKTL

SEQ ID NO: 880 - protein, 8 aa, Homo sapiens
  Table 1.2; ADAM7; ENSG00000069206; HLA -B*08:01
NGHPHNKL

SEQ ID NO: 881 - protein, 9 aa, Homo sapiens
  Table 1.2; ADAM7; ENSG00000069206; HLA -A*01:01
NIETTLLRF

SEQ ID NO: 882 - protein, 10 aa, Homo sapiens
  Table 1.2; ADAM7; ENSG00000069206; HLA -A*29:02,HLA-A*30:02
NLRVPYGANY

SEQ ID NO: 883 - protein, 9 aa, Homo sapiens
  Table 1.2; ADAM7; ENSG00000069206; HLA -A*24:02
NMIYKTLNI

SEQ ID NO: 884 - protein, 8 aa, Homo sapiens
  Table 1.2; ADAM7; ENSG00000069206; HLA -B*07:02,HLA-B*08:01,HLA-B*35:03
NPVDGHGL

SEQ ID NO: 885 - protein, 10 aa, Homo sapiens
  Table 1.2; ADAM7; ENSG00000069206; HLA -B*35:03,HLA-B*54:01,HLA-B*56:01
NPVDGHGLQC

SEQ ID NO: 886 - protein, 9 aa, Homo sapiens
  Table 1.2; ADAM7; ENSG00000069206; HLA -A*26:01,HLA-A*29:02,HLA-A*30:02,HLA-A*32:01
NTKGNKFGY

SEQ ID NO: 887 - protein, 9 aa, Homo sapiens
  Table 1.2; ADAM7; ENSG00000069206; HLA -A*23:01,HLA-A*24:02
NYSCTELNF

SEQ ID NO: 888 - protein, 9 aa, Homo sapiens
  Table 1.2; ADAM7; ENSG00000069206; HLA -A*23:01,HLA-A*24:02,HLA-A*29:02,HLA-B*35:01,HLA-B*35:03, HLA-C*04:01,HLA-C*14:02
NYSETFYSM

SEQ ID NO: 889 - protein, 9 aa, Homo sapiens
  Table 1.2; ADAM7; ENSG00000069206; HLA -A*33:01,HLA-A*33:03,HLA-A*68:01,HLA-B*27:02
PDTNIIANR

SEQ ID NO: 890 - protein, 9 aa, Homo sapiens
  Table 1.2; ADAM7; ENSG00000069206; HLA -A*24:02
PFPYNFHDF

SEQ ID NO: 891 - protein, 9 aa, Homo sapiens
  Table 1.2; ADAM7; ENSG00000069206; HLA -A*02:04
PILPEIHFL

SEQ ID NO: 892 - protein, 11 aa, Homo sapiens
  Table 1.2; ADAM7; ENSG00000069206; HLA -B*27:02
PPTETLGVENK

SEQ ID NO: 893 - protein, 9 aa, Homo sapiens
  Table 1.2; ADAM7; ENSG00000069206; HLA -A*24:02
PYNFHDFQF

SEQ ID NO: 894 - protein, 8 aa, Homo sapiens
  Table 1.2; ADAM7; ENSG00000069206; HLA -A*30:02,HLA-B*15:01,HLA-B*15:03,HLA-B*18:01,HLA-B*35:01, HLA-B*37:01,HLA-C*16:01,HLA-C*16:02
QGSIVHEY

SEQ ID NO: 895 - protein, 8 aa, Homo sapiens
  Table 1.2; ADAM7; ENSG00000069206; HLA -B*08:01
QIKKAGSI

SEQ ID NO: 896 - protein, 9 aa, Homo sapiens
  Table 1.2; ADAM7; ENSG00000069206; HLA -B*38:01
QQIRTEPIL

SEQ ID NO: 897 - protein, 9 aa, Homo sapiens
  Table 1.2; ADAM7; ENSG00000069206; HLA -B*27:02,HLA-B*27:05
QRYLIEPVK

SEQ ID NO: 898 - protein, 10 aa, Homo sapiens
  Table 1.2; ADAM7; ENSG00000069206; HLA -B*27:02,HLA-B*27:05,HLA-B*44:02,HLA-C*16:04
QRYLIEPVKY

SEQ ID NO: 899 - protein, 8 aa, Homo sapiens
  Table 1.2; ADAM7; ENSG00000069206; HLA -B*08:01
QVKEKFIL

SEQ ID NO: 900 - protein, 10 aa, Homo sapiens
  Table 1.2; ADAM7; ENSG00000069206; HLA -A*25:01,HLA-B*07:02,HLA-B*38:01,HLA-B*39:01
QVQSPPTETL

SEQ ID NO: 901 - protein, 8 aa, Homo sapiens
  Table 1.2; ADAM7; ENSG00000069206; HLA -B*15:03,HLA-B*18:01,HLA-B*37:01,HLA-B*44:02,HLA-B*44:03, HLA-B*49:01,HLA-C*16:04
REFLGSNY

SEQ ID NO: 902 - protein, 10 aa, Homo sapiens
  Table 1.2; ADAM7; ENSG00000069206; HLA -A*31:01
RGFFRINDQR

SEQ ID NO: 903 - protein, 11 aa, Homo sapiens
  Table 1.2; ADAM7; ENSG00000069206; HLA -A*03:02,HLA-A*11:01
RGIADPNQSAK

SEQ ID NO: 904 - protein, 9 aa, Homo sapiens
  Table 1.2; ADAM7; ENSG00000069206; HLA -A*02:04
RINDQRYLI

SEQ ID NO: 905 - protein, 9 aa, Homo sapiens
  Table 1.2; ADAM7; ENSG00000069206; HLA -A*02:01,HLA-A*02:03,HLA-A*02:04,HLA-A*02:07
RIWGMVNFV

SEQ ID NO: 906 - protein, 10 aa, Homo sapiens
  Table 1.2; ADAM7; ENSG00000069206; HLA -A*30:02,HLA-B*57:01
RSREFLGSNY

SEQ ID NO: 907 - protein, 9 aa, Homo sapiens
  Table 1.2; ADAM7; ENSG00000069206; HLA -A*02:01,HLA-A*02:07,HLA-B*57:01,HLA-B*58:01
RTEPILPEI

SEQ ID NO: 908 - protein, 9 aa, Homo sapiens
  Table 1.2; ADAM7; ENSG00000069206; HLA -A*23:01,HLA-A*24:02,HLA-A*29:02,HLA-A*30:02,HLA-A*31:01, HLA-B*57:01
RYLIEPVKY

SEQ ID NO: 909 - protein, 8 aa, Homo sapiens
  Table 1.2; ADAM7; ENSG00000069206; HLA -C*12:03
SAASISTC

SEQ ID NO: 910 - protein, 9 aa, Homo sapiens
  Table 1.2; ADAM7; ENSG00000069206; HLA -A*33:03,HLA-A*68:01,HLA-C*07:06
SCTELNFTR

SEQ ID NO: 911 - protein, 10 aa, Homo sapiens
  Table 1.2; ADAM7; ENSG00000069206; HLA -A*11:01
SCTELNFTRK

SEQ ID NO: 912 - protein, 9 aa, Homo sapiens
  Table 1.2; ADAM7; ENSG00000069206; HLA -B*37:01
SDEGEHLVF

SEQ ID NO: 913 - protein, 10 aa, Homo sapiens
  Table 1.2; ADAM7; ENSG00000069206; HLA -A*11:01
SDEGEHLVFK

SEQ ID NO: 914 - protein, 8 aa, Homo sapiens
  Table 1.2; ADAM7; ENSG00000069206; HLA -A*30:01,HLA-B*37:01,HLA-B*40:02
SDGSIPAL

SEQ ID NO: 915 - protein, 9 aa, Homo sapiens
  Table 1.2; ADAM7; ENSG00000069206; HLA -A*03:02,HLA-A*11:01,HLA-B*27:02
SDGSIPALK

SEQ ID NO: 916 - protein, 10 aa, Homo sapiens
  Table 1.2; ADAM7; ENSG00000069206; HLA -A*23:01,HLA-B*37:01,HLA-B*44:02,HLA-B*44:03
SDGSIPALKF

SEQ ID NO: 917 - protein, 10 aa, Homo sapiens
  Table 1.2; ADAM7; ENSG00000069206; HLA -B*44:02,HLA-B*44:03,HLA-B*49:01
SEEDSKIKGI

SEQ ID NO: 918 - protein, 9 aa, Homo sapiens
  Table 1.2; ADAM7; ENSG00000069206; HLA -B*40:01,HLA-B*49:01
SELFDDEAI

SEQ ID NO: 919 - protein, 11 aa, Homo sapiens
  Table 1.2; ADAM7; ENSG00000069206; HLA -A*31:01
SFWQEKILKTR

SEQ ID NO: 920 - protein, 8 aa, Homo sapiens
  Table 1.2; ADAM7; ENSG00000069206; HLA -B*15:03,HLA-B*39:01
SHVQGISY

SEQ ID NO: 921 - protein, 9 aa, Homo sapiens
  Table 1.2; ADAM7; ENSG00000069206; HLA -A*30:02,HLA-B*15:01
SLLGEDKTY

SEQ ID NO: 922 - protein, 11 aa, Homo sapiens
  Table 1.2; ADAM7; ENSG00000069206; HLA -A*02:01,HLA-A*02:04,HLA-A*02:07
SLLGEDKTYHL

SEQ ID NO: 923 - protein, 9 aa, Homo sapiens
  Table 1.2; ADAM7; ENSG00000069206; HLA -A*31:01,HLA-A*33:01,HLA-A*33:03
SMKGEAFTR

SEQ ID NO: 924 - protein, 9 aa, Homo sapiens
  Table 1.2; ADAM7; ENSG00000069206; HLA -A*33:01,HLA-A*33:03,HLA-A*68:01
SNIETTLLR

SEQ ID NO: 925 - protein, 10 aa, Homo sapiens
  Table 1.2; ADAM7; ENSG00000069206; HLA -A*26:01
SNIETTLLRF

SEQ ID NO: 926 - protein, 9 aa, Homo sapiens
  Table 1.2; ADAM7; ENSG00000069206; HLA -B*07:02,HLA-B*35:01,HLA-C*07:02
SPACPKDQF

SEQ ID NO: 927 - protein, 9 aa, Homo sapiens
  Table 1.2; ADAM7; ENSG00000069206; HLA -B*51:01
SPPTETLGV

SEQ ID NO: 928 - protein, 8 aa, Homo sapiens
  Table 1.2; ADAM7; ENSG00000069206; HLA -A*30:02,HLA-A*32:01,HLA-B*15:01,HLA-B*15:03
SQNQYHQY

SEQ ID NO: 929 - protein, 9 aa, Homo sapiens
  Table 1.2; ADAM7; ENSG00000069206; HLA -A*02:04,HLA-A*24:02,HLA-A*31:01,HLA-A*32:01,HLA-B*13:02, HLA-B*15:01,HLA-B*27:05,HLA-B*37:01,HLA-B*38:01,HLA-B*39:01, HLA-C*04:01,HLA-C*07:04
SQNQYHQYL

SEQ ID NO: 930 - protein, 10 aa, Homo sapiens
  Table 1.2; ADAM7; ENSG00000069206; HLA -A*11:01
SQNQYHQYLK

SEQ ID NO: 931 - protein, 9 aa, Homo sapiens
  Table 1.2; ADAM7; ENSG00000069206; HLA -B*27:02
SREFLGSNY

SEQ ID NO: 932 - protein, 10 aa, Homo sapiens
  Table 1.2; ADAM7; ENSG00000069206; HLA -B*58:01
SSLLGEDKTY

SEQ ID NO: 933 - protein, 9 aa, Homo sapiens
  Table 1.2; ADAM7; ENSG00000069206; HLA -A*68:02,HLA-B*27:05
STSIIKDLL

SEQ ID NO: 934 - protein, 10 aa, Homo sapiens
  Table 1.2; ADAM7; ENSG00000069206; HLA -A*29:02
SYPGGMCLPY

SEQ ID NO: 935 - protein, 11 aa, Homo sapiens
  Table 1.2; ADAM7; ENSG00000069206; HLA -B*27:02
TDIGLVASGTK

SEQ ID NO: 936 - protein, 10 aa, Homo sapiens
  Table 1.2; ADAM7; ENSG00000069206; HLA -B*49:01
TELNFTRKTV

SEQ ID NO: 937 - protein, 8 aa, Homo sapiens
  Table 1.2; ADAM7; ENSG00000069206; HLA -B*49:01,HLA-B*51:01
TEPILPEI

SEQ ID NO: 938 - protein, 10 aa, Homo sapiens
  Table 1.2; ADAM7; ENSG00000069206; HLA -B*44:02,HLA-B*44:03
TEPILPEIHF

SEQ ID NO: 939 - protein, 11 aa, Homo sapiens
  Table 1.2; ADAM7; ENSG00000069206; HLA -B*44:02
TEPILPEIHFL

SEQ ID NO: 940 - protein, 11 aa, Homo sapiens
  Table 1.2; ADAM7; ENSG00000069206; HLA -B*44:02,HLA-B*44:03
TETLGVENKGY

SEQ ID NO: 941 - protein, 10 aa, Homo sapiens
  Table 1.2; ADAM7; ENSG00000069206; HLA -A*23:01,HLA-A*24:02
TFYSMKGEAF

SEQ ID NO: 942 - protein, 9 aa, Homo sapiens
  Table 1.2; ADAM7; ENSG00000069206; HLA -A*03:02,HLA-A*11:01
TGHSPACPK

SEQ ID NO: 943 - protein, 9 aa, Homo sapiens
  Table 1.2; ADAM7; ENSG00000069206; HLA -B*38:01
THDDDILKT

SEQ ID NO: 944 - protein, 10 aa, Homo sapiens
  Table 1.2; ADAM7; ENSG00000069206; HLA -A*01:01,HLA-B*38:01,HLA-B*39:01
THDDDILKTY

SEQ ID NO: 945 - protein, 8 aa, Homo sapiens
  Table 1.2; ADAM7; ENSG00000069206; HLA -B*38:01
THEDKIEL

SEQ ID NO: 946 - protein, 9 aa, Homo sapiens
  Table 1.2; ADAM7; ENSG00000069206; HLA -A*01:01,HLA-B*38:01,HLA-B*39:01
THEDKIELY

SEQ ID NO: 947 - protein, 9 aa, Homo sapiens
  Table 1.2; ADAM7; ENSG00000069206; HLA -A*23:01
TILVVVLVL

SEQ ID NO: 948 - protein, 9 aa, Homo sapiens
  Table 1.2; ADAM7; ENSG00000069206; HLA -B*13:02
TLHVTNITI

SEQ ID NO: 949 - protein, 8 aa, Homo sapiens
  Table 1.2; ADAM7; ENSG00000069206; HLA -B*08:01,HLA-B*37:01
TLNIHVTL

SEQ ID NO: 950 - protein, 9 aa, Homo sapiens
  Table 1.2; ADAM7; ENSG00000069206; HLA -A*02:01,HLA-A*02:03,HLA-A*02:04,HLA-A*02:07,HLA-B*13:02, HLA-B*37:01,HLA-B*55:01
TLNIHVTLV

SEQ ID NO: 951 - protein, 9 aa, Homo sapiens
  Table 1.2; ADAM7; ENSG00000069206; HLA -B*57:01
TTLLRFSFW

SEQ ID NO: 952 - protein, 8 aa, Homo sapiens
  Table 1.2; ADAM7; ENSG00000069206; HLA -B*08:01
TVKCKTIF

SEQ ID NO: 953 - protein, 9 aa, Homo sapiens
  Table 1.2; ADAM7; ENSG00000069206; HLA -B*51:01
VACEETLHV

SEQ ID NO: 954 - protein, 8 aa, Homo sapiens
  Table 1.2; ADAM7; ENSG00000069206; HLA -A*11:01,HLA-A*33:01,HLA-A*33:03,HLA-C*05:01
VADDTVYR

SEQ ID NO: 955 - protein, 9 aa, Homo sapiens
  Table 1.2; ADAM7; ENSG00000069206; HLA -A*01:01,HLA-A*02:07,HLA-A*03:02,HLA-A*11:01,HLA-A*31:01, HLA-A*33:01,HLA-A*33:03,HLA-A*68:01,HLA-B*27:02,HLA-B*38:01, HLA-C*05:01
VADDTVYRR

SEQ ID NO: 956 - protein, 10 aa, Homo sapiens
  Table 1.2; ADAM7; ENSG00000069206; HLA -B*27:02
VEGQQLVRPK

SEQ ID NO: 957 - protein, 10 aa, Homo sapiens
  Table 1.2; ADAM7; ENSG00000069206; HLA -B*38:01,HLA-B*39:01
VHEYDSAASI

SEQ ID NO: 958 - protein, 9 aa, Homo sapiens
  Table 1.2; ADAM7; ENSG00000069206; HLA -A*23:01,HLA-A*68:02,HLA-B*13:02
VIVGIGVLI

SEQ ID NO: 959 - protein, 11 aa, Homo sapiens
  Table 1.2; ADAM7; ENSG00000069206; HLA -A*02:04,HLA-A*23:01
VIVGIGVLILL

SEQ ID NO: 960 - protein, 9 aa, Homo sapiens
  Table 1.2; ADAM7; ENSG00000069206; HLA -A*31:01
VLILLVRYR

SEQ ID NO: 961 - protein, 9 aa, Homo sapiens
  Table 1.2; ADAM7; ENSG00000069206; HLA -A*02:03
VLKPGFTCA

SEQ ID NO: 962 - protein, 9 aa, Homo sapiens
  Table 1.2; ADAM7; ENSG00000069206; HLA -A*29:02
VLLSGKWLY

SEQ ID NO: 963 - protein, 9 aa, Homo sapiens
  Table 1.2; ADAM7; ENSG00000069206; HLA -A*02:01,HLA-A*02:03,HLA-A*02:04,HLA-A*02:07,HLA-B*13:02
VLVIVGIGV

SEQ ID NO: 964 - protein, 9 aa, Homo sapiens
  Table 1.2; ADAM7; ENSG00000069206; HLA -A*02:01,HLA-A*02:04,HLA-A*02:07,HLA-A*23:01,HLA-B*13:02
VLVLVIVGI

SEQ ID NO: 965 - protein, 8 aa, Homo sapiens
  Table 1.2; ADAM7; ENSG00000069206; HLA -C*05:01
VMDSDGSI

SEQ ID NO: 966 - protein, 10 aa, Homo sapiens
  Table 1.2; ADAM7; ENSG00000069206; HLA -A*02:01
VMDSDGSIPA

SEQ ID NO: 967 - protein, 11 aa, Homo sapiens
  Table 1.2; ADAM7; ENSG00000069206; HLA -A*02:01,HLA-A*02:07,HLA-B*38:01,HLA-B*39:01
VMDSDGSIPAL

SEQ ID NO: 968 - protein, 9 aa, Homo sapiens
  Table 1.2; ADAM7; ENSG00000069206; HLA -A*11:01
VNFVNMIYK

SEQ ID NO: 969 - protein, 9 aa, Homo sapiens
  Table 1.2; ADAM7; ENSG00000069206; HLA -B*07:02,HLA-B*35:03,HLA-B*51:01,HLA-B*54:01,HLA-B*55:01, HLA-B*56:01
VPYGANYSC

SEQ ID NO: 970 - protein, 9 aa, Homo sapiens
  Table 1.2; ADAM7; ENSG00000069206; HLA -A*02:01,HLA-A*02:03,HLA-A*23:01,HLA-A*24:02,HLA-A*25:01, HLA-A*30:01,HLA-A*32:01,HLA-B*13:02,HLA-B*15:01,HLA-B*15:03, HLA-B*27:05,HLA-B*37:01,HLA-B*38:01,HLA-B*39:01,HLA-B*40:01,
  HLA-B*46:01,HLA-B*58:01,HLA-C*02:02,HLA-C*03:03,HLA-C*03:04, HLA-C*05:01,HLA-C*07:04,HLA-C*16:04
VQSPPTETL

SEQ ID NO: 971 - protein, 11 aa, Homo sapiens
  Table 1.2; ADAM7; ENSG00000069206; HLA -A*02:01,HLA-A*30:01,HLA-B*13:02,HLA-B*39:01
VQSPPTETLGV

SEQ ID NO: 972 - protein, 9 aa, Homo sapiens
  Table 1.2; ADAM7; ENSG00000069206; HLA -A*24:02
VRPKKLPLI

SEQ ID NO: 973 - protein, 9 aa, Homo sapiens
  Table 1.2; ADAM7; ENSG00000069206; HLA -B*57:01
VTLVGIEIW

SEQ ID NO: 974 - protein, 9 aa, Homo sapiens
  Table 1.2; ADAM7; ENSG00000069206; HLA -A*01:01,HLA-B*13:02,HLA-C*16:02
VTNITILVV

SEQ ID NO: 975 - protein, 10 aa, Homo sapiens
  Table 1.2; ADAM7; ENSG00000069206; HLA -A*29:02
VVLLSGKWLY

SEQ ID NO: 976 - protein, 8 aa, Homo sapiens
  Table 1.2; ADAM7; ENSG00000069206; HLA -B*51:01
VVVLVLVI

SEQ ID NO: 977 - protein, 9 aa, Homo sapiens
  Table 1.2; ADAM7; ENSG00000069206; HLA -A*02:01,HLA-A*02:03,HLA-A*02:04,HLA-B*13:02
WLYSHVQGI

SEQ ID NO: 978 - protein, 10 aa, Homo sapiens
  Table 1.2; ADAM7; ENSG00000069206; HLA -A*01:01
WTHEDKIELY

SEQ ID NO: 979 - protein, 10 aa, Homo sapiens
  Table 1.2; ADAM7; ENSG00000069206; HLA -B*40:02,HLA-C*12:03
YDSAASISTC

SEQ ID NO: 980 - protein, 9 aa, Homo sapiens
  Table 1.2; ADAM7; ENSG00000069206; HLA -A*30:01,HLA-B*18:01,HLA-B*40:01,HLA-B*49:01
YEEELLYEI

SEQ ID NO: 981 - protein, 11 aa, Homo sapiens
  Table 1.2; ADAM7; ENSG00000069206; HLA -A*30:01,HLA-B*40:01
YEEELLYEIKL

SEQ ID NO: 982 - protein, 9 aa, Homo sapiens
  Table 1.2; ADAM7; ENSG00000069206; HLA -A*02:07,HLA-B*27:05,HLA-B*35:03,HLA-B*38:01,HLA-B*39:01, HLA-B*40:01,HLA-C*05:01
YHDSTDIGL

SEQ ID NO: 983 - protein, 10 aa, Homo sapiens
  Table 1.2; ADAM7; ENSG00000069206; HLA -B*38:01,HLA-B*39:01
YHDSTDIGLV

SEQ ID NO: 984 - protein, 11 aa, Homo sapiens
  Table 1.2; ADAM7; ENSG00000069206; HLA -B*38:01
YHDSTDIGLVA

SEQ ID NO: 985 - protein, 8 aa, Homo sapiens
  Table 1.2; ADAM7; ENSG00000069206; HLA -A*01:01,HLA-A*26:01,HLA-A*29:02,HLA-A*30:02,HLA-A*32:01, HLA-B*08:01,HLA-B*13:02,HLA-B*15:01,HLA-B*15:03,HLA-B*18:01, HLA-B*46:01,HLA-B*58:01,HLA-C*02:02,HLA-C*04:01,HLA-C*07:01,
  HLA-C*07:04,HLA-C*12:03,HLA-C*16:02
YLIEPVKY

SEQ ID NO: 986 - protein, 9 aa, Homo sapiens
  Table 1.2; ADAM7; ENSG00000069206; HLA -B*08:01
YLKDYKPTC

SEQ ID NO: 987 - protein, 11 aa, Homo sapiens
  Table 1.2; ADAM7; ENSG00000069206; HLA -A*29:02
YNLRVPYGANY

SEQ ID NO: 988 - protein, 9 aa, Homo sapiens
  Table 1.2; ADAM7; ENSG00000069206; HLA -A*01:01,HLA-A*23:01,HLA-A*24:02,HLA-A*25:01,HLA-A*26:01, HLA-A*29:02,HLA-A*30:01,HLA-A*30:02,HLA-A*32:01,HLA-B*13:02, HLA-B*15:01,HLA-B*15:03,HLA-B*18:01,HLA-B*27:02,HLA-B*27:05,
  HLA-B*35:01,HLA-B*37:01,HLA-B*38:01,HLA-B*39:01,HLA-B*44:02, HLA-B*44:03,HLA-B*46:01,HLA-B*58:01,HLA-C*02:02,HLA-C*07:01, HLA-C*07:04,HLA-C*07:06,HLA-C*12:03,HLA-C*14:02,HLA-C*16:01, HLA-C*16:02,HLA-C*16:04
YQGSIVHEY

SEQ ID NO: 989 - protein, 10 aa, Homo sapiens
  Table 1.2; ADAM7; ENSG00000069206; HLA -B*27:02
YSCTELNFTR

SEQ ID NO: 990 - protein, 8 aa, Homo sapiens
  Table 1.2; ADAM7; ENSG00000069206; HLA -A*01:01,HLA-C*03:04,HLA-C*05:01
YSDEGEHL

SEQ ID NO: 991 - protein, 9 aa, Homo sapiens
  Table 1.2; ADAM7; ENSG00000069206; HLA -A*01:01,HLA-A*02:01,HLA-A*02:07,HLA-B*38:01,HLA-C*05:01
YSDEGEHLV

SEQ ID NO: 992 - protein, 10 aa, Homo sapiens
  Table 1.2; ADAM7; ENSG00000069206; HLA -A*01:01,HLA-A*02:07,HLA-B*38:01,HLA-B*58:01,HLA-C*03:04, HLA-C*05:01
YSDEGEHLVF

SEQ ID NO: 993 - protein, 11 aa, Homo sapiens
  Table 1.2; ADAM7; ENSG00000069206; HLA -A*01:01
YSDEGEHLVFK

SEQ ID NO: 994 - protein, 9 aa, Homo sapiens
  Table 1.2; ADAM7; ENSG00000069206; HLA -A*01:01
YSETFYSMK

SEQ ID NO: 995 - protein, 9 aa, Homo sapiens
  Table 1.2; ADAM7; ENSG00000069206; HLA -A*01:01,HLA-A*25:01,HLA-A*26:01,HLA-A*29:02,HLA-A*30:02, HLA-A*32:01,HLA-B*15:01,HLA-B*15:03,HLA-B*18:01,HLA-B*35:01, HLA-B*46:01,HLA-B*58:01,HLA-C*02:02,HLA-C*03:03,HLA-C*03:04,
  HLA-C*07:04,HLA-C*14:02,HLA-C*16:01,HLA-C*16:04
YSHVQGISY

SEQ ID NO: 996 - protein, 8 aa, Homo sapiens
  Table 1.2; ADAM7; ENSG00000069206; HLA -A*32:01,HLA-B*08:01,HLA-B*15:01,HLA-B*15:03,HLA-B*18:01, HLA-B*37:01,HLA-B*46:01,HLA-B*58:01,HLA-C*03:03,HLA-C*03:04, HLA-C*14:02,HLA-C*16:01
YSMKGEAF

SEQ ID NO: 997 - protein, 10 aa, Homo sapiens
  Table 1.2; ADAM7; ENSG00000069206; HLA -A*33:01,HLA-A*33:03,HLA-A*68:01,HLA-B*27:02,HLA-B*57:01
YSMKGEAFTR

SEQ ID NO: 998 - protein, 8 aa, Homo sapiens
  Table 1.2; ADAM7; ENSG00000069206; HLA -B*08:01,HLA-B*58:01,HLA-C*03:03,HLA-C*03:04,HLA-C*05:01
YSNIETTL

SEQ ID NO: 999 - protein, 9 aa, Homo sapiens
  Table 1.2; ADAM7; ENSG00000069206; HLA -A*01:01,HLA-B*46:01,HLA-B*58:01
YSNIETTLL

SEQ ID NO: 1000 - protein, 10 aa, Homo sapiens
  Table 1.2; ADAM7; ENSG00000069206; HLA -B*27:02
YSNIETTLLR

SEQ ID NO: 1001 - protein, 11 aa, Homo sapiens
  Table 1.2; ADAM7; ENSG00000069206; HLA -A*01:01,HLA-B*57:01
YSNIETTLLRF

SEQ ID NO: 1002 - protein, 9 aa, Homo sapiens
  Table 1.2; ADAM7; ENSG00000069206; HLA -A*68:02,HLA-B*58:01,HLA-C*02:02,HLA-C*12:03,HLA-C*16:01, HLA-C*16:02
YSTSIIKDL

SEQ ID NO: 1003 - protein, 10 aa, Homo sapiens
  Table 1.2; ADAM7; ENSG00000069206; HLA -A*68:02
YSTSIIKDLL

SEQ ID NO: 1004 - protein, 10 aa, Homo sapiens
  Table 1.2; ADAM7; ENSG00000069206; HLA -A*24:02
YYSTSIIKDL

SEQ ID NO: 1005 - protein, 11 aa, Homo sapiens
  Table 1.2; ADAM7; ENSG00000069206; HLA -A*24:02
YYSTSIIKDLL

SEQ ID NO: 1006 - protein, 9 aa, Homo sapiens
  Table 1.2; AMELX; ENSG00000125363; HLA -B*54:01,HLA-B*56:01,HLA-C*06:02
AAFAMPLPP

SEQ ID NO: 1007 - protein, 9 aa, Homo sapiens
  Table 1.2; AMELX; ENSG00000125363; HLA -B*39:01
AQQPVIPQQ

SEQ ID NO: 1008 - protein, 10 aa, Homo sapiens
  Table 1.2; AMELX; ENSG00000125363; HLA -B*13:02
AQQPYQPQPV

SEQ ID NO: 1009 - protein, 11 aa, Homo sapiens
  Table 1.2; AMELX; ENSG00000125363; HLA -A*33:01,HLA-A*33:03,HLA-A*68:01
EAWPSTDKTKR

SEQ ID NO: 1010 - protein, 8 aa, Homo sapiens
  Table 1.2; AMELX; ENSG00000125363; HLA -A*25:01,HLA-B*57:01
EVLTPLKW

SEQ ID NO: 1011 - protein, 9 aa, Homo sapiens
  Table 1.2; AMELX; ENSG00000125363; HLA -B*46:01
FACLLGAAF

SEQ ID NO: 1012 - protein, 9 aa, Homo sapiens
  Table 1.2; AMELX; ENSG00000125363; HLA -B*54:01
FAMPLPPHP

SEQ ID NO: 1013 - protein, 10 aa, Homo sapiens
  Table 1.2; AMELX; ENSG00000125363; HLA -B*54:01
FAMPLPPHPG

SEQ ID NO: 1014 - protein, 9 aa, Homo sapiens
  Table 1.2; AMELX; ENSG00000125363; HLA -B*35:01,HLA-B*35:03,HLA-B*54:01,HLA-B*56:01
FPMQPLPPM

SEQ ID NO: 1015 - protein, 10 aa, Homo sapiens
  Table 1.2; AMELX; ENSG00000125363; HLA -B*35:03
FPMQPLPPML

SEQ ID NO: 1016 - protein, 9 aa, Homo sapiens
  Table 1.2; AMELX; ENSG00000125363; HLA -B*46:01
FSYEVLTPL

SEQ ID NO: 1017 - protein, 11 aa, Homo sapiens
  Table 1.2; AMELX; ENSG00000125363; HLA -B*57:01
FSYEVLTPLKW

SEQ ID NO: 1018 - protein, 8 aa, Homo sapiens
  Table 1.2; AMELX; ENSG00000125363; HLA -B*13:02
GQHSMTPI

SEQ ID NO: 1019 - protein, 9 aa, Homo sapiens
  Table 1.2; AMELX; ENSG00000125363; HLA -A*23:01,HLA-A*24:02
GYINFSYEV

SEQ ID NO: 1020 - protein, 8 aa, Homo sapiens
  Table 1.2; AMELX; ENSG00000125363; HLA -B*38:01
HHQIIPVL

SEQ ID NO: 1021 - protein, 9 aa, Homo sapiens
  Table 1.2; AMELX; ENSG00000125363; HLA -A*29:02,HLA-B*35:01
HPGYINFSY

SEQ ID NO: 1022 - protein, 9 aa, Homo sapiens
  Table 1.2; AMELX; ENSG00000125363; HLA -A*33:01
HSMTPIQHH

SEQ ID NO: 1023 - protein, 9 aa, Homo sapiens
  Table 1.2; AMELX; ENSG00000125363; HLA -B*07:02,HLA-B*51:01,HLA-B*54:01,HLA-B*56:01
IPQQPMMPV

SEQ ID NO: 1024 - protein, 10 aa, Homo sapiens
  Table 1.2; AMELX; ENSG00000125363; HLA -B*54:01,HLA-B*56:01
IPVLSQQHPP

SEQ ID NO: 1025 - protein, 9 aa, Homo sapiens
  Table 1.2; AMELX; ENSG00000125363; HLA -B*56:01
IPVVPAQQP

SEQ ID NO: 1026 - protein, 10 aa, Homo sapiens
  Table 1.2; AMELX; ENSG00000125363; HLA -B*56:01
IPVVPAQQPV

SEQ ID NO: 1027 - protein, 11 aa, Homo sapiens
  Table 1.2; AMELX; ENSG00000125363; HLA -B*51:01,HLA-B*54:01
IPVVPAQQPVI

SEQ ID NO: 1028 - protein, 9 aa, Homo sapiens
  Table 1.2; AMELX; ENSG00000125363; HLA -A*02:04,HLA-B*38:01
LHHQIIPVL

SEQ ID NO: 1029 - protein, 8 aa, Homo sapiens
  Table 1.2; AMELX; ENSG00000125363; HLA -B*51:01
LPPMLPDL

SEQ ID NO: 1030 - protein, 10 aa, Homo sapiens
  Table 1.2; AMELX; ENSG00000125363; HLA -B*51:01
LPPMLPDLTL

SEQ ID NO: 1031 - protein, 9 aa, Homo sapiens
  Table 1.2; AMELX; ENSG00000125363; HLA -A*26:01,HLA-A*29:02,HLA-B*35:01,HLA-B*51:01,HLA-B*55:01
LPPPAQQPY

SEQ ID NO: 1032 - protein, 9 aa, Homo sapiens
  Table 1.2; AMELX; ENSG00000125363; HLA -B*54:01
LPPQPPLPP

SEQ ID NO: 1033 - protein, 10 aa, Homo sapiens
  Table 1.2; AMELX; ENSG00000125363; HLA -A*02:07,HLA-A*25:01
MLPDLTLEAW

SEQ ID NO: 1034 - protein, 8 aa, Homo sapiens
  Table 1.2; AMELX; ENSG00000125363; HLA -B*54:01
MPLPPHPG

SEQ ID NO: 1035 - protein, 9 aa, Homo sapiens
  Table 1.2; AMELX; ENSG00000125363; HLA -B*35:01,HLA-B*54:01,HLA-B*55:01
MPLPPHPGH

SEQ ID NO: 1036 - protein, 10 aa, Homo sapiens
  Table 1.2; AMELX; ENSG00000125363; HLA -B*54:01
MPLPPHPGHP

SEQ ID NO: 1037 - protein, 11 aa, Homo sapiens
  Table 1.2; AMELX; ENSG00000125363; HLA -B*54:01
MPLPPHPGHPG

SEQ ID NO: 1038 - protein, 9 aa, Homo sapiens
  Table 1.2; AMELX; ENSG00000125363; HLA -B*07:02,HLA-B*08:01,HLA-B*35:01,HLA-B*35:03,HLA-B*51:01, HLA-B*54:01,HLA-B*55:01,HLA-B*56:01,HLA-C*03:03,HLA-C*07:02
MPVPGQHSM

SEQ ID NO: 1039 - protein, 11 aa, Homo sapiens
  Table 1.2; AMELX; ENSG00000125363; HLA -B*54:01
MPVPGQHSMTP

SEQ ID NO: 1040 - protein, 10 aa, Homo sapiens
  Table 1.2; AMELX; ENSG00000125363; HLA -A*01:01,HLA-A*29:02,HLA-A*30:02
NLPPPAQQPY

SEQ ID NO: 1041 - protein, 9 aa, Homo sapiens
  Table 1.2; AMELX; ENSG00000125363; HLA -A*02:07
PLPPMLPDL

SEQ ID NO: 1042 - protein, 11 aa, Homo sapiens
  Table 1.2; AMELX; ENSG00000125363; HLA -A*24:02
PMMPVPGQHSM

SEQ ID NO: 1043 - protein, 11 aa, Homo sapiens
  Table 1.2; AMELX; ENSG00000125363; HLA -A*29:02
PNLPPPAQQPY

SEQ ID NO: 1044 - protein, 9 aa, Homo sapiens
  Table 1.2; AMELX; ENSG00000125363; HLA -B*35:03
PPMLPDLTL

SEQ ID NO: 1045 - protein, 9 aa, Homo sapiens
  Table 1.2; AMELX; ENSG00000125363; HLA -A*24:02
PQPPLPPMF

SEQ ID NO: 1046 - protein, 8 aa, Homo sapiens
  Table 1.2; AMELX; ENSG00000125363; HLA -B*07:02
PVPGQHSM

SEQ ID NO: 1047 - protein, 9 aa, Homo sapiens
  Table 1.2; AMELX; ENSG00000125363; HLA -B*38:01
QHSMTPIQH

SEQ ID NO: 1048 - protein, 9 aa, Homo sapiens
  Table 1.2; AMELX; ENSG00000125363; HLA -B*51:01,HLA-B*54:01,HLA-B*56:01
QPHHHIPVV

SEQ ID NO: 1049 - protein, 9 aa, Homo sapiens
  Table 1.2; AMELX; ENSG00000125363; HLA -B*07:02,HLA-B*35:01,HLA-B*35:03,HLA-B*51:01,HLA-B*54:01, HLA-B*56:01,HLA-C*07:02
QPLPPQPPL

SEQ ID NO: 1050 - protein, 9 aa, Homo sapiens
  Table 1.2; AMELX; ENSG00000125363; HLA -B*07:02,HLA-B*35:03,HLA-B*51:01,HLA-B*54:01,HLA-B*55:01, HLA-B*56:01,HLA-C*07:02
QPMQPQPPV

SEQ ID NO: 1051 - protein, 8 aa, Homo sapiens
  Table 1.2; AMELX; ENSG00000125363; HLA -B*56:01
QPNLPPPA

SEQ ID NO: 1052 - protein, 9 aa, Homo sapiens
  Table 1.2; AMELX; ENSG00000125363; HLA -B*56:01
QPNLPPPAQ

SEQ ID NO: 1053 - protein, 9 aa, Homo sapiens
  Table 1.2; AMELX; ENSG00000125363; HLA -A*30:02,HLA-B*07:02,HLA-B*35:01,HLA-B*35:03,HLA-B*37:01, HLA-B*55:01,HLA-B*56:01,HLA-C*07:02
QPQPPVHPM

SEQ ID NO: 1054 - protein, 9 aa, Homo sapiens
  Table 1.2; AMELX; ENSG00000125363; HLA -B*56:01
QPQPVQPQP

SEQ ID NO: 1055 - protein, 9 aa, Homo sapiens
  Table 1.2; AMELX; ENSG00000125363; HLA -B*07:02,HLA-B*35:01,HLA-B*35:03,HLA-B*55:01,HLA-B*56:01
QPVIPQQPM

SEQ ID NO: 1056 - protein, 8 aa, Homo sapiens
  Table 1.2; AMELX; ENSG00000125363; HLA -B*51:01
QPYQPQPV

SEQ ID NO: 1057 - protein, 9 aa, Homo sapiens
  Table 1.2; AMELX; ENSG00000125363; HLA -B*51:01,HLA-B*54:01
QPYQPQPVQ

SEQ ID NO: 1058 - protein, 10 aa, Homo sapiens
  Table 1.2; AMELX; ENSG00000125363; HLA -B*56:01
QPYQPQPVQP

SEQ ID NO: 1059 - protein, 9 aa, Homo sapiens
  Table 1.2; AMELX; ENSG00000125363; HLA -A*02:03,HLA-A*02:04,HLA-A*23:01,HLA-A*24:02,HLA-A*25:01, HLA-A*30:01,HLA-A*30:02,HLA-A*31:01,HLA-A*32:01,HLA-B*08:01, HLA-B*13:02,HLA-B*15:01,HLA-B*15:03,HLA-B*27:05,HLA-B*37:01,
  HLA-B*38:01,HLA-B*39:01,HLA-B*40:01,HLA-B*40:02,HLA-B*44:02, HLA-B*46:01,HLA-B*58:01,HLA-C*03:03,HLA-C*03:04,HLA-C*06:02, HLA-C*07:02,HLA-C*07:04,HLA-C*16:04
QQHPPTHTL

SEQ ID NO: 1060 - protein, 9 aa, Homo sapiens
  Table 1.2; AMELX; ENSG00000125363; HLA -B*13:02
QQPYQPQPV

SEQ ID NO: 1061 - protein, 10 aa, Homo sapiens
  Table 1.2; AMELX; ENSG00000125363; HLA -A*01:01,HLA-A*25:01,HLA-A*26:01,HLA-A*30:02,HLA-B*57:01, HLA-B*58:01
QSIRPPYPSY

SEQ ID NO: 1062 - protein, 9 aa, Homo sapiens
  Table 1.2; AMELX; ENSG00000125363; HLA -A*29:02,HLA-B*35:01
RPPYPSYGY

SEQ ID NO: 1063 - protein, 9 aa, Homo sapiens
  Table 1.2; AMELX; ENSG00000125363; HLA -A*03:01,HLA-A*25:01,HLA-A*26:01,HLA-A*29:02,HLA-A*30:02, HLA-A*31:01,HLA-A*32:01,HLA-B*07:02,HLA-B*15:01,HLA-B*15:03, HLA-B*46:01,HLA-B*57:01,HLA-B*58:01,HLA-C*02:02
SIRPPYPSY

SEQ ID NO: 1064 - protein, 11 aa, Homo sapiens
  Table 1.2; AMELX; ENSG00000125363; HLA -A*29:02
SIRPPYPSYGY

SEQ ID NO: 1065 - protein, 10 aa, Homo sapiens
  Table 1.2; AMELX; ENSG00000125363; HLA -A*24:02
SYEVLTPLKW

SEQ ID NO: 1066 - protein, 11 aa, Homo sapiens
  Table 1.2; AMELX; ENSG00000125363; HLA -A*02:04
TLQPHHHIPVV

SEQ ID NO: 1067 - protein, 8 aa, Homo sapiens
  Table 1.2; AMELX; ENSG00000125363; HLA -B*08:01
TPIQHHQP

SEQ ID NO: 1068 - protein, 10 aa, Homo sapiens
  Table 1.2; AMELX; ENSG00000125363; HLA -B*07:02,HLA-B*35:03,HLA-C*07:02
TPIQHHQPNL

SEQ ID NO: 1069 - protein, 9 aa, Homo sapiens
  Table 1.2; AMELX; ENSG00000125363; HLA -B*08:01,HLA-B*51:01
TPLKWYQSI

SEQ ID NO: 1070 - protein, 8 aa, Homo sapiens
  Table 1.2; AMELX; ENSG00000125363; HLA -B*51:01,HLA-B*56:01
VPAQQPVI

SEQ ID NO: 1071 - protein, 9 aa, Homo sapiens
  Table 1.2; AMELX; ENSG00000125363; HLA -B*15:01,HLA-B*15:03,HLA-B*37:01,HLA-B*46:01,HLA-C*01:02
VQPQPHQPM

SEQ ID NO: 1072 - protein, 9 aa, Homo sapiens
  Table 1.2; AMELX; ENSG00000125363; HLA -A*02:07,HLA-B*13:02,HLA-B*51:01
VVPAQQPVI

SEQ ID NO: 1073 - protein, 8 aa, Homo sapiens
  Table 1.2; AMELX; ENSG00000125363; HLA -B*18:01,HLA-B*49:01
YEVLTPLK

SEQ ID NO: 1074 - protein, 9 aa, Homo sapiens
  Table 1.2; AMELX; ENSG00000125363; HLA -B*18:01,HLA-B*44:02,HLA-B*44:03,HLA-B*49:01,HLA-B*57:01, HLA-C*16:04
YEVLTPLKW

SEQ ID NO: 1075 - protein, 10 aa, Homo sapiens
  Table 1.2; AMELX; ENSG00000125363; HLA -B*44:02,HLA-B*44:03
YEVLTPLKWY

SEQ ID NO: 1076 - protein, 8 aa, Homo sapiens
  Table 1.2; AMELX; ENSG00000125363; HLA -B*54:01
YPSYGYEP

SEQ ID NO: 1077 - protein, 9 aa, Homo sapiens
  Table 1.2; AMELX; ENSG00000125363; HLA -B*35:01,HLA-B*35:03
YPSYGYEPM

SEQ ID NO: 1078 - protein, 8 aa, Homo sapiens
  Table 1.2; AMELX; ENSG00000125363; HLA -B*15:03,HLA-C*16:01
YQSIRPPY

SEQ ID NO: 1079 - protein, 8 aa, Homo sapiens
  Table 1.2; BPIFA2; ENSG00000131050; HLA -B*37:01,HLA-B*49:01
AEKLLNNV

SEQ ID NO: 1080 - protein, 9 aa, Homo sapiens
  Table 1.2; BPIFA2; ENSG00000131050; HLA -A*30:01,HLA-B*13:02,HLA-B*18:01,HLA-B*27:02,HLA-B*37:01, HLA-B*40:01,HLA-B*40:02,HLA-B*44:02,HLA-B*44:03,HLA-B*49:01, HLA-C*16:04
AEKLLNNVI

SEQ ID NO: 1081 - protein, 10 aa, Homo sapiens
  Table 1.2; BPIFA2; ENSG00000131050; HLA -A*30:01,HLA-B*40:01,HLA-B*40:02,HLA-B*44:02,HLA-B*44:03
AEPIDDGKGL

SEQ ID NO: 1082 - protein, 9 aa, Homo sapiens
  Table 1.2; BPIFA2; ENSG00000131050; HLA -C*01:02
AGPIIGQII

SEQ ID NO: 1083 - protein, 9 aa, Homo sapiens
  Table 1.2; BPIFA2; ENSG00000131050; HLA -A*01:01,HLA-A*02:01,HLA-A*02:07,HLA-A*03:01,HLA-A*03:02, HLA-A*11:01,HLA-A*25:01,HLA-A*30:01,HLA-A*31:01,HLA-A*32:01, HLA-B*13:02,HLA-B*15:01,HLA-B*15:03,HLA-B*27:05,HLA-B*35:01,
  HLA-B*35:03,HLA-B*38:01,HLA-B*39:01,HLA-B*40:01,HLA-B*40:02, HLA-B*44:03,HLA-B*46:01,HLA-B*55:01,HLA-B*57:01,HLA-B*58:01, HLA-C*01:02,HLA-C*02:02,HLA-C*03:03,HLA-C*03:04,HLA-C*04:01, HLA-C*05:01,HLA-C*07:04,HLA-C*16:01,HLA-C*16:02,HLA-C*16:04
ASDPTSISL

SEQ ID NO: 1084 - protein, 10 aa, Homo sapiens
  Table 1.2; BPIFA2; ENSG00000131050; HLA -A*01:01
ASDPTSISLS

SEQ ID NO: 1085 - protein, 11 aa, Homo sapiens
  Table 1.2; BPIFA2; ENSG00000131050; HLA -A*01:01,HLA-A*02:07,HLA-A*03:01,HLA-A*03:02,HLA-A*11:01, HLA-B*38:01,HLA-C*03:03
ASDPTSISLSL

SEQ ID NO: 1086 - protein, 9 aa, Homo sapiens
  Table 1.2; BPIFA2; ENSG00000131050; HLA -A*02:01,HLA-A*02:03,HLA-A*02:04,HLA-A*02:07,HLA-A*03:01, HLA-A*11:01,HLA-A*23:01,HLA-A*30:01,HLA-A*31:01,HLA-A*32:01, HLA-A*68:02,HLA-B*13:02,HLA-B*40:02,HLA-B*46:01,HLA-B*49:01,
  HLA-B*55:01,HLA-B*56:01
ASLDLLTAV

SEQ ID NO: 1087 - protein, 10 aa, Homo sapiens
  Table 1.2; BPIFA2; ENSG00000131050; HLA -A*11:01,HLA-A*30:01,HLA-A*68:01,HLA-B*07:02,HLA-B*27:05, HLA-B*35:03,HLA-B*38:01,HLA-B*39:01,HLA-B*40:01,HLA-C*01:02, HLA-C*03:03,HLA-C*03:04
CASDPTSISL

SEQ ID NO: 1088 - protein, 8 aa, Homo sapiens
  Table 1.2; BPIFA2; ENSG00000131050; HLA -B*40:02
DDGKGLNL

SEQ ID NO: 1089 - protein, 10 aa, Homo sapiens
  Table 1.2; BPIFA2; ENSG00000131050; HLA -B*18:01
DDGKGLNLSF

SEQ ID NO: 1090 - protein, 9 aa, Homo sapiens
  Table 1.2; BPIFA2; ENSG00000131050; HLA -A*25:01
DGKGLNLSF

SEQ ID NO: 1091 - protein, 9 aa, Homo sapiens
  Table 1.2; BPIFA2; ENSG00000131050; HLA -A*33:01
DKHSQIINK

SEQ ID NO: 1092 - protein, 11 aa, Homo sapiens
  Table 1.2; BPIFA2; ENSG00000131050; HLA -A*25:01
DLGVLQKSSAW

SEQ ID NO: 1093 - protein, 8 aa, Homo sapiens
  Table 1.2; BPIFA2; ENSG00000131050; HLA -A*23:01,HLA-B*08:01,HLA-B*18:01,HLA-B*51:01
DLLTAVTI

SEQ ID NO: 1094 - protein, 9 aa, Homo sapiens
  Table 1.2; BPIFA2; ENSG00000131050; HLA -A*02:04,HLA-A*25:01,HLA-A*68:01,HLA-A*68:02,HLA-B*27:05, HLA-B*35:03,HLA-B*38:01,HLA-B*39:01
DLSNVVDKL

SEQ ID NO: 1095 - protein, 9 aa, Homo sapiens
  Table 1.2; BPIFA2; ENSG00000131050; HLA -B*08:01
DNPQHKTQL

SEQ ID NO: 1096 - protein, 8 aa, Homo sapiens
  Table 1.2; BPIFA2; ENSG00000131050; HLA -B*08:01
DNTLKGIL

SEQ ID NO: 1097 - protein, 8 aa, Homo sapiens
  Table 1.2; BPIFA2; ENSG00000131050; HLA -B*08:01,HLA-B*51:01
DPQTHQPV

SEQ ID NO: 1098 - protein, 9 aa, Homo sapiens
  Table 1.2; BPIFA2; ENSG00000131050; HLA -B*35:03,HLA-B*51:01,HLA-B*54:01,HLA-B*55:01,HLA-B*56:01
DPQTHQPVA

SEQ ID NO: 1099 - protein, 10 aa, Homo sapiens
  Table 1.2; BPIFA2; ENSG00000131050; HLA -B*56:01
DPQTHQPVAV

SEQ ID NO: 1100 - protein, 9 aa, Homo sapiens
  Table 1.2; BPIFA2; ENSG00000131050; HLA -A*23:01,HLA-A*68:01,HLA-B*07:02,HLA-B*08:01,HLA-B*18:01, HLA-B*35:01,HLA-B*35:03,HLA-B*51:01,HLA-B*55:01,HLA-B*56:01, HLA-C*07:02
DPTSISLSL

SEQ ID NO: 1101 - protein, 10 aa, Homo sapiens
  Table 1.2; BPIFA2; ENSG00000131050; HLA -A*25:01
DPTSISLSLL

SEQ ID NO: 1102 - protein, 11 aa, Homo sapiens
  Table 1.2; BPIFA2; ENSG00000131050; HLA -A*33:03,HLA-A*68:01
DVKAEPIDDGK

SEQ ID NO: 1103 - protein, 8 aa, Homo sapiens
  Table 1.2; BPIFA2; ENSG00000131050; HLA -A*26:01,HLA-B*08:01,HLA-B*51:01
DVNVIQQV

SEQ ID NO: 1104 - protein, 9 aa, Homo sapiens
  Table 1.2; BPIFA2; ENSG00000131050; HLA -A*25:01,HLA-A*26:01,HLA-A*33:01,HLA-A*33:03,HLA-A*68:01, HLA-A*68:02,HLA-B*08:01,HLA-B*13:02,HLA-B*18:01,HLA-B*35:01, HLA-B*35:03,HLA-B*38:01,HLA-B*51:01,HLA-C*07:06
DVNVIQQVV

SEQ ID NO: 1105 - protein, 9 aa, Homo sapiens
  Table 1.2; BPIFA2; ENSG00000131050; HLA -A*68:02,HLA-B*51:01
EAEKLLNNV

SEQ ID NO: 1106 - protein, 11 aa, Homo sapiens
  Table 1.2; BPIFA2; ENSG00000131050; HLA -A*68:01
ECASDPTSISL

SEQ ID NO: 1107 - protein, 10 aa, Homo sapiens
  Table 1.2; BPIFA2; ENSG00000131050; HLA -B*35:03,HLA-B*38:01
EGLETVDNTL

SEQ ID NO: 1108 - protein, 11 aa, Homo sapiens
  Table 1.2; BPIFA2; ENSG00000131050; HLA -A*11:01,HLA-A*33:01,HLA-A*33:03,HLA-A*68:01,HLA-B*27:02, HLA-C*07:06
EGLETVDNTLK

SEQ ID NO: 1109 - protein, 10 aa, Homo sapiens
  Table 1.2; BPIFA2; ENSG00000131050; HLA -A*68:02
EICPLIRIFI

SEQ ID NO: 1110 - protein, 9 aa, Homo sapiens
  Table 1.2; BPIFA2; ENSG00000131050; HLA -A*25:01,HLA-A*26:01,HLA-A*33:03,HLA-B*07:02,HLA-B*35:01, HLA-B*35:03,HLA-B*44:03,HLA-B*55:01
EPIDDGKGL

SEQ ID NO: 1111 - protein, 11 aa, Homo sapiens
  Table 1.2; BPIFA2; ENSG00000131050; HLA -A*23:01,HLA-A*25:01,HLA-A*26:01,HLA-A*33:03,HLA-A*68:01, HLA-A*68:02,HLA-B*07:02,HLA-B*35:01,HLA-B*35:03,HLA-B*38:01, HLA-B*44:03,HLA-C*07:02,HLA-C*07:06
EPIDDGKGLNL

SEQ ID NO: 1112 - protein, 8 aa, Homo sapiens
  Table 1.2; BPIFA2; ENSG00000131050; HLA -B*07:02,HLA-B*08:01,HLA-B*35:03
EPVLHEGL

SEQ ID NO: 1113 - protein, 11 aa, Homo sapiens
  Table 1.2; BPIFA2; ENSG00000131050; HLA -A*68:02,HLA-B*56:01
EPVLHEGLETV

SEQ ID NO: 1114 - protein, 9 aa, Homo sapiens
  Table 1.2; BPIFA2; ENSG00000131050; HLA -A*01:01
ETDPQTHQP

SEQ ID NO: 1115 - protein, 10 aa, Homo sapiens
  Table 1.2; BPIFA2; ENSG00000131050; HLA -A*01:01,HLA-A*26:01,HLA-A*33:01,HLA-A*33:03,HLA-A*68:01, HLA-A*68:02,HLA-B*27:05,HLA-C*06:02
ETDPQTHQPV

SEQ ID NO: 1116 - protein, 11 aa, Homo sapiens
  Table 1.2; BPIFA2; ENSG00000131050; HLA -A*01:01
ETDPQTHQPVA

SEQ ID NO: 1117 - protein, 8 aa, Homo sapiens
  Table 1.2; BPIFA2; ENSG00000131050; HLA -A*33:03
ETVDNTLK

SEQ ID NO: 1118 - protein, 9 aa, Homo sapiens
  Table 1.2; BPIFA2; ENSG00000131050; HLA -A*26:01
ETVDNTLKG

SEQ ID NO: 1119 - protein, 10 aa, Homo sapiens
  Table 1.2; BPIFA2; ENSG00000131050; HLA -A*25:01,HLA-A*26:01,HLA-A*33:03,HLA-A*68:01,HLA-A*68:02
ETVDNTLKGI

SEQ ID NO: 1120 - protein, 11 aa, Homo sapiens
  Table 1.2; BPIFA2; ENSG00000131050; HLA -A*25:01,HLA-A*26:01,HLA-A*68:01,HLA-A*68:02
ETVDNTLKGIL

SEQ ID NO: 1121 - protein, 9 aa, Homo sapiens
  Table 1.2; BPIFA2; ENSG00000131050; HLA -A*23:01,HLA-B*08:01,HLA-B*35:03,HLA-B*46:01,HLA-C*03:03, HLA-C*03:04
FGLKISNSL

SEQ ID NO: 1122 - protein, 9 aa, Homo sapiens
  Table 1.2; BPIFA2; ENSG00000131050; HLA -A*02:01,HLA-A*02:04,HLA-A*02:07,HLA-A*68:02,HLA-B*13:02
FIHSLDVNV

SEQ ID NO: 1123 - protein, 8 aa, Homo sapiens
  Table 1.2; BPIFA2; ENSG00000131050; HLA -B*35:01,HLA-B*35:03,HLA-B*51:01,HLA-B*54:01,HLA-B*55:01, HLA-B*56:01
FPVTANVT

SEQ ID NO: 1124 - protein, 9 aa, Homo sapiens
  Table 1.2; BPIFA2; ENSG00000131050; HLA -A*02:01,HLA-A*23:01,HLA-A*30:01,HLA-A*68:02,HLA-B*07:02, HLA-B*08:01,HLA-B*13:02,HLA-B*27:05,HLA-B*35:01,HLA-B*35:03, HLA-B*38:01,HLA-B*39:01,HLA-B*40:02,HLA-B*46:01,HLA-B*49:01,
  HLA-B*51:01,HLA-B*54:01,HLA-B*55:01,HLA-B*56:01,HLA-C*02:02, HLA-C*03:03,HLA-C*03:04,HLA-C*04:01,HLA-C*07:02,HLA-C*07:04, HLA-C*12:03
FPVTANVTV

SEQ ID NO: 1125 - protein, 10 aa, Homo sapiens
  Table 1.2; BPIFA2; ENSG00000131050; HLA -B*35:01,HLA-B*35:03,HLA-B*54:01,HLA-B*55:01,HLA-B*56:01
FPVTANVTVA

SEQ ID NO: 1126 - protein, 11 aa, Homo sapiens
  Table 1.2; BPIFA2; ENSG00000131050; HLA -B*35:03,HLA-B*54:01,HLA-B*55:01,HLA-B*56:01
FPVTANVTVAG

SEQ ID NO: 1127 - protein, 9 aa, Homo sapiens
  Table 1.2; BPIFA2; ENSG00000131050; HLA -A*02:01,HLA-A*02:03,HLA-A*02:04,HLA-A*02:07,HLA-A*03:01, HLA-A*03:02,HLA-A*11:01,HLA-A*23:01,HLA-A*24:02,HLA-A*25:01, HLA-A*26:01,HLA-A*29:02,HLA-A*30:01,HLA-A*30:02,HLA-A*31:01,
  HLA-A*32:01,HLA-A*33:01,HLA-A*33:03,HLA-A*68:01,HLA-A*68:02, HLA-B*07:02,HLA-B*08:01,HLA-B*13:02,HLA-B*15:01,HLA-B*15:03, HLA-B*18:01,HLA-B*27:02,HLA-B*27:05,HLA-B*35:01,HLA-B*35:03, HLA-B*37:01,HLA-B*38:01,HLA-B*39:01,HLA-B*40:01,HLA-B*40:02,
  HLA-B*44:02,HLA-B*44:03,HLA-B*46:01,HLA-B*49:01,HLA-B*51:01, HLA-B*54:01,HLA-B*55:01,HLA-B*56:01,HLA-B*57:01,HLA-B*58:01, HLA-C*01:02,HLA-C*02:02,HLA-C*03:03,HLA-C*03:04,HLA-C*04:01, HLA-C*05:01,HLA-C*06:02,HLA-C*07:02,HLA-C*07:04,HLA-C*07:06,
  HLA-C*12:03,HLA-C*14:02,HLA-C*16:01,HLA-C*16:02,HLA-C*16:04
FVNSVINTL

SEQ ID NO: 1128 - protein, 10 aa, Homo sapiens
  Table 1.2; BPIFA2; ENSG00000131050; HLA -A*01:01,HLA-A*03:01,HLA-A*03:02,HLA-A*11:01,HLA-A*29:02, HLA-A*31:01,HLA-A*33:01,HLA-A*33:03,HLA-A*68:01,HLA-A*68:02, HLA-B*27:02,HLA-B*27:05,HLA-C*07:06
FVNSVINTLK

SEQ ID NO: 1129 - protein, 10 aa, Homo sapiens
  Table 1.2; BPIFA2; ENSG00000131050; HLA -A*30:01,HLA-B*40:01,HLA-B*49:01
GECASDPTSI

SEQ ID NO: 1130 - protein, 9 aa, Homo sapiens
  Table 1.2; BPIFA2; ENSG00000131050; HLA -A*02:01,HLA-A*02:04,HLA-A*02:07,HLA-B*27:05,HLA-B*35:03, HLA-B*38:01,HLA-B*40:01,HLA-B*55:01
GLETVDNTL

SEQ ID NO: 1131 - protein, 10 aa, Homo sapiens
  Table 1.2; BPIFA2; ENSG00000131050; HLA -A*01:01,HLA-A*03:02,HLA-B*27:02
GLETVDNTLK

SEQ ID NO: 1132 - protein, 8 aa, Homo sapiens
  Table 1.2; BPIFA2; ENSG00000131050; HLA -B*08:01
GLKISNSL

SEQ ID NO: 1133 - protein, 10 aa, Homo sapiens
  Table 1.2; BPIFA2; ENSG00000131050; HLA -A*02:03,HLA-B*56:01
GLNLSFPVTA

SEQ ID NO: 1134 - protein, 10 aa, Homo sapiens
  Table 1.2; BPIFA2; ENSG00000131050; HLA -B*27:02
GNDLSNVVDK

SEQ ID NO: 1135 - protein, 8 aa, Homo sapiens
  Table 1.2; BPIFA2; ENSG00000131050; HLA -B*07:02,HLA-B*51:01
GPIIGQII

SEQ ID NO: 1136 - protein, 10 aa, Homo sapiens
  Table 1.2; BPIFA2; ENSG00000131050; HLA -B*07:02,HLA-B*35:03,HLA-B*56:01,HLA-C*07:02
GPIIGQIINL

SEQ ID NO: 1137 - protein, 8 aa, Homo sapiens
  Table 1.2; BPIFA2; ENSG00000131050; HLA -B*13:02
GQIINLKA

SEQ ID NO: 1138 - protein, 10 aa, Homo sapiens
  Table 1.2; BPIFA2; ENSG00000131050; HLA -B*15:01
GQIINLKASL

SEQ ID NO: 1139 - protein, 10 aa, Homo sapiens
  Table 1.2; BPIFA2; ENSG00000131050; HLA -B*27:05
GTSESLLDNL

SEQ ID NO: 1140 - protein, 9 aa, Homo sapiens
  Table 1.2; BPIFA2; ENSG00000131050; HLA -A*25:01,HLA-A*26:01,HLA-A*32:01,HLA-B*15:01,HLA-B*44:02, HLA-B*44:03,HLA-B*57:01,HLA-B*58:01
GVLQKSSAW

SEQ ID NO: 1141 - protein, 11 aa, Homo sapiens
  Table 1.2; BPIFA2; ENSG00000131050; HLA -A*02:04,HLA-A*31:01
GVLQKSSAWQL

SEQ ID NO: 1142 - protein, 10 aa, Homo sapiens
  Table 1.2; BPIFA2; ENSG00000131050; HLA -A*30:01,HLA-B*15:01,HLA-B*40:01
GVLTGTSESL

SEQ ID NO: 1143 - protein, 11 aa, Homo sapiens
  Table 1.2; BPIFA2; ENSG00000131050; HLA -A*02:01,HLA-A*23:01,HLA-B*27:05
GVLTGTSESLL

SEQ ID NO: 1144 - protein, 11 aa, Homo sapiens
  Table 1.2; BPIFA2; ENSG00000131050; HLA -A*30:01,HLA-B*35:03,HLA-B*38:01,HLA-B*39:01,HLA-B*40:01, HLA-B*40:02
HEGLETVDNTL

SEQ ID NO: 1145 - protein, 9 aa, Homo sapiens
  Table 1.2; BPIFA2; ENSG00000131050; HLA -B*13:02
HKTQLQTLI

SEQ ID NO: 1146 - protein, 8 aa, Homo sapiens
  Table 1.2; BPIFA2; ENSG00000131050; HLA -B*51:01
HSLDVNVI

SEQ ID NO: 1147 - protein, 10 aa, Homo sapiens
  Table 1.2; BPIFA2; ENSG00000131050; HLA -A*68:01
HSLDVNVIQQ

SEQ ID NO: 1148 - protein, 11 aa, Homo sapiens
  Table 1.2; BPIFA2; ENSG00000131050; HLA -A*68:02,HLA-B*13:02
HSLDVNVIQQV

SEQ ID NO: 1149 - protein, 8 aa, Homo sapiens
  Table 1.2; BPIFA2; ENSG00000131050; HLA -B*08:01,HLA-B*18:01,HLA-B*58:01
HSQIINKF

SEQ ID NO: 1150 - protein, 9 aa, Homo sapiens
  Table 1.2; BPIFA2; ENSG00000131050; HLA -A*68:02
HSQIINKFV

SEQ ID NO: 1151 - protein, 9 aa, Homo sapiens
  Table 1.2; BPIFA2; ENSG00000131050; HLA -A*02:07,HLA-B*37:01,HLA-B*38:01
IDDGKGLNL

SEQ ID NO: 1152 - protein, 8 aa, Homo sapiens
  Table 1.2; BPIFA2; ENSG00000131050; HLA -B*18:01
IETDPQTH

SEQ ID NO: 1153 - protein, 9 aa, Homo sapiens
  Table 1.2; BPIFA2; ENSG00000131050; HLA -B*49:01
IETDPQTHQ

SEQ ID NO: 1154 - protein, 10 aa, Homo sapiens
  Table 1.2; BPIFA2; ENSG00000131050; HLA -B*49:01
IETDPQTHQP

SEQ ID NO: 1155 - protein, 11 aa, Homo sapiens
  Table 1.2; BPIFA2; ENSG00000131050; HLA -A*30:01,HLA-B*27:05,HLA-B*39:01,HLA-B*40:01,HLA-B*49:01, HLA-C*06:02
IETDPQTHQPV

SEQ ID NO: 1156 - protein, 11 aa, Homo sapiens
  Table 1.2; BPIFA2; ENSG00000131050; HLA -A*24:02
IFIHSLDVNVI

SEQ ID NO: 1157 - protein, 9 aa, Homo sapiens
  Table 1.2; BPIFA2; ENSG00000131050; HLA -C*06:02
IGQIINLKA

SEQ ID NO: 1158 - protein, 9 aa, Homo sapiens
  Table 1.2; BPIFA2; ENSG00000131050; HLA -B*27:05,HLA-B*38:01,HLA-B*39:01
IHSLDVNVI

SEQ ID NO: 1159 - protein, 8 aa, Homo sapiens
  Table 1.2; BPIFA2; ENSG00000131050; HLA -A*02:04
IIGQIINL

SEQ ID NO: 1160 - protein, 9 aa, Homo sapiens
  Table 1.2; BPIFA2; ENSG00000131050; HLA -A*03:01,HLA-A*03:02,HLA-A*11:01,HLA-A*68:01,HLA-B*27:02
IIGQIINLK

SEQ ID NO: 1161 - protein, 9 aa, Homo sapiens
  Table 1.2; BPIFA2; ENSG00000131050; HLA -A*02:01,HLA-A*02:03,HLA-A*02:04,HLA-A*02:07,HLA-A*32:01, HLA-A*68:02,HLA-B*08:01,HLA-B*13:02,HLA-B*46:01,HLA-B*51:01, HLA-B*54:01,HLA-B*55:01,HLA-C*16:02
IINKFVNSV

SEQ ID NO: 1162 - protein, 8 aa, Homo sapiens
  Table 1.2; BPIFA2; ENSG00000131050; HLA -B*07:02,HLA-B*08:01
IINLKASL

SEQ ID NO: 1163 - protein, 9 aa, Homo sapiens
  Table 1.2; BPIFA2; ENSG00000131050; HLA -A*02:01,HLA-A*02:07,HLA-B*08:01,HLA-B*38:01,HLA-B*55:01, HLA-C*04:01,HLA-C*05:01
ILDVKAEPI

SEQ ID NO: 1164 - protein, 8 aa, Homo sapiens
  Table 1.2; BPIFA2; ENSG00000131050; HLA -B*08:01
INTLKSTV

SEQ ID NO: 1165 - protein, 11 aa, Homo sapiens
  Table 1.2; BPIFA2; ENSG00000131050; HLA -A*03:02,HLA-A*11:01
IQQVVDNPQHK

SEQ ID NO: 1166 - protein, 9 aa, Homo sapiens
  Table 1.2; BPIFA2; ENSG00000131050; HLA -A*01:01,HLA-A*02:01,HLA-A*02:03,HLA-A*02:07,HLA-A*68:02, HLA-B*13:02,HLA-B*27:02,HLA-B*54:01,HLA-C*02:02,HLA-C*06:02, HLA-C*12:03,HLA-C*16:02
ISNSLILDV

SEQ ID NO: 1167 - protein, 10 aa, Homo sapiens
  Table 1.2; BPIFA2; ENSG00000131050; HLA -A*03:01,HLA-A*03:02,HLA-A*11:01,HLA-B*27:02
ISNSLILDVK

SEQ ID NO: 1168 - protein, 8 aa, Homo sapiens
  Table 1.2; BPIFA2; ENSG00000131050; HLA -B*58:01,HLA-C*16:02
KAQEAEKL

SEQ ID NO: 1169 - protein, 9 aa, Homo sapiens
  Table 1.2; BPIFA2; ENSG00000131050; HLA -A*32:01,HLA-B*58:01,HLA-C*01:02,HLA-C*03:04,HLA-C*16:01, HLA-C*16:02
KAQEAEKLL

SEQ ID NO: 1170 - protein, 9 aa, Homo sapiens
  Table 1.2; BPIFA2; ENSG00000131050; HLA -B*54:01,HLA-B*56:01
KASLDLLTA

SEQ ID NO: 1171 - protein, 10 aa, Homo sapiens
  Table 1.2; BPIFA2; ENSG00000131050; HLA -B*56:01
KASLDLLTAV

SEQ ID NO: 1172 - protein, 10 aa, Homo sapiens
  Table 1.2; BPIFA2; ENSG00000131050; HLA -A*23:01,HLA-A*24:02,HLA-B*40:01,HLA-B*58:01,HLA-C*14:02
KFVNSVINTL

SEQ ID NO: 1173 - protein, 9 aa, Homo sapiens
  Table 1.2; BPIFA2; ENSG00000131050; HLA -A*24:02,HLA-A*32:01,HLA-B*15:03,HLA-B*38:01,HLA-B*44:02, HLA-B*57:01,HLA-B*58:01,HLA-C*12:03
KHSQIINKF

SEQ ID NO: 1174 - protein, 10 aa, Homo sapiens
  Table 1.2; BPIFA2; ENSG00000131050; HLA -A*02:03
KISNSLILDV

SEQ ID NO: 1175 - protein, 11 aa, Homo sapiens
  Table 1.2; BPIFA2; ENSG00000131050; HLA -A*03:01,HLA-A*03:02
KISNSLILDVK

SEQ ID NO: 1176 - protein, 10 aa, Homo sapiens
  Table 1.2; BPIFA2; ENSG00000131050; HLA -A*02:07
KLEPVLHEGL

SEQ ID NO: 1177 - protein, 9 aa, Homo sapiens
  Table 1.2; BPIFA2; ENSG00000131050; HLA -A*02:03
KLKVDLGVL

SEQ ID NO: 1178 - protein, 11 aa, Homo sapiens
  Table 1.2; BPIFA2; ENSG00000131050; HLA -A*03:01,HLA-A*03:02
KLKVDLGVLQK

SEQ ID NO: 1179 - protein, 9 aa, Homo sapiens
  Table 1.2; BPIFA2; ENSG00000131050; HLA -A*02:01,HLA-A*02:04,HLA-A*03:01,HLA-A*03:02,HLA-A*11:01, HLA-A*31:01,HLA-A*32:01
KLLNNVISK

SEQ ID NO: 1180 - protein, 10 aa, Homo sapiens
  Table 1.2; BPIFA2; ENSG00000131050; HLA -A*02:01,HLA-A*02:03,HLA-A*02:04,HLA-A*02:07,HLA-A*03:01
KLLNNVISKL

SEQ ID NO: 1181 - protein, 9 aa, Homo sapiens
  Table 1.2; BPIFA2; ENSG00000131050; HLA -A*02:01,HLA-A*02:03,HLA-A*02:04,HLA-A*32:01,HLA-B*13:02, HLA-B*58:01
KLLPTNTDI

SEQ ID NO: 1182 - protein, 10 aa, Homo sapiens
  Table 1.2; BPIFA2; ENSG00000131050; HLA -A*23:01,HLA-A*24:02,HLA-B*57:01
KLLPTNTDIF

SEQ ID NO: 1183 - protein, 11 aa, Homo sapiens
  Table 1.2; BPIFA2; ENSG00000131050; HLA -C*04:01
KLLPTNTDIFG

SEQ ID NO: 1184 - protein, 10 aa, Homo sapiens
  Table 1.2; BPIFA2; ENSG00000131050; HLA -B*40:02
KQKAQEAEKL

SEQ ID NO: 1185 - protein, 9 aa, Homo sapiens
  Table 1.2; BPIFA2; ENSG00000131050; HLA -A*03:01,HLA-A*03:02,HLA-A*11:01,HLA-A*31:01
KSSAWQLAK

SEQ ID NO: 1186 - protein, 8 aa, Homo sapiens
  Table 1.2; BPIFA2; ENSG00000131050; HLA -A*32:01,HLA-B*58:01
KSTVSSLL

SEQ ID NO: 1187 - protein, 10 aa, Homo sapiens
  Table 1.2; BPIFA2; ENSG00000131050; HLA -A*03:01,HLA-A*03:02,HLA-A*11:01
KSTVSSLLQK

SEQ ID NO: 1188 - protein, 9 aa, Homo sapiens
  Table 1.2; BPIFA2; ENSG00000131050; HLA -A*01:01,HLA-A*02:07,HLA-A*03:01,HLA-A*03:02,HLA-A*11:01, HLA-A*31:01,HLA-A*33:03,HLA-A*68:01,HLA-B*27:02,HLA-B*27:05, HLA-B*57:01,HLA-C*06:02
KVDLGVLQK

SEQ ID NO: 1189 - protein, 9 aa, Homo sapiens
  Table 1.2; BPIFA2; ENSG00000131050; HLA -B*08:01
LAKQKAQEA

SEQ ID NO: 1190 - protein, 9 aa, Homo sapiens
  Table 1.2; BPIFA2; ENSG00000131050; HLA -A*23:01,HLA-A*30:01,HLA-B*40:02,HLA-B*49:01,HLA-B*51:01
LDLLTAVTI

SEQ ID NO: 1191 - protein, 8 aa, Homo sapiens
  Table 1.2; BPIFA2; ENSG00000131050; HLA -B*37:01,HLA-B*40:02
LDNLGNDL

SEQ ID NO: 1192 - protein, 8 aa, Homo sapiens
  Table 1.2; BPIFA2; ENSG00000131050; HLA -B*37:01,HLA-B*40:02
LDVKAEPI

SEQ ID NO: 1193 - protein, 8 aa, Homo sapiens
  Table 1.2; BPIFA2; ENSG00000131050; HLA -C*07:01
LDVNVIQQ

SEQ ID NO: 1194 - protein, 9 aa, Homo sapiens
  Table 1.2; BPIFA2; ENSG00000131050; HLA -A*02:03,HLA-A*02:04,HLA-A*02:07,HLA-A*30:01,HLA-A*68:02, HLA-B*13:02,HLA-B*37:01,HLA-B*40:02,HLA-B*44:02,HLA-B*49:01, HLA-C*06:02,HLA-C*12:03
LDVNVIQQV

SEQ ID NO: 1195 - protein, 10 aa, Homo sapiens
  Table 1.2; BPIFA2; ENSG00000131050; HLA -A*68:02
LDVNVIQQVV

SEQ ID NO: 1196 - protein, 8 aa, Homo sapiens
  Table 1.2; BPIFA2; ENSG00000131050; HLA -B*08:01
LEKLKVDL

SEQ ID NO: 1197 - protein, 9 aa, Homo sapiens
  Table 1.2; BPIFA2; ENSG00000131050; HLA -A*30:01,HLA-B*37:01,HLA-B*40:01,HLA-B*40:02
LEPVLHEGL

SEQ ID NO: 1198 - protein, 8 aa, Homo sapiens
  Table 1.2; BPIFA2; ENSG00000131050; HLA -A*30:01,HLA-B*18:01,HLA-B*40:01,HLA-B*40:02,HLA-B*49:01
LETVDNTL

SEQ ID NO: 1199 - protein, 9 aa, Homo sapiens
  Table 1.2; BPIFA2; ENSG00000131050; HLA -B*49:01
LETVDNTLK

SEQ ID NO: 1200 - protein, 9 aa, Homo sapiens
  Table 1.2; BPIFA2; ENSG00000131050; HLA -B*27:05,HLA-B*39:01
LGNDLSNVV

SEQ ID NO: 1201 - protein, 11 aa, Homo sapiens
  Table 1.2; BPIFA2; ENSG00000131050; HLA -A*03:02,HLA-A*11:01,HLA-B*27:02
LGNDLSNVVDK

SEQ ID NO: 1202 - protein, 9 aa, Homo sapiens
  Table 1.2; BPIFA2; ENSG00000131050; HLA -B*54:01
LGVLQKSSA

SEQ ID NO: 1203 - protein, 10 aa, Homo sapiens
  Table 1.2; BPIFA2; ENSG00000131050; HLA -A*02:01,HLA-A*02:03,HLA-A*02:04,HLA-A*02:07,HLA-A*68:02, HLA-B*40:02,HLA-C*06:02,HLA-C*07:01
LILDVKAEPI

SEQ ID NO: 1204 - protein, 9 aa, Homo sapiens
  Table 1.2; BPIFA2; ENSG00000131050; HLA -A*02:03,HLA-A*02:04
LIRIFIHSL

SEQ ID NO: 1205 - protein, 10 aa, Homo sapiens
  Table 1.2; BPIFA2; ENSG00000131050; HLA -B*27:02
LKVDLGVLQK

SEQ ID NO: 1206 - protein, 9 aa, Homo sapiens
  Table 1.2; BPIFA2; ENSG00000131050; HLA -A*01:01,HLA-A*02:01,HLA-A*02:07
LLDKHSQII

SEQ ID NO: 1207 - protein, 11 aa, Homo sapiens
  Table 1.2; BPIFA2; ENSG00000131050; HLA -A*03:01,HLA-A*03:02
LLDKHSQIINK

SEQ ID NO: 1208 - protein, 9 aa, Homo sapiens
  Table 1.2; BPIFA2; ENSG00000131050; HLA -A*01:01,HLA-A*02:07,HLA-B*38:01,HLA-B*39:01,HLA-C*05:01
LLDNLGNDL

SEQ ID NO: 1209 - protein, 8 aa, Homo sapiens
  Table 1.2; BPIFA2; ENSG00000131050; HLA -A*03:01,HLA-A*03:02,HLA-B*27:02,HLA-B*27:05
LLNNVISK

SEQ ID NO: 1210 - protein, 9 aa, Homo sapiens
  Table 1.2; BPIFA2; ENSG00000131050; HLA -A*02:01,HLA-A*02:03,HLA-A*02:04,HLA-A*02:07,HLA-A*03:01, HLA-A*03:02,HLA-A*23:01,HLA-A*24:02,HLA-A*31:01,HLA-A*32:01, HLA-A*68:02,HLA-B*13:02,HLA-B*55:01,HLA-C*02:02
LLNNVISKL

SEQ ID NO: 1211 - protein, 9 aa, Homo sapiens
  Table 1.2; BPIFA2; ENSG00000131050; HLA -A*02:07,HLA-A*24:02,HLA-A*29:02,HLA-B*46:01
LLPTNTDIF

SEQ ID NO: 1212 - protein, 11 aa, Homo sapiens
  Table 1.2; BPIFA2; ENSG00000131050; HLA -A*02:01,HLA-A*02:04,HLA-A*02:07
LLPTNTDIFGL

SEQ ID NO: 1213 - protein, 9 aa, Homo sapiens
  Table 1.2; BPIFA2; ENSG00000131050; HLA -A*02:01,HLA-A*02:03,HLA-A*02:04
LLQKEICPL

SEQ ID NO: 1214 - protein, 9 aa, Homo sapiens
  Table 1.2; BPIFA2; ENSG00000131050; HLA -A*02:01,HLA-A*02:03
LLTAVTIET

SEQ ID NO: 1215 - protein, 9 aa, Homo sapiens
  Table 1.2; BPIFA2; ENSG00000131050; HLA -B*54:01
LNLSFPVTA

SEQ ID NO: 1216 - protein, 8 aa, Homo sapiens
  Table 1.2; BPIFA2; ENSG00000131050; HLA -B*35:01,HLA-B*35:03,HLA-B*51:01,HLA-B*55:01
LPTNTDIF

SEQ ID NO: 1217 - protein, 10 aa, Homo sapiens
  Table 1.2; BPIFA2; ENSG00000131050; HLA -A*68:01,HLA-B*27:02,HLA-B*35:01,HLA-B*35:03
LPTNTDIFGL

SEQ ID NO: 1218 - protein, 9 aa, Homo sapiens
  Table 1.2; BPIFA2; ENSG00000131050; HLA -A*24:02,HLA-B*13:02
LQKEICPLI

SEQ ID NO: 1219 - protein, 9 aa, Homo sapiens
  Table 1.2; BPIFA2; ENSG00000131050; HLA -A*02:04
LQKSSAWQL

SEQ ID NO: 1220 - protein, 9 aa, Homo sapiens
  Table 1.2; BPIFA2; ENSG00000131050; HLA -A*02:01,HLA-A*02:04
LQLWKLVLL

SEQ ID NO: 1221 - protein, 9 aa, Homo sapiens
  Table 1.2; BPIFA2; ENSG00000131050; HLA -A*02:01,HLA-A*02:03,HLA-A*02:04,HLA-A*02:07,HLA-A*32:01, HLA-A*68:02,HLA-B*13:02,HLA-B*27:05,HLA-B*40:02,HLA-B*46:01, HLA-B*51:01,HLA-B*54:01,HLA-B*56:01,HLA-B*57:01,HLA-B*58:01,
  HLA-C*02:02,HLA-C*06:02,HLA-C*12:03
LSFPVTANV

SEQ ID NO: 1222 - protein, 10 aa, Homo sapiens
  Table 1.2; BPIFA2; ENSG00000131050; HLA -C*06:02
LSFPVTANVT

SEQ ID NO: 1223 - protein, 11 aa, Homo sapiens
  Table 1.2; BPIFA2; ENSG00000131050; HLA -A*02:07,HLA-A*68:02,HLA-B*54:01,HLA-B*57:01,HLA-B*58:01, HLA-C*02:02
LSFPVTANVTV

SEQ ID NO: 1224 - protein, 9 aa, Homo sapiens
  Table 1.2; BPIFA2; ENSG00000131050; HLA -A*02:04
MLQLWKLVL

SEQ ID NO: 1225 - protein, 10 aa, Homo sapiens
  Table 1.2; BPIFA2; ENSG00000131050; HLA -A*02:04
MLQLWKLVLL

SEQ ID NO: 1226 - protein, 9 aa, Homo sapiens
  Table 1.2; BPIFA2; ENSG00000131050; HLA -A*03:02,HLA-A*11:01,HLA-B*27:02
NDLSNVVDK

SEQ ID NO: 1227 - protein, 9 aa, Homo sapiens
  Table 1.2; BPIFA2; ENSG00000131050; HLA -A*02:01,HLA-A*02:03,HLA-B*55:01
NLGNDLSNV

SEQ ID NO: 1228 - protein, 9 aa, Homo sapiens
  Table 1.2; BPIFA2; ENSG00000131050; HLA -A*02:03,HLA-A*02:04
NLKASLDLL

SEQ ID NO: 1229 - protein, 10 aa, Homo sapiens
  Table 1.2; BPIFA2; ENSG00000131050; HLA -A*68:02
NLSFPVTANV

SEQ ID NO: 1230 - protein, 8 aa, Homo sapiens
  Table 1.2; BPIFA2; ENSG00000131050; HLA -B*07:02,HLA-B*08:01,HLA-C*07:02
NPQHKTQL

SEQ ID NO: 1231 - protein, 11 aa, Homo sapiens
  Table 1.2; BPIFA2; ENSG00000131050; HLA -B*07:02
NPQHKTQLQTL

SEQ ID NO: 1232 - protein, 8 aa, Homo sapiens
  Table 1.2; BPIFA2; ENSG00000131050; HLA -A*01:01
NTDIFGLK

SEQ ID NO: 1233 - protein, 9 aa, Homo sapiens
  Table 1.2; BPIFA2; ENSG00000131050; HLA -A*01:01,HLA-A*02:07,HLA-A*68:02,HLA-B*38:01
NTDIFGLKI

SEQ ID NO: 1234 - protein, 9 aa, Homo sapiens
  Table 1.2; BPIFA2; ENSG00000131050; HLA -A*03:01,HLA-A*03:02,HLA-A*11:01,HLA-A*33:01,HLA-A*33:03, HLA-A*68:01,HLA-C*07:06
NTLKGILEK

SEQ ID NO: 1235 - protein, 10 aa, Homo sapiens
  Table 1.2; BPIFA2; ENSG00000131050; HLA -A*02:04,HLA-A*68:02
NTLKGILEKL

SEQ ID NO: 1236 - protein, 9 aa, Homo sapiens
  Table 1.2; BPIFA2; ENSG00000131050; HLA -A*25:01,HLA-B*13:02,HLA-B*35:03,HLA-B*38:01,HLA-B*39:01, HLA-B*51:01,HLA-C*03:03
NVTVAGPII

SEQ ID NO: 1237 - protein, 9 aa, Homo sapiens
  Table 1.2; BPIFA2; ENSG00000131050; HLA -A*02:01,HLA-A*02:03,HLA-A*02:04,HLA-A*02:07,HLA-A*25:01, HLA-A*26:01,HLA-A*68:02,HLA-B*46:01
NVVDKLEPV

SEQ ID NO: 1238 - protein, 10 aa, Homo sapiens
  Table 1.2; BPIFA2; ENSG00000131050; HLA -A*02:04,HLA-A*25:01,HLA-A*26:01,HLA-A*68:02,HLA-B*35:01, HLA-B*35:03
NVVDKLEPVL

SEQ ID NO: 1239 - protein, 8 aa, Homo sapiens
  Table 1.2; BPIFA2; ENSG00000131050; HLA -C*05:01
PIDDGKGL

SEQ ID NO: 1240 - protein, 10 aa, Homo sapiens
  Table 1.2; BPIFA2; ENSG00000131050; HLA -A*01:01,HLA-A*02:07
PIDDGKGLNL

SEQ ID NO: 1241 - protein, 9 aa, Homo sapiens
  Table 1.2; BPIFA2; ENSG00000131050; HLA -A*02:04,HLA-A*68:02
PIIGQIINL

SEQ ID NO: 1242 - protein, 9 aa, Homo sapiens
  Table 1.2; BPIFA2; ENSG00000131050; HLA -B*13:02
PQTHQPVAV

SEQ ID NO: 1243 - protein, 9 aa, Homo sapiens
  Table 1.2; BPIFA2; ENSG00000131050; HLA -C*07:02
PTSISLSLL

SEQ ID NO: 1244 - protein, 10 aa, Homo sapiens
  Table 1.2; BPIFA2; ENSG00000131050; HLA -C*07:02
PVTANVTVAG

SEQ ID NO: 1245 - protein, 10 aa, Homo sapiens
  Table 1.2; BPIFA2; ENSG00000131050; HLA -A*30:01,HLA-B*49:01
QEAEKLLNNV

SEQ ID NO: 1246 - protein, 11 aa, Homo sapiens
  Table 1.2; BPIFA2; ENSG00000131050; HLA -A*30:01,HLA-B*38:01,HLA-B*40:02,HLA-B*44:02,HLA-B*44:03, HLA-B*49:01
QEAEKLLNNVI

SEQ ID NO: 1247 - protein, 9 aa, Homo sapiens
  Table 1.2; BPIFA2; ENSG00000131050; HLA -B*38:01,HLA-B*39:01
QHKTQLQTL

SEQ ID NO: 1248 - protein, 10 aa, Homo sapiens
  Table 1.2; BPIFA2; ENSG00000131050; HLA -A*02:03,HLA-A*68:02
QIINKFVNSV

SEQ ID NO: 1249 - protein, 9 aa, Homo sapiens
  Table 1.2; BPIFA2; ENSG00000131050; HLA -A*25:01,HLA-A*32:01,HLA-B*07:02,HLA-B*08:01,HLA-C*01:02
QIINLKASL

SEQ ID NO: 1250 - protein, 9 aa, Homo sapiens
  Table 1.2; BPIFA2; ENSG00000131050; HLA -B*38:01
QKAQEAEKL

SEQ ID NO: 1251 - protein, 8 aa, Homo sapiens
  Table 1.2; BPIFA2; ENSG00000131050; HLA -A*02:01,HLA-A*02:04
QLWKLVLL

SEQ ID NO: 1252 - protein, 9 aa, Homo sapiens
  Table 1.2; BPIFA2; ENSG00000131050; HLA -B*35:03,HLA-B*54:01,HLA-B*55:01,HLA-B*56:01
QPVAVLGEC

SEQ ID NO: 1253 - protein, 10 aa, Homo sapiens
  Table 1.2; BPIFA2; ENSG00000131050; HLA -B*35:03,HLA-B*54:01,HLA-B*55:01,HLA-B*56:01
QPVAVLGECA

SEQ ID NO: 1254 - protein, 9 aa, Homo sapiens
  Table 1.2; BPIFA2; ENSG00000131050; HLA -B*15:01,HLA-B*27:05
QQVVDNPQH

SEQ ID NO: 1255 - protein, 9 aa, Homo sapiens
  Table 1.2; BPIFA2; ENSG00000131050; HLA -A*25:01,HLA-A*68:01,HLA-A*68:02,HLA-B*39:01
QTHQPVAVL

SEQ ID NO: 1256 - protein, 9 aa, Homo sapiens
  Table 1.2; BPIFA2; ENSG00000131050; HLA -A*03:01,HLA-A*03:02,HLA-A*11:01,HLA-A*33:03,HLA-A*68:01, HLA-C*07:06
QVVDNPQHK

SEQ ID NO: 1257 - protein, 10 aa, Homo sapiens
  Table 1.2; BPIFA2; ENSG00000131050; HLA -C*06:02
QVVDNPQHKT

SEQ ID NO: 1258 - protein, 9 aa, Homo sapiens
  Table 1.2; BPIFA2; ENSG00000131050; HLA -A*03:02,HLA-A*11:01,HLA-A*31:01,HLA-C*07:06
SAWQLAKQK

SEQ ID NO: 1259 - protein, 10 aa, Homo sapiens
  Table 1.2; BPIFA2; ENSG00000131050; HLA -B*54:01
SAWQLAKQKA

SEQ ID NO: 1260 - protein, 8 aa, Homo sapiens
  Table 1.2; BPIFA2; ENSG00000131050; HLA -A*30:01,HLA-B*07:02,HLA-B*37:01,HLA-B*40:02,HLA-C*01:02
SDPTSISL

SEQ ID NO: 1261 - protein, 8 aa, Homo sapiens
  Table 1.2; BPIFA2; ENSG00000131050; HLA -B*37:01,HLA-B*40:01
SESLLDNL

SEQ ID NO: 1262 - protein, 9 aa, Homo sapiens
  Table 1.2; BPIFA2; ENSG00000131050; HLA -C*14:02
SFPVTANVT

SEQ ID NO: 1263 - protein, 10 aa, Homo sapiens
  Table 1.2; BPIFA2; ENSG00000131050; HLA -C*01:02,HLA-C*04:01
SFPVTANVTV

SEQ ID NO: 1264 - protein, 9 aa, Homo sapiens
  Table 1.2; BPIFA2; ENSG00000131050; HLA -A*03:01,HLA-A*03:02,HLA-A*11:01
SISLSLLDK

SEQ ID NO: 1265 - protein, 8 aa, Homo sapiens
  Table 1.2; BPIFA2; ENSG00000131050; HLA -A*02:01,HLA-A*02:07,HLA-B*55:01,HLA-C*05:01
SLDLLTAV

SEQ ID NO: 1266 - protein, 10 aa, Homo sapiens
  Table 1.2; BPIFA2; ENSG00000131050; HLA -A*02:01,HLA-A*02:07,HLA-B*13:02,HLA-B*38:01,HLA-C*04:01
SLDLLTAVTI

SEQ ID NO: 1267 - protein, 10 aa, Homo sapiens
  Table 1.2; BPIFA2; ENSG00000131050; HLA -A*02:01,HLA-A*02:03,HLA-A*02:07,HLA-B*13:02,HLA-B*55:01
SLDVNVIQQV

SEQ ID NO: 1268 - protein, 11 aa, Homo sapiens
  Table 1.2; BPIFA2; ENSG00000131050; HLA -A*02:07
SLDVNVIQQVV

SEQ ID NO: 1269 - protein, 9 aa, Homo sapiens
  Table 1.2; BPIFA2; ENSG00000131050; HLA -A*02:01,HLA-A*02:03,HLA-A*02:04,HLA-A*02:07,HLA-B*08:01, HLA-B*13:02,HLA-B*55:01
SLLDKHSQI

SEQ ID NO: 1270 - protein, 10 aa, Homo sapiens
  Table 1.2; BPIFA2; ENSG00000131050; HLA -A*02:01,HLA-A*02:04
SLLDNLGNDL

SEQ ID NO: 1271 - protein, 9 aa, Homo sapiens
  Table 1.2; BPIFA2; ENSG00000131050; HLA -B*27:02
SNSLILDVK

SEQ ID NO: 1272 - protein, 8 aa, Homo sapiens
  Table 1.2; BPIFA2; ENSG00000131050; HLA -B*13:02
SQIINKFV

SEQ ID NO: 1273 - protein, 10 aa, Homo sapiens
  Table 1.2; BPIFA2; ENSG00000131050; HLA -A*03:02,HLA-A*11:01
SSAWQLAKQK

SEQ ID NO: 1274 - protein, 9 aa, Homo sapiens
  Table 1.2; BPIFA2; ENSG00000131050; HLA -A*03:01,HLA-A*03:02,HLA-A*11:01,HLA-A*31:01,HLA-A*33:01, HLA-A*33:03,HLA-A*68:01,HLA-C*07:06
STVSSLLQK

SEQ ID NO: 1275 - protein, 10 aa, Homo sapiens
  Table 1.2; BPIFA2; ENSG00000131050; HLA -A*02:03,HLA-A*25:01,HLA-A*26:01,HLA-A*32:01,HLA-A*68:02, HLA-B*13:02
SVINTLKSTV

SEQ ID NO: 1276 - protein, 10 aa, Homo sapiens
  Table 1.2; BPIFA2; ENSG00000131050; HLA -B*27:02
TAVTIETDPQ

SEQ ID NO: 1277 - protein, 8 aa, Homo sapiens
  Table 1.2; BPIFA2; ENSG00000131050; HLA -B*44:02,HLA-B*44:03,HLA-B*49:01
TDIFGLKI

SEQ ID NO: 1278 - protein, 9 aa, Homo sapiens
  Table 1.2; BPIFA2; ENSG00000131050; HLA -B*37:01
TDPQTHQPV

SEQ ID NO: 1279 - protein, 11 aa, Homo sapiens
  Table 1.2; BPIFA2; ENSG00000131050; HLA -B*27:05,HLA-B*39:01
TGTSESLLDNL

SEQ ID NO: 1280 - protein, 8 aa, Homo sapiens
  Table 1.2; BPIFA2; ENSG00000131050; HLA -B*27:05,HLA-B*38:01,HLA-B*39:01
THQPVAVL

SEQ ID NO: 1281 - protein, 8 aa, Homo sapiens
  Table 1.2; BPIFA2; ENSG00000131050; HLA -A*03:01
TLKGILEK

SEQ ID NO: 1282 - protein, 9 aa, Homo sapiens
  Table 1.2; BPIFA2; ENSG00000131050; HLA -A*02:01,HLA-A*02:03,HLA-A*02:04,HLA-A*02:07,HLA-A*03:01, HLA-A*31:01,HLA-A*68:02,HLA-B*08:01,HLA-B*40:02,HLA-C*06:02
TLKGILEKL

SEQ ID NO: 1283 - protein, 9 aa, Homo sapiens
  Table 1.2; BPIFA2; ENSG00000131050; HLA -A*02:03,HLA-A*02:04,HLA-A*25:01,HLA-A*32:01,HLA-B*07:02, HLA-B*08:01,HLA-B*15:01,HLA-B*15:03,HLA-B*46:01,HLA-C*01:02, HLA-C*07:02,HLA-C*14:02
TLKSTVSSL

SEQ ID NO: 1284 - protein, 10 aa, Homo sapiens
  Table 1.2; BPIFA2; ENSG00000131050; HLA -A*02:03,HLA-A*03:01,HLA-A*31:01
TLKSTVSSLL

SEQ ID NO: 1285 - protein, 9 aa, Homo sapiens
  Table 1.2; BPIFA2; ENSG00000131050; HLA -A*33:01,HLA-A*33:03,HLA-B*27:02
TNTDIFGLK

SEQ ID NO: 1286 - protein, 9 aa, Homo sapiens
  Table 1.2; BPIFA2; ENSG00000131050; HLA -B*39:01
TSESLLDNL

SEQ ID NO: 1287 - protein, 10 aa, Homo sapiens
  Table 1.2; BPIFA2; ENSG00000131050; HLA -A*11:01,HLA-B*27:02
TSISLSLLDK

SEQ ID NO: 1288 - protein, 9 aa, Homo sapiens
  Table 1.2; BPIFA2; ENSG00000131050; HLA -A*03:01,HLA-A*03:02,HLA-A*11:01,HLA-A*26:01,HLA-A*31:01, HLA-A*68:01,HLA-A*68:02,HLA-B*27:05
TVAGPIIGQ

SEQ ID NO: 1289 - protein, 10 aa, Homo sapiens
  Table 1.2; BPIFA2; ENSG00000131050; HLA -A*02:03,HLA-A*25:01,HLA-A*26:01,HLA-A*68:01,HLA-A*68:02, HLA-B*13:02
TVAGPIIGQI

SEQ ID NO: 1290 - protein, 11 aa, Homo sapiens
  Table 1.2; BPIFA2; ENSG00000131050; HLA -A*68:01,HLA-A*68:02,HLA-B*13:02,HLA-B*38:01
TVAGPIIGQII

SEQ ID NO: 1291 - protein, 9 aa, Homo sapiens
  Table 1.2; BPIFA2; ENSG00000131050; HLA -A*02:07
TVDNTLKGI

SEQ ID NO: 1292 - protein, 8 aa, Homo sapiens
  Table 1.2; BPIFA2; ENSG00000131050; HLA -A*03:01,HLA-A*03:02,HLA-A*11:01,HLA-B*27:02
TVSSLLQK

SEQ ID NO: 1293 - protein, 10 aa, Homo sapiens
  Table 1.2; BPIFA2; ENSG00000131050; HLA -A*68:02
TVSSLLQKEI

SEQ ID NO: 1294 - protein, 9 aa, Homo sapiens
  Table 1.2; BPIFA2; ENSG00000131050; HLA -A*02:03,HLA-A*23:01,HLA-A*24:02,HLA-A*25:01,HLA-A*30:01, HLA-A*68:02,HLA-B*13:02,HLA-B*38:01,HLA-B*46:01,HLA-B*49:01, HLA-B*51:01,HLA-B*58:01,HLA-C*02:02,HLA-C*05:01,HLA-C*06:02,
  HLA-C*12:03,HLA-C*16:02
VAGPIIGQI

SEQ ID NO: 1295 - protein, 10 aa, Homo sapiens
  Table 1.2; BPIFA2; ENSG00000131050; HLA -A*23:01,HLA-A*24:02,HLA-B*38:01,HLA-B*51:01,HLA-C*12:03
VAGPIIGQII

SEQ ID NO: 1296 - protein, 8 aa, Homo sapiens
  Table 1.2; BPIFA2; ENSG00000131050; HLA -A*30:01,HLA-B*07:02,HLA-B*08:01,HLA-B*15:03,HLA-B*18:01, HLA-B*37:01,HLA-B*40:02,HLA-C*06:02,HLA-C*07:01,HLA-C*07:04, HLA-C*12:03
VDKLEPVL

SEQ ID NO: 1297 - protein, 8 aa, Homo sapiens
  Table 1.2; BPIFA2; ENSG00000131050; HLA -A*03:01,HLA-A*03:02,HLA-A*11:01,HLA-B*27:02,HLA-C*04:01, HLA-C*07:01
VDLGVLQK

SEQ ID NO: 1298 - protein, 9 aa, Homo sapiens
  Table 1.2; BPIFA2; ENSG00000131050; HLA -B*40:02
VDLGVLQKS

SEQ ID NO: 1299 - protein, 8 aa, Homo sapiens
  Table 1.2; BPIFA2; ENSG00000131050; HLA -A*32:01,HLA-C*06:02,HLA-C*16:02
VDNPQHKT

SEQ ID NO: 1300 - protein, 10 aa, Homo sapiens
  Table 1.2; BPIFA2; ENSG00000131050; HLA -A*30:01,HLA-B*07:02,HLA-B*37:01,HLA-B*40:02
VDNPQHKTQL

SEQ ID NO: 1301 - protein, 9 aa, Homo sapiens
  Table 1.2; BPIFA2; ENSG00000131050; HLA -A*02:01,HLA-A*02:03,HLA-A*02:07,HLA-A*31:01,HLA-A*32:01, HLA-B*08:01,HLA-B*13:02,HLA-B*46:01,HLA-B*51:01,HLA-B*55:01, HLA-B*58:01,HLA-C*01:02,HLA-C*06:02,HLA-C*07:04,HLA-C*12:03,
  HLA-C*16:02
VINTLKSTV

SEQ ID NO: 1302 - protein, 9 aa, Homo sapiens
  Table 1.2; BPIFA2; ENSG00000131050; HLA -A*02:01,HLA-A*02:03,HLA-A*02:04,HLA-A*02:07,HLA-B*13:02, HLA-B*15:01,HLA-B*46:01,HLA-B*49:01,HLA-B*51:01,HLA-B*55:01
VLHEGLETV

SEQ ID NO: 1303 - protein, 8 aa, Homo sapiens
  Table 1.2; BPIFA2; ENSG00000131050; HLA -A*32:01,HLA-B*58:01
VLQKSSAW

SEQ ID NO: 1304 - protein, 10 aa, Homo sapiens
  Table 1.2; BPIFA2; ENSG00000131050; HLA -A*02:04
VLQKSSAWQL

SEQ ID NO: 1305 - protein, 9 aa, Homo sapiens
  Table 1.2; BPIFA2; ENSG00000131050; HLA -A*02:01,HLA-A*02:03,HLA-A*02:07,HLA-A*23:01,HLA-A*24:02, HLA-A*30:01,HLA-A*32:01,HLA-B*13:02,HLA-B*15:01,HLA-B*15:03, HLA-B*35:03,HLA-B*39:01,HLA-B*40:01,HLA-B*46:01,HLA-B*55:01,
  HLA-C*01:02,HLA-C*07:02,HLA-C*14:02,HLA-C*16:01
VLTGTSESL

SEQ ID NO: 1306 - protein, 8 aa, Homo sapiens
  Table 1.2; BPIFA2; ENSG00000131050; HLA -A*23:01,HLA-B*08:01,HLA-B*27:05,HLA-B*37:01,HLA-B*39:01, HLA-C*04:01,HLA-C*06:02,HLA-C*12:03,HLA-C*14:02,HLA-C*16:01, HLA-C*16:02
VNSVINTL

SEQ ID NO: 1307 - protein, 9 aa, Homo sapiens
  Table 1.2; BPIFA2; ENSG00000131050; HLA -A*03:01,HLA-A*03:02,HLA-A*11:01,HLA-A*33:01,HLA-A*33:03, HLA-A*68:01,HLA-B*27:02,HLA-B*27:05,HLA-C*04:01,HLA-C*07:06
VNSVINTLK

SEQ ID NO: 1308 - protein, 10 aa, Homo sapiens
  Table 1.2; BPIFA2; ENSG00000131050; HLA -C*07:01
VNVIQQVVDN

SEQ ID NO: 1309 - protein, 9 aa, Homo sapiens
  Table 1.2; BPIFA2; ENSG00000131050; HLA -B*13:02,HLA-B*58:01,HLA-C*06:02,HLA-C*16:02
VSSLLQKEI

SEQ ID NO: 1310 - protein, 9 aa, Homo sapiens
  Table 1.2; BPIFA2; ENSG00000131050; HLA -A*02:01,HLA-B*58:01,HLA-C*04:01,HLA-C*06:02
VTIETDPQT

SEQ ID NO: 1311 - protein, 10 aa, Homo sapiens
  Table 1.2; BPIFA2; ENSG00000131050; HLA -A*11:01,HLA-B*27:05,HLA-B*57:01,HLA-B*58:01,HLA-C*12:03
VTIETDPQTH

SEQ ID NO: 1312 - protein, 8 aa, Homo sapiens
  Table 1.2; BPIFA2; ENSG00000131050; HLA -A*23:01,HLA-B*40:02,HLA-B*51:01,HLA-B*58:01,HLA-C*03:03, HLA-C*03:04
VTVAGPII

SEQ ID NO: 1313 - protein, 10 aa, Homo sapiens
  Table 1.2; BPIFA2; ENSG00000131050; HLA -A*11:01,HLA-A*26:01,HLA-C*06:02
VTVAGPIIGQ

SEQ ID NO: 1314 - protein, 11 aa, Homo sapiens
  Table 1.2; BPIFA2; ENSG00000131050; HLA -A*68:02
VTVAGPIIGQI

SEQ ID NO: 1315 - protein, 9 aa, Homo sapiens
  Table 1.2; BPIFA2; ENSG00000131050; HLA -A*01:01,HLA-A*02:01,HLA-A*02:04,HLA-A*02:07,HLA-A*03:02, HLA-A*23:01,HLA-A*24:02,HLA-A*30:01,HLA-B*27:05,HLA-B*35:01, HLA-B*35:03,HLA-B*38:01,HLA-B*39:01,HLA-B*40:01,HLA-B*55:01,
  HLA-B*58:01,HLA-C*03:03,HLA-C*05:01,HLA-C*07:04
VVDKLEPVL

SEQ ID NO: 1316 - protein, 10 aa, Homo sapiens
  Table 1.2; BPIFA2; ENSG00000131050; HLA -A*01:01
VVDKLEPVLH

SEQ ID NO: 1317 - protein, 8 aa, Homo sapiens
  Table 1.2; BPIFA2; ENSG00000131050; HLA -A*01:01,HLA-A*03:02,HLA-A*11:01,HLA-C*05:01
VVDNPQHK

SEQ ID NO: 1318 - protein, 9 aa, Homo sapiens
  Table 1.2; BPIFA2; ENSG00000131050; HLA -A*01:01,HLA-A*02:07,HLA-B*58:01,HLA-C*05:01
VVDNPQHKT

SEQ ID NO: 1319 - protein, 11 aa, Homo sapiens
  Table 1.2; BPIFA2; ENSG00000131050; HLA -A*01:01,HLA-A*02:07,HLA-A*32:01,HLA-A*68:02,HLA-B*27:05, HLA-B*38:01,HLA-B*55:01,HLA-C*05:01,HLA-C*07:04,HLA-C*12:03, HLA-C*16:02
VVDNPQHKTQL

SEQ ID NO: 1320 - protein, 8 aa, Homo sapiens
  Table 1.2; CRYGC; ENSG00000163254; HLA -B*08:01,HLA-C*16:01
AGSLRRVV

SEQ ID NO: 1321 - protein, 11 aa, Homo sapiens
  Table 1.2; CRYGC; ENSG00000163254; HLA -A*30:02
AGSLRRVVDLY

SEQ ID NO: 1322 - protein, 9 aa, Homo sapiens
  Table 1.2; CRYGC; ENSG00000163254; HLA -A*02:01,HLA-A*02:07,HLA-B*07:02,HLA-B*08:01,HLA-B*55:01, HLA-C*05:01,HLA-C*07:02
AMDAKAGSL

SEQ ID NO: 1323 - protein, 10 aa, Homo sapiens
  Table 1.2; CRYGC; ENSG00000163254; HLA -A*31:01
AMDAKAGSLR

SEQ ID NO: 1324 - protein, 9 aa, Homo sapiens
  Table 1.2; CRYGC; ENSG00000163254; HLA -A*03:02,HLA-A*32:01,HLA-B*15:01,HLA-B*15:03,HLA-B*46:01
CLIPQTVSH

SEQ ID NO: 1325 - protein, 10 aa, Homo sapiens
  Table 1.2; CRYGC; ENSG00000163254; HLA -A*31:01
CLIPQTVSHR

SEQ ID NO: 1326 - protein, 11 aa, Homo sapiens
  Table 1.2; CRYGC; ENSG00000163254; HLA -A*02:04
CLIPQTVSHRL

SEQ ID NO: 1327 - protein, 8 aa, Homo sapiens
  Table 1.2; CRYGC; ENSG00000163254; HLA -A*33:01,HLA-A*33:03,HLA-A*68:01
DAKAGSLR

SEQ ID NO: 1328 - protein, 9 aa, Homo sapiens
  Table 1.2; CRYGC; ENSG00000163254; HLA -A*33:01,HLA-A*33:03,HLA-A*68:01
DAKAGSLRR

SEQ ID NO: 1329 - protein, 9 aa, Homo sapiens
  Table 1.2; CRYGC; ENSG00000163254; HLA -A*26:01
DCPNLQPYF

SEQ ID NO: 1330 - protein, 11 aa, Homo sapiens
  Table 1.2; CRYGC; ENSG00000163254; HLA -A*33:01
DCPNLQPYFSR

SEQ ID NO: 1331 - protein, 8 aa, Homo sapiens
  Table 1.2; CRYGC; ENSG00000163254; HLA -A*33:01,HLA-A*33:03
EDRAFQGR

SEQ ID NO: 1332 - protein, 8 aa, Homo sapiens
  Table 1.2; CRYGC; ENSG00000163254; HLA -B*08:01
EIRSLHVL

SEQ ID NO: 1333 - protein, 10 aa, Homo sapiens
  Table 1.2; CRYGC; ENSG00000163254; HLA -A*26:01
ELPNYRGRQY

SEQ ID NO: 1334 - protein, 10 aa, Homo sapiens
  Table 1.2; CRYGC; ENSG00000163254; HLA -B*27:02,HLA-B*27:05,HLA-C*07:01
ERPNYQGQQY

SEQ ID NO: 1335 - protein, 9 aa, Homo sapiens
  Table 1.2; CRYGC; ENSG00000163254; HLA -A*26:01
ETTTDCPNL

SEQ ID NO: 1336 - protein, 11 aa, Homo sapiens
  Table 1.2; CRYGC; ENSG00000163254; HLA -A*24:02
EYPDYQQWMGL

SEQ ID NO: 1337 - protein, 9 aa, Homo sapiens
  Table 1.2; CRYGC; ENSG00000163254; HLA -A*02:04,HLA-B*38:01
FHLSEIRSL

SEQ ID NO: 1338 - protein, 10 aa, Homo sapiens
  Table 1.2; CRYGC; ENSG00000163254; HLA -A*31:01,HLA-A*33:01,HLA-A*33:03
FYEDRAFQGR

SEQ ID NO: 1339 - protein, 10 aa, Homo sapiens
  Table 1.2; CRYGC; ENSG00000163254; HLA -A*25:01,HLA-A*26:01,HLA-A*30:01,HLA-B*07:02,HLA-B*15:01, HLA-B*15:03,HLA-B*39:01,HLA-B*40:01,HLA-B*40:02,HLA-B*46:01, HLA-B*58:01,HLA-C*01:02,HLA-C*03:03,HLA-C*03:04,HLA-C*05:01,
  HLA-C*07:02,HLA-C*16:02,HLA-C*16:04
GAMDAKAGSL

SEQ ID NO: 1340 - protein, 11 aa, Homo sapiens
  Table 1.2; CRYGC; ENSG00000163254; HLA -A*03:01,HLA-A*03:02,HLA-A*11:01,HLA-A*31:01,HLA-A*33:01, HLA-A*33:03,HLA-A*68:01,HLA-C*07:06
GAMDAKAGSLR

SEQ ID NO: 1341 - protein, 8 aa, Homo sapiens
  Table 1.2; CRYGC; ENSG00000163254; HLA -B*27:05
GEYPDYQQ

SEQ ID NO: 1342 - protein, 9 aa, Homo sapiens
  Table 1.2; CRYGC; ENSG00000163254; HLA -A*23:01,HLA-A*25:01,HLA-A*30:01,HLA-B*15:03,HLA-B*18:01, HLA-B*27:02,HLA-B*27:05,HLA-B*37:01,HLA-B*38:01,HLA-B*40:01, HLA-B*40:02,HLA-B*44:02,HLA-B*44:03,HLA-B*49:01,HLA-B*57:01,
  HLA-B*58:01,HLA-C*16:04
GEYPDYQQW

SEQ ID NO: 1343 - protein, 10 aa, Homo sapiens
  Table 1.2; CRYGC; ENSG00000163254; HLA -A*30:01,HLA-B*40:01,HLA-B*44:02,HLA-B*44:03,HLA-B*49:01
GEYPDYQQWM

SEQ ID NO: 1344 - protein, 9 aa, Homo sapiens
  Table 1.2; CRYGC; ENSG00000163254; HLA -A*02:01,HLA-A*02:03,HLA-A*02:04,HLA-B*55:01
GLSDSIRSC

SEQ ID NO: 1345 - protein, 10 aa, Homo sapiens
  Table 1.2; CRYGC; ENSG00000163254; HLA -A*01:01,HLA-A*29:02,HLA-A*30:02,HLA-B*57:01
GSLRRVVDLY

SEQ ID NO: 1346 - protein, 8 aa, Homo sapiens
  Table 1.2; CRYGC; ENSG00000163254; HLA -A*02:03,HLA-A*02:04,HLA-B*08:01,HLA-B*37:01
HLSEIRSL

SEQ ID NO: 1347 - protein, 10 aa, Homo sapiens
  Table 1.2; CRYGC; ENSG00000163254; HLA -A*02:03
HLSEIRSLHV

SEQ ID NO: 1348 - protein, 11 aa, Homo sapiens
  Table 1.2; CRYGC; ENSG00000163254; HLA -A*02:04
HLSEIRSLHVL

SEQ ID NO: 1349 - protein, 9 aa, Homo sapiens
  Table 1.2; CRYGC; ENSG00000163254; HLA -A*02:04
HVLEGCWVL

SEQ ID NO: 1350 - protein, 10 aa, Homo sapiens
  Table 1.2; CRYGC; ENSG00000163254; HLA -A*29:02
HVLEGCWVLY

SEQ ID NO: 1351 - protein, 8 aa, Homo sapiens
  Table 1.2; CRYGC; ENSG00000163254; HLA -A*33:01,HLA-A*33:03
IPQTVSHR

SEQ ID NO: 1352 - protein, 9 aa, Homo sapiens
  Table 1.2; CRYGC; ENSG00000163254; HLA -A*23:01,HLA-A*24:02,HLA-A*33:03,HLA-B*07:02,HLA-B*08:01, HLA-B*35:01,HLA-B*35:03,HLA-B*51:01,HLA-B*55:01,HLA-C*07:02
IPQTVSHRL

SEQ ID NO: 1353 - protein, 9 aa, Homo sapiens
  Table 1.2; CRYGC; ENSG00000163254; HLA -B*57:01
ITFYEDRAF

SEQ ID NO: 1354 - protein, 10 aa, Homo sapiens
  Table 1.2; CRYGC; ENSG00000163254; HLA -A*02:07
LIPQTVSHRL

SEQ ID NO: 1355 - protein, 9 aa, Homo sapiens
  Table 1.2; CRYGC; ENSG00000163254; HLA -A*01:01
LSEIRSLHV

SEQ ID NO: 1356 - protein, 8 aa, Homo sapiens
  Table 1.2; CRYGC; ENSG00000163254; HLA -A*30:01,HLA-B*07:02,HLA-B*37:01,HLA-B*40:01,HLA-B*40:02, HLA-C*06:02,HLA-C*07:04
MDAKAGSL

SEQ ID NO: 1357 - protein, 9 aa, Homo sapiens
  Table 1.2; CRYGC; ENSG00000163254; HLA -A*33:01,HLA-A*33:03,HLA-A*68:01
MDAKAGSLR

SEQ ID NO: 1358 - protein, 10 aa, Homo sapiens
  Table 1.2; CRYGC; ENSG00000163254; HLA -B*49:01
MELSEDCPSI

SEQ ID NO: 1359 - protein, 10 aa, Homo sapiens
  Table 1.2; CRYGC; ENSG00000163254; HLA -A*25:01,HLA-B*57:01
NSIRVESGCW

SEQ ID NO: 1360 - protein, 9 aa, Homo sapiens
  Table 1.2; CRYGC; ENSG00000163254; HLA -A*23:01,HLA-A*24:02,HLA-A*29:02,HLA-A*33:03,HLA-C*14:02
NYQGQQYLL

SEQ ID NO: 1361 - protein, 10 aa, Homo sapiens
  Table 1.2; CRYGC; ENSG00000163254; HLA -A*31:01,HLA-A*33:01,HLA-A*33:03
NYQGQQYLLR

SEQ ID NO: 1362 - protein, 11 aa, Homo sapiens
  Table 1.2; CRYGC; ENSG00000163254; HLA -A*31:01,HLA-A*33:01
NYQGQQYLLRR

SEQ ID NO: 1363 - protein, 9 aa, Homo sapiens
  Table 1.2; CRYGC; ENSG00000163254; HLA -A*33:01
PNLQPYFSR

SEQ ID NO: 1364 - protein, 8 aa, Homo sapiens
  Table 1.2; CRYGC; ENSG00000163254; HLA -B*15:03,HLA-B*39:01,HLA-C*04:01,HLA-C*07:01
PNYQGQQY

SEQ ID NO: 1365 - protein, 10 aa, Homo sapiens
  Table 1.2; CRYGC; ENSG00000163254; HLA -C*07:02
PNYQGQQYLL

SEQ ID NO: 1366 - protein, 11 aa, Homo sapiens
  Table 1.2; CRYGC; ENSG00000163254; HLA -A*33:01
PNYQGQQYLLR

SEQ ID NO: 1367 - protein, 9 aa, Homo sapiens
  Table 1.2; CRYGC; ENSG00000163254; HLA -A*24:02
PYFSRCNSI

SEQ ID NO: 1368 - protein, 9 aa, Homo sapiens
  Table 1.2; CRYGC; ENSG00000163254; HLA -B*27:02
QDWGAMDAK

SEQ ID NO: 1369 - protein, 9 aa, Homo sapiens
  Table 1.2; CRYGC; ENSG00000163254; HLA -A*31:01
QGQQYLLRR

SEQ ID NO: 1370 - protein, 10 aa, Homo sapiens
  Table 1.2; CRYGC; ENSG00000163254; HLA -B*51:01
QPYFSRCNSI

SEQ ID NO: 1371 - protein, 10 aa, Homo sapiens
  Table 1.2; CRYGC; ENSG00000163254; HLA -B*38:01
QQWMGLSDSI

SEQ ID NO: 1372 - protein, 9 aa, Homo sapiens
  Table 1.2; CRYGC; ENSG00000163254; HLA -A*23:01,HLA-A*24:02,HLA-A*29:02,HLA-A*30:02,HLA-B*15:03, HLA-C*04:01,HLA-C*14:02
QYLLRPQEY

SEQ ID NO: 1373 - protein, 8 aa, Homo sapiens
  Table 1.2; CRYGC; ENSG00000163254; HLA -A*30:02,HLA-A*32:01,HLA-B*15:01,HLA-B*15:03,HLA-B*46:01, HLA-B*57:01,HLA-B*58:01,HLA-C*16:01,HLA-C*16:02
RAFQGRSY

SEQ ID NO: 1374 - protein, 11 aa, Homo sapiens
  Table 1.2; CRYGC; ENSG00000163254; HLA -A*03:02
RCQDWGAMDAK

SEQ ID NO: 1375 - protein, 9 aa, Homo sapiens
  Table 1.2; CRYGC; ENSG00000163254; HLA -A*03:01
RLYEREDHK

SEQ ID NO: 1376 - protein, 9 aa, Homo sapiens
  Table 1.2; CRYGC; ENSG00000163254; HLA -A*30:02,HLA-A*32:01,HLA-B*07:02,HLA-B*15:01,HLA-B*35:01, HLA-B*55:01,HLA-C*07:02,HLA-C*16:02
RPNYQGQQY

SEQ ID NO: 1377 - protein, 10 aa, Homo sapiens
  Table 1.2; CRYGC; ENSG00000163254; HLA -B*07:02,HLA-C*07:02
RPNYQGQQYL

SEQ ID NO: 1378 - protein, 10 aa, Homo sapiens
  Table 1.2; CRYGC; ENSG00000163254; HLA -A*30:02,HLA-B*15:01,HLA-B*15:03,HLA-B*44:02
RQYLLRPQEY

SEQ ID NO: 1379 - protein, 10 aa, Homo sapiens
  Table 1.2; CRYGC; ENSG00000163254; HLA -B*57:01
RSLHVLEGCW

SEQ ID NO: 1380 - protein, 10 aa, Homo sapiens
  Table 1.2; CRYGC; ENSG00000163254; HLA -A*01:01
RVESGCWMLY

SEQ ID NO: 1381 - protein, 9 aa, Homo sapiens
  Table 1.2; CRYGC; ENSG00000163254; HLA -B*37:01
SDSIRSCCL

SEQ ID NO: 1382 - protein, 11 aa, Homo sapiens
  Table 1.2; CRYGC; ENSG00000163254; HLA -B*38:01,HLA-B*44:02,HLA-B*44:03
SEDCPSIQDRF

SEQ ID NO: 1383 - protein, 8 aa, Homo sapiens
  Table 1.2; CRYGC; ENSG00000163254; HLA -B*49:01
SEIRSLHV

SEQ ID NO: 1384 - protein, 9 aa, Homo sapiens
  Table 1.2; CRYGC; ENSG00000163254; HLA -A*30:01,HLA-B*18:01,HLA-B*37:01,HLA-B*40:01,HLA-B*40:02, HLA-B*44:02,HLA-B*44:03,HLA-B*49:01
SEIRSLHVL

SEQ ID NO: 1385 - protein, 9 aa, Homo sapiens
  Table 1.2; CRYGC; ENSG00000163254; HLA -A*01:01,HLA-A*29:02,HLA-A*30:02,HLA-B*15:03,HLA-B*46:01, HLA-B*57:01
SLRRVVDLY

SEQ ID NO: 1386 - protein, 9 aa, Homo sapiens
  Table 1.2; CRYGC; ENSG00000163254; HLA -C*04:01,HLA-C*07:01
TDCPNLQPY

SEQ ID NO: 1387 - protein, 11 aa, Homo sapiens
  Table 1.2; CRYGC; ENSG00000163254; HLA -A*31:01
TFYEDRAFQGR

SEQ ID NO: 1388 - protein, 10 aa, Homo sapiens
  Table 1.2; CRYGC; ENSG00000163254; HLA -A*01:01
TTDCPNLQPY

SEQ ID NO: 1389 - protein, 9 aa, Homo sapiens
  Table 1.2; CRYGC; ENSG00000163254; HLA -A*01:01,HLA-A*29:02
VLEGCWVLY

SEQ ID NO: 1390 - protein, 8 aa, Homo sapiens
  Table 1.2; CRYGC; ENSG00000163254; HLA -A*03:01,HLA-A*30:02,HLA-B*15:01,HLA-B*15:03,HLA-B*46:01
VLYELPNY

SEQ ID NO: 1391 - protein, 9 aa, Homo sapiens
  Table 1.2; CRYGC; ENSG00000163254; HLA -A*02:03,HLA-A*02:04,HLA-A*02:07,HLA-A*03:01,HLA-A*03:02, HLA-A*11:01,HLA-A*31:01,HLA-A*33:01,HLA-A*33:03,HLA-A*68:01
VLYELPNYR

SEQ ID NO: 1392 - protein, 11 aa, Homo sapiens
  Table 1.2; CRYGC; ENSG00000163254; HLA -A*31:01
VLYELPNYRGR

SEQ ID NO: 1393 - protein, 9 aa, Homo sapiens
  Table 1.2; CRYGC; ENSG00000163254; HLA -A*29:02
WMLYERPNY

SEQ ID NO: 1394 - protein, 9 aa, Homo sapiens
  Table 1.2; CRYGC; ENSG00000163254; HLA -A*29:02
WVLYELPNY

SEQ ID NO: 1395 - protein, 9 aa, Homo sapiens
  Table 1.2; CRYGC; ENSG00000163254; HLA -A*31:01,HLA-B*44:02,HLA-B*49:01
YEDRAFQGR

SEQ ID NO: 1396 - protein, 11 aa, Homo sapiens
  Table 1.2; CRYGC; ENSG00000163254; HLA -B*44:02,HLA-B*44:03
YEDRAFQGRSY

SEQ ID NO: 1397 - protein, 11 aa, Homo sapiens
  Table 1.2; CRYGC; ENSG00000163254; HLA -B*44:02
YELPNYRGRQY

SEQ ID NO: 1398 - protein, 9 aa, Homo sapiens
  Table 1.2; CRYGC; ENSG00000163254; HLA -B*37:01,HLA-B*40:02
YEREDHKGL

SEQ ID NO: 1399 - protein, 11 aa, Homo sapiens
  Table 1.2; CRYGC; ENSG00000163254; HLA -A*29:02,HLA-A*32:01,HLA-B*18:01,HLA-B*44:02,HLA-B*44:03, HLA-C*16:04
YERPNYQGQQY

SEQ ID NO: 1400 - protein, 8 aa, Homo sapiens
  Table 1.2; CRYGC; ENSG00000163254; HLA -B*49:01
YETTTDCP

SEQ ID NO: 1401 - protein, 10 aa, Homo sapiens
  Table 1.2; CRYGC; ENSG00000163254; HLA -A*30:01,HLA-B*40:01,HLA-B*40:02
YETTTDCPNL

SEQ ID NO: 1402 - protein, 8 aa, Homo sapiens
  Table 1.2; CRYGC; ENSG00000163254; HLA -A*01:01,HLA-A*29:02,HLA-B*15:03,HLA-B*46:01,HLA-C*07:01
YLLRPQEY

SEQ ID NO: 1403 - protein, 9 aa, Homo sapiens
  Table 1.2; CRYGC; ENSG00000163254; HLA -A*33:01
YLLRPQEYR

SEQ ID NO: 1404 - protein, 8 aa, Homo sapiens
  Table 1.2; CRYGC; ENSG00000163254; HLA -A*02:01,HLA-A*30:01,HLA-B*13:02,HLA-B*27:05,HLA-B*38:01, HLA-B*39:01,HLA-C*07:04
YQGQQYLL

SEQ ID NO: 1405 - protein, 9 aa, Homo sapiens
  Table 1.2; CRYGC; ENSG00000163254; HLA -A*29:02,HLA-A*31:01
YQGQQYLLR

SEQ ID NO: 1406 - protein, 9 aa, Homo sapiens
  Table 1.2; CT83; ENSG00000204019; HLA -A*32:01
ALALVRPSS

SEQ ID NO: 1407 - protein, 10 aa, Homo sapiens
  Table 1.2; CT83; ENSG00000204019; HLA -A*02:03
ALALVRPSSS

SEQ ID NO: 1408 - protein, 8 aa, Homo sapiens
  Table 1.2; CT83; ENSG00000204019; HLA -A*29:02
ALIVFWKY

SEQ ID NO: 1409 - protein, 10 aa, Homo sapiens
  Table 1.2; CT83; ENSG00000204019; HLA -A*02:03
ALVRPSSSGL

SEQ ID NO: 1410 - protein, 9 aa, Homo sapiens
  Table 1.2; CT83; ENSG00000204019; HLA -B*13:02
AVYDLSRDI

SEQ ID NO: 1411 - protein, 10 aa, Homo sapiens
  Table 1.2; CT83; ENSG00000204019; HLA -A*25:01,HLA-B*07:02
AVYDLSRDIL

SEQ ID NO: 1412 - protein, 9 aa, Homo sapiens
  Table 1.2; CT83; ENSG00000204019; HLA -A*29:02,HLA-B*57:01
CALIVFWKY

SEQ ID NO: 1413 - protein, 10 aa, Homo sapiens
  Table 1.2; CT83; ENSG00000204019; HLA -A*25:01
DLSRDILNNF

SEQ ID NO: 1414 - protein, 11 aa, Homo sapiens
  Table 1.2; CT83; ENSG00000204019; HLA -A*33:01,HLA-B*27:02
DNNLAVYDLSR

SEQ ID NO: 1415 - protein, 9 aa, Homo sapiens
  Table 1.2; CT83; ENSG00000204019; HLA -B*38:01,HLA-B*44:02,HLA-C*07:01
EHTLLSKGF

SEQ ID NO: 1416 - protein, 9 aa, Homo sapiens
  Table 1.2; CT83; ENSG00000204019; HLA -A*01:01,HLA-A*33:01,HLA-A*68:01
ELEHTLLSK

SEQ ID NO: 1417 - protein, 9 aa, Homo sapiens
  Table 1.2; CT83; ENSG00000204019; HLA -A*02:03,HLA-A*25:01,HLA-A*26:01,HLA-A*32:01,HLA-A*33:03, HLA-B*07:02,HLA-B*08:01,HLA-B*27:05,HLA-B*35:03,HLA-B*38:01, HLA-B*39:01,HLA-B*55:01,HLA-C*01:02,HLA-C*07:02,HLA-C*07:04,
  HLA-C*14:02
EMSSNSTAL

SEQ ID NO: 1418 - protein, 9 aa, Homo sapiens
  Table 1.2; CT83; ENSG00000204019; HLA -B*54:01
FPHSIARQK

SEQ ID NO: 1419 - protein, 8 aa, Homo sapiens
  Table 1.2; CT83; ENSG00000204019; HLA -B*07:02,HLA-B*15:01,HLA-B*15:03,HLA-B*40:02,HLA-B*46:01, HLA-C*03:03,HLA-C*07:04,HLA-C*12:03,HLA-C*14:02
FQRNTGEM

SEQ ID NO: 1420 - protein, 9 aa, Homo sapiens
  Table 1.2; CT83; ENSG00000204019; HLA -A*23:01,HLA-A*24:02,HLA-C*14:02
FYLLLASSI

SEQ ID NO: 1421 - protein, 10 aa, Homo sapiens
  Table 1.2; CT83; ENSG00000204019; HLA -A*24:02
FYLLLASSIL

SEQ ID NO: 1422 - protein, 9 aa, Homo sapiens
  Table 1.2; CT83; ENSG00000204019; HLA -A*30:01,HLA-B*40:01,HLA-B*40:02,HLA-B*49:01
GEMSSNSTA

SEQ ID NO: 1423 - protein, 10 aa, Homo sapiens
  Table 1.2; CT83; ENSG00000204019; HLA -A*30:01,HLA-B*15:01,HLA-B*15:03,HLA-B*27:02,HLA-B*27:05, HLA-B*38:01,HLA-B*39:01,HLA-B*40:01,HLA-B*40:02,HLA-B*44:02, HLA-B*44:03,HLA-B*49:01,HLA-C*16:04
GEMSSNSTAL

SEQ ID NO: 1424 - protein, 11 aa, Homo sapiens
  Table 1.2; CT83; ENSG00000204019; HLA -A*30:01,HLA-B*49:01
GEMSSNSTALA

SEQ ID NO: 1425 - protein, 11 aa, Homo sapiens
  Table 1.2; CT83; ENSG00000204019; HLA -A*02:01,HLA-A*02:03,HLA-A*02:04,HLA-B*27:05
GLINSNTDNNL

SEQ ID NO: 1426 - protein, 8 aa, Homo sapiens
  Table 1.2; CT83; ENSG00000204019; HLA -B*57:01
HTLLSKGF

SEQ ID NO: 1427 - protein, 9 aa, Homo sapiens
  Table 1.2; CT83; ENSG00000204019; HLA -A*31:01,HLA-A*33:01,HLA-A*33:03
HTLLSKGFR

SEQ ID NO: 1428 - protein, 9 aa, Homo sapiens
  Table 1.2; CT83; ENSG00000204019; HLA -A*02:01,HLA-A*02:03,HLA-A*02:04,HLA-A*02:07,HLA-A*23:01, HLA-A*24:02,HLA-A*30:01,HLA-A*31:01,HLA-A*32:01,HLA-A*68:02, HLA-B*13:02,HLA-B*38:01,HLA-B*51:01,HLA-B*55:01,HLA-C*06:02,
  HLA-C*16:02
ILNNFPHSI

SEQ ID NO: 1429 - protein, 10 aa, Homo sapiens
  Table 1.2; CT83; ENSG00000204019; HLA -A*02:03
ILNNFPHSIA

SEQ ID NO: 1430 - protein, 11 aa, Homo sapiens
  Table 1.2; CT83; ENSG00000204019; HLA -A*03:01,HLA-A*31:01,HLA-A*33:01,HLA-A*33:03
ILNNFPHSIAR

SEQ ID NO: 1431 - protein, 9 aa, Homo sapiens
  Table 1.2; CT83; ENSG00000204019; HLA -B*35:03,HLA-B*39:01
INSNTDNNL

SEQ ID NO: 1432 - protein, 10 aa, Homo sapiens
  Table 1.2; CT83; ENSG00000204019; HLA -A*31:01
KGFRGASPHR

SEQ ID NO: 1433 - protein, 9 aa, Homo sapiens
  Table 1.2; CT83; ENSG00000204019; HLA -A*02:01,HLA-A*02:03,HLA-A*02:04,HLA-A*02:07,HLA-A*23:01, HLA-A*24:02,HLA-A*30:01,HLA-A*32:01,HLA-B*13:02,HLA-B*15:01, HLA-B*15:03,HLA-B*38:01,HLA-B*40:01,HLA-B*40:02,HLA-B*55:01,
  HLA-B*58:01,HLA-C*16:02
KLVELEHTL

SEQ ID NO: 1434 - protein, 10 aa, Homo sapiens
  Table 1.2; CT83; ENSG00000204019; HLA -A*02:01,HLA-A*02:03,HLA-A*02:04,HLA-A*02:07,HLA-A*24:02
KLVELEHTLL

SEQ ID NO: 1435 - protein, 8 aa, Homo sapiens
  Table 1.2; CT83; ENSG00000204019; HLA -B*54:01
LASSILCA

SEQ ID NO: 1436 - protein, 9 aa, Homo sapiens
  Table 1.2; CT83; ENSG00000204019; HLA -A*68:02,HLA-B*27:05,HLA-B*35:03,HLA-B*46:01,HLA-C*02:02, HLA-C*03:03,HLA-C*03:04,HLA-C*12:03
LASSILCAL

SEQ ID NO: 1437 - protein, 10 aa, Homo sapiens
  Table 1.2; CT83; ENSG00000204019; HLA -B*44:02,HLA-B*44:03
LEHTLLSKGF

SEQ ID NO: 1438 - protein, 10 aa, Homo sapiens
  Table 1.2; CT83; ENSG00000204019; HLA -B*27:05
LINSNTDNNL

SEQ ID NO: 1439 - protein, 9 aa, Homo sapiens
  Table 1.2; CT83; ENSG00000204019; HLA -A*02:01,HLA-A*02:03
LLASSILCA

SEQ ID NO: 1440 - protein, 10 aa, Homo sapiens
  Table 1.2; CT83; ENSG00000204019; HLA -A*02:01,HLA-A*02:03,HLA-A*02:04
LLASSILCAL

SEQ ID NO: 1441 - protein, 9 aa, Homo sapiens
  Table 1.2; CT83; ENSG00000204019; HLA -A*02:01
LLLASSILC

SEQ ID NO: 1442 - protein, 11 aa, Homo sapiens
  Table 1.2; CT83; ENSG00000204019; HLA -A*02:01,HLA-A*02:04
LLLASSILCAL

SEQ ID NO: 1443 - protein, 9 aa, Homo sapiens
  Table 1.2; CT83; ENSG00000204019; HLA -A*23:01,HLA-A*24:02,HLA-A*32:01,HLA-A*33:01,HLA-A*33:03, HLA-B*46:01,HLA-B*57:01,HLA-B*58:01,HLA-C*02:02
LSRDILNNF

SEQ ID NO: 1444 - protein, 9 aa, Homo sapiens
  Table 1.2; CT83; ENSG00000204019; HLA -A*01:01,HLA-A*02:07,HLA-B*38:01,HLA-C*05:01
LVELEHTLL

SEQ ID NO: 1445 - protein, 10 aa, Homo sapiens
  Table 1.2; CT83; ENSG00000204019; HLA -A*03:01,HLA-A*03:02,HLA-B*27:02
LVNLSMVENK

SEQ ID NO: 1446 - protein, 9 aa, Homo sapiens
  Table 1.2; CT83; ENSG00000204019; HLA -A*02:03,HLA-A*25:01,HLA-A*32:01,HLA-B*07:02,HLA-B*08:01, HLA-B*15:01,HLA-B*40:02,HLA-B*46:01,HLA-C*01:02,HLA-C*03:04, HLA-C*07:02,HLA-C*07:04
LVRPSSSGL

SEQ ID NO: 1447 - protein, 8 aa, Homo sapiens
  Table 1.2; CT83; ENSG00000204019; HLA -C*03:03,HLA-C*03:04,HLA-C*16:01
MSSNSTAL

SEQ ID NO: 1448 - protein, 9 aa, Homo sapiens
  Table 1.2; CT83; ENSG00000204019; HLA -A*02:07,HLA-A*68:02,HLA-B*08:01,HLA-B*35:03,HLA-B*38:01, HLA-B*55:01,HLA-C*05:01,HLA-C*07:04
MVENKLVEL

SEQ ID NO: 1449 - protein, 9 aa, Homo sapiens
  Table 1.2; CT83; ENSG00000204019; HLA -A*02:04
NLSMVENKL

SEQ ID NO: 1450 - protein, 9 aa, Homo sapiens
  Table 1.2; CT83; ENSG00000204019; HLA -A*29:02,HLA-A*31:01,HLA-A*33:01,HLA-A*33:03,HLA-A*68:01, HLA-A*68:02,HLA-C*07:06
NNFPHSIAR

SEQ ID NO: 1451 - protein, 11 aa, Homo sapiens
  Table 1.2; CT83; ENSG00000204019; HLA -A*01:01,HLA-A*30:02
NSNTDNNLAVY

SEQ ID NO: 1452 - protein, 9 aa, Homo sapiens
  Table 1.2; CT83; ENSG00000204019; HLA -A*29:02,HLA-A*33:01,HLA-A*33:03,HLA-A*68:01,HLA-B*27:02, HLA-C*07:06
NSTALALVR

SEQ ID NO: 1453 - protein, 8 aa, Homo sapiens
  Table 1.2; CT83; ENSG00000204019; HLA -A*01:01,HLA-C*05:01
NTDNNLAV

SEQ ID NO: 1454 - protein, 9 aa, Homo sapiens
  Table 1.2; CT83; ENSG00000204019; HLA -A*01:01,HLA-A*11:01,HLA-A*25:01,HLA-A*26:01,HLA-A*29:02, HLA-A*30:02,HLA-A*32:01,HLA-B*27:05,HLA-B*35:01,HLA-B*39:01, HLA-B*55:01,HLA-C*04:01,HLA-C*05:01,HLA-C*07:04,HLA-C*16:02
NTDNNLAVY

SEQ ID NO: 1455 - protein, 11 aa, Homo sapiens
  Table 1.2; CT83; ENSG00000204019; HLA -B*27:05,HLA-B*39:01
NTDNNLAVYDL

SEQ ID NO: 1456 - protein, 9 aa, Homo sapiens
  Table 1.2; CT83; ENSG00000204019; HLA -A*02:01,HLA-A*02:03,HLA-A*02:04,HLA-A*02:07
RILVNLSMV

SEQ ID NO: 1457 - protein, 11 aa, Homo sapiens
  Table 1.2; CT83; ENSG00000204019; HLA -B*07:02
RPSSSGLINSN

SEQ ID NO: 1458 - protein, 9 aa, Homo sapiens
  Table 1.2; CT83; ENSG00000204019; HLA -A*31:01
RQKRILVNL

SEQ ID NO: 1459 - protein, 10 aa, Homo sapiens
  Table 1.2; CT83; ENSG00000204019; HLA -A*02:01,HLA-A*02:03,HLA-A*02:04,HLA-A*02:07,HLA-B*46:01, HLA-B*55:01
SMVENKLVEL

SEQ ID NO: 1460 - protein, 10 aa, Homo sapiens
  Table 1.2; CT83; ENSG00000204019; HLA -A*68:01,HLA-B*27:02
SNSTALALVR

SEQ ID NO: 1461 - protein, 9 aa, Homo sapiens
  Table 1.2; CT83; ENSG00000204019; HLA -B*13:02
SNTDNNLAV

SEQ ID NO: 1462 - protein, 10 aa, Homo sapiens
  Table 1.2; CT83; ENSG00000204019; HLA -A*25:01,HLA-A*26:01,HLA-A*29:02,HLA-A*30:02
SNTDNNLAVY

SEQ ID NO: 1463 - protein, 9 aa, Homo sapiens
  Table 1.2; CT83; ENSG00000204019; HLA -A*03:01,HLA-A*03:02,HLA-B*07:02,HLA-B*13:02,HLA-B*35:03, HLA-B*46:01,HLA-B*58:01,HLA-C*01:02,HLA-C*03:03,HLA-C*03:04, HLA-C*07:02,HLA-C*14:02,HLA-C*16:01
SSNSTALAL

SEQ ID NO: 1464 - protein, 11 aa, Homo sapiens
  Table 1.2; CT83; ENSG00000204019; HLA -A*03:02,HLA-A*11:01,HLA-A*31:01,HLA-A*33:03,HLA-A*68:01, HLA-C*07:06
SSNSTALALVR

SEQ ID NO: 1465 - protein, 8 aa, Homo sapiens
  Table 1.2; CT83; ENSG00000204019; HLA -A*11:01
STALALVR

SEQ ID NO: 1466 - protein, 10 aa, Homo sapiens
  Table 1.2; CT83; ENSG00000204019; HLA -C*06:02,HLA-C*07:01,HLA-C*07:02
STALALVRPS

SEQ ID NO: 1467 - protein, 9 aa, Homo sapiens
  Table 1.2; CT83; ENSG00000204019; HLA -A*31:01,HLA-A*33:01,HLA-A*33:03,HLA-C*06:02,HLA-C*07:01
TALALVRPS

SEQ ID NO: 1468 - protein, 8 aa, Homo sapiens
  Table 1.2; CT83; ENSG00000204019; HLA -A*30:02,HLA-B*18:01,HLA-C*07:01
TDNNLAVY

SEQ ID NO: 1469 - protein, 11 aa, Homo sapiens
  Table 1.2; CT83; ENSG00000204019; HLA -B*35:03,HLA-B*40:01
TGEMSSNSTAL

SEQ ID NO: 1470 - protein, 10 aa, Homo sapiens
  Table 1.2; CT83; ENSG00000204019; HLA -A*02:03
TLLSKGFRGA

SEQ ID NO: 1471 - protein, 8 aa, Homo sapiens
  Table 1.2; CT83; ENSG00000204019; HLA -A*23:01,HLA-A*30:01,HLA-B*08:01,HLA-B*18:01,HLA-B*37:01, HLA-B*40:01,HLA-B*40:02,HLA-B*49:01
VELEHTLL

SEQ ID NO: 1472 - protein, 9 aa, Homo sapiens
  Table 1.2; CT83; ENSG00000204019; HLA -B*49:01
VELEHTLLS

SEQ ID NO: 1473 - protein, 8 aa, Homo sapiens
  Table 1.2; CT83; ENSG00000204019; HLA -A*30:01,HLA-B*18:01,HLA-B*37:01,HLA-B*40:01,HLA-B*40:02, HLA-B*49:01
VENKLVEL

SEQ ID NO: 1474 - protein, 9 aa, Homo sapiens
  Table 1.2; CT83; ENSG00000204019; HLA -B*27:02
VNLSMVENK

SEQ ID NO: 1475 - protein, 10 aa, Homo sapiens
  Table 1.2; CT83; ENSG00000204019; HLA -A*23:01
VNLSMVENKL

SEQ ID NO: 1476 - protein, 8 aa, Homo sapiens
  Table 1.2; CT83; ENSG00000204019; HLA -C*01:02
VRPSSSGL

SEQ ID NO: 1477 - protein, 8 aa, Homo sapiens
  Table 1.2; CT83; ENSG00000204019; HLA -B*35:03,HLA-B*51:01,HLA-C*04:01
VYDLSRDI

SEQ ID NO: 1478 - protein, 9 aa, Homo sapiens
  Table 1.2; CT83; ENSG00000204019; HLA -A*23:01,HLA-A*24:02,HLA-B*35:01,HLA-B*35:03,HLA-B*55:01, HLA-C*04:01
VYDLSRDIL

SEQ ID NO: 1479 - protein, 8 aa, Homo sapiens
  Table 1.2; CT83; ENSG00000204019; HLA -B*13:02,HLA-B*51:01
YLLLASSI

SEQ ID NO: 1480 - protein, 9 aa, Homo sapiens
  Table 1.2; CT83; ENSG00000204019; HLA -A*02:04
YLLLASSIL

SEQ ID NO: 1481 - protein, 9 aa, Homo sapiens
  Table 1.2; CTAG1A/CTAG1B; ENSG00000184033; HLA -A*01:01,HLA-A*02:07,HLA-A*30:01,HLA-B*07:02,HLA-B*08:01, HLA-B*38:01,HLA-B*40:01,HLA-B*58:01,HLA-C*03:03,HLA-C*03:04, HLA-C*05:01,HLA-C*07:02,HLA-C*16:01,HLA-C*16:02
AADHRQLQL

SEQ ID NO: 1482 - protein, 9 aa, Homo sapiens
  Table 1.2; CTAG1A/CTAG1B; ENSG00000184033; HLA -A*30:01,HLA-B*13:02,HLA-B*37:01,HLA-B*38:01,HLA-B*44:02, HLA-B*44:03,HLA-B*49:01
ADGPGGPGI

SEQ ID NO: 1483 - protein, 8 aa, Homo sapiens
  Table 1.2; CTAG1A/CTAG1B; ENSG00000184033; HLA -A*30:01,HLA-B*37:01,HLA-B*40:02,HLA-C*06:02,HLA-C*07:04
ADHRQLQL

SEQ ID NO: 1484 - protein, 10 aa, Homo sapiens
  Table 1.2; CTAG1A/CTAG1B; ENSG00000184033; HLA -B*40:01
AEGRGTGGST

SEQ ID NO: 1485 - protein, 9 aa, Homo sapiens
  Table 1.2; CTAG1A/CTAG1B; ENSG00000184033; HLA -A*32:01,HLA-C*07:04,HLA-C*16:02
AGAARASGP

SEQ ID NO: 1486 - protein, 11 aa, Homo sapiens
  Table 1.2; CTAG1A/CTAG1B; ENSG00000184033; HLA -C*04:01
AGAARASGPGG

SEQ ID NO: 1487 - protein, 8 aa, Homo sapiens
  Table 1.2; CTAG1A/CTAG1B; ENSG00000184033; HLA -B*46:01,HLA-C*01:02
AMPFATPM

SEQ ID NO: 1488 - protein, 10 aa, Homo sapiens
  Table 1.2; CTAG1A/CTAG1B; ENSG00000184033; HLA -A*02:01,HLA-A*02:03,HLA-A*02:07
AMPFATPMEA

SEQ ID NO: 1489 - protein, 9 aa, Homo sapiens
  Table 1.2; CTAG1A/CTAG1B; ENSG00000184033; HLA -A*02:01,HLA-A*02:03,HLA-A*02:07,HLA-B*07:02,HLA-B*13:02, HLA-B*37:01,HLA-B*51:01,HLA-B*54:01,HLA-B*55:01,HLA-B*56:01, HLA-C*04:01,HLA-C*07:02
APPLPVPGV

SEQ ID NO: 1490 - protein, 10 aa, Homo sapiens
  Table 1.2; CTAG1A/CTAG1B; ENSG00000184033; HLA -B*07:02,HLA-B*56:01,HLA-C*07:02
APPLPVPGVL

SEQ ID NO: 1491 - protein, 11 aa, Homo sapiens
  Table 1.2; CTAG1A/CTAG1B; ENSG00000184033; HLA -B*07:02
APPLPVPGVLL

SEQ ID NO: 1492 - protein, 9 aa, Homo sapiens
  Table 1.2; CTAG1A/CTAG1B; ENSG00000184033; HLA -B*07:02,HLA-B*54:01,HLA-B*55:01,HLA-B*56:01,HLA-C*07:02
APRGPHGGA

SEQ ID NO: 1493 - protein, 10 aa, Homo sapiens
  Table 1.2; CTAG1A/CTAG1B; ENSG00000184033; HLA -B*07:02,HLA-B*54:01,HLA-B*55:01,HLA-B*56:01,HLA-C*07:02
APRGPHGGAA

SEQ ID NO: 1494 - protein, 11 aa, Homo sapiens
  Table 1.2; CTAG1A/CTAG1B; ENSG00000184033; HLA -B*07:02,HLA-C*07:02
APRGPHGGAAS

SEQ ID NO: 1495 - protein, 9 aa, Homo sapiens
  Table 1.2; CTAG1A/CTAG1B; ENSG00000184033; HLA -A*01:01,HLA-A*02:01,HLA-A*02:03,HLA-A*02:07,HLA-A*03:01, HLA-A*03:02,HLA-A*11:01,HLA-A*30:01,HLA-B*13:02,HLA-B*27:05, HLA-B*37:01,HLA-B*38:01,HLA-B*39:01,HLA-B*40:02,HLA-B*49:01,
  HLA-B*55:01,HLA-B*56:01,HLA-C*05:01,HLA-C*06:02
AQDAPPLPV

SEQ ID NO: 1496 - protein, 11 aa, Homo sapiens
  Table 1.2; CTAG1A/CTAG1B; ENSG00000184033; HLA -B*27:05
AQDAPPLPVPG

SEQ ID NO: 1497 - protein, 9 aa, Homo sapiens
  Table 1.2; CTAG1A/CTAG1B; ENSG00000184033; HLA -A*31:01,HLA-A*32:01,HLA-B*13:02,HLA-B*15:01,HLA-B*15:03, HLA-B*27:05,HLA-C*06:02
AQPPSGQRR

SEQ ID NO: 1498 - protein, 10 aa, Homo sapiens
  Table 1.2; CTAG1A/CTAG1B; ENSG00000184033; HLA -B*27:05,HLA-B*39:01
ARASGPGGGA

SEQ ID NO: 1499 - protein, 11 aa, Homo sapiens
  Table 1.2; CTAG1A/CTAG1B; ENSG00000184033; HLA -B*27:05,HLA-B*39:01
ARASGPGGGAP

SEQ ID NO: 1500 - protein, 9 aa, Homo sapiens
  Table 1.2; CTAG1A/CTAG1B; ENSG00000184033; HLA -B*07:02,HLA-B*27:05,HLA-B*40:02,HLA-C*06:02,HLA-C*07:01
ARGPESRLL

SEQ ID NO: 1501 - protein, 10 aa, Homo sapiens
  Table 1.2; CTAG1A/CTAG1B; ENSG00000184033; HLA -A*01:01,HLA-A*03:02,HLA-A*11:01,HLA-A*29:02,HLA-A*30:02, HLA-A*31:01,HLA-A*32:01,HLA-A*33:01,HLA-A*33:03,HLA-A*68:01, HLA-B*27:02,HLA-B*27:05,HLA-B*57:01,HLA-C*01:02,HLA-C*07:04,
  HLA-C*07:06
ASGPGGGAPR

SEQ ID NO: 1502 - protein, 11 aa, Homo sapiens
  Table 1.2; CTAG1A/CTAG1B; ENSG00000184033; HLA -A*01:01
ASGPGGGAPRG

SEQ ID NO: 1503 - protein, 8 aa, Homo sapiens
  Table 1.2; CTAG1A/CTAG1B; ENSG00000184033; HLA -C*01:02
ATPMEAEL

SEQ ID NO: 1504 - protein, 10 aa, Homo sapiens
  Table 1.2; CTAG1A/CTAG1B; ENSG00000184033; HLA -A*11:01,HLA-A*68:01,HLA-B*27:02,HLA-C*07:06
ATPMEAELAR

SEQ ID NO: 1505 - protein, 11 aa, Homo sapiens
  Table 1.2; CTAG1A/CTAG1B; ENSG00000184033; HLA -A*11:01,HLA-A*31:01
ATPMEAELARR

SEQ ID NO: 1506 - protein, 10 aa, Homo sapiens
  Table 1.2; CTAG1A/CTAG1B; ENSG00000184033; HLA -B*38:01,HLA-B*51:01,HLA-C*05:01
DADGPGGPGI

SEQ ID NO: 1507 - protein, 8 aa, Homo sapiens
  Table 1.2; CTAG1A/CTAG1B; ENSG00000184033; HLA -B*51:01,HLA-B*54:01
DAPPLPVP

SEQ ID NO: 1508 - protein, 10 aa, Homo sapiens
  Table 1.2; CTAG1A/CTAG1B; ENSG00000184033; HLA -A*02:07,HLA-A*26:01,HLA-A*68:02,HLA-B*51:01
DAPPLPVPGV

SEQ ID NO: 1509 - protein, 8 aa, Homo sapiens
  Table 1.2; CTAG1A/CTAG1B; ENSG00000184033; HLA -B*51:01
DGPGGPGI

SEQ ID NO: 1510 - protein, 9 aa, Homo sapiens
  Table 1.2; CTAG1A/CTAG1B; ENSG00000184033; HLA -B*51:01
DHRQLQLSI

SEQ ID NO: 1511 - protein, 9 aa, Homo sapiens
  Table 1.2; CTAG1A/CTAG1B; ENSG00000184033; HLA -B*07:02,HLA-B*08:01,HLA-B*51:01,HLA-C*01:02,HLA-C*07:02, HLA-C*16:01
EAELARRSL

SEQ ID NO: 1512 - protein, 11 aa, Homo sapiens
  Table 1.2; CTAG1A/CTAG1B; ENSG00000184033; HLA -A*33:03
EAGATGGRGPR

SEQ ID NO: 1513 - protein, 9 aa, Homo sapiens
  Table 1.2; CTAG1A/CTAG1B; ENSG00000184033; HLA -A*24:02,HLA-C*14:02
EFTVSGNIL

SEQ ID NO: 1514 - protein, 11 aa, Homo sapiens
  Table 1.2; CTAG1A/CTAG1B; ENSG00000184033; HLA -A*23:01
EFTVSGNILTI

SEQ ID NO: 1515 - protein, 8 aa, Homo sapiens
  Table 1.2; CTAG1A/CTAG1B; ENSG00000184033; HLA -C*07:01
EFYLAMPF

SEQ ID NO: 1516 - protein, 9 aa, Homo sapiens
  Table 1.2; CTAG1A/CTAG1B; ENSG00000184033; HLA -A*02:01,HLA-A*02:07,HLA-A*23:01,HLA-A*24:02,HLA-A*30:01, HLA-A*32:01,HLA-A*68:02,HLA-B*13:02,HLA-B*15:03,HLA-B*27:02, HLA-B*27:05,HLA-B*35:01,HLA-B*35:03,HLA-B*38:01,HLA-B*39:01,
  HLA-B*40:01,HLA-B*40:02,HLA-B*46:01,HLA-B*51:01,HLA-B*54:01, HLA-B*55:01,HLA-B*56:01,HLA-B*58:01,HLA-C*01:02,HLA-C*02:02, HLA-C*03:03,HLA-C*03:04,HLA-C*04:01,HLA-C*05:01,HLA-C*07:04, HLA-C*07:06,HLA-C*12:03,HLA-C*14:02,HLA-C*16:01,HLA-C*16:02,
  HLA-C*16:04
FATPMEAEL

SEQ ID NO: 1517 - protein, 11 aa, Homo sapiens
  Table 1.2; CTAG1A/CTAG1B; ENSG00000184033; HLA -B*27:02
FATPMEAELAR

SEQ ID NO: 1518 - protein, 9 aa, Homo sapiens
  Table 1.2; CTAG1A/CTAG1B; ENSG00000184033; HLA -A*02:03,HLA-A*32:01
FLAQPPSGQ

SEQ ID NO: 1519 - protein, 10 aa, Homo sapiens
  Table 1.2; CTAG1A/CTAG1B; ENSG00000184033; HLA -A*33:03,HLA-A*68:01
FLAQPPSGQR

SEQ ID NO: 1520 - protein, 11 aa, Homo sapiens
  Table 1.2; CTAG1A/CTAG1B; ENSG00000184033; HLA -A*01:01,HLA-A*02:03,HLA-A*02:04,HLA-A*02:07,HLA-A*29:02, HLA-A*31:01,HLA-A*33:01,HLA-A*33:03,HLA-A*68:01,HLA-A*68:02, HLA-B*27:05
FLAQPPSGQRR

SEQ ID NO: 1521 - protein, 9 aa, Homo sapiens
  Table 1.2; CTAG1A/CTAG1B; ENSG00000184033; HLA -A*02:07
FLPVFLAQP

SEQ ID NO: 1522 - protein, 8 aa, Homo sapiens
  Table 1.2; CTAG1A/CTAG1B; ENSG00000184033; HLA -B*35:03,HLA-B*39:01,HLA-B*46:01,HLA-C*03:03,HLA-C*03:04, HLA-C*14:02
FTVSGNIL

SEQ ID NO: 1523 - protein, 10 aa, Homo sapiens
  Table 1.2; CTAG1A/CTAG1B; ENSG00000184033; HLA -A*02:01,HLA-A*02:03,HLA-A*23:01,HLA-A*25:01,HLA-A*26:01, HLA-A*68:01,HLA-A*68:02,HLA-B*13:02,HLA-B*40:02,HLA-C*02:02
FTVSGNILTI

SEQ ID NO: 1524 - protein, 11 aa, Homo sapiens
  Table 1.2; CTAG1A/CTAG1B; ENSG00000184033; HLA -A*31:01,HLA-A*33:03,HLA-A*68:01,HLA-A*68:02
FTVSGNILTIR

SEQ ID NO: 1525 - protein, 9 aa, Homo sapiens
  Table 1.2; CTAG1A/CTAG1B; ENSG00000184033; HLA -B*07:02,HLA-C*07:02
GARGPESRL

SEQ ID NO: 1526 - protein, 8 aa, Homo sapiens
  Table 1.2; CTAG1A/CTAG1B; ENSG00000184033; HLA -C*16:02
GATGGRGP

SEQ ID NO: 1527 - protein, 11 aa, Homo sapiens
  Table 1.2; CTAG1A/CTAG1B; ENSG00000184033; HLA -B*44:02,HLA-B*44:03,HLA-C*06:02,HLA-C*16:04
GEAGATGGRGP

SEQ ID NO: 1528 - protein, 10 aa, Homo sapiens
  Table 1.2; CTAG1A/CTAG1B; ENSG00000184033; HLA -B*39:01
GIPDGPGGNA

SEQ ID NO: 1529 - protein, 9 aa, Homo sapiens
  Table 1.2; CTAG1A/CTAG1B; ENSG00000184033; HLA -B*07:02,HLA-B*08:01,HLA-B*35:01,HLA-B*55:01,HLA-B*56:01, HLA-C*07:02
GPESRLLEF

SEQ ID NO: 1530 - protein, 10 aa, Homo sapiens
  Table 1.2; CTAG1A/CTAG1B; ENSG00000184033; HLA -A*01:01
GPESRLLEFY

SEQ ID NO: 1531 - protein, 11 aa, Homo sapiens
  Table 1.2; CTAG1A/CTAG1B; ENSG00000184033; HLA -A*68:01
GPGEAGATGGR

SEQ ID NO: 1532 - protein, 8 aa, Homo sapiens
  Table 1.2; CTAG1A/CTAG1B; ENSG00000184033; HLA -A*68:01
GPGGGAPR

SEQ ID NO: 1533 - protein, 10 aa, Homo sapiens
  Table 1.2; CTAG1A/CTAG1B; ENSG00000184033; HLA -C*07:02
GPGGGAPRGP

SEQ ID NO: 1534 - protein, 10 aa, Homo sapiens
  Table 1.2; CTAG1A/CTAG1B; ENSG00000184033; HLA -B*07:02,HLA-C*07:02
GPHGGAASGL

SEQ ID NO: 1535 - protein, 9 aa, Homo sapiens
  Table 1.2; CTAG1A/CTAG1B; ENSG00000184033; HLA -A*33:01,HLA-A*33:03,HLA-B*07:02
GPRGAGAAR

SEQ ID NO: 1536 - protein, 10 aa, Homo sapiens
  Table 1.2; CTAG1A/CTAG1B; ENSG00000184033; HLA -B*07:02,HLA-B*55:01,HLA-B*56:01,HLA-C*07:02
GPRGAGAARA

SEQ ID NO: 1537 - protein, 11 aa, Homo sapiens
  Table 1.2; CTAG1A/CTAG1B; ENSG00000184033; HLA -B*07:02
GPRGAGAARAS

SEQ ID NO: 1538 - protein, 9 aa, Homo sapiens
  Table 1.2; CTAG1A/CTAG1B; ENSG00000184033; HLA -B*27:05
GRGPRGAGA

SEQ ID NO: 1539 - protein, 11 aa, Homo sapiens
  Table 1.2; CTAG1A/CTAG1B; ENSG00000184033; HLA -B*27:05
GRGPRGAGAAR

SEQ ID NO: 1540 - protein, 9 aa, Homo sapiens
  Table 1.2; CTAG1A/CTAG1B; ENSG00000184033; HLA -A*02:01,HLA-A*02:04,HLA-B*13:02
GVLLKEFTV

SEQ ID NO: 1541 - protein, 8 aa, Homo sapiens
  Table 1.2; CTAG1A/CTAG1B; ENSG00000184033; HLA -C*07:04
HGGAASGL

SEQ ID NO: 1542 - protein, 9 aa, Homo sapiens
  Table 1.2; CTAG1A/CTAG1B; ENSG00000184033; HLA -A*02:01,HLA-A*02:03,HLA-A*02:04,HLA-B*08:01,HLA-B*46:01, HLA-B*55:01
ILTIRLTAA

SEQ ID NO: 1543 - protein, 9 aa, Homo sapiens
  Table 1.2; CTAG1A/CTAG1B; ENSG00000184033; HLA -B*07:02,HLA-B*55:01,HLA-B*56:01,HLA-C*05:01
IPDGPGGNA

SEQ ID NO: 1544 - protein, 9 aa, Homo sapiens
  Table 1.2; CTAG1A/CTAG1B; ENSG00000184033; HLA -B*57:01
ITQCFLPVF

SEQ ID NO: 1545 - protein, 9 aa, Homo sapiens
  Table 1.2; CTAG1A/CTAG1B; ENSG00000184033; HLA -A*30:01,HLA-B*13:02,HLA-B*37:01,HLA-B*40:01,HLA-B*40:02, HLA-B*44:02,HLA-B*44:03,HLA-B*49:01
KEFTVSGNI

SEQ ID NO: 1546 - protein, 10 aa, Homo sapiens
  Table 1.2; CTAG1A/CTAG1B; ENSG00000184033; HLA -A*30:01,HLA-B*15:03,HLA-B*27:05,HLA-B*37:01,HLA-B*40:01, HLA-B*40:02,HLA-B*44:02,HLA-B*44:03,HLA-B*49:01
KEFTVSGNIL

SEQ ID NO: 1547 - protein, 11 aa, Homo sapiens
  Table 1.2; CTAG1A/CTAG1B; ENSG00000184033; HLA -B*49:01
KEFTVSGNILT

SEQ ID NO: 1548 - protein, 9 aa, Homo sapiens
  Table 1.2; CTAG1A/CTAG1B; ENSG00000184033; HLA -A*02:01,HLA-A*02:07,HLA-A*03:01,HLA-A*11:01,HLA-A*23:01, HLA-A*24:02,HLA-A*26:01,HLA-A*29:02,HLA-A*30:01,HLA-A*30:02, HLA-A*31:01,HLA-A*32:01,HLA-B*07:02,HLA-B*08:01,HLA-B*15:01,
  HLA-B*15:03,HLA-B*18:01,HLA-B*35:01,HLA-B*35:03,HLA-B*37:01, HLA-B*39:01,HLA-B*40:02,HLA-B*46:01,HLA-B*51:01,HLA-B*54:01, HLA-B*55:01,HLA-B*56:01,HLA-B*57:01,HLA-B*58:01,HLA-C*01:02, HLA-C*02:02,HLA-C*03:03,HLA-C*03:04,HLA-C*04:01,HLA-C*06:02,
  HLA-C*07:01,HLA-C*07:04,HLA-C*12:03,HLA-C*14:02,HLA-C*16:01, HLA-C*16:02,HLA-C*16:04
LAMPFATPM

SEQ ID NO: 1549 - protein, 11 aa, Homo sapiens
  Table 1.2; CTAG1A/CTAG1B; ENSG00000184033; HLA -B*54:01
LAMPFATPMEA

SEQ ID NO: 1550 - protein, 8 aa, Homo sapiens
  Table 1.2; CTAG1A/CTAG1B; ENSG00000184033; HLA -B*46:01,HLA-C*03:03,HLA-C*03:04
LAQDAPPL

SEQ ID NO: 1551 - protein, 10 aa, Homo sapiens
  Table 1.2; CTAG1A/CTAG1B; ENSG00000184033; HLA -A*01:01,HLA-B*27:02,HLA-B*54:01,HLA-B*56:01,HLA-C*03:03, HLA-C*03:04
LAQDAPPLPV

SEQ ID NO: 1552 - protein, 9 aa, Homo sapiens
  Table 1.2; CTAG1A/CTAG1B; ENSG00000184033; HLA -A*03:02,HLA-A*11:01,HLA-A*31:01,HLA-A*33:01,HLA-A*33:03, HLA-A*68:01,HLA-B*27:05,HLA-B*54:01,HLA-B*57:01,HLA-C*06:02, HLA-C*07:06,HLA-C*16:02
LAQPPSGQR

SEQ ID NO: 1553 - protein, 10 aa, Homo sapiens
  Table 1.2; CTAG1A/CTAG1B; ENSG00000184033; HLA -A*03:02,HLA-A*11:01,HLA-A*31:01,HLA-A*33:01,HLA-A*33:03, HLA-A*68:01,HLA-B*27:05,HLA-B*54:01,HLA-B*57:01,HLA-B*58:01, HLA-C*06:02,HLA-C*07:01,HLA-C*07:02,HLA-C*07:06,HLA-C*16:02
LAQPPSGQRR

SEQ ID NO: 1554 - protein, 9 aa, Homo sapiens
  Table 1.2; CTAG1A/CTAG1B; ENSG00000184033; HLA -A*02:03
LLKEFTVSG

SEQ ID NO: 1555 - protein, 10 aa, Homo sapiens
  Table 1.2; CTAG1A/CTAG1B; ENSG00000184033; HLA -A*02:03
LLKEFTVSGN

SEQ ID NO: 1556 - protein, 9 aa, Homo sapiens
  Table 1.2; CTAG1A/CTAG1B; ENSG00000184033; HLA -B*54:01
LPVFLAQPP

SEQ ID NO: 1557 - protein, 10 aa, Homo sapiens
  Table 1.2; CTAG1A/CTAG1B; ENSG00000184033; HLA -B*54:01
LPVFLAQPPS

SEQ ID NO: 1558 - protein, 11 aa, Homo sapiens
  Table 1.2; CTAG1A/CTAG1B; ENSG00000184033; HLA -B*54:01,HLA-B*56:01
LPVFLAQPPSG

SEQ ID NO: 1559 - protein, 8 aa, Homo sapiens
  Table 1.2; CTAG1A/CTAG1B; ENSG00000184033; HLA -B*07:02,HLA-B*08:01,HLA-B*35:01,HLA-B*35:03,HLA-B*51:01, HLA-B*56:01
LPVPGVLL

SEQ ID NO: 1560 - protein, 9 aa, Homo sapiens
  Table 1.2; CTAG1A/CTAG1B; ENSG00000184033; HLA -B*51:01
LPVPGVLLK

SEQ ID NO: 1561 - protein, 11 aa, Homo sapiens
  Table 1.2; CTAG1A/CTAG1B; ENSG00000184033; HLA -B*35:01
LPVPGVLLKEF

SEQ ID NO: 1562 - protein, 9 aa, Homo sapiens
  Table 1.2; CTAG1A/CTAG1B; ENSG00000184033; HLA -A*30:01,HLA-B*27:05
LQLSISSCL

SEQ ID NO: 1563 - protein, 9 aa, Homo sapiens
  Table 1.2; CTAG1A/CTAG1B; ENSG00000184033; HLA -A*68:02,HLA-C*06:02,HLA-C*16:01,HLA-C*16:02
LTAADHRQL

SEQ ID NO: 1564 - protein, 10 aa, Homo sapiens
  Table 1.2; CTAG1A/CTAG1B; ENSG00000184033; HLA -A*30:01,HLA-B*40:02,HLA-B*44:02,HLA-B*44:03
MEAELARRSL

SEQ ID NO: 1565 - protein, 8 aa, Homo sapiens
  Table 1.2; CTAG1A/CTAG1B; ENSG00000184033; HLA -B*51:01,HLA-B*54:01
MPFATPME

SEQ ID NO: 1566 - protein, 9 aa, Homo sapiens
  Table 1.2; CTAG1A/CTAG1B; ENSG00000184033; HLA -A*02:01,HLA-A*02:03,HLA-A*30:01,HLA-A*68:02,HLA-B*07:02, HLA-B*08:01,HLA-B*13:02,HLA-B*35:01,HLA-B*35:03,HLA-B*51:01, HLA-B*54:01,HLA-B*55:01,HLA-B*56:01,HLA-C*03:03,HLA-C*04:01,
  HLA-C*06:02,HLA-C*07:02,HLA-C*12:03,HLA-C*16:04
MPFATPMEA

SEQ ID NO: 1567 - protein, 10 aa, Homo sapiens
  Table 1.2; CTAG1A/CTAG1B; ENSG00000184033; HLA -B*35:01,HLA-B*54:01,HLA-B*56:01
MPFATPMEAE

SEQ ID NO: 1568 - protein, 11 aa, Homo sapiens
  Table 1.2; CTAG1A/CTAG1B; ENSG00000184033; HLA -A*68:01,HLA-A*68:02,HLA-B*07:02,HLA-B*35:01,HLA-B*35:03, HLA-B*38:01,HLA-B*51:01,HLA-B*54:01,HLA-B*55:01,HLA-B*56:01, HLA-C*03:03,HLA-C*04:01,HLA-C*07:01
MPFATPMEAEL

SEQ ID NO: 1569 - protein, 9 aa, Homo sapiens
  Table 1.2; CTAG1A/CTAG1B; ENSG00000184033; HLA -B*54:01,HLA-C*16:01
NILTIRLTA

SEQ ID NO: 1570 - protein, 10 aa, Homo sapiens
  Table 1.2; CTAG1A/CTAG1B; ENSG00000184033; HLA -A*02:01,HLA-A*02:03,HLA-A*02:04,HLA-B*54:01
NILTIRLTAA

SEQ ID NO: 1571 - protein, 9 aa, Homo sapiens
  Table 1.2; CTAG1A/CTAG1B; ENSG00000184033; HLA -C*07:02
PGGGAPRGP

SEQ ID NO: 1572 - protein, 9 aa, Homo sapiens
  Table 1.2; CTAG1A/CTAG1B; ENSG00000184033; HLA -A*02:07,HLA-A*24:02
PLPVPGVLL

SEQ ID NO: 1573 - protein, 8 aa, Homo sapiens
  Table 1.2; CTAG1A/CTAG1B; ENSG00000184033; HLA -B*51:01
PPLPVPGV

SEQ ID NO: 1574 - protein, 9 aa, Homo sapiens
  Table 1.2; CTAG1A/CTAG1B; ENSG00000184033; HLA -B*07:02
PPLPVPGVL

SEQ ID NO: 1575 - protein, 10 aa, Homo sapiens
  Table 1.2; CTAG1A/CTAG1B; ENSG00000184033; HLA -A*24:02
PPLPVPGVLL

SEQ ID NO: 1576 - protein, 8 aa, Homo sapiens
  Table 1.2; CTAG1A/CTAG1B; ENSG00000184033; HLA -B*37:01
QDAPPLPV

SEQ ID NO: 1577 - protein, 9 aa, Homo sapiens
  Table 1.2; CTAG1A/CTAG1B; ENSG00000184033; HLA -A*30:01,HLA-B*27:05,HLA-B*40:02,HLA-C*04:01,HLA-C*06:02, HLA-C*07:01,HLA-C*07:02,HLA-C*07:04,HLA-C*16:02
QDAPPLPVP

SEQ ID NO: 1578 - protein, 10 aa, Homo sapiens
  Table 1.2; CTAG1A/CTAG1B; ENSG00000184033; HLA -A*68:02,HLA-B*27:02,HLA-C*04:01,HLA-C*06:02,HLA-C*07:01
QDAPPLPVPG

SEQ ID NO: 1579 - protein, 11 aa, Homo sapiens
  Table 1.2; CTAG1A/CTAG1B; ENSG00000184033; HLA -A*03:02,HLA-A*11:01,HLA-A*31:01,HLA-A*33:01,HLA-A*33:03, HLA-A*68:01,HLA-B*27:05,HLA-C*07:06
RASGPGGGAPR

SEQ ID NO: 1580 - protein, 11 aa, Homo sapiens
  Table 1.2; CTAG1A/CTAG1B; ENSG00000184033; HLA -A*32:01
RGAGAARASGP

SEQ ID NO: 1581 - protein, 10 aa, Homo sapiens
  Table 1.2; CTAG1A/CTAG1B; ENSG00000184033; HLA -A*02:07,HLA-A*24:02
RGPESRLLEF

SEQ ID NO: 1582 - protein, 11 aa, Homo sapiens
  Table 1.2; CTAG1A/CTAG1B; ENSG00000184033; HLA -C*01:02
RGPHGGAASGL

SEQ ID NO: 1583 - protein, 10 aa, Homo sapiens
  Table 1.2; CTAG1A/CTAG1B; ENSG00000184033; HLA -A*31:01
RGPRGAGAAR

SEQ ID NO: 1584 - protein, 9 aa, Homo sapiens
  Table 1.2; CTAG1A/CTAG1B; ENSG00000184033; HLA -A*02:04,HLA-A*02:07,HLA-A*03:01
RLLEFYLAM

SEQ ID NO: 1585 - protein, 9 aa, Homo sapiens
  Table 1.2; CTAG1A/CTAG1B; ENSG00000184033; HLA -A*02:04,HLA-A*31:01
SGNILTIRL

SEQ ID NO: 1586 - protein, 8 aa, Homo sapiens
  Table 1.2; CTAG1A/CTAG1B; ENSG00000184033; HLA -C*01:02
SGPGGGAP

SEQ ID NO: 1587 - protein, 9 aa, Homo sapiens
  Table 1.2; CTAG1A/CTAG1B; ENSG00000184033; HLA -A*11:01,HLA-A*31:01,HLA-A*68:01,HLA-C*01:02,HLA-C*07:06
SGPGGGAPR

SEQ ID NO: 1588 - protein, 11 aa, Homo sapiens
  Table 1.2; CTAG1A/CTAG1B; ENSG00000184033; HLA -B*07:02,HLA-C*04:01,HLA-C*06:02,HLA-C*07:01,HLA-C*07:02, HLA-C*16:02
SGPGGGAPRGP

SEQ ID NO: 1589 - protein, 9 aa, Homo sapiens
  Table 1.2; CTAG1A/CTAG1B; ENSG00000184033; HLA -A*02:01,HLA-A*02:03,HLA-A*02:04,HLA-A*24:02,HLA-A*68:02, HLA-B*13:02,HLA-B*55:01
SISSCLQQL

SEQ ID NO: 1590 - protein, 9 aa, Homo sapiens
  Table 1.2; CTAG1A/CTAG1B; ENSG00000184033; HLA -A*02:01,HLA-A*02:03,HLA-A*02:04,HLA-A*02:07,HLA-B*35:03, HLA-B*39:01,HLA-B*40:01,HLA-B*55:01
SLAQDAPPL

SEQ ID NO: 1591 - protein, 11 aa, Homo sapiens
  Table 1.2; CTAG1A/CTAG1B; ENSG00000184033; HLA -A*02:01,HLA-A*02:03
SLAQDAPPLPV

SEQ ID NO: 1592 - protein, 9 aa, Homo sapiens
  Table 1.2; CTAG1A/CTAG1B; ENSG00000184033; HLA -A*02:01,HLA-A*02:03,HLA-A*02:04
SLLMWITQC

SEQ ID NO: 1593 - protein, 8 aa, Homo sapiens
  Table 1.2; CTAG1A/CTAG1B; ENSG00000184033; HLA -B*07:02,HLA-B*08:01,HLA-B*35:03,HLA-B*51:01,HLA-C*03:03, HLA-C*03:04,HLA-C*06:02,HLA-C*12:03,HLA-C*16:01,HLA-C*16:02
TAADHRQL

SEQ ID NO: 1594 - protein, 10 aa, Homo sapiens
  Table 1.2; CTAG1A/CTAG1B; ENSG00000184033; HLA -A*02:03,HLA-A*25:01,HLA-A*30:01,HLA-A*68:02,HLA-B*07:02, HLA-B*08:01,HLA-C*07:02,HLA-C*16:01,HLA-C*16:02
TAADHRQLQL

SEQ ID NO: 1595 - protein, 8 aa, Homo sapiens
  Table 1.2; CTAG1A/CTAG1B; ENSG00000184033; HLA -B*54:01,HLA-B*55:01,HLA-B*56:01
TPMEAELA

SEQ ID NO: 1596 - protein, 9 aa, Homo sapiens
  Table 1.2; CTAG1A/CTAG1B; ENSG00000184033; HLA -A*33:03,HLA-A*68:01,HLA-B*27:02,HLA-B*35:01,HLA-B*35:03, HLA-B*54:01,HLA-B*55:01,HLA-B*56:01,HLA-C*07:06
TPMEAELAR

SEQ ID NO: 1597 - protein, 10 aa, Homo sapiens
  Table 1.2; CTAG1A/CTAG1B; ENSG00000184033; HLA -A*33:03,HLA-A*68:01,HLA-B*56:01,HLA-C*07:06
TPMEAELARR

SEQ ID NO: 1598 - protein, 9 aa, Homo sapiens
  Table 1.2; CTAG1A/CTAG1B; ENSG00000184033; HLA -A*02:01,HLA-A*02:03,HLA-A*02:04,HLA-A*02:07,HLA-A*03:01, HLA-A*11:01,HLA-A*23:01,HLA-A*25:01,HLA-A*26:01,HLA-A*30:01, HLA-A*32:01,HLA-A*33:03,HLA-A*68:01,HLA-A*68:02,HLA-B*13:02,
  HLA-B*27:05,HLA-B*35:01,HLA-B*35:03,HLA-B*38:01,HLA-B*39:01, HLA-B*40:02,HLA-B*44:03,HLA-B*49:01,HLA-B*51:01,HLA-B*54:01, HLA-B*55:01,HLA-B*56:01,HLA-B*58:01,HLA-C*02:02,HLA-C*04:01, HLA-C*06:02,HLA-C*07:04,HLA-C*07:06,HLA-C*12:03,HLA-C*16:02
TVSGNILTI

SEQ ID NO: 1599 - protein, 10 aa, Homo sapiens
  Table 1.2; CTAG1A/CTAG1B; ENSG00000184033; HLA -A*31:01,HLA-A*33:03,HLA-A*68:01,HLA-A*68:02,HLA-C*07:06
TVSGNILTIR

SEQ ID NO: 1600 - protein, 11 aa, Homo sapiens
  Table 1.2; CTAG1A/CTAG1B; ENSG00000184033; HLA -A*68:02
TVSGNILTIRL

SEQ ID NO: 1601 - protein, 8 aa, Homo sapiens
  Table 1.2; CTAG1A/CTAG1B; ENSG00000184033; HLA -A*02:01,HLA-A*02:04
VLLKEFTV

SEQ ID NO: 1602 - protein, 8 aa, Homo sapiens
  Table 1.2; CTAG1A/CTAG1B; ENSG00000184033; HLA -A*23:01,HLA-B*13:02,HLA-B*51:01,HLA-B*58:01
VSGNILTI

SEQ ID NO: 1603 - protein, 9 aa, Homo sapiens
  Table 1.2; CTAG1A/CTAG1B; ENSG00000184033; HLA -A*31:01,HLA-A*33:03,HLA-A*68:01
VSGNILTIR

SEQ ID NO: 1604 - protein, 9 aa, Homo sapiens
  Table 1.2; CTAG1A/CTAG1B; ENSG00000184033; HLA -A*02:03
YLAMPFATP

SEQ ID NO: 1605 - protein, 10 aa, Homo sapiens
  Table 1.2; CTAG1A/CTAG1B; ENSG00000184033; HLA -A*02:03,HLA-C*07:01
YLAMPFATPM

SEQ ID NO: 1606 - protein, 10 aa, Homo sapiens
  Table 1.2; CTCFL; ENSG00000124092; HLA -A*03:02,HLA-A*11:01,HLA-C*07:06
AAAEEASTTK

SEQ ID NO: 1607 - protein, 9 aa, Homo sapiens
  Table 1.2; CTCFL; ENSG00000124092; HLA -A*03:02,HLA-A*11:01,HLA-C*05:01
AAEEASTTK

SEQ ID NO: 1608 - protein, 8 aa, Homo sapiens
  Table 1.2; CTCFL; ENSG00000124092; HLA -B*08:01
AAELKCRY

SEQ ID NO: 1609 - protein, 8 aa, Homo sapiens
  Table 1.2; CTCFL; ENSG00000124092; HLA -C*03:03,HLA-C*03:04,HLA-C*12:03,HLA-C*16:01,HLA-C*16:02
AATEISVL

SEQ ID NO: 1610 - protein, 9 aa, Homo sapiens
  Table 1.2; CTCFL; ENSG00000124092; HLA -B*49:01
AEEASTTKG

SEQ ID NO: 1611 - protein, 9 aa, Homo sapiens
  Table 1.2; CTCFL; ENSG00000124092; HLA -B*37:01,HLA-B*40:02,HLA-B*44:02,HLA-B*44:03
AERTKEQLF

SEQ ID NO: 1612 - protein, 8 aa, Homo sapiens
  Table 1.2; CTCFL; ENSG00000124092; HLA -B*37:01
AERTSGAF

SEQ ID NO: 1613 - protein, 9 aa, Homo sapiens
  Table 1.2; CTCFL; ENSG00000124092; HLA -A*30:01,HLA-B*27:02,HLA-B*37:01,HLA-B*40:01,HLA-B*40:02, HLA-B*44:02,HLA-B*44:03,HLA-B*49:01,HLA-C*16:04
AETTGLIKL

SEQ ID NO: 1614 - protein, 8 aa, Homo sapiens
  Table 1.2; CTCFL; ENSG00000124092; HLA -C*14:02,HLA-C*16:01
AFVTSGEL

SEQ ID NO: 1615 - protein, 8 aa, Homo sapiens
  Table 1.2; CTCFL; ENSG00000124092; HLA -B*37:01
AISIQQEL

SEQ ID NO: 1616 - protein, 9 aa, Homo sapiens
  Table 1.2; CTCFL; ENSG00000124092; HLA -A*01:01,HLA-A*29:02,HLA-A*30:02,HLA-A*32:01,HLA-B*15:01, HLA-B*15:03,HLA-B*58:01
AISIQQELY

SEQ ID NO: 1617 - protein, 8 aa, Homo sapiens
  Table 1.2; CTCFL; ENSG00000124092; HLA -A*02:01
ALEENVMV

SEQ ID NO: 1618 - protein, 9 aa, Homo sapiens
  Table 1.2; CTCFL; ENSG00000124092; HLA -A*02:01,HLA-A*02:03
ALEENVMVA

SEQ ID NO: 1619 - protein, 8 aa, Homo sapiens
  Table 1.2; CTCFL; ENSG00000124092; HLA -A*29:02,HLA-A*30:02,HLA-B*15:01,HLA-B*15:03,HLA-B*18:01, HLA-B*39:01,HLA-B*46:01,HLA-C*12:03
ANFIPTVY

SEQ ID NO: 1620 - protein, 9 aa, Homo sapiens
  Table 1.2; CTCFL; ENSG00000124092; HLA -A*03:01,HLA-A*03:02,HLA-A*11:01,HLA-B*27:05,HLA-C*04:01
ANFIPTVYK

SEQ ID NO: 1621 - protein, 9 aa, Homo sapiens
  Table 1.2; CTCFL; ENSG00000124092; HLA -A*30:02,HLA-B*15:01,HLA-B*35:01,HLA-B*55:01
APSEESEKY

SEQ ID NO: 1622 - protein, 11 aa, Homo sapiens
  Table 1.2; CTCFL; ENSG00000124092; HLA -B*07:02,HLA-B*35:03,HLA-B*55:01
APSEESEKYIL

SEQ ID NO: 1623 - protein, 9 aa, Homo sapiens
  Table 1.2; CTCFL; ENSG00000124092; HLA -A*01:01,HLA-C*16:02
ASEDSKLAV

SEQ ID NO: 1624 - protein, 8 aa, Homo sapiens
  Table 1.2; CTCFL; ENSG00000124092; HLA -A*23:01
ASRDTYKL

SEQ ID NO: 1625 - protein, 9 aa, Homo sapiens
  Table 1.2; CTCFL; ENSG00000124092; HLA -B*58:01,HLA-C*16:01
ASTTKGEQF

SEQ ID NO: 1626 - protein, 8 aa, Homo sapiens
  Table 1.2; CTCFL; ENSG00000124092; HLA -B*40:02,HLA-B*58:01,HLA-C*03:03,HLA-C*03:04,HLA-C*05:01, HLA-C*16:01,HLA-C*16:02
ASVEASKL

SEQ ID NO: 1627 - protein, 9 aa, Homo sapiens
  Table 1.2; CTCFL; ENSG00000124092; HLA -A*03:01,HLA-A*03:02,HLA-A*11:01,HLA-C*06:02
ASVEASKLK

SEQ ID NO: 1628 - protein, 11 aa, Homo sapiens
  Table 1.2; CTCFL; ENSG00000124092; HLA -A*01:01
ATEISVLSEQF

SEQ ID NO: 1629 - protein, 10 aa, Homo sapiens
  Table 1.2; CTCFL; ENSG00000124092; HLA -A*33:03
ATKGQKEAAK

SEQ ID NO: 1630 - protein, 9 aa, Homo sapiens
  Table 1.2; CTCFL; ENSG00000124092; HLA -A*02:04
AVFHERYAL

SEQ ID NO: 1631 - protein, 11 aa, Homo sapiens
  Table 1.2; CTCFL; ENSG00000124092; HLA -A*29:02
AYSAAELKCRY

SEQ ID NO: 1632 - protein, 8 aa, Homo sapiens
  Table 1.2; CTCFL; ENSG00000124092; HLA -A*30:01,HLA-B*18:01,HLA-B*37:01,HLA-B*49:01
CEMLLNTM

SEQ ID NO: 1633 - protein, 9 aa, Homo sapiens
  Table 1.2; CTCFL; ENSG00000124092; HLA -A*01:01,HLA-A*29:02,HLA-A*30:02
CSAVFHERY

SEQ ID NO: 1634 - protein, 9 aa, Homo sapiens
  Table 1.2; CTCFL; ENSG00000124092; HLA -A*01:01,HLA-A*30:02,HLA-A*32:01,HLA-B*15:01,HLA-B*15:03, HLA-B*46:01,HLA-B*58:01,HLA-C*12:03,HLA-C*16:01,HLA-C*16:04
CSYASRDTY

SEQ ID NO: 1635 - protein, 10 aa, Homo sapiens
  Table 1.2; CTCFL; ENSG00000124092; HLA -A*03:01
CSYASRDTYK

SEQ ID NO: 1636 - protein, 11 aa, Homo sapiens
  Table 1.2; CTCFL; ENSG00000124092; HLA -A*30:02
CVAISIQQELY

SEQ ID NO: 1637 - protein, 8 aa, Homo sapiens
  Table 1.2; CTCFL; ENSG00000124092; HLA -B*18:01,HLA-B*51:01,HLA-B*54:01
DANFIPTV

SEQ ID NO: 1638 - protein, 9 aa, Homo sapiens
  Table 1.2; CTCFL; ENSG00000124092; HLA -A*01:01,HLA-A*25:01,HLA-A*26:01,HLA-A*29:02,HLA-A*33:01, HLA-A*33:03,HLA-A*68:01,HLA-B*15:01,HLA-B*15:03,HLA-B*18:01, HLA-B*35:01,HLA-B*35:03,HLA-B*39:01,HLA-B*46:01,HLA-B*51:01,
  HLA-B*54:01,HLA-B*55:01,HLA-C*02:02,HLA-C*03:03,HLA-C*07:01, HLA-C*07:06,HLA-C*12:03,HLA-C*16:04
DANFIPTVY

SEQ ID NO: 1639 - protein, 10 aa, Homo sapiens
  Table 1.2; CTCFL; ENSG00000124092; HLA -A*11:01,HLA-A*33:01,HLA-A*33:03,HLA-A*68:01,HLA-A*68:02, HLA-B*27:02
DANFIPTVYK

SEQ ID NO: 1640 - protein, 8 aa, Homo sapiens
  Table 1.2; CTCFL; ENSG00000124092; HLA -B*18:01
DEAAAEEA

SEQ ID NO: 1641 - protein, 8 aa, Homo sapiens
  Table 1.2; CTCFL; ENSG00000124092; HLA -B*18:01
DEGVTCEM

SEQ ID NO: 1642 - protein, 8 aa, Homo sapiens
  Table 1.2; CTCFL; ENSG00000124092; HLA -B*18:01
DEIVLTVS

SEQ ID NO: 1643 - protein, 9 aa, Homo sapiens
  Table 1.2; CTCFL; ENSG00000124092; HLA -B*18:01
DEIVLTVSN

SEQ ID NO: 1644 - protein, 9 aa, Homo sapiens
  Table 1.2; CTCFL; ENSG00000124092; HLA -B*18:01,HLA-B*40:01,HLA-B*40:02
DERSDEIVL

SEQ ID NO: 1645 - protein, 8 aa, Homo sapiens
  Table 1.2; CTCFL; ENSG00000124092; HLA -A*33:01,HLA-B*08:01,HLA-B*18:01,HLA-B*40:02,HLA-B*51:01
DSKLAVSL

SEQ ID NO: 1646 - protein, 10 aa, Homo sapiens
  Table 1.2; CTCFL; ENSG00000124092; HLA -A*33:01
DTYKLKRHMR

SEQ ID NO: 1647 - protein, 9 aa, Homo sapiens
  Table 1.2; CTCFL; ENSG00000124092; HLA -A*33:01,HLA-A*33:03,HLA-A*68:01
DVCMFTSSR

SEQ ID NO: 1648 - protein, 11 aa, Homo sapiens
  Table 1.2; CTCFL; ENSG00000124092; HLA -A*26:01,HLA-A*33:03,HLA-A*68:01,HLA-B*27:02,HLA-C*07:06
EAAAEEASTTK

SEQ ID NO: 1649 - protein, 9 aa, Homo sapiens
  Table 1.2; CTCFL; ENSG00000124092; HLA -A*33:03
EAKSAASGK

SEQ ID NO: 1650 - protein, 11 aa, Homo sapiens
  Table 1.2; CTCFL; ENSG00000124092; HLA -A*33:01,HLA-A*33:03,HLA-A*68:01
EAKSAASGKGR

SEQ ID NO: 1651 - protein, 10 aa, Homo sapiens
  Table 1.2; CTCFL; ENSG00000124092; HLA -A*25:01
EASTTKGEQF

SEQ ID NO: 1652 - protein, 10 aa, Homo sapiens
  Table 1.2; CTCFL; ENSG00000124092; HLA -A*25:01,HLA-A*68:01,HLA-A*68:02,HLA-B*35:01,HLA-B*35:03
EAVELQDMSL

SEQ ID NO: 1653 - protein, 11 aa, Homo sapiens
  Table 1.2; CTCFL; ENSG00000124092; HLA -A*25:01,HLA-A*26:01,HLA-A*68:02
EAVELQDMSLL

SEQ ID NO: 1654 - protein, 9 aa, Homo sapiens
  Table 1.2; CTCFL; ENSG00000124092; HLA -A*30:01,HLA-A*68:02,HLA-B*18:01,HLA-B*27:05,HLA-B*37:01, HLA-B*38:01,HLA-B*39:01,HLA-B*40:01,HLA-B*40:02,HLA-B*44:02, HLA-B*44:03
EDSKLAVSL

SEQ ID NO: 1655 - protein, 11 aa, Homo sapiens
  Table 1.2; CTCFL; ENSG00000124092; HLA -A*25:01,HLA-A*26:01,HLA-B*27:02,HLA-B*38:01,HLA-B*40:01, HLA-B*44:02,HLA-B*44:03,HLA-C*16:04
EEASTTKGEQF

SEQ ID NO: 1656 - protein, 9 aa, Homo sapiens
  Table 1.2; CTCFL; ENSG00000124092; HLA -B*40:01,HLA-B*44:02,HLA-B*44:03
EEEQEKNQL

SEQ ID NO: 1657 - protein, 10 aa, Homo sapiens
  Table 1.2; CTCFL; ENSG00000124092; HLA -B*40:01,HLA-B*44:02,HLA-B*44:03
EEEQEKNQLL

SEQ ID NO: 1658 - protein, 8 aa, Homo sapiens
  Table 1.2; CTCFL; ENSG00000124092; HLA -B*37:01,HLA-B*40:01,HLA-B*44:02,HLA-B*44:03
EEGPRQSL

SEQ ID NO: 1659 - protein, 9 aa, Homo sapiens
  Table 1.2; CTCFL; ENSG00000124092; HLA -A*30:01,HLA-B*40:01,HLA-B*40:02,HLA-B*44:02,HLA-B*44:03, HLA-B*49:01
EEQEKNQLL

SEQ ID NO: 1660 - protein, 8 aa, Homo sapiens
  Table 1.2; CTCFL; ENSG00000124092; HLA -B*18:01,HLA-B*37:01
EESEKYIL

SEQ ID NO: 1661 - protein, 10 aa, Homo sapiens
  Table 1.2; CTCFL; ENSG00000124092; HLA -A*30:01,HLA-B*40:01,HLA-B*44:02,HLA-B*44:03
EESEKYILTL

SEQ ID NO: 1662 - protein, 9 aa, Homo sapiens
  Table 1.2; CTCFL; ENSG00000124092; HLA -A*30:01,HLA-B*39:01,HLA-B*40:01,HLA-B*49:01
EEVDEGVTC

SEQ ID NO: 1663 - protein, 11 aa, Homo sapiens
  Table 1.2; CTCFL; ENSG00000124092; HLA -A*26:01,HLA-A*30:01,HLA-B*40:01,HLA-B*44:03
EEVDEGVTCEM

SEQ ID NO: 1664 - protein, 8 aa, Homo sapiens
  Table 1.2; CTCFL; ENSG00000124092; HLA -B*18:01
EEVELVLA

SEQ ID NO: 1665 - protein, 9 aa, Homo sapiens
  Table 1.2; CTCFL; ENSG00000124092; HLA -B*18:01
EEVELVLAP

SEQ ID NO: 1666 - protein, 9 aa, Homo sapiens
  Table 1.2; CTCFL; ENSG00000124092; HLA -A*25:01,HLA-A*26:01,HLA-B*44:02
EISVLSEQF

SEQ ID NO: 1667 - protein, 11 aa, Homo sapiens
  Table 1.2; CTCFL; ENSG00000124092; HLA -A*68:01,HLA-B*27:02
EISVLSEQFTK

SEQ ID NO: 1668 - protein, 9 aa, Homo sapiens
  Table 1.2; CTCFL; ENSG00000124092; HLA -A*33:01,HLA-A*33:03
EKNQLLAER

SEQ ID NO: 1669 - protein, 8 aa, Homo sapiens
  Table 1.2; CTCFL; ENSG00000124092; HLA -B*08:01
ELMPEKGL

SEQ ID NO: 1670 - protein, 9 aa, Homo sapiens
  Table 1.2; CTCFL; ENSG00000124092; HLA -A*33:03
ELMPEKGLK

SEQ ID NO: 1671 - protein, 10 aa, Homo sapiens
  Table 1.2; CTCFL; ENSG00000124092; HLA -A*25:01
ELQDMSLLSI

SEQ ID NO: 1672 - protein, 8 aa, Homo sapiens
  Table 1.2; CTCFL; ENSG00000124092; HLA -B*08:01
ELYSPQEM

SEQ ID NO: 1673 - protein, 10 aa, Homo sapiens
  Table 1.2; CTCFL; ENSG00000124092; HLA -A*02:01,HLA-A*02:03,HLA-B*13:02
ELYSPQEMEV

SEQ ID NO: 1674 - protein, 8 aa, Homo sapiens
  Table 1.2; CTCFL; ENSG00000124092; HLA -A*33:03
EMFPVACR

SEQ ID NO: 1675 - protein, 9 aa, Homo sapiens
  Table 1.2; CTCFL; ENSG00000124092; HLA -A*01:01
EMLLNTMDK

SEQ ID NO: 1676 - protein, 10 aa, Homo sapiens
  Table 1.2; CTCFL; ENSG00000124092; HLA -A*02:03,HLA-A*26:01,HLA-A*68:02
EQFPGEMFPV

SEQ ID NO: 1677 - protein, 11 aa, Homo sapiens
  Table 1.2; CTCFL; ENSG00000124092; HLA -A*68:02
EQFPGEMFPVA

SEQ ID NO: 1678 - protein, 9 aa, Homo sapiens
  Table 1.2; CTCFL; ENSG00000124092; HLA -A*25:01,HLA-A*26:01,HLA-A*68:02,HLA-B*08:01
EQFTKIKEL

SEQ ID NO: 1679 - protein, 9 aa, Homo sapiens
  Table 1.2; CTCFL; ENSG00000124092; HLA -A*68:02,HLA-B*13:02,HLA-B*18:01,HLA-B*38:01,HLA-B*39:01
EQLFFVETM

SEQ ID NO: 1680 - protein, 10 aa, Homo sapiens
  Table 1.2; CTCFL; ENSG00000124092; HLA -A*68:02
ERSDEIVLTV

SEQ ID NO: 1681 - protein, 9 aa, Homo sapiens
  Table 1.2; CTCFL; ENSG00000124092; HLA -A*01:01
ESEKYILTL

SEQ ID NO: 1682 - protein, 8 aa, Homo sapiens
  Table 1.2; CTCFL; ENSG00000124092; HLA -A*33:03
ETMSGDER

SEQ ID NO: 1683 - protein, 8 aa, Homo sapiens
  Table 1.2; CTCFL; ENSG00000124092; HLA -A*68:02
ETTGLIKL

SEQ ID NO: 1684 - protein, 8 aa, Homo sapiens
  Table 1.2; CTCFL; ENSG00000124092; HLA -C*05:01
EVDEGVTC

SEQ ID NO: 1685 - protein, 10 aa, Homo sapiens
  Table 1.2; CTCFL; ENSG00000124092; HLA -A*25:01,HLA-A*26:01,HLA-B*35:01,HLA-B*35:03
EVDEGVTCEM

SEQ ID NO: 1686 - protein, 8 aa, Homo sapiens
  Table 1.2; CTCFL; ENSG00000124092; HLA -B*08:01
EVLQFHAL

SEQ ID NO: 1687 - protein, 9 aa, Homo sapiens
  Table 1.2; CTCFL; ENSG00000124092; HLA -B*35:03,HLA-B*38:01,HLA-B*39:01
FHALEENVM

SEQ ID NO: 1688 - protein, 10 aa, Homo sapiens
  Table 1.2; CTCFL; ENSG00000124092; HLA -B*38:01
FHALEENVMV

SEQ ID NO: 1689 - protein, 8 aa, Homo sapiens
  Table 1.2; CTCFL; ENSG00000124092; HLA -B*54:01
FPGEMFPV

SEQ ID NO: 1690 - protein, 9 aa, Homo sapiens
  Table 1.2; CTCFL; ENSG00000124092; HLA -B*35:01,HLA-B*35:03,HLA-B*51:01,HLA-B*54:01,HLA-B*55:01, HLA-B*56:01
FPGEMFPVA

SEQ ID NO: 1691 - protein, 10 aa, Homo sapiens
  Table 1.2; CTCFL; ENSG00000124092; HLA -B*35:03,HLA-B*54:01,HLA-B*56:01
FPGEMFPVAC

SEQ ID NO: 1692 - protein, 10 aa, Homo sapiens
  Table 1.2; CTCFL; ENSG00000124092; HLA -B*54:01
FPVACRETTA

SEQ ID NO: 1693 - protein, 9 aa, Homo sapiens
  Table 1.2; CTCFL; ENSG00000124092; HLA -B*08:01
FTKIKELEL

SEQ ID NO: 1694 - protein, 9 aa, Homo sapiens
  Table 1.2; CTCFL; ENSG00000124092; HLA -A*01:01,HLA-A*25:01,HLA-A*32:01,HLA-A*68:02,HLA-B*13:02, HLA-C*16:02
FTQSGTMKI

SEQ ID NO: 1695 - protein, 8 aa, Homo sapiens
  Table 1.2; CTCFL; ENSG00000124092; HLA -B*27:05,HLA-B*35:03,HLA-B*39:01,HLA-B*40:01,HLA-B*46:01, HLA-C*01:02,HLA-C*03:03,HLA-C*03:04,HLA-C*04:01,HLA-C*05:01, HLA-C*07:04,HLA-C*12:03,HLA-C*14:02
FTSEAVEL

SEQ ID NO: 1696 - protein, 9 aa, Homo sapiens
  Table 1.2; CTCFL; ENSG00000124092; HLA -A*01:01,HLA-A*25:01,HLA-A*26:01,HLA-A*32:01,HLA-B*08:01, HLA-B*37:01,HLA-B*46:01,HLA-B*57:01,HLA-C*02:02,HLA-C*03:04, HLA-C*07:04,HLA-C*12:03,HLA-C*16:01
FTSSRMSSF

SEQ ID NO: 1697 - protein, 10 aa, Homo sapiens
  Table 1.2; CTCFL; ENSG00000124092; HLA -B*27:05
FVETMSGDER

SEQ ID NO: 1698 - protein, 8 aa, Homo sapiens
  Table 1.2; CTCFL; ENSG00000124092; HLA -B*39:01
FVTSGELV

SEQ ID NO: 1699 - protein, 9 aa, Homo sapiens
  Table 1.2; CTCFL; ENSG00000124092; HLA -A*33:03,HLA-A*68:01,HLA-C*07:06
FVTSGELVR

SEQ ID NO: 1700 - protein, 10 aa, Homo sapiens
  Table 1.2; CTCFL; ENSG00000124092; HLA -B*40:01
GDERSDEIVL

SEQ ID NO: 1701 - protein, 8 aa, Homo sapiens
  Table 1.2; CTCFL; ENSG00000124092; HLA -A*30:01,HLA-B*40:01,HLA-B*40:02,HLA-B*49:01
GEKPFTCL

SEQ ID NO: 1702 - protein, 9 aa, Homo sapiens
  Table 1.2; CTCFL; ENSG00000124092; HLA -B*40:02,HLA-B*49:01
GEKPYECHI

SEQ ID NO: 1703 - protein, 9 aa, Homo sapiens
  Table 1.2; CTCFL; ENSG00000124092; HLA -B*37:01
GENVPKYQC

SEQ ID NO: 1704 - protein, 9 aa, Homo sapiens
  Table 1.2; CTCFL; ENSG00000124092; HLA -B*44:02,HLA-B*44:03
GEQFPGEMF

SEQ ID NO: 1705 - protein, 9 aa, Homo sapiens
  Table 1.2; CTCFL; ENSG00000124092; HLA -B*07:02,HLA-B*56:01
GPRQSLQQC

SEQ ID NO: 1706 - protein, 10 aa, Homo sapiens
  Table 1.2; CTCFL; ENSG00000124092; HLA -B*07:02
GPRQSLQQCV

SEQ ID NO: 1707 - protein, 11 aa, Homo sapiens
  Table 1.2; CTCFL; ENSG00000124092; HLA -B*56:01
GPRQSLQQCVA

SEQ ID NO: 1708 - protein, 9 aa, Homo sapiens
  Table 1.2; CTCFL; ENSG00000124092; HLA -A*32:01
GQKEAAKGW

SEQ ID NO: 1709 - protein, 10 aa, Homo sapiens
  Table 1.2; CTCFL; ENSG00000124092; HLA -A*03:01,HLA-A*03:02,HLA-A*11:01
GTMKIHILQK

SEQ ID NO: 1710 - protein, 8 aa, Homo sapiens
  Table 1.2; CTCFL; ENSG00000124092; HLA -B*08:01,HLA-B*35:01,HLA-B*35:03,HLA-B*51:01
HALEENVM

SEQ ID NO: 1711 - protein, 9 aa, Homo sapiens
  Table 1.2; CTCFL; ENSG00000124092; HLA -A*02:01,HLA-A*68:02,HLA-B*13:02,HLA-B*35:03,HLA-B*38:01, HLA-B*39:01,HLA-B*51:01,HLA-B*54:01,HLA-B*55:01,HLA-C*03:03, HLA-C*05:01,HLA-C*12:03
HALEENVMV

SEQ ID NO: 1712 - protein, 10 aa, Homo sapiens
  Table 1.2; CTCFL; ENSG00000124092; HLA -B*54:01,HLA-B*56:01
HALEENVMVA

SEQ ID NO: 1713 - protein, 8 aa, Homo sapiens
  Table 1.2; CTCFL; ENSG00000124092; HLA -A*23:01,HLA-A*30:01,HLA-A*32:01,HLA-B*07:02,HLA-B*08:01, HLA-B*13:02,HLA-B*15:03,HLA-B*18:01,HLA-B*35:01,HLA-B*35:03, HLA-B*37:01,HLA-B*38:01,HLA-B*39:01,HLA-B*40:01,HLA-B*40:02,
  HLA-B*46:01,HLA-B*51:01,HLA-B*54:01,HLA-B*58:01,HLA-C*01:02, HLA-C*02:02,HLA-C*03:03,HLA-C*03:04,HLA-C*05:01,HLA-C*07:02, HLA-C*07:04,HLA-C*12:03,HLA-C*14:02,HLA-C*16:01,HLA-C*16:02, HLA-C*16:04
HAYSAAEL

SEQ ID NO: 1714 - protein, 9 aa, Homo sapiens
  Table 1.2; CTCFL; ENSG00000124092; HLA -A*03:01,HLA-A*03:02,HLA-A*11:01,HLA-A*33:01,HLA-A*33:03, HLA-A*68:01,HLA-B*27:02,HLA-B*27:05,HLA-B*57:01,HLA-C*07:06
HAYSAAELK

SEQ ID NO: 1715 - protein, 10 aa, Homo sapiens
  Table 1.2; CTCFL; ENSG00000124092; HLA -B*51:01,HLA-B*54:01
HAYSAAELKC

SEQ ID NO: 1716 - protein, 11 aa, Homo sapiens
  Table 1.2; CTCFL; ENSG00000124092; HLA -A*33:01,HLA-A*33:03
HAYSAAELKCR

SEQ ID NO: 1717 - protein, 8 aa, Homo sapiens
  Table 1.2; CTCFL; ENSG00000124092; HLA -A*68:01
HCATIIAR

SEQ ID NO: 1718 - protein, 9 aa, Homo sapiens
  Table 1.2; CTCFL; ENSG00000124092; HLA -A*03:02
HCATIIARK

SEQ ID NO: 1719 - protein, 9 aa, Homo sapiens
  Table 1.2; CTCFL; ENSG00000124092; HLA -A*02:01,HLA-A*02:03,HLA-A*02:04,HLA-A*30:01,HLA-A*68:02, HLA-B*13:02,HLA-B*49:01,HLA-B*51:01
HDANFIPTV

SEQ ID NO: 1720 - protein, 10 aa, Homo sapiens
  Table 1.2; CTCFL; ENSG00000124092; HLA -A*25:01,HLA-A*26:01,HLA-A*29:02,HLA-A*30:02,HLA-B*15:03, HLA-B*18:01,HLA-B*27:02,HLA-B*35:01,HLA-B*44:03,HLA-C*07:01
HDANFIPTVY

SEQ ID NO: 1721 - protein, 9 aa, Homo sapiens
  Table 1.2; CTCFL; ENSG00000124092; HLA -A*23:01,HLA-A*24:02,HLA-B*35:03,HLA-C*14:02
HFTSEAVEL

SEQ ID NO: 1722 - protein, 8 aa, Homo sapiens
  Table 1.2; CTCFL; ENSG00000124092; HLA -B*18:01,HLA-B*39:01
HGENVPKY

SEQ ID NO: 1723 - protein, 9 aa, Homo sapiens
  Table 1.2; CTCFL; ENSG00000124092; HLA -A*03:01
HMKTHTSEK

SEQ ID NO: 1724 - protein, 9 aa, Homo sapiens
  Table 1.2; CTCFL; ENSG00000124092; HLA -A*31:01,HLA-A*33:01,HLA-A*33:03,HLA-A*68:01,HLA-C*07:06
HVNTHTGTR

SEQ ID NO: 1725 - protein, 11 aa, Homo sapiens
  Table 1.2; CTCFL; ENSG00000124092; HLA -A*03:02
ILQKHGENVPK

SEQ ID NO: 1726 - protein, 9 aa, Homo sapiens
  Table 1.2; CTCFL; ENSG00000124092; HLA -A*23:01,HLA-A*24:02
ILTLQTVHF

SEQ ID NO: 1727 - protein, 9 aa, Homo sapiens
  Table 1.2; CTCFL; ENSG00000124092; HLA -B*13:02,HLA-B*27:05,HLA-B*38:01,HLA-B*39:01
IQQQEGVQV

SEQ ID NO: 1728 - protein, 10 aa, Homo sapiens
  Table 1.2; CTCFL; ENSG00000124092; HLA -B*13:02
IQQQEGVQVV

SEQ ID NO: 1729 - protein, 11 aa, Homo sapiens
  Table 1.2; CTCFL; ENSG00000124092; HLA -A*30:01,HLA-B*13:02
IQQQEGVQVVV

SEQ ID NO: 1730 - protein, 8 aa, Homo sapiens
  Table 1.2; CTCFL; ENSG00000124092; HLA -B*15:01,HLA-B*58:01
ISIQQELY

SEQ ID NO: 1731 - protein, 8 aa, Homo sapiens
  Table 1.2; CTCFL; ENSG00000124092; HLA -B*58:01
ISVLSEQF

SEQ ID NO: 1732 - protein, 10 aa, Homo sapiens
  Table 1.2; CTCFL; ENSG00000124092; HLA -A*11:01
ISVLSEQFTK

SEQ ID NO: 1733 - protein, 10 aa, Homo sapiens
  Table 1.2; CTCFL; ENSG00000124092; HLA -B*40:01
KEAANGDEAA

SEQ ID NO: 1734 - protein, 11 aa, Homo sapiens
  Table 1.2; CTCFL; ENSG00000124092; HLA -B*40:01
KEAANGDEAAA

SEQ ID NO: 1735 - protein, 10 aa, Homo sapiens
  Table 1.2; CTCFL; ENSG00000124092; HLA -B*40:01
KEEVDEGVTC

SEQ ID NO: 1736 - protein, 10 aa, Homo sapiens
  Table 1.2; CTCFL; ENSG00000124092; HLA -A*30:01,HLA-B*37:01,HLA-B*40:02,HLA-B*49:01
KEQLFFVETM

SEQ ID NO: 1737 - protein, 9 aa, Homo sapiens
  Table 1.2; CTCFL; ENSG00000124092; HLA -A*31:01
KGFSRWINL

SEQ ID NO: 1738 - protein, 9 aa, Homo sapiens
  Table 1.2; CTCFL; ENSG00000124092; HLA -A*03:01,HLA-A*30:02,HLA-B*39:01,HLA-B*58:01
KHGENVPKY

SEQ ID NO: 1739 - protein, 9 aa, Homo sapiens
  Table 1.2; CTCFL; ENSG00000124092; HLA -A*31:01
KQLLNAHFR

SEQ ID NO: 1740 - protein, 8 aa, Homo sapiens
  Table 1.2; CTCFL; ENSG00000124092; HLA -B*40:02,HLA-B*57:01,HLA-B*58:01
KTFRTVTL

SEQ ID NO: 1741 - protein, 9 aa, Homo sapiens
  Table 1.2; CTCFL; ENSG00000124092; HLA -A*02:04,HLA-A*03:01,HLA-A*31:01,HLA-A*68:02,HLA-B*57:01, HLA-B*58:01
KTFRTVTLL

SEQ ID NO: 1742 - protein, 10 aa, Homo sapiens
  Table 1.2; CTCFL; ENSG00000124092; HLA -A*03:01,HLA-A*31:01,HLA-B*57:01
KTFRTVTLLR

SEQ ID NO: 1743 - protein, 9 aa, Homo sapiens
  Table 1.2; CTCFL; ENSG00000124092; HLA -A*32:01
KTKGAKGTF

SEQ ID NO: 1744 - protein, 10 aa, Homo sapiens
  Table 1.2; CTCFL; ENSG00000124092; HLA -A*23:01,HLA-A*24:02,HLA-B*15:03,HLA-B*27:05,HLA-B*40:01, HLA-C*06:02
KYASVEASKL

SEQ ID NO: 1745 - protein, 11 aa, Homo sapiens
  Table 1.2; CTCFL; ENSG00000124092; HLA -A*31:01,HLA-C*06:02
KYASVEASKLK

SEQ ID NO: 1746 - protein, 9 aa, Homo sapiens
  Table 1.2; CTCFL; ENSG00000124092; HLA -A*23:01,HLA-A*24:02
KYILTLQTV

SEQ ID NO: 1747 - protein, 11 aa, Homo sapiens
  Table 1.2; CTCFL; ENSG00000124092; HLA -A*23:01,HLA-A*24:02
KYILTLQTVHF

SEQ ID NO: 1748 - protein, 8 aa, Homo sapiens
  Table 1.2; CTCFL; ENSG00000124092; HLA -C*05:01
LAETTGLI

SEQ ID NO: 1749 - protein, 9 aa, Homo sapiens
  Table 1.2; CTCFL; ENSG00000124092; HLA -A*01:01
LAETTGLIK

SEQ ID NO: 1750 - protein, 10 aa, Homo sapiens
  Table 1.2; CTCFL; ENSG00000124092; HLA -A*30:01,HLA-B*18:01
LEAERTSGAF

SEQ ID NO: 1751 - protein, 10 aa, Homo sapiens
  Table 1.2; CTCFL; ENSG00000124092; HLA -A*30:01,HLA-B*40:01
LEEEQEKNQL

SEQ ID NO: 1752 - protein, 11 aa, Homo sapiens
  Table 1.2; CTCFL; ENSG00000124092; HLA -B*40:01
LEEEQEKNQLL

SEQ ID NO: 1753 - protein, 8 aa, Homo sapiens
  Table 1.2; CTCFL; ENSG00000124092; HLA -B*49:01
LEEEVELV

SEQ ID NO: 1754 - protein, 9 aa, Homo sapiens
  Table 1.2; CTCFL; ENSG00000124092; HLA -A*30:01,HLA-B*18:01,HLA-B*40:01,HLA-B*49:01
LEEEVELVL

SEQ ID NO: 1755 - protein, 9 aa, Homo sapiens
  Table 1.2; CTCFL; ENSG00000124092; HLA -A*30:01,HLA-B*37:01,HLA-B*40:01,HLA-B*40:02,HLA-B*44:02, HLA-B*44:03,HLA-B*49:01
LEEGPRQSL

SEQ ID NO: 1756 - protein, 8 aa, Homo sapiens
  Table 1.2; CTCFL; ENSG00000124092; HLA -B*18:01,HLA-B*49:01
LEENVMVA

SEQ ID NO: 1757 - protein, 9 aa, Homo sapiens
  Table 1.2; CTCFL; ENSG00000124092; HLA -B*44:02,HLA-B*44:03
LELMPEKGL

SEQ ID NO: 1758 - protein, 9 aa, Homo sapiens
  Table 1.2; CTCFL; ENSG00000124092; HLA -B*38:01,HLA-B*39:01
LHAYSAAEL

SEQ ID NO: 1759 - protein, 9 aa, Homo sapiens
  Table 1.2; CTCFL; ENSG00000124092; HLA -A*29:02
LLNAHFRKY

SEQ ID NO: 1760 - protein, 9 aa, Homo sapiens
  Table 1.2; CTCFL; ENSG00000124092; HLA -B*13:02,HLA-B*38:01
LQDMSLLSI

SEQ ID NO: 1761 - protein, 9 aa, Homo sapiens
  Table 1.2; CTCFL; ENSG00000124092; HLA -B*13:02
LQQCVAISI

SEQ ID NO: 1762 - protein, 8 aa, Homo sapiens
  Table 1.2; CTCFL; ENSG00000124092; HLA -A*23:01
LTLQTVHF

SEQ ID NO: 1763 - protein, 11 aa, Homo sapiens
  Table 1.2; CTCFL; ENSG00000124092; HLA -A*03:02
LVLAPSEESEK

SEQ ID NO: 1764 - protein, 9 aa, Homo sapiens
  Table 1.2; CTCFL; ENSG00000124092; HLA -A*24:02
LYSPQEMEV

SEQ ID NO: 1765 - protein, 9 aa, Homo sapiens
  Table 1.2; CTCFL; ENSG00000124092; HLA -B*35:01,HLA-B*35:03,HLA-C*03:03,HLA-C*03:04
MAATEISVL

SEQ ID NO: 1766 - protein, 9 aa, Homo sapiens
  Table 1.2; CTCFL; ENSG00000124092; HLA -B*07:02,HLA-B*15:03,HLA-B*35:01,HLA-B*35:03,HLA-B*39:01, HLA-B*40:01,HLA-B*46:01,HLA-B*51:01,HLA-B*54:01,HLA-C*02:02, HLA-C*03:03,HLA-C*03:04,HLA-C*16:04
MAFVTSGEL

SEQ ID NO: 1767 - protein, 11 aa, Homo sapiens
  Table 1.2; CTCFL; ENSG00000124092; HLA -A*33:01,HLA-A*33:03,HLA-A*68:01,HLA-B*54:01,HLA-C*07:06
MAFVTSGELVR

SEQ ID NO: 1768 - protein, 9 aa, Homo sapiens
  Table 1.2; CTCFL; ENSG00000124092; HLA -B*54:01
MCKYASVEA

SEQ ID NO: 1769 - protein, 9 aa, Homo sapiens
  Table 1.2; CTCFL; ENSG00000124092; HLA -A*30:01,HLA-B*18:01,HLA-B*37:01,HLA-B*40:01,HLA-B*40:02, HLA-B*44:02,HLA-B*44:03,HLA-B*49:01
MEVLQFHAL

SEQ ID NO: 1770 - protein, 10 aa, Homo sapiens
  Table 1.2; CTCFL; ENSG00000124092; HLA -A*24:02
MFTSSRMSSF

SEQ ID NO: 1771 - protein, 8 aa, Homo sapiens
  Table 1.2; CTCFL; ENSG00000124092; HLA -C*07:01
MLLNTMDK

SEQ ID NO: 1772 - protein, 9 aa, Homo sapiens
  Table 1.2; CTCFL; ENSG00000124092; HLA -B*27:05,HLA-B*35:03,HLA-B*38:01,HLA-B*55:01
MVASEDSKL

SEQ ID NO: 1773 - protein, 11 aa, Homo sapiens
  Table 1.2; CTCFL; ENSG00000124092; HLA -A*26:01,HLA-A*68:02
MVASEDSKLAV

SEQ ID NO: 1774 - protein, 11 aa, Homo sapiens
  Table 1.2; CTCFL; ENSG00000124092; HLA -A*03:02
NLHAYSAAELK

SEQ ID NO: 1775 - protein, 9 aa, Homo sapiens
  Table 1.2; CTCFL; ENSG00000124092; HLA -A*30:02,HLA-C*16:01
NTHTGTRPY

SEQ ID NO: 1776 - protein, 11 aa, Homo sapiens
  Table 1.2; CTCFL; ENSG00000124092; HLA -B*27:05
NVMVASEDSKL

SEQ ID NO: 1777 - protein, 10 aa, Homo sapiens
  Table 1.2; CTCFL; ENSG00000124092; HLA -A*68:01,HLA-B*27:02
PTAGQADAEK

SEQ ID NO: 1778 - protein, 10 aa, Homo sapiens
  Table 1.2; CTCFL; ENSG00000124092; HLA -A*01:01,HLA-A*30:02
QCSYASRDTY

SEQ ID NO: 1779 - protein, 8 aa, Homo sapiens
  Table 1.2; CTCFL; ENSG00000124092; HLA -A*30:01,HLA-B*40:01,HLA-B*49:01
QEGVQVVV

SEQ ID NO: 1780 - protein, 10 aa, Homo sapiens
  Table 1.2; CTCFL; ENSG00000124092; HLA -A*33:03
QEKNQLLAER

SEQ ID NO: 1781 - protein, 9 aa, Homo sapiens
  Table 1.2; CTCFL; ENSG00000124092; HLA -A*30:01,HLA-B*18:01,HLA-B*37:01,HLA-B*40:01,HLA-B*44:02, HLA-B*44:03,HLA-B*49:01
QELYSPQEM

SEQ ID NO: 1782 - protein, 8 aa, Homo sapiens
  Table 1.2; CTCFL; ENSG00000124092; HLA -A*30:01,HLA-B*18:01,HLA-B*37:01,HLA-B*44:02,HLA-B*44:03
QEMEVLQF

SEQ ID NO: 1783 - protein, 9 aa, Homo sapiens
  Table 1.2; CTCFL; ENSG00000124092; HLA -B*44:02
QEMEVLQFH

SEQ ID NO: 1784 - protein, 11 aa, Homo sapiens
  Table 1.2; CTCFL; ENSG00000124092; HLA -A*30:01,HLA-B*40:01,HLA-B*44:02,HLA-B*44:03,HLA-B*49:01
QEMEVLQFHAL

SEQ ID NO: 1785 - protein, 9 aa, Homo sapiens
  Table 1.2; CTCFL; ENSG00000124092; HLA -B*56:01
QPTAGQADA

SEQ ID NO: 1786 - protein, 8 aa, Homo sapiens
  Table 1.2; CTCFL; ENSG00000124092; HLA -B*13:02
QQCVAISI

SEQ ID NO: 1787 - protein, 9 aa, Homo sapiens
  Table 1.2; CTCFL; ENSG00000124092; HLA -A*30:01,HLA-B*13:02,HLA-B*27:05,HLA-B*38:01,HLA-B*39:01, HLA-C*05:01
QQEGVQVVV

SEQ ID NO: 1788 - protein, 10 aa, Homo sapiens
  Table 1.2; CTCFL; ENSG00000124092; HLA -B*39:01
QQELYSPQEM

SEQ ID NO: 1789 - protein, 8 aa, Homo sapiens
  Table 1.2; CTCFL; ENSG00000124092; HLA -B*13:02
QQQEGVQV

SEQ ID NO: 1790 - protein, 9 aa, Homo sapiens
  Table 1.2; CTCFL; ENSG00000124092; HLA -A*02:01,HLA-A*02:03,HLA-B*13:02,HLA-B*15:01,HLA-B*27:05, HLA-B*38:01,HLA-B*39:01
QQQEGVQVV

SEQ ID NO: 1791 - protein, 10 aa, Homo sapiens
  Table 1.2; CTCFL; ENSG00000124092; HLA -A*30:01,HLA-B*13:02,HLA-B*38:01,HLA-B*39:01
QQQEGVQVVV

SEQ ID NO: 1792 - protein, 9 aa, Homo sapiens
  Table 1.2; CTCFL; ENSG00000124092; HLA -A*03:02,HLA-A*11:01,HLA-A*33:03,HLA-A*68:01
QTILKEATK

SEQ ID NO: 1793 - protein, 10 aa, Homo sapiens
  Table 1.2; CTCFL; ENSG00000124092; HLA -A*68:02
QTVHFTSEAV

SEQ ID NO: 1794 - protein, 11 aa, Homo sapiens
  Table 1.2; CTCFL; ENSG00000124092; HLA -A*31:01
RQKQLLNAHFR

SEQ ID NO: 1795 - protein, 9 aa, Homo sapiens
  Table 1.2; CTCFL; ENSG00000124092; HLA -A*01:01,HLA-A*02:07,HLA-B*13:02,HLA-C*05:01
RSDEIVLTV

SEQ ID NO: 1796 - protein, 9 aa, Homo sapiens
  Table 1.2; CTCFL; ENSG00000124092; HLA -B*57:01
RSHTGERPF

SEQ ID NO: 1797 - protein, 10 aa, Homo sapiens
  Table 1.2; CTCFL; ENSG00000124092; HLA -B*58:01
RVKEEVDEGV

SEQ ID NO: 1798 - protein, 9 aa, Homo sapiens
  Table 1.2; CTCFL; ENSG00000124092; HLA -A*24:02,HLA-A*31:01
RYALIQHQK

SEQ ID NO: 1799 - protein, 10 aa, Homo sapiens
  Table 1.2; CTCFL; ENSG00000124092; HLA -A*31:01
RYCSAVFHER

SEQ ID NO: 1800 - protein, 9 aa, Homo sapiens
  Table 1.2; CTCFL; ENSG00000124092; HLA -A*26:01,HLA-A*29:02,HLA-A*30:02,HLA-A*32:01,HLA-C*02:02, HLA-C*16:01,HLA-C*16:02
SAAELKCRY

SEQ ID NO: 1801 - protein, 8 aa, Homo sapiens
  Table 1.2; CTCFL; ENSG00000124092; HLA -B*08:01,HLA-C*07:01,HLA-C*12:03,HLA-C*16:01
SAVFHERY

SEQ ID NO: 1802 - protein, 8 aa, Homo sapiens
  Table 1.2; CTCFL; ENSG00000124092; HLA -B*37:01
SDEIVLTV

SEQ ID NO: 1803 - protein, 9 aa, Homo sapiens
  Table 1.2; CTCFL; ENSG00000124092; HLA -A*30:01,HLA-B*40:01,HLA-B*44:02,HLA-B*44:03,HLA-B*49:01
SEAVELQDM

SEQ ID NO: 1804 - protein, 11 aa, Homo sapiens
  Table 1.2; CTCFL; ENSG00000124092; HLA -A*30:01,HLA-B*40:01
SEAVELQDMSL

SEQ ID NO: 1805 - protein, 8 aa, Homo sapiens
  Table 1.2; CTCFL; ENSG00000124092; HLA -B*37:01,HLA-B*49:01
SEDSKLAV

SEQ ID NO: 1806 - protein, 10 aa, Homo sapiens
  Table 1.2; CTCFL; ENSG00000124092; HLA -A*30:01,HLA-B*37:01,HLA-B*38:01,HLA-B*40:01,HLA-B*40:02, HLA-B*44:02,HLA-B*44:03,HLA-B*49:01
SEDSKLAVSL

SEQ ID NO: 1807 - protein, 9 aa, Homo sapiens
  Table 1.2; CTCFL; ENSG00000124092; HLA -A*30:01,HLA-B*40:01,HLA-B*40:02,HLA-B*44:02,HLA-B*44:03
SEESEKYIL

SEQ ID NO: 1808 - protein, 11 aa, Homo sapiens
  Table 1.2; CTCFL; ENSG00000124092; HLA -A*30:01,HLA-B*40:01
SEESEKYILTL

SEQ ID NO: 1809 - protein, 9 aa, Homo sapiens
  Table 1.2; CTCFL; ENSG00000124092; HLA -B*37:01,HLA-B*40:02
SEKPHLCHL

SEQ ID NO: 1810 - protein, 8 aa, Homo sapiens
  Table 1.2; CTCFL; ENSG00000124092; HLA -A*30:01,HLA-B*18:01,HLA-B*40:02
SEKYILTL

SEQ ID NO: 1811 - protein, 10 aa, Homo sapiens
  Table 1.2; CTCFL; ENSG00000124092; HLA -B*44:02,HLA-B*44:03
SEQFTKIKEL

SEQ ID NO: 1812 - protein, 9 aa, Homo sapiens
  Table 1.2; CTCFL; ENSG00000124092; HLA -B*35:03
SGAFQDSVL

SEQ ID NO: 1813 - protein, 9 aa, Homo sapiens
  Table 1.2; CTCFL; ENSG00000124092; HLA -C*16:02
SGTMKIHIL

SEQ ID NO: 1814 - protein, 8 aa, Homo sapiens
  Table 1.2; CTCFL; ENSG00000124092; HLA -A*02:03
SLAETTGL

SEQ ID NO: 1815 - protein, 9 aa, Homo sapiens
  Table 1.2; CTCFL; ENSG00000124092; HLA -A*02:01,HLA-A*02:03,HLA-B*13:02
SLAETTGLI

SEQ ID NO: 1816 - protein, 10 aa, Homo sapiens
  Table 1.2; CTCFL; ENSG00000124092; HLA -A*03:01,HLA-A*03:02,HLA-A*11:01,HLA-A*68:01
SLAETTGLIK

SEQ ID NO: 1817 - protein, 11 aa, Homo sapiens
  Table 1.2; CTCFL; ENSG00000124092; HLA -A*02:01,HLA-A*02:03,HLA-A*02:04,HLA-A*02:07,HLA-A*03:01, HLA-A*03:02,HLA-B*55:01
SLAETTGLIKL

SEQ ID NO: 1818 - protein, 11 aa, Homo sapiens
  Table 1.2; CTCFL; ENSG00000124092; HLA -A*02:01,HLA-A*02:04,HLA-A*02:07
SLLSIQQQEGV

SEQ ID NO: 1819 - protein, 8 aa, Homo sapiens
  Table 1.2; CTCFL; ENSG00000124092; HLA -B*07:02,HLA-B*35:03
SPQEMEVL

SEQ ID NO: 1820 - protein, 10 aa, Homo sapiens
  Table 1.2; CTCFL; ENSG00000124092; HLA -B*35:01
SPQEMEVLQF

SEQ ID NO: 1821 - protein, 9 aa, Homo sapiens
  Table 1.2; CTCFL; ENSG00000124092; HLA -A*68:01,HLA-C*07:06
SPSELEAER

SEQ ID NO: 1822 - protein, 8 aa, Homo sapiens
  Table 1.2; CTCFL; ENSG00000124092; HLA -B*27:05
SRMSSFNR

SEQ ID NO: 1823 - protein, 9 aa, Homo sapiens
  Table 1.2; CTCFL; ENSG00000124092; HLA -A*31:01,HLA-A*33:01,HLA-A*33:03
SSRMSSFNR

SEQ ID NO: 1824 - protein, 8 aa, Homo sapiens
  Table 1.2; CTCFL; ENSG00000124092; HLA -A*03:02
SVEASKLK

SEQ ID NO: 1825 - protein, 9 aa, Homo sapiens
  Table 1.2; CTCFL; ENSG00000124092; HLA -A*02:01,HLA-A*02:07,HLA-B*15:01,HLA-B*35:03,HLA-B*39:01, HLA-B*40:01,HLA-B*55:01
SVLEEEVEL

SEQ ID NO: 1826 - protein, 9 aa, Homo sapiens
  Table 1.2; CTCFL; ENSG00000124092; HLA -A*03:01,HLA-A*03:02,HLA-A*11:01,HLA-C*07:06
SVLSEQFTK

SEQ ID NO: 1827 - protein, 10 aa, Homo sapiens
  Table 1.2; CTCFL; ENSG00000124092; HLA -A*02:04,HLA-A*25:01,HLA-A*26:01,HLA-A*68:02
SVLSEQFTKI

SEQ ID NO: 1828 - protein, 11 aa, Homo sapiens
  Table 1.2; CTCFL; ENSG00000124092; HLA -A*11:01
SVLSEQFTKIK

SEQ ID NO: 1829 - protein, 8 aa, Homo sapiens
  Table 1.2; CTCFL; ENSG00000124092; HLA -A*30:02,HLA-A*32:01,HLA-C*14:02,HLA-C*16:01
SYASRDTY

SEQ ID NO: 1830 - protein, 10 aa, Homo sapiens
  Table 1.2; CTCFL; ENSG00000124092; HLA -A*24:02
SYASRDTYKL

SEQ ID NO: 1831 - protein, 8 aa, Homo sapiens
  Table 1.2; CTCFL; ENSG00000124092; HLA -B*08:01
TARVKEEV

SEQ ID NO: 1832 - protein, 10 aa, Homo sapiens
  Table 1.2; CTCFL; ENSG00000124092; HLA -A*30:01,HLA-B*18:01,HLA-B*27:02,HLA-B*38:01,HLA-B*40:01, HLA-B*44:02,HLA-B*44:03,HLA-C*16:04
TEISVLSEQF

SEQ ID NO: 1833 - protein, 8 aa, Homo sapiens
  Table 1.2; CTCFL; ENSG00000124092; HLA -A*23:01
TFRTVTLL

SEQ ID NO: 1834 - protein, 9 aa, Homo sapiens
  Table 1.2; CTCFL; ENSG00000124092; HLA -A*31:01,HLA-A*33:03
TFRTVTLLR

SEQ ID NO: 1835 - protein, 9 aa, Homo sapiens
  Table 1.2; CTCFL; ENSG00000124092; HLA -B*38:01,HLA-B*39:01
THTSEKPHL

SEQ ID NO: 1836 - protein, 9 aa, Homo sapiens
  Table 1.2; CTCFL; ENSG00000124092; HLA -B*08:01
TIIARKSDL

SEQ ID NO: 1837 - protein, 9 aa, Homo sapiens
  Table 1.2; CTCFL; ENSG00000124092; HLA -A*03:01
TMKIHILQK

SEQ ID NO: 1838 - protein, 8 aa, Homo sapiens
  Table 1.2; CTCFL; ENSG00000124092; HLA -A*30:01,HLA-B*13:02,HLA-B*38:01,HLA-C*06:02
TQSGTMKI

SEQ ID NO: 1839 - protein, 10 aa, Homo sapiens
  Table 1.2; CTCFL; ENSG00000124092; HLA -B*13:02,HLA-B*38:01
TQSGTMKIHI

SEQ ID NO: 1840 - protein, 9 aa, Homo sapiens
  Table 1.2; CTCFL; ENSG00000124092; HLA -B*27:05,HLA-B*39:01,HLA-C*06:02
TRFTQSGTM

SEQ ID NO: 1841 - protein, 10 aa, Homo sapiens
  Table 1.2; CTCFL; ENSG00000124092; HLA -B*27:05
TRFTQSGTMK

SEQ ID NO: 1842 - protein, 9 aa, Homo sapiens
  Table 1.2; CTCFL; ENSG00000124092; HLA -A*31:01,HLA-A*33:01,HLA-A*33:03,HLA-A*68:01
TSGELVRHR

SEQ ID NO: 1843 - protein, 9 aa, Homo sapiens
  Table 1.2; CTCFL; ENSG00000124092; HLA -A*68:02
TTARVKEEV

SEQ ID NO: 1844 - protein, 9 aa, Homo sapiens
  Table 1.2; CTCFL; ENSG00000124092; HLA -A*02:07,HLA-A*23:01,HLA-A*24:02,HLA-A*30:01,HLA-A*32:01, HLA-A*68:02,HLA-B*07:02,HLA-B*13:02,HLA-B*15:01,HLA-B*15:03, HLA-B*27:02,HLA-B*27:05,HLA-B*35:01,HLA-B*35:03,HLA-B*38:01,
  HLA-B*39:01,HLA-B*40:01,HLA-B*46:01,HLA-B*51:01,HLA-B*58:01, HLA-C*01:02,HLA-C*02:02,HLA-C*03:03,HLA-C*03:04,HLA-C*05:01, HLA-C*07:02,HLA-C*07:06,HLA-C*12:03,HLA-C*14:02,HLA-C*16:01, HLA-C*16:02,HLA-C*16:04
VAISIQQEL

SEQ ID NO: 1845 - protein, 10 aa, Homo sapiens
  Table 1.2; CTCFL; ENSG00000124092; HLA -A*01:01,HLA-A*23:01,HLA-A*25:01,HLA-A*26:01,HLA-A*29:02, HLA-A*30:02,HLA-B*15:01,HLA-B*15:03,HLA-B*35:01,HLA-B*46:01, HLA-B*57:01,HLA-B*58:01,HLA-C*02:02,HLA-C*16:04
VAISIQQELY

SEQ ID NO: 1846 - protein, 8 aa, Homo sapiens
  Table 1.2; CTCFL; ENSG00000124092; HLA -C*03:04,HLA-C*05:01
VASEDSKL

SEQ ID NO: 1847 - protein, 9 aa, Homo sapiens
  Table 1.2; CTCFL; ENSG00000124092; HLA -A*30:01,HLA-B*37:01
VDEGVTCEM

SEQ ID NO: 1848 - protein, 9 aa, Homo sapiens
  Table 1.2; CTCFL; ENSG00000124092; HLA -A*30:01,HLA-B*37:01,HLA-B*40:01,HLA-B*40:02,HLA-B*49:01
VELQDMSLL

SEQ ID NO: 1849 - protein, 9 aa, Homo sapiens
  Table 1.2; CTCFL; ENSG00000124092; HLA -A*24:02
VFHERYALI

SEQ ID NO: 1850 - protein, 8 aa, Homo sapiens
  Table 1.2; CTCFL; ENSG00000124092; HLA -B*39:01
VHFTSEAV

SEQ ID NO: 1851 - protein, 10 aa, Homo sapiens
  Table 1.2; CTCFL; ENSG00000124092; HLA -B*27:05,HLA-B*38:01,HLA-B*39:01
VHFTSEAVEL

SEQ ID NO: 1852 - protein, 9 aa, Homo sapiens
  Table 1.2; CTCFL; ENSG00000124092; HLA -A*29:02,HLA-A*30:02
VHMRNLHAY

SEQ ID NO: 1853 - protein, 10 aa, Homo sapiens
  Table 1.2; CTCFL; ENSG00000124092; HLA -A*03:02,HLA-B*27:02
VLAPSEESEK

SEQ ID NO: 1854 - protein, 11 aa, Homo sapiens
  Table 1.2; CTCFL; ENSG00000124092; HLA -A*01:01,HLA-A*25:01,HLA-A*26:01,HLA-A*29:02,HLA-A*30:02, HLA-A*32:01,HLA-B*15:01,HLA-B*15:03,HLA-B*46:01,HLA-B*55:01, HLA-B*58:01,HLA-C*16:04
VLAPSEESEKY

SEQ ID NO: 1855 - protein, 8 aa, Homo sapiens
  Table 1.2; CTCFL; ENSG00000124092; HLA -C*05:01
VLEEEVEL

SEQ ID NO: 1856 - protein, 9 aa, Homo sapiens
  Table 1.2; CTCFL; ENSG00000124092; HLA -A*02:01,HLA-A*02:07
VLEEEVELV

SEQ ID NO: 1857 - protein, 8 aa, Homo sapiens
  Table 1.2; CTCFL; ENSG00000124092; HLA -A*03:02,HLA-A*11:01
VLSEQFTK

SEQ ID NO: 1858 - protein, 9 aa, Homo sapiens
  Table 1.2; CTCFL; ENSG00000124092; HLA -A*02:01,HLA-A*02:03,HLA-A*02:04,HLA-A*02:07,HLA-A*23:01, HLA-A*24:02,HLA-A*30:01,HLA-A*68:02,HLA-B*13:02,HLA-B*49:01, HLA-B*55:01
VLSEQFTKI

SEQ ID NO: 1859 - protein, 9 aa, Homo sapiens
  Table 1.2; CTCFL; ENSG00000124092; HLA -A*02:01,HLA-A*02:03
VLTVSNSNV

SEQ ID NO: 1860 - protein, 9 aa, Homo sapiens
  Table 1.2; CTCFL; ENSG00000124092; HLA -B*15:01
VQQPGPGLL

SEQ ID NO: 1861 - protein, 10 aa, Homo sapiens
  Table 1.2; CTCFL; ENSG00000124092; HLA -A*23:01,HLA-A*25:01,HLA-A*32:01,HLA-B*58:01
VQQPGPGLLW

SEQ ID NO: 1862 - protein, 11 aa, Homo sapiens
  Table 1.2; CTCFL; ENSG00000124092; HLA -A*11:01
VSLAETTGLIK

SEQ ID NO: 1863 - protein, 9 aa, Homo sapiens
  Table 1.2; CTCFL; ENSG00000124092; HLA -A*11:01
VTSGELVRH

SEQ ID NO: 1864 - protein, 10 aa, Homo sapiens
  Table 1.2; CTCFL; ENSG00000124092; HLA -A*11:01,HLA-A*31:01,HLA-A*68:01,HLA-C*07:06
VTSGELVRHR

SEQ ID NO: 1865 - protein, 11 aa, Homo sapiens
  Table 1.2; CTCFL; ENSG00000124092; HLA -B*57:01
VVQQPGPGLLW

SEQ ID NO: 1866 - protein, 9 aa, Homo sapiens
  Table 1.2; CTCFL; ENSG00000124092; HLA -A*02:04,HLA-A*24:02,HLA-A*68:02,HLA-B*27:05,HLA-B*35:03, HLA-B*38:01,HLA-B*40:01,HLA-C*02:02
YASRDTYKL

SEQ ID NO: 1867 - protein, 9 aa, Homo sapiens
  Table 1.2; CTCFL; ENSG00000124092; HLA -A*23:01,HLA-A*25:01,HLA-A*30:01,HLA-B*07:02,HLA-B*13:02, HLA-B*15:03,HLA-B*27:05,HLA-B*35:01,HLA-B*35:03,HLA-B*38:01, HLA-B*39:01,HLA-B*40:01,HLA-B*40:02,HLA-B*46:01,HLA-B*51:01,
  HLA-B*55:01,HLA-B*58:01,HLA-C*02:02,HLA-C*03:03,HLA-C*03:04, HLA-C*05:01,HLA-C*06:02,HLA-C*07:04,HLA-C*12:03,HLA-C*16:01, HLA-C*16:02,HLA-C*16:04
YASVEASKL

SEQ ID NO: 1868 - protein, 10 aa, Homo sapiens
  Table 1.2; CTCFL; ENSG00000124092; HLA -B*27:02
YASVEASKLK

SEQ ID NO: 1869 - protein, 9 aa, Homo sapiens
  Table 1.2; CTCFL; ENSG00000124092; HLA -A*31:01,HLA-A*33:01,HLA-A*33:03,HLA-A*68:01
YCSAVFHER

SEQ ID NO: 1870 - protein, 10 aa, Homo sapiens
  Table 1.2; CTCFL; ENSG00000124092; HLA -A*01:01,HLA-A*29:02
YCSAVFHERY

SEQ ID NO: 1871 - protein, 10 aa, Homo sapiens
  Table 1.2; CTCFL; ENSG00000124092; HLA -B*38:01
YHDANFIPTV

SEQ ID NO: 1872 - protein, 8 aa, Homo sapiens
  Table 1.2; CTCFL; ENSG00000124092; HLA -A*02:01,HLA-B*13:02,HLA-B*51:01
YILTLQTV

SEQ ID NO: 1873 - protein, 10 aa, Homo sapiens
  Table 1.2; CTCFL; ENSG00000124092; HLA -A*23:01,HLA-A*24:02
YILTLQTVHF

SEQ ID NO: 1874 - protein, 9 aa, Homo sapiens
  Table 1.2; CTCFL; ENSG00000124092; HLA -A*33:01
YSAAELKCR

SEQ ID NO: 1875 - protein, 10 aa, Homo sapiens
  Table 1.2; CTCFL; ENSG00000124092; HLA -A*01:01,HLA-A*29:02
YSAAELKCRY

SEQ ID NO: 1876 - protein, 8 aa, Homo sapiens
  Table 1.2; CTCFL; ENSG00000124092; HLA -B*51:01
YSPQEMEV

SEQ ID NO: 1877 - protein, 9 aa, Homo sapiens
  Table 1.2; DCAF12L1; ENSG00000198889; HLA -C*03:04
AAADGEGPL

SEQ ID NO: 1878 - protein, 10 aa, Homo sapiens
  Table 1.2; DCAF12L1; ENSG00000198889; HLA -B*40:01,HLA-C*03:04
AAADGEGPLL

SEQ ID NO: 1879 - protein, 11 aa, Homo sapiens
  Table 1.2; DCAF12L1; ENSG00000198889; HLA -A*01:01
AAADGEGPLLL

SEQ ID NO: 1880 - protein, 9 aa, Homo sapiens
  Table 1.2; DCAF12L1; ENSG00000198889; HLA -A*02:07,HLA-A*32:01,HLA-B*38:01,HLA-B*39:01,HLA-B*40:01, HLA-C*03:04,HLA-C*05:01
AADGEGPLL

SEQ ID NO: 1881 - protein, 10 aa, Homo sapiens
  Table 1.2; DCAF12L1; ENSG00000198889; HLA -A*01:01,HLA-B*35:03,HLA-B*38:01,HLA-B*39:01,HLA-B*40:01, HLA-C*04:01,HLA-C*05:01
AADGEGPLLL

SEQ ID NO: 1882 - protein, 11 aa, Homo sapiens
  Table 1.2; DCAF12L1; ENSG00000198889; HLA -A*01:01,HLA-A*03:01,HLA-A*03:02,HLA-A*11:01,HLA-B*27:02
AADGEGPLLLK

SEQ ID NO: 1883 - protein, 11 aa, Homo sapiens
  Table 1.2; DCAF12L1; ENSG00000198889; HLA -A*30:01
ADAESSPSQGL

SEQ ID NO: 1884 - protein, 8 aa, Homo sapiens
  Table 1.2; DCAF12L1; ENSG00000198889; HLA -B*37:01,HLA-B*40:01
ADGEGPLL

SEQ ID NO: 1885 - protein, 9 aa, Homo sapiens
  Table 1.2; DCAF12L1; ENSG00000198889; HLA -A*30:01,HLA-B*37:01,HLA-B*44:02
ADGEGPLLL

SEQ ID NO: 1886 - protein, 10 aa, Homo sapiens
  Table 1.2; DCAF12L1; ENSG00000198889; HLA -A*03:01,HLA-A*11:01,HLA-B*27:02
ADGEGPLLLK

SEQ ID NO: 1887 - protein, 9 aa, Homo sapiens
  Table 1.2; DCAF12L1; ENSG00000198889; HLA -A*30:01,HLA-B*13:02,HLA-B*27:02,HLA-B*27:05,HLA-B*37:01, HLA-B*38:01,HLA-B*39:01,HLA-B*40:01,HLA-B*40:02,HLA-B*44:02, HLA-B*44:03,HLA-B*49:01,HLA-C*16:04
AESSPSQGL

SEQ ID NO: 1888 - protein, 11 aa, Homo sapiens
  Table 1.2; DCAF12L1; ENSG00000198889; HLA -A*30:01,HLA-B*40:01,HLA-B*44:03,HLA-B*49:01,HLA-C*16:04
AESSPSQGLAA

SEQ ID NO: 1889 - protein, 9 aa, Homo sapiens
  Table 1.2; DCAF12L1; ENSG00000198889; HLA -A*32:01
AGGPLPAGL

SEQ ID NO: 1890 - protein, 9 aa, Homo sapiens
  Table 1.2; DCAF12L1; ENSG00000198889; HLA -C*06:02,HLA-C*16:01,HLA-C*16:02
AGSALSRLL

SEQ ID NO: 1891 - protein, 8 aa, Homo sapiens
  Table 1.2; DCAF12L1; ENSG00000198889; HLA -A*31:01
AIINPSNR

SEQ ID NO: 1892 - protein, 9 aa, Homo sapiens
  Table 1.2; DCAF12L1; ENSG00000198889; HLA -A*03:01,HLA-A*03:02,HLA-A*11:01
AIINPSNRK

SEQ ID NO: 1893 - protein, 11 aa, Homo sapiens
  Table 1.2; DCAF12L1; ENSG00000198889; HLA -A*31:01
AIINPSNRKVR

SEQ ID NO: 1894 - protein, 8 aa, Homo sapiens
  Table 1.2; DCAF12L1; ENSG00000198889; HLA -A*02:04
AIYQLPSL

SEQ ID NO: 1895 - protein, 9 aa, Homo sapiens
  Table 1.2; DCAF12L1; ENSG00000198889; HLA -B*13:02,HLA-B*38:01
AQDQQGCGI

SEQ ID NO: 1896 - protein, 11 aa, Homo sapiens
  Table 1.2; DCAF12L1; ENSG00000198889; HLA -A*03:01,HLA-A*03:02,HLA-A*11:01,HLA-A*31:01,HLA-A*33:03, HLA-A*68:01,HLA-B*57:01,HLA-C*07:06
ATLESSSGPAR

SEQ ID NO: 1897 - protein, 9 aa, Homo sapiens
  Table 1.2; DCAF12L1; ENSG00000198889; HLA -A*01:01,HLA-A*03:01,HLA-A*25:01,HLA-A*29:02,HLA-A*30:02
ATYRSMAHY

SEQ ID NO: 1898 - protein, 10 aa, Homo sapiens
  Table 1.2; DCAF12L1; ENSG00000198889; HLA -A*03:01
ATYRSMAHYL

SEQ ID NO: 1899 - protein, 10 aa, Homo sapiens
  Table 1.2; DCAF12L1; ENSG00000198889; HLA -A*32:01
AVGSHSHVSF

SEQ ID NO: 1900 - protein, 11 aa, Homo sapiens
  Table 1.2; DCAF12L1; ENSG00000198889; HLA -B*44:02,HLA-B*57:01
AVSLDGYFHLW

SEQ ID NO: 1901 - protein, 11 aa, Homo sapiens
  Table 1.2; DCAF12L1; ENSG00000198889; HLA -A*30:02
AWHSEVGLPVY

SEQ ID NO: 1902 - protein, 9 aa, Homo sapiens
  Table 1.2; DCAF12L1; ENSG00000198889; HLA -C*04:01
AWLSDTVAV

SEQ ID NO: 1903 - protein, 8 aa, Homo sapiens
  Table 1.2; DCAF12L1; ENSG00000198889; HLA -B*18:01,HLA-B*37:01,HLA-B*40:02
DDMSVYAV

SEQ ID NO: 1904 - protein, 9 aa, Homo sapiens
  Table 1.2; DCAF12L1; ENSG00000198889; HLA -A*11:01,HLA-A*33:01,HLA-A*68:01,HLA-B*27:02
DGEGPLLLK

SEQ ID NO: 1905 - protein, 10 aa, Homo sapiens
  Table 1.2; DCAF12L1; ENSG00000198889; HLA -A*33:01,HLA-A*68:01
DGEGPLLLKR

SEQ ID NO: 1906 - protein, 9 aa, Homo sapiens
  Table 1.2; DCAF12L1; ENSG00000198889; HLA -B*08:01,HLA-B*51:01
DGELRGYAV

SEQ ID NO: 1907 - protein, 11 aa, Homo sapiens
  Table 1.2; DCAF12L1; ENSG00000198889; HLA -A*33:01
DGELRGYAVQR

SEQ ID NO: 1908 - protein, 10 aa, Homo sapiens
  Table 1.2; DCAF12L1; ENSG00000198889; HLA -A*33:01
DLRQDQQNIR

SEQ ID NO: 1909 - protein, 11 aa, Homo sapiens
  Table 1.2; DCAF12L1; ENSG00000198889; HLA -A*33:01
DQQNIRPLCSR

SEQ ID NO: 1910 - protein, 9 aa, Homo sapiens
  Table 1.2; DCAF12L1; ENSG00000198889; HLA -A*26:01,HLA-A*33:01,HLA-A*33:03,HLA-A*68:01,HLA-C*07:06
DTVAVSGSR

SEQ ID NO: 1911 - protein, 9 aa, Homo sapiens
  Table 1.2; DCAF12L1; ENSG00000198889; HLA -A*26:01,HLA-A*68:02
DTVAWHSEV

SEQ ID NO: 1912 - protein, 9 aa, Homo sapiens
  Table 1.2; DCAF12L1; ENSG00000198889; HLA -B*51:01
DVEAIPRAI

SEQ ID NO: 1913 - protein, 9 aa, Homo sapiens
  Table 1.2; DCAF12L1; ENSG00000198889; HLA -A*33:01,HLA-A*33:03,HLA-A*68:01
DVESGHIAR

SEQ ID NO: 1914 - protein, 10 aa, Homo sapiens
  Table 1.2; DCAF12L1; ENSG00000198889; HLA -A*25:01,HLA-A*26:01
DVESGHIARI

SEQ ID NO: 1915 - protein, 11 aa, Homo sapiens
  Table 1.2; DCAF12L1; ENSG00000198889; HLA -A*33:01
DVRAQKFLEER

SEQ ID NO: 1916 - protein, 8 aa, Homo sapiens
  Table 1.2; DCAF12L1; ENSG00000198889; HLA -B*08:01,HLA-B*51:01
EAIPRAII

SEQ ID NO: 1917 - protein, 8 aa, Homo sapiens
  Table 1.2; DCAF12L1; ENSG00000198889; HLA -B*18:01
EERASATL

SEQ ID NO: 1918 - protein, 10 aa, Homo sapiens
  Table 1.2; DCAF12L1; ENSG00000198889; HLA -A*01:01
ELGAVSLDGY

SEQ ID NO: 1919 - protein, 9 aa, Homo sapiens
  Table 1.2; DCAF12L1; ENSG00000198889; HLA -A*23:01,HLA-A*25:01,HLA-B*44:02,HLA-B*44:03
ELGTVNKVF

SEQ ID NO: 1920 - protein, 9 aa, Homo sapiens
  Table 1.2; DCAF12L1; ENSG00000198889; HLA -A*02:03,HLA-A*02:04,HLA-A*23:01,HLA-A*24:02,HLA-A*25:01, HLA-A*26:01,HLA-A*32:01,HLA-B*07:02,HLA-B*08:01,HLA-B*15:01, HLA-B*37:01,HLA-C*07:04
ELNPSKTLL

SEQ ID NO: 1921 - protein, 9 aa, Homo sapiens
  Table 1.2; DCAF12L1; ENSG00000198889; HLA -A*33:01,HLA-A*33:03,HLA-A*68:01
ELRGYAVQR

SEQ ID NO: 1922 - protein, 9 aa, Homo sapiens
  Table 1.2; DCAF12L1; ENSG00000198889; HLA -A*26:01
ENPNSLAIY

SEQ ID NO: 1923 - protein, 8 aa, Homo sapiens
  Table 1.2; DCAF12L1; ENSG00000198889; HLA -A*33:03
ESSSGPAR

SEQ ID NO: 1924 - protein, 9 aa, Homo sapiens
  Table 1.2; DCAF12L1; ENSG00000198889; HLA -A*33:03,HLA-A*68:01
ESSSGPARR

SEQ ID NO: 1925 - protein, 8 aa, Homo sapiens
  Table 1.2; DCAF12L1; ENSG00000198889; HLA -A*26:01
EVFPNALY

SEQ ID NO: 1926 - protein, 9 aa, Homo sapiens
  Table 1.2; DCAF12L1; ENSG00000198889; HLA -A*26:01
EVFPNALYT

SEQ ID NO: 1927 - protein, 10 aa, Homo sapiens
  Table 1.2; DCAF12L1; ENSG00000198889; HLA -A*25:01,HLA-A*26:01,HLA-A*68:02
EVFPNALYTH

SEQ ID NO: 1928 - protein, 9 aa, Homo sapiens
  Table 1.2; DCAF12L1; ENSG00000198889; HLA -A*25:01,HLA-A*26:01,HLA-A*33:01,HLA-A*33:03,HLA-A*68:01
EVGGWGPAR

SEQ ID NO: 1929 - protein, 9 aa, Homo sapiens
  Table 1.2; DCAF12L1; ENSG00000198889; HLA -A*33:03
EVGLPVYAH

SEQ ID NO: 1930 - protein, 10 aa, Homo sapiens
  Table 1.2; DCAF12L1; ENSG00000198889; HLA -A*68:02
EVGLPVYAHI

SEQ ID NO: 1931 - protein, 8 aa, Homo sapiens
  Table 1.2; DCAF12L1; ENSG00000198889; HLA -C*07:01
FDGELRGY

SEQ ID NO: 1932 - protein, 10 aa, Homo sapiens
  Table 1.2; DCAF12L1; ENSG00000198889; HLA -A*02:01,HLA-A*02:03,HLA-A*02:07
FLEERASATL

SEQ ID NO: 1933 - protein, 9 aa, Homo sapiens
  Table 1.2; DCAF12L1; ENSG00000198889; HLA -B*54:01,HLA-B*56:01
FPNALYTHC

SEQ ID NO: 1934 - protein, 10 aa, Homo sapiens
  Table 1.2; DCAF12L1; ENSG00000198889; HLA -B*35:01
FPNALYTHCY

SEQ ID NO: 1935 - protein, 9 aa, Homo sapiens
  Table 1.2; DCAF12L1; ENSG00000198889; HLA -A*01:01
FRDNVCLTY

SEQ ID NO: 1936 - protein, 9 aa, Homo sapiens
  Table 1.2; DCAF12L1; ENSG00000198889; HLA -A*02:01,HLA-A*02:03,HLA-B*13:02,HLA-B*54:01,HLA-B*56:01
FVAGGPLPA

SEQ ID NO: 1937 - protein, 10 aa, Homo sapiens
  Table 1.2; DCAF12L1; ENSG00000198889; HLA -A*25:01,HLA-A*26:01,HLA-A*68:02,HLA-B*46:01,HLA-B*54:01
FVAGGPLPAG

SEQ ID NO: 1938 - protein, 11 aa, Homo sapiens
  Table 1.2; DCAF12L1; ENSG00000198889; HLA -A*26:01,HLA-A*68:02
FVAGGPLPAGL

SEQ ID NO: 1939 - protein, 9 aa, Homo sapiens
  Table 1.2; DCAF12L1; ENSG00000198889; HLA -A*26:01
FVVDVESGH

SEQ ID NO: 1940 - protein, 10 aa, Homo sapiens
  Table 1.2; DCAF12L1; ENSG00000198889; HLA -A*02:03,HLA-A*02:07,HLA-A*25:01,HLA-A*26:01,HLA-A*68:01, HLA-A*68:02
FVVDVESGHI

SEQ ID NO: 1941 - protein, 11 aa, Homo sapiens
  Table 1.2; DCAF12L1; ENSG00000198889; HLA -A*26:01,HLA-A*68:02,HLA-B*54:01
FVVDVESGHIA

SEQ ID NO: 1942 - protein, 9 aa, Homo sapiens
  Table 1.2; DCAF12L1; ENSG00000198889; HLA -A*23:01,HLA-A*24:02,HLA-A*29:02,HLA-A*32:01,HLA-B*35:01, HLA-B*35:03,HLA-C*04:01
FYDVRAQKF

SEQ ID NO: 1943 - protein, 9 aa, Homo sapiens
  Table 1.2; DCAF12L1; ENSG00000198889; HLA -B*44:02,HLA-B*44:03
GEGPLLLKR

SEQ ID NO: 1944 - protein, 8 aa, Homo sapiens
  Table 1.2; DCAF12L1; ENSG00000198889; HLA -A*30:01,HLA-B*18:01,HLA-B*37:01,HLA-B*40:02,HLA-B*49:01
GELRGYAV

SEQ ID NO: 1945 - protein, 9 aa, Homo sapiens
  Table 1.2; DCAF12L1; ENSG00000198889; HLA -A*30:01,HLA-B*13:02,HLA-B*27:02,HLA-B*27:05,HLA-B*37:01, HLA-B*40:01,HLA-B*40:02,HLA-B*44:02,HLA-B*44:03,HLA-B*49:01, HLA-C*16:04
GENPNSLAI

SEQ ID NO: 1946 - protein, 10 aa, Homo sapiens
  Table 1.2; DCAF12L1; ENSG00000198889; HLA -A*29:02,HLA-A*30:02,HLA-B*15:01,HLA-B*15:03,HLA-B*18:01, HLA-B*27:02,HLA-B*40:01,HLA-B*44:02,HLA-B*44:03,HLA-C*16:04
GENPNSLAIY

SEQ ID NO: 1947 - protein, 9 aa, Homo sapiens
  Table 1.2; DCAF12L1; ENSG00000198889; HLA -A*29:02,HLA-A*30:02
GFDGELRGY

SEQ ID NO: 1948 - protein, 11 aa, Homo sapiens
  Table 1.2; DCAF12L1; ENSG00000198889; HLA -A*01:01,HLA-A*30:02
GGENPNSLAIY

SEQ ID NO: 1949 - protein, 11 aa, Homo sapiens
  Table 1.2; DCAF12L1; ENSG00000198889; HLA -A*30:02
GGTGVRSLSFY

SEQ ID NO: 1950 - protein, 9 aa, Homo sapiens
  Table 1.2; DCAF12L1; ENSG00000198889; HLA -A*02:04,HLA-A*24:02,HLA-B*38:01
GHIARIPLL

SEQ ID NO: 1951 - protein, 9 aa, Homo sapiens
  Table 1.2; DCAF12L1; ENSG00000198889; HLA -A*02:04
GHKDWIFAV

SEQ ID NO: 1952 - protein, 10 aa, Homo sapiens
  Table 1.2; DCAF12L1; ENSG00000198889; HLA -A*01:01,HLA-A*29:02,HLA-A*30:02
GMEVFPNALY

SEQ ID NO: 1953 - protein, 11 aa, Homo sapiens
  Table 1.2; DCAF12L1; ENSG00000198889; HLA -A*29:02,HLA-A*30:02,HLA-B*35:01
GPLPAGLHGNY

SEQ ID NO: 1954 - protein, 8 aa, Homo sapiens
  Table 1.2; DCAF12L1; ENSG00000198889; HLA -A*30:02,HLA-B*15:01
GQGSLLFY

SEQ ID NO: 1955 - protein, 8 aa, Homo sapiens
  Table 1.2; DCAF12L1; ENSG00000198889; HLA -A*32:01,HLA-B*58:01
GSHSHVSF

SEQ ID NO: 1956 - protein, 9 aa, Homo sapiens
  Table 1.2; DCAF12L1; ENSG00000198889; HLA -B*07:02,HLA-B*15:03,HLA-B*46:01,HLA-C*03:03
GSRDGTVAL

SEQ ID NO: 1957 - protein, 10 aa, Homo sapiens
  Table 1.2; DCAF12L1; ENSG00000198889; HLA -A*25:01,HLA-B*57:01,HLA-B*58:01
GSRDGTVALW

SEQ ID NO: 1958 - protein, 11 aa, Homo sapiens
  Table 1.2; DCAF12L1; ENSG00000198889; HLA -A*31:01
GSRDGTVALWR

SEQ ID NO: 1959 - protein, 10 aa, Homo sapiens
  Table 1.2; DCAF12L1; ENSG00000198889; HLA -A*01:01,HLA-A*29:02,HLA-A*30:02
GTGQGSLLFY

SEQ ID NO: 1960 - protein, 9 aa, Homo sapiens
  Table 1.2; DCAF12L1; ENSG00000198889; HLA -A*25:01,HLA-A*32:01,HLA-B*37:01,HLA-C*16:01
GTGVRSLSF

SEQ ID NO: 1961 - protein, 11 aa, Homo sapiens
  Table 1.2; DCAF12L1; ENSG00000198889; HLA -A*31:01
GTGVRSLSFYR

SEQ ID NO: 1962 - protein, 11 aa, Homo sapiens
  Table 1.2; DCAF12L1; ENSG00000198889; HLA -A*25:01,HLA-B*57:01
GTVNKVFASQW

SEQ ID NO: 1963 - protein, 9 aa, Homo sapiens
  Table 1.2; DCAF12L1; ENSG00000198889; HLA -A*31:01
GVRSLSFYR

SEQ ID NO: 1964 - protein, 9 aa, Homo sapiens
  Table 1.2; DCAF12L1; ENSG00000198889; HLA -A*11:01,HLA-A*26:01,HLA-A*68:01,HLA-B*35:01
HAIELNPSK

SEQ ID NO: 1965 - protein, 11 aa, Homo sapiens
  Table 1.2; DCAF12L1; ENSG00000198889; HLA -C*03:04
HAIELNPSKTL

SEQ ID NO: 1966 - protein, 9 aa, Homo sapiens
  Table 1.2; DCAF12L1; ENSG00000198889; HLA -A*29:02,HLA-A*33:03
HIARIPLLR

SEQ ID NO: 1967 - protein, 9 aa, Homo sapiens
  Table 1.2; DCAF12L1; ENSG00000198889; HLA -A*26:01
HIITVGTGQ

SEQ ID NO: 1968 - protein, 9 aa, Homo sapiens
  Table 1.2; DCAF12L1; ENSG00000198889; HLA -A*01:01,HLA-A*30:02,HLA-B*35:01,HLA-B*39:01,HLA-B*46:01, HLA-B*55:01,HLA-B*58:01,HLA-C*03:03
HSEVGLPVY

SEQ ID NO: 1969 - protein, 9 aa, Homo sapiens
  Table 1.2; DCAF12L1; ENSG00000198889; HLA -A*30:01,HLA-B*37:01,HLA-B*40:01,HLA-B*40:02,HLA-B*44:02, HLA-B*44:03,HLA-B*49:01
IELNPSKTL

SEQ ID NO: 1970 - protein, 10 aa, Homo sapiens
  Table 1.2; DCAF12L1; ENSG00000198889; HLA -A*23:01,HLA-A*30:01,HLA-B*37:01,HLA-B*40:01,HLA-B*40:02, HLA-B*44:02,HLA-B*44:03,HLA-B*49:01
IELNPSKTLL

SEQ ID NO: 1971 - protein, 9 aa, Homo sapiens
  Table 1.2; DCAF12L1; ENSG00000198889; HLA -B*54:01,HLA-B*55:01,HLA-B*56:01
IPLLRDSEA

SEQ ID NO: 1972 - protein, 10 aa, Homo sapiens
  Table 1.2; DCAF12L1; ENSG00000198889; HLA -B*58:01
ITVGTGQGSL

SEQ ID NO: 1973 - protein, 11 aa, Homo sapiens
  Table 1.2; DCAF12L1; ENSG00000198889; HLA -B*58:01
ITVGTGQGSLL

SEQ ID NO: 1974 - protein, 11 aa, Homo sapiens
  Table 1.2; DCAF12L1; ENSG00000198889; HLA -A*23:01,HLA-A*24:02
KFLEERASATL

SEQ ID NO: 1975 - protein, 11 aa, Homo sapiens
  Table 1.2; DCAF12L1; ENSG00000198889; HLA -A*02:01,HLA-A*02:03
KLFVAGGPLPA

SEQ ID NO: 1976 - protein, 11 aa, Homo sapiens
  Table 1.2; DCAF12L1; ENSG00000198889; HLA -A*31:01
KVFASQWLNSR

SEQ ID NO: 1977 - protein, 8 aa, Homo sapiens
  Table 1.2; DCAF12L1; ENSG00000198889; HLA -B*57:01
KVREVGGW

SEQ ID NO: 1978 - protein, 9 aa, Homo sapiens
  Table 1.2; DCAF12L1; ENSG00000198889; HLA -B*46:01,HLA-C*03:03,HLA-C*03:04
LAIYQLPSL

SEQ ID NO: 1979 - protein, 11 aa, Homo sapiens
  Table 1.2; DCAF12L1; ENSG00000198889; HLA -B*39:01
LATGGENPNSL

SEQ ID NO: 1980 - protein, 9 aa, Homo sapiens
  Table 1.2; DCAF12L1; ENSG00000198889; HLA -A*30:01,HLA-B*40:01,HLA-B*40:02,HLA-B*49:01
LEERASATL

SEQ ID NO: 1981 - protein, 9 aa, Homo sapiens
  Table 1.2; DCAF12L1; ENSG00000198889; HLA -A*30:01,HLA-B*49:01
LELGTVNKV

SEQ ID NO: 1982 - protein, 10 aa, Homo sapiens
  Table 1.2; DCAF12L1; ENSG00000198889; HLA -B*44:02,HLA-B*44:03
LELGTVNKVF

SEQ ID NO: 1983 - protein, 9 aa, Homo sapiens
  Table 1.2; DCAF12L1; ENSG00000198889; HLA -B*39:01
LESSSGPAR

SEQ ID NO: 1984 - protein, 10 aa, Homo sapiens
  Table 1.2; DCAF12L1; ENSG00000198889; HLA -A*24:02
LFYDVRAQKF

SEQ ID NO: 1985 - protein, 9 aa, Homo sapiens
  Table 1.2; DCAF12L1; ENSG00000198889; HLA -A*01:01,HLA-A*30:02,HLA-B*46:01
LGAVSLDGY

SEQ ID NO: 1986 - protein, 9 aa, Homo sapiens
  Table 1.2; DCAF12L1; ENSG00000198889; HLA -A*02:04,HLA-A*24:02
LLSIRLPYF

SEQ ID NO: 1987 - protein, 9 aa, Homo sapiens
  Table 1.2; DCAF12L1; ENSG00000198889; HLA -A*02:01,HLA-A*02:03,HLA-A*02:04,HLA-A*02:07,HLA-B*08:01, HLA-C*16:01
LLTERQLEL

SEQ ID NO: 1988 - protein, 9 aa, Homo sapiens
  Table 1.2; DCAF12L1; ENSG00000198889; HLA -A*26:01,HLA-A*29:02,HLA-A*30:02,HLA-B*35:01,HLA-B*55:01
LPAGLHGNY

SEQ ID NO: 1989 - protein, 10 aa, Homo sapiens
  Table 1.2; DCAF12L1; ENSG00000198889; HLA -B*54:01,HLA-B*56:01
LPAGLHGNYA

SEQ ID NO: 1990 - protein, 10 aa, Homo sapiens
  Table 1.2; DCAF12L1; ENSG00000198889; HLA -B*35:03
LPELLTERQL

SEQ ID NO: 1991 - protein, 9 aa, Homo sapiens
  Table 1.2; DCAF12L1; ENSG00000198889; HLA -B*07:02,HLA-B*35:01,HLA-B*35:03,HLA-B*51:01
LPSLDPLCL

SEQ ID NO: 1992 - protein, 8 aa, Homo sapiens
  Table 1.2; DCAF12L1; ENSG00000198889; HLA -B*51:01
LPYFRDNV

SEQ ID NO: 1993 - protein, 9 aa, Homo sapiens
  Table 1.2; DCAF12L1; ENSG00000198889; HLA -B*51:01,HLA-B*54:01
LPYFRDNVC

SEQ ID NO: 1994 - protein, 9 aa, Homo sapiens
  Table 1.2; DCAF12L1; ENSG00000198889; HLA -B*27:05
LRQDQQNIR

SEQ ID NO: 1995 - protein, 9 aa, Homo sapiens
  Table 1.2; DCAF12L1; ENSG00000198889; HLA -A*01:01
LSDTVAVSG

SEQ ID NO: 1996 - protein, 10 aa, Homo sapiens
  Table 1.2; DCAF12L1; ENSG00000198889; HLA -A*68:02
LSFYRHIITV

SEQ ID NO: 1997 - protein, 8 aa, Homo sapiens
  Table 1.2; DCAF12L1; ENSG00000198889; HLA -B*57:01
LSIRLPYF

SEQ ID NO: 1998 - protein, 10 aa, Homo sapiens
  Table 1.2; DCAF12L1; ENSG00000198889; HLA -A*01:01
LTYCDDMSVY

SEQ ID NO: 1999 - protein, 9 aa, Homo sapiens
  Table 1.2; DCAF12L1; ENSG00000198889; HLA -A*33:03
MAQQQTGSR

SEQ ID NO: 2000 - protein, 8 aa, Homo sapiens
  Table 1.2; DCAF12L1; ENSG00000198889; HLA -A*30:01,HLA-B*18:01,HLA-B*40:01,HLA-B*49:01
MEVFPNAL

SEQ ID NO: 2001 - protein, 9 aa, Homo sapiens
  Table 1.2; DCAF12L1; ENSG00000198889; HLA -A*29:02,HLA-B*18:01,HLA-B*44:02,HLA-B*44:03
MEVFPNALY

SEQ ID NO: 2002 - protein, 8 aa, Homo sapiens
  Table 1.2; DCAF12L1; ENSG00000198889; HLA -B*37:01
NDFWVNYF

SEQ ID NO: 2003 - protein, 9 aa, Homo sapiens
  Table 1.2; DCAF12L1; ENSG00000198889; HLA -A*29:02
NHNDFWVNY

SEQ ID NO: 2004 - protein, 8 aa, Homo sapiens
  Table 1.2; DCAF12L1; ENSG00000198889; HLA -B*35:01
NPNSLAIY

SEQ ID NO: 2005 - protein, 10 aa, Homo sapiens
  Table 1.2; DCAF12L1; ENSG00000198889; HLA -B*35:03
NPNSLAIYQL

SEQ ID NO: 2006 - protein, 9 aa, Homo sapiens
  Table 1.2; DCAF12L1; ENSG00000198889; HLA -B*07:02
NPSKTLLAT

SEQ ID NO: 2007 - protein, 10 aa, Homo sapiens
  Table 1.2; DCAF12L1; ENSG00000198889; HLA -B*07:02
NPSNRKVRAL

SEQ ID NO: 2008 - protein, 9 aa, Homo sapiens
  Table 1.2; DCAF12L1; ENSG00000198889; HLA -B*27:05,HLA-B*38:01,HLA-B*39:01
NQELGAVSL

SEQ ID NO: 2009 - protein, 8 aa, Homo sapiens
  Table 1.2; DCAF12L1; ENSG00000198889; HLA -C*14:02
NYFGGMEV

SEQ ID NO: 2010 - protein, 9 aa, Homo sapiens
  Table 1.2; DCAF12L1; ENSG00000198889; HLA -A*23:01,HLA-A*24:02,HLA-C*14:02
NYFGGMEVF

SEQ ID NO: 2011 - protein, 10 aa, Homo sapiens
  Table 1.2; DCAF12L1; ENSG00000198889; HLA -A*29:02
PLPAGLHGNY

SEQ ID NO: 2012 - protein, 9 aa, Homo sapiens
  Table 1.2; DCAF12L1; ENSG00000198889; HLA -A*31:01
PVYAHIRPR

SEQ ID NO: 2013 - protein, 9 aa, Homo sapiens
  Table 1.2; DCAF12L1; ENSG00000198889; HLA -B*37:01
QDQQNIRPL

SEQ ID NO: 2014 - protein, 8 aa, Homo sapiens
  Table 1.2; DCAF12L1; ENSG00000198889; HLA -A*30:01,HLA-B*18:01,HLA-B*37:01,HLA-B*40:01
QELGAVSL

SEQ ID NO: 2015 - protein, 11 aa, Homo sapiens
  Table 1.2; DCAF12L1; ENSG00000198889; HLA -A*30:02,HLA-B*44:02,HLA-B*44:03,HLA-C*16:04
QELGAVSLDGY

SEQ ID NO: 2016 - protein, 10 aa, Homo sapiens
  Table 1.2; DCAF12L1; ENSG00000198889; HLA -A*25:01,HLA-A*26:01,HLA-A*30:02,HLA-B*35:01,HLA-B*44:02, HLA-B*44:03
QGFDGELRGY

SEQ ID NO: 2017 - protein, 9 aa, Homo sapiens
  Table 1.2; DCAF12L1; ENSG00000198889; HLA -A*03:02
QLELGTVNK

SEQ ID NO: 2018 - protein, 9 aa, Homo sapiens
  Table 1.2; DCAF12L1; ENSG00000198889; HLA -A*31:01,HLA-A*33:01,HLA-A*33:03
QNIRPLCSR

SEQ ID NO: 2019 - protein, 9 aa, Homo sapiens
  Table 1.2; DCAF12L1; ENSG00000198889; HLA -B*13:02
QQGCGIHAI

SEQ ID NO: 2020 - protein, 10 aa, Homo sapiens
  Table 1.2; DCAF12L1; ENSG00000198889; HLA -A*31:01
QQNIRPLCSR

SEQ ID NO: 2021 - protein, 10 aa, Homo sapiens
  Table 1.2; DCAF12L1; ENSG00000198889; HLA -B*27:02
QRLPELLTER

SEQ ID NO: 2022 - protein, 9 aa, Homo sapiens
  Table 1.2; DCAF12L1; ENSG00000198889; HLA -A*31:01
RAIINPSNR

SEQ ID NO: 2023 - protein, 9 aa, Homo sapiens
  Table 1.2; DCAF12L1; ENSG00000198889; HLA -A*31:01
RAQKFLEER

SEQ ID NO: 2024 - protein, 8 aa, Homo sapiens
  Table 1.2; DCAF12L1; ENSG00000198889; HLA -B*37:01
RDGTVALW

SEQ ID NO: 2025 - protein, 10 aa, Homo sapiens
  Table 1.2; DCAF12L1; ENSG00000198889; HLA -B*40:01
REGGTGVRSL

SEQ ID NO: 2026 - protein, 10 aa, Homo sapiens
  Table 1.2; DCAF12L1; ENSG00000198889; HLA -B*57:01
RGWLNHNDFW

SEQ ID NO: 2027 - protein, 9 aa, Homo sapiens
  Table 1.2; DCAF12L1; ENSG00000198889; HLA -A*03:01,HLA-A*29:02,HLA-B*57:01
RLLSIRLPY

SEQ ID NO: 2028 - protein, 10 aa, Homo sapiens
  Table 1.2; DCAF12L1; ENSG00000198889; HLA -A*02:04,HLA-A*24:02
RLLSIRLPYF

SEQ ID NO: 2029 - protein, 9 aa, Homo sapiens
  Table 1.2; DCAF12L1; ENSG00000198889; HLA -A*02:07,HLA-A*03:01,HLA-A*31:01
RLPELLTER

SEQ ID NO: 2030 - protein, 11 aa, Homo sapiens
  Table 1.2; DCAF12L1; ENSG00000198889; HLA -A*02:07
RLPELLTERQL

SEQ ID NO: 2031 - protein, 9 aa, Homo sapiens
  Table 1.2; DCAF12L1; ENSG00000198889; HLA -A*02:07
RLPYFRDNV

SEQ ID NO: 2032 - protein, 8 aa, Homo sapiens
  Table 1.2; DCAF12L1; ENSG00000198889; HLA -B*07:02
RPATYRSM

SEQ ID NO: 2033 - protein, 10 aa, Homo sapiens
  Table 1.2; DCAF12L1; ENSG00000198889; HLA -A*31:01
RPRDVEAIPR

SEQ ID NO: 2034 - protein, 10 aa, Homo sapiens
  Table 1.2; DCAF12L1; ENSG00000198889; HLA -A*03:01,HLA-A*03:02,HLA-A*11:01,HLA-A*31:01,HLA-B*27:05
RQLELGTVNK

SEQ ID NO: 2035 - protein, 11 aa, Homo sapiens
  Table 1.2; DCAF12L1; ENSG00000198889; HLA -A*02:01,HLA-A*02:04,HLA-B*13:02
RQLELGTVNKV

SEQ ID NO: 2036 - protein, 9 aa, Homo sapiens
  Table 1.2; DCAF12L1; ENSG00000198889; HLA -A*03:01,HLA-A*31:01
RQRRPATYR

SEQ ID NO: 2037 - protein, 9 aa, Homo sapiens
  Table 1.2; DCAF12L1; ENSG00000198889; HLA -A*02:01,HLA-A*02:03,HLA-A*02:04,HLA-A*23:01,HLA-B*08:01, HLA-B*13:02,HLA-B*51:01,HLA-B*54:01,HLA-C*16:01
SALSRLLSI

SEQ ID NO: 2038 - protein, 8 aa, Homo sapiens
  Table 1.2; DCAF12L1; ENSG00000198889; HLA -A*30:01,HLA-B*15:01,HLA-B*15:03,HLA-B*18:01,HLA-B*37:01, HLA-B*39:01,HLA-B*40:02,HLA-B*44:02,HLA-B*44:03,HLA-B*49:01, HLA-C*16:04
SEVGLPVY

SEQ ID NO: 2039 - protein, 9 aa, Homo sapiens
  Table 1.2; DCAF12L1; ENSG00000198889; HLA -A*30:01,HLA-B*18:01,HLA-B*40:01,HLA-B*40:02,HLA-B*44:02, HLA-B*44:03,HLA-B*49:01
SEVGLPVYA

SEQ ID NO: 2040 - protein, 11 aa, Homo sapiens
  Table 1.2; DCAF12L1; ENSG00000198889; HLA -B*44:02
SEVGLPVYAHI

SEQ ID NO: 2041 - protein, 9 aa, Homo sapiens
  Table 1.2; DCAF12L1; ENSG00000198889; HLA -A*02:01,HLA-A*02:03,HLA-A*02:04
SFYRHIITV

SEQ ID NO: 2042 - protein, 11 aa, Homo sapiens
  Table 1.2; DCAF12L1; ENSG00000198889; HLA -B*57:01
SGSRDGTVALW

SEQ ID NO: 2043 - protein, 8 aa, Homo sapiens
  Table 1.2; DCAF12L1; ENSG00000198889; HLA -A*02:07
SLDGYFHL

SEQ ID NO: 2044 - protein, 9 aa, Homo sapiens
  Table 1.2; DCAF12L1; ENSG00000198889; HLA -A*01:01,HLA-A*02:07,HLA-A*24:02,HLA-A*29:02,HLA-B*44:02, HLA-B*57:01
SLDGYFHLW

SEQ ID NO: 2045 - protein, 9 aa, Homo sapiens
  Table 1.2; DCAF12L1; ENSG00000198889; HLA -A*02:04
SLLFYDVRA

SEQ ID NO: 2046 - protein, 9 aa, Homo sapiens
  Table 1.2; DCAF12L1; ENSG00000198889; HLA -A*31:01,HLA-A*33:01
SMAHYLKVR

SEQ ID NO: 2047 - protein, 8 aa, Homo sapiens
  Table 1.2; DCAF12L1; ENSG00000198889; HLA -B*56:01
SPSQGLAA

SEQ ID NO: 2048 - protein, 9 aa, Homo sapiens
  Table 1.2; DCAF12L1; ENSG00000198889; HLA -B*07:02,HLA-B*54:01,HLA-B*55:01,HLA-B*56:01
SPSQGLAAA

SEQ ID NO: 2049 - protein, 9 aa, Homo sapiens
  Table 1.2; DCAF12L1; ENSG00000198889; HLA -B*13:02
SQWLNSRQV

SEQ ID NO: 2050 - protein, 9 aa, Homo sapiens
  Table 1.2; DCAF12L1; ENSG00000198889; HLA -B*38:01
SRDGTVALW

SEQ ID NO: 2051 - protein, 9 aa, Homo sapiens
  Table 1.2; DCAF12L1; ENSG00000198889; HLA -B*27:05
SREGGTGVR

SEQ ID NO: 2052 - protein, 9 aa, Homo sapiens
  Table 1.2; DCAF12L1; ENSG00000198889; HLA -C*01:02
SSPSQGLAA

SEQ ID NO: 2053 - protein, 10 aa, Homo sapiens
  Table 1.2; DCAF12L1; ENSG00000198889; HLA -A*03:01,HLA-A*03:02,HLA-A*11:01,HLA-A*30:02
SVYAVGSHSH

SEQ ID NO: 2054 - protein, 11 aa, Homo sapiens
  Table 1.2; DCAF12L1; ENSG00000198889; HLA -A*68:02
SVYAVGSHSHV

SEQ ID NO: 2055 - protein, 10 aa, Homo sapiens
  Table 1.2; DCAF12L1; ENSG00000198889; HLA -B*40:02,HLA-B*49:01
TERQLELGTV

SEQ ID NO: 2056 - protein, 9 aa, Homo sapiens
  Table 1.2; DCAF12L1; ENSG00000198889; HLA -B*35:03,HLA-B*39:01
TGGENPNSL

SEQ ID NO: 2057 - protein, 9 aa, Homo sapiens
  Table 1.2; DCAF12L1; ENSG00000198889; HLA -A*30:02
TGQGSLLFY

SEQ ID NO: 2058 - protein, 10 aa, Homo sapiens
  Table 1.2; DCAF12L1; ENSG00000198889; HLA -A*68:01
TLESSSGPAR

SEQ ID NO: 2059 - protein, 10 aa, Homo sapiens
  Table 1.2; DCAF12L1; ENSG00000198889; HLA -A*25:01,HLA-A*32:01,HLA-B*57:01,HLA-B*58:01
TVNKVFASQW

SEQ ID NO: 2060 - protein, 9 aa, Homo sapiens
  Table 1.2; DCAF12L1; ENSG00000198889; HLA -A*29:02,HLA-C*07:01,HLA-C*14:02
TYCDDMSVY

SEQ ID NO: 2061 - protein, 9 aa, Homo sapiens
  Table 1.2; DCAF12L1; ENSG00000198889; HLA -A*24:02
TYRSMAHYL

SEQ ID NO: 2062 - protein, 9 aa, Homo sapiens
  Table 1.2; DCAF12L1; ENSG00000198889; HLA -B*46:01,HLA-B*56:01
VAGGPLPAG

SEQ ID NO: 2063 - protein, 8 aa, Homo sapiens
  Table 1.2; DCAF12L1; ENSG00000198889; HLA -B*51:01
VAWLSDTV

SEQ ID NO: 2064 - protein, 9 aa, Homo sapiens
  Table 1.2; DCAF12L1; ENSG00000198889; HLA -B*54:01
VAWLSDTVA

SEQ ID NO: 2065 - protein, 8 aa, Homo sapiens
  Table 1.2; DCAF12L1; ENSG00000198889; HLA -B*49:01
VEAIPRAI

SEQ ID NO: 2066 - protein, 9 aa, Homo sapiens
  Table 1.2; DCAF12L1; ENSG00000198889; HLA -B*40:01,HLA-B*44:02,HLA-B*44:03,HLA-B*49:01
VEAIPRAII

SEQ ID NO: 2067 - protein, 9 aa, Homo sapiens
  Table 1.2; DCAF12L1; ENSG00000198889; HLA -A*30:01,HLA-B*37:01,HLA-B*40:01,HLA-B*44:02,HLA-B*44:03, HLA-B*49:01
VESGHIARI

SEQ ID NO: 2068 - protein, 9 aa, Homo sapiens
  Table 1.2; DCAF12L1; ENSG00000198889; HLA -A*24:02
VFPNALYTH

SEQ ID NO: 2069 - protein, 11 aa, Homo sapiens
  Table 1.2; DCAF12L1; ENSG00000198889; HLA -A*29:02
VFPNALYTHCY

SEQ ID NO: 2070 - protein, 9 aa, Homo sapiens
  Table 1.2; DCAF12L1; ENSG00000198889; HLA -A*23:01,HLA-A*24:02,HLA-B*51:01
VGLPVYAHI

SEQ ID NO: 2071 - protein, 10 aa, Homo sapiens
  Table 1.2; DCAF12L1; ENSG00000198889; HLA -A*31:01
VGLPVYAHIR

SEQ ID NO: 2072 - protein, 9 aa, Homo sapiens
  Table 1.2; DCAF12L1; ENSG00000198889; HLA -B*15:03,HLA-B*46:01,HLA-C*07:04,HLA-C*12:03,HLA-C*16:01
VGSHSHVSF

SEQ ID NO: 2073 - protein, 9 aa, Homo sapiens
  Table 1.2; DCAF12L1; ENSG00000198889; HLA -C*03:04
VGTGQGSLL

SEQ ID NO: 2074 - protein, 11 aa, Homo sapiens
  Table 1.2; DCAF12L1; ENSG00000198889; HLA -A*30:02
VGTGQGSLLFY

SEQ ID NO: 2075 - protein, 11 aa, Homo sapiens
  Table 1.2; DCAF12L1; ENSG00000198889; HLA -A*31:01,HLA-A*33:01
VQRLPELLTER

SEQ ID NO: 2076 - protein, 9 aa, Homo sapiens
  Table 1.2; DCAF12L1; ENSG00000198889; HLA -A*02:04,HLA-A*23:01,HLA-A*24:02
VSLDGYFHL

SEQ ID NO: 2077 - protein, 10 aa, Homo sapiens
  Table 1.2; DCAF12L1; ENSG00000198889; HLA -A*24:02,HLA-B*44:02,HLA-B*57:01
VSLDGYFHLW

SEQ ID NO: 2078 - protein, 9 aa, Homo sapiens
  Table 1.2; DCAF12L1; ENSG00000198889; HLA -A*02:07,HLA-C*05:01
VVDVESGHI

SEQ ID NO: 2079 - protein, 11 aa, Homo sapiens
  Table 1.2; DCAF12L1; ENSG00000198889; HLA -A*31:01,HLA-A*33:01
VVDVESGHIAR

SEQ ID NO: 2080 - protein, 8 aa, Homo sapiens
  Table 1.2; DCAF12L1; ENSG00000198889; HLA -C*14:02
VYAVGSHS

SEQ ID NO: 2081 - protein, 9 aa, Homo sapiens
  Table 1.2; DCAF12L1; ENSG00000198889; HLA -A*24:02,HLA-C*14:02
VYAVGSHSH

SEQ ID NO: 2082 - protein, 9 aa, Homo sapiens
  Table 1.2; DCAF12L1; ENSG00000198889; HLA -A*26:01,HLA-A*68:02,HLA-B*51:01,HLA-C*02:02,HLA-C*12:03, HLA-C*16:02
YAVGSHSHV

SEQ ID NO: 2083 - protein, 11 aa, Homo sapiens
  Table 1.2; DCAF12L1; ENSG00000198889; HLA -B*35:01,HLA-B*46:01,HLA-C*02:02,HLA-C*12:03
YAVGSHSHVSF

SEQ ID NO: 2084 - protein, 9 aa, Homo sapiens
  Table 1.2; DCAF12L1; ENSG00000198889; HLA -A*02:04,HLA-A*02:07,HLA-A*23:01,HLA-A*24:02,HLA-A*30:01, HLA-A*68:02,HLA-B*08:01,HLA-B*35:03,HLA-B*46:01,HLA-B*51:01, HLA-B*54:01,HLA-B*58:01,HLA-C*02:02,HLA-C*03:03,HLA-C*03:04,
  HLA-C*12:03,HLA-C*16:01,HLA-C*16:02
YAVQRLPEL

SEQ ID NO: 2085 - protein, 8 aa, Homo sapiens
  Table 1.2; DCAF12L1; ENSG00000198889; HLA -A*01:01
YCDDMSVY

SEQ ID NO: 2086 - protein, 10 aa, Homo sapiens
  Table 1.2; DCAF12L1; ENSG00000198889; HLA -A*02:01,HLA-A*02:07
YCDDMSVYAV

SEQ ID NO: 2087 - protein, 8 aa, Homo sapiens
  Table 1.2; DCAF12L1; ENSG00000198889; HLA -B*18:01,HLA-B*37:01,HLA-B*40:02
YDVRAQKF

SEQ ID NO: 2088 - protein, 10 aa, Homo sapiens
  Table 1.2; DCAF12L1; ENSG00000198889; HLA -A*29:02
YFRDNVCLTY

SEQ ID NO: 2089 - protein, 9 aa, Homo sapiens
  Table 1.2; DCAF12L1; ENSG00000198889; HLA -A*02:01,HLA-A*02:03,HLA-A*02:04,HLA-A*02:07,HLA-B*13:02, HLA-B*39:01,HLA-B*40:01
YQLPSLDPL

SEQ ID NO: 2090 - protein, 11 aa, Homo sapiens
  Table 1.2; DCAF12L1; ENSG00000198889; HLA -A*02:01,HLA-A*23:01,HLA-B*38:01
YQLPSLDPLCL

SEQ ID NO: 2091 - protein, 8 aa, Homo sapiens
  Table 1.2; DCAF4L2; ENSG00000176566; HLA -B*39:01
AAVGQDCY

SEQ ID NO: 2092 - protein, 9 aa, Homo sapiens
  Table 1.2; DCAF4L2; ENSG00000176566; HLA -C*04:01
AAVGQDCYT

SEQ ID NO: 2093 - protein, 8 aa, Homo sapiens
  Table 1.2; DCAF4L2; ENSG00000176566; HLA -B*37:01
ADTPSCAV

SEQ ID NO: 2094 - protein, 9 aa, Homo sapiens
  Table 1.2; DCAF4L2; ENSG00000176566; HLA -A*30:01,HLA-B*37:01
ADTPSCAVL

SEQ ID NO: 2095 - protein, 10 aa, Homo sapiens
  Table 1.2; DCAF4L2; ENSG00000176566; HLA -C*16:02
ADTPSCAVLL

SEQ ID NO: 2096 - protein, 8 aa, Homo sapiens
  Table 1.2; DCAF4L2; ENSG00000176566; HLA -A*23:01
AIMTPLLF

SEQ ID NO: 2097 - protein, 8 aa, Homo sapiens
  Table 1.2; DCAF4L2; ENSG00000176566; HLA -B*56:01
APGLLMAV

SEQ ID NO: 2098 - protein, 10 aa, Homo sapiens
  Table 1.2; DCAF4L2; ENSG00000176566; HLA -B*07:02,HLA-B*08:01,HLA-C*07:02
APSMLRKNQL

SEQ ID NO: 2099 - protein, 8 aa, Homo sapiens
  Table 1.2; DCAF4L2; ENSG00000176566; HLA -A*30:02,HLA-A*32:01,HLA-B*15:01,HLA-B*46:01
ATKCVTQY

SEQ ID NO: 2100 - protein, 9 aa, Homo sapiens
  Table 1.2; DCAF4L2; ENSG00000176566; HLA -A*23:01
AVLLPASLF

SEQ ID NO: 2101 - protein, 9 aa, Homo sapiens
  Table 1.2; DCAF4L2; ENSG00000176566; HLA -B*57:01
AVREDLYCF

SEQ ID NO: 2102 - protein, 9 aa, Homo sapiens
  Table 1.2; DCAF4L2; ENSG00000176566; HLA -A*29:02,HLA-A*30:02,HLA-B*15:01,HLA-B*44:02
AWSLSIHAY

SEQ ID NO: 2103 - protein, 9 aa, Homo sapiens
  Table 1.2; DCAF4L2; ENSG00000176566; HLA -A*23:01,HLA-A*24:02,HLA-A*30:02,HLA-A*31:01,HLA-A*32:01, HLA-B*15:03,HLA-B*46:01,HLA-C*01:02,HLA-C*14:02
AYHSFSTGL

SEQ ID NO: 2104 - protein, 9 aa, Homo sapiens
  Table 1.2; DCAF4L2; ENSG00000176566; HLA -A*23:01,HLA-A*24:02,HLA-A*31:01
AYLPVHVNE

SEQ ID NO: 2105 - protein, 10 aa, Homo sapiens
  Table 1.2; DCAF4L2; ENSG00000176566; HLA -A*24:02
AYLPVHVNEE

SEQ ID NO: 2106 - protein, 9 aa, Homo sapiens
  Table 1.2; DCAF4L2; ENSG00000176566; HLA -B*35:03,HLA-C*03:03
CAVLLPASL

SEQ ID NO: 2107 - protein, 9 aa, Homo sapiens
  Table 1.2; DCAF4L2; ENSG00000176566; HLA -B*54:01
CAWSLSIHA

SEQ ID NO: 2108 - protein, 10 aa, Homo sapiens
  Table 1.2; DCAF4L2; ENSG00000176566; HLA -A*30:02
CAWSLSIHAY

SEQ ID NO: 2109 - protein, 9 aa, Homo sapiens
  Table 1.2; DCAF4L2; ENSG00000176566; HLA -B*57:01,HLA-B*58:01
CSFQIPDAW

SEQ ID NO: 2110 - protein, 8 aa, Homo sapiens
  Table 1.2; DCAF4L2; ENSG00000176566; HLA -A*24:02
CYTRIWSL

SEQ ID NO: 2111 - protein, 9 aa, Homo sapiens
  Table 1.2; DCAF4L2; ENSG00000176566; HLA -B*08:01
DCYTRIWSL

SEQ ID NO: 2112 - protein, 10 aa, Homo sapiens
  Table 1.2; DCAF4L2; ENSG00000176566; HLA -A*25:01,HLA-A*26:01,HLA-A*33:01,HLA-A*33:03,HLA-A*68:01
DIPSVAFSSR

SEQ ID NO: 2113 - protein, 11 aa, Homo sapiens
  Table 1.2; DCAF4L2; ENSG00000176566; HLA -A*68:02
DIPSVAFSSRL

SEQ ID NO: 2114 - protein, 8 aa, Homo sapiens
  Table 1.2; DCAF4L2; ENSG00000176566; HLA -B*08:01
DMTGTIKL

SEQ ID NO: 2115 - protein, 9 aa, Homo sapiens
  Table 1.2; DCAF4L2; ENSG00000176566; HLA -A*25:01,HLA-B*44:02
DMTGTIKLW

SEQ ID NO: 2116 - protein, 9 aa, Homo sapiens
  Table 1.2; DCAF4L2; ENSG00000176566; HLA -A*68:01
DPSSLASDR

SEQ ID NO: 2117 - protein, 10 aa, Homo sapiens
  Table 1.2; DCAF4L2; ENSG00000176566; HLA -B*35:01
DPSSLASDRF

SEQ ID NO: 2118 - protein, 9 aa, Homo sapiens
  Table 1.2; DCAF4L2; ENSG00000176566; HLA -A*02:03,HLA-B*13:02,HLA-B*39:01,HLA-B*51:01
DQLFTVNQV

SEQ ID NO: 2119 - protein, 9 aa, Homo sapiens
  Table 1.2; DCAF4L2; ENSG00000176566; HLA -B*51:01
DSAVTSLQI

SEQ ID NO: 2120 - protein, 9 aa, Homo sapiens
  Table 1.2; DCAF4L2; ENSG00000176566; HLA -A*68:02,HLA-B*51:01
DVLAQQFAI

SEQ ID NO: 2121 - protein, 10 aa, Homo sapiens
  Table 1.2; DCAF4L2; ENSG00000176566; HLA -A*25:01,HLA-A*26:01,HLA-A*33:01
DVLAQQFAIM

SEQ ID NO: 2122 - protein, 9 aa, Homo sapiens
  Table 1.2; DCAF4L2; ENSG00000176566; HLA -B*51:01
EADKQKKTV

SEQ ID NO: 2123 - protein, 10 aa, Homo sapiens
  Table 1.2; DCAF4L2; ENSG00000176566; HLA -A*33:03
EADKQKKTVR

SEQ ID NO: 2124 - protein, 10 aa, Homo sapiens
  Table 1.2; DCAF4L2; ENSG00000176566; HLA -B*44:03
EEADKQKKTV

SEQ ID NO: 2125 - protein, 9 aa, Homo sapiens
  Table 1.2; DCAF4L2; ENSG00000176566; HLA -A*30:01,HLA-B*18:01,HLA-B*39:01,HLA-B*40:01,HLA-B*49:01
EEEGVVAAV

SEQ ID NO: 2126 - protein, 8 aa, Homo sapiens
  Table 1.2; DCAF4L2; ENSG00000176566; HLA -B*18:01,HLA-B*49:01
EEGVVAAV

SEQ ID NO: 2127 - protein, 9 aa, Homo sapiens
  Table 1.2; DCAF4L2; ENSG00000176566; HLA -A*25:01,HLA-A*26:01,HLA-A*30:02,HLA-B*15:01,HLA-B*46:01
EGHVNNSAY

SEQ ID NO: 2128 - protein, 8 aa, Homo sapiens
  Table 1.2; DCAF4L2; ENSG00000176566; HLA -A*33:03
EIFGIDLR

SEQ ID NO: 2129 - protein, 9 aa, Homo sapiens
  Table 1.2; DCAF4L2; ENSG00000176566; HLA -A*68:02
EIFGIDLRC

SEQ ID NO: 2130 - protein, 9 aa, Homo sapiens
  Table 1.2; DCAF4L2; ENSG00000176566; HLA -A*33:01,HLA-A*33:03
ELRVSCMQR

SEQ ID NO: 2131 - protein, 9 aa, Homo sapiens
  Table 1.2; DCAF4L2; ENSG00000176566; HLA -A*33:01,HLA-A*33:03,HLA-B*35:01,HLA-B*38:01,HLA-C*04:01, HLA-C*05:01
ENDIPSVAF

SEQ ID NO: 2132 - protein, 8 aa, Homo sapiens
  Table 1.2; DCAF4L2; ENSG00000176566; HLA -A*23:01,HLA-B*51:01,HLA-C*03:03,HLA-C*03:04
FAIMTPLL

SEQ ID NO: 2133 - protein, 9 aa, Homo sapiens
  Table 1.2; DCAF4L2; ENSG00000176566; HLA -A*23:01,HLA-A*24:02,HLA-A*26:01,HLA-A*29:02,HLA-B*27:02, HLA-B*35:01,HLA-B*54:01,HLA-C*02:02,HLA-C*12:03
FAIMTPLLF

SEQ ID NO: 2134 - protein, 8 aa, Homo sapiens
  Table 1.2; DCAF4L2; ENSG00000176566; HLA -B*35:03,HLA-B*39:01,HLA-C*03:03,HLA-C*03:04
FGTSSDVL

SEQ ID NO: 2135 - protein, 9 aa, Homo sapiens
  Table 1.2; DCAF4L2; ENSG00000176566; HLA -A*02:01
FQIPDAWSC

SEQ ID NO: 2136 - protein, 9 aa, Homo sapiens
  Table 1.2; DCAF4L2; ENSG00000176566; HLA -A*68:02,HLA-B*13:02,HLA-C*16:02
FSTGLSQQV

SEQ ID NO: 2137 - protein, 9 aa, Homo sapiens
  Table 1.2; DCAF4L2; ENSG00000176566; HLA -A*02:07,HLA-B*13:02
GAPGLLMAV

SEQ ID NO: 2138 - protein, 8 aa, Homo sapiens
  Table 1.2; DCAF4L2; ENSG00000176566; HLA -A*30:01,HLA-B*40:01,HLA-B*49:01
GEIFGIDL

SEQ ID NO: 2139 - protein, 8 aa, Homo sapiens
  Table 1.2; DCAF4L2; ENSG00000176566; HLA -A*29:02
GFLRFANY

SEQ ID NO: 2140 - protein, 11 aa, Homo sapiens
  Table 1.2; DCAF4L2; ENSG00000176566; HLA -A*31:01
GGSKYGIITMR

SEQ ID NO: 2141 - protein, 9 aa, Homo sapiens
  Table 1.2; DCAF4L2; ENSG00000176566; HLA -B*27:05,HLA-B*38:01,HLA-B*39:01
GHVNNSAYL

SEQ ID NO: 2142 - protein, 9 aa, Homo sapiens
  Table 1.2; DCAF4L2; ENSG00000176566; HLA -A*02:01,HLA-A*02:03,HLA-B*55:01
GLADTPSCA

SEQ ID NO: 2143 - protein, 10 aa, Homo sapiens
  Table 1.2; DCAF4L2; ENSG00000176566; HLA -A*02:01,HLA-A*02:03,HLA-B*13:02,HLA-B*55:01
GLADTPSCAV

SEQ ID NO: 2144 - protein, 9 aa, Homo sapiens
  Table 1.2; DCAF4L2; ENSG00000176566; HLA -A*03:01,HLA-A*03:02,HLA-A*11:01,HLA-A*31:01,HLA-A*33:01, HLA-A*33:03
GLNAPSMLR

SEQ ID NO: 2145 - protein, 10 aa, Homo sapiens
  Table 1.2; DCAF4L2; ENSG00000176566; HLA -A*03:01,HLA-A*03:02,HLA-A*11:01
GLNAPSMLRK

SEQ ID NO: 2146 - protein, 11 aa, Homo sapiens
  Table 1.2; DCAF4L2; ENSG00000176566; HLA -A*02:01,HLA-A*02:03,HLA-A*02:04,HLA-B*55:01
GLSQQVLLTNV

SEQ ID NO: 2147 - protein, 9 aa, Homo sapiens
  Table 1.2; DCAF4L2; ENSG00000176566; HLA -A*02:01,HLA-A*02:03,HLA-B*13:02
GLTTPELRV

SEQ ID NO: 2148 - protein, 10 aa, Homo sapiens
  Table 1.2; DCAF4L2; ENSG00000176566; HLA -A*01:01,HLA-A*29:02,HLA-A*30:02,HLA-A*32:01,HLA-B*15:01, HLA-B*15:03,HLA-C*16:01
GLTTPELRVY

SEQ ID NO: 2149 - protein, 9 aa, Homo sapiens
  Table 1.2; DCAF4L2; ENSG00000176566; HLA -A*30:01,HLA-B*13:02,HLA-B*15:01,HLA-B*15:03,HLA-B*27:05, HLA-B*39:01
GQFLVSSDM

SEQ ID NO: 2150 - protein, 11 aa, Homo sapiens
  Table 1.2; DCAF4L2; ENSG00000176566; HLA -B*13:02,HLA-B*27:05
GQFLVSSDMTG

SEQ ID NO: 2151 - protein, 9 aa, Homo sapiens
  Table 1.2; DCAF4L2; ENSG00000176566; HLA -A*31:01,HLA-B*40:02,HLA-B*46:01,HLA-B*57:01,HLA-B*58:01, HLA-C*07:04,HLA-C*12:03
GSKYGIITM

SEQ ID NO: 2152 - protein, 10 aa, Homo sapiens
  Table 1.2; DCAF4L2; ENSG00000176566; HLA -A*31:01,HLA-A*33:01,HLA-A*33:03
GSKYGIITMR

SEQ ID NO: 2153 - protein, 9 aa, Homo sapiens
  Table 1.2; DCAF4L2; ENSG00000176566; HLA -A*11:01
GTSSDVLAQ

SEQ ID NO: 2154 - protein, 10 aa, Homo sapiens
  Table 1.2; DCAF4L2; ENSG00000176566; HLA -A*11:01
GTSSDVLAQQ

SEQ ID NO: 2155 - protein, 11 aa, Homo sapiens
  Table 1.2; DCAF4L2; ENSG00000176566; HLA -A*03:02,HLA-A*11:01,HLA-A*29:02,HLA-A*30:02,HLA-A*32:01, HLA-B*27:02,HLA-B*27:05,HLA-B*39:01,HLA-B*57:01,HLA-B*58:01
GTSSDVLAQQF

SEQ ID NO: 2156 - protein, 11 aa, Homo sapiens
  Table 1.2; DCAF4L2; ENSG00000176566; HLA -A*30:02,HLA-B*15:01,HLA-B*15:03
GVVAAVGQDCY

SEQ ID NO: 2157 - protein, 8 aa, Homo sapiens
  Table 1.2; DCAF4L2; ENSG00000176566; HLA -A*30:01,HLA-B*18:01,HLA-B*37:01,HLA-B*38:01,HLA-B*40:01, HLA-B*40:02
HDSAVTSL

SEQ ID NO: 2158 - protein, 10 aa, Homo sapiens
  Table 1.2; DCAF4L2; ENSG00000176566; HLA -B*38:01
HDSAVTSLQI

SEQ ID NO: 2159 - protein, 11 aa, Homo sapiens
  Table 1.2; DCAF4L2; ENSG00000176566; HLA -A*30:01
HDSAVTSLQIL

SEQ ID NO: 2160 - protein, 8 aa, Homo sapiens
  Table 1.2; DCAF4L2; ENSG00000176566; HLA -B*51:01
HGHLLTTI

SEQ ID NO: 2161 - protein, 8 aa, Homo sapiens
  Table 1.2; DCAF4L2; ENSG00000176566; HLA -A*02:07
HLDSHLLL

SEQ ID NO: 2162 - protein, 9 aa, Homo sapiens
  Table 1.2; DCAF4L2; ENSG00000176566; HLA -A*02:01,HLA-A*02:07
HLDSHLLLC

SEQ ID NO: 2163 - protein, 10 aa, Homo sapiens
  Table 1.2; DCAF4L2; ENSG00000176566; HLA -A*02:07
HLDSHLLLCF

SEQ ID NO: 2164 - protein, 10 aa, Homo sapiens
  Table 1.2; DCAF4L2; ENSG00000176566; HLA -A*01:01,HLA-A*29:02,HLA-A*30:02
HLLTTIPSPY

SEQ ID NO: 2165 - protein, 11 aa, Homo sapiens
  Table 1.2; DCAF4L2; ENSG00000176566; HLA -A*68:02,HLA-B*13:02
HSFSTGLSQQV

SEQ ID NO: 2166 - protein, 9 aa, Homo sapiens
  Table 1.2; DCAF4L2; ENSG00000176566; HLA -B*54:01
HSWDPSSLA

SEQ ID NO: 2167 - protein, 10 aa, Homo sapiens
  Table 1.2; DCAF4L2; ENSG00000176566; HLA -B*35:03,HLA-B*54:01
HVNEEEGVVA

SEQ ID NO: 2168 - protein, 9 aa, Homo sapiens
  Table 1.2; DCAF4L2; ENSG00000176566; HLA -B*38:01,HLA-B*39:01
IHSWDPSSL

SEQ ID NO: 2169 - protein, 11 aa, Homo sapiens
  Table 1.2; DCAF4L2; ENSG00000176566; HLA -A*23:01
ILANTNTDQLF

SEQ ID NO: 2170 - protein, 9 aa, Homo sapiens
  Table 1.2; DCAF4L2; ENSG00000176566; HLA -A*02:01,HLA-A*02:03,HLA-A*02:04,HLA-A*02:07,HLA-A*30:01, HLA-B*13:02,HLA-B*55:01
ILQDGQFLV

SEQ ID NO: 2171 - protein, 9 aa, Homo sapiens
  Table 1.2; DCAF4L2; ENSG00000176566; HLA -A*68:01
IPSVAFSSR

SEQ ID NO: 2172 - protein, 10 aa, Homo sapiens
  Table 1.2; DCAF4L2; ENSG00000176566; HLA -B*07:02
IPSVAFSSRL

SEQ ID NO: 2173 - protein, 9 aa, Homo sapiens
  Table 1.2; DCAF4L2; ENSG00000176566; HLA -A*03:01
KLWDLRATK

SEQ ID NO: 2174 - protein, 8 aa, Homo sapiens
  Table 1.2; DCAF4L2; ENSG00000176566; HLA -A*31:01
KTLYVPNR

SEQ ID NO: 2175 - protein, 9 aa, Homo sapiens
  Table 1.2; DCAF4L2; ENSG00000176566; HLA -A*03:01,HLA-A*03:02,HLA-A*11:01
KTLYVPNRK

SEQ ID NO: 2176 - protein, 9 aa, Homo sapiens
  Table 1.2; DCAF4L2; ENSG00000176566; HLA -B*58:01
KTVRVGLNA

SEQ ID NO: 2177 - protein, 8 aa, Homo sapiens
  Table 1.2; DCAF4L2; ENSG00000176566; HLA -A*31:01
KYGIITMR

SEQ ID NO: 2178 - protein, 9 aa, Homo sapiens
  Table 1.2; DCAF4L2; ENSG00000176566; HLA -B*51:01,HLA-C*03:03,HLA-C*03:04,HLA-C*05:01
LADTPSCAV

SEQ ID NO: 2179 - protein, 10 aa, Homo sapiens
  Table 1.2; DCAF4L2; ENSG00000176566; HLA -C*05:01
LADTPSCAVL

SEQ ID NO: 2180 - protein, 9 aa, Homo sapiens
  Table 1.2; DCAF4L2; ENSG00000176566; HLA -C*03:03,HLA-C*03:04
LANTNTDQL

SEQ ID NO: 2181 - protein, 10 aa, Homo sapiens
  Table 1.2; DCAF4L2; ENSG00000176566; HLA -B*57:01,HLA-B*58:01
LANTNTDQLF

SEQ ID NO: 2182 - protein, 9 aa, Homo sapiens
  Table 1.2; DCAF4L2; ENSG00000176566; HLA -A*23:01,HLA-A*24:02,HLA-C*14:02
LFIGSFPGM

SEQ ID NO: 2183 - protein, 9 aa, Homo sapiens
  Table 1.2; DCAF4L2; ENSG00000176566; HLA -A*30:02,HLA-B*57:01
LGFLRFANY

SEQ ID NO: 2184 - protein, 10 aa, Homo sapiens
  Table 1.2; DCAF4L2; ENSG00000176566; HLA -A*01:01
LLMAVREDLY

SEQ ID NO: 2185 - protein, 9 aa, Homo sapiens
  Table 1.2; DCAF4L2; ENSG00000176566; HLA -A*02:01,HLA-A*02:03
LLTNVVTGH

SEQ ID NO: 2186 - protein, 9 aa, Homo sapiens
  Table 1.2; DCAF4L2; ENSG00000176566; HLA -A*01:01,HLA-A*29:02,HLA-A*30:02,HLA-B*46:01
LLTTIPSPY

SEQ ID NO: 2187 - protein, 9 aa, Homo sapiens
  Table 1.2; DCAF4L2; ENSG00000176566; HLA -A*01:01,HLA-A*29:02,HLA-A*30:02
LMAVREDLY

SEQ ID NO: 2188 - protein, 9 aa, Homo sapiens
  Table 1.2; DCAF4L2; ENSG00000176566; HLA -B*54:01
LPASLFIGS

SEQ ID NO: 2189 - protein, 10 aa, Homo sapiens
  Table 1.2; DCAF4L2; ENSG00000176566; HLA -B*35:01,HLA-B*54:01
LPASLFIGSF

SEQ ID NO: 2190 - protein, 11 aa, Homo sapiens
  Table 1.2; DCAF4L2; ENSG00000176566; HLA -B*55:01
LPVHVNEEEGV

SEQ ID NO: 2191 - protein, 9 aa, Homo sapiens
  Table 1.2; DCAF4L2; ENSG00000176566; HLA -B*15:01,HLA-B*15:03
LQILQDGQF

SEQ ID NO: 2192 - protein, 10 aa, Homo sapiens
  Table 1.2; DCAF4L2; ENSG00000176566; HLA -B*38:01
LQILQDGQFL

SEQ ID NO: 2193 - protein, 9 aa, Homo sapiens
  Table 1.2; DCAF4L2; ENSG00000176566; HLA -A*24:02,HLA-A*25:01,HLA-B*46:01,HLA-B*57:01,HLA-B*58:01
LSIHAYHSF

SEQ ID NO: 2194 - protein, 8 aa, Homo sapiens
  Table 1.2; DCAF4L2; ENSG00000176566; HLA -A*01:01
LTTIPSPY

SEQ ID NO: 2195 - protein, 9 aa, Homo sapiens
  Table 1.2; DCAF4L2; ENSG00000176566; HLA -A*01:01,HLA-A*29:02,HLA-A*30:02,HLA-A*32:01,HLA-B*46:01, HLA-B*57:01,HLA-B*58:01,HLA-C*02:02,HLA-C*16:01,HLA-C*16:02
LTTPELRVY

SEQ ID NO: 2196 - protein, 10 aa, Homo sapiens
  Table 1.2; DCAF4L2; ENSG00000176566; HLA -B*35:01
MAVREDLYCF

SEQ ID NO: 2197 - protein, 8 aa, Homo sapiens
  Table 1.2; DCAF4L2; ENSG00000176566; HLA -B*08:01
MQRKKVQI

SEQ ID NO: 2198 - protein, 9 aa, Homo sapiens
  Table 1.2; DCAF4L2; ENSG00000176566; HLA -B*27:02,HLA-B*27:05
MRGLTTPEL

SEQ ID NO: 2199 - protein, 8 aa, Homo sapiens
  Table 1.2; DCAF4L2; ENSG00000176566; HLA -B*57:01
MTGTIKLW

SEQ ID NO: 2200 - protein, 8 aa, Homo sapiens
  Table 1.2; DCAF4L2; ENSG00000176566; HLA -B*51:01
NAPSMLRK

SEQ ID NO: 2201 - protein, 8 aa, Homo sapiens
  Table 1.2; DCAF4L2; ENSG00000176566; HLA -A*30:01,HLA-B*18:01,HLA-B*37:01,HLA-B*40:02,HLA-B*44:02, HLA-B*44:03
NDIPSVAF

SEQ ID NO: 2202 - protein, 11 aa, Homo sapiens
  Table 1.2; DCAF4L2; ENSG00000176566; HLA -A*33:01
NDIPSVAFSSR

SEQ ID NO: 2203 - protein, 8 aa, Homo sapiens
  Table 1.2; DCAF4L2; ENSG00000176566; HLA -B*18:01
NEEEGVVA

SEQ ID NO: 2204 - protein, 9 aa, Homo sapiens
  Table 1.2; DCAF4L2; ENSG00000176566; HLA -A*30:01,HLA-B*18:01,HLA-B*40:01
NEEEGVVAA

SEQ ID NO: 2205 - protein, 10 aa, Homo sapiens
  Table 1.2; DCAF4L2; ENSG00000176566; HLA -B*40:01
NEEEGVVAAV

SEQ ID NO: 2206 - protein, 8 aa, Homo sapiens
  Table 1.2; DCAF4L2; ENSG00000176566; HLA -B*38:01
NHLDSHLL

SEQ ID NO: 2207 - protein, 9 aa, Homo sapiens
  Table 1.2; DCAF4L2; ENSG00000176566; HLA -B*38:01,HLA-B*39:01
NHLDSHLLL

SEQ ID NO: 2208 - protein, 11 aa, Homo sapiens
  Table 1.2; DCAF4L2; ENSG00000176566; HLA -A*29:02
NQLGFLRFANY

SEQ ID NO: 2209 - protein, 10 aa, Homo sapiens
  Table 1.2; DCAF4L2; ENSG00000176566; HLA -A*25:01,HLA-A*26:01,HLA-A*30:02,HLA-A*32:01,HLA-B*15:01, HLA-B*15:03,HLA-B*18:01,HLA-B*38:01,HLA-B*39:01,HLA-B*44:03, HLA-C*07:04,HLA-C*16:04
NQVEAGGSKY

SEQ ID NO: 2210 - protein, 9 aa, Homo sapiens
  Table 1.2; DCAF4L2; ENSG00000176566; HLA -A*68:02
NSAYLPVHV

SEQ ID NO: 2211 - protein, 8 aa, Homo sapiens
  Table 1.2; DCAF4L2; ENSG00000176566; HLA -C*05:01
NTDQLFTV

SEQ ID NO: 2212 - protein, 9 aa, Homo sapiens
  Table 1.2; DCAF4L2; ENSG00000176566; HLA -A*01:01
NTDQLFTVN

SEQ ID NO: 2213 - protein, 10 aa, Homo sapiens
  Table 1.2; DCAF4L2; ENSG00000176566; HLA -A*23:01,HLA-A*25:01,HLA-A*26:01,HLA-A*32:01,HLA-B*35:01, HLA-B*46:01,HLA-B*58:01
NVVTGHQQSF

SEQ ID NO: 2214 - protein, 9 aa, Homo sapiens
  Table 1.2; DCAF4L2; ENSG00000176566; HLA -A*23:01,HLA-A*24:02
QFAIMTPLL

SEQ ID NO: 2215 - protein, 10 aa, Homo sapiens
  Table 1.2; DCAF4L2; ENSG00000176566; HLA -A*23:01,HLA-A*24:02
QFAIMTPLLF

SEQ ID NO: 2216 - protein, 8 aa, Homo sapiens
  Table 1.2; DCAF4L2; ENSG00000176566; HLA -B*35:03,HLA-C*14:02
QFLVSSDM

SEQ ID NO: 2217 - protein, 9 aa, Homo sapiens
  Table 1.2; DCAF4L2; ENSG00000176566; HLA -B*38:01
QILQDGQFL

SEQ ID NO: 2218 - protein, 10 aa, Homo sapiens
  Table 1.2; DCAF4L2; ENSG00000176566; HLA -A*25:01
QIPDAWSCAW

SEQ ID NO: 2219 - protein, 8 aa, Homo sapiens
  Table 1.2; DCAF4L2; ENSG00000176566; HLA -A*02:01,HLA-A*02:03,HLA-A*02:04,HLA-B*13:02,HLA-B*55:01
QLFTVNQV

SEQ ID NO: 2220 - protein, 10 aa, Homo sapiens
  Table 1.2; DCAF4L2; ENSG00000176566; HLA -A*02:01,HLA-A*02:03,HLA-B*56:01
QLFTVNQVEA

SEQ ID NO: 2221 - protein, 9 aa, Homo sapiens
  Table 1.2; DCAF4L2; ENSG00000176566; HLA -B*13:02,HLA-B*15:01,HLA-B*15:03,HLA-B*27:05
QQFAIMTPL

SEQ ID NO: 2222 - protein, 11 aa, Homo sapiens
  Table 1.2; DCAF4L2; ENSG00000176566; HLA -B*27:05,HLA-B*38:01,HLA-B*39:01
QQSFGTSSDVL

SEQ ID NO: 2223 - protein, 8 aa, Homo sapiens
  Table 1.2; DCAF4L2; ENSG00000176566; HLA -B*13:02
QQVLLTNV

SEQ ID NO: 2224 - protein, 9 aa, Homo sapiens
  Table 1.2; DCAF4L2; ENSG00000176566; HLA -B*13:02,HLA-B*39:01
QQVLLTNVV

SEQ ID NO: 2225 - protein, 10 aa, Homo sapiens
  Table 1.2; DCAF4L2; ENSG00000176566; HLA -B*39:01,HLA-B*40:01
QSFGTSSDVL

SEQ ID NO: 2226 - protein, 9 aa, Homo sapiens
  Table 1.2; DCAF4L2; ENSG00000176566; HLA -A*01:01,HLA-A*25:01,HLA-A*26:01,HLA-A*29:02,HLA-A*30:02, HLA-A*32:01,HLA-B*15:01,HLA-B*15:03,HLA-B*35:01,HLA-B*58:01, HLA-C*07:04
QVEAGGSKY

SEQ ID NO: 2227 - protein, 11 aa, Homo sapiens
  Table 1.2; DCAF4L2; ENSG00000176566; HLA -A*30:02
QYEGHVNNSAY

SEQ ID NO: 2228 - protein, 9 aa, Homo sapiens
  Table 1.2; DCAF4L2; ENSG00000176566; HLA -A*30:02,HLA-B*15:01,HLA-B*58:01,HLA-C*16:02
RATKCVTQY

SEQ ID NO: 2229 - protein, 9 aa, Homo sapiens
  Table 1.2; DCAF4L2; ENSG00000176566; HLA -B*44:03
REDLYCFSY

SEQ ID NO: 2230 - protein, 8 aa, Homo sapiens
  Table 1.2; DCAF4L2; ENSG00000176566; HLA -B*37:01
RELRVSCM

SEQ ID NO: 2231 - protein, 11 aa, Homo sapiens
  Table 1.2; DCAF4L2; ENSG00000176566; HLA -A*31:01
RGAPGLLMAVR

SEQ ID NO: 2232 - protein, 9 aa, Homo sapiens
  Table 1.2; DCAF4L2; ENSG00000176566; HLA -A*31:01
RGLTTPELR

SEQ ID NO: 2233 - protein, 11 aa, Homo sapiens
  Table 1.2; DCAF4L2; ENSG00000176566; HLA -A*30:02,HLA-B*57:01
RGLTTPELRVY

SEQ ID NO: 2234 - protein, 10 aa, Homo sapiens
  Table 1.2; DCAF4L2; ENSG00000176566; HLA -A*03:02
RLLEEADKQK

SEQ ID NO: 2235 - protein, 11 aa, Homo sapiens
  Table 1.2; DCAF4L2; ENSG00000176566; HLA -A*03:01,HLA-A*31:01
RVGLNAPSMLR

SEQ ID NO: 2236 - protein, 9 aa, Homo sapiens
  Table 1.2; DCAF4L2; ENSG00000176566; HLA -A*03:01,HLA-A*29:02,HLA-A*30:02,HLA-A*32:01,HLA-B*15:01, HLA-B*57:01,HLA-C*02:02
RVYPHKTLY

SEQ ID NO: 2237 - protein, 10 aa, Homo sapiens
  Table 1.2; DCAF4L2; ENSG00000176566; HLA -A*02:03,HLA-A*03:01
RVYPHKTLYV

SEQ ID NO: 2238 - protein, 8 aa, Homo sapiens
  Table 1.2; DCAF4L2; ENSG00000176566; HLA -B*51:01
SAVTSLQI

SEQ ID NO: 2239 - protein, 9 aa, Homo sapiens
  Table 1.2; DCAF4L2; ENSG00000176566; HLA -A*30:01,HLA-B*35:03,HLA-B*40:01,HLA-B*46:01,HLA-B*58:01, HLA-C*02:02,HLA-C*03:03,HLA-C*03:04,HLA-C*12:03,HLA-C*16:02
SAVTSLQIL

SEQ ID NO: 2240 - protein, 8 aa, Homo sapiens
  Table 1.2; DCAF4L2; ENSG00000176566; HLA -A*68:02,HLA-B*08:01,HLA-B*13:02,HLA-B*51:01,HLA-B*54:01, HLA-B*56:01,HLA-C*02:02,HLA-C*12:03
SAYLPVHV

SEQ ID NO: 2241 - protein, 9 aa, Homo sapiens
  Table 1.2; DCAF4L2; ENSG00000176566; HLA -B*54:01,HLA-C*12:03
SAYLPVHVN

SEQ ID NO: 2242 - protein, 9 aa, Homo sapiens
  Table 1.2; DCAF4L2; ENSG00000176566; HLA -A*30:01,HLA-B*37:01,HLA-B*40:01
SDMTGTIKL

SEQ ID NO: 2243 - protein, 10 aa, Homo sapiens
  Table 1.2; DCAF4L2; ENSG00000176566; HLA -B*44:02,HLA-B*44:03
SDMTGTIKLW

SEQ ID NO: 2244 - protein, 8 aa, Homo sapiens
  Table 1.2; DCAF4L2; ENSG00000176566; HLA -A*30:01,HLA-B*18:01,HLA-B*27:02,HLA-B*37:01,HLA-B*40:02, HLA-B*44:02,HLA-B*44:03,HLA-C*04:01
SDVLAQQF

SEQ ID NO: 2245 - protein, 8 aa, Homo sapiens
  Table 1.2; DCAF4L2; ENSG00000176566; HLA -A*30:01,HLA-B*18:01,HLA-B*37:01,HLA-B*49:01
SENDIPSV

SEQ ID NO: 2246 - protein, 9 aa, Homo sapiens
  Table 1.2; DCAF4L2; ENSG00000176566; HLA -A*30:01,HLA-B*18:01,HLA-B*49:01
SENDIPSVA

SEQ ID NO: 2247 - protein, 10 aa, Homo sapiens
  Table 1.2; DCAF4L2; ENSG00000176566; HLA -A*23:01,HLA-A*25:01,HLA-A*30:01,HLA-B*15:03,HLA-B*18:01, HLA-B*27:02,HLA-B*37:01,HLA-B*38:01,HLA-B*40:01,HLA-B*40:02, HLA-B*44:02,HLA-B*44:03,HLA-B*49:01,HLA-C*16:04
SENDIPSVAF

SEQ ID NO: 2248 - protein, 9 aa, Homo sapiens
  Table 1.2; DCAF4L2; ENSG00000176566; HLA -A*02:07,HLA-B*27:05,HLA-B*35:03,HLA-B*38:01,HLA-B*39:01, HLA-B*40:01,HLA-C*05:01
SHDSAVTSL

SEQ ID NO: 2249 - protein, 11 aa, Homo sapiens
  Table 1.2; DCAF4L2; ENSG00000176566; HLA -B*38:01
SHDSAVTSLQI

SEQ ID NO: 2250 - protein, 8 aa, Homo sapiens
  Table 1.2; DCAF4L2; ENSG00000176566; HLA -B*15:03
SKYGIITM

SEQ ID NO: 2251 - protein, 9 aa, Homo sapiens
  Table 1.2; DCAF4L2; ENSG00000176566; HLA -A*31:01
SKYGIITMR

SEQ ID NO: 2252 - protein, 10 aa, Homo sapiens
  Table 1.2; DCAF4L2; ENSG00000176566; HLA -A*02:03
SLASDRFNRI

SEQ ID NO: 2253 - protein, 10 aa, Homo sapiens
  Table 1.2; DCAF4L2; ENSG00000176566; HLA -A*02:01,HLA-A*02:03,HLA-A*02:04,HLA-A*26:01
SLFIGSFPGM

SEQ ID NO: 2254 - protein, 11 aa, Homo sapiens
  Table 1.2; DCAF4L2; ENSG00000176566; HLA -A*31:01
SLFIGSFPGMR

SEQ ID NO: 2255 - protein, 9 aa, Homo sapiens
  Table 1.2; DCAF4L2; ENSG00000176566; HLA -A*02:04
SLNHLDSHL

SEQ ID NO: 2256 - protein, 11 aa, Homo sapiens
  Table 1.2; DCAF4L2; ENSG00000176566; HLA -A*02:04
SLNHLDSHLLL

SEQ ID NO: 2257 - protein, 8 aa, Homo sapiens
  Table 1.2; DCAF4L2; ENSG00000176566; HLA -B*08:01
SMLRKNQL

SEQ ID NO: 2258 - protein, 9 aa, Homo sapiens
  Table 1.2; DCAF4L2; ENSG00000176566; HLA -A*02:01,HLA-A*02:03,HLA-A*02:04,HLA-B*13:02
SQQVLLTNV

SEQ ID NO: 2259 - protein, 8 aa, Homo sapiens
  Table 1.2; DCAF4L2; ENSG00000176566; HLA -C*05:01
SSDMTGTI

SEQ ID NO: 2260 - protein, 11 aa, Homo sapiens
  Table 1.2; DCAF4L2; ENSG00000176566; HLA -B*44:02
SSDMTGTIKLW

SEQ ID NO: 2261 - protein, 9 aa, Homo sapiens
  Table 1.2; DCAF4L2; ENSG00000176566; HLA -A*01:01,HLA-A*02:07,HLA-A*32:01,HLA-B*38:01,HLA-B*58:01, HLA-C*04:01,HLA-C*05:01
SSDVLAQQF

SEQ ID NO: 2262 - protein, 9 aa, Homo sapiens
  Table 1.2; DCAF4L2; ENSG00000176566; HLA -A*23:01
TGLSQQVLL

SEQ ID NO: 2263 - protein, 8 aa, Homo sapiens
  Table 1.2; DCAF4L2; ENSG00000176566; HLA -A*03:01
TLYVPNRK

SEQ ID NO: 2264 - protein, 9 aa, Homo sapiens
  Table 1.2; DCAF4L2; ENSG00000176566; HLA -A*02:03
TLYVPNRKV

SEQ ID NO: 2265 - protein, 11 aa, Homo sapiens
  Table 1.2; DCAF4L2; ENSG00000176566; HLA -A*31:01
TMRGLTTPELR

SEQ ID NO: 2266 - protein, 9 aa, Homo sapiens
  Table 1.2; DCAF4L2; ENSG00000176566; HLA -A*68:02
TNTDQLFTV

SEQ ID NO: 2267 - protein, 10 aa, Homo sapiens
  Table 1.2; DCAF4L2; ENSG00000176566; HLA -B*54:01
TPSCAVLLPA

SEQ ID NO: 2268 - protein, 9 aa, Homo sapiens
  Table 1.2; DCAF4L2; ENSG00000176566; HLA -B*27:05
TQYEGHVNN

SEQ ID NO: 2269 - protein, 10 aa, Homo sapiens
  Table 1.2; DCAF4L2; ENSG00000176566; HLA -A*02:03
TQYEGHVNNS

SEQ ID NO: 2270 - protein, 9 aa, Homo sapiens
  Table 1.2; DCAF4L2; ENSG00000176566; HLA -A*68:01
TSSDVLAQQ

SEQ ID NO: 2271 - protein, 10 aa, Homo sapiens
  Table 1.2; DCAF4L2; ENSG00000176566; HLA -A*23:01,HLA-A*24:02,HLA-A*25:01,HLA-A*26:01,HLA-A*29:02, HLA-A*30:02,HLA-A*32:01,HLA-A*33:03,HLA-A*68:01,HLA-A*68:02, HLA-B*18:01,HLA-B*27:02,HLA-B*27:05,HLA-B*35:01,HLA-B*38:01,
  HLA-B*39:01,HLA-B*44:02,HLA-B*44:03,HLA-B*57:01,HLA-B*58:01, HLA-C*07:06
TSSDVLAQQF

SEQ ID NO: 2272 - protein, 9 aa, Homo sapiens
  Table 1.2; DCAF4L2; ENSG00000176566; HLA -A*02:01,HLA-A*31:01,HLA-A*68:01,HLA-A*68:02,HLA-B*54:01, HLA-B*56:01,HLA-B*57:01
TTIPSPYPA

SEQ ID NO: 2273 - protein, 11 aa, Homo sapiens
  Table 1.2; DCAF4L2; ENSG00000176566; HLA -A*03:01,HLA-A*03:02,HLA-A*11:01,HLA-A*68:01
TVNQVEAGGSK

SEQ ID NO: 2274 - protein, 9 aa, Homo sapiens
  Table 1.2; DCAF4L2; ENSG00000176566; HLA -A*01:01,HLA-A*30:02,HLA-B*15:01,HLA-B*15:03,HLA-B*35:01, HLA-B*39:01,HLA-B*46:01,HLA-B*58:01,HLA-C*02:02,HLA-C*16:01
VAAVGQDCY

SEQ ID NO: 2275 - protein, 10 aa, Homo sapiens
  Table 1.2; DCAF4L2; ENSG00000176566; HLA -C*02:02
VAFSSRLGGF

SEQ ID NO: 2276 - protein, 8 aa, Homo sapiens
  Table 1.2; DCAF4L2; ENSG00000176566; HLA -A*32:01,HLA-B*15:03,HLA-B*18:01,HLA-B*37:01,HLA-B*39:01, HLA-B*44:02,HLA-B*44:03
VEAGGSKY

SEQ ID NO: 2277 - protein, 10 aa, Homo sapiens
  Table 1.2; DCAF4L2; ENSG00000176566; HLA -B*44:02,HLA-B*44:03,HLA-B*49:01
VEAGGSKYGI

SEQ ID NO: 2278 - protein, 9 aa, Homo sapiens
  Table 1.2; DCAF4L2; ENSG00000176566; HLA -A*02:01
VGLADTPSC

SEQ ID NO: 2279 - protein, 8 aa, Homo sapiens
  Table 1.2; DCAF4L2; ENSG00000176566; HLA -B*39:01,HLA-B*46:01,HLA-B*51:01,HLA-C*14:02,HLA-C*16:01
VGLNAPSM

SEQ ID NO: 2280 - protein, 9 aa, Homo sapiens
  Table 1.2; DCAF4L2; ENSG00000176566; HLA -A*23:01,HLA-C*03:03
VGLNAPSML

SEQ ID NO: 2281 - protein, 9 aa, Homo sapiens
  Table 1.2; DCAF4L2; ENSG00000176566; HLA -B*38:01,HLA-B*39:01
VHVNEEEGV

SEQ ID NO: 2282 - protein, 10 aa, Homo sapiens
  Table 1.2; DCAF4L2; ENSG00000176566; HLA -B*39:01
VHVNEEEGVV

SEQ ID NO: 2283 - protein, 11 aa, Homo sapiens
  Table 1.2; DCAF4L2; ENSG00000176566; HLA -B*38:01,HLA-B*39:01
VHVNEEEGVVA

SEQ ID NO: 2284 - protein, 8 aa, Homo sapiens
  Table 1.2; DCAF4L2; ENSG00000176566; HLA -B*13:02
VLAQQFAI

SEQ ID NO: 2285 - protein, 9 aa, Homo sapiens
  Table 1.2; DCAF4L2; ENSG00000176566; HLA -A*24:02
VLAQQFAIM

SEQ ID NO: 2286 - protein, 8 aa, Homo sapiens
  Table 1.2; DCAF4L2; ENSG00000176566; HLA -A*23:01
VLLPASLF

SEQ ID NO: 2287 - protein, 9 aa, Homo sapiens
  Table 1.2; DCAF4L2; ENSG00000176566; HLA -A*02:01,HLA-A*02:03,HLA-A*02:04,HLA-A*02:07,HLA-A*23:01, HLA-A*24:02,HLA-B*13:02
VLLPASLFI

SEQ ID NO: 2288 - protein, 9 aa, Homo sapiens
  Table 1.2; DCAF4L2; ENSG00000176566; HLA -A*02:01,HLA-A*02:04
VLLTNVVTG

SEQ ID NO: 2289 - protein, 10 aa, Homo sapiens
  Table 1.2; DCAF4L2; ENSG00000176566; HLA -A*03:01
VLLTNVVTGH

SEQ ID NO: 2290 - protein, 11 aa, Homo sapiens
  Table 1.2; DCAF4L2; ENSG00000176566; HLA -A*30:02
VNQVEAGGSKY

SEQ ID NO: 2291 - protein, 9 aa, Homo sapiens
  Table 1.2; DCAF4L2; ENSG00000176566; HLA -B*07:02,HLA-B*08:01,HLA-B*35:01,HLA-B*35:03,HLA-B*51:01, HLA-B*55:01,HLA-B*56:01,HLA-C*07:02,HLA-C*14:02
VPNRKVNSM

SEQ ID NO: 2292 - protein, 10 aa, Homo sapiens
  Table 1.2; DCAF4L2; ENSG00000176566; HLA -B*27:02
VRVGLNAPSM

SEQ ID NO: 2293 - protein, 9 aa, Homo sapiens
  Table 1.2; DCAF4L2; ENSG00000176566; HLA -B*13:02,HLA-B*58:01
VSSDMTGTI

SEQ ID NO: 2294 - protein, 10 aa, Homo sapiens
  Table 1.2; DCAF4L2; ENSG00000176566; HLA -A*03:01,HLA-A*03:02,HLA-A*11:01
VSSDMTGTIK

SEQ ID NO: 2295 - protein, 8 aa, Homo sapiens
  Table 1.2; DCAF4L2; ENSG00000176566; HLA -A*32:01,HLA-B*57:01,HLA-B*58:01
VTGHQQSF

SEQ ID NO: 2296 - protein, 10 aa, Homo sapiens
  Table 1.2; DCAF4L2; ENSG00000176566; HLA -A*01:01,HLA-A*26:01,HLA-A*29:02,HLA-A*30:02,HLA-A*32:01, HLA-B*15:01,HLA-B*15:03,HLA-B*27:05,HLA-B*58:01
VVAAVGQDCY

SEQ ID NO: 2297 - protein, 9 aa, Homo sapiens
  Table 1.2; DCAF4L2; ENSG00000176566; HLA -A*23:01,HLA-A*24:02,HLA-A*25:01,HLA-A*26:01,HLA-A*29:02, HLA-A*30:02,HLA-A*32:01,HLA-A*33:03,HLA-B*07:02,HLA-B*08:01, HLA-B*13:02,HLA-B*15:01,HLA-B*15:03,HLA-B*27:02,HLA-B*27:05,
  HLA-B*35:01,HLA-B*37:01,HLA-B*44:02,HLA-B*44:03,HLA-B*46:01, HLA-B*57:01,HLA-B*58:01,HLA-C*02:02,HLA-C*03:03,HLA-C*03:04, HLA-C*04:01,HLA-C*07:02,HLA-C*07:04,HLA-C*12:03,HLA-C*14:02, HLA-C*16:01,HLA-C*16:02,HLA-C*16:04
VVTGHQQSF

SEQ ID NO: 2298 - protein, 9 aa, Homo sapiens
  Table 1.2; DCAF4L2; ENSG00000176566; HLA -A*24:02
VYPHKTLYV

SEQ ID NO: 2299 - protein, 8 aa, Homo sapiens
  Table 1.2; DCAF4L2; ENSG00000176566; HLA -A*30:02
WSLSIHAY

SEQ ID NO: 2300 - protein, 9 aa, Homo sapiens
  Table 1.2; DCAF4L2; ENSG00000176566; HLA -A*30:01,HLA-B*18:01,HLA-B*40:01,HLA-B*40:02,HLA-B*49:01, HLA-B*54:01
YEGHVNNSA

SEQ ID NO: 2301 - protein, 10 aa, Homo sapiens
  Table 1.2; DCAF4L2; ENSG00000176566; HLA -A*30:02,HLA-B*18:01,HLA-B*44:02,HLA-B*44:03,HLA-C*16:04
YEGHVNNSAY

SEQ ID NO: 2302 - protein, 8 aa, Homo sapiens
  Table 1.2; DCAF4L2; ENSG00000176566; HLA -B*38:01,HLA-B*39:01,HLA-C*07:04
YHSFSTGL

SEQ ID NO: 2303 - protein, 11 aa, Homo sapiens
  Table 1.2; DCAF4L2; ENSG00000176566; HLA -B*35:01,HLA-B*35:03,HLA-B*54:01,HLA-B*55:01,HLA-B*56:01
YPASENDIPSV

SEQ ID NO: 2304 - protein, 8 aa, Homo sapiens
  Table 1.2; DCAF4L2; ENSG00000176566; HLA -B*51:01,HLA-B*54:01
YPHKTLYV

SEQ ID NO: 2305 - protein, 9 aa, Homo sapiens
  Table 1.2; DCAF4L2; ENSG00000176566; HLA -B*54:01
YPHKTLYVP

SEQ ID NO: 2306 - protein, 10 aa, Homo sapiens
  Table 1.2; DCAF4L2; ENSG00000176566; HLA -A*25:01,HLA-A*26:01,HLA-B*08:01
YVPNRKVNSM

SEQ ID NO: 2307 - protein, 9 aa, Homo sapiens
  Table 1.2; DEFB126; ENSG00000125788; HLA -A*23:01,HLA-A*24:02,HLA-A*30:01,HLA-A*32:01,HLA-B*07:02, HLA-B*13:02,HLA-B*27:05,HLA-B*35:01,HLA-B*35:03,HLA-B*40:02, HLA-B*51:01,HLA-B*54:01,HLA-B*55:01,HLA-B*56:01,HLA-B*57:01,
  HLA-B*58:01,HLA-C*04:01,HLA-C*06:02,HLA-C*07:02,HLA-C*16:01, HLA-C*16:02
APTPVSPTG

SEQ ID NO: 2308 - protein, 9 aa, Homo sapiens
  Table 1.2; DEFB126; ENSG00000125788; HLA -A*30:02,HLA-B*15:01,HLA-B*15:03
AQLVSGNWY

SEQ ID NO: 2309 - protein, 9 aa, Homo sapiens
  Table 1.2; DEFB126; ENSG00000125788; HLA -A*01:01,HLA-A*26:01,HLA-A*29:02,HLA-A*32:01,HLA-B*58:01
ATTATTTLM

SEQ ID NO: 2310 - protein, 9 aa, Homo sapiens
  Table 1.2; DEFB126; ENSG00000125788; HLA -A*02:04
AVFMLLAQL

SEQ ID NO: 2311 - protein, 9 aa, Homo sapiens
  Table 1.2; DEFB126; ENSG00000125788; HLA -A*03:01,HLA-A*03:02,HLA-A*11:01
CLNDVGICK

SEQ ID NO: 2312 - protein, 10 aa, Homo sapiens
  Table 1.2; DEFB126; ENSG00000125788; HLA -A*03:01,HLA-A*03:02,HLA-A*11:01
CLNDVGICKK

SEQ ID NO: 2313 - protein, 9 aa, Homo sapiens
  Table 1.2; DEFB126; ENSG00000125788; HLA -B*27:02,HLA-B*44:02,HLA-B*44:03,HLA-C*16:04
EEMHVKNGW

SEQ ID NO: 2314 - protein, 9 aa, Homo sapiens
  Table 1.2; DEFB126; ENSG00000125788; HLA -A*02:01,HLA-A*02:07,HLA-A*29:02,HLA-A*68:02
FTLAVFMLL

SEQ ID NO: 2315 - protein, 10 aa, Homo sapiens
  Table 1.2; DEFB126; ENSG00000125788; HLA -A*03:01,HLA-A*03:02,HLA-A*11:01
KCLNDVGICK

SEQ ID NO: 2316 - protein, 10 aa, Homo sapiens
  Table 1.2; DEFB126; ENSG00000125788; HLA -B*57:01
KSLLFTLAVF

SEQ ID NO: 2317 - protein, 9 aa, Homo sapiens
  Table 1.2; DEFB126; ENSG00000125788; HLA -A*32:01
KTTRISTVT

SEQ ID NO: 2318 - protein, 9 aa, Homo sapiens
  Table 1.2; DEFB126; ENSG00000125788; HLA -B*57:01
LAQLVSGNW

SEQ ID NO: 2319 - protein, 10 aa, Homo sapiens
  Table 1.2; DEFB126; ENSG00000125788; HLA -A*02:04
LLFTLAVFML

SEQ ID NO: 2320 - protein, 8 aa, Homo sapiens
  Table 1.2; DEFB126; ENSG00000125788; HLA -B*46:01,HLA-C*14:02
LMMTTASM

SEQ ID NO: 2321 - protein, 9 aa, Homo sapiens
  Table 1.2; DEFB126; ENSG00000125788; HLA -A*25:01,HLA-A*26:01,HLA-B*46:01,HLA-C*03:04
MTTASMSSM

SEQ ID NO: 2322 - protein, 8 aa, Homo sapiens
  Table 1.2; DEFB126; ENSG00000125788; HLA -B*07:02
PTPVSPTG

SEQ ID NO: 2323 - protein, 9 aa, Homo sapiens
  Table 1.2; DEFB126; ENSG00000125788; HLA -A*02:01,HLA-A*02:04,HLA-B*13:02
QLVSGNWYV

SEQ ID NO: 2324 - protein, 9 aa, Homo sapiens
  Table 1.2; DEFB126; ENSG00000125788; HLA -A*32:01
QTKTTRIST

SEQ ID NO: 2325 - protein, 9 aa, Homo sapiens
  Table 1.2; DEFB126; ENSG00000125788; HLA -A*02:01,HLA-A*02:03,HLA-A*03:01,HLA-A*32:01
SMAPTPVSP

SEQ ID NO: 2326 - protein, 11 aa, Homo sapiens
  Table 1.2; DEFB126; ENSG00000125788; HLA -A*02:01,HLA-C*04:01
SMAPTPVSPTG

SEQ ID NO: 2327 - protein, 10 aa, Homo sapiens
  Table 1.2; DEFB126; ENSG00000125788; HLA -A*02:01,HLA-A*02:03
SMSSMAPTPV

SEQ ID NO: 2328 - protein, 9 aa, Homo sapiens
  Table 1.2; DEFB126; ENSG00000125788; HLA -A*23:01,HLA-A*25:01,HLA-A*30:01,HLA-A*32:01,HLA-B*07:02, HLA-B*15:01,HLA-B*15:03,HLA-B*35:01,HLA-B*35:03,HLA-B*38:01, HLA-B*39:01,HLA-B*40:01,HLA-B*46:01,HLA-B*51:01,HLA-B*58:01,
  HLA-C*01:02,HLA-C*02:02,HLA-C*03:03,HLA-C*03:04,HLA-C*05:01, HLA-C*07:06,HLA-C*12:03,HLA-C*14:02,HLA-C*16:01,HLA-C*16:02
TATTATTTL

SEQ ID NO: 2329 - protein, 8 aa, Homo sapiens
  Table 1.2; DEFB126; ENSG00000125788; HLA -B*35:01,HLA-B*35:03,HLA-B*51:01
TATTTLMM

SEQ ID NO: 2330 - protein, 9 aa, Homo sapiens
  Table 1.2; DEFB126; ENSG00000125788; HLA -A*32:01,HLA-B*07:02,HLA-B*08:01,HLA-B*15:01,HLA-B*15:03, HLA-B*35:03,HLA-B*46:01,HLA-C*07:04,HLA-C*14:02
TLMMTTASM

SEQ ID NO: 2331 - protein, 9 aa, Homo sapiens
  Table 1.2; DEFB126; ENSG00000125788; HLA -B*27:05
TRISTVTAT

SEQ ID NO: 2332 - protein, 9 aa, Homo sapiens
  Table 1.2; DEFB126; ENSG00000125788; HLA -A*01:01,HLA-A*26:01,HLA-A*68:01
TTATTTLMM

SEQ ID NO: 2333 - protein, 9 aa, Homo sapiens
  Table 1.2; DEFB126; ENSG00000125788; HLA -B*40:02
TTRISTVTA

SEQ ID NO: 2334 - protein, 9 aa, Homo sapiens
  Table 1.2; DEFB126; ENSG00000125788; HLA -B*54:01,HLA-B*56:01
TTTLMMTTA

SEQ ID NO: 2335 - protein, 11 aa, Homo sapiens
  Table 1.2; DEFB126; ENSG00000125788; HLA -B*39:01
TVTATTATTTL

SEQ ID NO: 2336 - protein, 8 aa, Homo sapiens
  Table 1.2; DEFB126; ENSG00000125788; HLA -A*23:01
VFMLLAQL

SEQ ID NO: 2337 - protein, 9 aa, Homo sapiens
  Table 1.2; DEFB126; ENSG00000125788; HLA -B*07:02,HLA-C*16:01
VPADRRANY

SEQ ID NO: 2338 - protein, 8 aa, Homo sapiens
  Table 1.2; DEFB126; ENSG00000125788; HLA -B*13:02
VQTKTTRI

SEQ ID NO: 2339 - protein, 9 aa, Homo sapiens
  Table 1.2; DEFB126; ENSG00000125788; HLA -A*03:02,HLA-A*11:01
VSGNWYVKK

SEQ ID NO: 2340 - protein, 10 aa, Homo sapiens
  Table 1.2; DEFB126; ENSG00000125788; HLA -B*58:01,HLA-C*01:02
VTATTATTTL

SEQ ID NO: 2341 - protein, 9 aa, Homo sapiens
  Table 1.2; DMRT1; ENSG00000137090; HLA -C*05:01
AADSASGEV

SEQ ID NO: 2342 - protein, 8 aa, Homo sapiens
  Table 1.2; DMRT1; ENSG00000137090; HLA -C*16:01,HLA-C*16:02
AASEGRMV

SEQ ID NO: 2343 - protein, 9 aa, Homo sapiens
  Table 1.2; DMRT1; ENSG00000137090; HLA -A*32:01,HLA-B*07:02,HLA-B*13:02,HLA-B*38:01,HLA-B*46:01, HLA-B*51:01,HLA-B*58:01,HLA-C*02:02,HLA-C*03:03,HLA-C*03:04, HLA-C*07:02,HLA-C*12:03,HLA-C*16:01,HLA-C*16:02
AASEGRMVI

SEQ ID NO: 2344 - protein, 8 aa, Homo sapiens
  Table 1.2; DMRT1; ENSG00000137090; HLA -B*37:01
ADSASGEV

SEQ ID NO: 2345 - protein, 9 aa, Homo sapiens
  Table 1.2; DMRT1; ENSG00000137090; HLA -B*37:01,HLA-B*40:02
AERQRVMAA

SEQ ID NO: 2346 - protein, 11 aa, Homo sapiens
  Table 1.2; DMRT1; ENSG00000137090; HLA -A*02:01,HLA-A*02:03
ALAADSASGEV

SEQ ID NO: 2347 - protein, 11 aa, Homo sapiens
  Table 1.2; DMRT1; ENSG00000137090; HLA -A*02:03
ALVGAASGSSA

SEQ ID NO: 2348 - protein, 8 aa, Homo sapiens
  Table 1.2; DMRT1; ENSG00000137090; HLA -B*37:01
AMSSQYRM

SEQ ID NO: 2349 - protein, 9 aa, Homo sapiens
  Table 1.2; DMRT1; ENSG00000137090; HLA -A*68:01
APGVPPQGR

SEQ ID NO: 2350 - protein, 9 aa, Homo sapiens
  Table 1.2; DMRT1; ENSG00000137090; HLA -B*07:02,HLA-B*54:01,HLA-B*56:01
APHAPGVPP

SEQ ID NO: 2351 - protein, 9 aa, Homo sapiens
  Table 1.2; DMRT1; ENSG00000137090; HLA -B*54:01,HLA-B*55:01,HLA-B*56:01
APSYPEARA

SEQ ID NO: 2352 - protein, 11 aa, Homo sapiens
  Table 1.2; DMRT1; ENSG00000137090; HLA -B*07:02,HLA-B*56:01,HLA-C*07:02
APSYPEARASV

SEQ ID NO: 2353 - protein, 9 aa, Homo sapiens
  Table 1.2; DMRT1; ENSG00000137090; HLA -A*01:01,HLA-A*11:01
ASDLGAGSK

SEQ ID NO: 2354 - protein, 10 aa, Homo sapiens
  Table 1.2; DMRT1; ENSG00000137090; HLA -A*01:01,HLA-A*03:01,HLA-A*03:02,HLA-A*11:01
ASDLGAGSKK

SEQ ID NO: 2355 - protein, 9 aa, Homo sapiens
  Table 1.2; DMRT1; ENSG00000137090; HLA -B*07:02,HLA-B*39:01,HLA-B*46:01,HLA-B*58:01,HLA-C*01:02, HLA-C*03:03,HLA-C*03:04
ASGEVGNPL

SEQ ID NO: 2356 - protein, 10 aa, Homo sapiens
  Table 1.2; DMRT1; ENSG00000137090; HLA -A*30:01,HLA-B*37:01,HLA-B*39:01,HLA-B*40:01,HLA-B*44:03
CEPASEPSSF

SEQ ID NO: 2357 - protein, 8 aa, Homo sapiens
  Table 1.2; DMRT1; ENSG00000137090; HLA -B*07:02
CPQYSMAL

SEQ ID NO: 2358 - protein, 9 aa, Homo sapiens
  Table 1.2; DMRT1; ENSG00000137090; HLA -B*56:01
CPQYSMALA

SEQ ID NO: 2359 - protein, 10 aa, Homo sapiens
  Table 1.2; DMRT1; ENSG00000137090; HLA -B*56:01
CPQYSMALAA

SEQ ID NO: 2360 - protein, 8 aa, Homo sapiens
  Table 1.2; DMRT1; ENSG00000137090; HLA -B*51:01
DAPSYPEA

SEQ ID NO: 2361 - protein, 9 aa, Homo sapiens
  Table 1.2; DMRT1; ENSG00000137090; HLA -A*33:01,HLA-A*33:03,HLA-A*68:01,HLA-A*68:02,HLA-B*51:01, HLA-C*07:06
DAPSYPEAR

SEQ ID NO: 2362 - protein, 10 aa, Homo sapiens
  Table 1.2; DMRT1; ENSG00000137090; HLA -B*51:01
DAPSYPEARA

SEQ ID NO: 2363 - protein, 9 aa, Homo sapiens
  Table 1.2; DMRT1; ENSG00000137090; HLA -B*18:01
DEAFSKPST

SEQ ID NO: 2364 - protein, 11 aa, Homo sapiens
  Table 1.2; DMRT1; ENSG00000137090; HLA -A*33:01
DLGAGSKKSPR

SEQ ID NO: 2365 - protein, 9 aa, Homo sapiens
  Table 1.2; DMRT1; ENSG00000137090; HLA -A*01:01,HLA-A*25:01,HLA-A*26:01,HLA-B*15:03
DLVSDSTYY

SEQ ID NO: 2366 - protein, 11 aa, Homo sapiens
  Table 1.2; DMRT1; ENSG00000137090; HLA -A*26:01,HLA-A*33:01,HLA-A*68:01,HLA-A*68:02,HLA-B*38:01, HLA-B*39:01
DSASGEVGNPL

SEQ ID NO: 2367 - protein, 8 aa, Homo sapiens
  Table 1.2; DMRT1; ENSG00000137090; HLA -A*25:01
DSTYYSSF

SEQ ID NO: 2368 - protein, 9 aa, Homo sapiens
  Table 1.2; DMRT1; ENSG00000137090; HLA -A*01:01,HLA-A*26:01
DSTYYSSFY

SEQ ID NO: 2369 - protein, 9 aa, Homo sapiens
  Table 1.2; DMRT1; ENSG00000137090; HLA -A*26:01,HLA-A*33:03
EAFSKPSTP

SEQ ID NO: 2370 - protein, 8 aa, Homo sapiens
  Table 1.2; DMRT1; ENSG00000137090; HLA -B*51:01
EAPHAPGV

SEQ ID NO: 2371 - protein, 10 aa, Homo sapiens
  Table 1.2; DMRT1; ENSG00000137090; HLA -A*33:01,HLA-A*33:03,HLA-A*68:01,HLA-B*27:02
EDAPSYPEAR

SEQ ID NO: 2372 - protein, 8 aa, Homo sapiens
  Table 1.2; DMRT1; ENSG00000137090; HLA -B*18:01
EEELGISH

SEQ ID NO: 2373 - protein, 10 aa, Homo sapiens
  Table 1.2; DMRT1; ENSG00000137090; HLA -B*27:02,HLA-B*40:01,HLA-B*44:02
EEELGISHPI

SEQ ID NO: 2374 - protein, 9 aa, Homo sapiens
  Table 1.2; DMRT1; ENSG00000137090; HLA -B*18:01,HLA-B*44:02,HLA-B*44:03,HLA-B*49:01
EELGISHPI

SEQ ID NO: 2375 - protein, 11 aa, Homo sapiens
  Table 1.2; DMRT1; ENSG00000137090; HLA -A*33:01
ENRHAMSSQYR

SEQ ID NO: 2376 - protein, 9 aa, Homo sapiens
  Table 1.2; DMRT1; ENSG00000137090; HLA -A*25:01,HLA-A*26:01,HLA-B*07:02,HLA-B*35:01,HLA-B*35:03, HLA-B*39:01,HLA-B*55:01
EPASEPSSF

SEQ ID NO: 2377 - protein, 11 aa, Homo sapiens
  Table 1.2; DMRT1; ENSG00000137090; HLA -A*26:01
EVGNPLGGSPV

SEQ ID NO: 2378 - protein, 10 aa, Homo sapiens
  Table 1.2; DMRT1; ENSG00000137090; HLA -A*29:02
FFTFEDAPSY

SEQ ID NO: 2379 - protein, 8 aa, Homo sapiens
  Table 1.2; DMRT1; ENSG00000137090; HLA -B*08:01,HLA-B*40:02,HLA-B*46:01,HLA-C*03:04
FGKASGAL

SEQ ID NO: 2380 - protein, 9 aa, Homo sapiens
  Table 1.2; DMRT1; ENSG00000137090; HLA -A*02:03,HLA-B*40:02,HLA-B*46:01,HLA-C*02:02,HLA-C*12:03
FGKASGALV

SEQ ID NO: 2381 - protein, 11 aa, Homo sapiens
  Table 1.2; DMRT1; ENSG00000137090; HLA -B*54:01
FGKASGALVGA

SEQ ID NO: 2382 - protein, 8 aa, Homo sapiens
  Table 1.2; DMRT1; ENSG00000137090; HLA -B*35:01
FPYYNNLY

SEQ ID NO: 2383 - protein, 9 aa, Homo sapiens
  Table 1.2; DMRT1; ENSG00000137090; HLA -B*46:01
FSKPSTPSE

SEQ ID NO: 2384 - protein, 9 aa, Homo sapiens
  Table 1.2; DMRT1; ENSG00000137090; HLA -A*01:01,HLA-A*11:01,HLA-A*25:01,HLA-A*26:01,HLA-A*29:02, HLA-A*30:02,HLA-A*32:01,HLA-A*68:01,HLA-B*15:01,HLA-B*15:03, HLA-B*18:01,HLA-B*27:05,HLA-B*35:01,HLA-B*39:01,HLA-B*46:01,
  HLA-B*57:01,HLA-B*58:01,HLA-C*02:02,HLA-C*03:03,HLA-C*03:04, HLA-C*07:04,HLA-C*07:06,HLA-C*12:03,HLA-C*16:01,HLA-C*16:04
FTFEDAPSY

SEQ ID NO: 2385 - protein, 9 aa, Homo sapiens
  Table 1.2; DMRT1; ENSG00000137090; HLA -A*24:02,HLA-A*29:02
FYQPSLFPY

SEQ ID NO: 2386 - protein, 10 aa, Homo sapiens
  Table 1.2; DMRT1; ENSG00000137090; HLA -A*24:02,HLA-A*29:02,HLA-A*30:02
FYQPSLFPYY

SEQ ID NO: 2387 - protein, 10 aa, Homo sapiens
  Table 1.2; DMRT1; ENSG00000137090; HLA -A*11:01,HLA-B*27:02
GASDLGAGSK

SEQ ID NO: 2388 - protein, 11 aa, Homo sapiens
  Table 1.2; DMRT1; ENSG00000137090; HLA -A*03:01,HLA-A*03:02,HLA-A*11:01,HLA-B*27:02,HLA-B*27:05
GASDLGAGSKK

SEQ ID NO: 2389 - protein, 9 aa, Homo sapiens
  Table 1.2; DMRT1; ENSG00000137090; HLA -B*49:01
GEVGNPLGG

SEQ ID NO: 2390 - protein, 10 aa, Homo sapiens
  Table 1.2; DMRT1; ENSG00000137090; HLA -B*27:05
GEVGNPLGGS

SEQ ID NO: 2391 - protein, 11 aa, Homo sapiens
  Table 1.2; DMRT1; ENSG00000137090; HLA -B*39:01,HLA-B*40:02,HLA-C*16:04
GEVGNPLGGSP

SEQ ID NO: 2392 - protein, 9 aa, Homo sapiens
  Table 1.2; DMRT1; ENSG00000137090; HLA -A*32:01,HLA-B*07:02,HLA-B*08:01,HLA-B*13:02,HLA-B*15:03, HLA-B*27:05,HLA-B*37:01,HLA-B*38:01,HLA-B*39:01,HLA-B*40:01, HLA-B*58:01,HLA-C*06:02,HLA-C*16:01,HLA-C*16:02
GGSPVKNSL

SEQ ID NO: 2393 - protein, 9 aa, Homo sapiens
  Table 1.2; DMRT1; ENSG00000137090; HLA -B*27:05,HLA-B*38:01,HLA-B*39:01
GHVENTPDL

SEQ ID NO: 2394 - protein, 10 aa, Homo sapiens
  Table 1.2; DMRT1; ENSG00000137090; HLA -B*39:01
GHVENTPDLV

SEQ ID NO: 2395 - protein, 9 aa, Homo sapiens
  Table 1.2; DMRT1; ENSG00000137090; HLA -B*07:02,HLA-B*56:01
GPYVPGQTG

SEQ ID NO: 2396 - protein, 8 aa, Homo sapiens
  Table 1.2; DMRT1; ENSG00000137090; HLA -B*13:02
GQSVPQFF

SEQ ID NO: 2397 - protein, 9 aa, Homo sapiens
  Table 1.2; DMRT1; ENSG00000137090; HLA -B*13:02
GQSVPQFFT

SEQ ID NO: 2398 - protein, 9 aa, Homo sapiens
  Table 1.2; DMRT1; ENSG00000137090; HLA -B*13:02,HLA-B*27:05
GQTGNQWQM

SEQ ID NO: 2399 - protein, 8 aa, Homo sapiens
  Table 1.2; DMRT1; ENSG00000137090; HLA -B*27:05
GRAGGFGK

SEQ ID NO: 2400 - protein, 8 aa, Homo sapiens
  Table 1.2; DMRT1; ENSG00000137090; HLA -B*08:01,HLA-C*01:02
GSPVKNSL

SEQ ID NO: 2401 - protein, 8 aa, Homo sapiens
  Table 1.2; DMRT1; ENSG00000137090; HLA -A*31:01,HLA-A*33:01,HLA-A*33:03,HLA-A*68:01
HAMSSQYR

SEQ ID NO: 2402 - protein, 9 aa, Homo sapiens
  Table 1.2; DMRT1; ENSG00000137090; HLA -B*35:01,HLA-B*35:03,HLA-B*54:01,HLA-B*58:01
HAMSSQYRM

SEQ ID NO: 2403 - protein, 10 aa, Homo sapiens
  Table 1.2; DMRT1; ENSG00000137090; HLA -A*68:01,HLA-C*07:06
HAPGVPPQGR

SEQ ID NO: 2404 - protein, 8 aa, Homo sapiens
  Table 1.2; DMRT1; ENSG00000137090; HLA -A*11:01,HLA-B*51:01,HLA-C*06:02
HGYASPLK

SEQ ID NO: 2405 - protein, 9 aa, Homo sapiens
  Table 1.2; DMRT1; ENSG00000137090; HLA -B*13:02,HLA-C*06:02
HGYASPLKG

SEQ ID NO: 2406 - protein, 8 aa, Homo sapiens
  Table 1.2; DMRT1; ENSG00000137090; HLA -B*51:01,HLA-B*54:01,HLA-B*55:01,HLA-B*56:01
HPIPLPSA

SEQ ID NO: 2407 - protein, 9 aa, Homo sapiens
  Table 1.2; DMRT1; ENSG00000137090; HLA -B*35:03,HLA-B*54:01,HLA-B*55:01,HLA-B*56:01
HPIPLPSAA

SEQ ID NO: 2408 - protein, 11 aa, Homo sapiens
  Table 1.2; DMRT1; ENSG00000137090; HLA -B*35:01,HLA-B*35:03
HPIPLPSAAEL

SEQ ID NO: 2409 - protein, 9 aa, Homo sapiens
  Table 1.2; DMRT1; ENSG00000137090; HLA -A*01:01,HLA-A*03:01,HLA-A*11:01,HLA-A*25:01,HLA-A*26:01, HLA-A*29:02,HLA-A*30:02,HLA-A*31:01,HLA-A*32:01,HLA-A*33:01, HLA-A*68:01,HLA-B*13:02,HLA-B*15:01,HLA-B*15:03,HLA-B*35:01,
  HLA-B*46:01,HLA-B*51:01,HLA-B*54:01,HLA-B*57:01,HLA-B*58:01, HLA-C*02:02,HLA-C*03:03,HLA-C*03:04,HLA-C*12:03,HLA-C*16:01
HSYYPPPSY

SEQ ID NO: 2410 - protein, 10 aa, Homo sapiens
  Table 1.2; DMRT1; ENSG00000137090; HLA -A*03:01,HLA-A*68:02
HSYYPPPSYL

SEQ ID NO: 2411 - protein, 8 aa, Homo sapiens
  Table 1.2; DMRT1; ENSG00000137090; HLA -B*08:01,HLA-C*16:01
IAERQRVM

SEQ ID NO: 2412 - protein, 9 aa, Homo sapiens
  Table 1.2; DMRT1; ENSG00000137090; HLA -A*23:01,HLA-B*07:02,HLA-B*35:01,HLA-B*35:03,HLA-B*51:01, HLA-B*56:01,HLA-C*03:03,HLA-C*03:04,HLA-C*07:02,HLA-C*14:02
IPLPSAAEL

SEQ ID NO: 2413 - protein, 10 aa, Homo sapiens
  Table 1.2; DMRT1; ENSG00000137090; HLA -B*35:03
IPLPSAAELL

SEQ ID NO: 2414 - protein, 11 aa, Homo sapiens
  Table 1.2; DMRT1; ENSG00000137090; HLA -A*23:01,HLA-B*51:01,HLA-B*54:01
IPLPSAAELLV

SEQ ID NO: 2415 - protein, 10 aa, Homo sapiens
  Table 1.2; DMRT1; ENSG00000137090; HLA -B*54:01
ISHPIPLPSA

SEQ ID NO: 2416 - protein, 9 aa, Homo sapiens
  Table 1.2; DMRT1; ENSG00000137090; HLA -A*32:01,HLA-B*55:01,HLA-B*56:01
KASGALVGA

SEQ ID NO: 2417 - protein, 9 aa, Homo sapiens
  Table 1.2; DMRT1; ENSG00000137090; HLA -B*07:02
KPSTPSEAP

SEQ ID NO: 2418 - protein, 10 aa, Homo sapiens
  Table 1.2; DMRT1; ENSG00000137090; HLA -B*39:01
LAADSASGEV

SEQ ID NO: 2419 - protein, 9 aa, Homo sapiens
  Table 1.2; DMRT1; ENSG00000137090; HLA -A*29:02
LFPYYNNLY

SEQ ID NO: 2420 - protein, 9 aa, Homo sapiens
  Table 1.2; DMRT1; ENSG00000137090; HLA -A*32:01
LGAGSKKSP

SEQ ID NO: 2421 - protein, 9 aa, Homo sapiens
  Table 1.2; DMRT1; ENSG00000137090; HLA -B*08:01,HLA-C*16:01
LIAERQRVM

SEQ ID NO: 2422 - protein, 8 aa, Homo sapiens
  Table 1.2; DMRT1; ENSG00000137090; HLA -B*35:03
LPSAAELL

SEQ ID NO: 2423 - protein, 9 aa, Homo sapiens
  Table 1.2; DMRT1; ENSG00000137090; HLA -B*35:03,HLA-B*51:01,HLA-B*54:01,HLA-B*56:01
LPSAAELLV

SEQ ID NO: 2424 - protein, 10 aa, Homo sapiens
  Table 1.2; DMRT1; ENSG00000137090; HLA -A*03:01,HLA-A*03:02,HLA-A*11:01
LSSSSPISNK

SEQ ID NO: 2425 - protein, 8 aa, Homo sapiens
  Table 1.2; DMRT1; ENSG00000137090; HLA -A*30:02,HLA-B*39:01
LVSDSTYY

SEQ ID NO: 2426 - protein, 11 aa, Homo sapiens
  Table 1.2; DMRT1; ENSG00000137090; HLA -A*25:01
LVSDSTYYSSF

SEQ ID NO: 2427 - protein, 9 aa, Homo sapiens
  Table 1.2; DMRT1; ENSG00000137090; HLA -A*24:02
LYNCPQYSM

SEQ ID NO: 2428 - protein, 8 aa, Homo sapiens
  Table 1.2; DMRT1; ENSG00000137090; HLA -A*33:01,HLA-A*33:03,HLA-A*68:01,HLA-B*27:02,HLA-C*07:06
MAAQVALR

SEQ ID NO: 2429 - protein, 9 aa, Homo sapiens
  Table 1.2; DMRT1; ENSG00000137090; HLA -A*33:01,HLA-A*33:03,HLA-A*68:01,HLA-A*68:02,HLA-C*07:06
MAAQVALRR

SEQ ID NO: 2430 - protein, 8 aa, Homo sapiens
  Table 1.2; DMRT1; ENSG00000137090; HLA -B*54:01
MALAADSA

SEQ ID NO: 2431 - protein, 10 aa, Homo sapiens
  Table 1.2; DMRT1; ENSG00000137090; HLA -A*30:02
MSSQYRMHSY

SEQ ID NO: 2432 - protein, 9 aa, Homo sapiens
  Table 1.2; DMRT1; ENSG00000137090; HLA -A*02:01,HLA-A*02:03,HLA-A*02:04,HLA-A*02:07,HLA-A*25:01, HLA-A*26:01,HLA-A*30:01,HLA-A*68:02,HLA-B*13:02,HLA-B*35:01, HLA-B*35:03,HLA-B*40:02,HLA-B*46:01,HLA-B*54:01,HLA-B*55:01,
  HLA-B*56:01,HLA-B*58:01,HLA-C*03:03,HLA-C*03:04
MVIQDIPAV

SEQ ID NO: 2433 - protein, 9 aa, Homo sapiens
  Table 1.2; DMRT1; ENSG00000137090; HLA -C*01:02
NCPQYSMAL

SEQ ID NO: 2434 - protein, 8 aa, Homo sapiens
  Table 1.2; DMRT1; ENSG00000137090; HLA -B*08:01
NMENRHAM

SEQ ID NO: 2435 - protein, 9 aa, Homo sapiens
  Table 1.2; DMRT1; ENSG00000137090; HLA -A*29:02,HLA-C*07:01
NNLYNCPQY

SEQ ID NO: 2436 - protein, 9 aa, Homo sapiens
  Table 1.2; DMRT1; ENSG00000137090; HLA -B*35:01,HLA-B*35:03
NPLGGSPVK

SEQ ID NO: 2437 - protein, 9 aa, Homo sapiens
  Table 1.2; DMRT1; ENSG00000137090; HLA -A*30:02,HLA-B*27:02,HLA-B*27:05,HLA-C*07:01,HLA-C*16:04
NRHAMSSQY

SEQ ID NO: 2438 - protein, 10 aa, Homo sapiens
  Table 1.2; DMRT1; ENSG00000137090; HLA -A*01:01,HLA-A*30:02
NSLRGLPGPY

SEQ ID NO: 2439 - protein, 11 aa, Homo sapiens
  Table 1.2; DMRT1; ENSG00000137090; HLA -A*01:01,HLA-A*25:01,HLA-A*26:01
NTPDLVSDSTY

SEQ ID NO: 2440 - protein, 10 aa, Homo sapiens
  Table 1.2; DMRT1; ENSG00000137090; HLA -C*07:01
PDLVSDSTYY

SEQ ID NO: 2441 - protein, 8 aa, Homo sapiens
  Table 1.2; DMRT1; ENSG00000137090; HLA -B*18:01
PEARASVF

SEQ ID NO: 2442 - protein, 8 aa, Homo sapiens
  Table 1.2; DMRT1; ENSG00000137090; HLA -A*03:02
PLGGSPVK

SEQ ID NO: 2443 - protein, 9 aa, Homo sapiens
  Table 1.2; DMRT1; ENSG00000137090; HLA -B*56:01
PPASVPTTA

SEQ ID NO: 2444 - protein, 10 aa, Homo sapiens
  Table 1.2; DMRT1; ENSG00000137090; HLA -B*56:01
PPASVPTTAA

SEQ ID NO: 2445 - protein, 11 aa, Homo sapiens
  Table 1.2; DMRT1; ENSG00000137090; HLA -B*57:01
PSYPEARASVF

SEQ ID NO: 2446 - protein, 11 aa, Homo sapiens
  Table 1.2; DMRT1; ENSG00000137090; HLA -A*23:01,HLA-A*24:02
PYVPGQTGNQW

SEQ ID NO: 2447 - protein, 9 aa, Homo sapiens
  Table 1.2; DMRT1; ENSG00000137090; HLA -A*11:01,HLA-A*31:01,HLA-A*33:01,HLA-A*33:03,HLA-A*68:01, HLA-B*27:02,HLA-C*07:06
QDIPAVTSR

SEQ ID NO: 2448 - protein, 8 aa, Homo sapiens
  Table 1.2; DMRT1; ENSG00000137090; HLA -B*37:01
QDSGLVSL

SEQ ID NO: 2449 - protein, 9 aa, Homo sapiens
  Table 1.2; DMRT1; ENSG00000137090; HLA -B*18:01
QEEELGISH

SEQ ID NO: 2450 - protein, 11 aa, Homo sapiens
  Table 1.2; DMRT1; ENSG00000137090; HLA -A*29:02
QFFTFEDAPSY

SEQ ID NO: 2451 - protein, 11 aa, Homo sapiens
  Table 1.2; DMRT1; ENSG00000137090; HLA -B*07:02,HLA-B*51:01,HLA-B*54:01,HLA-B*55:01,HLA-B*56:01
QPPPASVPTTA

SEQ ID NO: 2452 - protein, 10 aa, Homo sapiens
  Table 1.2; DMRT1; ENSG00000137090; HLA -B*13:02,HLA-B*38:01
QQAQEEELGI

SEQ ID NO: 2453 - protein, 10 aa, Homo sapiens
  Table 1.2; DMRT1; ENSG00000137090; HLA -B*27:02,HLA-B*27:05
QRVMAAQVAL

SEQ ID NO: 2454 - protein, 9 aa, Homo sapiens
  Table 1.2; DMRT1; ENSG00000137090; HLA -A*23:01,HLA-A*24:02,HLA-A*25:01,HLA-B*57:01,HLA-B*58:01
QSVPQFFTF

SEQ ID NO: 2455 - protein, 10 aa, Homo sapiens
  Table 1.2; DMRT1; ENSG00000137090; HLA -A*30:01,HLA-B*40:01,HLA-B*40:02,HLA-B*44:02,HLA-B*44:03
RENNGSNPCL

SEQ ID NO: 2456 - protein, 11 aa, Homo sapiens
  Table 1.2; DMRT1; ENSG00000137090; HLA -B*40:01
RENNGSNPCLM

SEQ ID NO: 2457 - protein, 10 aa, Homo sapiens
  Table 1.2; DMRT1; ENSG00000137090; HLA -A*02:01
RMVIQDIPAV

SEQ ID NO: 2458 - protein, 9 aa, Homo sapiens
  Table 1.2; DMRT1; ENSG00000137090; HLA -B*13:02
RQRVMAAQV

SEQ ID NO: 2459 - protein, 9 aa, Homo sapiens
  Table 1.2; DMRT1; ENSG00000137090; HLA -A*02:04,HLA-A*03:01,HLA-A*03:02,HLA-A*11:01,HLA-A*23:01, HLA-A*31:01,HLA-A*32:01,HLA-B*07:02,HLA-B*08:01,HLA-B*13:02, HLA-B*15:01,HLA-B*15:03,HLA-B*46:01,HLA-B*56:01,HLA-B*58:01,
  HLA-C*01:02,HLA-C*03:04,HLA-C*07:02
RVMAAQVAL

SEQ ID NO: 2460 - protein, 10 aa, Homo sapiens
  Table 1.2; DMRT1; ENSG00000137090; HLA -A*03:01,HLA-A*03:02,HLA-A*11:01,HLA-A*31:01,HLA-A*33:03, HLA-A*68:01,HLA-B*27:02,HLA-B*57:01
RVMAAQVALR

SEQ ID NO: 2461 - protein, 11 aa, Homo sapiens
  Table 1.2; DMRT1; ENSG00000137090; HLA -A*03:01,HLA-A*31:01
RVMAAQVALRR

SEQ ID NO: 2462 - protein, 9 aa, Homo sapiens
  Table 1.2; DMRT1; ENSG00000137090; HLA -A*11:01,HLA-A*26:01,HLA-A*31:01,HLA-A*33:01,HLA-A*33:03, HLA-A*68:01,HLA-A*68:02,HLA-C*07:06
SAAELLVKR

SEQ ID NO: 2463 - protein, 10 aa, Homo sapiens
  Table 1.2; DMRT1; ENSG00000137090; HLA -A*68:01,HLA-B*07:02,HLA-B*27:05,HLA-B*35:03,HLA-B*39:01, HLA-B*40:01,HLA-C*03:03,HLA-C*03:04,HLA-C*07:06
SASGEVGNPL

SEQ ID NO: 2464 - protein, 9 aa, Homo sapiens
  Table 1.2; DMRT1; ENSG00000137090; HLA -B*37:01
SDSTYYSSF

SEQ ID NO: 2465 - protein, 9 aa, Homo sapiens
  Table 1.2; DMRT1; ENSG00000137090; HLA -A*30:01,HLA-B*13:02,HLA-B*37:01,HLA-B*40:01,HLA-B*44:02, HLA-B*44:03,HLA-B*49:01,HLA-C*02:02
SEAPHAPGV

SEQ ID NO: 2466 - protein, 8 aa, Homo sapiens
  Table 1.2; DMRT1; ENSG00000137090; HLA -B*49:01
SEPSSFTV

SEQ ID NO: 2467 - protein, 8 aa, Homo sapiens
  Table 1.2; DMRT1; ENSG00000137090; HLA -A*23:01
SFTVTPVI

SEQ ID NO: 2468 - protein, 8 aa, Homo sapiens
  Table 1.2; DMRT1; ENSG00000137090; HLA -A*23:01
SFYQPSLF

SEQ ID NO: 2469 - protein, 10 aa, Homo sapiens
  Table 1.2; DMRT1; ENSG00000137090; HLA -A*29:02
SFYQPSLFPY

SEQ ID NO: 2470 - protein, 11 aa, Homo sapiens
  Table 1.2; DMRT1; ENSG00000137090; HLA -A*29:02,HLA-A*30:02
SFYQPSLFPYY

SEQ ID NO: 2471 - protein, 11 aa, Homo sapiens
  Table 1.2; DMRT1; ENSG00000137090; HLA -C*07:04
SGALVGAASGS

SEQ ID NO: 2472 - protein, 9 aa, Homo sapiens
  Table 1.2; DMRT1; ENSG00000137090; HLA -B*54:01
SGTSQPPPA

SEQ ID NO: 2473 - protein, 9 aa, Homo sapiens
  Table 1.2; DMRT1; ENSG00000137090; HLA -A*02:01,HLA-A*02:03,HLA-A*02:04,HLA-A*02:07,HLA-A*68:02
SLFPYYNNL

SEQ ID NO: 2474 - protein, 10 aa, Homo sapiens
  Table 1.2; DMRT1; ENSG00000137090; HLA -A*29:02,HLA-A*30:02
SLFPYYNNLY

SEQ ID NO: 2475 - protein, 9 aa, Homo sapiens
  Table 1.2; DMRT1; ENSG00000137090; HLA -A*30:02,HLA-B*46:01
SLRGLPGPY

SEQ ID NO: 2476 - protein, 10 aa, Homo sapiens
  Table 1.2; DMRT1; ENSG00000137090; HLA -A*02:03
SLRGLPGPYV

SEQ ID NO: 2477 - protein, 11 aa, Homo sapiens
  Table 1.2; DMRT1; ENSG00000137090; HLA -A*03:01,HLA-A*03:02,HLA-A*11:01
SLSSSSPISNK

SEQ ID NO: 2478 - protein, 9 aa, Homo sapiens
  Table 1.2; DMRT1; ENSG00000137090; HLA -B*07:02,HLA-B*56:01,HLA-C*07:02
SPISNKSTK

SEQ ID NO: 2479 - protein, 10 aa, Homo sapiens
  Table 1.2; DMRT1; ENSG00000137090; HLA -B*07:02,HLA-B*54:01,HLA-B*55:01,HLA-B*56:01
SPISNKSTKA

SEQ ID NO: 2480 - protein, 11 aa, Homo sapiens
  Table 1.2; DMRT1; ENSG00000137090; HLA -B*07:02,HLA-B*56:01,HLA-C*07:02
SPISNKSTKAV

SEQ ID NO: 2481 - protein, 10 aa, Homo sapiens
  Table 1.2; DMRT1; ENSG00000137090; HLA -B*07:02
SPPSSQDSGL

SEQ ID NO: 2482 - protein, 10 aa, Homo sapiens
  Table 1.2; DMRT1; ENSG00000137090; HLA -B*07:02
SPVKNSLRGL

SEQ ID NO: 2483 - protein, 9 aa, Homo sapiens
  Table 1.2; DMRT1; ENSG00000137090; HLA -A*02:01,HLA-A*02:04,HLA-A*02:07,HLA-B*13:02,HLA-B*27:05, HLA-B*35:03,HLA-B*38:01,HLA-B*39:01,HLA-B*40:01,HLA-C*05:01
SQDSGLVSL

SEQ ID NO: 2484 - protein, 8 aa, Homo sapiens
  Table 1.2; DMRT1; ENSG00000137090; HLA -A*30:02,HLA-A*32:01,HLA-B*15:01,HLA-B*15:03
SQYRMHSY

SEQ ID NO: 2485 - protein, 9 aa, Homo sapiens
  Table 1.2; DMRT1; ENSG00000137090; HLA -A*30:02
SQYRMHSYY

SEQ ID NO: 2486 - protein, 9 aa, Homo sapiens
  Table 1.2; DMRT1; ENSG00000137090; HLA -B*13:02,HLA-B*58:01
SSFTVTPVI

SEQ ID NO: 2487 - protein, 9 aa, Homo sapiens
  Table 1.2; DMRT1; ENSG00000137090; HLA -B*57:01,HLA-C*02:02
SSFYQPSLF

SEQ ID NO: 2488 - protein, 9 aa, Homo sapiens
  Table 1.2; DMRT1; ENSG00000137090; HLA -A*01:01,HLA-A*30:02,HLA-A*32:01
SSQYRMHSY

SEQ ID NO: 2489 - protein, 8 aa, Homo sapiens
  Table 1.2; DMRT1; ENSG00000137090; HLA -A*03:02,HLA-A*11:01
SSSPISNK

SEQ ID NO: 2490 - protein, 11 aa, Homo sapiens
  Table 1.2; DMRT1; ENSG00000137090; HLA -A*03:01,HLA-A*03:02,HLA-A*11:01,HLA-A*31:01,HLA-A*68:01
SSSPISNKSTK

SEQ ID NO: 2491 - protein, 9 aa, Homo sapiens
  Table 1.2; DMRT1; ENSG00000137090; HLA -A*03:01,HLA-A*03:02,HLA-A*11:01,HLA-A*31:01,HLA-A*33:01, HLA-A*33:03,HLA-A*68:01,HLA-B*27:02,HLA-B*27:05,HLA-C*07:06
SSSSPISNK

SEQ ID NO: 2492 - protein, 9 aa, Homo sapiens
  Table 1.2; DMRT1; ENSG00000137090; HLA -A*26:01,HLA-A*31:01
SVFSPPSSQ

SEQ ID NO: 2493 - protein, 10 aa, Homo sapiens
  Table 1.2; DMRT1; ENSG00000137090; HLA -A*23:01,HLA-A*24:02
SYLGQSVPQF

SEQ ID NO: 2494 - protein, 11 aa, Homo sapiens
  Table 1.2; DMRT1; ENSG00000137090; HLA -A*23:01,HLA-A*24:02
SYLGQSVPQFF

SEQ ID NO: 2495 - protein, 9 aa, Homo sapiens
  Table 1.2; DMRT1; ENSG00000137090; HLA -C*01:02
SYPEARASV

SEQ ID NO: 2496 - protein, 10 aa, Homo sapiens
  Table 1.2; DMRT1; ENSG00000137090; HLA -A*23:01,HLA-A*24:02,HLA-C*14:02
SYPEARASVF

SEQ ID NO: 2497 - protein, 8 aa, Homo sapiens
  Table 1.2; DMRT1; ENSG00000137090; HLA -A*23:01,HLA-A*29:02,HLA-A*30:02,HLA-A*32:01,HLA-B*15:03, HLA-B*39:01,HLA-C*14:02
SYYPPPSY

SEQ ID NO: 2498 - protein, 9 aa, Homo sapiens
  Table 1.2; DMRT1; ENSG00000137090; HLA -A*02:04,HLA-A*23:01,HLA-A*24:02,HLA-A*29:02,HLA-A*30:02, HLA-A*31:01,HLA-B*07:02,HLA-C*04:01,HLA-C*14:02
SYYPPPSYL

SEQ ID NO: 2499 - protein, 9 aa, Homo sapiens
  Table 1.2; DMRT1; ENSG00000137090; HLA -C*16:02
TAASEGRMV

SEQ ID NO: 2500 - protein, 11 aa, Homo sapiens
  Table 1.2; DMRT1; ENSG00000137090; HLA -C*06:02
TECSGTSQPPP

SEQ ID NO: 2501 - protein, 8 aa, Homo sapiens
  Table 1.2; DMRT1; ENSG00000137090; HLA -C*14:02
TFEDAPSY

SEQ ID NO: 2502 - protein, 10 aa, Homo sapiens
  Table 1.2; DMRT1; ENSG00000137090; HLA -A*01:01,HLA-B*35:01,HLA-B*55:01,HLA-C*03:03
TPDLVSDSTY

SEQ ID NO: 2503 - protein, 11 aa, Homo sapiens
  Table 1.2; DMRT1; ENSG00000137090; HLA -A*01:01,HLA-B*35:01,HLA-B*55:01,HLA-C*03:03
TPDLVSDSTYY

SEQ ID NO: 2504 - protein, 9 aa, Homo sapiens
  Table 1.2; DMRT1; ENSG00000137090; HLA -A*02:03,HLA-A*32:01,HLA-B*46:01,HLA-B*56:01,HLA-C*06:02
TSQPPPASV

SEQ ID NO: 2505 - protein, 10 aa, Homo sapiens
  Table 1.2; DMRT1; ENSG00000137090; HLA -B*27:05
TVTPVIEEDE

SEQ ID NO: 2506 - protein, 8 aa, Homo sapiens
  Table 1.2; DMRT1; ENSG00000137090; HLA -B*49:01
VENTPDLV

SEQ ID NO: 2507 - protein, 9 aa, Homo sapiens
  Table 1.2; DMRT1; ENSG00000137090; HLA -B*46:01,HLA-C*03:04,HLA-C*14:02
VGAASGSSA

SEQ ID NO: 2508 - protein, 11 aa, Homo sapiens
  Table 1.2; DMRT1; ENSG00000137090; HLA -C*07:02
VGAASGSSAGG

SEQ ID NO: 2509 - protein, 10 aa, Homo sapiens
  Table 1.2; DMRT1; ENSG00000137090; HLA -A*02:03,HLA-B*39:01,HLA-B*46:01,HLA-C*01:02,HLA-C*04:01, HLA-C*14:02
VGNPLGGSPV

SEQ ID NO: 2510 - protein, 11 aa, Homo sapiens
  Table 1.2; DMRT1; ENSG00000137090; HLA -A*03:02,HLA-A*11:01,HLA-B*27:02,HLA-B*27:05
VGNPLGGSPVK

SEQ ID NO: 2511 - protein, 8 aa, Homo sapiens
  Table 1.2; DMRT1; ENSG00000137090; HLA -A*02:01,HLA-A*02:03,HLA-A*02:04,HLA-B*13:02
VIQDIPAV

SEQ ID NO: 2512 - protein, 9 aa, Homo sapiens
  Table 1.2; DMRT1; ENSG00000137090; HLA -A*02:03,HLA-A*03:02,HLA-A*32:01,HLA-B*39:01,HLA-C*12:03
VIQDIPAVT

SEQ ID NO: 2513 - protein, 10 aa, Homo sapiens
  Table 1.2; DMRT1; ENSG00000137090; HLA -A*03:02
VIQDIPAVTS

SEQ ID NO: 2514 - protein, 11 aa, Homo sapiens
  Table 1.2; DMRT1; ENSG00000137090; HLA -A*03:02,HLA-A*11:01,HLA-A*31:01,HLA-A*33:01,HLA-A*33:03, HLA-A*68:01,HLA-C*07:06
VIQDIPAVTSR

SEQ ID NO: 2515 - protein, 9 aa, Homo sapiens
  Table 1.2; DMRT1; ENSG00000137090; HLA -A*02:03,HLA-A*03:01,HLA-A*03:02,HLA-A*31:01,HLA-A*33:01, HLA-A*33:03,HLA-A*68:01,HLA-B*27:05,HLA-C*07:06
VMAAQVALR

SEQ ID NO: 2516 - protein, 10 aa, Homo sapiens
  Table 1.2; DMRT1; ENSG00000137090; HLA -A*03:01
VMAAQVALRR

SEQ ID NO: 2517 - protein, 10 aa, Homo sapiens
  Table 1.2; DMRT1; ENSG00000137090; HLA -B*07:02
VPPQGRAGGF

SEQ ID NO: 2518 - protein, 10 aa, Homo sapiens
  Table 1.2; DMRT1; ENSG00000137090; HLA -A*01:01,HLA-C*05:01
VSDSTYYSSF

SEQ ID NO: 2519 - protein, 11 aa, Homo sapiens
  Table 1.2; DMRT1; ENSG00000137090; HLA -A*01:01
VSDSTYYSSFY

SEQ ID NO: 2520 - protein, 9 aa, Homo sapiens
  Table 1.2; DMRT1; ENSG00000137090; HLA -A*23:01,HLA-A*25:01,HLA-A*26:01
YLGQSVPQF

SEQ ID NO: 2521 - protein, 10 aa, Homo sapiens
  Table 1.2; DMRT1; ENSG00000137090; HLA -C*07:01,HLA-C*07:02
YNCPQYSMAL

SEQ ID NO: 2522 - protein, 9 aa, Homo sapiens
  Table 1.2; DMRT1; ENSG00000137090; HLA -B*07:02,HLA-B*08:01,HLA-B*35:01,HLA-B*35:03,HLA-B*51:01, HLA-B*55:01,HLA-C*03:03,HLA-C*07:02
YPEARASVF

SEQ ID NO: 2523 - protein, 11 aa, Homo sapiens
  Table 1.2; DMRT1; ENSG00000137090; HLA -B*51:01,HLA-B*54:01,HLA-B*56:01
YPPPSYLGQSV

SEQ ID NO: 2524 - protein, 9 aa, Homo sapiens
  Table 1.2; DMRT1; ENSG00000137090; HLA -A*01:01,HLA-A*02:07,HLA-A*24:02,HLA-A*26:01,HLA-A*29:02
YQPSLFPYY

SEQ ID NO: 2525 - protein, 9 aa, Homo sapiens
  Table 1.2; DMRT1; ENSG00000137090; HLA -A*02:04,HLA-A*68:02,HLA-B*27:05,HLA-B*35:03,HLA-B*58:01, HLA-C*02:02,HLA-C*03:03,HLA-C*03:04,HLA-C*07:04,HLA-C*16:02
YSSFYQPSL

SEQ ID NO: 2526 - protein, 10 aa, Homo sapiens
  Table 1.2; DMRT1; ENSG00000137090; HLA -A*25:01,HLA-A*26:01,HLA-A*32:01,HLA-B*58:01,HLA-C*07:04
YVPGQTGNQW

SEQ ID NO: 2527 - protein, 8 aa, Homo sapiens
  Table 1.2; DMRT1; ENSG00000137090; HLA -A*23:01,HLA-A*24:02,HLA-C*04:01
YYPPPSYL

SEQ ID NO: 2528 - protein, 9 aa, Homo sapiens
  Table 1.2; DMRT1; ENSG00000137090; HLA -A*24:02,HLA-A*29:02
YYPPPSYLG

SEQ ID NO: 2529 - protein, 10 aa, Homo sapiens
  Table 1.2; DMRT1; ENSG00000137090; HLA -A*23:01,HLA-A*24:02
YYSSFYQPSL

SEQ ID NO: 2530 - protein, 11 aa, Homo sapiens
  Table 1.2; DMRT1; ENSG00000137090; HLA -A*24:02
YYSSFYQPSLF

SEQ ID NO: 2531 - protein, 9 aa, Homo sapiens
  Table 1.2; DPPA2; ENSG00000163530; HLA -B*54:01,HLA-B*56:01
AARAVQPKA

SEQ ID NO: 2532 - protein, 10 aa, Homo sapiens
  Table 1.2; DPPA2; ENSG00000163530; HLA -B*07:02,HLA-B*40:02,HLA-C*07:02
AARAVQPKAL

SEQ ID NO: 2533 - protein, 9 aa, Homo sapiens
  Table 1.2; DPPA2; ENSG00000163530; HLA -A*30:01,HLA-B*37:01,HLA-B*40:01,HLA-B*40:02,HLA-B*49:01
AEETNTVEV

SEQ ID NO: 2534 - protein, 10 aa, Homo sapiens
  Table 1.2; DPPA2; ENSG00000163530; HLA -A*30:01,HLA-B*40:01,HLA-B*40:02,HLA-B*49:01
AEETNTVEVI

SEQ ID NO: 2535 - protein, 11 aa, Homo sapiens
  Table 1.2; DPPA2; ENSG00000163530; HLA -A*31:01
AGQAWVPTTHR

SEQ ID NO: 2536 - protein, 9 aa, Homo sapiens
  Table 1.2; DPPA2; ENSG00000163530; HLA -A*02:01,HLA-B*55:01
ALNSCSIPV

SEQ ID NO: 2537 - protein, 11 aa, Homo sapiens
  Table 1.2; DPPA2; ENSG00000163530; HLA -A*02:07
ALPLPTILPPI

SEQ ID NO: 2538 - protein, 9 aa, Homo sapiens
  Table 1.2; DPPA2; ENSG00000163530; HLA -A*02:04
AMLASWARI

SEQ ID NO: 2539 - protein, 9 aa, Homo sapiens
  Table 1.2; DPPA2; ENSG00000163530; HLA -A*25:01,HLA-B*07:02,HLA-B*35:01,HLA-B*44:02,HLA-B*44:03, HLA-B*56:01
APGAMLASW

SEQ ID NO: 2540 - protein, 9 aa, Homo sapiens
  Table 1.2; DPPA2; ENSG00000163530; HLA -B*07:02,HLA-C*07:02
APQKARCKI

SEQ ID NO: 2541 - protein, 9 aa, Homo sapiens
  Table 1.2; DPPA2; ENSG00000163530; HLA -A*32:01,HLA-B*07:02,HLA-B*27:02,HLA-B*27:05,HLA-B*39:01, HLA-C*06:02,HLA-C*07:02,HLA-C*12:03,HLA-C*16:01,HLA-C*16:04
ARAVQPKAL

SEQ ID NO: 2542 - protein, 8 aa, Homo sapiens
  Table 1.2; DPPA2; ENSG00000163530; HLA -C*06:02
ARIAARAV

SEQ ID NO: 2543 - protein, 10 aa, Homo sapiens
  Table 1.2; DPPA2; ENSG00000163530; HLA -B*27:05
ARIAARAVQP

SEQ ID NO: 2544 - protein, 11 aa, Homo sapiens
  Table 1.2; DPPA2; ENSG00000163530; HLA -B*27:05,HLA-C*06:02
ARIAARAVQPK

SEQ ID NO: 2545 - protein, 9 aa, Homo sapiens
  Table 1.2; DPPA2; ENSG00000163530; HLA -B*08:01,HLA-B*27:05,HLA-B*37:01,HLA-C*16:01,HLA-C*16:04
ARLQRSYEM

SEQ ID NO: 2546 - protein, 9 aa, Homo sapiens
  Table 1.2; DPPA2; ENSG00000163530; HLA -A*03:01,HLA-A*31:01,HLA-A*33:01,HLA-A*33:03,HLA-B*57:01
ASWARIAAR

SEQ ID NO: 2547 - protein, 9 aa, Homo sapiens
  Table 1.2; DPPA2; ENSG00000163530; HLA -C*01:02,HLA-C*14:02
AYPEQRQDM

SEQ ID NO: 2548 - protein, 9 aa, Homo sapiens
  Table 1.2; DPPA2; ENSG00000163530; HLA -B*46:01,HLA-B*54:01,HLA-B*56:01
CSIPVSVEA

SEQ ID NO: 2549 - protein, 10 aa, Homo sapiens
  Table 1.2; DPPA2; ENSG00000163530; HLA -B*15:03,HLA-B*57:01,HLA-B*58:01
CSIPVSVEAF

SEQ ID NO: 2550 - protein, 10 aa, Homo sapiens
  Table 1.2; DPPA2; ENSG00000163530; HLA -B*54:01
CVVHGRLLSA

SEQ ID NO: 2551 - protein, 9 aa, Homo sapiens
  Table 1.2; DPPA2; ENSG00000163530; HLA -A*33:01,HLA-B*51:01
DANLDSSKK

SEQ ID NO: 2552 - protein, 11 aa, Homo sapiens
  Table 1.2; DPPA2; ENSG00000163530; HLA -A*33:01
DANLDSSKKNF

SEQ ID NO: 2553 - protein, 9 aa, Homo sapiens
  Table 1.2; DPPA2; ENSG00000163530; HLA -A*30:01,HLA-B*18:01,HLA-B*38:01,HLA-B*40:01,HLA-B*44:02, HLA-B*44:03
DEESVILTL

SEQ ID NO: 2554 - protein, 11 aa, Homo sapiens
  Table 1.2; DPPA2; ENSG00000163530; HLA -A*02:07
DMPEMSQETRL

SEQ ID NO: 2555 - protein, 8 aa, Homo sapiens
  Table 1.2; DPPA2; ENSG00000163530; HLA -B*08:01
DSSKKNFL

SEQ ID NO: 2556 - protein, 8 aa, Homo sapiens
  Table 1.2; DPPA2; ENSG00000163530; HLA -B*08:01
DTKGWVRL

SEQ ID NO: 2557 - protein, 9 aa, Homo sapiens
  Table 1.2; DPPA2; ENSG00000163530; HLA -A*33:01
DVKLEKPKK

SEQ ID NO: 2558 - protein, 9 aa, Homo sapiens
  Table 1.2; DPPA2; ENSG00000163530; HLA -A*26:01,HLA-B*54:01
EAFLMQASG

SEQ ID NO: 2559 - protein, 10 aa, Homo sapiens
  Table 1.2; DPPA2; ENSG00000163530; HLA -B*51:01
EAFLMQASGV

SEQ ID NO: 2560 - protein, 11 aa, Homo sapiens
  Table 1.2; DPPA2; ENSG00000163530; HLA -A*68:01
EAFLMQASGVR

SEQ ID NO: 2561 - protein, 8 aa, Homo sapiens
  Table 1.2; DPPA2; ENSG00000163530; HLA -A*30:01,HLA-B*18:01,HLA-B*37:01,HLA-B*40:01,HLA-B*44:02, HLA-B*44:03,HLA-B*49:01
EESVILTL

SEQ ID NO: 2562 - protein, 9 aa, Homo sapiens
  Table 1.2; DPPA2; ENSG00000163530; HLA -A*68:02,HLA-B*18:01,HLA-B*44:02,HLA-B*44:03,HLA-B*49:01
EESVILTLV

SEQ ID NO: 2563 - protein, 8 aa, Homo sapiens
  Table 1.2; DPPA2; ENSG00000163530; HLA -B*18:01,HLA-B*49:01
EETNTVEV

SEQ ID NO: 2564 - protein, 9 aa, Homo sapiens
  Table 1.2; DPPA2; ENSG00000163530; HLA -A*30:01,HLA-A*68:02,HLA-B*18:01,HLA-B*38:01,HLA-B*39:01, HLA-B*40:01,HLA-B*40:02,HLA-B*44:02,HLA-B*44:03,HLA-B*49:01
EETNTVEVI

SEQ ID NO: 2565 - protein, 11 aa, Homo sapiens
  Table 1.2; DPPA2; ENSG00000163530; HLA -B*27:05,HLA-B*39:01
EETNTVEVITS

SEQ ID NO: 2566 - protein, 10 aa, Homo sapiens
  Table 1.2; DPPA2; ENSG00000163530; HLA -A*33:03
EMSQETRLQR

SEQ ID NO: 2567 - protein, 11 aa, Homo sapiens
  Table 1.2; DPPA2; ENSG00000163530; HLA -A*68:01
EPSVSSTSDVK

SEQ ID NO: 2568 - protein, 8 aa, Homo sapiens
  Table 1.2; DPPA2; ENSG00000163530; HLA -A*03:02,HLA-A*11:01,HLA-A*33:03,HLA-A*68:01,HLA-B*13:02, HLA-B*27:02,HLA-B*27:05,HLA-C*07:01
EQFTAPQK

SEQ ID NO: 2569 - protein, 9 aa, Homo sapiens
  Table 1.2; DPPA2; ENSG00000163530; HLA -A*26:01,HLA-B*13:02,HLA-B*39:01
EQFTAPQKA

SEQ ID NO: 2570 - protein, 10 aa, Homo sapiens
  Table 1.2; DPPA2; ENSG00000163530; HLA -A*33:03,HLA-A*68:01
EQFTAPQKAR

SEQ ID NO: 2571 - protein, 9 aa, Homo sapiens
  Table 1.2; DPPA2; ENSG00000163530; HLA -B*39:01
EQMEPSVSS

SEQ ID NO: 2572 - protein, 9 aa, Homo sapiens
  Table 1.2; DPPA2; ENSG00000163530; HLA -A*26:01,HLA-B*15:01
EQRQDMPEM

SEQ ID NO: 2573 - protein, 9 aa, Homo sapiens
  Table 1.2; DPPA2; ENSG00000163530; HLA -B*38:01,HLA-B*39:01
ERAEETNTV

SEQ ID NO: 2574 - protein, 10 aa, Homo sapiens
  Table 1.2; DPPA2; ENSG00000163530; HLA -A*68:02
ESVILTLVPV

SEQ ID NO: 2575 - protein, 11 aa, Homo sapiens
  Table 1.2; DPPA2; ENSG00000163530; HLA -A*68:01
ESVILTLVPVK

SEQ ID NO: 2576 - protein, 8 aa, Homo sapiens
  Table 1.2; DPPA2; ENSG00000163530; HLA -A*33:03
ETNTVEVI

SEQ ID NO: 2577 - protein, 9 aa, Homo sapiens
  Table 1.2; DPPA2; ENSG00000163530; HLA -A*33:03
ETNTVEVIT

SEQ ID NO: 2578 - protein, 10 aa, Homo sapiens
  Table 1.2; DPPA2; ENSG00000163530; HLA -A*33:03,HLA-A*68:01
ETNTVEVITS

SEQ ID NO: 2579 - protein, 11 aa, Homo sapiens
  Table 1.2; DPPA2; ENSG00000163530; HLA -A*26:01,HLA-A*68:01
ETNTVEVITSA

SEQ ID NO: 2580 - protein, 9 aa, Homo sapiens
  Table 1.2; DPPA2; ENSG00000163530; HLA -A*33:01,HLA-A*33:03
ETRLQRCSR

SEQ ID NO: 2581 - protein, 9 aa, Homo sapiens
  Table 1.2; DPPA2; ENSG00000163530; HLA -C*05:01
EVDDEESVI

SEQ ID NO: 2582 - protein, 10 aa, Homo sapiens
  Table 1.2; DPPA2; ENSG00000163530; HLA -B*39:01
EVDDEESVIL

SEQ ID NO: 2583 - protein, 9 aa, Homo sapiens
  Table 1.2; DPPA2; ENSG00000163530; HLA -A*25:01,HLA-A*26:01
EVITSAPGA

SEQ ID NO: 2584 - protein, 10 aa, Homo sapiens
  Table 1.2; DPPA2; ENSG00000163530; HLA -A*25:01,HLA-A*26:01,HLA-A*68:01,HLA-B*39:01
EVITSAPGAM

SEQ ID NO: 2585 - protein, 11 aa, Homo sapiens
  Table 1.2; DPPA2; ENSG00000163530; HLA -A*25:01,HLA-A*26:01,HLA-A*68:01,HLA-A*68:02,HLA-B*35:03
EVITSAPGAML

SEQ ID NO: 2586 - protein, 8 aa, Homo sapiens
  Table 1.2; DPPA2; ENSG00000163530; HLA -A*02:03,HLA-B*08:01,HLA-B*13:02
FLMQASGV

SEQ ID NO: 2587 - protein, 10 aa, Homo sapiens
  Table 1.2; DPPA2; ENSG00000163530; HLA -A*24:02,HLA-A*25:01,HLA-A*29:02,HLA-B*44:02,HLA-B*57:01
FLMQASGVRW

SEQ ID NO: 2588 - protein, 10 aa, Homo sapiens
  Table 1.2; DPPA2; ENSG00000163530; HLA -B*35:01,HLA-B*35:03,HLA-B*38:01,HLA-B*55:01,HLA-C*03:03
FPSPGIEDNM

SEQ ID NO: 2589 - protein, 11 aa, Homo sapiens
  Table 1.2; DPPA2; ENSG00000163530; HLA -B*27:05,HLA-B*35:01,HLA-B*35:03,HLA-B*38:01,HLA-B*55:01
FPSPGIEDNML

SEQ ID NO: 2590 - protein, 9 aa, Homo sapiens
  Table 1.2; DPPA2; ENSG00000163530; HLA -A*30:01,HLA-B*40:01,HLA-B*49:01
GEVDDEESV

SEQ ID NO: 2591 - protein, 10 aa, Homo sapiens
  Table 1.2; DPPA2; ENSG00000163530; HLA -A*30:01,HLA-B*40:01,HLA-B*49:01
GEVDDEESVI

SEQ ID NO: 2592 - protein, 11 aa, Homo sapiens
  Table 1.2; DPPA2; ENSG00000163530; HLA -A*30:01,HLA-B*40:01
GEVDDEESVIL

SEQ ID NO: 2593 - protein, 10 aa, Homo sapiens
  Table 1.2; DPPA2; ENSG00000163530; HLA -B*38:01,HLA-B*39:01
GHLLQTNEQF

SEQ ID NO: 2594 - protein, 9 aa, Homo sapiens
  Table 1.2; DPPA2; ENSG00000163530; HLA -A*02:03
GLSTNGKKI

SEQ ID NO: 2595 - protein, 11 aa, Homo sapiens
  Table 1.2; DPPA2; ENSG00000163530; HLA -A*02:01
GLSTNGKKIEV

SEQ ID NO: 2596 - protein, 9 aa, Homo sapiens
  Table 1.2; DPPA2; ENSG00000163530; HLA -A*30:02,HLA-A*32:01,HLA-B*13:02,HLA-B*15:01,HLA-B*15:03, HLA-B*27:05
GQAWVPTTH

SEQ ID NO: 2597 - protein, 10 aa, Homo sapiens
  Table 1.2; DPPA2; ENSG00000163530; HLA -A*31:01
GQAWVPTTHR

SEQ ID NO: 2598 - protein, 9 aa, Homo sapiens
  Table 1.2; DPPA2; ENSG00000163530; HLA -B*27:02,HLA-B*27:05
GRLLSADTK

SEQ ID NO: 2599 - protein, 11 aa, Homo sapiens
  Table 1.2; DPPA2; ENSG00000163530; HLA -B*27:02
GRLLSADTKGW

SEQ ID NO: 2600 - protein, 10 aa, Homo sapiens
  Table 1.2; DPPA2; ENSG00000163530; HLA -B*35:01,HLA-B*35:03,HLA-B*55:01
HAYPEQRQDM

SEQ ID NO: 2601 - protein, 9 aa, Homo sapiens
  Table 1.2; DPPA2; ENSG00000163530; HLA -A*23:01,HLA-A*24:02,HLA-A*32:01,HLA-B*15:01,HLA-B*37:01, HLA-B*38:01
HLLQTNEQF

SEQ ID NO: 2602 - protein, 11 aa, Homo sapiens
  Table 1.2; DPPA2; ENSG00000163530; HLA -A*02:04
HLLQTNEQFTA

SEQ ID NO: 2603 - protein, 9 aa, Homo sapiens
  Table 1.2; DPPA2; ENSG00000163530; HLA -A*03:01,HLA-A*03:02,HLA-A*11:01,HLA-A*31:01,HLA-A*68:01, HLA-B*27:02,HLA-B*27:05,HLA-C*04:01,HLA-C*06:02,HLA-C*07:01, HLA-C*07:06,HLA-C*16:01
IAARAVQPK

SEQ ID NO: 2604 - protein, 11 aa, Homo sapiens
  Table 1.2; DPPA2; ENSG00000163530; HLA -A*29:02
IFPSPGIEDNM

SEQ ID NO: 2605 - protein, 8 aa, Homo sapiens
  Table 1.2; DPPA2; ENSG00000163530; HLA -A*02:01,HLA-A*02:03,HLA-A*02:07
ILPPINKV

SEQ ID NO: 2606 - protein, 8 aa, Homo sapiens
  Table 1.2; DPPA2; ENSG00000163530; HLA -B*27:02
ILTLVPVK

SEQ ID NO: 2607 - protein, 9 aa, Homo sapiens
  Table 1.2; DPPA2; ENSG00000163530; HLA -A*23:01,HLA-A*24:02,HLA-A*30:01,HLA-B*07:02,HLA-B*13:02, HLA-B*35:01,HLA-B*35:03,HLA-B*38:01,HLA-B*49:01,HLA-B*51:01, HLA-B*54:01,HLA-B*55:01,HLA-B*56:01,HLA-B*58:01,HLA-C*07:02,
  HLA-C*16:02
IPALPLPTI

SEQ ID NO: 2608 - protein, 10 aa, Homo sapiens
  Table 1.2; DPPA2; ENSG00000163530; HLA -B*07:02,HLA-B*35:03,HLA-B*56:01
IPALPLPTIL

SEQ ID NO: 2609 - protein, 11 aa, Homo sapiens
  Table 1.2; DPPA2; ENSG00000163530; HLA -B*54:01
IPALPLPTILP

SEQ ID NO: 2610 - protein, 8 aa, Homo sapiens
  Table 1.2; DPPA2; ENSG00000163530; HLA -A*23:01,HLA-B*07:02,HLA-B*15:01,HLA-B*15:03,HLA-B*18:01, HLA-B*35:01,HLA-B*35:03,HLA-B*37:01,HLA-B*39:01,HLA-B*51:01, HLA-B*54:01,HLA-B*55:01,HLA-B*56:01
IPVSVEAF

SEQ ID NO: 2611 - protein, 9 aa, Homo sapiens
  Table 1.2; DPPA2; ENSG00000163530; HLA -A*23:01,HLA-A*68:02,HLA-B*07:02,HLA-B*35:01,HLA-B*35:03, HLA-B*51:01,HLA-B*54:01,HLA-B*55:01,HLA-B*56:01
IPVSVEAFL

SEQ ID NO: 2612 - protein, 10 aa, Homo sapiens
  Table 1.2; DPPA2; ENSG00000163530; HLA -B*27:02,HLA-B*35:01,HLA-B*35:03
IPVSVEAFLM

SEQ ID NO: 2613 - protein, 9 aa, Homo sapiens
  Table 1.2; DPPA2; ENSG00000163530; HLA -A*03:01,HLA-A*23:01,HLA-A*32:01,HLA-A*68:02,HLA-B*07:02, HLA-B*13:02,HLA-B*15:01,HLA-B*15:03,HLA-B*35:03,HLA-B*38:01, HLA-B*39:01,HLA-B*40:02,HLA-B*46:01,HLA-B*58:01,HLA-C*01:02,
  HLA-C*03:03,HLA-C*03:04,HLA-C*05:01,HLA-C*06:02,HLA-C*07:04, HLA-C*12:03,HLA-C*14:02,HLA-C*16:01,HLA-C*16:02
ITSAPGAML

SEQ ID NO: 2614 - protein, 10 aa, Homo sapiens
  Table 1.2; DPPA2; ENSG00000163530; HLA -A*02:01,HLA-A*02:07,HLA-A*24:02
KIPALPLPTI

SEQ ID NO: 2615 - protein, 9 aa, Homo sapiens
  Table 1.2; DPPA2; ENSG00000163530; HLA -B*15:03
KKYNPGHLL

SEQ ID NO: 2616 - protein, 9 aa, Homo sapiens
  Table 1.2; DPPA2; ENSG00000163530; HLA -A*02:01,HLA-A*02:03,HLA-B*08:01
KMMKRLMTV

SEQ ID NO: 2617 - protein, 8 aa, Homo sapiens
  Table 1.2; DPPA2; ENSG00000163530; HLA -B*27:02,HLA-B*27:05,HLA-C*06:02,HLA-C*07:01
KRLMTVEK

SEQ ID NO: 2618 - protein, 8 aa, Homo sapiens
  Table 1.2; DPPA2; ENSG00000163530; HLA -A*23:01,HLA-A*24:02,HLA-B*58:01
KYNPGHLL

SEQ ID NO: 2619 - protein, 9 aa, Homo sapiens
  Table 1.2; DPPA2; ENSG00000163530; HLA -A*24:02
KYNPGHLLQ

SEQ ID NO: 2620 - protein, 9 aa, Homo sapiens
  Table 1.2; DPPA2; ENSG00000163530; HLA -B*54:01,HLA-B*56:01
LASWARIAA

SEQ ID NO: 2621 - protein, 8 aa, Homo sapiens
  Table 1.2; DPPA2; ENSG00000163530; HLA -B*37:01
LDSSKKNF

SEQ ID NO: 2622 - protein, 9 aa, Homo sapiens
  Table 1.2; DPPA2; ENSG00000163530; HLA -A*24:02,HLA-A*32:01,HLA-B*57:01,HLA-B*58:01
LMQASGVRW

SEQ ID NO: 2623 - protein, 9 aa, Homo sapiens
  Table 1.2; DPPA2; ENSG00000163530; HLA -B*51:01,HLA-B*54:01,HLA-B*56:01
LPACIFPSP

SEQ ID NO: 2624 - protein, 11 aa, Homo sapiens
  Table 1.2; DPPA2; ENSG00000163530; HLA -B*51:01
LPACIFPSPGI

SEQ ID NO: 2625 - protein, 9 aa, Homo sapiens
  Table 1.2; DPPA2; ENSG00000163530; HLA -B*54:01,HLA-B*56:01
LPLPTILPP

SEQ ID NO: 2626 - protein, 10 aa, Homo sapiens
  Table 1.2; DPPA2; ENSG00000163530; HLA -A*23:01,HLA-B*51:01,HLA-B*54:01,HLA-B*56:01
LPLPTILPPI

SEQ ID NO: 2627 - protein, 8 aa, Homo sapiens
  Table 1.2; DPPA2; ENSG00000163530; HLA -B*51:01,HLA-B*54:01
LPTILPPI

SEQ ID NO: 2628 - protein, 11 aa, Homo sapiens
  Table 1.2; DPPA2; ENSG00000163530; HLA -B*51:01,HLA-B*54:01,HLA-B*56:01
LPTILPPINKV

SEQ ID NO: 2629 - protein, 9 aa, Homo sapiens
  Table 1.2; DPPA2; ENSG00000163530; HLA -A*25:01,HLA-A*32:01
LQFHAGQAW

SEQ ID NO: 2630 - protein, 8 aa, Homo sapiens
  Table 1.2; DPPA2; ENSG00000163530; HLA -B*57:01,HLA-B*58:01
LSADTKGW

SEQ ID NO: 2631 - protein, 11 aa, Homo sapiens
  Table 1.2; DPPA2; ENSG00000163530; HLA -B*49:01
MEPSVSSTSDV

SEQ ID NO: 2632 - protein, 8 aa, Homo sapiens
  Table 1.2; DPPA2; ENSG00000163530; HLA -B*18:01,HLA-B*40:02,HLA-B*49:01
MEQMEPSV

SEQ ID NO: 2633 - protein, 9 aa, Homo sapiens
  Table 1.2; DPPA2; ENSG00000163530; HLA -B*54:01
MISLFLLPA

SEQ ID NO: 2634 - protein, 9 aa, Homo sapiens
  Table 1.2; DPPA2; ENSG00000163530; HLA -A*02:03,HLA-A*02:04
MLASWARIA

SEQ ID NO: 2635 - protein, 10 aa, Homo sapiens
  Table 1.2; DPPA2; ENSG00000163530; HLA -B*54:01
MLASWARIAA

SEQ ID NO: 2636 - protein, 11 aa, Homo sapiens
  Table 1.2; DPPA2; ENSG00000163530; HLA -A*31:01
MLASWARIAAR

SEQ ID NO: 2637 - protein, 8 aa, Homo sapiens
  Table 1.2; DPPA2; ENSG00000163530; HLA -B*08:01
MMKRLMTV

SEQ ID NO: 2638 - protein, 9 aa, Homo sapiens
  Table 1.2; DPPA2; ENSG00000163530; HLA -B*35:03,HLA-B*55:01
MPEMSQETR

SEQ ID NO: 2639 - protein, 10 aa, Homo sapiens
  Table 1.2; DPPA2; ENSG00000163530; HLA -B*07:02,HLA-B*35:01,HLA-B*35:03,HLA-B*55:01,HLA-C*03:03
MPEMSQETRL

SEQ ID NO: 2640 - protein, 8 aa, Homo sapiens
  Table 1.2; DPPA2; ENSG00000163530; HLA -A*25:01,HLA-A*32:01,HLA-B*44:02,HLA-B*44:03
MQASGVRW

SEQ ID NO: 2641 - protein, 10 aa, Homo sapiens
  Table 1.2; DPPA2; ENSG00000163530; HLA -A*01:01,HLA-B*27:02
MSDANLDSSK

SEQ ID NO: 2642 - protein, 9 aa, Homo sapiens
  Table 1.2; DPPA2; ENSG00000163530; HLA -A*31:01,HLA-A*33:03
MSQETRLQR

SEQ ID NO: 2643 - protein, 9 aa, Homo sapiens
  Table 1.2; DPPA2; ENSG00000163530; HLA -A*03:02,HLA-A*11:01
NEQFTAPQK

SEQ ID NO: 2644 - protein, 10 aa, Homo sapiens
  Table 1.2; DPPA2; ENSG00000163530; HLA -B*49:01
NERAEETNTV

SEQ ID NO: 2645 - protein, 8 aa, Homo sapiens
  Table 1.2; DPPA2; ENSG00000163530; HLA -B*15:01,HLA-B*15:03,HLA-B*18:01,HLA-B*46:01
NGKKIEVY

SEQ ID NO: 2646 - protein, 9 aa, Homo sapiens
  Table 1.2; DPPA2; ENSG00000163530; HLA -A*32:01,HLA-C*04:01
NLDSSKKNF

SEQ ID NO: 2647 - protein, 10 aa, Homo sapiens
  Table 1.2; DPPA2; ENSG00000163530; HLA -A*02:07
NLDSSKKNFL

SEQ ID NO: 2648 - protein, 9 aa, Homo sapiens
  Table 1.2; DPPA2; ENSG00000163530; HLA -A*02:01,HLA-B*55:01
NMEQMEPSV

SEQ ID NO: 2649 - protein, 9 aa, Homo sapiens
  Table 1.2; DPPA2; ENSG00000163530; HLA -A*68:02,HLA-C*12:03
NSCSIPVSV

SEQ ID NO: 2650 - protein, 9 aa, Homo sapiens
  Table 1.2; DPPA2; ENSG00000163530; HLA -A*02:01,HLA-A*02:03,HLA-A*02:07,HLA-A*25:01,HLA-A*26:01, HLA-A*68:02,HLA-B*46:01,HLA-B*54:01,HLA-B*55:01,HLA-B*56:01
NTVEVITSA

SEQ ID NO: 2651 - protein, 8 aa, Homo sapiens
  Table 1.2; DPPA2; ENSG00000163530; HLA -A*23:01,HLA-B*51:01
PALPLPTI

SEQ ID NO: 2652 - protein, 9 aa, Homo sapiens
  Table 1.2; DPPA2; ENSG00000163530; HLA -A*30:01,HLA-B*27:02,HLA-B*40:01,HLA-B*40:02,HLA-B*44:02, HLA-B*44:03,HLA-B*49:01
PEMSQETRL

SEQ ID NO: 2653 - protein, 9 aa, Homo sapiens
  Table 1.2; DPPA2; ENSG00000163530; HLA -A*02:04,HLA-A*02:07,HLA-A*24:02
PLPTILPPI

SEQ ID NO: 2654 - protein, 9 aa, Homo sapiens
  Table 1.2; DPPA2; ENSG00000163530; HLA -A*03:01,HLA-A*03:02,HLA-A*11:01
PTILPPINK

SEQ ID NO: 2655 - protein, 9 aa, Homo sapiens
  Table 1.2; DPPA2; ENSG00000163530; HLA -A*31:01,HLA-A*33:01,HLA-A*33:03,HLA-A*68:01,HLA-B*51:01, HLA-B*57:01,HLA-C*07:06
QAWVPTTHR

SEQ ID NO: 2656 - protein, 9 aa, Homo sapiens
  Table 1.2; DPPA2; ENSG00000163530; HLA -A*33:01,HLA-A*33:03
QFTAPQKAR

SEQ ID NO: 2657 - protein, 9 aa, Homo sapiens
  Table 1.2; DPPA2; ENSG00000163530; HLA -A*03:01,HLA-A*03:02
QLGLSTNGK

SEQ ID NO: 2658 - protein, 8 aa, Homo sapiens
  Table 1.2; DPPA2; ENSG00000163530; HLA -B*56:01
QPKALNSC

SEQ ID NO: 2659 - protein, 10 aa, Homo sapiens
  Table 1.2; DPPA2; ENSG00000163530; HLA -A*03:02,HLA-A*11:01,HLA-B*27:02
QQLGLSTNGK

SEQ ID NO: 2660 - protein, 9 aa, Homo sapiens
  Table 1.2; DPPA2; ENSG00000163530; HLA -B*27:05
QRSYEMNER

SEQ ID NO: 2661 - protein, 11 aa, Homo sapiens
  Table 1.2; DPPA2; ENSG00000163530; HLA -A*03:01,HLA-A*03:02,HLA-A*11:01,HLA-A*68:01
QTNEQFTAPQK

SEQ ID NO: 2662 - protein, 8 aa, Homo sapiens
  Table 1.2; DPPA2; ENSG00000163530; HLA -C*05:01
RAEETNTV

SEQ ID NO: 2663 - protein, 10 aa, Homo sapiens
  Table 1.2; DPPA2; ENSG00000163530; HLA -C*05:01
RAEETNTVEV

SEQ ID NO: 2664 - protein, 8 aa, Homo sapiens
  Table 1.2; DPPA2; ENSG00000163530; HLA -B*08:01,HLA-B*58:01
RAVQPKAL

SEQ ID NO: 2665 - protein, 10 aa, Homo sapiens
  Table 1.2; DPPA2; ENSG00000163530; HLA -A*03:01,HLA-A*03:02
RIAARAVQPK

SEQ ID NO: 2666 - protein, 10 aa, Homo sapiens
  Table 1.2; DPPA2; ENSG00000163530; HLA -A*25:01,HLA-B*57:01
RLLSADTKGW

SEQ ID NO: 2667 - protein, 8 aa, Homo sapiens
  Table 1.2; DPPA2; ENSG00000163530; HLA -A*02:04
RMISLFLL

SEQ ID NO: 2668 - protein, 8 aa, Homo sapiens
  Table 1.2; DPPA2; ENSG00000163530; HLA -A*31:01
RSYEMNER

SEQ ID NO: 2669 - protein, 10 aa, Homo sapiens
  Table 1.2; DPPA2; ENSG00000163530; HLA -A*25:01,HLA-A*26:01,HLA-B*44:02,HLA-B*57:01,HLA-B*58:01
SAPGAMLASW

SEQ ID NO: 2670 - protein, 9 aa, Homo sapiens
  Table 1.2; DPPA2; ENSG00000163530; HLA -B*27:02
SDANLDSSK

SEQ ID NO: 2671 - protein, 10 aa, Homo sapiens
  Table 1.2; DPPA2; ENSG00000163530; HLA -A*11:01,HLA-B*27:02
SDANLDSSKK

SEQ ID NO: 2672 - protein, 9 aa, Homo sapiens
  Table 1.2; DPPA2; ENSG00000163530; HLA -A*02:07,HLA-A*24:02,HLA-A*25:01,HLA-A*26:01,HLA-A*32:01, HLA-B*15:01,HLA-B*46:01,HLA-C*01:02,HLA-C*07:04,HLA-C*14:02
SIPVSVEAF

SEQ ID NO: 2673 - protein, 9 aa, Homo sapiens
  Table 1.2; DPPA2; ENSG00000163530; HLA -A*02:01,HLA-A*02:03,HLA-A*02:04,HLA-A*30:01,HLA-B*13:02
SLFLLPACI

SEQ ID NO: 2674 - protein, 9 aa, Homo sapiens
  Table 1.2; DPPA2; ENSG00000163530; HLA -B*35:03
SPGIEDNML

SEQ ID NO: 2675 - protein, 10 aa, Homo sapiens
  Table 1.2; DPPA2; ENSG00000163530; HLA -A*11:01,HLA-C*07:06
SSTSDVKLEK

SEQ ID NO: 2676 - protein, 10 aa, Homo sapiens
  Table 1.2; DPPA2; ENSG00000163530; HLA -A*25:01,HLA-A*26:01,HLA-A*30:02,HLA-A*32:01,HLA-B*15:01
STNGKKIEVY

SEQ ID NO: 2677 - protein, 9 aa, Homo sapiens
  Table 1.2; DPPA2; ENSG00000163530; HLA -A*01:01,HLA-A*03:01,HLA-A*03:02,HLA-A*11:01,HLA-A*29:02, HLA-A*30:02,HLA-A*31:01,HLA-A*33:01,HLA-A*33:03,HLA-A*68:01, HLA-B*13:02,HLA-B*27:05,HLA-B*57:01,HLA-C*07:06
STSDVKLEK

SEQ ID NO: 2678 - protein, 11 aa, Homo sapiens
  Table 1.2; DPPA2; ENSG00000163530; HLA -A*03:02,HLA-A*11:01
STSDVKLEKPK

SEQ ID NO: 2679 - protein, 9 aa, Homo sapiens
  Table 1.2; DPPA2; ENSG00000163530; HLA -A*02:01,HLA-A*02:03,HLA-A*02:04,HLA-A*02:07,HLA-A*68:02, HLA-B*56:01
SVILTLVPV

SEQ ID NO: 2680 - protein, 10 aa, Homo sapiens
  Table 1.2; DPPA2; ENSG00000163530; HLA -A*03:01,HLA-A*03:02,HLA-A*11:01,HLA-B*27:02
SVILTLVPVK

SEQ ID NO: 2681 - protein, 9 aa, Homo sapiens
  Table 1.2; DPPA2; ENSG00000163530; HLA -A*03:02,HLA-A*11:01
SVSSTSDVK

SEQ ID NO: 2682 - protein, 10 aa, Homo sapiens
  Table 1.2; DPPA2; ENSG00000163530; HLA -B*35:03
SVSSTSDVKL

SEQ ID NO: 2683 - protein, 8 aa, Homo sapiens
  Table 1.2; DPPA2; ENSG00000163530; HLA -A*03:01,HLA-A*03:02,HLA-A*11:01
TILPPINK

SEQ ID NO: 2684 - protein, 9 aa, Homo sapiens
  Table 1.2; DPPA2; ENSG00000163530; HLA -A*02:01,HLA-A*02:03,HLA-A*02:04,HLA-A*02:07,HLA-A*68:02, HLA-B*13:02,HLA-B*51:01,HLA-B*55:01
TILPPINKV

SEQ ID NO: 2685 - protein, 11 aa, Homo sapiens
  Table 1.2; DPPA2; ENSG00000163530; HLA -A*31:01
TILPPINKVCR

SEQ ID NO: 2686 - protein, 9 aa, Homo sapiens
  Table 1.2; DPPA2; ENSG00000163530; HLA -A*02:03,HLA-A*02:04
TLRDWCQQL

SEQ ID NO: 2687 - protein, 10 aa, Homo sapiens
  Table 1.2; DPPA2; ENSG00000163530; HLA -B*27:02
TNEQFTAPQK

SEQ ID NO: 2688 - protein, 9 aa, Homo sapiens
  Table 1.2; DPPA2; ENSG00000163530; HLA -B*39:01
TNTVEVITS

SEQ ID NO: 2689 - protein, 8 aa, Homo sapiens
  Table 1.2; DPPA2; ENSG00000163530; HLA -C*01:02,HLA-C*03:03,HLA-C*03:04
TSAPGAML

SEQ ID NO: 2690 - protein, 9 aa, Homo sapiens
  Table 1.2; DPPA2; ENSG00000163530; HLA -B*54:01,HLA-C*06:02
TSAPGAMLA

SEQ ID NO: 2691 - protein, 11 aa, Homo sapiens
  Table 1.2; DPPA2; ENSG00000163530; HLA -A*25:01,HLA-A*26:01,HLA-A*31:01,HLA-A*32:01,HLA-A*33:03, HLA-B*44:03,HLA-B*57:01,HLA-B*58:01,HLA-C*16:04
TSAPGAMLASW

SEQ ID NO: 2692 - protein, 9 aa, Homo sapiens
  Table 1.2; DPPA2; ENSG00000163530; HLA -B*08:01
TTHRRMISL

SEQ ID NO: 2693 - protein, 8 aa, Homo sapiens
  Table 1.2; DPPA2; ENSG00000163530; HLA -C*05:01
VDDEESVI

SEQ ID NO: 2694 - protein, 9 aa, Homo sapiens
  Table 1.2; DPPA2; ENSG00000163530; HLA -B*38:01,HLA-B*40:01
VDDEESVIL

SEQ ID NO: 2695 - protein, 11 aa, Homo sapiens
  Table 1.2; DPPA2; ENSG00000163530; HLA -A*02:07
VDDEESVILTL

SEQ ID NO: 2696 - protein, 8 aa, Homo sapiens
  Table 1.2; DPPA2; ENSG00000163530; HLA -B*18:01,HLA-B*49:01
VEAFLMQA

SEQ ID NO: 2697 - protein, 8 aa, Homo sapiens
  Table 1.2; DPPA2; ENSG00000163530; HLA -B*18:01,HLA-B*40:02,HLA-B*49:01
VEVITSAP

SEQ ID NO: 2698 - protein, 9 aa, Homo sapiens
  Table 1.2; DPPA2; ENSG00000163530; HLA -B*40:02,HLA-B*49:01
VEVITSAPG

SEQ ID NO: 2699 - protein, 11 aa, Homo sapiens
  Table 1.2; DPPA2; ENSG00000163530; HLA -A*30:01,HLA-B*18:01,HLA-B*40:01,HLA-B*40:02
VEVITSAPGAM

SEQ ID NO: 2700 - protein, 9 aa, Homo sapiens
  Table 1.2; DPPA2; ENSG00000163530; HLA -A*03:01,HLA-A*03:02,HLA-A*11:01,HLA-B*27:02
VILTLVPVK

SEQ ID NO: 2701 - protein, 9 aa, Homo sapiens
  Table 1.2; DPPA2; ENSG00000163530; HLA -B*39:01
VITSAPGAM

SEQ ID NO: 2702 - protein, 10 aa, Homo sapiens
  Table 1.2; DPPA2; ENSG00000163530; HLA -A*23:01,HLA-B*39:01
VITSAPGAML

SEQ ID NO: 2703 - protein, 11 aa, Homo sapiens
  Table 1.2; DPPA2; ENSG00000163530; HLA -B*07:02
VPTTHRRMISL

SEQ ID NO: 2704 - protein, 9 aa, Homo sapiens
  Table 1.2; DPPA2; ENSG00000163530; HLA -B*07:02,HLA-B*35:01,HLA-B*35:03,HLA-B*55:01,HLA-B*56:01, HLA-C*03:03
VPVKDDANM

SEQ ID NO: 2705 - protein, 9 aa, Homo sapiens
  Table 1.2; DPPA2; ENSG00000163530; HLA -B*38:01,HLA-B*40:01,HLA-B*58:01
VSSTSDVKL

SEQ ID NO: 2706 - protein, 11 aa, Homo sapiens
  Table 1.2; DPPA2; ENSG00000163530; HLA -A*01:01,HLA-A*03:01,HLA-A*03:02,HLA-A*11:01
VSSTSDVKLEK

SEQ ID NO: 2707 - protein, 9 aa, Homo sapiens
  Table 1.2; DPPA2; ENSG00000163530; HLA -A*02:03,HLA-A*32:01,HLA-B*08:01,HLA-B*40:02,HLA-B*46:01, HLA-B*54:01,HLA-B*55:01,HLA-B*56:01
VVHGRLLSA

SEQ ID NO: 2708 - protein, 8 aa, Homo sapiens
  Table 1.2; DPPA2; ENSG00000163530; HLA -B*08:01
YPEQRQDM

SEQ ID NO: 2709 - protein, 9 aa, Homo sapiens
  Table 1.2; DPPA2; ENSG00000163530; HLA -B*55:01
YPEQRQDMP

SEQ ID NO: 2710 - protein, 11 aa, Homo sapiens
  Table 1.2; DPPA2; ENSG00000163530; HLA -B*35:01,HLA-B*35:03,HLA-B*55:01
YPEQRQDMPEM

SEQ ID NO: 2711 - protein, 11 aa, Homo sapiens
  Table 1.2; FMR1NB; ENSG00000176988; HLA -B*58:01
AAMADRPQPGW

SEQ ID NO: 2712 - protein, 8 aa, Homo sapiens
  Table 1.2; FMR1NB; ENSG00000176988; HLA -A*32:01,HLA-B*37:01,HLA-B*44:02,HLA-B*57:01
ADRPQPGW

SEQ ID NO: 2713 - protein, 10 aa, Homo sapiens
  Table 1.2; FMR1NB; ENSG00000176988; HLA -B*38:01,HLA-B*39:01
AHLELATYEL

SEQ ID NO: 2714 - protein, 10 aa, Homo sapiens
  Table 1.2; FMR1NB; ENSG00000176988; HLA -A*25:01,HLA-A*32:01,HLA-B*57:01,HLA-B*58:01
AMADRPQPGW

SEQ ID NO: 2715 - protein, 9 aa, Homo sapiens
  Table 1.2; FMR1NB; ENSG00000176988; HLA -B*07:02
AMRVAHLEL

SEQ ID NO: 2716 - protein, 10 aa, Homo sapiens
  Table 1.2; FMR1NB; ENSG00000176988; HLA -B*07:02,HLA-C*07:02
APFRDVPKQM

SEQ ID NO: 2717 - protein, 10 aa, Homo sapiens
  Table 1.2; FMR1NB; ENSG00000176988; HLA -A*23:01,HLA-A*24:02,HLA-C*14:02
CFSSSGTTSF

SEQ ID NO: 2718 - protein, 9 aa, Homo sapiens
  Table 1.2; FMR1NB; ENSG00000176988; HLA -A*33:01,HLA-A*33:03
DLSESECLR

SEQ ID NO: 2719 - protein, 8 aa, Homo sapiens
  Table 1.2; FMR1NB; ENSG00000176988; HLA -A*33:01,HLA-B*08:01,HLA-B*18:01
DNRVVTGL

SEQ ID NO: 2720 - protein, 9 aa, Homo sapiens
  Table 1.2; FMR1NB; ENSG00000176988; HLA -A*33:01
DNRVVTGLK

SEQ ID NO: 2721 - protein, 10 aa, Homo sapiens
  Table 1.2; FMR1NB; ENSG00000176988; HLA -A*33:01
DNRVVTGLKK

SEQ ID NO: 2722 - protein, 10 aa, Homo sapiens
  Table 1.2; FMR1NB; ENSG00000176988; HLA -A*25:01
DSALEALLNF

SEQ ID NO: 2723 - protein, 9 aa, Homo sapiens
  Table 1.2; FMR1NB; ENSG00000176988; HLA -A*25:01,HLA-A*26:01
DVPKQMMQM

SEQ ID NO: 2724 - protein, 10 aa, Homo sapiens
  Table 1.2; FMR1NB; ENSG00000176988; HLA -A*25:01,HLA-A*26:01
DVPKQMMQMF

SEQ ID NO: 2725 - protein, 9 aa, Homo sapiens
  Table 1.2; FMR1NB; ENSG00000176988; HLA -A*30:01,HLA-B*40:01
EEDSALEAL

SEQ ID NO: 2726 - protein, 10 aa, Homo sapiens
  Table 1.2; FMR1NB; ENSG00000176988; HLA -B*40:01
EEDSALEALL

SEQ ID NO: 2727 - protein, 8 aa, Homo sapiens
  Table 1.2; FMR1NB; ENSG00000176988; HLA -A*33:03
EMLQKAAR

SEQ ID NO: 2728 - protein, 11 aa, Homo sapiens
  Table 1.2; FMR1NB; ENSG00000176988; HLA -A*01:01,HLA-A*25:01,HLA-A*26:01,HLA-A*29:02,HLA-A*30:02, HLA-A*32:01,HLA-A*33:01,HLA-A*33:03,HLA-B*58:01
ESNPESSHPGY

SEQ ID NO: 2729 - protein, 9 aa, Homo sapiens
  Table 1.2; FMR1NB; ENSG00000176988; HLA -A*23:01,HLA-A*24:02,HLA-A*29:02,HLA-C*14:02
FFFPTTCNL

SEQ ID NO: 2730 - protein, 9 aa, Homo sapiens
  Table 1.2; FMR1NB; ENSG00000176988; HLA -A*01:01,HLA-A*23:01,HLA-A*25:01,HLA-A*26:01,HLA-A*32:01, HLA-B*15:01,HLA-B*15:03,HLA-B*27:05,HLA-B*35:01,HLA-B*38:01, HLA-B*39:01,HLA-B*46:01,HLA-B*58:01,HLA-C*01:02,HLA-C*02:02,
  HLA-C*03:03,HLA-C*03:04,HLA-C*05:01,HLA-C*07:04,HLA-C*14:02, HLA-C*16:01
FSSSGTTSF

SEQ ID NO: 2731 - protein, 10 aa, Homo sapiens
  Table 1.2; FMR1NB; ENSG00000176988; HLA -A*01:01
FSSSGTTSFK

SEQ ID NO: 2732 - protein, 9 aa, Homo sapiens
  Table 1.2; FMR1NB; ENSG00000176988; HLA -A*02:04,HLA-B*35:03,HLA-C*03:04
FVLANGHIL

SEQ ID NO: 2733 - protein, 9 aa, Homo sapiens
  Table 1.2; FMR1NB; ENSG00000176988; HLA -C*12:03
GAISLILVC

SEQ ID NO: 2734 - protein, 10 aa, Homo sapiens
  Table 1.2; FMR1NB; ENSG00000176988; HLA -A*02:01,HLA-A*02:03,HLA-A*02:04
GLGAISLILV

SEQ ID NO: 2735 - protein, 10 aa, Homo sapiens
  Table 1.2; FMR1NB; ENSG00000176988; HLA -B*27:05
GQSLEEDSAL

SEQ ID NO: 2736 - protein, 9 aa, Homo sapiens
  Table 1.2; FMR1NB; ENSG00000176988; HLA -A*02:04,HLA-A*02:07,HLA-B*35:03,HLA-B*38:01
HLELATYEL

SEQ ID NO: 2737 - protein, 8 aa, Homo sapiens
  Table 1.2; FMR1NB; ENSG00000176988; HLA -B*35:01,HLA-B*35:03,HLA-B*55:01
HPGYEAAM

SEQ ID NO: 2738 - protein, 9 aa, Homo sapiens
  Table 1.2; FMR1NB; ENSG00000176988; HLA -B*35:03,HLA-B*54:01,HLA-B*55:01,HLA-B*56:01
HPGYEAAMA

SEQ ID NO: 2739 - protein, 8 aa, Homo sapiens
  Table 1.2; FMR1NB; ENSG00000176988; HLA -B*18:01
LEALLNFF

SEQ ID NO: 2740 - protein, 10 aa, Homo sapiens
  Table 1.2; FMR1NB; ENSG00000176988; HLA -A*30:01,HLA-B*40:01
LEEDSALEAL

SEQ ID NO: 2741 - protein, 11 aa, Homo sapiens
  Table 1.2; FMR1NB; ENSG00000176988; HLA -B*40:01
LEEDSALEALL

SEQ ID NO: 2742 - protein, 8 aa, Homo sapiens
  Table 1.2; FMR1NB; ENSG00000176988; HLA -A*30:01,HLA-B*18:01,HLA-B*37:01,HLA-B*40:01,HLA-B*40:02, HLA-B*49:01
LELATYEL

SEQ ID NO: 2743 - protein, 9 aa, Homo sapiens
  Table 1.2; FMR1NB; ENSG00000176988; HLA -A*29:02
LFVCYYLSY

SEQ ID NO: 2744 - protein, 10 aa, Homo sapiens
  Table 1.2; FMR1NB; ENSG00000176988; HLA -B*27:05,HLA-B*38:01
LQDLSESECL

SEQ ID NO: 2745 - protein, 9 aa, Homo sapiens
  Table 1.2; FMR1NB; ENSG00000176988; HLA -A*01:01,HLA-A*25:01,HLA-B*51:01,HLA-B*57:01,HLA-B*58:01
MADRPQPGW

SEQ ID NO: 2746 - protein, 9 aa, Homo sapiens
  Table 1.2; FMR1NB; ENSG00000176988; HLA -C*14:02
MFGLGAISL

SEQ ID NO: 2747 - protein, 9 aa, Homo sapiens
  Table 1.2; FMR1NB; ENSG00000176988; HLA -A*02:04
MLSIWILLF

SEQ ID NO: 2748 - protein, 9 aa, Homo sapiens
  Table 1.2; FMR1NB; ENSG00000176988; HLA -B*13:02
MQMFGLGAI

SEQ ID NO: 2749 - protein, 9 aa, Homo sapiens
  Table 1.2; FMR1NB; ENSG00000176988; HLA -A*03:01
NLRENQVAK

SEQ ID NO: 2750 - protein, 9 aa, Homo sapiens
  Table 1.2; FMR1NB; ENSG00000176988; HLA -A*29:02,HLA-A*30:02,HLA-B*35:01,HLA-B*55:01,HLA-C*03:03
NPESSHPGY

SEQ ID NO: 2751 - protein, 11 aa, Homo sapiens
  Table 1.2; FMR1NB; ENSG00000176988; HLA -B*54:01
NPESSHPGYEA

SEQ ID NO: 2752 - protein, 10 aa, Homo sapiens
  Table 1.2; FMR1NB; ENSG00000176988; HLA -B*27:02
QDLSESECLR

SEQ ID NO: 2753 - protein, 9 aa, Homo sapiens
  Table 1.2; FMR1NB; ENSG00000176988; HLA -A*30:01,HLA-B*37:01,HLA-B*40:02,HLA-B*44:03
QDNRVVTGL

SEQ ID NO: 2754 - protein, 10 aa, Homo sapiens
  Table 1.2; FMR1NB; ENSG00000176988; HLA -A*02:01,HLA-A*02:03
QMFGLGAISL

SEQ ID NO: 2755 - protein, 8 aa, Homo sapiens
  Table 1.2; FMR1NB; ENSG00000176988; HLA -B*08:01
RAMRVAHL

SEQ ID NO: 2756 - protein, 8 aa, Homo sapiens
  Table 1.2; FMR1NB; ENSG00000176988; HLA -B*37:01
RDVPKQMM

SEQ ID NO: 2757 - protein, 10 aa, Homo sapiens
  Table 1.2; FMR1NB; ENSG00000176988; HLA -B*07:02,HLA-C*07:02
RPQPGWRESL

SEQ ID NO: 2758 - protein, 10 aa, Homo sapiens
  Table 1.2; FMR1NB; ENSG00000176988; HLA -B*38:01
RQDNRVVTGL

SEQ ID NO: 2759 - protein, 10 aa, Homo sapiens
  Table 1.2; FMR1NB; ENSG00000176988; HLA -A*25:01,HLA-A*26:01,HLA-A*29:02,HLA-A*30:02,HLA-A*32:01, HLA-B*15:01,HLA-B*27:02,HLA-B*57:01,HLA-B*58:01
RVAHLELATY

SEQ ID NO: 2760 - protein, 9 aa, Homo sapiens
  Table 1.2; FMR1NB; ENSG00000176988; HLA -A*03:01
RVSKPFGML

SEQ ID NO: 2761 - protein, 10 aa, Homo sapiens
  Table 1.2; FMR1NB; ENSG00000176988; HLA -A*31:01
RVVTGLKKQR

SEQ ID NO: 2762 - protein, 9 aa, Homo sapiens
  Table 1.2; FMR1NB; ENSG00000176988; HLA -A*23:01,HLA-A*25:01,HLA-A*29:02
SALEALLNF

SEQ ID NO: 2763 - protein, 9 aa, Homo sapiens
  Table 1.2; FMR1NB; ENSG00000176988; HLA -B*44:02,HLA-B*44:03
SEMLQKAAR

SEQ ID NO: 2764 - protein, 9 aa, Homo sapiens
  Table 1.2; FMR1NB; ENSG00000176988; HLA -A*30:01,HLA-B*18:01,HLA-B*27:02,HLA-B*37:01,HLA-B*40:01, HLA-B*40:02,HLA-B*44:02,HLA-B*44:03,HLA-B*49:01,HLA-C*16:04
SENAHGQSL

SEQ ID NO: 2765 - protein, 9 aa, Homo sapiens
  Table 1.2; FMR1NB; ENSG00000176988; HLA -B*39:01
SHPGYEAAM

SEQ ID NO: 2766 - protein, 8 aa, Homo sapiens
  Table 1.2; FMR1NB; ENSG00000176988; HLA -B*08:01
SLKMRVSK

SEQ ID NO: 2767 - protein, 10 aa, Homo sapiens
  Table 1.2; FMR1NB; ENSG00000176988; HLA -A*26:01,HLA-A*29:02,HLA-A*30:02
SNPESSHPGY

SEQ ID NO: 2768 - protein, 8 aa, Homo sapiens
  Table 1.2; FMR1NB; ENSG00000176988; HLA -A*03:02,HLA-A*11:01
SSGTTSFK

SEQ ID NO: 2769 - protein, 8 aa, Homo sapiens
  Table 1.2; FMR1NB; ENSG00000176988; HLA -A*32:01,HLA-C*05:01
SSSGTTSF

SEQ ID NO: 2770 - protein, 9 aa, Homo sapiens
  Table 1.2; FMR1NB; ENSG00000176988; HLA -A*03:01,HLA-A*03:02,HLA-A*11:01
SSSGTTSFK

SEQ ID NO: 2771 - protein, 10 aa, Homo sapiens
  Table 1.2; FMR1NB; ENSG00000176988; HLA -A*30:02,HLA-C*14:02
SYYLCSGSSY

SEQ ID NO: 2772 - protein, 9 aa, Homo sapiens
  Table 1.2; FMR1NB; ENSG00000176988; HLA -A*01:01,HLA-A*23:01,HLA-A*25:01,HLA-A*26:01,HLA-A*29:02, HLA-A*30:02,HLA-A*32:01,HLA-B*15:01,HLA-B*15:03,HLA-B*18:01, HLA-B*27:05,HLA-B*35:01,HLA-B*39:01,HLA-B*46:01,HLA-B*51:01,
  HLA-B*54:01,HLA-B*55:01,HLA-B*56:01,HLA-B*57:01,HLA-B*58:01, HLA-C*01:02,HLA-C*02:02,HLA-C*03:03,HLA-C*03:04,HLA-C*07:04, HLA-C*12:03,HLA-C*14:02,HLA-C*16:01,HLA-C*16:02,HLA-C*16:04
VAHLELATY

SEQ ID NO: 2773 - protein, 8 aa, Homo sapiens
  Table 1.2; FMR1NB; ENSG00000176988; HLA -B*08:01
VAKPCNEL

SEQ ID NO: 2774 - protein, 8 aa, Homo sapiens
  Table 1.2; FMR1NB; ENSG00000176988; HLA -B*08:01
VPKQMMQM

SEQ ID NO: 2775 - protein, 9 aa, Homo sapiens
  Table 1.2; FMR1NB; ENSG00000176988; HLA -A*31:01,HLA-A*32:01,HLA-B*40:02,HLA-B*46:01,HLA-B*57:01, HLA-B*58:01,HLA-C*02:02,HLA-C*12:03
VSKPFGMLM

SEQ ID NO: 2776 - protein, 9 aa, Homo sapiens
  Table 1.2; FMR1NB; ENSG00000176988; HLA -A*31:01,HLA-A*33:01
VVTGLKKQR

SEQ ID NO: 2777 - protein, 8 aa, Homo sapiens
  Table 1.2; FMR1NB; ENSG00000176988; HLA -B*18:01
YELAATES

SEQ ID NO: 2778 - protein, 9 aa, Homo sapiens
  Table 1.2; FMR1NB; ENSG00000176988; HLA -B*18:01,HLA-B*40:02,HLA-B*49:01
YELAATESN

SEQ ID NO: 2779 - protein, 8 aa, Homo sapiens
  Table 1.2; FMR1NB; ENSG00000176988; HLA -B*46:01
YLCSGSSY

SEQ ID NO: 2780 - protein, 9 aa, Homo sapiens
  Table 1.2; FMR1NB; ENSG00000176988; HLA -A*29:02,HLA-A*30:02,HLA-B*15:03,HLA-C*14:02
YYLCSGSSY

SEQ ID NO: 2781 - protein, 10 aa, Homo sapiens
  Table 1.2; FMR1NB; ENSG00000176988; HLA -A*23:01,HLA-A*24:02
YYLCSGSSYF

SEQ ID NO: 2782 - protein, 9 aa, Homo sapiens
  Table 1.2; FTHL17; ENSG00000132446; HLA -A*02:01,HLA-A*02:04,HLA-A*02:07,HLA-A*11:01,HLA-A*23:01, HLA-A*24:02,HLA-A*25:01,HLA-A*30:01,HLA-A*31:01,HLA-A*32:01, HLA-A*68:02,HLA-B*07:02,HLA-B*08:01,HLA-B*15:01,HLA-B*15:03,
  HLA-B*27:05,HLA-B*35:01,HLA-B*35:03,HLA-B*38:01,HLA-B*39:01, HLA-B*40:01,HLA-B*40:02,HLA-B*44:02,HLA-B*44:03,HLA-B*46:01, HLA-B*55:01,HLA-B*57:01,HLA-B*58:01,HLA-C*01:02,HLA-C*02:02, HLA-C*03:03,HLA-C*03:04,HLA-C*05:01,HLA-C*07:02,HLA-C*07:04,
  HLA-C*07:06,HLA-C*12:03,HLA-C*14:02,HLA-C*16:01,HLA-C*16:02, HLA-C*16:04
AAINSHITL

SEQ ID NO: 2783 - protein, 11 aa, Homo sapiens
  Table 1.2; FTHL17; ENSG00000132446; HLA -B*46:01,HLA-B*58:01,HLA-C*02:02,HLA-C*03:03,HLA-C*03:04, HLA-C*16:04
AAINSHITLEL

SEQ ID NO: 2784 - protein, 8 aa, Homo sapiens
  Table 1.2; FTHL17; ENSG00000132446; HLA -A*30:01,HLA-B*18:01,HLA-B*37:01,HLA-B*40:01,HLA-B*40:02, HLA-B*44:02,HLA-B*44:03,HLA-B*49:01
AEYLFDKL

SEQ ID NO: 2785 - protein, 9 aa, Homo sapiens
  Table 1.2; FTHL17; ENSG00000132446; HLA -B*49:01
AEYLFDKLT

SEQ ID NO: 2786 - protein, 10 aa, Homo sapiens
  Table 1.2; FTHL17; ENSG00000132446; HLA -A*30:01,HLA-B*18:01,HLA-B*37:01,HLA-B*40:01,HLA-B*40:02, HLA-B*44:02,HLA-B*44:03,HLA-B*49:01,HLA-C*16:04
AEYLFDKLTL

SEQ ID NO: 2787 - protein, 8 aa, Homo sapiens
  Table 1.2; FTHL17; ENSG00000132446; HLA -A*32:01,HLA-B*08:01,HLA-B*37:01,HLA-B*58:01,HLA-C*01:02, HLA-C*16:01
AINSHITL

SEQ ID NO: 2788 - protein, 9 aa, Homo sapiens
  Table 1.2; FTHL17; ENSG00000132446; HLA -A*03:01
AINSHITLE

SEQ ID NO: 2789 - protein, 10 aa, Homo sapiens
  Table 1.2; FTHL17; ENSG00000132446; HLA -A*02:03,HLA-A*02:04,HLA-A*03:01,HLA-B*07:02,HLA-B*46:01
AINSHITLEL

SEQ ID NO: 2790 - protein, 11 aa, Homo sapiens
  Table 1.2; FTHL17; ENSG00000132446; HLA -A*01:01,HLA-A*29:02,HLA-A*30:02,HLA-B*15:01,HLA-B*46:01
AINSHITLELY

SEQ ID NO: 2791 - protein, 8 aa, Homo sapiens
  Table 1.2; FTHL17; ENSG00000132446; HLA -A*01:01
ALENFFRY

SEQ ID NO: 2792 - protein, 9 aa, Homo sapiens
  Table 1.2; FTHL17; ENSG00000132446; HLA -A*02:07
ALENFFRYF

SEQ ID NO: 2793 - protein, 10 aa, Homo sapiens
  Table 1.2; FTHL17; ENSG00000132446; HLA -A*02:01,HLA-A*02:04
ALENFFRYFL

SEQ ID NO: 2794 - protein, 9 aa, Homo sapiens
  Table 1.2; FTHL17; ENSG00000132446; HLA -A*03:01,HLA-A*03:02,HLA-A*11:01
AQPSQVRQK

SEQ ID NO: 2795 - protein, 10 aa, Homo sapiens
  Table 1.2; FTHL17; ENSG00000132446; HLA -A*29:02,HLA-A*30:02,HLA-A*32:01,HLA-B*15:01,HLA-B*15:03, HLA-B*44:03,HLA-C*16:04
AQPSQVRQKY

SEQ ID NO: 2796 - protein, 9 aa, Homo sapiens
  Table 1.2; FTHL17; ENSG00000132446; HLA -A*03:01,HLA-A*03:02,HLA-A*11:01,HLA-A*31:01,HLA-A*32:01, HLA-A*33:01,HLA-A*33:03,HLA-A*68:01,HLA-B*27:05,HLA-B*57:01, HLA-C*07:06
ATAQPSQVR

SEQ ID NO: 2797 - protein, 10 aa, Homo sapiens
  Table 1.2; FTHL17; ENSG00000132446; HLA -A*11:01
ATAQPSQVRQ

SEQ ID NO: 2798 - protein, 11 aa, Homo sapiens
  Table 1.2; FTHL17; ENSG00000132446; HLA -A*03:01,HLA-A*03:02,HLA-A*11:01,HLA-A*31:01,HLA-A*68:01, HLA-C*07:06
ATAQPSQVRQK

SEQ ID NO: 2799 - protein, 9 aa, Homo sapiens
  Table 1.2; FTHL17; ENSG00000132446; HLA -B*35:03,HLA-B*38:01,HLA-B*40:01,HLA-B*55:01,HLA-C*05:01
AVEKGDPQL

SEQ ID NO: 2800 - protein, 9 aa, Homo sapiens
  Table 1.2; FTHL17; ENSG00000132446; HLA -B*13:02,HLA-B*38:01,HLA-B*40:02,HLA-B*49:01
CDAAINSHI

SEQ ID NO: 2801 - protein, 9 aa, Homo sapiens
  Table 1.2; FTHL17; ENSG00000132446; HLA -B*38:01
CHFLESHYL

SEQ ID NO: 2802 - protein, 10 aa, Homo sapiens
  Table 1.2; FTHL17; ENSG00000132446; HLA -A*01:01,HLA-A*30:02,HLA-B*46:01,HLA-C*01:02
CSPEAGLAEY

SEQ ID NO: 2803 - protein, 8 aa, Homo sapiens
  Table 1.2; FTHL17; ENSG00000132446; HLA -A*33:01,HLA-B*51:01
DAAINSHI

SEQ ID NO: 2804 - protein, 10 aa, Homo sapiens
  Table 1.2; FTHL17; ENSG00000132446; HLA -A*33:01,HLA-A*68:01,HLA-B*35:03,HLA-B*51:01,HLA-C*07:06
DAAINSHITL

SEQ ID NO: 2805 - protein, 9 aa, Homo sapiens
  Table 1.2; FTHL17; ENSG00000132446; HLA -A*33:01
DDKMEHAQK

SEQ ID NO: 2806 - protein, 8 aa, Homo sapiens
  Table 1.2; FTHL17; ENSG00000132446; HLA -B*18:01
DDVALENF

SEQ ID NO: 2807 - protein, 9 aa, Homo sapiens
  Table 1.2; FTHL17; ENSG00000132446; HLA -B*18:01
DDVALENFF

SEQ ID NO: 2808 - protein, 9 aa, Homo sapiens
  Table 1.2; FTHL17; ENSG00000132446; HLA -A*03:01,HLA-A*03:02,HLA-A*11:01,HLA-A*26:01,HLA-A*33:01, HLA-A*33:03,HLA-A*68:01,HLA-B*18:01,HLA-B*27:02,HLA-B*27:05, HLA-C*07:06
DLYQLAVEK

SEQ ID NO: 2809 - protein, 9 aa, Homo sapiens
  Table 1.2; FTHL17; ENSG00000132446; HLA -A*33:01,HLA-A*33:03,HLA-A*68:01
DVALENFFR

SEQ ID NO: 2810 - protein, 10 aa, Homo sapiens
  Table 1.2; FTHL17; ENSG00000132446; HLA -A*01:01,HLA-A*25:01,HLA-A*26:01
DVALENFFRY

SEQ ID NO: 2811 - protein, 9 aa, Homo sapiens
  Table 1.2; FTHL17; ENSG00000132446; HLA -B*38:01
EHAQKLMRL

SEQ ID NO: 2812 - protein, 9 aa, Homo sapiens
  Table 1.2; FTHL17; ENSG00000132446; HLA -A*02:03,HLA-A*25:01,HLA-A*26:01,HLA-A*33:03,HLA-A*68:02
ELGGYVSNL

SEQ ID NO: 2813 - protein, 10 aa, Homo sapiens
  Table 1.2; FTHL17; ENSG00000132446; HLA -A*33:03,HLA-A*68:01
ELGGYVSNLR

SEQ ID NO: 2814 - protein, 8 aa, Homo sapiens
  Table 1.2; FTHL17; ENSG00000132446; HLA -A*29:02
ELYTSYLY

SEQ ID NO: 2815 - protein, 9 aa, Homo sapiens
  Table 1.2; FTHL17; ENSG00000132446; HLA -A*01:01,HLA-A*02:01,HLA-A*02:03,HLA-A*02:04,HLA-A*02:07, HLA-A*03:01,HLA-A*25:01,HLA-A*26:01,HLA-A*68:02
ELYTSYLYL

SEQ ID NO: 2816 - protein, 9 aa, Homo sapiens
  Table 1.2; FTHL17; ENSG00000132446; HLA -A*25:01,HLA-A*26:01,HLA-B*38:01,HLA-B*39:01,HLA-B*40:02, HLA-B*44:02,HLA-B*44:03
EQVKTIKEL

SEQ ID NO: 2817 - protein, 10 aa, Homo sapiens
  Table 1.2; FTHL17; ENSG00000132446; HLA -A*68:02
ESAFHLEKNV

SEQ ID NO: 2818 - protein, 11 aa, Homo sapiens
  Table 1.2; FTHL17; ENSG00000132446; HLA -C*07:01
ESGLVAMESAF

SEQ ID NO: 2819 - protein, 9 aa, Homo sapiens
  Table 1.2; FTHL17; ENSG00000132446; HLA -A*01:01,HLA-A*68:02
ESHYLHEQV

SEQ ID NO: 2820 - protein, 9 aa, Homo sapiens
  Table 1.2; FTHL17; ENSG00000132446; HLA -A*23:01,HLA-A*24:02,HLA-A*33:03
EYLFDKLTL

SEQ ID NO: 2821 - protein, 8 aa, Homo sapiens
  Table 1.2; FTHL17; ENSG00000132446; HLA -C*07:04
FDKLTLGG

SEQ ID NO: 2822 - protein, 11 aa, Homo sapiens
  Table 1.2; FTHL17; ENSG00000132446; HLA -B*38:01
FHLEKNVNQSL

SEQ ID NO: 2823 - protein, 10 aa, Homo sapiens
  Table 1.2; FTHL17; ENSG00000132446; HLA -A*23:01,HLA-A*24:02
FYFNRDDVAL

SEQ ID NO: 2824 - protein, 9 aa, Homo sapiens
  Table 1.2; FTHL17; ENSG00000132446; HLA -A*03:01,HLA-A*11:01
GGYVSNLRK

SEQ ID NO: 2825 - protein, 9 aa, Homo sapiens
  Table 1.2; FTHL17; ENSG00000132446; HLA -A*03:01,HLA-A*03:02,HLA-A*11:01,HLA-B*27:02
GLAEYLFDK

SEQ ID NO: 2826 - protein, 10 aa, Homo sapiens
  Table 1.2; FTHL17; ENSG00000132446; HLA -A*02:01,HLA-A*02:03,HLA-A*02:04,HLA-A*02:07,HLA-A*68:02
GLAEYLFDKL

SEQ ID NO: 2827 - protein, 9 aa, Homo sapiens
  Table 1.2; FTHL17; ENSG00000132446; HLA -A*26:01,HLA-B*15:01,HLA-B*15:03,HLA-B*46:01,HLA-B*55:01, HLA-C*07:04
GLVAMESAF

SEQ ID NO: 2828 - protein, 9 aa, Homo sapiens
  Table 1.2; FTHL17; ENSG00000132446; HLA -C*04:01
GWESGLVAM

SEQ ID NO: 2829 - protein, 9 aa, Homo sapiens
  Table 1.2; FTHL17; ENSG00000132446; HLA -A*23:01,HLA-A*24:02
GYVSNLRKI

SEQ ID NO: 2830 - protein, 10 aa, Homo sapiens
  Table 1.2; FTHL17; ENSG00000132446; HLA -A*25:01,HLA-A*30:02,HLA-B*35:01
HITLELYTSY

SEQ ID NO: 2831 - protein, 10 aa, Homo sapiens
  Table 1.2; FTHL17; ENSG00000132446; HLA -A*23:01,HLA-A*24:02
HYLHEQVKTI

SEQ ID NO: 2832 - protein, 11 aa, Homo sapiens
  Table 1.2; FTHL17; ENSG00000132446; HLA -A*29:02,HLA-A*30:02,HLA-B*15:01
ICSPEAGLAEY

SEQ ID NO: 2833 - protein, 9 aa, Homo sapiens
  Table 1.2; FTHL17; ENSG00000132446; HLA -A*23:01,HLA-A*29:02,HLA-A*68:02,HLA-B*27:05,HLA-C*06:02
INSHITLEL

SEQ ID NO: 2834 - protein, 10 aa, Homo sapiens
  Table 1.2; FTHL17; ENSG00000132446; HLA -A*29:02
INSHITLELY

SEQ ID NO: 2835 - protein, 9 aa, Homo sapiens
  Table 1.2; FTHL17; ENSG00000132446; HLA -A*01:01,HLA-A*03:01,HLA-A*11:01,HLA-A*23:01,HLA-A*25:01, HLA-A*26:01,HLA-A*29:02,HLA-A*30:02,HLA-A*32:01,HLA-A*33:01, HLA-A*33:03,HLA-B*15:01,HLA-B*15:03,HLA-B*18:01,HLA-B*27:02,
  HLA-B*35:01,HLA-B*46:01,HLA-B*57:01,HLA-B*58:01,HLA-C*02:02, HLA-C*14:02,HLA-C*16:04
ITLELYTSY

SEQ ID NO: 2836 - protein, 11 aa, Homo sapiens
  Table 1.2; FTHL17; ENSG00000132446; HLA -A*29:02
ITLELYTSYLY

SEQ ID NO: 2837 - protein, 10 aa, Homo sapiens
  Table 1.2; FTHL17; ENSG00000132446; HLA -A*30:01,HLA-B*40:01,HLA-B*40:02,HLA-B*49:01
KELGGYVSNL

SEQ ID NO: 2838 - protein, 8 aa, Homo sapiens
  Table 1.2; FTHL17; ENSG00000132446; HLA -A*02:04
KLMRLQNL

SEQ ID NO: 2839 - protein, 9 aa, Homo sapiens
  Table 1.2; FTHL17; ENSG00000132446; HLA -A*31:01
KLMRLQNLR

SEQ ID NO: 2840 - protein, 11 aa, Homo sapiens
  Table 1.2; FTHL17; ENSG00000132446; HLA -A*29:02,HLA-A*30:02
KNVNQSLLDLY

SEQ ID NO: 2841 - protein, 9 aa, Homo sapiens
  Table 1.2; FTHL17; ENSG00000132446; HLA -A*01:01,HLA-A*25:01,HLA-A*26:01,HLA-A*29:02,HLA-A*30:02, HLA-A*32:01,HLA-B*15:01,HLA-B*57:01,HLA-B*58:01
KTIKELGGY

SEQ ID NO: 2842 - protein, 10 aa, Homo sapiens
  Table 1.2; FTHL17; ENSG00000132446; HLA -B*40:02
KTIKELGGYV

SEQ ID NO: 2843 - protein, 10 aa, Homo sapiens
  Table 1.2; FTHL17; ENSG00000132446; HLA -B*35:03,HLA-C*03:03,HLA-C*03:04
LAVEKGDPQL

SEQ ID NO: 2844 - protein, 10 aa, Homo sapiens
  Table 1.2; FTHL17; ENSG00000132446; HLA -B*27:02
LDLYQLAVEK

SEQ ID NO: 2845 - protein, 9 aa, Homo sapiens
  Table 1.2; FTHL17; ENSG00000132446; HLA -A*23:01,HLA-A*30:01,HLA-B*07:02,HLA-B*08:01,HLA-B*18:01, HLA-B*37:01,HLA-B*40:01,HLA-B*40:02,HLA-B*44:02,HLA-B*44:03, HLA-B*49:01,HLA-C*03:04
LEKNVNQSL

SEQ ID NO: 2846 - protein, 10 aa, Homo sapiens
  Table 1.2; FTHL17; ENSG00000132446; HLA -A*30:01,HLA-B*40:01
LEKNVNQSLL

SEQ ID NO: 2847 - protein, 8 aa, Homo sapiens
  Table 1.2; FTHL17; ENSG00000132446; HLA -B*49:01
LELYTSYL

SEQ ID NO: 2848 - protein, 9 aa, Homo sapiens
  Table 1.2; FTHL17; ENSG00000132446; HLA -A*29:02
LELYTSYLY

SEQ ID NO: 2849 - protein, 10 aa, Homo sapiens
  Table 1.2; FTHL17; ENSG00000132446; HLA -A*68:02
LESHYLHEQV

SEQ ID NO: 2850 - protein, 8 aa, Homo sapiens
  Table 1.2; FTHL17; ENSG00000132446; HLA -C*07:04
LGGYVSNL

SEQ ID NO: 2851 - protein, 9 aa, Homo sapiens
  Table 1.2; FTHL17; ENSG00000132446; HLA -A*68:01
LGGYVSNLR

SEQ ID NO: 2852 - protein, 8 aa, Homo sapiens
  Table 1.2; FTHL17; ENSG00000132446; HLA -B*38:01
LHEQVKTI

SEQ ID NO: 2853 - protein, 9 aa, Homo sapiens
  Table 1.2; FTHL17; ENSG00000132446; HLA -A*01:01,HLA-A*02:01,HLA-A*02:04,HLA-A*02:07
LLDLYQLAV

SEQ ID NO: 2854 - protein, 11 aa, Homo sapiens
  Table 1.2; FTHL17; ENSG00000132446; HLA -B*27:02
LLDLYQLAVEK

SEQ ID NO: 2855 - protein, 9 aa, Homo sapiens
  Table 1.2; FTHL17; ENSG00000132446; HLA -A*31:01
LSMAFYFNR

SEQ ID NO: 2856 - protein, 8 aa, Homo sapiens
  Table 1.2; FTHL17; ENSG00000132446; HLA -B*39:01
LVAMESAF

SEQ ID NO: 2857 - protein, 8 aa, Homo sapiens
  Table 1.2; FTHL17; ENSG00000132446; HLA -A*29:02
LYLSMAFY

SEQ ID NO: 2858 - protein, 9 aa, Homo sapiens
  Table 1.2; FTHL17; ENSG00000132446; HLA -A*23:01,HLA-A*24:02,HLA-A*29:02
LYLSMAFYF

SEQ ID NO: 2859 - protein, 8 aa, Homo sapiens
  Table 1.2; FTHL17; ENSG00000132446; HLA -C*14:02
LYQLAVEK

SEQ ID NO: 2860 - protein, 8 aa, Homo sapiens
  Table 1.2; FTHL17; ENSG00000132446; HLA -A*24:02
LYTSYLYL

SEQ ID NO: 2861 - protein, 9 aa, Homo sapiens
  Table 1.2; FTHL17; ENSG00000132446; HLA -B*51:01,HLA-B*54:01,HLA-C*16:02
MATAQPSQV

SEQ ID NO: 2862 - protein, 10 aa, Homo sapiens
  Table 1.2; FTHL17; ENSG00000132446; HLA -A*33:03,HLA-A*68:01,HLA-C*07:06
MATAQPSQVR

SEQ ID NO: 2863 - protein, 8 aa, Homo sapiens
  Table 1.2; FTHL17; ENSG00000132446; HLA -B*18:01,HLA-B*37:01,HLA-B*40:02,HLA-B*44:03,HLA-B*49:01
MEHAQKLM

SEQ ID NO: 2864 - protein, 9 aa, Homo sapiens
  Table 1.2; FTHL17; ENSG00000132446; HLA -B*49:01
MESAFHLEK

SEQ ID NO: 2865 - protein, 8 aa, Homo sapiens
  Table 1.2; FTHL17; ENSG00000132446; HLA -A*30:02,HLA-B*15:01,HLA-B*15:03,HLA-B*18:01
NQSLLDLY

SEQ ID NO: 2866 - protein, 10 aa, Homo sapiens
  Table 1.2; FTHL17; ENSG00000132446; HLA -B*38:01,HLA-B*39:01
NQSLLDLYQL

SEQ ID NO: 2867 - protein, 10 aa, Homo sapiens
  Table 1.2; FTHL17; ENSG00000132446; HLA -B*38:01
NRDDVALENF

SEQ ID NO: 2868 - protein, 8 aa, Homo sapiens
  Table 1.2; FTHL17; ENSG00000132446; HLA -C*03:04
NSHITLEL

SEQ ID NO: 2869 - protein, 9 aa, Homo sapiens
  Table 1.2; FTHL17; ENSG00000132446; HLA -A*01:01,HLA-A*29:02,HLA-A*30:02,HLA-B*46:01
NSHITLELY

SEQ ID NO: 2870 - protein, 10 aa, Homo sapiens
  Table 1.2; FTHL17; ENSG00000132446; HLA -A*01:01,HLA-A*25:01,HLA-A*26:01,HLA-A*29:02,HLA-A*30:02, HLA-B*35:01
NVNQSLLDLY

SEQ ID NO: 2871 - protein, 8 aa, Homo sapiens
  Table 1.2; FTHL17; ENSG00000132446; HLA -B*18:01
PEAGLAEY

SEQ ID NO: 2872 - protein, 9 aa, Homo sapiens
  Table 1.2; FTHL17; ENSG00000132446; HLA -B*40:01
PEAGLAEYL

SEQ ID NO: 2873 - protein, 10 aa, Homo sapiens
  Table 1.2; FTHL17; ENSG00000132446; HLA -B*35:01,HLA-B*35:03
QGWESGLVAM

SEQ ID NO: 2874 - protein, 9 aa, Homo sapiens
  Table 1.2; FTHL17; ENSG00000132446; HLA -A*29:02,HLA-A*30:02,HLA-A*32:01,HLA-B*15:01,HLA-B*35:01, HLA-B*44:02,HLA-B*44:03,HLA-B*55:01,HLA-C*07:02,HLA-C*16:01
QPSQVRQKY

SEQ ID NO: 2875 - protein, 9 aa, Homo sapiens
  Table 1.2; FTHL17; ENSG00000132446; HLA -A*02:04
QSLLDLYQL

SEQ ID NO: 2876 - protein, 8 aa, Homo sapiens
  Table 1.2; FTHL17; ENSG00000132446; HLA -B*08:01
QVKTIKEL

SEQ ID NO: 2877 - protein, 11 aa, Homo sapiens
  Table 1.2; FTHL17; ENSG00000132446; HLA -A*25:01,HLA-A*26:01,HLA-A*30:02
QVKTIKELGGY

SEQ ID NO: 2878 - protein, 9 aa, Homo sapiens
  Table 1.2; FTHL17; ENSG00000132446; HLA -A*68:02,HLA-B*51:01,HLA-C*12:03,HLA-C*16:02
SAFHLEKNV

SEQ ID NO: 2879 - protein, 8 aa, Homo sapiens
  Table 1.2; FTHL17; ENSG00000132446; HLA -A*02:01,HLA-A*02:04,HLA-A*23:01
SLLDLYQL

SEQ ID NO: 2880 - protein, 9 aa, Homo sapiens
  Table 1.2; FTHL17; ENSG00000132446; HLA -A*02:01,HLA-A*02:04
SLLDLYQLA

SEQ ID NO: 2881 - protein, 10 aa, Homo sapiens
  Table 1.2; FTHL17; ENSG00000132446; HLA -A*02:01,HLA-A*02:03,HLA-A*02:04,HLA-A*02:07,HLA-B*13:02
SLLDLYQLAV

SEQ ID NO: 2882 - protein, 8 aa, Homo sapiens
  Table 1.2; FTHL17; ENSG00000132446; HLA -A*31:01
SMAFYFNR

SEQ ID NO: 2883 - protein, 9 aa, Homo sapiens
  Table 1.2; FTHL17; ENSG00000132446; HLA -A*01:01,HLA-B*35:01,HLA-B*35:03,HLA-B*39:01,HLA-B*55:01, HLA-C*03:03
SPEAGLAEY

SEQ ID NO: 2884 - protein, 10 aa, Homo sapiens
  Table 1.2; FTHL17; ENSG00000132446; HLA -B*35:03
SPEAGLAEYL

SEQ ID NO: 2885 - protein, 11 aa, Homo sapiens
  Table 1.2; FTHL17; ENSG00000132446; HLA -B*35:01
SPEAGLAEYLF

SEQ ID NO: 2886 - protein, 9 aa, Homo sapiens
  Table 1.2; FTHL17; ENSG00000132446; HLA -A*23:01,HLA-A*24:02,HLA-A*29:02
SYLYLSMAF

SEQ ID NO: 2887 - protein, 10 aa, Homo sapiens
  Table 1.2; FTHL17; ENSG00000132446; HLA -A*29:02
SYLYLSMAFY

SEQ ID NO: 2888 - protein, 10 aa, Homo sapiens
  Table 1.2; FTHL17; ENSG00000132446; HLA -A*03:01,HLA-A*03:02,HLA-A*11:01,HLA-A*68:01,HLA-C*07:06
TAQPSQVRQK

SEQ ID NO: 2889 - protein, 11 aa, Homo sapiens
  Table 1.2; FTHL17; ENSG00000132446; HLA -A*29:02,HLA-A*30:02,HLA-A*32:01,HLA-B*15:01,HLA-B*35:01, HLA-B*57:01,HLA-B*58:01
TAQPSQVRQKY

SEQ ID NO: 2890 - protein, 8 aa, Homo sapiens
  Table 1.2; FTHL17; ENSG00000132446; HLA -A*30:02,HLA-B*15:01,HLA-B*46:01
TIKELGGY

SEQ ID NO: 2891 - protein, 9 aa, Homo sapiens
  Table 1.2; FTHL17; ENSG00000132446; HLA -A*02:03,HLA-A*26:01,HLA-A*68:02
TIKELGGYV

SEQ ID NO: 2892 - protein, 9 aa, Homo sapiens
  Table 1.2; FTHL17; ENSG00000132446; HLA -A*02:07
TLELYTSYL

SEQ ID NO: 2893 - protein, 10 aa, Homo sapiens
  Table 1.2; FTHL17; ENSG00000132446; HLA -A*01:01
TLELYTSYLY

SEQ ID NO: 2894 - protein, 9 aa, Homo sapiens
  Table 1.2; FTHL17; ENSG00000132446; HLA -A*02:03
TLGGRVKET

SEQ ID NO: 2895 - protein, 9 aa, Homo sapiens
  Table 1.2; FTHL17; ENSG00000132446; HLA -A*01:01,HLA-A*02:04,HLA-A*03:01,HLA-A*24:02,HLA-A*29:02, HLA-A*30:02,HLA-B*57:01,HLA-C*02:02
VALENFFRY

SEQ ID NO: 2896 - protein, 10 aa, Homo sapiens
  Table 1.2; FTHL17; ENSG00000132446; HLA -B*57:01
VALENFFRYF

SEQ ID NO: 2897 - protein, 9 aa, Homo sapiens
  Table 1.2; FTHL17; ENSG00000132446; HLA -A*02:01,HLA-A*02:04,HLA-A*02:07,HLA-A*03:02,HLA-A*11:01, HLA-A*23:01,HLA-A*24:02,HLA-A*30:01,HLA-A*31:01,HLA-A*68:02, HLA-B*13:02,HLA-B*27:02,HLA-B*35:03,HLA-B*37:01,HLA-B*38:01,
  HLA-B*40:01,HLA-B*46:01,HLA-B*58:01,HLA-C*01:02,HLA-C*02:02, HLA-C*03:03,HLA-C*03:04,HLA-C*12:03,HLA-C*14:02,HLA-C*16:01, HLA-C*16:02,HLA-C*16:04
VAMESAFHL

SEQ ID NO: 2898 - protein, 11 aa, Homo sapiens
  Table 1.2; FTHL17; ENSG00000132446; HLA -A*11:01
VAMESAFHLEK

SEQ ID NO: 2899 - protein, 8 aa, Homo sapiens
  Table 1.2; FTHL17; ENSG00000132446; HLA -A*30:01,HLA-B*18:01,HLA-B*37:01,HLA-B*40:01,HLA-B*40:02
VEKGDPQL

SEQ ID NO: 2900 - protein, 9 aa, Homo sapiens
  Table 1.2; FTHL17; ENSG00000132446; HLA -A*30:01,HLA-B*40:02,HLA-B*49:01,HLA-C*12:03
VEKGDPQLC

SEQ ID NO: 2901 - protein, 9 aa, Homo sapiens
  Table 1.2; FTHL17; ENSG00000132446; HLA -A*01:01,HLA-A*29:02,HLA-A*30:02
VNQSLLDLY

SEQ ID NO: 2902 - protein, 8 aa, Homo sapiens
  Table 1.2; FTHL17; ENSG00000132446; HLA -A*30:01,HLA-B*18:01,HLA-B*37:01
WESGLVAM

SEQ ID NO: 2903 - protein, 9 aa, Homo sapiens
  Table 1.2; FTHL17; ENSG00000132446; HLA -A*23:01,HLA-A*24:02,HLA-B*35:03,HLA-B*55:01,HLA-C*14:02
YFNRDDVAL

SEQ ID NO: 2904 - protein, 8 aa, Homo sapiens
  Table 1.2; FTHL17; ENSG00000132446; HLA -A*02:01,HLA-A*02:03,HLA-A*02:04,HLA-A*02:07,HLA-A*23:01, HLA-B*08:01,HLA-B*13:02,HLA-C*03:03
YLFDKLTL

SEQ ID NO: 2905 - protein, 9 aa, Homo sapiens
  Table 1.2; FTHL17; ENSG00000132446; HLA -A*02:01,HLA-A*02:03,HLA-A*02:04,HLA-A*02:07
YLFDKLTLG

SEQ ID NO: 2906 - protein, 10 aa, Homo sapiens
  Table 1.2; FTHL17; ENSG00000132446; HLA -A*02:01,HLA-A*02:03,HLA-A*02:04,HLA-A*02:07
YLFDKLTLGG

SEQ ID NO: 2907 - protein, 11 aa, Homo sapiens
  Table 1.2; FTHL17; ENSG00000132446; HLA -A*02:03
YLFDKLTLGGR

SEQ ID NO: 2908 - protein, 9 aa, Homo sapiens
  Table 1.2; FTHL17; ENSG00000132446; HLA -A*02:01,HLA-A*02:03,HLA-A*02:04,HLA-A*02:07,HLA-A*23:01, HLA-A*24:02,HLA-A*25:01,HLA-A*30:01,HLA-A*32:01,HLA-A*68:02, HLA-B*08:01,HLA-B*13:02,HLA-B*40:02,HLA-B*46:01,HLA-B*49:01,
  HLA-B*51:01,HLA-B*55:01,HLA-C*02:02,HLA-C*03:04,HLA-C*06:02, HLA-C*12:03,HLA-C*16:02
YLHEQVKTI

SEQ ID NO: 2909 - protein, 10 aa, Homo sapiens
  Table 1.2; FTHL17; ENSG00000132446; HLA -A*03:01
YLHEQVKTIK

SEQ ID NO: 2910 - protein, 9 aa, Homo sapiens
  Table 1.2; FTHL17; ENSG00000132446; HLA -A*01:01,HLA-A*29:02
YLYLSMAFY

SEQ ID NO: 2911 - protein, 9 aa, Homo sapiens
  Table 1.2; FTHL17; ENSG00000132446; HLA -A*01:01,HLA-A*29:02
YTSYLYLSM

SEQ ID NO: 2912 - protein, 9 aa, Homo sapiens
  Table 1.2; GAGE1; ENSG00000205777; HLA -A*02:01,HLA-A*02:03,HLA-A*02:04,HLA-B*13:02
AQTGILWLL

SEQ ID NO: 2913 - protein, 10 aa, Homo sapiens
  Table 1.2; GAGE1; ENSG00000205777; HLA -B*40:01
CEDGPDGQEM

SEQ ID NO: 2914 - protein, 8 aa, Homo sapiens
  Table 1.2; GAGE1; ENSG00000205777; HLA -B*18:01
DEVEPATP

SEQ ID NO: 2915 - protein, 8 aa, Homo sapiens
  Table 1.2; GAGE1; ENSG00000205777; HLA -B*51:01
DPPNPEEV

SEQ ID NO: 2916 - protein, 9 aa, Homo sapiens
  Table 1.2; GAGE1; ENSG00000205777; HLA -A*33:01
DSQEQGHPQ

SEQ ID NO: 2917 - protein, 9 aa, Homo sapiens
  Table 1.2; GAGE1; ENSG00000205777; HLA -A*33:03,HLA-C*07:06
EEGEPATQR

SEQ ID NO: 2918 - protein, 10 aa, Homo sapiens
  Table 1.2; GAGE1; ENSG00000205777; HLA -A*68:01
EGASAGQGPK

SEQ ID NO: 2919 - protein, 10 aa, Homo sapiens
  Table 1.2; GAGE1; ENSG00000205777; HLA -A*01:01
EMDPPNPEEV

SEQ ID NO: 2920 - protein, 11 aa, Homo sapiens
  Table 1.2; GAGE1; ENSG00000205777; HLA -A*01:01
EMDPPNPEEVK

SEQ ID NO: 2921 - protein, 9 aa, Homo sapiens
  Table 1.2; GAGE1; ENSG00000205777; HLA -A*26:01
EVKTPEEEM

SEQ ID NO: 2922 - protein, 10 aa, Homo sapiens
  Table 1.2; GAGE1; ENSG00000205777; HLA -A*33:03,HLA-A*68:01
EVKTPEEEMR

SEQ ID NO: 2923 - protein, 9 aa, Homo sapiens
  Table 1.2; GAGE1; ENSG00000205777; HLA -A*23:01,HLA-A*24:02,HLA-C*14:02
HYVAQTGIL

SEQ ID NO: 2924 - protein, 10 aa, Homo sapiens
  Table 1.2; GAGE1; ENSG00000205777; HLA -A*23:01,HLA-A*24:02
HYVAQTGILW

SEQ ID NO: 2925 - protein, 9 aa, Homo sapiens
  Table 1.2; GAGE1; ENSG00000205777; HLA -A*23:01,HLA-A*24:02
RYVQPPEMI

SEQ ID NO: 2926 - protein, 9 aa, Homo sapiens
  Table 1.2; GAGE1; ENSG00000205777; HLA -B*38:01
SHYVAQTGI

SEQ ID NO: 2927 - protein, 9 aa, Homo sapiens
  Table 1.2; GAGE1; ENSG00000205777; HLA -A*31:01
STYYWPRPR

SEQ ID NO: 2928 - protein, 9 aa, Homo sapiens
  Table 1.2; GAGE1; ENSG00000205777; HLA -B*35:03
TPEEGEPAT

SEQ ID NO: 2929 - protein, 11 aa, Homo sapiens
  Table 1.2; GAGE1; ENSG00000205777; HLA -A*68:01,HLA-C*07:06
TPEEGEPATQR

SEQ ID NO: 2930 - protein, 8 aa, Homo sapiens
  Table 1.2; GAGE1; ENSG00000205777; HLA -B*57:01,HLA-B*58:01
VAQTGILW

SEQ ID NO: 2931 - protein, 9 aa, Homo sapiens
  Table 1.2; GAGE1; ENSG00000205777; HLA -A*01:01,HLA-A*25:01,HLA-A*26:01,HLA-A*29:02,HLA-B*57:01, HLA-B*58:01
YVAQTGILW

SEQ ID NO: 2932 - protein, 11 aa, Homo sapiens
  Table 1.2; GAGE1; ENSG00000205777; HLA -A*02:04,HLA-A*68:02
YVAQTGILWLL

SEQ ID NO: 2933 - protein, 11 aa, Homo sapiens
  Table 1.2; GAGE1; ENSG00000205777; HLA -A*26:01
YVQPPEMIGPM

SEQ ID NO: 2934 - protein, 9 aa, Homo sapiens
  Table 1.2; GAGE1; ENSG00000205777; HLA -A*29:02
YYWPRPRRY

SEQ ID NO: 2935 - protein, 10 aa, Homo sapiens
  Table 1.2; GAGE12J; ENSG00000224659; HLA -B*40:01
CEDGPDGQEM

SEQ ID NO: 2936 - protein, 8 aa, Homo sapiens
  Table 1.2; GAGE12J; ENSG00000224659; HLA -B*18:01
DEVEPATP

SEQ ID NO: 2937 - protein, 8 aa, Homo sapiens
  Table 1.2; GAGE12J; ENSG00000224659; HLA -B*51:01
DPPNPEEV

SEQ ID NO: 2938 - protein, 9 aa, Homo sapiens
  Table 1.2; GAGE12J; ENSG00000224659; HLA -A*33:01
DSQEQGHPQ

SEQ ID NO: 2939 - protein, 9 aa, Homo sapiens
  Table 1.2; GAGE12J; ENSG00000224659; HLA -A*33:03,HLA-C*07:06
EEGEPATQR

SEQ ID NO: 2940 - protein, 10 aa, Homo sapiens
  Table 1.2; GAGE12J; ENSG00000224659; HLA -A*68:01
EGASAGQGPK

SEQ ID NO: 2941 - protein, 10 aa, Homo sapiens
  Table 1.2; GAGE12J; ENSG00000224659; HLA -A*01:01
EMDPPNPEEV

SEQ ID NO: 2942 - protein, 11 aa, Homo sapiens
  Table 1.2; GAGE12J; ENSG00000224659; HLA -A*01:01
EMDPPNPEEVK

SEQ ID NO: 2943 - protein, 9 aa, Homo sapiens
  Table 1.2; GAGE12J; ENSG00000224659; HLA -A*33:03
EVKTPEEGK

SEQ ID NO: 2944 - protein, 10 aa, Homo sapiens
  Table 1.2; GAGE12J; ENSG00000224659; HLA -A*68:01
EVKTPEEGKK

SEQ ID NO: 2945 - protein, 9 aa, Homo sapiens
  Table 1.2; GAGE12J; ENSG00000224659; HLA -A*24:02
PYVQPPEMI

SEQ ID NO: 2946 - protein, 9 aa, Homo sapiens
  Table 1.2; GAGE12J; ENSG00000224659; HLA -B*07:02,HLA-B*35:01,HLA-B*35:03,HLA-B*51:01,HLA-B*55:01, HLA-B*56:01,HLA-C*07:02
RPYVQPPEM

SEQ ID NO: 2947 - protein, 9 aa, Homo sapiens
  Table 1.2; GAGE12J; ENSG00000224659; HLA -A*31:01
STYYWPRPR

SEQ ID NO: 2948 - protein, 9 aa, Homo sapiens
  Table 1.2; GAGE12J; ENSG00000224659; HLA -B*35:03
TPEEGEPAT

SEQ ID NO: 2949 - protein, 11 aa, Homo sapiens
  Table 1.2; GAGE12J; ENSG00000224659; HLA -A*68:01,HLA-C*07:06
TPEEGEPATQR

SEQ ID NO: 2950 - protein, 9 aa, Homo sapiens
  Table 1.2; GAGE12J; ENSG00000224659; HLA -A*29:02
YYWPRPRPY

SEQ ID NO: 2951 - protein, 10 aa, Homo sapiens
  Table 1.2; GAGE2A; ENSG00000189064; HLA -A*30:01,HLA-B*40:01
CEDGPDGQEM

SEQ ID NO: 2952 - protein, 8 aa, Homo sapiens
  Table 1.2; GAGE2A; ENSG00000189064; HLA -B*18:01
DEVEPATP

SEQ ID NO: 2953 - protein, 9 aa, Homo sapiens
  Table 1.2; GAGE2A; ENSG00000189064; HLA -B*18:01
DEVEPATPE

SEQ ID NO: 2954 - protein, 8 aa, Homo sapiens
  Table 1.2; GAGE2A; ENSG00000189064; HLA -B*51:01
DGPDGQEM

SEQ ID NO: 2955 - protein, 8 aa, Homo sapiens
  Table 1.2; GAGE2A; ENSG00000189064; HLA -B*51:01
DPPNPEEV

SEQ ID NO: 2956 - protein, 9 aa, Homo sapiens
  Table 1.2; GAGE2A; ENSG00000189064; HLA -A*33:03,HLA-A*68:01,HLA-C*07:06
EEGEPATQR

SEQ ID NO: 2957 - protein, 10 aa, Homo sapiens
  Table 1.2; GAGE2A; ENSG00000189064; HLA -A*68:01
EGASAGQGPK

SEQ ID NO: 2958 - protein, 10 aa, Homo sapiens
  Table 1.2; GAGE2A; ENSG00000189064; HLA -A*01:01
EMDPPNPEEV

SEQ ID NO: 2959 - protein, 11 aa, Homo sapiens
  Table 1.2; GAGE2A; ENSG00000189064; HLA -A*01:01
EMDPPNPEEVK

SEQ ID NO: 2960 - protein, 9 aa, Homo sapiens
  Table 1.2; GAGE2A; ENSG00000189064; HLA -A*26:01
EPPEMIGPM

SEQ ID NO: 2961 - protein, 10 aa, Homo sapiens
  Table 1.2; GAGE2A; ENSG00000189064; HLA -A*68:01
EPPEMIGPMR

SEQ ID NO: 2962 - protein, 10 aa, Homo sapiens
  Table 1.2; GAGE2A; ENSG00000189064; HLA -A*33:03,HLA-A*68:01
EVKTPEEGEK

SEQ ID NO: 2963 - protein, 9 aa, Homo sapiens
  Table 1.2; GAGE2A; ENSG00000189064; HLA -A*02:07
MDPPNPEEV

SEQ ID NO: 2964 - protein, 11 aa, Homo sapiens
  Table 1.2; GAGE2A; ENSG00000189064; HLA -B*49:01
QEMDPPNPEEV

SEQ ID NO: 2965 - protein, 9 aa, Homo sapiens
  Table 1.2; GAGE2A; ENSG00000189064; HLA -C*16:04
RRYVEPPEM

SEQ ID NO: 2966 - protein, 9 aa, Homo sapiens
  Table 1.2; GAGE2A; ENSG00000189064; HLA -A*23:01,HLA-A*24:02
RYVEPPEMI

SEQ ID NO: 2967 - protein, 10 aa, Homo sapiens
  Table 1.2; GAGE2A; ENSG00000189064; HLA -B*54:01
SAGQGPKPEA

SEQ ID NO: 2968 - protein, 8 aa, Homo sapiens
  Table 1.2; GAGE2A; ENSG00000189064; HLA -A*31:01
STYRPRPR

SEQ ID NO: 2969 - protein, 9 aa, Homo sapiens
  Table 1.2; GAGE2A; ENSG00000189064; HLA -B*35:03
TPEEGEPAT

SEQ ID NO: 2970 - protein, 11 aa, Homo sapiens
  Table 1.2; GAGE2A; ENSG00000189064; HLA -A*68:01,HLA-C*07:06
TPEEGEPATQR

SEQ ID NO: 2971 - protein, 10 aa, Homo sapiens
  Table 1.2; GAGE2A; ENSG00000189064; HLA -B*40:01,HLA-B*40:02
VEPPEMIGPM

SEQ ID NO: 2972 - protein, 8 aa, Homo sapiens
  Table 1.2; GLYATL3; ENSG00000203972; HLA -B*37:01,HLA-B*44:02,HLA-B*44:03
AEFLPCRF

SEQ ID NO: 2973 - protein, 9 aa, Homo sapiens
  Table 1.2; GLYATL3; ENSG00000203972; HLA -A*30:02,HLA-B*18:01,HLA-B*27:02,HLA-B*40:01,HLA-B*44:02, HLA-B*44:03,HLA-B*49:01,HLA-C*16:02,HLA-C*16:04
AETDNLDHY

SEQ ID NO: 2974 - protein, 10 aa, Homo sapiens
  Table 1.2; GLYATL3; ENSG00000203972; HLA -A*25:01,HLA-A*32:01,HLA-B*44:02,HLA-B*44:03,HLA-B*57:01, HLA-B*58:01,HLA-C*16:04
ANADLLNRTW

SEQ ID NO: 2975 - protein, 9 aa, Homo sapiens
  Table 1.2; GLYATL3; ENSG00000203972; HLA -B*58:01
ASISLLKSL

SEQ ID NO: 2976 - protein, 9 aa, Homo sapiens
  Table 1.2; GLYATL3; ENSG00000203972; HLA -A*02:01,HLA-A*02:03,HLA-A*02:04,HLA-A*02:07,HLA-A*03:01, HLA-A*03:02,HLA-A*11:01,HLA-A*23:01,HLA-A*24:02,HLA-A*25:01, HLA-A*26:01,HLA-A*31:01,HLA-A*32:01,HLA-A*68:02,HLA-B*13:02,
  HLA-B*40:02,HLA-B*46:01,HLA-B*57:01,HLA-B*58:01,HLA-C*02:02, HLA-C*03:04
ATFSGLPHL

SEQ ID NO: 2977 - protein, 11 aa, Homo sapiens
  Table 1.2; GLYATL3; ENSG00000203972; HLA -A*03:01,HLA-A*03:02,HLA-A*11:01
AVANSKQLNIK

SEQ ID NO: 2978 - protein, 10 aa, Homo sapiens
  Table 1.2; GLYATL3; ENSG00000203972; HLA -A*03:01,HLA-A*25:01,HLA-A*30:02
AVFYKDVRAY

SEQ ID NO: 2979 - protein, 11 aa, Homo sapiens
  Table 1.2; GLYATL3; ENSG00000203972; HLA -A*31:01
AVFYKDVRAYR

SEQ ID NO: 2980 - protein, 9 aa, Homo sapiens
  Table 1.2; GLYATL3; ENSG00000203972; HLA -A*29:02
CFPESLKVY

SEQ ID NO: 2981 - protein, 9 aa, Homo sapiens
  Table 1.2; GLYATL3; ENSG00000203972; HLA -B*18:01
DDNTASISL

SEQ ID NO: 2982 - protein, 11 aa, Homo sapiens
  Table 1.2; GLYATL3; ENSG00000203972; HLA -B*27:02
DDNTASISLLK

SEQ ID NO: 2983 - protein, 9 aa, Homo sapiens
  Table 1.2; GLYATL3; ENSG00000203972; HLA -A*25:01,HLA-B*18:01,HLA-B*27:02,HLA-B*40:02,HLA-B*44:02, HLA-B*44:03,HLA-C*16:04
DEKGNPVSW

SEQ ID NO: 2984 - protein, 8 aa, Homo sapiens
  Table 1.2; GLYATL3; ENSG00000203972; HLA -A*33:01,HLA-A*33:03
DFKAVITR

SEQ ID NO: 2985 - protein, 9 aa, Homo sapiens
  Table 1.2; GLYATL3; ENSG00000203972; HLA -A*33:01,HLA-A*33:03
DFKAVITRR

SEQ ID NO: 2986 - protein, 9 aa, Homo sapiens
  Table 1.2; GLYATL3; ENSG00000203972; HLA -B*38:01,HLA-B*39:01
DHYTNAYAV

SEQ ID NO: 2987 - protein, 10 aa, Homo sapiens
  Table 1.2; GLYATL3; ENSG00000203972; HLA -B*38:01
DHYTNAYAVF

SEQ ID NO: 2988 - protein, 9 aa, Homo sapiens
  Table 1.2; GLYATL3; ENSG00000203972; HLA -A*33:01,HLA-A*33:03
DLLNRTWSR

SEQ ID NO: 2989 - protein, 10 aa, Homo sapiens
  Table 1.2; GLYATL3; ENSG00000203972; HLA -A*25:01,HLA-B*18:01
DNLDHYTNAY

SEQ ID NO: 2990 - protein, 10 aa, Homo sapiens
  Table 1.2; GLYATL3; ENSG00000203972; HLA -B*27:02
DNTASISLLK

SEQ ID NO: 2991 - protein, 10 aa, Homo sapiens
  Table 1.2; GLYATL3; ENSG00000203972; HLA -A*26:01
DQFATMCHGY

SEQ ID NO: 2992 - protein, 9 aa, Homo sapiens
  Table 1.2; GLYATL3; ENSG00000203972; HLA -B*39:01
DQVFQIQGL

SEQ ID NO: 2993 - protein, 9 aa, Homo sapiens
  Table 1.2; GLYATL3; ENSG00000203972; HLA -A*25:01,HLA-A*26:01
DVFNWDQVF

SEQ ID NO: 2994 - protein, 11 aa, Homo sapiens
  Table 1.2; GLYATL3; ENSG00000203972; HLA -A*68:02
DVFNWDQVFQI

SEQ ID NO: 2995 - protein, 10 aa, Homo sapiens
  Table 1.2; GLYATL3; ENSG00000203972; HLA -A*68:01
DVSKAVANSK

SEQ ID NO: 2996 - protein, 10 aa, Homo sapiens
  Table 1.2; GLYATL3; ENSG00000203972; HLA -A*01:01
EAETDNLDHY

SEQ ID NO: 2997 - protein, 9 aa, Homo sapiens
  Table 1.2; GLYATL3; ENSG00000203972; HLA -A*02:01,HLA-A*02:03,HLA-A*02:07,HLA-A*25:01,HLA-A*26:01, HLA-A*68:02,HLA-B*13:02,HLA-B*51:01,HLA-B*55:01
ELYDVSKAV

SEQ ID NO: 2998 - protein, 10 aa, Homo sapiens
  Table 1.2; GLYATL3; ENSG00000203972; HLA -A*26:01
ELYDVSKAVA

SEQ ID NO: 2999 - protein, 11 aa, Homo sapiens
  Table 1.2; GLYATL3; ENSG00000203972; HLA -A*33:01
ELYDVSKAVAN

SEQ ID NO: 3000 - protein, 8 aa, Homo sapiens
  Table 1.2; GLYATL3; ENSG00000203972; HLA -A*01:01
ETDNLDHY

SEQ ID NO: 3001 - protein, 9 aa, Homo sapiens
  Table 1.2; GLYATL3; ENSG00000203972; HLA -A*02:03
FLKGPSPRL

SEQ ID NO: 3002 - protein, 10 aa, Homo sapiens
  Table 1.2; GLYATL3; ENSG00000203972; HLA -A*02:03
FLKGPSPRLT

SEQ ID NO: 3003 - protein, 11 aa, Homo sapiens
  Table 1.2; GLYATL3; ENSG00000203972; HLA -A*29:02
FLKGPSPRLTY

SEQ ID NO: 3004 - protein, 8 aa, Homo sapiens
  Table 1.2; GLYATL3; ENSG00000203972; HLA -B*35:01,HLA-B*55:01
FPESLKVY

SEQ ID NO: 3005 - protein, 10 aa, Homo sapiens
  Table 1.2; GLYATL3; ENSG00000203972; HLA -B*54:01
FPESLKVYGA

SEQ ID NO: 3006 - protein, 8 aa, Homo sapiens
  Table 1.2; GLYATL3; ENSG00000203972; HLA -B*07:02,HLA-B*08:01,HLA-B*35:01,HLA-B*35:03,HLA-B*55:01, HLA-B*56:01,HLA-C*03:04
FPSQGNVL

SEQ ID NO: 3007 - protein, 10 aa, Homo sapiens
  Table 1.2; GLYATL3; ENSG00000203972; HLA -B*39:01,HLA-C*02:02
FQIQGLQSEL

SEQ ID NO: 3008 - protein, 11 aa, Homo sapiens
  Table 1.2; GLYATL3; ENSG00000203972; HLA -A*30:02,HLA-B*15:01,HLA-B*15:03
FQIQGLQSELY

SEQ ID NO: 3009 - protein, 9 aa, Homo sapiens
  Table 1.2; GLYATL3; ENSG00000203972; HLA -A*31:01
FYKDVRAYR

SEQ ID NO: 3010 - protein, 9 aa, Homo sapiens
  Table 1.2; GLYATL3; ENSG00000203972; HLA -C*14:02
GFPSQGNVL

SEQ ID NO: 3011 - protein, 9 aa, Homo sapiens
  Table 1.2; GLYATL3; ENSG00000203972; HLA -A*30:02
GGNEQCLRY

SEQ ID NO: 3012 - protein, 9 aa, Homo sapiens
  Table 1.2; GLYATL3; ENSG00000203972; HLA -A*02:01,HLA-A*02:04,HLA-B*13:02,HLA-B*55:01
GLQSELYDV

SEQ ID NO: 3013 - protein, 11 aa, Homo sapiens
  Table 1.2; GLYATL3; ENSG00000203972; HLA -A*03:02
GLQSELYDVSK

SEQ ID NO: 3014 - protein, 9 aa, Homo sapiens
  Table 1.2; GLYATL3; ENSG00000203972; HLA -B*07:02,HLA-B*37:01,HLA-C*07:02
GPSPRLTYL

SEQ ID NO: 3015 - protein, 10 aa, Homo sapiens
  Table 1.2; GLYATL3; ENSG00000203972; HLA -A*23:01,HLA-A*24:02
GYSRLVALTL

SEQ ID NO: 3016 - protein, 9 aa, Homo sapiens
  Table 1.2; GLYATL3; ENSG00000203972; HLA -A*31:01,HLA-A*33:01,HLA-A*33:03,HLA-A*68:01
HGYTLPEHR

SEQ ID NO: 3017 - protein, 10 aa, Homo sapiens
  Table 1.2; GLYATL3; ENSG00000203972; HLA -A*31:01
HGYTLPEHRR

SEQ ID NO: 3018 - protein, 9 aa, Homo sapiens
  Table 1.2; GLYATL3; ENSG00000203972; HLA -A*23:01,HLA-A*24:02,HLA-C*14:02
HYTNAYAVF

SEQ ID NO: 3019 - protein, 10 aa, Homo sapiens
  Table 1.2; GLYATL3; ENSG00000203972; HLA -A*29:02
HYTNAYAVFY

SEQ ID NO: 3020 - protein, 8 aa, Homo sapiens
  Table 1.2; GLYATL3; ENSG00000203972; HLA -B*15:01
IQGLQSEL

SEQ ID NO: 3021 - protein, 9 aa, Homo sapiens
  Table 1.2; GLYATL3; ENSG00000203972; HLA -A*30:02,HLA-B*15:01,HLA-B*15:03
IQGLQSELY

SEQ ID NO: 3022 - protein, 8 aa, Homo sapiens
  Table 1.2; GLYATL3; ENSG00000203972; HLA -C*05:01
ITDQFATM

SEQ ID NO: 3023 - protein, 9 aa, Homo sapiens
  Table 1.2; GLYATL3; ENSG00000203972; HLA -B*58:01,HLA-C*03:03,HLA-C*03:04,HLA-C*16:01,HLA-C*16:02
KAVANSKQL

SEQ ID NO: 3024 - protein, 9 aa, Homo sapiens
  Table 1.2; GLYATL3; ENSG00000203972; HLA -A*32:01
KGNPVSWSI

SEQ ID NO: 3025 - protein, 9 aa, Homo sapiens
  Table 1.2; GLYATL3; ENSG00000203972; HLA -A*30:02,HLA-A*32:01,HLA-C*16:01
KGPSPRLTY

SEQ ID NO: 3026 - protein, 10 aa, Homo sapiens
  Table 1.2; GLYATL3; ENSG00000203972; HLA -A*02:07
KGPSPRLTYL

SEQ ID NO: 3027 - protein, 9 aa, Homo sapiens
  Table 1.2; GLYATL3; ENSG00000203972; HLA -B*08:01,HLA-B*37:01
KGYSRLVAL

SEQ ID NO: 3028 - protein, 10 aa, Homo sapiens
  Table 1.2; GLYATL3; ENSG00000203972; HLA -A*23:01,HLA-A*24:02,HLA-A*30:02,HLA-A*31:01,HLA-A*32:01, HLA-B*15:01,HLA-B*15:03
KQLNIKLTSF

SEQ ID NO: 3029 - protein, 9 aa, Homo sapiens
  Table 1.2; GLYATL3; ENSG00000203972; HLA -A*02:01,HLA-A*02:03,HLA-A*02:07,HLA-A*03:01,HLA-A*32:01, HLA-B*13:02,HLA-B*40:02,HLA-B*58:01
KVYGAVMNI

SEQ ID NO: 3030 - protein, 11 aa, Homo sapiens
  Table 1.2; GLYATL3; ENSG00000203972; HLA -A*03:01,HLA-A*31:01
KVYGAVMNINR

SEQ ID NO: 3031 - protein, 8 aa, Homo sapiens
  Table 1.2; GLYATL3; ENSG00000203972; HLA -B*18:01,HLA-B*37:01
LDHYTNAY

SEQ ID NO: 3032 - protein, 8 aa, Homo sapiens
  Table 1.2; GLYATL3; ENSG00000203972; HLA -A*23:01,HLA-B*39:01
LILTPATF

SEQ ID NO: 3033 - protein, 8 aa, Homo sapiens
  Table 1.2; GLYATL3; ENSG00000203972; HLA -B*27:02
LPDTSFLK

SEQ ID NO: 3034 - protein, 8 aa, Homo sapiens
  Table 1.2; GLYATL3; ENSG00000203972; HLA -B*13:02
LQSELYDV

SEQ ID NO: 3035 - protein, 10 aa, Homo sapiens
  Table 1.2; GLYATL3; ENSG00000203972; HLA -A*11:01,HLA-B*27:02
LQSELYDVSK

SEQ ID NO: 3036 - protein, 9 aa, Homo sapiens
  Table 1.2; GLYATL3; ENSG00000203972; HLA -A*02:07,HLA-C*01:02
LTPATFSGL

SEQ ID NO: 3037 - protein, 8 aa, Homo sapiens
  Table 1.2; GLYATL3; ENSG00000203972; HLA -C*04:01
LYDVSKAV

SEQ ID NO: 3038 - protein, 9 aa, Homo sapiens
  Table 1.2; GLYATL3; ENSG00000203972; HLA -B*08:01,HLA-C*16:01
MNINRGNPF

SEQ ID NO: 3039 - protein, 9 aa, Homo sapiens
  Table 1.2; GLYATL3; ENSG00000203972; HLA -A*25:01,HLA-B*44:02,HLA-B*44:03,HLA-B*51:01,HLA-B*57:01, HLA-B*58:01
NADLLNRTW

SEQ ID NO: 3040 - protein, 9 aa, Homo sapiens
  Table 1.2; GLYATL3; ENSG00000203972; HLA -A*01:01,HLA-A*02:07,HLA-A*29:02,HLA-A*30:02
NLDHYTNAY

SEQ ID NO: 3041 - protein, 9 aa, Homo sapiens
  Table 1.2; GLYATL3; ENSG00000203972; HLA -A*02:01,HLA-A*02:07,HLA-B*55:01
NLISCFPSV

SEQ ID NO: 3042 - protein, 8 aa, Homo sapiens
  Table 1.2; GLYATL3; ENSG00000203972; HLA -B*08:01,HLA-B*51:01
NPFQKEVV

SEQ ID NO: 3043 - protein, 9 aa, Homo sapiens
  Table 1.2; GLYATL3; ENSG00000203972; HLA -B*07:02,HLA-B*08:01,HLA-B*35:01,HLA-B*35:03,HLA-B*51:01, HLA-B*54:01,HLA-B*55:01,HLA-B*56:01,HLA-C*03:03,HLA-C*07:02
NPFQKEVVL

SEQ ID NO: 3044 - protein, 11 aa, Homo sapiens
  Table 1.2; GLYATL3; ENSG00000203972; HLA -B*35:01
NPVSWSITDQF

SEQ ID NO: 3045 - protein, 9 aa, Homo sapiens
  Table 1.2; GLYATL3; ENSG00000203972; HLA -A*01:01,HLA-A*03:01,HLA-A*03:02,HLA-A*11:01,HLA-A*26:01, HLA-A*29:02,HLA-A*33:03,HLA-A*68:01,HLA-A*68:02,HLA-B*27:05, HLA-C*07:06
NTASISLLK

SEQ ID NO: 3046 - protein, 11 aa, Homo sapiens
  Table 1.2; GLYATL3; ENSG00000203972; HLA -A*68:02
NTASISLLKSL

SEQ ID NO: 3047 - protein, 10 aa, Homo sapiens
  Table 1.2; GLYATL3; ENSG00000203972; HLA -A*25:01
NVLDDNTASI

SEQ ID NO: 3048 - protein, 9 aa, Homo sapiens
  Table 1.2; GLYATL3; ENSG00000203972; HLA -A*29:02
QFATMCHGY

SEQ ID NO: 3049 - protein, 9 aa, Homo sapiens
  Table 1.2; GLYATL3; ENSG00000203972; HLA -C*01:02
QIQGLQSEL

SEQ ID NO: 3050 - protein, 10 aa, Homo sapiens
  Table 1.2; GLYATL3; ENSG00000203972; HLA -A*30:02,HLA-B*15:01
QIQGLQSELY

SEQ ID NO: 3051 - protein, 9 aa, Homo sapiens
  Table 1.2; GLYATL3; ENSG00000203972; HLA -A*02:03,HLA-A*23:01,HLA-A*24:02,HLA-A*25:01,HLA-A*31:01, HLA-A*32:01,HLA-B*08:01,HLA-B*15:01,HLA-B*15:03,HLA-B*37:01, HLA-B*46:01
QLNIKLTSF

SEQ ID NO: 3052 - protein, 9 aa, Homo sapiens
  Table 1.2; GLYATL3; ENSG00000203972; HLA -B*27:02
QSELYDVSK

SEQ ID NO: 3053 - protein, 10 aa, Homo sapiens
  Table 1.2; GLYATL3; ENSG00000203972; HLA -B*44:03,HLA-B*58:01
RDEKGNPVSW

SEQ ID NO: 3054 - protein, 11 aa, Homo sapiens
  Table 1.2; GLYATL3; ENSG00000203972; HLA -A*30:02,HLA-B*44:02,HLA-B*44:03
REAETDNLDHY

SEQ ID NO: 3055 - protein, 9 aa, Homo sapiens
  Table 1.2; GLYATL3; ENSG00000203972; HLA -A*23:01,HLA-A*24:02,HLA-A*32:01,HLA-B*15:01,HLA-B*15:03, HLA-B*46:01,HLA-B*57:01,HLA-B*58:01
RLILTPATF

SEQ ID NO: 3056 - protein, 9 aa, Homo sapiens
  Table 1.2; GLYATL3; ENSG00000203972; HLA -A*03:01
RLVALTLAR

SEQ ID NO: 3057 - protein, 10 aa, Homo sapiens
  Table 1.2; GLYATL3; ENSG00000203972; HLA -A*23:01,HLA-A*24:02
RYIANLISCF

SEQ ID NO: 3058 - protein, 9 aa, Homo sapiens
  Table 1.2; GLYATL3; ENSG00000203972; HLA -B*13:02
SCFPESLKV

SEQ ID NO: 3059 - protein, 10 aa, Homo sapiens
  Table 1.2; GLYATL3; ENSG00000203972; HLA -A*30:02,HLA-B*15:01,HLA-C*12:03
SCFPESLKVY

SEQ ID NO: 3060 - protein, 9 aa, Homo sapiens
  Table 1.2; GLYATL3; ENSG00000203972; HLA -A*31:01
SCFPSVCVR

SEQ ID NO: 3061 - protein, 9 aa, Homo sapiens
  Table 1.2; GLYATL3; ENSG00000203972; HLA -A*30:01,HLA-B*40:01,HLA-B*40:02,HLA-B*49:01
SELYDVSKA

SEQ ID NO: 3062 - protein, 10 aa, Homo sapiens
  Table 1.2; GLYATL3; ENSG00000203972; HLA -B*49:01
SELYDVSKAV

SEQ ID NO: 3063 - protein, 8 aa, Homo sapiens
  Table 1.2; GLYATL3; ENSG00000203972; HLA -B*37:01
SISLLKSL

SEQ ID NO: 3064 - protein, 9 aa, Homo sapiens
  Table 1.2; GLYATL3; ENSG00000203972; HLA -A*25:01,HLA-A*26:01,HLA-A*30:01,HLA-A*32:01,HLA-A*68:01, HLA-A*68:02,HLA-B*18:01,HLA-B*27:05,HLA-B*35:01,HLA-B*35:03, HLA-B*46:01,HLA-C*01:02,HLA-C*02:02,HLA-C*03:03,HLA-C*03:04
SITDQFATM

SEQ ID NO: 3065 - protein, 9 aa, Homo sapiens
  Table 1.2; GLYATL3; ENSG00000203972; HLA -B*08:01,HLA-B*46:01
SLKVYGAVM

SEQ ID NO: 3066 - protein, 9 aa, Homo sapiens
  Table 1.2; GLYATL3; ENSG00000203972; HLA -A*03:01,HLA-A*03:02,HLA-A*11:01
SLPDTSFLK

SEQ ID NO: 3067 - protein, 9 aa, Homo sapiens
  Table 1.2; GLYATL3; ENSG00000203972; HLA -B*07:02,HLA-B*54:01,HLA-B*56:01,HLA-C*07:02
SPRLTYLSV

SEQ ID NO: 3068 - protein, 9 aa, Homo sapiens
  Table 1.2; GLYATL3; ENSG00000203972; HLA -B*56:01
SPVSSLPDT

SEQ ID NO: 3069 - protein, 11 aa, Homo sapiens
  Table 1.2; GLYATL3; ENSG00000203972; HLA -B*07:02,HLA-B*35:01,HLA-B*35:03,HLA-B*55:01,HLA-B*56:01, HLA-C*03:03
SPVSSLPDTSF

SEQ ID NO: 3070 - protein, 10 aa, Homo sapiens
  Table 1.2; GLYATL3; ENSG00000203972; HLA -A*11:01
SSLPDTSFLK

SEQ ID NO: 3071 - protein, 9 aa, Homo sapiens
  Table 1.2; GLYATL3; ENSG00000203972; HLA -A*03:01,HLA-A*11:01,HLA-A*31:01,HLA-A*33:01,HLA-A*33:03, HLA-B*13:02
STKLLILEK

SEQ ID NO: 3072 - protein, 10 aa, Homo sapiens
  Table 1.2; GLYATL3; ENSG00000203972; HLA -A*03:01,HLA-A*11:01,HLA-A*31:01,HLA-A*33:01,HLA-A*33:03, HLA-A*68:01,HLA-B*27:02,HLA-C*07:06
SVANADLLNR

SEQ ID NO: 3073 - protein, 8 aa, Homo sapiens
  Table 1.2; GLYATL3; ENSG00000203972; HLA -B*27:02
TASISLLK

SEQ ID NO: 3074 - protein, 8 aa, Homo sapiens
  Table 1.2; GLYATL3; ENSG00000203972; HLA -A*23:01
TFSGLPHL

SEQ ID NO: 3075 - protein, 8 aa, Homo sapiens
  Table 1.2; GLYATL3; ENSG00000203972; HLA -B*07:02
TPATFSGL

SEQ ID NO: 3076 - protein, 11 aa, Homo sapiens
  Table 1.2; GLYATL3; ENSG00000203972; HLA -B*07:02,HLA-B*35:03,HLA-C*04:01,HLA-C*06:02
TPATFSGLPHL

SEQ ID NO: 3077 - protein, 8 aa, Homo sapiens
  Table 1.2; GLYATL3; ENSG00000203972; HLA -B*57:01
TSFKAVHF

SEQ ID NO: 3078 - protein, 11 aa, Homo sapiens
  Table 1.2; GLYATL3; ENSG00000203972; HLA -A*23:01,HLA-A*24:02
TYLSVANADLL

SEQ ID NO: 3079 - protein, 9 aa, Homo sapiens
  Table 1.2; GLYATL3; ENSG00000203972; HLA -C*16:01,HLA-C*16:02
VALTLARKL

SEQ ID NO: 3080 - protein, 9 aa, Homo sapiens
  Table 1.2; GLYATL3; ENSG00000203972; HLA -A*03:02,HLA-A*11:01,HLA-A*31:01,HLA-A*33:01,HLA-A*33:03, HLA-A*68:01,HLA-C*07:06
VANADLLNR

SEQ ID NO: 3081 - protein, 11 aa, Homo sapiens
  Table 1.2; GLYATL3; ENSG00000203972; HLA -A*32:01,HLA-B*44:02,HLA-B*57:01,HLA-B*58:01
VANADLLNRTW

SEQ ID NO: 3082 - protein, 9 aa, Homo sapiens
  Table 1.2; GLYATL3; ENSG00000203972; HLA -A*23:01,HLA-A*24:02,HLA-A*30:01,HLA-A*32:01,HLA-B*13:02, HLA-B*51:01,HLA-B*58:01,HLA-C*16:02
VANSKQLNI

SEQ ID NO: 3083 - protein, 9 aa, Homo sapiens
  Table 1.2; GLYATL3; ENSG00000203972; HLA -A*29:02,HLA-A*30:02
VFYKDVRAY

SEQ ID NO: 3084 - protein, 10 aa, Homo sapiens
  Table 1.2; GLYATL3; ENSG00000203972; HLA -A*31:01
VFYKDVRAYR

SEQ ID NO: 3085 - protein, 9 aa, Homo sapiens
  Table 1.2; GLYATL3; ENSG00000203972; HLA -B*15:03,HLA-B*38:01,HLA-B*39:01
VHFSPVSSL

SEQ ID NO: 3086 - protein, 9 aa, Homo sapiens
  Table 1.2; GLYATL3; ENSG00000203972; HLA -A*01:01,HLA-A*02:01,HLA-A*02:03,HLA-A*02:07,HLA-A*30:01, HLA-A*32:01,HLA-B*13:02,HLA-B*38:01,HLA-B*55:01,HLA-C*04:01, HLA-C*05:01
VLDDNTASI

SEQ ID NO: 3087 - protein, 11 aa, Homo sapiens
  Table 1.2; GLYATL3; ENSG00000203972; HLA -A*02:01,HLA-A*02:07,HLA-B*38:01,HLA-B*55:01,HLA-C*05:01
VLDDNTASISL

SEQ ID NO: 3088 - protein, 11 aa, Homo sapiens
  Table 1.2; GLYATL3; ENSG00000203972; HLA -A*02:01,HLA-A*02:07
VLDSWPDFKAV

SEQ ID NO: 3089 - protein, 10 aa, Homo sapiens
  Table 1.2; GLYATL3; ENSG00000203972; HLA -A*32:01,HLA-C*16:01
VMNINRGNPF

SEQ ID NO: 3090 - protein, 9 aa, Homo sapiens
  Table 1.2; GLYATL3; ENSG00000203972; HLA -A*03:02,HLA-A*31:01,HLA-B*58:01
VSKAVANSK

SEQ ID NO: 3091 - protein, 9 aa, Homo sapiens
  Table 1.2; GLYATL3; ENSG00000203972; HLA -A*32:01,HLA-B*15:01,HLA-B*46:01,HLA-B*58:01,HLA-C*05:01
VSSLPDTSF

SEQ ID NO: 3092 - protein, 11 aa, Homo sapiens
  Table 1.2; GLYATL3; ENSG00000203972; HLA -A*11:01
VSSLPDTSFLK

SEQ ID NO: 3093 - protein, 8 aa, Homo sapiens
  Table 1.2; GLYATL3; ENSG00000203972; HLA -A*23:01,HLA-A*24:02
VYGAVMNI

SEQ ID NO: 3094 - protein, 10 aa, Homo sapiens
  Table 1.2; GLYATL3; ENSG00000203972; HLA -A*31:01,HLA-A*33:01,HLA-A*33:03,HLA-B*27:02
VYGAVMNINR

SEQ ID NO: 3095 - protein, 8 aa, Homo sapiens
  Table 1.2; GLYATL3; ENSG00000203972; HLA -B*08:01
WPDFKAVI

SEQ ID NO: 3096 - protein, 9 aa, Homo sapiens
  Table 1.2; GLYATL3; ENSG00000203972; HLA -A*33:03,HLA-A*68:01,HLA-B*27:02,HLA-C*07:06
YGAVMNINR

SEQ ID NO: 3097 - protein, 9 aa, Homo sapiens
  Table 1.2; GLYATL3; ENSG00000203972; HLA -A*25:01,HLA-A*26:01,HLA-B*46:01,HLA-C*02:02
YIANLISCF

SEQ ID NO: 3098 - protein, 9 aa, Homo sapiens
  Table 1.2; GLYATL3; ENSG00000203972; HLA -A*01:01,HLA-A*03:01,HLA-A*11:01,HLA-A*26:01,HLA-A*29:02, HLA-A*30:02,HLA-A*32:01,HLA-A*33:01,HLA-B*57:01,HLA-C*02:02
YTNAYAVFY

SEQ ID NO: 3099 - protein, 9 aa, Homo sapiens
  Table 1.2; GPRC6A; ENSG00000173612; HLA -A*02:07,HLA-B*51:01,HLA-C*01:02
AAPTVEVNV

SEQ ID NO: 3100 - protein, 9 aa, Homo sapiens
  Table 1.2; GPRC6A; ENSG00000173612; HLA -C*16:02
AATSPGHII

SEQ ID NO: 3101 - protein, 8 aa, Homo sapiens
  Table 1.2; GPRC6A; ENSG00000173612; HLA -B*49:01
AEANNVCI

SEQ ID NO: 3102 - protein, 10 aa, Homo sapiens
  Table 1.2; GPRC6A; ENSG00000173612; HLA -A*30:01,HLA-B*27:02,HLA-B*40:01,HLA-B*44:02,HLA-B*44:03, HLA-C*16:04
AEANNVCIAF

SEQ ID NO: 3103 - protein, 8 aa, Homo sapiens
  Table 1.2; GPRC6A; ENSG00000173612; HLA -A*30:01,HLA-B*37:01,HLA-B*44:02,HLA-B*44:03,HLA-B*49:01
AEILSDKI

SEQ ID NO: 3104 - protein, 10 aa, Homo sapiens
  Table 1.2; GPRC6A; ENSG00000173612; HLA -B*44:02,HLA-B*44:03
AEILSDKIRF

SEQ ID NO: 3105 - protein, 9 aa, Homo sapiens
  Table 1.2; GPRC6A; ENSG00000173612; HLA -A*02:07,HLA-A*30:01,HLA-B*13:02,HLA-B*27:02,HLA-B*37:01, HLA-B*40:01,HLA-B*40:02,HLA-B*44:02,HLA-B*44:03,HLA-B*49:01, HLA-C*16:04
AEPGLIHSI

SEQ ID NO: 3106 - protein, 11 aa, Homo sapiens
  Table 1.2; GPRC6A; ENSG00000173612; HLA -A*30:01,HLA-B*40:01,HLA-B*44:02,HLA-B*44:03
AEPGLIHSIQL

SEQ ID NO: 3107 - protein, 9 aa, Homo sapiens
  Table 1.2; GPRC6A; ENSG00000173612; HLA -A*30:01,HLA-B*49:01,HLA-C*16:04
AEYDLQNDV

SEQ ID NO: 3108 - protein, 10 aa, Homo sapiens
  Table 1.2; GPRC6A; ENSG00000173612; HLA -A*30:01,HLA-B*18:01,HLA-B*27:02,HLA-B*37:01,HLA-B*40:01, HLA-B*40:02,HLA-B*44:02,HLA-B*44:03,HLA-B*49:01,HLA-C*16:04
AEYDLQNDVF

SEQ ID NO: 3109 - protein, 11 aa, Homo sapiens
  Table 1.2; GPRC6A; ENSG00000173612; HLA -B*49:01
AEYDLQNDVFI

SEQ ID NO: 3110 - protein, 9 aa, Homo sapiens
  Table 1.2; GPRC6A; ENSG00000173612; HLA -A*23:01,HLA-A*24:02,HLA-A*30:02,HLA-B*46:01
AFKEVLPAF

SEQ ID NO: 3111 - protein, 9 aa, Homo sapiens
  Table 1.2; GPRC6A; ENSG00000173612; HLA -A*29:02,HLA-A*30:02
AFKGKYENY

SEQ ID NO: 3112 - protein, 9 aa, Homo sapiens
  Table 1.2; GPRC6A; ENSG00000173612; HLA -A*29:02,HLA-A*30:02
AFLKMIYSY

SEQ ID NO: 3113 - protein, 9 aa, Homo sapiens
  Table 1.2; GPRC6A; ENSG00000173612; HLA -A*02:04
AILLLILSL

SEQ ID NO: 3114 - protein, 9 aa, Homo sapiens
  Table 1.2; GPRC6A; ENSG00000173612; HLA -A*31:01
AIRDLCQAR

SEQ ID NO: 3115 - protein, 9 aa, Homo sapiens
  Table 1.2; GPRC6A; ENSG00000173612; HLA -A*02:04
ALGYAIRDL

SEQ ID NO: 3116 - protein, 9 aa, Homo sapiens
  Table 1.2; GPRC6A; ENSG00000173612; HLA -A*02:01,HLA-A*02:03,HLA-A*02:04,HLA-A*02:07,HLA-A*03:01, HLA-B*55:01,HLA-B*56:01
ALNTFIIQA

SEQ ID NO: 3117 - protein, 9 aa, Homo sapiens
  Table 1.2; GPRC6A; ENSG00000173612; HLA -A*02:03,HLA-A*02:04
AMAATLRFL

SEQ ID NO: 3118 - protein, 8 aa, Homo sapiens
  Table 1.2; GPRC6A; ENSG00000173612; HLA -A*03:01
AMAHLIQK

SEQ ID NO: 3119 - protein, 9 aa, Homo sapiens
  Table 1.2; GPRC6A; ENSG00000173612; HLA -A*30:02,HLA-B*15:01,HLA-B*15:03,HLA-B*46:01
AMHLSACAY

SEQ ID NO: 3120 - protein, 8 aa, Homo sapiens
  Table 1.2; GPRC6A; ENSG00000173612; HLA -B*46:01
AMIHSIEM

SEQ ID NO: 3121 - protein, 9 aa, Homo sapiens
  Table 1.2; GPRC6A; ENSG00000173612; HLA -A*02:01,HLA-A*02:03,HLA-A*02:04,HLA-A*02:07,HLA-B*13:02, HLA-B*55:01
AMIHSIEMI

SEQ ID NO: 3122 - protein, 10 aa, Homo sapiens
  Table 1.2; GPRC6A; ENSG00000173612; HLA -B*07:02,HLA-B*35:03,HLA-B*56:01,HLA-C*07:02
APTVEVNVSL

SEQ ID NO: 3123 - protein, 8 aa, Homo sapiens
  Table 1.2; GPRC6A; ENSG00000173612; HLA -B*56:01
APVRSTMC

SEQ ID NO: 3124 - protein, 9 aa, Homo sapiens
  Table 1.2; GPRC6A; ENSG00000173612; HLA -B*07:02
APVRSTMCF

SEQ ID NO: 3125 - protein, 8 aa, Homo sapiens
  Table 1.2; GPRC6A; ENSG00000173612; HLA -B*13:02
AQVNVIVV

SEQ ID NO: 3126 - protein, 9 aa, Homo sapiens
  Table 1.2; GPRC6A; ENSG00000173612; HLA -A*23:01,HLA-A*25:01,HLA-A*26:01,HLA-A*30:01,HLA-A*32:01, HLA-B*13:02,HLA-B*15:01,HLA-B*15:03,HLA-B*27:02,HLA-B*38:01, HLA-B*39:01,HLA-B*44:02,HLA-B*44:03,HLA-B*58:01,HLA-C*02:02,
  HLA-C*12:03,HLA-C*16:04
AQVNVIVVF

SEQ ID NO: 3127 - protein, 11 aa, Homo sapiens
  Table 1.2; GPRC6A; ENSG00000173612; HLA -A*03:01,HLA-A*03:02,HLA-A*11:01,HLA-A*31:01
ATKITTIPNVK

SEQ ID NO: 3128 - protein, 9 aa, Homo sapiens
  Table 1.2; GPRC6A; ENSG00000173612; HLA -B*57:01
ATLRFLSKF

SEQ ID NO: 3129 - protein, 10 aa, Homo sapiens
  Table 1.2; GPRC6A; ENSG00000173612; HLA -A*11:01,HLA-A*68:01
ATSVSKTLPR

SEQ ID NO: 3130 - protein, 11 aa, Homo sapiens
  Table 1.2; GPRC6A; ENSG00000173612; HLA -A*11:01
ATSVSKTLPRK

SEQ ID NO: 3131 - protein, 9 aa, Homo sapiens
  Table 1.2; GPRC6A; ENSG00000173612; HLA -A*02:04,HLA-B*13:02
AVFALGYAI

SEQ ID NO: 3132 - protein, 10 aa, Homo sapiens
  Table 1.2; GPRC6A; ENSG00000173612; HLA -A*25:01,HLA-A*26:01,HLA-B*46:01
AVIGSGYSEI

SEQ ID NO: 3133 - protein, 10 aa, Homo sapiens
  Table 1.2; GPRC6A; ENSG00000173612; HLA -A*33:03
AYKANKAIER

SEQ ID NO: 3134 - protein, 9 aa, Homo sapiens
  Table 1.2; GPRC6A; ENSG00000173612; HLA -B*08:01
CAYVKDTDL

SEQ ID NO: 3135 - protein, 9 aa, Homo sapiens
  Table 1.2; GPRC6A; ENSG00000173612; HLA -A*30:01,HLA-B*18:01,HLA-B*27:02,HLA-B*40:01,HLA-B*44:02, HLA-B*44:03,HLA-B*49:01
CEEGSILAF

SEQ ID NO: 3136 - protein, 9 aa, Homo sapiens
  Table 1.2; GPRC6A; ENSG00000173612; HLA -A*30:02
CQNCPENHY

SEQ ID NO: 3137 - protein, 10 aa, Homo sapiens
  Table 1.2; GPRC6A; ENSG00000173612; HLA -B*27:02,HLA-B*27:05
CRENATSVSK

SEQ ID NO: 3138 - protein, 10 aa, Homo sapiens
  Table 1.2; GPRC6A; ENSG00000173612; HLA -A*25:01,HLA-A*26:01
DAHGDLNTGY

SEQ ID NO: 3139 - protein, 9 aa, Homo sapiens
  Table 1.2; GPRC6A; ENSG00000173612; HLA -A*26:01,HLA-A*33:01,HLA-B*08:01,HLA-B*18:01
DLFNKAIEM

SEQ ID NO: 3140 - protein, 10 aa, Homo sapiens
  Table 1.2; GPRC6A; ENSG00000173612; HLA -A*33:01,HLA-A*33:03
DNTIEVRINR

SEQ ID NO: 3141 - protein, 9 aa, Homo sapiens
  Table 1.2; GPRC6A; ENSG00000173612; HLA -B*51:01
DNWSTATKI

SEQ ID NO: 3142 - protein, 8 aa, Homo sapiens
  Table 1.2; GPRC6A; ENSG00000173612; HLA -B*08:01
DPKLQKFL

SEQ ID NO: 3143 - protein, 9 aa, Homo sapiens
  Table 1.2; GPRC6A; ENSG00000173612; HLA -A*33:01
DPKLQKFLK

SEQ ID NO: 3144 - protein, 9 aa, Homo sapiens
  Table 1.2; GPRC6A; ENSG00000173612; HLA -A*01:01,HLA-A*26:01,HLA-A*30:02,HLA-A*33:01,HLA-B*18:01
DSHKLLHEY

SEQ ID NO: 3145 - protein, 9 aa, Homo sapiens
  Table 1.2; GPRC6A; ENSG00000173612; HLA -B*51:01
DSLAILLLI

SEQ ID NO: 3146 - protein, 9 aa, Homo sapiens
  Table 1.2; GPRC6A; ENSG00000173612; HLA -A*25:01,HLA-A*26:01,HLA-A*33:01,HLA-B*35:01,HLA-B*35:03, HLA-B*39:01,HLA-B*51:01
DSMSGNVTM

SEQ ID NO: 3147 - protein, 8 aa, Homo sapiens
  Table 1.2; GPRC6A; ENSG00000173612; HLA -B*51:01
DSPRRPQI

SEQ ID NO: 3148 - protein, 10 aa, Homo sapiens
  Table 1.2; GPRC6A; ENSG00000173612; HLA -A*26:01
DTCTEVTVAM

SEQ ID NO: 3149 - protein, 9 aa, Homo sapiens
  Table 1.2; GPRC6A; ENSG00000173612; HLA -A*01:01
DTDLSQCIF

SEQ ID NO: 3150 - protein, 11 aa, Homo sapiens
  Table 1.2; GPRC6A; ENSG00000173612; HLA -A*68:01,HLA-A*68:02
DVFIIPDQETK

SEQ ID NO: 3151 - protein, 10 aa, Homo sapiens
  Table 1.2; GPRC6A; ENSG00000173612; HLA -A*33:01
DYAEPGLIHS

SEQ ID NO: 3152 - protein, 11 aa, Homo sapiens
  Table 1.2; GPRC6A; ENSG00000173612; HLA -A*23:01,HLA-A*24:02,HLA-A*33:01,HLA-A*33:03,HLA-B*38:01
DYAEPGLIHSI

SEQ ID NO: 3153 - protein, 10 aa, Homo sapiens
  Table 1.2; GPRC6A; ENSG00000173612; HLA -A*24:02
DYGRLALNTF

SEQ ID NO: 3154 - protein, 8 aa, Homo sapiens
  Table 1.2; GPRC6A; ENSG00000173612; HLA -A*33:01
DYSSYMPR

SEQ ID NO: 3155 - protein, 9 aa, Homo sapiens
  Table 1.2; GPRC6A; ENSG00000173612; HLA -A*23:01,HLA-A*25:01,HLA-A*26:01,HLA-A*32:01,HLA-A*33:01, HLA-A*33:03,HLA-A*68:01,HLA-A*68:02,HLA-B*18:01,HLA-B*27:02, HLA-B*35:01,HLA-B*35:03,HLA-B*44:03,HLA-B*55:01,HLA-B*57:01,
  HLA-B*58:01,HLA-C*03:03,HLA-C*07:06,HLA-C*16:04
EANNVCIAF

SEQ ID NO: 3156 - protein, 10 aa, Homo sapiens
  Table 1.2; GPRC6A; ENSG00000173612; HLA -A*68:01
EANNVCIAFK

SEQ ID NO: 3157 - protein, 10 aa, Homo sapiens
  Table 1.2; GPRC6A; ENSG00000173612; HLA -A*25:01
EAQVNVIVVF

SEQ ID NO: 3158 - protein, 10 aa, Homo sapiens
  Table 1.2; GPRC6A; ENSG00000173612; HLA -A*25:01,HLA-A*26:01
ECVGFEISVF

SEQ ID NO: 3159 - protein, 9 aa, Homo sapiens
  Table 1.2; GPRC6A; ENSG00000173612; HLA -B*37:01
EDSPRRPQI

SEQ ID NO: 3160 - protein, 8 aa, Homo sapiens
  Table 1.2; GPRC6A; ENSG00000173612; HLA -B*18:01,HLA-B*44:02,HLA-B*44:03
EEGSILAF

SEQ ID NO: 3161 - protein, 10 aa, Homo sapiens
  Table 1.2; GPRC6A; ENSG00000173612; HLA -A*25:01,HLA-A*26:01
EIIVILISNY

SEQ ID NO: 3162 - protein, 8 aa, Homo sapiens
  Table 1.2; GPRC6A; ENSG00000173612; HLA -B*08:01
EINGHMTV

SEQ ID NO: 3163 - protein, 9 aa, Homo sapiens
  Table 1.2; GPRC6A; ENSG00000173612; HLA -A*25:01,HLA-A*26:01
EINGHMTVT

SEQ ID NO: 3164 - protein, 10 aa, Homo sapiens
  Table 1.2; GPRC6A; ENSG00000173612; HLA -A*03:02,HLA-A*25:01,HLA-A*33:01,HLA-A*33:03,HLA-A*68:01, HLA-C*07:06
EINGHMTVTK

SEQ ID NO: 3165 - protein, 11 aa, Homo sapiens
  Table 1.2; GPRC6A; ENSG00000173612; HLA -A*25:01,HLA-A*26:01
EINGHMTVTKM

SEQ ID NO: 3166 - protein, 8 aa, Homo sapiens
  Table 1.2; GPRC6A; ENSG00000173612; HLA -B*08:01
EINTKSAF

SEQ ID NO: 3167 - protein, 9 aa, Homo sapiens
  Table 1.2; GPRC6A; ENSG00000173612; HLA -A*25:01,HLA-A*26:01,HLA-B*08:01
EINTKSAFL

SEQ ID NO: 3168 - protein, 10 aa, Homo sapiens
  Table 1.2; GPRC6A; ENSG00000173612; HLA -A*03:02,HLA-A*33:01,HLA-A*33:03,HLA-A*68:01
EINTKSAFLK

SEQ ID NO: 3169 - protein, 9 aa, Homo sapiens
  Table 1.2; GPRC6A; ENSG00000173612; HLA -A*24:02,HLA-A*25:01,HLA-A*26:01,HLA-A*68:02,HLA-B*44:02
EISVFLQTL

SEQ ID NO: 3170 - protein, 8 aa, Homo sapiens
  Table 1.2; GPRC6A; ENSG00000173612; HLA -A*33:03,HLA-A*68:01
EITMAVSR

SEQ ID NO: 3171 - protein, 9 aa, Homo sapiens
  Table 1.2; GPRC6A; ENSG00000173612; HLA -A*25:01,HLA-A*26:01
EITMAVSRM

SEQ ID NO: 3172 - protein, 9 aa, Homo sapiens
  Table 1.2; GPRC6A; ENSG00000173612; HLA -A*02:03,HLA-A*25:01,HLA-A*26:01,HLA-A*68:02,HLA-B*13:02
EIYDTCTEV

SEQ ID NO: 3173 - protein, 11 aa, Homo sapiens
  Table 1.2; GPRC6A; ENSG00000173612; HLA -A*23:01
ELLGVLKNVTF

SEQ ID NO: 3174 - protein, 9 aa, Homo sapiens
  Table 1.2; GPRC6A; ENSG00000173612; HLA -A*23:01,HLA-A*26:01
EMINNSTLL

SEQ ID NO: 3175 - protein, 11 aa, Homo sapiens
  Table 1.2; GPRC6A; ENSG00000173612; HLA -A*25:01,HLA-A*26:01,HLA-A*33:01,HLA-A*33:03
ENYNEAKFITF

SEQ ID NO: 3176 - protein, 8 aa, Homo sapiens
  Table 1.2; GPRC6A; ENSG00000173612; HLA -B*08:01,HLA-B*51:01
EPGLIHSI

SEQ ID NO: 3177 - protein, 10 aa, Homo sapiens
  Table 1.2; GPRC6A; ENSG00000173612; HLA -A*33:01,HLA-A*33:03
EPQDFTCKTR

SEQ ID NO: 3178 - protein, 9 aa, Homo sapiens
  Table 1.2; GPRC6A; ENSG00000173612; HLA -A*25:01,HLA-A*33:03
ETKNEFRNL

SEQ ID NO: 3179 - protein, 9 aa, Homo sapiens
  Table 1.2; GPRC6A; ENSG00000173612; HLA -A*25:01,HLA-A*26:01
ETVEFKCDY

SEQ ID NO: 3180 - protein, 9 aa, Homo sapiens
  Table 1.2; GPRC6A; ENSG00000173612; HLA -A*26:01
EVNVSLPRV

SEQ ID NO: 3181 - protein, 10 aa, Homo sapiens
  Table 1.2; GPRC6A; ENSG00000173612; HLA -A*25:01
EVNVSLPRVI

SEQ ID NO: 3182 - protein, 8 aa, Homo sapiens
  Table 1.2; GPRC6A; ENSG00000173612; HLA -B*08:01
EVRINRTL

SEQ ID NO: 3183 - protein, 9 aa, Homo sapiens
  Table 1.2; GPRC6A; ENSG00000173612; HLA -A*25:01,HLA-A*26:01
EVTVAMAAT

SEQ ID NO: 3184 - protein, 10 aa, Homo sapiens
  Table 1.2; GPRC6A; ENSG00000173612; HLA -A*25:01,HLA-A*26:01,HLA-A*68:01
EVTVAMAATL

SEQ ID NO: 3185 - protein, 11 aa, Homo sapiens
  Table 1.2; GPRC6A; ENSG00000173612; HLA -A*33:03,HLA-A*68:01
EVTVAMAATLR

SEQ ID NO: 3186 - protein, 9 aa, Homo sapiens
  Table 1.2; GPRC6A; ENSG00000173612; HLA -A*24:02,HLA-B*35:03,HLA-B*55:01,HLA-C*04:01
EYDLQNDVF

SEQ ID NO: 3187 - protein, 9 aa, Homo sapiens
  Table 1.2; GPRC6A; ENSG00000173612; HLA -A*23:01,HLA-A*24:02
EYLNWNDSL

SEQ ID NO: 3188 - protein, 8 aa, Homo sapiens
  Table 1.2; GPRC6A; ENSG00000173612; HLA -B*35:03,HLA-B*39:01,HLA-B*46:01,HLA-B*51:01,HLA-B*54:01, HLA-B*56:01,HLA-C*02:02,HLA-C*03:03,HLA-C*03:04,HLA-C*05:01, HLA-C*12:03,HLA-C*16:02
FAAPTVEV

SEQ ID NO: 3189 - protein, 10 aa, Homo sapiens
  Table 1.2; GPRC6A; ENSG00000173612; HLA -A*68:02,HLA-C*02:02
FAAPTVEVNV

SEQ ID NO: 3190 - protein, 10 aa, Homo sapiens
  Table 1.2; GPRC6A; ENSG00000173612; HLA -A*29:02,HLA-B*35:01,HLA-C*02:02
FAFKGKYENY

SEQ ID NO: 3191 - protein, 9 aa, Homo sapiens
  Table 1.2; GPRC6A; ENSG00000173612; HLA -B*49:01
FEISVFLQT

SEQ ID NO: 3192 - protein, 10 aa, Homo sapiens
  Table 1.2; GPRC6A; ENSG00000173612; HLA -A*30:01,HLA-B*40:01,HLA-B*40:02,HLA-B*44:02,HLA-B*49:01
FEISVFLQTL

SEQ ID NO: 3193 - protein, 8 aa, Homo sapiens
  Table 1.2; GPRC6A; ENSG00000173612; HLA -A*30:01,HLA-B*18:01,HLA-B*37:01
FEKEVEYL

SEQ ID NO: 3194 - protein, 10 aa, Homo sapiens
  Table 1.2; GPRC6A; ENSG00000173612; HLA -B*44:02
FEKEVEYLNW

SEQ ID NO: 3195 - protein, 9 aa, Homo sapiens
  Table 1.2; GPRC6A; ENSG00000173612; HLA -A*23:01,HLA-A*24:02,HLA-A*29:02,HLA-C*14:02
FFIGEPQDF

SEQ ID NO: 3196 - protein, 9 aa, Homo sapiens
  Table 1.2; GPRC6A; ENSG00000173612; HLA -A*29:02,HLA-A*30:02
FIFAFKGKY

SEQ ID NO: 3197 - protein, 9 aa, Homo sapiens
  Table 1.2; GPRC6A; ENSG00000173612; HLA -B*58:01
FIIPDQETK

SEQ ID NO: 3198 - protein, 10 aa, Homo sapiens
  Table 1.2; GPRC6A; ENSG00000173612; HLA -A*02:03,HLA-A*68:02
FIIQAEANNV

SEQ ID NO: 3199 - protein, 9 aa, Homo sapiens
  Table 1.2; GPRC6A; ENSG00000173612; HLA -A*02:07,HLA-A*24:02,HLA-B*46:01,HLA-C*01:02
FIPIYATTF

SEQ ID NO: 3200 - protein, 9 aa, Homo sapiens
  Table 1.2; GPRC6A; ENSG00000173612; HLA -A*29:02
FITFGMLIY

SEQ ID NO: 3201 - protein, 9 aa, Homo sapiens
  Table 1.2; GPRC6A; ENSG00000173612; HLA -A*32:01,HLA-B*15:01,HLA-B*15:03,HLA-B*46:01,HLA-C*01:02, HLA-C*02:02,HLA-C*07:04,HLA-C*14:02
FLNFASTSF

SEQ ID NO: 3202 - protein, 8 aa, Homo sapiens
  Table 1.2; GPRC6A; ENSG00000173612; HLA -A*02:04
FLQNLHLL

SEQ ID NO: 3203 - protein, 9 aa, Homo sapiens
  Table 1.2; GPRC6A; ENSG00000173612; HLA -B*46:01
FLRTVPSDF

SEQ ID NO: 3204 - protein, 9 aa, Homo sapiens
  Table 1.2; GPRC6A; ENSG00000173612; HLA -A*02:01,HLA-A*02:03,HLA-A*02:04,HLA-A*02:07,HLA-A*68:02, HLA-B*13:02,HLA-B*46:01,HLA-B*55:01,HLA-C*02:02
FLSDNTIEV

SEQ ID NO: 3205 - protein, 11 aa, Homo sapiens
  Table 1.2; GPRC6A; ENSG00000173612; HLA -A*02:01,HLA-A*02:04
FLSDNTIEVRI

SEQ ID NO: 3206 - protein, 10 aa, Homo sapiens
  Table 1.2; GPRC6A; ENSG00000173612; HLA -A*02:01,HLA-A*02:04,HLA-A*02:07
FLWDYAEPGL

SEQ ID NO: 3207 - protein, 11 aa, Homo sapiens
  Table 1.2; GPRC6A; ENSG00000173612; HLA -A*02:01,HLA-A*02:04
FLWDYAEPGLI

SEQ ID NO: 3208 - protein, 10 aa, Homo sapiens
  Table 1.2; GPRC6A; ENSG00000173612; HLA -A*29:02
FNHSQRTLAY

SEQ ID NO: 3209 - protein, 8 aa, Homo sapiens
  Table 1.2; GPRC6A; ENSG00000173612; HLA -B*51:01,HLA-B*54:01
FPSFLRTV

SEQ ID NO: 3210 - protein, 9 aa, Homo sapiens
  Table 1.2; GPRC6A; ENSG00000173612; HLA -A*02:07
FQPWELLGV

SEQ ID NO: 3211 - protein, 9 aa, Homo sapiens
  Table 1.2; GPRC6A; ENSG00000173612; HLA -A*03:01,HLA-A*11:01
FSFDPKLQK

SEQ ID NO: 3212 - protein, 10 aa, Homo sapiens
  Table 1.2; GPRC6A; ENSG00000173612; HLA -A*25:01,HLA-A*26:01,HLA-A*29:02,HLA-A*68:02,HLA-B*57:01, HLA-C*02:02
FSFDPKLQKF

SEQ ID NO: 3213 - protein, 9 aa, Homo sapiens
  Table 1.2; GPRC6A; ENSG00000173612; HLA -A*11:01
GGLFAIHEK

SEQ ID NO: 3214 - protein, 8 aa, Homo sapiens
  Table 1.2; GPRC6A; ENSG00000173612; HLA -B*37:01
GHMTVTKM

SEQ ID NO: 3215 - protein, 9 aa, Homo sapiens
  Table 1.2; GPRC6A; ENSG00000173612; HLA -B*15:01
GIITTDDDY

SEQ ID NO: 3216 - protein, 8 aa, Homo sapiens
  Table 1.2; GPRC6A; ENSG00000173612; HLA -B*15:03
GKVVGFAF

SEQ ID NO: 3217 - protein, 9 aa, Homo sapiens
  Table 1.2; GPRC6A; ENSG00000173612; HLA -B*15:03
GKYVPAVEI

SEQ ID NO: 3218 - protein, 9 aa, Homo sapiens
  Table 1.2; GPRC6A; ENSG00000173612; HLA -A*25:01
GNISSFHSF

SEQ ID NO: 3219 - protein, 9 aa, Homo sapiens
  Table 1.2; GPRC6A; ENSG00000173612; HLA -A*24:02
GYIAILAFI

SEQ ID NO: 3220 - protein, 9 aa, Homo sapiens
  Table 1.2; GPRC6A; ENSG00000173612; HLA -A*02:01,HLA-A*23:01,HLA-A*24:02,HLA-A*29:02,HLA-A*68:02, HLA-B*13:02,HLA-B*27:05,HLA-B*49:01,HLA-C*14:02
GYSEITMAV

SEQ ID NO: 3221 - protein, 11 aa, Homo sapiens
  Table 1.2; GPRC6A; ENSG00000173612; HLA -A*31:01,HLA-A*33:03
GYSEITMAVSR

SEQ ID NO: 3222 - protein, 9 aa, Homo sapiens
  Table 1.2; GPRC6A; ENSG00000173612; HLA -A*30:01,HLA-B*18:01,HLA-B*40:02,HLA-B*49:01,HLA-B*54:01
HEYAMHLSA

SEQ ID NO: 3223 - protein, 8 aa, Homo sapiens
  Table 1.2; GPRC6A; ENSG00000173612; HLA -C*04:01
HFDAHGDL

SEQ ID NO: 3224 - protein, 10 aa, Homo sapiens
  Table 1.2; GPRC6A; ENSG00000173612; HLA -A*23:01,HLA-A*24:02,HLA-A*29:02,HLA-C*14:02
HFLNFASTSF

SEQ ID NO: 3225 - protein, 10 aa, Homo sapiens
  Table 1.2; GPRC6A; ENSG00000173612; HLA -A*02:04
HLLPSDSHKL

SEQ ID NO: 3226 - protein, 11 aa, Homo sapiens
  Table 1.2; GPRC6A; ENSG00000173612; HLA -A*02:04
HLLPSDSHKLL

SEQ ID NO: 3227 - protein, 9 aa, Homo sapiens
  Table 1.2; GPRC6A; ENSG00000173612; HLA -A*03:02
HLSACAYVK

SEQ ID NO: 3228 - protein, 8 aa, Homo sapiens
  Table 1.2; GPRC6A; ENSG00000173612; HLA -A*01:01,HLA-A*30:02,HLA-B*58:01
HSQRTLAY

SEQ ID NO: 3229 - protein, 9 aa, Homo sapiens
  Table 1.2; GPRC6A; ENSG00000173612; HLA -A*03:02,HLA-A*33:01
HSQRTLAYK

SEQ ID NO: 3230 - protein, 8 aa, Homo sapiens
  Table 1.2; GPRC6A; ENSG00000173612; HLA -C*03:03,HLA-C*03:04
HSVSSIAL

SEQ ID NO: 3231 - protein, 9 aa, Homo sapiens
  Table 1.2; GPRC6A; ENSG00000173612; HLA -A*68:02,HLA-B*54:01
HVFDLFNKA

SEQ ID NO: 3232 - protein, 10 aa, Homo sapiens
  Table 1.2; GPRC6A; ENSG00000173612; HLA -A*68:02
HVFDLFNKAI

SEQ ID NO: 3233 - protein, 9 aa, Homo sapiens
  Table 1.2; GPRC6A; ENSG00000173612; HLA -A*24:02
HWAPVRSTM

SEQ ID NO: 3234 - protein, 9 aa, Homo sapiens
  Table 1.2; GPRC6A; ENSG00000173612; HLA -B*54:01
IAFKEVLPA

SEQ ID NO: 3235 - protein, 10 aa, Homo sapiens
  Table 1.2; GPRC6A; ENSG00000173612; HLA -B*57:01
IAFKEVLPAF

SEQ ID NO: 3236 - protein, 8 aa, Homo sapiens
  Table 1.2; GPRC6A; ENSG00000173612; HLA -A*23:01,HLA-C*03:03,HLA-C*03:04
IALSPASL

SEQ ID NO: 3237 - protein, 9 aa, Homo sapiens
  Table 1.2; GPRC6A; ENSG00000173612; HLA -A*30:01,HLA-B*18:01,HLA-B*37:01,HLA-B*40:01,HLA-B*40:02, HLA-B*44:02,HLA-B*44:03,HLA-B*49:01
IEMINNSTL

SEQ ID NO: 3238 - protein, 10 aa, Homo sapiens
  Table 1.2; GPRC6A; ENSG00000173612; HLA -A*30:01,HLA-B*40:01,HLA-B*49:01
IEMINNSTLL

SEQ ID NO: 3239 - protein, 8 aa, Homo sapiens
  Table 1.2; GPRC6A; ENSG00000173612; HLA -A*30:01,HLA-B*18:01,HLA-B*37:01,HLA-B*44:02,HLA-B*49:01
IEMNINKM

SEQ ID NO: 3240 - protein, 9 aa, Homo sapiens
  Table 1.2; GPRC6A; ENSG00000173612; HLA -B*44:02,HLA-B*44:03
IEMNINKMW

SEQ ID NO: 3241 - protein, 9 aa, Homo sapiens
  Table 1.2; GPRC6A; ENSG00000173612; HLA -A*30:01
IEVRINRTL

SEQ ID NO: 3242 - protein, 9 aa, Homo sapiens
  Table 1.2; GPRC6A; ENSG00000173612; HLA -A*23:01,HLA-A*24:02,HLA-B*46:01,HLA-C*14:02
IFAAPTVEV

SEQ ID NO: 3243 - protein, 11 aa, Homo sapiens
  Table 1.2; GPRC6A; ENSG00000173612; HLA -A*23:01
IFAAPTVEVNV

SEQ ID NO: 3244 - protein, 9 aa, Homo sapiens
  Table 1.2; GPRC6A; ENSG00000173612; HLA -C*14:02
IFNHSQRTL

SEQ ID NO: 3245 - protein, 11 aa, Homo sapiens
  Table 1.2; GPRC6A; ENSG00000173612; HLA -A*29:02
IFNHSQRTLAY

SEQ ID NO: 3246 - protein, 10 aa, Homo sapiens
  Table 1.2; GPRC6A; ENSG00000173612; HLA -A*23:01
IFVLVVGIIF

SEQ ID NO: 3247 - protein, 9 aa, Homo sapiens
  Table 1.2; GPRC6A; ENSG00000173612; HLA -A*23:01,HLA-B*46:01
IGKVVGFAF

SEQ ID NO: 3248 - protein, 10 aa, Homo sapiens
  Table 1.2; GPRC6A; ENSG00000173612; HLA -B*39:01
IGSGYSEITM

SEQ ID NO: 3249 - protein, 9 aa, Homo sapiens
  Table 1.2; GPRC6A; ENSG00000173612; HLA -B*38:01
IHSIQLAVF

SEQ ID NO: 3250 - protein, 10 aa, Homo sapiens
  Table 1.2; GPRC6A; ENSG00000173612; HLA -A*03:01,HLA-A*03:02
IICKQEINTK

SEQ ID NO: 3251 - protein, 9 aa, Homo sapiens
  Table 1.2; GPRC6A; ENSG00000173612; HLA -A*02:04,HLA-A*23:01
IIIGGLFAI

SEQ ID NO: 3252 - protein, 9 aa, Homo sapiens
  Table 1.2; GPRC6A; ENSG00000173612; HLA -A*02:01,HLA-A*02:04,HLA-A*02:07
IILEAQVNV

SEQ ID NO: 3253 - protein, 11 aa, Homo sapiens
  Table 1.2; GPRC6A; ENSG00000173612; HLA -A*02:07
IILEAQVNVIV

SEQ ID NO: 3254 - protein, 11 aa, Homo sapiens
  Table 1.2; GPRC6A; ENSG00000173612; HLA -A*24:02,HLA-A*32:01,HLA-B*15:01
IIPDQETKNEF

SEQ ID NO: 3255 - protein, 9 aa, Homo sapiens
  Table 1.2; GPRC6A; ENSG00000173612; HLA -A*26:01,HLA-A*29:02,HLA-A*30:02,HLA-B*15:01
IIVILISNY

SEQ ID NO: 3256 - protein, 10 aa, Homo sapiens
  Table 1.2; GPRC6A; ENSG00000173612; HLA -A*29:02
ILAFGTMLGY

SEQ ID NO: 3257 - protein, 9 aa, Homo sapiens
  Table 1.2; GPRC6A; ENSG00000173612; HLA -A*02:01
ILEAQVNVI

SEQ ID NO: 3258 - protein, 10 aa, Homo sapiens
  Table 1.2; GPRC6A; ENSG00000173612; HLA -A*29:02
ILISNYGILY

SEQ ID NO: 3259 - protein, 9 aa, Homo sapiens
  Table 1.2; GPRC6A; ENSG00000173612; HLA -A*02:04
ILLLILSLL

SEQ ID NO: 3260 - protein, 9 aa, Homo sapiens
  Table 1.2; GPRC6A; ENSG00000173612; HLA -A*03:01
ILYCTFIPK

SEQ ID NO: 3261 - protein, 10 aa, Homo sapiens
  Table 1.2; GPRC6A; ENSG00000173612; HLA -B*07:02,HLA-B*35:01,HLA-B*35:03,HLA-B*38:01,HLA-B*55:01, HLA-C*03:03,HLA-C*05:01
IPDQETKNEF

SEQ ID NO: 3262 - protein, 8 aa, Homo sapiens
  Table 1.2; GPRC6A; ENSG00000173612; HLA -A*23:01,HLA-B*08:01,HLA-B*18:01,HLA-B*35:01,HLA-B*35:03, HLA-B*51:01
IPIYATTF

SEQ ID NO: 3263 - protein, 8 aa, Homo sapiens
  Table 1.2; GPRC6A; ENSG00000173612; HLA -B*13:02
IQAEANNV

SEQ ID NO: 3264 - protein, 10 aa, Homo sapiens
  Table 1.2; GPRC6A; ENSG00000173612; HLA -A*30:01,HLA-B*13:02,HLA-B*27:05,HLA-B*38:01
IQAEANNVCI

SEQ ID NO: 3265 - protein, 10 aa, Homo sapiens
  Table 1.2; GPRC6A; ENSG00000173612; HLA -A*29:02
IQLAVFALGY

SEQ ID NO: 3266 - protein, 8 aa, Homo sapiens
  Table 1.2; GPRC6A; ENSG00000173612; HLA -B*15:01
IQVVICTL

SEQ ID NO: 3267 - protein, 8 aa, Homo sapiens
  Table 1.2; GPRC6A; ENSG00000173612; HLA -A*01:01,HLA-A*30:02
ISNYGILY

SEQ ID NO: 3268 - protein, 9 aa, Homo sapiens
  Table 1.2; GPRC6A; ENSG00000173612; HLA -B*57:01
ITFGMLIYF

SEQ ID NO: 3269 - protein, 11 aa, Homo sapiens
  Table 1.2; GPRC6A; ENSG00000173612; HLA -B*57:01
ITFIPIYATTF

SEQ ID NO: 3270 - protein, 9 aa, Homo sapiens
  Table 1.2; GPRC6A; ENSG00000173612; HLA -A*23:01,HLA-C*03:03,HLA-C*03:04,HLA-C*16:01
ITMAVSRML

SEQ ID NO: 3271 - protein, 8 aa, Homo sapiens
  Table 1.2; GPRC6A; ENSG00000173612; HLA -A*03:02
ITTIPNVK

SEQ ID NO: 3272 - protein, 9 aa, Homo sapiens
  Table 1.2; GPRC6A; ENSG00000173612; HLA -A*03:01,HLA-A*03:02,HLA-A*11:01,HLA-A*68:01
ITTIPNVKK

SEQ ID NO: 3273 - protein, 10 aa, Homo sapiens
  Table 1.2; GPRC6A; ENSG00000173612; HLA -C*16:02
ITTIPNVKKI

SEQ ID NO: 3274 - protein, 8 aa, Homo sapiens
  Table 1.2; GPRC6A; ENSG00000173612; HLA -B*15:01,HLA-B*18:01
IVILISNY

SEQ ID NO: 3275 - protein, 9 aa, Homo sapiens
  Table 1.2; GPRC6A; ENSG00000173612; HLA -A*23:01,HLA-A*24:02,HLA-A*29:02,HLA-A*30:02
IYATTFGKY

SEQ ID NO: 3276 - protein, 8 aa, Homo sapiens
  Table 1.2; GPRC6A; ENSG00000173612; HLA -C*04:01
IYDTCTEV

SEQ ID NO: 3277 - protein, 10 aa, Homo sapiens
  Table 1.2; GPRC6A; ENSG00000173612; HLA -B*35:03,HLA-C*04:01
IYDTCTEVTV

SEQ ID NO: 3278 - protein, 9 aa, Homo sapiens
  Table 1.2; GPRC6A; ENSG00000173612; HLA -A*24:02
IYFIAWITF

SEQ ID NO: 3279 - protein, 9 aa, Homo sapiens
  Table 1.2; GPRC6A; ENSG00000173612; HLA -A*24:02,HLA-C*14:02,HLA-C*16:02
IYSYSSHSV

SEQ ID NO: 3280 - protein, 9 aa, Homo sapiens
  Table 1.2; GPRC6A; ENSG00000173612; HLA -A*03:01,HLA-A*03:02,HLA-A*11:01,HLA-A*31:01,HLA-B*27:05, HLA-B*58:01
KAIEMNINK

SEQ ID NO: 3281 - protein, 10 aa, Homo sapiens
  Table 1.2; GPRC6A; ENSG00000173612; HLA -B*58:01
KAIEMNINKM

SEQ ID NO: 3282 - protein, 9 aa, Homo sapiens
  Table 1.2; GPRC6A; ENSG00000173612; HLA -A*23:01,HLA-A*24:02,HLA-A*32:01,HLA-B*08:01,HLA-B*37:01, HLA-B*46:01,HLA-B*57:01,HLA-B*58:01,HLA-C*02:02,HLA-C*03:04, HLA-C*12:03,HLA-C*16:01,HLA-C*16:02
KAIERNFVM

SEQ ID NO: 3283 - protein, 10 aa, Homo sapiens
  Table 1.2; GPRC6A; ENSG00000173612; HLA -A*31:01
KAIERNFVMR

SEQ ID NO: 3284 - protein, 9 aa, Homo sapiens
  Table 1.2; GPRC6A; ENSG00000173612; HLA -A*03:01,HLA-A*03:02,HLA-A*11:01,HLA-A*31:01
KAMAHLIQK

SEQ ID NO: 3285 - protein, 10 aa, Homo sapiens
  Table 1.2; GPRC6A; ENSG00000173612; HLA -B*57:01
KANKAIERNF

SEQ ID NO: 3286 - protein, 8 aa, Homo sapiens
  Table 1.2; GPRC6A; ENSG00000173612; HLA -A*30:02,HLA-B*15:01,HLA-B*15:03,HLA-B*39:01,HLA-B*46:01, HLA-B*58:01
KAVIGSGY

SEQ ID NO: 3287 - protein, 8 aa, Homo sapiens
  Table 1.2; GPRC6A; ENSG00000173612; HLA -B*37:01
KDLQAQAF

SEQ ID NO: 3288 - protein, 9 aa, Homo sapiens
  Table 1.2; GPRC6A; ENSG00000173612; HLA -A*30:01,HLA-B*37:01,HLA-B*40:01,HLA-B*40:02,HLA-B*44:03, HLA-B*49:01
KEINGHMTV

SEQ ID NO: 3289 - protein, 10 aa, Homo sapiens
  Table 1.2; GPRC6A; ENSG00000173612; HLA -B*40:01,HLA-B*40:02,HLA-B*49:01
KEINGHMTVT

SEQ ID NO: 3290 - protein, 8 aa, Homo sapiens
  Table 1.2; GPRC6A; ENSG00000173612; HLA -B*44:02
KEVEYLNW

SEQ ID NO: 3291 - protein, 8 aa, Homo sapiens
  Table 1.2; GPRC6A; ENSG00000173612; HLA -B*37:01
KEVLPAFL

SEQ ID NO: 3292 - protein, 10 aa, Homo sapiens
  Table 1.2; GPRC6A; ENSG00000173612; HLA -A*29:02
KFITFGMLIY

SEQ ID NO: 3293 - protein, 8 aa, Homo sapiens
  Table 1.2; GPRC6A; ENSG00000173612; HLA -A*32:01,HLA-B*37:01
KIGKVVGF

SEQ ID NO: 3294 - protein, 9 aa, Homo sapiens
  Table 1.2; GPRC6A; ENSG00000173612; HLA -A*03:01,HLA-A*03:02,HLA-A*11:01
KITTIPNVK

SEQ ID NO: 3295 - protein, 10 aa, Homo sapiens
  Table 1.2; GPRC6A; ENSG00000173612; HLA -A*03:01,HLA-A*03:02,HLA-A*11:01
KITTIPNVKK

SEQ ID NO: 3296 - protein, 9 aa, Homo sapiens
  Table 1.2; GPRC6A; ENSG00000173612; HLA -B*15:03
KKIGKVVGF

SEQ ID NO: 3297 - protein, 9 aa, Homo sapiens
  Table 1.2; GPRC6A; ENSG00000173612; HLA -B*57:01,HLA-B*58:01
KNVTFTDGW

SEQ ID NO: 3298 - protein, 10 aa, Homo sapiens
  Table 1.2; GPRC6A; ENSG00000173612; HLA -A*30:02,HLA-A*32:01,HLA-B*15:01,HLA-B*15:03,HLA-B*46:01, HLA-B*57:01,HLA-B*58:01
KSKDLQAQAF

SEQ ID NO: 3299 - protein, 9 aa, Homo sapiens
  Table 1.2; GPRC6A; ENSG00000173612; HLA -B*57:01
KSLKILLAF

SEQ ID NO: 3300 - protein, 8 aa, Homo sapiens
  Table 1.2; GPRC6A; ENSG00000173612; HLA -A*31:01
KVVGFAFR

SEQ ID NO: 3301 - protein, 9 aa, Homo sapiens
  Table 1.2; GPRC6A; ENSG00000173612; HLA -A*31:01
KVVGFAFRR

SEQ ID NO: 3302 - protein, 10 aa, Homo sapiens
  Table 1.2; GPRC6A; ENSG00000173612; HLA -A*23:01,HLA-A*24:02
KYENYNEAKF

SEQ ID NO: 3303 - protein, 8 aa, Homo sapiens
  Table 1.2; GPRC6A; ENSG00000173612; HLA -A*23:01,HLA-A*24:02
KYVPAVEI

SEQ ID NO: 3304 - protein, 9 aa, Homo sapiens
  Table 1.2; GPRC6A; ENSG00000173612; HLA -A*23:01,HLA-A*24:02
KYVPAVEII

SEQ ID NO: 3305 - protein, 11 aa, Homo sapiens
  Table 1.2; GPRC6A; ENSG00000173612; HLA -A*24:02
KYVPAVEIIVI

SEQ ID NO: 3306 - protein, 9 aa, Homo sapiens
  Table 1.2; GPRC6A; ENSG00000173612; HLA -A*29:02,HLA-B*15:03,HLA-B*46:01,HLA-C*02:02
LAFGTMLGY

SEQ ID NO: 3307 - protein, 9 aa, Homo sapiens
  Table 1.2; GPRC6A; ENSG00000173612; HLA -A*02:04,HLA-A*68:02,HLA-B*35:03,HLA-C*02:02
LAFSFDPKL

SEQ ID NO: 3308 - protein, 9 aa, Homo sapiens
  Table 1.2; GPRC6A; ENSG00000173612; HLA -B*08:01,HLA-B*35:01,HLA-B*35:03,HLA-B*46:01,HLA-C*02:02, HLA-C*03:03,HLA-C*03:04,HLA-C*16:01
LAMIHSIEM

SEQ ID NO: 3309 - protein, 9 aa, Homo sapiens
  Table 1.2; GPRC6A; ENSG00000173612; HLA -B*51:01
LAYKANKAI

SEQ ID NO: 3310 - protein, 8 aa, Homo sapiens
  Table 1.2; GPRC6A; ENSG00000173612; HLA -A*30:01,HLA-B*18:01,HLA-B*49:01
LEAQVNVI

SEQ ID NO: 3311 - protein, 9 aa, Homo sapiens
  Table 1.2; GPRC6A; ENSG00000173612; HLA -B*49:01
LEAQVNVIV

SEQ ID NO: 3312 - protein, 10 aa, Homo sapiens
  Table 1.2; GPRC6A; ENSG00000173612; HLA -B*49:01
LEAQVNVIVV

SEQ ID NO: 3313 - protein, 11 aa, Homo sapiens
  Table 1.2; GPRC6A; ENSG00000173612; HLA -A*30:01,HLA-B*44:02,HLA-B*44:03
LEAQVNVIVVF

SEQ ID NO: 3314 - protein, 9 aa, Homo sapiens
  Table 1.2; GPRC6A; ENSG00000173612; HLA -B*40:01
LECEEGSIL

SEQ ID NO: 3315 - protein, 11 aa, Homo sapiens
  Table 1.2; GPRC6A; ENSG00000173612; HLA -B*18:01
LECEEGSILAF

SEQ ID NO: 3316 - protein, 8 aa, Homo sapiens
  Table 1.2; GPRC6A; ENSG00000173612; HLA -C*14:02
LFNKAIEM

SEQ ID NO: 3317 - protein, 8 aa, Homo sapiens
  Table 1.2; GPRC6A; ENSG00000173612; HLA -B*51:01
LIFAAPTV

SEQ ID NO: 3318 - protein, 10 aa, Homo sapiens
  Table 1.2; GPRC6A; ENSG00000173612; HLA -A*02:03,HLA-A*68:02
LIFAAPTVEV

SEQ ID NO: 3319 - protein, 9 aa, Homo sapiens
  Table 1.2; GPRC6A; ENSG00000173612; HLA -A*01:01,HLA-A*29:02
LISNYGILY

SEQ ID NO: 3320 - protein, 8 aa, Homo sapiens
  Table 1.2; GPRC6A; ENSG00000173612; HLA -A*02:04
LLGIIFVL

SEQ ID NO: 3321 - protein, 9 aa, Homo sapiens
  Table 1.2; GPRC6A; ENSG00000173612; HLA -A*02:01,HLA-A*02:04,HLA-A*02:07,HLA-A*68:02
LLGIIFVLV

SEQ ID NO: 3322 - protein, 9 aa, Homo sapiens
  Table 1.2; GPRC6A; ENSG00000173612; HLA -A*02:01,HLA-A*02:03,HLA-A*02:04,HLA-A*02:07
LLHEYAMHL

SEQ ID NO: 3323 - protein, 9 aa, Homo sapiens
  Table 1.2; GPRC6A; ENSG00000173612; HLA -A*01:01,HLA-A*29:02,HLA-A*32:01
LLPGVKLGY

SEQ ID NO: 3324 - protein, 11 aa, Homo sapiens
  Table 1.2; GPRC6A; ENSG00000173612; HLA -A*02:07
LLPGVKLGYEI

SEQ ID NO: 3325 - protein, 9 aa, Homo sapiens
  Table 1.2; GPRC6A; ENSG00000173612; HLA -A*02:07,HLA-A*24:02
LLPSDSHKL

SEQ ID NO: 3326 - protein, 8 aa, Homo sapiens
  Table 1.2; GPRC6A; ENSG00000173612; HLA -B*46:01
LNFASTSF

SEQ ID NO: 3327 - protein, 10 aa, Homo sapiens
  Table 1.2; GPRC6A; ENSG00000173612; HLA -B*35:03,HLA-B*51:01
LPAFLSDNTI

SEQ ID NO: 3328 - protein, 8 aa, Homo sapiens
  Table 1.2; GPRC6A; ENSG00000173612; HLA -B*35:01
LPGVKLGY

SEQ ID NO: 3329 - protein, 9 aa, Homo sapiens
  Table 1.2; GPRC6A; ENSG00000173612; HLA -B*07:02,HLA-B*08:01,HLA-B*51:01
LPRKRMSSI

SEQ ID NO: 3330 - protein, 9 aa, Homo sapiens
  Table 1.2; GPRC6A; ENSG00000173612; HLA -B*07:02,HLA-B*51:01,HLA-B*54:01,HLA-B*56:01
LPRVIILEC

SEQ ID NO: 3331 - protein, 8 aa, Homo sapiens
  Table 1.2; GPRC6A; ENSG00000173612; HLA -B*35:03
LPSDSHKL

SEQ ID NO: 3332 - protein, 9 aa, Homo sapiens
  Table 1.2; GPRC6A; ENSG00000173612; HLA -B*07:02,HLA-B*35:03,HLA-B*51:01
LPSDSHKLL

SEQ ID NO: 3333 - protein, 9 aa, Homo sapiens
  Table 1.2; GPRC6A; ENSG00000173612; HLA -A*24:02,HLA-B*13:02,HLA-B*38:01
LQAQAFAHI

SEQ ID NO: 3334 - protein, 9 aa, Homo sapiens
  Table 1.2; GPRC6A; ENSG00000173612; HLA -A*30:02,HLA-A*32:01,HLA-B*15:01,HLA-B*15:03
LQLMPQVGY

SEQ ID NO: 3335 - protein, 8 aa, Homo sapiens
  Table 1.2; GPRC6A; ENSG00000173612; HLA -A*01:01,HLA-C*05:01
LSDNTIEV

SEQ ID NO: 3336 - protein, 9 aa, Homo sapiens
  Table 1.2; GPRC6A; ENSG00000173612; HLA -B*46:01,HLA-C*01:02
LSPASLDSM

SEQ ID NO: 3337 - protein, 9 aa, Homo sapiens
  Table 1.2; GPRC6A; ENSG00000173612; HLA -A*31:01,HLA-A*33:03,HLA-A*68:01,HLA-A*68:02
LVVGIIFTR

SEQ ID NO: 3338 - protein, 9 aa, Homo sapiens
  Table 1.2; GPRC6A; ENSG00000173612; HLA -A*24:02,HLA-B*57:01
LYRPILIIF

SEQ ID NO: 3339 - protein, 8 aa, Homo sapiens
  Table 1.2; GPRC6A; ENSG00000173612; HLA -B*51:01
MAFLIILI

SEQ ID NO: 3340 - protein, 9 aa, Homo sapiens
  Table 1.2; GPRC6A; ENSG00000173612; HLA -B*08:01,HLA-C*03:04
MAVSRMLNL

SEQ ID NO: 3341 - protein, 9 aa, Homo sapiens
  Table 1.2; GPRC6A; ENSG00000173612; HLA -B*15:01,HLA-B*35:01,HLA-B*46:01
MCFEKEVEY

SEQ ID NO: 3342 - protein, 8 aa, Homo sapiens
  Table 1.2; GPRC6A; ENSG00000173612; HLA -A*23:01,HLA-B*35:01,HLA-B*35:03
MFGVSFTL

SEQ ID NO: 3343 - protein, 8 aa, Homo sapiens
  Table 1.2; GPRC6A; ENSG00000173612; HLA -A*23:01
MINNSTLL

SEQ ID NO: 3344 - protein, 9 aa, Homo sapiens
  Table 1.2; GPRC6A; ENSG00000173612; HLA -B*35:01,HLA-B*35:03,HLA-B*54:01,HLA-B*55:01,HLA-B*56:01
MPQVGYEST

SEQ ID NO: 3345 - protein, 10 aa, Homo sapiens
  Table 1.2; GPRC6A; ENSG00000173612; HLA -B*35:01,HLA-B*35:03,HLA-B*54:01,HLA-B*55:01,HLA-B*56:01
MPQVGYESTA

SEQ ID NO: 3346 - protein, 8 aa, Homo sapiens
  Table 1.2; GPRC6A; ENSG00000173612; HLA -B*07:02,HLA-B*08:01,HLA-B*51:01
MPRVKAVI

SEQ ID NO: 3347 - protein, 9 aa, Homo sapiens
  Table 1.2; GPRC6A; ENSG00000173612; HLA -A*03:01,HLA-A*03:02,HLA-A*11:01
MTNPSSSGK

SEQ ID NO: 3348 - protein, 9 aa, Homo sapiens
  Table 1.2; GPRC6A; ENSG00000173612; HLA -A*01:01,HLA-A*25:01,HLA-A*26:01,HLA-A*29:02,HLA-A*30:02, HLA-A*32:01,HLA-B*46:01,HLA-B*58:01
MTVTKMAEY

SEQ ID NO: 3349 - protein, 9 aa, Homo sapiens
  Table 1.2; GPRC6A; ENSG00000173612; HLA -A*23:01,HLA-A*30:01,HLA-A*68:01,HLA-B*07:02,HLA-B*35:01, HLA-B*35:03,HLA-B*39:01,HLA-B*40:01,HLA-B*58:01,HLA-C*02:02, HLA-C*03:03,HLA-C*03:04,HLA-C*05:01,HLA-C*12:03,HLA-C*16:01,
  HLA-C*16:02,HLA-C*16:04
NATSVSKTL

SEQ ID NO: 3350 - protein, 11 aa, Homo sapiens
  Table 1.2; GPRC6A; ENSG00000173612; HLA -A*33:01,HLA-A*33:03,HLA-A*68:01
NATSVSKTLPR

SEQ ID NO: 3351 - protein, 8 aa, Homo sapiens
  Table 1.2; GPRC6A; ENSG00000173612; HLA -B*37:01
NDSLAILL

SEQ ID NO: 3352 - protein, 8 aa, Homo sapiens
  Table 1.2; GPRC6A; ENSG00000173612; HLA -A*30:01,HLA-B*18:01,HLA-B*37:01,HLA-B*44:02,HLA-B*44:03, HLA-B*49:01
NEAKFITF

SEQ ID NO: 3353 - protein, 9 aa, Homo sapiens
  Table 1.2; GPRC6A; ENSG00000173612; HLA -B*44:03,HLA-B*49:01
NEFRNLKQI

SEQ ID NO: 3354 - protein, 9 aa, Homo sapiens
  Table 1.2; GPRC6A; ENSG00000173612; HLA -C*16:01
NHSQRTLAY

SEQ ID NO: 3355 - protein, 9 aa, Homo sapiens
  Table 1.2; GPRC6A; ENSG00000173612; HLA -B*39:01
NHYTNQTDM

SEQ ID NO: 3356 - protein, 9 aa, Homo sapiens
  Table 1.2; GPRC6A; ENSG00000173612; HLA -A*68:02
NISSFHSFL

SEQ ID NO: 3357 - protein, 8 aa, Homo sapiens
  Table 1.2; GPRC6A; ENSG00000173612; HLA -A*03:02
NLNTPVVK

SEQ ID NO: 3358 - protein, 9 aa, Homo sapiens
  Table 1.2; GPRC6A; ENSG00000173612; HLA -A*33:01
NLNTPVVKS

SEQ ID NO: 3359 - protein, 10 aa, Homo sapiens
  Table 1.2; GPRC6A; ENSG00000173612; HLA -A*30:02
NLQLMPQVGY

SEQ ID NO: 3360 - protein, 10 aa, Homo sapiens
  Table 1.2; GPRC6A; ENSG00000173612; HLA -B*35:03
NPNAFQPWEL

SEQ ID NO: 3361 - protein, 9 aa, Homo sapiens
  Table 1.2; GPRC6A; ENSG00000173612; HLA -B*07:02,HLA-B*55:01,HLA-B*56:01
NPSSSGKSA

SEQ ID NO: 3362 - protein, 11 aa, Homo sapiens
  Table 1.2; GPRC6A; ENSG00000173612; HLA -A*25:01,HLA-B*07:02,HLA-B*35:01
NPSSSGKSATW

SEQ ID NO: 3363 - protein, 9 aa, Homo sapiens
  Table 1.2; GPRC6A; ENSG00000173612; HLA -B*27:05,HLA-B*38:01,HLA-B*39:01
NQTDMPHCL

SEQ ID NO: 3364 - protein, 9 aa, Homo sapiens
  Table 1.2; GPRC6A; ENSG00000173612; HLA -A*68:02,HLA-B*54:01
NTFIIQAEA

SEQ ID NO: 3365 - protein, 9 aa, Homo sapiens
  Table 1.2; GPRC6A; ENSG00000173612; HLA -A*11:01,HLA-A*31:01,HLA-A*33:01,HLA-A*33:03,HLA-A*68:01, HLA-A*68:02,HLA-B*57:01,HLA-C*07:06
NTIEVRINR

SEQ ID NO: 3366 - protein, 9 aa, Homo sapiens
  Table 1.2; GPRC6A; ENSG00000173612; HLA -A*24:02
NYGILYCTF

SEQ ID NO: 3367 - protein, 10 aa, Homo sapiens
  Table 1.2; GPRC6A; ENSG00000173612; HLA -A*23:01,HLA-A*24:02,HLA-A*33:01,HLA-A*33:03
NYNEAKFITF

SEQ ID NO: 3368 - protein, 9 aa, Homo sapiens
  Table 1.2; GPRC6A; ENSG00000173612; HLA -A*03:02
PIYATTFGK

SEQ ID NO: 3369 - protein, 10 aa, Homo sapiens
  Table 1.2; GPRC6A; ENSG00000173612; HLA -B*58:01
PSSSGKSATW

SEQ ID NO: 3370 - protein, 11 aa, Homo sapiens
  Table 1.2; GPRC6A; ENSG00000173612; HLA -A*68:01
PTVEVNVSLPR

SEQ ID NO: 3371 - protein, 8 aa, Homo sapiens
  Table 1.2; GPRC6A; ENSG00000173612; HLA -B*51:01
QAQAFAHI

SEQ ID NO: 3372 - protein, 9 aa, Homo sapiens
  Table 1.2; GPRC6A; ENSG00000173612; HLA -C*12:03
QAQAFAHIC

SEQ ID NO: 3373 - protein, 10 aa, Homo sapiens
  Table 1.2; GPRC6A; ENSG00000173612; HLA -A*33:03
QAQAFAHICR

SEQ ID NO: 3374 - protein, 9 aa, Homo sapiens
  Table 1.2; GPRC6A; ENSG00000173612; HLA -A*25:01,HLA-A*30:01,HLA-A*32:01,HLA-B*15:01,HLA-B*15:03, HLA-B*18:01,HLA-B*27:02,HLA-B*37:01,HLA-B*40:01,HLA-B*40:02, HLA-B*44:02,HLA-B*44:03,HLA-B*49:01,HLA-C*16:04
QEINTKSAF

SEQ ID NO: 3375 - protein, 10 aa, Homo sapiens
  Table 1.2; GPRC6A; ENSG00000173612; HLA -A*30:01,HLA-B*40:01,HLA-B*44:02,HLA-B*44:03,HLA-B*49:01
QEINTKSAFL

SEQ ID NO: 3376 - protein, 9 aa, Homo sapiens
  Table 1.2; GPRC6A; ENSG00000173612; HLA -A*01:01,HLA-A*03:01,HLA-A*26:01,HLA-A*29:02,HLA-A*30:02, HLA-B*15:01,HLA-B*15:03
QLAVFALGY

SEQ ID NO: 3377 - protein, 8 aa, Homo sapiens
  Table 1.2; GPRC6A; ENSG00000173612; HLA -A*30:02,HLA-B*15:01,HLA-B*15:03
QLMPQVGY

SEQ ID NO: 3378 - protein, 9 aa, Homo sapiens
  Table 1.2; GPRC6A; ENSG00000173612; HLA -A*01:01
QTDMPHCLL

SEQ ID NO: 3379 - protein, 9 aa, Homo sapiens
  Table 1.2; GPRC6A; ENSG00000173612; HLA -B*13:02
QTLAMIHSI

SEQ ID NO: 3380 - protein, 8 aa, Homo sapiens
  Table 1.2; GPRC6A; ENSG00000173612; HLA -A*32:01,HLA-B*15:01,HLA-B*37:01
QVNVIVVF

SEQ ID NO: 3381 - protein, 9 aa, Homo sapiens
  Table 1.2; GPRC6A; ENSG00000173612; HLA -A*02:04,HLA-A*02:07,HLA-A*68:02
QVNVIVVFL

SEQ ID NO: 3382 - protein, 9 aa, Homo sapiens
  Table 1.2; GPRC6A; ENSG00000173612; HLA -B*37:01
RDCQNPNAF

SEQ ID NO: 3383 - protein, 9 aa, Homo sapiens
  Table 1.2; GPRC6A; ENSG00000173612; HLA -A*03:02
RENATSVSK

SEQ ID NO: 3384 - protein, 11 aa, Homo sapiens
  Table 1.2; GPRC6A; ENSG00000173612; HLA -A*30:01,HLA-B*40:01,HLA-B*44:02,HLA-B*44:03
RENATSVSKTL

SEQ ID NO: 3385 - protein, 9 aa, Homo sapiens
  Table 1.2; GPRC6A; ENSG00000173612; HLA -A*03:02,HLA-A*11:01
RNLNTPVVK

SEQ ID NO: 3386 - protein, 9 aa, Homo sapiens
  Table 1.2; GPRC6A; ENSG00000173612; HLA -B*54:01,HLA-B*56:01
RPILIIFTC

SEQ ID NO: 3387 - protein, 9 aa, Homo sapiens
  Table 1.2; GPRC6A; ENSG00000173612; HLA -A*24:02,HLA-B*57:01
RQFHVFDLF

SEQ ID NO: 3388 - protein, 9 aa, Homo sapiens
  Table 1.2; GPRC6A; ENSG00000173612; HLA -A*32:01,HLA-B*15:01,HLA-B*15:03,HLA-B*37:01
RQTMFGVSF

SEQ ID NO: 3389 - protein, 9 aa, Homo sapiens
  Table 1.2; GPRC6A; ENSG00000173612; HLA -A*03:01,HLA-A*03:02,HLA-A*11:01
RTLAYKANK

SEQ ID NO: 3390 - protein, 10 aa, Homo sapiens
  Table 1.2; GPRC6A; ENSG00000173612; HLA -B*57:01,HLA-B*58:01
RTVPSDFHQI

SEQ ID NO: 3391 - protein, 11 aa, Homo sapiens
  Table 1.2; GPRC6A; ENSG00000173612; HLA -A*03:01,HLA-A*11:01,HLA-A*31:01,HLA-B*57:01
RTVPSDFHQIK

SEQ ID NO: 3392 - protein, 10 aa, Homo sapiens
  Table 1.2; GPRC6A; ENSG00000173612; HLA -A*25:01,HLA-A*26:01,HLA-A*30:02,HLA-A*32:01,HLA-B*15:01, HLA-B*15:03,HLA-B*46:01
RVKAVIGSGY

SEQ ID NO: 3393 - protein, 8 aa, Homo sapiens
  Table 1.2; GPRC6A; ENSG00000173612; HLA -B*08:01
SAFLKMIY

SEQ ID NO: 3394 - protein, 10 aa, Homo sapiens
  Table 1.2; GPRC6A; ENSG00000173612; HLA -A*29:02,HLA-A*30:02
SAFLKMIYSY

SEQ ID NO: 3395 - protein, 9 aa, Homo sapiens
  Table 1.2; GPRC6A; ENSG00000173612; HLA -B*37:01
SDFHQIKAM

SEQ ID NO: 3396 - protein, 9 aa, Homo sapiens
  Table 1.2; GPRC6A; ENSG00000173612; HLA -B*37:01
SDKIRFPSF

SEQ ID NO: 3397 - protein, 9 aa, Homo sapiens
  Table 1.2; GPRC6A; ENSG00000173612; HLA -B*38:01,HLA-B*44:02,HLA-B*44:03
SDNTIEVRI

SEQ ID NO: 3398 - protein, 11 aa, Homo sapiens
  Table 1.2; GPRC6A; ENSG00000173612; HLA -A*31:01
SDNTIEVRINR

SEQ ID NO: 3399 - protein, 10 aa, Homo sapiens
  Table 1.2; GPRC6A; ENSG00000173612; HLA -B*44:02,HLA-B*49:01
SEDSPRRPQI

SEQ ID NO: 3400 - protein, 9 aa, Homo sapiens
  Table 1.2; GPRC6A; ENSG00000173612; HLA -B*44:03,HLA-B*49:01
SEITMAVSR

SEQ ID NO: 3401 - protein, 10 aa, Homo sapiens
  Table 1.2; GPRC6A; ENSG00000173612; HLA -A*30:01,HLA-B*40:01,HLA-B*44:03,HLA-B*49:01
SEITMAVSRM

SEQ ID NO: 3402 - protein, 9 aa, Homo sapiens
  Table 1.2; GPRC6A; ENSG00000173612; HLA -A*23:01,HLA-A*24:02,HLA-A*29:02,HLA-A*32:01,HLA-B*35:01, HLA-C*04:01
SFDPKLQKF

SEQ ID NO: 3403 - protein, 10 aa, Homo sapiens
  Table 1.2; GPRC6A; ENSG00000173612; HLA -A*23:01,HLA-A*29:02
SFFIGEPQDF

SEQ ID NO: 3404 - protein, 9 aa, Homo sapiens
  Table 1.2; GPRC6A; ENSG00000173612; HLA -A*02:04,HLA-A*23:01,HLA-A*24:02
SFLQNLHLL

SEQ ID NO: 3405 - protein, 8 aa, Homo sapiens
  Table 1.2; GPRC6A; ENSG00000173612; HLA -C*16:01
SGGLRVCY

SEQ ID NO: 3406 - protein, 9 aa, Homo sapiens
  Table 1.2; GPRC6A; ENSG00000173612; HLA -B*27:05,HLA-B*38:01,HLA-B*39:01
SHSVSSIAL

SEQ ID NO: 3407 - protein, 9 aa, Homo sapiens
  Table 1.2; GPRC6A; ENSG00000173612; HLA -B*07:02,HLA-B*08:01,HLA-C*01:02
SIALSPASL

SEQ ID NO: 3408 - protein, 11 aa, Homo sapiens
  Table 1.2; GPRC6A; ENSG00000173612; HLA -A*29:02
SILAFGTMLGY

SEQ ID NO: 3409 - protein, 9 aa, Homo sapiens
  Table 1.2; GPRC6A; ENSG00000173612; HLA -A*02:04
SIQLAVFAL

SEQ ID NO: 3410 - protein, 9 aa, Homo sapiens
  Table 1.2; GPRC6A; ENSG00000173612; HLA -B*15:03
SKDLQAQAF

SEQ ID NO: 3411 - protein, 9 aa, Homo sapiens
  Table 1.2; GPRC6A; ENSG00000173612; HLA -A*02:04
SLAILLLIL

SEQ ID NO: 3412 - protein, 11 aa, Homo sapiens
  Table 1.2; GPRC6A; ENSG00000173612; HLA -A*02:01,HLA-A*02:07,HLA-B*38:01,HLA-B*55:01,HLA-C*05:01
SLDSMSGNVTM

SEQ ID NO: 3413 - protein, 8 aa, Homo sapiens
  Table 1.2; GPRC6A; ENSG00000173612; HLA -A*02:04
SLLGIIFV

SEQ ID NO: 3414 - protein, 9 aa, Homo sapiens
  Table 1.2; GPRC6A; ENSG00000173612; HLA -A*02:01,HLA-A*02:03,HLA-A*02:04,HLA-A*02:07,HLA-A*29:02
SLLGIIFVL

SEQ ID NO: 3415 - protein, 10 aa, Homo sapiens
  Table 1.2; GPRC6A; ENSG00000173612; HLA -A*02:01,HLA-A*02:04
SLLGIIFVLV

SEQ ID NO: 3416 - protein, 8 aa, Homo sapiens
  Table 1.2; GPRC6A; ENSG00000173612; HLA -B*07:02,HLA-B*35:01,HLA-B*35:03,HLA-B*55:01,HLA-B*56:01
SPASLDSM

SEQ ID NO: 3417 - protein, 10 aa, Homo sapiens
  Table 1.2; GPRC6A; ENSG00000173612; HLA -B*56:01
SPASLDSMSG

SEQ ID NO: 3418 - protein, 9 aa, Homo sapiens
  Table 1.2; GPRC6A; ENSG00000173612; HLA -A*30:02
SSGGLRVCY

SEQ ID NO: 3419 - protein, 8 aa, Homo sapiens
  Table 1.2; GPRC6A; ENSG00000173612; HLA -A*32:01,HLA-B*57:01,HLA-B*58:01
SSGKSATW

SEQ ID NO: 3420 - protein, 9 aa, Homo sapiens
  Table 1.2; GPRC6A; ENSG00000173612; HLA -A*25:01,HLA-A*32:01,HLA-B*57:01,HLA-B*58:01
SSSGKSATW

SEQ ID NO: 3421 - protein, 9 aa, Homo sapiens
  Table 1.2; GPRC6A; ENSG00000173612; HLA -B*54:01
SSYMPRVKA

SEQ ID NO: 3422 - protein, 9 aa, Homo sapiens
  Table 1.2; GPRC6A; ENSG00000173612; HLA -A*03:01,HLA-A*03:02,HLA-A*11:01,HLA-A*68:01
STAEILSDK

SEQ ID NO: 3423 - protein, 10 aa, Homo sapiens
  Table 1.2; GPRC6A; ENSG00000173612; HLA -A*68:02
STAEILSDKI

SEQ ID NO: 3424 - protein, 9 aa, Homo sapiens
  Table 1.2; GPRC6A; ENSG00000173612; HLA -A*02:03,HLA-A*25:01,HLA-A*68:02,HLA-B*13:02
STATKITTI

SEQ ID NO: 3425 - protein, 11 aa, Homo sapiens
  Table 1.2; GPRC6A; ENSG00000173612; HLA -A*01:01,HLA-A*29:02,HLA-A*30:02
STLLPGVKLGY

SEQ ID NO: 3426 - protein, 9 aa, Homo sapiens
  Table 1.2; GPRC6A; ENSG00000173612; HLA -A*03:01,HLA-A*03:02,HLA-A*11:01
SVSKTLPRK

SEQ ID NO: 3427 - protein, 9 aa, Homo sapiens
  Table 1.2; GPRC6A; ENSG00000173612; HLA -A*03:01,HLA-B*13:02
SVSSIALSP

SEQ ID NO: 3428 - protein, 10 aa, Homo sapiens
  Table 1.2; GPRC6A; ENSG00000173612; HLA -B*56:01
SVSSIALSPA

SEQ ID NO: 3429 - protein, 9 aa, Homo sapiens
  Table 1.2; GPRC6A; ENSG00000173612; HLA -A*24:02,HLA-B*37:01
SYMPRVKAV

SEQ ID NO: 3430 - protein, 10 aa, Homo sapiens
  Table 1.2; GPRC6A; ENSG00000173612; HLA -A*23:01,HLA-A*24:02
SYMPRVKAVI

SEQ ID NO: 3431 - protein, 10 aa, Homo sapiens
  Table 1.2; GPRC6A; ENSG00000173612; HLA -A*24:02
SYSSHSVSSI

SEQ ID NO: 3432 - protein, 8 aa, Homo sapiens
  Table 1.2; GPRC6A; ENSG00000173612; HLA -B*51:01,HLA-B*58:01
TATKITTI

SEQ ID NO: 3433 - protein, 8 aa, Homo sapiens
  Table 1.2; GPRC6A; ENSG00000173612; HLA -B*08:01
TCKTRQTM

SEQ ID NO: 3434 - protein, 9 aa, Homo sapiens
  Table 1.2; GPRC6A; ENSG00000173612; HLA -B*08:01
TCKTRQTMF

SEQ ID NO: 3435 - protein, 9 aa, Homo sapiens
  Table 1.2; GPRC6A; ENSG00000173612; HLA -A*30:01,HLA-A*32:01,HLA-B*18:01,HLA-B*35:01,HLA-B*35:03, HLA-B*39:01,HLA-B*40:01,HLA-B*46:01,HLA-B*55:01,HLA-C*03:03, HLA-C*03:04,HLA-C*04:01,HLA-C*07:06,HLA-C*16:01
TCTEVTVAM

SEQ ID NO: 3436 - protein, 9 aa, Homo sapiens
  Table 1.2; GPRC6A; ENSG00000173612; HLA -B*38:01,HLA-B*39:01
TCTGIQVVI

SEQ ID NO: 3437 - protein, 8 aa, Homo sapiens
  Table 1.2; GPRC6A; ENSG00000173612; HLA -B*37:01
TDMPHCLL

SEQ ID NO: 3438 - protein, 8 aa, Homo sapiens
  Table 1.2; GPRC6A; ENSG00000173612; HLA -A*30:01,HLA-B*18:01,HLA-B*49:01
TEVTVAMA

SEQ ID NO: 3439 - protein, 9 aa, Homo sapiens
  Table 1.2; GPRC6A; ENSG00000173612; HLA -A*30:01,HLA-B*18:01,HLA-B*40:02,HLA-B*49:01
TEVTVAMAA

SEQ ID NO: 3440 - protein, 11 aa, Homo sapiens
  Table 1.2; GPRC6A; ENSG00000173612; HLA -A*30:01,HLA-B*40:01
TEVTVAMAATL

SEQ ID NO: 3441 - protein, 9 aa, Homo sapiens
  Table 1.2; GPRC6A; ENSG00000173612; HLA -A*23:01
TFIPIYATT

SEQ ID NO: 3442 - protein, 10 aa, Homo sapiens
  Table 1.2; GPRC6A; ENSG00000173612; HLA -A*23:01,HLA-A*24:02,HLA-A*29:02
TFIPIYATTF

SEQ ID NO: 3443 - protein, 9 aa, Homo sapiens
  Table 1.2; GPRC6A; ENSG00000173612; HLA -A*23:01,HLA-A*24:02
TFIPKCYVI

SEQ ID NO: 3444 - protein, 9 aa, Homo sapiens
  Table 1.2; GPRC6A; ENSG00000173612; HLA -A*23:01,HLA-A*24:02,HLA-C*14:02
TFTDGWNSF

SEQ ID NO: 3445 - protein, 9 aa, Homo sapiens
  Table 1.2; GPRC6A; ENSG00000173612; HLA -A*02:03,HLA-B*08:01
TLKKIILEA

SEQ ID NO: 3446 - protein, 10 aa, Homo sapiens
  Table 1.2; GPRC6A; ENSG00000173612; HLA -A*03:01,HLA-A*29:02,HLA-A*30:02,HLA-A*32:01,HLA-B*15:01
TLLPGVKLGY

SEQ ID NO: 3447 - protein, 9 aa, Homo sapiens
  Table 1.2; GPRC6A; ENSG00000173612; HLA -A*02:01,HLA-A*02:03,HLA-A*02:04,HLA-A*02:07,HLA-A*23:01, HLA-B*13:02,HLA-B*35:03,HLA-C*02:02
TMFGVSFTL

SEQ ID NO: 3448 - protein, 9 aa, Homo sapiens
  Table 1.2; GPRC6A; ENSG00000173612; HLA -A*02:01,HLA-A*02:03,HLA-A*02:04
TMLGYIAIL

SEQ ID NO: 3449 - protein, 8 aa, Homo sapiens
  Table 1.2; GPRC6A; ENSG00000173612; HLA -B*56:01
TPDDFVAA

SEQ ID NO: 3450 - protein, 10 aa, Homo sapiens
  Table 1.2; GPRC6A; ENSG00000173612; HLA -B*07:02
TPVVKSSGGL

SEQ ID NO: 3451 - protein, 11 aa, Homo sapiens
  Table 1.2; GPRC6A; ENSG00000173612; HLA -A*68:01
TPVVKSSGGLR

SEQ ID NO: 3452 - protein, 10 aa, Homo sapiens
  Table 1.2; GPRC6A; ENSG00000173612; HLA -B*27:05
TRNLNTPVVK

SEQ ID NO: 3453 - protein, 9 aa, Homo sapiens
  Table 1.2; GPRC6A; ENSG00000173612; HLA -A*11:01,HLA-A*31:01,HLA-A*33:01,HLA-A*33:03,HLA-A*68:01, HLA-C*07:06
TSVSKTLPR

SEQ ID NO: 3454 - protein, 9 aa, Homo sapiens
  Table 1.2; GPRC6A; ENSG00000173612; HLA -C*05:01
TTDDDYGRL

SEQ ID NO: 3455 - protein, 11 aa, Homo sapiens
  Table 1.2; GPRC6A; ENSG00000173612; HLA -B*38:01
TTDDDYGRLAL

SEQ ID NO: 3456 - protein, 9 aa, Homo sapiens
  Table 1.2; GPRC6A; ENSG00000173612; HLA -B*54:01
TTFGKYVPA

SEQ ID NO: 3457 - protein, 10 aa, Homo sapiens
  Table 1.2; GPRC6A; ENSG00000173612; HLA -A*02:03,HLA-A*68:02
TTFGKYVPAV

SEQ ID NO: 3458 - protein, 8 aa, Homo sapiens
  Table 1.2; GPRC6A; ENSG00000173612; HLA -A*11:01
TTIPNVKK

SEQ ID NO: 3459 - protein, 9 aa, Homo sapiens
  Table 1.2; GPRC6A; ENSG00000173612; HLA -A*02:03,HLA-A*25:01,HLA-A*68:02,HLA-C*16:02
TTIPNVKKI

SEQ ID NO: 3460 - protein, 11 aa, Homo sapiens
  Table 1.2; GPRC6A; ENSG00000173612; HLA -A*11:01,HLA-A*31:01
TTIPNVKKIGK

SEQ ID NO: 3461 - protein, 8 aa, Homo sapiens
  Table 1.2; GPRC6A; ENSG00000173612; HLA -B*35:03
TVAMAATL

SEQ ID NO: 3462 - protein, 9 aa, Homo sapiens
  Table 1.2; GPRC6A; ENSG00000173612; HLA -A*33:03,HLA-A*68:01,HLA-C*07:06
TVAMAATLR

SEQ ID NO: 3463 - protein, 10 aa, Homo sapiens
  Table 1.2; GPRC6A; ENSG00000173612; HLA -A*25:01,HLA-A*26:01
TVAMAATLRF

SEQ ID NO: 3464 - protein, 9 aa, Homo sapiens
  Table 1.2; GPRC6A; ENSG00000173612; HLA -A*02:07,HLA-A*24:02,HLA-A*25:01,HLA-A*26:01,HLA-A*68:02
TVPSDFHQI

SEQ ID NO: 3465 - protein, 8 aa, Homo sapiens
  Table 1.2; GPRC6A; ENSG00000173612; HLA -A*26:01,HLA-A*30:02,HLA-A*32:01,HLA-B*15:01,HLA-B*15:03, HLA-B*18:01,HLA-B*46:01
TVTKMAEY

SEQ ID NO: 3466 - protein, 9 aa, Homo sapiens
  Table 1.2; GPRC6A; ENSG00000173612; HLA -A*23:01,HLA-A*24:02,HLA-B*46:01,HLA-B*58:01,HLA-C*02:02
VAMAATLRF

SEQ ID NO: 3467 - protein, 10 aa, Homo sapiens
  Table 1.2; GPRC6A; ENSG00000173612; HLA -B*18:01
VEFKCDYSSY

SEQ ID NO: 3468 - protein, 8 aa, Homo sapiens
  Table 1.2; GPRC6A; ENSG00000173612; HLA -B*18:01,HLA-B*49:01
VEIIVILI

SEQ ID NO: 3469 - protein, 10 aa, Homo sapiens
  Table 1.2; GPRC6A; ENSG00000173612; HLA -B*49:01
VEVNVSLPRV

SEQ ID NO: 3470 - protein, 10 aa, Homo sapiens
  Table 1.2; GPRC6A; ENSG00000173612; HLA -B*40:01,HLA-B*49:01
VEYLNWNDSL

SEQ ID NO: 3471 - protein, 8 aa, Homo sapiens
  Table 1.2; GPRC6A; ENSG00000173612; HLA -A*23:01
VFALGYAI

SEQ ID NO: 3472 - protein, 10 aa, Homo sapiens
  Table 1.2; GPRC6A; ENSG00000173612; HLA -B*27:02
VFIIPDQETK

SEQ ID NO: 3473 - protein, 9 aa, Homo sapiens
  Table 1.2; GPRC6A; ENSG00000173612; HLA -A*23:01
VFLQTLAMI

SEQ ID NO: 3474 - protein, 9 aa, Homo sapiens
  Table 1.2; GPRC6A; ENSG00000173612; HLA -A*23:01,HLA-A*24:02
VFLRQFHVF

SEQ ID NO: 3475 - protein, 8 aa, Homo sapiens
  Table 1.2; GPRC6A; ENSG00000173612; HLA -B*18:01,HLA-B*46:01
VGFEISVF

SEQ ID NO: 3476 - protein, 9 aa, Homo sapiens
  Table 1.2; GPRC6A; ENSG00000173612; HLA -B*46:01,HLA-B*49:01,HLA-B*51:01
VGYESTAEI

SEQ ID NO: 3477 - protein, 9 aa, Homo sapiens
  Table 1.2; GPRC6A; ENSG00000173612; HLA -B*15:01,HLA-B*15:03
VKAVIGSGY

SEQ ID NO: 3478 - protein, 9 aa, Homo sapiens
  Table 1.2; GPRC6A; ENSG00000173612; HLA -B*35:01,HLA-B*35:03,HLA-B*51:01,HLA-B*56:01
VPAVEIIVI

SEQ ID NO: 3479 - protein, 8 aa, Homo sapiens
  Table 1.2; GPRC6A; ENSG00000173612; HLA -B*51:01
VPSDFHQI

SEQ ID NO: 3480 - protein, 10 aa, Homo sapiens
  Table 1.2; GPRC6A; ENSG00000173612; HLA -B*54:01,HLA-B*55:01,HLA-B*56:01
VPSDFHQIKA

SEQ ID NO: 3481 - protein, 9 aa, Homo sapiens
  Table 1.2; GPRC6A; ENSG00000173612; HLA -A*02:04,HLA-C*16:01
VSLPRVIIL

SEQ ID NO: 3482 - protein, 10 aa, Homo sapiens
  Table 1.2; GPRC6A; ENSG00000173612; HLA -B*57:01
VTFTDGWNSF

SEQ ID NO: 3483 - protein, 11 aa, Homo sapiens
  Table 1.2; GPRC6A; ENSG00000173612; HLA -A*03:01,HLA-A*03:02,HLA-A*11:01,HLA-B*27:02
VTMTNPSSSGK

SEQ ID NO: 3484 - protein, 9 aa, Homo sapiens
  Table 1.2; GPRC6A; ENSG00000173612; HLA -A*23:01,HLA-A*24:02,HLA-B*40:01,HLA-B*46:01,HLA-B*58:01, HLA-C*03:03,HLA-C*03:04
VTVAMAATL

SEQ ID NO: 3485 - protein, 8 aa, Homo sapiens
  Table 1.2; GPRC6A; ENSG00000173612; HLA -A*11:01,HLA-A*31:01
VVGIIFTR

SEQ ID NO: 3486 - protein, 9 aa, Homo sapiens
  Table 1.2; GPRC6A; ENSG00000173612; HLA -A*31:01,HLA-A*33:01,HLA-A*33:03
VVKSSGGLR

SEQ ID NO: 3487 - protein, 8 aa, Homo sapiens
  Table 1.2; GPRC6A; ENSG00000173612; HLA -B*08:01
WAPVRSTM

SEQ ID NO: 3488 - protein, 10 aa, Homo sapiens
  Table 1.2; GPRC6A; ENSG00000173612; HLA -A*01:01,HLA-A*23:01,HLA-A*25:01,HLA-B*35:03,HLA-B*38:01, HLA-B*49:01,HLA-B*51:01,HLA-B*54:01,HLA-B*58:01
YAEPGLIHSI

SEQ ID NO: 3489 - protein, 9 aa, Homo sapiens
  Table 1.2; GPRC6A; ENSG00000173612; HLA -B*54:01
YAIRDLCQA

SEQ ID NO: 3490 - protein, 9 aa, Homo sapiens
  Table 1.2; GPRC6A; ENSG00000173612; HLA -B*54:01
YAMHLSACA

SEQ ID NO: 3491 - protein, 9 aa, Homo sapiens
  Table 1.2; GPRC6A; ENSG00000173612; HLA -C*16:02
YATTFGKYV

SEQ ID NO: 3492 - protein, 9 aa, Homo sapiens
  Table 1.2; GPRC6A; ENSG00000173612; HLA -B*13:02
YDTCTEVTV

SEQ ID NO: 3493 - protein, 10 aa, Homo sapiens
  Table 1.2; GPRC6A; ENSG00000173612; HLA -B*49:01
YEIYDTCTEV

SEQ ID NO: 3494 - protein, 9 aa, Homo sapiens
  Table 1.2; GPRC6A; ENSG00000173612; HLA -A*30:01,HLA-B*18:01,HLA-B*37:01,HLA-B*40:01,HLA-B*44:02, HLA-B*44:03,HLA-B*49:01
YENYNEAKF

SEQ ID NO: 3495 - protein, 8 aa, Homo sapiens
  Table 1.2; GPRC6A; ENSG00000173612; HLA -A*30:01,HLA-B*18:01,HLA-B*37:01,HLA-B*40:01,HLA-B*49:01
YESTAEIL

SEQ ID NO: 3496 - protein, 11 aa, Homo sapiens
  Table 1.2; GPRC6A; ENSG00000173612; HLA -B*27:02
YESTAEILSDK

SEQ ID NO: 3497 - protein, 9 aa, Homo sapiens
  Table 1.2; GPRC6A; ENSG00000173612; HLA -A*24:02
YFIAWITFI

SEQ ID NO: 3498 - protein, 9 aa, Homo sapiens
  Table 1.2; GPRC6A; ENSG00000173612; HLA -B*46:01
YGRLALNTF

SEQ ID NO: 3499 - protein, 9 aa, Homo sapiens
  Table 1.2; GPRC6A; ENSG00000173612; HLA -A*02:07,HLA-A*24:02
YMPRVKAVI

SEQ ID NO: 3500 - protein, 9 aa, Homo sapiens
  Table 1.2; GPRC6A; ENSG00000173612; HLA -A*25:01,HLA-B*58:01,HLA-C*03:04,HLA-C*16:02
YSSHSVSSI

SEQ ID NO: 3501 - protein, 8 aa, Homo sapiens
  Table 1.2; GPRC6A; ENSG00000173612; HLA -B*13:02
YSSYMPRV

SEQ ID NO: 3502 - protein, 8 aa, Homo sapiens
  Table 1.2; GPRC6A; ENSG00000173612; HLA -B*08:01,HLA-B*13:02,HLA-B*51:01,HLA-B*54:01
YSYSSHSV

SEQ ID NO: 3503 - protein, 9 aa, Homo sapiens
  Table 1.2; GPRC6A; ENSG00000173612; HLA -B*13:02
YVIICKQEI

SEQ ID NO: 3504 - protein, 9 aa, Homo sapiens
  Table 1.2; GPRC6A; ENSG00000173612; HLA -A*26:01
YVKDTDLSQ

SEQ ID NO: 3505 - protein, 9 aa, Homo sapiens
  Table 1.2; GPRC6A; ENSG00000173612; HLA -A*02:07
YVPAVEIIV

SEQ ID NO: 3506 - protein, 10 aa, Homo sapiens
  Table 1.2; GPRC6A; ENSG00000173612; HLA -A*02:07
YVPAVEIIVI

SEQ ID NO: 3507 - protein, 10 aa, Homo sapiens
  Table 1.2; GSG1L2; ENSG00000214978; HLA -C*01:02
AAPCPAEQAF

SEQ ID NO: 3508 - protein, 9 aa, Homo sapiens
  Table 1.2; GSG1L2; ENSG00000214978; HLA -A*03:01,HLA-A*03:02,HLA-A*11:01,HLA-A*31:01,HLA-A*33:01, HLA-B*46:01,HLA-B*56:01,HLA-B*57:01
AARLEFTEK

SEQ ID NO: 3509 - protein, 8 aa, Homo sapiens
  Table 1.2; GSG1L2; ENSG00000214978; HLA -B*44:02,HLA-B*44:03
AEEQGVLW

SEQ ID NO: 3510 - protein, 9 aa, Homo sapiens
  Table 1.2; GSG1L2; ENSG00000214978; HLA -B*40:01,HLA-B*44:02,HLA-B*44:03,HLA-B*49:01
AEEQGVLWL

SEQ ID NO: 3511 - protein, 8 aa, Homo sapiens
  Table 1.2; GSG1L2; ENSG00000214978; HLA -B*37:01,HLA-B*49:01
AEQAFRNV

SEQ ID NO: 3512 - protein, 10 aa, Homo sapiens
  Table 1.2; GSG1L2; ENSG00000214978; HLA -B*40:02
AEQAFRNVSG

SEQ ID NO: 3513 - protein, 9 aa, Homo sapiens
  Table 1.2; GSG1L2; ENSG00000214978; HLA -A*02:04,HLA-A*02:07
AIFMVLAGL

SEQ ID NO: 3514 - protein, 11 aa, Homo sapiens
  Table 1.2; GSG1L2; ENSG00000214978; HLA -A*31:01
AILLGSRVSCR

SEQ ID NO: 3515 - protein, 9 aa, Homo sapiens
  Table 1.2; GSG1L2; ENSG00000214978; HLA -A*02:01,HLA-A*02:04
ALLLLPVCL

SEQ ID NO: 3516 - protein, 9 aa, Homo sapiens
  Table 1.2; GSG1L2; ENSG00000214978; HLA -A*02:01,HLA-A*02:03,HLA-A*02:04,HLA-A*02:07,HLA-B*13:02, HLA-B*55:01
ALTFSLTAV

SEQ ID NO: 3517 - protein, 8 aa, Homo sapiens
  Table 1.2; GSG1L2; ENSG00000214978; HLA -A*02:01,HLA-A*02:04,HLA-B*13:02
ALVAIFMV

SEQ ID NO: 3518 - protein, 9 aa, Homo sapiens
  Table 1.2; GSG1L2; ENSG00000214978; HLA -A*02:01,HLA-A*02:03,HLA-A*02:04,HLA-A*02:07,HLA-A*03:01, HLA-A*23:01,HLA-A*24:02
ALVAIFMVL

SEQ ID NO: 3519 - protein, 9 aa, Homo sapiens
  Table 1.2; GSG1L2; ENSG00000214978; HLA -A*31:01
AMSRFTAAR

SEQ ID NO: 3520 - protein, 8 aa, Homo sapiens
  Table 1.2; GSG1L2; ENSG00000214978; HLA -B*56:01
APCPAEQA

SEQ ID NO: 3521 - protein, 9 aa, Homo sapiens
  Table 1.2; GSG1L2; ENSG00000214978; HLA -A*30:02,HLA-A*32:01,HLA-B*07:02,HLA-B*15:01,HLA-B*35:01, HLA-B*35:03,HLA-B*37:01,HLA-B*38:01,HLA-B*55:01,HLA-B*56:01, HLA-C*03:03,HLA-C*04:01,HLA-C*07:01,HLA-C*07:02,HLA-C*16:01
APCPAEQAF

SEQ ID NO: 3522 - protein, 9 aa, Homo sapiens
  Table 1.2; GSG1L2; ENSG00000214978; HLA -A*32:01
AQNGSRHSQ

SEQ ID NO: 3523 - protein, 8 aa, Homo sapiens
  Table 1.2; GSG1L2; ENSG00000214978; HLA -B*27:05
ARLEFTEK

SEQ ID NO: 3524 - protein, 8 aa, Homo sapiens
  Table 1.2; GSG1L2; ENSG00000214978; HLA -A*02:04
AVLYIWEL

SEQ ID NO: 3525 - protein, 9 aa, Homo sapiens
  Table 1.2; GSG1L2; ENSG00000214978; HLA -A*03:01,HLA-A*03:02,HLA-A*11:01,HLA-A*31:01,HLA-A*33:03, HLA-A*68:01,HLA-C*07:06
AVSVSAMSR

SEQ ID NO: 3526 - protein, 10 aa, Homo sapiens
  Table 1.2; GSG1L2; ENSG00000214978; HLA -A*25:01,HLA-A*26:01
AVSVSAMSRF

SEQ ID NO: 3527 - protein, 9 aa, Homo sapiens
  Table 1.2; GSG1L2; ENSG00000214978; HLA -A*02:03,HLA-B*15:01,HLA-B*27:05,HLA-B*46:01,HLA-C*01:02, HLA-C*14:02
CLAVSVSAM

SEQ ID NO: 3528 - protein, 9 aa, Homo sapiens
  Table 1.2; GSG1L2; ENSG00000214978; HLA -A*02:01,HLA-A*02:04
CLAWGSFAL

SEQ ID NO: 3529 - protein, 10 aa, Homo sapiens
  Table 1.2; GSG1L2; ENSG00000214978; HLA -B*56:01
CPAEQAFRNV

SEQ ID NO: 3530 - protein, 8 aa, Homo sapiens
  Table 1.2; GSG1L2; ENSG00000214978; HLA -A*33:01,HLA-B*18:01,HLA-B*35:01,HLA-B*35:03,HLA-B*51:01
DALVAIFM

SEQ ID NO: 3531 - protein, 9 aa, Homo sapiens
  Table 1.2; GSG1L2; ENSG00000214978; HLA -B*51:01
DALVAIFMV

SEQ ID NO: 3532 - protein, 9 aa, Homo sapiens
  Table 1.2; GSG1L2; ENSG00000214978; HLA -B*54:01,HLA-B*56:01
DIVLILTSA

SEQ ID NO: 3533 - protein, 8 aa, Homo sapiens
  Table 1.2; GSG1L2; ENSG00000214978; HLA -B*35:03
DNNSQAVL

SEQ ID NO: 3534 - protein, 9 aa, Homo sapiens
  Table 1.2; GSG1L2; ENSG00000214978; HLA -A*26:01,HLA-A*33:01,HLA-A*33:03,HLA-B*18:01
DNNSQAVLY

SEQ ID NO: 3535 - protein, 9 aa, Homo sapiens
  Table 1.2; GSG1L2; ENSG00000214978; HLA -B*07:02,HLA-B*08:01,HLA-B*27:05,HLA-B*38:01,HLA-B*39:01, HLA-C*06:02
DRAKQQQAL

SEQ ID NO: 3536 - protein, 10 aa, Homo sapiens
  Table 1.2; GSG1L2; ENSG00000214978; HLA -A*33:01,HLA-A*33:03,HLA-A*68:01
ELGDDKFIQR

SEQ ID NO: 3537 - protein, 11 aa, Homo sapiens
  Table 1.2; GSG1L2; ENSG00000214978; HLA -A*33:01,HLA-A*33:03
ESLNGEDEKCR

SEQ ID NO: 3538 - protein, 9 aa, Homo sapiens
  Table 1.2; GSG1L2; ENSG00000214978; HLA -A*02:04,HLA-A*23:01,HLA-A*25:01,HLA-A*26:01,HLA-A*29:02, HLA-A*33:03,HLA-A*68:02,HLA-B*35:03
EVLDIVLIL

SEQ ID NO: 3539 - protein, 10 aa, Homo sapiens
  Table 1.2; GSG1L2; ENSG00000214978; HLA -A*68:02
EVLDIVLILT

SEQ ID NO: 3540 - protein, 9 aa, Homo sapiens
  Table 1.2; GSG1L2; ENSG00000214978; HLA -A*02:01,HLA-B*51:01,HLA-B*54:01
FALCLAVSV

SEQ ID NO: 3541 - protein, 11 aa, Homo sapiens
  Table 1.2; GSG1L2; ENSG00000214978; HLA -B*57:01
FSLTAVVSSHW

SEQ ID NO: 3542 - protein, 8 aa, Homo sapiens
  Table 1.2; GSG1L2; ENSG00000214978; HLA -A*23:01,HLA-A*32:01,HLA-B*08:01,HLA-B*46:01,HLA-C*16:01
FTAARLEF

SEQ ID NO: 3543 - protein, 9 aa, Homo sapiens
  Table 1.2; GSG1L2; ENSG00000214978; HLA -A*01:01
FTEKQQAQN

SEQ ID NO: 3544 - protein, 11 aa, Homo sapiens
  Table 1.2; GSG1L2; ENSG00000214978; HLA -B*15:01
GAAPCPAEQAF

SEQ ID NO: 3545 - protein, 8 aa, Homo sapiens
  Table 1.2; GSG1L2; ENSG00000214978; HLA -A*11:01,HLA-A*31:01
GDDKFIQR

SEQ ID NO: 3546 - protein, 10 aa, Homo sapiens
  Table 1.2; GSG1L2; ENSG00000214978; HLA -B*44:02
GDDKFIQRGF

SEQ ID NO: 3547 - protein, 9 aa, Homo sapiens
  Table 1.2; GSG1L2; ENSG00000214978; HLA -B*18:01,HLA-B*37:01,HLA-B*44:02,HLA-B*44:03
GEDEKCRSF

SEQ ID NO: 3548 - protein, 8 aa, Homo sapiens
  Table 1.2; GSG1L2; ENSG00000214978; HLA -A*30:01,HLA-B*40:01
GEVLDIVL

SEQ ID NO: 3549 - protein, 9 aa, Homo sapiens
  Table 1.2; GSG1L2; ENSG00000214978; HLA -A*30:01,HLA-B*40:01,HLA-B*44:02,HLA-B*44:03,HLA-B*49:01
GEVLDIVLI

SEQ ID NO: 3550 - protein, 10 aa, Homo sapiens
  Table 1.2; GSG1L2; ENSG00000214978; HLA -B*40:01
GEVLDIVLIL

SEQ ID NO: 3551 - protein, 9 aa, Homo sapiens
  Table 1.2; GSG1L2; ENSG00000214978; HLA -A*02:01,HLA-A*02:03,HLA-A*02:04,HLA-A*29:02,HLA-B*55:01
GLLGMVAHM

SEQ ID NO: 3552 - protein, 9 aa, Homo sapiens
  Table 1.2; GSG1L2; ENSG00000214978; HLA -B*27:05
GRMDNNSQA

SEQ ID NO: 3553 - protein, 10 aa, Homo sapiens
  Table 1.2; GSG1L2; ENSG00000214978; HLA -B*27:02,HLA-B*27:05
GRMDNNSQAV

SEQ ID NO: 3554 - protein, 11 aa, Homo sapiens
  Table 1.2; GSG1L2; ENSG00000214978; HLA -B*27:02,HLA-B*27:05,HLA-C*16:04
GRMDNNSQAVL

SEQ ID NO: 3555 - protein, 9 aa, Homo sapiens
  Table 1.2; GSG1L2; ENSG00000214978; HLA -B*13:02
GSFALCLAV

SEQ ID NO: 3556 - protein, 9 aa, Homo sapiens
  Table 1.2; GSG1L2; ENSG00000214978; HLA -B*57:01
GSRHSQHSF

SEQ ID NO: 3557 - protein, 9 aa, Homo sapiens
  Table 1.2; GSG1L2; ENSG00000214978; HLA -A*03:02
HLPPGAPGK

SEQ ID NO: 3558 - protein, 10 aa, Homo sapiens
  Table 1.2; GSG1L2; ENSG00000214978; HLA -A*02:03,HLA-A*02:07,HLA-A*68:02
HLPPGAPGKV

SEQ ID NO: 3559 - protein, 8 aa, Homo sapiens
  Table 1.2; GSG1L2; ENSG00000214978; HLA -B*54:01
HSFLEPEA

SEQ ID NO: 3560 - protein, 9 aa, Homo sapiens
  Table 1.2; GSG1L2; ENSG00000214978; HLA -A*23:01,HLA-A*24:02
IFMVLAGLL

SEQ ID NO: 3561 - protein, 8 aa, Homo sapiens
  Table 1.2; GSG1L2; ENSG00000214978; HLA -A*23:01,HLA-C*14:02
IFQITVNL

SEQ ID NO: 3562 - protein, 8 aa, Homo sapiens
  Table 1.2; GSG1L2; ENSG00000214978; HLA -B*51:01
IGGEVLDI

SEQ ID NO: 3563 - protein, 8 aa, Homo sapiens
  Table 1.2; GSG1L2; ENSG00000214978; HLA -A*02:01,HLA-A*23:01
ILTSAILL

SEQ ID NO: 3564 - protein, 10 aa, Homo sapiens
  Table 1.2; GSG1L2; ENSG00000214978; HLA -B*57:01,HLA-B*58:01
ITVNLGPEDW

SEQ ID NO: 3565 - protein, 8 aa, Homo sapiens
  Table 1.2; GSG1L2; ENSG00000214978; HLA -B*54:01
IVLILTSA

SEQ ID NO: 3566 - protein, 9 aa, Homo sapiens
  Table 1.2; GSG1L2; ENSG00000214978; HLA -A*23:01,HLA-C*01:02
IVLILTSAI

SEQ ID NO: 3567 - protein, 9 aa, Homo sapiens
  Table 1.2; GSG1L2; ENSG00000214978; HLA -A*02:04,HLA-B*13:02
KQQQALLLL

SEQ ID NO: 3568 - protein, 9 aa, Homo sapiens
  Table 1.2; GSG1L2; ENSG00000214978; HLA -B*54:01
LAGLLGMVA

SEQ ID NO: 3569 - protein, 9 aa, Homo sapiens
  Table 1.2; GSG1L2; ENSG00000214978; HLA -B*54:01
LALTFSLTA

SEQ ID NO: 3570 - protein, 8 aa, Homo sapiens
  Table 1.2; GSG1L2; ENSG00000214978; HLA -A*30:01,HLA-B*08:01,HLA-B*15:01,HLA-B*15:03,HLA-B*18:01, HLA-B*35:01,HLA-B*35:03,HLA-B*39:01,HLA-B*40:02,HLA-B*46:01, HLA-B*51:01,HLA-B*54:01,HLA-B*58:01,HLA-C*02:02,HLA-C*03:03,
  HLA-C*03:04,HLA-C*05:01,HLA-C*12:03,HLA-C*14:02
LAVSVSAM

SEQ ID NO: 3571 - protein, 10 aa, Homo sapiens
  Table 1.2; GSG1L2; ENSG00000214978; HLA -A*68:01,HLA-B*27:02,HLA-C*07:06
LAVSVSAMSR

SEQ ID NO: 3572 - protein, 9 aa, Homo sapiens
  Table 1.2; GSG1L2; ENSG00000214978; HLA -B*54:01
LCLAVSVSA

SEQ ID NO: 3573 - protein, 10 aa, Homo sapiens
  Table 1.2; GSG1L2; ENSG00000214978; HLA -C*04:01
LCLAVSVSAM

SEQ ID NO: 3574 - protein, 9 aa, Homo sapiens
  Table 1.2; GSG1L2; ENSG00000214978; HLA -A*30:01,HLA-B*18:01,HLA-B*40:01,HLA-B*40:02,HLA-B*44:03, HLA-B*49:01
LEFTEKQQA

SEQ ID NO: 3575 - protein, 9 aa, Homo sapiens
  Table 1.2; GSG1L2; ENSG00000214978; HLA -B*49:01
LEPEASESI

SEQ ID NO: 3576 - protein, 10 aa, Homo sapiens
  Table 1.2; GSG1L2; ENSG00000214978; HLA -B*44:02,HLA-B*44:03,HLA-B*57:01
LEPEASESIW

SEQ ID NO: 3577 - protein, 9 aa, Homo sapiens
  Table 1.2; GSG1L2; ENSG00000214978; HLA -A*11:01,HLA-A*31:01
LGDDKFIQR

SEQ ID NO: 3578 - protein, 8 aa, Homo sapiens
  Table 1.2; GSG1L2; ENSG00000214978; HLA -B*08:01
LGMVAHMM

SEQ ID NO: 3579 - protein, 9 aa, Homo sapiens
  Table 1.2; GSG1L2; ENSG00000214978; HLA -A*02:01,HLA-A*02:04,HLA-A*02:07
LLLPVCLAL

SEQ ID NO: 3580 - protein, 9 aa, Homo sapiens
  Table 1.2; GSG1L2; ENSG00000214978; HLA -B*51:01
LPPGAPGKV

SEQ ID NO: 3581 - protein, 11 aa, Homo sapiens
  Table 1.2; GSG1L2; ENSG00000214978; HLA -B*07:02,HLA-B*51:01,HLA-B*54:01,HLA-B*56:01
LPPGAPGKVSI

SEQ ID NO: 3582 - protein, 9 aa, Homo sapiens
  Table 1.2; GSG1L2; ENSG00000214978; HLA -B*35:01,HLA-B*35:03,HLA-B*51:01
LPVCLALTF

SEQ ID NO: 3583 - protein, 8 aa, Homo sapiens
  Table 1.2; GSG1L2; ENSG00000214978; HLA -C*03:03,HLA-C*03:04
LSIGGEVL

SEQ ID NO: 3584 - protein, 9 aa, Homo sapiens
  Table 1.2; GSG1L2; ENSG00000214978; HLA -A*24:02,HLA-A*25:01,HLA-A*26:01,HLA-A*32:01,HLA-B*44:02, HLA-B*57:01,HLA-B*58:01,HLA-C*16:04
LTAVVSSHW

SEQ ID NO: 3585 - protein, 8 aa, Homo sapiens
  Table 1.2; GSG1L2; ENSG00000214978; HLA -A*68:02
LTFSLTAV

SEQ ID NO: 3586 - protein, 9 aa, Homo sapiens
  Table 1.2; GSG1L2; ENSG00000214978; HLA -A*68:02
LTFSLTAVV

SEQ ID NO: 3587 - protein, 11 aa, Homo sapiens
  Table 1.2; GSG1L2; ENSG00000214978; HLA -A*68:02
LTSAILLGSRV

SEQ ID NO: 3588 - protein, 8 aa, Homo sapiens
  Table 1.2; GSG1L2; ENSG00000214978; HLA -B*37:01
MDNNSQAV

SEQ ID NO: 3589 - protein, 9 aa, Homo sapiens
  Table 1.2; GSG1L2; ENSG00000214978; HLA -A*30:01,HLA-B*37:01
MDNNSQAVL

SEQ ID NO: 3590 - protein, 10 aa, Homo sapiens
  Table 1.2; GSG1L2; ENSG00000214978; HLA -A*29:02,HLA-A*33:01,HLA-B*35:01,HLA-B*44:03
MDNNSQAVLY

SEQ ID NO: 3591 - protein, 9 aa, Homo sapiens
  Table 1.2; GSG1L2; ENSG00000214978; HLA -A*02:01,HLA-A*02:03,HLA-A*02:04,HLA-A*02:07,HLA-B*13:02, HLA-B*51:01
MMYTTIFQI

SEQ ID NO: 3592 - protein, 9 aa, Homo sapiens
  Table 1.2; GSG1L2; ENSG00000214978; HLA -A*26:01,HLA-A*29:02
MVLAGLLGM

SEQ ID NO: 3593 - protein, 11 aa, Homo sapiens
  Table 1.2; GSG1L2; ENSG00000214978; HLA -B*54:01
MVLAGLLGMVA

SEQ ID NO: 3594 - protein, 8 aa, Homo sapiens
  Table 1.2; GSG1L2; ENSG00000214978; HLA -A*23:01,HLA-A*24:02
MYTTIFQI

SEQ ID NO: 3595 - protein, 9 aa, Homo sapiens
  Table 1.2; GSG1L2; ENSG00000214978; HLA -A*24:02
MYTTIFQIT

SEQ ID NO: 3596 - protein, 8 aa, Homo sapiens
  Table 1.2; GSG1L2; ENSG00000214978; HLA -B*18:01
NNSQAVLY

SEQ ID NO: 3597 - protein, 9 aa, Homo sapiens
  Table 1.2; GSG1L2; ENSG00000214978; HLA -B*57:01
NSQAVLYIW

SEQ ID NO: 3598 - protein, 9 aa, Homo sapiens
  Table 1.2; GSG1L2; ENSG00000214978; HLA -B*44:02
PEDWKPQTW

SEQ ID NO: 3599 - protein, 9 aa, Homo sapiens
  Table 1.2; GSG1L2; ENSG00000214978; HLA -B*54:01
QALLLLPVC

SEQ ID NO: 3600 - protein, 9 aa, Homo sapiens
  Table 1.2; GSG1L2; ENSG00000214978; HLA -A*02:04,HLA-B*35:03
QAVLYIWEL

SEQ ID NO: 3601 - protein, 9 aa, Homo sapiens
  Table 1.2; GSG1L2; ENSG00000214978; HLA -B*39:01
QHSFLEPEA

SEQ ID NO: 3602 - protein, 9 aa, Homo sapiens
  Table 1.2; GSG1L2; ENSG00000214978; HLA -B*13:02
QQALLLLPV

SEQ ID NO: 3603 - protein, 9 aa, Homo sapiens
  Table 1.2; GSG1L2; ENSG00000214978; HLA -A*01:01,HLA-A*29:02
QTWDYGWSY

SEQ ID NO: 3604 - protein, 8 aa, Homo sapiens
  Table 1.2; GSG1L2; ENSG00000214978; HLA -B*08:01
RAKQQQAL

SEQ ID NO: 3605 - protein, 9 aa, Homo sapiens
  Table 1.2; GSG1L2; ENSG00000214978; HLA -A*23:01,HLA-A*24:02
RFTAARLEF

SEQ ID NO: 3606 - protein, 8 aa, Homo sapiens
  Table 1.2; GSG1L2; ENSG00000214978; HLA -B*57:01
RGFHVGLW

SEQ ID NO: 3607 - protein, 9 aa, Homo sapiens
  Table 1.2; GSG1L2; ENSG00000214978; HLA -A*02:01
RMDNNSQAV

SEQ ID NO: 3608 - protein, 11 aa, Homo sapiens
  Table 1.2; GSG1L2; ENSG00000214978; HLA -A*01:01,HLA-A*29:02,HLA-A*30:02
RMDNNSQAVLY

SEQ ID NO: 3609 - protein, 9 aa, Homo sapiens
  Table 1.2; GSG1L2; ENSG00000214978; HLA -A*02:07,HLA-B*57:01
RVDALVAIF

SEQ ID NO: 3610 - protein, 10 aa, Homo sapiens
  Table 1.2; GSG1L2; ENSG00000214978; HLA -A*02:07
RVDALVAIFM

SEQ ID NO: 3611 - protein, 11 aa, Homo sapiens
  Table 1.2; GSG1L2; ENSG00000214978; HLA -A*02:07
RVDALVAIFMV

SEQ ID NO: 3612 - protein, 9 aa, Homo sapiens
  Table 1.2; GSG1L2; ENSG00000214978; HLA -A*68:02,HLA-B*51:01,HLA-C*02:02,HLA-C*12:03
SAILLGSRV

SEQ ID NO: 3613 - protein, 8 aa, Homo sapiens
  Table 1.2; GSG1L2; ENSG00000214978; HLA -A*32:01,HLA-B*08:01,HLA-B*54:01,HLA-B*56:01,HLA-C*16:01
SAMSRFTA

SEQ ID NO: 3614 - protein, 9 aa, Homo sapiens
  Table 1.2; GSG1L2; ENSG00000214978; HLA -A*02:01,HLA-A*02:03,HLA-A*25:01,HLA-A*30:01,HLA-A*32:01, HLA-B*07:02,HLA-B*08:01,HLA-B*37:01,HLA-B*40:02,HLA-B*46:01, HLA-B*54:01,HLA-B*55:01,HLA-B*56:01,HLA-C*01:02,HLA-C*02:02,
  HLA-C*03:03,HLA-C*03:04,HLA-C*07:02,HLA-C*12:03,HLA-C*14:02, HLA-C*16:01,HLA-C*16:02
SAMSRFTAA

SEQ ID NO: 3615 - protein, 10 aa, Homo sapiens
  Table 1.2; GSG1L2; ENSG00000214978; HLA -A*31:01,HLA-A*33:01,HLA-A*33:03
SAMSRFTAAR

SEQ ID NO: 3616 - protein, 9 aa, Homo sapiens
  Table 1.2; GSG1L2; ENSG00000214978; HLA -B*37:01
SESIWKTGA

SEQ ID NO: 3617 - protein, 9 aa, Homo sapiens
  Table 1.2; GSG1L2; ENSG00000214978; HLA -A*03:01,HLA-A*03:02,HLA-A*30:02,HLA-A*32:01,HLA-B*46:01
SLTAVVSSH

SEQ ID NO: 3618 - protein, 10 aa, Homo sapiens
  Table 1.2; GSG1L2; ENSG00000214978; HLA -A*23:01,HLA-A*24:02,HLA-A*25:01,HLA-A*32:01,HLA-B*27:02, HLA-B*44:02,HLA-B*44:03,HLA-B*57:01,HLA-B*58:01
SLTAVVSSHW

SEQ ID NO: 3619 - protein, 10 aa, Homo sapiens
  Table 1.2; GSG1L2; ENSG00000214978; HLA -A*02:04
SQAVLYIWEL

SEQ ID NO: 3620 - protein, 8 aa, Homo sapiens
  Table 1.2; GSG1L2; ENSG00000214978; HLA -A*32:01,HLA-B*37:01
SVSAMSRF

SEQ ID NO: 3621 - protein, 10 aa, Homo sapiens
  Table 1.2; GSG1L2; ENSG00000214978; HLA -A*03:01,HLA-A*03:02,HLA-A*11:01,HLA-A*68:01
TAARLEFTEK

SEQ ID NO: 3622 - protein, 8 aa, Homo sapiens
  Table 1.2; GSG1L2; ENSG00000214978; HLA -A*25:01,HLA-A*32:01,HLA-B*51:01,HLA-B*57:01,HLA-B*58:01
TAVVSSHW

SEQ ID NO: 3623 - protein, 11 aa, Homo sapiens
  Table 1.2; GSG1L2; ENSG00000214978; HLA -A*33:03
TEKQQAQNGSR

SEQ ID NO: 3624 - protein, 9 aa, Homo sapiens
  Table 1.2; GSG1L2; ENSG00000214978; HLA -A*02:01,HLA-A*02:03,HLA-A*02:04,HLA-A*02:07,HLA-A*23:01, HLA-A*68:01,HLA-A*68:02,HLA-B*13:02,HLA-B*27:05
TIFQITVNL

SEQ ID NO: 3625 - protein, 9 aa, Homo sapiens
  Table 1.2; GSG1L2; ENSG00000214978; HLA -A*31:01,HLA-A*33:03,HLA-A*68:01
TSAILLGSR

SEQ ID NO: 3626 - protein, 10 aa, Homo sapiens
  Table 1.2; GSG1L2; ENSG00000214978; HLA -A*68:02
TSAILLGSRV

SEQ ID NO: 3627 - protein, 8 aa, Homo sapiens
  Table 1.2; GSG1L2; ENSG00000214978; HLA -A*68:02
TTIFQITV

SEQ ID NO: 3628 - protein, 10 aa, Homo sapiens
  Table 1.2; GSG1L2; ENSG00000214978; HLA -A*68:02
TTIFQITVNL

SEQ ID NO: 3629 - protein, 9 aa, Homo sapiens
  Table 1.2; GSG1L2; ENSG00000214978; HLA -B*57:01
TVNLGPEDW

SEQ ID NO: 3630 - protein, 9 aa, Homo sapiens
  Table 1.2; GSG1L2; ENSG00000214978; HLA -A*23:01,HLA-A*24:02,HLA-B*51:01
VAHMMYTTI

SEQ ID NO: 3631 - protein, 8 aa, Homo sapiens
  Table 1.2; GSG1L2; ENSG00000214978; HLA -B*18:01,HLA-B*37:01
VDALVAIF

SEQ ID NO: 3632 - protein, 9 aa, Homo sapiens
  Table 1.2; GSG1L2; ENSG00000214978; HLA -B*37:01
VDALVAIFM

SEQ ID NO: 3633 - protein, 9 aa, Homo sapiens
  Table 1.2; GSG1L2; ENSG00000214978; HLA -A*02:01,HLA-A*02:03,HLA-A*02:04,HLA-A*02:07,HLA-B*13:02, HLA-B*55:01
VLAGLLGMV

SEQ ID NO: 3634 - protein, 10 aa, Homo sapiens
  Table 1.2; GSG1L2; ENSG00000214978; HLA -A*02:03
VLAGLLGMVA

SEQ ID NO: 3635 - protein, 9 aa, Homo sapiens
  Table 1.2; GSG1L2; ENSG00000214978; HLA -A*02:07
VLDIVLILT

SEQ ID NO: 3636 - protein, 8 aa, Homo sapiens
  Table 1.2; GSG1L2; ENSG00000214978; HLA -B*51:01
VPAEEQGV

SEQ ID NO: 3637 - protein, 9 aa, Homo sapiens
  Table 1.2; GSG1L2; ENSG00000214978; HLA -B*07:02,HLA-B*35:01,HLA-B*35:03,HLA-B*51:01,HLA-B*55:01, HLA-C*07:02
VPAEEQGVL

SEQ ID NO: 3638 - protein, 10 aa, Homo sapiens
  Table 1.2; GSG1L2; ENSG00000214978; HLA -A*25:01,HLA-B*35:01,HLA-B*57:01
VPAEEQGVLW

SEQ ID NO: 3639 - protein, 10 aa, Homo sapiens
  Table 1.2; GSG1L2; ENSG00000214978; HLA -B*40:02
VSAMSRFTAA

SEQ ID NO: 3640 - protein, 9 aa, Homo sapiens
  Table 1.2; GSG1L2; ENSG00000214978; HLA -A*23:01,HLA-A*24:02,HLA-A*25:01,HLA-A*26:01,HLA-B*46:01, HLA-B*57:01,HLA-B*58:01,HLA-C*02:02
VSVSAMSRF

SEQ ID NO: 3641 - protein, 9 aa, Homo sapiens
  Table 1.2; GSG1L2; ENSG00000214978; HLA -A*02:07
VVPAEEQGV

SEQ ID NO: 3642 - protein, 11 aa, Homo sapiens
  Table 1.2; GSG1L2; ENSG00000214978; HLA -A*25:01,HLA-B*57:01,HLA-B*58:01
VVPAEEQGVLW

SEQ ID NO: 3643 - protein, 10 aa, Homo sapiens
  Table 1.2; GSG1L2; ENSG00000214978; HLA -A*02:07
YIWELGDDKF

SEQ ID NO: 3644 - protein, 11 aa, Homo sapiens
  Table 1.2; GSG1L2; ENSG00000214978; HLA -A*02:01
YIWELGDDKFI

SEQ ID NO: 3645 - protein, 9 aa, Homo sapiens
  Table 1.2; GSG1L2; ENSG00000214978; HLA -A*30:01,HLA-A*68:02,HLA-B*13:02,HLA-B*40:02,HLA-B*51:01, HLA-B*54:01,HLA-C*16:02
YTTIFQITV

SEQ ID NO: 3646 - protein, 11 aa, Homo sapiens
  Table 1.2; GSG1L2; ENSG00000214978; HLA -A*68:02
YTTIFQITVNL

SEQ ID NO: 3647 - protein, 11 aa, Homo sapiens
  Table 1.2; IFNK; ENSG00000147896; HLA -A*29:02
AFELPQEFLQY

SEQ ID NO: 3648 - protein, 10 aa, Homo sapiens
  Table 1.2; IFNK; ENSG00000147896; HLA -A*23:01,HLA-A*24:02,HLA-A*30:02
AFNIFSQHTF

SEQ ID NO: 3649 - protein, 10 aa, Homo sapiens
  Table 1.2; IFNK; ENSG00000147896; HLA -A*23:01
AFYEMSLQAF

SEQ ID NO: 3650 - protein, 9 aa, Homo sapiens
  Table 1.2; IFNK; ENSG00000147896; HLA -B*27:05
ARVPQLSSL

SEQ ID NO: 3651 - protein, 8 aa, Homo sapiens
  Table 1.2; IFNK; ENSG00000147896; HLA -B*51:01
CAWEIVRV

SEQ ID NO: 3652 - protein, 9 aa, Homo sapiens
  Table 1.2; IFNK; ENSG00000147896; HLA -A*33:01
DCNLLNVHL

SEQ ID NO: 3653 - protein, 10 aa, Homo sapiens
  Table 1.2; IFNK; ENSG00000147896; HLA -A*33:01
DCNLLNVHLR

SEQ ID NO: 3654 - protein, 9 aa, Homo sapiens
  Table 1.2; IFNK; ENSG00000147896; HLA -A*33:01,HLA-B*08:01
DIKKAFYEM

SEQ ID NO: 3655 - protein, 9 aa, Homo sapiens
  Table 1.2; IFNK; ENSG00000147896; HLA -A*01:01,HLA-A*25:01,HLA-A*26:01,HLA-A*29:02
ELPQEFLQY

SEQ ID NO: 3656 - protein, 10 aa, Homo sapiens
  Table 1.2; IFNK; ENSG00000147896; HLA -A*29:02,HLA-B*44:02,HLA-B*44:03
FELPQEFLQY

SEQ ID NO: 3657 - protein, 9 aa, Homo sapiens
  Table 1.2; IFNK; ENSG00000147896; HLA -A*23:01,HLA-A*24:02,HLA-C*04:01,HLA-C*14:02
FYEMSLQAF

SEQ ID NO: 3658 - protein, 9 aa, Homo sapiens
  Table 1.2; IFNK; ENSG00000147896; HLA -A*02:01,HLA-A*02:07
GLDQQAEYL

SEQ ID NO: 3659 - protein, 9 aa, Homo sapiens
  Table 1.2; IFNK; ENSG00000147896; HLA -A*02:03,HLA-A*02:04,HLA-B*08:01
HLKQIQIGL

SEQ ID NO: 3660 - protein, 9 aa, Homo sapiens
  Table 1.2; IFNK; ENSG00000147896; HLA -A*32:01,HLA-B*15:01,HLA-B*15:03,HLA-B*37:01,HLA-B*38:01
HLSSMSNSF

SEQ ID NO: 3661 - protein, 9 aa, Homo sapiens
  Table 1.2; IFNK; ENSG00000147896; HLA -A*23:01,HLA-A*24:02,HLA-A*29:02,HLA-B*15:03,HLA-B*18:01, HLA-B*27:02,HLA-B*35:01,HLA-B*46:01,HLA-B*51:01,HLA-B*57:01, HLA-B*58:01,HLA-C*02:02,HLA-C*05:01,HLA-C*12:03,HLA-C*16:02,
  HLA-C*16:04
IAFELPQEF

SEQ ID NO: 3662 - protein, 9 aa, Homo sapiens
  Table 1.2; IFNK; ENSG00000147896; HLA -A*23:01,HLA-A*24:02,HLA-B*46:01,HLA-C*01:02,HLA-C*14:02
IFIAGTLSL

SEQ ID NO: 3663 - protein, 9 aa, Homo sapiens
  Table 1.2; IFNK; ENSG00000147896; HLA -A*24:02,HLA-A*29:02
IFSQHTFKY

SEQ ID NO: 3664 - protein, 9 aa, Homo sapiens
  Table 1.2; IFNK; ENSG00000147896; HLA -A*29:02,HLA-A*30:02,HLA-B*15:03,HLA-B*46:01
IGLDQQAEY

SEQ ID NO: 3665 - protein, 11 aa, Homo sapiens
  Table 1.2; IFNK; ENSG00000147896; HLA -A*26:01,HLA-A*29:02,HLA-A*30:02,HLA-A*32:01,HLA-B*15:01, HLA-B*15:03,HLA-B*46:01,HLA-B*58:01,HLA-C*07:04,HLA-C*16:04
IQIGLDQQAEY

SEQ ID NO: 3666 - protein, 10 aa, Homo sapiens
  Table 1.2; IFNK; ENSG00000147896; HLA -B*07:02,HLA-C*07:02
KPSEARVPQL

SEQ ID NO: 3667 - protein, 9 aa, Homo sapiens
  Table 1.2; IFNK; ENSG00000147896; HLA -A*24:02
KYSDCAWEI

SEQ ID NO: 3668 - protein, 9 aa, Homo sapiens
  Table 1.2; IFNK; ENSG00000147896; HLA -B*49:01
LEILMGIFI

SEQ ID NO: 3669 - protein, 8 aa, Homo sapiens
  Table 1.2; IFNK; ENSG00000147896; HLA -B*35:01
LPQEFLQY

SEQ ID NO: 3670 - protein, 9 aa, Homo sapiens
  Table 1.2; IFNK; ENSG00000147896; HLA -A*03:01,HLA-A*31:01
LQYTQPMKR

SEQ ID NO: 3671 - protein, 9 aa, Homo sapiens
  Table 1.2; IFNK; ENSG00000147896; HLA -B*54:01
MSNSFPVEC

SEQ ID NO: 3672 - protein, 9 aa, Homo sapiens
  Table 1.2; IFNK; ENSG00000147896; HLA -B*18:01,HLA-B*44:03
NENEDMKEM

SEQ ID NO: 3673 - protein, 9 aa, Homo sapiens
  Table 1.2; IFNK; ENSG00000147896; HLA -A*03:01
NIFSQHTFK

SEQ ID NO: 3674 - protein, 10 aa, Homo sapiens
  Table 1.2; IFNK; ENSG00000147896; HLA -A*29:02
NIFSQHTFKY

SEQ ID NO: 3675 - protein, 10 aa, Homo sapiens
  Table 1.2; IFNK; ENSG00000147896; HLA -A*01:01
QIGLDQQAEY

SEQ ID NO: 3676 - protein, 10 aa, Homo sapiens
  Table 1.2; IFNK; ENSG00000147896; HLA -B*13:02
QQAEYLNQCL

SEQ ID NO: 3677 - protein, 8 aa, Homo sapiens
  Table 1.2; IFNK; ENSG00000147896; HLA -B*37:01
RENIAFEL

SEQ ID NO: 3678 - protein, 9 aa, Homo sapiens
  Table 1.2; IFNK; ENSG00000147896; HLA -A*03:01,HLA-A*03:02
RIDNFLKEK

SEQ ID NO: 3679 - protein, 11 aa, Homo sapiens
  Table 1.2; IFNK; ENSG00000147896; HLA -A*31:01
RVPQLSSLELR

SEQ ID NO: 3680 - protein, 9 aa, Homo sapiens
  Table 1.2; IFNK; ENSG00000147896; HLA -A*24:02
RYFHRIDNF

SEQ ID NO: 3681 - protein, 8 aa, Homo sapiens
  Table 1.2; IFNK; ENSG00000147896; HLA -A*30:01,HLA-B*18:01,HLA-B*37:01,HLA-B*40:01
SEARVPQL

SEQ ID NO: 3682 - protein, 11 aa, Homo sapiens
  Table 1.2; IFNK; ENSG00000147896; HLA -A*30:01,HLA-B*40:01
SEARVPQLSSL

SEQ ID NO: 3683 - protein, 9 aa, Homo sapiens
  Table 1.2; IFNK; ENSG00000147896; HLA -A*02:01,HLA-A*02:07
SLDCNLLNV

SEQ ID NO: 3684 - protein, 9 aa, Homo sapiens
  Table 1.2; IFNK; ENSG00000147896; HLA -B*57:01
SSLELRRYF

SEQ ID NO: 3685 - protein, 9 aa, Homo sapiens
  Table 1.2; IFNK; ENSG00000147896; HLA -A*03:01,HLA-A*03:02,HLA-A*11:01,HLA-A*31:01,HLA-A*33:01, HLA-A*33:03,HLA-A*68:01,HLA-B*13:02
STKPDMIQK

SEQ ID NO: 3686 - protein, 9 aa, Homo sapiens
  Table 1.2; IFNK; ENSG00000147896; HLA -B*07:02,HLA-B*35:03,HLA-C*07:02
VPQLSSLEL

SEQ ID NO: 3687 - protein, 8 aa, Homo sapiens
  Table 1.2; IFNK; ENSG00000147896; HLA -A*30:01,HLA-B*18:01,HLA-B*37:01,HLA-B*44:02,HLA-B*44:03, HLA-B*49:01
YEMSLQAF

SEQ ID NO: 3688 - protein, 9 aa, Homo sapiens
  Table 1.2; IFNK; ENSG00000147896; HLA -A*24:02,HLA-A*29:02
YFYKFTALF

SEQ ID NO: 3689 - protein, 9 aa, Homo sapiens
  Table 1.2; IFNK; ENSG00000147896; HLA -A*24:02
YYFYKFTAL

SEQ ID NO: 3690 - protein, 10 aa, Homo sapiens
  Table 1.2; IL22RA2; ENSG00000164485; HLA -A*25:01,HLA-A*26:01,HLA-A*32:01,HLA-B*27:02,HLA-B*44:03, HLA-B*57:01,HLA-B*58:01,HLA-C*16:04
AASAGSYSEW

SEQ ID NO: 3691 - protein, 8 aa, Homo sapiens
  Table 1.2; IL22RA2; ENSG00000164485; HLA -A*30:01,HLA-B*37:01,HLA-B*40:01,HLA-B*40:02,HLA-B*44:02, HLA-B*44:03,HLA-B*49:01
AEIYQPML

SEQ ID NO: 3692 - protein, 10 aa, Homo sapiens
  Table 1.2; IL22RA2; ENSG00000164485; HLA -B*38:01
AHRAVEIEAL

SEQ ID NO: 3693 - protein, 9 aa, Homo sapiens
  Table 1.2; IL22RA2; ENSG00000164485; HLA -A*25:01,HLA-A*26:01,HLA-A*29:02,HLA-A*30:02,HLA-A*32:01, HLA-B*15:01,HLA-B*15:03,HLA-B*46:01,HLA-C*07:04,HLA-C*14:02
ALTGNSSVY

SEQ ID NO: 3694 - protein, 8 aa, Homo sapiens
  Table 1.2; IL22RA2; ENSG00000164485; HLA -A*30:02,HLA-A*32:01,HLA-B*15:01
ALTPHSSY

SEQ ID NO: 3695 - protein, 9 aa, Homo sapiens
  Table 1.2; IL22RA2; ENSG00000164485; HLA -A*01:01,HLA-A*25:01,HLA-A*26:01,HLA-A*30:02,HLA-A*32:01, HLA-B*15:01,HLA-B*44:02,HLA-B*44:03,HLA-B*46:01,HLA-B*57:01, HLA-B*58:01,HLA-C*02:02,HLA-C*12:03,HLA-C*16:04
ASAGSYSEW

SEQ ID NO: 3696 - protein, 9 aa, Homo sapiens
  Table 1.2; IL22RA2; ENSG00000164485; HLA -C*06:02
CNFPGCRTL

SEQ ID NO: 3697 - protein, 9 aa, Homo sapiens
  Table 1.2; IL22RA2; ENSG00000164485; HLA -A*03:02,HLA-A*11:01
CSMKSSHQK

SEQ ID NO: 3698 - protein, 9 aa, Homo sapiens
  Table 1.2; IL22RA2; ENSG00000164485; HLA -A*03:02,HLA-A*11:01,HLA-A*26:01,HLA-A*31:01,HLA-A*33:01, HLA-A*33:03,HLA-A*68:01,HLA-C*07:06
DIQEPYYGR

SEQ ID NO: 3699 - protein, 10 aa, Homo sapiens
  Table 1.2; IL22RA2; ENSG00000164485; HLA -A*68:01,HLA-A*68:02
DIQEPYYGRV

SEQ ID NO: 3700 - protein, 11 aa, Homo sapiens
  Table 1.2; IL22RA2; ENSG00000164485; HLA -A*33:01,HLA-A*68:01
DIQEPYYGRVR

SEQ ID NO: 3701 - protein, 10 aa, Homo sapiens
  Table 1.2; IL22RA2; ENSG00000164485; HLA -B*51:01
DPPVMNITQV

SEQ ID NO: 3702 - protein, 8 aa, Homo sapiens
  Table 1.2; IL22RA2; ENSG00000164485; HLA -A*33:01,HLA-A*33:03
DYYELLYR

SEQ ID NO: 3703 - protein, 9 aa, Homo sapiens
  Table 1.2; IL22RA2; ENSG00000164485; HLA -A*23:01,HLA-A*25:01,HLA-A*26:01,HLA-A*29:02,HLA-A*30:02, HLA-A*32:01,HLA-A*33:01,HLA-A*33:03,HLA-A*68:01,HLA-B*08:01, HLA-B*15:01,HLA-B*15:03,HLA-B*18:01,HLA-B*35:01,HLA-B*35:03,
  HLA-B*39:01,HLA-B*44:02,HLA-B*44:03,HLA-B*46:01,HLA-B*51:01, HLA-B*54:01,HLA-B*55:01,HLA-B*58:01,HLA-C*01:02,HLA-C*02:02, HLA-C*03:03,HLA-C*07:06,HLA-C*12:03,HLA-C*14:02,HLA-C*16:01, HLA-C*16:04
EALTPHSSY

SEQ ID NO: 3704 - protein, 11 aa, Homo sapiens
  Table 1.2; IL22RA2; ENSG00000164485; HLA -A*01:01,HLA-A*25:01,HLA-A*26:01,HLA-A*30:02
EIEALTPHSSY

SEQ ID NO: 3705 - protein, 9 aa, Homo sapiens
  Table 1.2; IL22RA2; ENSG00000164485; HLA -A*26:01,HLA-A*33:01,HLA-A*33:03,HLA-A*68:01,HLA-A*68:02, HLA-C*07:06
EIYQPMLDR

SEQ ID NO: 3706 - protein, 10 aa, Homo sapiens
  Table 1.2; IL22RA2; ENSG00000164485; HLA -A*68:02
EIYQPMLDRR

SEQ ID NO: 3707 - protein, 9 aa, Homo sapiens
  Table 1.2; IL22RA2; ENSG00000164485; HLA -B*15:03
EKNVSIEDY

SEQ ID NO: 3708 - protein, 9 aa, Homo sapiens
  Table 1.2; IL22RA2; ENSG00000164485; HLA -A*24:02
ELLYRVFII

SEQ ID NO: 3709 - protein, 9 aa, Homo sapiens
  Table 1.2; IL22RA2; ENSG00000164485; HLA -B*51:01,HLA-B*54:01,HLA-B*55:01,HLA-B*56:01
EPYYGRVRA

SEQ ID NO: 3710 - protein, 10 aa, Homo sapiens
  Table 1.2; IL22RA2; ENSG00000164485; HLA -B*54:01,HLA-B*55:01,HLA-B*56:01
EPYYGRVRAA

SEQ ID NO: 3711 - protein, 10 aa, Homo sapiens
  Table 1.2; IL22RA2; ENSG00000164485; HLA -A*33:03
EQKVYEGAHR

SEQ ID NO: 3712 - protein, 10 aa, Homo sapiens
  Table 1.2; IL22RA2; ENSG00000164485; HLA -A*24:02,HLA-A*33:03,HLA-B*57:01
ESLKPQRVQF

SEQ ID NO: 3713 - protein, 9 aa, Homo sapiens
  Table 1.2; IL22RA2; ENSG00000164485; HLA -A*01:01,HLA-A*25:01,HLA-A*26:01,HLA-A*33:03,HLA-B*39:01
ETKIDPPVM

SEQ ID NO: 3714 - protein, 9 aa, Homo sapiens
  Table 1.2; IL22RA2; ENSG00000164485; HLA -A*01:01,HLA-A*11:01,HLA-A*25:01,HLA-A*26:01,HLA-A*29:02, HLA-A*30:02,HLA-A*33:01,HLA-A*33:03,HLA-A*68:01,HLA-B*35:01, HLA-C*07:06
ETSDIQEPY

SEQ ID NO: 3715 - protein, 10 aa, Homo sapiens
  Table 1.2; IL22RA2; ENSG00000164485; HLA -A*01:01,HLA-A*25:01,HLA-A*26:01,HLA-A*29:02,HLA-A*30:02, HLA-A*68:01,HLA-A*68:02
ETSDIQEPYY

SEQ ID NO: 3716 - protein, 10 aa, Homo sapiens
  Table 1.2; IL22RA2; ENSG00000164485; HLA -A*29:02
FFLTGVAGTQ

SEQ ID NO: 3717 - protein, 9 aa, Homo sapiens
  Table 1.2; IL22RA2; ENSG00000164485; HLA -A*03:01,HLA-A*11:01
FIINNSLEK

SEQ ID NO: 3718 - protein, 10 aa, Homo sapiens
  Table 1.2; IL22RA2; ENSG00000164485; HLA -A*02:01,HLA-A*02:03,HLA-A*02:04,HLA-A*02:07
FLISFFLTGV

SEQ ID NO: 3719 - protein, 9 aa, Homo sapiens
  Table 1.2; IL22RA2; ENSG00000164485; HLA -A*26:01,HLA-C*12:03
FLTGVAGTQ

SEQ ID NO: 3720 - protein, 9 aa, Homo sapiens
  Table 1.2; IL22RA2; ENSG00000164485; HLA -A*02:07
FTPWWETKI

SEQ ID NO: 3721 - protein, 10 aa, Homo sapiens
  Table 1.2; IL22RA2; ENSG00000164485; HLA -A*29:02,HLA-A*30:02
GNSSVYFVQY

SEQ ID NO: 3722 - protein, 11 aa, Homo sapiens
  Table 1.2; IL22RA2; ENSG00000164485; HLA -C*16:04
GRALTGNSSVY

SEQ ID NO: 3723 - protein, 11 aa, Homo sapiens
  Table 1.2; IL22RA2; ENSG00000164485; HLA -A*30:02,HLA-B*27:02,HLA-C*16:04
GRVRAASAGSY

SEQ ID NO: 3724 - protein, 9 aa, Homo sapiens
  Table 1.2; IL22RA2; ENSG00000164485; HLA -A*32:01,HLA-B*58:01,HLA-C*01:02
GTQSTHESL

SEQ ID NO: 3725 - protein, 10 aa, Homo sapiens
  Table 1.2; IL22RA2; ENSG00000164485; HLA -A*03:01,HLA-A*03:02,HLA-A*11:01
GTQSTHESLK

SEQ ID NO: 3726 - protein, 9 aa, Homo sapiens
  Table 1.2; IL22RA2; ENSG00000164485; HLA -B*15:01
GVAGTQSTH

SEQ ID NO: 3727 - protein, 9 aa, Homo sapiens
  Table 1.2; IL22RA2; ENSG00000164485; HLA -A*29:02,HLA-A*30:02,HLA-B*35:01
HAPNLPYRY

SEQ ID NO: 3728 - protein, 9 aa, Homo sapiens
  Table 1.2; IL22RA2; ENSG00000164485; HLA -B*37:01
HESLKPQRV

SEQ ID NO: 3729 - protein, 9 aa, Homo sapiens
  Table 1.2; IL22RA2; ENSG00000164485; HLA -B*27:02,HLA-B*27:05,HLA-B*38:01,HLA-B*39:01
HRAVEIEAL

SEQ ID NO: 3730 - protein, 8 aa, Homo sapiens
  Table 1.2; IL22RA2; ENSG00000164485; HLA -B*37:01,HLA-B*51:01
IDPPVMNI

SEQ ID NO: 3731 - protein, 10 aa, Homo sapiens
  Table 1.2; IL22RA2; ENSG00000164485; HLA -A*01:01,HLA-A*25:01,HLA-A*26:01,HLA-A*30:01,HLA-A*30:02, HLA-B*15:01,HLA-B*15:03,HLA-B*18:01,HLA-B*27:02,HLA-B*37:01, HLA-B*40:01,HLA-B*44:02,HLA-B*44:03,HLA-B*49:01,HLA-C*16:04
IEALTPHSSY

SEQ ID NO: 3732 - protein, 9 aa, Homo sapiens
  Table 1.2; IL22RA2; ENSG00000164485; HLA -A*01:01,HLA-B*18:01,HLA-B*44:02,HLA-B*44:03
IEDYYELLY

SEQ ID NO: 3733 - protein, 11 aa, Homo sapiens
  Table 1.2; IL22RA2; ENSG00000164485; HLA -A*03:02
IINNSLEKEQK

SEQ ID NO: 3734 - protein, 9 aa, Homo sapiens
  Table 1.2; IL22RA2; ENSG00000164485; HLA -A*01:01,HLA-A*03:01,HLA-A*29:02,HLA-A*30:02,HLA-B*15:01, HLA-B*46:01
ILHAPNLPY

SEQ ID NO: 3735 - protein, 11 aa, Homo sapiens
  Table 1.2; IL22RA2; ENSG00000164485; HLA -A*29:02,HLA-A*30:02
ILHAPNLPYRY

SEQ ID NO: 3736 - protein, 9 aa, Homo sapiens
  Table 1.2; IL22RA2; ENSG00000164485; HLA -C*03:03,HLA-C*03:04
ITQVNGSLL

SEQ ID NO: 3737 - protein, 9 aa, Homo sapiens
  Table 1.2; IL22RA2; ENSG00000164485; HLA -A*24:02,HLA-A*31:01
IYQPMLDRR

SEQ ID NO: 3738 - protein, 10 aa, Homo sapiens
  Table 1.2; IL22RA2; ENSG00000164485; HLA -B*40:01
KEDCWGTQEL

SEQ ID NO: 3739 - protein, 10 aa, Homo sapiens
  Table 1.2; IL22RA2; ENSG00000164485; HLA -A*30:02,HLA-B*44:02,HLA-B*44:03
KEKNVSIEDY

SEQ ID NO: 3740 - protein, 11 aa, Homo sapiens
  Table 1.2; IL22RA2; ENSG00000164485; HLA -A*30:02,HLA-B*44:02,HLA-B*44:03
KEKNVSIEDYY

SEQ ID NO: 3741 - protein, 9 aa, Homo sapiens
  Table 1.2; IL22RA2; ENSG00000164485; HLA -B*40:02
KEQKVYEGA

SEQ ID NO: 3742 - protein, 9 aa, Homo sapiens
  Table 1.2; IL22RA2; ENSG00000164485; HLA -A*01:01,HLA-A*02:01,HLA-A*02:03,HLA-A*02:04,HLA-A*02:07, HLA-A*03:01,HLA-A*03:02,HLA-A*30:01,HLA-A*31:01,HLA-A*32:01, HLA-B*13:02,HLA-B*38:01,HLA-B*49:01,HLA-B*58:01,HLA-C*05:01
KIDPPVMNI

SEQ ID NO: 3743 - protein, 9 aa, Homo sapiens
  Table 1.2; IL22RA2; ENSG00000164485; HLA -A*29:02,HLA-A*30:02
KNVSIEDYY

SEQ ID NO: 3744 - protein, 8 aa, Homo sapiens
  Table 1.2; IL22RA2; ENSG00000164485; HLA -A*31:01
KVYEGAHR

SEQ ID NO: 3745 - protein, 9 aa, Homo sapiens
  Table 1.2; IL22RA2; ENSG00000164485; HLA -B*55:01
KVYEGAHRA

SEQ ID NO: 3746 - protein, 10 aa, Homo sapiens
  Table 1.2; IL22RA2; ENSG00000164485; HLA -A*02:03,HLA-A*03:01
KVYEGAHRAV

SEQ ID NO: 3747 - protein, 9 aa, Homo sapiens
  Table 1.2; IL22RA2; ENSG00000164485; HLA -B*57:01
LAKYGQRQW

SEQ ID NO: 3748 - protein, 8 aa, Homo sapiens
  Table 1.2; IL22RA2; ENSG00000164485; HLA -B*18:01
LEKEQKVY

SEQ ID NO: 3749 - protein, 10 aa, Homo sapiens
  Table 1.2; IL22RA2; ENSG00000164485; HLA -A*29:02,HLA-B*57:01
LHAPNLPYRY

SEQ ID NO: 3750 - protein, 9 aa, Homo sapiens
  Table 1.2; IL22RA2; ENSG00000164485; HLA -A*02:01,HLA-A*02:03,HLA-A*02:04,HLA-A*02:07,HLA-A*68:02
LISFFLTGV

SEQ ID NO: 3751 - protein, 9 aa, Homo sapiens
  Table 1.2; IL22RA2; ENSG00000164485; HLA -B*15:03
LQWQPGRAL

SEQ ID NO: 3752 - protein, 8 aa, Homo sapiens
  Table 1.2; IL22RA2; ENSG00000164485; HLA -A*01:01,HLA-B*39:01,HLA-C*12:03
LTGNSSVY

SEQ ID NO: 3753 - protein, 9 aa, Homo sapiens
  Table 1.2; IL22RA2; ENSG00000164485; HLA -A*02:04
LVILHAPNL

SEQ ID NO: 3754 - protein, 9 aa, Homo sapiens
  Table 1.2; IL22RA2; ENSG00000164485; HLA -A*01:01,HLA-A*29:02,HLA-A*30:02,HLA-B*35:01,HLA-C*16:01
NSSVYFVQY

SEQ ID NO: 3755 - protein, 9 aa, Homo sapiens
  Table 1.2; IL22RA2; ENSG00000164485; HLA -A*31:01
PQRVQFQSR

SEQ ID NO: 3756 - protein, 11 aa, Homo sapiens
  Table 1.2; IL22RA2; ENSG00000164485; HLA -B*57:01
QSRNFHNILQW

SEQ ID NO: 3757 - protein, 9 aa, Homo sapiens
  Table 1.2; IL22RA2; ENSG00000164485; HLA -A*25:01,HLA-B*13:02
QVNGSLLVI

SEQ ID NO: 3758 - protein, 8 aa, Homo sapiens
  Table 1.2; IL22RA2; ENSG00000164485; HLA -A*30:02,HLA-B*46:01,HLA-B*58:01
RAASAGSY

SEQ ID NO: 3759 - protein, 11 aa, Homo sapiens
  Table 1.2; IL22RA2; ENSG00000164485; HLA -A*25:01,HLA-A*30:02,HLA-A*32:01,HLA-B*44:02,HLA-B*44:03, HLA-B*57:01,HLA-B*58:01,HLA-C*16:04
RAASAGSYSEW

SEQ ID NO: 3760 - protein, 10 aa, Homo sapiens
  Table 1.2; IL22RA2; ENSG00000164485; HLA -A*23:01,HLA-A*30:02,HLA-B*15:01,HLA-B*15:03,HLA-B*46:01, HLA-B*58:01
RALTGNSSVY

SEQ ID NO: 3761 - protein, 11 aa, Homo sapiens
  Table 1.2; IL22RA2; ENSG00000164485; HLA -B*57:01,HLA-B*58:01
RALTGNSSVYF

SEQ ID NO: 3762 - protein, 9 aa, Homo sapiens
  Table 1.2; IL22RA2; ENSG00000164485; HLA -B*57:01
RNFHNILQW

SEQ ID NO: 3763 - protein, 9 aa, Homo sapiens
  Table 1.2; IL22RA2; ENSG00000164485; HLA -A*03:01,HLA-A*31:01
RTLAKYGQR

SEQ ID NO: 3764 - protein, 11 aa, Homo sapiens
  Table 1.2; IL22RA2; ENSG00000164485; HLA -B*57:01
RTLAKYGQRQW

SEQ ID NO: 3765 - protein, 9 aa, Homo sapiens
  Table 1.2; IL22RA2; ENSG00000164485; HLA -A*02:04,HLA-A*32:01,HLA-A*68:02,HLA-B*07:02,HLA-B*27:05, HLA-B*58:01
RVFIINNSL

SEQ ID NO: 3766 - protein, 11 aa, Homo sapiens
  Table 1.2; IL22RA2; ENSG00000164485; HLA -A*03:01
RVFIINNSLEK

SEQ ID NO: 3767 - protein, 9 aa, Homo sapiens
  Table 1.2; IL22RA2; ENSG00000164485; HLA -A*32:01
RVQFQSRNF

SEQ ID NO: 3768 - protein, 10 aa, Homo sapiens
  Table 1.2; IL22RA2; ENSG00000164485; HLA -A*30:02,HLA-A*32:01,HLA-B*15:01,HLA-B*15:03,HLA-B*46:01
RVRAASAGSY

SEQ ID NO: 3769 - protein, 8 aa, Homo sapiens
  Table 1.2; IL22RA2; ENSG00000164485; HLA -A*25:01,HLA-A*32:01,HLA-B*58:01
SAGSYSEW

SEQ ID NO: 3770 - protein, 8 aa, Homo sapiens
  Table 1.2; IL22RA2; ENSG00000164485; HLA -B*18:01
SDIQEPYY

SEQ ID NO: 3771 - protein, 10 aa, Homo sapiens
  Table 1.2; IL22RA2; ENSG00000164485; HLA -A*33:01
SDIQEPYYGR

SEQ ID NO: 3772 - protein, 10 aa, Homo sapiens
  Table 1.2; IL22RA2; ENSG00000164485; HLA -A*30:02,HLA-B*18:01,HLA-B*27:02,HLA-B*44:02,HLA-B*44:03
SETSDIQEPY

SEQ ID NO: 3773 - protein, 11 aa, Homo sapiens
  Table 1.2; IL22RA2; ENSG00000164485; HLA -A*30:02,HLA-B*44:02,HLA-B*44:03
SETSDIQEPYY

SEQ ID NO: 3774 - protein, 9 aa, Homo sapiens
  Table 1.2; IL22RA2; ENSG00000164485; HLA -B*18:01,HLA-B*44:02,HLA-B*44:03
SEWSMTPRF

SEQ ID NO: 3775 - protein, 9 aa, Homo sapiens
  Table 1.2; IL22RA2; ENSG00000164485; HLA -A*02:07
SIEDYYELL

SEQ ID NO: 3776 - protein, 10 aa, Homo sapiens
  Table 1.2; IL22RA2; ENSG00000164485; HLA -A*01:01,HLA-A*29:02
SIEDYYELLY

SEQ ID NO: 3777 - protein, 9 aa, Homo sapiens
  Table 1.2; IL22RA2; ENSG00000164485; HLA -A*01:01,HLA-A*30:02,HLA-B*15:01,HLA-B*15:03,HLA-C*07:04
SLEKEQKVY

SEQ ID NO: 3778 - protein, 9 aa, Homo sapiens
  Table 1.2; IL22RA2; ENSG00000164485; HLA -A*32:01,HLA-B*08:01,HLA-B*15:01,HLA-B*37:01,HLA-B*46:01
SLKPQRVQF

SEQ ID NO: 3779 - protein, 11 aa, Homo sapiens
  Table 1.2; IL22RA2; ENSG00000164485; HLA -A*02:04
SLLVILHAPNL

SEQ ID NO: 3780 - protein, 9 aa, Homo sapiens
  Table 1.2; IL22RA2; ENSG00000164485; HLA -A*24:02
SMTPRFTPW

SEQ ID NO: 3781 - protein, 8 aa, Homo sapiens
  Table 1.2; IL22RA2; ENSG00000164485; HLA -B*15:01
SSVYFVQY

SEQ ID NO: 3782 - protein, 9 aa, Homo sapiens
  Table 1.2; IL22RA2; ENSG00000164485; HLA -A*03:02,HLA-A*11:01
SSVYFVQYK

SEQ ID NO: 3783 - protein, 9 aa, Homo sapiens
  Table 1.2; IL22RA2; ENSG00000164485; HLA -B*13:02
SSYCVVAEI

SEQ ID NO: 3784 - protein, 9 aa, Homo sapiens
  Table 1.2; IL22RA2; ENSG00000164485; HLA -A*02:07,HLA-A*68:02,HLA-B*13:02
SVYFVQYKI

SEQ ID NO: 3785 - protein, 9 aa, Homo sapiens
  Table 1.2; IL22RA2; ENSG00000164485; HLA -A*29:02
SYCVVAEIY

SEQ ID NO: 3786 - protein, 10 aa, Homo sapiens
  Table 1.2; IL22RA2; ENSG00000164485; HLA -A*31:01,HLA-A*33:03
SYSEWSMTPR

SEQ ID NO: 3787 - protein, 11 aa, Homo sapiens
  Table 1.2; IL22RA2; ENSG00000164485; HLA -A*24:02
SYSEWSMTPRF

SEQ ID NO: 3788 - protein, 9 aa, Homo sapiens
  Table 1.2; IL22RA2; ENSG00000164485; HLA -B*13:02
TGNSSVYFV

SEQ ID NO: 3789 - protein, 11 aa, Homo sapiens
  Table 1.2; IL22RA2; ENSG00000164485; HLA -A*30:02
TGNSSVYFVQY

SEQ ID NO: 3790 - protein, 10 aa, Homo sapiens
  Table 1.2; IL22RA2; ENSG00000164485; HLA -B*38:01
THESLKPQRV

SEQ ID NO: 3791 - protein, 8 aa, Homo sapiens
  Table 1.2; IL22RA2; ENSG00000164485; HLA -B*15:03
TKIDPPVM

SEQ ID NO: 3792 - protein, 9 aa, Homo sapiens
  Table 1.2; IL22RA2; ENSG00000164485; HLA -B*51:01,HLA-B*54:01,HLA-B*56:01
TPHSSYCVV

SEQ ID NO: 3793 - protein, 10 aa, Homo sapiens
  Table 1.2; IL22RA2; ENSG00000164485; HLA -B*54:01,HLA-B*56:01
TPHSSYCVVA

SEQ ID NO: 3794 - protein, 8 aa, Homo sapiens
  Table 1.2; IL22RA2; ENSG00000164485; HLA -B*37:01,HLA-B*38:01,HLA-B*39:01
TQSTHESL

SEQ ID NO: 3795 - protein, 8 aa, Homo sapiens
  Table 1.2; IL22RA2; ENSG00000164485; HLA -B*39:01
TQVNGSLL

SEQ ID NO: 3796 - protein, 9 aa, Homo sapiens
  Table 1.2; IL22RA2; ENSG00000164485; HLA -B*13:02,HLA-B*38:01,HLA-B*39:01,HLA-B*49:01
TQVNGSLLV

SEQ ID NO: 3797 - protein, 10 aa, Homo sapiens
  Table 1.2; IL22RA2; ENSG00000164485; HLA -B*13:02,HLA-B*39:01
TQVNGSLLVI

SEQ ID NO: 3798 - protein, 8 aa, Homo sapiens
  Table 1.2; IL22RA2; ENSG00000164485; HLA -A*01:01
TSDIQEPY

SEQ ID NO: 3799 - protein, 9 aa, Homo sapiens
  Table 1.2; IL22RA2; ENSG00000164485; HLA -A*01:01,HLA-A*30:02
TSDIQEPYY

SEQ ID NO: 3800 - protein, 11 aa, Homo sapiens
  Table 1.2; IL22RA2; ENSG00000164485; HLA -A*31:01,HLA-A*33:01,HLA-A*68:01
TSDIQEPYYGR

SEQ ID NO: 3801 - protein, 11 aa, Homo sapiens
  Table 1.2; IL22RA2; ENSG00000164485; HLA -A*01:01
TSETSDIQEPY

SEQ ID NO: 3802 - protein, 9 aa, Homo sapiens
  Table 1.2; IL22RA2; ENSG00000164485; HLA -B*35:03
VAEIYQPML

SEQ ID NO: 3803 - protein, 8 aa, Homo sapiens
  Table 1.2; IL22RA2; ENSG00000164485; HLA -B*18:01,HLA-B*49:01
VEIEALTP

SEQ ID NO: 3804 - protein, 9 aa, Homo sapiens
  Table 1.2; IL22RA2; ENSG00000164485; HLA -B*18:01,HLA-B*40:02,HLA-B*46:01,HLA-B*49:01
VEIEALTPH

SEQ ID NO: 3805 - protein, 8 aa, Homo sapiens
  Table 1.2; IL22RA2; ENSG00000164485; HLA -A*23:01,HLA-B*08:01,HLA-C*01:02,HLA-C*14:02
VFIINNSL

SEQ ID NO: 3806 - protein, 10 aa, Homo sapiens
  Table 1.2; IL22RA2; ENSG00000164485; HLA -A*03:01,HLA-A*29:02
VILHAPNLPY

SEQ ID NO: 3807 - protein, 8 aa, Homo sapiens
  Table 1.2; IL22RA2; ENSG00000164485; HLA -B*15:01,HLA-B*15:03
VQFQSRNF

SEQ ID NO: 3808 - protein, 9 aa, Homo sapiens
  Table 1.2; IL22RA2; ENSG00000164485; HLA -A*30:02,HLA-A*32:01,HLA-B*15:03,HLA-B*27:02,HLA-B*27:05, HLA-B*39:01,HLA-C*16:04
VRAASAGSY

SEQ ID NO: 3809 - protein, 9 aa, Homo sapiens
  Table 1.2; IL22RA2; ENSG00000164485; HLA -A*02:07,HLA-A*23:01,HLA-B*27:05,HLA-B*35:03,HLA-B*46:01, HLA-B*58:01,HLA-C*03:03,HLA-C*03:04
VSIEDYYEL

SEQ ID NO: 3810 - protein, 11 aa, Homo sapiens
  Table 1.2; IL22RA2; ENSG00000164485; HLA -A*01:01
VSIEDYYELLY

SEQ ID NO: 3811 - protein, 9 aa, Homo sapiens
  Table 1.2; IL22RA2; ENSG00000164485; HLA -A*01:01,HLA-A*02:01,HLA-A*02:07,HLA-A*03:01,HLA-A*03:02, HLA-A*11:01,HLA-A*25:01,HLA-A*26:01,HLA-A*29:02,HLA-A*31:01, HLA-A*32:01,HLA-A*33:03,HLA-A*68:01,HLA-A*68:02,HLA-B*27:05,
  HLA-B*35:01,HLA-B*35:03,HLA-B*46:01,HLA-C*01:02,HLA-C*02:02, HLA-C*03:04,HLA-C*07:04,HLA-C*07:06,HLA-C*12:03,HLA-C*16:04
VVAEIYQPM

SEQ ID NO: 3812 - protein, 10 aa, Homo sapiens
  Table 1.2; IL22RA2; ENSG00000164485; HLA -A*02:01,HLA-A*02:04,HLA-A*02:07,HLA-A*23:01,HLA-A*68:02
VVAEIYQPML

SEQ ID NO: 3813 - protein, 9 aa, Homo sapiens
  Table 1.2; IL22RA2; ENSG00000164485; HLA -A*32:01,HLA-C*06:02
VYEGAHRAV

SEQ ID NO: 3814 - protein, 11 aa, Homo sapiens
  Table 1.2; IL22RA2; ENSG00000164485; HLA -A*24:02
VYEGAHRAVEI

SEQ ID NO: 3815 - protein, 8 aa, Homo sapiens
  Table 1.2; IL22RA2; ENSG00000164485; HLA -A*23:01,HLA-A*24:02
VYFVQYKI

SEQ ID NO: 3816 - protein, 10 aa, Homo sapiens
  Table 1.2; IL22RA2; ENSG00000164485; HLA -A*24:02
VYFVQYKIMF

SEQ ID NO: 3817 - protein, 9 aa, Homo sapiens
  Table 1.2; IL22RA2; ENSG00000164485; HLA -B*49:01
WETKIDPPV

SEQ ID NO: 3818 - protein, 8 aa, Homo sapiens
  Table 1.2; IL22RA2; ENSG00000164485; HLA -B*46:01
YCVVAEIY

SEQ ID NO: 3819 - protein, 8 aa, Homo sapiens
  Table 1.2; IL22RA2; ENSG00000164485; HLA -B*37:01,HLA-B*49:01
YEGAHRAV

SEQ ID NO: 3820 - protein, 9 aa, Homo sapiens
  Table 1.2; IL22RA2; ENSG00000164485; HLA -A*24:02
YFVQYKIMF

SEQ ID NO: 3821 - protein, 9 aa, Homo sapiens
  Table 1.2; IL22RA2; ENSG00000164485; HLA -B*08:01,HLA-B*54:01
YGRVRAASA

SEQ ID NO: 3822 - protein, 9 aa, Homo sapiens
  Table 1.2; IL22RA2; ENSG00000164485; HLA -A*02:03,HLA-A*30:01,HLA-A*32:01,HLA-B*08:01,HLA-B*13:02, HLA-B*38:01,HLA-B*40:02
YQKEKNVSI

SEQ ID NO: 3823 - protein, 9 aa, Homo sapiens
  Table 1.2; IL22RA2; ENSG00000164485; HLA -A*24:02,HLA-A*29:02
YYELLYRVF

SEQ ID NO: 3824 - protein, 9 aa, Homo sapiens
  Table 1.2; INSL4; ENSG00000120211; HLA -A*02:04
AIWLLLSQL

SEQ ID NO: 3825 - protein, 8 aa, Homo sapiens
  Table 1.2; INSL4; ENSG00000120211; HLA -A*32:01,HLA-B*46:01
ALGTTSEF

SEQ ID NO: 3826 - protein, 9 aa, Homo sapiens
  Table 1.2; INSL4; ENSG00000120211; HLA -B*13:02
ALGTTSEFI

SEQ ID NO: 3827 - protein, 9 aa, Homo sapiens
  Table 1.2; INSL4; ENSG00000120211; HLA -B*38:01,HLA-B*40:01
CDDGTSVKL

SEQ ID NO: 3828 - protein, 11 aa, Homo sapiens
  Table 1.2; INSL4; ENSG00000120211; HLA -B*56:01
CPMPEKTFTTT

SEQ ID NO: 3829 - protein, 8 aa, Homo sapiens
  Table 1.2; INSL4; ENSG00000120211; HLA -B*18:01
DDGTSVKL

SEQ ID NO: 3830 - protein, 8 aa, Homo sapiens
  Table 1.2; INSL4; ENSG00000120211; HLA -B*51:01
DPFCCEVI

SEQ ID NO: 3831 - protein, 10 aa, Homo sapiens
  Table 1.2; INSL4; ENSG00000120211; HLA -A*23:01,HLA-A*24:02
EFIPNLSPEL

SEQ ID NO: 3832 - protein, 9 aa, Homo sapiens
  Table 1.2; INSL4; ENSG00000120211; HLA -A*33:03
EMVSTSNNK

SEQ ID NO: 3833 - protein, 8 aa, Homo sapiens
  Table 1.2; INSL4; ENSG00000120211; HLA -A*33:03
ESLAAELR

SEQ ID NO: 3834 - protein, 10 aa, Homo sapiens
  Table 1.2; INSL4; ENSG00000120211; HLA -A*25:01,HLA-A*26:01,HLA-A*68:02
EVICDDGTSV

SEQ ID NO: 3835 - protein, 11 aa, Homo sapiens
  Table 1.2; INSL4; ENSG00000120211; HLA -A*26:01,HLA-A*68:01
EVICDDGTSVK

SEQ ID NO: 3836 - protein, 9 aa, Homo sapiens
  Table 1.2; INSL4; ENSG00000120211; HLA -A*02:01,HLA-A*02:04,HLA-A*02:07,HLA-A*23:01,HLA-A*24:02, HLA-A*26:01,HLA-A*68:02,HLA-B*35:03,HLA-B*58:01,HLA-C*01:02
FIPNLSPEL

SEQ ID NO: 3837 - protein, 8 aa, Homo sapiens
  Table 1.2; INSL4; ENSG00000120211; HLA -A*32:01
FTTTPGGW

SEQ ID NO: 3838 - protein, 10 aa, Homo sapiens
  Table 1.2; INSL4; ENSG00000120211; HLA -A*01:01,HLA-A*68:02
FTTTPGGWLL

SEQ ID NO: 3839 - protein, 10 aa, Homo sapiens
  Table 1.2; INSL4; ENSG00000120211; HLA -A*30:02,HLA-B*15:01,HLA-B*15:03
GQALGTTSEF

SEQ ID NO: 3840 - protein, 11 aa, Homo sapiens
  Table 1.2; INSL4; ENSG00000120211; HLA -B*13:02
GQALGTTSEFI

SEQ ID NO: 3841 - protein, 10 aa, Homo sapiens
  Table 1.2; INSL4; ENSG00000120211; HLA -A*02:04,HLA-A*11:01,HLA-A*68:02
GTTSEFIPNL

SEQ ID NO: 3842 - protein, 8 aa, Homo sapiens
  Table 1.2; INSL4; ENSG00000120211; HLA -C*05:01
ICDDGTSV

SEQ ID NO: 3843 - protein, 10 aa, Homo sapiens
  Table 1.2; INSL4; ENSG00000120211; HLA -A*02:01,HLA-A*02:07,HLA-B*35:01,HLA-B*35:03,HLA-B*38:01, HLA-B*40:01,HLA-C*05:01
ICDDGTSVKL

SEQ ID NO: 3844 - protein, 8 aa, Homo sapiens
  Table 1.2; INSL4; ENSG00000120211; HLA -B*07:02,HLA-B*08:01,HLA-B*35:01,HLA-B*35:03,HLA-B*51:01, HLA-B*54:01,HLA-B*55:01,HLA-B*56:01,HLA-C*03:03,HLA-C*03:04, HLA-C*07:02,HLA-C*16:01
IPNLSPEL

SEQ ID NO: 3845 - protein, 9 aa, Homo sapiens
  Table 1.2; INSL4; ENSG00000120211; HLA -A*24:02
IWLLLSQLL

SEQ ID NO: 3846 - protein, 11 aa, Homo sapiens
  Table 1.2; INSL4; ENSG00000120211; HLA -B*15:03
KKPLSEGQPSL

SEQ ID NO: 3847 - protein, 10 aa, Homo sapiens
  Table 1.2; INSL4; ENSG00000120211; HLA -B*07:02,HLA-B*35:01,HLA-B*35:03,HLA-B*40:01,HLA-B*55:01, HLA-B*56:01,HLA-C*07:02
KPLSEGQPSL

SEQ ID NO: 3848 - protein, 11 aa, Homo sapiens
  Table 1.2; INSL4; ENSG00000120211; HLA -A*03:02,HLA-B*27:02
KPLSEGQPSLK

SEQ ID NO: 3849 - protein, 10 aa, Homo sapiens
  Table 1.2; INSL4; ENSG00000120211; HLA -A*25:01,HLA-A*32:01,HLA-B*57:01,HLA-B*58:01
KTFTTTPGGW

SEQ ID NO: 3850 - protein, 9 aa, Homo sapiens
  Table 1.2; INSL4; ENSG00000120211; HLA -B*37:01
LESGRPKEM

SEQ ID NO: 3851 - protein, 10 aa, Homo sapiens
  Table 1.2; INSL4; ENSG00000120211; HLA -A*02:03,HLA-A*02:04
LLRESLAAEL

SEQ ID NO: 3852 - protein, 10 aa, Homo sapiens
  Table 1.2; INSL4; ENSG00000120211; HLA -A*02:04
LLSQLLRESL

SEQ ID NO: 3853 - protein, 9 aa, Homo sapiens
  Table 1.2; INSL4; ENSG00000120211; HLA -B*27:05,HLA-B*38:01,HLA-B*39:01,HLA-C*06:02
LRESLAAEL

SEQ ID NO: 3854 - protein, 9 aa, Homo sapiens
  Table 1.2; INSL4; ENSG00000120211; HLA -A*01:01,HLA-A*03:02
LSEGQPSLK

SEQ ID NO: 3855 - protein, 9 aa, Homo sapiens
  Table 1.2; INSL4; ENSG00000120211; HLA -A*03:01,HLA-A*11:01
LSYCPMPEK

SEQ ID NO: 3856 - protein, 9 aa, Homo sapiens
  Table 1.2; INSL4; ENSG00000120211; HLA -B*35:01,HLA-B*35:03,HLA-B*54:01,HLA-B*55:01,HLA-B*56:01
MPEKTFTTT

SEQ ID NO: 3857 - protein, 8 aa, Homo sapiens
  Table 1.2; INSL4; ENSG00000120211; HLA -B*08:01
NNKDGQAL

SEQ ID NO: 3858 - protein, 9 aa, Homo sapiens
  Table 1.2; INSL4; ENSG00000120211; HLA -A*02:01,HLA-A*02:04
PLSEGQPSL

SEQ ID NO: 3859 - protein, 9 aa, Homo sapiens
  Table 1.2; INSL4; ENSG00000120211; HLA -A*23:01,HLA-A*24:02,HLA-A*25:01,HLA-A*26:01,HLA-A*32:01, HLA-B*15:01,HLA-B*15:03,HLA-B*35:01,HLA-B*35:03,HLA-B*39:01, HLA-B*46:01,HLA-B*55:01,HLA-B*58:01,HLA-C*02:02,HLA-C*03:03,
  HLA-C*03:04,HLA-C*05:01,HLA-C*14:02,HLA-C*16:04
QALGTTSEF

SEQ ID NO: 3860 - protein, 11 aa, Homo sapiens
  Table 1.2; INSL4; ENSG00000120211; HLA -A*02:01,HLA-A*02:04
QLLRESLAAEL

SEQ ID NO: 3861 - protein, 9 aa, Homo sapiens
  Table 1.2; INSL4; ENSG00000120211; HLA -B*07:02,HLA-B*08:01,HLA-C*07:02
QPSLKKIIL

SEQ ID NO: 3862 - protein, 8 aa, Homo sapiens
  Table 1.2; INSL4; ENSG00000120211; HLA -A*30:01,HLA-B*18:01,HLA-B*37:01,HLA-B*40:01
RESLAAEL

SEQ ID NO: 3863 - protein, 9 aa, Homo sapiens
  Table 1.2; INSL4; ENSG00000120211; HLA -A*29:02
RFGKHLLSY

SEQ ID NO: 3864 - protein, 8 aa, Homo sapiens
  Table 1.2; INSL4; ENSG00000120211; HLA -B*57:01
RSYLPAIW

SEQ ID NO: 3865 - protein, 9 aa, Homo sapiens
  Table 1.2; INSL4; ENSG00000120211; HLA -B*40:02
SEFIPNLSP

SEQ ID NO: 3866 - protein, 11 aa, Homo sapiens
  Table 1.2; INSL4; ENSG00000120211; HLA -A*30:01,HLA-B*40:01
SEFIPNLSPEL

SEQ ID NO: 3867 - protein, 9 aa, Homo sapiens
  Table 1.2; INSL4; ENSG00000120211; HLA -B*44:03
SEGQPSLKK

SEQ ID NO: 3868 - protein, 10 aa, Homo sapiens
  Table 1.2; INSL4; ENSG00000120211; HLA -B*44:02,HLA-B*44:03,HLA-B*49:01
SEGQPSLKKI

SEQ ID NO: 3869 - protein, 9 aa, Homo sapiens
  Table 1.2; INSL4; ENSG00000120211; HLA -A*02:03
SLAAELRGC

SEQ ID NO: 3870 - protein, 10 aa, Homo sapiens
  Table 1.2; INSL4; ENSG00000120211; HLA -A*02:01,HLA-A*02:03,HLA-A*02:04
SLFRSYLPAI

SEQ ID NO: 3871 - protein, 9 aa, Homo sapiens
  Table 1.2; INSL4; ENSG00000120211; HLA -A*02:03,HLA-A*03:01,HLA-A*31:01,HLA-A*33:01,HLA-A*33:03
SLKKIILSR

SEQ ID NO: 3872 - protein, 8 aa, Homo sapiens
  Table 1.2; INSL4; ENSG00000120211; HLA -B*07:02,HLA-B*08:01
SPELKKPL

SEQ ID NO: 3873 - protein, 8 aa, Homo sapiens
  Table 1.2; INSL4; ENSG00000120211; HLA -B*08:01
SQLLRESL

SEQ ID NO: 3874 - protein, 10 aa, Homo sapiens
  Table 1.2; INSL4; ENSG00000120211; HLA -A*23:01,HLA-A*24:02
SYCPMPEKTF

SEQ ID NO: 3875 - protein, 9 aa, Homo sapiens
  Table 1.2; INSL4; ENSG00000120211; HLA -A*02:04,HLA-A*23:01,HLA-A*24:02,HLA-A*29:02
SYLPAIWLL

SEQ ID NO: 3876 - protein, 10 aa, Homo sapiens
  Table 1.2; INSL4; ENSG00000120211; HLA -A*23:01,HLA-A*24:02
SYLPAIWLLL

SEQ ID NO: 3877 - protein, 9 aa, Homo sapiens
  Table 1.2; INSL4; ENSG00000120211; HLA -A*02:01,HLA-A*02:03,HLA-A*02:04,HLA-A*02:07,HLA-A*03:02, HLA-A*11:01,HLA-A*23:01,HLA-A*25:01,HLA-A*26:01,HLA-A*31:01, HLA-A*68:01,HLA-A*68:02,HLA-B*13:02,HLA-B*35:03,HLA-B*38:01,
  HLA-B*39:01,HLA-C*16:02
TTSEFIPNL

SEQ ID NO: 3878 - protein, 9 aa, Homo sapiens
  Table 1.2; INSL4; ENSG00000120211; HLA -A*68:02
TTTPGGWLL

SEQ ID NO: 3879 - protein, 9 aa, Homo sapiens
  Table 1.2; INSL4; ENSG00000120211; HLA -A*02:01,HLA-A*02:03,HLA-C*05:01
VICDDGTSV

SEQ ID NO: 3880 - protein, 10 aa, Homo sapiens
  Table 1.2; INSL4; ENSG00000120211; HLA -A*03:02
VICDDGTSVK

SEQ ID NO: 3881 - protein, 8 aa, Homo sapiens
  Table 1.2; INSL4; ENSG00000120211; HLA -A*02:04,HLA-A*02:07
YLPAIWLL

SEQ ID NO: 3882 - protein, 9 aa, Homo sapiens
  Table 1.2; INSL4; ENSG00000120211; HLA -A*02:01,HLA-A*02:03,HLA-A*02:04,HLA-A*02:07,HLA-A*24:02, HLA-A*29:02
YLPAIWLLL

SEQ ID NO: 3883 - protein, 9 aa, Homo sapiens
  Table 1.2; INSL6; ENSG00000120210; HLA -A*11:01
ACLPYIDFK

SEQ ID NO: 3884 - protein, 10 aa, Homo sapiens
  Table 1.2; INSL6; ENSG00000120210; HLA -A*25:01,HLA-A*26:01,HLA-A*30:02,HLA-A*32:01,HLA-B*15:01, HLA-B*15:03,HLA-B*44:02,HLA-B*44:03,HLA-C*07:04
AQASEKVEAY

SEQ ID NO: 3885 - protein, 8 aa, Homo sapiens
  Table 1.2; INSL6; ENSG00000120210; HLA -A*01:01,HLA-A*30:02,HLA-B*58:01
ASEKVEAY

SEQ ID NO: 3886 - protein, 11 aa, Homo sapiens
  Table 1.2; INSL6; ENSG00000120210; HLA -A*01:01
ASEKVEAYSPY

SEQ ID NO: 3887 - protein, 8 aa, Homo sapiens
  Table 1.2; INSL6; ENSG00000120210; HLA -B*08:01
DISSARKL

SEQ ID NO: 3888 - protein, 8 aa, Homo sapiens
  Table 1.2; INSL6; ENSG00000120210; HLA -B*35:01,HLA-B*35:03
EAVNSWEM

SEQ ID NO: 3889 - protein, 8 aa, Homo sapiens
  Table 1.2; INSL6; ENSG00000120210; HLA -A*23:01,HLA-B*08:01
EAYSPYQF

SEQ ID NO: 3890 - protein, 9 aa, Homo sapiens
  Table 1.2; INSL6; ENSG00000120210; HLA -B*40:01,HLA-B*44:03
EEETPFSRL

SEQ ID NO: 3891 - protein, 10 aa, Homo sapiens
  Table 1.2; INSL6; ENSG00000120210; HLA -B*44:02,HLA-B*44:03,HLA-B*49:01
EEETPFSRLI

SEQ ID NO: 3892 - protein, 8 aa, Homo sapiens
  Table 1.2; INSL6; ENSG00000120210; HLA -B*18:01
EELSIACL

SEQ ID NO: 3893 - protein, 8 aa, Homo sapiens
  Table 1.2; INSL6; ENSG00000120210; HLA -B*18:01,HLA-B*44:03
EETPFSRL

SEQ ID NO: 3894 - protein, 9 aa, Homo sapiens
  Table 1.2; INSL6; ENSG00000120210; HLA -A*30:01,HLA-A*68:02,HLA-B*18:01,HLA-B*44:02,HLA-B*44:03, HLA-B*49:01
EETPFSRLI

SEQ ID NO: 3895 - protein, 9 aa, Homo sapiens
  Table 1.2; INSL6; ENSG00000120210; HLA -A*26:01,HLA-B*15:03
EKVEAYSPY

SEQ ID NO: 3896 - protein, 9 aa, Homo sapiens
  Table 1.2; INSL6; ENSG00000120210; HLA -A*26:01,HLA-A*33:01,HLA-A*33:03,HLA-A*68:01,HLA-C*07:06
ELSDISSAR

SEQ ID NO: 3897 - protein, 10 aa, Homo sapiens
  Table 1.2; INSL6; ENSG00000120210; HLA -A*33:03,HLA-A*68:01
ELSDISSARK

SEQ ID NO: 3898 - protein, 11 aa, Homo sapiens
  Table 1.2; INSL6; ENSG00000120210; HLA -A*68:02
ELSDISSARKL

SEQ ID NO: 3899 - protein, 8 aa, Homo sapiens
  Table 1.2; INSL6; ENSG00000120210; HLA -A*30:02
EMQSLPEY

SEQ ID NO: 3900 - protein, 9 aa, Homo sapiens
  Table 1.2; INSL6; ENSG00000120210; HLA -A*03:02,HLA-A*33:03
EMQSLPEYK

SEQ ID NO: 3901 - protein, 9 aa, Homo sapiens
  Table 1.2; INSL6; ENSG00000120210; HLA -A*33:03
ENAKFQKKR

SEQ ID NO: 3902 - protein, 10 aa, Homo sapiens
  Table 1.2; INSL6; ENSG00000120210; HLA -A*68:01
ESPQTASPAR

SEQ ID NO: 3903 - protein, 10 aa, Homo sapiens
  Table 1.2; INSL6; ENSG00000120210; HLA -B*40:01,HLA-B*49:01
FEEETPFSRL

SEQ ID NO: 3904 - protein, 11 aa, Homo sapiens
  Table 1.2; INSL6; ENSG00000120210; HLA -B*49:01
FEEETPFSRLI

SEQ ID NO: 3905 - protein, 9 aa, Homo sapiens
  Table 1.2; INSL6; ENSG00000120210; HLA -B*49:01
FESPQTASP

SEQ ID NO: 3906 - protein, 11 aa, Homo sapiens
  Table 1.2; INSL6; ENSG00000120210; HLA -B*27:02,HLA-B*27:05
FESPQTASPAR

SEQ ID NO: 3907 - protein, 9 aa, Homo sapiens
  Table 1.2; INSL6; ENSG00000120210; HLA -A*68:02,HLA-C*02:02
FSSSHNINV

SEQ ID NO: 3908 - protein, 10 aa, Homo sapiens
  Table 1.2; INSL6; ENSG00000120210; HLA -A*01:01,HLA-A*26:01,HLA-A*30:02
FSSSHNINVY

SEQ ID NO: 3909 - protein, 11 aa, Homo sapiens
  Table 1.2; INSL6; ENSG00000120210; HLA -B*27:02,HLA-C*16:04
GRGTNPVSTSW

SEQ ID NO: 3910 - protein, 10 aa, Homo sapiens
  Table 1.2; INSL6; ENSG00000120210; HLA -B*27:05
GRYLVKEIEK

SEQ ID NO: 3911 - protein, 9 aa, Homo sapiens
  Table 1.2; INSL6; ENSG00000120210; HLA -A*03:02,HLA-A*11:01,HLA-A*23:01,HLA-A*25:01,HLA-A*26:01, HLA-A*29:02,HLA-A*30:02,HLA-A*31:01,HLA-A*32:01,HLA-A*33:03, HLA-B*15:01,HLA-B*15:03,HLA-B*27:02,HLA-B*44:02,HLA-B*44:03,
  HLA-B*46:01,HLA-B*57:01,HLA-B*58:01,HLA-C*16:04
GTNPVSTSW

SEQ ID NO: 3912 - protein, 9 aa, Homo sapiens
  Table 1.2; INSL6; ENSG00000120210; HLA -A*33:03
GYSPLGKTR

SEQ ID NO: 3913 - protein, 11 aa, Homo sapiens
  Table 1.2; INSL6; ENSG00000120210; HLA -A*24:02
GYSPLGKTREF

SEQ ID NO: 3914 - protein, 10 aa, Homo sapiens
  Table 1.2; INSL6; ENSG00000120210; HLA -B*54:01
IAQASEKVEA

SEQ ID NO: 3915 - protein, 11 aa, Homo sapiens
  Table 1.2; INSL6; ENSG00000120210; HLA -A*26:01,HLA-A*30:02,HLA-B*15:01,HLA-B*35:01,HLA-B*46:01
IAQASEKVEAY

SEQ ID NO: 3916 - protein, 9 aa, Homo sapiens
  Table 1.2; INSL6; ENSG00000120210; HLA -B*40:01
KEELSIACL

SEQ ID NO: 3917 - protein, 8 aa, Homo sapiens
  Table 1.2; INSL6; ENSG00000120210; HLA -A*03:01,HLA-A*03:02
KGYSPLGK

SEQ ID NO: 3918 - protein, 10 aa, Homo sapiens
  Table 1.2; INSL6; ENSG00000120210; HLA -A*31:01,HLA-B*57:01
KGYSPLGKTR

SEQ ID NO: 3919 - protein, 10 aa, Homo sapiens
  Table 1.2; INSL6; ENSG00000120210; HLA -B*57:01
KIKTLSNLFW

SEQ ID NO: 3920 - protein, 8 aa, Homo sapiens
  Table 1.2; INSL6; ENSG00000120210; HLA -B*57:01
KTLSNLFW

SEQ ID NO: 3921 - protein, 9 aa, Homo sapiens
  Table 1.2; INSL6; ENSG00000120210; HLA -A*02:01,HLA-A*02:04,HLA-A*02:07
LLWLGLLLV

SEQ ID NO: 3922 - protein, 9 aa, Homo sapiens
  Table 1.2; INSL6; ENSG00000120210; HLA -B*51:01
LPYIDFKRL

SEQ ID NO: 3923 - protein, 9 aa, Homo sapiens
  Table 1.2; INSL6; ENSG00000120210; HLA -A*01:01
LSDISSARK

SEQ ID NO: 3924 - protein, 8 aa, Homo sapiens
  Table 1.2; INSL6; ENSG00000120210; HLA -B*08:01
LVKEIEKL

SEQ ID NO: 3925 - protein, 9 aa, Homo sapiens
  Table 1.2; INSL6; ENSG00000120210; HLA -B*07:02
MPRLLRLSL

SEQ ID NO: 3926 - protein, 9 aa, Homo sapiens
  Table 1.2; INSL6; ENSG00000120210; HLA -A*03:01,HLA-A*03:02,HLA-A*11:01
NVYIHENAK

SEQ ID NO: 3927 - protein, 10 aa, Homo sapiens
  Table 1.2; INSL6; ENSG00000120210; HLA -A*25:01
NVYIHENAKF

SEQ ID NO: 3928 - protein, 9 aa, Homo sapiens
  Table 1.2; INSL6; ENSG00000120210; HLA -A*01:01,HLA-A*25:01,HLA-A*26:01,HLA-A*29:02,HLA-A*30:02, HLA-A*32:01,HLA-A*68:01,HLA-B*15:01,HLA-B*15:03,HLA-B*18:01, HLA-B*35:01,HLA-B*39:01,HLA-B*44:02,HLA-B*44:03,HLA-B*46:01,
  HLA-B*55:01,HLA-B*58:01,HLA-C*02:02,HLA-C*03:03,HLA-C*07:04, HLA-C*07:06,HLA-C*12:03,HLA-C*14:02,HLA-C*16:01,HLA-C*16:02, HLA-C*16:04
QASEKVEAY

SEQ ID NO: 3929 - protein, 9 aa, Homo sapiens
  Table 1.2; INSL6; ENSG00000120210; HLA -A*31:01,HLA-A*33:03,HLA-A*68:01,HLA-C*07:06
QTASPARGR

SEQ ID NO: 3930 - protein, 9 aa, Homo sapiens
  Table 1.2; INSL6; ENSG00000120210; HLA -B*37:01,HLA-B*40:01,HLA-B*44:02,HLA-B*44:03,HLA-B*49:01
REFSSSHNI

SEQ ID NO: 3931 - protein, 9 aa, Homo sapiens
  Table 1.2; INSL6; ENSG00000120210; HLA -A*30:01,HLA-B*40:01,HLA-B*40:02,HLA-B*49:01
RELSDISSA

SEQ ID NO: 3932 - protein, 10 aa, Homo sapiens
  Table 1.2; INSL6; ENSG00000120210; HLA -B*40:01
RELSDISSAR

SEQ ID NO: 3933 - protein, 10 aa, Homo sapiens
  Table 1.2; INSL6; ENSG00000120210; HLA -A*23:01,HLA-A*25:01,HLA-A*32:01,HLA-B*57:01,HLA-B*58:01, HLA-C*16:04
RGTNPVSTSW

SEQ ID NO: 3934 - protein, 9 aa, Homo sapiens
  Table 1.2; INSL6; ENSG00000120210; HLA -A*03:01,HLA-A*03:02
RLIAQASEK

SEQ ID NO: 3935 - protein, 10 aa, Homo sapiens
  Table 1.2; INSL6; ENSG00000120210; HLA -A*02:03
RLIAQASEKV

SEQ ID NO: 3936 - protein, 9 aa, Homo sapiens
  Table 1.2; INSL6; ENSG00000120210; HLA -B*08:01
RLKEKRSSL

SEQ ID NO: 3937 - protein, 9 aa, Homo sapiens
  Table 1.2; INSL6; ENSG00000120210; HLA -B*57:01
RLLRLSLLW

SEQ ID NO: 3938 - protein, 9 aa, Homo sapiens
  Table 1.2; INSL6; ENSG00000120210; HLA -A*01:01,HLA-A*03:01,HLA-A*29:02,HLA-A*30:02,HLA-A*32:01, HLA-B*07:02,HLA-B*15:01,HLA-B*15:03,HLA-B*44:02,HLA-B*44:03, HLA-B*57:01,HLA-B*58:01,HLA-C*06:02,HLA-C*07:01,HLA-C*12:03,
  HLA-C*16:01,HLA-C*16:02,HLA-C*16:04
RSSLVTKIY

SEQ ID NO: 3939 - protein, 10 aa, Homo sapiens
  Table 1.2; INSL6; ENSG00000120210; HLA -A*24:02
RYLVKEIEKL

SEQ ID NO: 3940 - protein, 9 aa, Homo sapiens
  Table 1.2; INSL6; ENSG00000120210; HLA -A*30:01,HLA-B*37:01,HLA-B*44:02,HLA-B*44:03
SDISSARKL

SEQ ID NO: 3941 - protein, 9 aa, Homo sapiens
  Table 1.2; INSL6; ENSG00000120210; HLA -B*40:02
SEKVEAYSP

SEQ ID NO: 3942 - protein, 10 aa, Homo sapiens
  Table 1.2; INSL6; ENSG00000120210; HLA -A*30:02,HLA-B*44:02,HLA-B*44:03
SEKVEAYSPY

SEQ ID NO: 3943 - protein, 8 aa, Homo sapiens
  Table 1.2; INSL6; ENSG00000120210; HLA -B*38:01
SHNINVYI

SEQ ID NO: 3944 - protein, 9 aa, Homo sapiens
  Table 1.2; INSL6; ENSG00000120210; HLA -A*02:01,HLA-A*02:04
SLLWLGLLL

SEQ ID NO: 3945 - protein, 10 aa, Homo sapiens
  Table 1.2; INSL6; ENSG00000120210; HLA -A*02:01,HLA-A*02:04
SLLWLGLLLV

SEQ ID NO: 3946 - protein, 11 aa, Homo sapiens
  Table 1.2; INSL6; ENSG00000120210; HLA -B*07:02
SPARGRGTNPV

SEQ ID NO: 3947 - protein, 9 aa, Homo sapiens
  Table 1.2; INSL6; ENSG00000120210; HLA -B*07:02,HLA-B*08:01,HLA-B*35:01,HLA-C*07:02,HLA-C*16:01
SPLGKTREF

SEQ ID NO: 3948 - protein, 9 aa, Homo sapiens
  Table 1.2; INSL6; ENSG00000120210; HLA -C*07:06
SPQTASPAR

SEQ ID NO: 3949 - protein, 8 aa, Homo sapiens
  Table 1.2; INSL6; ENSG00000120210; HLA -B*56:01
SPYQFESP

SEQ ID NO: 3950 - protein, 10 aa, Homo sapiens
  Table 1.2; INSL6; ENSG00000120210; HLA -B*51:01,HLA-B*56:01
SPYQFESPQT

SEQ ID NO: 3951 - protein, 11 aa, Homo sapiens
  Table 1.2; INSL6; ENSG00000120210; HLA -B*54:01,HLA-B*55:01,HLA-B*56:01
SPYQFESPQTA

SEQ ID NO: 3952 - protein, 8 aa, Homo sapiens
  Table 1.2; INSL6; ENSG00000120210; HLA -A*30:02,HLA-B*46:01
SSHNINVY

SEQ ID NO: 3953 - protein, 9 aa, Homo sapiens
  Table 1.2; INSL6; ENSG00000120210; HLA -A*68:02,HLA-B*13:02
SSHNINVYI

SEQ ID NO: 3954 - protein, 8 aa, Homo sapiens
  Table 1.2; INSL6; ENSG00000120210; HLA -B*15:01,HLA-B*15:03,HLA-B*46:01,HLA-C*12:03,HLA-C*16:01
SSLVTKIY

SEQ ID NO: 3955 - protein, 9 aa, Homo sapiens
  Table 1.2; INSL6; ENSG00000120210; HLA -A*01:01,HLA-A*26:01,HLA-A*30:02,HLA-A*32:01,HLA-B*15:01, HLA-B*46:01,HLA-B*58:01,HLA-C*12:03,HLA-C*16:01,HLA-C*16:02
SSSHNINVY

SEQ ID NO: 3956 - protein, 10 aa, Homo sapiens
  Table 1.2; INSL6; ENSG00000120210; HLA -A*68:02
SSSHNINVYI

SEQ ID NO: 3957 - protein, 11 aa, Homo sapiens
  Table 1.2; INSL6; ENSG00000120210; HLA -A*25:01
STSWEEAVNSW

SEQ ID NO: 3958 - protein, 8 aa, Homo sapiens
  Table 1.2; INSL6; ENSG00000120210; HLA -B*54:01,HLA-B*56:01
TPFSRLIA

SEQ ID NO: 3959 - protein, 9 aa, Homo sapiens
  Table 1.2; INSL6; ENSG00000120210; HLA -B*54:01,HLA-B*56:01
TPFSRLIAQ

SEQ ID NO: 3960 - protein, 10 aa, Homo sapiens
  Table 1.2; INSL6; ENSG00000120210; HLA -B*54:01,HLA-B*56:01
TPFSRLIAQA

SEQ ID NO: 3961 - protein, 10 aa, Homo sapiens
  Table 1.2; INSL6; ENSG00000120210; HLA -A*25:01,HLA-B*57:01,HLA-B*58:01
TSWEEAVNSW

SEQ ID NO: 3962 - protein, 9 aa, Homo sapiens
  Table 1.2; INSL6; ENSG00000120210; HLA -A*23:01,HLA-A*24:02,HLA-A*30:01,HLA-B*18:01,HLA-B*27:02, HLA-B*37:01,HLA-B*44:02,HLA-B*44:03
VEAYSPYQF

SEQ ID NO: 3963 - protein, 9 aa, Homo sapiens
  Table 1.2; INSL6; ENSG00000120210; HLA -A*23:01,HLA-A*24:02,HLA-A*29:02,HLA-C*14:02
VYIHENAKF

SEQ ID NO: 3964 - protein, 9 aa, Homo sapiens
  Table 1.2; INSL6; ENSG00000120210; HLA -B*15:03,HLA-B*18:01,HLA-B*44:02,HLA-B*44:03
WEMQSLPEY

SEQ ID NO: 3965 - protein, 9 aa, Homo sapiens
  Table 1.2; INSL6; ENSG00000120210; HLA -A*02:01,HLA-A*02:03,HLA-A*02:04,HLA-A*02:07,HLA-A*68:02
YLVKEIEKL

SEQ ID NO: 3966 - protein, 8 aa, Homo sapiens
  Table 1.2; INSL6; ENSG00000120210; HLA -B*13:02
YQFESPQT

SEQ ID NO: 3967 - protein, 9 aa, Homo sapiens
  Table 1.2; INSL6; ENSG00000120210; HLA -A*02:01,HLA-A*02:03,HLA-A*30:01,HLA-A*32:01,HLA-B*13:02, HLA-B*15:01,HLA-B*15:03,HLA-B*27:05,HLA-B*39:01,HLA-C*02:02, HLA-C*12:03
YQFESPQTA

SEQ ID NO: 3968 - protein, 8 aa, Homo sapiens
  Table 1.2; KCNU1; ENSG00000215262; HLA -C*05:01
AADDKIKF

SEQ ID NO: 3969 - protein, 9 aa, Homo sapiens
  Table 1.2; KCNU1; ENSG00000215262; HLA -B*57:01
AADDKIKFW

SEQ ID NO: 3970 - protein, 8 aa, Homo sapiens
  Table 1.2; KCNU1; ENSG00000215262; HLA -B*46:01
AAFILSSF

SEQ ID NO: 3971 - protein, 9 aa, Homo sapiens
  Table 1.2; KCNU1; ENSG00000215262; HLA -B*46:01,HLA-B*58:01,HLA-C*03:04
AANIEQCSM

SEQ ID NO: 3972 - protein, 10 aa, Homo sapiens
  Table 1.2; KCNU1; ENSG00000215262; HLA -C*04:01
ADPVGSCSSY

SEQ ID NO: 3973 - protein, 8 aa, Homo sapiens
  Table 1.2; KCNU1; ENSG00000215262; HLA -B*37:01
ADSCTSLL

SEQ ID NO: 3974 - protein, 8 aa, Homo sapiens
  Table 1.2; KCNU1; ENSG00000215262; HLA -B*37:01,HLA-B*40:01,HLA-B*49:01
AEDISNIM

SEQ ID NO: 3975 - protein, 10 aa, Homo sapiens
  Table 1.2; KCNU1; ENSG00000215262; HLA -B*49:01
AEDISNIMRV

SEQ ID NO: 3976 - protein, 11 aa, Homo sapiens
  Table 1.2; KCNU1; ENSG00000215262; HLA -A*30:01,HLA-B*40:01,HLA-B*44:02,HLA-B*44:03,HLA-B*49:01
AEDISNIMRVL

SEQ ID NO: 3977 - protein, 10 aa, Homo sapiens
  Table 1.2; KCNU1; ENSG00000215262; HLA -B*44:02
AELKLGFIAQ

SEQ ID NO: 3978 - protein, 10 aa, Homo sapiens
  Table 1.2; KCNU1; ENSG00000215262; HLA -A*23:01,HLA-A*24:02
AFILSSFVTF

SEQ ID NO: 3979 - protein, 8 aa, Homo sapiens
  Table 1.2; KCNU1; ENSG00000215262; HLA -A*23:01,HLA-B*15:03,HLA-C*14:02
AFSTGTVF

SEQ ID NO: 3980 - protein, 10 aa, Homo sapiens
  Table 1.2; KCNU1; ENSG00000215262; HLA -A*11:01
AGMSFPEVAR

SEQ ID NO: 3981 - protein, 11 aa, Homo sapiens
  Table 1.2; KCNU1; ENSG00000215262; HLA -A*02:04
AGMSFPEVARL

SEQ ID NO: 3982 - protein, 8 aa, Homo sapiens
  Table 1.2; KCNU1; ENSG00000215262; HLA -B*38:01
AHSAPMGL

SEQ ID NO: 3983 - protein, 8 aa, Homo sapiens
  Table 1.2; KCNU1; ENSG00000215262; HLA -A*32:01,HLA-B*08:01
AIKTSNSV

SEQ ID NO: 3984 - protein, 9 aa, Homo sapiens
  Table 1.2; KCNU1; ENSG00000215262; HLA -A*03:01
AIKTSNSVK

SEQ ID NO: 3985 - protein, 10 aa, Homo sapiens
  Table 1.2; KCNU1; ENSG00000215262; HLA -B*46:01
AIKTSNSVKF

SEQ ID NO: 3986 - protein, 9 aa, Homo sapiens
  Table 1.2; KCNU1; ENSG00000215262; HLA -A*26:01,HLA-A*29:02,HLA-A*30:02,HLA-B*15:01,HLA-B*15:03, HLA-B*46:01,HLA-C*01:02,HLA-C*07:04
AIPFSTACY

SEQ ID NO: 3987 - protein, 10 aa, Homo sapiens
  Table 1.2; KCNU1; ENSG00000215262; HLA -A*03:01,HLA-A*03:02,HLA-A*11:01
AIPFSTACYK

SEQ ID NO: 3988 - protein, 9 aa, Homo sapiens
  Table 1.2; KCNU1; ENSG00000215262; HLA -B*15:03
AKTSLGRTF

SEQ ID NO: 3989 - protein, 10 aa, Homo sapiens
  Table 1.2; KCNU1; ENSG00000215262; HLA -A*02:04
ALRLLELPQI

SEQ ID NO: 3990 - protein, 9 aa, Homo sapiens
  Table 1.2; KCNU1; ENSG00000215262; HLA -A*02:01,HLA-A*02:03,HLA-B*13:02,HLA-B*55:01
ALYSGDLHA

SEQ ID NO: 3991 - protein, 10 aa, Homo sapiens
  Table 1.2; KCNU1; ENSG00000215262; HLA -A*02:01,HLA-A*02:03,HLA-A*02:04,HLA-A*02:07,HLA-A*03:01, HLA-B*13:02,HLA-B*46:01,HLA-B*55:01,HLA-B*56:01
ALYSGDLHAA

SEQ ID NO: 3992 - protein, 9 aa, Homo sapiens
  Table 1.2; KCNU1; ENSG00000215262; HLA -B*56:01
APMGLRNFV

SEQ ID NO: 3993 - protein, 10 aa, Homo sapiens
  Table 1.2; KCNU1; ENSG00000215262; HLA -B*07:02,HLA-B*08:01,HLA-C*07:02
APMGLRNFVM

SEQ ID NO: 3994 - protein, 8 aa, Homo sapiens
  Table 1.2; KCNU1; ENSG00000215262; HLA -B*13:02
AQTFVGQV

SEQ ID NO: 3995 - protein, 9 aa, Homo sapiens
  Table 1.2; KCNU1; ENSG00000215262; HLA -A*30:01,HLA-A*32:01,HLA-B*13:02,HLA-B*15:01,HLA-B*15:03, HLA-B*27:02,HLA-B*27:05,HLA-B*38:01,HLA-B*39:01,HLA-B*40:01, HLA-B*40:02,HLA-C*02:02,HLA-C*06:02,HLA-C*16:04
AQTFVGQVL

SEQ ID NO: 3996 - protein, 9 aa, Homo sapiens
  Table 1.2; KCNU1; ENSG00000215262; HLA -A*30:02,HLA-A*32:01,HLA-B*58:01
ASTSSISNF

SEQ ID NO: 3997 - protein, 9 aa, Homo sapiens
  Table 1.2; KCNU1; ENSG00000215262; HLA -A*68:02
ATAFYNYHV

SEQ ID NO: 3998 - protein, 8 aa, Homo sapiens
  Table 1.2; KCNU1; ENSG00000215262; HLA -A*32:01
ATTSTVGF

SEQ ID NO: 3999 - protein, 11 aa, Homo sapiens
  Table 1.2; KCNU1; ENSG00000215262; HLA -C*14:02
AYTTFISGSAM

SEQ ID NO: 4000 - protein, 10 aa, Homo sapiens
  Table 1.2; KCNU1; ENSG00000215262; HLA -A*26:01,HLA-A*30:02,HLA-B*15:01,HLA-B*15:03,HLA-B*46:01
CAIPFSTACY

SEQ ID NO: 4001 - protein, 8 aa, Homo sapiens
  Table 1.2; KCNU1; ENSG00000215262; HLA -B*51:01
CPPTIDSV

SEQ ID NO: 4002 - protein, 10 aa, Homo sapiens
  Table 1.2; KCNU1; ENSG00000215262; HLA -A*31:01
CTSLLSGRNR

SEQ ID NO: 4003 - protein, 9 aa, Homo sapiens
  Table 1.2; KCNU1; ENSG00000215262; HLA -A*23:01,HLA-A*26:01,HLA-A*30:02,HLA-A*32:01,HLA-B*15:03, HLA-B*57:01,HLA-B*58:01,HLA-C*02:02
CTTEIQAAF

SEQ ID NO: 4004 - protein, 9 aa, Homo sapiens
  Table 1.2; KCNU1; ENSG00000215262; HLA -B*56:01
CVFGDAHSA

SEQ ID NO: 4005 - protein, 8 aa, Homo sapiens
  Table 1.2; KCNU1; ENSG00000215262; HLA -A*23:01,HLA-A*24:02
CYLAYTTF

SEQ ID NO: 4006 - protein, 9 aa, Homo sapiens
  Table 1.2; KCNU1; ENSG00000215262; HLA -A*24:02
CYLAYTTFI

SEQ ID NO: 4007 - protein, 9 aa, Homo sapiens
  Table 1.2; KCNU1; ENSG00000215262; HLA -A*25:01,HLA-A*26:01,HLA-A*33:01,HLA-A*33:03,HLA-A*68:01, HLA-B*08:01,HLA-B*35:03,HLA-B*51:01
DAHSAPMGL

SEQ ID NO: 4008 - protein, 10 aa, Homo sapiens
  Table 1.2; KCNU1; ENSG00000215262; HLA -A*33:01,HLA-A*33:03,HLA-A*68:01
DAHSAPMGLR

SEQ ID NO: 4009 - protein, 8 aa, Homo sapiens
  Table 1.2; KCNU1; ENSG00000215262; HLA -B*18:01,HLA-B*37:01,HLA-B*40:02
DDFAGMSF

SEQ ID NO: 4010 - protein, 8 aa, Homo sapiens
  Table 1.2; KCNU1; ENSG00000215262; HLA -B*18:01
DDVFIPEL

SEQ ID NO: 4011 - protein, 9 aa, Homo sapiens
  Table 1.2; KCNU1; ENSG00000215262; HLA -A*68:02
DDVFIPELI

SEQ ID NO: 4012 - protein, 9 aa, Homo sapiens
  Table 1.2; KCNU1; ENSG00000215262; HLA -B*18:01
DEDPFAYSE

SEQ ID NO: 4013 - protein, 11 aa, Homo sapiens
  Table 1.2; KCNU1; ENSG00000215262; HLA -B*18:01
DEDPFAYSEPL

SEQ ID NO: 4014 - protein, 9 aa, Homo sapiens
  Table 1.2; KCNU1; ENSG00000215262; HLA -B*18:01
DEVYDEDPF

SEQ ID NO: 4015 - protein, 11 aa, Homo sapiens
  Table 1.2; KCNU1; ENSG00000215262; HLA -B*18:01
DEVYDEDPFAY

SEQ ID NO: 4016 - protein, 9 aa, Homo sapiens
  Table 1.2; KCNU1; ENSG00000215262; HLA -A*23:01,HLA-A*25:01,HLA-A*26:01,HLA-A*68:01,HLA-B*18:01
DIFTIPPTF

SEQ ID NO: 4017 - protein, 10 aa, Homo sapiens
  Table 1.2; KCNU1; ENSG00000215262; HLA -A*68:02
DIFTIPPTFI

SEQ ID NO: 4018 - protein, 9 aa, Homo sapiens
  Table 1.2; KCNU1; ENSG00000215262; HLA -A*25:01,HLA-A*68:02
DISNIMRVL

SEQ ID NO: 4019 - protein, 10 aa, Homo sapiens
  Table 1.2; KCNU1; ENSG00000215262; HLA -A*26:01
DIVFIGSLDY

SEQ ID NO: 4020 - protein, 11 aa, Homo sapiens
  Table 1.2; KCNU1; ENSG00000215262; HLA -A*68:02
DIVFIGSLDYL

SEQ ID NO: 4021 - protein, 8 aa, Homo sapiens
  Table 1.2; KCNU1; ENSG00000215262; HLA -B*51:01
DLFGILCV

SEQ ID NO: 4022 - protein, 9 aa, Homo sapiens
  Table 1.2; KCNU1; ENSG00000215262; HLA -A*25:01,HLA-A*33:01,HLA-A*68:01,HLA-B*18:01,HLA-B*35:01, HLA-B*35:03,HLA-B*51:01,HLA-C*07:01
DPFAYSEPL

SEQ ID NO: 4023 - protein, 9 aa, Homo sapiens
  Table 1.2; KCNU1; ENSG00000215262; HLA -A*25:01,HLA-A*26:01,HLA-B*35:01
DPVGSCSSY

SEQ ID NO: 4024 - protein, 10 aa, Homo sapiens
  Table 1.2; KCNU1; ENSG00000215262; HLA -A*33:01,HLA-A*68:01
DSCTSLLSGR

SEQ ID NO: 4025 - protein, 8 aa, Homo sapiens
  Table 1.2; KCNU1; ENSG00000215262; HLA -B*08:01,HLA-B*18:01,HLA-B*35:01
DSLLATAF

SEQ ID NO: 4026 - protein, 9 aa, Homo sapiens
  Table 1.2; KCNU1; ENSG00000215262; HLA -A*01:01,HLA-A*26:01,HLA-A*33:01
DSLLATAFY

SEQ ID NO: 4027 - protein, 8 aa, Homo sapiens
  Table 1.2; KCNU1; ENSG00000215262; HLA -A*68:01
DSVTAFLR

SEQ ID NO: 4028 - protein, 10 aa, Homo sapiens
  Table 1.2; KCNU1; ENSG00000215262; HLA -A*25:01
DSVTAFLRNF

SEQ ID NO: 4029 - protein, 9 aa, Homo sapiens
  Table 1.2; KCNU1; ENSG00000215262; HLA -A*25:01,HLA-A*68:01,HLA-A*68:02,HLA-B*35:03
DTEAIMATL

SEQ ID NO: 4030 - protein, 9 aa, Homo sapiens
  Table 1.2; KCNU1; ENSG00000215262; HLA -A*25:01,HLA-A*26:01,HLA-A*33:01,HLA-A*33:03,HLA-A*68:01
DTGDNIICF

SEQ ID NO: 4031 - protein, 8 aa, Homo sapiens
  Table 1.2; KCNU1; ENSG00000215262; HLA -B*51:01
DVFIPELI

SEQ ID NO: 4032 - protein, 10 aa, Homo sapiens
  Table 1.2; KCNU1; ENSG00000215262; HLA -A*68:02
DVFIPELITN

SEQ ID NO: 4033 - protein, 8 aa, Homo sapiens
  Table 1.2; KCNU1; ENSG00000215262; HLA -A*25:01,HLA-B*08:01
DVNPRNTF

SEQ ID NO: 4034 - protein, 11 aa, Homo sapiens
  Table 1.2; KCNU1; ENSG00000215262; HLA -A*25:01,HLA-A*33:01
DVNPRNTFGQL

SEQ ID NO: 4035 - protein, 8 aa, Homo sapiens
  Table 1.2; KCNU1; ENSG00000215262; HLA -B*08:01
DVVAKTSL

SEQ ID NO: 4036 - protein, 9 aa, Homo sapiens
  Table 1.2; KCNU1; ENSG00000215262; HLA -A*26:01
DVVAKTSLG

SEQ ID NO: 4037 - protein, 10 aa, Homo sapiens
  Table 1.2; KCNU1; ENSG00000215262; HLA -A*33:01,HLA-A*33:03,HLA-A*68:01
DVVAKTSLGR

SEQ ID NO: 4038 - protein, 9 aa, Homo sapiens
  Table 1.2; KCNU1; ENSG00000215262; HLA -A*24:02
DYLQREWRF

SEQ ID NO: 4039 - protein, 9 aa, Homo sapiens
  Table 1.2; KCNU1; ENSG00000215262; HLA -A*23:01,HLA-A*25:01,HLA-A*26:01,HLA-A*68:02,HLA-B*35:03, HLA-B*51:01
EAIMATLTI

SEQ ID NO: 4040 - protein, 9 aa, Homo sapiens
  Table 1.2; KCNU1; ENSG00000215262; HLA -A*26:01
EDISNIMRV

SEQ ID NO: 4041 - protein, 11 aa, Homo sapiens
  Table 1.2; KCNU1; ENSG00000215262; HLA -B*44:02,HLA-B*44:03
EEELNPENKRF

SEQ ID NO: 4042 - protein, 9 aa, Homo sapiens
  Table 1.2; KCNU1; ENSG00000215262; HLA -A*25:01,HLA-A*26:01,HLA-A*30:01,HLA-B*18:01,HLA-B*27:02, HLA-B*44:02,HLA-B*44:03,HLA-B*49:01,HLA-C*16:04
EEFSLQKSY

SEQ ID NO: 4043 - protein, 10 aa, Homo sapiens
  Table 1.2; KCNU1; ENSG00000215262; HLA -B*44:02,HLA-B*44:03
EELNPENKRF

SEQ ID NO: 4044 - protein, 9 aa, Homo sapiens
  Table 1.2; KCNU1; ENSG00000215262; HLA -A*68:02
EINTEIVFL

SEQ ID NO: 4045 - protein, 11 aa, Homo sapiens
  Table 1.2; KCNU1; ENSG00000215262; HLA -A*25:01,HLA-A*26:01
EIQAAFILSSF

SEQ ID NO: 4046 - protein, 9 aa, Homo sapiens
  Table 1.2; KCNU1; ENSG00000215262; HLA -A*01:01
ELETIFKCY

SEQ ID NO: 4047 - protein, 9 aa, Homo sapiens
  Table 1.2; KCNU1; ENSG00000215262; HLA -A*26:01
ELFTSGTIA

SEQ ID NO: 4048 - protein, 10 aa, Homo sapiens
  Table 1.2; KCNU1; ENSG00000215262; HLA -A*25:01,HLA-A*26:01,HLA-A*33:01,HLA-A*33:03,HLA-A*68:01, HLA-C*07:06
ELFTSGTIAR

SEQ ID NO: 4049 - protein, 10 aa, Homo sapiens
  Table 1.2; KCNU1; ENSG00000215262; HLA -A*33:03
ELKNPSNIHF

SEQ ID NO: 4050 - protein, 9 aa, Homo sapiens
  Table 1.2; KCNU1; ENSG00000215262; HLA -A*02:07,HLA-A*24:02,HLA-A*68:02
ELPQILQIL

SEQ ID NO: 4051 - protein, 10 aa, Homo sapiens
  Table 1.2; KCNU1; ENSG00000215262; HLA -A*68:02
ELPQILQILR

SEQ ID NO: 4052 - protein, 9 aa, Homo sapiens
  Table 1.2; KCNU1; ENSG00000215262; HLA -A*23:01,HLA-A*24:02,HLA-C*14:02
EMLLSAQTF

SEQ ID NO: 4053 - protein, 9 aa, Homo sapiens
  Table 1.2; KCNU1; ENSG00000215262; HLA -A*26:01,HLA-A*33:03
EMNSIVDIF

SEQ ID NO: 4054 - protein, 9 aa, Homo sapiens
  Table 1.2; KCNU1; ENSG00000215262; HLA -A*11:01,HLA-A*25:01,HLA-A*26:01,HLA-A*33:01,HLA-A*33:03, HLA-A*68:01,HLA-A*68:02
EMVELFANK

SEQ ID NO: 4055 - protein, 10 aa, Homo sapiens
  Table 1.2; KCNU1; ENSG00000215262; HLA -A*33:03,HLA-A*68:01
EMVELFANKR

SEQ ID NO: 4056 - protein, 9 aa, Homo sapiens
  Table 1.2; KCNU1; ENSG00000215262; HLA -A*33:01,HLA-A*33:03
ENKRFVITR

SEQ ID NO: 4057 - protein, 10 aa, Homo sapiens
  Table 1.2; KCNU1; ENSG00000215262; HLA -B*39:01
EQLGGLEGSL

SEQ ID NO: 4058 - protein, 9 aa, Homo sapiens
  Table 1.2; KCNU1; ENSG00000215262; HLA -A*33:03
EQNKKVMPK

SEQ ID NO: 4059 - protein, 10 aa, Homo sapiens
  Table 1.2; KCNU1; ENSG00000215262; HLA -A*26:01,HLA-A*33:01,HLA-A*33:03,HLA-A*68:01,HLA-B*27:02, HLA-C*07:06
ETILSDVNPR

SEQ ID NO: 4060 - protein, 8 aa, Homo sapiens
  Table 1.2; KCNU1; ENSG00000215262; HLA -A*26:01,HLA-B*18:01
ETLYSPVY

SEQ ID NO: 4061 - protein, 10 aa, Homo sapiens
  Table 1.2; KCNU1; ENSG00000215262; HLA -A*01:01,HLA-A*25:01,HLA-A*26:01,HLA-A*29:02
ETLYSPVYSY

SEQ ID NO: 4062 - protein, 10 aa, Homo sapiens
  Table 1.2; KCNU1; ENSG00000215262; HLA -A*25:01,HLA-A*26:01,HLA-A*33:01,HLA-A*33:03,HLA-B*44:02
ETNLHLSTAF

SEQ ID NO: 4063 - protein, 9 aa, Homo sapiens
  Table 1.2; KCNU1; ENSG00000215262; HLA -A*26:01
ETPGYTNGH

SEQ ID NO: 4064 - protein, 11 aa, Homo sapiens
  Table 1.2; KCNU1; ENSG00000215262; HLA -A*25:01,HLA-A*68:02
ETPPSLELETI

SEQ ID NO: 4065 - protein, 9 aa, Homo sapiens
  Table 1.2; KCNU1; ENSG00000215262; HLA -A*25:01,HLA-A*26:01,HLA-A*68:02
ETWEDLPKM

SEQ ID NO: 4066 - protein, 10 aa, Homo sapiens
  Table 1.2; KCNU1; ENSG00000215262; HLA -A*01:01,HLA-A*25:01,HLA-A*26:01,HLA-A*29:02,HLA-A*30:02, HLA-A*33:01,HLA-A*33:03,HLA-A*68:01,HLA-B*35:01
EVYDEDPFAY

SEQ ID NO: 4067 - protein, 10 aa, Homo sapiens
  Table 1.2; KCNU1; ENSG00000215262; HLA -A*24:02
EYKSLFTDGF

SEQ ID NO: 4068 - protein, 9 aa, Homo sapiens
  Table 1.2; KCNU1; ENSG00000215262; HLA -B*46:01,HLA-B*51:01,HLA-B*54:01
FAGMSFPEV

SEQ ID NO: 4069 - protein, 8 aa, Homo sapiens
  Table 1.2; KCNU1; ENSG00000215262; HLA -B*35:01,HLA-B*46:01,HLA-B*51:01,HLA-B*54:01,HLA-C*03:04
FANYIPEM

SEQ ID NO: 4070 - protein, 9 aa, Homo sapiens
  Table 1.2; KCNU1; ENSG00000215262; HLA -A*68:02,HLA-B*54:01
FANYIPEMV

SEQ ID NO: 4071 - protein, 9 aa, Homo sapiens
  Table 1.2; KCNU1; ENSG00000215262; HLA -B*54:01
FCAIPFSTA

SEQ ID NO: 4072 - protein, 8 aa, Homo sapiens
  Table 1.2; KCNU1; ENSG00000215262; HLA -B*18:01
FESIYLVM

SEQ ID NO: 4073 - protein, 9 aa, Homo sapiens
  Table 1.2; KCNU1; ENSG00000215262; HLA -A*32:01,HLA-B*35:01,HLA-B*35:03,HLA-B*46:01,HLA-B*55:01, HLA-C*02:02,HLA-C*03:03,HLA-C*03:04,HLA-C*04:01,HLA-C*05:01, HLA-C*07:04
FGDAHSAPM

SEQ ID NO: 4074 - protein, 10 aa, Homo sapiens
  Table 1.2; KCNU1; ENSG00000215262; HLA -B*40:01,HLA-C*05:01
FGDVVAKTSL

SEQ ID NO: 4075 - protein, 9 aa, Homo sapiens
  Table 1.2; KCNU1; ENSG00000215262; HLA -A*02:03
FIAETPKDV

SEQ ID NO: 4076 - protein, 10 aa, Homo sapiens
  Table 1.2; KCNU1; ENSG00000215262; HLA -A*33:03,HLA-A*68:01,HLA-A*68:02
FIAETPKDVR

SEQ ID NO: 4077 - protein, 9 aa, Homo sapiens
  Table 1.2; KCNU1; ENSG00000215262; HLA -A*02:04,HLA-A*02:07,HLA-A*23:01,HLA-A*24:02,HLA-A*25:01, HLA-A*29:02,HLA-C*02:02
FILSSFVTF

SEQ ID NO: 4078 - protein, 9 aa, Homo sapiens
  Table 1.2; KCNU1; ENSG00000215262; HLA -A*02:01,HLA-A*02:07
FIPELITNC

SEQ ID NO: 4079 - protein, 9 aa, Homo sapiens
  Table 1.2; KCNU1; ENSG00000215262; HLA -A*25:01
FISGSAMKW

SEQ ID NO: 4080 - protein, 9 aa, Homo sapiens
  Table 1.2; KCNU1; ENSG00000215262; HLA -A*02:01,HLA-A*02:07
FLDSLLATA

SEQ ID NO: 4081 - protein, 10 aa, Homo sapiens
  Table 1.2; KCNU1; ENSG00000215262; HLA -A*01:01,HLA-A*02:07,HLA-A*29:02
FLDSLLATAF

SEQ ID NO: 4082 - protein, 11 aa, Homo sapiens
  Table 1.2; KCNU1; ENSG00000215262; HLA -A*01:01
FLDSLLATAFY

SEQ ID NO: 4083 - protein, 9 aa, Homo sapiens
  Table 1.2; KCNU1; ENSG00000215262; HLA -A*02:01,HLA-A*02:03,HLA-A*02:04,HLA-A*02:07,HLA-A*23:01, HLA-A*30:01,HLA-B*13:02,HLA-B*35:03,HLA-B*39:01,HLA-B*55:01, HLA-C*01:02,HLA-C*07:04
FLGETPPSL

SEQ ID NO: 4084 - protein, 11 aa, Homo sapiens
  Table 1.2; KCNU1; ENSG00000215262; HLA -A*02:01
FLGETPPSLEL

SEQ ID NO: 4085 - protein, 9 aa, Homo sapiens
  Table 1.2; KCNU1; ENSG00000215262; HLA -A*02:03
FLKMHLLLI

SEQ ID NO: 4086 - protein, 10 aa, Homo sapiens
  Table 1.2; KCNU1; ENSG00000215262; HLA -A*02:03
FLRALRLLEL

SEQ ID NO: 4087 - protein, 9 aa, Homo sapiens
  Table 1.2; KCNU1; ENSG00000215262; HLA -A*02:03
FLRDKSGEI

SEQ ID NO: 4088 - protein, 8 aa, Homo sapiens
  Table 1.2; KCNU1; ENSG00000215262; HLA -A*02:07
FLWNFPQI

SEQ ID NO: 4089 - protein, 9 aa, Homo sapiens
  Table 1.2; KCNU1; ENSG00000215262; HLA -A*29:02
FLWNFPQIY

SEQ ID NO: 4090 - protein, 10 aa, Homo sapiens
  Table 1.2; KCNU1; ENSG00000215262; HLA -A*02:01,HLA-A*02:04
FLWNFPQIYI

SEQ ID NO: 4091 - protein, 11 aa, Homo sapiens
  Table 1.2; KCNU1; ENSG00000215262; HLA -A*02:04
FLWNFPQIYIL

SEQ ID NO: 4092 - protein, 9 aa, Homo sapiens
  Table 1.2; KCNU1; ENSG00000215262; HLA -A*29:02
FSFYFGLRF

SEQ ID NO: 4093 - protein, 9 aa, Homo sapiens
  Table 1.2; KCNU1; ENSG00000215262; HLA -A*68:02
FSGLIILLI

SEQ ID NO: 4094 - protein, 9 aa, Homo sapiens
  Table 1.2; KCNU1; ENSG00000215262; HLA -A*02:04,HLA-A*68:02,HLA-C*02:02,HLA-C*03:04
FTAAGFIHL

SEQ ID NO: 4095 - protein, 10 aa, Homo sapiens
  Table 1.2; KCNU1; ENSG00000215262; HLA -A*68:02
FTAAGFIHLV

SEQ ID NO: 4096 - protein, 10 aa, Homo sapiens
  Table 1.2; KCNU1; ENSG00000215262; HLA -A*01:01,HLA-A*25:01,HLA-A*26:01,HLA-A*29:02,HLA-A*30:02, HLA-B*46:01,HLA-B*57:01,HLA-C*02:02
FTIPPTFISY

SEQ ID NO: 4097 - protein, 11 aa, Homo sapiens
  Table 1.2; KCNU1; ENSG00000215262; HLA -A*01:01,HLA-A*29:02
FTIPPTFISYY

SEQ ID NO: 4098 - protein, 9 aa, Homo sapiens
  Table 1.2; KCNU1; ENSG00000215262; HLA -A*23:01,HLA-A*29:02,HLA-B*57:01
FTLGSLILF

SEQ ID NO: 4099 - protein, 8 aa, Homo sapiens
  Table 1.2; KCNU1; ENSG00000215262; HLA -A*33:03,HLA-A*68:01
FTSGTIAR

SEQ ID NO: 4100 - protein, 9 aa, Homo sapiens
  Table 1.2; KCNU1; ENSG00000215262; HLA -B*08:01,HLA-C*03:03
FVEQNKKVM

SEQ ID NO: 4101 - protein, 10 aa, Homo sapiens
  Table 1.2; KCNU1; ENSG00000215262; HLA -A*25:01,HLA-A*26:01,HLA-B*46:01,HLA-C*02:02
FVITRPANEF

SEQ ID NO: 4102 - protein, 11 aa, Homo sapiens
  Table 1.2; KCNU1; ENSG00000215262; HLA -A*29:02
FVLSIGSLIIY

SEQ ID NO: 4103 - protein, 10 aa, Homo sapiens
  Table 1.2; KCNU1; ENSG00000215262; HLA -A*03:01,HLA-A*25:01,HLA-A*26:01,HLA-A*29:02,HLA-A*30:02, HLA-A*32:01,HLA-B*46:01,HLA-C*02:02
FVMPLRASNY

SEQ ID NO: 4104 - protein, 9 aa, Homo sapiens
  Table 1.2; KCNU1; ENSG00000215262; HLA -A*23:01,HLA-A*24:02,HLA-A*29:02
FYNYHVLEL

SEQ ID NO: 4105 - protein, 8 aa, Homo sapiens
  Table 1.2; KCNU1; ENSG00000215262; HLA -B*37:01
GDAHSAPM

SEQ ID NO: 4106 - protein, 8 aa, Homo sapiens
  Table 1.2; KCNU1; ENSG00000215262; HLA -B*37:01
GDLHAANI

SEQ ID NO: 4107 - protein, 9 aa, Homo sapiens
  Table 1.2; KCNU1; ENSG00000215262; HLA -A*30:01,HLA-B*15:03,HLA-B*37:01,HLA-B*40:01,HLA-B*40:02, HLA-B*44:03,HLA-B*49:01
GDVVAKTSL

SEQ ID NO: 4108 - protein, 8 aa, Homo sapiens
  Table 1.2; KCNU1; ENSG00000215262; HLA -B*49:01
GEINTEIV

SEQ ID NO: 4109 - protein, 9 aa, Homo sapiens
  Table 1.2; KCNU1; ENSG00000215262; HLA -A*30:01,HLA-B*15:01,HLA-B*15:03,HLA-B*18:01,HLA-B*27:02, HLA-B*37:01,HLA-B*40:01,HLA-B*40:02,HLA-B*44:02,HLA-B*44:03, HLA-B*49:01,HLA-C*16:04
GEINTEIVF

SEQ ID NO: 4110 - protein, 10 aa, Homo sapiens
  Table 1.2; KCNU1; ENSG00000215262; HLA -A*30:01,HLA-B*40:01,HLA-B*44:02,HLA-B*44:03,HLA-B*49:01
GEINTEIVFL

SEQ ID NO: 4111 - protein, 9 aa, Homo sapiens
  Table 1.2; KCNU1; ENSG00000215262; HLA -A*30:01,HLA-B*13:02,HLA-B*18:01,HLA-B*27:02,HLA-B*27:05, HLA-B*37:01,HLA-B*40:01,HLA-B*40:02,HLA-B*44:02,HLA-B*44:03, HLA-B*49:01
GETPPSLEL

SEQ ID NO: 4112 - protein, 8 aa, Homo sapiens
  Table 1.2; KCNU1; ENSG00000215262; HLA -A*03:02
GFGDVVAK

SEQ ID NO: 4113 - protein, 9 aa, Homo sapiens
  Table 1.2; KCNU1; ENSG00000215262; HLA -A*02:04
GLCTFLTSL

SEQ ID NO: 4114 - protein, 10 aa, Homo sapiens
  Table 1.2; KCNU1; ENSG00000215262; HLA -A*02:04
GLIILLIFRL

SEQ ID NO: 4115 - protein, 10 aa, Homo sapiens
  Table 1.2; KCNU1; ENSG00000215262; HLA -A*02:01,HLA-A*02:03
GLILNPPPQV

SEQ ID NO: 4116 - protein, 9 aa, Homo sapiens
  Table 1.2; KCNU1; ENSG00000215262; HLA -A*02:04,HLA-B*13:02
GLLSLHETI

SEQ ID NO: 4117 - protein, 10 aa, Homo sapiens
  Table 1.2; KCNU1; ENSG00000215262; HLA -A*02:01,HLA-A*02:04
GLLSLHETIL

SEQ ID NO: 4118 - protein, 11 aa, Homo sapiens
  Table 1.2; KCNU1; ENSG00000215262; HLA -A*02:04
GLYRIIDEEEL

SEQ ID NO: 4119 - protein, 8 aa, Homo sapiens
  Table 1.2; KCNU1; ENSG00000215262; HLA -A*02:01,HLA-B*13:02
GQDSPPRV

SEQ ID NO: 4120 - protein, 9 aa, Homo sapiens
  Table 1.2; KCNU1; ENSG00000215262; HLA -B*15:01
GQFRDHIEM

SEQ ID NO: 4121 - protein, 8 aa, Homo sapiens
  Table 1.2; KCNU1; ENSG00000215262; HLA -B*13:02
GQVLVILV

SEQ ID NO: 4122 - protein, 9 aa, Homo sapiens
  Table 1.2; KCNU1; ENSG00000215262; HLA -B*13:02,HLA-B*15:01,HLA-B*15:03
GQVLVILVF

SEQ ID NO: 4123 - protein, 9 aa, Homo sapiens
  Table 1.2; KCNU1; ENSG00000215262; HLA -A*30:02,HLA-A*32:01,HLA-B*27:02,HLA-B*27:05,HLA-C*16:04
GRNSQNISY

SEQ ID NO: 4124 - protein, 10 aa, Homo sapiens
  Table 1.2; KCNU1; ENSG00000215262; HLA -B*27:02,HLA-B*27:05
GRNSQNISYF

SEQ ID NO: 4125 - protein, 10 aa, Homo sapiens
  Table 1.2; KCNU1; ENSG00000215262; HLA -B*57:01
GSLDYLQREW

SEQ ID NO: 4126 - protein, 9 aa, Homo sapiens
  Table 1.2; KCNU1; ENSG00000215262; HLA -A*29:02,HLA-A*30:02
GSLILFANY

SEQ ID NO: 4127 - protein, 9 aa, Homo sapiens
  Table 1.2; KCNU1; ENSG00000215262; HLA -B*57:01
GTGIILELF

SEQ ID NO: 4128 - protein, 9 aa, Homo sapiens
  Table 1.2; KCNU1; ENSG00000215262; HLA -A*11:01,HLA-A*31:01,HLA-A*33:03
GTIARSHVR

SEQ ID NO: 4129 - protein, 9 aa, Homo sapiens
  Table 1.2; KCNU1; ENSG00000215262; HLA -A*25:01,HLA-A*26:01,HLA-B*15:01,HLA-B*27:05
GVADSCTSL

SEQ ID NO: 4130 - protein, 10 aa, Homo sapiens
  Table 1.2; KCNU1; ENSG00000215262; HLA -A*26:01
GVADSCTSLL

SEQ ID NO: 4131 - protein, 10 aa, Homo sapiens
  Table 1.2; KCNU1; ENSG00000215262; HLA -B*27:05
GVSSQLEQHL

SEQ ID NO: 4132 - protein, 10 aa, Homo sapiens
  Table 1.2; KCNU1; ENSG00000215262; HLA -B*35:01,HLA-B*35:03
HAANIEQCSM

SEQ ID NO: 4133 - protein, 8 aa, Homo sapiens
  Table 1.2; KCNU1; ENSG00000215262; HLA -C*05:01
HAEDISNI

SEQ ID NO: 4134 - protein, 9 aa, Homo sapiens
  Table 1.2; KCNU1; ENSG00000215262; HLA -B*35:01,HLA-B*35:03,HLA-B*38:01,HLA-B*39:01,HLA-B*55:01, HLA-C*03:03,HLA-C*03:04,HLA-C*05:01,HLA-C*07:06,HLA-C*12:03
HAEDISNIM

SEQ ID NO: 4135 - protein, 10 aa, Homo sapiens
  Table 1.2; KCNU1; ENSG00000215262; HLA -A*33:01,HLA-A*33:03,HLA-A*68:01,HLA-A*68:02,HLA-C*07:06
HAEDISNIMR

SEQ ID NO: 4136 - protein, 11 aa, Homo sapiens
  Table 1.2; KCNU1; ENSG00000215262; HLA -A*68:02
HAEDISNIMRV

SEQ ID NO: 4137 - protein, 8 aa, Homo sapiens
  Table 1.2; KCNU1; ENSG00000215262; HLA -A*30:01,HLA-B*18:01,HLA-B*49:01
HETILSDV

SEQ ID NO: 4138 - protein, 11 aa, Homo sapiens
  Table 1.2; KCNU1; ENSG00000215262; HLA -B*27:02
HETILSDVNPR

SEQ ID NO: 4139 - protein, 8 aa, Homo sapiens
  Table 1.2; KCNU1; ENSG00000215262; HLA -A*03:01,HLA-A*03:02
HITVPSVK

SEQ ID NO: 4140 - protein, 9 aa, Homo sapiens
  Table 1.2; KCNU1; ENSG00000215262; HLA -A*33:01,HLA-A*33:03,HLA-A*68:01,HLA-C*07:06
HITVPSVKR

SEQ ID NO: 4141 - protein, 10 aa, Homo sapiens
  Table 1.2; KCNU1; ENSG00000215262; HLA -A*02:01,HLA-A*02:07
HLDKDKVYGV

SEQ ID NO: 4142 - protein, 9 aa, Homo sapiens
  Table 1.2; KCNU1; ENSG00000215262; HLA -A*01:01,HLA-A*29:02,HLA-B*35:01
HLLLIAIEY

SEQ ID NO: 4143 - protein, 10 aa, Homo sapiens
  Table 1.2; KCNU1; ENSG00000215262; HLA -A*25:01
HLVENSGDPW

SEQ ID NO: 4144 - protein, 10 aa, Homo sapiens
  Table 1.2; KCNU1; ENSG00000215262; HLA -B*57:01
HSAPMGLRNF

SEQ ID NO: 4145 - protein, 9 aa, Homo sapiens
  Table 1.2; KCNU1; ENSG00000215262; HLA -A*02:04,HLA-A*02:07
HVLELLQML

SEQ ID NO: 4146 - protein, 9 aa, Homo sapiens
  Table 1.2; KCNU1; ENSG00000215262; HLA -C*07:06
IAETPKDVR

SEQ ID NO: 4147 - protein, 8 aa, Homo sapiens
  Table 1.2; KCNU1; ENSG00000215262; HLA -C*03:04
IAIEYKSL

SEQ ID NO: 4148 - protein, 9 aa, Homo sapiens
  Table 1.2; KCNU1; ENSG00000215262; HLA -A*23:01,HLA-A*24:02,HLA-B*46:01,HLA-B*51:01,HLA-B*57:01, HLA-B*58:01,HLA-C*02:02
IAIEYKSLF

SEQ ID NO: 4149 - protein, 8 aa, Homo sapiens
  Table 1.2; KCNU1; ENSG00000215262; HLA -B*37:01
IDLVFNAF

SEQ ID NO: 4150 - protein, 8 aa, Homo sapiens
  Table 1.2; KCNU1; ENSG00000215262; HLA -B*37:01
IDSVTETL

SEQ ID NO: 4151 - protein, 10 aa, Homo sapiens
  Table 1.2; KCNU1; ENSG00000215262; HLA -A*30:01,HLA-B*18:01,HLA-B*27:02,HLA-B*37:01,HLA-B*44:02, HLA-B*44:03,HLA-B*49:01,HLA-C*16:04
IEMLLSAQTF

SEQ ID NO: 4152 - protein, 9 aa, Homo sapiens
  Table 1.2; KCNU1; ENSG00000215262; HLA -B*49:01
IEQCSMCAV

SEQ ID NO: 4153 - protein, 11 aa, Homo sapiens
  Table 1.2; KCNU1; ENSG00000215262; HLA -A*30:01,HLA-B*40:01,HLA-B*40:02
IEQLGGLEGSL

SEQ ID NO: 4154 - protein, 8 aa, Homo sapiens
  Table 1.2; KCNU1; ENSG00000215262; HLA -A*23:01,HLA-A*24:02
IFTIPPTF

SEQ ID NO: 4155 - protein, 9 aa, Homo sapiens
  Table 1.2; KCNU1; ENSG00000215262; HLA -A*23:01,HLA-A*24:02
IFTIPPTFI

SEQ ID NO: 4156 - protein, 9 aa, Homo sapiens
  Table 1.2; KCNU1; ENSG00000215262; HLA -A*68:02
IGSLIIYFI

SEQ ID NO: 4157 - protein, 9 aa, Homo sapiens
  Table 1.2; KCNU1; ENSG00000215262; HLA -B*46:01
IIIQILQSH

SEQ ID NO: 4158 - protein, 8 aa, Homo sapiens
  Table 1.2; KCNU1; ENSG00000215262; HLA -A*02:04
IILLIFRL

SEQ ID NO: 4159 - protein, 10 aa, Homo sapiens
  Table 1.2; KCNU1; ENSG00000215262; HLA -A*03:02
IIQILQSHNK

SEQ ID NO: 4160 - protein, 9 aa, Homo sapiens
  Table 1.2; KCNU1; ENSG00000215262; HLA -A*23:01,HLA-A*24:02,HLA-B*15:03
IKTSNSVKF

SEQ ID NO: 4161 - protein, 8 aa, Homo sapiens
  Table 1.2; KCNU1; ENSG00000215262; HLA -A*02:01,HLA-A*02:03,HLA-B*13:02,HLA-B*55:01,HLA-C*16:02
ILNPPPQV

SEQ ID NO: 4162 - protein, 9 aa, Homo sapiens
  Table 1.2; KCNU1; ENSG00000215262; HLA -A*03:01,HLA-A*03:02,HLA-A*11:01,HLA-A*23:01,HLA-A*24:02, HLA-A*29:02,HLA-A*31:01,HLA-A*32:01,HLA-A*33:01,HLA-A*33:03, HLA-A*68:01,HLA-B*57:01
ILNPPPQVR

SEQ ID NO: 4163 - protein, 10 aa, Homo sapiens
  Table 1.2; KCNU1; ENSG00000215262; HLA -A*02:01,HLA-A*02:03,HLA-A*02:04,HLA-A*02:07,HLA-A*03:01, HLA-A*23:01,HLA-A*24:02,HLA-A*32:01,HLA-B*13:02
ILNPPPQVRI

SEQ ID NO: 4164 - protein, 11 aa, Homo sapiens
  Table 1.2; KCNU1; ENSG00000215262; HLA -A*31:01
ILNPPPQVRIR

SEQ ID NO: 4165 - protein, 9 aa, Homo sapiens
  Table 1.2; KCNU1; ENSG00000215262; HLA -A*30:02,HLA-A*32:01,HLA-B*15:01
ILQSHNKVY

SEQ ID NO: 4166 - protein, 10 aa, Homo sapiens
  Table 1.2; KCNU1; ENSG00000215262; HLA -A*02:03
ILSDVNPRNT

SEQ ID NO: 4167 - protein, 11 aa, Homo sapiens
  Table 1.2; KCNU1; ENSG00000215262; HLA -A*23:01,HLA-A*24:02,HLA-A*32:01,HLA-B*15:01,HLA-B*46:01
ILSDVNPRNTF

SEQ ID NO: 4168 - protein, 8 aa, Homo sapiens
  Table 1.2; KCNU1; ENSG00000215262; HLA -A*23:01,HLA-B*37:01
ILSSFVTF

SEQ ID NO: 4169 - protein, 9 aa, Homo sapiens
  Table 1.2; KCNU1; ENSG00000215262; HLA -A*02:01,HLA-A*02:03,HLA-A*02:04,HLA-A*02:07,HLA-A*23:01, HLA-A*24:02,HLA-A*29:02
ILSSFVTFF

SEQ ID NO: 4170 - protein, 9 aa, Homo sapiens
  Table 1.2; KCNU1; ENSG00000215262; HLA -A*02:03,HLA-A*02:04
ILSTWFTAA

SEQ ID NO: 4171 - protein, 10 aa, Homo sapiens
  Table 1.2; KCNU1; ENSG00000215262; HLA -A*02:03
IMATLTIGSL

SEQ ID NO: 4172 - protein, 11 aa, Homo sapiens
  Table 1.2; KCNU1; ENSG00000215262; HLA -B*27:02
IPEMVELFANK

SEQ ID NO: 4173 - protein, 8 aa, Homo sapiens
  Table 1.2; KCNU1; ENSG00000215262; HLA -B*15:03,HLA-B*18:01,HLA-B*35:01,HLA-B*56:01
IPFSTACY

SEQ ID NO: 4174 - protein, 9 aa, Homo sapiens
  Table 1.2; KCNU1; ENSG00000215262; HLA -B*54:01,HLA-B*56:01
IPIDLVFNA

SEQ ID NO: 4175 - protein, 10 aa, Homo sapiens
  Table 1.2; KCNU1; ENSG00000215262; HLA -A*23:01,HLA-B*35:01
IPIDLVFNAF

SEQ ID NO: 4176 - protein, 8 aa, Homo sapiens
  Table 1.2; KCNU1; ENSG00000215262; HLA -B*35:01,HLA-B*51:01
IPPTFISY

SEQ ID NO: 4177 - protein, 9 aa, Homo sapiens
  Table 1.2; KCNU1; ENSG00000215262; HLA -B*35:01
IPPTFISYY

SEQ ID NO: 4178 - protein, 10 aa, Homo sapiens
  Table 1.2; KCNU1; ENSG00000215262; HLA -A*23:01,HLA-A*25:01,HLA-A*26:01,HLA-A*32:01,HLA-B*15:01, HLA-B*15:03,HLA-B*46:01,HLA-C*02:02
IQAAFILSSF

SEQ ID NO: 4179 - protein, 9 aa, Homo sapiens
  Table 1.2; KCNU1; ENSG00000215262; HLA -A*68:01,HLA-C*07:06
ISGQDSPPR

SEQ ID NO: 4180 - protein, 8 aa, Homo sapiens
  Table 1.2; KCNU1; ENSG00000215262; HLA -A*32:01,HLA-B*57:01,HLA-B*58:01
ISGSAMKW

SEQ ID NO: 4181 - protein, 9 aa, Homo sapiens
  Table 1.2; KCNU1; ENSG00000215262; HLA -A*32:01,HLA-B*46:01,HLA-B*57:01,HLA-B*58:01,HLA-C*01:02, HLA-C*03:04,HLA-C*16:01,HLA-C*16:02
ISNFTTRTL

SEQ ID NO: 4182 - protein, 8 aa, Homo sapiens
  Table 1.2; KCNU1; ENSG00000215262; HLA -B*08:01,HLA-C*16:01
ISNIMRVL

SEQ ID NO: 4183 - protein, 9 aa, Homo sapiens
  Table 1.2; KCNU1; ENSG00000215262; HLA -B*57:01
ISYYLKSNW

SEQ ID NO: 4184 - protein, 8 aa, Homo sapiens
  Table 1.2; KCNU1; ENSG00000215262; HLA -A*32:01,HLA-B*15:01,HLA-B*46:01,HLA-B*57:01,HLA-B*58:01
ITRPANEF

SEQ ID NO: 4185 - protein, 10 aa, Homo sapiens
  Table 1.2; KCNU1; ENSG00000215262; HLA -B*57:01
ITRPANEFKL

SEQ ID NO: 4186 - protein, 9 aa, Homo sapiens
  Table 1.2; KCNU1; ENSG00000215262; HLA -A*23:01,HLA-A*24:02,HLA-A*25:01,HLA-A*26:01,HLA-A*29:02, HLA-A*30:02,HLA-A*32:01,HLA-B*15:01,HLA-B*15:03,HLA-B*35:01, HLA-B*39:01,HLA-B*46:01,HLA-B*57:01,HLA-B*58:01,HLA-C*01:02,
  HLA-C*02:02,HLA-C*03:03,HLA-C*03:04,HLA-C*07:04,HLA-C*12:03, HLA-C*14:02,HLA-C*16:01,HLA-C*16:04
ITVDSVTAF

SEQ ID NO: 4187 - protein, 10 aa, Homo sapiens
  Table 1.2; KCNU1; ENSG00000215262; HLA -A*68:02
ITVDSVTAFL

SEQ ID NO: 4188 - protein, 11 aa, Homo sapiens
  Table 1.2; KCNU1; ENSG00000215262; HLA -A*11:01,HLA-A*31:01,HLA-A*33:03,HLA-A*68:01,HLA-B*27:02, HLA-C*07:06
ITVDSVTAFLR

SEQ ID NO: 4189 - protein, 9 aa, Homo sapiens
  Table 1.2; KCNU1; ENSG00000215262; HLA -B*57:01,HLA-B*58:01,HLA-C*16:02
ITVPSVKRM

SEQ ID NO: 4190 - protein, 9 aa, Homo sapiens
  Table 1.2; KCNU1; ENSG00000215262; HLA -A*01:01,HLA-A*26:01,HLA-A*29:02,HLA-A*30:02,HLA-B*15:01, HLA-B*15:03,HLA-B*35:01,HLA-B*46:01
IVFIGSLDY

SEQ ID NO: 4191 - protein, 10 aa, Homo sapiens
  Table 1.2; KCNU1; ENSG00000215262; HLA -A*68:02
IVFIGSLDYL

SEQ ID NO: 4192 - protein, 9 aa, Homo sapiens
  Table 1.2; KCNU1; ENSG00000215262; HLA -A*23:01,HLA-A*24:02,HLA-C*14:02
IYILPGCAL

SEQ ID NO: 4193 - protein, 10 aa, Homo sapiens
  Table 1.2; KCNU1; ENSG00000215262; HLA -A*24:02,HLA-A*29:02
IYILPGCALY

SEQ ID NO: 4194 - protein, 9 aa, Homo sapiens
  Table 1.2; KCNU1; ENSG00000215262; HLA -C*14:02
IYLVMATTS

SEQ ID NO: 4195 - protein, 9 aa, Homo sapiens
  Table 1.2; KCNU1; ENSG00000215262; HLA -A*32:01,HLA-B*58:01
KASQTTETH

SEQ ID NO: 4196 - protein, 8 aa, Homo sapiens
  Table 1.2; KCNU1; ENSG00000215262; HLA -B*37:01
KELKDIVF

SEQ ID NO: 4197 - protein, 9 aa, Homo sapiens
  Table 1.2; KCNU1; ENSG00000215262; HLA -B*40:01,HLA-B*44:02,HLA-B*49:01
KELKDIVFI

SEQ ID NO: 4198 - protein, 10 aa, Homo sapiens
  Table 1.2; KCNU1; ENSG00000215262; HLA -A*30:02
KGRNSQNISY

SEQ ID NO: 4199 - protein, 9 aa, Homo sapiens
  Table 1.2; KCNU1; ENSG00000215262; HLA -A*02:04,HLA-A*23:01,HLA-A*29:02,HLA-B*57:01
KLLPSDLVF

SEQ ID NO: 4200 - protein, 10 aa, Homo sapiens
  Table 1.2; KCNU1; ENSG00000215262; HLA -A*02:01,HLA-A*02:04
KLLPSDLVFC

SEQ ID NO: 4201 - protein, 9 aa, Homo sapiens
  Table 1.2; KCNU1; ENSG00000215262; HLA -A*02:04
KLLSIILST

SEQ ID NO: 4202 - protein, 10 aa, Homo sapiens
  Table 1.2; KCNU1; ENSG00000215262; HLA -A*02:04,HLA-B*57:01
KLLSIILSTW

SEQ ID NO: 4203 - protein, 9 aa, Homo sapiens
  Table 1.2; KCNU1; ENSG00000215262; HLA -A*02:07,HLA-A*24:02
KNPSNIHFI

SEQ ID NO: 4204 - protein, 9 aa, Homo sapiens
  Table 1.2; KCNU1; ENSG00000215262; HLA -A*23:01
KNYDSTTRI

SEQ ID NO: 4205 - protein, 8 aa, Homo sapiens
  Table 1.2; KCNU1; ENSG00000215262; HLA -B*56:01
KPTSLDKV

SEQ ID NO: 4206 - protein, 10 aa, Homo sapiens
  Table 1.2; KCNU1; ENSG00000215262; HLA -B*07:02,HLA-B*35:01,HLA-B*35:03,HLA-B*40:01,HLA-B*55:01, HLA-B*56:01,HLA-C*07:02
KPTSLDKVTL

SEQ ID NO: 4207 - protein, 9 aa, Homo sapiens
  Table 1.2; KCNU1; ENSG00000215262; HLA -A*31:01
KQIAWNQSR

SEQ ID NO: 4208 - protein, 9 aa, Homo sapiens
  Table 1.2; KCNU1; ENSG00000215262; HLA -B*58:01
KSGEINTEI

SEQ ID NO: 4209 - protein, 9 aa, Homo sapiens
  Table 1.2; KCNU1; ENSG00000215262; HLA -B*57:01
KSNWLGLRF

SEQ ID NO: 4210 - protein, 8 aa, Homo sapiens
  Table 1.2; KCNU1; ENSG00000215262; HLA -A*03:01,HLA-A*03:02,HLA-A*11:01
KSYEIVNK

SEQ ID NO: 4211 - protein, 9 aa, Homo sapiens
  Table 1.2; KCNU1; ENSG00000215262; HLA -B*40:02,HLA-B*56:01,HLA-B*58:01,HLA-C*12:03
KSYEIVNKA

SEQ ID NO: 4212 - protein, 9 aa, Homo sapiens
  Table 1.2; KCNU1; ENSG00000215262; HLA -A*23:01,HLA-A*24:02,HLA-A*29:02,HLA-A*32:01,HLA-B*15:01, HLA-B*57:01,HLA-B*58:01
KTIPIDLVF

SEQ ID NO: 4213 - protein, 8 aa, Homo sapiens
  Table 1.2; KCNU1; ENSG00000215262; HLA -C*16:01
KTSLGRTF

SEQ ID NO: 4214 - protein, 8 aa, Homo sapiens
  Table 1.2; KCNU1; ENSG00000215262; HLA -A*32:01,HLA-B*37:01,HLA-B*58:01
KTSNSVKF

SEQ ID NO: 4215 - protein, 10 aa, Homo sapiens
  Table 1.2; KCNU1; ENSG00000215262; HLA -A*03:01,HLA-A*03:02,HLA-A*11:01
KTSNSVKFSK

SEQ ID NO: 4216 - protein, 8 aa, Homo sapiens
  Table 1.2; KCNU1; ENSG00000215262; HLA -A*32:01,HLA-B*57:01,HLA-B*58:01
KVMPKQTW

SEQ ID NO: 4217 - protein, 9 aa, Homo sapiens
  Table 1.2; KCNU1; ENSG00000215262; HLA -A*03:01,HLA-A*03:02
KVMPKQTWK

SEQ ID NO: 4218 - protein, 8 aa, Homo sapiens
  Table 1.2; KCNU1; ENSG00000215262; HLA -A*02:07,HLA-C*01:02
KVPILTEL

SEQ ID NO: 4219 - protein, 9 aa, Homo sapiens
  Table 1.2; KCNU1; ENSG00000215262; HLA -A*03:01,HLA-A*03:02
KVPILTELK

SEQ ID NO: 4220 - protein, 10 aa, Homo sapiens
  Table 1.2; KCNU1; ENSG00000215262; HLA -A*25:01,HLA-B*57:01
KVYLPKIPSW

SEQ ID NO: 4221 - protein, 9 aa, Homo sapiens
  Table 1.2; KCNU1; ENSG00000215262; HLA -A*23:01,HLA-A*24:02,HLA-C*01:02,HLA-C*14:02
KYTSSYEAL

SEQ ID NO: 4222 - protein, 9 aa, Homo sapiens
  Table 1.2; KCNU1; ENSG00000215262; HLA -A*02:03,HLA-B*37:01
LDKDKVYGV

SEQ ID NO: 4223 - protein, 9 aa, Homo sapiens
  Table 1.2; KCNU1; ENSG00000215262; HLA -B*18:01,HLA-B*37:01,HLA-B*44:02
LDSLLATAF

SEQ ID NO: 4224 - protein, 10 aa, Homo sapiens
  Table 1.2; KCNU1; ENSG00000215262; HLA -A*30:01,HLA-B*40:01
LEGSLQETNL

SEQ ID NO: 4225 - protein, 10 aa, Homo sapiens
  Table 1.2; KCNU1; ENSG00000215262; HLA -B*44:02,HLA-B*44:03
LELETIFKCY

SEQ ID NO: 4226 - protein, 9 aa, Homo sapiens
  Table 1.2; KCNU1; ENSG00000215262; HLA -B*49:01
LELFTSGTI

SEQ ID NO: 4227 - protein, 8 aa, Homo sapiens
  Table 1.2; KCNU1; ENSG00000215262; HLA -B*49:01
LELLQMLV

SEQ ID NO: 4228 - protein, 9 aa, Homo sapiens
  Table 1.2; KCNU1; ENSG00000215262; HLA -A*23:01,HLA-A*30:01,HLA-B*13:02,HLA-B*18:01,HLA-B*44:02, HLA-B*44:03,HLA-B*49:01,HLA-B*51:01
LELPQILQI

SEQ ID NO: 4229 - protein, 10 aa, Homo sapiens
  Table 1.2; KCNU1; ENSG00000215262; HLA -B*44:02
LELPQILQIL

SEQ ID NO: 4230 - protein, 9 aa, Homo sapiens
  Table 1.2; KCNU1; ENSG00000215262; HLA -A*30:01,HLA-B*40:01,HLA-B*49:01
LEMNSIVDI

SEQ ID NO: 4231 - protein, 8 aa, Homo sapiens
  Table 1.2; KCNU1; ENSG00000215262; HLA -B*18:01
LETIFKCY

SEQ ID NO: 4232 - protein, 9 aa, Homo sapiens
  Table 1.2; KCNU1; ENSG00000215262; HLA -A*23:01,HLA-A*24:02
LFANYIPEM

SEQ ID NO: 4233 - protein, 9 aa, Homo sapiens
  Table 1.2; KCNU1; ENSG00000215262; HLA -A*33:01,HLA-A*33:03
LFTSGTIAR

SEQ ID NO: 4234 - protein, 9 aa, Homo sapiens
  Table 1.2; KCNU1; ENSG00000215262; HLA -A*02:04
LIILLIFRL

SEQ ID NO: 4235 - protein, 9 aa, Homo sapiens
  Table 1.2; KCNU1; ENSG00000215262; HLA -A*02:01,HLA-A*02:03,HLA-A*02:04,HLA-A*02:07
LILNPPPQV

SEQ ID NO: 4236 - protein, 9 aa, Homo sapiens
  Table 1.2; KCNU1; ENSG00000215262; HLA -B*15:03
LKNPSNIHF

SEQ ID NO: 4237 - protein, 9 aa, Homo sapiens
  Table 1.2; KCNU1; ENSG00000215262; HLA -A*01:01,HLA-A*03:01,HLA-A*29:02
LLATAFYNY

SEQ ID NO: 4238 - protein, 8 aa, Homo sapiens
  Table 1.2; KCNU1; ENSG00000215262; HLA -A*29:02
LLLIAIEY

SEQ ID NO: 4239 - protein, 9 aa, Homo sapiens
  Table 1.2; KCNU1; ENSG00000215262; HLA -A*02:01,HLA-A*02:07
LLPSDLVFC

SEQ ID NO: 4240 - protein, 11 aa, Homo sapiens
  Table 1.2; KCNU1; ENSG00000215262; HLA -A*02:07
LLPSDLVFCAI

SEQ ID NO: 4241 - protein, 9 aa, Homo sapiens
  Table 1.2; KCNU1; ENSG00000215262; HLA -B*44:02,HLA-B*57:01
LLSIILSTW

SEQ ID NO: 4242 - protein, 9 aa, Homo sapiens
  Table 1.2; KCNU1; ENSG00000215262; HLA -A*02:04
LLSLHETIL

SEQ ID NO: 4243 - protein, 10 aa, Homo sapiens
  Table 1.2; KCNU1; ENSG00000215262; HLA -B*54:01,HLA-B*56:01
LPQILQILRA

SEQ ID NO: 4244 - protein, 9 aa, Homo sapiens
  Table 1.2; KCNU1; ENSG00000215262; HLA -B*54:01,HLA-B*55:01,HLA-B*56:01
LPSDLVFCA

SEQ ID NO: 4245 - protein, 8 aa, Homo sapiens
  Table 1.2; KCNU1; ENSG00000215262; HLA -C*05:01
LSDDFAGM

SEQ ID NO: 4246 - protein, 10 aa, Homo sapiens
  Table 1.2; KCNU1; ENSG00000215262; HLA -A*01:01,HLA-B*46:01,HLA-B*58:01,HLA-C*03:04,HLA-C*05:01
LSDDFAGMSF

SEQ ID NO: 4247 - protein, 10 aa, Homo sapiens
  Table 1.2; KCNU1; ENSG00000215262; HLA -A*01:01,HLA-B*58:01,HLA-C*05:01
LSDVNPRNTF

SEQ ID NO: 4248 - protein, 9 aa, Homo sapiens
  Table 1.2; KCNU1; ENSG00000215262; HLA -A*25:01,HLA-A*32:01,HLA-B*57:01,HLA-B*58:01,HLA-C*02:02
LSFPKQIAW

SEQ ID NO: 4249 - protein, 10 aa, Homo sapiens
  Table 1.2; KCNU1; ENSG00000215262; HLA -B*57:01
LSIGSLIIYF

SEQ ID NO: 4250 - protein, 8 aa, Homo sapiens
  Table 1.2; KCNU1; ENSG00000215262; HLA -B*57:01,HLA-B*58:01
LSIILSTW

SEQ ID NO: 4251 - protein, 9 aa, Homo sapiens
  Table 1.2; KCNU1; ENSG00000215262; HLA -B*57:01
LSIILSTWF

SEQ ID NO: 4252 - protein, 10 aa, Homo sapiens
  Table 1.2; KCNU1; ENSG00000215262; HLA -B*27:02
LTSLFVEQNK

SEQ ID NO: 4253 - protein, 8 aa, Homo sapiens
  Table 1.2; KCNU1; ENSG00000215262; HLA -C*05:01
LVDTEAIM

SEQ ID NO: 4254 - protein, 11 aa, Homo sapiens
  Table 1.2; KCNU1; ENSG00000215262; HLA -A*02:07
LVDTEAIMATL

SEQ ID NO: 4255 - protein, 9 aa, Homo sapiens
  Table 1.2; KCNU1; ENSG00000215262; HLA -A*02:01,HLA-A*02:03,HLA-A*25:01,HLA-B*13:02,HLA-B*46:01, HLA-B*51:01,HLA-B*55:01,HLA-B*56:01
LVMATTSTV

SEQ ID NO: 4256 - protein, 8 aa, Homo sapiens
  Table 1.2; KCNU1; ENSG00000215262; HLA -A*23:01,HLA-A*29:02,HLA-A*30:02,HLA-C*14:02
LYSPVYSY

SEQ ID NO: 4257 - protein, 9 aa, Homo sapiens
  Table 1.2; KCNU1; ENSG00000215262; HLA -B*35:01,HLA-B*35:03,HLA-B*38:01,HLA-B*55:01,HLA-B*58:01, HLA-C*02:02,HLA-C*03:03,HLA-C*16:01
MAADDKIKF

SEQ ID NO: 4258 - protein, 10 aa, Homo sapiens
  Table 1.2; KCNU1; ENSG00000215262; HLA -A*25:01,HLA-B*57:01
MAADDKIKFW

SEQ ID NO: 4259 - protein, 9 aa, Homo sapiens
  Table 1.2; KCNU1; ENSG00000215262; HLA -B*35:01,HLA-B*35:03,HLA-B*54:01,HLA-C*03:03,HLA-C*03:04, HLA-C*16:02
MATLTIGSL

SEQ ID NO: 4260 - protein, 9 aa, Homo sapiens
  Table 1.2; KCNU1; ENSG00000215262; HLA -A*23:01,HLA-A*25:01,HLA-A*26:01,HLA-A*32:01,HLA-B*15:03, HLA-B*27:05,HLA-B*35:01,HLA-B*35:03,HLA-B*46:01,HLA-B*55:01, HLA-B*58:01,HLA-C*02:02,HLA-C*03:03,HLA-C*03:04,HLA-C*16:01,
  HLA-C*16:02
MATTSTVGF

SEQ ID NO: 4261 - protein, 8 aa, Homo sapiens
  Table 1.2; KCNU1; ENSG00000215262; HLA -A*23:01
MLLSAQTF

SEQ ID NO: 4262 - protein, 9 aa, Homo sapiens
  Table 1.2; KCNU1; ENSG00000215262; HLA -A*02:01,HLA-A*02:04
MLLSAQTFV

SEQ ID NO: 4263 - protein, 8 aa, Homo sapiens
  Table 1.2; KCNU1; ENSG00000215262; HLA -B*18:01,HLA-B*35:01,HLA-B*55:01
MPLRASNY

SEQ ID NO: 4264 - protein, 9 aa, Homo sapiens
  Table 1.2; KCNU1; ENSG00000215262; HLA -B*27:02,HLA-B*27:05
MRVLSIKNY

SEQ ID NO: 4265 - protein, 9 aa, Homo sapiens
  Table 1.2; KCNU1; ENSG00000215262; HLA -A*02:03,HLA-A*02:04,HLA-A*02:07,HLA-A*68:02,HLA-B*57:01, HLA-B*58:01
MSFPEVARL

SEQ ID NO: 4266 - protein, 11 aa, Homo sapiens
  Table 1.2; KCNU1; ENSG00000215262; HLA -B*57:01
MSFPEVARLCF

SEQ ID NO: 4267 - protein, 10 aa, Homo sapiens
  Table 1.2; KCNU1; ENSG00000215262; HLA -B*18:01,HLA-B*44:02,HLA-B*44:03,HLA-C*16:04
NEEFSLQKSY

SEQ ID NO: 4268 - protein, 8 aa, Homo sapiens
  Table 1.2; KCNU1; ENSG00000215262; HLA -B*18:01
NHIVACVF

SEQ ID NO: 4269 - protein, 8 aa, Homo sapiens
  Table 1.2; KCNU1; ENSG00000215262; HLA -B*51:01
NIMRVLSI

SEQ ID NO: 4270 - protein, 10 aa, Homo sapiens
  Table 1.2; KCNU1; ENSG00000215262; HLA -A*25:01,HLA-B*39:01
NITVDSVTAF

SEQ ID NO: 4271 - protein, 8 aa, Homo sapiens
  Table 1.2; KCNU1; ENSG00000215262; HLA -B*37:01
NLHLSTAF

SEQ ID NO: 4272 - protein, 8 aa, Homo sapiens
  Table 1.2; KCNU1; ENSG00000215262; HLA -B*51:01
NPPPQVRI

SEQ ID NO: 4273 - protein, 9 aa, Homo sapiens
  Table 1.2; KCNU1; ENSG00000215262; HLA -B*07:02,HLA-C*07:02
NPRNTFGQL

SEQ ID NO: 4274 - protein, 10 aa, Homo sapiens
  Table 1.2; KCNU1; ENSG00000215262; HLA -B*07:02
NPRNTFGQLF

SEQ ID NO: 4275 - protein, 8 aa, Homo sapiens
  Table 1.2; KCNU1; ENSG00000215262; HLA -B*51:01
NPSNIHFI

SEQ ID NO: 4276 - protein, 11 aa, Homo sapiens
  Table 1.2; KCNU1; ENSG00000215262; HLA -A*68:02
NPSNIHFIEQL

SEQ ID NO: 4277 - protein, 9 aa, Homo sapiens
  Table 1.2; KCNU1; ENSG00000215262; HLA -C*12:03
NSADPVGSC

SEQ ID NO: 4278 - protein, 8 aa, Homo sapiens
  Table 1.2; KCNU1; ENSG00000215262; HLA -B*51:01
NSIISSQI

SEQ ID NO: 4279 - protein, 11 aa, Homo sapiens
  Table 1.2; KCNU1; ENSG00000215262; HLA -B*57:01
NSLSFPKQIAW

SEQ ID NO: 4280 - protein, 8 aa, Homo sapiens
  Table 1.2; KCNU1; ENSG00000215262; HLA -C*05:01,HLA-C*07:04
NYDSTTRI

SEQ ID NO: 4281 - protein, 9 aa, Homo sapiens
  Table 1.2; KCNU1; ENSG00000215262; HLA -A*23:01,HLA-A*24:02,HLA-B*35:01,HLA-B*35:03
NYDSTTRII

SEQ ID NO: 4282 - protein, 10 aa, Homo sapiens
  Table 1.2; KCNU1; ENSG00000215262; HLA -A*24:02
NYDSTTRIII

SEQ ID NO: 4283 - protein, 9 aa, Homo sapiens
  Table 1.2; KCNU1; ENSG00000215262; HLA -A*23:01,HLA-A*24:02,HLA-B*35:03,HLA-B*38:01,HLA-C*14:02
NYIPEMVEL

SEQ ID NO: 4284 - protein, 10 aa, Homo sapiens
  Table 1.2; KCNU1; ENSG00000215262; HLA -A*23:01,HLA-A*24:02,HLA-A*29:02
NYIPEMVELF

SEQ ID NO: 4285 - protein, 10 aa, Homo sapiens
  Table 1.2; KCNU1; ENSG00000215262; HLA -B*27:02
PEMVELFANK

SEQ ID NO: 4286 - protein, 11 aa, Homo sapiens
  Table 1.2; KCNU1; ENSG00000215262; HLA -B*07:02
PPPQPSSNQTL

SEQ ID NO: 4287 - protein, 10 aa, Homo sapiens
  Table 1.2; KCNU1; ENSG00000215262; HLA -B*27:02
PSLELETIFK

SEQ ID NO: 4288 - protein, 11 aa, Homo sapiens
  Table 1.2; KCNU1; ENSG00000215262; HLA -A*01:01,HLA-A*30:02
PTIDSVTETLY

SEQ ID NO: 4289 - protein, 8 aa, Homo sapiens
  Table 1.2; KCNU1; ENSG00000215262; HLA -C*07:01
PVGSCSSY

SEQ ID NO: 4290 - protein, 9 aa, Homo sapiens
  Table 1.2; KCNU1; ENSG00000215262; HLA -A*23:01,HLA-A*25:01,HLA-A*26:01,HLA-B*15:01,HLA-B*15:03, HLA-B*35:01,HLA-B*46:01,HLA-B*57:01,HLA-B*58:01,HLA-C*02:02, HLA-C*03:04,HLA-C*12:03,HLA-C*16:04
QAAFILSSF

SEQ ID NO: 4291 - protein, 9 aa, Homo sapiens
  Table 1.2; KCNU1; ENSG00000215262; HLA -B*37:01,HLA-B*56:01
QDSPPRVSA

SEQ ID NO: 4292 - protein, 10 aa, Homo sapiens
  Table 1.2; KCNU1; ENSG00000215262; HLA -A*30:01
QETNLHLSTA

SEQ ID NO: 4293 - protein, 11 aa, Homo sapiens
  Table 1.2; KCNU1; ENSG00000215262; HLA -A*30:01,HLA-B*18:01,HLA-B*40:02,HLA-B*44:02,HLA-B*44:03
QETNLHLSTAF

SEQ ID NO: 4294 - protein, 11 aa, Homo sapiens
  Table 1.2; KCNU1; ENSG00000215262; HLA -B*38:01,HLA-B*39:01
QHDVEQDSDQL

SEQ ID NO: 4295 - protein, 8 aa, Homo sapiens
  Table 1.2; KCNU1; ENSG00000215262; HLA -B*13:02,HLA-B*39:01,HLA-B*51:01
QHITVPSV

SEQ ID NO: 4296 - protein, 10 aa, Homo sapiens
  Table 1.2; KCNU1; ENSG00000215262; HLA -A*33:03
QHITVPSVKR

SEQ ID NO: 4297 - protein, 8 aa, Homo sapiens
  Table 1.2; KCNU1; ENSG00000215262; HLA -C*05:01
QLDSSGMF

SEQ ID NO: 4298 - protein, 9 aa, Homo sapiens
  Table 1.2; KCNU1; ENSG00000215262; HLA -A*01:01
QLDSSGMFH

SEQ ID NO: 4299 - protein, 10 aa, Homo sapiens
  Table 1.2; KCNU1; ENSG00000215262; HLA -A*01:01
QLDSSGMFHW

SEQ ID NO: 4300 - protein, 9 aa, Homo sapiens
  Table 1.2; KCNU1; ENSG00000215262; HLA -B*07:02,HLA-B*35:01,HLA-C*07:02
QPRTNSLSF

SEQ ID NO: 4301 - protein, 9 aa, Homo sapiens
  Table 1.2; KCNU1; ENSG00000215262; HLA -B*56:01
QPSSNQTLV

SEQ ID NO: 4302 - protein, 8 aa, Homo sapiens
  Table 1.2; KCNU1; ENSG00000215262; HLA -B*08:01
QSHNKVYL

SEQ ID NO: 4303 - protein, 8 aa, Homo sapiens
  Table 1.2; KCNU1; ENSG00000215262; HLA -C*01:02,HLA-C*03:03,HLA-C*03:04
QTFVGQVL

SEQ ID NO: 4304 - protein, 9 aa, Homo sapiens
  Table 1.2; KCNU1; ENSG00000215262; HLA -A*68:02
QTFVGQVLV

SEQ ID NO: 4305 - protein, 9 aa, Homo sapiens
  Table 1.2; KCNU1; ENSG00000215262; HLA -A*32:01,HLA-B*57:01
QTKLRNETW

SEQ ID NO: 4306 - protein, 9 aa, Homo sapiens
  Table 1.2; KCNU1; ENSG00000215262; HLA -B*08:01
QVRIRKNTL

SEQ ID NO: 4307 - protein, 9 aa, Homo sapiens
  Table 1.2; KCNU1; ENSG00000215262; HLA -A*32:01,HLA-B*46:01,HLA-B*58:01,HLA-C*03:04
RAIKTSNSV

SEQ ID NO: 4308 - protein, 11 aa, Homo sapiens
  Table 1.2; KCNU1; ENSG00000215262; HLA -B*57:01,HLA-B*58:01
RAIKTSNSVKF

SEQ ID NO: 4309 - protein, 9 aa, Homo sapiens
  Table 1.2; KCNU1; ENSG00000215262; HLA -A*24:02
RFLWNFPQI

SEQ ID NO: 4310 - protein, 11 aa, Homo sapiens
  Table 1.2; KCNU1; ENSG00000215262; HLA -A*24:02
RFMAADDKIKF

SEQ ID NO: 4311 - protein, 11 aa, Homo sapiens
  Table 1.2; KCNU1; ENSG00000215262; HLA -A*24:02
RFVITRPANEF

SEQ ID NO: 4312 - protein, 9 aa, Homo sapiens
  Table 1.2; KCNU1; ENSG00000215262; HLA -B*15:03
RKVPILTEL

SEQ ID NO: 4313 - protein, 8 aa, Homo sapiens
  Table 1.2; KCNU1; ENSG00000215262; HLA -A*02:04
RLLELPQI

SEQ ID NO: 4314 - protein, 9 aa, Homo sapiens
  Table 1.2; KCNU1; ENSG00000215262; HLA -A*02:01,HLA-A*02:03,HLA-A*02:04,HLA-A*02:07
RLLELPQIL

SEQ ID NO: 4315 - protein, 11 aa, Homo sapiens
  Table 1.2; KCNU1; ENSG00000215262; HLA -A*02:01,HLA-A*02:03,HLA-A*02:04
RLLELPQILQI

SEQ ID NO: 4316 - protein, 9 aa, Homo sapiens
  Table 1.2; KCNU1; ENSG00000215262; HLA -A*02:01,HLA-A*02:03,HLA-A*02:04,HLA-B*13:02
RQHITVPSV

SEQ ID NO: 4317 - protein, 10 aa, Homo sapiens
  Table 1.2; KCNU1; ENSG00000215262; HLA -A*03:01,HLA-A*03:02
RQHITVPSVK

SEQ ID NO: 4318 - protein, 9 aa, Homo sapiens
  Table 1.2; KCNU1; ENSG00000215262; HLA -B*57:01
RSLHFQGQF

SEQ ID NO: 4319 - protein, 10 aa, Homo sapiens
  Table 1.2; KCNU1; ENSG00000215262; HLA -A*31:01
RSLHFQGQFR

SEQ ID NO: 4320 - protein, 9 aa, Homo sapiens
  Table 1.2; KCNU1; ENSG00000215262; HLA -B*57:01
RTFIMFFTL

SEQ ID NO: 4321 - protein, 9 aa, Homo sapiens
  Table 1.2; KCNU1; ENSG00000215262; HLA -A*03:01,HLA-A*03:02,HLA-A*11:01,HLA-A*31:01
RTNSLSFPK

SEQ ID NO: 4322 - protein, 8 aa, Homo sapiens
  Table 1.2; KCNU1; ENSG00000215262; HLA -C*05:01
SADPVGSC

SEQ ID NO: 4323 - protein, 11 aa, Homo sapiens
  Table 1.2; KCNU1; ENSG00000215262; HLA -A*01:01,HLA-A*30:02,HLA-B*35:01
SADPVGSCSSY

SEQ ID NO: 4324 - protein, 9 aa, Homo sapiens
  Table 1.2; KCNU1; ENSG00000215262; HLA -A*31:01
SAMKWEDLR

SEQ ID NO: 4325 - protein, 9 aa, Homo sapiens
  Table 1.2; KCNU1; ENSG00000215262; HLA -C*01:02
SAPMGLRNF

SEQ ID NO: 4326 - protein, 9 aa, Homo sapiens
  Table 1.2; KCNU1; ENSG00000215262; HLA -C*16:02
SAQTFVGQV

SEQ ID NO: 4327 - protein, 10 aa, Homo sapiens
  Table 1.2; KCNU1; ENSG00000215262; HLA -C*03:04
SAQTFVGQVL

SEQ ID NO: 4328 - protein, 9 aa, Homo sapiens
  Table 1.2; KCNU1; ENSG00000215262; HLA -B*37:01
SDQLDSSGM

SEQ ID NO: 4329 - protein, 9 aa, Homo sapiens
  Table 1.2; KCNU1; ENSG00000215262; HLA -A*23:01,HLA-A*30:01,HLA-A*32:01,HLA-B*37:01,HLA-B*44:02, HLA-B*44:03
SDVNPRNTF

SEQ ID NO: 4330 - protein, 11 aa, Homo sapiens
  Table 1.2; KCNU1; ENSG00000215262; HLA -A*23:01,HLA-A*24:02,HLA-A*29:02
SFLDSLLATAF

SEQ ID NO: 4331 - protein, 10 aa, Homo sapiens
  Table 1.2; KCNU1; ENSG00000215262; HLA -A*24:02
SFPEVARLCF

SEQ ID NO: 4332 - protein, 9 aa, Homo sapiens
  Table 1.2; KCNU1; ENSG00000215262; HLA -A*31:01
SGDPWLKGR

SEQ ID NO: 4333 - protein, 9 aa, Homo sapiens
  Table 1.2; KCNU1; ENSG00000215262; HLA -B*27:05,HLA-B*38:01,HLA-B*39:01
SHAEDISNI

SEQ ID NO: 4334 - protein, 10 aa, Homo sapiens
  Table 1.2; KCNU1; ENSG00000215262; HLA -B*38:01,HLA-B*39:01
SHAEDISNIM

SEQ ID NO: 4335 - protein, 10 aa, Homo sapiens
  Table 1.2; KCNU1; ENSG00000215262; HLA -A*31:01,HLA-A*33:03,HLA-A*68:01
SIKNYDSTTR

SEQ ID NO: 4336 - protein, 8 aa, Homo sapiens
  Table 1.2; KCNU1; ENSG00000215262; HLA -A*31:01,HLA-A*33:03,HLA-A*68:01
SISNFTTR

SEQ ID NO: 4337 - protein, 8 aa, Homo sapiens
  Table 1.2; KCNU1; ENSG00000215262; HLA -A*02:04,HLA-B*13:02
SIVDIFTI

SEQ ID NO: 4338 - protein, 8 aa, Homo sapiens
  Table 1.2; KCNU1; ENSG00000215262; HLA -A*03:02
SLDKVTLK

SEQ ID NO: 4339 - protein, 9 aa, Homo sapiens
  Table 1.2; KCNU1; ENSG00000215262; HLA -A*02:07,HLA-A*03:01
SLDKVTLKR

SEQ ID NO: 4340 - protein, 10 aa, Homo sapiens
  Table 1.2; KCNU1; ENSG00000215262; HLA -A*02:01
SLDLFGILCV

SEQ ID NO: 4341 - protein, 9 aa, Homo sapiens
  Table 1.2; KCNU1; ENSG00000215262; HLA -B*44:02
SLDYLQREW

SEQ ID NO: 4342 - protein, 10 aa, Homo sapiens
  Table 1.2; KCNU1; ENSG00000215262; HLA -A*02:01,HLA-A*02:03,HLA-A*02:04,HLA-A*02:07
SLFTDGFCGL

SEQ ID NO: 4343 - protein, 9 aa, Homo sapiens
  Table 1.2; KCNU1; ENSG00000215262; HLA -A*03:01,HLA-A*03:02,HLA-A*11:01
SLFVEQNKK

SEQ ID NO: 4344 - protein, 10 aa, Homo sapiens
  Table 1.2; KCNU1; ENSG00000215262; HLA -A*02:03
SLFVEQNKKV

SEQ ID NO: 4345 - protein, 10 aa, Homo sapiens
  Table 1.2; KCNU1; ENSG00000215262; HLA -A*02:03
SLHETILSDV

SEQ ID NO: 4346 - protein, 10 aa, Homo sapiens
  Table 1.2; KCNU1; ENSG00000215262; HLA -A*29:02
SLLATAFYNY

SEQ ID NO: 4347 - protein, 9 aa, Homo sapiens
  Table 1.2; KCNU1; ENSG00000215262; HLA -A*02:01,HLA-A*02:03,HLA-A*02:04,HLA-A*02:07,HLA-B*13:02, HLA-B*55:01
SLQETNLHL

SEQ ID NO: 4348 - protein, 8 aa, Homo sapiens
  Table 1.2; KCNU1; ENSG00000215262; HLA -B*13:02
SLQKSYEI

SEQ ID NO: 4349 - protein, 11 aa, Homo sapiens
  Table 1.2; KCNU1; ENSG00000215262; HLA -A*03:02,HLA-A*11:01
SLQKSYEIVNK

SEQ ID NO: 4350 - protein, 10 aa, Homo sapiens
  Table 1.2; KCNU1; ENSG00000215262; HLA -A*31:01
SMKNKILTQR

SEQ ID NO: 4351 - protein, 9 aa, Homo sapiens
  Table 1.2; KCNU1; ENSG00000215262; HLA -B*08:01
SNIMRVLSI

SEQ ID NO: 4352 - protein, 8 aa, Homo sapiens
  Table 1.2; KCNU1; ENSG00000215262; HLA -B*08:01,HLA-C*16:01
SNYTRKEL

SEQ ID NO: 4353 - protein, 9 aa, Homo sapiens
  Table 1.2; KCNU1; ENSG00000215262; HLA -A*68:01
SPVYSYQPR

SEQ ID NO: 4354 - protein, 9 aa, Homo sapiens
  Table 1.2; KCNU1; ENSG00000215262; HLA -B*39:01
SQIPLGDNA

SEQ ID NO: 4355 - protein, 8 aa, Homo sapiens
  Table 1.2; KCNU1; ENSG00000215262; HLA -C*05:01
SSDPSPSV

SEQ ID NO: 4356 - protein, 9 aa, Homo sapiens
  Table 1.2; KCNU1; ENSG00000215262; HLA -A*03:01,HLA-A*11:01,HLA-A*25:01,HLA-A*31:01,HLA-A*33:01, HLA-A*33:03,HLA-A*68:01,HLA-B*57:01,HLA-B*58:01,HLA-C*07:06
SSISNFTTR

SEQ ID NO: 4357 - protein, 11 aa, Homo sapiens
  Table 1.2; KCNU1; ENSG00000215262; HLA -A*11:01
SSQIPLGDNAK

SEQ ID NO: 4358 - protein, 9 aa, Homo sapiens
  Table 1.2; KCNU1; ENSG00000215262; HLA -A*02:01,HLA-B*13:02,HLA-B*39:01,HLA-B*51:01,HLA-C*03:03, HLA-C*03:04,HLA-C*05:01
SSSDPSPSV

SEQ ID NO: 4359 - protein, 9 aa, Homo sapiens
  Table 1.2; KCNU1; ENSG00000215262; HLA -A*03:01,HLA-A*03:02,HLA-A*11:01
SSYEALKGK

SEQ ID NO: 4360 - protein, 9 aa, Homo sapiens
  Table 1.2; KCNU1; ENSG00000215262; HLA -A*02:03
STAFSTGTV

SEQ ID NO: 4361 - protein, 10 aa, Homo sapiens
  Table 1.2; KCNU1; ENSG00000215262; HLA -A*25:01,HLA-A*26:01,HLA-B*15:01,HLA-B*15:03,HLA-C*07:04
STAFSTGTVF

SEQ ID NO: 4362 - protein, 8 aa, Homo sapiens
  Table 1.2; KCNU1; ENSG00000215262; HLA -B*37:01
STSSISNF

SEQ ID NO: 4363 - protein, 11 aa, Homo sapiens
  Table 1.2; KCNU1; ENSG00000215262; HLA -A*03:02,HLA-A*11:01,HLA-A*31:01,HLA-A*33:01,HLA-A*33:03, HLA-A*68:01,HLA-C*07:06
STSSISNFTTR

SEQ ID NO: 4364 - protein, 9 aa, Homo sapiens
  Table 1.2; KCNU1; ENSG00000215262; HLA -A*02:04,HLA-A*68:01,HLA-A*68:02,HLA-B*13:02,HLA-B*57:01
STTRIIIQI

SEQ ID NO: 4365 - protein, 10 aa, Homo sapiens
  Table 1.2; KCNU1; ENSG00000215262; HLA -A*68:02
STTRIIIQIL

SEQ ID NO: 4366 - protein, 9 aa, Homo sapiens
  Table 1.2; KCNU1; ENSG00000215262; HLA -A*68:02,HLA-B*39:01
STVGFGDVV

SEQ ID NO: 4367 - protein, 11 aa, Homo sapiens
  Table 1.2; KCNU1; ENSG00000215262; HLA -A*03:02,HLA-A*11:01,HLA-A*31:01,HLA-A*68:01,HLA-B*27:02, HLA-C*07:06
STVGFGDVVAK

SEQ ID NO: 4368 - protein, 9 aa, Homo sapiens
  Table 1.2; KCNU1; ENSG00000215262; HLA -A*01:01,HLA-A*25:01,HLA-A*26:01,HLA-A*29:02,HLA-A*30:02, HLA-A*32:01,HLA-B*15:01,HLA-B*35:01
SVSEETPGY

SEQ ID NO: 4369 - protein, 9 aa, Homo sapiens
  Table 1.2; KCNU1; ENSG00000215262; HLA -A*32:01
SVTAFLRNF

SEQ ID NO: 4370 - protein, 9 aa, Homo sapiens
  Table 1.2; KCNU1; ENSG00000215262; HLA -A*02:04,HLA-A*24:02,HLA-A*29:02,HLA-A*68:02
SYFESIYLV

SEQ ID NO: 4371 - protein, 10 aa, Homo sapiens
  Table 1.2; KCNU1; ENSG00000215262; HLA -A*29:02
SYFESIYLVM

SEQ ID NO: 4372 - protein, 9 aa, Homo sapiens
  Table 1.2; KCNU1; ENSG00000215262; HLA -A*23:01,HLA-A*24:02,HLA-B*07:02,HLA-B*08:01,HLA-C*01:02, HLA-C*14:02
SYQPRTNSL

SEQ ID NO: 4373 - protein, 11 aa, Homo sapiens
  Table 1.2; KCNU1; ENSG00000215262; HLA -A*23:01,HLA-A*24:02
SYQPRTNSLSF

SEQ ID NO: 4374 - protein, 9 aa, Homo sapiens
  Table 1.2; KCNU1; ENSG00000215262; HLA -A*02:01,HLA-A*02:03,HLA-A*02:04,HLA-A*02:07,HLA-A*26:01, HLA-A*68:01,HLA-A*68:02,HLA-B*13:02,HLA-B*51:01,HLA-B*54:01, HLA-C*02:02,HLA-C*12:03,HLA-C*16:02
TAAGFIHLV

SEQ ID NO: 4375 - protein, 8 aa, Homo sapiens
  Table 1.2; KCNU1; ENSG00000215262; HLA -B*08:01
TAFLRNFL

SEQ ID NO: 4376 - protein, 9 aa, Homo sapiens
  Table 1.2; KCNU1; ENSG00000215262; HLA -A*31:01,HLA-B*57:01
TAFLRNFLR

SEQ ID NO: 4377 - protein, 8 aa, Homo sapiens
  Table 1.2; KCNU1; ENSG00000215262; HLA -B*51:01
TAFSTGTV

SEQ ID NO: 4378 - protein, 9 aa, Homo sapiens
  Table 1.2; KCNU1; ENSG00000215262; HLA -A*23:01,HLA-A*25:01,HLA-A*26:01,HLA-A*29:02,HLA-A*30:02, HLA-A*32:01,HLA-B*07:02,HLA-B*15:01,HLA-B*15:03,HLA-B*18:01, HLA-B*27:02,HLA-B*27:05,HLA-B*35:01,HLA-B*35:03,HLA-B*38:01,
  HLA-B*39:01,HLA-B*46:01,HLA-B*51:01,HLA-B*54:01,HLA-B*55:01, HLA-B*56:01,HLA-B*57:01,HLA-B*58:01,HLA-C*01:02,HLA-C*02:02, HLA-C*03:03,HLA-C*03:04,HLA-C*05:01,HLA-C*07:02,HLA-C*07:04, HLA-C*07:06,HLA-C*12:03,HLA-C*14:02,HLA-C*16:01,HLA-C*16:02,
  HLA-C*16:04
TAFSTGTVF

SEQ ID NO: 4379 - protein, 9 aa, Homo sapiens
  Table 1.2; KCNU1; ENSG00000215262; HLA -A*68:02,HLA-B*35:01,HLA-B*35:03,HLA-B*51:01,HLA-B*54:01, HLA-C*02:02,HLA-C*03:04
TAFYNYHVL

SEQ ID NO: 4380 - protein, 8 aa, Homo sapiens
  Table 1.2; KCNU1; ENSG00000215262; HLA -A*30:01,HLA-B*18:01,HLA-B*37:01,HLA-B*40:01,HLA-B*40:02, HLA-B*49:01
TEAIMATL

SEQ ID NO: 4381 - protein, 9 aa, Homo sapiens
  Table 1.2; KCNU1; ENSG00000215262; HLA -B*49:01
TEAIMATLT

SEQ ID NO: 4382 - protein, 10 aa, Homo sapiens
  Table 1.2; KCNU1; ENSG00000215262; HLA -B*49:01
TEAIMATLTI

SEQ ID NO: 4383 - protein, 8 aa, Homo sapiens
  Table 1.2; KCNU1; ENSG00000215262; HLA -B*49:01
TEIQAAFI

SEQ ID NO: 4384 - protein, 9 aa, Homo sapiens
  Table 1.2; KCNU1; ENSG00000215262; HLA -A*30:01,HLA-B*40:01,HLA-B*44:02,HLA-B*44:03
TEIQAAFIL

SEQ ID NO: 4385 - protein, 9 aa, Homo sapiens
  Table 1.2; KCNU1; ENSG00000215262; HLA -B*49:01
TELKNPSNI

SEQ ID NO: 4386 - protein, 11 aa, Homo sapiens
  Table 1.2; KCNU1; ENSG00000215262; HLA -B*44:03
TELKNPSNIHF

SEQ ID NO: 4387 - protein, 8 aa, Homo sapiens
  Table 1.2; KCNU1; ENSG00000215262; HLA -B*49:01
TETLYSPV

SEQ ID NO: 4388 - protein, 9 aa, Homo sapiens
  Table 1.2; KCNU1; ENSG00000215262; HLA -A*30:01,HLA-B*15:03,HLA-B*18:01,HLA-B*27:02,HLA-B*37:01, HLA-B*40:01,HLA-B*44:02,HLA-B*44:03,HLA-B*49:01,HLA-C*16:04
TETLYSPVY

SEQ ID NO: 4389 - protein, 11 aa, Homo sapiens
  Table 1.2; KCNU1; ENSG00000215262; HLA -B*18:01
TETLYSPVYSY

SEQ ID NO: 4390 - protein, 8 aa, Homo sapiens
  Table 1.2; KCNU1; ENSG00000215262; HLA -A*23:01
TFIMFFTL

SEQ ID NO: 4391 - protein, 8 aa, Homo sapiens
  Table 1.2; KCNU1; ENSG00000215262; HLA -C*01:02,HLA-C*14:02
TFISGSAM

SEQ ID NO: 4392 - protein, 10 aa, Homo sapiens
  Table 1.2; KCNU1; ENSG00000215262; HLA -A*23:01,HLA-A*24:02,HLA-A*25:01
TFISGSAMKW

SEQ ID NO: 4393 - protein, 9 aa, Homo sapiens
  Table 1.2; KCNU1; ENSG00000215262; HLA -A*23:01,HLA-A*24:02
TFVGQVLVI

SEQ ID NO: 4394 - protein, 8 aa, Homo sapiens
  Table 1.2; KCNU1; ENSG00000215262; HLA -B*08:01
TGKSKYKF

SEQ ID NO: 4395 - protein, 9 aa, Homo sapiens
  Table 1.2; KCNU1; ENSG00000215262; HLA -B*15:03,HLA-B*39:01
TGTVFSGSF

SEQ ID NO: 4396 - protein, 11 aa, Homo sapiens
  Table 1.2; KCNU1; ENSG00000215262; HLA -B*38:01
THSDTNCPPTI

SEQ ID NO: 4397 - protein, 9 aa, Homo sapiens
  Table 1.2; KCNU1; ENSG00000215262; HLA -A*02:07,HLA-B*35:03,HLA-B*38:01,HLA-C*05:01
TIDSVTETL

SEQ ID NO: 4398 - protein, 10 aa, Homo sapiens
  Table 1.2; KCNU1; ENSG00000215262; HLA -A*01:01
TIDSVTETLY

SEQ ID NO: 4399 - protein, 9 aa, Homo sapiens
  Table 1.2; KCNU1; ENSG00000215262; HLA -A*29:02
TIFKCYLAY

SEQ ID NO: 4400 - protein, 9 aa, Homo sapiens
  Table 1.2; KCNU1; ENSG00000215262; HLA -A*03:02,HLA-A*11:01,HLA-A*31:01,HLA-A*33:01,HLA-A*33:03, HLA-A*68:01,HLA-B*27:02,HLA-B*27:05,HLA-C*07:06
TILSDVNPR

SEQ ID NO: 4401 - protein, 9 aa, Homo sapiens
  Table 1.2; KCNU1; ENSG00000215262; HLA -A*25:01,HLA-A*26:01,HLA-A*29:02,HLA-A*32:01,HLA-B*15:01, HLA-B*46:01
TIPPTFISY

SEQ ID NO: 4402 - protein, 11 aa, Homo sapiens
  Table 1.2; KCNU1; ENSG00000215262; HLA -A*02:07
TIPPTFISYYL

SEQ ID NO: 4403 - protein, 9 aa, Homo sapiens
  Table 1.2; KCNU1; ENSG00000215262; HLA -A*02:01,HLA-A*02:03
TLGSLILFA

SEQ ID NO: 4404 - protein, 9 aa, Homo sapiens
  Table 1.2; KCNU1; ENSG00000215262; HLA -B*13:02
TLTIGSLQI

SEQ ID NO: 4405 - protein, 9 aa, Homo sapiens
  Table 1.2; KCNU1; ENSG00000215262; HLA -B*35:01,HLA-B*35:03
TLVDTEAIM

SEQ ID NO: 4406 - protein, 9 aa, Homo sapiens
  Table 1.2; KCNU1; ENSG00000215262; HLA -A*01:01,HLA-A*03:01,HLA-A*25:01,HLA-A*26:01,HLA-A*29:02, HLA-A*30:02,HLA-A*32:01,HLA-B*15:01,HLA-B*15:03,HLA-B*35:01, HLA-B*46:01,HLA-C*14:02
TLYSPVYSY

SEQ ID NO: 4407 - protein, 9 aa, Homo sapiens
  Table 1.2; KCNU1; ENSG00000215262; HLA -A*23:01
TNLHLSTAF

SEQ ID NO: 4408 - protein, 9 aa, Homo sapiens
  Table 1.2; KCNU1; ENSG00000215262; HLA -B*07:02,HLA-C*07:02
TPKDVRRAL

SEQ ID NO: 4409 - protein, 8 aa, Homo sapiens
  Table 1.2; KCNU1; ENSG00000215262; HLA -B*08:01
TSLDKVTL

SEQ ID NO: 4410 - protein, 9 aa, Homo sapiens
  Table 1.2; KCNU1; ENSG00000215262; HLA -A*03:01,HLA-A*03:02,HLA-A*11:01,HLA-A*33:01,HLA-A*33:03, HLA-A*68:01
TSLDKVTLK

SEQ ID NO: 4411 - protein, 10 aa, Homo sapiens
  Table 1.2; KCNU1; ENSG00000215262; HLA -A*33:01
TSLDKVTLKR

SEQ ID NO: 4412 - protein, 9 aa, Homo sapiens
  Table 1.2; KCNU1; ENSG00000215262; HLA -A*03:02,HLA-A*11:01,HLA-B*27:02,HLA-C*07:06
TSLFVEQNK

SEQ ID NO: 4413 - protein, 10 aa, Homo sapiens
  Table 1.2; KCNU1; ENSG00000215262; HLA -A*11:01,HLA-B*27:02
TSLFVEQNKK

SEQ ID NO: 4414 - protein, 9 aa, Homo sapiens
  Table 1.2; KCNU1; ENSG00000215262; HLA -A*31:01,HLA-A*33:03
TSLLSGRNR

SEQ ID NO: 4415 - protein, 9 aa, Homo sapiens
  Table 1.2; KCNU1; ENSG00000215262; HLA -A*03:02,HLA-A*11:01,HLA-A*31:01,HLA-A*33:03
TSNSVKFSK

SEQ ID NO: 4416 - protein, 10 aa, Homo sapiens
  Table 1.2; KCNU1; ENSG00000215262; HLA -A*68:01,HLA-C*07:06
TSSISNFTTR

SEQ ID NO: 4417 - protein, 9 aa, Homo sapiens
  Table 1.2; KCNU1; ENSG00000215262; HLA -A*26:01,HLA-A*32:01,HLA-B*07:02,HLA-B*15:01,HLA-B*15:03, HLA-B*39:01,HLA-B*46:01,HLA-C*01:02,HLA-C*03:03,HLA-C*03:04, HLA-C*14:02
TTFISGSAM

SEQ ID NO: 4418 - protein, 10 aa, Homo sapiens
  Table 1.2; KCNU1; ENSG00000215262; HLA -A*03:01,HLA-A*03:02,HLA-A*11:01,HLA-A*68:01
TTFISGSAMK

SEQ ID NO: 4419 - protein, 11 aa, Homo sapiens
  Table 1.2; KCNU1; ENSG00000215262; HLA -A*25:01,HLA-B*57:01,HLA-B*58:01
TTFISGSAMKW

SEQ ID NO: 4420 - protein, 11 aa, Homo sapiens
  Table 1.2; KCNU1; ENSG00000215262; HLA -A*01:01,HLA-A*68:02
TTSTVGFGDVV

SEQ ID NO: 4421 - protein, 8 aa, Homo sapiens
  Table 1.2; KCNU1; ENSG00000215262; HLA -B*37:01,HLA-C*05:01
TVDSVTAF

SEQ ID NO: 4422 - protein, 9 aa, Homo sapiens
  Table 1.2; KCNU1; ENSG00000215262; HLA -A*01:01,HLA-A*02:01,HLA-A*02:07,HLA-A*68:02,HLA-B*13:02, HLA-B*35:03,HLA-B*38:01,HLA-C*05:01
TVDSVTAFL

SEQ ID NO: 4423 - protein, 10 aa, Homo sapiens
  Table 1.2; KCNU1; ENSG00000215262; HLA -A*68:01,HLA-B*27:02
TVDSVTAFLR

SEQ ID NO: 4424 - protein, 11 aa, Homo sapiens
  Table 1.2; KCNU1; ENSG00000215262; HLA -A*68:02
TVFSGSFLDSL

SEQ ID NO: 4425 - protein, 8 aa, Homo sapiens
  Table 1.2; KCNU1; ENSG00000215262; HLA -B*39:01
TVGFGDVV

SEQ ID NO: 4426 - protein, 10 aa, Homo sapiens
  Table 1.2; KCNU1; ENSG00000215262; HLA -A*03:01,HLA-A*03:02,HLA-A*11:01,HLA-A*68:01,HLA-B*27:02
TVGFGDVVAK

SEQ ID NO: 4427 - protein, 8 aa, Homo sapiens
  Table 1.2; KCNU1; ENSG00000215262; HLA -C*05:01
VADSCTSL

SEQ ID NO: 4428 - protein, 9 aa, Homo sapiens
  Table 1.2; KCNU1; ENSG00000215262; HLA -A*01:01,HLA-A*02:07,HLA-B*35:03,HLA-B*38:01,HLA-C*04:01, HLA-C*05:01,HLA-C*07:04
VADSCTSLL

SEQ ID NO: 4429 - protein, 8 aa, Homo sapiens
  Table 1.2; KCNU1; ENSG00000215262; HLA -B*46:01
VAVESAEA

SEQ ID NO: 4430 - protein, 9 aa, Homo sapiens
  Table 1.2; KCNU1; ENSG00000215262; HLA -B*46:01,HLA-C*03:03,HLA-C*03:04
VAVESAEAC

SEQ ID NO: 4431 - protein, 10 aa, Homo sapiens
  Table 1.2; KCNU1; ENSG00000215262; HLA -B*35:03
VAVESAEACL

SEQ ID NO: 4432 - protein, 8 aa, Homo sapiens
  Table 1.2; KCNU1; ENSG00000215262; HLA -B*37:01
VDSVTAFL

SEQ ID NO: 4433 - protein, 10 aa, Homo sapiens
  Table 1.2; KCNU1; ENSG00000215262; HLA -A*30:01
VDTEAIMATL

SEQ ID NO: 4434 - protein, 9 aa, Homo sapiens
  Table 1.2; KCNU1; ENSG00000215262; HLA -B*40:01
VENSGDPWL

SEQ ID NO: 4435 - protein, 10 aa, Homo sapiens
  Table 1.2; KCNU1; ENSG00000215262; HLA -A*03:02,HLA-A*11:01,HLA-B*27:02
VENSGDPWLK

SEQ ID NO: 4436 - protein, 8 aa, Homo sapiens
  Table 1.2; KCNU1; ENSG00000215262; HLA -B*37:01
VEQNKKVM

SEQ ID NO: 4437 - protein, 8 aa, Homo sapiens
  Table 1.2; KCNU1; ENSG00000215262; HLA -B*40:01
VESAEACL

SEQ ID NO: 4438 - protein, 9 aa, Homo sapiens
  Table 1.2; KCNU1; ENSG00000215262; HLA -B*40:01,HLA-B*49:01
VESAEACLI

SEQ ID NO: 4439 - protein, 10 aa, Homo sapiens
  Table 1.2; KCNU1; ENSG00000215262; HLA -B*49:01
VESAEACLII

SEQ ID NO: 4440 - protein, 9 aa, Homo sapiens
  Table 1.2; KCNU1; ENSG00000215262; HLA -A*23:01,HLA-A*24:02
VFIGSLDYL

SEQ ID NO: 4441 - protein, 10 aa, Homo sapiens
  Table 1.2; KCNU1; ENSG00000215262; HLA -A*23:01,HLA-A*24:02,HLA-C*14:02
VFLGETPPSL

SEQ ID NO: 4442 - protein, 9 aa, Homo sapiens
  Table 1.2; KCNU1; ENSG00000215262; HLA -A*29:02
VFNAFFSFY

SEQ ID NO: 4443 - protein, 9 aa, Homo sapiens
  Table 1.2; KCNU1; ENSG00000215262; HLA -A*23:01,HLA-C*14:02
VFVLSIGSL

SEQ ID NO: 4444 - protein, 10 aa, Homo sapiens
  Table 1.2; KCNU1; ENSG00000215262; HLA -A*23:01
VFVLSIGSLI

SEQ ID NO: 4445 - protein, 9 aa, Homo sapiens
  Table 1.2; KCNU1; ENSG00000215262; HLA -A*03:01,HLA-A*03:02,HLA-A*11:01,HLA-A*31:01,HLA-A*68:01, HLA-B*27:02,HLA-B*27:05,HLA-C*07:04,HLA-C*07:06
VGFGDVVAK

SEQ ID NO: 4446 - protein, 9 aa, Homo sapiens
  Table 1.2; KCNU1; ENSG00000215262; HLA -A*23:01,HLA-A*24:02,HLA-A*32:01,HLA-B*15:01,HLA-B*15:03, HLA-B*46:01,HLA-B*58:01,HLA-C*03:03,HLA-C*03:04,HLA-C*16:01, HLA-C*16:02
VITRPANEF

SEQ ID NO: 4447 - protein, 9 aa, Homo sapiens
  Table 1.2; KCNU1; ENSG00000215262; HLA -A*01:01
VLELLQMLV

SEQ ID NO: 4448 - protein, 9 aa, Homo sapiens
  Table 1.2; KCNU1; ENSG00000215262; HLA -A*03:02,HLA-B*27:05,HLA-B*39:01
VLSPPPQPS

SEQ ID NO: 4449 - protein, 10 aa, Homo sapiens
  Table 1.2; KCNU1; ENSG00000215262; HLA -B*27:05
VLSPPPQPSS

SEQ ID NO: 4450 - protein, 9 aa, Homo sapiens
  Table 1.2; KCNU1; ENSG00000215262; HLA -A*02:04
VLVILVFVL

SEQ ID NO: 4451 - protein, 8 aa, Homo sapiens
  Table 1.2; KCNU1; ENSG00000215262; HLA -A*02:03
VMATTSTV

SEQ ID NO: 4452 - protein, 9 aa, Homo sapiens
  Table 1.2; KCNU1; ENSG00000215262; HLA -A*32:01
VMATTSTVG

SEQ ID NO: 4453 - protein, 10 aa, Homo sapiens
  Table 1.2; KCNU1; ENSG00000215262; HLA -A*23:01,HLA-A*32:01,HLA-B*15:01,HLA-B*46:01,HLA-C*14:02
VMATTSTVGF

SEQ ID NO: 4454 - protein, 9 aa, Homo sapiens
  Table 1.2; KCNU1; ENSG00000215262; HLA -B*15:01,HLA-B*15:03,HLA-B*46:01,HLA-C*01:02
VMPLRASNY

SEQ ID NO: 4455 - protein, 11 aa, Homo sapiens
  Table 1.2; KCNU1; ENSG00000215262; HLA -A*24:02
VNPRNTFGQLF

SEQ ID NO: 4456 - protein, 11 aa, Homo sapiens
  Table 1.2; KCNU1; ENSG00000215262; HLA -B*56:01
VPILTELKNPS

SEQ ID NO: 4457 - protein, 8 aa, Homo sapiens
  Table 1.2; KCNU1; ENSG00000215262; HLA -A*01:01
VSEETPGY

SEQ ID NO: 4458 - protein, 9 aa, Homo sapiens
  Table 1.2; KCNU1; ENSG00000215262; HLA -B*58:01
VSSQLEQHL

SEQ ID NO: 4459 - protein, 9 aa, Homo sapiens
  Table 1.2; KCNU1; ENSG00000215262; HLA -A*68:02
VTAFLRNFL

SEQ ID NO: 4460 - protein, 9 aa, Homo sapiens
  Table 1.2; KCNU1; ENSG00000215262; HLA -A*01:01
VTETLYSPV

SEQ ID NO: 4461 - protein, 10 aa, Homo sapiens
  Table 1.2; KCNU1; ENSG00000215262; HLA -A*01:01,HLA-A*30:02
VTETLYSPVY

SEQ ID NO: 4462 - protein, 9 aa, Homo sapiens
  Table 1.2; KCNU1; ENSG00000215262; HLA -A*03:01,HLA-A*03:02,HLA-A*32:01,HLA-A*68:01,HLA-C*01:02
VTGGVSSQL

SEQ ID NO: 4463 - protein, 9 aa, Homo sapiens
  Table 1.2; KCNU1; ENSG00000215262; HLA -A*03:01
VVAKTSLGR

SEQ ID NO: 4464 - protein, 9 aa, Homo sapiens
  Table 1.2; KCNU1; ENSG00000215262; HLA -A*01:01,HLA-A*23:01,HLA-A*24:02,HLA-A*29:02,HLA-A*30:02, HLA-B*35:01,HLA-B*35:03,HLA-B*55:01,HLA-C*04:01
VYDEDPFAY

SEQ ID NO: 4465 - protein, 9 aa, Homo sapiens
  Table 1.2; KCNU1; ENSG00000215262; HLA -A*23:01,HLA-A*24:02,HLA-A*25:01,HLA-A*32:01,HLA-B*57:01, HLA-B*58:01
VYLPKIPSW

SEQ ID NO: 4466 - protein, 11 aa, Homo sapiens
  Table 1.2; KCNU1; ENSG00000215262; HLA -A*24:02
VYLPKIPSWNW

SEQ ID NO: 4467 - protein, 11 aa, Homo sapiens
  Table 1.2; KCNU1; ENSG00000215262; HLA -A*24:02
VYSYQPRTNSL

SEQ ID NO: 4468 - protein, 8 aa, Homo sapiens
  Table 1.2; KCNU1; ENSG00000215262; HLA -B*18:01
YDEDPFAY

SEQ ID NO: 4469 - protein, 8 aa, Homo sapiens
  Table 1.2; KCNU1; ENSG00000215262; HLA -B*37:01
YDSTTRII

SEQ ID NO: 4470 - protein, 9 aa, Homo sapiens
  Table 1.2; KCNU1; ENSG00000215262; HLA -B*44:02,HLA-B*44:03
YEALKGKKF

SEQ ID NO: 4471 - protein, 8 aa, Homo sapiens
  Table 1.2; KCNU1; ENSG00000215262; HLA -B*49:01
YEDKTIPI

SEQ ID NO: 4472 - protein, 10 aa, Homo sapiens
  Table 1.2; KCNU1; ENSG00000215262; HLA -A*30:01,HLA-B*40:01
YEDKTIPIDL

SEQ ID NO: 4473 - protein, 9 aa, Homo sapiens
  Table 1.2; KCNU1; ENSG00000215262; HLA -A*30:01,HLA-B*40:01,HLA-B*40:02,HLA-B*49:01
YEIVNKASQ

SEQ ID NO: 4474 - protein, 10 aa, Homo sapiens
  Table 1.2; KCNU1; ENSG00000215262; HLA -B*40:02,HLA-B*49:01
YEIVNKASQT

SEQ ID NO: 4475 - protein, 11 aa, Homo sapiens
  Table 1.2; KCNU1; ENSG00000215262; HLA -A*30:01
YEIVNKASQTT

SEQ ID NO: 4476 - protein, 9 aa, Homo sapiens
  Table 1.2; KCNU1; ENSG00000215262; HLA -A*23:01,HLA-A*29:02
YFESIYLVM

SEQ ID NO: 4477 - protein, 8 aa, Homo sapiens
  Table 1.2; KCNU1; ENSG00000215262; HLA -B*08:01
YILPGCAL

SEQ ID NO: 4478 - protein, 9 aa, Homo sapiens
  Table 1.2; KCNU1; ENSG00000215262; HLA -A*01:01,HLA-A*29:02
YILPGCALY

SEQ ID NO: 4479 - protein, 8 aa, Homo sapiens
  Table 1.2; KCNU1; ENSG00000215262; HLA -A*02:07
YIPEMVEL

SEQ ID NO: 4480 - protein, 9 aa, Homo sapiens
  Table 1.2; KCNU1; ENSG00000215262; HLA -A*02:07,HLA-A*24:02,HLA-A*26:01,HLA-A*29:02
YIPEMVELF

SEQ ID NO: 4481 - protein, 10 aa, Homo sapiens
  Table 1.2; KCNU1; ENSG00000215262; HLA -A*02:07
YIPEMVELFA

SEQ ID NO: 4482 - protein, 8 aa, Homo sapiens
  Table 1.2; KCNU1; ENSG00000215262; HLA -B*13:02
YLAYTTFI

SEQ ID NO: 4483 - protein, 9 aa, Homo sapiens
  Table 1.2; KCNU1; ENSG00000215262; HLA -A*02:03,HLA-A*02:04
YLKSNWLGL

SEQ ID NO: 4484 - protein, 8 aa, Homo sapiens
  Table 1.2; KCNU1; ENSG00000215262; HLA -A*24:02
YLPKIPSW

SEQ ID NO: 4485 - protein, 10 aa, Homo sapiens
  Table 1.2; KCNU1; ENSG00000215262; HLA -A*02:07,HLA-A*24:02
YLPKIPSWNW

SEQ ID NO: 4486 - protein, 10 aa, Homo sapiens
  Table 1.2; KCNU1; ENSG00000215262; HLA -A*02:03
YLVMATTSTV

SEQ ID NO: 4487 - protein, 9 aa, Homo sapiens
  Table 1.2; KCNU1; ENSG00000215262; HLA -A*02:04,HLA-A*68:02
YNYHVLELL

SEQ ID NO: 4488 - protein, 8 aa, Homo sapiens
  Table 1.2; KCNU1; ENSG00000215262; HLA -B*13:02,HLA-C*01:02
YQPRTNSL

SEQ ID NO: 4489 - protein, 10 aa, Homo sapiens
  Table 1.2; KCNU1; ENSG00000215262; HLA -A*24:02
YQPRTNSLSF

SEQ ID NO: 4490 - protein, 9 aa, Homo sapiens
  Table 1.2; KCNU1; ENSG00000215262; HLA -B*27:05,HLA-B*38:01,HLA-B*39:01
YRIIDEEEL

SEQ ID NO: 4491 - protein, 8 aa, Homo sapiens
  Table 1.2; KCNU1; ENSG00000215262; HLA -B*54:01
YSGDLHAA

SEQ ID NO: 4492 - protein, 10 aa, Homo sapiens
  Table 1.2; KCNU1; ENSG00000215262; HLA -A*25:01,HLA-A*30:01,HLA-B*08:01,HLA-B*46:01,HLA-B*58:01, HLA-C*01:02,HLA-C*03:03,HLA-C*03:04,HLA-C*12:03
YSYQPRTNSL

SEQ ID NO: 4493 - protein, 9 aa, Homo sapiens
  Table 1.2; KCNU1; ENSG00000215262; HLA -A*01:01,HLA-A*03:02,HLA-A*11:01,HLA-A*68:01,HLA-B*27:02
YTSSYEALK

SEQ ID NO: 4494 - protein, 11 aa, Homo sapiens
  Table 1.2; KCNU1; ENSG00000215262; HLA -A*03:01,HLA-A*03:02,HLA-A*11:01,HLA-A*68:01
YTSSYEALKGK

SEQ ID NO: 4495 - protein, 9 aa, Homo sapiens
  Table 1.2; KCNU1; ENSG00000215262; HLA -B*54:01,HLA-B*56:01
YTTFISGSA

SEQ ID NO: 4496 - protein, 8 aa, Homo sapiens
  Table 1.2; LIN28A; ENSG00000131914; HLA -A*01:01,HLA-A*32:01,HLA-B*35:03,HLA-B*38:01,HLA-B*39:01, HLA-B*55:01,HLA-C*03:04,HLA-C*04:01,HLA-C*05:01,HLA-C*07:04
AADEPQLL

SEQ ID NO: 4497 - protein, 9 aa, Homo sapiens
  Table 1.2; LIN28A; ENSG00000131914; HLA -A*01:01,HLA-A*02:07,HLA-A*03:01,HLA-A*03:02,HLA-A*11:01, HLA-A*29:02,HLA-B*27:05,HLA-B*58:01,HLA-C*05:01,HLA-C*07:06
AADEPQLLH

SEQ ID NO: 4498 - protein, 11 aa, Homo sapiens
  Table 1.2; LIN28A; ENSG00000131914; HLA -A*02:07
AADEPQLLHGA

SEQ ID NO: 4499 - protein, 10 aa, Homo sapiens
  Table 1.2; LIN28A; ENSG00000131914; HLA -B*07:02
AARAADEPQL

SEQ ID NO: 4500 - protein, 11 aa, Homo sapiens
  Table 1.2; LIN28A; ENSG00000131914; HLA -B*40:02,HLA-B*57:01
AARAADEPQLL

SEQ ID NO: 4501 - protein, 9 aa, Homo sapiens
  Table 1.2; LIN28A; ENSG00000131914; HLA -B*40:02,HLA-B*55:01,HLA-B*56:01,HLA-C*04:01,HLA-C*06:02
AGVALDPPV

SEQ ID NO: 4502 - protein, 8 aa, Homo sapiens
  Table 1.2; LIN28A; ENSG00000131914; HLA -A*02:01,HLA-A*02:07,HLA-B*55:01,HLA-C*04:01,HLA-C*05:01
ALDPPVDV

SEQ ID NO: 4503 - protein, 9 aa, Homo sapiens
  Table 1.2; LIN28A; ENSG00000131914; HLA -A*01:01,HLA-A*02:01,HLA-A*02:04,HLA-A*02:07,HLA-A*03:02, HLA-A*23:01,HLA-A*24:02,HLA-A*25:01,HLA-A*26:01,HLA-A*29:02, HLA-A*32:01,HLA-B*13:02,HLA-B*15:01,HLA-B*15:03,HLA-B*27:05,
  HLA-B*35:01,HLA-B*37:01,HLA-B*38:01,HLA-B*39:01,HLA-B*44:02, HLA-B*44:03,HLA-B*55:01,HLA-B*57:01,HLA-B*58:01,HLA-C*02:02, HLA-C*03:03,HLA-C*04:01,HLA-C*05:01,HLA-C*07:04,HLA-C*12:03
ALDPPVDVF

SEQ ID NO: 4504 - protein, 10 aa, Homo sapiens
  Table 1.2; LIN28A; ENSG00000131914; HLA -A*01:01,HLA-A*02:01,HLA-A*02:03,HLA-A*02:04,HLA-A*02:07, HLA-A*68:02,HLA-B*13:02,HLA-B*38:01,HLA-B*55:01,HLA-C*05:01
ALDPPVDVFV

SEQ ID NO: 4505 - protein, 9 aa, Homo sapiens
  Table 1.2; LIN28A; ENSG00000131914; HLA -B*07:02,HLA-B*54:01,HLA-B*55:01,HLA-B*56:01
APEDAARAA

SEQ ID NO: 4506 - protein, 8 aa, Homo sapiens
  Table 1.2; LIN28A; ENSG00000131914; HLA -A*32:01,HLA-B*15:01,HLA-B*15:03,HLA-B*37:01,HLA-B*38:01, HLA-B*39:01
AQGKPTYF

SEQ ID NO: 4507 - protein, 9 aa, Homo sapiens
  Table 1.2; LIN28A; ENSG00000131914; HLA -A*31:01
AQGKPTYFR

SEQ ID NO: 4508 - protein, 10 aa, Homo sapiens
  Table 1.2; LIN28A; ENSG00000131914; HLA -A*03:02,HLA-A*11:01,HLA-B*27:05
AQQGPSAQGK

SEQ ID NO: 4509 - protein, 9 aa, Homo sapiens
  Table 1.2; LIN28A; ENSG00000131914; HLA -B*27:02,HLA-B*27:05,HLA-B*38:01,HLA-B*39:01,HLA-B*40:01, HLA-C*16:04
ARAADEPQL

SEQ ID NO: 4510 - protein, 10 aa, Homo sapiens
  Table 1.2; LIN28A; ENSG00000131914; HLA -B*27:05,HLA-B*38:01,HLA-B*39:01
ARAADEPQLL

SEQ ID NO: 4511 - protein, 9 aa, Homo sapiens
  Table 1.2; LIN28A; ENSG00000131914; HLA -B*27:05
ARAGVALDP

SEQ ID NO: 4512 - protein, 8 aa, Homo sapiens
  Table 1.2; LIN28A; ENSG00000131914; HLA -A*03:02,HLA-A*11:01
AVEFTFKK

SEQ ID NO: 4513 - protein, 11 aa, Homo sapiens
  Table 1.2; LIN28A; ENSG00000131914; HLA -A*03:02
AVEFTFKKSAK

SEQ ID NO: 4514 - protein, 11 aa, Homo sapiens
  Table 1.2; LIN28A; ENSG00000131914; HLA -B*54:01,HLA-B*55:01,HLA-B*56:01
CPLKAQQGPSA

SEQ ID NO: 4515 - protein, 8 aa, Homo sapiens
  Table 1.2; LIN28A; ENSG00000131914; HLA -B*13:02,HLA-B*37:01
CQSISHMV

SEQ ID NO: 4516 - protein, 9 aa, Homo sapiens
  Table 1.2; LIN28A; ENSG00000131914; HLA -B*18:01
DEPQLLHGA

SEQ ID NO: 4517 - protein, 8 aa, Homo sapiens
  Table 1.2; LIN28A; ENSG00000131914; HLA -B*51:01
DPPVDVFV

SEQ ID NO: 4518 - protein, 9 aa, Homo sapiens
  Table 1.2; LIN28A; ENSG00000131914; HLA -A*25:01,HLA-A*26:01,HLA-A*33:01,HLA-A*68:01,HLA-A*68:02, HLA-B*51:01
DVFVHQSKL

SEQ ID NO: 4519 - protein, 9 aa, Homo sapiens
  Table 1.2; LIN28A; ENSG00000131914; HLA -A*26:01
EAPEDAARA

SEQ ID NO: 4520 - protein, 8 aa, Homo sapiens
  Table 1.2; LIN28A; ENSG00000131914; HLA -A*11:01,HLA-A*33:01,HLA-A*33:03,HLA-A*68:01,HLA-B*27:02, HLA-B*51:01,HLA-C*07:01
EAVEFTFK

SEQ ID NO: 4521 - protein, 9 aa, Homo sapiens
  Table 1.2; LIN28A; ENSG00000131914; HLA -A*11:01,HLA-A*25:01,HLA-A*26:01,HLA-A*33:01,HLA-A*33:03, HLA-A*68:01,HLA-A*68:02,HLA-B*27:02,HLA-B*57:01,HLA-C*07:06
EAVEFTFKK

SEQ ID NO: 4522 - protein, 11 aa, Homo sapiens
  Table 1.2; LIN28A; ENSG00000131914; HLA -B*54:01
EAVEFTFKKSA

SEQ ID NO: 4523 - protein, 9 aa, Homo sapiens
  Table 1.2; LIN28A; ENSG00000131914; HLA -A*33:01,HLA-A*33:03
ECKLPPQPK

SEQ ID NO: 4524 - protein, 11 aa, Homo sapiens
  Table 1.2; LIN28A; ENSG00000131914; HLA -B*39:01
EEAPEEAPEDA

SEQ ID NO: 4525 - protein, 11 aa, Homo sapiens
  Table 1.2; LIN28A; ENSG00000131914; HLA -A*30:01,HLA-B*40:01,HLA-B*44:02,HLA-B*44:03
EEEEEIHSPTL

SEQ ID NO: 4526 - protein, 10 aa, Homo sapiens
  Table 1.2; LIN28A; ENSG00000131914; HLA -A*30:01,HLA-B*18:01,HLA-B*38:01,HLA-B*40:01,HLA-B*40:02, HLA-B*44:02,HLA-B*44:03,HLA-B*49:01
EEEEIHSPTL

SEQ ID NO: 4527 - protein, 11 aa, Homo sapiens
  Table 1.2; LIN28A; ENSG00000131914; HLA -B*40:01
EEEEIHSPTLL

SEQ ID NO: 4528 - protein, 9 aa, Homo sapiens
  Table 1.2; LIN28A; ENSG00000131914; HLA -A*30:01,HLA-B*18:01,HLA-B*27:02,HLA-B*37:01,HLA-B*38:01, HLA-B*39:01,HLA-B*40:01,HLA-B*40:02,HLA-B*44:02,HLA-B*44:03, HLA-B*49:01
EEEIHSPTL

SEQ ID NO: 4529 - protein, 10 aa, Homo sapiens
  Table 1.2; LIN28A; ENSG00000131914; HLA -B*40:01
EEEIHSPTLL

SEQ ID NO: 4530 - protein, 8 aa, Homo sapiens
  Table 1.2; LIN28A; ENSG00000131914; HLA -A*30:01,HLA-B*18:01,HLA-B*40:01,HLA-B*40:02,HLA-B*44:02, HLA-B*44:03,HLA-B*49:01
EEIHSPTL

SEQ ID NO: 4531 - protein, 9 aa, Homo sapiens
  Table 1.2; LIN28A; ENSG00000131914; HLA -A*25:01,HLA-A*26:01,HLA-A*30:01,HLA-A*68:02,HLA-B*18:01, HLA-B*40:01,HLA-B*40:02,HLA-B*44:02,HLA-B*44:03,HLA-B*49:01
EEIHSPTLL

SEQ ID NO: 4532 - protein, 9 aa, Homo sapiens
  Table 1.2; LIN28A; ENSG00000131914; HLA -A*33:01,HLA-A*33:03
EFTFKKSAK

SEQ ID NO: 4533 - protein, 9 aa, Homo sapiens
  Table 1.2; LIN28A; ENSG00000131914; HLA -A*23:01,HLA-B*27:02,HLA-B*35:01,HLA-B*35:03,HLA-B*38:01
EGEAVEFTF

SEQ ID NO: 4534 - protein, 10 aa, Homo sapiens
  Table 1.2; LIN28A; ENSG00000131914; HLA -B*27:02
EGEAVEFTFK

SEQ ID NO: 4535 - protein, 8 aa, Homo sapiens
  Table 1.2; LIN28A; ENSG00000131914; HLA -B*54:01,HLA-B*55:01,HLA-B*56:01
EPQLLHGA

SEQ ID NO: 4536 - protein, 9 aa, Homo sapiens
  Table 1.2; LIN28A; ENSG00000131914; HLA -B*54:01
FAGGCAKAA

SEQ ID NO: 4537 - protein, 9 aa, Homo sapiens
  Table 1.2; LIN28A; ENSG00000131914; HLA -A*02:01,HLA-C*04:01,HLA-C*12:03
FCQSISHMV

SEQ ID NO: 4538 - protein, 8 aa, Homo sapiens
  Table 1.2; LIN28A; ENSG00000131914; HLA -B*40:02,HLA-B*54:01,HLA-B*56:01,HLA-C*06:02,HLA-C*12:03
FGFLSMTA

SEQ ID NO: 4539 - protein, 9 aa, Homo sapiens
  Table 1.2; LIN28A; ENSG00000131914; HLA -A*31:01,HLA-A*33:01,HLA-A*33:03,HLA-A*68:01,HLA-B*27:02, HLA-B*27:05,HLA-B*35:01,HLA-B*46:01,HLA-B*54:01
FGFLSMTAR

SEQ ID NO: 4540 - protein, 10 aa, Homo sapiens
  Table 1.2; LIN28A; ENSG00000131914; HLA -B*54:01
FGFLSMTARA

SEQ ID NO: 4541 - protein, 10 aa, Homo sapiens
  Table 1.2; LIN28A; ENSG00000131914; HLA -A*02:03
FLSMTARAGV

SEQ ID NO: 4542 - protein, 8 aa, Homo sapiens
  Table 1.2; LIN28A; ENSG00000131914; HLA -A*23:01,HLA-A*30:01,HLA-B*13:02,HLA-B*15:01,HLA-B*18:01, HLA-B*27:02,HLA-B*27:05,HLA-B*37:01,HLA-B*39:01,HLA-B*40:01, HLA-B*40:02,HLA-B*44:02,HLA-B*44:03,HLA-B*49:01,HLA-C*16:04
GEAVEFTF

SEQ ID NO: 4543 - protein, 9 aa, Homo sapiens
  Table 1.2; LIN28A; ENSG00000131914; HLA -B*27:02,HLA-B*27:05,HLA-B*49:01
GEAVEFTFK

SEQ ID NO: 4544 - protein, 10 aa, Homo sapiens
  Table 1.2; LIN28A; ENSG00000131914; HLA -B*27:02
GEAVEFTFKK

SEQ ID NO: 4545 - protein, 8 aa, Homo sapiens
  Table 1.2; LIN28A; ENSG00000131914; HLA -A*31:01
GFLSMTAR

SEQ ID NO: 4546 - protein, 8 aa, Homo sapiens
  Table 1.2; LIN28A; ENSG00000131914; HLA -A*11:01,HLA-B*27:05
GGLDHHAK

SEQ ID NO: 4547 - protein, 10 aa, Homo sapiens
  Table 1.2; LIN28A; ENSG00000131914; HLA -A*30:02,HLA-B*07:02,HLA-B*15:01,HLA-B*35:01,HLA-B*44:03, HLA-B*55:01,HLA-C*07:02
GPSAQGKPTY

SEQ ID NO: 4548 - protein, 11 aa, Homo sapiens
  Table 1.2; LIN28A; ENSG00000131914; HLA -B*07:02,HLA-C*04:01,HLA-C*07:02
GPSAQGKPTYF

SEQ ID NO: 4549 - protein, 8 aa, Homo sapiens
  Table 1.2; LIN28A; ENSG00000131914; HLA -B*58:01
GSVSNQQF

SEQ ID NO: 4550 - protein, 10 aa, Homo sapiens
  Table 1.2; LIN28A; ENSG00000131914; HLA -B*39:01
GVALDPPVDV

SEQ ID NO: 4551 - protein, 11 aa, Homo sapiens
  Table 1.2; LIN28A; ENSG00000131914; HLA -A*25:01,HLA-B*39:01
GVALDPPVDVF

SEQ ID NO: 4552 - protein, 9 aa, Homo sapiens
  Table 1.2; LIN28A; ENSG00000131914; HLA -A*31:01,HLA-A*68:01,HLA-C*07:06
GVFCIGSER

SEQ ID NO: 4553 - protein, 8 aa, Homo sapiens
  Table 1.2; LIN28A; ENSG00000131914; HLA -B*08:01
HMEGFRSL

SEQ ID NO: 4554 - protein, 9 aa, Homo sapiens
  Table 1.2; LIN28A; ENSG00000131914; HLA -A*03:01
HMEGFRSLK

SEQ ID NO: 4555 - protein, 9 aa, Homo sapiens
  Table 1.2; LIN28A; ENSG00000131914; HLA -A*03:01,HLA-A*03:02,HLA-A*11:01,HLA-C*06:02,HLA-C*07:01
HMVASCPLK

SEQ ID NO: 4556 - protein, 9 aa, Homo sapiens
  Table 1.2; LIN28A; ENSG00000131914; HLA -A*02:07,HLA-B*54:01
HSPTLLPEA

SEQ ID NO: 4557 - protein, 8 aa, Homo sapiens
  Table 1.2; LIN28A; ENSG00000131914; HLA -C*16:01
IGSERRPK

SEQ ID NO: 4558 - protein, 10 aa, Homo sapiens
  Table 1.2; LIN28A; ENSG00000131914; HLA -B*07:02,HLA-B*15:03,HLA-B*27:02,HLA-B*27:05,HLA-B*38:01, HLA-B*39:01,HLA-C*06:02,HLA-C*07:01,HLA-C*12:03,HLA-C*16:04
IRVTGPGGVF

SEQ ID NO: 4559 - protein, 10 aa, Homo sapiens
  Table 1.2; LIN28A; ENSG00000131914; HLA -C*06:02,HLA-C*07:01
ISHMVASCPL

SEQ ID NO: 4560 - protein, 11 aa, Homo sapiens
  Table 1.2; LIN28A; ENSG00000131914; HLA -A*03:02
KAQQGPSAQGK

SEQ ID NO: 4561 - protein, 8 aa, Homo sapiens
  Table 1.2; LIN28A; ENSG00000131914; HLA -A*30:01,HLA-A*32:01,HLA-B*15:01,HLA-B*15:03,HLA-B*18:01, HLA-B*27:02,HLA-B*37:01,HLA-B*40:01,HLA-B*40:02,HLA-B*44:02, HLA-B*44:03,HLA-B*57:01,HLA-B*58:01,HLA-C*12:03,HLA-C*16:01,
  HLA-C*16:02,HLA-C*16:04
KEGEAVEF

SEQ ID NO: 4562 - protein, 10 aa, Homo sapiens
  Table 1.2; LIN28A; ENSG00000131914; HLA -A*23:01,HLA-A*24:02,HLA-A*30:01,HLA-A*32:01,HLA-B*18:01, HLA-B*27:02,HLA-B*37:01,HLA-B*38:01,HLA-B*40:01,HLA-B*40:02, HLA-B*44:02,HLA-B*44:03,HLA-B*49:01,HLA-B*57:01,HLA-B*58:01,
  HLA-C*16:04
KEGEAVEFTF

SEQ ID NO: 4563 - protein, 11 aa, Homo sapiens
  Table 1.2; LIN28A; ENSG00000131914; HLA -A*03:02,HLA-A*11:01
KEGEAVEFTFK

SEQ ID NO: 4564 - protein, 11 aa, Homo sapiens
  Table 1.2; LIN28A; ENSG00000131914; HLA -A*32:01
KGLESIRVTGP

SEQ ID NO: 4565 - protein, 10 aa, Homo sapiens
  Table 1.2; LIN28A; ENSG00000131914; HLA -A*02:03
KLHMEGFRSL

SEQ ID NO: 4566 - protein, 9 aa, Homo sapiens
  Table 1.2; LIN28A; ENSG00000131914; HLA -A*02:07
KLPPQPKKC

SEQ ID NO: 4567 - protein, 9 aa, Homo sapiens
  Table 1.2; LIN28A; ENSG00000131914; HLA -B*40:02,HLA-B*58:01
KSAKGLESI

SEQ ID NO: 4568 - protein, 9 aa, Homo sapiens
  Table 1.2; LIN28A; ENSG00000131914; HLA -A*24:02
KWFNVRMGF

SEQ ID NO: 4569 - protein, 8 aa, Homo sapiens
  Table 1.2; LIN28A; ENSG00000131914; HLA -B*37:01
LDPPVDVF

SEQ ID NO: 4570 - protein, 9 aa, Homo sapiens
  Table 1.2; LIN28A; ENSG00000131914; HLA -A*02:07,HLA-A*68:02
LDPPVDVFV

SEQ ID NO: 4571 - protein, 9 aa, Homo sapiens
  Table 1.2; LIN28A; ENSG00000131914; HLA -B*37:01,HLA-B*40:02,HLA-B*49:01,HLA-C*07:04
LESIRVTGP

SEQ ID NO: 4572 - protein, 9 aa, Homo sapiens
  Table 1.2; LIN28A; ENSG00000131914; HLA -B*38:01,HLA-B*57:01,HLA-C*03:04
LHMEGFRSL

SEQ ID NO: 4573 - protein, 9 aa, Homo sapiens
  Table 1.2; LIN28A; ENSG00000131914; HLA -B*15:03,HLA-B*38:01
LKEGEAVEF

SEQ ID NO: 4574 - protein, 9 aa, Homo sapiens
  Table 1.2; LIN28A; ENSG00000131914; HLA -A*03:01
LLHGAGICK

SEQ ID NO: 4575 - protein, 11 aa, Homo sapiens
  Table 1.2; LIN28A; ENSG00000131914; HLA -B*07:02,HLA-C*03:03,HLA-C*03:04
LSMTARAGVAL

SEQ ID NO: 4576 - protein, 8 aa, Homo sapiens
  Table 1.2; LIN28A; ENSG00000131914; HLA -B*51:01,HLA-B*54:01
MGFGFLSM

SEQ ID NO: 4577 - protein, 9 aa, Homo sapiens
  Table 1.2; LIN28A; ENSG00000131914; HLA -B*54:01
MGFGFLSMT

SEQ ID NO: 4578 - protein, 10 aa, Homo sapiens
  Table 1.2; LIN28A; ENSG00000131914; HLA -B*54:01
MGFGFLSMTA

SEQ ID NO: 4579 - protein, 11 aa, Homo sapiens
  Table 1.2; LIN28A; ENSG00000131914; HLA -A*31:01
MGFGFLSMTAR

SEQ ID NO: 4580 - protein, 9 aa, Homo sapiens
  Table 1.2; LIN28A; ENSG00000131914; HLA -B*15:01,HLA-B*27:05,HLA-B*38:01,HLA-C*04:01,HLA-C*07:04
MGSVSNQQF

SEQ ID NO: 4581 - protein, 9 aa, Homo sapiens
  Table 1.2; LIN28A; ENSG00000131914; HLA -A*25:01,HLA-A*32:01,HLA-B*07:02,HLA-B*35:03,HLA-B*40:02, HLA-B*46:01,HLA-B*58:01,HLA-C*01:02,HLA-C*02:02,HLA-C*03:03, HLA-C*03:04,HLA-C*07:04,HLA-C*16:01
MTARAGVAL

SEQ ID NO: 4582 - protein, 8 aa, Homo sapiens
  Table 1.2; LIN28A; ENSG00000131914; HLA -A*03:02
MVASCPLK

SEQ ID NO: 4583 - protein, 9 aa, Homo sapiens
  Table 1.2; LIN28A; ENSG00000131914; HLA -A*03:01,HLA-B*13:02,HLA-B*54:01,HLA-C*06:02
MVASCPLKA

SEQ ID NO: 4584 - protein, 10 aa, Homo sapiens
  Table 1.2; LIN28A; ENSG00000131914; HLA -B*27:05
NQQFAGGCAK

SEQ ID NO: 4585 - protein, 10 aa, Homo sapiens
  Table 1.2; LIN28A; ENSG00000131914; HLA -B*27:02
PEEAPEDAAR

SEQ ID NO: 4586 - protein, 9 aa, Homo sapiens
  Table 1.2; LIN28A; ENSG00000131914; HLA -A*01:01,HLA-A*30:02,HLA-A*32:01,HLA-B*15:01,HLA-B*58:01, HLA-C*16:01,HLA-C*16:02
PSAQGKPTY

SEQ ID NO: 4587 - protein, 10 aa, Homo sapiens
  Table 1.2; LIN28A; ENSG00000131914; HLA -A*24:02,HLA-B*07:02,HLA-C*07:02
PSAQGKPTYF

SEQ ID NO: 4588 - protein, 9 aa, Homo sapiens
  Table 1.2; LIN28A; ENSG00000131914; HLA -C*07:01
PTLLPEAQN

SEQ ID NO: 4589 - protein, 8 aa, Homo sapiens
  Table 1.2; LIN28A; ENSG00000131914; HLA -A*31:01
QGKPTYFR

SEQ ID NO: 4590 - protein, 11 aa, Homo sapiens
  Table 1.2; LIN28A; ENSG00000131914; HLA -A*30:02,HLA-B*39:01,HLA-C*04:01,HLA-C*07:01
QGPSAQGKPTY

SEQ ID NO: 4591 - protein, 9 aa, Homo sapiens
  Table 1.2; LIN28A; ENSG00000131914; HLA -A*03:01,HLA-A*03:02,HLA-A*11:01,HLA-A*30:02,HLA-A*31:01, HLA-A*32:01,HLA-B*13:02,HLA-B*15:01,HLA-B*15:03,HLA-B*27:05, HLA-B*39:01,HLA-B*40:02,HLA-C*06:02,HLA-C*07:04
QQFAGGCAK

SEQ ID NO: 4592 - protein, 10 aa, Homo sapiens
  Table 1.2; LIN28A; ENSG00000131914; HLA -A*02:03,HLA-B*13:02
QQFAGGCAKA

SEQ ID NO: 4593 - protein, 9 aa, Homo sapiens
  Table 1.2; LIN28A; ENSG00000131914; HLA -A*03:02
QQGPSAQGK

SEQ ID NO: 4594 - protein, 8 aa, Homo sapiens
  Table 1.2; LIN28A; ENSG00000131914; HLA -B*40:02,HLA-C*12:03
QSISHMVA

SEQ ID NO: 4595 - protein, 9 aa, Homo sapiens
  Table 1.2; LIN28A; ENSG00000131914; HLA -A*33:01,HLA-B*08:01,HLA-B*57:01,HLA-C*07:01
QSKLHMEGF

SEQ ID NO: 4596 - protein, 9 aa, Homo sapiens
  Table 1.2; LIN28A; ENSG00000131914; HLA -B*38:01,HLA-B*40:01,HLA-B*57:01,HLA-B*58:01,HLA-C*05:01
RAADEPQLL

SEQ ID NO: 4597 - protein, 10 aa, Homo sapiens
  Table 1.2; LIN28A; ENSG00000131914; HLA -A*03:01,HLA-A*03:02,HLA-A*11:01,HLA-B*57:01
RAADEPQLLH

SEQ ID NO: 4598 - protein, 9 aa, Homo sapiens
  Table 1.2; LIN28A; ENSG00000131914; HLA -B*07:02
RPKGKSMQK

SEQ ID NO: 4599 - protein, 11 aa, Homo sapiens
  Table 1.2; LIN28A; ENSG00000131914; HLA -B*57:01,HLA-B*58:01
RSLKEGEAVEF

SEQ ID NO: 4600 - protein, 9 aa, Homo sapiens
  Table 1.2; LIN28A; ENSG00000131914; HLA -A*03:01,HLA-A*25:01,HLA-A*26:01,HLA-A*30:02,HLA-A*32:01, HLA-B*07:02,HLA-B*15:01,HLA-B*15:03,HLA-B*27:05,HLA-B*39:01, HLA-B*40:02,HLA-B*46:01,HLA-B*57:01,HLA-B*58:01,HLA-C*02:02,
  HLA-C*03:03,HLA-C*03:04,HLA-C*04:01,HLA-C*05:01,HLA-C*07:02, HLA-C*07:04,HLA-C*12:03,HLA-C*16:01
RVTGPGGVF

SEQ ID NO: 4601 - protein, 9 aa, Homo sapiens
  Table 1.2; LIN28A; ENSG00000131914; HLA -A*31:01,HLA-A*33:01,HLA-A*33:03,HLA-A*68:01,HLA-C*07:06
SAKGLESIR

SEQ ID NO: 4602 - protein, 8 aa, Homo sapiens
  Table 1.2; LIN28A; ENSG00000131914; HLA -A*30:02,HLA-A*32:01,HLA-B*39:01,HLA-B*58:01,HLA-C*16:01
SAQGKPTY

SEQ ID NO: 4603 - protein, 9 aa, Homo sapiens
  Table 1.2; LIN28A; ENSG00000131914; HLA -A*03:02,HLA-A*11:01,HLA-A*23:01,HLA-A*26:01,HLA-A*30:02, HLA-A*31:01,HLA-A*32:01,HLA-A*33:01,HLA-A*33:03,HLA-B*35:01, HLA-B*46:01,HLA-B*57:01,HLA-B*58:01,HLA-C*02:02,HLA-C*04:01,
  HLA-C*05:01,HLA-C*07:04,HLA-C*12:03,HLA-C*16:01,HLA-C*16:02, HLA-C*16:04
SAQGKPTYF

SEQ ID NO: 4604 - protein, 10 aa, Homo sapiens
  Table 1.2; LIN28A; ENSG00000131914; HLA -A*31:01,HLA-A*33:01,HLA-A*33:03
SAQGKPTYFR

SEQ ID NO: 4605 - protein, 9 aa, Homo sapiens
  Table 1.2; LIN28A; ENSG00000131914; HLA -B*39:01
SHMVASCPL

SEQ ID NO: 4606 - protein, 10 aa, Homo sapiens
  Table 1.2; LIN28A; ENSG00000131914; HLA -A*02:03
SIRVTGPGGV

SEQ ID NO: 4607 - protein, 11 aa, Homo sapiens
  Table 1.2; LIN28A; ENSG00000131914; HLA -B*07:02,HLA-B*15:01,HLA-B*46:01,HLA-C*07:02
SIRVTGPGGVF

SEQ ID NO: 4608 - protein, 8 aa, Homo sapiens
  Table 1.2; LIN28A; ENSG00000131914; HLA -B*08:01
SLKEGEAV

SEQ ID NO: 4609 - protein, 10 aa, Homo sapiens
  Table 1.2; LIN28A; ENSG00000131914; HLA -A*02:03,HLA-A*03:02,HLA-A*23:01,HLA-A*25:01,HLA-A*26:01, HLA-A*29:02,HLA-A*30:02,HLA-A*32:01,HLA-A*33:01,HLA-B*15:01, HLA-B*15:03,HLA-B*46:01,HLA-B*57:01,HLA-C*07:04,HLA-C*14:02
SLKEGEAVEF

SEQ ID NO: 4610 - protein, 9 aa, Homo sapiens
  Table 1.2; LIN28A; ENSG00000131914; HLA -B*55:01
SMTARAGVA

SEQ ID NO: 4611 - protein, 10 aa, Homo sapiens
  Table 1.2; LIN28A; ENSG00000131914; HLA -B*07:02
SMTARAGVAL

SEQ ID NO: 4612 - protein, 8 aa, Homo sapiens
  Table 1.2; LIN28A; ENSG00000131914; HLA -B*51:01,HLA-B*54:01,HLA-B*55:01,HLA-B*56:01
SPTLLPEA

SEQ ID NO: 4613 - protein, 8 aa, Homo sapiens
  Table 1.2; LIN28A; ENSG00000131914; HLA -B*07:02,HLA-B*08:01,HLA-B*40:02,HLA-B*46:01,HLA-C*01:02, HLA-C*03:03,HLA-C*03:04,HLA-C*07:02,HLA-C*07:04,HLA-C*16:01
TARAGVAL

SEQ ID NO: 4614 - protein, 11 aa, Homo sapiens
  Table 1.2; LIN28A; ENSG00000131914; HLA -C*06:02
TARAGVALDPP

SEQ ID NO: 4615 - protein, 9 aa, Homo sapiens
  Table 1.2; LIN28A; ENSG00000131914; HLA -B*13:02,HLA-C*06:02
TGPGGVFCI

SEQ ID NO: 4616 - protein, 10 aa, Homo sapiens
  Table 1.2; LIN28A; ENSG00000131914; HLA -C*04:01,HLA-C*06:02,HLA-C*07:01,HLA-C*07:02
TGPGGVFCIG

SEQ ID NO: 4617 - protein, 9 aa, Homo sapiens
  Table 1.2; LIN28A; ENSG00000131914; HLA -A*02:01,HLA-A*23:01,HLA-B*39:01,HLA-B*46:01,HLA-B*51:01, HLA-B*54:01,HLA-C*02:02,HLA-C*03:03,HLA-C*05:01,HLA-C*12:03, HLA-C*16:04
VALDPPVDV

SEQ ID NO: 4618 - protein, 10 aa, Homo sapiens
  Table 1.2; LIN28A; ENSG00000131914; HLA -A*23:01,HLA-A*24:02,HLA-A*25:01,HLA-A*29:02,HLA-A*30:02, HLA-A*32:01,HLA-A*33:01,HLA-B*27:02,HLA-B*27:05,HLA-B*35:01, HLA-B*38:01,HLA-B*39:01,HLA-B*46:01,HLA-B*57:01,HLA-C*02:02,
  HLA-C*05:01,HLA-C*12:03,HLA-C*16:04
VALDPPVDVF

SEQ ID NO: 4619 - protein, 11 aa, Homo sapiens
  Table 1.2; LIN28A; ENSG00000131914; HLA -A*02:01,HLA-A*02:04,HLA-A*02:07,HLA-A*68:02
VALDPPVDVFV

SEQ ID NO: 4620 - protein, 9 aa, Homo sapiens
  Table 1.2; LIN28A; ENSG00000131914; HLA -A*30:01,HLA-B*18:01,HLA-B*40:02,HLA-B*44:03,HLA-B*49:01
VEFTFKKSA

SEQ ID NO: 4621 - protein, 8 aa, Homo sapiens
  Table 1.2; LIN28A; ENSG00000131914; HLA -A*23:01
VFVHQSKL

SEQ ID NO: 4622 - protein, 8 aa, Homo sapiens
  Table 1.2; LIN28A; ENSG00000131914; HLA -A*23:01,HLA-A*25:01,HLA-A*26:01,HLA-A*30:02,HLA-A*32:01, HLA-B*15:01,HLA-B*15:03,HLA-B*27:05,HLA-B*39:01,HLA-B*40:02, HLA-B*46:01,HLA-B*57:01,HLA-B*58:01,HLA-C*01:02,HLA-C*02:02,
  HLA-C*03:03,HLA-C*03:04,HLA-C*04:01,HLA-C*05:01,HLA-C*06:02, HLA-C*07:01,HLA-C*07:04,HLA-C*12:03,HLA-C*14:02,HLA-C*16:01
VTGPGGVF

SEQ ID NO: 4623 - protein, 10 aa, Homo sapiens
  Table 1.2; LIN28A; ENSG00000131914; HLA -A*02:01,HLA-C*06:02
VTGPGGVFCI

SEQ ID NO: 4624 - protein, 8 aa, Homo sapiens
  Table 1.2; LUZP4; ENSG00000102021; HLA -B*08:01,HLA-B*40:02,HLA-C*16:01
ASFRKLTL

SEQ ID NO: 4625 - protein, 11 aa, Homo sapiens
  Table 1.2; LUZP4; ENSG00000102021; HLA -A*03:02,HLA-A*11:01,HLA-A*31:01,HLA-A*33:01,HLA-A*33:03, HLA-A*68:01,HLA-C*07:06
ATQKDLIATQR

SEQ ID NO: 4626 - protein, 11 aa, Homo sapiens
  Table 1.2; LUZP4; ENSG00000102021; HLA -A*03:01,HLA-A*03:02,HLA-A*11:01,HLA-A*31:01,HLA-B*27:02
ATQRDLIATQK

SEQ ID NO: 4627 - protein, 11 aa, Homo sapiens
  Table 1.2; LUZP4; ENSG00000102021; HLA -A*03:02,HLA-A*11:01,HLA-A*31:01,HLA-A*33:03,HLA-A*68:01
ATQRDLIATQR

SEQ ID NO: 4628 - protein, 10 aa, Homo sapiens
  Table 1.2; LUZP4; ENSG00000102021; HLA -A*11:01
ATQRDLIVTQ

SEQ ID NO: 4629 - protein, 11 aa, Homo sapiens
  Table 1.2; LUZP4; ENSG00000102021; HLA -A*03:02,HLA-A*11:01,HLA-A*31:01,HLA-A*33:01,HLA-A*33:03, HLA-A*68:01,HLA-C*07:06
ATQRDLIVTQR

SEQ ID NO: 4630 - protein, 8 aa, Homo sapiens
  Table 1.2; LUZP4; ENSG00000102021; HLA -B*18:01
DDIIIYKE

SEQ ID NO: 4631 - protein, 9 aa, Homo sapiens
  Table 1.2; LUZP4; ENSG00000102021; HLA -B*18:01,HLA-B*40:02,HLA-B*44:02,HLA-B*44:03
DDIIIYKEL

SEQ ID NO: 4632 - protein, 8 aa, Homo sapiens
  Table 1.2; LUZP4; ENSG00000102021; HLA -B*08:01
DIIIYKEL

SEQ ID NO: 4633 - protein, 9 aa, Homo sapiens
  Table 1.2; LUZP4; ENSG00000102021; HLA -B*08:01
DLIATQKDL

SEQ ID NO: 4634 - protein, 9 aa, Homo sapiens
  Table 1.2; LUZP4; ENSG00000102021; HLA -B*08:01
DLIATQRDL

SEQ ID NO: 4635 - protein, 8 aa, Homo sapiens
  Table 1.2; LUZP4; ENSG00000102021; HLA -A*33:01,HLA-A*33:03
DLINQSGR

SEQ ID NO: 4636 - protein, 10 aa, Homo sapiens
  Table 1.2; LUZP4; ENSG00000102021; HLA -A*25:01
DLINQSGRSH

SEQ ID NO: 4637 - protein, 9 aa, Homo sapiens
  Table 1.2; LUZP4; ENSG00000102021; HLA -B*08:01
DLIVTQRDL

SEQ ID NO: 4638 - protein, 9 aa, Homo sapiens
  Table 1.2; LUZP4; ENSG00000102021; HLA -A*26:01
DLVDTQSDL

SEQ ID NO: 4639 - protein, 10 aa, Homo sapiens
  Table 1.2; LUZP4; ENSG00000102021; HLA -A*25:01
DLVDTQSDLI

SEQ ID NO: 4640 - protein, 11 aa, Homo sapiens
  Table 1.2; LUZP4; ENSG00000102021; HLA -A*33:01,HLA-B*27:02
DMSLDDIIIYK

SEQ ID NO: 4641 - protein, 9 aa, Homo sapiens
  Table 1.2; LUZP4; ENSG00000102021; HLA -A*26:01,HLA-A*33:01,HLA-A*33:03,HLA-A*68:01,HLA-B*27:02, HLA-C*07:06
DNYEAQAEK

SEQ ID NO: 4642 - protein, 10 aa, Homo sapiens
  Table 1.2; LUZP4; ENSG00000102021; HLA -A*25:01,HLA-A*26:01,HLA-A*33:01
DTQSDLIATQ

SEQ ID NO: 4643 - protein, 11 aa, Homo sapiens
  Table 1.2; LUZP4; ENSG00000102021; HLA -A*03:02,HLA-A*11:01,HLA-A*31:01,HLA-A*33:01,HLA-A*33:03, HLA-A*68:01,HLA-B*27:02,HLA-C*07:06
DTQSDLIATQR

SEQ ID NO: 4644 - protein, 8 aa, Homo sapiens
  Table 1.2; LUZP4; ENSG00000102021; HLA -A*33:01
EENHHSER

SEQ ID NO: 4645 - protein, 11 aa, Homo sapiens
  Table 1.2; LUZP4; ENSG00000102021; HLA -B*27:02
ELEGTNAEEEK

SEQ ID NO: 4646 - protein, 9 aa, Homo sapiens
  Table 1.2; LUZP4; ENSG00000102021; HLA -B*27:05
ERDLINQSG

SEQ ID NO: 4647 - protein, 9 aa, Homo sapiens
  Table 1.2; LUZP4; ENSG00000102021; HLA -A*02:07
FLDMSLDDI

SEQ ID NO: 4648 - protein, 10 aa, Homo sapiens
  Table 1.2; LUZP4; ENSG00000102021; HLA -B*15:01,HLA-B*27:05,HLA-B*39:01
GQHPLNGQPL

SEQ ID NO: 4649 - protein, 11 aa, Homo sapiens
  Table 1.2; LUZP4; ENSG00000102021; HLA -A*30:01,HLA-B*13:02
GQHPLNGQPLI

SEQ ID NO: 4650 - protein, 9 aa, Homo sapiens
  Table 1.2; LUZP4; ENSG00000102021; HLA -A*11:01,HLA-B*13:02
GQPLIEQEK

SEQ ID NO: 4651 - protein, 10 aa, Homo sapiens
  Table 1.2; LUZP4; ENSG00000102021; HLA -B*13:02,HLA-B*27:05
GQSEGNQHQS

SEQ ID NO: 4652 - protein, 9 aa, Homo sapiens
  Table 1.2; LUZP4; ENSG00000102021; HLA -A*29:02,HLA-A*30:02,HLA-A*32:01,HLA-B*15:01,HLA-B*15:03, HLA-C*16:01
GQSERHQRY

SEQ ID NO: 4653 - protein, 9 aa, Homo sapiens
  Table 1.2; LUZP4; ENSG00000102021; HLA -B*27:05
GRSHGQSER

SEQ ID NO: 4654 - protein, 10 aa, Homo sapiens
  Table 1.2; LUZP4; ENSG00000102021; HLA -A*03:02,HLA-A*11:01
GTNAEEEKNK

SEQ ID NO: 4655 - protein, 11 aa, Homo sapiens
  Table 1.2; LUZP4; ENSG00000102021; HLA -A*31:01,HLA-A*33:03
GTNAEEEKNKR

SEQ ID NO: 4656 - protein, 8 aa, Homo sapiens
  Table 1.2; LUZP4; ENSG00000102021; HLA -B*07:02,HLA-C*04:01
HDKKPSQK

SEQ ID NO: 4657 - protein, 9 aa, Homo sapiens
  Table 1.2; LUZP4; ENSG00000102021; HLA -A*33:01
HGQSERHQR

SEQ ID NO: 4658 - protein, 8 aa, Homo sapiens
  Table 1.2; LUZP4; ENSG00000102021; HLA -B*35:03
HPLNGQPL

SEQ ID NO: 4659 - protein, 9 aa, Homo sapiens
  Table 1.2; LUZP4; ENSG00000102021; HLA -A*23:01,HLA-B*13:02,HLA-B*35:01,HLA-B*35:03,HLA-B*38:01, HLA-B*51:01,HLA-B*54:01,HLA-B*55:01,HLA-B*56:01
HPLNGQPLI

SEQ ID NO: 4660 - protein, 11 aa, Homo sapiens
  Table 1.2; LUZP4; ENSG00000102021; HLA -B*35:01
HPQYERSHGQY

SEQ ID NO: 4661 - protein, 9 aa, Homo sapiens
  Table 1.2; LUZP4; ENSG00000102021; HLA -B*39:01
HQSEGNPDK

SEQ ID NO: 4662 - protein, 9 aa, Homo sapiens
  Table 1.2; LUZP4; ENSG00000102021; HLA -A*31:01,HLA-A*33:01,HLA-A*33:03
HSKKESPSR

SEQ ID NO: 4663 - protein, 8 aa, Homo sapiens
  Table 1.2; LUZP4; ENSG00000102021; HLA -B*51:01,HLA-C*16:02
IATQKDLI

SEQ ID NO: 4664 - protein, 9 aa, Homo sapiens
  Table 1.2; LUZP4; ENSG00000102021; HLA -B*54:01
IATQKDLIA

SEQ ID NO: 4665 - protein, 8 aa, Homo sapiens
  Table 1.2; LUZP4; ENSG00000102021; HLA -B*51:01,HLA-C*16:01
IATQRDLI

SEQ ID NO: 4666 - protein, 9 aa, Homo sapiens
  Table 1.2; LUZP4; ENSG00000102021; HLA -B*54:01,HLA-C*16:01,HLA-C*16:02
IATQRDLIA

SEQ ID NO: 4667 - protein, 9 aa, Homo sapiens
  Table 1.2; LUZP4; ENSG00000102021; HLA -B*51:01,HLA-C*12:03,HLA-C*16:01,HLA-C*16:02
IATQRDLIV

SEQ ID NO: 4668 - protein, 10 aa, Homo sapiens
  Table 1.2; LUZP4; ENSG00000102021; HLA -A*30:02
IEQEKCSDNY

SEQ ID NO: 4669 - protein, 9 aa, Homo sapiens
  Table 1.2; LUZP4; ENSG00000102021; HLA -B*54:01
IVTQRDLVA

SEQ ID NO: 4670 - protein, 10 aa, Homo sapiens
  Table 1.2; LUZP4; ENSG00000102021; HLA -C*14:02
IYKELEGTNA

SEQ ID NO: 4671 - protein, 8 aa, Homo sapiens
  Table 1.2; LUZP4; ENSG00000102021; HLA -A*31:01,HLA-B*37:01
KDLIATQR

SEQ ID NO: 4672 - protein, 10 aa, Homo sapiens
  Table 1.2; LUZP4; ENSG00000102021; HLA -B*37:01
KESPSRQQSK

SEQ ID NO: 4673 - protein, 10 aa, Homo sapiens
  Table 1.2; LUZP4; ENSG00000102021; HLA -B*15:03
KKPSQKPSGF

SEQ ID NO: 4674 - protein, 9 aa, Homo sapiens
  Table 1.2; LUZP4; ENSG00000102021; HLA -B*07:02,HLA-B*08:01,HLA-B*37:01,HLA-C*07:02
KPSQKPSGF

SEQ ID NO: 4675 - protein, 9 aa, Homo sapiens
  Table 1.2; LUZP4; ENSG00000102021; HLA -B*07:02
KVNFLDMSL

SEQ ID NO: 4676 - protein, 9 aa, Homo sapiens
  Table 1.2; LUZP4; ENSG00000102021; HLA -A*02:07,HLA-A*03:01,HLA-A*03:02,HLA-A*11:01,HLA-A*31:01, HLA-A*32:01
KVPPNHPSR

SEQ ID NO: 4677 - protein, 10 aa, Homo sapiens
  Table 1.2; LUZP4; ENSG00000102021; HLA -A*03:01,HLA-A*03:02,HLA-A*11:01
KVPPNHPSRK

SEQ ID NO: 4678 - protein, 8 aa, Homo sapiens
  Table 1.2; LUZP4; ENSG00000102021; HLA -B*27:02
LDDIIIYK

SEQ ID NO: 4679 - protein, 8 aa, Homo sapiens
  Table 1.2; LUZP4; ENSG00000102021; HLA -C*05:01
LVDTQSDL

SEQ ID NO: 4680 - protein, 9 aa, Homo sapiens
  Table 1.2; LUZP4; ENSG00000102021; HLA -A*01:01,HLA-A*02:07,HLA-B*27:05,HLA-B*38:01,HLA-C*05:01
LVDTQSDLI

SEQ ID NO: 4681 - protein, 9 aa, Homo sapiens
  Table 1.2; LUZP4; ENSG00000102021; HLA -B*08:01,HLA-C*16:01
MASFRKLTL

SEQ ID NO: 4682 - protein, 9 aa, Homo sapiens
  Table 1.2; LUZP4; ENSG00000102021; HLA -A*01:01,HLA-A*29:02,HLA-B*35:01,HLA-B*55:01,HLA-B*57:01, HLA-C*07:01,HLA-C*12:03
MSLDDIIIY

SEQ ID NO: 4683 - protein, 10 aa, Homo sapiens
  Table 1.2; LUZP4; ENSG00000102021; HLA -A*03:01,HLA-A*03:02,HLA-A*11:01,HLA-A*68:02,HLA-B*27:02, HLA-B*57:01
MSLDDIIIYK

SEQ ID NO: 4684 - protein, 10 aa, Homo sapiens
  Table 1.2; LUZP4; ENSG00000102021; HLA -B*27:02
NGQPLIEQEK

SEQ ID NO: 4685 - protein, 9 aa, Homo sapiens
  Table 1.2; LUZP4; ENSG00000102021; HLA -A*01:01
NSEEGNHDK

SEQ ID NO: 4686 - protein, 10 aa, Homo sapiens
  Table 1.2; LUZP4; ENSG00000102021; HLA -A*30:02
PQYERSHGQY

SEQ ID NO: 4687 - protein, 9 aa, Homo sapiens
  Table 1.2; LUZP4; ENSG00000102021; HLA -B*38:01,HLA-B*39:01
QHPLNGQPL

SEQ ID NO: 4688 - protein, 10 aa, Homo sapiens
  Table 1.2; LUZP4; ENSG00000102021; HLA -B*38:01
QHPLNGQPLI

SEQ ID NO: 4689 - protein, 10 aa, Homo sapiens
  Table 1.2; LUZP4; ENSG00000102021; HLA -B*39:01
QHQSEGNPDK

SEQ ID NO: 4690 - protein, 9 aa, Homo sapiens
  Table 1.2; LUZP4; ENSG00000102021; HLA -B*55:01
QPLIEQEKC

SEQ ID NO: 4691 - protein, 9 aa, Homo sapiens
  Table 1.2; LUZP4; ENSG00000102021; HLA -B*27:02,HLA-B*27:05
QRDLIATQK

SEQ ID NO: 4692 - protein, 9 aa, Homo sapiens
  Table 1.2; LUZP4; ENSG00000102021; HLA -B*27:05
QRDLIATQR

SEQ ID NO: 4693 - protein, 9 aa, Homo sapiens
  Table 1.2; LUZP4; ENSG00000102021; HLA -B*27:02,HLA-B*27:05
QRDLIVTQR

SEQ ID NO: 4694 - protein, 9 aa, Homo sapiens
  Table 1.2; LUZP4; ENSG00000102021; HLA -B*27:05
QRDLVATER

SEQ ID NO: 4695 - protein, 10 aa, Homo sapiens
  Table 1.2; LUZP4; ENSG00000102021; HLA -B*38:01
QRYSTGKNTI

SEQ ID NO: 4696 - protein, 9 aa, Homo sapiens
  Table 1.2; LUZP4; ENSG00000102021; HLA -A*01:01,HLA-A*11:01,HLA-A*31:01,HLA-A*33:01,HLA-A*33:03, HLA-A*68:01,HLA-C*07:06
QSDLIATQR

SEQ ID NO: 4697 - protein, 9 aa, Homo sapiens
  Table 1.2; LUZP4; ENSG00000102021; HLA -A*01:01,HLA-C*05:01
QSDRSQGQL

SEQ ID NO: 4698 - protein, 10 aa, Homo sapiens
  Table 1.2; LUZP4; ENSG00000102021; HLA -A*01:01,HLA-A*03:02
QSDRSQGQLK

SEQ ID NO: 4699 - protein, 9 aa, Homo sapiens
  Table 1.2; LUZP4; ENSG00000102021; HLA -A*29:02,HLA-A*30:02
QYERSHGQY

SEQ ID NO: 4700 - protein, 8 aa, Homo sapiens
  Table 1.2; LUZP4; ENSG00000102021; HLA -A*03:02,HLA-A*11:01,HLA-B*27:02,HLA-B*37:01
RDLIATQK

SEQ ID NO: 4701 - protein, 8 aa, Homo sapiens
  Table 1.2; LUZP4; ENSG00000102021; HLA -A*31:01,HLA-B*37:01
RDLIATQR

SEQ ID NO: 4702 - protein, 9 aa, Homo sapiens
  Table 1.2; LUZP4; ENSG00000102021; HLA -A*31:01
RDLINQSGR

SEQ ID NO: 4703 - protein, 8 aa, Homo sapiens
  Table 1.2; LUZP4; ENSG00000102021; HLA -A*31:01,HLA-B*37:01
RDLIVTQR

SEQ ID NO: 4704 - protein, 8 aa, Homo sapiens
  Table 1.2; LUZP4; ENSG00000102021; HLA -A*03:01,HLA-A*11:01,HLA-A*31:01,HLA-B*37:01
RDLVATER

SEQ ID NO: 4705 - protein, 9 aa, Homo sapiens
  Table 1.2; LUZP4; ENSG00000102021; HLA -A*23:01,HLA-A*24:02
RYSTGKNTI

SEQ ID NO: 4706 - protein, 8 aa, Homo sapiens
  Table 1.2; LUZP4; ENSG00000102021; HLA -B*37:01
SDLIATQR

SEQ ID NO: 4707 - protein, 10 aa, Homo sapiens
  Table 1.2; LUZP4; ENSG00000102021; HLA -A*03:02,HLA-A*11:01,HLA-B*27:02
SDNYEAQAEK

SEQ ID NO: 4708 - protein, 9 aa, Homo sapiens
  Table 1.2; LUZP4; ENSG00000102021; HLA -C*06:02
SDRSQGQLK

SEQ ID NO: 4709 - protein, 9 aa, Homo sapiens
  Table 1.2; LUZP4; ENSG00000102021; HLA -B*40:02
SEKVPPNHP

SEQ ID NO: 4710 - protein, 10 aa, Homo sapiens
  Table 1.2; LUZP4; ENSG00000102021; HLA -B*40:02,HLA-C*04:01,HLA-C*06:02
SEKVPPNHPS

SEQ ID NO: 4711 - protein, 11 aa, Homo sapiens
  Table 1.2; LUZP4; ENSG00000102021; HLA -A*31:01
SEKVPPNHPSR

SEQ ID NO: 4712 - protein, 8 aa, Homo sapiens
  Table 1.2; LUZP4; ENSG00000102021; HLA -A*01:01
SLDDIIIY

SEQ ID NO: 4713 - protein, 9 aa, Homo sapiens
  Table 1.2; LUZP4; ENSG00000102021; HLA -A*01:01,HLA-A*02:01,HLA-A*02:04,HLA-A*02:07,HLA-A*03:01, HLA-A*03:02,HLA-A*11:01,HLA-A*31:01,HLA-A*68:01,HLA-A*68:02
SLDDIIIYK

SEQ ID NO: 4714 - protein, 10 aa, Homo sapiens
  Table 1.2; LUZP4; ENSG00000102021; HLA -A*02:07
SLDDIIIYKE

SEQ ID NO: 4715 - protein, 11 aa, Homo sapiens
  Table 1.2; LUZP4; ENSG00000102021; HLA -A*02:07
SLDDIIIYKEL

SEQ ID NO: 4716 - protein, 9 aa, Homo sapiens
  Table 1.2; LUZP4; ENSG00000102021; HLA -B*56:01
SPSRQQSKA

SEQ ID NO: 4717 - protein, 10 aa, Homo sapiens
  Table 1.2; LUZP4; ENSG00000102021; HLA -B*27:05,HLA-B*39:01
SQSDRSQGQL

SEQ ID NO: 4718 - protein, 11 aa, Homo sapiens
  Table 1.2; LUZP4; ENSG00000102021; HLA -A*03:02,HLA-A*11:01,HLA-A*31:01
SQSDRSQGQLK

SEQ ID NO: 4719 - protein, 9 aa, Homo sapiens
  Table 1.2; LUZP4; ENSG00000102021; HLA -C*06:02
SRNHLERSL

SEQ ID NO: 4720 - protein, 10 aa, Homo sapiens
  Table 1.2; LUZP4; ENSG00000102021; HLA -A*30:01,HLA-B*40:02,HLA-C*06:02
TERDLINQSG

SEQ ID NO: 4721 - protein, 11 aa, Homo sapiens
  Table 1.2; LUZP4; ENSG00000102021; HLA -A*31:01
TERDLINQSGR

SEQ ID NO: 4722 - protein, 8 aa, Homo sapiens
  Table 1.2; LUZP4; ENSG00000102021; HLA -C*07:04
TGKNTITT

SEQ ID NO: 4723 - protein, 9 aa, Homo sapiens
  Table 1.2; LUZP4; ENSG00000102021; HLA -A*31:01,HLA-B*27:05
TQKDLIATQ

SEQ ID NO: 4724 - protein, 10 aa, Homo sapiens
  Table 1.2; LUZP4; ENSG00000102021; HLA -A*31:01,HLA-A*33:01,HLA-A*33:03,HLA-A*68:01,HLA-C*07:06
TQKDLIATQR

SEQ ID NO: 4725 - protein, 10 aa, Homo sapiens
  Table 1.2; LUZP4; ENSG00000102021; HLA -A*03:01,HLA-A*03:02,HLA-A*31:01
TQRDLIATQK

SEQ ID NO: 4726 - protein, 10 aa, Homo sapiens
  Table 1.2; LUZP4; ENSG00000102021; HLA -A*31:01,HLA-A*33:03,HLA-A*68:01
TQRDLIATQR

SEQ ID NO: 4727 - protein, 9 aa, Homo sapiens
  Table 1.2; LUZP4; ENSG00000102021; HLA -A*31:01
TQRDLIVTQ

SEQ ID NO: 4728 - protein, 10 aa, Homo sapiens
  Table 1.2; LUZP4; ENSG00000102021; HLA -A*31:01,HLA-A*33:03,HLA-A*68:01
TQRDLIVTQR

SEQ ID NO: 4729 - protein, 10 aa, Homo sapiens
  Table 1.2; LUZP4; ENSG00000102021; HLA -A*31:01,HLA-A*33:01,HLA-A*33:03,HLA-C*07:06
TQRDLVATER

SEQ ID NO: 4730 - protein, 9 aa, Homo sapiens
  Table 1.2; LUZP4; ENSG00000102021; HLA -B*27:05,HLA-B*38:01,HLA-B*39:01
TQSDLIATQ

SEQ ID NO: 4731 - protein, 10 aa, Homo sapiens
  Table 1.2; LUZP4; ENSG00000102021; HLA -A*11:01,HLA-A*31:01,HLA-A*33:03,HLA-A*68:01,HLA-A*68:02, HLA-B*27:02,HLA-B*27:05,HLA-C*07:06
TQSDLIATQR

SEQ ID NO: 4732 - protein, 8 aa, Homo sapiens
  Table 1.2; LUZP4; ENSG00000102021; HLA -B*51:01,HLA-C*16:01
VATERDLI

SEQ ID NO: 4733 - protein, 8 aa, Homo sapiens
  Table 1.2; LUZP4; ENSG00000102021; HLA -B*51:01
VPPNHPSR

SEQ ID NO: 4734 - protein, 11 aa, Homo sapiens
  Table 1.2; LUZP4; ENSG00000102021; HLA -A*31:01,HLA-A*33:01,HLA-A*68:01
VTQRDLVATER

SEQ ID NO: 4735 - protein, 9 aa, Homo sapiens
  Table 1.2; LUZP4; ENSG00000102021; HLA -B*07:02,HLA-B*44:02,HLA-B*44:03,HLA-C*06:02
YEAQAEKNQ

SEQ ID NO: 4736 - protein, 10 aa, Homo sapiens
  Table 1.2; LUZP4; ENSG00000102021; HLA -B*40:02,HLA-B*49:01
YEAQAEKNQG

SEQ ID NO: 4737 - protein, 8 aa, Homo sapiens
  Table 1.2; LUZP4; ENSG00000102021; HLA -B*18:01
YERSHGQY

SEQ ID NO: 4738 - protein, 8 aa, Homo sapiens
  Table 1.2; LUZP4; ENSG00000102021; HLA -A*32:01,HLA-B*08:01,HLA-C*16:02
YSTGKNTI

SEQ ID NO: 4739 - protein, 9 aa, Homo sapiens
  Table 1.2; MAGEA1; ENSG00000198681; HLA -B*07:02,HLA-B*35:03,HLA-B*46:01,HLA-C*01:02,HLA-C*03:03, HLA-C*03:04,HLA-C*07:02,HLA-C*14:02,HLA-C*16:01
AATSSSSPL

SEQ ID NO: 4740 - protein, 11 aa, Homo sapiens
  Table 1.2; MAGEA1; ENSG00000198681; HLA -C*03:03,HLA-C*03:04
AATSSSSPLVL

SEQ ID NO: 4741 - protein, 8 aa, Homo sapiens
  Table 1.2; MAGEA1; ENSG00000198681; HLA -B*37:01,HLA-B*40:02
ADLVGFLL

SEQ ID NO: 4742 - protein, 9 aa, Homo sapiens
  Table 1.2; MAGEA1; ENSG00000198681; HLA -B*44:02
ADLVGFLLL

SEQ ID NO: 4743 - protein, 8 aa, Homo sapiens
  Table 1.2; MAGEA1; ENSG00000198681; HLA -A*30:02,HLA-B*15:03,HLA-B*37:01,HLA-B*44:02,HLA-B*44:03, HLA-C*01:02,HLA-C*14:02
ADPTGHSY

SEQ ID NO: 4744 - protein, 9 aa, Homo sapiens
  Table 1.2; MAGEA1; ENSG00000198681; HLA -B*37:01
ADPTGHSYV

SEQ ID NO: 4745 - protein, 10 aa, Homo sapiens
  Table 1.2; MAGEA1; ENSG00000198681; HLA -B*37:01
ADPTGHSYVL

SEQ ID NO: 4746 - protein, 8 aa, Homo sapiens
  Table 1.2; MAGEA1; ENSG00000198681; HLA -A*30:01,HLA-B*13:02,HLA-B*18:01,HLA-B*37:01,HLA-B*40:01, HLA-B*40:02,HLA-B*44:02,HLA-B*44:03,HLA-B*49:01
AEMLESVI

SEQ ID NO: 4747 - protein, 10 aa, Homo sapiens
  Table 1.2; MAGEA1; ENSG00000198681; HLA -B*44:02,HLA-B*49:01
AEMLESVIKN

SEQ ID NO: 4748 - protein, 11 aa, Homo sapiens
  Table 1.2; MAGEA1; ENSG00000198681; HLA -A*30:01,HLA-A*30:02,HLA-B*18:01,HLA-B*27:02,HLA-B*40:01, HLA-B*44:02,HLA-B*44:03,HLA-B*49:01,HLA-C*16:04
AEMLESVIKNY

SEQ ID NO: 4749 - protein, 8 aa, Homo sapiens
  Table 1.2; MAGEA1; ENSG00000198681; HLA -A*30:01,HLA-B*37:01,HLA-B*49:01
AETSYVKV

SEQ ID NO: 4750 - protein, 9 aa, Homo sapiens
  Table 1.2; MAGEA1; ENSG00000198681; HLA -A*30:01,HLA-B*18:01,HLA-B*27:02,HLA-B*27:05,HLA-B*37:01, HLA-B*40:01,HLA-B*40:02,HLA-B*44:02,HLA-B*44:03,HLA-B*49:01, HLA-C*02:02,HLA-C*12:03,HLA-C*16:01,HLA-C*16:02,HLA-C*16:04
AETSYVKVL

SEQ ID NO: 4751 - protein, 11 aa, Homo sapiens
  Table 1.2; MAGEA1; ENSG00000198681; HLA -A*29:02,HLA-A*30:01,HLA-A*30:02,HLA-B*18:01,HLA-B*27:02, HLA-B*44:02,HLA-B*44:03,HLA-C*16:04
AETSYVKVLEY

SEQ ID NO: 4752 - protein, 8 aa, Homo sapiens
  Table 1.2; MAGEA1; ENSG00000198681; HLA -A*23:01,HLA-A*24:02,HLA-C*14:02
AFPTTINF

SEQ ID NO: 4753 - protein, 8 aa, Homo sapiens
  Table 1.2; MAGEA1; ENSG00000198681; HLA -A*02:01,HLA-A*02:03,HLA-B*55:01
ALAETSYV

SEQ ID NO: 4754 - protein, 9 aa, Homo sapiens
  Table 1.2; MAGEA1; ENSG00000198681; HLA -A*01:01,HLA-A*03:01,HLA-A*03:02,HLA-A*11:01,HLA-A*29:02, HLA-A*68:01,HLA-B*13:02,HLA-B*27:05
ALAETSYVK

SEQ ID NO: 4755 - protein, 10 aa, Homo sapiens
  Table 1.2; MAGEA1; ENSG00000198681; HLA -A*02:01,HLA-A*02:03,HLA-A*02:04,HLA-A*02:07,HLA-B*55:01
ALAETSYVKV

SEQ ID NO: 4756 - protein, 11 aa, Homo sapiens
  Table 1.2; MAGEA1; ENSG00000198681; HLA -A*02:03,HLA-A*02:04
ALAETSYVKVL

SEQ ID NO: 4757 - protein, 9 aa, Homo sapiens
  Table 1.2; MAGEA1; ENSG00000198681; HLA -A*02:01,HLA-B*55:01
ALGLVCVQA

SEQ ID NO: 4758 - protein, 9 aa, Homo sapiens
  Table 1.2; MAGEA1; ENSG00000198681; HLA -A*02:01,HLA-A*02:03,HLA-A*02:04,HLA-A*02:07,HLA-B*13:02, HLA-B*15:01,HLA-B*40:02,HLA-B*55:01,HLA-C*06:02,HLA-C*07:04
ALREEEEGV

SEQ ID NO: 4759 - protein, 9 aa, Homo sapiens
  Table 1.2; MAGEA1; ENSG00000198681; HLA -A*02:01,HLA-A*02:03,HLA-B*13:02
AQQEALGLV

SEQ ID NO: 4760 - protein, 11 aa, Homo sapiens
  Table 1.2; MAGEA1; ENSG00000198681; HLA -A*02:01,HLA-A*02:04,HLA-A*30:01,HLA-B*13:02,HLA-B*15:01
AQQEALGLVCV

SEQ ID NO: 4761 - protein, 10 aa, Homo sapiens
  Table 1.2; MAGEA1; ENSG00000198681; HLA -B*27:05,HLA-B*38:01
AREPVTKAEM

SEQ ID NO: 4762 - protein, 10 aa, Homo sapiens
  Table 1.2; MAGEA1; ENSG00000198681; HLA -B*57:01,HLA-B*58:01
ASAFPTTINF

SEQ ID NO: 4763 - protein, 9 aa, Homo sapiens
  Table 1.2; MAGEA1; ENSG00000198681; HLA -A*01:01,HLA-A*11:01,HLA-A*29:02,HLA-B*57:01,HLA-B*58:01
ASESLQLVF

SEQ ID NO: 4764 - protein, 9 aa, Homo sapiens
  Table 1.2; MAGEA1; ENSG00000198681; HLA -A*01:01,HLA-A*02:01,HLA-A*03:02,HLA-A*11:01,HLA-B*13:02, HLA-B*27:05,HLA-B*39:01
ATSSSSPLV

SEQ ID NO: 4765 - protein, 10 aa, Homo sapiens
  Table 1.2; MAGEA1; ENSG00000198681; HLA -A*03:01,HLA-A*11:01
ATSSSSPLVL

SEQ ID NO: 4766 - protein, 11 aa, Homo sapiens
  Table 1.2; MAGEA1; ENSG00000198681; HLA -A*11:01,HLA-A*31:01
ATSSSSPLVLG

SEQ ID NO: 4767 - protein, 8 aa, Homo sapiens
  Table 1.2; MAGEA1; ENSG00000198681; HLA -B*08:01
AVITKKVA

SEQ ID NO: 4768 - protein, 8 aa, Homo sapiens
  Table 1.2; MAGEA1; ENSG00000198681; HLA -A*24:02
AYGEPRKL

SEQ ID NO: 4769 - protein, 9 aa, Homo sapiens
  Table 1.2; MAGEA1; ENSG00000198681; HLA -A*24:02
AYGEPRKLL

SEQ ID NO: 4770 - protein, 9 aa, Homo sapiens
  Table 1.2; MAGEA1; ENSG00000198681; HLA -A*02:01,HLA-A*02:04
CILESLFRA

SEQ ID NO: 4771 - protein, 9 aa, Homo sapiens
  Table 1.2; MAGEA1; ENSG00000198681; HLA -B*38:01,HLA-B*51:01
DGLLGDNQI

SEQ ID NO: 4772 - protein, 8 aa, Homo sapiens
  Table 1.2; MAGEA1; ENSG00000198681; HLA -B*08:01,HLA-B*18:01
DGREHSAY

SEQ ID NO: 4773 - protein, 10 aa, Homo sapiens
  Table 1.2; MAGEA1; ENSG00000198681; HLA -A*25:01,HLA-A*26:01,HLA-A*29:02
DLVGFLLLKY

SEQ ID NO: 4774 - protein, 10 aa, Homo sapiens
  Table 1.2; MAGEA1; ENSG00000198681; HLA -A*01:01,HLA-A*25:01,HLA-A*26:01,HLA-A*29:02,HLA-A*33:01, HLA-B*35:01
DLVQEKYLEY

SEQ ID NO: 4775 - protein, 11 aa, Homo sapiens
  Table 1.2; MAGEA1; ENSG00000198681; HLA -A*33:01
DLVQEKYLEYR

SEQ ID NO: 4776 - protein, 8 aa, Homo sapiens
  Table 1.2; MAGEA1; ENSG00000198681; HLA -B*51:01
DPPQSPQG

SEQ ID NO: 4777 - protein, 8 aa, Homo sapiens
  Table 1.2; MAGEA1; ENSG00000198681; HLA -B*51:01
DPTGHSYV

SEQ ID NO: 4778 - protein, 9 aa, Homo sapiens
  Table 1.2; MAGEA1; ENSG00000198681; HLA -B*07:02,HLA-B*08:01,HLA-B*35:01,HLA-B*35:03,HLA-B*39:01, HLA-B*51:01,HLA-B*55:01,HLA-C*07:02
DPTGHSYVL

SEQ ID NO: 4779 - protein, 9 aa, Homo sapiens
  Table 1.2; MAGEA1; ENSG00000198681; HLA -A*01:01,HLA-A*25:01,HLA-A*32:01,HLA-A*33:01,HLA-B*18:01, HLA-B*35:01,HLA-B*38:01,HLA-B*39:01,HLA-B*57:01,HLA-B*58:01, HLA-C*05:01
DSDPARYEF

SEQ ID NO: 4780 - protein, 10 aa, Homo sapiens
  Table 1.2; MAGEA1; ENSG00000198681; HLA -A*01:01
DSDPARYEFL

SEQ ID NO: 4781 - protein, 10 aa, Homo sapiens
  Table 1.2; MAGEA1; ENSG00000198681; HLA -A*25:01,HLA-A*26:01,HLA-A*33:01
DVKEADPTGH

SEQ ID NO: 4782 - protein, 9 aa, Homo sapiens
  Table 1.2; MAGEA1; ENSG00000198681; HLA -A*01:01,HLA-A*25:01,HLA-A*26:01,HLA-A*29:02,HLA-A*30:02, HLA-A*32:01,HLA-A*33:01,HLA-A*33:03,HLA-A*68:01,HLA-B*15:01, HLA-B*15:03,HLA-B*18:01,HLA-B*35:01,HLA-B*35:03,HLA-B*38:01,
  HLA-B*39:01,HLA-B*44:02,HLA-B*44:03,HLA-B*46:01,HLA-B*55:01, HLA-B*58:01,HLA-C*02:02,HLA-C*03:03,HLA-C*03:04,HLA-C*04:01, HLA-C*05:01,HLA-C*07:04,HLA-C*07:06,HLA-C*14:02,HLA-C*16:01, HLA-C*16:02,HLA-C*16:04
EADPTGHSY

SEQ ID NO: 4783 - protein, 10 aa, Homo sapiens
  Table 1.2; MAGEA1; ENSG00000198681; HLA -A*01:01,HLA-A*68:02,HLA-B*38:01,HLA-B*51:01,HLA-C*05:01
EADPTGHSYV

SEQ ID NO: 4784 - protein, 11 aa, Homo sapiens
  Table 1.2; MAGEA1; ENSG00000198681; HLA -A*01:01,HLA-A*68:01,HLA-B*27:05,HLA-B*35:01,HLA-B*35:03, HLA-B*38:01,HLA-B*39:01,HLA-B*40:01,HLA-B*55:01,HLA-C*03:04, HLA-C*05:01,HLA-C*16:02
EADPTGHSYVL

SEQ ID NO: 4785 - protein, 9 aa, Homo sapiens
  Table 1.2; MAGEA1; ENSG00000198681; HLA -B*54:01
EALEAQQEA

SEQ ID NO: 4786 - protein, 10 aa, Homo sapiens
  Table 1.2; MAGEA1; ENSG00000198681; HLA -A*68:01,HLA-B*35:03
EALEAQQEAL

SEQ ID NO: 4787 - protein, 8 aa, Homo sapiens
  Table 1.2; MAGEA1; ENSG00000198681; HLA -B*51:01
EALGLVCV

SEQ ID NO: 4788 - protein, 9 aa, Homo sapiens
  Table 1.2; MAGEA1; ENSG00000198681; HLA -A*33:03,HLA-C*07:01
EALGLVCVQ

SEQ ID NO: 4789 - protein, 10 aa, Homo sapiens
  Table 1.2; MAGEA1; ENSG00000198681; HLA -A*33:03,HLA-A*68:02,HLA-B*54:01
EALGLVCVQA

SEQ ID NO: 4790 - protein, 11 aa, Homo sapiens
  Table 1.2; MAGEA1; ENSG00000198681; HLA -A*30:01,HLA-B*40:01
EEALEAQQEAL

SEQ ID NO: 4791 - protein, 9 aa, Homo sapiens
  Table 1.2; MAGEA1; ENSG00000198681; HLA -B*39:01
EEEGPSTSC

SEQ ID NO: 4792 - protein, 10 aa, Homo sapiens
  Table 1.2; MAGEA1; ENSG00000198681; HLA -B*40:01,HLA-B*49:01
EEEGPSTSCI

SEQ ID NO: 4793 - protein, 11 aa, Homo sapiens
  Table 1.2; MAGEA1; ENSG00000198681; HLA -B*40:01
EEEGPSTSCIL

SEQ ID NO: 4794 - protein, 9 aa, Homo sapiens
  Table 1.2; MAGEA1; ENSG00000198681; HLA -B*40:01,HLA-B*44:02,HLA-B*44:03,HLA-B*49:01
EEGPSTSCI

SEQ ID NO: 4795 - protein, 10 aa, Homo sapiens
  Table 1.2; MAGEA1; ENSG00000198681; HLA -B*40:01,HLA-B*44:03
EEGPSTSCIL

SEQ ID NO: 4796 - protein, 9 aa, Homo sapiens
  Table 1.2; MAGEA1; ENSG00000198681; HLA -B*49:01
EEIWEELSV

SEQ ID NO: 4797 - protein, 8 aa, Homo sapiens
  Table 1.2; MAGEA1; ENSG00000198681; HLA -B*18:01,HLA-B*40:02,HLA-B*49:01
EELSVMEV

SEQ ID NO: 4798 - protein, 9 aa, Homo sapiens
  Table 1.2; MAGEA1; ENSG00000198681; HLA -A*25:01,HLA-A*26:01,HLA-A*30:01,HLA-B*15:03,HLA-B*18:01, HLA-B*27:02,HLA-B*35:01,HLA-B*40:01,HLA-B*44:02,HLA-B*44:03, HLA-C*16:04
EELSVMEVY

SEQ ID NO: 4799 - protein, 9 aa, Homo sapiens
  Table 1.2; MAGEA1; ENSG00000198681; HLA -B*40:02
EEVPTAGST

SEQ ID NO: 4800 - protein, 8 aa, Homo sapiens
  Table 1.2; MAGEA1; ENSG00000198681; HLA -B*51:01
EGPSTSCI

SEQ ID NO: 4801 - protein, 9 aa, Homo sapiens
  Table 1.2; MAGEA1; ENSG00000198681; HLA -A*33:03
EHSAYGEPR

SEQ ID NO: 4802 - protein, 10 aa, Homo sapiens
  Table 1.2; MAGEA1; ENSG00000198681; HLA -A*25:01,HLA-A*26:01
EIFGKASESL

SEQ ID NO: 4803 - protein, 8 aa, Homo sapiens
  Table 1.2; MAGEA1; ENSG00000198681; HLA -B*18:01
ELSVMEVY

SEQ ID NO: 4804 - protein, 10 aa, Homo sapiens
  Table 1.2; MAGEA1; ENSG00000198681; HLA -A*25:01,HLA-A*26:01,HLA-A*29:02,HLA-A*30:02,HLA-A*33:01, HLA-A*33:03,HLA-B*44:02,HLA-B*44:03
EMLESVIKNY

SEQ ID NO: 4805 - protein, 11 aa, Homo sapiens
  Table 1.2; MAGEA1; ENSG00000198681; HLA -A*33:03
EMLESVIKNYK

SEQ ID NO: 4806 - protein, 8 aa, Homo sapiens
  Table 1.2; MAGEA1; ENSG00000198681; HLA -B*08:01,HLA-B*35:01,HLA-B*35:03,HLA-B*55:01
EPVTKAEM

SEQ ID NO: 4807 - protein, 9 aa, Homo sapiens
  Table 1.2; MAGEA1; ENSG00000198681; HLA -B*07:02,HLA-B*08:01,HLA-B*35:01,HLA-B*35:03,HLA-C*07:02
EPVTKAEML

SEQ ID NO: 4808 - protein, 8 aa, Homo sapiens
  Table 1.2; MAGEA1; ENSG00000198681; HLA -B*08:01
ESLFRAVI

SEQ ID NO: 4809 - protein, 10 aa, Homo sapiens
  Table 1.2; MAGEA1; ENSG00000198681; HLA -A*33:03
ESLFRAVITK

SEQ ID NO: 4810 - protein, 9 aa, Homo sapiens
  Table 1.2; MAGEA1; ENSG00000198681; HLA -A*33:01,HLA-A*68:02,HLA-C*07:01
ESLQLVFGI

SEQ ID NO: 4811 - protein, 11 aa, Homo sapiens
  Table 1.2; MAGEA1; ENSG00000198681; HLA -A*68:02
ESLQLVFGIDV

SEQ ID NO: 4812 - protein, 9 aa, Homo sapiens
  Table 1.2; MAGEA1; ENSG00000198681; HLA -A*68:02
ETSYVKVLE

SEQ ID NO: 4813 - protein, 10 aa, Homo sapiens
  Table 1.2; MAGEA1; ENSG00000198681; HLA -A*01:01,HLA-A*25:01,HLA-A*26:01,HLA-A*29:02,HLA-A*33:03, HLA-A*68:01,HLA-A*68:02,HLA-B*44:03
ETSYVKVLEY

SEQ ID NO: 4814 - protein, 11 aa, Homo sapiens
  Table 1.2; MAGEA1; ENSG00000198681; HLA -A*68:02
ETSYVKVLEYV

SEQ ID NO: 4815 - protein, 10 aa, Homo sapiens
  Table 1.2; MAGEA1; ENSG00000198681; HLA -A*25:01,HLA-A*26:01,HLA-A*32:01,HLA-A*33:01,HLA-A*33:03, HLA-A*68:01,HLA-A*68:02,HLA-B*08:01,HLA-B*54:01,HLA-B*55:01, HLA-B*56:01
EVYDGREHSA

SEQ ID NO: 4816 - protein, 11 aa, Homo sapiens
  Table 1.2; MAGEA1; ENSG00000198681; HLA -A*01:01,HLA-A*25:01,HLA-A*26:01,HLA-A*29:02,HLA-A*30:02, HLA-A*32:01,HLA-A*33:01,HLA-A*33:03,HLA-A*68:01,HLA-B*15:01, HLA-B*35:01
EVYDGREHSAY

SEQ ID NO: 4817 - protein, 8 aa, Homo sapiens
  Table 1.2; MAGEA1; ENSG00000198681; HLA -B*08:01
EYVIKVSA

SEQ ID NO: 4818 - protein, 9 aa, Homo sapiens
  Table 1.2; MAGEA1; ENSG00000198681; HLA -A*26:01,HLA-A*31:01,HLA-A*33:01,HLA-A*33:03,HLA-A*68:01, HLA-C*07:06
EYVIKVSAR

SEQ ID NO: 4819 - protein, 9 aa, Homo sapiens
  Table 1.2; MAGEA1; ENSG00000198681; HLA -A*02:03,HLA-B*54:01
FFFPSLREA

SEQ ID NO: 4820 - protein, 11 aa, Homo sapiens
  Table 1.2; MAGEA1; ENSG00000198681; HLA -A*29:02
FFFPSLREAAL

SEQ ID NO: 4821 - protein, 8 aa, Homo sapiens
  Table 1.2; MAGEA1; ENSG00000198681; HLA -B*08:01,HLA-B*46:01
FGKASESL

SEQ ID NO: 4822 - protein, 9 aa, Homo sapiens
  Table 1.2; MAGEA1; ENSG00000198681; HLA -A*02:01,HLA-A*02:03,HLA-A*02:04,HLA-A*02:07
FLIIVLVMI

SEQ ID NO: 4823 - protein, 8 aa, Homo sapiens
  Table 1.2; MAGEA1; ENSG00000198681; HLA -A*02:04
FLWGPRAL

SEQ ID NO: 4824 - protein, 9 aa, Homo sapiens
  Table 1.2; MAGEA1; ENSG00000198681; HLA -A*02:01,HLA-A*02:03,HLA-A*02:07
FLWGPRALA

SEQ ID NO: 4825 - protein, 11 aa, Homo sapiens
  Table 1.2; MAGEA1; ENSG00000198681; HLA -A*02:01,HLA-A*02:03,HLA-A*02:04,HLA-A*02:07
FLWGPRALAET

SEQ ID NO: 4826 - protein, 8 aa, Homo sapiens
  Table 1.2; MAGEA1; ENSG00000198681; HLA -B*54:01,HLA-B*56:01
FPEIFGKA

SEQ ID NO: 4827 - protein, 8 aa, Homo sapiens
  Table 1.2; MAGEA1; ENSG00000198681; HLA -B*54:01,HLA-B*56:01
FPSLREAA

SEQ ID NO: 4828 - protein, 9 aa, Homo sapiens
  Table 1.2; MAGEA1; ENSG00000198681; HLA -B*07:02,HLA-B*08:01,HLA-B*35:01,HLA-B*35:03,HLA-B*37:01, HLA-B*39:01,HLA-B*40:01,HLA-B*51:01,HLA-B*54:01,HLA-B*55:01, HLA-B*56:01,HLA-C*03:03,HLA-C*03:04,HLA-C*07:02,HLA-C*16:01
FPSLREAAL

SEQ ID NO: 4829 - protein, 8 aa, Homo sapiens
  Table 1.2; MAGEA1; ENSG00000198681; HLA -B*54:01,HLA-B*56:01
FPTTINFT

SEQ ID NO: 4830 - protein, 9 aa, Homo sapiens
  Table 1.2; MAGEA1; ENSG00000198681; HLA -A*33:03,HLA-A*68:01,HLA-A*68:02,HLA-B*27:02,HLA-B*35:01, HLA-B*35:03,HLA-B*54:01,HLA-B*55:01,HLA-B*56:01,HLA-C*07:06
FPTTINFTR

SEQ ID NO: 4831 - protein, 10 aa, Homo sapiens
  Table 1.2; MAGEA1; ENSG00000198681; HLA -B*54:01
FPTTINFTRQ

SEQ ID NO: 4832 - protein, 8 aa, Homo sapiens
  Table 1.2; MAGEA1; ENSG00000198681; HLA -B*27:05
FRAVITKK

SEQ ID NO: 4833 - protein, 9 aa, Homo sapiens
  Table 1.2; MAGEA1; ENSG00000198681; HLA -A*68:02,HLA-C*06:02
FRAVITKKV

SEQ ID NO: 4834 - protein, 9 aa, Homo sapiens
  Table 1.2; MAGEA1; ENSG00000198681; HLA -A*02:03,HLA-B*13:02,HLA-B*49:01,HLA-B*51:01,HLA-C*02:02, HLA-C*12:03,HLA-C*16:02
GASAFPTTI

SEQ ID NO: 4835 - protein, 8 aa, Homo sapiens
  Table 1.2; MAGEA1; ENSG00000198681; HLA -A*11:01,HLA-B*27:02
GDNQIMPK

SEQ ID NO: 4836 - protein, 9 aa, Homo sapiens
  Table 1.2; MAGEA1; ENSG00000198681; HLA -A*23:01,HLA-A*29:02
GFLIIVLVM

SEQ ID NO: 4837 - protein, 8 aa, Homo sapiens
  Table 1.2; MAGEA1; ENSG00000198681; HLA -B*38:01
GHAPEEEI

SEQ ID NO: 4838 - protein, 9 aa, Homo sapiens
  Table 1.2; MAGEA1; ENSG00000198681; HLA -B*38:01
GHAPEEEIW

SEQ ID NO: 4839 - protein, 10 aa, Homo sapiens
  Table 1.2; MAGEA1; ENSG00000198681; HLA -B*38:01
GHSYVLVTCL

SEQ ID NO: 4840 - protein, 9 aa, Homo sapiens
  Table 1.2; MAGEA1; ENSG00000198681; HLA -B*15:03
GKASESLQL

SEQ ID NO: 4841 - protein, 11 aa, Homo sapiens
  Table 1.2; MAGEA1; ENSG00000198681; HLA -B*15:03
GKASESLQLVF

SEQ ID NO: 4842 - protein, 11 aa, Homo sapiens
  Table 1.2; MAGEA1; ENSG00000198681; HLA -A*02:01,HLA-A*02:04,HLA-A*03:01,HLA-A*03:02,HLA-A*11:01, HLA-A*31:01,HLA-B*27:02,HLA-B*27:05
GLLGDNQIMPK

SEQ ID NO: 4843 - protein, 10 aa, Homo sapiens
  Table 1.2; MAGEA1; ENSG00000198681; HLA -A*30:02,HLA-B*07:02,HLA-B*15:01,HLA-B*15:03,HLA-B*35:01, HLA-B*55:01
GPRALAETSY

SEQ ID NO: 4844 - protein, 9 aa, Homo sapiens
  Table 1.2; MAGEA1; ENSG00000198681; HLA -A*02:01,HLA-A*02:03,HLA-B*55:01
GTLEEVPTA

SEQ ID NO: 4845 - protein, 9 aa, Homo sapiens
  Table 1.2; MAGEA1; ENSG00000198681; HLA -A*03:01,HLA-A*03:02,HLA-A*11:01
HCFPEIFGK

SEQ ID NO: 4846 - protein, 8 aa, Homo sapiens
  Table 1.2; MAGEA1; ENSG00000198681; HLA -A*68:01
HSAYGEPR

SEQ ID NO: 4847 - protein, 9 aa, Homo sapiens
  Table 1.2; MAGEA1; ENSG00000198681; HLA -C*03:04
IAMEGGHAP

SEQ ID NO: 4848 - protein, 9 aa, Homo sapiens
  Table 1.2; MAGEA1; ENSG00000198681; HLA -C*14:02
IFGKASESL

SEQ ID NO: 4849 - protein, 9 aa, Homo sapiens
  Table 1.2; MAGEA1; ENSG00000198681; HLA -A*02:01,HLA-A*02:03,HLA-A*02:04,HLA-A*02:07
ILESLFRAV

SEQ ID NO: 4850 - protein, 9 aa, Homo sapiens
  Table 1.2; MAGEA1; ENSG00000198681; HLA -A*02:07,HLA-A*24:02
IMPKTGFLI

SEQ ID NO: 4851 - protein, 10 aa, Homo sapiens
  Table 1.2; MAGEA1; ENSG00000198681; HLA -A*24:02
IMPKTGFLII

SEQ ID NO: 4852 - protein, 11 aa, Homo sapiens
  Table 1.2; MAGEA1; ENSG00000198681; HLA -B*57:01
ITKKVADLVGF

SEQ ID NO: 4853 - protein, 10 aa, Homo sapiens
  Table 1.2; MAGEA1; ENSG00000198681; HLA -B*27:02
KAEMLESVIK

SEQ ID NO: 4854 - protein, 8 aa, Homo sapiens
  Table 1.2; MAGEA1; ENSG00000198681; HLA -C*03:04
KASESLQL

SEQ ID NO: 4855 - protein, 9 aa, Homo sapiens
  Table 1.2; MAGEA1; ENSG00000198681; HLA -B*58:01,HLA-C*16:02
KASESLQLV

SEQ ID NO: 4856 - protein, 10 aa, Homo sapiens
  Table 1.2; MAGEA1; ENSG00000198681; HLA -A*23:01,HLA-A*24:02,HLA-A*29:02,HLA-B*27:02,HLA-B*57:01, HLA-B*58:01,HLA-C*02:02,HLA-C*16:04
KASESLQLVF

SEQ ID NO: 4857 - protein, 10 aa, Homo sapiens
  Table 1.2; MAGEA1; ENSG00000198681; HLA -A*01:01,HLA-A*03:02,HLA-A*25:01,HLA-A*26:01,HLA-A*29:02, HLA-A*30:01,HLA-A*30:02,HLA-A*32:01,HLA-B*15:01,HLA-B*15:03, HLA-B*18:01,HLA-B*27:02,HLA-B*27:05,HLA-B*37:01,HLA-B*40:01,
  HLA-B*44:02,HLA-B*44:03,HLA-B*49:01,HLA-B*57:01,HLA-B*58:01, HLA-C*02:02,HLA-C*16:01,HLA-C*16:02,HLA-C*16:04
KEADPTGHSY

SEQ ID NO: 4858 - protein, 11 aa, Homo sapiens
  Table 1.2; MAGEA1; ENSG00000198681; HLA -B*40:01,HLA-B*49:01
KEADPTGHSYV

SEQ ID NO: 4859 - protein, 9 aa, Homo sapiens
  Table 1.2; MAGEA1; ENSG00000198681; HLA -B*15:03
KKVADLVGF

SEQ ID NO: 4860 - protein, 11 aa, Homo sapiens
  Table 1.2; MAGEA1; ENSG00000198681; HLA -A*03:01,HLA-A*03:02,HLA-A*11:01,HLA-A*31:01
KLLTQDLVQEK

SEQ ID NO: 4861 - protein, 9 aa, Homo sapiens
  Table 1.2; MAGEA1; ENSG00000198681; HLA -A*02:03,HLA-A*02:04,HLA-A*02:07,HLA-A*03:01,HLA-A*25:01, HLA-A*26:01,HLA-A*32:01,HLA-A*68:02,HLA-B*27:05,HLA-B*58:01
KVADLVGFL

SEQ ID NO: 4862 - protein, 10 aa, Homo sapiens
  Table 1.2; MAGEA1; ENSG00000198681; HLA -A*02:01,HLA-A*02:04,HLA-A*02:07,HLA-A*03:01,HLA-A*31:01, HLA-A*68:02,HLA-B*57:01
KVADLVGFLL

SEQ ID NO: 4863 - protein, 11 aa, Homo sapiens
  Table 1.2; MAGEA1; ENSG00000198681; HLA -A*02:01,HLA-A*02:04,HLA-A*02:07,HLA-A*03:01
KVADLVGFLLL

SEQ ID NO: 4864 - protein, 9 aa, Homo sapiens
  Table 1.2; MAGEA1; ENSG00000198681; HLA -A*02:01,HLA-A*02:03,HLA-A*02:04,HLA-A*02:07,HLA-A*03:01, HLA-A*03:02,HLA-A*11:01,HLA-A*31:01,HLA-A*32:01,HLA-A*68:02, HLA-B*13:02,HLA-B*40:02,HLA-B*55:01,HLA-B*57:01,HLA-B*58:01,
  HLA-C*02:02,HLA-C*06:02
KVLEYVIKV

SEQ ID NO: 4865 - protein, 11 aa, Homo sapiens
  Table 1.2; MAGEA1; ENSG00000198681; HLA -A*02:01,HLA-B*54:01,HLA-B*56:01
KVLEYVIKVSA

SEQ ID NO: 4866 - protein, 8 aa, Homo sapiens
  Table 1.2; MAGEA1; ENSG00000198681; HLA -B*27:02
LAETSYVK

SEQ ID NO: 4867 - protein, 9 aa, Homo sapiens
  Table 1.2; MAGEA1; ENSG00000198681; HLA -C*05:01
LAETSYVKV

SEQ ID NO: 4868 - protein, 8 aa, Homo sapiens
  Table 1.2; MAGEA1; ENSG00000198681; HLA -A*30:01,HLA-B*18:01,HLA-B*40:01,HLA-B*49:01
LEAQQEAL

SEQ ID NO: 4869 - protein, 10 aa, Homo sapiens
  Table 1.2; MAGEA1; ENSG00000198681; HLA -A*30:01,HLA-B*40:01
LEAQQEALGL

SEQ ID NO: 4870 - protein, 11 aa, Homo sapiens
  Table 1.2; MAGEA1; ENSG00000198681; HLA -B*49:01
LEAQQEALGLV

SEQ ID NO: 4871 - protein, 8 aa, Homo sapiens
  Table 1.2; MAGEA1; ENSG00000198681; HLA -B*18:01,HLA-B*37:01,HLA-B*49:01
LESLFRAV

SEQ ID NO: 4872 - protein, 9 aa, Homo sapiens
  Table 1.2; MAGEA1; ENSG00000198681; HLA -B*44:02,HLA-B*49:01
LESLFRAVI

SEQ ID NO: 4873 - protein, 8 aa, Homo sapiens
  Table 1.2; MAGEA1; ENSG00000198681; HLA -B*18:01,HLA-B*37:01,HLA-B*44:02,HLA-B*44:03,HLA-C*12:03, HLA-C*16:04
LESVIKNY

SEQ ID NO: 4874 - protein, 9 aa, Homo sapiens
  Table 1.2; MAGEA1; ENSG00000198681; HLA -A*30:01,HLA-B*18:01,HLA-B*37:01,HLA-B*40:01,HLA-B*40:02, HLA-B*49:01,HLA-B*54:01,HLA-B*56:01
LEYVIKVSA

SEQ ID NO: 4875 - protein, 9 aa, Homo sapiens
  Table 1.2; MAGEA1; ENSG00000198681; HLA -A*03:01,HLA-A*03:02,HLA-A*11:01,HLA-B*27:02
LGDNQIMPK

SEQ ID NO: 4876 - protein, 9 aa, Homo sapiens
  Table 1.2; MAGEA1; ENSG00000198681; HLA -B*38:01
LHCKPEEAL

SEQ ID NO: 4877 - protein, 10 aa, Homo sapiens
  Table 1.2; MAGEA1; ENSG00000198681; HLA -A*03:01,HLA-A*03:02,HLA-A*11:01,HLA-B*27:02
LLGDNQIMPK

SEQ ID NO: 4878 - protein, 10 aa, Homo sapiens
  Table 1.2; MAGEA1; ENSG00000198681; HLA -B*27:02
LLTQDLVQEK

SEQ ID NO: 4879 - protein, 9 aa, Homo sapiens
  Table 1.2; MAGEA1; ENSG00000198681; HLA -B*13:02
LQLVFGIDV

SEQ ID NO: 4880 - protein, 10 aa, Homo sapiens
  Table 1.2; MAGEA1; ENSG00000198681; HLA -B*27:02
LSVMEVYDGR

SEQ ID NO: 4881 - protein, 9 aa, Homo sapiens
  Table 1.2; MAGEA1; ENSG00000198681; HLA -A*01:01,HLA-A*03:02,HLA-A*11:01,HLA-A*31:01,HLA-A*33:01, HLA-A*33:03,HLA-A*68:01,HLA-B*27:02,HLA-B*27:05,HLA-C*07:06
LTQDLVQEK

SEQ ID NO: 4882 - protein, 10 aa, Homo sapiens
  Table 1.2; MAGEA1; ENSG00000198681; HLA -A*01:01,HLA-A*25:01,HLA-A*26:01,HLA-A*29:02,HLA-A*30:02, HLA-A*32:01,HLA-B*57:01,HLA-B*58:01,HLA-C*16:04
LTQDLVQEKY

SEQ ID NO: 4883 - protein, 8 aa, Homo sapiens
  Table 1.2; MAGEA1; ENSG00000198681; HLA -B*27:02
LVFGIDVK

SEQ ID NO: 4884 - protein, 9 aa, Homo sapiens
  Table 1.2; MAGEA1; ENSG00000198681; HLA -B*27:05
LVFGIDVKE

SEQ ID NO: 4885 - protein, 9 aa, Homo sapiens
  Table 1.2; MAGEA1; ENSG00000198681; HLA -A*01:01,HLA-A*29:02
LVGFLLLKY

SEQ ID NO: 4886 - protein, 9 aa, Homo sapiens
  Table 1.2; MAGEA1; ENSG00000198681; HLA -A*02:01,HLA-A*02:03,HLA-A*02:04,HLA-A*02:07,HLA-B*55:01
LVLGTLEEV

SEQ ID NO: 4887 - protein, 9 aa, Homo sapiens
  Table 1.2; MAGEA1; ENSG00000198681; HLA -A*01:01,HLA-A*02:07,HLA-A*03:01,HLA-A*03:02,HLA-A*11:01, HLA-A*25:01,HLA-A*26:01,HLA-A*29:02,HLA-A*30:02,HLA-A*32:01, HLA-A*33:01,HLA-B*15:01,HLA-B*15:03,HLA-B*35:01,HLA-B*46:01,
  HLA-B*57:01,HLA-B*58:01,HLA-C*01:02,HLA-C*02:02,HLA-C*03:03, HLA-C*07:04,HLA-C*12:03,HLA-C*14:02,HLA-C*16:01,HLA-C*16:02
LVQEKYLEY

SEQ ID NO: 4888 - protein, 10 aa, Homo sapiens
  Table 1.2; MAGEA1; ENSG00000198681; HLA -A*31:01,HLA-A*33:01
LVQEKYLEYR

SEQ ID NO: 4889 - protein, 9 aa, Homo sapiens
  Table 1.2; MAGEA1; ENSG00000198681; HLA -A*01:01,HLA-A*26:01,HLA-A*29:02,HLA-A*30:02
LVTCLGLSY

SEQ ID NO: 4890 - protein, 11 aa, Homo sapiens
  Table 1.2; MAGEA1; ENSG00000198681; HLA -A*30:01,HLA-B*40:02,HLA-B*54:01
MEVYDGREHSA

SEQ ID NO: 4891 - protein, 9 aa, Homo sapiens
  Table 1.2; MAGEA1; ENSG00000198681; HLA -A*01:01,HLA-A*02:07,HLA-A*03:01,HLA-A*03:02,HLA-A*26:01, HLA-A*29:02,HLA-A*30:02,HLA-A*32:01,HLA-B*15:01,HLA-B*15:03, HLA-B*18:01,HLA-B*27:02,HLA-B*27:05,HLA-B*35:01,HLA-B*44:02,
  HLA-B*44:03,HLA-C*06:02,HLA-C*07:01,HLA-C*07:04,HLA-C*16:02
MLESVIKNY

SEQ ID NO: 4892 - protein, 10 aa, Homo sapiens
  Table 1.2; MAGEA1; ENSG00000198681; HLA -A*01:01,HLA-A*03:01,HLA-A*03:02
MLESVIKNYK

SEQ ID NO: 4893 - protein, 8 aa, Homo sapiens
  Table 1.2; MAGEA1; ENSG00000198681; HLA -B*08:01,HLA-B*51:01
MPKTGFLI

SEQ ID NO: 4894 - protein, 9 aa, Homo sapiens
  Table 1.2; MAGEA1; ENSG00000198681; HLA -B*51:01,HLA-B*54:01
MPKTGFLII

SEQ ID NO: 4895 - protein, 10 aa, Homo sapiens
  Table 1.2; MAGEA1; ENSG00000198681; HLA -B*54:01
MPKTGFLIIV

SEQ ID NO: 4896 - protein, 9 aa, Homo sapiens
  Table 1.2; MAGEA1; ENSG00000198681; HLA -A*25:01,HLA-A*26:01,HLA-A*32:01,HLA-B*15:01,HLA-B*15:03, HLA-B*18:01,HLA-B*37:01,HLA-B*38:01,HLA-B*44:02,HLA-B*44:03, HLA-B*46:01,HLA-C*07:04,HLA-C*16:04
NQIMPKTGF

SEQ ID NO: 4897 - protein, 9 aa, Homo sapiens
  Table 1.2; MAGEA1; ENSG00000198681; HLA -A*24:02
NYKHCFPEI

SEQ ID NO: 4898 - protein, 9 aa, Homo sapiens
  Table 1.2; MAGEA1; ENSG00000198681; HLA -B*15:03,HLA-B*27:02,HLA-C*07:01
PRALAETSY

SEQ ID NO: 4899 - protein, 8 aa, Homo sapiens
  Table 1.2; MAGEA1; ENSG00000198681; HLA -B*07:02,HLA-C*07:01,HLA-C*07:02
PTGHSYVL

SEQ ID NO: 4900 - protein, 8 aa, Homo sapiens
  Table 1.2; MAGEA1; ENSG00000198681; HLA -B*27:02
PTTINFTR

SEQ ID NO: 4901 - protein, 10 aa, Homo sapiens
  Table 1.2; MAGEA1; ENSG00000198681; HLA -B*35:03,HLA-C*03:03,HLA-C*03:04
QAATSSSSPL

SEQ ID NO: 4902 - protein, 8 aa, Homo sapiens
  Table 1.2; MAGEA1; ENSG00000198681; HLA -B*15:03,HLA-B*18:01,HLA-B*37:01,HLA-C*07:01
QDLVQEKY

SEQ ID NO: 4903 - protein, 9 aa, Homo sapiens
  Table 1.2; MAGEA1; ENSG00000198681; HLA -A*30:01,HLA-B*13:02,HLA-B*40:01,HLA-B*40:02,HLA-B*49:01
QEALGLVCV

SEQ ID NO: 4904 - protein, 8 aa, Homo sapiens
  Table 1.2; MAGEA1; ENSG00000198681; HLA -B*08:01,HLA-B*37:01
QIMPKTGF

SEQ ID NO: 4905 - protein, 9 aa, Homo sapiens
  Table 1.2; MAGEA1; ENSG00000198681; HLA -A*03:02
QLVFGIDVK

SEQ ID NO: 4906 - protein, 9 aa, Homo sapiens
  Table 1.2; MAGEA1; ENSG00000198681; HLA -A*68:01
QPSEGSSSR

SEQ ID NO: 4907 - protein, 10 aa, Homo sapiens
  Table 1.2; MAGEA1; ENSG00000198681; HLA -A*02:01,HLA-B*13:02,HLA-C*04:01
QQEALGLVCV

SEQ ID NO: 4908 - protein, 11 aa, Homo sapiens
  Table 1.2; MAGEA1; ENSG00000198681; HLA -B*27:05
QRQPSEGSSSR

SEQ ID NO: 4909 - protein, 9 aa, Homo sapiens
  Table 1.2; MAGEA1; ENSG00000198681; HLA -B*46:01,HLA-C*01:02
QSPQGASAF

SEQ ID NO: 4910 - protein, 9 aa, Homo sapiens
  Table 1.2; MAGEA1; ENSG00000198681; HLA -A*68:01
QVPDSDPAR

SEQ ID NO: 4911 - protein, 10 aa, Homo sapiens
  Table 1.2; MAGEA1; ENSG00000198681; HLA -A*01:01,HLA-A*25:01,HLA-A*26:01,HLA-A*29:02,HLA-A*30:02
QVPDSDPARY

SEQ ID NO: 4912 - protein, 10 aa, Homo sapiens
  Table 1.2; MAGEA1; ENSG00000198681; HLA -A*03:02,HLA-B*27:02
RALAETSYVK

SEQ ID NO: 4913 - protein, 8 aa, Homo sapiens
  Table 1.2; MAGEA1; ENSG00000198681; HLA -A*03:01,HLA-B*57:01
RAREPVTK

SEQ ID NO: 4914 - protein, 9 aa, Homo sapiens
  Table 1.2; MAGEA1; ENSG00000198681; HLA -A*32:01,HLA-B*07:02,HLA-B*54:01,HLA-B*56:01
RAREPVTKA

SEQ ID NO: 4915 - protein, 10 aa, Homo sapiens
  Table 1.2; MAGEA1; ENSG00000198681; HLA -A*30:01,HLA-B*40:01,HLA-B*49:01
REEEGPSTSC

SEQ ID NO: 4916 - protein, 11 aa, Homo sapiens
  Table 1.2; MAGEA1; ENSG00000198681; HLA -B*40:01,HLA-B*49:01
REEEGPSTSCI

SEQ ID NO: 4917 - protein, 9 aa, Homo sapiens
  Table 1.2; MAGEA1; ENSG00000198681; HLA -A*30:01,HLA-B*37:01,HLA-B*40:01,HLA-B*40:02,HLA-B*44:02, HLA-B*44:03
REPVTKAEM

SEQ ID NO: 4918 - protein, 10 aa, Homo sapiens
  Table 1.2; MAGEA1; ENSG00000198681; HLA -A*30:01,HLA-B*40:01,HLA-B*40:02
REPVTKAEML

SEQ ID NO: 4919 - protein, 8 aa, Homo sapiens
  Table 1.2; MAGEA1; ENSG00000198681; HLA -A*31:01
RFFFPSLR

SEQ ID NO: 4920 - protein, 11 aa, Homo sapiens
  Table 1.2; MAGEA1; ENSG00000198681; HLA -A*29:02,HLA-A*30:02,HLA-A*32:01,HLA-B*15:01,HLA-B*15:03, HLA-B*57:01,HLA-B*58:01
RQVPDSDPARY

SEQ ID NO: 4921 - protein, 9 aa, Homo sapiens
  Table 1.2; MAGEA1; ENSG00000198681; HLA -A*02:04
RVRFFFPSL

SEQ ID NO: 4922 - protein, 10 aa, Homo sapiens
  Table 1.2; MAGEA1; ENSG00000198681; HLA -A*31:01
RVRFFFPSLR

SEQ ID NO: 4923 - protein, 9 aa, Homo sapiens
  Table 1.2; MAGEA1; ENSG00000198681; HLA -A*02:04,HLA-A*02:07,HLA-A*03:01,HLA-A*03:02,HLA-A*11:01, HLA-A*23:01,HLA-A*24:02,HLA-A*25:01,HLA-A*26:01,HLA-A*29:02, HLA-A*30:01,HLA-A*30:02,HLA-A*31:01,HLA-A*32:01,HLA-A*33:01,
  HLA-A*33:03,HLA-A*68:01,HLA-A*68:02,HLA-B*07:02,HLA-B*13:02, HLA-B*15:01,HLA-B*15:03,HLA-B*18:01,HLA-B*27:02,HLA-B*27:05, HLA-B*35:01,HLA-B*35:03,HLA-B*37:01,HLA-B*38:01,HLA-B*39:01, HLA-B*40:02,HLA-B*44:02,HLA-B*44:03,HLA-B*46:01,HLA-B*51:01,
  HLA-B*54:01,HLA-B*55:01,HLA-B*56:01,HLA-B*57:01,HLA-B*58:01, HLA-C*01:02,HLA-C*02:02,HLA-C*03:03,HLA-C*03:04,HLA-C*04:01, HLA-C*05:01,HLA-C*07:04,HLA-C*07:06,HLA-C*12:03,HLA-C*14:02, HLA-C*16:01,HLA-C*16:02,HLA-C*16:04
SAFPTTINF

SEQ ID NO: 4924 - protein, 11 aa, Homo sapiens
  Table 1.2; MAGEA1; ENSG00000198681; HLA -A*03:02,HLA-A*11:01,HLA-A*29:02,HLA-A*31:01,HLA-A*33:01, HLA-A*33:03,HLA-A*68:01,HLA-A*68:02,HLA-B*57:01,HLA-C*02:02, HLA-C*07:06
SAFPTTINFTR

SEQ ID NO: 4925 - protein, 9 aa, Homo sapiens
  Table 1.2; MAGEA1; ENSG00000198681; HLA -A*03:01,HLA-B*15:03,HLA-B*51:01,HLA-B*58:01,HLA-C*02:02, HLA-C*03:03,HLA-C*03:04,HLA-C*06:02,HLA-C*12:03,HLA-C*16:01, HLA-C*16:02,HLA-C*16:04
SAYGEPRKL

SEQ ID NO: 4926 - protein, 8 aa, Homo sapiens
  Table 1.2; MAGEA1; ENSG00000198681; HLA -B*37:01
SDPARYEF

SEQ ID NO: 4927 - protein, 8 aa, Homo sapiens
  Table 1.2; MAGEA1; ENSG00000198681; HLA -A*30:01,HLA-B*18:01,HLA-B*37:01,HLA-B*44:02,HLA-B*44:03, HLA-B*49:01
SESLQLVF

SEQ ID NO: 4928 - protein, 9 aa, Homo sapiens
  Table 1.2; MAGEA1; ENSG00000198681; HLA -A*02:03,HLA-A*02:04,HLA-A*03:01,HLA-A*03:02,HLA-A*11:01, HLA-A*31:01
SLFRAVITK

SEQ ID NO: 4929 - protein, 10 aa, Homo sapiens
  Table 1.2; MAGEA1; ENSG00000198681; HLA -A*03:01,HLA-A*03:02
SLFRAVITKK

SEQ ID NO: 4930 - protein, 8 aa, Homo sapiens
  Table 1.2; MAGEA1; ENSG00000198681; HLA -A*02:04,HLA-B*37:01
SLQLVFGI

SEQ ID NO: 4931 - protein, 8 aa, Homo sapiens
  Table 1.2; MAGEA1; ENSG00000198681; HLA -B*07:02,HLA-B*08:01
SPLVLGTL

SEQ ID NO: 4932 - protein, 11 aa, Homo sapiens
  Table 1.2; MAGEA1; ENSG00000198681; HLA -B*56:01
SPLVLGTLEEV

SEQ ID NO: 4933 - protein, 8 aa, Homo sapiens
  Table 1.2; MAGEA1; ENSG00000198681; HLA -B*07:02
SPQGASAF

SEQ ID NO: 4934 - protein, 9 aa, Homo sapiens
  Table 1.2; MAGEA1; ENSG00000198681; HLA -A*02:07,HLA-B*46:01,HLA-C*01:02
SSPLVLGTL

SEQ ID NO: 4935 - protein, 10 aa, Homo sapiens
  Table 1.2; MAGEA1; ENSG00000198681; HLA -A*25:01
SSSPLVLGTL

SEQ ID NO: 4936 - protein, 8 aa, Homo sapiens
  Table 1.2; MAGEA1; ENSG00000198681; HLA -C*03:03,HLA-C*03:04,HLA-C*16:01
SSSSPLVL

SEQ ID NO: 4937 - protein, 9 aa, Homo sapiens
  Table 1.2; MAGEA1; ENSG00000198681; HLA -A*01:01,HLA-A*11:01
STDPPQSPQ

SEQ ID NO: 4938 - protein, 10 aa, Homo sapiens
  Table 1.2; MAGEA1; ENSG00000198681; HLA -A*01:01
STDPPQSPQG

SEQ ID NO: 4939 - protein, 9 aa, Homo sapiens
  Table 1.2; MAGEA1; ENSG00000198681; HLA -A*68:02
STSCILESL

SEQ ID NO: 4940 - protein, 9 aa, Homo sapiens
  Table 1.2; MAGEA1; ENSG00000198681; HLA -A*03:02,HLA-A*11:01,HLA-A*25:01,HLA-A*26:01,HLA-A*31:01, HLA-A*33:01,HLA-A*33:03,HLA-A*68:01,HLA-A*68:02,HLA-C*07:06
SVMEVYDGR

SEQ ID NO: 4941 - protein, 11 aa, Homo sapiens
  Table 1.2; MAGEA1; ENSG00000198681; HLA -B*35:03,HLA-B*38:01,HLA-C*04:01
SYDGLLGDNQI

SEQ ID NO: 4942 - protein, 8 aa, Homo sapiens
  Table 1.2; MAGEA1; ENSG00000198681; HLA -A*23:01,HLA-A*24:02,HLA-A*29:02,HLA-A*30:02,HLA-B*15:01, HLA-B*15:03,HLA-B*18:01,HLA-B*46:01,HLA-C*07:01,HLA-C*14:02
SYVKVLEY

SEQ ID NO: 4943 - protein, 9 aa, Homo sapiens
  Table 1.2; MAGEA1; ENSG00000198681; HLA -A*24:02
SYVKVLEYV

SEQ ID NO: 4944 - protein, 10 aa, Homo sapiens
  Table 1.2; MAGEA1; ENSG00000198681; HLA -A*23:01,HLA-A*24:02
SYVKVLEYVI

SEQ ID NO: 4945 - protein, 8 aa, Homo sapiens
  Table 1.2; MAGEA1; ENSG00000198681; HLA -A*23:01,HLA-A*24:02,HLA-C*14:02
SYVLVTCL

SEQ ID NO: 4946 - protein, 9 aa, Homo sapiens
  Table 1.2; MAGEA1; ENSG00000198681; HLA -A*68:02,HLA-B*51:01
TGFLIIVLV

SEQ ID NO: 4947 - protein, 9 aa, Homo sapiens
  Table 1.2; MAGEA1; ENSG00000198681; HLA -A*01:01,HLA-A*29:02,HLA-A*30:02,HLA-A*32:01,HLA-B*15:01, HLA-B*15:03,HLA-B*18:01,HLA-B*35:01,HLA-B*38:01,HLA-B*39:01, HLA-B*44:02,HLA-B*44:03,HLA-B*58:01,HLA-C*04:01,HLA-C*05:01,
  HLA-C*16:04
TQDLVQEKY

SEQ ID NO: 4948 - protein, 10 aa, Homo sapiens
  Table 1.2; MAGEA1; ENSG00000198681; HLA -B*38:01
TQDLVQEKYL

SEQ ID NO: 4949 - protein, 9 aa, Homo sapiens
  Table 1.2; MAGEA1; ENSG00000198681; HLA -A*01:01,HLA-A*03:01,HLA-A*23:01,HLA-A*25:01,HLA-A*30:01, HLA-A*68:01,HLA-A*68:02,HLA-B*07:02,HLA-B*13:02,HLA-B*27:05, HLA-B*35:01,HLA-B*35:03,HLA-B*38:01,HLA-B*39:01,HLA-B*40:01,
  HLA-B*58:01,HLA-C*01:02,HLA-C*02:02,HLA-C*03:03,HLA-C*03:04, HLA-C*05:01,HLA-C*06:02,HLA-C*07:04,HLA-C*12:03,HLA-C*16:01, HLA-C*16:02
TSSSSPLVL

SEQ ID NO: 4950 - protein, 9 aa, Homo sapiens
  Table 1.2; MAGEA1; ENSG00000198681; HLA -A*01:01,HLA-A*03:01,HLA-A*11:01,HLA-A*23:01,HLA-A*25:01, HLA-A*26:01,HLA-A*29:02,HLA-A*30:02,HLA-A*32:01,HLA-A*33:01, HLA-B*08:01,HLA-B*13:02,HLA-B*15:01,HLA-B*15:03,HLA-B*18:01,
  HLA-B*27:02,HLA-B*35:01,HLA-B*39:01,HLA-B*44:02,HLA-B*44:03, HLA-B*46:01,HLA-B*51:01,HLA-B*57:01,HLA-B*58:01,HLA-C*01:02, HLA-C*02:02,HLA-C*03:03,HLA-C*07:01,HLA-C*07:04,HLA-C*07:06, HLA-C*12:03,HLA-C*14:02,HLA-C*16:01,HLA-C*16:02,HLA-C*16:04
TSYVKVLEY

SEQ ID NO: 4951 - protein, 10 aa, Homo sapiens
  Table 1.2; MAGEA1; ENSG00000198681; HLA -A*68:02
TSYVKVLEYV

SEQ ID NO: 4952 - protein, 9 aa, Homo sapiens
  Table 1.2; MAGEA1; ENSG00000198681; HLA -A*11:01,HLA-A*31:01,HLA-A*33:01,HLA-A*33:03,HLA-A*68:01
TTINFTRQR

SEQ ID NO: 4953 - protein, 8 aa, Homo sapiens
  Table 1.2; MAGEA1; ENSG00000198681; HLA -C*04:01,HLA-C*05:01
VADLVGFL

SEQ ID NO: 4954 - protein, 9 aa, Homo sapiens
  Table 1.2; MAGEA1; ENSG00000198681; HLA -A*01:01,HLA-A*02:07,HLA-A*23:01,HLA-B*38:01,HLA-C*03:04, HLA-C*05:01
VADLVGFLL

SEQ ID NO: 4955 - protein, 10 aa, Homo sapiens
  Table 1.2; MAGEA1; ENSG00000198681; HLA -A*01:01,HLA-A*02:07
VADLVGFLLL

SEQ ID NO: 4956 - protein, 8 aa, Homo sapiens
  Table 1.2; MAGEA1; ENSG00000198681; HLA -C*07:01
VGFLLLKY

SEQ ID NO: 4957 - protein, 8 aa, Homo sapiens
  Table 1.2; MAGEA1; ENSG00000198681; HLA -B*08:01
VIKVSARV

SEQ ID NO: 4958 - protein, 9 aa, Homo sapiens
  Table 1.2; MAGEA1; ENSG00000198681; HLA -B*08:01
VITKKVADL

SEQ ID NO: 4959 - protein, 11 aa, Homo sapiens
  Table 1.2; MAGEA1; ENSG00000198681; HLA -B*15:03
VKEADPTGHSY

SEQ ID NO: 4960 - protein, 10 aa, Homo sapiens
  Table 1.2; MAGEA1; ENSG00000198681; HLA -A*02:07
VLEYVIKVSA

SEQ ID NO: 4961 - protein, 8 aa, Homo sapiens
  Table 1.2; MAGEA1; ENSG00000198681; HLA -A*02:01,HLA-A*02:03
VLGTLEEV

SEQ ID NO: 4962 - protein, 10 aa, Homo sapiens
  Table 1.2; MAGEA1; ENSG00000198681; HLA -A*29:02
VLVTCLGLSY

SEQ ID NO: 4963 - protein, 9 aa, Homo sapiens
  Table 1.2; MAGEA1; ENSG00000198681; HLA -A*01:01,HLA-A*29:02,HLA-A*30:02,HLA-B*35:01,HLA-B*35:03, HLA-B*55:01,HLA-C*03:03,HLA-C*05:01
VPDSDPARY

SEQ ID NO: 4964 - protein, 11 aa, Homo sapiens
  Table 1.2; MAGEA1; ENSG00000198681; HLA -A*24:02,HLA-B*07:02,HLA-B*35:01,HLA-B*35:03,HLA-B*55:01, HLA-C*03:03,HLA-C*05:01,HLA-C*07:02
VPDSDPARYEF

SEQ ID NO: 4965 - protein, 11 aa, Homo sapiens
  Table 1.2; MAGEA1; ENSG00000198681; HLA -B*27:05,HLA-C*07:04
VQAATSSSSPL

SEQ ID NO: 4966 - protein, 8 aa, Homo sapiens
  Table 1.2; MAGEA1; ENSG00000198681; HLA -A*01:01,HLA-A*30:02,HLA-B*15:01,HLA-B*15:03,HLA-C*07:01
VQEKYLEY

SEQ ID NO: 4967 - protein, 9 aa, Homo sapiens
  Table 1.2; MAGEA1; ENSG00000198681; HLA -B*57:01
VSARVRFFF

SEQ ID NO: 4968 - protein, 8 aa, Homo sapiens
  Table 1.2; MAGEA1; ENSG00000198681; HLA -A*01:01
VTCLGLSY

SEQ ID NO: 4969 - protein, 10 aa, Homo sapiens
  Table 1.2; MAGEA1; ENSG00000198681; HLA -A*01:01,HLA-A*29:02,HLA-A*30:02,HLA-C*04:01
VYDGREHSAY

SEQ ID NO: 4970 - protein, 9 aa, Homo sapiens
  Table 1.2; MAGEA1; ENSG00000198681; HLA -B*49:01
WEELSVMEV

SEQ ID NO: 4971 - protein, 9 aa, Homo sapiens
  Table 1.2; MAGEA1; ENSG00000198681; HLA -A*01:01,HLA-A*29:02,HLA-C*07:01
YDGREHSAY

SEQ ID NO: 4972 - protein, 9 aa, Homo sapiens
  Table 1.2; MAGEA1; ENSG00000198681; HLA -A*02:04
YEFLWGPRA

SEQ ID NO: 4973 - protein, 9 aa, Homo sapiens
  Table 1.2; MAGEA1; ENSG00000198681; HLA -B*27:02,HLA-B*27:05,HLA-B*39:01
YRAREPVTK

SEQ ID NO: 4974 - protein, 8 aa, Homo sapiens
  Table 1.2; MAGEA1; ENSG00000198681; HLA -A*26:01,HLA-A*31:01,HLA-A*33:01,HLA-A*33:03,HLA-A*68:01, HLA-B*08:01,HLA-B*18:01,HLA-B*40:02
YVIKVSAR

SEQ ID NO: 4975 - protein, 9 aa, Homo sapiens
  Table 1.2; MAGEA1; ENSG00000198681; HLA -A*02:01,HLA-A*02:03,HLA-A*02:04,HLA-A*02:07,HLA-A*26:01, HLA-A*68:02,HLA-B*13:02,HLA-B*27:05
YVIKVSARV

SEQ ID NO: 4976 - protein, 8 aa, Homo sapiens
  Table 1.2; MAGEA1; ENSG00000198681; HLA -A*02:03
YVKVLEYV

SEQ ID NO: 4977 - protein, 9 aa, Homo sapiens
  Table 1.2; MAGEA1; ENSG00000198681; HLA -A*02:04,HLA-A*24:02,HLA-A*68:02,HLA-B*08:01,HLA-B*13:02, HLA-B*40:02,HLA-B*51:01,HLA-B*57:01
YVKVLEYVI

SEQ ID NO: 4978 - protein, 11 aa, Homo sapiens
  Table 1.2; MAGEA10; ENSG00000124260; HLA -A*30:01
ACSSPSVVASL

SEQ ID NO: 4979 - protein, 8 aa, Homo sapiens
  Table 1.2; MAGEA10; ENSG00000124260; HLA -A*30:01,HLA-B*40:01,HLA-B*44:02,HLA-B*44:03,HLA-B*49:01
AEILESVI

SEQ ID NO: 4980 - protein, 11 aa, Homo sapiens
  Table 1.2; MAGEA10; ENSG00000124260; HLA -A*30:01,HLA-A*30:02,HLA-B*27:02,HLA-B*44:02,HLA-B*44:03, HLA-B*57:01,HLA-C*16:04
AEILESVIRNY

SEQ ID NO: 4981 - protein, 8 aa, Homo sapiens
  Table 1.2; MAGEA10; ENSG00000124260; HLA -B*37:01,HLA-B*40:02
AEIRKMSL

SEQ ID NO: 4982 - protein, 9 aa, Homo sapiens
  Table 1.2; MAGEA10; ENSG00000124260; HLA -B*37:01,HLA-B*40:01,HLA-B*40:02,HLA-B*44:02,HLA-B*44:03, HLA-B*49:01
AEIRKMSLL

SEQ ID NO: 4983 - protein, 11 aa, Homo sapiens
  Table 1.2; MAGEA10; ENSG00000124260; HLA -B*15:03
AKVNGSDPRSF

SEQ ID NO: 4984 - protein, 8 aa, Homo sapiens
  Table 1.2; MAGEA10; ENSG00000124260; HLA -A*30:02
ALNMMGLY

SEQ ID NO: 4985 - protein, 9 aa, Homo sapiens
  Table 1.2; MAGEA10; ENSG00000124260; HLA -A*02:03,HLA-A*32:01,HLA-B*55:01
AMASASSSA

SEQ ID NO: 4986 - protein, 9 aa, Homo sapiens
  Table 1.2; MAGEA10; ENSG00000124260; HLA -B*56:01
APLAVEEDA

SEQ ID NO: 4987 - protein, 9 aa, Homo sapiens
  Table 1.2; MAGEA10; ENSG00000124260; HLA -B*27:05
AQAPLAVEE

SEQ ID NO: 4988 - protein, 10 aa, Homo sapiens
  Table 1.2; MAGEA10; ENSG00000124260; HLA -B*13:02
AQIACSSPSV

SEQ ID NO: 4989 - protein, 11 aa, Homo sapiens
  Table 1.2; MAGEA10; ENSG00000124260; HLA -A*25:01,HLA-A*26:01,HLA-A*30:02,HLA-A*32:01,HLA-B*15:01, HLA-B*46:01,HLA-B*58:01
ASASSSATGSF

SEQ ID NO: 4990 - protein, 9 aa, Homo sapiens
  Table 1.2; MAGEA10; ENSG00000124260; HLA -A*25:01,HLA-A*26:01,HLA-A*30:02,HLA-A*32:01,HLA-B*15:01, HLA-B*15:03,HLA-B*37:01,HLA-B*46:01,HLA-B*58:01,HLA-C*01:02, HLA-C*03:04,HLA-C*05:01
ASSSATGSF

SEQ ID NO: 4991 - protein, 11 aa, Homo sapiens
  Table 1.2; MAGEA10; ENSG00000124260; HLA -A*01:01,HLA-A*03:02,HLA-A*11:01,HLA-A*26:01,HLA-A*29:02, HLA-A*30:02,HLA-A*32:01,HLA-B*58:01,HLA-C*16:04
ASSSATGSFSY

SEQ ID NO: 4992 - protein, 11 aa, Homo sapiens
  Table 1.2; MAGEA10; ENSG00000124260; HLA -A*30:02,HLA-A*32:01
ASSSTSTSSSF

SEQ ID NO: 4993 - protein, 9 aa, Homo sapiens
  Table 1.2; MAGEA10; ENSG00000124260; HLA -A*25:01,HLA-A*26:01,HLA-A*32:01,HLA-B*15:01,HLA-B*39:01, HLA-B*46:01,HLA-B*58:01,HLA-C*01:02,HLA-C*03:03,HLA-C*03:04, HLA-C*12:03,HLA-C*16:02
ATTDDTTAM

SEQ ID NO: 4994 - protein, 11 aa, Homo sapiens
  Table 1.2; MAGEA10; ENSG00000124260; HLA -B*39:01
DDETPNPPQSA

SEQ ID NO: 4995 - protein, 8 aa, Homo sapiens
  Table 1.2; MAGEA10; ENSG00000124260; HLA -B*18:01,HLA-B*49:01
DEKVTDLV

SEQ ID NO: 4996 - protein, 10 aa, Homo sapiens
  Table 1.2; MAGEA10; ENSG00000124260; HLA -B*18:01,HLA-B*44:02
DEKVTDLVQF

SEQ ID NO: 4997 - protein, 8 aa, Homo sapiens
  Table 1.2; MAGEA10; ENSG00000124260; HLA -B*18:01
DETPNPPQ

SEQ ID NO: 4998 - protein, 10 aa, Homo sapiens
  Table 1.2; MAGEA10; ENSG00000124260; HLA -B*18:01
DETPNPPQSA

SEQ ID NO: 4999 - protein, 8 aa, Homo sapiens
  Table 1.2; MAGEA10; ENSG00000124260; HLA -B*08:01,HLA-B*18:01,HLA-B*35:01
DGMEHLIY

SEQ ID NO: 5000 - protein, 10 aa, Homo sapiens
  Table 1.2; MAGEA10; ENSG00000124260; HLA -B*51:01
DGMLSDVQSM

SEQ ID NO: 5001 - protein, 8 aa, Homo sapiens
  Table 1.2; MAGEA10; ENSG00000124260; HLA -B*51:01
DPTGHSFV

SEQ ID NO: 5002 - protein, 9 aa, Homo sapiens
  Table 1.2; MAGEA10; ENSG00000124260; HLA -B*08:01,HLA-B*35:01,HLA-B*35:03
DPTGHSFVL

SEQ ID NO: 5003 - protein, 10 aa, Homo sapiens
  Table 1.2; MAGEA10; ENSG00000124260; HLA -A*26:01,HLA-A*33:01,HLA-A*68:01
DVKEVDPTGH

SEQ ID NO: 5004 - protein, 9 aa, Homo sapiens
  Table 1.2; MAGEA10; ENSG00000124260; HLA -A*33:03
EALKDEEER

SEQ ID NO: 5005 - protein, 8 aa, Homo sapiens
  Table 1.2; MAGEA10; ENSG00000124260; HLA -B*51:01
EALNMMGL

SEQ ID NO: 5006 - protein, 9 aa, Homo sapiens
  Table 1.2; MAGEA10; ENSG00000124260; HLA -A*01:01,HLA-A*25:01,HLA-A*26:01,HLA-A*29:02,HLA-B*35:01
EALNMMGLY

SEQ ID NO: 5007 - protein, 9 aa, Homo sapiens
  Table 1.2; MAGEA10; ENSG00000124260; HLA -A*68:02,HLA-B*51:01
EASECMLLV

SEQ ID NO: 5008 - protein, 8 aa, Homo sapiens
  Table 1.2; MAGEA10; ENSG00000124260; HLA -C*07:01
EDHFPLLF

SEQ ID NO: 5009 - protein, 9 aa, Homo sapiens
  Table 1.2; MAGEA10; ENSG00000124260; HLA -A*30:01,HLA-B*13:02,HLA-B*18:01,HLA-B*37:01,HLA-B*40:01, HLA-B*44:02,HLA-B*44:03,HLA-B*49:01
EESPSTLQV

SEQ ID NO: 5010 - protein, 10 aa, Homo sapiens
  Table 1.2; MAGEA10; ENSG00000124260; HLA -A*25:01,HLA-A*30:01,HLA-B*27:02,HLA-B*38:01,HLA-B*39:01, HLA-B*40:01,HLA-B*40:02,HLA-B*44:02,HLA-B*44:03
EESPSTLQVL

SEQ ID NO: 5011 - protein, 8 aa, Homo sapiens
  Table 1.2; MAGEA10; ENSG00000124260; HLA -B*18:01
EEVIWEAL

SEQ ID NO: 5012 - protein, 9 aa, Homo sapiens
  Table 1.2; MAGEA10; ENSG00000124260; HLA -B*13:02,HLA-B*51:01
EGAQAPLAV

SEQ ID NO: 5013 - protein, 9 aa, Homo sapiens
  Table 1.2; MAGEA10; ENSG00000124260; HLA -A*33:01,HLA-A*33:03
EHLIYGEPR

SEQ ID NO: 5014 - protein, 9 aa, Homo sapiens
  Table 1.2; MAGEA10; ENSG00000124260; HLA -A*02:07,HLA-C*05:01
EIDEKVTDL

SEQ ID NO: 5015 - protein, 8 aa, Homo sapiens
  Table 1.2; MAGEA10; ENSG00000124260; HLA -A*33:03
EILESVIR

SEQ ID NO: 5016 - protein, 10 aa, Homo sapiens
  Table 1.2; MAGEA10; ENSG00000124260; HLA -A*25:01,HLA-A*26:01,HLA-A*29:02,HLA-A*30:02,HLA-A*33:01, HLA-A*33:03,HLA-B*44:02,HLA-B*44:03
EILESVIRNY

SEQ ID NO: 5017 - protein, 9 aa, Homo sapiens
  Table 1.2; MAGEA10; ENSG00000124260; HLA -A*23:01
EKVTDLVQF

SEQ ID NO: 5018 - protein, 8 aa, Homo sapiens
  Table 1.2; MAGEA10; ENSG00000124260; HLA -B*08:01,HLA-B*51:01
EPITKAEI

SEQ ID NO: 5019 - protein, 9 aa, Homo sapiens
  Table 1.2; MAGEA10; ENSG00000124260; HLA -B*07:02,HLA-B*08:01,HLA-B*35:01,HLA-B*35:03,HLA-C*07:02
EPITKAEIL

SEQ ID NO: 5020 - protein, 11 aa, Homo sapiens
  Table 1.2; MAGEA10; ENSG00000124260; HLA -A*33:01
ESLPRSEIDEK

SEQ ID NO: 5021 - protein, 9 aa, Homo sapiens
  Table 1.2; MAGEA10; ENSG00000124260; HLA -A*25:01
ESPSTLQVL

SEQ ID NO: 5022 - protein, 9 aa, Homo sapiens
  Table 1.2; MAGEA10; ENSG00000124260; HLA -A*33:03
ETPNPPQSA

SEQ ID NO: 5023 - protein, 11 aa, Homo sapiens
  Table 1.2; MAGEA10; ENSG00000124260; HLA -A*26:01,HLA-A*68:02
ETPNPPQSAQI

SEQ ID NO: 5024 - protein, 9 aa, Homo sapiens
  Table 1.2; MAGEA10; ENSG00000124260; HLA -A*01:01,HLA-A*02:07,HLA-A*23:01,HLA-A*24:02,HLA-A*25:01, HLA-A*26:01,HLA-A*29:02,HLA-A*30:02,HLA-A*32:01,HLA-A*33:01, HLA-A*33:03,HLA-A*68:01,HLA-B*15:01,HLA-B*15:03,HLA-B*18:01,
  HLA-B*27:05,HLA-B*35:01,HLA-B*35:03,HLA-B*38:01,HLA-B*39:01, HLA-B*44:02,HLA-B*44:03,HLA-B*46:01,HLA-B*55:01,HLA-B*57:01, HLA-B*58:01,HLA-C*03:03,HLA-C*03:04,HLA-C*04:01,HLA-C*05:01, HLA-C*07:04,HLA-C*07:06,HLA-C*16:04
EVDPTGHSF

SEQ ID NO: 5025 - protein, 10 aa, Homo sapiens
  Table 1.2; MAGEA10; ENSG00000124260; HLA -A*01:01,HLA-A*26:01,HLA-A*68:02
EVDPTGHSFV

SEQ ID NO: 5026 - protein, 11 aa, Homo sapiens
  Table 1.2; MAGEA10; ENSG00000124260; HLA -A*01:01,HLA-A*02:07,HLA-A*68:02,HLA-B*35:03,HLA-B*38:01
EVDPTGHSFVL

SEQ ID NO: 5027 - protein, 9 aa, Homo sapiens
  Table 1.2; MAGEA10; ENSG00000124260; HLA -A*25:01,HLA-A*26:01
EVIWEALNM

SEQ ID NO: 5028 - protein, 10 aa, Homo sapiens
  Table 1.2; MAGEA10; ENSG00000124260; HLA -A*25:01,HLA-A*26:01
EVIWEALNMM

SEQ ID NO: 5029 - protein, 8 aa, Homo sapiens
  Table 1.2; MAGEA10; ENSG00000124260; HLA -B*51:01
FGIDVKEV

SEQ ID NO: 5030 - protein, 11 aa, Homo sapiens
  Table 1.2; MAGEA10; ENSG00000124260; HLA -A*02:01,HLA-A*02:07
FLWGPRAHAEI

SEQ ID NO: 5031 - protein, 8 aa, Homo sapiens
  Table 1.2; MAGEA10; ENSG00000124260; HLA -B*51:01,HLA-B*54:01,HLA-B*55:01,HLA-B*56:01
FPLLFSEA

SEQ ID NO: 5032 - protein, 9 aa, Homo sapiens
  Table 1.2; MAGEA10; ENSG00000124260; HLA -B*54:01
FPLLFSEAS

SEQ ID NO: 5033 - protein, 11 aa, Homo sapiens
  Table 1.2; MAGEA10; ENSG00000124260; HLA -B*54:01
FPLLFSEASEC

SEQ ID NO: 5034 - protein, 8 aa, Homo sapiens
  Table 1.2; MAGEA10; ENSG00000124260; HLA -B*54:01
FPLWYEEA

SEQ ID NO: 5035 - protein, 9 aa, Homo sapiens
  Table 1.2; MAGEA10; ENSG00000124260; HLA -B*35:01,HLA-B*35:03,HLA-B*54:01
FPLWYEEAL

SEQ ID NO: 5036 - protein, 8 aa, Homo sapiens
  Table 1.2; MAGEA10; ENSG00000124260; HLA -B*54:01
FPSSFPSS

SEQ ID NO: 5037 - protein, 9 aa, Homo sapiens
  Table 1.2; MAGEA10; ENSG00000124260; HLA -B*54:01,HLA-B*56:01
FPSSFPSSS

SEQ ID NO: 5038 - protein, 10 aa, Homo sapiens
  Table 1.2; MAGEA10; ENSG00000124260; HLA -B*54:01,HLA-B*56:01
FPSSFPSSSS

SEQ ID NO: 5039 - protein, 9 aa, Homo sapiens
  Table 1.2; MAGEA10; ENSG00000124260; HLA -B*39:01
FPSSSSSSS

SEQ ID NO: 5040 - protein, 9 aa, Homo sapiens
  Table 1.2; MAGEA10; ENSG00000124260; HLA -C*05:01
FSEASECML

SEQ ID NO: 5041 - protein, 11 aa, Homo sapiens
  Table 1.2; MAGEA10; ENSG00000124260; HLA -A*29:02
FVLVTSLGLTY

SEQ ID NO: 5042 - protein, 10 aa, Homo sapiens
  Table 1.2; MAGEA10; ENSG00000124260; HLA -B*38:01
GHSFVLVTSL

SEQ ID NO: 5043 - protein, 9 aa, Homo sapiens
  Table 1.2; MAGEA10; ENSG00000124260; HLA -A*02:01,HLA-A*02:03,HLA-A*02:04,HLA-A*02:07,HLA-A*03:01, HLA-A*30:01,HLA-A*68:02,HLA-B*13:02,HLA-B*15:01,HLA-B*15:03, HLA-B*40:01,HLA-B*46:01,HLA-B*55:01,HLA-C*02:02
GLYDGMEHL

SEQ ID NO: 5044 - protein, 10 aa, Homo sapiens
  Table 1.2; MAGEA10; ENSG00000124260; HLA -A*02:01,HLA-A*02:03,HLA-A*02:04,HLA-A*02:07,HLA-A*03:01, HLA-A*30:01,HLA-B*13:02,HLA-B*55:01
GLYDGMEHLI

SEQ ID NO: 5045 - protein, 11 aa, Homo sapiens
  Table 1.2; MAGEA10; ENSG00000124260; HLA -A*01:01,HLA-A*03:01,HLA-A*29:02
GLYDGMEHLIY

SEQ ID NO: 5046 - protein, 9 aa, Homo sapiens
  Table 1.2; MAGEA10; ENSG00000124260; HLA -A*02:01,HLA-A*02:04,HLA-A*23:01,HLA-A*32:01,HLA-B*13:02, HLA-B*15:01,HLA-B*15:03,HLA-B*27:05,HLA-B*37:01,HLA-B*46:01, HLA-B*55:01,HLA-B*58:01,HLA-C*01:02,HLA-C*14:02
GMLSDVQSM

SEQ ID NO: 5047 - protein, 11 aa, Homo sapiens
  Table 1.2; MAGEA10; ENSG00000124260; HLA -A*03:01,HLA-A*03:02,HLA-A*11:01,HLA-B*27:05
GMLSDVQSMPK

SEQ ID NO: 5048 - protein, 8 aa, Homo sapiens
  Table 1.2; MAGEA10; ENSG00000124260; HLA -B*07:02
GPRAHAEI

SEQ ID NO: 5049 - protein, 9 aa, Homo sapiens
  Table 1.2; MAGEA10; ENSG00000124260; HLA -A*01:01,HLA-A*30:02,HLA-A*32:01,HLA-B*15:01,HLA-B*38:01, HLA-B*57:01,HLA-B*58:01,HLA-C*05:01,HLA-C*16:01
GSDPARYEF

SEQ ID NO: 5050 - protein, 11 aa, Homo sapiens
  Table 1.2; MAGEA10; ENSG00000124260; HLA -B*57:01
GSDPARYEFLW

SEQ ID NO: 5051 - protein, 9 aa, Homo sapiens
  Table 1.2; MAGEA10; ENSG00000124260; HLA -A*01:01
GSDPRSFPL

SEQ ID NO: 5052 - protein, 10 aa, Homo sapiens
  Table 1.2; MAGEA10; ENSG00000124260; HLA -B*57:01
GSDPRSFPLW

SEQ ID NO: 5053 - protein, 11 aa, Homo sapiens
  Table 1.2; MAGEA10; ENSG00000124260; HLA -A*01:01
GSDPRSFPLWY

SEQ ID NO: 5054 - protein, 9 aa, Homo sapiens
  Table 1.2; MAGEA10; ENSG00000124260; HLA -B*08:01
HAEIRKMSL

SEQ ID NO: 5055 - protein, 9 aa, Homo sapiens
  Table 1.2; MAGEA10; ENSG00000124260; HLA -A*30:01,HLA-A*68:02,HLA-B*08:01,HLA-B*15:03,HLA-B*18:01, HLA-B*35:01,HLA-B*40:02,HLA-B*46:01,HLA-B*58:01
HSFVLVTSL

SEQ ID NO: 5056 - protein, 8 aa, Homo sapiens
  Table 1.2; MAGEA10; ENSG00000124260; HLA -B*51:01
IACSSPSV

SEQ ID NO: 5057 - protein, 9 aa, Homo sapiens
  Table 1.2; MAGEA10; ENSG00000124260; HLA -B*51:01,HLA-C*12:03
IACSSPSVV

SEQ ID NO: 5058 - protein, 9 aa, Homo sapiens
  Table 1.2; MAGEA10; ENSG00000124260; HLA -B*35:03
IATTDDTTA

SEQ ID NO: 5059 - protein, 10 aa, Homo sapiens
  Table 1.2; MAGEA10; ENSG00000124260; HLA -B*35:01,HLA-B*35:03,HLA-B*39:01,HLA-B*55:01,HLA-C*03:03, HLA-C*03:04,HLA-C*05:01
IATTDDTTAM

SEQ ID NO: 5060 - protein, 8 aa, Homo sapiens
  Table 1.2; MAGEA10; ENSG00000124260; HLA -B*37:01
IDEKVTDL

SEQ ID NO: 5061 - protein, 9 aa, Homo sapiens
  Table 1.2; MAGEA10; ENSG00000124260; HLA -A*01:01,HLA-A*02:07,HLA-A*03:01,HLA-A*03:02,HLA-A*29:02, HLA-A*30:02,HLA-A*32:01,HLA-B*15:01,HLA-B*15:03,HLA-B*44:02, HLA-B*44:03,HLA-B*46:01,HLA-B*57:01,HLA-B*58:01,HLA-C*02:02,
  HLA-C*07:04,HLA-C*16:01,HLA-C*16:02
ILESVIRNY

SEQ ID NO: 5062 - protein, 9 aa, Homo sapiens
  Table 1.2; MAGEA10; ENSG00000124260; HLA -A*02:01,HLA-A*02:04
ILILSIVFI

SEQ ID NO: 5063 - protein, 10 aa, Homo sapiens
  Table 1.2; MAGEA10; ENSG00000124260; HLA -A*01:01
ILSIVFIEGY

SEQ ID NO: 5064 - protein, 10 aa, Homo sapiens
  Table 1.2; MAGEA10; ENSG00000124260; HLA -B*35:03,HLA-B*54:01,HLA-B*55:01,HLA-B*56:01
IPSTPEEVSA

SEQ ID NO: 5065 - protein, 8 aa, Homo sapiens
  Table 1.2; MAGEA10; ENSG00000124260; HLA -A*23:01,HLA-A*24:02,HLA-C*06:02
IYGEPRKL

SEQ ID NO: 5066 - protein, 9 aa, Homo sapiens
  Table 1.2; MAGEA10; ENSG00000124260; HLA -A*24:02
IYGEPRKLL

SEQ ID NO: 5067 - protein, 8 aa, Homo sapiens
  Table 1.2; MAGEA10; ENSG00000124260; HLA -B*40:01
KEESPSTL

SEQ ID NO: 5068 - protein, 10 aa, Homo sapiens
  Table 1.2; MAGEA10; ENSG00000124260; HLA -B*40:01,HLA-B*49:01
KEESPSTLQV

SEQ ID NO: 5069 - protein, 11 aa, Homo sapiens
  Table 1.2; MAGEA10; ENSG00000124260; HLA -A*30:01,HLA-B*40:01,HLA-B*40:02,HLA-B*49:01
KEESPSTLQVL

SEQ ID NO: 5070 - protein, 9 aa, Homo sapiens
  Table 1.2; MAGEA10; ENSG00000124260; HLA -B*49:01
KEPITKAEI

SEQ ID NO: 5071 - protein, 10 aa, Homo sapiens
  Table 1.2; MAGEA10; ENSG00000124260; HLA -B*40:01
KEPITKAEIL

SEQ ID NO: 5072 - protein, 10 aa, Homo sapiens
  Table 1.2; MAGEA10; ENSG00000124260; HLA -A*23:01,HLA-A*24:02,HLA-A*25:01,HLA-A*30:01,HLA-A*30:02, HLA-A*32:01,HLA-B*15:01,HLA-B*15:03,HLA-B*18:01,HLA-B*27:02, HLA-B*27:05,HLA-B*37:01,HLA-B*38:01,HLA-B*40:01,HLA-B*40:02,
  HLA-B*44:02,HLA-B*44:03,HLA-B*49:01,HLA-B*57:01,HLA-B*58:01, HLA-C*02:02,HLA-C*16:04
KEVDPTGHSF

SEQ ID NO: 5073 - protein, 11 aa, Homo sapiens
  Table 1.2; MAGEA10; ENSG00000124260; HLA -B*49:01
KEVDPTGHSFV

SEQ ID NO: 5074 - protein, 10 aa, Homo sapiens
  Table 1.2; MAGEA10; ENSG00000124260; HLA -A*03:02,HLA-A*25:01,HLA-A*30:02,HLA-A*32:01,HLA-B*57:01, HLA-B*58:01
KVNGSDPRSF

SEQ ID NO: 5075 - protein, 8 aa, Homo sapiens
  Table 1.2; MAGEA10; ENSG00000124260; HLA -A*32:01
KVTDLVQF

SEQ ID NO: 5076 - protein, 9 aa, Homo sapiens
  Table 1.2; MAGEA10; ENSG00000124260; HLA -A*02:01,HLA-A*02:03,HLA-A*02:04,HLA-A*02:07,HLA-A*24:02, HLA-A*31:01,HLA-A*32:01,HLA-A*68:02,HLA-B*13:02,HLA-B*27:05, HLA-B*58:01
KVTDLVQFL

SEQ ID NO: 5077 - protein, 10 aa, Homo sapiens
  Table 1.2; MAGEA10; ENSG00000124260; HLA -A*02:04
KVTDLVQFLL

SEQ ID NO: 5078 - protein, 9 aa, Homo sapiens
  Table 1.2; MAGEA10; ENSG00000124260; HLA -B*49:01
LEGAQAPLA

SEQ ID NO: 5079 - protein, 10 aa, Homo sapiens
  Table 1.2; MAGEA10; ENSG00000124260; HLA -A*30:01,HLA-B*49:01
LEGAQAPLAV

SEQ ID NO: 5080 - protein, 8 aa, Homo sapiens
  Table 1.2; MAGEA10; ENSG00000124260; HLA -A*30:02,HLA-B*18:01,HLA-B*37:01,HLA-B*44:02,HLA-B*44:03
LESVIRNY

SEQ ID NO: 5081 - protein, 9 aa, Homo sapiens
  Table 1.2; MAGEA10; ENSG00000124260; HLA -A*02:01,HLA-A*02:07
LIPSTPEEV

SEQ ID NO: 5082 - protein, 9 aa, Homo sapiens
  Table 1.2; MAGEA10; ENSG00000124260; HLA -A*03:01
LIYGEPRKL

SEQ ID NO: 5083 - protein, 9 aa, Homo sapiens
  Table 1.2; MAGEA10; ENSG00000124260; HLA -A*02:01
LLFSEASEC

SEQ ID NO: 5084 - protein, 11 aa, Homo sapiens
  Table 1.2; MAGEA10; ENSG00000124260; HLA -A*02:01
LLFSEASECML

SEQ ID NO: 5085 - protein, 10 aa, Homo sapiens
  Table 1.2; MAGEA10; ENSG00000124260; HLA -B*27:05,HLA-B*38:01,HLA-B*39:01
LQSQSETQGL

SEQ ID NO: 5086 - protein, 10 aa, Homo sapiens
  Table 1.2; MAGEA10; ENSG00000124260; HLA -B*39:01
LQVLPDSESL

SEQ ID NO: 5087 - protein, 9 aa, Homo sapiens
  Table 1.2; MAGEA10; ENSG00000124260; HLA -A*01:01,HLA-A*03:01,HLA-A*03:02,HLA-A*11:01,HLA-B*27:02
LSDVQSMPK

SEQ ID NO: 5088 - protein, 9 aa, Homo sapiens
  Table 1.2; MAGEA10; ENSG00000124260; HLA -A*01:01,HLA-A*30:02,HLA-B*46:01,HLA-B*57:01
LSIVFIEGY

SEQ ID NO: 5089 - protein, 10 aa, Homo sapiens
  Table 1.2; MAGEA10; ENSG00000124260; HLA -A*01:01,HLA-A*29:02,HLA-A*30:02,HLA-A*32:01,HLA-B*57:01, HLA-B*58:01
LTQDWVQENY

SEQ ID NO: 5090 - protein, 11 aa, Homo sapiens
  Table 1.2; MAGEA10; ENSG00000124260; HLA -C*04:01
LTQDWVQENYL

SEQ ID NO: 5091 - protein, 10 aa, Homo sapiens
  Table 1.2; MAGEA10; ENSG00000124260; HLA -A*02:03,HLA-A*68:02
LTYDGMLSDV

SEQ ID NO: 5092 - protein, 10 aa, Homo sapiens
  Table 1.2; MAGEA10; ENSG00000124260; HLA -A*02:03,HLA-A*02:04,HLA-A*02:07,HLA-A*68:02
LVFGIDVKEV

SEQ ID NO: 5093 - protein, 9 aa, Homo sapiens
  Table 1.2; MAGEA10; ENSG00000124260; HLA -A*29:02
LVQFLLFKY

SEQ ID NO: 5094 - protein, 9 aa, Homo sapiens
  Table 1.2; MAGEA10; ENSG00000124260; HLA -A*01:01,HLA-A*03:01,HLA-A*25:01,HLA-A*26:01,HLA-A*29:02, HLA-A*30:02,HLA-A*32:01,HLA-B*15:01,HLA-B*15:03,HLA-B*18:01, HLA-B*35:01,HLA-B*46:01,HLA-B*58:01,HLA-C*02:02,HLA-C*07:04,
  HLA-C*16:01
LVTSLGLTY

SEQ ID NO: 5095 - protein, 8 aa, Homo sapiens
  Table 1.2; MAGEA10; ENSG00000124260; HLA -C*04:01
LYDGMEHL

SEQ ID NO: 5096 - protein, 9 aa, Homo sapiens
  Table 1.2; MAGEA10; ENSG00000124260; HLA -A*02:07,HLA-A*23:01,HLA-A*24:02,HLA-B*35:01,HLA-B*35:03, HLA-B*38:01,HLA-C*04:01
LYDGMEHLI

SEQ ID NO: 5097 - protein, 10 aa, Homo sapiens
  Table 1.2; MAGEA10; ENSG00000124260; HLA -A*29:02
LYDGMEHLIY

SEQ ID NO: 5098 - protein, 8 aa, Homo sapiens
  Table 1.2; MAGEA10; ENSG00000124260; HLA -B*54:01
MASASSSA

SEQ ID NO: 5099 - protein, 9 aa, Homo sapiens
  Table 1.2; MAGEA10; ENSG00000124260; HLA -B*40:02
MEHLIYGEP

SEQ ID NO: 5100 - protein, 9 aa, Homo sapiens
  Table 1.2; MAGEA10; ENSG00000124260; HLA -A*02:01,HLA-A*02:04
MLLVFGIDV

SEQ ID NO: 5101 - protein, 8 aa, Homo sapiens
  Table 1.2; MAGEA10; ENSG00000124260; HLA -B*37:01
MLSDVQSM

SEQ ID NO: 5102 - protein, 10 aa, Homo sapiens
  Table 1.2; MAGEA10; ENSG00000124260; HLA -A*01:01,HLA-A*03:01,HLA-A*03:02,HLA-A*11:01,HLA-A*68:01, HLA-B*27:02,HLA-B*27:05,HLA-C*06:02,HLA-C*07:01
MLSDVQSMPK

SEQ ID NO: 5103 - protein, 9 aa, Homo sapiens
  Table 1.2; MAGEA10; ENSG00000124260; HLA -B*35:01,HLA-B*35:03,HLA-B*55:01,HLA-C*03:03
MPEEDLQSQ

SEQ ID NO: 5104 - protein, 8 aa, Homo sapiens
  Table 1.2; MAGEA10; ENSG00000124260; HLA -B*08:01,HLA-B*51:01,HLA-B*54:01
MPKTGILI

SEQ ID NO: 5105 - protein, 9 aa, Homo sapiens
  Table 1.2; MAGEA10; ENSG00000124260; HLA -B*07:02,HLA-B*08:01,HLA-B*35:01,HLA-B*35:03,HLA-B*51:01, HLA-B*54:01,HLA-C*07:02
MPKTGILIL

SEQ ID NO: 5106 - protein, 9 aa, Homo sapiens
  Table 1.2; MAGEA10; ENSG00000124260; HLA -A*03:01
MSLLKFLAK

SEQ ID NO: 5107 - protein, 8 aa, Homo sapiens
  Table 1.2; MAGEA10; ENSG00000124260; HLA -C*16:01
NGSDPRSF

SEQ ID NO: 5108 - protein, 8 aa, Homo sapiens
  Table 1.2; MAGEA10; ENSG00000124260; HLA -B*51:01
NPPQSAQI

SEQ ID NO: 5109 - protein, 9 aa, Homo sapiens
  Table 1.2; MAGEA10; ENSG00000124260; HLA -A*23:01,HLA-A*24:02
NYEDHFPLL

SEQ ID NO: 5110 - protein, 10 aa, Homo sapiens
  Table 1.2; MAGEA10; ENSG00000124260; HLA -A*24:02,HLA-A*29:02
NYEDHFPLLF

SEQ ID NO: 5111 - protein, 8 aa, Homo sapiens
  Table 1.2; MAGEA10; ENSG00000124260; HLA -B*27:02
PDSESLPR

SEQ ID NO: 5112 - protein, 10 aa, Homo sapiens
  Table 1.2; MAGEA10; ENSG00000124260; HLA -A*02:03
PLIPSTPEEV

SEQ ID NO: 5113 - protein, 9 aa, Homo sapiens
  Table 1.2; MAGEA10; ENSG00000124260; HLA -A*30:01
QDWVQENYL

SEQ ID NO: 5114 - protein, 9 aa, Homo sapiens
  Table 1.2; MAGEA10; ENSG00000124260; HLA -A*02:01
QIACSSPSV

SEQ ID NO: 5115 - protein, 9 aa, Homo sapiens
  Table 1.2; MAGEA10; ENSG00000124260; HLA -B*39:01
QKEESPSTL

SEQ ID NO: 5116 - protein, 9 aa, Homo sapiens
  Table 1.2; MAGEA10; ENSG00000124260; HLA -A*02:03,HLA-B*55:01
QMKEPITKA

SEQ ID NO: 5117 - protein, 10 aa, Homo sapiens
  Table 1.2; MAGEA10; ENSG00000124260; HLA -A*01:01
QSDEGSSSQK

SEQ ID NO: 5118 - protein, 8 aa, Homo sapiens
  Table 1.2; MAGEA10; ENSG00000124260; HLA -B*08:01
QSMPKTGI

SEQ ID NO: 5119 - protein, 9 aa, Homo sapiens
  Table 1.2; MAGEA10; ENSG00000124260; HLA -B*08:01
QSMPKTGIL

SEQ ID NO: 5120 - protein, 9 aa, Homo sapiens
  Table 1.2; MAGEA10; ENSG00000124260; HLA -B*15:01,HLA-B*35:03,HLA-B*38:01,HLA-B*39:01
QVLPDSESL

SEQ ID NO: 5121 - protein, 11 aa, Homo sapiens
  Table 1.2; MAGEA10; ENSG00000124260; HLA -A*03:01,HLA-A*11:01,HLA-A*31:01,HLA-A*33:01,HLA-A*33:03, HLA-A*68:01,HLA-B*27:02,HLA-C*07:06
QVLPDSESLPR

SEQ ID NO: 5122 - protein, 10 aa, Homo sapiens
  Table 1.2; MAGEA10; ENSG00000124260; HLA -A*01:01,HLA-A*25:01,HLA-A*26:01,HLA-A*29:02,HLA-A*30:02
QVPGSDPARY

SEQ ID NO: 5123 - protein, 11 aa, Homo sapiens
  Table 1.2; MAGEA10; ENSG00000124260; HLA -B*15:01
RIATTDDTTAM

SEQ ID NO: 5124 - protein, 11 aa, Homo sapiens
  Table 1.2; MAGEA10; ENSG00000124260; HLA -B*57:01
RNYEDHFPLLF

SEQ ID NO: 5125 - protein, 11 aa, Homo sapiens
  Table 1.2; MAGEA10; ENSG00000124260; HLA -A*29:02,HLA-A*30:02,HLA-A*32:01,HLA-B*15:01,HLA-B*15:03, HLA-B*58:01
RQVPGSDPARY

SEQ ID NO: 5126 - protein, 10 aa, Homo sapiens
  Table 1.2; MAGEA10; ENSG00000124260; HLA -A*25:01,HLA-A*26:01,HLA-A*30:02,HLA-B*07:02
SASSSATGSF

SEQ ID NO: 5127 - protein, 8 aa, Homo sapiens
  Table 1.2; MAGEA10; ENSG00000124260; HLA -A*30:02,HLA-B*15:01,HLA-B*35:01,HLA-B*39:01,HLA-B*58:01, HLA-C*16:01
SATGSFSY

SEQ ID NO: 5128 - protein, 8 aa, Homo sapiens
  Table 1.2; MAGEA10; ENSG00000124260; HLA -B*37:01
SDPARYEF

SEQ ID NO: 5129 - protein, 9 aa, Homo sapiens
  Table 1.2; MAGEA10; ENSG00000124260; HLA -A*24:02
SDPRSFPLW

SEQ ID NO: 5130 - protein, 9 aa, Homo sapiens
  Table 1.2; MAGEA10; ENSG00000124260; HLA -A*30:01,HLA-B*40:01,HLA-B*44:03,HLA-B*49:01
SEASECMLL

SEQ ID NO: 5131 - protein, 10 aa, Homo sapiens
  Table 1.2; MAGEA10; ENSG00000124260; HLA -B*49:01
SEASECMLLV

SEQ ID NO: 5132 - protein, 8 aa, Homo sapiens
  Table 1.2; MAGEA10; ENSG00000124260; HLA -B*18:01
SECMLLVF

SEQ ID NO: 5133 - protein, 10 aa, Homo sapiens
  Table 1.2; MAGEA10; ENSG00000124260; HLA -A*30:01,HLA-B*40:01,HLA-B*40:02,HLA-B*44:02,HLA-B*44:03, HLA-B*49:01
SEIDEKVTDL

SEQ ID NO: 5134 - protein, 11 aa, Homo sapiens
  Table 1.2; MAGEA10; ENSG00000124260; HLA -B*49:01
SEIDEKVTDLV

SEQ ID NO: 5135 - protein, 9 aa, Homo sapiens
  Table 1.2; MAGEA10; ENSG00000124260; HLA -B*37:01,HLA-B*40:01,HLA-B*44:02,HLA-B*44:03,HLA-B*49:01
SESLPRSEI

SEQ ID NO: 5136 - protein, 8 aa, Homo sapiens
  Table 1.2; MAGEA10; ENSG00000124260; HLA -A*23:01,HLA-C*14:02
SFVLVTSL

SEQ ID NO: 5137 - protein, 8 aa, Homo sapiens
  Table 1.2; MAGEA10; ENSG00000124260; HLA -B*15:01
SIVFIEGY

SEQ ID NO: 5138 - protein, 8 aa, Homo sapiens
  Table 1.2; MAGEA10; ENSG00000124260; HLA -A*03:01
SLLKFLAK

SEQ ID NO: 5139 - protein, 9 aa, Homo sapiens
  Table 1.2; MAGEA10; ENSG00000124260; HLA -A*02:01,HLA-A*02:03,HLA-A*02:04,HLA-A*02:07
SLLKFLAKV

SEQ ID NO: 5140 - protein, 8 aa, Homo sapiens
  Table 1.2; MAGEA10; ENSG00000124260; HLA -B*07:02
SPSTLQVL

SEQ ID NO: 5141 - protein, 8 aa, Homo sapiens
  Table 1.2; MAGEA10; ENSG00000124260; HLA -B*07:02,HLA-B*08:01,HLA-B*37:01,HLA-B*56:01,HLA-C*07:02
SPSVVASL

SEQ ID NO: 5142 - protein, 10 aa, Homo sapiens
  Table 1.2; MAGEA10; ENSG00000124260; HLA -B*07:02
SPSVVASLPL

SEQ ID NO: 5143 - protein, 10 aa, Homo sapiens
  Table 1.2; MAGEA10; ENSG00000124260; HLA -B*15:01
SQKEESPSTL

SEQ ID NO: 5144 - protein, 9 aa, Homo sapiens
  Table 1.2; MAGEA10; ENSG00000124260; HLA -A*01:01,HLA-A*11:01,HLA-A*25:01,HLA-A*26:01,HLA-A*29:02, HLA-A*30:02,HLA-A*32:01,HLA-B*15:01,HLA-B*15:03,HLA-B*27:05, HLA-B*35:01,HLA-B*46:01,HLA-B*58:01,HLA-C*02:02,HLA-C*16:01,
  HLA-C*16:02
SSATGSFSY

SEQ ID NO: 5145 - protein, 9 aa, Homo sapiens
  Table 1.2; MAGEA10; ENSG00000124260; HLA -A*02:07,HLA-A*24:02,HLA-A*25:01,HLA-A*26:01,HLA-A*68:02, HLA-B*46:01,HLA-B*58:01,HLA-C*01:02,HLA-C*14:02
SSPSVVASL

SEQ ID NO: 5146 - protein, 10 aa, Homo sapiens
  Table 1.2; MAGEA10; ENSG00000124260; HLA -A*01:01,HLA-A*29:02,HLA-A*30:02
SSSATGSFSY

SEQ ID NO: 5147 - protein, 8 aa, Homo sapiens
  Table 1.2; MAGEA10; ENSG00000124260; HLA -A*30:02
SSSSSSCY

SEQ ID NO: 5148 - protein, 9 aa, Homo sapiens
  Table 1.2; MAGEA10; ENSG00000124260; HLA -A*01:01,HLA-A*26:01,HLA-A*30:02,HLA-B*15:01,HLA-B*15:03
SSSSSSSCY

SEQ ID NO: 5149 - protein, 10 aa, Homo sapiens
  Table 1.2; MAGEA10; ENSG00000124260; HLA -A*30:02
SSSSSSSSCY

SEQ ID NO: 5150 - protein, 11 aa, Homo sapiens
  Table 1.2; MAGEA10; ENSG00000124260; HLA -A*30:02
SSSSSSSSSCY

SEQ ID NO: 5151 - protein, 9 aa, Homo sapiens
  Table 1.2; MAGEA10; ENSG00000124260; HLA -A*25:01,HLA-A*26:01,HLA-A*30:02,HLA-A*32:01,HLA-B*15:01, HLA-B*15:03,HLA-B*46:01,HLA-B*58:01,HLA-C*16:01
SSTSTSSSF

SEQ ID NO: 5152 - protein, 10 aa, Homo sapiens
  Table 1.2; MAGEA10; ENSG00000124260; HLA -A*25:01,HLA-A*26:01,HLA-A*30:02
STSSSFPSSF

SEQ ID NO: 5153 - protein, 8 aa, Homo sapiens
  Table 1.2; MAGEA10; ENSG00000124260; HLA -A*32:01
STSTSSSF

SEQ ID NO: 5154 - protein, 10 aa, Homo sapiens
  Table 1.2; MAGEA10; ENSG00000124260; HLA -B*54:01,HLA-B*56:01
TAMASASSSA

SEQ ID NO: 5155 - protein, 8 aa, Homo sapiens
  Table 1.2; MAGEA10; ENSG00000124260; HLA -B*37:01
TDLVQFLL

SEQ ID NO: 5156 - protein, 9 aa, Homo sapiens
  Table 1.2; MAGEA10; ENSG00000124260; HLA -A*68:02
TKAEILESV

SEQ ID NO: 5157 - protein, 9 aa, Homo sapiens
  Table 1.2; MAGEA10; ENSG00000124260; HLA -B*54:01,HLA-B*56:01
TPEEVIWEA

SEQ ID NO: 5158 - protein, 10 aa, Homo sapiens
  Table 1.2; MAGEA10; ENSG00000124260; HLA -B*35:03
TPEEVIWEAL

SEQ ID NO: 5159 - protein, 8 aa, Homo sapiens
  Table 1.2; MAGEA10; ENSG00000124260; HLA -B*56:01
TPNPPQSA

SEQ ID NO: 5160 - protein, 10 aa, Homo sapiens
  Table 1.2; MAGEA10; ENSG00000124260; HLA -B*07:02,HLA-B*51:01,HLA-B*56:01,HLA-C*07:02
TPNPPQSAQI

SEQ ID NO: 5161 - protein, 11 aa, Homo sapiens
  Table 1.2; MAGEA10; ENSG00000124260; HLA -B*54:01,HLA-B*56:01
TPNPPQSAQIA

SEQ ID NO: 5162 - protein, 9 aa, Homo sapiens
  Table 1.2; MAGEA10; ENSG00000124260; HLA -A*01:01,HLA-A*30:02,HLA-B*15:01,HLA-B*38:01
TQDWVQENY

SEQ ID NO: 5163 - protein, 10 aa, Homo sapiens
  Table 1.2; MAGEA10; ENSG00000124260; HLA -B*38:01
TQDWVQENYL

SEQ ID NO: 5164 - protein, 11 aa, Homo sapiens
  Table 1.2; MAGEA10; ENSG00000124260; HLA -B*27:05,HLA-B*38:01,HLA-B*39:01
TQGLEGAQAPL

SEQ ID NO: 5165 - protein, 9 aa, Homo sapiens
  Table 1.2; MAGEA10; ENSG00000124260; HLA -A*25:01,HLA-A*26:01,HLA-A*30:02,HLA-A*32:01,HLA-B*37:01, HLA-C*02:02,HLA-C*16:01
TSSSFPSSF

SEQ ID NO: 5166 - protein, 8 aa, Homo sapiens
  Table 1.2; MAGEA10; ENSG00000124260; HLA -A*32:01,HLA-B*35:03,HLA-C*04:01,HLA-C*05:01
TTDDTTAM

SEQ ID NO: 5167 - protein, 9 aa, Homo sapiens
  Table 1.2; MAGEA10; ENSG00000124260; HLA -A*01:01
TTDDTTAMA

SEQ ID NO: 5168 - protein, 9 aa, Homo sapiens
  Table 1.2; MAGEA10; ENSG00000124260; HLA -B*35:01,HLA-B*35:03,HLA-C*04:01,HLA-C*05:01
TYDGMLSDV

SEQ ID NO: 5169 - protein, 8 aa, Homo sapiens
  Table 1.2; MAGEA10; ENSG00000124260; HLA -A*32:01,HLA-B*37:01,HLA-C*01:02
VDPTGHSF

SEQ ID NO: 5170 - protein, 11 aa, Homo sapiens
  Table 1.2; MAGEA10; ENSG00000124260; HLA -A*30:01
VEEDASSSTST

SEQ ID NO: 5171 - protein, 11 aa, Homo sapiens
  Table 1.2; MAGEA10; ENSG00000124260; HLA -B*15:03
VKEVDPTGHSF

SEQ ID NO: 5172 - protein, 8 aa, Homo sapiens
  Table 1.2; MAGEA10; ENSG00000124260; HLA -C*01:02
VLPDSESL

SEQ ID NO: 5173 - protein, 11 aa, Homo sapiens
  Table 1.2; MAGEA10; ENSG00000124260; HLA -A*02:07
VLPDSESLPRS

SEQ ID NO: 5174 - protein, 10 aa, Homo sapiens
  Table 1.2; MAGEA10; ENSG00000124260; HLA -A*01:01,HLA-A*23:01,HLA-A*25:01,HLA-A*26:01,HLA-A*29:02, HLA-A*30:02,HLA-A*32:01,HLA-B*15:01,HLA-B*15:03,HLA-B*46:01, HLA-B*58:01
VLVTSLGLTY

SEQ ID NO: 5175 - protein, 9 aa, Homo sapiens
  Table 1.2; MAGEA10; ENSG00000124260; HLA -C*16:01
VNGSDPRSF

SEQ ID NO: 5176 - protein, 9 aa, Homo sapiens
  Table 1.2; MAGEA10; ENSG00000124260; HLA -A*30:02,HLA-B*35:01,HLA-B*55:01
VPGSDPARY

SEQ ID NO: 5177 - protein, 11 aa, Homo sapiens
  Table 1.2; MAGEA10; ENSG00000124260; HLA -B*35:01
VPGSDPARYEF

SEQ ID NO: 5178 - protein, 8 aa, Homo sapiens
  Table 1.2; MAGEA10; ENSG00000124260; HLA -A*01:01,HLA-B*39:01
VQENYLEY

SEQ ID NO: 5179 - protein, 9 aa, Homo sapiens
  Table 1.2; MAGEA10; ENSG00000124260; HLA -A*32:01,HLA-B*13:02,HLA-B*38:01
VQSMPKTGI

SEQ ID NO: 5180 - protein, 8 aa, Homo sapiens
  Table 1.2; MAGEA10; ENSG00000124260; HLA -A*01:01,HLA-C*04:01,HLA-C*05:01
VTDLVQFL

SEQ ID NO: 5181 - protein, 9 aa, Homo sapiens
  Table 1.2; MAGEA10; ENSG00000124260; HLA -A*01:01,HLA-A*02:07
VTDLVQFLL

SEQ ID NO: 5182 - protein, 10 aa, Homo sapiens
  Table 1.2; MAGEA10; ENSG00000124260; HLA -A*01:01
VTDLVQFLLF

SEQ ID NO: 5183 - protein, 8 aa, Homo sapiens
  Table 1.2; MAGEA10; ENSG00000124260; HLA -A*01:01,HLA-A*29:02,HLA-A*32:01,HLA-B*15:01,HLA-B*46:01, HLA-C*14:02,HLA-C*16:01
VTSLGLTY

SEQ ID NO: 5184 - protein, 9 aa, Homo sapiens
  Table 1.2; MAGEA10; ENSG00000124260; HLA -A*01:01,HLA-A*25:01,HLA-A*26:01,HLA-A*29:02,HLA-A*30:02, HLA-B*15:01,HLA-B*35:01
WVQENYLEY

SEQ ID NO: 5185 - protein, 8 aa, Homo sapiens
  Table 1.2; MAGEA10; ENSG00000124260; HLA -B*38:01,HLA-C*07:01,HLA-C*07:04
YDGMEHLI

SEQ ID NO: 5186 - protein, 8 aa, Homo sapiens
  Table 1.2; MAGEA10; ENSG00000124260; HLA -A*02:07,HLA-B*49:01
YEDHFPLL

SEQ ID NO: 5187 - protein, 9 aa, Homo sapiens
  Table 1.2; MAGEA10; ENSG00000124260; HLA -A*01:01,HLA-A*02:07,HLA-A*24:02,HLA-A*29:02,HLA-B*18:01, HLA-B*44:02,HLA-B*44:03,HLA-B*49:01
YEDHFPLLF

SEQ ID NO: 5188 - protein, 9 aa, Homo sapiens
  Table 1.2; MAGEA10; ENSG00000124260; HLA -A*02:04
YEFLWGPRA

SEQ ID NO: 5189 - protein, 11 aa, Homo sapiens
  Table 1.2; MAGEA10; ENSG00000124260; HLA -A*68:02,HLA-B*51:01,HLA-B*54:01,HLA-B*56:01
YPLIPSTPEEV

SEQ ID NO: 5190 - protein, 9 aa, Homo sapiens
  Table 1.2; MAGEA10; ENSG00000124260; HLA -A*01:01,HLA-A*02:01,HLA-A*03:01,HLA-A*03:02,HLA-A*11:01, HLA-B*13:02,HLA-B*27:05,HLA-B*38:01
YQMKEPITK

SEQ ID NO: 5191 - protein, 10 aa, Homo sapiens
  Table 1.2; MAGEA10; ENSG00000124260; HLA -A*02:03
YQMKEPITKA

SEQ ID NO: 5192 - protein, 11 aa, Homo sapiens
  Table 1.2; MAGEA10; ENSG00000124260; HLA -B*27:05
YRQVPGSDPAR

SEQ ID NO: 5193 - protein, 8 aa, Homo sapiens
  Table 1.2; MAGEA11; ENSG00000185247; HLA -B*08:01,HLA-B*46:01,HLA-B*58:01,HLA-C*03:03,HLA-C*03:04, HLA-C*12:03
AAFFSSTL

SEQ ID NO: 5194 - protein, 8 aa, Homo sapiens
  Table 1.2; MAGEA11; ENSG00000185247; HLA -B*37:01
ADLTRVIM

SEQ ID NO: 5195 - protein, 9 aa, Homo sapiens
  Table 1.2; MAGEA11; ENSG00000185247; HLA -B*37:01
ADLTRVIMP

SEQ ID NO: 5196 - protein, 9 aa, Homo sapiens
  Table 1.2; MAGEA11; ENSG00000185247; HLA -A*30:01,HLA-B*27:02,HLA-B*37:01,HLA-B*38:01,HLA-B*40:01, HLA-B*44:02,HLA-B*44:03,HLA-B*49:01,HLA-C*16:04
AEEQEAAFF

SEQ ID NO: 5197 - protein, 8 aa, Homo sapiens
  Table 1.2; MAGEA11; ENSG00000185247; HLA -A*30:01,HLA-B*13:02,HLA-B*18:01,HLA-B*27:02,HLA-B*37:01, HLA-B*40:01,HLA-B*40:02,HLA-B*44:02,HLA-B*44:03,HLA-B*49:01
AEMLGSVI

SEQ ID NO: 5198 - protein, 10 aa, Homo sapiens
  Table 1.2; MAGEA11; ENSG00000185247; HLA -B*44:02
AEMLGSVIKN

SEQ ID NO: 5199 - protein, 11 aa, Homo sapiens
  Table 1.2; MAGEA11; ENSG00000185247; HLA -A*30:01,HLA-A*30:02,HLA-B*27:02,HLA-B*44:02,HLA-B*44:03, HLA-C*16:04
AEMLGSVIKNY

SEQ ID NO: 5200 - protein, 10 aa, Homo sapiens
  Table 1.2; MAGEA11; ENSG00000185247; HLA -A*30:01
AESPSPPQSP

SEQ ID NO: 5201 - protein, 8 aa, Homo sapiens
  Table 1.2; MAGEA11; ENSG00000185247; HLA -B*49:01
AETSKMKV

SEQ ID NO: 5202 - protein, 9 aa, Homo sapiens
  Table 1.2; MAGEA11; ENSG00000185247; HLA -A*30:01,HLA-B*37:01,HLA-B*40:01,HLA-B*40:02,HLA-B*44:02, HLA-B*44:03,HLA-B*49:01
AETSKMKVL

SEQ ID NO: 5203 - protein, 11 aa, Homo sapiens
  Table 1.2; MAGEA11; ENSG00000185247; HLA -B*44:02
AETSKMKVLEY

SEQ ID NO: 5204 - protein, 9 aa, Homo sapiens
  Table 1.2; MAGEA11; ENSG00000185247; HLA -B*13:02
AFFSSTLNV

SEQ ID NO: 5205 - protein, 11 aa, Homo sapiens
  Table 1.2; MAGEA11; ENSG00000185247; HLA -B*15:01
ALQAEEQEAAF

SEQ ID NO: 5206 - protein, 9 aa, Homo sapiens
  Table 1.2; MAGEA11; ENSG00000185247; HLA -A*02:01,HLA-A*02:03,HLA-A*02:04,HLA-A*02:07,HLA-B*07:02, HLA-B*13:02,HLA-B*15:01,HLA-B*40:02,HLA-B*46:01,HLA-B*55:01, HLA-C*06:02
ALREEGEGV

SEQ ID NO: 5207 - protein, 9 aa, Homo sapiens
  Table 1.2; MAGEA11; ENSG00000185247; HLA -A*01:01,HLA-A*02:07,HLA-A*32:01,HLA-C*02:02,HLA-C*05:01
AMDAIFGSL

SEQ ID NO: 5208 - protein, 11 aa, Homo sapiens
  Table 1.2; MAGEA11; ENSG00000185247; HLA -A*30:02,HLA-C*12:03
ANANGRDPTSY

SEQ ID NO: 5209 - protein, 9 aa, Homo sapiens
  Table 1.2; MAGEA11; ENSG00000185247; HLA -A*30:02
ANGRDPTSY

SEQ ID NO: 5210 - protein, 9 aa, Homo sapiens
  Table 1.2; MAGEA11; ENSG00000185247; HLA -A*33:01,HLA-A*33:03
ANLEDRSPR

SEQ ID NO: 5211 - protein, 9 aa, Homo sapiens
  Table 1.2; MAGEA11; ENSG00000185247; HLA -A*25:01,HLA-B*07:02,HLA-B*35:01,HLA-B*44:02,HLA-B*44:03, HLA-B*51:01,HLA-B*54:01,HLA-B*56:01,HLA-B*57:01,HLA-B*58:01, HLA-C*07:02
APYGPQLQW

SEQ ID NO: 5212 - protein, 10 aa, Homo sapiens
  Table 1.2; MAGEA11; ENSG00000185247; HLA -A*02:07
CIPEEVMWEV

SEQ ID NO: 5213 - protein, 8 aa, Homo sapiens
  Table 1.2; MAGEA11; ENSG00000185247; HLA -A*33:01,HLA-A*68:01
DDFQSTER

SEQ ID NO: 5214 - protein, 11 aa, Homo sapiens
  Table 1.2; MAGEA11; ENSG00000185247; HLA -B*18:01
DDFQSTERAPY

SEQ ID NO: 5215 - protein, 10 aa, Homo sapiens
  Table 1.2; MAGEA11; ENSG00000185247; HLA -A*23:01
DFGLQVSTMF

SEQ ID NO: 5216 - protein, 10 aa, Homo sapiens
  Table 1.2; MAGEA11; ENSG00000185247; HLA -A*30:02
DFQSTERAPY

SEQ ID NO: 5217 - protein, 8 aa, Homo sapiens
  Table 1.2; MAGEA11; ENSG00000185247; HLA -A*25:01
DLIDPESF

SEQ ID NO: 5218 - protein, 8 aa, Homo sapiens
  Table 1.2; MAGEA11; ENSG00000185247; HLA -B*08:01,HLA-B*51:01
DLPRVQVF

SEQ ID NO: 5219 - protein, 9 aa, Homo sapiens
  Table 1.2; MAGEA11; ENSG00000185247; HLA -A*33:01,HLA-A*33:03
DLPRVQVFR

SEQ ID NO: 5220 - protein, 10 aa, Homo sapiens
  Table 1.2; MAGEA11; ENSG00000185247; HLA -B*35:03
DPESFSQDIL

SEQ ID NO: 5221 - protein, 8 aa, Homo sapiens
  Table 1.2; MAGEA11; ENSG00000185247; HLA -B*51:01
DPTSHSYV

SEQ ID NO: 5222 - protein, 9 aa, Homo sapiens
  Table 1.2; MAGEA11; ENSG00000185247; HLA -B*07:02,HLA-B*08:01,HLA-B*35:01,HLA-B*35:03,HLA-B*39:01, HLA-B*51:01,HLA-C*07:02
DPTSHSYVL

SEQ ID NO: 5223 - protein, 8 aa, Homo sapiens
  Table 1.2; MAGEA11; ENSG00000185247; HLA -B*35:01,HLA-B*35:03,HLA-B*51:01
DPTSYPSL

SEQ ID NO: 5224 - protein, 9 aa, Homo sapiens
  Table 1.2; MAGEA11; ENSG00000185247; HLA -A*01:01,HLA-A*26:01,HLA-B*18:01,HLA-B*35:01
DPTSYPSLY

SEQ ID NO: 5225 - protein, 9 aa, Homo sapiens
  Table 1.2; MAGEA11; ENSG00000185247; HLA -A*26:01,HLA-A*68:01,HLA-A*68:02,HLA-B*51:01
DSGDFGLQV

SEQ ID NO: 5226 - protein, 10 aa, Homo sapiens
  Table 1.2; MAGEA11; ENSG00000185247; HLA -A*25:01,HLA-A*26:01,HLA-A*33:01,HLA-A*68:01
DVKEVDPTSH

SEQ ID NO: 5227 - protein, 10 aa, Homo sapiens
  Table 1.2; MAGEA11; ENSG00000185247; HLA -B*54:01
DYFPEIFREA

SEQ ID NO: 5228 - protein, 9 aa, Homo sapiens
  Table 1.2; MAGEA11; ENSG00000185247; HLA -A*25:01,HLA-A*26:01,HLA-A*33:03,HLA-A*68:01,HLA-A*68:02, HLA-B*07:02,HLA-B*08:01,HLA-B*27:05,HLA-B*35:01,HLA-B*35:03, HLA-B*38:01,HLA-B*39:01,HLA-B*51:01,HLA-C*03:03,HLA-C*03:04,
  HLA-C*07:06,HLA-C*12:03,HLA-C*16:04
EAAFFSSTL

SEQ ID NO: 5229 - protein, 9 aa, Homo sapiens
  Table 1.2; MAGEA11; ENSG00000185247; HLA -A*33:03,HLA-A*68:01
EDDFQSTER

SEQ ID NO: 5230 - protein, 11 aa, Homo sapiens
  Table 1.2; MAGEA11; ENSG00000185247; HLA -A*30:01,HLA-B*44:02,HLA-C*07:01
EDLGLVGAQAL

SEQ ID NO: 5231 - protein, 9 aa, Homo sapiens
  Table 1.2; MAGEA11; ENSG00000185247; HLA -A*33:01,HLA-A*68:02
EDYFPEIFR

SEQ ID NO: 5232 - protein, 9 aa, Homo sapiens
  Table 1.2; MAGEA11; ENSG00000185247; HLA -B*49:01
EEDLGLVGA

SEQ ID NO: 5233 - protein, 9 aa, Homo sapiens
  Table 1.2; MAGEA11; ENSG00000185247; HLA -B*40:02
EELPAAESP

SEQ ID NO: 5234 - protein, 8 aa, Homo sapiens
  Table 1.2; MAGEA11; ENSG00000185247; HLA -B*18:01,HLA-B*37:01,HLA-B*44:02
EEQEAAFF

SEQ ID NO: 5235 - protein, 8 aa, Homo sapiens
  Table 1.2; MAGEA11; ENSG00000185247; HLA -B*18:01
EESFSPTA

SEQ ID NO: 5236 - protein, 9 aa, Homo sapiens
  Table 1.2; MAGEA11; ENSG00000185247; HLA -A*30:01,HLA-B*18:01,HLA-B*37:01,HLA-B*39:01,HLA-B*40:01, HLA-B*44:03
EESFSPTAM

SEQ ID NO: 5237 - protein, 10 aa, Homo sapiens
  Table 1.2; MAGEA11; ENSG00000185247; HLA -A*26:01
EIFREASVCM

SEQ ID NO: 5238 - protein, 10 aa, Homo sapiens
  Table 1.2; MAGEA11; ENSG00000185247; HLA -A*25:01,HLA-A*26:01,HLA-A*29:02,HLA-A*30:02,HLA-A*33:01, HLA-A*33:03,HLA-B*44:02,HLA-B*44:03
EMLGSVIKNY

SEQ ID NO: 5239 - protein, 11 aa, Homo sapiens
  Table 1.2; MAGEA11; ENSG00000185247; HLA -B*38:01
EQEAAFFSSTL

SEQ ID NO: 5240 - protein, 9 aa, Homo sapiens
  Table 1.2; MAGEA11; ENSG00000185247; HLA -B*38:01,HLA-B*39:01
EQSMPKSGL

SEQ ID NO: 5241 - protein, 9 aa, Homo sapiens
  Table 1.2; MAGEA11; ENSG00000185247; HLA -B*27:02,HLA-B*27:05,HLA-B*38:01,HLA-B*39:01,HLA-C*06:02
ERAPYGPQL

SEQ ID NO: 5242 - protein, 8 aa, Homo sapiens
  Table 1.2; MAGEA11; ENSG00000185247; HLA -A*26:01
ESFSPTAM

SEQ ID NO: 5243 - protein, 11 aa, Homo sapiens
  Table 1.2; MAGEA11; ENSG00000185247; HLA -A*68:01
ESFSQDILHDK

SEQ ID NO: 5244 - protein, 10 aa, Homo sapiens
  Table 1.2; MAGEA11; ENSG00000185247; HLA -A*01:01,HLA-A*25:01,HLA-A*26:01
ETSKMKVLEY

SEQ ID NO: 5245 - protein, 9 aa, Homo sapiens
  Table 1.2; MAGEA11; ENSG00000185247; HLA -A*01:01,HLA-A*11:01,HLA-A*25:01,HLA-A*26:01,HLA-A*29:02, HLA-A*30:02,HLA-A*32:01,HLA-A*33:03,HLA-A*68:01,HLA-B*15:01, HLA-B*15:03,HLA-B*18:01,HLA-B*35:01,HLA-B*38:01,HLA-B*39:01,
  HLA-B*44:02,HLA-B*44:03,HLA-B*46:01,HLA-B*55:01,HLA-B*58:01, HLA-C*03:03,HLA-C*05:01,HLA-C*07:04,HLA-C*07:06,HLA-C*16:02, HLA-C*16:04
EVDPTSHSY

SEQ ID NO: 5246 - protein, 10 aa, Homo sapiens
  Table 1.2; MAGEA11; ENSG00000185247; HLA -A*01:01,HLA-A*26:01,HLA-A*68:02,HLA-C*05:01
EVDPTSHSYV

SEQ ID NO: 5247 - protein, 11 aa, Homo sapiens
  Table 1.2; MAGEA11; ENSG00000185247; HLA -A*01:01,HLA-A*02:07,HLA-A*68:02,HLA-B*35:03,HLA-B*38:01, HLA-B*39:01
EVDPTSHSYVL

SEQ ID NO: 5248 - protein, 8 aa, Homo sapiens
  Table 1.2; MAGEA11; ENSG00000185247; HLA -A*26:01
EVLSIMGV

SEQ ID NO: 5249 - protein, 9 aa, Homo sapiens
  Table 1.2; MAGEA11; ENSG00000185247; HLA -A*25:01,HLA-A*26:01,HLA-A*29:02,HLA-A*30:02,HLA-A*33:01, HLA-A*33:03,HLA-B*35:01,HLA-B*44:03,HLA-C*07:06
EVLSIMGVY

SEQ ID NO: 5250 - protein, 10 aa, Homo sapiens
  Table 1.2; MAGEA11; ENSG00000185247; HLA -A*26:01,HLA-A*68:02,HLA-B*54:01
EVLSIMGVYA

SEQ ID NO: 5251 - protein, 9 aa, Homo sapiens
  Table 1.2; MAGEA11; ENSG00000185247; HLA -A*25:01,HLA-A*26:01,HLA-A*68:02
EVMWEVLSI

SEQ ID NO: 5252 - protein, 10 aa, Homo sapiens
  Table 1.2; MAGEA11; ENSG00000185247; HLA -A*26:01
EVMWEVLSIM

SEQ ID NO: 5253 - protein, 9 aa, Homo sapiens
  Table 1.2; MAGEA11; ENSG00000185247; HLA -A*33:01,HLA-A*33:03,HLA-A*68:01
EYIANANGR

SEQ ID NO: 5254 - protein, 8 aa, Homo sapiens
  Table 1.2; MAGEA11; ENSG00000185247; HLA -B*46:01,HLA-B*49:01,HLA-B*51:01,HLA-C*16:02
FGIDVKEV

SEQ ID NO: 5255 - protein, 8 aa, Homo sapiens
  Table 1.2; MAGEA11; ENSG00000185247; HLA -B*08:01,HLA-B*46:01,HLA-B*51:01,HLA-C*14:02
FGLQVSTM

SEQ ID NO: 5256 - protein, 9 aa, Homo sapiens
  Table 1.2; MAGEA11; ENSG00000185247; HLA -A*23:01
FGLQVSTMF

SEQ ID NO: 5257 - protein, 9 aa, Homo sapiens
  Table 1.2; MAGEA11; ENSG00000185247; HLA -A*02:01,HLA-A*02:03,HLA-A*02:04,HLA-A*02:07
FLFGEPKRL

SEQ ID NO: 5258 - protein, 10 aa, Homo sapiens
  Table 1.2; MAGEA11; ENSG00000185247; HLA -A*02:01,HLA-A*02:03,HLA-A*02:04
FLFGEPKRLL

SEQ ID NO: 5259 - protein, 11 aa, Homo sapiens
  Table 1.2; MAGEA11; ENSG00000185247; HLA -A*02:01
FLFGEPKRLLT

SEQ ID NO: 5260 - protein, 8 aa, Homo sapiens
  Table 1.2; MAGEA11; ENSG00000185247; HLA -B*54:01,HLA-B*55:01,HLA-B*56:01
FPEIFREA

SEQ ID NO: 5261 - protein, 10 aa, Homo sapiens
  Table 1.2; MAGEA11; ENSG00000185247; HLA -B*54:01,HLA-B*56:01
FPEIFREASV

SEQ ID NO: 5262 - protein, 9 aa, Homo sapiens
  Table 1.2; MAGEA11; ENSG00000185247; HLA -B*07:02,HLA-B*08:01,HLA-B*35:01,HLA-B*35:03,HLA-C*07:02
FPTVRPADL

SEQ ID NO: 5263 - protein, 9 aa, Homo sapiens
  Table 1.2; MAGEA11; ENSG00000185247; HLA -A*01:01,HLA-A*29:02,HLA-A*30:02,HLA-A*32:01,HLA-B*15:01, HLA-B*15:03,HLA-B*46:01,HLA-C*02:02,HLA-C*07:04,HLA-C*16:01
FQSTERAPY

SEQ ID NO: 5264 - protein, 9 aa, Homo sapiens
  Table 1.2; MAGEA11; ENSG00000185247; HLA -C*01:02
FSPTAMDAI

SEQ ID NO: 5265 - protein, 9 aa, Homo sapiens
  Table 1.2; MAGEA11; ENSG00000185247; HLA -A*11:01,HLA-A*33:01
FSQDILHDK

SEQ ID NO: 5266 - protein, 9 aa, Homo sapiens
  Table 1.2; MAGEA11; ENSG00000185247; HLA -A*03:01,HLA-A*03:02,HLA-A*11:01,HLA-A*31:01,HLA-A*68:01, HLA-B*27:05,HLA-C*07:06
GCSPASIKR

SEQ ID NO: 5267 - protein, 10 aa, Homo sapiens
  Table 1.2; MAGEA11; ENSG00000185247; HLA -A*03:01,HLA-A*03:02,HLA-A*11:01
GCSPASIKRK

SEQ ID NO: 5268 - protein, 10 aa, Homo sapiens
  Table 1.2; MAGEA11; ENSG00000185247; HLA -A*30:01,HLA-B*40:02
GDFGLQVSTM

SEQ ID NO: 5269 - protein, 11 aa, Homo sapiens
  Table 1.2; MAGEA11; ENSG00000185247; HLA -B*44:02
GEPKRLLTQNW

SEQ ID NO: 5270 - protein, 11 aa, Homo sapiens
  Table 1.2; MAGEA11; ENSG00000185247; HLA -A*03:01,HLA-A*03:02,HLA-A*11:01
GIQCNEQSMPK

SEQ ID NO: 5271 - protein, 9 aa, Homo sapiens
  Table 1.2; MAGEA11; ENSG00000185247; HLA -A*02:01,HLA-A*02:03
GLGCSPASI

SEQ ID NO: 5272 - protein, 10 aa, Homo sapiens
  Table 1.2; MAGEA11; ENSG00000185247; HLA -A*03:01,HLA-A*03:02
GLGCSPASIK

SEQ ID NO: 5273 - protein, 8 aa, Homo sapiens
  Table 1.2; MAGEA11; ENSG00000185247; HLA -B*08:01
GLITKAEM

SEQ ID NO: 5274 - protein, 9 aa, Homo sapiens
  Table 1.2; MAGEA11; ENSG00000185247; HLA -A*02:01,HLA-A*02:03,HLA-A*02:04,HLA-A*02:07,HLA-B*08:01
GLITKAEML

SEQ ID NO: 5275 - protein, 9 aa, Homo sapiens
  Table 1.2; MAGEA11; ENSG00000185247; HLA -A*02:01,HLA-A*02:03,HLA-A*02:04,HLA-A*02:07,HLA-B*13:02
GLLIIVLGV

SEQ ID NO: 5276 - protein, 8 aa, Homo sapiens
  Table 1.2; MAGEA11; ENSG00000185247; HLA -B*15:01
GLQVSTMF

SEQ ID NO: 5277 - protein, 10 aa, Homo sapiens
  Table 1.2; MAGEA11; ENSG00000185247; HLA -B*55:01,HLA-B*56:01
GPITQIFPTV

SEQ ID NO: 5278 - protein, 10 aa, Homo sapiens
  Table 1.2; MAGEA11; ENSG00000185247; HLA -B*07:02
GPRAHAETSK

SEQ ID NO: 5279 - protein, 11 aa, Homo sapiens
  Table 1.2; MAGEA11; ENSG00000185247; HLA -B*07:02
GPRAHAETSKM

SEQ ID NO: 5280 - protein, 9 aa, Homo sapiens
  Table 1.2; MAGEA11; ENSG00000185247; HLA -B*27:05
GRDPTSYPS

SEQ ID NO: 5281 - protein, 10 aa, Homo sapiens
  Table 1.2; MAGEA11; ENSG00000185247; HLA -B*27:02,HLA-B*27:05,HLA-B*38:01,HLA-B*39:01
GRDPTSYPSL

SEQ ID NO: 5282 - protein, 11 aa, Homo sapiens
  Table 1.2; MAGEA11; ENSG00000185247; HLA -A*01:01
GRDPTSYPSLY

SEQ ID NO: 5283 - protein, 9 aa, Homo sapiens
  Table 1.2; MAGEA11; ENSG00000185247; HLA -A*01:01,HLA-A*32:01,HLA-B*57:01,HLA-B*58:01,HLA-C*05:01
GTDPACYEF

SEQ ID NO: 5284 - protein, 9 aa, Homo sapiens
  Table 1.2; MAGEA11; ENSG00000185247; HLA -A*02:01
GTLEELPAA

SEQ ID NO: 5285 - protein, 9 aa, Homo sapiens
  Table 1.2; MAGEA11; ENSG00000185247; HLA -A*32:01,HLA-B*15:01
GVYAGREHF

SEQ ID NO: 5286 - protein, 10 aa, Homo sapiens
  Table 1.2; MAGEA11; ENSG00000185247; HLA -A*02:01,HLA-A*02:03,HLA-A*02:04,HLA-A*03:01
GVYAGREHFL

SEQ ID NO: 5287 - protein, 11 aa, Homo sapiens
  Table 1.2; MAGEA11; ENSG00000185247; HLA -A*29:02
GVYAGREHFLF

SEQ ID NO: 5288 - protein, 8 aa, Homo sapiens
  Table 1.2; MAGEA11; ENSG00000185247; HLA -B*37:01,HLA-B*40:02
HDKIIDLV

SEQ ID NO: 5289 - protein, 9 aa, Homo sapiens
  Table 1.2; MAGEA11; ENSG00000185247; HLA -A*25:01,HLA-A*30:01,HLA-A*32:01,HLA-A*68:02,HLA-B*08:01, HLA-B*13:02,HLA-B*15:03,HLA-B*18:01,HLA-B*35:01,HLA-B*39:01, HLA-B*40:01,HLA-B*40:02,HLA-B*46:01,HLA-B*51:01,HLA-B*58:01,
  HLA-C*01:02,HLA-C*02:02,HLA-C*03:03,HLA-C*03:04,HLA-C*12:03
HSYVLVTSL

SEQ ID NO: 5290 - protein, 8 aa, Homo sapiens
  Table 1.2; MAGEA11; ENSG00000185247; HLA -B*37:01
IDLVHLLL

SEQ ID NO: 5291 - protein, 8 aa, Homo sapiens
  Table 1.2; MAGEA11; ENSG00000185247; HLA -A*02:07,HLA-C*05:01
IIDLVHLL

SEQ ID NO: 5292 - protein, 9 aa, Homo sapiens
  Table 1.2; MAGEA11; ENSG00000185247; HLA -A*01:01,HLA-A*02:07
IIDLVHLLL

SEQ ID NO: 5293 - protein, 9 aa, Homo sapiens
  Table 1.2; MAGEA11; ENSG00000185247; HLA -A*02:01,HLA-A*02:03,HLA-A*02:04,HLA-A*02:07,HLA-B*08:01
ILHDKIIDL

SEQ ID NO: 5294 - protein, 10 aa, Homo sapiens
  Table 1.2; MAGEA11; ENSG00000185247; HLA -A*02:01,HLA-A*02:03,HLA-A*02:04,HLA-A*02:07
ILHDKIIDLV

SEQ ID NO: 5295 - protein, 9 aa, Homo sapiens
  Table 1.2; MAGEA11; ENSG00000185247; HLA -B*35:03,HLA-B*54:01
IPEEVMWEV

SEQ ID NO: 5296 - protein, 10 aa, Homo sapiens
  Table 1.2; MAGEA11; ENSG00000185247; HLA -B*35:03
IPEEVMWEVL

SEQ ID NO: 5297 - protein, 10 aa, Homo sapiens
  Table 1.2; MAGEA11; ENSG00000185247; HLA -A*03:02,HLA-A*11:01,HLA-B*27:02
IQCNEQSMPK

SEQ ID NO: 5298 - protein, 9 aa, Homo sapiens
  Table 1.2; MAGEA11; ENSG00000185247; HLA -B*57:01,HLA-B*58:01
ITGGEQVLW

SEQ ID NO: 5299 - protein, 9 aa, Homo sapiens
  Table 1.2; MAGEA11; ENSG00000185247; HLA -A*11:01,HLA-A*31:01,HLA-A*33:01,HLA-A*33:03,HLA-A*68:01
ITQIFPTVR

SEQ ID NO: 5300 - protein, 10 aa, Homo sapiens
  Table 1.2; MAGEA11; ENSG00000185247; HLA -A*30:01,HLA-B*40:01
KEGPSTSPDL

SEQ ID NO: 5301 - protein, 11 aa, Homo sapiens
  Table 1.2; MAGEA11; ENSG00000185247; HLA -B*40:01,HLA-B*49:01
KEGPSTSPDLI

SEQ ID NO: 5302 - protein, 10 aa, Homo sapiens
  Table 1.2; MAGEA11; ENSG00000185247; HLA -A*25:01,HLA-A*26:01,HLA-A*29:02,HLA-A*30:01,HLA-A*30:02, HLA-A*32:01,HLA-B*15:01,HLA-B*15:03,HLA-B*18:01,HLA-B*27:02, HLA-B*27:05,HLA-B*37:01,HLA-B*40:01,HLA-B*44:02,HLA-B*44:03,
  HLA-B*49:01,HLA-B*58:01,HLA-C*02:02,HLA-C*16:01,HLA-C*16:02, HLA-C*16:04
KEVDPTSHSY

SEQ ID NO: 5303 - protein, 11 aa, Homo sapiens
  Table 1.2; MAGEA11; ENSG00000185247; HLA -B*40:01,HLA-B*49:01
KEVDPTSHSYV

SEQ ID NO: 5304 - protein, 8 aa, Homo sapiens
  Table 1.2; MAGEA11; ENSG00000185247; HLA -A*02:04,HLA-A*02:07
KIIDLVHL

SEQ ID NO: 5305 - protein, 9 aa, Homo sapiens
  Table 1.2; MAGEA11; ENSG00000185247; HLA -A*02:01,HLA-A*02:03,HLA-A*02:04,HLA-A*02:07,HLA-A*23:01, HLA-A*24:02,HLA-A*31:01,HLA-A*32:01,HLA-A*68:02,HLA-B*57:01, HLA-B*58:01
KIIDLVHLL

SEQ ID NO: 5306 - protein, 10 aa, Homo sapiens
  Table 1.2; MAGEA11; ENSG00000185247; HLA -A*02:01,HLA-A*02:04,HLA-A*02:07
KIIDLVHLLL

SEQ ID NO: 5307 - protein, 11 aa, Homo sapiens
  Table 1.2; MAGEA11; ENSG00000185247; HLA -A*31:01
KIIDLVHLLLR

SEQ ID NO: 5308 - protein, 9 aa, Homo sapiens
  Table 1.2; MAGEA11; ENSG00000185247; HLA -A*02:01,HLA-A*02:03,HLA-A*02:04,HLA-A*02:07,HLA-A*31:01, HLA-B*40:02,HLA-B*55:01,HLA-B*56:01
KVLEYIANA

SEQ ID NO: 5309 - protein, 10 aa, Homo sapiens
  Table 1.2; MAGEA11; ENSG00000185247; HLA -B*27:02
LEYIANANGR

SEQ ID NO: 5310 - protein, 9 aa, Homo sapiens
  Table 1.2; MAGEA11; ENSG00000185247; HLA -B*08:01,HLA-B*46:01,HLA-C*01:02,HLA-C*03:03,HLA-C*03:04, HLA-C*14:02
LGLVGAQAL

SEQ ID NO: 5311 - protein, 8 aa, Homo sapiens
  Table 1.2; MAGEA11; ENSG00000185247; HLA -C*12:03,HLA-C*16:01,HLA-C*16:02
LGSVIKNY

SEQ ID NO: 5312 - protein, 10 aa, Homo sapiens
  Table 1.2; MAGEA11; ENSG00000185247; HLA -A*02:01,HLA-A*02:03,HLA-A*02:04,HLA-A*02:07
LLFGIDVKEV

SEQ ID NO: 5313 - protein, 9 aa, Homo sapiens
  Table 1.2; MAGEA11; ENSG00000185247; HLA -B*55:01
LPAAESPSP

SEQ ID NO: 5314 - protein, 10 aa, Homo sapiens
  Table 1.2; MAGEA11; ENSG00000185247; HLA -B*15:01,HLA-C*07:04
LQAEEQEAAF

SEQ ID NO: 5315 - protein, 11 aa, Homo sapiens
  Table 1.2; MAGEA11; ENSG00000185247; HLA -B*27:05,HLA-B*38:01
LQAEEQEAAFF

SEQ ID NO: 5316 - protein, 10 aa, Homo sapiens
  Table 1.2; MAGEA11; ENSG00000185247; HLA -B*27:05
LQAQEEDLGL

SEQ ID NO: 5317 - protein, 10 aa, Homo sapiens
  Table 1.2; MAGEA11; ENSG00000185247; HLA -A*01:01
LSDEGSGSQE

SEQ ID NO: 5318 - protein, 11 aa, Homo sapiens
  Table 1.2; MAGEA11; ENSG00000185247; HLA -A*01:01
LSDEGSGSQEK

SEQ ID NO: 5319 - protein, 9 aa, Homo sapiens
  Table 1.2; MAGEA11; ENSG00000185247; HLA -A*03:02,HLA-A*11:01
LTQNWVQEK

SEQ ID NO: 5320 - protein, 10 aa, Homo sapiens
  Table 1.2; MAGEA11; ENSG00000185247; HLA -A*01:01,HLA-A*29:02,HLA-A*30:02,HLA-B*57:01,HLA-B*58:01
LTQNWVQEKY

SEQ ID NO: 5321 - protein, 9 aa, Homo sapiens
  Table 1.2; MAGEA11; ENSG00000185247; HLA -A*01:01,HLA-A*25:01,HLA-A*26:01,HLA-A*29:02,HLA-A*30:02, HLA-A*32:01,HLA-B*15:01,HLA-B*35:01,HLA-B*58:01,HLA-C*02:02, HLA-C*07:04
LVTSLNLSY

SEQ ID NO: 5322 - protein, 9 aa, Homo sapiens
  Table 1.2; MAGEA11; ENSG00000185247; HLA -A*23:01,HLA-A*24:02
LWGPITQIF

SEQ ID NO: 5323 - protein, 8 aa, Homo sapiens
  Table 1.2; MAGEA11; ENSG00000185247; HLA -A*30:01,HLA-B*18:01,HLA-B*37:01,HLA-B*40:02
MDAIFGSL

SEQ ID NO: 5324 - protein, 9 aa, Homo sapiens
  Table 1.2; MAGEA11; ENSG00000185247; HLA -A*03:01,HLA-A*03:02,HLA-A*29:02,HLA-A*30:02,HLA-A*32:01, HLA-B*44:02,HLA-B*44:03,HLA-C*07:04
MLGSVIKNY

SEQ ID NO: 5325 - protein, 8 aa, Homo sapiens
  Table 1.2; MAGEA11; ENSG00000185247; HLA -B*51:01
MPKSGLLI

SEQ ID NO: 5326 - protein, 9 aa, Homo sapiens
  Table 1.2; MAGEA11; ENSG00000185247; HLA -B*07:02,HLA-B*51:01,HLA-B*54:01,HLA-B*56:01
MPKSGLLII

SEQ ID NO: 5327 - protein, 10 aa, Homo sapiens
  Table 1.2; MAGEA11; ENSG00000185247; HLA -B*51:01,HLA-B*54:01,HLA-B*56:01
MPKSGLLIIV

SEQ ID NO: 5328 - protein, 11 aa, Homo sapiens
  Table 1.2; MAGEA11; ENSG00000185247; HLA -B*54:01
MPKSGLLIIVL

SEQ ID NO: 5329 - protein, 10 aa, Homo sapiens
  Table 1.2; MAGEA11; ENSG00000185247; HLA -B*54:01
MPLEQRSQHC

SEQ ID NO: 5330 - protein, 9 aa, Homo sapiens
  Table 1.2; MAGEA11; ENSG00000185247; HLA -B*13:02
MQLLFGIDV

SEQ ID NO: 5331 - protein, 10 aa, Homo sapiens
  Table 1.2; MAGEA11; ENSG00000185247; HLA -A*25:01,HLA-A*30:02,HLA-B*35:01
NANGRDPTSY

SEQ ID NO: 5332 - protein, 10 aa, Homo sapiens
  Table 1.2; MAGEA11; ENSG00000185247; HLA -B*40:01
NEQSMPKSGL

SEQ ID NO: 5333 - protein, 10 aa, Homo sapiens
  Table 1.2; MAGEA11; ENSG00000185247; HLA -A*33:01
NGRDPTSYPS

SEQ ID NO: 5334 - protein, 10 aa, Homo sapiens
  Table 1.2; MAGEA11; ENSG00000185247; HLA -A*29:02
NWVQEKYLVY

SEQ ID NO: 5335 - protein, 9 aa, Homo sapiens
  Table 1.2; MAGEA11; ENSG00000185247; HLA -A*23:01,HLA-A*24:02
NYEDYFPEI

SEQ ID NO: 5336 - protein, 10 aa, Homo sapiens
  Table 1.2; MAGEA11; ENSG00000185247; HLA -A*24:02
NYEDYFPEIF

SEQ ID NO: 5337 - protein, 8 aa, Homo sapiens
  Table 1.2; MAGEA11; ENSG00000185247; HLA -B*51:01
PADLTRVI

SEQ ID NO: 5338 - protein, 9 aa, Homo sapiens
  Table 1.2; MAGEA11; ENSG00000185247; HLA -B*37:01
PDLIDPESF

SEQ ID NO: 5339 - protein, 9 aa, Homo sapiens
  Table 1.2; MAGEA11; ENSG00000185247; HLA -B*37:01,HLA-B*40:02,HLA-B*49:01
PEIFREASV

SEQ ID NO: 5340 - protein, 9 aa, Homo sapiens
  Table 1.2; MAGEA11; ENSG00000185247; HLA -B*15:01
PQSPQEESF

SEQ ID NO: 5341 - protein, 8 aa, Homo sapiens
  Table 1.2; MAGEA11; ENSG00000185247; HLA -A*01:01
PTSYPSLY

SEQ ID NO: 5342 - protein, 8 aa, Homo sapiens
  Table 1.2; MAGEA11; ENSG00000185247; HLA -A*24:02
PYGPQLQW

SEQ ID NO: 5343 - protein, 9 aa, Homo sapiens
  Table 1.2; MAGEA11; ENSG00000185247; HLA -B*35:01,HLA-B*35:03,HLA-B*38:01,HLA-B*39:01,HLA-B*55:01, HLA-C*03:03,HLA-C*05:01
QAEEQEAAF

SEQ ID NO: 5344 - protein, 10 aa, Homo sapiens
  Table 1.2; MAGEA11; ENSG00000185247; HLA -B*27:02,HLA-B*38:01,HLA-C*05:01
QAEEQEAAFF

SEQ ID NO: 5345 - protein, 9 aa, Homo sapiens
  Table 1.2; MAGEA11; ENSG00000185247; HLA -B*35:03
QAQEEDLGL

SEQ ID NO: 5346 - protein, 9 aa, Homo sapiens
  Table 1.2; MAGEA11; ENSG00000185247; HLA -A*03:01,HLA-A*03:02,HLA-A*11:01
QCNEQSMPK

SEQ ID NO: 5347 - protein, 8 aa, Homo sapiens
  Table 1.2; MAGEA11; ENSG00000185247; HLA -B*37:01
QDLPRVQV

SEQ ID NO: 5348 - protein, 9 aa, Homo sapiens
  Table 1.2; MAGEA11; ENSG00000185247; HLA -A*23:01,HLA-A*24:02,HLA-A*30:01,HLA-A*32:01,HLA-B*08:01, HLA-B*15:03,HLA-B*18:01,HLA-B*37:01,HLA-B*40:02,HLA-B*44:02, HLA-B*44:03,HLA-B*57:01,HLA-C*07:01,HLA-C*12:03,HLA-C*16:04
QDLPRVQVF

SEQ ID NO: 5349 - protein, 10 aa, Homo sapiens
  Table 1.2; MAGEA11; ENSG00000185247; HLA -A*31:01
QDLPRVQVFR

SEQ ID NO: 5350 - protein, 9 aa, Homo sapiens
  Table 1.2; MAGEA11; ENSG00000185247; HLA -A*30:01,HLA-B*18:01,HLA-B*49:01
QEAAFFSST

SEQ ID NO: 5351 - protein, 10 aa, Homo sapiens
  Table 1.2; MAGEA11; ENSG00000185247; HLA -A*30:01,HLA-B*18:01,HLA-B*40:01,HLA-B*40:02,HLA-B*44:02, HLA-B*44:03,HLA-B*49:01
QEAAFFSSTL

SEQ ID NO: 5352 - protein, 10 aa, Homo sapiens
  Table 1.2; MAGEA11; ENSG00000185247; HLA -A*30:01,HLA-B*49:01
QEEDLGLVGA

SEQ ID NO: 5353 - protein, 9 aa, Homo sapiens
  Table 1.2; MAGEA11; ENSG00000185247; HLA -B*49:01
QEESFSPTA

SEQ ID NO: 5354 - protein, 10 aa, Homo sapiens
  Table 1.2; MAGEA11; ENSG00000185247; HLA -A*30:01,HLA-B*18:01,HLA-B*40:01
QEESFSPTAM

SEQ ID NO: 5355 - protein, 9 aa, Homo sapiens
  Table 1.2; MAGEA11; ENSG00000185247; HLA -B*38:01
QHCKPEEGL

SEQ ID NO: 5356 - protein, 9 aa, Homo sapiens
  Table 1.2; MAGEA11; ENSG00000185247; HLA -A*02:03
QIFPTVRPA

SEQ ID NO: 5357 - protein, 9 aa, Homo sapiens
  Table 1.2; MAGEA11; ENSG00000185247; HLA -B*38:01,HLA-B*39:01
QRITGGEQV

SEQ ID NO: 5358 - protein, 10 aa, Homo sapiens
  Table 1.2; MAGEA11; ENSG00000185247; HLA -B*38:01,HLA-B*39:01
QRITGGEQVL

SEQ ID NO: 5359 - protein, 8 aa, Homo sapiens
  Table 1.2; MAGEA11; ENSG00000185247; HLA -B*08:01
QSMPKSGL

SEQ ID NO: 5360 - protein, 10 aa, Homo sapiens
  Table 1.2; MAGEA11; ENSG00000185247; HLA -A*25:01,HLA-A*26:01,HLA-A*29:02,HLA-A*30:02,HLA-C*07:04
QVPGTDPACY

SEQ ID NO: 5361 - protein, 8 aa, Homo sapiens
  Table 1.2; MAGEA11; ENSG00000185247; HLA -C*01:02
RAPYGPQL

SEQ ID NO: 5362 - protein, 10 aa, Homo sapiens
  Table 1.2; MAGEA11; ENSG00000185247; HLA -A*24:02,HLA-B*57:01,HLA-B*58:01
RAPYGPQLQW

SEQ ID NO: 5363 - protein, 9 aa, Homo sapiens
  Table 1.2; MAGEA11; ENSG00000185247; HLA -B*37:01
RDPTSYPSL

SEQ ID NO: 5364 - protein, 9 aa, Homo sapiens
  Table 1.2; MAGEA11; ENSG00000185247; HLA -A*30:01,HLA-B*40:01
REASVCMQL

SEQ ID NO: 5365 - protein, 9 aa, Homo sapiens
  Table 1.2; MAGEA11; ENSG00000185247; HLA -B*37:01,HLA-B*38:01,HLA-B*40:01
REDSGDFGL

SEQ ID NO: 5366 - protein, 11 aa, Homo sapiens
  Table 1.2; MAGEA11; ENSG00000185247; HLA -B*49:01
REDSGDFGLQV

SEQ ID NO: 5367 - protein, 10 aa, Homo sapiens
  Table 1.2; MAGEA11; ENSG00000185247; HLA -B*57:01,HLA-B*58:01
RITGGEQVLW

SEQ ID NO: 5368 - protein, 9 aa, Homo sapiens
  Table 1.2; MAGEA11; ENSG00000185247; HLA -B*07:02,HLA-B*51:01,HLA-B*56:01,HLA-C*07:02
RPADLTRVI

SEQ ID NO: 5369 - protein, 10 aa, Homo sapiens
  Table 1.2; MAGEA11; ENSG00000185247; HLA -B*07:02
RPADLTRVIM

SEQ ID NO: 5370 - protein, 11 aa, Homo sapiens
  Table 1.2; MAGEA11; ENSG00000185247; HLA -A*30:02,HLA-A*32:01,HLA-B*15:01,HLA-B*15:03
RQVPGTDPACY

SEQ ID NO: 5371 - protein, 9 aa, Homo sapiens
  Table 1.2; MAGEA11; ENSG00000185247; HLA -A*03:01,HLA-A*03:02,HLA-A*11:01,HLA-A*31:01,HLA-A*33:01, HLA-A*33:03,HLA-A*68:01,HLA-B*57:01
RVIMPLEQR

SEQ ID NO: 5372 - protein, 8 aa, Homo sapiens
  Table 1.2; MAGEA11; ENSG00000185247; HLA -A*03:01
RVKGLITK

SEQ ID NO: 5373 - protein, 9 aa, Homo sapiens
  Table 1.2; MAGEA11; ENSG00000185247; HLA -A*02:03
RVKGLITKA

SEQ ID NO: 5374 - protein, 8 aa, Homo sapiens
  Table 1.2; MAGEA11; ENSG00000185247; HLA -C*05:01
SGDFGLQV

SEQ ID NO: 5375 - protein, 10 aa, Homo sapiens
  Table 1.2; MAGEA11; ENSG00000185247; HLA -B*38:01
SHSYVLVTSL

SEQ ID NO: 5376 - protein, 9 aa, Homo sapiens
  Table 1.2; MAGEA11; ENSG00000185247; HLA -A*03:02,HLA-A*11:01,HLA-A*31:01,HLA-A*33:01,HLA-A*33:03, HLA-A*68:01,HLA-C*07:06
SIMGVYAGR

SEQ ID NO: 5377 - protein, 8 aa, Homo sapiens
  Table 1.2; MAGEA11; ENSG00000185247; HLA -B*15:03
SKMKVLEY

SEQ ID NO: 5378 - protein, 11 aa, Homo sapiens
  Table 1.2; MAGEA11; ENSG00000185247; HLA -A*02:07
SMPKSGLLIIV

SEQ ID NO: 5379 - protein, 10 aa, Homo sapiens
  Table 1.2; MAGEA11; ENSG00000185247; HLA -B*35:01,HLA-B*35:03,HLA-B*55:01
SPDLIDPESF

SEQ ID NO: 5380 - protein, 11 aa, Homo sapiens
  Table 1.2; MAGEA11; ENSG00000185247; HLA -B*56:01
SPQEESFSPTA

SEQ ID NO: 5381 - protein, 8 aa, Homo sapiens
  Table 1.2; MAGEA11; ENSG00000185247; HLA -B*56:01
SPTAMDAI

SEQ ID NO: 5382 - protein, 9 aa, Homo sapiens
  Table 1.2; MAGEA11; ENSG00000185247; HLA -B*07:02,HLA-B*35:01,HLA-B*35:03,HLA-B*55:01
SPTAMDAIF

SEQ ID NO: 5383 - protein, 9 aa, Homo sapiens
  Table 1.2; MAGEA11; ENSG00000185247; HLA -B*13:02,HLA-B*38:01
SQDILHDKI

SEQ ID NO: 5384 - protein, 9 aa, Homo sapiens
  Table 1.2; MAGEA11; ENSG00000185247; HLA -A*02:01,HLA-A*02:07,HLA-B*13:02,HLA-B*38:01,HLA-B*39:01, HLA-C*04:01,HLA-C*05:01
SQDLPRVQV

SEQ ID NO: 5385 - protein, 10 aa, Homo sapiens
  Table 1.2; MAGEA11; ENSG00000185247; HLA -B*15:01,HLA-B*15:03,HLA-B*37:01,HLA-B*38:01,HLA-B*44:02
SQDLPRVQVF

SEQ ID NO: 5386 - protein, 11 aa, Homo sapiens
  Table 1.2; MAGEA11; ENSG00000185247; HLA -A*68:02
STLNVGTLEEL

SEQ ID NO: 5387 - protein, 9 aa, Homo sapiens
  Table 1.2; MAGEA11; ENSG00000185247; HLA -A*25:01,HLA-A*26:01,HLA-A*29:02,HLA-A*30:02,HLA-A*32:01, HLA-B*15:01,HLA-B*35:01,HLA-B*46:01,HLA-B*58:01
SVIKNYEDY

SEQ ID NO: 5388 - protein, 8 aa, Homo sapiens
  Table 1.2; MAGEA11; ENSG00000185247; HLA -A*23:01,HLA-A*24:02,HLA-B*15:03,HLA-C*14:02
SYVLVTSL

SEQ ID NO: 5389 - protein, 10 aa, Homo sapiens
  Table 1.2; MAGEA11; ENSG00000185247; HLA -A*23:01,HLA-A*24:02
SYVLVTSLNL

SEQ ID NO: 5390 - protein, 10 aa, Homo sapiens
  Table 1.2; MAGEA11; ENSG00000185247; HLA -A*23:01,HLA-A*25:01,HLA-A*26:01,HLA-A*30:01,HLA-A*68:01, HLA-A*68:02,HLA-B*27:02,HLA-B*35:01,HLA-B*35:03,HLA-B*38:01, HLA-B*39:01,HLA-B*40:01,HLA-B*46:01,HLA-B*58:01,HLA-C*02:02,
  HLA-C*03:03,HLA-C*03:04,HLA-C*16:04
TAMDAIFGSL

SEQ ID NO: 5391 - protein, 10 aa, Homo sapiens
  Table 1.2; MAGEA11; ENSG00000185247; HLA -A*30:01,HLA-B*40:01,HLA-B*40:02
TERAPYGPQL

SEQ ID NO: 5392 - protein, 9 aa, Homo sapiens
  Table 1.2; MAGEA11; ENSG00000185247; HLA -A*29:02,HLA-A*30:02,HLA-A*32:01,HLA-B*15:01,HLA-B*15:03, HLA-C*16:04
TQNWVQEKY

SEQ ID NO: 5393 - protein, 9 aa, Homo sapiens
  Table 1.2; MAGEA11; ENSG00000185247; HLA -C*06:02
TRVIMPLEQ

SEQ ID NO: 5394 - protein, 9 aa, Homo sapiens
  Table 1.2; MAGEA11; ENSG00000185247; HLA -A*32:01,HLA-B*08:01,HLA-B*46:01,HLA-C*07:01,HLA-C*12:03, HLA-C*16:01,HLA-C*16:02
TSKMKVLEY

SEQ ID NO: 5395 - protein, 9 aa, Homo sapiens
  Table 1.2; MAGEA11; ENSG00000185247; HLA -A*31:01,HLA-A*33:03
TVRPADLTR

SEQ ID NO: 5396 - protein, 8 aa, Homo sapiens
  Table 1.2; MAGEA11; ENSG00000185247; HLA -A*30:02,HLA-B*37:01,HLA-C*01:02,HLA-C*07:01
VDPTSHSY

SEQ ID NO: 5397 - protein, 9 aa, Homo sapiens
  Table 1.2; MAGEA11; ENSG00000185247; HLA -A*23:01,HLA-A*24:02
VIKNYEDYF

SEQ ID NO: 5398 - protein, 8 aa, Homo sapiens
  Table 1.2; MAGEA11; ENSG00000185247; HLA -A*31:01
VIMPLEQR

SEQ ID NO: 5399 - protein, 11 aa, Homo sapiens
  Table 1.2; MAGEA11; ENSG00000185247; HLA -B*15:03
VKEVDPTSHSY

SEQ ID NO: 5400 - protein, 8 aa, Homo sapiens
  Table 1.2; MAGEA11; ENSG00000185247; HLA -A*30:02,HLA-B*15:01,HLA-B*15:03,HLA-B*39:01
VLSIMGVY

SEQ ID NO: 5401 - protein, 8 aa, Homo sapiens
  Table 1.2; MAGEA11; ENSG00000185247; HLA -A*23:01
VLVTSLNL

SEQ ID NO: 5402 - protein, 10 aa, Homo sapiens
  Table 1.2; MAGEA11; ENSG00000185247; HLA -A*01:01,HLA-A*29:02,HLA-A*30:02,HLA-B*15:01,HLA-B*15:03, HLA-B*46:01
VLVTSLNLSY

SEQ ID NO: 5403 - protein, 9 aa, Homo sapiens
  Table 1.2; MAGEA11; ENSG00000185247; HLA -A*02:01,HLA-A*02:03,HLA-A*02:04,HLA-A*02:07,HLA-A*23:01, HLA-B*13:02,HLA-B*55:01
VLWGPITQI

SEQ ID NO: 5404 - protein, 8 aa, Homo sapiens
  Table 1.2; MAGEA11; ENSG00000185247; HLA -B*51:01
VMWEVLSI

SEQ ID NO: 5405 - protein, 11 aa, Homo sapiens
  Table 1.2; MAGEA11; ENSG00000185247; HLA -A*02:01,HLA-A*02:07
VMWEVLSIMGV

SEQ ID NO: 5406 - protein, 8 aa, Homo sapiens
  Table 1.2; MAGEA11; ENSG00000185247; HLA -B*55:01
VPGTDPAC

SEQ ID NO: 5407 - protein, 9 aa, Homo sapiens
  Table 1.2; MAGEA11; ENSG00000185247; HLA -B*35:01,HLA-B*55:01
VPGTDPACY

SEQ ID NO: 5408 - protein, 8 aa, Homo sapiens
  Table 1.2; MAGEA11; ENSG00000185247; HLA -B*15:01,HLA-B*15:03
VQEKYLVY

SEQ ID NO: 5409 - protein, 9 aa, Homo sapiens
  Table 1.2; MAGEA11; ENSG00000185247; HLA -A*31:01
VQEKYLVYR

SEQ ID NO: 5410 - protein, 8 aa, Homo sapiens
  Table 1.2; MAGEA11; ENSG00000185247; HLA -A*01:01
VTSLNLSY

SEQ ID NO: 5411 - protein, 9 aa, Homo sapiens
  Table 1.2; MAGEA11; ENSG00000185247; HLA -A*23:01,HLA-A*24:02
VYAGREHFL

SEQ ID NO: 5412 - protein, 10 aa, Homo sapiens
  Table 1.2; MAGEA11; ENSG00000185247; HLA -A*24:02
VYAGREHFLF

SEQ ID NO: 5413 - protein, 9 aa, Homo sapiens
  Table 1.2; MAGEA11; ENSG00000185247; HLA -B*49:01
WEVLSIMGV

SEQ ID NO: 5414 - protein, 9 aa, Homo sapiens
  Table 1.2; MAGEA11; ENSG00000185247; HLA -A*03:01,HLA-A*25:01,HLA-A*26:01,HLA-A*29:02,HLA-A*30:02, HLA-B*15:01,HLA-B*35:01
WVQEKYLVY

SEQ ID NO: 5415 - protein, 10 aa, Homo sapiens
  Table 1.2; MAGEA11; ENSG00000185247; HLA -A*31:01,HLA-A*33:01
WVQEKYLVYR

SEQ ID NO: 5416 - protein, 8 aa, Homo sapiens
  Table 1.2; MAGEA11; ENSG00000185247; HLA -B*49:01
YEDYFPEI

SEQ ID NO: 5417 - protein, 9 aa, Homo sapiens
  Table 1.2; MAGEA11; ENSG00000185247; HLA -B*18:01
YEDYFPEIF

SEQ ID NO: 5418 - protein, 9 aa, Homo sapiens
  Table 1.2; MAGEA11; ENSG00000185247; HLA -A*02:04
YEFLWGPRA

SEQ ID NO: 5419 - protein, 9 aa, Homo sapiens
  Table 1.2; MAGEA11; ENSG00000185247; HLA -A*02:07,HLA-A*29:02,HLA-B*54:01
YFPEIFREA

SEQ ID NO: 5420 - protein, 9 aa, Homo sapiens
  Table 1.2; MAGEA11; ENSG00000185247; HLA -B*27:05,HLA-B*35:01,HLA-B*35:03,HLA-B*38:01,HLA-B*39:01, HLA-B*55:01,HLA-C*03:03
YPSLYEDAL

SEQ ID NO: 5421 - protein, 9 aa, Homo sapiens
  Table 1.2; MAGEA11; ENSG00000185247; HLA -B*27:05
YRVKGLITK

SEQ ID NO: 5422 - protein, 9 aa, Homo sapiens
  Table 1.2; MAGEA11; ENSG00000185247; HLA -A*02:01,HLA-A*02:04,HLA-A*02:07,HLA-A*23:01,HLA-A*24:02, HLA-B*13:02,HLA-C*03:04
YVLVTSLNL

SEQ ID NO: 5423 - protein, 11 aa, Homo sapiens
  Table 1.2; MAGEA11; ENSG00000185247; HLA -A*01:01,HLA-A*29:02,HLA-A*30:02
YVLVTSLNLSY

SEQ ID NO: 5424 - protein, 9 aa, Homo sapiens
  Table 1.2; MAGEA3; ENSG00000221867; HLA -C*16:01
AALSRKVAE

SEQ ID NO: 5425 - protein, 8 aa, Homo sapiens
  Table 1.2; MAGEA3; ENSG00000221867; HLA -C*03:03,HLA-C*03:04,HLA-C*05:01
AASSSSTL

SEQ ID NO: 5426 - protein, 9 aa, Homo sapiens
  Table 1.2; MAGEA3; ENSG00000221867; HLA -B*13:02
AASSSSTLV

SEQ ID NO: 5427 - protein, 8 aa, Homo sapiens
  Table 1.2; MAGEA3; ENSG00000221867; HLA -B*37:01,HLA-B*44:02,HLA-B*44:03
AELVHFLL

SEQ ID NO: 5428 - protein, 9 aa, Homo sapiens
  Table 1.2; MAGEA3; ENSG00000221867; HLA -A*30:01,HLA-B*37:01,HLA-B*44:02,HLA-B*44:03,HLA-B*49:01
AELVHFLLL

SEQ ID NO: 5429 - protein, 11 aa, Homo sapiens
  Table 1.2; MAGEA3; ENSG00000221867; HLA -B*44:02,HLA-B*44:03
AELVHFLLLKY

SEQ ID NO: 5430 - protein, 8 aa, Homo sapiens
  Table 1.2; MAGEA3; ENSG00000221867; HLA -A*30:01,HLA-B*13:02,HLA-B*18:01,HLA-B*37:01,HLA-B*40:01, HLA-B*40:02,HLA-B*44:02,HLA-B*44:03,HLA-B*49:01
AEMLGSVV

SEQ ID NO: 5431 - protein, 9 aa, Homo sapiens
  Table 1.2; MAGEA3; ENSG00000221867; HLA -B*40:01,HLA-B*40:02,HLA-B*49:01
AEMLGSVVG

SEQ ID NO: 5432 - protein, 10 aa, Homo sapiens
  Table 1.2; MAGEA3; ENSG00000221867; HLA -B*44:02,HLA-B*49:01
AEMLGSVVGN

SEQ ID NO: 5433 - protein, 11 aa, Homo sapiens
  Table 1.2; MAGEA3; ENSG00000221867; HLA -A*30:01,HLA-A*32:01,HLA-B*27:02,HLA-B*37:01,HLA-B*40:01, HLA-B*44:02,HLA-B*44:03,HLA-B*49:01,HLA-B*57:01,HLA-C*16:04
AEMLGSVVGNW

SEQ ID NO: 5434 - protein, 10 aa, Homo sapiens
  Table 1.2; MAGEA3; ENSG00000221867; HLA -A*30:01,HLA-B*40:02,HLA-B*49:01
AESPDPPQSP

SEQ ID NO: 5435 - protein, 9 aa, Homo sapiens
  Table 1.2; MAGEA3; ENSG00000221867; HLA -A*02:01,HLA-A*02:03,HLA-B*55:01,HLA-B*56:01
ALGLVGAQA

SEQ ID NO: 5436 - protein, 11 aa, Homo sapiens
  Table 1.2; MAGEA3; ENSG00000221867; HLA -B*56:01
ALGLVGAQAPA

SEQ ID NO: 5437 - protein, 9 aa, Homo sapiens
  Table 1.2; MAGEA3; ENSG00000221867; HLA -A*02:01,HLA-A*02:03,HLA-A*02:04,HLA-A*02:07,HLA-B*08:01
ALSRKVAEL

SEQ ID NO: 5438 - protein, 8 aa, Homo sapiens
  Table 1.2; MAGEA3; ENSG00000221867; HLA -A*02:01,HLA-A*02:03,HLA-B*13:02,HLA-B*49:01,HLA-B*55:01
ALVETSYV

SEQ ID NO: 5439 - protein, 9 aa, Homo sapiens
  Table 1.2; MAGEA3; ENSG00000221867; HLA -A*03:01,HLA-A*03:02,HLA-A*11:01,HLA-B*27:02
ALVETSYVK

SEQ ID NO: 5440 - protein, 10 aa, Homo sapiens
  Table 1.2; MAGEA3; ENSG00000221867; HLA -A*02:01,HLA-A*02:03,HLA-A*02:04,HLA-A*02:07
ALVETSYVKV

SEQ ID NO: 5441 - protein, 11 aa, Homo sapiens
  Table 1.2; MAGEA3; ENSG00000221867; HLA -A*02:01,HLA-A*02:03,HLA-A*02:04,HLA-A*02:07
ALVETSYVKVL

SEQ ID NO: 5442 - protein, 9 aa, Homo sapiens
  Table 1.2; MAGEA3; ENSG00000221867; HLA -B*55:01,HLA-B*56:01
APATEEQEA

SEQ ID NO: 5443 - protein, 10 aa, Homo sapiens
  Table 1.2; MAGEA3; ENSG00000221867; HLA -B*55:01,HLA-B*56:01
APATEEQEAA

SEQ ID NO: 5444 - protein, 9 aa, Homo sapiens
  Table 1.2; MAGEA3; ENSG00000221867; HLA -B*15:01
AQAPATEEQ

SEQ ID NO: 5445 - protein, 11 aa, Homo sapiens
  Table 1.2; MAGEA3; ENSG00000221867; HLA -B*13:02,HLA-B*27:05,HLA-B*39:01
AQAPATEEQEA

SEQ ID NO: 5446 - protein, 10 aa, Homo sapiens
  Table 1.2; MAGEA3; ENSG00000221867; HLA -B*27:02,HLA-B*27:05,HLA-B*38:01
AREPVTKAEM

SEQ ID NO: 5447 - protein, 8 aa, Homo sapiens
  Table 1.2; MAGEA3; ENSG00000221867; HLA -B*37:01
ASSLPTTM

SEQ ID NO: 5448 - protein, 10 aa, Homo sapiens
  Table 1.2; MAGEA3; ENSG00000221867; HLA -A*01:01,HLA-A*03:01,HLA-A*11:01,HLA-A*29:02,HLA-A*30:02, HLA-A*32:01,HLA-B*15:01,HLA-B*46:01,HLA-B*58:01,HLA-C*16:02
ASSLPTTMNY

SEQ ID NO: 5449 - protein, 9 aa, Homo sapiens
  Table 1.2; MAGEA3; ENSG00000221867; HLA -A*01:01,HLA-A*03:01,HLA-A*11:01,HLA-A*23:01,HLA-A*24:02, HLA-A*29:02,HLA-A*30:02,HLA-A*32:01,HLA-B*15:01,HLA-B*15:03, HLA-B*27:02,HLA-B*44:02,HLA-B*44:03,HLA-B*57:01,HLA-B*58:01,
  HLA-C*02:02,HLA-C*12:03,HLA-C*16:01,HLA-C*16:04
ASSSLQLVF

SEQ ID NO: 5450 - protein, 8 aa, Homo sapiens
  Table 1.2; MAGEA3; ENSG00000221867; HLA -A*01:01
ATCLGLSY

SEQ ID NO: 5451 - protein, 9 aa, Homo sapiens
  Table 1.2; MAGEA3; ENSG00000221867; HLA -B*38:01,HLA-B*51:01
DGLLGDNQI

SEQ ID NO: 5452 - protein, 10 aa, Homo sapiens
  Table 1.2; MAGEA3; ENSG00000221867; HLA -B*35:03
DGLLGDNQIM

SEQ ID NO: 5453 - protein, 8 aa, Homo sapiens
  Table 1.2; MAGEA3; ENSG00000221867; HLA -B*08:01,HLA-B*51:01
DPIGHLYI

SEQ ID NO: 5454 - protein, 9 aa, Homo sapiens
  Table 1.2; MAGEA3; ENSG00000221867; HLA -B*35:01,HLA-B*35:03,HLA-B*51:01
DPIGHLYIF

SEQ ID NO: 5455 - protein, 10 aa, Homo sapiens
  Table 1.2; MAGEA3; ENSG00000221867; HLA -B*54:01
DPIGHLYIFA

SEQ ID NO: 5456 - protein, 8 aa, Homo sapiens
  Table 1.2; MAGEA3; ENSG00000221867; HLA -B*51:01
DPPQSPQG

SEQ ID NO: 5457 - protein, 8 aa, Homo sapiens
  Table 1.2; MAGEA3; ENSG00000221867; HLA -B*27:02
DSILGDPK

SEQ ID NO: 5458 - protein, 9 aa, Homo sapiens
  Table 1.2; MAGEA3; ENSG00000221867; HLA -A*25:01,HLA-A*26:01,HLA-A*33:03,HLA-A*68:01,HLA-B*07:02, HLA-B*35:01,HLA-B*35:03,HLA-B*39:01,HLA-B*51:01,HLA-C*01:02, HLA-C*03:03,HLA-C*03:04,HLA-C*05:01
EAASSSSTL

SEQ ID NO: 5459 - protein, 8 aa, Homo sapiens
  Table 1.2; MAGEA3; ENSG00000221867; HLA -B*54:01
EALGLVGA

SEQ ID NO: 5460 - protein, 9 aa, Homo sapiens
  Table 1.2; MAGEA3; ENSG00000221867; HLA -A*26:01,HLA-A*33:01,HLA-A*33:03,HLA-B*27:05,HLA-C*07:01, HLA-C*12:03
EALGLVGAQ

SEQ ID NO: 5461 - protein, 10 aa, Homo sapiens
  Table 1.2; MAGEA3; ENSG00000221867; HLA -A*26:01,HLA-A*33:03,HLA-A*68:01,HLA-B*54:01
EALGLVGAQA

SEQ ID NO: 5462 - protein, 9 aa, Homo sapiens
  Table 1.2; MAGEA3; ENSG00000221867; HLA -A*25:01,HLA-A*26:01,HLA-A*33:03,HLA-A*68:01
EARGEALGL

SEQ ID NO: 5463 - protein, 9 aa, Homo sapiens
  Table 1.2; MAGEA3; ENSG00000221867; HLA -B*27:02
EDSILGDPK

SEQ ID NO: 5464 - protein, 8 aa, Homo sapiens
  Table 1.2; MAGEA3; ENSG00000221867; HLA -B*18:01
EEEGPSTF

SEQ ID NO: 5465 - protein, 11 aa, Homo sapiens
  Table 1.2; MAGEA3; ENSG00000221867; HLA -B*39:01,HLA-B*40:01
EEEGPSTFPDL

SEQ ID NO: 5466 - protein, 11 aa, Homo sapiens
  Table 1.2; MAGEA3; ENSG00000221867; HLA -B*40:01
EEGLEARGEAL

SEQ ID NO: 5467 - protein, 10 aa, Homo sapiens
  Table 1.2; MAGEA3; ENSG00000221867; HLA -A*30:01,HLA-B*40:01,HLA-B*40:02,HLA-B*44:02,HLA-B*44:03
EEGPSTFPDL

SEQ ID NO: 5468 - protein, 8 aa, Homo sapiens
  Table 1.2; MAGEA3; ENSG00000221867; HLA -B*18:01,HLA-B*49:01,HLA-B*51:01
EELSVLEV

SEQ ID NO: 5469 - protein, 9 aa, Homo sapiens
  Table 1.2; MAGEA3; ENSG00000221867; HLA -A*23:01,HLA-A*30:01,HLA-B*18:01,HLA-B*40:01,HLA-B*44:02, HLA-B*44:03,HLA-C*16:04
EELSVLEVF

SEQ ID NO: 5470 - protein, 8 aa, Homo sapiens
  Table 1.2; MAGEA3; ENSG00000221867; HLA -A*33:01,HLA-A*33:03
EFQAALSR

SEQ ID NO: 5471 - protein, 9 aa, Homo sapiens
  Table 1.2; MAGEA3; ENSG00000221867; HLA -A*33:03
EFQAALSRK

SEQ ID NO: 5472 - protein, 10 aa, Homo sapiens
  Table 1.2; MAGEA3; ENSG00000221867; HLA -A*25:01,HLA-A*26:01,HLA-A*68:01
ELMEVDPIGH

SEQ ID NO: 5473 - protein, 11 aa, Homo sapiens
  Table 1.2; MAGEA3; ENSG00000221867; HLA -A*02:07,HLA-A*25:01,HLA-A*26:01,HLA-A*68:02
ELMEVDPIGHL

SEQ ID NO: 5474 - protein, 10 aa, Homo sapiens
  Table 1.2; MAGEA3; ENSG00000221867; HLA -A*26:01,HLA-A*29:02
ELVHFLLLKY

SEQ ID NO: 5475 - protein, 10 aa, Homo sapiens
  Table 1.2; MAGEA3; ENSG00000221867; HLA -A*25:01,HLA-A*26:01,HLA-A*33:01,HLA-A*33:03,HLA-B*44:02, HLA-B*44:03,HLA-B*57:01
EMLGSVVGNW

SEQ ID NO: 5476 - protein, 8 aa, Homo sapiens
  Table 1.2; MAGEA3; ENSG00000221867; HLA -B*07:02,HLA-B*08:01,HLA-B*35:01,HLA-B*35:03,HLA-B*55:01, HLA-C*07:02
EPVTKAEM

SEQ ID NO: 5477 - protein, 9 aa, Homo sapiens
  Table 1.2; MAGEA3; ENSG00000221867; HLA -A*68:01,HLA-B*07:02,HLA-B*08:01,HLA-B*35:01,HLA-B*35:03, HLA-C*07:02
EPVTKAEML

SEQ ID NO: 5478 - protein, 11 aa, Homo sapiens
  Table 1.2; MAGEA3; ENSG00000221867; HLA -B*38:01,HLA-B*39:01
EQEAASSSSTL

SEQ ID NO: 5479 - protein, 10 aa, Homo sapiens
  Table 1.2; MAGEA3; ENSG00000221867; HLA -A*68:01
ESEFQAALSR

SEQ ID NO: 5480 - protein, 11 aa, Homo sapiens
  Table 1.2; MAGEA3; ENSG00000221867; HLA -A*01:01,HLA-A*68:01
ESEFQAALSRK

SEQ ID NO: 5481 - protein, 9 aa, Homo sapiens
  Table 1.2; MAGEA3; ENSG00000221867; HLA -A*33:01,HLA-A*33:03,HLA-A*68:01,HLA-A*68:02
ETSYVKVLH

SEQ ID NO: 5482 - protein, 8 aa, Homo sapiens
  Table 1.2; MAGEA3; ENSG00000221867; HLA -A*25:01,HLA-A*26:01,HLA-C*04:01,HLA-C*05:01
EVDPIGHL

SEQ ID NO: 5483 - protein, 9 aa, Homo sapiens
  Table 1.2; MAGEA3; ENSG00000221867; HLA -A*01:01,HLA-A*02:07,HLA-A*03:02,HLA-A*11:01,HLA-A*25:01, HLA-A*26:01,HLA-A*29:02,HLA-A*30:02,HLA-A*32:01,HLA-A*33:01, HLA-A*33:03,HLA-A*68:01,HLA-A*68:02,HLA-B*15:01,HLA-B*15:03,
  HLA-B*18:01,HLA-B*27:05,HLA-B*35:01,HLA-B*38:01,HLA-B*39:01, HLA-B*44:02,HLA-B*44:03,HLA-B*55:01,HLA-B*57:01,HLA-B*58:01, HLA-C*02:02,HLA-C*03:03,HLA-C*05:01,HLA-C*07:06,HLA-C*16:02, HLA-C*16:04
EVDPIGHLY

SEQ ID NO: 5484 - protein, 10 aa, Homo sapiens
  Table 1.2; MAGEA3; ENSG00000221867; HLA -A*01:01,HLA-A*02:07,HLA-A*29:02,HLA-A*68:02,HLA-B*38:01
EVDPIGHLYI

SEQ ID NO: 5485 - protein, 11 aa, Homo sapiens
  Table 1.2; MAGEA3; ENSG00000221867; HLA -A*02:07,HLA-A*68:02
EVDPIGHLYIF

SEQ ID NO: 5486 - protein, 10 aa, Homo sapiens
  Table 1.2; MAGEA3; ENSG00000221867; HLA -A*25:01,HLA-A*26:01,HLA-A*32:01,HLA-A*33:01,HLA-A*33:03, HLA-A*68:01,HLA-A*68:02,HLA-B*08:01,HLA-B*35:03,HLA-B*38:01, HLA-B*39:01,HLA-B*51:01
EVFEGREDSI

SEQ ID NO: 5487 - protein, 11 aa, Homo sapiens
  Table 1.2; MAGEA3; ENSG00000221867; HLA -A*25:01,HLA-A*26:01,HLA-A*68:02,HLA-B*27:05,HLA-B*35:03
EVFEGREDSIL

SEQ ID NO: 5488 - protein, 10 aa, Homo sapiens
  Table 1.2; MAGEA3; ENSG00000221867; HLA -A*25:01,HLA-A*26:01
EVTLGEVPAA

SEQ ID NO: 5489 - protein, 9 aa, Homo sapiens
  Table 1.2; MAGEA3; ENSG00000221867; HLA -A*01:01,HLA-A*26:01,HLA-A*29:02,HLA-A*30:02,HLA-B*15:03, HLA-B*35:01,HLA-B*46:01,HLA-C*02:02
FATCLGLSY

SEQ ID NO: 5490 - protein, 9 aa, Homo sapiens
  Table 1.2; MAGEA3; ENSG00000221867; HLA -B*40:01
FEGREDSIL

SEQ ID NO: 5491 - protein, 9 aa, Homo sapiens
  Table 1.2; MAGEA3; ENSG00000221867; HLA -A*02:07,HLA-A*29:02
FFPVIFSKA

SEQ ID NO: 5492 - protein, 8 aa, Homo sapiens
  Table 1.2; MAGEA3; ENSG00000221867; HLA -B*54:01
FGIELMEV

SEQ ID NO: 5493 - protein, 8 aa, Homo sapiens
  Table 1.2; MAGEA3; ENSG00000221867; HLA -A*02:04
FLWGPRAL

SEQ ID NO: 5494 - protein, 9 aa, Homo sapiens
  Table 1.2; MAGEA3; ENSG00000221867; HLA -A*02:01,HLA-A*02:03,HLA-A*02:04,HLA-A*02:07
FLWGPRALV

SEQ ID NO: 5495 - protein, 11 aa, Homo sapiens
  Table 1.2; MAGEA3; ENSG00000221867; HLA -A*02:01,HLA-A*02:04,HLA-A*02:07
FLWGPRALVET

SEQ ID NO: 5496 - protein, 8 aa, Homo sapiens
  Table 1.2; MAGEA3; ENSG00000221867; HLA -B*35:01,HLA-B*35:03,HLA-B*55:01,HLA-C*04:01,HLA-C*05:01
FPDLESEF

SEQ ID NO: 5497 - protein, 10 aa, Homo sapiens
  Table 1.2; MAGEA3; ENSG00000221867; HLA -B*35:03,HLA-B*54:01,HLA-B*55:01
FPDLESEFQA

SEQ ID NO: 5498 - protein, 11 aa, Homo sapiens
  Table 1.2; MAGEA3; ENSG00000221867; HLA -B*35:03,HLA-B*54:01,HLA-B*55:01
FPDLESEFQAA

SEQ ID NO: 5499 - protein, 8 aa, Homo sapiens
  Table 1.2; MAGEA3; ENSG00000221867; HLA -B*51:01,HLA-B*54:01,HLA-B*55:01,HLA-B*56:01
FPVIFSKA

SEQ ID NO: 5500 - protein, 9 aa, Homo sapiens
  Table 1.2; MAGEA3; ENSG00000221867; HLA -B*54:01
FPVIFSKAS

SEQ ID NO: 5501 - protein, 10 aa, Homo sapiens
  Table 1.2; MAGEA3; ENSG00000221867; HLA -B*54:01,HLA-B*56:01
FPVIFSKASS

SEQ ID NO: 5502 - protein, 9 aa, Homo sapiens
  Table 1.2; MAGEA3; ENSG00000221867; HLA -A*02:03,HLA-B*13:02,HLA-C*02:02,HLA-C*06:02
FQAALSRKV

SEQ ID NO: 5503 - protein, 8 aa, Homo sapiens
  Table 1.2; MAGEA3; ENSG00000221867; HLA -B*08:01,HLA-B*46:01,HLA-C*03:03,HLA-C*03:04,HLA-C*12:03, HLA-C*16:01
FSKASSSL

SEQ ID NO: 5504 - protein, 9 aa, Homo sapiens
  Table 1.2; MAGEA3; ENSG00000221867; HLA -A*01:01,HLA-A*02:07,HLA-A*03:01,HLA-A*03:02,HLA-A*11:01, HLA-A*25:01,HLA-A*26:01,HLA-A*29:02,HLA-A*30:02,HLA-A*32:01, HLA-A*33:01,HLA-A*33:03,HLA-A*68:01,HLA-B*15:01,HLA-B*15:03,
  HLA-B*27:02,HLA-B*35:01,HLA-B*39:01,HLA-B*46:01,HLA-B*55:01, HLA-B*58:01,HLA-C*01:02,HLA-C*02:02,HLA-C*03:03,HLA-C*07:01, HLA-C*07:04,HLA-C*07:06,HLA-C*12:03,HLA-C*14:02,HLA-C*16:01, HLA-C*16:02,HLA-C*16:04
FVQENYLEY

SEQ ID NO: 5505 - protein, 10 aa, Homo sapiens
  Table 1.2; MAGEA3; ENSG00000221867; HLA -A*31:01,HLA-A*33:01,HLA-A*33:03,HLA-A*68:01,HLA-A*68:02, HLA-B*27:02
FVQENYLEYR

SEQ ID NO: 5506 - protein, 9 aa, Homo sapiens
  Table 1.2; MAGEA3; ENSG00000221867; HLA -A*30:02,HLA-A*32:01,HLA-B*13:02,HLA-B*15:01,HLA-B*15:03, HLA-B*35:01,HLA-B*35:03,HLA-B*39:01,HLA-C*02:02,HLA-C*12:03, HLA-C*16:02,HLA-C*16:04
GASSLPTTM

SEQ ID NO: 5507 - protein, 11 aa, Homo sapiens
  Table 1.2; MAGEA3; ENSG00000221867; HLA -A*26:01,HLA-A*29:02,HLA-A*30:02
GASSLPTTMNY

SEQ ID NO: 5508 - protein, 8 aa, Homo sapiens
  Table 1.2; MAGEA3; ENSG00000221867; HLA -A*03:02,HLA-A*11:01,HLA-B*27:02
GDNQIMPK

SEQ ID NO: 5509 - protein, 9 aa, Homo sapiens
  Table 1.2; MAGEA3; ENSG00000221867; HLA -B*40:02
GDNQIMPKA

SEQ ID NO: 5510 - protein, 9 aa, Homo sapiens
  Table 1.2; MAGEA3; ENSG00000221867; HLA -A*30:01,HLA-B*13:02,HLA-B*37:01,HLA-B*40:01,HLA-B*40:02, HLA-B*49:01,HLA-B*56:01
GEALGLVGA

SEQ ID NO: 5511 - protein, 11 aa, Homo sapiens
  Table 1.2; MAGEA3; ENSG00000221867; HLA -A*30:01,HLA-B*27:05,HLA-B*40:01,HLA-B*40:02,HLA-B*49:01
GEALGLVGAQA

SEQ ID NO: 5512 - protein, 9 aa, Homo sapiens
  Table 1.2; MAGEA3; ENSG00000221867; HLA -A*30:01,HLA-B*40:01,HLA-B*40:02
GEVPAAESP

SEQ ID NO: 5513 - protein, 9 aa, Homo sapiens
  Table 1.2; MAGEA3; ENSG00000221867; HLA -B*15:01
GLLGDNQIM

SEQ ID NO: 5514 - protein, 11 aa, Homo sapiens
  Table 1.2; MAGEA3; ENSG00000221867; HLA -A*02:01,HLA-A*02:04,HLA-A*03:01,HLA-A*03:02,HLA-A*11:01, HLA-A*31:01,HLA-B*27:02,HLA-B*27:05
GLLGDNQIMPK

SEQ ID NO: 5515 - protein, 9 aa, Homo sapiens
  Table 1.2; MAGEA3; ENSG00000221867; HLA -A*02:01,HLA-A*02:03,HLA-A*02:04,HLA-B*13:02
GLLIIVLAI

SEQ ID NO: 5516 - protein, 9 aa, Homo sapiens
  Table 1.2; MAGEA3; ENSG00000221867; HLA -B*07:02
GPHISYPPL

SEQ ID NO: 5517 - protein, 10 aa, Homo sapiens
  Table 1.2; MAGEA3; ENSG00000221867; HLA -A*30:02,HLA-B*07:02,HLA-B*15:01,HLA-B*15:03,HLA-B*35:01, HLA-B*55:01
GPRALVETSY

SEQ ID NO: 5518 - protein, 8 aa, Homo sapiens
  Table 1.2; MAGEA3; ENSG00000221867; HLA -B*07:02
GPSTFPDL

SEQ ID NO: 5519 - protein, 11 aa, Homo sapiens
  Table 1.2; MAGEA3; ENSG00000221867; HLA -B*27:02,HLA-B*27:05
GREDSILGDPK

SEQ ID NO: 5520 - protein, 9 aa, Homo sapiens
  Table 1.2; MAGEA3; ENSG00000221867; HLA -A*01:01,HLA-B*27:05,HLA-B*57:01,HLA-B*58:01,HLA-C*05:01
GSDPACYEF

SEQ ID NO: 5521 - protein, 9 aa, Homo sapiens
  Table 1.2; MAGEA3; ENSG00000221867; HLA -A*01:01,HLA-A*29:02,HLA-A*30:02,HLA-B*15:01,HLA-B*15:03, HLA-B*57:01,HLA-B*58:01
GSVVGNWQY

SEQ ID NO: 5522 - protein, 11 aa, Homo sapiens
  Table 1.2; MAGEA3; ENSG00000221867; HLA -A*31:01,HLA-A*33:01,HLA-A*33:03
HCKPEEGLEAR

SEQ ID NO: 5523 - protein, 10 aa, Homo sapiens
  Table 1.2; MAGEA3; ENSG00000221867; HLA -A*29:02,HLA-B*35:01
HFVQENYLEY

SEQ ID NO: 5524 - protein, 10 aa, Homo sapiens
  Table 1.2; MAGEA3; ENSG00000221867; HLA -B*57:01
HISYPPLHEW

SEQ ID NO: 5525 - protein, 9 aa, Homo sapiens
  Table 1.2; MAGEA3; ENSG00000221867; HLA -B*40:01,HLA-B*40:02,HLA-B*49:01
IELMEVDPI

SEQ ID NO: 5526 - protein, 10 aa, Homo sapiens
  Table 1.2; MAGEA3; ENSG00000221867; HLA -A*29:02
IFATCLGLSY

SEQ ID NO: 5527 - protein, 9 aa, Homo sapiens
  Table 1.2; MAGEA3; ENSG00000221867; HLA -A*23:01,HLA-C*01:02,HLA-C*14:02
IFSKASSSL

SEQ ID NO: 5528 - protein, 9 aa, Homo sapiens
  Table 1.2; MAGEA3; ENSG00000221867; HLA -A*31:01,HLA-A*33:03,HLA-A*68:01
IIVLAIIAR

SEQ ID NO: 5529 - protein, 8 aa, Homo sapiens
  Table 1.2; MAGEA3; ENSG00000221867; HLA -A*02:03
ILGDPKKL

SEQ ID NO: 5530 - protein, 9 aa, Homo sapiens
  Table 1.2; MAGEA3; ENSG00000221867; HLA -A*02:01,HLA-A*02:03,HLA-A*02:04,HLA-A*02:07,HLA-A*03:01
ILGDPKKLL

SEQ ID NO: 5531 - protein, 9 aa, Homo sapiens
  Table 1.2; MAGEA3; ENSG00000221867; HLA -A*24:02
IMPKAGLLI

SEQ ID NO: 5532 - protein, 10 aa, Homo sapiens
  Table 1.2; MAGEA3; ENSG00000221867; HLA -A*02:07,HLA-A*24:02
IMPKAGLLII

SEQ ID NO: 5533 - protein, 11 aa, Homo sapiens
  Table 1.2; MAGEA3; ENSG00000221867; HLA -A*02:07
IMPKAGLLIIV

SEQ ID NO: 5534 - protein, 9 aa, Homo sapiens
  Table 1.2; MAGEA3; ENSG00000221867; HLA -A*01:01,HLA-A*29:02,HLA-A*30:02,HLA-A*32:01,HLA-B*15:01, HLA-B*15:03,HLA-B*35:01,HLA-B*46:01,HLA-B*57:01,HLA-B*58:01, HLA-C*02:02,HLA-C*07:04,HLA-C*12:03,HLA-C*16:01,HLA-C*16:02
ISGGPHISY

SEQ ID NO: 5535 - protein, 9 aa, Homo sapiens
  Table 1.2; MAGEA3; ENSG00000221867; HLA -A*24:02,HLA-A*25:01,HLA-A*30:02,HLA-A*31:01,HLA-A*32:01, HLA-A*33:01,HLA-B*57:01,HLA-B*58:01,HLA-C*02:02
ISYPPLHEW

SEQ ID NO: 5536 - protein, 8 aa, Homo sapiens
  Table 1.2; MAGEA3; ENSG00000221867; HLA -A*11:01,HLA-A*31:01,HLA-A*33:03
IVLAIIAR

SEQ ID NO: 5537 - protein, 8 aa, Homo sapiens
  Table 1.2; MAGEA3; ENSG00000221867; HLA -B*37:01
KASSSLQL

SEQ ID NO: 5538 - protein, 9 aa, Homo sapiens
  Table 1.2; MAGEA3; ENSG00000221867; HLA -B*13:02,HLA-C*12:03,HLA-C*16:02
KASSSLQLV

SEQ ID NO: 5539 - protein, 10 aa, Homo sapiens
  Table 1.2; MAGEA3; ENSG00000221867; HLA -A*23:01,HLA-A*24:02,HLA-A*29:02,HLA-A*30:02,HLA-A*32:01, HLA-B*27:02,HLA-B*57:01,HLA-B*58:01,HLA-C*02:02,HLA-C*16:04
KASSSLQLVF

SEQ ID NO: 5540 - protein, 10 aa, Homo sapiens
  Table 1.2; MAGEA3; ENSG00000221867; HLA -A*03:01,HLA-A*29:02,HLA-A*30:02,HLA-A*32:01,HLA-B*15:01, HLA-B*46:01
KISGGPHISY

SEQ ID NO: 5541 - protein, 9 aa, Homo sapiens
  Table 1.2; MAGEA3; ENSG00000221867; HLA -A*02:04,HLA-A*02:07
KIWEELSVL

SEQ ID NO: 5542 - protein, 11 aa, Homo sapiens
  Table 1.2; MAGEA3; ENSG00000221867; HLA -A*02:01,HLA-A*02:03,HLA-A*02:04,HLA-A*02:07
KIWEELSVLEV

SEQ ID NO: 5543 - protein, 8 aa, Homo sapiens
  Table 1.2; MAGEA3; ENSG00000221867; HLA -A*32:01,HLA-B*37:01,HLA-B*57:01,HLA-B*58:01
KVAELVHF

SEQ ID NO: 5544 - protein, 9 aa, Homo sapiens
  Table 1.2; MAGEA3; ENSG00000221867; HLA -A*02:01,HLA-A*02:03,HLA-A*02:04,HLA-A*02:07,HLA-A*03:01, HLA-A*03:02,HLA-A*24:02,HLA-A*25:01,HLA-A*26:01,HLA-A*31:01, HLA-A*32:01,HLA-A*68:02,HLA-B*13:02,HLA-B*27:05,HLA-B*57:01,
  HLA-B*58:01
KVAELVHFL

SEQ ID NO: 5545 - protein, 10 aa, Homo sapiens
  Table 1.2; MAGEA3; ENSG00000221867; HLA -A*02:01,HLA-A*02:04,HLA-A*02:07,HLA-A*31:01,HLA-A*68:02
KVAELVHFLL

SEQ ID NO: 5546 - protein, 11 aa, Homo sapiens
  Table 1.2; MAGEA3; ENSG00000221867; HLA -A*02:04,HLA-A*02:07,HLA-A*03:01
KVAELVHFLLL

SEQ ID NO: 5547 - protein, 8 aa, Homo sapiens
  Table 1.2; MAGEA3; ENSG00000221867; HLA -A*30:01,HLA-B*18:01,HLA-B*37:01,HLA-B*40:01,HLA-B*40:02
LEARGEAL

SEQ ID NO: 5548 - protein, 10 aa, Homo sapiens
  Table 1.2; MAGEA3; ENSG00000221867; HLA -A*30:01,HLA-B*40:01,HLA-B*40:02
LEARGEALGL

SEQ ID NO: 5549 - protein, 8 aa, Homo sapiens
  Table 1.2; MAGEA3; ENSG00000221867; HLA -B*18:01,HLA-B*49:01
LESEFQAA

SEQ ID NO: 5550 - protein, 9 aa, Homo sapiens
  Table 1.2; MAGEA3; ENSG00000221867; HLA -A*30:01,HLA-A*68:02,HLA-B*15:03,HLA-B*18:01,HLA-B*27:02, HLA-B*27:05,HLA-B*37:01,HLA-B*38:01,HLA-B*39:01,HLA-B*40:01, HLA-B*40:02,HLA-B*44:02,HLA-B*44:03,HLA-B*49:01
LESEFQAAL

SEQ ID NO: 5551 - protein, 9 aa, Homo sapiens
  Table 1.2; MAGEA3; ENSG00000221867; HLA -A*01:01,HLA-A*03:01,HLA-A*03:02,HLA-A*11:01,HLA-B*27:02
LGDNQIMPK

SEQ ID NO: 5552 - protein, 9 aa, Homo sapiens
  Table 1.2; MAGEA3; ENSG00000221867; HLA -A*32:01
LGLVGAQAP

SEQ ID NO: 5553 - protein, 10 aa, Homo sapiens
  Table 1.2; MAGEA3; ENSG00000221867; HLA -A*01:01
LGSVVGNWQY

SEQ ID NO: 5554 - protein, 10 aa, Homo sapiens
  Table 1.2; MAGEA3; ENSG00000221867; HLA -B*27:02
LIIVLAIIAR

SEQ ID NO: 5555 - protein, 10 aa, Homo sapiens
  Table 1.2; MAGEA3; ENSG00000221867; HLA -A*03:01,HLA-A*03:02,HLA-A*11:01,HLA-B*27:02
LLGDNQIMPK

SEQ ID NO: 5556 - protein, 11 aa, Homo sapiens
  Table 1.2; MAGEA3; ENSG00000221867; HLA -A*02:01
LLGDNQIMPKA

SEQ ID NO: 5557 - protein, 9 aa, Homo sapiens
  Table 1.2; MAGEA3; ENSG00000221867; HLA -A*02:04
LLIIVLAII

SEQ ID NO: 5558 - protein, 11 aa, Homo sapiens
  Table 1.2; MAGEA3; ENSG00000221867; HLA -A*01:01,HLA-A*29:02,HLA-A*30:02
LMEVDPIGHLY

SEQ ID NO: 5559 - protein, 9 aa, Homo sapiens
  Table 1.2; MAGEA3; ENSG00000221867; HLA -B*35:01,HLA-B*35:03
LPTTMNYPL

SEQ ID NO: 5560 - protein, 10 aa, Homo sapiens
  Table 1.2; MAGEA3; ENSG00000221867; HLA -A*24:02,HLA-B*27:02
LPTTMNYPLW

SEQ ID NO: 5561 - protein, 9 aa, Homo sapiens
  Table 1.2; MAGEA3; ENSG00000221867; HLA -A*02:01,HLA-A*02:04,HLA-B*13:02,HLA-B*39:01
LQLVFGIEL

SEQ ID NO: 5562 - protein, 8 aa, Homo sapiens
  Table 1.2; MAGEA3; ENSG00000221867; HLA -B*08:01
LSRKVAEL

SEQ ID NO: 5563 - protein, 10 aa, Homo sapiens
  Table 1.2; MAGEA3; ENSG00000221867; HLA -B*27:02,HLA-B*57:01
LSVLEVFEGR

SEQ ID NO: 5564 - protein, 10 aa, Homo sapiens
  Table 1.2; MAGEA3; ENSG00000221867; HLA -A*01:01,HLA-A*29:02,HLA-A*30:02,HLA-A*32:01,HLA-B*57:01
LTQHFVQENY

SEQ ID NO: 5565 - protein, 8 aa, Homo sapiens
  Table 1.2; MAGEA3; ENSG00000221867; HLA -A*03:02,HLA-B*27:02
LVETSYVK

SEQ ID NO: 5566 - protein, 9 aa, Homo sapiens
  Table 1.2; MAGEA3; ENSG00000221867; HLA -A*02:07,HLA-C*05:01
LVETSYVKV

SEQ ID NO: 5567 - protein, 9 aa, Homo sapiens
  Table 1.2; MAGEA3; ENSG00000221867; HLA -A*01:01
LVEVTLGEV

SEQ ID NO: 5568 - protein, 10 aa, Homo sapiens
  Table 1.2; MAGEA3; ENSG00000221867; HLA -A*02:01,HLA-A*02:03,HLA-A*02:04,HLA-A*02:07,HLA-A*68:02
LVFGIELMEV

SEQ ID NO: 5569 - protein, 9 aa, Homo sapiens
  Table 1.2; MAGEA3; ENSG00000221867; HLA -A*01:01,HLA-A*29:02,HLA-B*57:01
LVHFLLLKY

SEQ ID NO: 5570 - protein, 8 aa, Homo sapiens
  Table 1.2; MAGEA3; ENSG00000221867; HLA -A*23:01,HLA-C*14:02
LYIFATCL

SEQ ID NO: 5571 - protein, 8 aa, Homo sapiens
  Table 1.2; MAGEA3; ENSG00000221867; HLA -B*18:01
MEVDPIGH

SEQ ID NO: 5572 - protein, 9 aa, Homo sapiens
  Table 1.2; MAGEA3; ENSG00000221867; HLA -A*23:01,HLA-A*25:01,HLA-A*30:01,HLA-A*68:02,HLA-B*18:01, HLA-B*27:02,HLA-B*27:05,HLA-B*37:01,HLA-B*38:01,HLA-B*39:01, HLA-B*40:01,HLA-B*40:02,HLA-B*44:02,HLA-B*44:03,HLA-B*49:01,
  HLA-C*16:04
MEVDPIGHL

SEQ ID NO: 5573 - protein, 10 aa, Homo sapiens
  Table 1.2; MAGEA3; ENSG00000221867; HLA -A*01:01,HLA-A*23:01,HLA-A*25:01,HLA-A*26:01,HLA-A*29:02, HLA-A*30:01,HLA-A*30:02,HLA-A*32:01,HLA-A*33:03,HLA-A*68:02, HLA-B*15:01,HLA-B*15:03,HLA-B*18:01,HLA-B*27:02,HLA-B*27:05,
  HLA-B*35:01,HLA-B*37:01,HLA-B*40:01,HLA-B*44:02,HLA-B*44:03, HLA-B*49:01,HLA-B*57:01,HLA-C*02:02,HLA-C*07:04,HLA-C*16:04
MEVDPIGHLY

SEQ ID NO: 5574 - protein, 11 aa, Homo sapiens
  Table 1.2; MAGEA3; ENSG00000221867; HLA -A*30:01,HLA-A*68:02,HLA-B*44:02,HLA-B*44:03,HLA-B*49:01
MEVDPIGHLYI

SEQ ID NO: 5575 - protein, 9 aa, Homo sapiens
  Table 1.2; MAGEA3; ENSG00000221867; HLA -A*23:01,HLA-A*24:02,HLA-A*25:01,HLA-A*32:01,HLA-A*33:03, HLA-B*44:02,HLA-B*44:03,HLA-B*57:01,HLA-B*58:01,HLA-C*07:04
MLGSVVGNW

SEQ ID NO: 5576 - protein, 11 aa, Homo sapiens
  Table 1.2; MAGEA3; ENSG00000221867; HLA -A*01:01,HLA-A*29:02
MLGSVVGNWQY

SEQ ID NO: 5577 - protein, 10 aa, Homo sapiens
  Table 1.2; MAGEA3; ENSG00000221867; HLA -A*29:02
MNYPLWSQSY

SEQ ID NO: 5578 - protein, 8 aa, Homo sapiens
  Table 1.2; MAGEA3; ENSG00000221867; HLA -B*51:01
MPKAGLLI

SEQ ID NO: 5579 - protein, 9 aa, Homo sapiens
  Table 1.2; MAGEA3; ENSG00000221867; HLA -B*51:01,HLA-B*54:01,HLA-B*56:01
MPKAGLLII

SEQ ID NO: 5580 - protein, 10 aa, Homo sapiens
  Table 1.2; MAGEA3; ENSG00000221867; HLA -B*54:01,HLA-B*56:01
MPKAGLLIIV

SEQ ID NO: 5581 - protein, 11 aa, Homo sapiens
  Table 1.2; MAGEA3; ENSG00000221867; HLA -B*54:01
MPKAGLLIIVL

SEQ ID NO: 5582 - protein, 9 aa, Homo sapiens
  Table 1.2; MAGEA3; ENSG00000221867; HLA -C*04:01
MVKISGGPH

SEQ ID NO: 5583 - protein, 10 aa, Homo sapiens
  Table 1.2; MAGEA3; ENSG00000221867; HLA -B*38:01,HLA-B*39:01
NQEEEGPSTF

SEQ ID NO: 5584 - protein, 9 aa, Homo sapiens
  Table 1.2; MAGEA3; ENSG00000221867; HLA -B*08:01,HLA-B*15:01,HLA-B*39:01
NQIMPKAGL

SEQ ID NO: 5585 - protein, 9 aa, Homo sapiens
  Table 1.2; MAGEA3; ENSG00000221867; HLA -A*23:01,HLA-A*24:02,HLA-A*29:02,HLA-A*30:02,HLA-B*15:03, HLA-C*01:02,HLA-C*14:02
NYPLWSQSY

SEQ ID NO: 5586 - protein, 9 aa, Homo sapiens
  Table 1.2; MAGEA3; ENSG00000221867; HLA -B*27:02,HLA-C*07:01,HLA-C*16:04
PRALVETSY

SEQ ID NO: 5587 - protein, 8 aa, Homo sapiens
  Table 1.2; MAGEA3; ENSG00000221867; HLA -B*51:01,HLA-C*06:02,HLA-C*16:01,HLA-C*16:02
QAALSRKV

SEQ ID NO: 5588 - protein, 9 aa, Homo sapiens
  Table 1.2; MAGEA3; ENSG00000221867; HLA -B*54:01
QAALSRKVA

SEQ ID NO: 5589 - protein, 10 aa, Homo sapiens
  Table 1.2; MAGEA3; ENSG00000221867; HLA -A*30:01,HLA-B*38:01,HLA-B*40:01,HLA-B*40:02,HLA-B*44:03, HLA-B*49:01
QEAASSSSTL

SEQ ID NO: 5590 - protein, 11 aa, Homo sapiens
  Table 1.2; MAGEA3; ENSG00000221867; HLA -B*49:01
QEAASSSSTLV

SEQ ID NO: 5591 - protein, 9 aa, Homo sapiens
  Table 1.2; MAGEA3; ENSG00000221867; HLA -A*30:01,HLA-B*18:01,HLA-B*37:01,HLA-B*38:01,HLA-B*40:01, HLA-B*44:02,HLA-B*44:03,HLA-B*49:01,HLA-C*16:04
QEEEGPSTF

SEQ ID NO: 5592 - protein, 9 aa, Homo sapiens
  Table 1.2; MAGEA3; ENSG00000221867; HLA -B*38:01
QHCKPEEGL

SEQ ID NO: 5593 - protein, 9 aa, Homo sapiens
  Table 1.2; MAGEA3; ENSG00000221867; HLA -B*38:01,HLA-B*39:01
QHFVQENYL

SEQ ID NO: 5594 - protein, 8 aa, Homo sapiens
  Table 1.2; MAGEA3; ENSG00000221867; HLA -B*08:01
QIMPKAGL

SEQ ID NO: 5595 - protein, 9 aa, Homo sapiens
  Table 1.2; MAGEA3; ENSG00000221867; HLA -A*23:01,HLA-B*08:01
QIMPKAGLL

SEQ ID NO: 5596 - protein, 11 aa, Homo sapiens
  Table 1.2; MAGEA3; ENSG00000221867; HLA -A*02:01
QLVFGIELMEV

SEQ ID NO: 5597 - protein, 9 aa, Homo sapiens
  Table 1.2; MAGEA3; ENSG00000221867; HLA -C*01:02
QSPQGASSL

SEQ ID NO: 5598 - protein, 10 aa, Homo sapiens
  Table 1.2; MAGEA3; ENSG00000221867; HLA -A*25:01,HLA-A*26:01,HLA-A*29:02,HLA-A*30:02,HLA-C*07:04
QVPGSDPACY

SEQ ID NO: 5599 - protein, 8 aa, Homo sapiens
  Table 1.2; MAGEA3; ENSG00000221867; HLA -A*24:02
QYFFPVIF

SEQ ID NO: 5600 - protein, 8 aa, Homo sapiens
  Table 1.2; MAGEA3; ENSG00000221867; HLA -B*15:01,HLA-B*15:03,HLA-B*46:01
RALVETSY

SEQ ID NO: 5601 - protein, 10 aa, Homo sapiens
  Table 1.2; MAGEA3; ENSG00000221867; HLA -B*27:02
RALVETSYVK

SEQ ID NO: 5602 - protein, 8 aa, Homo sapiens
  Table 1.2; MAGEA3; ENSG00000221867; HLA -A*03:01,HLA-B*57:01
RAREPVTK

SEQ ID NO: 5603 - protein, 9 aa, Homo sapiens
  Table 1.2; MAGEA3; ENSG00000221867; HLA -A*32:01,HLA-B*07:02,HLA-B*54:01,HLA-B*56:01
RAREPVTKA

SEQ ID NO: 5604 - protein, 9 aa, Homo sapiens
  Table 1.2; MAGEA3; ENSG00000221867; HLA -A*30:01,HLA-B*07:02,HLA-B*37:01,HLA-B*40:01,HLA-B*40:02, HLA-B*44:02,HLA-B*44:03,HLA-C*01:02
REPVTKAEM

SEQ ID NO: 5605 - protein, 10 aa, Homo sapiens
  Table 1.2; MAGEA3; ENSG00000221867; HLA -A*30:01,HLA-B*40:01,HLA-B*40:02
REPVTKAEML

SEQ ID NO: 5606 - protein, 11 aa, Homo sapiens
  Table 1.2; MAGEA3; ENSG00000221867; HLA -A*30:02,HLA-A*32:01,HLA-B*15:01,HLA-B*15:03,HLA-B*39:01, HLA-B*58:01,HLA-C*07:04
RQVPGSDPACY

SEQ ID NO: 5607 - protein, 8 aa, Homo sapiens
  Table 1.2; MAGEA3; ENSG00000221867; HLA -B*37:01
SDPACYEF

SEQ ID NO: 5608 - protein, 9 aa, Homo sapiens
  Table 1.2; MAGEA3; ENSG00000221867; HLA -B*18:01,HLA-B*27:02,HLA-B*27:05,HLA-B*44:02,HLA-B*44:03, HLA-B*49:01
SEFQAALSR

SEQ ID NO: 5609 - protein, 8 aa, Homo sapiens
  Table 1.2; MAGEA3; ENSG00000221867; HLA -A*30:02,HLA-A*32:01,HLA-B*15:01,HLA-B*15:03,HLA-B*46:01, HLA-C*07:01,HLA-C*07:04,HLA-C*12:03,HLA-C*16:01
SGGPHISY

SEQ ID NO: 5610 - protein, 9 aa, Homo sapiens
  Table 1.2; MAGEA3; ENSG00000221867; HLA -B*15:03
SKASSSLQL

SEQ ID NO: 5611 - protein, 11 aa, Homo sapiens
  Table 1.2; MAGEA3; ENSG00000221867; HLA -B*15:03
SKASSSLQLVF

SEQ ID NO: 5612 - protein, 8 aa, Homo sapiens
  Table 1.2; MAGEA3; ENSG00000221867; HLA -A*29:02,HLA-A*30:02,HLA-B*15:01,HLA-B*46:01,HLA-C*01:02
SLPTTMNY

SEQ ID NO: 5613 - protein, 10 aa, Homo sapiens
  Table 1.2; MAGEA3; ENSG00000221867; HLA -A*02:07
SLPTTMNYPL

SEQ ID NO: 5614 - protein, 11 aa, Homo sapiens
  Table 1.2; MAGEA3; ENSG00000221867; HLA -A*24:02
SLPTTMNYPLW

SEQ ID NO: 5615 - protein, 8 aa, Homo sapiens
  Table 1.2; MAGEA3; ENSG00000221867; HLA -A*02:04,HLA-B*37:01
SLQLVFGI

SEQ ID NO: 5616 - protein, 10 aa, Homo sapiens
  Table 1.2; MAGEA3; ENSG00000221867; HLA -A*02:04,HLA-A*02:07
SLQLVFGIEL

SEQ ID NO: 5617 - protein, 11 aa, Homo sapiens
  Table 1.2; MAGEA3; ENSG00000221867; HLA -B*56:01
SPDPPQSPQGA

SEQ ID NO: 5618 - protein, 8 aa, Homo sapiens
  Table 1.2; MAGEA3; ENSG00000221867; HLA -B*07:02
SPQGASSL

SEQ ID NO: 5619 - protein, 9 aa, Homo sapiens
  Table 1.2; MAGEA3; ENSG00000221867; HLA -A*01:01,HLA-A*03:01,HLA-A*03:02,HLA-A*11:01,HLA-A*23:01, HLA-A*25:01,HLA-A*26:01,HLA-A*29:02,HLA-A*30:02,HLA-A*31:01, HLA-A*32:01,HLA-B*15:01,HLA-B*15:03,HLA-B*35:01,HLA-B*44:03,
  HLA-B*46:01,HLA-B*57:01,HLA-B*58:01,HLA-C*01:02,HLA-C*02:02, HLA-C*07:01,HLA-C*07:06,HLA-C*12:03,HLA-C*16:01,HLA-C*16:02, HLA-C*16:04
SSLPTTMNY

SEQ ID NO: 5620 - protein, 9 aa, Homo sapiens
  Table 1.2; MAGEA3; ENSG00000221867; HLA -A*02:01,HLA-A*02:04,HLA-B*13:02
SSLQLVFGI

SEQ ID NO: 5621 - protein, 8 aa, Homo sapiens
  Table 1.2; MAGEA3; ENSG00000221867; HLA -B*58:01
SSSLQLVF

SEQ ID NO: 5622 - protein, 9 aa, Homo sapiens
  Table 1.2; MAGEA3; ENSG00000221867; HLA -A*02:01,HLA-A*02:03,HLA-A*68:02,HLA-B*13:02,HLA-B*56:01, HLA-C*16:02
SSSSTLVEV

SEQ ID NO: 5623 - protein, 11 aa, Homo sapiens
  Table 1.2; MAGEA3; ENSG00000221867; HLA -B*38:01
SSSSTLVEVTL

SEQ ID NO: 5624 - protein, 10 aa, Homo sapiens
  Table 1.2; MAGEA3; ENSG00000221867; HLA -A*68:02
SSSTLVEVTL

SEQ ID NO: 5625 - protein, 9 aa, Homo sapiens
  Table 1.2; MAGEA3; ENSG00000221867; HLA -A*23:01,HLA-A*30:01,HLA-A*68:02,HLA-B*13:02,HLA-B*35:03, HLA-B*38:01,HLA-B*39:01,HLA-B*40:01,HLA-B*57:01,HLA-B*58:01, HLA-C*03:03,HLA-C*03:04,HLA-C*07:04,HLA-C*07:06,HLA-C*16:01,
  HLA-C*16:02
SSTLVEVTL

SEQ ID NO: 5626 - protein, 10 aa, Homo sapiens
  Table 1.2; MAGEA3; ENSG00000221867; HLA -A*25:01,HLA-A*26:01,HLA-A*30:02,HLA-B*57:01
STFPDLESEF

SEQ ID NO: 5627 - protein, 9 aa, Homo sapiens
  Table 1.2; MAGEA3; ENSG00000221867; HLA -A*02:04,HLA-A*02:07,HLA-A*03:01,HLA-A*03:02,HLA-A*11:01, HLA-A*25:01,HLA-A*31:01,HLA-A*33:01,HLA-A*33:03,HLA-A*68:01, HLA-A*68:02,HLA-B*57:01,HLA-C*07:06
SVLEVFEGR

SEQ ID NO: 5628 - protein, 9 aa, Homo sapiens
  Table 1.2; MAGEA3; ENSG00000221867; HLA -A*26:01
SVVGNWQYF

SEQ ID NO: 5629 - protein, 11 aa, Homo sapiens
  Table 1.2; MAGEA3; ENSG00000221867; HLA -B*35:03,HLA-B*38:01,HLA-C*04:01
SYDGLLGDNQI

SEQ ID NO: 5630 - protein, 8 aa, Homo sapiens
  Table 1.2; MAGEA3; ENSG00000221867; HLA -A*24:02
SYPPLHEW

SEQ ID NO: 5631 - protein, 10 aa, Homo sapiens
  Table 1.2; MAGEA3; ENSG00000221867; HLA -A*24:02
SYPPLHEWVL

SEQ ID NO: 5632 - protein, 9 aa, Homo sapiens
  Table 1.2; MAGEA3; ENSG00000221867; HLA -A*23:01,HLA-A*24:02,HLA-A*31:01
SYVKVLHHM

SEQ ID NO: 5633 - protein, 9 aa, Homo sapiens
  Table 1.2; MAGEA3; ENSG00000221867; HLA -A*23:01,HLA-A*24:02,HLA-A*29:02,HLA-C*14:02
TFPDLESEF

SEQ ID NO: 5634 - protein, 8 aa, Homo sapiens
  Table 1.2; MAGEA3; ENSG00000221867; HLA -A*02:01,HLA-A*02:03,HLA-B*55:01
TLGEVPAA

SEQ ID NO: 5635 - protein, 10 aa, Homo sapiens
  Table 1.2; MAGEA3; ENSG00000221867; HLA -A*02:01,HLA-A*02:03,HLA-A*02:07,HLA-A*68:02
TLVEVTLGEV

SEQ ID NO: 5636 - protein, 9 aa, Homo sapiens
  Table 1.2; MAGEA3; ENSG00000221867; HLA -A*29:02,HLA-A*30:02,HLA-A*32:01,HLA-B*13:02,HLA-B*15:01, HLA-B*15:03,HLA-B*18:01,HLA-B*27:02,HLA-B*27:05,HLA-B*35:01, HLA-B*39:01,HLA-B*44:02,HLA-B*44:03,HLA-B*46:01,HLA-C*07:04,
  HLA-C*16:04
TQHFVQENY

SEQ ID NO: 5637 - protein, 10 aa, Homo sapiens
  Table 1.2; MAGEA3; ENSG00000221867; HLA -B*38:01,HLA-B*39:01
TQHFVQENYL

SEQ ID NO: 5638 - protein, 9 aa, Homo sapiens
  Table 1.2; MAGEA3; ENSG00000221867; HLA -A*03:01
TSYVKVLHH

SEQ ID NO: 5639 - protein, 8 aa, Homo sapiens
  Table 1.2; MAGEA3; ENSG00000221867; HLA -C*05:01
VAELVHFL

SEQ ID NO: 5640 - protein, 9 aa, Homo sapiens
  Table 1.2; MAGEA3; ENSG00000221867; HLA -A*02:07
VAELVHFLL

SEQ ID NO: 5641 - protein, 8 aa, Homo sapiens
  Table 1.2; MAGEA3; ENSG00000221867; HLA -B*15:03,HLA-B*18:01,HLA-B*37:01,HLA-C*04:01,HLA-C*06:02, HLA-C*07:01
VDPIGHLY

SEQ ID NO: 5642 - protein, 10 aa, Homo sapiens
  Table 1.2; MAGEA3; ENSG00000221867; HLA -A*24:02
VDPIGHLYIF

SEQ ID NO: 5643 - protein, 8 aa, Homo sapiens
  Table 1.2; MAGEA3; ENSG00000221867; HLA -A*30:01,HLA-B*18:01,HLA-B*37:01,HLA-B*40:02,HLA-B*49:01
VETSYVKV

SEQ ID NO: 5644 - protein, 9 aa, Homo sapiens
  Table 1.2; MAGEA3; ENSG00000221867; HLA -A*30:01,HLA-B*18:01,HLA-B*27:05,HLA-B*37:01,HLA-B*40:01, HLA-B*40:02,HLA-B*44:02,HLA-B*44:03,HLA-B*49:01,HLA-C*02:02, HLA-C*06:02,HLA-C*07:01,HLA-C*07:04,HLA-C*12:03,HLA-C*16:01,
  HLA-C*16:02,HLA-C*16:04
VETSYVKVL

SEQ ID NO: 5645 - protein, 8 aa, Homo sapiens
  Table 1.2; MAGEA3; ENSG00000221867; HLA -A*30:01,HLA-B*18:01,HLA-B*40:02,HLA-B*49:01
VEVTLGEV

SEQ ID NO: 5646 - protein, 9 aa, Homo sapiens
  Table 1.2; MAGEA3; ENSG00000221867; HLA -B*18:01,HLA-B*40:02,HLA-B*49:01
VEVTLGEVP

SEQ ID NO: 5647 - protein, 10 aa, Homo sapiens
  Table 1.2; MAGEA3; ENSG00000221867; HLA -A*30:01,HLA-B*18:01,HLA-B*40:02
VEVTLGEVPA

SEQ ID NO: 5648 - protein, 11 aa, Homo sapiens
  Table 1.2; MAGEA3; ENSG00000221867; HLA -A*30:01,HLA-B*40:02
VEVTLGEVPAA

SEQ ID NO: 5649 - protein, 8 aa, Homo sapiens
  Table 1.2; MAGEA3; ENSG00000221867; HLA -A*29:02,HLA-C*07:01
VHFLLLKY

SEQ ID NO: 5650 - protein, 10 aa, Homo sapiens
  Table 1.2; MAGEA3; ENSG00000221867; HLA -A*02:03,HLA-B*07:02,HLA-B*46:01,HLA-C*01:02
VIFSKASSSL

SEQ ID NO: 5651 - protein, 9 aa, Homo sapiens
  Table 1.2; MAGEA3; ENSG00000221867; HLA -B*15:03,HLA-B*38:01
VKISGGPHI

SEQ ID NO: 5652 - protein, 11 aa, Homo sapiens
  Table 1.2; MAGEA3; ENSG00000221867; HLA -B*15:03,HLA-C*12:03
VKISGGPHISY

SEQ ID NO: 5653 - protein, 11 aa, Homo sapiens
  Table 1.2; MAGEA3; ENSG00000221867; HLA -C*03:03
VPAAESPDPPQ

SEQ ID NO: 5654 - protein, 8 aa, Homo sapiens
  Table 1.2; MAGEA3; ENSG00000221867; HLA -B*55:01
VPGSDPAC

SEQ ID NO: 5655 - protein, 9 aa, Homo sapiens
  Table 1.2; MAGEA3; ENSG00000221867; HLA -A*30:02,HLA-B*35:01,HLA-B*55:01
VPGSDPACY

SEQ ID NO: 5656 - protein, 11 aa, Homo sapiens
  Table 1.2; MAGEA3; ENSG00000221867; HLA -B*35:01
VPGSDPACYEF

SEQ ID NO: 5657 - protein, 8 aa, Homo sapiens
  Table 1.2; MAGEA3; ENSG00000221867; HLA -A*01:01,HLA-B*15:01,HLA-B*15:03,HLA-B*27:05,HLA-B*39:01, HLA-B*46:01,HLA-C*07:01
VQENYLEY

SEQ ID NO: 5658 - protein, 9 aa, Homo sapiens
  Table 1.2; MAGEA3; ENSG00000221867; HLA -A*31:01
VQENYLEYR

SEQ ID NO: 5659 - protein, 10 aa, Homo sapiens
  Table 1.2; MAGEA3; ENSG00000221867; HLA -A*02:03,HLA-B*40:02
VTKAEMLGSV

SEQ ID NO: 5660 - protein, 9 aa, Homo sapiens
  Table 1.2; MAGEA3; ENSG00000221867; HLA -A*02:01,HLA-A*02:03,HLA-A*02:04,HLA-B*54:01,HLA-B*55:01, HLA-B*56:01
VTLGEVPAA

SEQ ID NO: 5661 - protein, 9 aa, Homo sapiens
  Table 1.2; MAGEA3; ENSG00000221867; HLA -A*24:02
VVGNWQYFF

SEQ ID NO: 5662 - protein, 9 aa, Homo sapiens
  Table 1.2; MAGEA3; ENSG00000221867; HLA -B*49:01
WEELSVLEV

SEQ ID NO: 5663 - protein, 9 aa, Homo sapiens
  Table 1.2; MAGEA3; ENSG00000221867; HLA -A*02:04
YEFLWGPRA

SEQ ID NO: 5664 - protein, 9 aa, Homo sapiens
  Table 1.2; MAGEA3; ENSG00000221867; HLA -A*29:02
YFFPVIFSK

SEQ ID NO: 5665 - protein, 10 aa, Homo sapiens
  Table 1.2; MAGEA3; ENSG00000221867; HLA -A*68:02
YFFPVIFSKA

SEQ ID NO: 5666 - protein, 9 aa, Homo sapiens
  Table 1.2; MAGEA3; ENSG00000221867; HLA -A*02:03,HLA-A*02:07,HLA-A*68:02,HLA-B*13:02
YIFATCLGL

SEQ ID NO: 5667 - protein, 8 aa, Homo sapiens
  Table 1.2; MAGEA3; ENSG00000221867; HLA -B*35:01,HLA-B*51:01
YPLWSQSY

SEQ ID NO: 5668 - protein, 8 aa, Homo sapiens
  Table 1.2; MAGEA3; ENSG00000221867; HLA -B*51:01
YPPLHEWV

SEQ ID NO: 5669 - protein, 9 aa, Homo sapiens
  Table 1.2; MAGEA3; ENSG00000221867; HLA -A*02:07,HLA-A*24:02,HLA-B*35:01,HLA-B*35:03,HLA-B*51:01, HLA-B*54:01
YPPLHEWVL

SEQ ID NO: 5670 - protein, 9 aa, Homo sapiens
  Table 1.2; MAGEA3; ENSG00000221867; HLA -B*27:02,HLA-B*27:05,HLA-B*39:01
YRAREPVTK

SEQ ID NO: 5671 - protein, 8 aa, Homo sapiens
  Table 1.2; MAGEA3; ENSG00000221867; HLA -B*08:01
YVKVLHHM

SEQ ID NO: 5672 - protein, 9 aa, Homo sapiens
  Table 1.2; MAGEA3; ENSG00000221867; HLA -A*68:02
YVKVLHHMV

SEQ ID NO: 5673 - protein, 9 aa, Homo sapiens
  Table 1.2; MAGEA4; ENSG00000147381; HLA -B*07:02,HLA-B*15:01,HLA-B*15:03,HLA-B*35:03,HLA-B*39:01, HLA-B*40:01,HLA-B*46:01,HLA-B*58:01,HLA-C*01:02,HLA-C*02:02, HLA-C*03:03,HLA-C*03:04,HLA-C*07:02,HLA-C*14:02,HLA-C*16:01
AAVSSSSPL

SEQ ID NO: 5674 - protein, 8 aa, Homo sapiens
  Table 1.2; MAGEA4; ENSG00000147381; HLA -A*30:01,HLA-B*13:02,HLA-B*37:01,HLA-B*40:02,HLA-B*44:02, HLA-B*44:03,HLA-B*49:01
AEMLERVI

SEQ ID NO: 5675 - protein, 9 aa, Homo sapiens
  Table 1.2; MAGEA4; ENSG00000147381; HLA -B*44:02
AEMLERVIK

SEQ ID NO: 5676 - protein, 10 aa, Homo sapiens
  Table 1.2; MAGEA4; ENSG00000147381; HLA -B*44:02
AEMLERVIKN

SEQ ID NO: 5677 - protein, 11 aa, Homo sapiens
  Table 1.2; MAGEA4; ENSG00000147381; HLA -A*30:01,HLA-A*30:02,HLA-B*27:02,HLA-B*44:02,HLA-B*44:03, HLA-B*57:01,HLA-C*16:04
AEMLERVIKNY

SEQ ID NO: 5678 - protein, 10 aa, Homo sapiens
  Table 1.2; MAGEA4; ENSG00000147381; HLA -B*27:05
AESAGPPQSP

SEQ ID NO: 5679 - protein, 8 aa, Homo sapiens
  Table 1.2; MAGEA4; ENSG00000147381; HLA -B*37:01
AESLFREA

SEQ ID NO: 5680 - protein, 9 aa, Homo sapiens
  Table 1.2; MAGEA4; ENSG00000147381; HLA -A*30:01,HLA-B*07:02,HLA-B*18:01,HLA-B*27:02,HLA-B*37:01, HLA-B*40:01,HLA-B*40:02,HLA-B*44:02,HLA-B*44:03,HLA-B*49:01, HLA-C*16:04
AESLFREAL

SEQ ID NO: 5681 - protein, 8 aa, Homo sapiens
  Table 1.2; MAGEA4; ENSG00000147381; HLA -A*30:01,HLA-B*37:01,HLA-B*40:02,HLA-B*44:03,HLA-B*49:01
AETSYVKV

SEQ ID NO: 5682 - protein, 9 aa, Homo sapiens
  Table 1.2; MAGEA4; ENSG00000147381; HLA -A*30:01,HLA-B*18:01,HLA-B*27:02,HLA-B*27:05,HLA-B*37:01, HLA-B*40:01,HLA-B*40:02,HLA-B*44:02,HLA-B*44:03,HLA-B*49:01, HLA-C*02:02,HLA-C*07:04,HLA-C*12:03,HLA-C*16:01,HLA-C*16:02,
  HLA-C*16:04
AETSYVKVL

SEQ ID NO: 5683 - protein, 10 aa, Homo sapiens
  Table 1.2; MAGEA4; ENSG00000147381; HLA -B*15:03,HLA-C*04:01
AKELVTKAEM

SEQ ID NO: 5684 - protein, 8 aa, Homo sapiens
  Table 1.2; MAGEA4; ENSG00000147381; HLA -A*02:01,HLA-A*02:03,HLA-B*13:02,HLA-B*55:01
ALAETSYV

SEQ ID NO: 5685 - protein, 9 aa, Homo sapiens
  Table 1.2; MAGEA4; ENSG00000147381; HLA -A*01:01,HLA-A*02:01,HLA-A*03:01,HLA-A*03:02,HLA-A*11:01, HLA-A*29:02,HLA-A*30:02,HLA-A*32:01,HLA-A*68:01,HLA-B*13:02, HLA-B*27:02,HLA-B*27:05,HLA-B*46:01,HLA-C*07:06
ALAETSYVK

SEQ ID NO: 5686 - protein, 10 aa, Homo sapiens
  Table 1.2; MAGEA4; ENSG00000147381; HLA -A*02:01,HLA-A*02:03,HLA-A*02:04,HLA-A*02:07,HLA-B*13:02, HLA-B*55:01
ALAETSYVKV

SEQ ID NO: 5687 - protein, 11 aa, Homo sapiens
  Table 1.2; MAGEA4; ENSG00000147381; HLA -A*02:01,HLA-A*02:03,HLA-A*02:04
ALAETSYVKVL

SEQ ID NO: 5688 - protein, 9 aa, Homo sapiens
  Table 1.2; MAGEA4; ENSG00000147381; HLA -A*02:01,HLA-A*02:03,HLA-B*55:01,HLA-B*56:01
ALGLVGAQA

SEQ ID NO: 5689 - protein, 9 aa, Homo sapiens
  Table 1.2; MAGEA4; ENSG00000147381; HLA -A*02:01,HLA-A*02:03,HLA-A*02:04,HLA-A*02:07,HLA-B*13:02, HLA-B*55:01
ALLEEEEGV

SEQ ID NO: 5690 - protein, 8 aa, Homo sapiens
  Table 1.2; MAGEA4; ENSG00000147381; HLA -A*02:07,HLA-A*23:01,HLA-A*24:02,HLA-B*08:01,HLA-B*15:01, HLA-B*37:01,HLA-B*46:01,HLA-C*01:02,HLA-C*14:02
ALPTTISF

SEQ ID NO: 5691 - protein, 9 aa, Homo sapiens
  Table 1.2; MAGEA4; ENSG00000147381; HLA -A*02:03,HLA-A*02:07
ALPTTISFT

SEQ ID NO: 5692 - protein, 11 aa, Homo sapiens
  Table 1.2; MAGEA4; ENSG00000147381; HLA -A*02:07,HLA-A*24:02
ALPTTISFTCW

SEQ ID NO: 5693 - protein, 9 aa, Homo sapiens
  Table 1.2; MAGEA4; ENSG00000147381; HLA -A*02:01,HLA-A*02:03,HLA-A*02:04,HLA-A*02:07,HLA-B*27:05, HLA-B*55:01
ALSNKVDEL

SEQ ID NO: 5694 - protein, 9 aa, Homo sapiens
  Table 1.2; MAGEA4; ENSG00000147381; HLA -B*35:03,HLA-B*55:01,HLA-B*56:01
APTTEEQEA

SEQ ID NO: 5695 - protein, 10 aa, Homo sapiens
  Table 1.2; MAGEA4; ENSG00000147381; HLA -B*56:01
APTTEEQEAA

SEQ ID NO: 5696 - protein, 11 aa, Homo sapiens
  Table 1.2; MAGEA4; ENSG00000147381; HLA -B*56:01
APTTEEQEAAV

SEQ ID NO: 5697 - protein, 9 aa, Homo sapiens
  Table 1.2; MAGEA4; ENSG00000147381; HLA -B*13:02,HLA-B*15:01,HLA-B*27:05,HLA-B*39:01
AQAPTTEEQ

SEQ ID NO: 5698 - protein, 11 aa, Homo sapiens
  Table 1.2; MAGEA4; ENSG00000147381; HLA -B*27:05,HLA-B*39:01
AQAPTTEEQEA

SEQ ID NO: 5699 - protein, 10 aa, Homo sapiens
  Table 1.2; MAGEA4; ENSG00000147381; HLA -A*01:01,HLA-A*25:01,HLA-B*15:01,HLA-B*15:03,HLA-B*46:01, HLA-B*57:01,HLA-B*58:01,HLA-C*01:02
ASALPTTISF

SEQ ID NO: 5700 - protein, 9 aa, Homo sapiens
  Table 1.2; MAGEA4; ENSG00000147381; HLA -A*01:01,HLA-B*57:01,HLA-B*58:01
ASESLKMIF

SEQ ID NO: 5701 - protein, 9 aa, Homo sapiens
  Table 1.2; MAGEA4; ENSG00000147381; HLA -A*11:01
ASNTYTLVT

SEQ ID NO: 5702 - protein, 8 aa, Homo sapiens
  Table 1.2; MAGEA4; ENSG00000147381; HLA -B*37:01
AVSSSSPL

SEQ ID NO: 5703 - protein, 9 aa, Homo sapiens
  Table 1.2; MAGEA4; ENSG00000147381; HLA -A*02:01,HLA-A*02:03,HLA-A*02:04,HLA-A*02:07,HLA-A*03:02, HLA-A*26:01,HLA-A*32:01,HLA-A*68:02,HLA-B*13:02,HLA-B*27:05, HLA-B*38:01,HLA-B*39:01,HLA-B*55:01,HLA-C*06:02,HLA-C*16:02
AVSSSSPLV

SEQ ID NO: 5704 - protein, 11 aa, Homo sapiens
  Table 1.2; MAGEA4; ENSG00000147381; HLA -A*31:01
AVSSSSPLVPG

SEQ ID NO: 5705 - protein, 10 aa, Homo sapiens
  Table 1.2; MAGEA4; ENSG00000147381; HLA -A*24:02
AYPSLREAAL

SEQ ID NO: 5706 - protein, 11 aa, Homo sapiens
  Table 1.2; MAGEA4; ENSG00000147381; HLA -A*24:02
AYPSLREAALL

SEQ ID NO: 5707 - protein, 9 aa, Homo sapiens
  Table 1.2; MAGEA4; ENSG00000147381; HLA -A*33:01,HLA-B*51:01,HLA-B*54:01
DAESLFREA

SEQ ID NO: 5708 - protein, 8 aa, Homo sapiens
  Table 1.2; MAGEA4; ENSG00000147381; HLA -B*18:01,HLA-B*37:01,HLA-B*40:02,HLA-B*44:02
DELAHFLL

SEQ ID NO: 5709 - protein, 9 aa, Homo sapiens
  Table 1.2; MAGEA4; ENSG00000147381; HLA -A*33:01
DELAHFLLR

SEQ ID NO: 5710 - protein, 11 aa, Homo sapiens
  Table 1.2; MAGEA4; ENSG00000147381; HLA -B*44:02
DELAHFLLRKY

SEQ ID NO: 5711 - protein, 9 aa, Homo sapiens
  Table 1.2; MAGEA4; ENSG00000147381; HLA -B*51:01
DGLLGNNQI

SEQ ID NO: 5712 - protein, 8 aa, Homo sapiens
  Table 1.2; MAGEA4; ENSG00000147381; HLA -B*08:01,HLA-B*15:03,HLA-B*18:01
DGREHTVY

SEQ ID NO: 5713 - protein, 9 aa, Homo sapiens
  Table 1.2; MAGEA4; ENSG00000147381; HLA -A*23:01,HLA-A*25:01,HLA-A*33:01,HLA-A*68:01,HLA-A*68:02, HLA-B*07:02,HLA-B*08:01,HLA-B*35:01,HLA-B*35:03,HLA-B*38:01, HLA-B*39:01,HLA-B*51:01,HLA-B*54:01,HLA-B*55:01,HLA-B*56:01,
  HLA-C*07:02
DPASNTYTL

SEQ ID NO: 5714 - protein, 10 aa, Homo sapiens
  Table 1.2; MAGEA4; ENSG00000147381; HLA -A*68:01,HLA-B*51:01
DPASNTYTLV

SEQ ID NO: 5715 - protein, 11 aa, Homo sapiens
  Table 1.2; MAGEA4; ENSG00000147381; HLA -B*27:02
DPASNTYTLVT

SEQ ID NO: 5716 - protein, 10 aa, Homo sapiens
  Table 1.2; MAGEA4; ENSG00000147381; HLA -A*25:01,HLA-A*26:01,HLA-A*33:01,HLA-A*33:03,HLA-A*68:01
DVKEVDPASN

SEQ ID NO: 5717 - protein, 11 aa, Homo sapiens
  Table 1.2; MAGEA4; ENSG00000147381; HLA -A*68:02,HLA-B*27:02
EAALLEEEEGV

SEQ ID NO: 5718 - protein, 8 aa, Homo sapiens
  Table 1.2; MAGEA4; ENSG00000147381; HLA -B*54:01
EALGLVGA

SEQ ID NO: 5719 - protein, 9 aa, Homo sapiens
  Table 1.2; MAGEA4; ENSG00000147381; HLA -A*26:01,HLA-A*33:01,HLA-A*33:03,HLA-B*27:05,HLA-C*04:01, HLA-C*07:01,HLA-C*12:03
EALGLVGAQ

SEQ ID NO: 5720 - protein, 10 aa, Homo sapiens
  Table 1.2; MAGEA4; ENSG00000147381; HLA -A*33:03,HLA-B*54:01
EALGLVGAQA

SEQ ID NO: 5721 - protein, 10 aa, Homo sapiens
  Table 1.2; MAGEA4; ENSG00000147381; HLA -A*25:01,HLA-A*33:03,HLA-A*68:01
EALSNKVDEL

SEQ ID NO: 5722 - protein, 9 aa, Homo sapiens
  Table 1.2; MAGEA4; ENSG00000147381; HLA -A*33:01,HLA-A*33:03,HLA-B*35:03
EAQEEALGL

SEQ ID NO: 5723 - protein, 9 aa, Homo sapiens
  Table 1.2; MAGEA4; ENSG00000147381; HLA -A*30:01,HLA-B*18:01,HLA-B*40:02,HLA-B*49:01
EEALGLVGA

SEQ ID NO: 5724 - protein, 11 aa, Homo sapiens
  Table 1.2; MAGEA4; ENSG00000147381; HLA -A*30:01,HLA-B*44:03
EEALGLVGAQA

SEQ ID NO: 5725 - protein, 9 aa, Homo sapiens
  Table 1.2; MAGEA4; ENSG00000147381; HLA -B*39:01
EEEGPSTSP

SEQ ID NO: 5726 - protein, 11 aa, Homo sapiens
  Table 1.2; MAGEA4; ENSG00000147381; HLA -B*39:01
EEEGPSTSPDA

SEQ ID NO: 5727 - protein, 9 aa, Homo sapiens
  Table 1.2; MAGEA4; ENSG00000147381; HLA -B*49:01
EEIWEELGV

SEQ ID NO: 5728 - protein, 8 aa, Homo sapiens
  Table 1.2; MAGEA4; ENSG00000147381; HLA -B*18:01,HLA-B*37:01,HLA-B*40:02,HLA-B*49:01
EELGVMGV

SEQ ID NO: 5729 - protein, 9 aa, Homo sapiens
  Table 1.2; MAGEA4; ENSG00000147381; HLA -A*25:01,HLA-A*26:01,HLA-A*29:02,HLA-A*30:01,HLA-A*30:02, HLA-A*33:03,HLA-B*15:03,HLA-B*18:01,HLA-B*27:02,HLA-B*27:05, HLA-B*35:01,HLA-B*39:01,HLA-B*40:01,HLA-B*40:02,HLA-B*44:02,
  HLA-B*44:03,HLA-C*16:04
EELGVMGVY

SEQ ID NO: 5730 - protein, 8 aa, Homo sapiens
  Table 1.2; MAGEA4; ENSG00000147381; HLA -B*18:01
EEVPAAES

SEQ ID NO: 5731 - protein, 9 aa, Homo sapiens
  Table 1.2; MAGEA4; ENSG00000147381; HLA -A*30:01,HLA-B*18:01,HLA-B*40:01,HLA-B*40:02,HLA-B*49:01
EEVPAAESA

SEQ ID NO: 5732 - protein, 9 aa, Homo sapiens
  Table 1.2; MAGEA4; ENSG00000147381; HLA -A*33:01,HLA-A*33:03,HLA-A*68:01
EHTVYGEPR

SEQ ID NO: 5733 - protein, 9 aa, Homo sapiens
  Table 1.2; MAGEA4; ENSG00000147381; HLA -A*33:01,HLA-A*33:03
EHVVRVNAR

SEQ ID NO: 5734 - protein, 9 aa, Homo sapiens
  Table 1.2; MAGEA4; ENSG00000147381; HLA -A*26:01
EIWEELGVM

SEQ ID NO: 5735 - protein, 11 aa, Homo sapiens
  Table 1.2; MAGEA4; ENSG00000147381; HLA -A*02:01,HLA-A*02:07,HLA-A*68:02
EIWEELGVMGV

SEQ ID NO: 5736 - protein, 9 aa, Homo sapiens
  Table 1.2; MAGEA4; ENSG00000147381; HLA -A*03:01
ELAHFLLRK

SEQ ID NO: 5737 - protein, 10 aa, Homo sapiens
  Table 1.2; MAGEA4; ENSG00000147381; HLA -A*26:01,HLA-A*29:02
ELAHFLLRKY

SEQ ID NO: 5738 - protein, 8 aa, Homo sapiens
  Table 1.2; MAGEA4; ENSG00000147381; HLA -A*25:01,HLA-A*26:01,HLA-B*15:01,HLA-C*07:01,HLA-C*07:04
ELGVMGVY

SEQ ID NO: 5739 - protein, 8 aa, Homo sapiens
  Table 1.2; MAGEA4; ENSG00000147381; HLA -B*08:01
ELVTKAEM

SEQ ID NO: 5740 - protein, 9 aa, Homo sapiens
  Table 1.2; MAGEA4; ENSG00000147381; HLA -A*24:02,HLA-A*25:01,HLA-A*26:01,HLA-B*08:01
ELVTKAEML

SEQ ID NO: 5741 - protein, 11 aa, Homo sapiens
  Table 1.2; MAGEA4; ENSG00000147381; HLA -A*33:01,HLA-A*33:03,HLA-A*68:01
ELVTKAEMLER

SEQ ID NO: 5742 - protein, 10 aa, Homo sapiens
  Table 1.2; MAGEA4; ENSG00000147381; HLA -A*25:01,HLA-A*26:01,HLA-B*44:02
EMLERVIKNY

SEQ ID NO: 5743 - protein, 9 aa, Homo sapiens
  Table 1.2; MAGEA4; ENSG00000147381; HLA -A*33:01,HLA-A*33:03,HLA-B*51:01
ENYLEYRQV

SEQ ID NO: 5744 - protein, 9 aa, Homo sapiens
  Table 1.2; MAGEA4; ENSG00000147381; HLA -B*39:01
ESAGPPQSP

SEQ ID NO: 5745 - protein, 8 aa, Homo sapiens
  Table 1.2; MAGEA4; ENSG00000147381; HLA -B*08:01
ESLFREAL

SEQ ID NO: 5746 - protein, 11 aa, Homo sapiens
  Table 1.2; MAGEA4; ENSG00000147381; HLA -A*33:01
ESLFREALSNK

SEQ ID NO: 5747 - protein, 8 aa, Homo sapiens
  Table 1.2; MAGEA4; ENSG00000147381; HLA -B*08:01
ETSYVKVL

SEQ ID NO: 5748 - protein, 9 aa, Homo sapiens
  Table 1.2; MAGEA4; ENSG00000147381; HLA -A*68:02
ETSYVKVLE

SEQ ID NO: 5749 - protein, 10 aa, Homo sapiens
  Table 1.2; MAGEA4; ENSG00000147381; HLA -A*26:01,HLA-A*68:01
ETSYVKVLEH

SEQ ID NO: 5750 - protein, 11 aa, Homo sapiens
  Table 1.2; MAGEA4; ENSG00000147381; HLA -A*68:02
ETSYVKVLEHV

SEQ ID NO: 5751 - protein, 9 aa, Homo sapiens
  Table 1.2; MAGEA4; ENSG00000147381; HLA -A*01:01,HLA-A*25:01,HLA-A*26:01,HLA-A*29:02,HLA-A*30:02, HLA-A*32:01,HLA-A*33:03,HLA-A*68:01,HLA-B*15:01,HLA-B*15:03, HLA-B*18:01,HLA-B*35:01,HLA-B*38:01,HLA-B*39:01,HLA-B*44:03,
  HLA-B*46:01,HLA-B*55:01,HLA-B*58:01,HLA-C*03:03,HLA-C*05:01, HLA-C*07:04,HLA-C*07:06,HLA-C*16:02,HLA-C*16:04
EVDPASNTY

SEQ ID NO: 5752 - protein, 10 aa, Homo sapiens
  Table 1.2; MAGEA4; ENSG00000147381; HLA -A*01:01
EVDPASNTYT

SEQ ID NO: 5753 - protein, 11 aa, Homo sapiens
  Table 1.2; MAGEA4; ENSG00000147381; HLA -A*01:01,HLA-A*02:07,HLA-A*03:02,HLA-A*23:01,HLA-A*25:01, HLA-A*26:01,HLA-A*33:01,HLA-A*33:03,HLA-A*68:01,HLA-A*68:02, HLA-B*27:05,HLA-B*35:03,HLA-B*38:01,HLA-B*39:01,HLA-B*40:01,
  HLA-B*55:01,HLA-B*58:01,HLA-C*05:01
EVDPASNTYTL

SEQ ID NO: 5754 - protein, 10 aa, Homo sapiens
  Table 1.2; MAGEA4; ENSG00000147381; HLA -A*26:01
EVPAAESAGP

SEQ ID NO: 5755 - protein, 10 aa, Homo sapiens
  Table 1.2; MAGEA4; ENSG00000147381; HLA -A*33:03
EYRQVPGSNP

SEQ ID NO: 5756 - protein, 8 aa, Homo sapiens
  Table 1.2; MAGEA4; ENSG00000147381; HLA -B*46:01,HLA-B*49:01,HLA-B*51:01,HLA-C*12:03,HLA-C*16:02
FGIDVKEV

SEQ ID NO: 5757 - protein, 8 aa, Homo sapiens
  Table 1.2; MAGEA4; ENSG00000147381; HLA -B*08:01,HLA-B*46:01
FGKASESL

SEQ ID NO: 5758 - protein, 9 aa, Homo sapiens
  Table 1.2; MAGEA4; ENSG00000147381; HLA -C*07:02
FGKASESLK

SEQ ID NO: 5759 - protein, 8 aa, Homo sapiens
  Table 1.2; MAGEA4; ENSG00000147381; HLA -A*02:01,HLA-A*02:04,HLA-A*02:07
FLWGPRAL

SEQ ID NO: 5760 - protein, 9 aa, Homo sapiens
  Table 1.2; MAGEA4; ENSG00000147381; HLA -A*02:01,HLA-A*02:03,HLA-A*02:07
FLWGPRALA

SEQ ID NO: 5761 - protein, 11 aa, Homo sapiens
  Table 1.2; MAGEA4; ENSG00000147381; HLA -A*02:01,HLA-A*02:03,HLA-A*02:04,HLA-A*02:07
FLWGPRALAET

SEQ ID NO: 5762 - protein, 8 aa, Homo sapiens
  Table 1.2; MAGEA4; ENSG00000147381; HLA -B*51:01
FPKTGLLI

SEQ ID NO: 5763 - protein, 9 aa, Homo sapiens
  Table 1.2; MAGEA4; ENSG00000147381; HLA -B*51:01,HLA-B*54:01
FPKTGLLII

SEQ ID NO: 5764 - protein, 10 aa, Homo sapiens
  Table 1.2; MAGEA4; ENSG00000147381; HLA -B*54:01
FPKTGLLIIV

SEQ ID NO: 5765 - protein, 8 aa, Homo sapiens
  Table 1.2; MAGEA4; ENSG00000147381; HLA -B*54:01,HLA-B*55:01,HLA-B*56:01
FPVIFGKA

SEQ ID NO: 5766 - protein, 9 aa, Homo sapiens
  Table 1.2; MAGEA4; ENSG00000147381; HLA -B*54:01,HLA-B*56:01
FPVIFGKAS

SEQ ID NO: 5767 - protein, 11 aa, Homo sapiens
  Table 1.2; MAGEA4; ENSG00000147381; HLA -B*54:01
FPVIFGKASES

SEQ ID NO: 5768 - protein, 9 aa, Homo sapiens
  Table 1.2; MAGEA4; ENSG00000147381; HLA -C*06:02
FREALSNKV

SEQ ID NO: 5769 - protein, 9 aa, Homo sapiens
  Table 1.2; MAGEA4; ENSG00000147381; HLA -A*02:03,HLA-A*30:01,HLA-B*13:02,HLA-B*15:03,HLA-B*49:01, HLA-B*51:01,HLA-B*58:01,HLA-C*02:02,HLA-C*12:03,HLA-C*16:02, HLA-C*16:04
GASALPTTI

SEQ ID NO: 5770 - protein, 11 aa, Homo sapiens
  Table 1.2; MAGEA4; ENSG00000147381; HLA -B*44:02
GEPRKLLTQDW

SEQ ID NO: 5771 - protein, 9 aa, Homo sapiens
  Table 1.2; MAGEA4; ENSG00000147381; HLA -B*15:03
GKASESLKM

SEQ ID NO: 5772 - protein, 9 aa, Homo sapiens
  Table 1.2; MAGEA4; ENSG00000147381; HLA -A*23:01,HLA-A*29:02,HLA-B*15:01,HLA-B*15:03
GLLGNNQIF

SEQ ID NO: 5773 - protein, 11 aa, Homo sapiens
  Table 1.2; MAGEA4; ENSG00000147381; HLA -A*02:04,HLA-A*03:01,HLA-A*03:02,HLA-A*11:01,HLA-A*29:02, HLA-A*31:01,HLA-B*27:02
GLLGNNQIFPK

SEQ ID NO: 5774 - protein, 10 aa, Homo sapiens
  Table 1.2; MAGEA4; ENSG00000147381; HLA -A*02:04
GLLIIVLGTI

SEQ ID NO: 5775 - protein, 8 aa, Homo sapiens
  Table 1.2; MAGEA4; ENSG00000147381; HLA -A*11:01
GNNQIFPK

SEQ ID NO: 5776 - protein, 9 aa, Homo sapiens
  Table 1.2; MAGEA4; ENSG00000147381; HLA -B*56:01
GPPQSPQGA

SEQ ID NO: 5777 - protein, 11 aa, Homo sapiens
  Table 1.2; MAGEA4; ENSG00000147381; HLA -B*56:01
GPPQSPQGASA

SEQ ID NO: 5778 - protein, 10 aa, Homo sapiens
  Table 1.2; MAGEA4; ENSG00000147381; HLA -A*30:02,HLA-B*07:02,HLA-B*15:01,HLA-B*15:03,HLA-B*35:01, HLA-B*55:01
GPRALAETSY

SEQ ID NO: 5779 - protein, 11 aa, Homo sapiens
  Table 1.2; MAGEA4; ENSG00000147381; HLA -B*07:02
GPRALAETSYV

SEQ ID NO: 5780 - protein, 9 aa, Homo sapiens
  Table 1.2; MAGEA4; ENSG00000147381; HLA -A*23:01,HLA-A*24:02,HLA-A*29:02,HLA-A*30:02,HLA-A*31:01, HLA-A*32:01,HLA-B*07:02,HLA-B*15:01,HLA-B*15:03,HLA-B*27:05, HLA-B*37:01,HLA-B*46:01,HLA-B*57:01,HLA-B*58:01,HLA-C*02:02,
  HLA-C*16:01,HLA-C*16:04
GSNPARYEF

SEQ ID NO: 5781 - protein, 11 aa, Homo sapiens
  Table 1.2; MAGEA4; ENSG00000147381; HLA -B*57:01
GSNPARYEFLW

SEQ ID NO: 5782 - protein, 9 aa, Homo sapiens
  Table 1.2; MAGEA4; ENSG00000147381; HLA -A*02:01
GTLEEVPAA

SEQ ID NO: 5783 - protein, 9 aa, Homo sapiens
  Table 1.2; MAGEA4; ENSG00000147381; HLA -A*03:02,HLA-A*11:01,HLA-A*31:01,HLA-A*33:01,HLA-A*33:03, HLA-A*68:01,HLA-C*07:06
GVMGVYDGR

SEQ ID NO: 5784 - protein, 10 aa, Homo sapiens
  Table 1.2; MAGEA4; ENSG00000147381; HLA -A*02:01,HLA-A*02:03,HLA-A*02:04,HLA-A*02:07,HLA-A*03:01, HLA-A*03:02,HLA-A*11:01,HLA-A*23:01,HLA-A*25:01,HLA-A*26:01, HLA-A*30:01,HLA-A*32:01,HLA-A*68:02,HLA-B*08:01,HLA-B*13:02,
  HLA-B*15:01,HLA-B*15:03,HLA-B*27:05,HLA-B*37:01,HLA-B*40:02, HLA-B*46:01,HLA-B*49:01,HLA-B*51:01,HLA-B*55:01,HLA-B*56:01, HLA-B*58:01,HLA-C*02:02,HLA-C*03:04,HLA-C*06:02,HLA-C*12:03, HLA-C*16:02,HLA-C*16:04
GVYDGREHTV

SEQ ID NO: 5785 - protein, 11 aa, Homo sapiens
  Table 1.2; MAGEA4; ENSG00000147381; HLA -A*01:01,HLA-A*03:01,HLA-A*03:02,HLA-A*11:01,HLA-A*25:01, HLA-A*26:01,HLA-A*29:02,HLA-A*30:02,HLA-A*32:01,HLA-B*15:01, HLA-B*15:03,HLA-B*27:05,HLA-B*35:01,HLA-B*46:01,HLA-B*55:01,
  HLA-B*58:01,HLA-C*02:02,HLA-C*07:04,HLA-C*12:03,HLA-C*16:01, HLA-C*16:04
GVYDGREHTVY

SEQ ID NO: 5786 - protein, 8 aa, Homo sapiens
  Table 1.2; MAGEA4; ENSG00000147381; HLA -A*68:01
HTVYGEPR

SEQ ID NO: 5787 - protein, 8 aa, Homo sapiens
  Table 1.2; MAGEA4; ENSG00000147381; HLA -A*68:01
HVVRVNAR

SEQ ID NO: 5788 - protein, 9 aa, Homo sapiens
  Table 1.2; MAGEA4; ENSG00000147381; HLA -A*68:02
HVVRVNARV

SEQ ID NO: 5789 - protein, 8 aa, Homo sapiens
  Table 1.2; MAGEA4; ENSG00000147381; HLA -B*46:01,HLA-B*54:01,HLA-B*56:01,HLA-C*03:03,HLA-C*03:04, HLA-C*14:02
IAMEGDSA

SEQ ID NO: 5790 - protein, 9 aa, Homo sapiens
  Table 1.2; MAGEA4; ENSG00000147381; HLA -A*02:01,HLA-A*02:03,HLA-A*02:04,HLA-A*02:07,HLA-A*32:01, HLA-B*08:01,HLA-B*13:02,HLA-B*40:02,HLA-B*46:01,HLA-B*51:01, HLA-B*54:01,HLA-B*55:01,HLA-B*56:01,HLA-B*57:01,HLA-B*58:01,
  HLA-C*02:02,HLA-C*03:03,HLA-C*03:04,HLA-C*06:02,HLA-C*12:03, HLA-C*16:01,HLA-C*16:02
IAYPSLREA

SEQ ID NO: 5791 - protein, 10 aa, Homo sapiens
  Table 1.2; MAGEA4; ENSG00000147381; HLA -B*54:01,HLA-B*56:01
IAYPSLREAA

SEQ ID NO: 5792 - protein, 11 aa, Homo sapiens
  Table 1.2; MAGEA4; ENSG00000147381; HLA -A*24:02,HLA-B*07:02,HLA-B*35:03,HLA-B*46:01,HLA-B*51:01, HLA-B*54:01,HLA-B*58:01,HLA-C*03:03,HLA-C*03:04
IAYPSLREAAL

SEQ ID NO: 5793 - protein, 9 aa, Homo sapiens
  Table 1.2; MAGEA4; ENSG00000147381; HLA -A*24:02,HLA-C*14:02
IFGKASESL

SEQ ID NO: 5794 - protein, 9 aa, Homo sapiens
  Table 1.2; MAGEA4; ENSG00000147381; HLA -A*23:01,HLA-A*24:02
IFPKTGLLI

SEQ ID NO: 5795 - protein, 10 aa, Homo sapiens
  Table 1.2; MAGEA4; ENSG00000147381; HLA -A*23:01,HLA-A*24:02
IFPKTGLLII

SEQ ID NO: 5796 - protein, 9 aa, Homo sapiens
  Table 1.2; MAGEA4; ENSG00000147381; HLA -B*07:02,HLA-B*08:01,HLA-B*15:01,HLA-B*15:03,HLA-B*35:01, HLA-B*35:03,HLA-B*39:01,HLA-B*46:01,HLA-C*01:02,HLA-C*03:03, HLA-C*03:04,HLA-C*07:04,HLA-C*14:02
IIVLGTIAM

SEQ ID NO: 5797 - protein, 8 aa, Homo sapiens
  Table 1.2; MAGEA4; ENSG00000147381; HLA -A*23:01,HLA-B*08:01,HLA-B*35:01,HLA-B*35:03,HLA-B*39:01, HLA-B*46:01,HLA-C*14:02
IVLGTIAM

SEQ ID NO: 5798 - protein, 10 aa, Homo sapiens
  Table 1.2; MAGEA4; ENSG00000147381; HLA -C*04:01
IVLGTIAMEG

SEQ ID NO: 5799 - protein, 8 aa, Homo sapiens
  Table 1.2; MAGEA4; ENSG00000147381; HLA -B*37:01,HLA-B*58:01,HLA-C*16:01
KASESLKM

SEQ ID NO: 5800 - protein, 9 aa, Homo sapiens
  Table 1.2; MAGEA4; ENSG00000147381; HLA -C*06:02,HLA-C*16:02
KASESLKMI

SEQ ID NO: 5801 - protein, 10 aa, Homo sapiens
  Table 1.2; MAGEA4; ENSG00000147381; HLA -B*57:01
KASESLKMIF

SEQ ID NO: 5802 - protein, 9 aa, Homo sapiens
  Table 1.2; MAGEA4; ENSG00000147381; HLA -A*30:01,HLA-B*18:01,HLA-B*37:01,HLA-B*40:01,HLA-B*40:02, HLA-B*44:02,HLA-B*44:03,HLA-B*49:01
KELVTKAEM

SEQ ID NO: 5803 - protein, 10 aa, Homo sapiens
  Table 1.2; MAGEA4; ENSG00000147381; HLA -A*30:01,HLA-B*40:01,HLA-B*40:02
KELVTKAEML

SEQ ID NO: 5804 - protein, 9 aa, Homo sapiens
  Table 1.2; MAGEA4; ENSG00000147381; HLA -A*30:01,HLA-B*40:01,HLA-B*40:02,HLA-B*49:01
KEVDPASNT

SEQ ID NO: 5805 - protein, 10 aa, Homo sapiens
  Table 1.2; MAGEA4; ENSG00000147381; HLA -A*23:01,HLA-A*25:01,HLA-A*26:01,HLA-A*29:02,HLA-A*30:01, HLA-A*30:02,HLA-A*32:01,HLA-B*15:01,HLA-B*15:03,HLA-B*18:01, HLA-B*27:02,HLA-B*27:05,HLA-B*37:01,HLA-B*39:01,HLA-B*40:01,
  HLA-B*40:02,HLA-B*44:02,HLA-B*44:03,HLA-B*46:01,HLA-B*49:01, HLA-B*57:01,HLA-B*58:01,HLA-C*02:02,HLA-C*14:02,HLA-C*16:01, HLA-C*16:02,HLA-C*16:04
KEVDPASNTY

SEQ ID NO: 5806 - protein, 11 aa, Homo sapiens
  Table 1.2; MAGEA4; ENSG00000147381; HLA -B*40:01,HLA-B*40:02,HLA-B*49:01
KEVDPASNTYT

SEQ ID NO: 5807 - protein, 9 aa, Homo sapiens
  Table 1.2; MAGEA4; ENSG00000147381; HLA -A*03:01,HLA-A*03:02
KMIFGIDVK

SEQ ID NO: 5808 - protein, 11 aa, Homo sapiens
  Table 1.2; MAGEA4; ENSG00000147381; HLA -A*02:01,HLA-A*02:03
KMIFGIDVKEV

SEQ ID NO: 5809 - protein, 8 aa, Homo sapiens
  Table 1.2; MAGEA4; ENSG00000147381; HLA -A*02:07,HLA-C*05:01
KVDELAHF

SEQ ID NO: 5810 - protein, 9 aa, Homo sapiens
  Table 1.2; MAGEA4; ENSG00000147381; HLA -A*01:01,HLA-A*02:01,HLA-A*02:04,HLA-A*02:07,HLA-A*03:01, HLA-A*03:02,HLA-A*31:01,HLA-A*68:02,HLA-B*13:02,HLA-B*38:01, HLA-B*40:01,HLA-B*55:01,HLA-B*58:01,HLA-C*05:01
KVDELAHFL

SEQ ID NO: 5811 - protein, 10 aa, Homo sapiens
  Table 1.2; MAGEA4; ENSG00000147381; HLA -A*02:01,HLA-A*02:04,HLA-A*02:07,HLA-A*03:01,HLA-A*31:01, HLA-A*68:02
KVDELAHFLL

SEQ ID NO: 5812 - protein, 11 aa, Homo sapiens
  Table 1.2; MAGEA4; ENSG00000147381; HLA -A*02:07,HLA-A*03:01,HLA-A*31:01
KVDELAHFLLR

SEQ ID NO: 5813 - protein, 8 aa, Homo sapiens
  Table 1.2; MAGEA4; ENSG00000147381; HLA -A*31:01,HLA-B*57:01
KVLEHVVR

SEQ ID NO: 5814 - protein, 9 aa, Homo sapiens
  Table 1.2; MAGEA4; ENSG00000147381; HLA -A*02:01,HLA-A*02:03,HLA-A*02:04,HLA-A*02:07,HLA-A*03:01, HLA-A*03:02,HLA-A*31:01,HLA-A*32:01,HLA-A*68:02,HLA-B*13:02, HLA-B*37:01,HLA-B*40:02,HLA-B*55:01,HLA-C*02:02
KVLEHVVRV

SEQ ID NO: 5815 - protein, 10 aa, Homo sapiens
  Table 1.2; MAGEA4; ENSG00000147381; HLA -A*03:01
KVLEHVVRVN

SEQ ID NO: 5816 - protein, 11 aa, Homo sapiens
  Table 1.2; MAGEA4; ENSG00000147381; HLA -A*31:01
KVLEHVVRVNA

SEQ ID NO: 5817 - protein, 10 aa, Homo sapiens
  Table 1.2; MAGEA4; ENSG00000147381; HLA -A*31:01
KYRAKELVTK

SEQ ID NO: 5818 - protein, 8 aa, Homo sapiens
  Table 1.2; MAGEA4; ENSG00000147381; HLA -B*27:02
LAETSYVK

SEQ ID NO: 5819 - protein, 9 aa, Homo sapiens
  Table 1.2; MAGEA4; ENSG00000147381; HLA -A*01:01,HLA-C*05:01
LAETSYVKV

SEQ ID NO: 5820 - protein, 9 aa, Homo sapiens
  Table 1.2; MAGEA4; ENSG00000147381; HLA -A*29:02,HLA-B*57:01
LAHFLLRKY

SEQ ID NO: 5821 - protein, 9 aa, Homo sapiens
  Table 1.2; MAGEA4; ENSG00000147381; HLA -B*40:02
LEHVVRVNA

SEQ ID NO: 5822 - protein, 8 aa, Homo sapiens
  Table 1.2; MAGEA4; ENSG00000147381; HLA -B*18:01,HLA-B*37:01
LERVIKNY

SEQ ID NO: 5823 - protein, 9 aa, Homo sapiens
  Table 1.2; MAGEA4; ENSG00000147381; HLA -A*03:02,HLA-A*11:01,HLA-A*68:01,HLA-B*27:02
LGNNQIFPK

SEQ ID NO: 5824 - protein, 10 aa, Homo sapiens
  Table 1.2; MAGEA4; ENSG00000147381; HLA -B*27:02
LGVMGVYDGR

SEQ ID NO: 5825 - protein, 10 aa, Homo sapiens
  Table 1.2; MAGEA4; ENSG00000147381; HLA -B*46:01
LIIVLGTIAM

SEQ ID NO: 5826 - protein, 10 aa, Homo sapiens
  Table 1.2; MAGEA4; ENSG00000147381; HLA -A*03:01,HLA-A*03:02,HLA-A*11:01,HLA-B*27:02
LLGNNQIFPK

SEQ ID NO: 5827 - protein, 9 aa, Homo sapiens
  Table 1.2; MAGEA4; ENSG00000147381; HLA -A*02:03,HLA-A*02:04,HLA-A*02:07
LLIIVLGTI

SEQ ID NO: 5828 - protein, 9 aa, Homo sapiens
  Table 1.2; MAGEA4; ENSG00000147381; HLA -B*35:03,HLA-B*54:01,HLA-B*56:01
LPTTISFTC

SEQ ID NO: 5829 - protein, 10 aa, Homo sapiens
  Table 1.2; MAGEA4; ENSG00000147381; HLA -B*35:01,HLA-B*51:01,HLA-B*54:01
LPTTISFTCW

SEQ ID NO: 5830 - protein, 8 aa, Homo sapiens
  Table 1.2; MAGEA4; ENSG00000147381; HLA -B*58:01
LSNKVDEL

SEQ ID NO: 5831 - protein, 11 aa, Homo sapiens
  Table 1.2; MAGEA4; ENSG00000147381; HLA -B*57:01
LSNKVDELAHF

SEQ ID NO: 5832 - protein, 10 aa, Homo sapiens
  Table 1.2; MAGEA4; ENSG00000147381; HLA -C*06:02
LSYDGLLGNN

SEQ ID NO: 5833 - protein, 10 aa, Homo sapiens
  Table 1.2; MAGEA4; ENSG00000147381; HLA -A*01:01,HLA-A*29:02,HLA-A*30:02,HLA-A*32:01,HLA-B*57:01, HLA-B*58:01,HLA-C*07:01
LTQDWVQENY

SEQ ID NO: 5834 - protein, 11 aa, Homo sapiens
  Table 1.2; MAGEA4; ENSG00000147381; HLA -C*04:01
LTQDWVQENYL

SEQ ID NO: 5835 - protein, 9 aa, Homo sapiens
  Table 1.2; MAGEA4; ENSG00000147381; HLA -A*02:01,HLA-A*02:03,HLA-A*02:07
LVPGTLEEV

SEQ ID NO: 5836 - protein, 9 aa, Homo sapiens
  Table 1.2; MAGEA4; ENSG00000147381; HLA -A*01:01,HLA-A*26:01,HLA-A*29:02,HLA-A*30:02
LVTCLGLSY

SEQ ID NO: 5837 - protein, 8 aa, Homo sapiens
  Table 1.2; MAGEA4; ENSG00000147381; HLA -B*27:02
MIFGIDVK

SEQ ID NO: 5838 - protein, 9 aa, Homo sapiens
  Table 1.2; MAGEA4; ENSG00000147381; HLA -A*68:02
MIFGIDVKE

SEQ ID NO: 5839 - protein, 10 aa, Homo sapiens
  Table 1.2; MAGEA4; ENSG00000147381; HLA -A*02:01,HLA-A*02:03,HLA-A*02:04,HLA-A*02:07,HLA-A*26:01, HLA-A*68:02
MIFGIDVKEV

SEQ ID NO: 5840 - protein, 9 aa, Homo sapiens
  Table 1.2; MAGEA4; ENSG00000147381; HLA -A*01:01,HLA-A*02:07,HLA-A*29:02,HLA-A*30:02,HLA-A*32:01, HLA-B*44:02,HLA-B*44:03,HLA-B*57:01
MLERVIKNY

SEQ ID NO: 5841 - protein, 8 aa, Homo sapiens
  Table 1.2; MAGEA4; ENSG00000147381; HLA -B*46:01,HLA-C*16:01
NARVRIAY

SEQ ID NO: 5842 - protein, 9 aa, Homo sapiens
  Table 1.2; MAGEA4; ENSG00000147381; HLA -A*23:01,HLA-B*15:03
NKVDELAHF

SEQ ID NO: 5843 - protein, 9 aa, Homo sapiens
  Table 1.2; MAGEA4; ENSG00000147381; HLA -B*07:02,HLA-B*13:02,HLA-B*15:01,HLA-B*15:03,HLA-B*27:05, HLA-B*38:01,HLA-B*39:01
NQIFPKTGL

SEQ ID NO: 5844 - protein, 9 aa, Homo sapiens
  Table 1.2; MAGEA4; ENSG00000147381; HLA -A*23:01,HLA-A*25:01,HLA-A*26:01,HLA-A*68:01,HLA-A*68:02, HLA-B*13:02,HLA-B*18:01,HLA-B*35:03,HLA-B*39:01,HLA-B*40:02, HLA-C*06:02,HLA-C*12:03
NTYTLVTCL

SEQ ID NO: 5845 - protein, 9 aa, Homo sapiens
  Table 1.2; MAGEA4; ENSG00000147381; HLA -A*24:02
NYKRCFPVI

SEQ ID NO: 5846 - protein, 8 aa, Homo sapiens
  Table 1.2; MAGEA4; ENSG00000147381; HLA -A*23:01,HLA-B*07:02
PASNTYTL

SEQ ID NO: 5847 - protein, 8 aa, Homo sapiens
  Table 1.2; MAGEA4; ENSG00000147381; HLA -B*27:02
PDAESLFR

SEQ ID NO: 5848 - protein, 8 aa, Homo sapiens
  Table 1.2; MAGEA4; ENSG00000147381; HLA -A*30:02
PGSNPARY

SEQ ID NO: 5849 - protein, 10 aa, Homo sapiens
  Table 1.2; MAGEA4; ENSG00000147381; HLA -A*02:01,HLA-A*02:03
PLVPGTLEEV

SEQ ID NO: 5850 - protein, 9 aa, Homo sapiens
  Table 1.2; MAGEA4; ENSG00000147381; HLA -B*07:02,HLA-B*15:03,HLA-B*27:02,HLA-C*07:01
PRALAETSY

SEQ ID NO: 5851 - protein, 9 aa, Homo sapiens
  Table 1.2; MAGEA4; ENSG00000147381; HLA -B*57:01
PTTISFTCW

SEQ ID NO: 5852 - protein, 8 aa, Homo sapiens
  Table 1.2; MAGEA4; ENSG00000147381; HLA -B*18:01
QDWVQENY

SEQ ID NO: 5853 - protein, 9 aa, Homo sapiens
  Table 1.2; MAGEA4; ENSG00000147381; HLA -A*30:01,HLA-B*37:01
QDWVQENYL

SEQ ID NO: 5854 - protein, 11 aa, Homo sapiens
  Table 1.2; MAGEA4; ENSG00000147381; HLA -A*30:01,HLA-B*40:01
QEAAVSSSSPL

SEQ ID NO: 5855 - protein, 8 aa, Homo sapiens
  Table 1.2; MAGEA4; ENSG00000147381; HLA -B*49:01
QEEALGLV

SEQ ID NO: 5856 - protein, 10 aa, Homo sapiens
  Table 1.2; MAGEA4; ENSG00000147381; HLA -A*30:01,HLA-B*40:02,HLA-B*49:01
QEEALGLVGA

SEQ ID NO: 5857 - protein, 10 aa, Homo sapiens
  Table 1.2; MAGEA4; ENSG00000147381; HLA -B*49:01
QENYLEYRQV

SEQ ID NO: 5858 - protein, 8 aa, Homo sapiens
  Table 1.2; MAGEA4; ENSG00000147381; HLA -B*08:01
QIFPKTGL

SEQ ID NO: 5859 - protein, 9 aa, Homo sapiens
  Table 1.2; MAGEA4; ENSG00000147381; HLA -A*02:03,HLA-A*03:01,HLA-B*08:01,HLA-B*15:03
QIFPKTGLL

SEQ ID NO: 5860 - protein, 10 aa, Homo sapiens
  Table 1.2; MAGEA4; ENSG00000147381; HLA -A*02:03
QIFPKTGLLI

SEQ ID NO: 5861 - protein, 11 aa, Homo sapiens
  Table 1.2; MAGEA4; ENSG00000147381; HLA -A*02:01,HLA-A*02:03,HLA-A*02:04
QIFPKTGLLII

SEQ ID NO: 5862 - protein, 9 aa, Homo sapiens
  Table 1.2; MAGEA4; ENSG00000147381; HLA -C*01:02
QSPQGASAL

SEQ ID NO: 5863 - protein, 9 aa, Homo sapiens
  Table 1.2; MAGEA4; ENSG00000147381; HLA -A*68:01
QVPGSNPAR

SEQ ID NO: 5864 - protein, 10 aa, Homo sapiens
  Table 1.2; MAGEA4; ENSG00000147381; HLA -A*01:01,HLA-A*25:01,HLA-A*26:01,HLA-A*29:02,HLA-A*30:02, HLA-A*32:01,HLA-A*68:01,HLA-B*15:01,HLA-C*07:04
QVPGSNPARY

SEQ ID NO: 5865 - protein, 8 aa, Homo sapiens
  Table 1.2; MAGEA4; ENSG00000147381; HLA -B*57:01
RAKELVTK

SEQ ID NO: 5866 - protein, 9 aa, Homo sapiens
  Table 1.2; MAGEA4; ENSG00000147381; HLA -A*02:03,HLA-A*32:01,HLA-B*54:01,HLA-B*55:01
RAKELVTKA

SEQ ID NO: 5867 - protein, 10 aa, Homo sapiens
  Table 1.2; MAGEA4; ENSG00000147381; HLA -A*03:02,HLA-A*11:01,HLA-B*27:02
RALAETSYVK

SEQ ID NO: 5868 - protein, 9 aa, Homo sapiens
  Table 1.2; MAGEA4; ENSG00000147381; HLA -A*03:01,HLA-A*03:02,HLA-A*11:01,HLA-A*31:01,HLA-B*57:01
RCFPVIFGK

SEQ ID NO: 5869 - protein, 8 aa, Homo sapiens
  Table 1.2; MAGEA4; ENSG00000147381; HLA -B*37:01,HLA-B*49:01
REALSNKV

SEQ ID NO: 5870 - protein, 11 aa, Homo sapiens
  Table 1.2; MAGEA4; ENSG00000147381; HLA -A*30:01,HLA-B*40:01,HLA-B*40:02
REALSNKVDEL

SEQ ID NO: 5871 - protein, 9 aa, Homo sapiens
  Table 1.2; MAGEA4; ENSG00000147381; HLA -A*03:01
RIAYPSLRE

SEQ ID NO: 5872 - protein, 10 aa, Homo sapiens
  Table 1.2; MAGEA4; ENSG00000147381; HLA -A*02:03
RIAYPSLREA

SEQ ID NO: 5873 - protein, 9 aa, Homo sapiens
  Table 1.2; MAGEA4; ENSG00000147381; HLA -B*15:01
RQVPGSNPA

SEQ ID NO: 5874 - protein, 10 aa, Homo sapiens
  Table 1.2; MAGEA4; ENSG00000147381; HLA -A*31:01,HLA-B*27:05
RQVPGSNPAR

SEQ ID NO: 5875 - protein, 11 aa, Homo sapiens
  Table 1.2; MAGEA4; ENSG00000147381; HLA -A*29:02,HLA-A*30:02,HLA-A*32:01,HLA-B*15:01,HLA-B*15:03, HLA-B*44:03,HLA-B*57:01,HLA-B*58:01,HLA-C*16:04
RQVPGSNPARY

SEQ ID NO: 5876 - protein, 8 aa, Homo sapiens
  Table 1.2; MAGEA4; ENSG00000147381; HLA -A*31:01
RVIKNYKR

SEQ ID NO: 5877 - protein, 10 aa, Homo sapiens
  Table 1.2; MAGEA4; ENSG00000147381; HLA -A*03:01,HLA-A*30:02,HLA-A*32:01
RVNARVRIAY

SEQ ID NO: 5878 - protein, 9 aa, Homo sapiens
  Table 1.2; MAGEA4; ENSG00000147381; HLA -A*31:01,HLA-B*07:02,HLA-B*57:01
RVRIAYPSL

SEQ ID NO: 5879 - protein, 10 aa, Homo sapiens
  Table 1.2; MAGEA4; ENSG00000147381; HLA -A*03:01,HLA-A*31:01
RVRIAYPSLR

SEQ ID NO: 5880 - protein, 9 aa, Homo sapiens
  Table 1.2; MAGEA4; ENSG00000147381; HLA -A*02:01,HLA-A*02:04,HLA-A*02:07,HLA-A*11:01,HLA-A*23:01, HLA-A*24:02,HLA-A*25:01,HLA-A*26:01,HLA-A*29:02,HLA-A*30:01, HLA-A*30:02,HLA-A*31:01,HLA-A*32:01,HLA-A*33:01,HLA-A*33:03,
  HLA-A*68:01,HLA-A*68:02,HLA-B*07:02,HLA-B*08:01,HLA-B*15:01, HLA-B*15:03,HLA-B*18:01,HLA-B*27:02,HLA-B*35:01,HLA-B*35:03, HLA-B*37:01,HLA-B*38:01,HLA-B*39:01,HLA-B*40:02,HLA-B*44:02, HLA-B*44:03,HLA-B*46:01,HLA-B*51:01,HLA-B*54:01,HLA-B*55:01,
  HLA-B*56:01,HLA-B*57:01,HLA-B*58:01,HLA-C*01:02,HLA-C*02:02, HLA-C*03:03,HLA-C*03:04,HLA-C*04:01,HLA-C*05:01,HLA-C*07:02, HLA-C*07:04,HLA-C*07:06,HLA-C*12:03,HLA-C*14:02,HLA-C*16:01, HLA-C*16:02,HLA-C*16:04
SALPTTISF

SEQ ID NO: 5881 - protein, 9 aa, Homo sapiens
  Table 1.2; MAGEA4; ENSG00000147381; HLA -A*30:01,HLA-B*40:01
SEEEIWEEL

SEQ ID NO: 5882 - protein, 8 aa, Homo sapiens
  Table 1.2; MAGEA4; ENSG00000147381; HLA -B*18:01,HLA-B*37:01,HLA-B*44:02,HLA-B*44:03
SESLKMIF

SEQ ID NO: 5883 - protein, 10 aa, Homo sapiens
  Table 1.2; MAGEA4; ENSG00000147381; HLA -A*03:01,HLA-A*03:02
SLFREALSNK

SEQ ID NO: 5884 - protein, 10 aa, Homo sapiens
  Table 1.2; MAGEA4; ENSG00000147381; HLA -A*02:03
SLKMIFGIDV

SEQ ID NO: 5885 - protein, 8 aa, Homo sapiens
  Table 1.2; MAGEA4; ENSG00000147381; HLA -B*55:01,HLA-C*05:01
SPDAESLF

SEQ ID NO: 5886 - protein, 11 aa, Homo sapiens
  Table 1.2; MAGEA4; ENSG00000147381; HLA -B*54:01,HLA-B*55:01,HLA-B*56:01
SPDAESLFREA

SEQ ID NO: 5887 - protein, 8 aa, Homo sapiens
  Table 1.2; MAGEA4; ENSG00000147381; HLA -B*07:02,HLA-B*08:01,HLA-C*07:02
SPLVPGTL

SEQ ID NO: 5888 - protein, 11 aa, Homo sapiens
  Table 1.2; MAGEA4; ENSG00000147381; HLA -B*54:01,HLA-B*56:01
SPLVPGTLEEV

SEQ ID NO: 5889 - protein, 8 aa, Homo sapiens
  Table 1.2; MAGEA4; ENSG00000147381; HLA -B*07:02,HLA-C*07:02
SPQGASAL

SEQ ID NO: 5890 - protein, 9 aa, Homo sapiens
  Table 1.2; MAGEA4; ENSG00000147381; HLA -B*39:01
SQEEEGPST

SEQ ID NO: 5891 - protein, 9 aa, Homo sapiens
  Table 1.2; MAGEA4; ENSG00000147381; HLA -A*02:07,HLA-A*31:01,HLA-B*07:02,HLA-B*46:01,HLA-B*58:01, HLA-C*01:02,HLA-C*07:02
SSPLVPGTL

SEQ ID NO: 5892 - protein, 10 aa, Homo sapiens
  Table 1.2; MAGEA4; ENSG00000147381; HLA -A*30:02
SSSPLVPGTL

SEQ ID NO: 5893 - protein, 10 aa, Homo sapiens
  Table 1.2; MAGEA4; ENSG00000147381; HLA -B*57:01
STSPDAESLF

SEQ ID NO: 5894 - protein, 11 aa, Homo sapiens
  Table 1.2; MAGEA4; ENSG00000147381; HLA -A*11:01,HLA-A*68:01,HLA-C*07:06
STSPDAESLFR

SEQ ID NO: 5895 - protein, 9 aa, Homo sapiens
  Table 1.2; MAGEA4; ENSG00000147381; HLA -C*04:01
SYDGLLGNN

SEQ ID NO: 5896 - protein, 11 aa, Homo sapiens
  Table 1.2; MAGEA4; ENSG00000147381; HLA -A*23:01,HLA-A*24:02,HLA-B*35:03,HLA-B*38:01,HLA-C*04:01
SYDGLLGNNQI

SEQ ID NO: 5897 - protein, 9 aa, Homo sapiens
  Table 1.2; MAGEA4; ENSG00000147381; HLA -A*23:01,HLA-A*24:02,HLA-A*68:02
SYVKVLEHV

SEQ ID NO: 5898 - protein, 10 aa, Homo sapiens
  Table 1.2; MAGEA4; ENSG00000147381; HLA -A*24:02
SYVKVLEHVV

SEQ ID NO: 5899 - protein, 11 aa, Homo sapiens
  Table 1.2; MAGEA4; ENSG00000147381; HLA -A*31:01
SYVKVLEHVVR

SEQ ID NO: 5900 - protein, 9 aa, Homo sapiens
  Table 1.2; MAGEA4; ENSG00000147381; HLA -B*39:01
TIAMEGDSA

SEQ ID NO: 5901 - protein, 10 aa, Homo sapiens
  Table 1.2; MAGEA4; ENSG00000147381; HLA -A*29:02
TLVTCLGLSY

SEQ ID NO: 5902 - protein, 9 aa, Homo sapiens
  Table 1.2; MAGEA4; ENSG00000147381; HLA -A*01:01,HLA-A*30:02,HLA-A*32:01,HLA-B*15:01,HLA-B*15:03, HLA-B*38:01,HLA-B*39:01
TQDWVQENY

SEQ ID NO: 5903 - protein, 10 aa, Homo sapiens
  Table 1.2; MAGEA4; ENSG00000147381; HLA -B*38:01
TQDWVQENYL

SEQ ID NO: 5904 - protein, 8 aa, Homo sapiens
  Table 1.2; MAGEA4; ENSG00000147381; HLA -C*01:02
TSPDAESL

SEQ ID NO: 5905 - protein, 9 aa, Homo sapiens
  Table 1.2; MAGEA4; ENSG00000147381; HLA -C*01:02,HLA-C*05:01
TSPDAESLF

SEQ ID NO: 5906 - protein, 10 aa, Homo sapiens
  Table 1.2; MAGEA4; ENSG00000147381; HLA -A*68:01,HLA-B*27:02
TSPDAESLFR

SEQ ID NO: 5907 - protein, 9 aa, Homo sapiens
  Table 1.2; MAGEA4; ENSG00000147381; HLA -A*03:01,HLA-A*11:01,HLA-C*07:06,HLA-C*12:03
TSYVKVLEH

SEQ ID NO: 5908 - protein, 10 aa, Homo sapiens
  Table 1.2; MAGEA4; ENSG00000147381; HLA -A*02:03,HLA-A*68:02
TSYVKVLEHV

SEQ ID NO: 5909 - protein, 9 aa, Homo sapiens
  Table 1.2; MAGEA4; ENSG00000147381; HLA -C*05:01
TTEEQEAAV

SEQ ID NO: 5910 - protein, 8 aa, Homo sapiens
  Table 1.2; MAGEA4; ENSG00000147381; HLA -A*25:01,HLA-B*57:01
TTISFTCW

SEQ ID NO: 5911 - protein, 9 aa, Homo sapiens
  Table 1.2; MAGEA4; ENSG00000147381; HLA -A*31:01
TTISFTCWR

SEQ ID NO: 5912 - protein, 9 aa, Homo sapiens
  Table 1.2; MAGEA4; ENSG00000147381; HLA -A*02:03,HLA-A*03:01,HLA-A*03:02,HLA-A*11:01,HLA-A*25:01, HLA-A*31:01,HLA-A*68:01,HLA-A*68:02,HLA-C*06:02,HLA-C*12:03
TVYGEPRKL

SEQ ID NO: 5913 - protein, 8 aa, Homo sapiens
  Table 1.2; MAGEA4; ENSG00000147381; HLA -A*23:01,HLA-A*24:02,HLA-C*14:02
TYTLVTCL

SEQ ID NO: 5914 - protein, 8 aa, Homo sapiens
  Table 1.2; MAGEA4; ENSG00000147381; HLA -B*37:01,HLA-B*40:02,HLA-C*07:04
VDELAHFL

SEQ ID NO: 5915 - protein, 8 aa, Homo sapiens
  Table 1.2; MAGEA4; ENSG00000147381; HLA -B*15:03,HLA-B*37:01,HLA-B*39:01,HLA-C*01:02,HLA-C*04:01, HLA-C*07:01
VDPASNTY

SEQ ID NO: 5916 - protein, 10 aa, Homo sapiens
  Table 1.2; MAGEA4; ENSG00000147381; HLA -B*07:02
VDPASNTYTL

SEQ ID NO: 5917 - protein, 8 aa, Homo sapiens
  Table 1.2; MAGEA4; ENSG00000147381; HLA -A*30:01,HLA-B*40:01
VEAQEEAL

SEQ ID NO: 5918 - protein, 10 aa, Homo sapiens
  Table 1.2; MAGEA4; ENSG00000147381; HLA -A*30:01,HLA-B*40:01,HLA-B*40:02,HLA-B*44:03,HLA-B*49:01
VEAQEEALGL

SEQ ID NO: 5919 - protein, 11 aa, Homo sapiens
  Table 1.2; MAGEA4; ENSG00000147381; HLA -B*49:01
VEAQEEALGLV

SEQ ID NO: 5920 - protein, 11 aa, Homo sapiens
  Table 1.2; MAGEA4; ENSG00000147381; HLA -A*03:01,HLA-A*03:02,HLA-A*11:01
VIFGKASESLK

SEQ ID NO: 5921 - protein, 11 aa, Homo sapiens
  Table 1.2; MAGEA4; ENSG00000147381; HLA -B*15:03
VKEVDPASNTY

SEQ ID NO: 5922 - protein, 10 aa, Homo sapiens
  Table 1.2; MAGEA4; ENSG00000147381; HLA -A*02:07
VLEHVVRVNA

SEQ ID NO: 5923 - protein, 9 aa, Homo sapiens
  Table 1.2; MAGEA4; ENSG00000147381; HLA -A*30:02,HLA-A*32:01,HLA-B*46:01,HLA-C*16:01
VNARVRIAY

SEQ ID NO: 5924 - protein, 9 aa, Homo sapiens
  Table 1.2; MAGEA4; ENSG00000147381; HLA -A*01:01,HLA-A*29:02,HLA-A*30:02,HLA-B*35:01,HLA-B*55:01
VPGSNPARY

SEQ ID NO: 5925 - protein, 11 aa, Homo sapiens
  Table 1.2; MAGEA4; ENSG00000147381; HLA -B*35:01
VPGSNPARYEF

SEQ ID NO: 5926 - protein, 8 aa, Homo sapiens
  Table 1.2; MAGEA4; ENSG00000147381; HLA -B*51:01,HLA-B*56:01
VPGTLEEV

SEQ ID NO: 5927 - protein, 11 aa, Homo sapiens
  Table 1.2; MAGEA4; ENSG00000147381; HLA -B*56:01
VPGTLEEVPAA

SEQ ID NO: 5928 - protein, 8 aa, Homo sapiens
  Table 1.2; MAGEA4; ENSG00000147381; HLA -A*01:01,HLA-B*15:01,HLA-B*15:03,HLA-B*27:05,HLA-B*39:01, HLA-C*07:01
VQENYLEY

SEQ ID NO: 5929 - protein, 9 aa, Homo sapiens
  Table 1.2; MAGEA4; ENSG00000147381; HLA -A*31:01
VQENYLEYR

SEQ ID NO: 5930 - protein, 9 aa, Homo sapiens
  Table 1.2; MAGEA4; ENSG00000147381; HLA -A*31:01,HLA-B*27:05
VRIAYPSLR

SEQ ID NO: 5931 - protein, 8 aa, Homo sapiens
  Table 1.2; MAGEA4; ENSG00000147381; HLA -A*01:01,HLA-C*07:01
VTCLGLSY

SEQ ID NO: 5932 - protein, 9 aa, Homo sapiens
  Table 1.2; MAGEA4; ENSG00000147381; HLA -A*03:01,HLA-A*11:01,HLA-A*31:01,HLA-A*33:01,HLA-A*33:03, HLA-A*68:01,HLA-B*57:01,HLA-C*07:06
VTKAEMLER

SEQ ID NO: 5933 - protein, 10 aa, Homo sapiens
  Table 1.2; MAGEA4; ENSG00000147381; HLA -A*02:03
VTKAEMLERV

SEQ ID NO: 5934 - protein, 9 aa, Homo sapiens
  Table 1.2; MAGEA4; ENSG00000147381; HLA -A*31:01
VVRVNARVR

SEQ ID NO: 5935 - protein, 9 aa, Homo sapiens
  Table 1.2; MAGEA4; ENSG00000147381; HLA -A*02:01,HLA-A*02:07,HLA-A*23:01,HLA-A*24:02,HLA-A*32:01, HLA-B*08:01,HLA-B*35:01,HLA-B*35:03,HLA-B*38:01,HLA-B*39:01, HLA-B*51:01,HLA-B*55:01,HLA-C*01:02,HLA-C*04:01,HLA-C*05:01,
  HLA-C*14:02,HLA-C*16:01,HLA-C*16:02
VYDGREHTV

SEQ ID NO: 5936 - protein, 10 aa, Homo sapiens
  Table 1.2; MAGEA4; ENSG00000147381; HLA -A*01:01,HLA-A*23:01,HLA-A*24:02,HLA-A*29:02,HLA-B*35:01, HLA-B*55:01,HLA-C*04:01,HLA-C*07:01
VYDGREHTVY

SEQ ID NO: 5937 - protein, 8 aa, Homo sapiens
  Table 1.2; MAGEA4; ENSG00000147381; HLA -A*23:01,HLA-A*24:02
VYGEPRKL

SEQ ID NO: 5938 - protein, 9 aa, Homo sapiens
  Table 1.2; MAGEA4; ENSG00000147381; HLA -A*23:01,HLA-A*24:02
VYGEPRKLL

SEQ ID NO: 5939 - protein, 9 aa, Homo sapiens
  Table 1.2; MAGEA4; ENSG00000147381; HLA -B*40:02,HLA-B*49:01
WEELGVMGV

SEQ ID NO: 5940 - protein, 9 aa, Homo sapiens
  Table 1.2; MAGEA4; ENSG00000147381; HLA -A*01:01,HLA-A*03:01,HLA-A*25:01,HLA-A*26:01,HLA-A*29:02, HLA-A*30:02,HLA-B*15:01,HLA-B*35:01,HLA-B*46:01,HLA-C*07:04
WVQENYLEY

SEQ ID NO: 5941 - protein, 10 aa, Homo sapiens
  Table 1.2; MAGEA4; ENSG00000147381; HLA -A*31:01
WVQENYLEYR

SEQ ID NO: 5942 - protein, 11 aa, Homo sapiens
  Table 1.2; MAGEA4; ENSG00000147381; HLA -C*07:01
YDGLLGNNQIF

SEQ ID NO: 5943 - protein, 8 aa, Homo sapiens
  Table 1.2; MAGEA4; ENSG00000147381; HLA -B*40:02,HLA-C*06:02,HLA-C*07:01,HLA-C*07:04
YDGREHTV

SEQ ID NO: 5944 - protein, 9 aa, Homo sapiens
  Table 1.2; MAGEA4; ENSG00000147381; HLA -A*01:01,HLA-A*29:02,HLA-B*15:01,HLA-B*15:03,HLA-C*07:01
YDGREHTVY

SEQ ID NO: 5945 - protein, 9 aa, Homo sapiens
  Table 1.2; MAGEA4; ENSG00000147381; HLA -A*02:04
YEFLWGPRA

SEQ ID NO: 5946 - protein, 10 aa, Homo sapiens
  Table 1.2; MAGEA4; ENSG00000147381; HLA -A*30:01,HLA-B*40:02
YEFLWGPRAL

SEQ ID NO: 5947 - protein, 8 aa, Homo sapiens
  Table 1.2; MAGEA4; ENSG00000147381; HLA -B*54:01,HLA-B*55:01,HLA-B*56:01
YPSLREAA

SEQ ID NO: 5948 - protein, 9 aa, Homo sapiens
  Table 1.2; MAGEA4; ENSG00000147381; HLA -B*07:02,HLA-B*08:01,HLA-B*35:01,HLA-B*35:03,HLA-B*37:01, HLA-B*39:01,HLA-B*40:01,HLA-B*51:01,HLA-B*54:01,HLA-B*55:01, HLA-B*56:01,HLA-C*03:03,HLA-C*03:04,HLA-C*07:02,HLA-C*16:01
YPSLREAAL

SEQ ID NO: 5949 - protein, 10 aa, Homo sapiens
  Table 1.2; MAGEA4; ENSG00000147381; HLA -B*07:02
YPSLREAALL

SEQ ID NO: 5950 - protein, 9 aa, Homo sapiens
  Table 1.2; MAGEA4; ENSG00000147381; HLA -B*27:02,HLA-B*27:05,HLA-C*06:02
YRAKELVTK

SEQ ID NO: 5951 - protein, 9 aa, Homo sapiens
  Table 1.2; MAGEA4; ENSG00000147381; HLA -B*27:05
YRQVPGSNP

SEQ ID NO: 5952 - protein, 11 aa, Homo sapiens
  Table 1.2; MAGEA4; ENSG00000147381; HLA -B*27:05
YRQVPGSNPAR

SEQ ID NO: 5953 - protein, 8 aa, Homo sapiens
  Table 1.2; MAGEA4; ENSG00000147381; HLA -A*02:03,HLA-A*68:02,HLA-B*08:01,HLA-B*13:02,HLA-B*40:02, HLA-B*54:01
YVKVLEHV

SEQ ID NO: 5954 - protein, 9 aa, Homo sapiens
  Table 1.2; MAGEA4; ENSG00000147381; HLA -A*02:01,HLA-A*02:03,HLA-A*02:04,HLA-A*02:07,HLA-A*24:02, HLA-A*30:01,HLA-A*31:01,HLA-A*32:01,HLA-A*68:02,HLA-B*08:01, HLA-B*13:02,HLA-B*40:02,HLA-B*51:01,HLA-B*54:01,HLA-B*55:01,
  HLA-B*57:01,HLA-B*58:01,HLA-C*02:02,HLA-C*04:01,HLA-C*07:01, HLA-C*07:04,HLA-C*12:03
YVKVLEHVV

SEQ ID NO: 5955 - protein, 10 aa, Homo sapiens
  Table 1.2; MAGEA4; ENSG00000147381; HLA -A*31:01,HLA-A*33:01,HLA-A*33:03
YVKVLEHVVR

SEQ ID NO: 5956 - protein, 9 aa, Homo sapiens
  Table 1.2; MAGEA6; ENSG00000197172; HLA -B*08:01,HLA-C*16:01
AALSRKVAK

SEQ ID NO: 5957 - protein, 8 aa, Homo sapiens
  Table 1.2; MAGEA6; ENSG00000197172; HLA -C*03:03,HLA-C*03:04,HLA-C*05:01
AASSSSTL

SEQ ID NO: 5958 - protein, 9 aa, Homo sapiens
  Table 1.2; MAGEA6; ENSG00000197172; HLA -B*13:02
AASSSSTLV

SEQ ID NO: 5959 - protein, 8 aa, Homo sapiens
  Table 1.2; MAGEA6; ENSG00000197172; HLA -A*30:01,HLA-B*13:02,HLA-B*18:01,HLA-B*37:01,HLA-B*40:01, HLA-B*40:02,HLA-B*44:02,HLA-B*44:03,HLA-B*49:01
AEMLGSVV

SEQ ID NO: 5960 - protein, 9 aa, Homo sapiens
  Table 1.2; MAGEA6; ENSG00000197172; HLA -B*40:01,HLA-B*40:02,HLA-B*49:01
AEMLGSVVG

SEQ ID NO: 5961 - protein, 10 aa, Homo sapiens
  Table 1.2; MAGEA6; ENSG00000197172; HLA -B*44:02,HLA-B*49:01
AEMLGSVVGN

SEQ ID NO: 5962 - protein, 11 aa, Homo sapiens
  Table 1.2; MAGEA6; ENSG00000197172; HLA -A*30:01,HLA-A*32:01,HLA-B*27:02,HLA-B*37:01,HLA-B*40:01, HLA-B*44:02,HLA-B*44:03,HLA-B*49:01,HLA-B*57:01,HLA-C*16:04
AEMLGSVVGNW

SEQ ID NO: 5963 - protein, 10 aa, Homo sapiens
  Table 1.2; MAGEA6; ENSG00000197172; HLA -A*30:01,HLA-B*40:02,HLA-B*49:01
AESPDPPQSP

SEQ ID NO: 5964 - protein, 9 aa, Homo sapiens
  Table 1.2; MAGEA6; ENSG00000197172; HLA -A*02:01,HLA-A*02:03,HLA-B*55:01,HLA-B*56:01
ALGLVGAQA

SEQ ID NO: 5965 - protein, 11 aa, Homo sapiens
  Table 1.2; MAGEA6; ENSG00000197172; HLA -B*56:01
ALGLVGAQAPA

SEQ ID NO: 5966 - protein, 8 aa, Homo sapiens
  Table 1.2; MAGEA6; ENSG00000197172; HLA -A*02:01,HLA-A*02:03,HLA-A*02:07,HLA-B*13:02,HLA-B*49:01, HLA-B*55:01
ALIETSYV

SEQ ID NO: 5967 - protein, 9 aa, Homo sapiens
  Table 1.2; MAGEA6; ENSG00000197172; HLA -A*01:01,HLA-A*03:01,HLA-A*03:02,HLA-A*11:01,HLA-A*29:02, HLA-B*46:01
ALIETSYVK

SEQ ID NO: 5968 - protein, 10 aa, Homo sapiens
  Table 1.2; MAGEA6; ENSG00000197172; HLA -A*02:01,HLA-A*02:03,HLA-A*02:04,HLA-A*02:07,HLA-B*13:02, HLA-B*55:01
ALIETSYVKV

SEQ ID NO: 5969 - protein, 11 aa, Homo sapiens
  Table 1.2; MAGEA6; ENSG00000197172; HLA -A*02:01,HLA-A*02:03,HLA-A*02:04,HLA-A*02:07
ALIETSYVKVL

SEQ ID NO: 5970 - protein, 9 aa, Homo sapiens
  Table 1.2; MAGEA6; ENSG00000197172; HLA -A*02:03,HLA-A*02:04
ALSRKVAKL

SEQ ID NO: 5971 - protein, 9 aa, Homo sapiens
  Table 1.2; MAGEA6; ENSG00000197172; HLA -B*55:01,HLA-B*56:01
APATEEQEA

SEQ ID NO: 5972 - protein, 10 aa, Homo sapiens
  Table 1.2; MAGEA6; ENSG00000197172; HLA -B*55:01,HLA-B*56:01
APATEEQEAA

SEQ ID NO: 5973 - protein, 9 aa, Homo sapiens
  Table 1.2; MAGEA6; ENSG00000197172; HLA -B*15:01
AQAPATEEQ

SEQ ID NO: 5974 - protein, 11 aa, Homo sapiens
  Table 1.2; MAGEA6; ENSG00000197172; HLA -B*27:05,HLA-B*39:01
AQAPATEEQEA

SEQ ID NO: 5975 - protein, 10 aa, Homo sapiens
  Table 1.2; MAGEA6; ENSG00000197172; HLA -B*27:02,HLA-B*27:05,HLA-B*38:01
AREPVTKAEM

SEQ ID NO: 5976 - protein, 8 aa, Homo sapiens
  Table 1.2; MAGEA6; ENSG00000197172; HLA -C*05:01
ASDSLQLV

SEQ ID NO: 5977 - protein, 9 aa, Homo sapiens
  Table 1.2; MAGEA6; ENSG00000197172; HLA -A*01:01,HLA-A*02:07,HLA-A*11:01,HLA-A*29:02,HLA-A*32:01, HLA-B*35:01,HLA-B*38:01,HLA-B*44:03,HLA-B*57:01,HLA-B*58:01, HLA-C*02:02,HLA-C*05:01,HLA-C*12:03
ASDSLQLVF

SEQ ID NO: 5978 - protein, 8 aa, Homo sapiens
  Table 1.2; MAGEA6; ENSG00000197172; HLA -B*37:01
ASSLPTTM

SEQ ID NO: 5979 - protein, 10 aa, Homo sapiens
  Table 1.2; MAGEA6; ENSG00000197172; HLA -A*01:01,HLA-A*03:01,HLA-A*11:01,HLA-A*29:02,HLA-A*30:02, HLA-A*32:01,HLA-B*15:01,HLA-B*46:01,HLA-B*58:01,HLA-C*16:02
ASSLPTTMNY

SEQ ID NO: 5980 - protein, 8 aa, Homo sapiens
  Table 1.2; MAGEA6; ENSG00000197172; HLA -A*01:01
ATCLGLSY

SEQ ID NO: 5981 - protein, 9 aa, Homo sapiens
  Table 1.2; MAGEA6; ENSG00000197172; HLA -B*38:01,HLA-B*51:01
DGLLGDNQI

SEQ ID NO: 5982 - protein, 8 aa, Homo sapiens
  Table 1.2; MAGEA6; ENSG00000197172; HLA -B*08:01,HLA-B*51:01
DPIGHVYI

SEQ ID NO: 5983 - protein, 9 aa, Homo sapiens
  Table 1.2; MAGEA6; ENSG00000197172; HLA -A*25:01,HLA-A*26:01,HLA-A*33:01,HLA-B*35:01,HLA-B*35:03, HLA-B*51:01
DPIGHVYIF

SEQ ID NO: 5984 - protein, 10 aa, Homo sapiens
  Table 1.2; MAGEA6; ENSG00000197172; HLA -B*54:01
DPIGHVYIFA

SEQ ID NO: 5985 - protein, 9 aa, Homo sapiens
  Table 1.2; MAGEA6; ENSG00000197172; HLA -A*26:01,HLA-A*33:01,HLA-B*35:01
DPKKLLTQY

SEQ ID NO: 5986 - protein, 8 aa, Homo sapiens
  Table 1.2; MAGEA6; ENSG00000197172; HLA -B*51:01
DPPQSPQG

SEQ ID NO: 5987 - protein, 8 aa, Homo sapiens
  Table 1.2; MAGEA6; ENSG00000197172; HLA -A*33:01,HLA-A*68:01
DSIFGDPK

SEQ ID NO: 5988 - protein, 9 aa, Homo sapiens
  Table 1.2; MAGEA6; ENSG00000197172; HLA -A*33:01,HLA-A*68:01
DSIFGDPKK

SEQ ID NO: 5989 - protein, 10 aa, Homo sapiens
  Table 1.2; MAGEA6; ENSG00000197172; HLA -A*68:01
DSIFGDPKKL

SEQ ID NO: 5990 - protein, 9 aa, Homo sapiens
  Table 1.2; MAGEA6; ENSG00000197172; HLA -A*25:01,HLA-A*26:01,HLA-A*33:03,HLA-A*68:01,HLA-B*07:02, HLA-B*35:01,HLA-B*35:03,HLA-B*39:01,HLA-B*51:01,HLA-C*01:02, HLA-C*03:03,HLA-C*03:04,HLA-C*05:01
EAASSSSTL

SEQ ID NO: 5991 - protein, 8 aa, Homo sapiens
  Table 1.2; MAGEA6; ENSG00000197172; HLA -B*54:01
EALGLVGA

SEQ ID NO: 5992 - protein, 9 aa, Homo sapiens
  Table 1.2; MAGEA6; ENSG00000197172; HLA -A*26:01,HLA-A*33:01,HLA-A*33:03,HLA-B*27:05,HLA-C*07:01, HLA-C*12:03
EALGLVGAQ

SEQ ID NO: 5993 - protein, 10 aa, Homo sapiens
  Table 1.2; MAGEA6; ENSG00000197172; HLA -A*26:01,HLA-A*33:03,HLA-A*68:01,HLA-B*54:01
EALGLVGAQA

SEQ ID NO: 5994 - protein, 9 aa, Homo sapiens
  Table 1.2; MAGEA6; ENSG00000197172; HLA -A*25:01,HLA-A*26:01,HLA-A*33:03,HLA-A*68:01
EARGEALGL

SEQ ID NO: 5995 - protein, 9 aa, Homo sapiens
  Table 1.2; MAGEA6; ENSG00000197172; HLA -B*27:02
EDSIFGDPK

SEQ ID NO: 5996 - protein, 8 aa, Homo sapiens
  Table 1.2; MAGEA6; ENSG00000197172; HLA -B*18:01
EEEGPSTF

SEQ ID NO: 5997 - protein, 11 aa, Homo sapiens
  Table 1.2; MAGEA6; ENSG00000197172; HLA -B*39:01,HLA-B*40:01
EEEGPSTFPDL

SEQ ID NO: 5998 - protein, 11 aa, Homo sapiens
  Table 1.2; MAGEA6; ENSG00000197172; HLA -B*40:01
EEGLEARGEAL

SEQ ID NO: 5999 - protein, 10 aa, Homo sapiens
  Table 1.2; MAGEA6; ENSG00000197172; HLA -A*30:01,HLA-B*40:01,HLA-B*40:02,HLA-B*44:02,HLA-B*44:03
EEGPSTFPDL

SEQ ID NO: 6000 - protein, 8 aa, Homo sapiens
  Table 1.2; MAGEA6; ENSG00000197172; HLA -B*18:01,HLA-B*49:01,HLA-B*51:01
EELSVLEV

SEQ ID NO: 6001 - protein, 9 aa, Homo sapiens
  Table 1.2; MAGEA6; ENSG00000197172; HLA -A*23:01,HLA-A*30:01,HLA-B*18:01,HLA-B*40:01,HLA-B*44:02, HLA-B*44:03
EELSVLEVF

SEQ ID NO: 6002 - protein, 8 aa, Homo sapiens
  Table 1.2; MAGEA6; ENSG00000197172; HLA -A*33:01,HLA-A*33:03
EFQAALSR

SEQ ID NO: 6003 - protein, 9 aa, Homo sapiens
  Table 1.2; MAGEA6; ENSG00000197172; HLA -A*33:01,HLA-A*33:03
EFQAALSRK

SEQ ID NO: 6004 - protein, 10 aa, Homo sapiens
  Table 1.2; MAGEA6; ENSG00000197172; HLA -A*25:01,HLA-A*26:01,HLA-A*68:01
ELMEVDPIGH

SEQ ID NO: 6005 - protein, 11 aa, Homo sapiens
  Table 1.2; MAGEA6; ENSG00000197172; HLA -A*68:02
ELMEVDPIGHV

SEQ ID NO: 6006 - protein, 10 aa, Homo sapiens
  Table 1.2; MAGEA6; ENSG00000197172; HLA -A*25:01,HLA-A*26:01,HLA-A*33:01,HLA-A*33:03,HLA-B*44:02, HLA-B*44:03,HLA-B*57:01
EMLGSVVGNW

SEQ ID NO: 6007 - protein, 9 aa, Homo sapiens
  Table 1.2; MAGEA6; ENSG00000197172; HLA -A*33:01
ENYLEYRQV

SEQ ID NO: 6008 - protein, 8 aa, Homo sapiens
  Table 1.2; MAGEA6; ENSG00000197172; HLA -B*07:02,HLA-B*08:01,HLA-B*35:01,HLA-B*35:03,HLA-B*55:01, HLA-C*07:02
EPVTKAEM

SEQ ID NO: 6009 - protein, 9 aa, Homo sapiens
  Table 1.2; MAGEA6; ENSG00000197172; HLA -A*68:01,HLA-B*07:02,HLA-B*08:01,HLA-B*35:01,HLA-B*35:03, HLA-C*07:02
EPVTKAEML

SEQ ID NO: 6010 - protein, 11 aa, Homo sapiens
  Table 1.2; MAGEA6; ENSG00000197172; HLA -B*38:01,HLA-B*39:01
EQEAASSSSTL

SEQ ID NO: 6011 - protein, 10 aa, Homo sapiens
  Table 1.2; MAGEA6; ENSG00000197172; HLA -A*68:01
ESEFQAALSR

SEQ ID NO: 6012 - protein, 11 aa, Homo sapiens
  Table 1.2; MAGEA6; ENSG00000197172; HLA -A*01:01,HLA-A*68:01
ESEFQAALSRK

SEQ ID NO: 6013 - protein, 9 aa, Homo sapiens
  Table 1.2; MAGEA6; ENSG00000197172; HLA -A*33:01,HLA-A*33:03,HLA-A*68:01,HLA-A*68:02
ETSYVKVLH

SEQ ID NO: 6014 - protein, 8 aa, Homo sapiens
  Table 1.2; MAGEA6; ENSG00000197172; HLA -A*68:02,HLA-C*05:01
EVDPIGHV

SEQ ID NO: 6015 - protein, 9 aa, Homo sapiens
  Table 1.2; MAGEA6; ENSG00000197172; HLA -A*01:01,HLA-A*02:07,HLA-A*03:02,HLA-A*11:01,HLA-A*23:01, HLA-A*25:01,HLA-A*26:01,HLA-A*29:02,HLA-A*30:02,HLA-A*32:01, HLA-A*33:01,HLA-A*33:03,HLA-A*68:01,HLA-A*68:02,HLA-B*15:01,
  HLA-B*15:03,HLA-B*18:01,HLA-B*27:02,HLA-B*27:05,HLA-B*35:01, HLA-B*35:03,HLA-B*38:01,HLA-B*39:01,HLA-B*44:02,HLA-B*44:03, HLA-B*46:01,HLA-B*55:01,HLA-B*57:01,HLA-B*58:01,HLA-C*02:02, HLA-C*03:03,HLA-C*04:01,HLA-C*05:01,HLA-C*07:04,HLA-C*07:06,
  HLA-C*12:03,HLA-C*16:01,HLA-C*16:02,HLA-C*16:04
EVDPIGHVY

SEQ ID NO: 6016 - protein, 10 aa, Homo sapiens
  Table 1.2; MAGEA6; ENSG00000197172; HLA -A*01:01,HLA-A*02:07,HLA-A*68:01,HLA-A*68:02,HLA-B*38:01, HLA-C*05:01
EVDPIGHVYI

SEQ ID NO: 6017 - protein, 11 aa, Homo sapiens
  Table 1.2; MAGEA6; ENSG00000197172; HLA -A*01:01,HLA-A*02:07,HLA-A*68:02
EVDPIGHVYIF

SEQ ID NO: 6018 - protein, 10 aa, Homo sapiens
  Table 1.2; MAGEA6; ENSG00000197172; HLA -A*25:01,HLA-A*26:01,HLA-A*32:01,HLA-A*33:01,HLA-A*33:03, HLA-A*68:01,HLA-A*68:02,HLA-B*08:01,HLA-B*35:01,HLA-B*35:03, HLA-B*38:01,HLA-B*39:01,HLA-B*51:01
EVFEGREDSI

SEQ ID NO: 6019 - protein, 11 aa, Homo sapiens
  Table 1.2; MAGEA6; ENSG00000197172; HLA -A*25:01,HLA-A*26:01,HLA-B*35:01
EVFEGREDSIF

SEQ ID NO: 6020 - protein, 10 aa, Homo sapiens
  Table 1.2; MAGEA6; ENSG00000197172; HLA -A*25:01,HLA-A*26:01
EVTLGEVPAA

SEQ ID NO: 6021 - protein, 9 aa, Homo sapiens
  Table 1.2; MAGEA6; ENSG00000197172; HLA -A*01:01,HLA-A*26:01,HLA-A*29:02,HLA-A*30:02,HLA-B*15:03, HLA-B*35:01,HLA-B*46:01,HLA-C*02:02
FATCLGLSY

SEQ ID NO: 6022 - protein, 9 aa, Homo sapiens
  Table 1.2; MAGEA6; ENSG00000197172; HLA -A*02:07,HLA-A*29:02
FFPVIFSKA

SEQ ID NO: 6023 - protein, 11 aa, Homo sapiens
  Table 1.2; MAGEA6; ENSG00000197172; HLA -A*01:01
FGDPKKLLTQY

SEQ ID NO: 6024 - protein, 8 aa, Homo sapiens
  Table 1.2; MAGEA6; ENSG00000197172; HLA -B*54:01
FGIELMEV

SEQ ID NO: 6025 - protein, 8 aa, Homo sapiens
  Table 1.2; MAGEA6; ENSG00000197172; HLA -A*02:04
FLIIILAI

SEQ ID NO: 6026 - protein, 9 aa, Homo sapiens
  Table 1.2; MAGEA6; ENSG00000197172; HLA -A*02:03,HLA-A*02:04,HLA-A*02:07
FLIIILAII

SEQ ID NO: 6027 - protein, 9 aa, Homo sapiens
  Table 1.2; MAGEA6; ENSG00000197172; HLA -A*02:01,HLA-A*02:03,HLA-A*02:04,HLA-A*02:07
FLWGPRALI

SEQ ID NO: 6028 - protein, 11 aa, Homo sapiens
  Table 1.2; MAGEA6; ENSG00000197172; HLA -A*02:01,HLA-A*02:04,HLA-A*02:07
FLWGPRALIET

SEQ ID NO: 6029 - protein, 8 aa, Homo sapiens
  Table 1.2; MAGEA6; ENSG00000197172; HLA -B*35:01,HLA-B*35:03,HLA-B*55:01,HLA-C*04:01,HLA-C*05:01
FPDLESEF

SEQ ID NO: 6030 - protein, 10 aa, Homo sapiens
  Table 1.2; MAGEA6; ENSG00000197172; HLA -B*35:03,HLA-B*54:01,HLA-B*55:01
FPDLESEFQA

SEQ ID NO: 6031 - protein, 11 aa, Homo sapiens
  Table 1.2; MAGEA6; ENSG00000197172; HLA -B*35:03,HLA-B*54:01,HLA-B*55:01
FPDLESEFQAA

SEQ ID NO: 6032 - protein, 8 aa, Homo sapiens
  Table 1.2; MAGEA6; ENSG00000197172; HLA -B*51:01,HLA-B*54:01,HLA-B*55:01,HLA-B*56:01
FPVIFSKA

SEQ ID NO: 6033 - protein, 9 aa, Homo sapiens
  Table 1.2; MAGEA6; ENSG00000197172; HLA -B*54:01
FPVIFSKAS

SEQ ID NO: 6034 - protein, 9 aa, Homo sapiens
  Table 1.2; MAGEA6; ENSG00000197172; HLA -A*02:03,HLA-A*68:02,HLA-B*13:02,HLA-B*27:05,HLA-C*02:02, HLA-C*06:02
FQAALSRKV

SEQ ID NO: 6035 - protein, 8 aa, Homo sapiens
  Table 1.2; MAGEA6; ENSG00000197172; HLA -C*03:04
FSKASDSL

SEQ ID NO: 6036 - protein, 9 aa, Homo sapiens
  Table 1.2; MAGEA6; ENSG00000197172; HLA -A*01:01,HLA-A*02:07,HLA-A*03:01,HLA-A*03:02,HLA-A*11:01, HLA-A*25:01,HLA-A*26:01,HLA-A*29:02,HLA-A*30:02,HLA-A*32:01, HLA-A*33:01,HLA-A*33:03,HLA-A*68:01,HLA-B*13:02,HLA-B*15:01,
  HLA-B*15:03,HLA-B*27:02,HLA-B*35:01,HLA-B*39:01,HLA-B*46:01, HLA-B*55:01,HLA-B*57:01,HLA-B*58:01,HLA-C*01:02,HLA-C*02:02, HLA-C*03:03,HLA-C*03:04,HLA-C*07:01,HLA-C*07:04,HLA-C*07:06, HLA-C*12:03,HLA-C*14:02,HLA-C*16:01,HLA-C*16:02,HLA-C*16:04
FVQENYLEY

SEQ ID NO: 6037 - protein, 10 aa, Homo sapiens
  Table 1.2; MAGEA6; ENSG00000197172; HLA -A*31:01,HLA-A*33:01,HLA-A*33:03,HLA-A*68:01,HLA-A*68:02, HLA-B*27:02
FVQENYLEYR

SEQ ID NO: 6038 - protein, 9 aa, Homo sapiens
  Table 1.2; MAGEA6; ENSG00000197172; HLA -A*30:02,HLA-A*32:01,HLA-B*13:02,HLA-B*15:01,HLA-B*15:03, HLA-B*35:01,HLA-B*35:03,HLA-B*39:01,HLA-C*02:02,HLA-C*12:03, HLA-C*16:02,HLA-C*16:04
GASSLPTTM

SEQ ID NO: 6039 - protein, 11 aa, Homo sapiens
  Table 1.2; MAGEA6; ENSG00000197172; HLA -A*26:01,HLA-A*29:02,HLA-A*30:02
GASSLPTTMNY

SEQ ID NO: 6040 - protein, 8 aa, Homo sapiens
  Table 1.2; MAGEA6; ENSG00000197172; HLA -A*11:01,HLA-B*27:02
GDNQIMPK

SEQ ID NO: 6041 - protein, 9 aa, Homo sapiens
  Table 1.2; MAGEA6; ENSG00000197172; HLA -A*30:01,HLA-B*37:01,HLA-B*40:01,HLA-B*40:02,HLA-B*49:01, HLA-B*56:01
GEALGLVGA

SEQ ID NO: 6042 - protein, 11 aa, Homo sapiens
  Table 1.2; MAGEA6; ENSG00000197172; HLA -A*30:01,HLA-B*40:01,HLA-B*40:02,HLA-B*49:01
GEALGLVGAQA

SEQ ID NO: 6043 - protein, 9 aa, Homo sapiens
  Table 1.2; MAGEA6; ENSG00000197172; HLA -A*30:01,HLA-B*40:01,HLA-B*40:02
GEVPAAESP

SEQ ID NO: 6044 - protein, 9 aa, Homo sapiens
  Table 1.2; MAGEA6; ENSG00000197172; HLA -B*15:01
GLLGDNQIM

SEQ ID NO: 6045 - protein, 11 aa, Homo sapiens
  Table 1.2; MAGEA6; ENSG00000197172; HLA -A*02:01,HLA-A*02:04,HLA-A*03:01,HLA-A*03:02,HLA-A*11:01, HLA-A*31:01,HLA-B*27:02,HLA-B*27:05
GLLGDNQIMPK

SEQ ID NO: 6046 - protein, 10 aa, Homo sapiens
  Table 1.2; MAGEA6; ENSG00000197172; HLA -A*30:02,HLA-B*07:02,HLA-B*15:01,HLA-B*15:03,HLA-B*35:01, HLA-B*55:01
GPRALIETSY

SEQ ID NO: 6047 - protein, 9 aa, Homo sapiens
  Table 1.2; MAGEA6; ENSG00000197172; HLA -B*07:02,HLA-C*07:02
GPRISYPLL

SEQ ID NO: 6048 - protein, 8 aa, Homo sapiens
  Table 1.2; MAGEA6; ENSG00000197172; HLA -B*07:02
GPSTFPDL

SEQ ID NO: 6049 - protein, 11 aa, Homo sapiens
  Table 1.2; MAGEA6; ENSG00000197172; HLA -B*27:05
GREDSIFGDPK

SEQ ID NO: 6050 - protein, 9 aa, Homo sapiens
  Table 1.2; MAGEA6; ENSG00000197172; HLA -A*01:01,HLA-B*27:05,HLA-B*57:01,HLA-B*58:01,HLA-C*05:01
GSDPACYEF

SEQ ID NO: 6051 - protein, 9 aa, Homo sapiens
  Table 1.2; MAGEA6; ENSG00000197172; HLA -A*01:01,HLA-A*29:02,HLA-A*30:02,HLA-B*15:01,HLA-B*15:03, HLA-B*57:01,HLA-B*58:01
GSVVGNWQY

SEQ ID NO: 6052 - protein, 11 aa, Homo sapiens
  Table 1.2; MAGEA6; ENSG00000197172; HLA -A*31:01,HLA-A*33:01,HLA-A*33:03
HCKPEEGLEAR

SEQ ID NO: 6053 - protein, 10 aa, Homo sapiens
  Table 1.2; MAGEA6; ENSG00000197172; HLA -A*33:01
HMVKISGGPR

SEQ ID NO: 6054 - protein, 9 aa, Homo sapiens
  Table 1.2; MAGEA6; ENSG00000197172; HLA -A*68:02
HVYIFATCL

SEQ ID NO: 6055 - protein, 9 aa, Homo sapiens
  Table 1.2; MAGEA6; ENSG00000197172; HLA -B*40:01,HLA-B*40:02,HLA-B*49:01
IELMEVDPI

SEQ ID NO: 6056 - protein, 8 aa, Homo sapiens
  Table 1.2; MAGEA6; ENSG00000197172; HLA -A*30:01,HLA-B*18:01,HLA-B*37:01,HLA-B*40:02,HLA-B*49:01
IETSYVKV

SEQ ID NO: 6057 - protein, 9 aa, Homo sapiens
  Table 1.2; MAGEA6; ENSG00000197172; HLA -A*30:01,HLA-B*18:01,HLA-B*27:05,HLA-B*37:01,HLA-B*40:01, HLA-B*40:02,HLA-B*44:02,HLA-B*44:03,HLA-B*49:01,HLA-C*02:02, HLA-C*06:02,HLA-C*07:01,HLA-C*07:04,HLA-C*12:03,HLA-C*16:01,
  HLA-C*16:02,HLA-C*16:04
IETSYVKVL

SEQ ID NO: 6058 - protein, 10 aa, Homo sapiens
  Table 1.2; MAGEA6; ENSG00000197172; HLA -A*29:02
IFATCLGLSY

SEQ ID NO: 6059 - protein, 9 aa, Homo sapiens
  Table 1.2; MAGEA6; ENSG00000197172; HLA -A*24:02
IFGDPKKLL

SEQ ID NO: 6060 - protein, 9 aa, Homo sapiens
  Table 1.2; MAGEA6; ENSG00000197172; HLA -C*14:02
IFSKASDSL

SEQ ID NO: 6061 - protein, 9 aa, Homo sapiens
  Table 1.2; MAGEA6; ENSG00000197172; HLA -A*03:01,HLA-A*03:02,HLA-A*11:01
IIILAIIAK

SEQ ID NO: 6062 - protein, 8 aa, Homo sapiens
  Table 1.2; MAGEA6; ENSG00000197172; HLA -A*03:01,HLA-A*03:02,HLA-A*11:01,HLA-B*27:02
IILAIIAK

SEQ ID NO: 6063 - protein, 9 aa, Homo sapiens
  Table 1.2; MAGEA6; ENSG00000197172; HLA -A*02:07,HLA-A*24:02
IMPKTGFLI

SEQ ID NO: 6064 - protein, 10 aa, Homo sapiens
  Table 1.2; MAGEA6; ENSG00000197172; HLA -A*24:02
IMPKTGFLII

SEQ ID NO: 6065 - protein, 9 aa, Homo sapiens
  Table 1.2; MAGEA6; ENSG00000197172; HLA -A*01:01,HLA-A*25:01,HLA-A*29:02,HLA-A*30:02,HLA-A*32:01, HLA-B*15:01,HLA-B*15:03,HLA-B*35:01,HLA-B*46:01,HLA-B*57:01, HLA-B*58:01,HLA-C*02:02,HLA-C*07:04,HLA-C*12:03,HLA-C*16:01
ISGGPRISY

SEQ ID NO: 6066 - protein, 9 aa, Homo sapiens
  Table 1.2; MAGEA6; ENSG00000197172; HLA -A*24:02,HLA-A*25:01,HLA-A*31:01,HLA-A*33:01,HLA-B*44:02, HLA-B*57:01,HLA-B*58:01,HLA-C*02:02
ISYPLLHEW

SEQ ID NO: 6067 - protein, 8 aa, Homo sapiens
  Table 1.2; MAGEA6; ENSG00000197172; HLA -C*03:04
KASDSLQL

SEQ ID NO: 6068 - protein, 9 aa, Homo sapiens
  Table 1.2; MAGEA6; ENSG00000197172; HLA -A*02:01,HLA-A*02:03,HLA-A*03:02,HLA-B*13:02,HLA-B*58:01, HLA-C*12:03,HLA-C*16:02
KASDSLQLV

SEQ ID NO: 6069 - protein, 10 aa, Homo sapiens
  Table 1.2; MAGEA6; ENSG00000197172; HLA -A*03:01,HLA-A*23:01,HLA-A*24:02,HLA-A*29:02,HLA-A*30:02, HLA-A*32:01,HLA-B*15:03,HLA-B*27:02,HLA-B*44:03,HLA-B*57:01, HLA-B*58:01,HLA-C*02:02,HLA-C*16:04
KASDSLQLVF

SEQ ID NO: 6070 - protein, 10 aa, Homo sapiens
  Table 1.2; MAGEA6; ENSG00000197172; HLA -A*03:01,HLA-A*30:02,HLA-A*32:01,HLA-B*15:01,HLA-C*16:01
KISGGPRISY

SEQ ID NO: 6071 - protein, 9 aa, Homo sapiens
  Table 1.2; MAGEA6; ENSG00000197172; HLA -A*02:04,HLA-A*02:07
KIWEELSVL

SEQ ID NO: 6072 - protein, 11 aa, Homo sapiens
  Table 1.2; MAGEA6; ENSG00000197172; HLA -A*02:01,HLA-A*02:03,HLA-A*02:04,HLA-A*02:07
KIWEELSVLEV

SEQ ID NO: 6073 - protein, 9 aa, Homo sapiens
  Table 1.2; MAGEA6; ENSG00000197172; HLA -A*03:01
KLVHFLLLK

SEQ ID NO: 6074 - protein, 10 aa, Homo sapiens
  Table 1.2; MAGEA6; ENSG00000197172; HLA -A*03:01,HLA-A*29:02,HLA-B*57:01
KLVHFLLLKY

SEQ ID NO: 6075 - protein, 8 aa, Homo sapiens
  Table 1.2; MAGEA6; ENSG00000197172; HLA -B*57:01
KVAKLVHF

SEQ ID NO: 6076 - protein, 9 aa, Homo sapiens
  Table 1.2; MAGEA6; ENSG00000197172; HLA -A*02:03,HLA-A*02:04,HLA-A*68:02
KVAKLVHFL

SEQ ID NO: 6077 - protein, 8 aa, Homo sapiens
  Table 1.2; MAGEA6; ENSG00000197172; HLA -A*30:01,HLA-B*18:01,HLA-B*37:01,HLA-B*40:01,HLA-B*40:02
LEARGEAL

SEQ ID NO: 6078 - protein, 10 aa, Homo sapiens
  Table 1.2; MAGEA6; ENSG00000197172; HLA -A*30:01,HLA-B*40:01,HLA-B*40:02
LEARGEALGL

SEQ ID NO: 6079 - protein, 8 aa, Homo sapiens
  Table 1.2; MAGEA6; ENSG00000197172; HLA -B*18:01,HLA-B*49:01
LESEFQAA

SEQ ID NO: 6080 - protein, 9 aa, Homo sapiens
  Table 1.2; MAGEA6; ENSG00000197172; HLA -A*30:01,HLA-A*68:02,HLA-B*15:03,HLA-B*18:01,HLA-B*27:02, HLA-B*27:05,HLA-B*37:01,HLA-B*38:01,HLA-B*39:01,HLA-B*40:01, HLA-B*40:02,HLA-B*44:02,HLA-B*44:03,HLA-B*49:01
LESEFQAAL

SEQ ID NO: 6081 - protein, 9 aa, Homo sapiens
  Table 1.2; MAGEA6; ENSG00000197172; HLA -A*01:01,HLA-A*03:01,HLA-A*03:02,HLA-A*11:01,HLA-B*27:02
LGDNQIMPK

SEQ ID NO: 6082 - protein, 9 aa, Homo sapiens
  Table 1.2; MAGEA6; ENSG00000197172; HLA -A*32:01
LGLVGAQAP

SEQ ID NO: 6083 - protein, 10 aa, Homo sapiens
  Table 1.2; MAGEA6; ENSG00000197172; HLA -A*01:01
LGSVVGNWQY

SEQ ID NO: 6084 - protein, 8 aa, Homo sapiens
  Table 1.2; MAGEA6; ENSG00000197172; HLA -B*27:02
LIETSYVK

SEQ ID NO: 6085 - protein, 9 aa, Homo sapiens
  Table 1.2; MAGEA6; ENSG00000197172; HLA -A*02:07,HLA-C*05:01
LIETSYVKV

SEQ ID NO: 6086 - protein, 10 aa, Homo sapiens
  Table 1.2; MAGEA6; ENSG00000197172; HLA -B*27:02
LIIILAIIAK

SEQ ID NO: 6087 - protein, 10 aa, Homo sapiens
  Table 1.2; MAGEA6; ENSG00000197172; HLA -A*03:01,HLA-A*03:02,HLA-A*11:01,HLA-B*27:02
LLGDNQIMPK

SEQ ID NO: 6088 - protein, 11 aa, Homo sapiens
  Table 1.2; MAGEA6; ENSG00000197172; HLA -A*01:01,HLA-A*29:02,HLA-A*30:02
LMEVDPIGHVY

SEQ ID NO: 6089 - protein, 9 aa, Homo sapiens
  Table 1.2; MAGEA6; ENSG00000197172; HLA -B*35:01,HLA-B*35:03
LPTTMNYPL

SEQ ID NO: 6090 - protein, 10 aa, Homo sapiens
  Table 1.2; MAGEA6; ENSG00000197172; HLA -A*24:02,HLA-B*27:02
LPTTMNYPLW

SEQ ID NO: 6091 - protein, 9 aa, Homo sapiens
  Table 1.2; MAGEA6; ENSG00000197172; HLA -A*02:01,HLA-A*02:04,HLA-B*13:02
LQLVFGIEL

SEQ ID NO: 6092 - protein, 10 aa, Homo sapiens
  Table 1.2; MAGEA6; ENSG00000197172; HLA -B*27:02,HLA-B*57:01
LSVLEVFEGR

SEQ ID NO: 6093 - protein, 11 aa, Homo sapiens
  Table 1.2; MAGEA6; ENSG00000197172; HLA -A*01:01
LSYDGLLGDNQ

SEQ ID NO: 6094 - protein, 10 aa, Homo sapiens
  Table 1.2; MAGEA6; ENSG00000197172; HLA -A*01:01,HLA-A*30:02,HLA-B*57:01
LTQYFVQENY

SEQ ID NO: 6095 - protein, 10 aa, Homo sapiens
  Table 1.2; MAGEA6; ENSG00000197172; HLA -A*02:01,HLA-A*02:03,HLA-A*02:04,HLA-A*02:07,HLA-A*68:02
LVFGIELMEV

SEQ ID NO: 6096 - protein, 9 aa, Homo sapiens
  Table 1.2; MAGEA6; ENSG00000197172; HLA -A*01:01,HLA-A*29:02,HLA-B*57:01
LVHFLLLKY

SEQ ID NO: 6097 - protein, 8 aa, Homo sapiens
  Table 1.2; MAGEA6; ENSG00000197172; HLA -B*18:01
MEVDPIGH

SEQ ID NO: 6098 - protein, 9 aa, Homo sapiens
  Table 1.2; MAGEA6; ENSG00000197172; HLA -A*30:01,HLA-A*68:02,HLA-B*13:02,HLA-B*18:01,HLA-B*40:01, HLA-B*40:02,HLA-B*44:02,HLA-B*44:03,HLA-B*49:01
MEVDPIGHV

SEQ ID NO: 6099 - protein, 10 aa, Homo sapiens
  Table 1.2; MAGEA6; ENSG00000197172; HLA -A*01:01,HLA-A*23:01,HLA-A*25:01,HLA-A*26:01,HLA-A*29:02, HLA-A*30:01,HLA-A*30:02,HLA-A*32:01,HLA-A*33:03,HLA-A*68:02, HLA-B*15:01,HLA-B*15:03,HLA-B*18:01,HLA-B*27:02,HLA-B*27:05,
  HLA-B*35:01,HLA-B*37:01,HLA-B*38:01,HLA-B*39:01,HLA-B*40:01, HLA-B*40:02,HLA-B*44:02,HLA-B*44:03,HLA-B*49:01,HLA-B*57:01, HLA-C*02:02,HLA-C*12:03,HLA-C*16:01,HLA-C*16:04
MEVDPIGHVY

SEQ ID NO: 6100 - protein, 11 aa, Homo sapiens
  Table 1.2; MAGEA6; ENSG00000197172; HLA -A*30:01,HLA-A*68:02,HLA-B*38:01,HLA-B*40:01,HLA-B*44:02, HLA-B*44:03,HLA-B*49:01
MEVDPIGHVYI

SEQ ID NO: 6101 - protein, 9 aa, Homo sapiens
  Table 1.2; MAGEA6; ENSG00000197172; HLA -A*23:01,HLA-A*24:02,HLA-A*25:01,HLA-A*32:01,HLA-A*33:03, HLA-B*44:02,HLA-B*44:03,HLA-B*57:01,HLA-B*58:01,HLA-C*07:04
MLGSVVGNW

SEQ ID NO: 6102 - protein, 11 aa, Homo sapiens
  Table 1.2; MAGEA6; ENSG00000197172; HLA -A*01:01,HLA-A*29:02
MLGSVVGNWQY

SEQ ID NO: 6103 - protein, 10 aa, Homo sapiens
  Table 1.2; MAGEA6; ENSG00000197172; HLA -A*29:02
MNYPLWSQSY

SEQ ID NO: 6104 - protein, 8 aa, Homo sapiens
  Table 1.2; MAGEA6; ENSG00000197172; HLA -B*08:01,HLA-B*51:01,HLA-B*54:01
MPKTGFLI

SEQ ID NO: 6105 - protein, 9 aa, Homo sapiens
  Table 1.2; MAGEA6; ENSG00000197172; HLA -B*07:02,HLA-B*51:01,HLA-B*54:01
MPKTGFLII

SEQ ID NO: 6106 - protein, 9 aa, Homo sapiens
  Table 1.2; MAGEA6; ENSG00000197172; HLA -A*31:01,HLA-A*33:01,HLA-A*33:03,HLA-A*68:01
MVKISGGPR

SEQ ID NO: 6107 - protein, 10 aa, Homo sapiens
  Table 1.2; MAGEA6; ENSG00000197172; HLA -B*38:01,HLA-B*39:01
NQEEEGPSTF

SEQ ID NO: 6108 - protein, 9 aa, Homo sapiens
  Table 1.2; MAGEA6; ENSG00000197172; HLA -A*25:01,HLA-A*26:01,HLA-A*32:01,HLA-B*15:01,HLA-B*15:03, HLA-B*18:01,HLA-B*37:01,HLA-B*38:01,HLA-B*44:02,HLA-B*44:03, HLA-B*46:01,HLA-C*07:04,HLA-C*14:02,HLA-C*16:04
NQIMPKTGF

SEQ ID NO: 6109 - protein, 9 aa, Homo sapiens
  Table 1.2; MAGEA6; ENSG00000197172; HLA -A*23:01,HLA-A*24:02,HLA-A*29:02,HLA-A*30:02,HLA-B*15:03, HLA-C*01:02,HLA-C*14:02
NYPLWSQSY

SEQ ID NO: 6110 - protein, 9 aa, Homo sapiens
  Table 1.2; MAGEA6; ENSG00000197172; HLA -B*07:02,HLA-B*27:02,HLA-B*27:05,HLA-C*07:01,HLA-C*16:04
PRALIETSY

SEQ ID NO: 6111 - protein, 8 aa, Homo sapiens
  Table 1.2; MAGEA6; ENSG00000197172; HLA -B*51:01,HLA-C*06:02,HLA-C*16:01,HLA-C*16:02
QAALSRKV

SEQ ID NO: 6112 - protein, 9 aa, Homo sapiens
  Table 1.2; MAGEA6; ENSG00000197172; HLA -B*54:01
QAALSRKVA

SEQ ID NO: 6113 - protein, 10 aa, Homo sapiens
  Table 1.2; MAGEA6; ENSG00000197172; HLA -A*30:01,HLA-B*38:01,HLA-B*40:01,HLA-B*40:02,HLA-B*44:03, HLA-B*49:01
QEAASSSSTL

SEQ ID NO: 6114 - protein, 11 aa, Homo sapiens
  Table 1.2; MAGEA6; ENSG00000197172; HLA -B*49:01
QEAASSSSTLV

SEQ ID NO: 6115 - protein, 9 aa, Homo sapiens
  Table 1.2; MAGEA6; ENSG00000197172; HLA -A*30:01,HLA-B*18:01,HLA-B*37:01,HLA-B*38:01,HLA-B*40:01, HLA-B*44:02,HLA-B*44:03,HLA-B*49:01,HLA-C*16:04
QEEEGPSTF

SEQ ID NO: 6116 - protein, 10 aa, Homo sapiens
  Table 1.2; MAGEA6; ENSG00000197172; HLA -B*49:01
QENYLEYRQV

SEQ ID NO: 6117 - protein, 9 aa, Homo sapiens
  Table 1.2; MAGEA6; ENSG00000197172; HLA -B*38:01
QHCKPEEGL

SEQ ID NO: 6118 - protein, 8 aa, Homo sapiens
  Table 1.2; MAGEA6; ENSG00000197172; HLA -B*08:01,HLA-B*15:01,HLA-B*37:01
QIMPKTGF

SEQ ID NO: 6119 - protein, 11 aa, Homo sapiens
  Table 1.2; MAGEA6; ENSG00000197172; HLA -A*02:01
QLVFGIELMEV

SEQ ID NO: 6120 - protein, 9 aa, Homo sapiens
  Table 1.2; MAGEA6; ENSG00000197172; HLA -C*01:02
QSPQGASSL

SEQ ID NO: 6121 - protein, 10 aa, Homo sapiens
  Table 1.2; MAGEA6; ENSG00000197172; HLA -A*25:01,HLA-A*26:01,HLA-A*29:02,HLA-A*30:02,HLA-C*07:04
QVPGSDPACY

SEQ ID NO: 6122 - protein, 8 aa, Homo sapiens
  Table 1.2; MAGEA6; ENSG00000197172; HLA -A*24:02
QYFFPVIF

SEQ ID NO: 6123 - protein, 10 aa, Homo sapiens
  Table 1.2; MAGEA6; ENSG00000197172; HLA -B*27:02
QYFFPVIFSK

SEQ ID NO: 6124 - protein, 8 aa, Homo sapiens
  Table 1.2; MAGEA6; ENSG00000197172; HLA -A*30:02,HLA-B*15:03,HLA-C*14:02
QYFVQENY

SEQ ID NO: 6125 - protein, 9 aa, Homo sapiens
  Table 1.2; MAGEA6; ENSG00000197172; HLA -A*23:01,HLA-A*24:02,HLA-C*04:01
QYFVQENYL

SEQ ID NO: 6126 - protein, 11 aa, Homo sapiens
  Table 1.2; MAGEA6; ENSG00000197172; HLA -A*29:02
QYFVQENYLEY

SEQ ID NO: 6127 - protein, 8 aa, Homo sapiens
  Table 1.2; MAGEA6; ENSG00000197172; HLA -A*03:01,HLA-B*57:01
RAREPVTK

SEQ ID NO: 6128 - protein, 9 aa, Homo sapiens
  Table 1.2; MAGEA6; ENSG00000197172; HLA -A*32:01,HLA-B*07:02,HLA-B*54:01,HLA-B*56:01
RAREPVTKA

SEQ ID NO: 6129 - protein, 9 aa, Homo sapiens
  Table 1.2; MAGEA6; ENSG00000197172; HLA -A*30:01,HLA-B*37:01,HLA-B*40:01,HLA-B*40:02,HLA-B*44:02, HLA-B*44:03,HLA-C*01:02
REPVTKAEM

SEQ ID NO: 6130 - protein, 10 aa, Homo sapiens
  Table 1.2; MAGEA6; ENSG00000197172; HLA -A*30:01,HLA-B*40:01,HLA-B*40:02
REPVTKAEML

SEQ ID NO: 6131 - protein, 10 aa, Homo sapiens
  Table 1.2; MAGEA6; ENSG00000197172; HLA -B*57:01
RISYPLLHEW

SEQ ID NO: 6132 - protein, 11 aa, Homo sapiens
  Table 1.2; MAGEA6; ENSG00000197172; HLA -A*30:02,HLA-A*32:01,HLA-B*15:01,HLA-B*15:03,HLA-B*39:01, HLA-B*58:01,HLA-C*07:04
RQVPGSDPACY

SEQ ID NO: 6133 - protein, 8 aa, Homo sapiens
  Table 1.2; MAGEA6; ENSG00000197172; HLA -B*37:01
SDPACYEF

SEQ ID NO: 6134 - protein, 8 aa, Homo sapiens
  Table 1.2; MAGEA6; ENSG00000197172; HLA -A*30:01,HLA-B*18:01,HLA-B*37:01
SDSLQLVF

SEQ ID NO: 6135 - protein, 9 aa, Homo sapiens
  Table 1.2; MAGEA6; ENSG00000197172; HLA -B*18:01,HLA-B*27:02,HLA-B*27:05,HLA-B*44:02,HLA-B*44:03, HLA-B*49:01
SEFQAALSR

SEQ ID NO: 6136 - protein, 8 aa, Homo sapiens
  Table 1.2; MAGEA6; ENSG00000197172; HLA -A*30:02,HLA-A*32:01,HLA-B*08:01,HLA-B*15:01,HLA-B*15:03, HLA-C*07:01,HLA-C*07:04,HLA-C*12:03,HLA-C*16:01
SGGPRISY

SEQ ID NO: 6137 - protein, 9 aa, Homo sapiens
  Table 1.2; MAGEA6; ENSG00000197172; HLA -A*02:03,HLA-A*02:04,HLA-A*03:02,HLA-A*68:02,HLA-B*44:03, HLA-C*12:03
SIFGDPKKL

SEQ ID NO: 6138 - protein, 9 aa, Homo sapiens
  Table 1.2; MAGEA6; ENSG00000197172; HLA -B*38:01
SKASDSLQL

SEQ ID NO: 6139 - protein, 8 aa, Homo sapiens
  Table 1.2; MAGEA6; ENSG00000197172; HLA -A*29:02,HLA-A*30:02,HLA-B*15:01,HLA-B*46:01,HLA-C*01:02
SLPTTMNY

SEQ ID NO: 6140 - protein, 10 aa, Homo sapiens
  Table 1.2; MAGEA6; ENSG00000197172; HLA -A*02:07
SLPTTMNYPL

SEQ ID NO: 6141 - protein, 11 aa, Homo sapiens
  Table 1.2; MAGEA6; ENSG00000197172; HLA -A*24:02
SLPTTMNYPLW

SEQ ID NO: 6142 - protein, 8 aa, Homo sapiens
  Table 1.2; MAGEA6; ENSG00000197172; HLA -A*02:04,HLA-B*37:01
SLQLVFGI

SEQ ID NO: 6143 - protein, 10 aa, Homo sapiens
  Table 1.2; MAGEA6; ENSG00000197172; HLA -A*02:04,HLA-A*02:07
SLQLVFGIEL

SEQ ID NO: 6144 - protein, 11 aa, Homo sapiens
  Table 1.2; MAGEA6; ENSG00000197172; HLA -B*56:01
SPDPPQSPQGA

SEQ ID NO: 6145 - protein, 8 aa, Homo sapiens
  Table 1.2; MAGEA6; ENSG00000197172; HLA -B*07:02
SPQGASSL

SEQ ID NO: 6146 - protein, 9 aa, Homo sapiens
  Table 1.2; MAGEA6; ENSG00000197172; HLA -A*01:01,HLA-A*03:01,HLA-A*03:02,HLA-A*11:01,HLA-A*23:01, HLA-A*25:01,HLA-A*26:01,HLA-A*29:02,HLA-A*30:02,HLA-A*31:01, HLA-A*32:01,HLA-B*15:01,HLA-B*15:03,HLA-B*35:01,HLA-B*44:03,
  HLA-B*46:01,HLA-B*57:01,HLA-B*58:01,HLA-C*01:02,HLA-C*02:02, HLA-C*07:01,HLA-C*07:06,HLA-C*12:03,HLA-C*16:01,HLA-C*16:02, HLA-C*16:04
SSLPTTMNY

SEQ ID NO: 6147 - protein, 9 aa, Homo sapiens
  Table 1.2; MAGEA6; ENSG00000197172; HLA -A*02:01,HLA-A*02:03,HLA-A*68:02,HLA-B*13:02,HLA-B*56:01
SSSSTLVEV

SEQ ID NO: 6148 - protein, 11 aa, Homo sapiens
  Table 1.2; MAGEA6; ENSG00000197172; HLA -B*38:01
SSSSTLVEVTL

SEQ ID NO: 6149 - protein, 10 aa, Homo sapiens
  Table 1.2; MAGEA6; ENSG00000197172; HLA -A*68:02
SSSTLVEVTL

SEQ ID NO: 6150 - protein, 9 aa, Homo sapiens
  Table 1.2; MAGEA6; ENSG00000197172; HLA -A*23:01,HLA-A*30:01,HLA-A*68:02,HLA-B*13:02,HLA-B*35:03, HLA-B*38:01,HLA-B*39:01,HLA-B*40:01,HLA-B*57:01,HLA-B*58:01, HLA-C*03:03,HLA-C*03:04,HLA-C*07:04,HLA-C*07:06,HLA-C*16:01,
  HLA-C*16:02
SSTLVEVTL

SEQ ID NO: 6151 - protein, 10 aa, Homo sapiens
  Table 1.2; MAGEA6; ENSG00000197172; HLA -A*25:01,HLA-A*26:01,HLA-A*30:02,HLA-B*57:01
STFPDLESEF

SEQ ID NO: 6152 - protein, 9 aa, Homo sapiens
  Table 1.2; MAGEA6; ENSG00000197172; HLA -A*02:04,HLA-A*02:07,HLA-A*03:01,HLA-A*03:02,HLA-A*11:01, HLA-A*25:01,HLA-A*31:01,HLA-A*33:01,HLA-A*33:03,HLA-A*68:01, HLA-A*68:02,HLA-B*57:01,HLA-C*07:06
SVLEVFEGR

SEQ ID NO: 6153 - protein, 9 aa, Homo sapiens
  Table 1.2; MAGEA6; ENSG00000197172; HLA -A*26:01
SVVGNWQYF

SEQ ID NO: 6154 - protein, 11 aa, Homo sapiens
  Table 1.2; MAGEA6; ENSG00000197172; HLA -B*35:03,HLA-B*38:01,HLA-C*04:01
SYDGLLGDNQI

SEQ ID NO: 6155 - protein, 8 aa, Homo sapiens
  Table 1.2; MAGEA6; ENSG00000197172; HLA -A*24:02
SYPLLHEW

SEQ ID NO: 6156 - protein, 10 aa, Homo sapiens
  Table 1.2; MAGEA6; ENSG00000197172; HLA -A*24:02
SYPLLHEWAL

SEQ ID NO: 6157 - protein, 9 aa, Homo sapiens
  Table 1.2; MAGEA6; ENSG00000197172; HLA -A*23:01,HLA-A*24:02
SYVKVLHHM

SEQ ID NO: 6158 - protein, 9 aa, Homo sapiens
  Table 1.2; MAGEA6; ENSG00000197172; HLA -A*23:01,HLA-A*24:02,HLA-A*29:02,HLA-C*14:02
TFPDLESEF

SEQ ID NO: 6159 - protein, 9 aa, Homo sapiens
  Table 1.2; MAGEA6; ENSG00000197172; HLA -B*54:01
TGFLIIILA

SEQ ID NO: 6160 - protein, 8 aa, Homo sapiens
  Table 1.2; MAGEA6; ENSG00000197172; HLA -A*02:01,HLA-A*02:03,HLA-B*55:01
TLGEVPAA

SEQ ID NO: 6161 - protein, 10 aa, Homo sapiens
  Table 1.2; MAGEA6; ENSG00000197172; HLA -A*02:01,HLA-A*02:03,HLA-A*02:07,HLA-A*68:02
TLVEVTLGEV

SEQ ID NO: 6162 - protein, 9 aa, Homo sapiens
  Table 1.2; MAGEA6; ENSG00000197172; HLA -A*26:01,HLA-A*29:02,HLA-A*30:02,HLA-A*32:01,HLA-B*13:02, HLA-B*15:01,HLA-B*15:03,HLA-B*18:01,HLA-B*27:02,HLA-B*27:05, HLA-B*35:01,HLA-B*39:01,HLA-B*44:02,HLA-B*44:03,HLA-B*46:01,
  HLA-C*02:02,HLA-C*07:04,HLA-C*16:04
TQYFVQENY

SEQ ID NO: 6163 - protein, 10 aa, Homo sapiens
  Table 1.2; MAGEA6; ENSG00000197172; HLA -A*68:02,HLA-B*13:02,HLA-B*27:05,HLA-B*38:01
TQYFVQENYL

SEQ ID NO: 6164 - protein, 9 aa, Homo sapiens
  Table 1.2; MAGEA6; ENSG00000197172; HLA -A*03:01
TSYVKVLHH

SEQ ID NO: 6165 - protein, 8 aa, Homo sapiens
  Table 1.2; MAGEA6; ENSG00000197172; HLA -B*08:01
VAKLVHFL

SEQ ID NO: 6166 - protein, 8 aa, Homo sapiens
  Table 1.2; MAGEA6; ENSG00000197172; HLA -B*15:03,HLA-B*18:01,HLA-B*37:01,HLA-C*04:01,HLA-C*07:01, HLA-C*07:04
VDPIGHVY

SEQ ID NO: 6167 - protein, 9 aa, Homo sapiens
  Table 1.2; MAGEA6; ENSG00000197172; HLA -A*24:02
VDPIGHVYI

SEQ ID NO: 6168 - protein, 8 aa, Homo sapiens
  Table 1.2; MAGEA6; ENSG00000197172; HLA -A*30:01,HLA-B*18:01,HLA-B*40:02,HLA-B*49:01
VEVTLGEV

SEQ ID NO: 6169 - protein, 9 aa, Homo sapiens
  Table 1.2; MAGEA6; ENSG00000197172; HLA -B*18:01,HLA-B*40:02,HLA-B*49:01
VEVTLGEVP

SEQ ID NO: 6170 - protein, 10 aa, Homo sapiens
  Table 1.2; MAGEA6; ENSG00000197172; HLA -A*30:01,HLA-B*18:01,HLA-B*40:02
VEVTLGEVPA

SEQ ID NO: 6171 - protein, 11 aa, Homo sapiens
  Table 1.2; MAGEA6; ENSG00000197172; HLA -A*30:01,HLA-B*40:02
VEVTLGEVPAA

SEQ ID NO: 6172 - protein, 8 aa, Homo sapiens
  Table 1.2; MAGEA6; ENSG00000197172; HLA -A*29:02
VHFLLLKY

SEQ ID NO: 6173 - protein, 11 aa, Homo sapiens
  Table 1.2; MAGEA6; ENSG00000197172; HLA -B*15:03
VKISGGPRISY

SEQ ID NO: 6174 - protein, 11 aa, Homo sapiens
  Table 1.2; MAGEA6; ENSG00000197172; HLA -C*03:03
VPAAESPDPPQ

SEQ ID NO: 6175 - protein, 8 aa, Homo sapiens
  Table 1.2; MAGEA6; ENSG00000197172; HLA -B*55:01
VPGSDPAC

SEQ ID NO: 6176 - protein, 9 aa, Homo sapiens
  Table 1.2; MAGEA6; ENSG00000197172; HLA -B*35:01,HLA-B*55:01
VPGSDPACY

SEQ ID NO: 6177 - protein, 11 aa, Homo sapiens
  Table 1.2; MAGEA6; ENSG00000197172; HLA -B*35:01
VPGSDPACYEF

SEQ ID NO: 6178 - protein, 8 aa, Homo sapiens
  Table 1.2; MAGEA6; ENSG00000197172; HLA -A*01:01,HLA-A*30:02,HLA-B*15:01,HLA-B*15:03,HLA-B*27:05, HLA-B*39:01,HLA-B*46:01,HLA-C*04:01,HLA-C*07:01,HLA-C*07:04
VQENYLEY

SEQ ID NO: 6179 - protein, 9 aa, Homo sapiens
  Table 1.2; MAGEA6; ENSG00000197172; HLA -A*31:01
VQENYLEYR

SEQ ID NO: 6180 - protein, 10 aa, Homo sapiens
  Table 1.2; MAGEA6; ENSG00000197172; HLA -A*02:03,HLA-B*40:02
VTKAEMLGSV

SEQ ID NO: 6181 - protein, 9 aa, Homo sapiens
  Table 1.2; MAGEA6; ENSG00000197172; HLA -A*02:01,HLA-A*02:03,HLA-A*02:04,HLA-B*54:01,HLA-B*55:01, HLA-B*56:01
VTLGEVPAA

SEQ ID NO: 6182 - protein, 9 aa, Homo sapiens
  Table 1.2; MAGEA6; ENSG00000197172; HLA -A*24:02
VVGNWQYFF

SEQ ID NO: 6183 - protein, 8 aa, Homo sapiens
  Table 1.2; MAGEA6; ENSG00000197172; HLA -A*23:01,HLA-A*24:02,HLA-C*14:02
VYIFATCL

SEQ ID NO: 6184 - protein, 9 aa, Homo sapiens
  Table 1.2; MAGEA6; ENSG00000197172; HLA -B*49:01
WEELSVLEV

SEQ ID NO: 6185 - protein, 9 aa, Homo sapiens
  Table 1.2; MAGEA6; ENSG00000197172; HLA -A*02:04
YEFLWGPRA

SEQ ID NO: 6186 - protein, 9 aa, Homo sapiens
  Table 1.2; MAGEA6; ENSG00000197172; HLA -A*29:02
YFFPVIFSK

SEQ ID NO: 6187 - protein, 10 aa, Homo sapiens
  Table 1.2; MAGEA6; ENSG00000197172; HLA -A*68:02
YFFPVIFSKA

SEQ ID NO: 6188 - protein, 10 aa, Homo sapiens
  Table 1.2; MAGEA6; ENSG00000197172; HLA -A*23:01,HLA-A*29:02
YFVQENYLEY

SEQ ID NO: 6189 - protein, 9 aa, Homo sapiens
  Table 1.2; MAGEA6; ENSG00000197172; HLA -A*02:07,HLA-A*68:02
YIFATCLGL

SEQ ID NO: 6190 - protein, 8 aa, Homo sapiens
  Table 1.2; MAGEA6; ENSG00000197172; HLA -B*54:01
YPLLHEWA

SEQ ID NO: 6191 - protein, 9 aa, Homo sapiens
  Table 1.2; MAGEA6; ENSG00000197172; HLA -B*08:01,HLA-B*35:01,HLA-B*35:03,HLA-B*54:01,HLA-B*55:01, HLA-B*56:01
YPLLHEWAL

SEQ ID NO: 6192 - protein, 8 aa, Homo sapiens
  Table 1.2; MAGEA6; ENSG00000197172; HLA -B*35:01,HLA-B*51:01
YPLWSQSY

SEQ ID NO: 6193 - protein, 9 aa, Homo sapiens
  Table 1.2; MAGEA6; ENSG00000197172; HLA -B*27:02,HLA-B*27:05,HLA-B*39:01
YRAREPVTK

SEQ ID NO: 6194 - protein, 8 aa, Homo sapiens
  Table 1.2; MAGEA6; ENSG00000197172; HLA -B*08:01
YVKVLHHM

SEQ ID NO: 6195 - protein, 9 aa, Homo sapiens
  Table 1.2; MAGEA6; ENSG00000197172; HLA -A*68:02
YVKVLHHMV

SEQ ID NO: 6196 - protein, 8 aa, Homo sapiens
  Table 1.2; MAGEA9; ENSG00000123584; HLA -B*37:01,HLA-B*44:02
AELVHFLL

SEQ ID NO: 6197 - protein, 11 aa, Homo sapiens
  Table 1.2; MAGEA9; ENSG00000123584; HLA -B*44:02
AELVHFLLHKY

SEQ ID NO: 6198 - protein, 8 aa, Homo sapiens
  Table 1.2; MAGEA9; ENSG00000123584; HLA -B*40:01,HLA-B*44:02,HLA-B*49:01
AEMLESVI

SEQ ID NO: 6199 - protein, 10 aa, Homo sapiens
  Table 1.2; MAGEA9; ENSG00000123584; HLA -B*44:02
AEMLESVIKN

SEQ ID NO: 6200 - protein, 11 aa, Homo sapiens
  Table 1.2; MAGEA9; ENSG00000123584; HLA -A*30:01,HLA-A*30:02,HLA-B*27:02,HLA-B*40:01,HLA-B*44:02, HLA-B*44:03,HLA-C*16:04
AEMLESVIKNY

SEQ ID NO: 6201 - protein, 8 aa, Homo sapiens
  Table 1.2; MAGEA9; ENSG00000123584; HLA -B*49:01
AETSYEKV

SEQ ID NO: 6202 - protein, 9 aa, Homo sapiens
  Table 1.2; MAGEA9; ENSG00000123584; HLA -A*30:01,HLA-B*13:02,HLA-B*27:02,HLA-B*40:01,HLA-B*40:02, HLA-B*44:02,HLA-B*44:03,HLA-B*49:01,HLA-C*16:02,HLA-C*16:04
AETSYEKVI

SEQ ID NO: 6203 - protein, 11 aa, Homo sapiens
  Table 1.2; MAGEA9; ENSG00000123584; HLA -B*44:02,HLA-B*44:03
AETSYEKVINY

SEQ ID NO: 6204 - protein, 9 aa, Homo sapiens
  Table 1.2; MAGEA9; ENSG00000123584; HLA -A*03:02,HLA-A*11:01,HLA-B*27:05
AHAETSYEK

SEQ ID NO: 6205 - protein, 10 aa, Homo sapiens
  Table 1.2; MAGEA9; ENSG00000123584; HLA -B*38:01
AHAETSYEKV

SEQ ID NO: 6206 - protein, 11 aa, Homo sapiens
  Table 1.2; MAGEA9; ENSG00000123584; HLA -B*38:01
AHAETSYEKVI

SEQ ID NO: 6207 - protein, 9 aa, Homo sapiens
  Table 1.2; MAGEA9; ENSG00000123584; HLA -A*02:03,HLA-A*02:04,HLA-B*08:01
ALKLKVAEL

SEQ ID NO: 6208 - protein, 9 aa, Homo sapiens
  Table 1.2; MAGEA9; ENSG00000123584; HLA -A*02:01,HLA-A*02:03,HLA-A*02:04,HLA-A*02:07
ALLIIVLGV

SEQ ID NO: 6209 - protein, 8 aa, Homo sapiens
  Table 1.2; MAGEA9; ENSG00000123584; HLA -A*30:02,HLA-B*15:01,HLA-B*15:03
ALSVMGVY

SEQ ID NO: 6210 - protein, 9 aa, Homo sapiens
  Table 1.2; MAGEA9; ENSG00000123584; HLA -A*02:01,HLA-A*02:03,HLA-A*02:04,HLA-A*02:07,HLA-B*13:02, HLA-B*55:01
ALSVMGVYV

SEQ ID NO: 6211 - protein, 11 aa, Homo sapiens
  Table 1.2; MAGEA9; ENSG00000123584; HLA -A*03:01,HLA-A*03:02
ALSVMGVYVGK

SEQ ID NO: 6212 - protein, 9 aa, Homo sapiens
  Table 1.2; MAGEA9; ENSG00000123584; HLA -B*54:01,HLA-B*56:01
APEEVIWEA

SEQ ID NO: 6213 - protein, 10 aa, Homo sapiens
  Table 1.2; MAGEA9; ENSG00000123584; HLA -B*35:03
APEEVIWEAL

SEQ ID NO: 6214 - protein, 8 aa, Homo sapiens
  Table 1.2; MAGEA9; ENSG00000123584; HLA -A*30:02,HLA-B*15:01
ASSSISVY

SEQ ID NO: 6215 - protein, 9 aa, Homo sapiens
  Table 1.2; MAGEA9; ENSG00000123584; HLA -A*01:01,HLA-A*03:01,HLA-A*03:02,HLA-A*11:01,HLA-A*26:01, HLA-A*29:02,HLA-A*30:02,HLA-A*31:01,HLA-A*32:01,HLA-A*68:01, HLA-B*15:01,HLA-B*15:03,HLA-B*27:02,HLA-B*27:05,HLA-B*44:03,
  HLA-B*46:01,HLA-B*57:01,HLA-B*58:01,HLA-C*02:02,HLA-C*12:03, HLA-C*16:01,HLA-C*16:02,HLA-C*16:04
ASSSISVYY

SEQ ID NO: 6216 - protein, 8 aa, Homo sapiens
  Table 1.2; MAGEA9; ENSG00000123584; HLA -B*51:01
DPAGHSYI

SEQ ID NO: 6217 - protein, 9 aa, Homo sapiens
  Table 1.2; MAGEA9; ENSG00000123584; HLA -B*08:01,HLA-B*35:01,HLA-B*35:03
DPAGHSYIL

SEQ ID NO: 6218 - protein, 9 aa, Homo sapiens
  Table 1.2; MAGEA9; ENSG00000123584; HLA -B*35:01
DPAQLEFMF

SEQ ID NO: 6219 - protein, 10 aa, Homo sapiens
  Table 1.2; MAGEA9; ENSG00000123584; HLA -A*25:01,HLA-A*26:01,HLA-A*33:01
DSMLGDGHSM

SEQ ID NO: 6220 - protein, 10 aa, Homo sapiens
  Table 1.2; MAGEA9; ENSG00000123584; HLA -A*26:01,HLA-A*68:01
DVKEVDPAGH

SEQ ID NO: 6221 - protein, 8 aa, Homo sapiens
  Table 1.2; MAGEA9; ENSG00000123584; HLA -B*51:01
EALSVMGV

SEQ ID NO: 6222 - protein, 9 aa, Homo sapiens
  Table 1.2; MAGEA9; ENSG00000123584; HLA -A*25:01,HLA-A*26:01,HLA-A*29:02,HLA-A*30:02,HLA-A*33:01, HLA-A*33:03,HLA-B*18:01,HLA-B*35:01,HLA-C*07:06
EALSVMGVY

SEQ ID NO: 6223 - protein, 10 aa, Homo sapiens
  Table 1.2; MAGEA9; ENSG00000123584; HLA -A*26:01,HLA-A*68:01,HLA-A*68:02
EALSVMGVYV

SEQ ID NO: 6224 - protein, 9 aa, Homo sapiens
  Table 1.2; MAGEA9; ENSG00000123584; HLA -B*35:03
EAQGEDLGL

SEQ ID NO: 6225 - protein, 10 aa, Homo sapiens
  Table 1.2; MAGEA9; ENSG00000123584; HLA -A*26:01
EAQGEDLGLM

SEQ ID NO: 6226 - protein, 9 aa, Homo sapiens
  Table 1.2; MAGEA9; ENSG00000123584; HLA -B*49:01
EEEEPSSSV

SEQ ID NO: 6227 - protein, 8 aa, Homo sapiens
  Table 1.2; MAGEA9; ENSG00000123584; HLA -B*18:01
EEVIWEAL

SEQ ID NO: 6228 - protein, 10 aa, Homo sapiens
  Table 1.2; MAGEA9; ENSG00000123584; HLA -A*29:02
ELVHFLLHKY

SEQ ID NO: 6229 - protein, 10 aa, Homo sapiens
  Table 1.2; MAGEA9; ENSG00000123584; HLA -A*25:01,HLA-A*26:01,HLA-A*29:02,HLA-A*30:02,HLA-A*33:01, HLA-A*33:03,HLA-B*44:02,HLA-B*44:03
EMLESVIKNY

SEQ ID NO: 6230 - protein, 9 aa, Homo sapiens
  Table 1.2; MAGEA9; ENSG00000123584; HLA -A*26:01,HLA-B*35:01
EPICYPSLY

SEQ ID NO: 6231 - protein, 8 aa, Homo sapiens
  Table 1.2; MAGEA9; ENSG00000123584; HLA -B*08:01,HLA-B*35:03
EPVTKAEM

SEQ ID NO: 6232 - protein, 9 aa, Homo sapiens
  Table 1.2; MAGEA9; ENSG00000123584; HLA -B*08:01,HLA-B*35:03
EPVTKAEML

SEQ ID NO: 6233 - protein, 9 aa, Homo sapiens
  Table 1.2; MAGEA9; ENSG00000123584; HLA -A*33:03,HLA-A*68:01
ESVIKNYKR

SEQ ID NO: 6234 - protein, 10 aa, Homo sapiens
  Table 1.2; MAGEA9; ENSG00000123584; HLA -A*01:01,HLA-A*25:01,HLA-A*26:01,HLA-A*33:03,HLA-A*68:01
ETSYEKVINY

SEQ ID NO: 6235 - protein, 11 aa, Homo sapiens
  Table 1.2; MAGEA9; ENSG00000123584; HLA -A*68:01,HLA-A*68:02
ETSYEKVINYL

SEQ ID NO: 6236 - protein, 9 aa, Homo sapiens
  Table 1.2; MAGEA9; ENSG00000123584; HLA -A*01:01,HLA-A*25:01,HLA-A*26:01,HLA-A*29:02,HLA-A*30:02, HLA-A*32:01,HLA-A*33:03,HLA-A*68:01,HLA-B*15:01,HLA-B*15:03, HLA-B*18:01,HLA-B*35:01,HLA-B*39:01,HLA-B*44:02,HLA-B*44:03,
  HLA-B*58:01,HLA-C*03:03,HLA-C*05:01,HLA-C*07:04,HLA-C*07:06, HLA-C*16:02
EVDPAGHSY

SEQ ID NO: 6237 - protein, 10 aa, Homo sapiens
  Table 1.2; MAGEA9; ENSG00000123584; HLA -A*01:01,HLA-A*25:01,HLA-A*68:02,HLA-B*38:01
EVDPAGHSYI

SEQ ID NO: 6238 - protein, 11 aa, Homo sapiens
  Table 1.2; MAGEA9; ENSG00000123584; HLA -A*01:01,HLA-A*02:07,HLA-B*38:01
EVDPAGHSYIL

SEQ ID NO: 6239 - protein, 9 aa, Homo sapiens
  Table 1.2; MAGEA9; ENSG00000123584; HLA -A*25:01,HLA-A*26:01,HLA-A*68:02
EVIWEALSV

SEQ ID NO: 6240 - protein, 10 aa, Homo sapiens
  Table 1.2; MAGEA9; ENSG00000123584; HLA -A*25:01,HLA-A*26:01
EVIWEALSVM

SEQ ID NO: 6241 - protein, 10 aa, Homo sapiens
  Table 1.2; MAGEA9; ENSG00000123584; HLA -A*26:01
EVLGEEQEGV

SEQ ID NO: 6242 - protein, 8 aa, Homo sapiens
  Table 1.2; MAGEA9; ENSG00000123584; HLA -C*16:02
FGTDVKEV

SEQ ID NO: 6243 - protein, 9 aa, Homo sapiens
  Table 1.2; MAGEA9; ENSG00000123584; HLA -A*02:01,HLA-A*02:03,HLA-A*02:04,HLA-A*02:07,HLA-A*29:02, HLA-B*13:02
FMFQEALKL

SEQ ID NO: 6244 - protein, 8 aa, Homo sapiens
  Table 1.2; MAGEA9; ENSG00000123584; HLA -B*54:01,HLA-B*56:01
FPVIFGKA

SEQ ID NO: 6245 - protein, 9 aa, Homo sapiens
  Table 1.2; MAGEA9; ENSG00000123584; HLA -B*54:01
FPVIFGKAS

SEQ ID NO: 6246 - protein, 11 aa, Homo sapiens
  Table 1.2; MAGEA9; ENSG00000123584; HLA -B*35:01
FPVIFGKASEF

SEQ ID NO: 6247 - protein, 9 aa, Homo sapiens
  Table 1.2; MAGEA9; ENSG00000123584; HLA -B*13:02
FQEALKLKV

SEQ ID NO: 6248 - protein, 9 aa, Homo sapiens
  Table 1.2; MAGEA9; ENSG00000123584; HLA -A*24:02
FYGEPRKLL

SEQ ID NO: 6249 - protein, 9 aa, Homo sapiens
  Table 1.2; MAGEA9; ENSG00000123584; HLA -A*25:01,HLA-A*26:01,HLA-A*29:02,HLA-A*30:02,HLA-A*32:01, HLA-B*15:01,HLA-B*15:03,HLA-B*27:05,HLA-B*35:01,HLA-B*39:01, HLA-B*46:01,HLA-B*58:01,HLA-C*02:02,HLA-C*07:04,HLA-C*12:03,
  HLA-C*16:02,HLA-C*16:04
GASSSISVY

SEQ ID NO: 6250 - protein, 10 aa, Homo sapiens
  Table 1.2; MAGEA9; ENSG00000123584; HLA -A*01:01,HLA-A*26:01,HLA-A*29:02,HLA-A*30:02,HLA-B*15:01, HLA-B*15:03,HLA-B*27:05,HLA-B*58:01,HLA-C*02:02,HLA-C*16:04
GASSSISVYY

SEQ ID NO: 6251 - protein, 8 aa, Homo sapiens
  Table 1.2; MAGEA9; ENSG00000123584; HLA -A*03:02,HLA-A*11:01
GDGHSMPK

SEQ ID NO: 6252 - protein, 9 aa, Homo sapiens
  Table 1.2; MAGEA9; ENSG00000123584; HLA -B*49:01
GEDLGLMGA

SEQ ID NO: 6253 - protein, 10 aa, Homo sapiens
  Table 1.2; MAGEA9; ENSG00000123584; HLA -A*30:02,HLA-B*15:01
GGASSSISVY

SEQ ID NO: 6254 - protein, 11 aa, Homo sapiens
  Table 1.2; MAGEA9; ENSG00000123584; HLA -A*30:02,HLA-B*27:05
GGASSSISVYY

SEQ ID NO: 6255 - protein, 9 aa, Homo sapiens
  Table 1.2; MAGEA9; ENSG00000123584; HLA -B*38:01,HLA-B*39:01
GHSMPKAAL

SEQ ID NO: 6256 - protein, 9 aa, Homo sapiens
  Table 1.2; MAGEA9; ENSG00000123584; HLA -A*01:01,HLA-A*29:02,HLA-A*30:02,HLA-A*32:01,HLA-B*57:01, HLA-B*58:01,HLA-C*05:01
GSDPAHYEF

SEQ ID NO: 6257 - protein, 10 aa, Homo sapiens
  Table 1.2; MAGEA9; ENSG00000123584; HLA -A*01:01
GSDPAHYEFL

SEQ ID NO: 6258 - protein, 11 aa, Homo sapiens
  Table 1.2; MAGEA9; ENSG00000123584; HLA -B*57:01
GSDPAHYEFLW

SEQ ID NO: 6259 - protein, 10 aa, Homo sapiens
  Table 1.2; MAGEA9; ENSG00000123584; HLA -A*30:02,HLA-A*32:01,HLA-B*15:01,HLA-B*15:03,HLA-B*46:01, HLA-B*58:01
GSKAHAETSY

SEQ ID NO: 6260 - protein, 11 aa, Homo sapiens
  Table 1.2; MAGEA9; ENSG00000123584; HLA -A*29:02
GVYVGKEHMFY

SEQ ID NO: 6261 - protein, 9 aa, Homo sapiens
  Table 1.2; MAGEA9; ENSG00000123584; HLA -A*01:01
HAETSYEKV

SEQ ID NO: 6262 - protein, 8 aa, Homo sapiens
  Table 1.2; MAGEA9; ENSG00000123584; HLA -B*08:01
HSMPKAAL

SEQ ID NO: 6263 - protein, 9 aa, Homo sapiens
  Table 1.2; MAGEA9; ENSG00000123584; HLA -B*08:01
HSMPKAALL

SEQ ID NO: 6264 - protein, 8 aa, Homo sapiens
  Table 1.2; MAGEA9; ENSG00000123584; HLA -B*54:01
HSYILVTA

SEQ ID NO: 6265 - protein, 9 aa, Homo sapiens
  Table 1.2; MAGEA9; ENSG00000123584; HLA -B*15:03,HLA-B*18:01,HLA-B*40:02,HLA-B*51:01
HSYILVTAL

SEQ ID NO: 6266 - protein, 8 aa, Homo sapiens
  Table 1.2; MAGEA9; ENSG00000123584; HLA -A*23:01,HLA-C*14:02
IFGKASEF

SEQ ID NO: 6267 - protein, 8 aa, Homo sapiens
  Table 1.2; MAGEA9; ENSG00000123584; HLA -B*57:01
ISVYYTLW

SEQ ID NO: 6268 - protein, 9 aa, Homo sapiens
  Table 1.2; MAGEA9; ENSG00000123584; HLA -A*03:01,HLA-A*03:02,HLA-A*11:01
IVLGVILTK

SEQ ID NO: 6269 - protein, 8 aa, Homo sapiens
  Table 1.2; MAGEA9; ENSG00000123584; HLA -A*30:02,HLA-A*32:01,HLA-B*15:01,HLA-B*46:01,HLA-B*58:01
KAHAETSY

SEQ ID NO: 6270 - protein, 9 aa, Homo sapiens
  Table 1.2; MAGEA9; ENSG00000123584; HLA -B*13:02,HLA-B*49:01,HLA-B*58:01,HLA-C*02:02,HLA-C*12:03, HLA-C*16:02,HLA-C*16:04
KASEFMQVI

SEQ ID NO: 6271 - protein, 10 aa, Homo sapiens
  Table 1.2; MAGEA9; ENSG00000123584; HLA -B*57:01
KASEFMQVIF

SEQ ID NO: 6272 - protein, 9 aa, Homo sapiens
  Table 1.2; MAGEA9; ENSG00000123584; HLA -B*37:01,HLA-B*40:01
KEPVTKAEM

SEQ ID NO: 6273 - protein, 10 aa, Homo sapiens
  Table 1.2; MAGEA9; ENSG00000123584; HLA -B*40:01
KEPVTKAEML

SEQ ID NO: 6274 - protein, 10 aa, Homo sapiens
  Table 1.2; MAGEA9; ENSG00000123584; HLA -A*25:01,HLA-A*29:02,HLA-A*30:01,HLA-A*30:02,HLA-A*32:01, HLA-B*15:01,HLA-B*15:03,HLA-B*18:01,HLA-B*27:02,HLA-B*27:05, HLA-B*37:01,HLA-B*40:01,HLA-B*44:02,HLA-B*44:03,HLA-C*02:02,
  HLA-C*16:01,HLA-C*16:04
KEVDPAGHSY

SEQ ID NO: 6275 - protein, 11 aa, Homo sapiens
  Table 1.2; MAGEA9; ENSG00000123584; HLA -B*40:01,HLA-B*49:01
KEVDPAGHSYI

SEQ ID NO: 6276 - protein, 9 aa, Homo sapiens
  Table 1.2; MAGEA9; ENSG00000123584; HLA -A*02:01,HLA-A*02:03,HLA-A*02:04,HLA-A*02:07,HLA-A*31:01, HLA-A*32:01,HLA-A*68:02,HLA-B*27:05,HLA-B*58:01
KVAELVHFL

SEQ ID NO: 6277 - protein, 10 aa, Homo sapiens
  Table 1.2; MAGEA9; ENSG00000123584; HLA -A*02:04,HLA-A*02:07,HLA-A*31:01,HLA-A*68:02
KVAELVHFLL

SEQ ID NO: 6278 - protein, 9 aa, Homo sapiens
  Table 1.2; MAGEA9; ENSG00000123584; HLA -A*02:01,HLA-A*02:04,HLA-A*02:07
KVINYLVML

SEQ ID NO: 6279 - protein, 8 aa, Homo sapiens
  Table 1.2; MAGEA9; ENSG00000123584; HLA -B*40:01
LEAQGEDL

SEQ ID NO: 6280 - protein, 10 aa, Homo sapiens
  Table 1.2; MAGEA9; ENSG00000123584; HLA -B*40:01
LEAQGEDLGL

SEQ ID NO: 6281 - protein, 8 aa, Homo sapiens
  Table 1.2; MAGEA9; ENSG00000123584; HLA -B*18:01,HLA-B*49:01
LEFMFQEA

SEQ ID NO: 6282 - protein, 9 aa, Homo sapiens
  Table 1.2; MAGEA9; ENSG00000123584; HLA -A*30:01,HLA-B*18:01,HLA-B*40:01,HLA-B*40:02,HLA-B*49:01
LEFMFQEAL

SEQ ID NO: 6283 - protein, 8 aa, Homo sapiens
  Table 1.2; MAGEA9; ENSG00000123584; HLA -B*18:01,HLA-B*37:01,HLA-B*44:02,HLA-B*44:03
LESVIKNY

SEQ ID NO: 6284 - protein, 9 aa, Homo sapiens
  Table 1.2; MAGEA9; ENSG00000123584; HLA -A*03:01,HLA-A*03:02,HLA-A*11:01
LGDGHSMPK

SEQ ID NO: 6285 - protein, 10 aa, Homo sapiens
  Table 1.2; MAGEA9; ENSG00000123584; HLA -B*27:02
LSVMGVYVGK

SEQ ID NO: 6286 - protein, 10 aa, Homo sapiens
  Table 1.2; MAGEA9; ENSG00000123584; HLA -A*01:01,HLA-A*29:02,HLA-A*30:02,HLA-B*57:01,HLA-B*58:01
LTQDWVQENY

SEQ ID NO: 6287 - protein, 9 aa, Homo sapiens
  Table 1.2; MAGEA9; ENSG00000123584; HLA -A*29:02
LVHFLLHKY

SEQ ID NO: 6288 - protein, 8 aa, Homo sapiens
  Table 1.2; MAGEA9; ENSG00000123584; HLA -C*14:02
MFQEALKL

SEQ ID NO: 6289 - protein, 9 aa, Homo sapiens
  Table 1.2; MAGEA9; ENSG00000123584; HLA -A*01:01,HLA-A*03:02,HLA-A*29:02,HLA-A*30:02,HLA-A*32:01, HLA-B*15:01,HLA-B*15:03,HLA-B*27:05,HLA-B*44:02,HLA-B*44:03, HLA-C*16:02
MLESVIKNY

SEQ ID NO: 6290 - protein, 10 aa, Homo sapiens
  Table 1.2; MAGEA9; ENSG00000123584; HLA -A*03:01,HLA-A*03:02
MLESVIKNYK

SEQ ID NO: 6291 - protein, 8 aa, Homo sapiens
  Table 1.2; MAGEA9; ENSG00000123584; HLA -A*32:01,HLA-C*01:02
MLGDGHSM

SEQ ID NO: 6292 - protein, 10 aa, Homo sapiens
  Table 1.2; MAGEA9; ENSG00000123584; HLA -A*03:01,HLA-A*03:02,HLA-A*11:01,HLA-A*33:01
MLGDGHSMPK

SEQ ID NO: 6293 - protein, 8 aa, Homo sapiens
  Table 1.2; MAGEA9; ENSG00000123584; HLA -B*51:01
MPKAALLI

SEQ ID NO: 6294 - protein, 9 aa, Homo sapiens
  Table 1.2; MAGEA9; ENSG00000123584; HLA -B*51:01,HLA-B*54:01
MPKAALLII

SEQ ID NO: 6295 - protein, 10 aa, Homo sapiens
  Table 1.2; MAGEA9; ENSG00000123584; HLA -B*54:01
MPKAALLIIV

SEQ ID NO: 6296 - protein, 9 aa, Homo sapiens
  Table 1.2; MAGEA9; ENSG00000123584; HLA -A*30:01,HLA-B*13:02,HLA-B*15:03,HLA-B*39:01
MQVIFGTDV

SEQ ID NO: 6297 - protein, 9 aa, Homo sapiens
  Table 1.2; MAGEA9; ENSG00000123584; HLA -A*24:02
NYKRYFPVI

SEQ ID NO: 6298 - protein, 9 aa, Homo sapiens
  Table 1.2; MAGEA9; ENSG00000123584; HLA -A*33:01,HLA-A*33:03
NYLVMLNAR

SEQ ID NO: 6299 - protein, 9 aa, Homo sapiens
  Table 1.2; MAGEA9; ENSG00000123584; HLA -A*30:01
QDWVQENYL

SEQ ID NO: 6300 - protein, 11 aa, Homo sapiens
  Table 1.2; MAGEA9; ENSG00000123584; HLA -A*30:02
QGGASSSISVY

SEQ ID NO: 6301 - protein, 9 aa, Homo sapiens
  Table 1.2; MAGEA9; ENSG00000123584; HLA -A*03:02,HLA-A*11:01
QVIFGTDVK

SEQ ID NO: 6302 - protein, 10 aa, Homo sapiens
  Table 1.2; MAGEA9; ENSG00000123584; HLA -A*01:01,HLA-A*25:01,HLA-A*26:01,HLA-A*29:02,HLA-A*30:02
QVPGSDPAHY

SEQ ID NO: 6303 - protein, 11 aa, Homo sapiens
  Table 1.2; MAGEA9; ENSG00000123584; HLA -A*30:02,HLA-A*32:01,HLA-B*15:01,HLA-B*15:03,HLA-B*58:01
RQVPGSDPAHY

SEQ ID NO: 6304 - protein, 8 aa, Homo sapiens
  Table 1.2; MAGEA9; ENSG00000123584; HLA -A*03:01,HLA-A*03:02,HLA-A*11:01,HLA-A*31:01,HLA-B*57:01
RVKEPVTK

SEQ ID NO: 6305 - protein, 9 aa, Homo sapiens
  Table 1.2; MAGEA9; ENSG00000123584; HLA -A*02:03,HLA-A*32:01,HLA-B*55:01,HLA-B*56:01
RVKEPVTKA

SEQ ID NO: 6306 - protein, 9 aa, Homo sapiens
  Table 1.2; MAGEA9; ENSG00000123584; HLA -A*03:01,HLA-A*31:01,HLA-B*57:01
RYFPVIFGK

SEQ ID NO: 6307 - protein, 8 aa, Homo sapiens
  Table 1.2; MAGEA9; ENSG00000123584; HLA -B*37:01
SDPAHYEF

SEQ ID NO: 6308 - protein, 8 aa, Homo sapiens
  Table 1.2; MAGEA9; ENSG00000123584; HLA -B*18:01,HLA-B*37:01,HLA-B*44:02,HLA-B*44:03
SEFMQVIF

SEQ ID NO: 6309 - protein, 9 aa, Homo sapiens
  Table 1.2; MAGEA9; ENSG00000123584; HLA -B*15:03
SKAHAETSY

SEQ ID NO: 6310 - protein, 9 aa, Homo sapiens
  Table 1.2; MAGEA9; ENSG00000123584; HLA -A*32:01,HLA-B*15:01,HLA-B*35:03,HLA-B*46:01,HLA-B*55:01, HLA-C*01:02,HLA-C*14:02
SMLGDGHSM

SEQ ID NO: 6311 - protein, 11 aa, Homo sapiens
  Table 1.2; MAGEA9; ENSG00000123584; HLA -A*03:01,HLA-A*03:02,HLA-A*11:01
SMLGDGHSMPK

SEQ ID NO: 6312 - protein, 10 aa, Homo sapiens
  Table 1.2; MAGEA9; ENSG00000123584; HLA -B*07:02,HLA-C*07:02
SPQGGASSSI

SEQ ID NO: 6313 - protein, 10 aa, Homo sapiens
  Table 1.2; MAGEA9; ENSG00000123584; HLA -B*39:01
SQFDEGSSSQ

SEQ ID NO: 6314 - protein, 9 aa, Homo sapiens
  Table 1.2; MAGEA9; ENSG00000123584; HLA -C*05:01
SSDSKEEEV

SEQ ID NO: 6315 - protein, 9 aa, Homo sapiens
  Table 1.2; MAGEA9; ENSG00000123584; HLA -A*23:01,HLA-B*58:01
SSISVYYTL

SEQ ID NO: 6316 - protein, 10 aa, Homo sapiens
  Table 1.2; MAGEA9; ENSG00000123584; HLA -A*25:01,HLA-B*57:01
SSISVYYTLW

SEQ ID NO: 6317 - protein, 8 aa, Homo sapiens
  Table 1.2; MAGEA9; ENSG00000123584; HLA -A*30:02
SSSISVYY

SEQ ID NO: 6318 - protein, 9 aa, Homo sapiens
  Table 1.2; MAGEA9; ENSG00000123584; HLA -A*01:01,HLA-A*02:07,HLA-A*11:01,HLA-A*25:01,HLA-A*26:01, HLA-A*29:02,HLA-A*32:01,HLA-B*15:01,HLA-B*15:03,HLA-B*35:01, HLA-B*38:01,HLA-B*46:01,HLA-B*58:01,HLA-C*02:02,HLA-C*03:03,
  HLA-C*03:04,HLA-C*04:01,HLA-C*05:01
SVDPAQLEF

SEQ ID NO: 6319 - protein, 10 aa, Homo sapiens
  Table 1.2; MAGEA9; ENSG00000123584; HLA -A*01:01,HLA-A*02:07
SVDPAQLEFM

SEQ ID NO: 6320 - protein, 11 aa, Homo sapiens
  Table 1.2; MAGEA9; ENSG00000123584; HLA -A*02:07
SVDPAQLEFMF

SEQ ID NO: 6321 - protein, 9 aa, Homo sapiens
  Table 1.2; MAGEA9; ENSG00000123584; HLA -A*03:01,HLA-A*03:02,HLA-A*11:01,HLA-A*31:01,HLA-A*33:01, HLA-A*33:03,HLA-A*68:01,HLA-C*07:06
SVMGVYVGK

SEQ ID NO: 6322 - protein, 9 aa, Homo sapiens
  Table 1.2; MAGEA9; ENSG00000123584; HLA -A*23:01,HLA-A*24:02
SYEKVINYL

SEQ ID NO: 6323 - protein, 8 aa, Homo sapiens
  Table 1.2; MAGEA9; ENSG00000123584; HLA -A*23:01,HLA-A*24:02,HLA-C*14:02
SYILVTAL

SEQ ID NO: 6324 - protein, 10 aa, Homo sapiens
  Table 1.2; MAGEA9; ENSG00000123584; HLA -A*23:01,HLA-A*24:02
SYILVTALGL

SEQ ID NO: 6325 - protein, 9 aa, Homo sapiens
  Table 1.2; MAGEA9; ENSG00000123584; HLA -A*01:01,HLA-A*30:02
TQDWVQENY

SEQ ID NO: 6326 - protein, 10 aa, Homo sapiens
  Table 1.2; MAGEA9; ENSG00000123584; HLA -B*38:01
TQDWVQENYL

SEQ ID NO: 6327 - protein, 9 aa, Homo sapiens
  Table 1.2; MAGEA9; ENSG00000123584; HLA -A*01:01,HLA-A*03:01,HLA-A*11:01,HLA-A*25:01,HLA-A*26:01, HLA-A*29:02,HLA-A*30:02,HLA-A*32:01,HLA-A*33:01,HLA-A*33:03, HLA-A*68:01,HLA-B*08:01,HLA-B*15:01,HLA-B*15:03,HLA-B*18:01,
  HLA-B*35:01,HLA-B*44:03,HLA-B*46:01,HLA-B*57:01,HLA-B*58:01, HLA-C*02:02,HLA-C*07:04,HLA-C*07:06,HLA-C*12:03,HLA-C*14:02, HLA-C*16:01,HLA-C*16:02,HLA-C*16:04
TSYEKVINY

SEQ ID NO: 6328 - protein, 10 aa, Homo sapiens
  Table 1.2; MAGEA9; ENSG00000123584; HLA -A*68:02
TSYEKVINYL

SEQ ID NO: 6329 - protein, 11 aa, Homo sapiens
  Table 1.2; MAGEA9; ENSG00000123584; HLA -A*68:02
TSYEKVINYLV

SEQ ID NO: 6330 - protein, 9 aa, Homo sapiens
  Table 1.2; MAGEA9; ENSG00000123584; HLA -A*02:07
VAELVHFLL

SEQ ID NO: 6331 - protein, 8 aa, Homo sapiens
  Table 1.2; MAGEA9; ENSG00000123584; HLA -A*30:02,HLA-B*37:01,HLA-C*01:02
VDPAGHSY

SEQ ID NO: 6332 - protein, 9 aa, Homo sapiens
  Table 1.2; MAGEA9; ENSG00000123584; HLA -A*26:01,HLA-A*29:02,HLA-A*30:02,HLA-A*32:01,HLA-B*15:01, HLA-B*15:03,HLA-B*46:01,HLA-C*02:02
VIFGKASEF

SEQ ID NO: 6333 - protein, 10 aa, Homo sapiens
  Table 1.2; MAGEA9; ENSG00000123584; HLA -A*02:01,HLA-A*02:03
VIFGTDVKEV

SEQ ID NO: 6334 - protein, 11 aa, Homo sapiens
  Table 1.2; MAGEA9; ENSG00000123584; HLA -A*02:01,HLA-A*02:07
VIWEALSVMGV

SEQ ID NO: 6335 - protein, 10 aa, Homo sapiens
  Table 1.2; MAGEA9; ENSG00000123584; HLA -B*15:03
VKEPVTKAEM

SEQ ID NO: 6336 - protein, 11 aa, Homo sapiens
  Table 1.2; MAGEA9; ENSG00000123584; HLA -B*15:03
VKEVDPAGHSY

SEQ ID NO: 6337 - protein, 9 aa, Homo sapiens
  Table 1.2; MAGEA9; ENSG00000123584; HLA -A*02:01,HLA-A*02:03,HLA-A*02:07,HLA-B*13:02,HLA-B*55:01
VLGEEQEGV

SEQ ID NO: 6338 - protein, 8 aa, Homo sapiens
  Table 1.2; MAGEA9; ENSG00000123584; HLA -A*03:01,HLA-A*03:02
VLGVILTK

SEQ ID NO: 6339 - protein, 8 aa, Homo sapiens
  Table 1.2; MAGEA9; ENSG00000123584; HLA -A*03:02
VMGVYVGK

SEQ ID NO: 6340 - protein, 9 aa, Homo sapiens
  Table 1.2; MAGEA9; ENSG00000123584; HLA -A*23:01
VMLNAREPI

SEQ ID NO: 6341 - protein, 11 aa, Homo sapiens
  Table 1.2; MAGEA9; ENSG00000123584; HLA -A*29:02
VMLNAREPICY

SEQ ID NO: 6342 - protein, 9 aa, Homo sapiens
  Table 1.2; MAGEA9; ENSG00000123584; HLA -A*01:01,HLA-A*30:02,HLA-B*35:01,HLA-B*55:01
VPGSDPAHY

SEQ ID NO: 6343 - protein, 11 aa, Homo sapiens
  Table 1.2; MAGEA9; ENSG00000123584; HLA -B*35:01,HLA-B*55:01
VPGSDPAHYEF

SEQ ID NO: 6344 - protein, 8 aa, Homo sapiens
  Table 1.2; MAGEA9; ENSG00000123584; HLA -A*01:01,HLA-B*39:01
VQENYLEY

SEQ ID NO: 6345 - protein, 9 aa, Homo sapiens
  Table 1.2; MAGEA9; ENSG00000123584; HLA -A*23:01,HLA-A*24:02
VYVGKEHMF

SEQ ID NO: 6346 - protein, 10 aa, Homo sapiens
  Table 1.2; MAGEA9; ENSG00000123584; HLA -A*29:02
VYVGKEHMFY

SEQ ID NO: 6347 - protein, 9 aa, Homo sapiens
  Table 1.2; MAGEA9; ENSG00000123584; HLA -A*23:01,HLA-A*24:02
VYYTLWSQF

SEQ ID NO: 6348 - protein, 9 aa, Homo sapiens
  Table 1.2; MAGEA9; ENSG00000123584; HLA -B*49:01
WEALSVMGV

SEQ ID NO: 6349 - protein, 9 aa, Homo sapiens
  Table 1.2; MAGEA9; ENSG00000123584; HLA -A*01:01,HLA-A*25:01,HLA-A*26:01,HLA-A*29:02,HLA-A*30:02, HLA-B*15:01,HLA-B*35:01
WVQENYLEY

SEQ ID NO: 6350 - protein, 9 aa, Homo sapiens
  Table 1.2; MAGEA9; ENSG00000123584; HLA -B*49:01
YEFLWGSKA

SEQ ID NO: 6351 - protein, 8 aa, Homo sapiens
  Table 1.2; MAGEA9; ENSG00000123584; HLA -A*30:01,HLA-B*08:01,HLA-B*18:01,HLA-B*37:01,HLA-B*40:02, HLA-B*49:01
YEKVINYL

SEQ ID NO: 6352 - protein, 9 aa, Homo sapiens
  Table 1.2; MAGEA9; ENSG00000123584; HLA -B*49:01
YEKVINYLV

SEQ ID NO: 6353 - protein, 8 aa, Homo sapiens
  Table 1.2; MAGEA9; ENSG00000123584; HLA -B*54:01,HLA-B*56:01
YPSLYEEV

SEQ ID NO: 6354 - protein, 9 aa, Homo sapiens
  Table 1.2; MAGEA9; ENSG00000123584; HLA -B*35:01,HLA-B*35:03,HLA-B*38:01,HLA-B*55:01
YPSLYEEVL

SEQ ID NO: 6355 - protein, 9 aa, Homo sapiens
  Table 1.2; MAGEA9; ENSG00000123584; HLA -B*27:02,HLA-B*27:05
YRVKEPVTK

SEQ ID NO: 6356 - protein, 9 aa, Homo sapiens
  Table 1.2; MAGEA9; ENSG00000123584; HLA -A*01:01,HLA-A*29:02
YVGKEHMFY

SEQ ID NO: 6357 - protein, 8 aa, Homo sapiens
  Table 1.2; MAGEA9; ENSG00000123584; HLA -A*24:02
YYTLWSQF

SEQ ID NO: 6358 - protein, 8 aa, Homo sapiens
  Table 1.2; MAGEB1; ENSG00000214107; HLA -B*37:01,HLA-B*49:01
AETTKMKV

SEQ ID NO: 6359 - protein, 9 aa, Homo sapiens
  Table 1.2; MAGEB1; ENSG00000214107; HLA -A*30:01,HLA-B*37:01,HLA-B*40:01,HLA-B*40:02,HLA-B*44:02, HLA-B*44:03,HLA-B*49:01
AETTKMKVL

SEQ ID NO: 6360 - protein, 11 aa, Homo sapiens
  Table 1.2; MAGEB1; ENSG00000214107; HLA -A*02:01,HLA-A*02:03,HLA-B*55:01
ALRDEEERAQV

SEQ ID NO: 6361 - protein, 8 aa, Homo sapiens
  Table 1.2; MAGEB1; ENSG00000214107; HLA -B*07:02
APFSRSSH

SEQ ID NO: 6362 - protein, 9 aa, Homo sapiens
  Table 1.2; MAGEB1; ENSG00000214107; HLA -B*07:02,HLA-B*56:01,HLA-C*07:02
APFSRSSHP

SEQ ID NO: 6363 - protein, 10 aa, Homo sapiens
  Table 1.2; MAGEB1; ENSG00000214107; HLA -B*07:02,HLA-B*08:01,HLA-B*35:01,HLA-B*35:03,HLA-B*54:01, HLA-B*55:01,HLA-B*56:01,HLA-C*04:01,HLA-C*07:01,HLA-C*07:02
APFSRSSHPM

SEQ ID NO: 6364 - protein, 8 aa, Homo sapiens
  Table 1.2; MAGEB1; ENSG00000214107; HLA -B*56:01
APPTTTAA

SEQ ID NO: 6365 - protein, 9 aa, Homo sapiens
  Table 1.2; MAGEB1; ENSG00000214107; HLA -B*07:02,HLA-B*54:01,HLA-B*55:01,HLA-B*56:01
APPTTTAAA

SEQ ID NO: 6366 - protein, 10 aa, Homo sapiens
  Table 1.2; MAGEB1; ENSG00000214107; HLA -B*56:01
APPTTTAAAA

SEQ ID NO: 6367 - protein, 11 aa, Homo sapiens
  Table 1.2; MAGEB1; ENSG00000214107; HLA -B*07:02,HLA-B*56:01
APPTTTAAAAV

SEQ ID NO: 6368 - protein, 9 aa, Homo sapiens
  Table 1.2; MAGEB1; ENSG00000214107; HLA -B*27:05
ARSRAPFSR

SEQ ID NO: 6369 - protein, 9 aa, Homo sapiens
  Table 1.2; MAGEB1; ENSG00000214107; HLA -B*57:01
ASRRLELVF

SEQ ID NO: 6370 - protein, 10 aa, Homo sapiens
  Table 1.2; MAGEB1; ENSG00000214107; HLA -A*01:01,HLA-A*30:02
ATPRDFPSHY

SEQ ID NO: 6371 - protein, 10 aa, Homo sapiens
  Table 1.2; MAGEB1; ENSG00000214107; HLA -A*03:02,HLA-A*11:01
ATTSTESSVK

SEQ ID NO: 6372 - protein, 10 aa, Homo sapiens
  Table 1.2; MAGEB1; ENSG00000214107; HLA -A*24:02
AWEAGMLMHF

SEQ ID NO: 6373 - protein, 8 aa, Homo sapiens
  Table 1.2; MAGEB1; ENSG00000214107; HLA -A*23:01,HLA-A*24:02,HLA-A*32:01,HLA-B*46:01,HLA-C*01:02, HLA-C*04:01,HLA-C*14:02
AYAETTKM

SEQ ID NO: 6374 - protein, 9 aa, Homo sapiens
  Table 1.2; MAGEB1; ENSG00000214107; HLA -A*03:02,HLA-A*33:03
AYAETTKMK

SEQ ID NO: 6375 - protein, 11 aa, Homo sapiens
  Table 1.2; MAGEB1; ENSG00000214107; HLA -A*24:02
AYAETTKMKVL

SEQ ID NO: 6376 - protein, 8 aa, Homo sapiens
  Table 1.2; MAGEB1; ENSG00000214107; HLA -C*04:01
AYDGEEHL

SEQ ID NO: 6377 - protein, 9 aa, Homo sapiens
  Table 1.2; MAGEB1; ENSG00000214107; HLA -A*23:01,HLA-A*24:02,HLA-B*35:03,HLA-B*38:01,HLA-B*55:01, HLA-C*04:01,HLA-C*05:01
AYDGEEHLI

SEQ ID NO: 6378 - protein, 10 aa, Homo sapiens
  Table 1.2; MAGEB1; ENSG00000214107; HLA -A*01:01,HLA-A*29:02,HLA-A*30:02
AYDGEEHLIY

SEQ ID NO: 6379 - protein, 8 aa, Homo sapiens
  Table 1.2; MAGEB1; ENSG00000214107; HLA -B*07:02,HLA-B*35:01,HLA-B*35:03,HLA-C*07:02
CPSSSPVL

SEQ ID NO: 6380 - protein, 9 aa, Homo sapiens
  Table 1.2; MAGEB1; ENSG00000214107; HLA -A*32:01,HLA-B*15:01,HLA-B*15:03,HLA-B*27:05,HLA-B*38:01
CQGEENASF

SEQ ID NO: 6381 - protein, 8 aa, Homo sapiens
  Table 1.2; MAGEB1; ENSG00000214107; HLA -B*18:01
DEEERAQV

SEQ ID NO: 6382 - protein, 9 aa, Homo sapiens
  Table 1.2; MAGEB1; ENSG00000214107; HLA -B*18:01
DEEERAQVR

SEQ ID NO: 6383 - protein, 9 aa, Homo sapiens
  Table 1.2; MAGEB1; ENSG00000214107; HLA -A*33:01
DLVQEKYLK

SEQ ID NO: 6384 - protein, 10 aa, Homo sapiens
  Table 1.2; MAGEB1; ENSG00000214107; HLA -A*25:01,HLA-A*26:01
DLVQEKYLKY

SEQ ID NO: 6385 - protein, 9 aa, Homo sapiens
  Table 1.2; MAGEB1; ENSG00000214107; HLA -A*33:01
DMLKVVDEK

SEQ ID NO: 6386 - protein, 10 aa, Homo sapiens
  Table 1.2; MAGEB1; ENSG00000214107; HLA -A*01:01,HLA-B*18:01
DMLKVVDEKY

SEQ ID NO: 6387 - protein, 9 aa, Homo sapiens
  Table 1.2; MAGEB1; ENSG00000214107; HLA -B*35:01,HLA-B*35:03
DPVAWEAGM

SEQ ID NO: 6388 - protein, 9 aa, Homo sapiens
  Table 1.2; MAGEB1; ENSG00000214107; HLA -A*26:01
DTPTSSPAA

SEQ ID NO: 6389 - protein, 9 aa, Homo sapiens
  Table 1.2; MAGEB1; ENSG00000214107; HLA -A*33:01,HLA-A*33:03
EALRDEEER

SEQ ID NO: 6390 - protein, 9 aa, Homo sapiens
  Table 1.2; MAGEB1; ENSG00000214107; HLA -A*25:01,HLA-A*26:01,HLA-A*29:02,HLA-A*30:02,HLA-A*32:01, HLA-A*33:01,HLA-A*33:03,HLA-B*15:01,HLA-B*15:03,HLA-B*18:01, HLA-B*27:02,HLA-B*35:01,HLA-B*37:01,HLA-B*44:02,HLA-B*44:03,
  HLA-C*07:01,HLA-C*07:04,HLA-C*07:06,HLA-C*16:01,HLA-C*16:04
EDNPSGHTY

SEQ ID NO: 6391 - protein, 11 aa, Homo sapiens
  Table 1.2; MAGEB1; ENSG00000214107; HLA -A*23:01,HLA-A*30:01,HLA-A*33:03,HLA-B*37:01,HLA-B*38:01
EDNPSGHTYTL

SEQ ID NO: 6392 - protein, 10 aa, Homo sapiens
  Table 1.2; MAGEB1; ENSG00000214107; HLA -A*30:01,HLA-B*38:01,HLA-B*40:01,HLA-B*40:02,HLA-B*44:03
EECPSSSPVL

SEQ ID NO: 6393 - protein, 9 aa, Homo sapiens
  Table 1.2; MAGEB1; ENSG00000214107; HLA -A*68:02,HLA-B*49:01
EEIWKFMNV

SEQ ID NO: 6394 - protein, 9 aa, Homo sapiens
  Table 1.2; MAGEB1; ENSG00000214107; HLA -A*30:01,HLA-B*18:01,HLA-B*40:02,HLA-B*44:02,HLA-B*49:01
EENASFSQA

SEQ ID NO: 6395 - protein, 8 aa, Homo sapiens
  Table 1.2; MAGEB1; ENSG00000214107; HLA -B*18:01,HLA-B*44:03,HLA-B*49:01
EETQGLKV

SEQ ID NO: 6396 - protein, 9 aa, Homo sapiens
  Table 1.2; MAGEB1; ENSG00000214107; HLA -A*30:01,HLA-B*18:01,HLA-B*44:02,HLA-B*44:03,HLA-B*49:01
EETQGLKVA

SEQ ID NO: 6397 - protein, 10 aa, Homo sapiens
  Table 1.2; MAGEB1; ENSG00000214107; HLA -B*18:01,HLA-B*44:02,HLA-B*44:03
EETQGLKVAH

SEQ ID NO: 6398 - protein, 9 aa, Homo sapiens
  Table 1.2; MAGEB1; ENSG00000214107; HLA -A*33:01,HLA-A*33:03
EHLIYGEPR

SEQ ID NO: 6399 - protein, 8 aa, Homo sapiens
  Table 1.2; MAGEB1; ENSG00000214107; HLA -A*33:01,HLA-A*33:03
EILNGASR

SEQ ID NO: 6400 - protein, 9 aa, Homo sapiens
  Table 1.2; MAGEB1; ENSG00000214107; HLA -A*33:01,HLA-A*33:03
EILNGASRR

SEQ ID NO: 6401 - protein, 9 aa, Homo sapiens
  Table 1.2; MAGEB1; ENSG00000214107; HLA -A*68:02
EIWKFMNVL

SEQ ID NO: 6402 - protein, 8 aa, Homo sapiens
  Table 1.2; MAGEB1; ENSG00000214107; HLA -B*08:01
EPIMKADM

SEQ ID NO: 6403 - protein, 9 aa, Homo sapiens
  Table 1.2; MAGEB1; ENSG00000214107; HLA -B*07:02,HLA-B*08:01,HLA-B*35:01,HLA-B*35:03,HLA-C*07:02
EPIMKADML

SEQ ID NO: 6404 - protein, 10 aa, Homo sapiens
  Table 1.2; MAGEB1; ENSG00000214107; HLA -A*33:03,HLA-A*68:01,HLA-B*27:02,HLA-B*39:01
EQVPNSDPPR

SEQ ID NO: 6405 - protein, 11 aa, Homo sapiens
  Table 1.2; MAGEB1; ENSG00000214107; HLA -A*25:01,HLA-A*26:01,HLA-A*29:02,HLA-A*30:02,HLA-B*15:01, HLA-B*38:01,HLA-B*39:01,HLA-B*44:02,HLA-B*44:03
EQVPNSDPPRY

SEQ ID NO: 6406 - protein, 10 aa, Homo sapiens
  Table 1.2; MAGEB1; ENSG00000214107; HLA -A*25:01,HLA-B*57:01
ESSVKDPVAW

SEQ ID NO: 6407 - protein, 9 aa, Homo sapiens
  Table 1.2; MAGEB1; ENSG00000214107; HLA -A*33:01,HLA-A*33:03
ETQGLKVAH

SEQ ID NO: 6408 - protein, 10 aa, Homo sapiens
  Table 1.2; MAGEB1; ENSG00000214107; HLA -A*25:01,HLA-A*26:01
ETTKMKVLEF

SEQ ID NO: 6409 - protein, 10 aa, Homo sapiens
  Table 1.2; MAGEB1; ENSG00000214107; HLA -B*27:02
FITQDLVQEK

SEQ ID NO: 6410 - protein, 8 aa, Homo sapiens
  Table 1.2; MAGEB1; ENSG00000214107; HLA -A*29:02
FLWGPRAY

SEQ ID NO: 6411 - protein, 8 aa, Homo sapiens
  Table 1.2; MAGEB1; ENSG00000214107; HLA -A*30:02,HLA-B*46:01,HLA-C*14:02
FMNVLGAY

SEQ ID NO: 6412 - protein, 9 aa, Homo sapiens
  Table 1.2; MAGEB1; ENSG00000214107; HLA -B*54:01,HLA-B*56:01
FPRNGLLMP

SEQ ID NO: 6413 - protein, 8 aa, Homo sapiens
  Table 1.2; MAGEB1; ENSG00000214107; HLA -B*54:01
FPSHYEEA

SEQ ID NO: 6414 - protein, 9 aa, Homo sapiens
  Table 1.2; MAGEB1; ENSG00000214107; HLA -B*07:02,HLA-B*35:01,HLA-B*35:03,HLA-B*38:01,HLA-B*39:01, HLA-B*54:01,HLA-B*55:01,HLA-B*56:01,HLA-C*03:03
FPSHYEEAL

SEQ ID NO: 6415 - protein, 10 aa, Homo sapiens
  Table 1.2; MAGEB1; ENSG00000214107; HLA -A*01:01,HLA-A*33:01,HLA-A*33:03,HLA-A*68:01,HLA-B*27:02
FTEILNGASR

SEQ ID NO: 6416 - protein, 11 aa, Homo sapiens
  Table 1.2; MAGEB1; ENSG00000214107; HLA -A*01:01
FTEILNGASRR

SEQ ID NO: 6417 - protein, 9 aa, Homo sapiens
  Table 1.2; MAGEB1; ENSG00000214107; HLA -B*46:01,HLA-C*01:02
GAPPTTTAA

SEQ ID NO: 6418 - protein, 8 aa, Homo sapiens
  Table 1.2; MAGEB1; ENSG00000214107; HLA -B*07:02,HLA-C*16:01
GASRRLEL

SEQ ID NO: 6419 - protein, 9 aa, Homo sapiens
  Table 1.2; MAGEB1; ENSG00000214107; HLA -A*02:01,HLA-A*32:01,HLA-B*13:02,HLA-B*15:01,HLA-B*15:03, HLA-B*27:05,HLA-B*35:03,HLA-B*38:01,HLA-B*39:01,HLA-B*40:01, HLA-B*46:01,HLA-B*55:01,HLA-B*58:01,HLA-C*02:02,HLA-C*03:03,
  HLA-C*03:04,HLA-C*05:01,HLA-C*16:02,HLA-C*16:04
GAYDGEEHL

SEQ ID NO: 6420 - protein, 10 aa, Homo sapiens
  Table 1.2; MAGEB1; ENSG00000214107; HLA -A*02:01,HLA-A*23:01,HLA-A*25:01,HLA-A*30:01,HLA-B*13:02, HLA-B*27:05,HLA-B*38:01,HLA-B*49:01,HLA-B*51:01,HLA-B*58:01, HLA-C*06:02,HLA-C*12:03,HLA-C*16:02,HLA-C*16:04
GAYDGEEHLI

SEQ ID NO: 6421 - protein, 11 aa, Homo sapiens
  Table 1.2; MAGEB1; ENSG00000214107; HLA -A*01:01,HLA-A*11:01,HLA-A*25:01,HLA-A*26:01,HLA-A*29:02, HLA-A*30:02,HLA-B*15:01,HLA-B*15:03,HLA-B*35:01,HLA-B*55:01, HLA-B*57:01,HLA-C*02:02,HLA-C*07:01,HLA-C*12:03,HLA-C*16:04
GAYDGEEHLIY

SEQ ID NO: 6422 - protein, 10 aa, Homo sapiens
  Table 1.2; MAGEB1; ENSG00000214107; HLA -A*30:01,HLA-B*40:01,HLA-B*49:01
GEENASFSQA

SEQ ID NO: 6423 - protein, 9 aa, Homo sapiens
  Table 1.2; MAGEB1; ENSG00000214107; HLA -A*03:02,HLA-B*27:05
GHTYTLVSK

SEQ ID NO: 6424 - protein, 9 aa, Homo sapiens
  Table 1.2; MAGEB1; ENSG00000214107; HLA -A*02:03,HLA-B*08:01
GLKVAHATA

SEQ ID NO: 6425 - protein, 10 aa, Homo sapiens
  Table 1.2; MAGEB1; ENSG00000214107; HLA -A*02:03
GLKVAHATAA

SEQ ID NO: 6426 - protein, 9 aa, Homo sapiens
  Table 1.2; MAGEB1; ENSG00000214107; HLA -A*02:01,HLA-A*02:04
GLLMPLLGV

SEQ ID NO: 6427 - protein, 9 aa, Homo sapiens
  Table 1.2; MAGEB1; ENSG00000214107; HLA -A*31:01
GMLMHFILR

SEQ ID NO: 6428 - protein, 10 aa, Homo sapiens
  Table 1.2; MAGEB1; ENSG00000214107; HLA -B*07:02
GPRAYAETTK

SEQ ID NO: 6429 - protein, 11 aa, Homo sapiens
  Table 1.2; MAGEB1; ENSG00000214107; HLA -B*07:02,HLA-C*07:02
GPRAYAETTKM

SEQ ID NO: 6430 - protein, 10 aa, Homo sapiens
  Table 1.2; MAGEB1; ENSG00000214107; HLA -B*56:01
GVIFLKGNSA

SEQ ID NO: 6431 - protein, 9 aa, Homo sapiens
  Table 1.2; MAGEB1; ENSG00000214107; HLA -B*54:01,HLA-B*55:01
HFTEILNGA

SEQ ID NO: 6432 - protein, 8 aa, Homo sapiens
  Table 1.2; MAGEB1; ENSG00000214107; HLA -A*03:01,HLA-A*03:02,HLA-A*11:01
HTYTLVSK

SEQ ID NO: 6433 - protein, 9 aa, Homo sapiens
  Table 1.2; MAGEB1; ENSG00000214107; HLA -A*02:03,HLA-A*03:01,HLA-A*25:01,HLA-A*26:01,HLA-A*31:01, HLA-A*33:01,HLA-A*33:03,HLA-A*68:01,HLA-A*68:02,HLA-B*27:05, HLA-B*40:02,HLA-B*57:01,HLA-B*58:01,HLA-C*02:02,HLA-C*12:03
HTYTLVSKL

SEQ ID NO: 6434 - protein, 8 aa, Homo sapiens
  Table 1.2; MAGEB1; ENSG00000214107; HLA -C*14:02
IFLKGNSA

SEQ ID NO: 6435 - protein, 9 aa, Homo sapiens
  Table 1.2; MAGEB1; ENSG00000214107; HLA -A*02:03
IMKADMLKV

SEQ ID NO: 6436 - protein, 9 aa, Homo sapiens
  Table 1.2; MAGEB1; ENSG00000214107; HLA -B*56:01
IPQKPQGAP

SEQ ID NO: 6437 - protein, 10 aa, Homo sapiens
  Table 1.2; MAGEB1; ENSG00000214107; HLA -B*56:01
IPQKPQGAPP

SEQ ID NO: 6438 - protein, 9 aa, Homo sapiens
  Table 1.2; MAGEB1; ENSG00000214107; HLA -A*01:01,HLA-A*03:01,HLA-A*03:02,HLA-A*11:01,HLA-A*31:01, HLA-A*33:01,HLA-A*33:03,HLA-A*68:01,HLA-B*27:02,HLA-C*07:06
ITQDLVQEK

SEQ ID NO: 6439 - protein, 10 aa, Homo sapiens
  Table 1.2; MAGEB1; ENSG00000214107; HLA -A*01:01,HLA-A*03:02,HLA-A*25:01,HLA-A*26:01,HLA-A*29:02, HLA-A*30:02,HLA-A*32:01,HLA-B*15:01,HLA-B*57:01,HLA-B*58:01, HLA-C*16:02
ITQDLVQEKY

SEQ ID NO: 6440 - protein, 8 aa, Homo sapiens
  Table 1.2; MAGEB1; ENSG00000214107; HLA -A*24:02
IYGEPRKF

SEQ ID NO: 6441 - protein, 9 aa, Homo sapiens
  Table 1.2; MAGEB1; ENSG00000214107; HLA -A*24:02
IYGEPRKFI

SEQ ID NO: 6442 - protein, 9 aa, Homo sapiens
  Table 1.2; MAGEB1; ENSG00000214107; HLA -B*07:02,HLA-B*40:02,HLA-B*58:01
KAREETQGL

SEQ ID NO: 6443 - protein, 10 aa, Homo sapiens
  Table 1.2; MAGEB1; ENSG00000214107; HLA -A*03:01
KAREETQGLK

SEQ ID NO: 6444 - protein, 10 aa, Homo sapiens
  Table 1.2; MAGEB1; ENSG00000214107; HLA -A*30:02,HLA-A*32:01,HLA-B*15:01,HLA-B*58:01
KCQGEENASF

SEQ ID NO: 6445 - protein, 10 aa, Homo sapiens
  Table 1.2; MAGEB1; ENSG00000214107; HLA -A*01:01,HLA-A*25:01,HLA-A*29:02,HLA-A*30:01,HLA-A*30:02, HLA-A*32:01,HLA-B*15:01,HLA-B*15:03,HLA-B*18:01,HLA-B*27:02, HLA-B*27:05,HLA-B*37:01,HLA-B*40:01,HLA-B*40:02,HLA-B*44:02,
  HLA-B*44:03,HLA-B*49:01,HLA-B*57:01,HLA-B*58:01,HLA-C*02:02, HLA-C*16:02,HLA-C*16:04
KEDNPSGHTY

SEQ ID NO: 6446 - protein, 11 aa, Homo sapiens
  Table 1.2; MAGEB1; ENSG00000214107; HLA -A*30:01,HLA-B*40:01,HLA-B*40:02
KEECPSSSPVL

SEQ ID NO: 6447 - protein, 9 aa, Homo sapiens
  Table 1.2; MAGEB1; ENSG00000214107; HLA -A*23:01,HLA-A*29:02,HLA-A*30:02,HLA-B*15:03,HLA-B*46:01
KFMNVLGAY

SEQ ID NO: 6448 - protein, 11 aa, Homo sapiens
  Table 1.2; MAGEB1; ENSG00000214107; HLA -B*57:01,HLA-B*58:01
KGNSATEEEIW

SEQ ID NO: 6449 - protein, 10 aa, Homo sapiens
  Table 1.2; MAGEB1; ENSG00000214107; HLA -A*03:01
KMKVLEFLAK

SEQ ID NO: 6450 - protein, 8 aa, Homo sapiens
  Table 1.2; MAGEB1; ENSG00000214107; HLA -A*31:01
KMNGATPR

SEQ ID NO: 6451 - protein, 10 aa, Homo sapiens
  Table 1.2; MAGEB1; ENSG00000214107; HLA -A*30:02
KMNGATPRDF

SEQ ID NO: 6452 - protein, 8 aa, Homo sapiens
  Table 1.2; MAGEB1; ENSG00000214107; HLA -A*03:01
KMREPIMK

SEQ ID NO: 6453 - protein, 9 aa, Homo sapiens
  Table 1.2; MAGEB1; ENSG00000214107; HLA -A*02:03
KMREPIMKA

SEQ ID NO: 6454 - protein, 9 aa, Homo sapiens
  Table 1.2; MAGEB1; ENSG00000214107; HLA -B*56:01
KPQGAPPTT

SEQ ID NO: 6455 - protein, 10 aa, Homo sapiens
  Table 1.2; MAGEB1; ENSG00000214107; HLA -B*07:02,HLA-B*56:01
KPQGAPPTTT

SEQ ID NO: 6456 - protein, 11 aa, Homo sapiens
  Table 1.2; MAGEB1; ENSG00000214107; HLA -B*07:02,HLA-B*54:01,HLA-B*55:01,HLA-B*56:01
KPQGAPPTTTA

SEQ ID NO: 6457 - protein, 10 aa, Homo sapiens
  Table 1.2; MAGEB1; ENSG00000214107; HLA -A*03:01,HLA-A*03:02,HLA-A*11:01
KVAHATAAEK

SEQ ID NO: 6458 - protein, 8 aa, Homo sapiens
  Table 1.2; MAGEB1; ENSG00000214107; HLA -A*03:01,HLA-A*11:01
KVLEFLAK

SEQ ID NO: 6459 - protein, 9 aa, Homo sapiens
  Table 1.2; MAGEB1; ENSG00000214107; HLA -A*02:01,HLA-A*02:04,HLA-A*02:07,HLA-A*03:01,HLA-A*29:02, HLA-A*31:01,HLA-B*57:01
KVLEFLAKM

SEQ ID NO: 6460 - protein, 9 aa, Homo sapiens
  Table 1.2; MAGEB1; ENSG00000214107; HLA -A*23:01,HLA-A*24:02,HLA-A*31:01
KYKDHFTEI

SEQ ID NO: 6461 - protein, 10 aa, Homo sapiens
  Table 1.2; MAGEB1; ENSG00000214107; HLA -A*24:02
KYKDHFTEIL

SEQ ID NO: 6462 - protein, 9 aa, Homo sapiens
  Table 1.2; MAGEB1; ENSG00000214107; HLA -A*30:01,HLA-B*40:01,HLA-B*40:02,HLA-B*49:01
LELVFGLDL

SEQ ID NO: 6463 - protein, 9 aa, Homo sapiens
  Table 1.2; MAGEB1; ENSG00000214107; HLA -C*05:01
LGDTPTSSP

SEQ ID NO: 6464 - protein, 9 aa, Homo sapiens
  Table 1.2; MAGEB1; ENSG00000214107; HLA -A*03:01,HLA-B*57:01
LIYGEPRKF

SEQ ID NO: 6465 - protein, 11 aa, Homo sapiens
  Table 1.2; MAGEB1; ENSG00000214107; HLA -A*30:02,HLA-B*15:03
LKEDNPSGHTY

SEQ ID NO: 6466 - protein, 9 aa, Homo sapiens
  Table 1.2; MAGEB1; ENSG00000214107; HLA -B*15:03
LKVAHATAA

SEQ ID NO: 6467 - protein, 8 aa, Homo sapiens
  Table 1.2; MAGEB1; ENSG00000214107; HLA -B*15:03
LKVVDEKY

SEQ ID NO: 6468 - protein, 9 aa, Homo sapiens
  Table 1.2; MAGEB1; ENSG00000214107; HLA -A*02:01,HLA-A*02:03,HLA-A*02:04
LLMPLLGVI

SEQ ID NO: 6469 - protein, 11 aa, Homo sapiens
  Table 1.2; MAGEB1; ENSG00000214107; HLA -A*02:01,HLA-A*02:04,HLA-A*02:07
LLMPLLGVIFL

SEQ ID NO: 6470 - protein, 9 aa, Homo sapiens
  Table 1.2; MAGEB1; ENSG00000214107; HLA -A*29:02
LMHFILRKY

SEQ ID NO: 6471 - protein, 9 aa, Homo sapiens
  Table 1.2; MAGEB1; ENSG00000214107; HLA -A*24:02
LMPLLGVIF

SEQ ID NO: 6472 - protein, 10 aa, Homo sapiens
  Table 1.2; MAGEB1; ENSG00000214107; HLA -A*02:07
LMPLLGVIFL

SEQ ID NO: 6473 - protein, 9 aa, Homo sapiens
  Table 1.2; MAGEB1; ENSG00000214107; HLA -A*31:01,HLA-A*33:01
LSNDWDFPR

SEQ ID NO: 6474 - protein, 11 aa, Homo sapiens
  Table 1.2; MAGEB1; ENSG00000214107; HLA -B*58:01
LTNDGNLSNDW

SEQ ID NO: 6475 - protein, 9 aa, Homo sapiens
  Table 1.2; MAGEB1; ENSG00000214107; HLA -A*01:01,HLA-A*03:01,HLA-A*25:01,HLA-A*26:01,HLA-A*29:02, HLA-A*30:02,HLA-A*32:01,HLA-B*15:01
LVQEKYLKY

SEQ ID NO: 6476 - protein, 8 aa, Homo sapiens
  Table 1.2; MAGEB1; ENSG00000214107; HLA -B*08:01,HLA-C*07:01
MLKVVDEK

SEQ ID NO: 6477 - protein, 9 aa, Homo sapiens
  Table 1.2; MAGEB1; ENSG00000214107; HLA -A*01:01,HLA-A*29:02,HLA-A*30:02,HLA-A*32:01,HLA-B*15:01, HLA-B*15:03,HLA-B*18:01,HLA-B*35:01,HLA-B*46:01,HLA-C*07:04
MLKVVDEKY

SEQ ID NO: 6478 - protein, 9 aa, Homo sapiens
  Table 1.2; MAGEB1; ENSG00000214107; HLA -A*03:01
MLMHFILRK

SEQ ID NO: 6479 - protein, 10 aa, Homo sapiens
  Table 1.2; MAGEB1; ENSG00000214107; HLA -A*29:02
MLMHFILRKY

SEQ ID NO: 6480 - protein, 8 aa, Homo sapiens
  Table 1.2; MAGEB1; ENSG00000214107; HLA -B*35:01,HLA-B*35:03
MPLLGVIF

SEQ ID NO: 6481 - protein, 9 aa, Homo sapiens
  Table 1.2; MAGEB1; ENSG00000214107; HLA -B*35:01,HLA-B*35:03,HLA-B*51:01,HLA-B*54:01
MPLLGVIFL

SEQ ID NO: 6482 - protein, 11 aa, Homo sapiens
  Table 1.2; MAGEB1; ENSG00000214107; HLA -B*54:01
MPLLGVIFLKG

SEQ ID NO: 6483 - protein, 9 aa, Homo sapiens
  Table 1.2; MAGEB1; ENSG00000214107; HLA -B*07:02,HLA-C*07:02
MPRGQKSKL

SEQ ID NO: 6484 - protein, 9 aa, Homo sapiens
  Table 1.2; MAGEB1; ENSG00000214107; HLA -B*07:02,HLA-B*08:01,HLA-C*16:01
NGASRRLEL

SEQ ID NO: 6485 - protein, 9 aa, Homo sapiens
  Table 1.2; MAGEB1; ENSG00000214107; HLA -A*68:01,HLA-A*68:02,HLA-B*07:02,HLA-B*08:01,HLA-B*35:01, HLA-B*35:03,HLA-B*38:01,HLA-B*39:01,HLA-B*55:01,HLA-B*56:01, HLA-C*07:02
NPSGHTYTL

SEQ ID NO: 6486 - protein, 9 aa, Homo sapiens
  Table 1.2; MAGEB1; ENSG00000214107; HLA -B*58:01
NSATEEEIW

SEQ ID NO: 6487 - protein, 9 aa, Homo sapiens
  Table 1.2; MAGEB1; ENSG00000214107; HLA -A*01:01,HLA-A*02:07,HLA-A*29:02,HLA-A*32:01,HLA-B*35:01, HLA-B*38:01,HLA-B*57:01,HLA-B*58:01,HLA-C*05:01,HLA-C*16:01
NSDPPRYQF

SEQ ID NO: 6488 - protein, 8 aa, Homo sapiens
  Table 1.2; MAGEB1; ENSG00000214107; HLA -A*03:02,HLA-A*11:01,HLA-B*27:02
PAAGIPQK

SEQ ID NO: 6489 - protein, 8 aa, Homo sapiens
  Table 1.2; MAGEB1; ENSG00000214107; HLA -B*56:01
PPTTTAAA

SEQ ID NO: 6490 - protein, 8 aa, Homo sapiens
  Table 1.2; MAGEB1; ENSG00000214107; HLA -B*07:02,HLA-C*07:01,HLA-C*07:02
PSGHTYTL

SEQ ID NO: 6491 - protein, 8 aa, Homo sapiens
  Table 1.2; MAGEB1; ENSG00000214107; HLA -B*18:01,HLA-B*37:01,HLA-C*07:01
QDLVQEKY

SEQ ID NO: 6492 - protein, 9 aa, Homo sapiens
  Table 1.2; MAGEB1; ENSG00000214107; HLA -A*29:02
QFLWGPRAY

SEQ ID NO: 6493 - protein, 9 aa, Homo sapiens
  Table 1.2; MAGEB1; ENSG00000214107; HLA -A*02:03,HLA-B*46:01,HLA-B*54:01,HLA-B*56:01
QGAPPTTTA

SEQ ID NO: 6494 - protein, 9 aa, Homo sapiens
  Table 1.2; MAGEB1; ENSG00000214107; HLA -A*11:01,HLA-A*68:01
QVPNSDPPR

SEQ ID NO: 6495 - protein, 10 aa, Homo sapiens
  Table 1.2; MAGEB1; ENSG00000214107; HLA -A*01:01,HLA-A*25:01,HLA-A*26:01,HLA-A*29:02,HLA-A*30:02, HLA-B*58:01
QVPNSDPPRY

SEQ ID NO: 6496 - protein, 9 aa, Homo sapiens
  Table 1.2; MAGEB1; ENSG00000214107; HLA -A*03:01,HLA-A*31:01,HLA-A*33:01,HLA-A*33:03
QVRSSVRAR

SEQ ID NO: 6497 - protein, 8 aa, Homo sapiens
  Table 1.2; MAGEB1; ENSG00000214107; HLA -B*07:02,HLA-B*08:01,HLA-C*16:01
RAQVRSSV

SEQ ID NO: 6498 - protein, 9 aa, Homo sapiens
  Table 1.2; MAGEB1; ENSG00000214107; HLA -A*31:01
RAQVRSSVR

SEQ ID NO: 6499 - protein, 11 aa, Homo sapiens
  Table 1.2; MAGEB1; ENSG00000214107; HLA -A*31:01
RAQVRSSVRAR

SEQ ID NO: 6500 - protein, 10 aa, Homo sapiens
  Table 1.2; MAGEB1; ENSG00000214107; HLA -A*31:01
RARSRAPFSR

SEQ ID NO: 6501 - protein, 9 aa, Homo sapiens
  Table 1.2; MAGEB1; ENSG00000214107; HLA -A*32:01,HLA-B*07:02,HLA-B*15:01,HLA-B*15:03,HLA-B*46:01, HLA-B*58:01,HLA-C*02:02,HLA-C*03:03,HLA-C*03:04,HLA-C*05:01, HLA-C*12:03,HLA-C*16:04
RAYAETTKM

SEQ ID NO: 6502 - protein, 10 aa, Homo sapiens
  Table 1.2; MAGEB1; ENSG00000214107; HLA -A*03:01
RAYAETTKMK

SEQ ID NO: 6503 - protein, 9 aa, Homo sapiens
  Table 1.2; MAGEB1; ENSG00000214107; HLA -A*30:01,HLA-B*37:01,HLA-B*40:01,HLA-B*40:02,HLA-B*44:02, HLA-B*44:03,HLA-B*49:01
REETQGLKV

SEQ ID NO: 6504 - protein, 9 aa, Homo sapiens
  Table 1.2; MAGEB1; ENSG00000214107; HLA -B*37:01
REPIMKADM

SEQ ID NO: 6505 - protein, 8 aa, Homo sapiens
  Table 1.2; MAGEB1; ENSG00000214107; HLA -B*37:01
RRTTATTF

SEQ ID NO: 6506 - protein, 9 aa, Homo sapiens
  Table 1.2; MAGEB1; ENSG00000214107; HLA -B*27:05
RRTTATTFR

SEQ ID NO: 6507 - protein, 8 aa, Homo sapiens
  Table 1.2; MAGEB1; ENSG00000214107; HLA -A*31:01
RSRAPFSR

SEQ ID NO: 6508 - protein, 8 aa, Homo sapiens
  Table 1.2; MAGEB1; ENSG00000214107; HLA -A*31:01
RTTATTFR

SEQ ID NO: 6509 - protein, 9 aa, Homo sapiens
  Table 1.2; MAGEB1; ENSG00000214107; HLA -A*32:01
RTTATTFRA

SEQ ID NO: 6510 - protein, 10 aa, Homo sapiens
  Table 1.2; MAGEB1; ENSG00000214107; HLA -A*03:01,HLA-A*31:01,HLA-B*57:01
RTTATTFRAR

SEQ ID NO: 6511 - protein, 8 aa, Homo sapiens
  Table 1.2; MAGEB1; ENSG00000214107; HLA -B*37:01
SDPPRYQF

SEQ ID NO: 6512 - protein, 9 aa, Homo sapiens
  Table 1.2; MAGEB1; ENSG00000214107; HLA -B*37:01
SDPPRYQFL

SEQ ID NO: 6513 - protein, 9 aa, Homo sapiens
  Table 1.2; MAGEB1; ENSG00000214107; HLA -C*14:02
SFSQATTST

SEQ ID NO: 6514 - protein, 10 aa, Homo sapiens
  Table 1.2; MAGEB1; ENSG00000214107; HLA -A*11:01
SGHTYTLVSK

SEQ ID NO: 6515 - protein, 9 aa, Homo sapiens
  Table 1.2; MAGEB1; ENSG00000214107; HLA -A*03:02,HLA-A*11:01,HLA-B*56:01
SPAAGIPQK

SEQ ID NO: 6516 - protein, 10 aa, Homo sapiens
  Table 1.2; MAGEB1; ENSG00000214107; HLA -B*56:01
SPAAGIPQKP

SEQ ID NO: 6517 - protein, 9 aa, Homo sapiens
  Table 1.2; MAGEB1; ENSG00000214107; HLA -B*35:03
SPVLGDTPT

SEQ ID NO: 6518 - protein, 10 aa, Homo sapiens
  Table 1.2; MAGEB1; ENSG00000214107; HLA -B*56:01
SPVLGDTPTS

SEQ ID NO: 6519 - protein, 11 aa, Homo sapiens
  Table 1.2; MAGEB1; ENSG00000214107; HLA -B*13:02,HLA-B*27:05
SQATTSTESSV

SEQ ID NO: 6520 - protein, 10 aa, Homo sapiens
  Table 1.2; MAGEB1; ENSG00000214107; HLA -A*11:01
SSPAAGIPQK

SEQ ID NO: 6521 - protein, 9 aa, Homo sapiens
  Table 1.2; MAGEB1; ENSG00000214107; HLA -A*25:01,HLA-A*32:01,HLA-B*44:03,HLA-B*57:01,HLA-B*58:01, HLA-C*16:04
SSVKDPVAW

SEQ ID NO: 6522 - protein, 8 aa, Homo sapiens
  Table 1.2; MAGEB1; ENSG00000214107; HLA -A*25:01,HLA-A*32:01,HLA-B*57:01,HLA-B*58:01
SVKDPVAW

SEQ ID NO: 6523 - protein, 10 aa, Homo sapiens
  Table 1.2; MAGEB1; ENSG00000214107; HLA -A*31:01,HLA-B*54:01,HLA-B*56:01
SVKDPVAWEA

SEQ ID NO: 6524 - protein, 8 aa, Homo sapiens
  Table 1.2; MAGEB1; ENSG00000214107; HLA -A*31:01,HLA-A*33:03,HLA-C*16:01
TATTFRAR

SEQ ID NO: 6525 - protein, 8 aa, Homo sapiens
  Table 1.2; MAGEB1; ENSG00000214107; HLA -B*18:01,HLA-B*44:02
TEEEIWKF

SEQ ID NO: 6526 - protein, 9 aa, Homo sapiens
  Table 1.2; MAGEB1; ENSG00000214107; HLA -A*30:01,HLA-A*33:03,HLA-B*44:03
TEILNGASR

SEQ ID NO: 6527 - protein, 11 aa, Homo sapiens
  Table 1.2; MAGEB1; ENSG00000214107; HLA -B*44:02,HLA-B*44:03
TEILNGASRRL

SEQ ID NO: 6528 - protein, 9 aa, Homo sapiens
  Table 1.2; MAGEB1; ENSG00000214107; HLA -B*49:01
TESDEGAKC

SEQ ID NO: 6529 - protein, 9 aa, Homo sapiens
  Table 1.2; MAGEB1; ENSG00000214107; HLA -A*30:01,HLA-A*68:02,HLA-B*18:01,HLA-B*37:01,HLA-B*39:01, HLA-B*40:01,HLA-B*40:02,HLA-B*44:03,HLA-B*49:01,HLA-C*06:02
TESSVKDPV

SEQ ID NO: 6530 - protein, 11 aa, Homo sapiens
  Table 1.2; MAGEB1; ENSG00000214107; HLA -B*18:01,HLA-B*27:02,HLA-B*38:01,HLA-B*40:01,HLA-B*44:02, HLA-B*44:03,HLA-B*57:01,HLA-C*16:04
TESSVKDPVAW

SEQ ID NO: 6531 - protein, 8 aa, Homo sapiens
  Table 1.2; MAGEB1; ENSG00000214107; HLA -B*08:01
TLVSKLNL

SEQ ID NO: 6532 - protein, 9 aa, Homo sapiens
  Table 1.2; MAGEB1; ENSG00000214107; HLA -A*02:03
TLVSKLNLT

SEQ ID NO: 6533 - protein, 9 aa, Homo sapiens
  Table 1.2; MAGEB1; ENSG00000214107; HLA -B*07:02,HLA-B*35:01
TPRDFPSHY

SEQ ID NO: 6534 - protein, 8 aa, Homo sapiens
  Table 1.2; MAGEB1; ENSG00000214107; HLA -B*54:01,HLA-B*55:01,HLA-B*56:01
TPTSSPAA

SEQ ID NO: 6535 - protein, 9 aa, Homo sapiens
  Table 1.2; MAGEB1; ENSG00000214107; HLA -A*01:01,HLA-A*29:02,HLA-A*30:02,HLA-A*32:01,HLA-B*15:01, HLA-B*15:03,HLA-B*18:01,HLA-B*35:01,HLA-B*38:01,HLA-B*39:01, HLA-B*44:02,HLA-B*44:03,HLA-B*58:01,HLA-C*16:04
TQDLVQEKY

SEQ ID NO: 6536 - protein, 10 aa, Homo sapiens
  Table 1.2; MAGEB1; ENSG00000214107; HLA -B*38:01
TQDLVQEKYL

SEQ ID NO: 6537 - protein, 11 aa, Homo sapiens
  Table 1.2; MAGEB1; ENSG00000214107; HLA -A*03:02,HLA-A*11:01,HLA-A*68:01
TSSPAAGIPQK

SEQ ID NO: 6538 - protein, 9 aa, Homo sapiens
  Table 1.2; MAGEB1; ENSG00000214107; HLA -A*03:01,HLA-A*11:01,HLA-A*31:01,HLA-A*33:01,HLA-A*33:03, HLA-A*68:01,HLA-B*57:01,HLA-C*07:06
TTATTFRAR

SEQ ID NO: 6539 - protein, 9 aa, Homo sapiens
  Table 1.2; MAGEB1; ENSG00000214107; HLA -A*25:01,HLA-A*33:01,HLA-A*33:03,HLA-B*08:01,HLA-B*37:01, HLA-B*57:01
TTKMKVLEF

SEQ ID NO: 6540 - protein, 9 aa, Homo sapiens
  Table 1.2; MAGEB1; ENSG00000214107; HLA -A*03:02,HLA-A*11:01,HLA-A*68:01
TTSTESSVK

SEQ ID NO: 6541 - protein, 8 aa, Homo sapiens
  Table 1.2; MAGEB1; ENSG00000214107; HLA -A*23:01,HLA-A*24:02,HLA-B*37:01,HLA-C*04:01,HLA-C*06:02, HLA-C*14:02,HLA-C*16:02
TYTLVSKL

SEQ ID NO: 6542 - protein, 10 aa, Homo sapiens
  Table 1.2; MAGEB1; ENSG00000214107; HLA -A*23:01,HLA-A*24:02
TYTLVSKLNL

SEQ ID NO: 6543 - protein, 9 aa, Homo sapiens
  Table 1.2; MAGEB1; ENSG00000214107; HLA -A*03:01,HLA-A*03:02,HLA-A*11:01,HLA-A*33:01,HLA-B*46:01, HLA-C*07:06
VAHATAAEK

SEQ ID NO: 6544 - protein, 9 aa, Homo sapiens
  Table 1.2; MAGEB1; ENSG00000214107; HLA -B*35:01,HLA-B*46:01,HLA-B*51:01
VAWEAGMLM

SEQ ID NO: 6545 - protein, 9 aa, Homo sapiens
  Table 1.2; MAGEB1; ENSG00000214107; HLA -A*32:01,HLA-B*08:01,HLA-B*54:01,HLA-B*56:01
VIFLKGNSA

SEQ ID NO: 6546 - protein, 9 aa, Homo sapiens
  Table 1.2; MAGEB1; ENSG00000214107; HLA -A*01:01,HLA-A*29:02,HLA-A*30:02,HLA-B*15:01,HLA-B*35:01, HLA-B*35:03,HLA-B*55:01,HLA-C*16:02
VPNSDPPRY

SEQ ID NO: 6547 - protein, 11 aa, Homo sapiens
  Table 1.2; MAGEB1; ENSG00000214107; HLA -A*23:01,HLA-B*07:02,HLA-B*35:01,HLA-B*55:01
VPNSDPPRYQF

SEQ ID NO: 6548 - protein, 8 aa, Homo sapiens
  Table 1.2; MAGEB1; ENSG00000214107; HLA -A*01:01
VQEKYLKY

SEQ ID NO: 6549 - protein, 9 aa, Homo sapiens
  Table 1.2; MAGEB1; ENSG00000214107; HLA -A*01:01,HLA-B*51:01,HLA-C*16:02
YAETTKMKV

SEQ ID NO: 6550 - protein, 8 aa, Homo sapiens
  Table 1.2; MAGEB1; ENSG00000214107; HLA -B*38:01,HLA-C*07:01,HLA-C*07:04
YDGEEHLI

SEQ ID NO: 6551 - protein, 9 aa, Homo sapiens
  Table 1.2; MAGEB1; ENSG00000214107; HLA -A*01:01,HLA-A*29:02
YDGEEHLIY

SEQ ID NO: 6552 - protein, 9 aa, Homo sapiens
  Table 1.2; MAGEB1; ENSG00000214107; HLA -A*02:04
YQFLWGPRA

SEQ ID NO: 6553 - protein, 9 aa, Homo sapiens
  Table 1.2; MAGEB1; ENSG00000214107; HLA -A*02:04,HLA-A*23:01,HLA-A*24:02
YTLVSKLNL

SEQ ID NO: 6554 - protein, 9 aa, Homo sapiens
  Table 1.2; MAGEB2; ENSG00000099399; HLA -B*46:01
AAAAAGVSS

SEQ ID NO: 6555 - protein, 11 aa, Homo sapiens
  Table 1.2; MAGEB2; ENSG00000099399; HLA -A*03:01,HLA-A*03:02,HLA-A*11:01,HLA-A*31:01,HLA-A*68:01, HLA-B*27:02,HLA-B*27:05,HLA-B*57:01,HLA-B*58:01,HLA-C*02:02, HLA-C*06:02,HLA-C*07:06,HLA-C*16:04
AAAAAGVSSTK

SEQ ID NO: 6556 - protein, 9 aa, Homo sapiens
  Table 1.2; MAGEB2; ENSG00000099399; HLA -A*02:03,HLA-A*32:01,HLA-C*16:02
AAAAGVSST

SEQ ID NO: 6557 - protein, 10 aa, Homo sapiens
  Table 1.2; MAGEB2; ENSG00000099399; HLA -A*03:01,HLA-A*03:02,HLA-A*11:01,HLA-A*68:01,HLA-B*27:02, HLA-B*27:05,HLA-C*02:02,HLA-C*07:06
AAAAGVSSTK

SEQ ID NO: 6558 - protein, 9 aa, Homo sapiens
  Table 1.2; MAGEB2; ENSG00000099399; HLA -A*03:01,HLA-A*03:02,HLA-A*11:01,HLA-A*25:01,HLA-A*31:01, HLA-A*32:01,HLA-A*33:03,HLA-A*68:01,HLA-B*13:02,HLA-B*15:01, HLA-B*27:02,HLA-B*27:05,HLA-B*39:01,HLA-B*46:01,HLA-B*51:01,
  HLA-B*56:01,HLA-B*57:01,HLA-B*58:01,HLA-C*02:02,HLA-C*03:03, HLA-C*03:04,HLA-C*05:01,HLA-C*06:02,HLA-C*07:06,HLA-C*12:03, HLA-C*16:02,HLA-C*16:04
AAAGVSSTK

SEQ ID NO: 6559 - protein, 11 aa, Homo sapiens
  Table 1.2; MAGEB2; ENSG00000099399; HLA -A*03:01,HLA-A*03:02,HLA-A*11:01,HLA-A*31:01,HLA-A*68:01, HLA-B*27:05,HLA-C*04:01,HLA-C*06:02
AAAGVSSTKSK

SEQ ID NO: 6560 - protein, 8 aa, Homo sapiens
  Table 1.2; MAGEB2; ENSG00000099399; HLA -A*03:01,HLA-A*03:02,HLA-A*11:01,HLA-B*27:02,HLA-C*07:01, HLA-C*07:06
AAGVSSTK

SEQ ID NO: 6561 - protein, 10 aa, Homo sapiens
  Table 1.2; MAGEB2; ENSG00000099399; HLA -C*07:01
AAGVSSTKSK

SEQ ID NO: 6562 - protein, 8 aa, Homo sapiens
  Table 1.2; MAGEB2; ENSG00000099399; HLA -B*56:01
AASSSPAA

SEQ ID NO: 6563 - protein, 9 aa, Homo sapiens
  Table 1.2; MAGEB2; ENSG00000099399; HLA -A*30:01,HLA-B*49:01
AEEEEAPCC

SEQ ID NO: 6564 - protein, 8 aa, Homo sapiens
  Table 1.2; MAGEB2; ENSG00000099399; HLA -B*37:01,HLA-B*44:03,HLA-B*49:01
AETSKMKV

SEQ ID NO: 6565 - protein, 9 aa, Homo sapiens
  Table 1.2; MAGEB2; ENSG00000099399; HLA -A*30:01,HLA-B*37:01,HLA-B*40:01,HLA-B*40:02,HLA-B*44:02, HLA-B*44:03,HLA-B*49:01,HLA-C*16:04
AETSKMKVL

SEQ ID NO: 6566 - protein, 10 aa, Homo sapiens
  Table 1.2; MAGEB2; ENSG00000099399; HLA -C*01:02
AFPTHYEEAL

SEQ ID NO: 6567 - protein, 9 aa, Homo sapiens
  Table 1.2; MAGEB2; ENSG00000099399; HLA -A*31:01
AGIPQEPQR

SEQ ID NO: 6568 - protein, 9 aa, Homo sapiens
  Table 1.2; MAGEB2; ENSG00000099399; HLA -A*11:01
AGVSSTKSK

SEQ ID NO: 6569 - protein, 9 aa, Homo sapiens
  Table 1.2; MAGEB2; ENSG00000099399; HLA -B*15:03
AKVNGTTPC

SEQ ID NO: 6570 - protein, 11 aa, Homo sapiens
  Table 1.2; MAGEB2; ENSG00000099399; HLA -B*15:03
AKVNGTTPCAF

SEQ ID NO: 6571 - protein, 10 aa, Homo sapiens
  Table 1.2; MAGEB2; ENSG00000099399; HLA -A*02:01,HLA-A*02:03,HLA-B*55:01
ALKDEEKAGV

SEQ ID NO: 6572 - protein, 8 aa, Homo sapiens
  Table 1.2; MAGEB2; ENSG00000099399; HLA -B*55:01,HLA-B*56:01
APTTAAAA

SEQ ID NO: 6573 - protein, 9 aa, Homo sapiens
  Table 1.2; MAGEB2; ENSG00000099399; HLA -B*07:02,HLA-B*35:03,HLA-B*54:01,HLA-B*55:01,HLA-B*56:01, HLA-C*07:02
APTTAAAAA

SEQ ID NO: 6574 - protein, 10 aa, Homo sapiens
  Table 1.2; MAGEB2; ENSG00000099399; HLA -B*54:01,HLA-B*56:01
APTTAAAAAA

SEQ ID NO: 6575 - protein, 11 aa, Homo sapiens
  Table 1.2; MAGEB2; ENSG00000099399; HLA -B*56:01
APTTAAAAAAG

SEQ ID NO: 6576 - protein, 9 aa, Homo sapiens
  Table 1.2; MAGEB2; ENSG00000099399; HLA -A*01:01,HLA-B*15:01,HLA-B*15:03,HLA-B*38:01,HLA-B*57:01, HLA-B*58:01,HLA-C*05:01,HLA-C*07:04
ASEGLSVVF

SEQ ID NO: 6577 - protein, 9 aa, Homo sapiens
  Table 1.2; MAGEB2; ENSG00000099399; HLA -B*13:02
ASSSPAAGI

SEQ ID NO: 6578 - protein, 11 aa, Homo sapiens
  Table 1.2; MAGEB2; ENSG00000099399; HLA -A*03:01,HLA-A*03:02,HLA-A*11:01
ASSSQASTSTK

SEQ ID NO: 6579 - protein, 9 aa, Homo sapiens
  Table 1.2; MAGEB2; ENSG00000099399; HLA -C*05:01
ATEEEIWEF

SEQ ID NO: 6580 - protein, 8 aa, Homo sapiens
  Table 1.2; MAGEB2; ENSG00000099399; HLA -A*23:01,HLA-A*24:02,HLA-B*46:01,HLA-C*01:02,HLA-C*04:01, HLA-C*14:02
AYAETSKM

SEQ ID NO: 6581 - protein, 9 aa, Homo sapiens
  Table 1.2; MAGEB2; ENSG00000099399; HLA -A*33:03
AYAETSKMK

SEQ ID NO: 6582 - protein, 11 aa, Homo sapiens
  Table 1.2; MAGEB2; ENSG00000099399; HLA -A*24:02
AYAETSKMKVL

SEQ ID NO: 6583 - protein, 9 aa, Homo sapiens
  Table 1.2; MAGEB2; ENSG00000099399; HLA -A*25:01,HLA-B*18:01,HLA-B*44:02,HLA-B*44:03
DEESLLSSW

SEQ ID NO: 6584 - protein, 8 aa, Homo sapiens
  Table 1.2; MAGEB2; ENSG00000099399; HLA -B*18:01,HLA-B*49:01,HLA-B*51:01
DETRGLNV

SEQ ID NO: 6585 - protein, 11 aa, Homo sapiens
  Table 1.2; MAGEB2; ENSG00000099399; HLA -B*38:01
DKVDLTDEESL

SEQ ID NO: 6586 - protein, 10 aa, Homo sapiens
  Table 1.2; MAGEB2; ENSG00000099399; HLA -A*01:01,HLA-A*25:01,HLA-A*26:01,HLA-A*29:02,HLA-A*33:01, HLA-B*18:01,HLA-B*35:01
DLVQEKYLEY

SEQ ID NO: 6587 - protein, 10 aa, Homo sapiens
  Table 1.2; MAGEB2; ENSG00000099399; HLA -B*08:01
DPLTRKSGSL

SEQ ID NO: 6588 - protein, 8 aa, Homo sapiens
  Table 1.2; MAGEB2; ENSG00000099399; HLA -B*51:01
DPPRFQFL

SEQ ID NO: 6589 - protein, 9 aa, Homo sapiens
  Table 1.2; MAGEB2; ENSG00000099399; HLA -B*51:01
EAPCCSSSV

SEQ ID NO: 6590 - protein, 10 aa, Homo sapiens
  Table 1.2; MAGEB2; ENSG00000099399; HLA -B*18:01,HLA-B*44:02,HLA-B*44:03
EEHSVFGEPW

SEQ ID NO: 6591 - protein, 9 aa, Homo sapiens
  Table 1.2; MAGEB2; ENSG00000099399; HLA -B*44:02,HLA-B*44:03
EEIWEFLNM

SEQ ID NO: 6592 - protein, 8 aa, Homo sapiens
  Table 1.2; MAGEB2; ENSG00000099399; HLA -B*18:01,HLA-B*44:02,HLA-B*44:03
EESLLSSW

SEQ ID NO: 6593 - protein, 9 aa, Homo sapiens
  Table 1.2; MAGEB2; ENSG00000099399; HLA -A*29:02
EFLNMLGVY

SEQ ID NO: 6594 - protein, 9 aa, Homo sapiens
  Table 1.2; MAGEB2; ENSG00000099399; HLA -A*33:03
EGLSVVFGL

SEQ ID NO: 6595 - protein, 9 aa, Homo sapiens
  Table 1.2; MAGEB2; ENSG00000099399; HLA -A*33:03,HLA-A*68:02,HLA-B*38:01
EHFPEILKK

SEQ ID NO: 6596 - protein, 10 aa, Homo sapiens
  Table 1.2; MAGEB2; ENSG00000099399; HLA -A*68:02
EHFPEILKKA

SEQ ID NO: 6597 - protein, 9 aa, Homo sapiens
  Table 1.2; MAGEB2; ENSG00000099399; HLA -B*38:01
EHSVFGEPW

SEQ ID NO: 6598 - protein, 9 aa, Homo sapiens
  Table 1.2; MAGEB2; ENSG00000099399; HLA -A*02:04,HLA-A*02:07,HLA-A*68:02
EIWEFLNML

SEQ ID NO: 6599 - protein, 8 aa, Homo sapiens
  Table 1.2; MAGEB2; ENSG00000099399; HLA -A*33:01,HLA-A*33:03
EMLKIVGK

SEQ ID NO: 6600 - protein, 9 aa, Homo sapiens
  Table 1.2; MAGEB2; ENSG00000099399; HLA -A*33:01,HLA-A*33:03
EMLKIVGKR

SEQ ID NO: 6601 - protein, 9 aa, Homo sapiens
  Table 1.2; MAGEB2; ENSG00000099399; HLA -B*54:01,HLA-B*56:01
EPQRAPTTA

SEQ ID NO: 6602 - protein, 10 aa, Homo sapiens
  Table 1.2; MAGEB2; ENSG00000099399; HLA -B*07:02,HLA-B*54:01,HLA-B*55:01,HLA-B*56:01
EPQRAPTTAA

SEQ ID NO: 6603 - protein, 11 aa, Homo sapiens
  Table 1.2; MAGEB2; ENSG00000099399; HLA -A*33:01
ESLLSSWDFPR

SEQ ID NO: 6604 - protein, 10 aa, Homo sapiens
  Table 1.2; MAGEB2; ENSG00000099399; HLA -A*26:01
ETRGLNVPQV

SEQ ID NO: 6605 - protein, 8 aa, Homo sapiens
  Table 1.2; MAGEB2; ENSG00000099399; HLA -B*08:01
ETSKMKVL

SEQ ID NO: 6606 - protein, 10 aa, Homo sapiens
  Table 1.2; MAGEB2; ENSG00000099399; HLA -A*25:01,HLA-A*26:01
ETSKMKVLEF

SEQ ID NO: 6607 - protein, 11 aa, Homo sapiens
  Table 1.2; MAGEB2; ENSG00000099399; HLA -A*68:02
ETSKMKVLEFL

SEQ ID NO: 6608 - protein, 8 aa, Homo sapiens
  Table 1.2; MAGEB2; ENSG00000099399; HLA -B*51:01
FGLELNKV

SEQ ID NO: 6609 - protein, 9 aa, Homo sapiens
  Table 1.2; MAGEB2; ENSG00000099399; HLA -A*02:03
FLAKVNGTT

SEQ ID NO: 6610 - protein, 8 aa, Homo sapiens
  Table 1.2; MAGEB2; ENSG00000099399; HLA -A*29:02
FLWGPRAY

SEQ ID NO: 6611 - protein, 8 aa, Homo sapiens
  Table 1.2; MAGEB2; ENSG00000099399; HLA -B*54:01
FPEILKKA

SEQ ID NO: 6612 - protein, 8 aa, Homo sapiens
  Table 1.2; MAGEB2; ENSG00000099399; HLA -B*54:01,HLA-B*56:01
FPTHYEEA

SEQ ID NO: 6613 - protein, 9 aa, Homo sapiens
  Table 1.2; MAGEB2; ENSG00000099399; HLA -B*07:02,HLA-B*35:01,HLA-B*35:03,HLA-B*38:01,HLA-B*39:01, HLA-B*51:01,HLA-B*54:01,HLA-B*55:01,HLA-B*56:01,HLA-C*03:03, HLA-C*03:04
FPTHYEEAL

SEQ ID NO: 6614 - protein, 9 aa, Homo sapiens
  Table 1.2; MAGEB2; ENSG00000099399; HLA -A*02:04
FQFLWGPRA

SEQ ID NO: 6615 - protein, 9 aa, Homo sapiens
  Table 1.2; MAGEB2; ENSG00000099399; HLA -B*27:05,HLA-B*39:01,HLA-B*46:01,HLA-B*54:01,HLA-B*55:01, HLA-B*56:01,HLA-C*03:03
GAASSSPAA

SEQ ID NO: 6616 - protein, 11 aa, Homo sapiens
  Table 1.2; MAGEB2; ENSG00000099399; HLA -B*44:02,HLA-B*44:03
GEEHSVFGEPW

SEQ ID NO: 6617 - protein, 10 aa, Homo sapiens
  Table 1.2; MAGEB2; ENSG00000099399; HLA -A*30:01,HLA-B*40:02,HLA-B*49:01
GEKNASSSQA

SEQ ID NO: 6618 - protein, 9 aa, Homo sapiens
  Table 1.2; MAGEB2; ENSG00000099399; HLA -B*37:01
GEMLKIVGK

SEQ ID NO: 6619 - protein, 11 aa, Homo sapiens
  Table 1.2; MAGEB2; ENSG00000099399; HLA -B*44:02,HLA-B*44:03
GEMLKIVGKRF

SEQ ID NO: 6620 - protein, 10 aa, Homo sapiens
  Table 1.2; MAGEB2; ENSG00000099399; HLA -A*02:01,HLA-A*02:03
GLNVPQVTEA

SEQ ID NO: 6621 - protein, 8 aa, Homo sapiens
  Table 1.2; MAGEB2; ENSG00000099399; HLA -A*02:04,HLA-B*37:01
GLSVVFGL

SEQ ID NO: 6622 - protein, 10 aa, Homo sapiens
  Table 1.2; MAGEB2; ENSG00000099399; HLA -A*02:01,HLA-A*02:03,HLA-A*02:04
GLSVVFGLEL

SEQ ID NO: 6623 - protein, 10 aa, Homo sapiens
  Table 1.2; MAGEB2; ENSG00000099399; HLA -B*07:02
GPRAYAETSK

SEQ ID NO: 6624 - protein, 11 aa, Homo sapiens
  Table 1.2; MAGEB2; ENSG00000099399; HLA -B*07:02,HLA-C*07:02
GPRAYAETSKM

SEQ ID NO: 6625 - protein, 9 aa, Homo sapiens
  Table 1.2; MAGEB2; ENSG00000099399; HLA -A*01:01,HLA-A*03:01,HLA-A*11:01,HLA-A*29:02,HLA-A*30:02, HLA-B*57:01,HLA-B*58:01
GSLVQFLLY

SEQ ID NO: 6626 - protein, 10 aa, Homo sapiens
  Table 1.2; MAGEB2; ENSG00000099399; HLA -A*03:01,HLA-A*11:01
GSLVQFLLYK

SEQ ID NO: 6627 - protein, 11 aa, Homo sapiens
  Table 1.2; MAGEB2; ENSG00000099399; HLA -A*29:02
GSLVQFLLYKY

SEQ ID NO: 6628 - protein, 10 aa, Homo sapiens
  Table 1.2; MAGEB2; ENSG00000099399; HLA -B*56:01
GVIFLNGNSA

SEQ ID NO: 6629 - protein, 8 aa, Homo sapiens
  Table 1.2; MAGEB2; ENSG00000099399; HLA -A*03:02
GVSSTKSK

SEQ ID NO: 6630 - protein, 9 aa, Homo sapiens
  Table 1.2; MAGEB2; ENSG00000099399; HLA -A*03:01,HLA-A*03:02,HLA-A*11:01
GVSSTKSKK

SEQ ID NO: 6631 - protein, 10 aa, Homo sapiens
  Table 1.2; MAGEB2; ENSG00000099399; HLA -A*02:01,HLA-A*02:03,HLA-A*02:04,HLA-A*02:07,HLA-A*03:01, HLA-A*03:02,HLA-A*11:01,HLA-A*23:01,HLA-A*25:01,HLA-A*26:01, HLA-A*29:02,HLA-A*30:01,HLA-A*32:01,HLA-A*68:02,HLA-B*13:02,
  HLA-B*15:01,HLA-B*15:03,HLA-B*27:05,HLA-B*38:01,HLA-B*39:01, HLA-B*40:01,HLA-B*40:02,HLA-B*46:01,HLA-B*49:01,HLA-B*55:01, HLA-B*56:01,HLA-B*58:01,HLA-C*02:02,HLA-C*06:02,HLA-C*07:04, HLA-C*12:03,HLA-C*16:02,HLA-C*16:04
GVYDGEEHSV

SEQ ID NO: 6632 - protein, 11 aa, Homo sapiens
  Table 1.2; MAGEB2; ENSG00000099399; HLA -A*02:07,HLA-A*03:01,HLA-A*03:02,HLA-A*11:01,HLA-A*25:01, HLA-A*26:01,HLA-A*29:02,HLA-A*30:02,HLA-A*31:01,HLA-A*32:01, HLA-A*68:02,HLA-B*15:01,HLA-B*15:03,HLA-B*27:02,HLA-B*27:05,
  HLA-B*35:01,HLA-B*38:01,HLA-B*46:01,HLA-B*55:01,HLA-B*57:01, HLA-B*58:01,HLA-C*02:02,HLA-C*05:01,HLA-C*07:04,HLA-C*12:03, HLA-C*16:04
GVYDGEEHSVF

SEQ ID NO: 6633 - protein, 8 aa, Homo sapiens
  Table 1.2; MAGEB2; ENSG00000099399; HLA -A*03:01
HTYTFIDK

SEQ ID NO: 6634 - protein, 9 aa, Homo sapiens
  Table 1.2; MAGEB2; ENSG00000099399; HLA -A*02:03,HLA-A*02:04,HLA-A*68:02
HTYTFIDKV

SEQ ID NO: 6635 - protein, 8 aa, Homo sapiens
  Table 1.2; MAGEB2; ENSG00000099399; HLA -C*14:02
IFLNGNSA

SEQ ID NO: 6636 - protein, 9 aa, Homo sapiens
  Table 1.2; MAGEB2; ENSG00000099399; HLA -C*14:02
IFLNGNSAT

SEQ ID NO: 6637 - protein, 9 aa, Homo sapiens
  Table 1.2; MAGEB2; ENSG00000099399; HLA -A*02:03,HLA-B*08:01
ILKKASEGL

SEQ ID NO: 6638 - protein, 8 aa, Homo sapiens
  Table 1.2; MAGEB2; ENSG00000099399; HLA -B*56:01
IPQEPQRA

SEQ ID NO: 6639 - protein, 9 aa, Homo sapiens
  Table 1.2; MAGEB2; ENSG00000099399; HLA -B*07:02,HLA-B*54:01,HLA-B*55:01,HLA-B*56:01,HLA-C*07:02
IPQEPQRAP

SEQ ID NO: 6640 - protein, 10 aa, Homo sapiens
  Table 1.2; MAGEB2; ENSG00000099399; HLA -B*54:01,HLA-B*56:01,HLA-C*16:02
IPQEPQRAPT

SEQ ID NO: 6641 - protein, 9 aa, Homo sapiens
  Table 1.2; MAGEB2; ENSG00000099399; HLA -A*03:01,HLA-A*03:02,HLA-A*11:01,HLA-A*26:01,HLA-A*29:02, HLA-A*30:02,HLA-A*31:01,HLA-A*32:01,HLA-A*33:01,HLA-A*33:03, HLA-A*68:01,HLA-B*40:02,HLA-B*46:01,HLA-B*57:01,HLA-C*06:02,
  HLA-C*07:06,HLA-C*16:02
ITKDLVQEK

SEQ ID NO: 6642 - protein, 10 aa, Homo sapiens
  Table 1.2; MAGEB2; ENSG00000099399; HLA -A*01:01,HLA-A*25:01,HLA-A*26:01,HLA-A*29:02,HLA-A*30:02, HLA-A*32:01,HLA-B*15:01,HLA-B*46:01,HLA-B*57:01,HLA-B*58:01
ITKDLVQEKY

SEQ ID NO: 6643 - protein, 9 aa, Homo sapiens
  Table 1.2; MAGEB2; ENSG00000099399; HLA -B*07:02
KARDETRGL

SEQ ID NO: 6644 - protein, 8 aa, Homo sapiens
  Table 1.2; MAGEB2; ENSG00000099399; HLA -C*03:04
KASEGLSV

SEQ ID NO: 6645 - protein, 9 aa, Homo sapiens
  Table 1.2; MAGEB2; ENSG00000099399; HLA -A*02:01,HLA-A*02:03,HLA-A*32:01,HLA-B*46:01,HLA-B*55:01, HLA-C*02:02,HLA-C*12:03,HLA-C*16:02
KASEGLSVV

SEQ ID NO: 6646 - protein, 10 aa, Homo sapiens
  Table 1.2; MAGEB2; ENSG00000099399; HLA -A*23:01,HLA-A*30:02,HLA-A*32:01,HLA-B*15:01,HLA-B*15:03, HLA-B*27:02,HLA-B*27:05,HLA-B*35:01,HLA-B*55:01,HLA-B*57:01, HLA-B*58:01,HLA-C*02:02,HLA-C*12:03,HLA-C*16:04
KASEGLSVVF

SEQ ID NO: 6647 - protein, 8 aa, Homo sapiens
  Table 1.2; MAGEB2; ENSG00000099399; HLA -B*37:01
KDEEKAGV

SEQ ID NO: 6648 - protein, 8 aa, Homo sapiens
  Table 1.2; MAGEB2; ENSG00000099399; HLA -B*37:01
KDLVQEKY

SEQ ID NO: 6649 - protein, 9 aa, Homo sapiens
  Table 1.2; MAGEB2; ENSG00000099399; HLA -B*15:03
KKASEGLSV

SEQ ID NO: 6650 - protein, 11 aa, Homo sapiens
  Table 1.2; MAGEB2; ENSG00000099399; HLA -B*15:03
KKASEGLSVVF

SEQ ID NO: 6651 - protein, 11 aa, Homo sapiens
  Table 1.2; MAGEB2; ENSG00000099399; HLA -A*03:01,HLA-A*03:02,HLA-A*11:01,HLA-A*31:01
KLITKDLVQEK

SEQ ID NO: 6652 - protein, 9 aa, Homo sapiens
  Table 1.2; MAGEB2; ENSG00000099399; HLA -A*02:01,HLA-A*02:03,HLA-A*02:04,HLA-A*02:07
KLLMPLLGV

SEQ ID NO: 6653 - protein, 10 aa, Homo sapiens
  Table 1.2; MAGEB2; ENSG00000099399; HLA -A*03:01
KMKVLEFLAK

SEQ ID NO: 6654 - protein, 11 aa, Homo sapiens
  Table 1.2; MAGEB2; ENSG00000099399; HLA -A*23:01,HLA-A*24:02,HLA-A*32:01,HLA-B*15:01,HLA-B*38:01, HLA-B*57:01,HLA-B*58:01
KQVPSSDPPRF

SEQ ID NO: 6655 - protein, 8 aa, Homo sapiens
  Table 1.2; MAGEB2; ENSG00000099399; HLA -A*32:01,HLA-B*58:01
KSGSLVQF

SEQ ID NO: 6656 - protein, 11 aa, Homo sapiens
  Table 1.2; MAGEB2; ENSG00000099399; HLA -A*29:02,HLA-B*57:01
KSGSLVQFLLY

SEQ ID NO: 6657 - protein, 10 aa, Homo sapiens
  Table 1.2; MAGEB2; ENSG00000099399; HLA -A*68:01,HLA-B*27:05,HLA-B*57:01
KSPSEDPLTR

SEQ ID NO: 6658 - protein, 11 aa, Homo sapiens
  Table 1.2; MAGEB2; ENSG00000099399; HLA -A*03:01,HLA-A*03:02,HLA-A*11:01
KSPSEDPLTRK

SEQ ID NO: 6659 - protein, 8 aa, Homo sapiens
  Table 1.2; MAGEB2; ENSG00000099399; HLA -C*16:01
KSVTKGEM

SEQ ID NO: 6660 - protein, 9 aa, Homo sapiens
  Table 1.2; MAGEB2; ENSG00000099399; HLA -B*40:02,HLA-B*58:01
KSVTKGEML

SEQ ID NO: 6661 - protein, 8 aa, Homo sapiens
  Table 1.2; MAGEB2; ENSG00000099399; HLA -A*03:01,HLA-A*11:01
KVLEFLAK

SEQ ID NO: 6662 - protein, 9 aa, Homo sapiens
  Table 1.2; MAGEB2; ENSG00000099399; HLA -A*02:01,HLA-A*02:03,HLA-A*02:04,HLA-A*02:07,HLA-A*31:01, HLA-A*68:02,HLA-B*13:02,HLA-B*40:02,HLA-B*55:01,HLA-C*02:02
KVLEFLAKV

SEQ ID NO: 6663 - protein, 10 aa, Homo sapiens
  Table 1.2; MAGEB2; ENSG00000099399; HLA -A*03:02,HLA-A*25:01,HLA-A*30:02,HLA-A*32:01,HLA-B*15:01
KVNGTTPCAF

SEQ ID NO: 6664 - protein, 9 aa, Homo sapiens
  Table 1.2; MAGEB2; ENSG00000099399; HLA -A*03:01,HLA-A*03:02,HLA-A*23:01,HLA-A*25:01,HLA-A*26:01, HLA-A*29:02,HLA-A*30:02,HLA-A*31:01,HLA-A*32:01,HLA-B*15:01, HLA-B*15:03,HLA-B*35:01,HLA-B*44:03,HLA-B*46:01,HLA-B*57:01,
  HLA-B*58:01,HLA-C*01:02,HLA-C*02:02,HLA-C*07:04,HLA-C*16:01, HLA-C*16:02,HLA-C*16:04
KVNPNGHTY

SEQ ID NO: 6665 - protein, 10 aa, Homo sapiens
  Table 1.2; MAGEB2; ENSG00000099399; HLA -A*32:01
KVNPNGHTYT

SEQ ID NO: 6666 - protein, 11 aa, Homo sapiens
  Table 1.2; MAGEB2; ENSG00000099399; HLA -A*03:02,HLA-A*23:01,HLA-A*24:02,HLA-A*25:01,HLA-A*29:02, HLA-A*30:02,HLA-A*31:01,HLA-A*32:01,HLA-B*15:01,HLA-B*46:01, HLA-B*57:01,HLA-B*58:01
KVNPNGHTYTF

SEQ ID NO: 6667 - protein, 9 aa, Homo sapiens
  Table 1.2; MAGEB2; ENSG00000099399; HLA -A*32:01,HLA-B*46:01
LAKVNGTTP

SEQ ID NO: 6668 - protein, 9 aa, Homo sapiens
  Table 1.2; MAGEB2; ENSG00000099399; HLA -B*49:01
LEYKQVPSS

SEQ ID NO: 6669 - protein, 9 aa, Homo sapiens
  Table 1.2; MAGEB2; ENSG00000099399; HLA -A*02:01,HLA-A*02:03,HLA-A*02:04,HLA-A*02:07
LLMPLLGVI

SEQ ID NO: 6670 - protein, 11 aa, Homo sapiens
  Table 1.2; MAGEB2; ENSG00000099399; HLA -A*02:01,HLA-A*02:04,HLA-A*02:07
LLMPLLGVIFL

SEQ ID NO: 6671 - protein, 9 aa, Homo sapiens
  Table 1.2; MAGEB2; ENSG00000099399; HLA -A*03:01
LLYKYKIKK

SEQ ID NO: 6672 - protein, 9 aa, Homo sapiens
  Table 1.2; MAGEB2; ENSG00000099399; HLA -A*24:02
LMPLLGVIF

SEQ ID NO: 6673 - protein, 10 aa, Homo sapiens
  Table 1.2; MAGEB2; ENSG00000099399; HLA -A*02:07
LMPLLGVIFL

SEQ ID NO: 6674 - protein, 9 aa, Homo sapiens
  Table 1.2; MAGEB2; ENSG00000099399; HLA -B*54:01
LNVPQVTEA

SEQ ID NO: 6675 - protein, 9 aa, Homo sapiens
  Table 1.2; MAGEB2; ENSG00000099399; HLA -B*46:01,HLA-B*58:01,HLA-C*02:02,HLA-C*03:03,HLA-C*03:04
LSVVFGLEL

SEQ ID NO: 6676 - protein, 8 aa, Homo sapiens
  Table 1.2; MAGEB2; ENSG00000099399; HLA -C*04:01,HLA-C*05:01
LTDEESLL

SEQ ID NO: 6677 - protein, 9 aa, Homo sapiens
  Table 1.2; MAGEB2; ENSG00000099399; HLA -A*01:01
LTDEESLLS

SEQ ID NO: 6678 - protein, 11 aa, Homo sapiens
  Table 1.2; MAGEB2; ENSG00000099399; HLA -A*01:01
LTDEESLLSSW

SEQ ID NO: 6679 - protein, 11 aa, Homo sapiens
  Table 1.2; MAGEB2; ENSG00000099399; HLA -B*57:01
LTRKSGSLVQF

SEQ ID NO: 6680 - protein, 9 aa, Homo sapiens
  Table 1.2; MAGEB2; ENSG00000099399; HLA -A*01:01,HLA-A*02:07,HLA-A*03:01,HLA-A*03:02,HLA-A*11:01, HLA-A*25:01,HLA-A*26:01,HLA-A*29:02,HLA-A*30:02,HLA-A*32:01, HLA-A*33:01,HLA-B*15:01,HLA-B*18:01,HLA-B*35:01,HLA-B*46:01,
  HLA-B*57:01,HLA-B*58:01,HLA-C*01:02,HLA-C*02:02,HLA-C*03:03, HLA-C*07:04,HLA-C*12:03,HLA-C*14:02,HLA-C*16:01,HLA-C*16:02
LVQEKYLEY

SEQ ID NO: 6681 - protein, 10 aa, Homo sapiens
  Table 1.2; MAGEB2; ENSG00000099399; HLA -A*03:01,HLA-A*03:02,HLA-A*11:01
LVQEKYLEYK

SEQ ID NO: 6682 - protein, 9 aa, Homo sapiens
  Table 1.2; MAGEB2; ENSG00000099399; HLA -A*29:02,HLA-A*30:02
LVQFLLYKY

SEQ ID NO: 6683 - protein, 8 aa, Homo sapiens
  Table 1.2; MAGEB2; ENSG00000099399; HLA -B*35:01,HLA-B*35:03
MPLLGVIF

SEQ ID NO: 6684 - protein, 9 aa, Homo sapiens
  Table 1.2; MAGEB2; ENSG00000099399; HLA -B*35:01,HLA-B*35:03,HLA-B*51:01,HLA-B*54:01
MPLLGVIFL

SEQ ID NO: 6685 - protein, 11 aa, Homo sapiens
  Table 1.2; MAGEB2; ENSG00000099399; HLA -B*54:01
MPLLGVIFLNG

SEQ ID NO: 6686 - protein, 9 aa, Homo sapiens
  Table 1.2; MAGEB2; ENSG00000099399; HLA -B*07:02,HLA-C*07:02
MPRGQKSKL

SEQ ID NO: 6687 - protein, 10 aa, Homo sapiens
  Table 1.2; MAGEB2; ENSG00000099399; HLA -B*15:03
NKVNPNGHTY

SEQ ID NO: 6688 - protein, 9 aa, Homo sapiens
  Table 1.2; MAGEB2; ENSG00000099399; HLA -A*23:01,HLA-A*24:02,HLA-A*25:01,HLA-A*32:01,HLA-A*33:01, HLA-A*33:03,HLA-B*07:02,HLA-B*08:01,HLA-B*18:01,HLA-B*35:01, HLA-B*35:03,HLA-B*38:01,HLA-B*54:01,HLA-B*55:01,HLA-B*56:01,
  HLA-C*07:02
NPNGHTYTF

SEQ ID NO: 6689 - protein, 9 aa, Homo sapiens
  Table 1.2; MAGEB2; ENSG00000099399; HLA -B*58:01
NSATEEEIW

SEQ ID NO: 6690 - protein, 11 aa, Homo sapiens
  Table 1.2; MAGEB2; ENSG00000099399; HLA -A*68:01,HLA-B*27:02
PAAGIPQEPQR

SEQ ID NO: 6691 - protein, 9 aa, Homo sapiens
  Table 1.2; MAGEB2; ENSG00000099399; HLA -A*01:01,HLA-A*03:02,HLA-A*11:01
PSEDPLTRK

SEQ ID NO: 6692 - protein, 10 aa, Homo sapiens
  Table 1.2; MAGEB2; ENSG00000099399; HLA -A*24:02
PSSDPPRFQF

SEQ ID NO: 6693 - protein, 9 aa, Homo sapiens
  Table 1.2; MAGEB2; ENSG00000099399; HLA -C*16:02
QASTSTKSP

SEQ ID NO: 6694 - protein, 9 aa, Homo sapiens
  Table 1.2; MAGEB2; ENSG00000099399; HLA -A*29:02
QFLWGPRAY

SEQ ID NO: 6695 - protein, 9 aa, Homo sapiens
  Table 1.2; MAGEB2; ENSG00000099399; HLA -B*39:01
QRAPTTAAA

SEQ ID NO: 6696 - protein, 9 aa, Homo sapiens
  Table 1.2; MAGEB2; ENSG00000099399; HLA -A*11:01,HLA-A*68:01
QVPSSDPPR

SEQ ID NO: 6697 - protein, 10 aa, Homo sapiens
  Table 1.2; MAGEB2; ENSG00000099399; HLA -A*25:01,HLA-A*26:01
QVPSSDPPRF

SEQ ID NO: 6698 - protein, 9 aa, Homo sapiens
  Table 1.2; MAGEB2; ENSG00000099399; HLA -C*01:02
RAPTTAAAA

SEQ ID NO: 6699 - protein, 9 aa, Homo sapiens
  Table 1.2; MAGEB2; ENSG00000099399; HLA -A*03:01,HLA-A*32:01,HLA-B*07:02,HLA-B*15:01,HLA-B*15:03, HLA-B*46:01,HLA-B*58:01,HLA-C*02:02,HLA-C*03:03,HLA-C*03:04, HLA-C*05:01,HLA-C*12:03
RAYAETSKM

SEQ ID NO: 6700 - protein, 10 aa, Homo sapiens
  Table 1.2; MAGEB2; ENSG00000099399; HLA -A*03:01
RAYAETSKMK

SEQ ID NO: 6701 - protein, 9 aa, Homo sapiens
  Table 1.2; MAGEB2; ENSG00000099399; HLA -B*37:01
RDETRGLNV

SEQ ID NO: 6702 - protein, 9 aa, Homo sapiens
  Table 1.2; MAGEB2; ENSG00000099399; HLA -B*15:03
RKSGSLVQF

SEQ ID NO: 6703 - protein, 8 aa, Homo sapiens
  Table 1.2; MAGEB2; ENSG00000099399; HLA -B*37:01
SDPPRFQF

SEQ ID NO: 6704 - protein, 9 aa, Homo sapiens
  Table 1.2; MAGEB2; ENSG00000099399; HLA -B*37:01
SDPPRFQFL

SEQ ID NO: 6705 - protein, 8 aa, Homo sapiens
  Table 1.2; MAGEB2; ENSG00000099399; HLA -A*30:01,HLA-B*18:01,HLA-B*37:01,HLA-B*40:01,HLA-B*40:02, HLA-B*44:02,HLA-B*44:03,HLA-B*49:01,HLA-C*07:04
SEGLSVVF

SEQ ID NO: 6706 - protein, 10 aa, Homo sapiens
  Table 1.2; MAGEB2; ENSG00000099399; HLA -A*30:01,HLA-B*40:01,HLA-B*40:02,HLA-B*44:02,HLA-B*44:03
SEGLSVVFGL

SEQ ID NO: 6707 - protein, 8 aa, Homo sapiens
  Table 1.2; MAGEB2; ENSG00000099399; HLA -B*15:03
SKMKVLEF

SEQ ID NO: 6708 - protein, 10 aa, Homo sapiens
  Table 1.2; MAGEB2; ENSG00000099399; HLA -A*02:04
SLLSSWDFPR

SEQ ID NO: 6709 - protein, 8 aa, Homo sapiens
  Table 1.2; MAGEB2; ENSG00000099399; HLA -A*29:02
SLVQFLLY

SEQ ID NO: 6710 - protein, 9 aa, Homo sapiens
  Table 1.2; MAGEB2; ENSG00000099399; HLA -A*03:01
SLVQFLLYK

SEQ ID NO: 6711 - protein, 10 aa, Homo sapiens
  Table 1.2; MAGEB2; ENSG00000099399; HLA -A*29:02
SLVQFLLYKY

SEQ ID NO: 6712 - protein, 10 aa, Homo sapiens
  Table 1.2; MAGEB2; ENSG00000099399; HLA -B*56:01
SPAAGIPQEP

SEQ ID NO: 6713 - protein, 9 aa, Homo sapiens
  Table 1.2; MAGEB2; ENSG00000099399; HLA -A*33:03,HLA-A*68:01,HLA-B*07:02,HLA-B*35:01,HLA-B*35:03, HLA-B*56:01,HLA-C*07:06
SPSEDPLTR

SEQ ID NO: 6714 - protein, 10 aa, Homo sapiens
  Table 1.2; MAGEB2; ENSG00000099399; HLA -A*03:02,HLA-A*11:01,HLA-A*68:01,HLA-B*56:01,HLA-C*07:06
SPSEDPLTRK

SEQ ID NO: 6715 - protein, 9 aa, Homo sapiens
  Table 1.2; MAGEB2; ENSG00000099399; HLA -A*01:01,HLA-A*02:07,HLA-A*32:01,HLA-B*57:01,HLA-B*58:01, HLA-C*05:01,HLA-C*16:01
SSDPPRFQF

SEQ ID NO: 6716 - protein, 11 aa, Homo sapiens
  Table 1.2; MAGEB2; ENSG00000099399; HLA -B*57:01
SSDPPRFQFLW

SEQ ID NO: 6717 - protein, 9 aa, Homo sapiens
  Table 1.2; MAGEB2; ENSG00000099399; HLA -A*03:02,HLA-A*11:01
SSQASTSTK

SEQ ID NO: 6718 - protein, 10 aa, Homo sapiens
  Table 1.2; MAGEB2; ENSG00000099399; HLA -A*03:01,HLA-A*03:02,HLA-A*11:01
SSSQASTSTK

SEQ ID NO: 6719 - protein, 8 aa, Homo sapiens
  Table 1.2; MAGEB2; ENSG00000099399; HLA -A*31:01
SSWDFPRR

SEQ ID NO: 6720 - protein, 9 aa, Homo sapiens
  Table 1.2; MAGEB2; ENSG00000099399; HLA -A*02:01,HLA-A*02:03,HLA-A*02:04,HLA-A*02:07,HLA-A*68:02, HLA-B*13:02
SVFGEPWKL

SEQ ID NO: 6721 - protein, 9 aa, Homo sapiens
  Table 1.2; MAGEB2; ENSG00000099399; HLA -A*03:01,HLA-A*03:02,HLA-A*11:01
SVTKGEMLK

SEQ ID NO: 6722 - protein, 8 aa, Homo sapiens
  Table 1.2; MAGEB2; ENSG00000099399; HLA -C*03:04
SVVFGLEL

SEQ ID NO: 6723 - protein, 10 aa, Homo sapiens
  Table 1.2; MAGEB2; ENSG00000099399; HLA -A*03:02,HLA-A*11:01,HLA-B*27:02
SVVFGLELNK

SEQ ID NO: 6724 - protein, 11 aa, Homo sapiens
  Table 1.2; MAGEB2; ENSG00000099399; HLA -A*68:02
SVVFGLELNKV

SEQ ID NO: 6725 - protein, 9 aa, Homo sapiens
  Table 1.2; MAGEB2; ENSG00000099399; HLA -A*02:03,HLA-B*13:02,HLA-B*51:01
TAAAAAAGV

SEQ ID NO: 6726 - protein, 10 aa, Homo sapiens
  Table 1.2; MAGEB2; ENSG00000099399; HLA -B*44:02
TDEESLLSSW

SEQ ID NO: 6727 - protein, 8 aa, Homo sapiens
  Table 1.2; MAGEB2; ENSG00000099399; HLA -B*18:01
TEEEIWEF

SEQ ID NO: 6728 - protein, 9 aa, Homo sapiens
  Table 1.2; MAGEB2; ENSG00000099399; HLA -A*68:02
TEEEIWEFL

SEQ ID NO: 6729 - protein, 8 aa, Homo sapiens
  Table 1.2; MAGEB2; ENSG00000099399; HLA -B*08:01,HLA-C*14:02
TFIDKVDL

SEQ ID NO: 6730 - protein, 9 aa, Homo sapiens
  Table 1.2; MAGEB2; ENSG00000099399; HLA -B*15:03
TKDLVQEKY

SEQ ID NO: 6731 - protein, 9 aa, Homo sapiens
  Table 1.2; MAGEB2; ENSG00000099399; HLA -B*27:05,HLA-B*38:01,HLA-B*39:01
TKSPSEDPL

SEQ ID NO: 6732 - protein, 9 aa, Homo sapiens
  Table 1.2; MAGEB2; ENSG00000099399; HLA -B*35:01
TPCAFPTHY

SEQ ID NO: 6733 - protein, 9 aa, Homo sapiens
  Table 1.2; MAGEB2; ENSG00000099399; HLA -C*06:02
TRGLNVPQV

SEQ ID NO: 6734 - protein, 9 aa, Homo sapiens
  Table 1.2; MAGEB2; ENSG00000099399; HLA -B*08:01,HLA-B*57:01
TSKMKVLEF

SEQ ID NO: 6735 - protein, 10 aa, Homo sapiens
  Table 1.2; MAGEB2; ENSG00000099399; HLA -A*26:01
TTPCAFPTHY

SEQ ID NO: 6736 - protein, 8 aa, Homo sapiens
  Table 1.2; MAGEB2; ENSG00000099399; HLA -A*23:01,HLA-A*24:02
VFGEPWKL

SEQ ID NO: 6737 - protein, 9 aa, Homo sapiens
  Table 1.2; MAGEB2; ENSG00000099399; HLA -A*24:02
VFGEPWKLI

SEQ ID NO: 6738 - protein, 9 aa, Homo sapiens
  Table 1.2; MAGEB2; ENSG00000099399; HLA -B*46:01,HLA-B*54:01,HLA-B*56:01
VIFLNGNSA

SEQ ID NO: 6739 - protein, 8 aa, Homo sapiens
  Table 1.2; MAGEB2; ENSG00000099399; HLA -B*39:01,HLA-B*46:01,HLA-C*01:02,HLA-C*07:01,HLA-C*14:02, HLA-C*16:01,HLA-C*16:02
VNPNGHTY

SEQ ID NO: 6740 - protein, 10 aa, Homo sapiens
  Table 1.2; MAGEB2; ENSG00000099399; HLA -A*23:01,HLA-A*24:02,HLA-A*29:02,HLA-A*33:01
VNPNGHTYTF

SEQ ID NO: 6741 - protein, 9 aa, Homo sapiens
  Table 1.2; MAGEB2; ENSG00000099399; HLA -A*23:01,HLA-A*24:02,HLA-B*07:02,HLA-B*35:01,HLA-B*35:03, HLA-B*38:01,HLA-B*51:01,HLA-B*55:01,HLA-C*07:02
VPSSDPPRF

SEQ ID NO: 6742 - protein, 11 aa, Homo sapiens
  Table 1.2; MAGEB2; ENSG00000099399; HLA -B*35:01
VPSSDPPRFQF

SEQ ID NO: 6743 - protein, 8 aa, Homo sapiens
  Table 1.2; MAGEB2; ENSG00000099399; HLA -A*01:01,HLA-A*30:02,HLA-B*15:01,HLA-B*15:03,HLA-C*07:01
VQEKYLEY

SEQ ID NO: 6744 - protein, 8 aa, Homo sapiens
  Table 1.2; MAGEB2; ENSG00000099399; HLA -B*15:01,HLA-B*15:03,HLA-B*18:01
VQFLLYKY

SEQ ID NO: 6745 - protein, 9 aa, Homo sapiens
  Table 1.2; MAGEB2; ENSG00000099399; HLA -A*02:03,HLA-B*13:02,HLA-B*40:02,HLA-C*06:02
VTKGEMLKI

SEQ ID NO: 6746 - protein, 9 aa, Homo sapiens
  Table 1.2; MAGEB2; ENSG00000099399; HLA -A*03:01,HLA-A*03:02,HLA-A*11:01,HLA-A*29:02,HLA-A*31:01, HLA-B*27:02,HLA-B*27:05
VVFGLELNK

SEQ ID NO: 6747 - protein, 10 aa, Homo sapiens
  Table 1.2; MAGEB2; ENSG00000099399; HLA -A*02:01,HLA-A*02:03,HLA-A*02:04,HLA-A*02:07,HLA-A*68:02
VVFGLELNKV

SEQ ID NO: 6748 - protein, 9 aa, Homo sapiens
  Table 1.2; MAGEB2; ENSG00000099399; HLA -A*02:01,HLA-A*02:07,HLA-A*23:01,HLA-A*24:02,HLA-A*32:01, HLA-B*35:01,HLA-B*35:03,HLA-B*38:01,HLA-B*39:01,HLA-B*55:01, HLA-C*04:01,HLA-C*05:01,HLA-C*07:04,HLA-C*14:02
VYDGEEHSV

SEQ ID NO: 6749 - protein, 10 aa, Homo sapiens
  Table 1.2; MAGEB2; ENSG00000099399; HLA -A*23:01,HLA-A*24:02,HLA-B*35:01,HLA-B*35:03,HLA-B*38:01, HLA-B*55:01,HLA-C*04:01,HLA-C*05:01
VYDGEEHSVF

SEQ ID NO: 6750 - protein, 9 aa, Homo sapiens
  Table 1.2; MAGEB2; ENSG00000099399; HLA -B*49:01
WEFLNMLGV

SEQ ID NO: 6751 - protein, 9 aa, Homo sapiens
  Table 1.2; MAGEB2; ENSG00000099399; HLA -A*01:01,HLA-B*51:01,HLA-C*05:01,HLA-C*16:02
YAETSKMKV

SEQ ID NO: 6752 - protein, 8 aa, Homo sapiens
  Table 1.2; MAGEB2; ENSG00000099399; HLA -B*40:02,HLA-C*07:04,HLA-C*12:03
YDGEEHSV

SEQ ID NO: 6753 - protein, 9 aa, Homo sapiens
  Table 1.2; MAGEB2; ENSG00000099399; HLA -B*18:01,HLA-B*37:01,HLA-B*38:01
YDGEEHSVF

SEQ ID NO: 6754 - protein, 9 aa, Homo sapiens
  Table 1.2; MAGEB2; ENSG00000099399; HLA -A*68:02
YTFIDKVDL

SEQ ID NO: 6755 - protein, 9 aa, Homo sapiens
  Table 1.2; MAGEB4; ENSG00000120289; HLA -B*07:02,HLA-B*46:01,HLA-C*07:02
AARRGTTAM

SEQ ID NO: 6756 - protein, 9 aa, Homo sapiens
  Table 1.2; MAGEB4; ENSG00000120289; HLA -B*37:01,HLA-B*40:02,HLA-B*44:02,HLA-B*44:03
AEMLKIISK

SEQ ID NO: 6757 - protein, 11 aa, Homo sapiens
  Table 1.2; MAGEB4; ENSG00000120289; HLA -B*44:02,HLA-B*44:03
AEMLKIISKKY

SEQ ID NO: 6758 - protein, 8 aa, Homo sapiens
  Table 1.2; MAGEB4; ENSG00000120289; HLA -B*49:01
AETSKMKV

SEQ ID NO: 6759 - protein, 9 aa, Homo sapiens
  Table 1.2; MAGEB4; ENSG00000120289; HLA -A*30:01,HLA-B*37:01,HLA-B*40:01,HLA-B*40:02,HLA-B*44:02, HLA-B*44:03,HLA-B*49:01
AETSKMKVL

SEQ ID NO: 6760 - protein, 9 aa, Homo sapiens
  Table 1.2; MAGEB4; ENSG00000120289; HLA -B*54:01,HLA-B*56:01,HLA-C*16:01
AGARPRVAA

SEQ ID NO: 6761 - protein, 11 aa, Homo sapiens
  Table 1.2; MAGEB4; ENSG00000120289; HLA -B*15:03
AKVNDTTPNNF

SEQ ID NO: 6762 - protein, 9 aa, Homo sapiens
  Table 1.2; MAGEB4; ENSG00000120289; HLA -A*02:03,HLA-A*32:01,HLA-B*55:01
ALKEVNPTT

SEQ ID NO: 6763 - protein, 10 aa, Homo sapiens
  Table 1.2; MAGEB4; ENSG00000120289; HLA -A*02:03,HLA-A*03:01,HLA-B*46:01
ALKEVNPTTH

SEQ ID NO: 6764 - protein, 10 aa, Homo sapiens
  Table 1.2; MAGEB4; ENSG00000120289; HLA -C*06:02
ARRGTTAMTS

SEQ ID NO: 6765 - protein, 9 aa, Homo sapiens
  Table 1.2; MAGEB4; ENSG00000120289; HLA -B*13:02
ASSSLAFGI

SEQ ID NO: 6766 - protein, 9 aa, Homo sapiens
  Table 1.2; MAGEB4; ENSG00000120289; HLA -A*32:01,HLA-B*58:01,HLA-C*03:04,HLA-C*16:01,HLA-C*16:02
ASTSTERSL

SEQ ID NO: 6767 - protein, 10 aa, Homo sapiens
  Table 1.2; MAGEB4; ENSG00000120289; HLA -A*03:01,HLA-A*03:02,HLA-A*11:01,HLA-A*30:02,HLA-A*31:01, HLA-A*68:01,HLA-B*07:02,HLA-B*27:05,HLA-B*39:01,HLA-B*40:02, HLA-C*01:02,HLA-C*03:03,HLA-C*04:01,HLA-C*06:02,HLA-C*07:01,
  HLA-C*07:04,HLA-C*14:02
ATSSSSSQPM

SEQ ID NO: 6768 - protein, 11 aa, Homo sapiens
  Table 1.2; MAGEB4; ENSG00000120289; HLA -A*33:01
DEEERAGARPR

SEQ ID NO: 6769 - protein, 10 aa, Homo sapiens
  Table 1.2; MAGEB4; ENSG00000120289; HLA -A*01:01,HLA-A*25:01,HLA-A*26:01,HLA-A*29:02
DLVQEKYLEY

SEQ ID NO: 6770 - protein, 9 aa, Homo sapiens
  Table 1.2; MAGEB4; ENSG00000120289; HLA -B*08:01
DSLTRKTKM

SEQ ID NO: 6771 - protein, 9 aa, Homo sapiens
  Table 1.2; MAGEB4; ENSG00000120289; HLA -A*01:01,HLA-A*25:01,HLA-A*26:01,HLA-A*33:01,HLA-A*33:03, HLA-B*18:01
DTASSSLAF

SEQ ID NO: 6772 - protein, 11 aa, Homo sapiens
  Table 1.2; MAGEB4; ENSG00000120289; HLA -A*68:01
DTASSSLAFGI

SEQ ID NO: 6773 - protein, 10 aa, Homo sapiens
  Table 1.2; MAGEB4; ENSG00000120289; HLA -A*25:01
DTTPNNFPLL

SEQ ID NO: 6774 - protein, 11 aa, Homo sapiens
  Table 1.2; MAGEB4; ENSG00000120289; HLA -A*01:01,HLA-A*26:01,HLA-A*29:02
DTTPNNFPLLY

SEQ ID NO: 6775 - protein, 9 aa, Homo sapiens
  Table 1.2; MAGEB4; ENSG00000120289; HLA -A*33:01,HLA-A*33:03
EALRDEEER

SEQ ID NO: 6776 - protein, 10 aa, Homo sapiens
  Table 1.2; MAGEB4; ENSG00000120289; HLA -B*49:01
EESPSSSSSV

SEQ ID NO: 6777 - protein, 11 aa, Homo sapiens
  Table 1.2; MAGEB4; ENSG00000120289; HLA -A*30:01,HLA-B*38:01,HLA-B*39:01,HLA-B*40:01,HLA-B*40:02, HLA-B*44:03
EESPSSSSSVL

SEQ ID NO: 6778 - protein, 9 aa, Homo sapiens
  Table 1.2; MAGEB4; ENSG00000120289; HLA -A*29:02
EFLNMLGIY

SEQ ID NO: 6779 - protein, 10 aa, Homo sapiens
  Table 1.2; MAGEB4; ENSG00000120289; HLA -A*68:02
EHFPEIFRKV

SEQ ID NO: 6780 - protein, 9 aa, Homo sapiens
  Table 1.2; MAGEB4; ENSG00000120289; HLA -A*33:01,HLA-A*33:03,HLA-A*68:01
EIFRKVSQR

SEQ ID NO: 6781 - protein, 9 aa, Homo sapiens
  Table 1.2; MAGEB4; ENSG00000120289; HLA -A*02:07,HLA-A*68:02
EIWEFLNML

SEQ ID NO: 6782 - protein, 8 aa, Homo sapiens
  Table 1.2; MAGEB4; ENSG00000120289; HLA -A*33:01,HLA-A*33:03
EMLKIISK

SEQ ID NO: 6783 - protein, 9 aa, Homo sapiens
  Table 1.2; MAGEB4; ENSG00000120289; HLA -A*33:01,HLA-A*33:03
EMLKIISKK

SEQ ID NO: 6784 - protein, 11 aa, Homo sapiens
  Table 1.2; MAGEB4; ENSG00000120289; HLA -B*35:01,HLA-B*35:03
EPPTTSAAAAM

SEQ ID NO: 6785 - protein, 8 aa, Homo sapiens
  Table 1.2; MAGEB4; ENSG00000120289; HLA -B*07:02,HLA-B*08:01,HLA-B*35:03
EPTTKAEM

SEQ ID NO: 6786 - protein, 9 aa, Homo sapiens
  Table 1.2; MAGEB4; ENSG00000120289; HLA -B*08:01,HLA-B*35:03
EPTTKAEML

SEQ ID NO: 6787 - protein, 11 aa, Homo sapiens
  Table 1.2; MAGEB4; ENSG00000120289; HLA -A*33:01,HLA-A*33:03,HLA-A*68:01,HLA-C*07:06
ESPSSSSSVLR

SEQ ID NO: 6788 - protein, 10 aa, Homo sapiens
  Table 1.2; MAGEB4; ENSG00000120289; HLA -A*25:01,HLA-A*26:01
ETSKMKVLEF

SEQ ID NO: 6789 - protein, 9 aa, Homo sapiens
  Table 1.2; MAGEB4; ENSG00000120289; HLA -A*01:01,HLA-A*25:01,HLA-A*26:01,HLA-A*29:02,HLA-A*30:02, HLA-A*32:01,HLA-A*33:01,HLA-A*33:03,HLA-A*68:01,HLA-B*15:01, HLA-B*15:03,HLA-B*18:01,HLA-B*35:01,HLA-B*44:02,HLA-B*44:03,
  HLA-B*46:01,HLA-B*58:01,HLA-C*02:02,HLA-C*07:04,HLA-C*07:06, HLA-C*16:04
EVNPTTHSY

SEQ ID NO: 6790 - protein, 10 aa, Homo sapiens
  Table 1.2; MAGEB4; ENSG00000120289; HLA -A*25:01,HLA-A*26:01,HLA-A*33:03,HLA-A*68:02
EVNPTTHSYI

SEQ ID NO: 6791 - protein, 11 aa, Homo sapiens
  Table 1.2; MAGEB4; ENSG00000120289; HLA -A*33:01
EVNPTTHSYIL

SEQ ID NO: 6792 - protein, 8 aa, Homo sapiens
  Table 1.2; MAGEB4; ENSG00000120289; HLA -B*51:01
FGLALKEV

SEQ ID NO: 6793 - protein, 8 aa, Homo sapiens
  Table 1.2; MAGEB4; ENSG00000120289; HLA -B*51:01,HLA-B*54:01
FPEIFRKV

SEQ ID NO: 6794 - protein, 8 aa, Homo sapiens
  Table 1.2; MAGEB4; ENSG00000120289; HLA -B*54:01,HLA-B*56:01
FPLLYEEA

SEQ ID NO: 6795 - protein, 9 aa, Homo sapiens
  Table 1.2; MAGEB4; ENSG00000120289; HLA -B*35:01,HLA-B*35:03,HLA-B*54:01,HLA-B*55:01
FPLLYEEAL

SEQ ID NO: 6796 - protein, 9 aa, Homo sapiens
  Table 1.2; MAGEB4; ENSG00000120289; HLA -A*03:01,HLA-A*31:01,HLA-A*33:01,HLA-A*33:03
GARPRVAAR

SEQ ID NO: 6797 - protein, 9 aa, Homo sapiens
  Table 1.2; MAGEB4; ENSG00000120289; HLA -A*02:01,HLA-A*02:04,HLA-B*13:02
GLLMPLLSV

SEQ ID NO: 6798 - protein, 10 aa, Homo sapiens
  Table 1.2; MAGEB4; ENSG00000120289; HLA -B*56:01
GPNDGNQSSA

SEQ ID NO: 6799 - protein, 11 aa, Homo sapiens
  Table 1.2; MAGEB4; ENSG00000120289; HLA -A*25:01,HLA-B*07:02,HLA-B*27:02
GPNDGNQSSAW

SEQ ID NO: 6800 - protein, 11 aa, Homo sapiens
  Table 1.2; MAGEB4; ENSG00000120289; HLA -B*07:02
GPRAHAETSKM

SEQ ID NO: 6801 - protein, 8 aa, Homo sapiens
  Table 1.2; MAGEB4; ENSG00000120289; HLA -B*13:02
GQTQDLKV

SEQ ID NO: 6802 - protein, 9 aa, Homo sapiens
  Table 1.2; MAGEB4; ENSG00000120289; HLA -A*01:01,HLA-A*03:01,HLA-A*03:02,HLA-A*11:01,HLA-A*25:01, HLA-A*26:01,HLA-A*29:02,HLA-A*30:02,HLA-A*32:01,HLA-B*15:01, HLA-B*15:03,HLA-B*18:01,HLA-B*27:02,HLA-B*27:05,HLA-B*39:01,
  HLA-B*44:03,HLA-B*46:01,HLA-B*58:01,HLA-C*02:02,HLA-C*07:01, HLA-C*07:04,HLA-C*12:03,HLA-C*14:02,HLA-C*16:01,HLA-C*16:02, HLA-C*16:04
GTTAMTSAY

SEQ ID NO: 6803 - protein, 11 aa, Homo sapiens
  Table 1.2; MAGEB4; ENSG00000120289; HLA -A*03:02,HLA-A*11:01,HLA-A*31:01,HLA-A*68:01,HLA-B*27:02, HLA-C*07:06
GTTAMTSAYSR

SEQ ID NO: 6804 - protein, 9 aa, Homo sapiens
  Table 1.2; MAGEB4; ENSG00000120289; HLA -A*02:07
HFPEIFRKV

SEQ ID NO: 6805 - protein, 8 aa, Homo sapiens
  Table 1.2; MAGEB4; ENSG00000120289; HLA -B*08:01,HLA-B*51:01
HSYILVSM

SEQ ID NO: 6806 - protein, 9 aa, Homo sapiens
  Table 1.2; MAGEB4; ENSG00000120289; HLA -B*56:01
IPQEPQREP

SEQ ID NO: 6807 - protein, 10 aa, Homo sapiens
  Table 1.2; MAGEB4; ENSG00000120289; HLA -B*54:01,HLA-B*56:01
IPQEPQREPP

SEQ ID NO: 6808 - protein, 9 aa, Homo sapiens
  Table 1.2; MAGEB4; ENSG00000120289; HLA -A*01:01,HLA-A*03:01,HLA-A*03:02,HLA-A*11:01,HLA-A*31:01, HLA-A*33:01,HLA-A*33:03,HLA-A*68:01,HLA-B*27:02,HLA-C*07:06
ITQDLVQEK

SEQ ID NO: 6809 - protein, 10 aa, Homo sapiens
  Table 1.2; MAGEB4; ENSG00000120289; HLA -A*01:01,HLA-A*25:01,HLA-A*26:01,HLA-A*29:02,HLA-A*30:02, HLA-A*32:01,HLA-B*15:01,HLA-B*57:01,HLA-B*58:01,HLA-C*16:02
ITQDLVQEKY

SEQ ID NO: 6810 - protein, 9 aa, Homo sapiens
  Table 1.2; MAGEB4; ENSG00000120289; HLA -A*24:02
IYDGKRHLI

SEQ ID NO: 6811 - protein, 10 aa, Homo sapiens
  Table 1.2; MAGEB4; ENSG00000120289; HLA -A*24:02
IYDGKRHLIF

SEQ ID NO: 6812 - protein, 11 aa, Homo sapiens
  Table 1.2; MAGEB4; ENSG00000120289; HLA -B*40:01,HLA-B*49:01
KEESPSSSSSV

SEQ ID NO: 6813 - protein, 9 aa, Homo sapiens
  Table 1.2; MAGEB4; ENSG00000120289; HLA -B*37:01,HLA-B*40:01
KEPTTKAEM

SEQ ID NO: 6814 - protein, 10 aa, Homo sapiens
  Table 1.2; MAGEB4; ENSG00000120289; HLA -A*30:01,HLA-B*40:01,HLA-B*40:02
KEPTTKAEML

SEQ ID NO: 6815 - protein, 10 aa, Homo sapiens
  Table 1.2; MAGEB4; ENSG00000120289; HLA -A*25:01,HLA-A*29:02,HLA-A*30:01,HLA-A*30:02,HLA-A*32:01, HLA-B*15:01,HLA-B*15:03,HLA-B*27:02,HLA-B*40:01,HLA-B*44:02, HLA-B*44:03,HLA-C*16:01,HLA-C*16:04
KEVNPTTHSY

SEQ ID NO: 6816 - protein, 11 aa, Homo sapiens
  Table 1.2; MAGEB4; ENSG00000120289; HLA -B*49:01
KEVNPTTHSYI

SEQ ID NO: 6817 - protein, 11 aa, Homo sapiens
  Table 1.2; MAGEB4; ENSG00000120289; HLA -A*03:01,HLA-A*03:02,HLA-A*11:01
KLITQDLVQEK

SEQ ID NO: 6818 - protein, 8 aa, Homo sapiens
  Table 1.2; MAGEB4; ENSG00000120289; HLA -A*03:01
KMKEPTTK

SEQ ID NO: 6819 - protein, 9 aa, Homo sapiens
  Table 1.2; MAGEB4; ENSG00000120289; HLA -A*02:03,HLA-A*32:01,HLA-B*55:01
KMKEPTTKA

SEQ ID NO: 6820 - protein, 9 aa, Homo sapiens
  Table 1.2; MAGEB4; ENSG00000120289; HLA -A*03:01,HLA-A*24:02,HLA-A*29:02,HLA-B*57:01
KMLVQFLLY

SEQ ID NO: 6821 - protein, 10 aa, Homo sapiens
  Table 1.2; MAGEB4; ENSG00000120289; HLA -A*03:01
KMLVQFLLYK

SEQ ID NO: 6822 - protein, 10 aa, Homo sapiens
  Table 1.2; MAGEB4; ENSG00000120289; HLA -A*03:01,HLA-A*03:02,HLA-A*11:01
KVGQPTAAEK

SEQ ID NO: 6823 - protein, 8 aa, Homo sapiens
  Table 1.2; MAGEB4; ENSG00000120289; HLA -A*03:01
KVLEFLAK

SEQ ID NO: 6824 - protein, 9 aa, Homo sapiens
  Table 1.2; MAGEB4; ENSG00000120289; HLA -A*02:01,HLA-A*02:03,HLA-A*02:04,HLA-A*02:07,HLA-A*68:02
KVLEFLAKV

SEQ ID NO: 6825 - protein, 10 aa, Homo sapiens
  Table 1.2; MAGEB4; ENSG00000120289; HLA -A*03:02,HLA-A*30:02,HLA-A*32:01,HLA-B*58:01
KVNDTTPNNF

SEQ ID NO: 6826 - protein, 8 aa, Homo sapiens
  Table 1.2; MAGEB4; ENSG00000120289; HLA -C*16:01
KVSQRTEL

SEQ ID NO: 6827 - protein, 9 aa, Homo sapiens
  Table 1.2; MAGEB4; ENSG00000120289; HLA -A*24:02
KYKEHFPEI

SEQ ID NO: 6828 - protein, 9 aa, Homo sapiens
  Table 1.2; MAGEB4; ENSG00000120289; HLA -A*32:01,HLA-B*54:01
LAFGIPQEP

SEQ ID NO: 6829 - protein, 11 aa, Homo sapiens
  Table 1.2; MAGEB4; ENSG00000120289; HLA -A*68:01
LAFGIPQEPQR

SEQ ID NO: 6830 - protein, 9 aa, Homo sapiens
  Table 1.2; MAGEB4; ENSG00000120289; HLA -A*02:01,HLA-A*02:03,HLA-A*02:04,HLA-A*02:07
LLMPLLSVI

SEQ ID NO: 6831 - protein, 11 aa, Homo sapiens
  Table 1.2; MAGEB4; ENSG00000120289; HLA -A*02:04
LLMPLLSVIFL

SEQ ID NO: 6832 - protein, 9 aa, Homo sapiens
  Table 1.2; MAGEB4; ENSG00000120289; HLA -A*24:02
LMPLLSVIF

SEQ ID NO: 6833 - protein, 10 aa, Homo sapiens
  Table 1.2; MAGEB4; ENSG00000120289; HLA -B*27:02
LNMLGIYDGK

SEQ ID NO: 6834 - protein, 9 aa, Homo sapiens
  Table 1.2; MAGEB4; ENSG00000120289; HLA -B*54:01,HLA-B*56:01
LPRNGLLMP

SEQ ID NO: 6835 - protein, 9 aa, Homo sapiens
  Table 1.2; MAGEB4; ENSG00000120289; HLA -B*39:01
LRDTASSSL

SEQ ID NO: 6836 - protein, 10 aa, Homo sapiens
  Table 1.2; MAGEB4; ENSG00000120289; HLA -A*02:03
LVFGLALKEV

SEQ ID NO: 6837 - protein, 9 aa, Homo sapiens
  Table 1.2; MAGEB4; ENSG00000120289; HLA -A*01:01,HLA-A*03:01,HLA-A*11:01,HLA-A*25:01,HLA-A*26:01, HLA-A*29:02,HLA-A*30:02,HLA-A*32:01,HLA-B*15:01,HLA-B*35:01, HLA-B*46:01,HLA-B*58:01,HLA-C*02:02,HLA-C*07:04,HLA-C*14:02,
  HLA-C*16:01,HLA-C*16:02
LVQEKYLEY

SEQ ID NO: 6838 - protein, 9 aa, Homo sapiens
  Table 1.2; MAGEB4; ENSG00000120289; HLA -A*29:02,HLA-A*30:02
LVQFLLYKY

SEQ ID NO: 6839 - protein, 9 aa, Homo sapiens
  Table 1.2; MAGEB4; ENSG00000120289; HLA -A*29:02
MLKIISKKY

SEQ ID NO: 6840 - protein, 8 aa, Homo sapiens
  Table 1.2; MAGEB4; ENSG00000120289; HLA -A*29:02
MLVQFLLY

SEQ ID NO: 6841 - protein, 9 aa, Homo sapiens
  Table 1.2; MAGEB4; ENSG00000120289; HLA -A*03:01
MLVQFLLYK

SEQ ID NO: 6842 - protein, 10 aa, Homo sapiens
  Table 1.2; MAGEB4; ENSG00000120289; HLA -A*29:02
MLVQFLLYKY

SEQ ID NO: 6843 - protein, 8 aa, Homo sapiens
  Table 1.2; MAGEB4; ENSG00000120289; HLA -B*35:01,HLA-B*35:03
MPLLSVIF

SEQ ID NO: 6844 - protein, 9 aa, Homo sapiens
  Table 1.2; MAGEB4; ENSG00000120289; HLA -B*35:01,HLA-B*35:03,HLA-B*51:01,HLA-B*54:01
MPLLSVIFL

SEQ ID NO: 6845 - protein, 9 aa, Homo sapiens
  Table 1.2; MAGEB4; ENSG00000120289; HLA -B*07:02,HLA-C*07:02
MPRGQKSKL

SEQ ID NO: 6846 - protein, 9 aa, Homo sapiens
  Table 1.2; MAGEB4; ENSG00000120289; HLA -C*16:01
MTSAYSRAT

SEQ ID NO: 6847 - protein, 9 aa, Homo sapiens
  Table 1.2; MAGEB4; ENSG00000120289; HLA -B*44:02
NDGNQSSAW

SEQ ID NO: 6848 - protein, 8 aa, Homo sapiens
  Table 1.2; MAGEB4; ENSG00000120289; HLA -B*37:01
NDTTPNNF

SEQ ID NO: 6849 - protein, 10 aa, Homo sapiens
  Table 1.2; MAGEB4; ENSG00000120289; HLA -A*33:01
NMLGIYDGKR

SEQ ID NO: 6850 - protein, 9 aa, Homo sapiens
  Table 1.2; MAGEB4; ENSG00000120289; HLA -B*35:01,HLA-B*35:03
NPTTHSYIL

SEQ ID NO: 6851 - protein, 9 aa, Homo sapiens
  Table 1.2; MAGEB4; ENSG00000120289; HLA -A*01:01,HLA-A*32:01,HLA-B*35:01,HLA-B*57:01,HLA-B*58:01, HLA-C*05:01,HLA-C*16:01
NSDPPRYQF

SEQ ID NO: 6852 - protein, 9 aa, Homo sapiens
  Table 1.2; MAGEB4; ENSG00000120289; HLA -A*68:01
PSSSSSVLR

SEQ ID NO: 6853 - protein, 10 aa, Homo sapiens
  Table 1.2; MAGEB4; ENSG00000120289; HLA -B*07:02,HLA-C*03:04,HLA-C*16:02
QASTSTERSL

SEQ ID NO: 6854 - protein, 8 aa, Homo sapiens
  Table 1.2; MAGEB4; ENSG00000120289; HLA -B*18:01,HLA-C*07:01
QDLVQEKY

SEQ ID NO: 6855 - protein, 11 aa, Homo sapiens
  Table 1.2; MAGEB4; ENSG00000120289; HLA -A*30:02,HLA-A*32:01,HLA-B*15:01,HLA-B*15:03,HLA-B*39:01
QQVPNSDPPRY

SEQ ID NO: 6856 - protein, 9 aa, Homo sapiens
  Table 1.2; MAGEB4; ENSG00000120289; HLA -B*27:05
QRTELVFGL

SEQ ID NO: 6857 - protein, 9 aa, Homo sapiens
  Table 1.2; MAGEB4; ENSG00000120289; HLA -A*31:01
QSSAWTLPR

SEQ ID NO: 6858 - protein, 9 aa, Homo sapiens
  Table 1.2; MAGEB4; ENSG00000120289; HLA -A*68:01
QVPNSDPPR

SEQ ID NO: 6859 - protein, 10 aa, Homo sapiens
  Table 1.2; MAGEB4; ENSG00000120289; HLA -A*01:01,HLA-A*25:01,HLA-A*26:01,HLA-A*29:02,HLA-A*30:02
QVPNSDPPRY

SEQ ID NO: 6860 - protein, 8 aa, Homo sapiens
  Table 1.2; MAGEB4; ENSG00000120289; HLA -B*37:01
RDTASSSL

SEQ ID NO: 6861 - protein, 9 aa, Homo sapiens
  Table 1.2; MAGEB4; ENSG00000120289; HLA -A*30:01,HLA-B*40:01,HLA-B*49:01
REPPTTSAA

SEQ ID NO: 6862 - protein, 10 aa, Homo sapiens
  Table 1.2; MAGEB4; ENSG00000120289; HLA -A*30:01,HLA-B*40:01
REPPTTSAAA

SEQ ID NO: 6863 - protein, 10 aa, Homo sapiens
  Table 1.2; MAGEB4; ENSG00000120289; HLA -A*30:02,HLA-B*15:01,HLA-B*15:03,HLA-B*58:01
RGTTAMTSAY

SEQ ID NO: 6864 - protein, 9 aa, Homo sapiens
  Table 1.2; MAGEB4; ENSG00000120289; HLA -A*31:01
RHLIFGEPR

SEQ ID NO: 6865 - protein, 9 aa, Homo sapiens
  Table 1.2; MAGEB4; ENSG00000120289; HLA -B*57:01
RSLKDSLTR

SEQ ID NO: 6866 - protein, 10 aa, Homo sapiens
  Table 1.2; MAGEB4; ENSG00000120289; HLA -A*03:01
RSLKDSLTRK

SEQ ID NO: 6867 - protein, 10 aa, Homo sapiens
  Table 1.2; MAGEB4; ENSG00000120289; HLA -A*03:01,HLA-A*03:02
RTRGQTQDLK

SEQ ID NO: 6868 - protein, 9 aa, Homo sapiens
  Table 1.2; MAGEB4; ENSG00000120289; HLA -B*08:01,HLA-B*46:01,HLA-C*16:01
SAYSRATSS

SEQ ID NO: 6869 - protein, 8 aa, Homo sapiens
  Table 1.2; MAGEB4; ENSG00000120289; HLA -B*37:01
SDPPRYQF

SEQ ID NO: 6870 - protein, 9 aa, Homo sapiens
  Table 1.2; MAGEB4; ENSG00000120289; HLA -B*37:01
SDPPRYQFL

SEQ ID NO: 6871 - protein, 9 aa, Homo sapiens
  Table 1.2; MAGEB4; ENSG00000120289; HLA -A*03:01
SLKDSLTRK

SEQ ID NO: 6872 - protein, 8 aa, Homo sapiens
  Table 1.2; MAGEB4; ENSG00000120289; HLA -B*07:02
SPSSSSSV

SEQ ID NO: 6873 - protein, 9 aa, Homo sapiens
  Table 1.2; MAGEB4; ENSG00000120289; HLA -B*07:02,HLA-B*35:01,HLA-B*35:03,HLA-B*39:01,HLA-B*55:01, HLA-B*56:01,HLA-C*07:02
SPSSSSSVL

SEQ ID NO: 6874 - protein, 10 aa, Homo sapiens
  Table 1.2; MAGEB4; ENSG00000120289; HLA -A*68:01,HLA-C*07:06
SPSSSSSVLR

SEQ ID NO: 6875 - protein, 9 aa, Homo sapiens
  Table 1.2; MAGEB4; ENSG00000120289; HLA -B*27:05,HLA-C*07:06
SQASTSTER

SEQ ID NO: 6876 - protein, 11 aa, Homo sapiens
  Table 1.2; MAGEB4; ENSG00000120289; HLA -B*38:01
SQASTSTERSL

SEQ ID NO: 6877 - protein, 8 aa, Homo sapiens
  Table 1.2; MAGEB4; ENSG00000120289; HLA -B*15:01,HLA-B*15:03
SQRTELVF

SEQ ID NO: 6878 - protein, 10 aa, Homo sapiens
  Table 1.2; MAGEB4; ENSG00000120289; HLA -A*68:01,HLA-C*07:06
SSQASTSTER

SEQ ID NO: 6879 - protein, 8 aa, Homo sapiens
  Table 1.2; MAGEB4; ENSG00000120289; HLA -B*13:02
SSSLAFGI

SEQ ID NO: 6880 - protein, 11 aa, Homo sapiens
  Table 1.2; MAGEB4; ENSG00000120289; HLA -A*68:01,HLA-C*07:06
SSSQASTSTER

SEQ ID NO: 6881 - protein, 8 aa, Homo sapiens
  Table 1.2; MAGEB4; ENSG00000120289; HLA -C*16:01
STSTERSL

SEQ ID NO: 6882 - protein, 9 aa, Homo sapiens
  Table 1.2; MAGEB4; ENSG00000120289; HLA -A*11:01
STSTERSLK

SEQ ID NO: 6883 - protein, 11 aa, Homo sapiens
  Table 1.2; MAGEB4; ENSG00000120289; HLA -A*31:01
SVIFLNGNCAR

SEQ ID NO: 6884 - protein, 11 aa, Homo sapiens
  Table 1.2; MAGEB4; ENSG00000120289; HLA -A*25:01,HLA-B*07:02,HLA-C*01:02
SVLRDTASSSL

SEQ ID NO: 6885 - protein, 8 aa, Homo sapiens
  Table 1.2; MAGEB4; ENSG00000120289; HLA -A*23:01,HLA-A*24:02,HLA-C*14:02
SYILVSML

SEQ ID NO: 6886 - protein, 9 aa, Homo sapiens
  Table 1.2; MAGEB4; ENSG00000120289; HLA -A*03:02,HLA-A*11:01,HLA-A*31:01,HLA-A*33:01,HLA-A*33:03, HLA-A*68:01,HLA-B*35:01,HLA-B*57:01,HLA-C*07:06
TAMTSAYSR

SEQ ID NO: 6887 - protein, 10 aa, Homo sapiens
  Table 1.2; MAGEB4; ENSG00000120289; HLA -B*54:01
TAMTSAYSRA

SEQ ID NO: 6888 - protein, 8 aa, Homo sapiens
  Table 1.2; MAGEB4; ENSG00000120289; HLA -B*35:01,HLA-B*35:03,HLA-B*37:01
TASSSLAF

SEQ ID NO: 6889 - protein, 8 aa, Homo sapiens
  Table 1.2; MAGEB4; ENSG00000120289; HLA -B*18:01,HLA-B*49:01
TELVFGLA

SEQ ID NO: 6890 - protein, 9 aa, Homo sapiens
  Table 1.2; MAGEB4; ENSG00000120289; HLA -A*30:01,HLA-B*18:01,HLA-B*37:01,HLA-B*40:01,HLA-B*40:02, HLA-B*44:02,HLA-B*44:03,HLA-B*49:01
TELVFGLAL

SEQ ID NO: 6891 - protein, 9 aa, Homo sapiens
  Table 1.2; MAGEB4; ENSG00000120289; HLA -A*30:01,HLA-B*18:01,HLA-B*40:01,HLA-B*40:02
TERSLKDSL

SEQ ID NO: 6892 - protein, 9 aa, Homo sapiens
  Table 1.2; MAGEB4; ENSG00000120289; HLA -B*38:01,HLA-B*39:01
THSYILVSM

SEQ ID NO: 6893 - protein, 8 aa, Homo sapiens
  Table 1.2; MAGEB4; ENSG00000120289; HLA -B*51:01
TPNNFPLL

SEQ ID NO: 6894 - protein, 9 aa, Homo sapiens
  Table 1.2; MAGEB4; ENSG00000120289; HLA -A*01:01,HLA-A*26:01,HLA-A*29:02,HLA-A*30:02,HLA-B*18:01, HLA-B*35:01,HLA-B*55:01,HLA-C*02:02
TPNNFPLLY

SEQ ID NO: 6895 - protein, 9 aa, Homo sapiens
  Table 1.2; MAGEB4; ENSG00000120289; HLA -A*01:01,HLA-A*30:02,HLA-A*32:01,HLA-B*15:01,HLA-B*15:03, HLA-B*18:01,HLA-B*38:01,HLA-B*39:01
TQDLVQEKY

SEQ ID NO: 6896 - protein, 10 aa, Homo sapiens
  Table 1.2; MAGEB4; ENSG00000120289; HLA -B*38:01
TQDLVQEKYL

SEQ ID NO: 6897 - protein, 9 aa, Homo sapiens
  Table 1.2; MAGEB4; ENSG00000120289; HLA -B*27:05
TRGQTQDLK

SEQ ID NO: 6898 - protein, 9 aa, Homo sapiens
  Table 1.2; MAGEB4; ENSG00000120289; HLA -B*08:01
TSKMKVLEF

SEQ ID NO: 6899 - protein, 9 aa, Homo sapiens
  Table 1.2; MAGEB4; ENSG00000120289; HLA -A*33:03,HLA-A*68:01,HLA-B*27:05,HLA-B*35:01,HLA-B*35:03, HLA-B*39:01,HLA-B*55:01,HLA-C*01:02,HLA-C*03:03,HLA-C*03:04, HLA-C*04:01,HLA-C*06:02,HLA-C*07:01,HLA-C*07:04,HLA-C*07:06,
  HLA-C*14:02,HLA-C*16:01,HLA-C*16:02
TSSSSSQPM

SEQ ID NO: 6900 - protein, 8 aa, Homo sapiens
  Table 1.2; MAGEB4; ENSG00000120289; HLA -A*01:01,HLA-A*25:01,HLA-A*26:01,HLA-A*30:02,HLA-A*32:01, HLA-B*15:01,HLA-B*46:01,HLA-C*12:03
TTAMTSAY

SEQ ID NO: 6901 - protein, 10 aa, Homo sapiens
  Table 1.2; MAGEB4; ENSG00000120289; HLA -A*03:02,HLA-A*11:01,HLA-A*31:01,HLA-A*33:03,HLA-A*68:01, HLA-B*27:02,HLA-C*07:06
TTAMTSAYSR

SEQ ID NO: 6902 - protein, 9 aa, Homo sapiens
  Table 1.2; MAGEB4; ENSG00000120289; HLA -A*02:07,HLA-A*24:02,HLA-A*25:01,HLA-A*26:01,HLA-A*68:02
TTPNNFPLL

SEQ ID NO: 6903 - protein, 10 aa, Homo sapiens
  Table 1.2; MAGEB4; ENSG00000120289; HLA -A*01:01,HLA-A*25:01,HLA-A*26:01,HLA-A*29:02
TTPNNFPLLY

SEQ ID NO: 6904 - protein, 9 aa, Homo sapiens
  Table 1.2; MAGEB4; ENSG00000120289; HLA -A*03:02,HLA-A*11:01
VGQPTAAEK

SEQ ID NO: 6905 - protein, 10 aa, Homo sapiens
  Table 1.2; MAGEB4; ENSG00000120289; HLA -A*02:03,HLA-A*03:01,HLA-B*07:02,HLA-B*46:01,HLA-C*01:02, HLA-C*07:02,HLA-C*14:02
VLRDTASSSL

SEQ ID NO: 6906 - protein, 9 aa, Homo sapiens
  Table 1.2; MAGEB4; ENSG00000120289; HLA -C*05:01
VNDTTPNNF

SEQ ID NO: 6907 - protein, 9 aa, Homo sapiens
  Table 1.2; MAGEB4; ENSG00000120289; HLA -A*29:02,HLA-A*30:02,HLA-B*35:01,HLA-B*35:03,HLA-B*55:01
VPNSDPPRY

SEQ ID NO: 6908 - protein, 11 aa, Homo sapiens
  Table 1.2; MAGEB4; ENSG00000120289; HLA -A*23:01,HLA-B*07:02,HLA-B*35:01,HLA-B*55:01
VPNSDPPRYQF

SEQ ID NO: 6909 - protein, 8 aa, Homo sapiens
  Table 1.2; MAGEB4; ENSG00000120289; HLA -A*01:01,HLA-B*15:01,HLA-B*15:03
VQEKYLEY

SEQ ID NO: 6910 - protein, 8 aa, Homo sapiens
  Table 1.2; MAGEB4; ENSG00000120289; HLA -B*15:01,HLA-B*15:03
VQFLLYKY

SEQ ID NO: 6911 - protein, 9 aa, Homo sapiens
  Table 1.2; MAGEB4; ENSG00000120289; HLA -A*23:01,HLA-A*32:01,HLA-B*15:01,HLA-B*46:01,HLA-B*57:01, HLA-B*58:01
VSQRTELVF

SEQ ID NO: 6912 - protein, 9 aa, Homo sapiens
  Table 1.2; MAGEB4; ENSG00000120289; HLA -B*49:01
WEFLNMLGI

SEQ ID NO: 6913 - protein, 9 aa, Homo sapiens
  Table 1.2; MAGEB4; ENSG00000120289; HLA -A*02:04
YQFLWGPRA

SEQ ID NO: 6914 - protein, 11 aa, Homo sapiens
  Table 1.2; MAGEB6; ENSG00000176746; HLA -A*30:02
ADSSNTSPGLY

SEQ ID NO: 6915 - protein, 9 aa, Homo sapiens
  Table 1.2; MAGEB6; ENSG00000176746; HLA -A*30:01,HLA-B*37:01,HLA-B*40:01,HLA-B*40:02,HLA-B*44:02, HLA-B*44:03,HLA-C*16:01,HLA-C*16:02
AETTKMRVL

SEQ ID NO: 6916 - protein, 8 aa, Homo sapiens
  Table 1.2; MAGEB6; ENSG00000176746; HLA -B*15:03
AGVSGSKY

SEQ ID NO: 6917 - protein, 9 aa, Homo sapiens
  Table 1.2; MAGEB6; ENSG00000176746; HLA -A*02:01,HLA-A*02:03,HLA-A*02:04,HLA-A*02:07,HLA-B*55:01
ALIDEVERA

SEQ ID NO: 6918 - protein, 10 aa, Homo sapiens
  Table 1.2; MAGEB6; ENSG00000176746; HLA -A*02:01,HLA-A*02:03,HLA-A*02:04,HLA-A*25:01,HLA-A*30:01, HLA-B*15:01,HLA-B*40:01,HLA-B*46:01,HLA-B*55:01,HLA-C*01:02
ALIDEVERAL

SEQ ID NO: 6919 - protein, 11 aa, Homo sapiens
  Table 1.2; MAGEB6; ENSG00000176746; HLA -A*31:01
ALIDEVERALR

SEQ ID NO: 6920 - protein, 9 aa, Homo sapiens
  Table 1.2; MAGEB6; ENSG00000176746; HLA -A*01:01,HLA-A*03:01
ALPKSGLLM

SEQ ID NO: 6921 - protein, 11 aa, Homo sapiens
  Table 1.2; MAGEB6; ENSG00000176746; HLA -A*02:04,HLA-A*02:07
ALPKSGLLMSL

SEQ ID NO: 6922 - protein, 10 aa, Homo sapiens
  Table 1.2; MAGEB6; ENSG00000176746; HLA -A*11:01
AQFLQKKFEK

SEQ ID NO: 6923 - protein, 8 aa, Homo sapiens
  Table 1.2; MAGEB6; ENSG00000176746; HLA -B*58:01
ASQKAIIF

SEQ ID NO: 6924 - protein, 9 aa, Homo sapiens
  Table 1.2; MAGEB6; ENSG00000176746; HLA -A*03:01,HLA-A*03:02,HLA-A*11:01,HLA-A*31:01
ASQKAIIFK

SEQ ID NO: 6925 - protein, 9 aa, Homo sapiens
  Table 1.2; MAGEB6; ENSG00000176746; HLA -B*08:01
AVKKKACTL

SEQ ID NO: 6926 - protein, 8 aa, Homo sapiens
  Table 1.2; MAGEB6; ENSG00000176746; HLA -A*23:01,HLA-A*24:02,HLA-C*01:02,HLA-C*04:01,HLA-C*14:02
AYAETTKM

SEQ ID NO: 6927 - protein, 9 aa, Homo sapiens
  Table 1.2; MAGEB6; ENSG00000176746; HLA -A*33:03
AYAETTKMR

SEQ ID NO: 6928 - protein, 11 aa, Homo sapiens
  Table 1.2; MAGEB6; ENSG00000176746; HLA -A*24:02
AYAETTKMRVL

SEQ ID NO: 6929 - protein, 9 aa, Homo sapiens
  Table 1.2; MAGEB6; ENSG00000176746; HLA -A*03:01,HLA-A*03:02,HLA-A*11:01
CTLAQFLQK

SEQ ID NO: 6930 - protein, 10 aa, Homo sapiens
  Table 1.2; MAGEB6; ENSG00000176746; HLA -A*11:01
CTLAQFLQKK

SEQ ID NO: 6931 - protein, 9 aa, Homo sapiens
  Table 1.2; MAGEB6; ENSG00000176746; HLA -A*26:01
DAGVSGSKY

SEQ ID NO: 6932 - protein, 9 aa, Homo sapiens
  Table 1.2; MAGEB6; ENSG00000176746; HLA -A*33:01,HLA-A*33:03,HLA-A*68:01
DALIDEVER

SEQ ID NO: 6933 - protein, 8 aa, Homo sapiens
  Table 1.2; MAGEB6; ENSG00000176746; HLA -B*08:01
DAVKKKAC

SEQ ID NO: 6934 - protein, 10 aa, Homo sapiens
  Table 1.2; MAGEB6; ENSG00000176746; HLA -B*08:01
DAVKKKACTL

SEQ ID NO: 6935 - protein, 8 aa, Homo sapiens
  Table 1.2; MAGEB6; ENSG00000176746; HLA -B*51:01
DAVVSYSK

SEQ ID NO: 6936 - protein, 9 aa, Homo sapiens
  Table 1.2; MAGEB6; ENSG00000176746; HLA -B*18:01
DEKSPSTSH

SEQ ID NO: 6937 - protein, 9 aa, Homo sapiens
  Table 1.2; MAGEB6; ENSG00000176746; HLA -A*33:01,HLA-A*33:03,HLA-B*18:01
DEKSPSTSR

SEQ ID NO: 6938 - protein, 9 aa, Homo sapiens
  Table 1.2; MAGEB6; ENSG00000176746; HLA -B*18:01,HLA-B*37:01,HLA-B*44:02,HLA-B*44:03
DEVERALRL

SEQ ID NO: 6939 - protein, 8 aa, Homo sapiens
  Table 1.2; MAGEB6; ENSG00000176746; HLA -B*08:01,HLA-B*18:01
DGILHSIY

SEQ ID NO: 6940 - protein, 9 aa, Homo sapiens
  Table 1.2; MAGEB6; ENSG00000176746; HLA -B*08:01
DLVQDKYVV

SEQ ID NO: 6941 - protein, 10 aa, Homo sapiens
  Table 1.2; MAGEB6; ENSG00000176746; HLA -A*25:01,HLA-A*26:01
DLVQDKYVVY

SEQ ID NO: 6942 - protein, 11 aa, Homo sapiens
  Table 1.2; MAGEB6; ENSG00000176746; HLA -A*33:01
DLVQDKYVVYR

SEQ ID NO: 6943 - protein, 9 aa, Homo sapiens
  Table 1.2; MAGEB6; ENSG00000176746; HLA -A*33:01,HLA-B*08:01
DNALPKSGL

SEQ ID NO: 6944 - protein, 9 aa, Homo sapiens
  Table 1.2; MAGEB6; ENSG00000176746; HLA -B*27:05,HLA-B*35:03,HLA-B*38:01,HLA-B*39:01
DSSGESYTL

SEQ ID NO: 6945 - protein, 10 aa, Homo sapiens
  Table 1.2; MAGEB6; ENSG00000176746; HLA -A*01:01,HLA-A*26:01
DSSNTSPGLY

SEQ ID NO: 6946 - protein, 10 aa, Homo sapiens
  Table 1.2; MAGEB6; ENSG00000176746; HLA -A*68:01
DVAANGQDEK

SEQ ID NO: 6947 - protein, 10 aa, Homo sapiens
  Table 1.2; MAGEB6; ENSG00000176746; HLA -B*27:02
EDALIDEVER

SEQ ID NO: 6948 - protein, 11 aa, Homo sapiens
  Table 1.2; MAGEB6; ENSG00000176746; HLA -B*27:02
EDEESVSASQK

SEQ ID NO: 6949 - protein, 11 aa, Homo sapiens
  Table 1.2; MAGEB6; ENSG00000176746; HLA -B*44:02,HLA-B*44:03
EESVSASQKAI

SEQ ID NO: 6950 - protein, 9 aa, Homo sapiens
  Table 1.2; MAGEB6; ENSG00000176746; HLA -A*29:02
EFLGLLGIY

SEQ ID NO: 6951 - protein, 10 aa, Homo sapiens
  Table 1.2; MAGEB6; ENSG00000176746; HLA -B*35:03
EGILSGDNAL

SEQ ID NO: 6952 - protein, 9 aa, Homo sapiens
  Table 1.2; MAGEB6; ENSG00000176746; HLA -A*01:01,HLA-A*26:01,HLA-A*30:02,HLA-B*15:01,HLA-B*39:01, HLA-C*07:04
EMDSSGESY

SEQ ID NO: 6953 - protein, 11 aa, Homo sapiens
  Table 1.2; MAGEB6; ENSG00000176746; HLA -B*38:01,HLA-B*39:01
EMDSSGESYTL

SEQ ID NO: 6954 - protein, 10 aa, Homo sapiens
  Table 1.2; MAGEB6; ENSG00000176746; HLA -A*33:03
ESHSSSSSSR

SEQ ID NO: 6955 - protein, 8 aa, Homo sapiens
  Table 1.2; MAGEB6; ENSG00000176746; HLA -A*11:01,HLA-A*33:01,HLA-A*33:03
ESYTLVSK

SEQ ID NO: 6956 - protein, 9 aa, Homo sapiens
  Table 1.2; MAGEB6; ENSG00000176746; HLA -A*25:01,HLA-A*26:01,HLA-A*33:01,HLA-A*33:03,HLA-A*68:01, HLA-A*68:02,HLA-B*51:01
ESYTLVSKL

SEQ ID NO: 6957 - protein, 9 aa, Homo sapiens
  Table 1.2; MAGEB6; ENSG00000176746; HLA -A*25:01,HLA-A*26:01,HLA-A*33:03,HLA-A*68:01
ETNGQPQGL

SEQ ID NO: 6958 - protein, 8 aa, Homo sapiens
  Table 1.2; MAGEB6; ENSG00000176746; HLA -B*08:01
ETTKMRVL

SEQ ID NO: 6959 - protein, 9 aa, Homo sapiens
  Table 1.2; MAGEB6; ENSG00000176746; HLA -A*33:01,HLA-A*33:03
ETTKMRVLR

SEQ ID NO: 6960 - protein, 9 aa, Homo sapiens
  Table 1.2; MAGEB6; ENSG00000176746; HLA -A*33:01
EVERALRLR

SEQ ID NO: 6961 - protein, 9 aa, Homo sapiens
  Table 1.2; MAGEB6; ENSG00000176746; HLA -A*68:02
EVWEFLGLL

SEQ ID NO: 6962 - protein, 9 aa, Homo sapiens
  Table 1.2; MAGEB6; ENSG00000176746; HLA -A*23:01,HLA-A*24:02,HLA-A*31:01,HLA-A*33:01,HLA-A*33:03
EYKPYFPQI

SEQ ID NO: 6963 - protein, 10 aa, Homo sapiens
  Table 1.2; MAGEB6; ENSG00000176746; HLA -A*24:02
EYKPYFPQIL

SEQ ID NO: 6964 - protein, 8 aa, Homo sapiens
  Table 1.2; MAGEB6; ENSG00000176746; HLA -B*46:01,HLA-C*03:04
FGVELKEM

SEQ ID NO: 6965 - protein, 9 aa, Homo sapiens
  Table 1.2; MAGEB6; ENSG00000176746; HLA -B*40:01,HLA-B*49:01
GEDEESVSA

SEQ ID NO: 6966 - protein, 9 aa, Homo sapiens
  Table 1.2; MAGEB6; ENSG00000176746; HLA -A*03:02,HLA-A*11:01,HLA-B*27:05
GESYTLVSK

SEQ ID NO: 6967 - protein, 10 aa, Homo sapiens
  Table 1.2; MAGEB6; ENSG00000176746; HLA -A*30:01,HLA-B*40:01,HLA-B*49:01
GESYTLVSKL

SEQ ID NO: 6968 - protein, 11 aa, Homo sapiens
  Table 1.2; MAGEB6; ENSG00000176746; HLA -A*03:01,HLA-A*03:02,HLA-A*11:01,HLA-B*27:02
GILSGDNALPK

SEQ ID NO: 6969 - protein, 10 aa, Homo sapiens
  Table 1.2; MAGEB6; ENSG00000176746; HLA -A*02:01,HLA-A*02:03,HLA-A*02:04,HLA-A*02:07,HLA-A*03:01, HLA-A*23:01,HLA-A*25:01,HLA-A*30:01,HLA-A*32:01,HLA-A*68:02, HLA-B*13:02,HLA-B*46:01,HLA-B*55:01
GIYDGILHSI

SEQ ID NO: 6970 - protein, 11 aa, Homo sapiens
  Table 1.2; MAGEB6; ENSG00000176746; HLA -A*01:01,HLA-A*29:02,HLA-A*30:02,HLA-B*15:01
GIYDGILHSIY

SEQ ID NO: 6971 - protein, 9 aa, Homo sapiens
  Table 1.2; MAGEB6; ENSG00000176746; HLA -A*02:04
GLLGIYDGI

SEQ ID NO: 6972 - protein, 10 aa, Homo sapiens
  Table 1.2; MAGEB6; ENSG00000176746; HLA -A*02:04
GLLGIYDGIL

SEQ ID NO: 6973 - protein, 9 aa, Homo sapiens
  Table 1.2; MAGEB6; ENSG00000176746; HLA -A*02:04
GLLMSLLVV

SEQ ID NO: 6974 - protein, 11 aa, Homo sapiens
  Table 1.2; MAGEB6; ENSG00000176746; HLA -A*03:02
GLTGPQATAEK

SEQ ID NO: 6975 - protein, 11 aa, Homo sapiens
  Table 1.2; MAGEB6; ENSG00000176746; HLA -A*02:04
GLYPHLYEDAL

SEQ ID NO: 6976 - protein, 11 aa, Homo sapiens
  Table 1.2; MAGEB6; ENSG00000176746; HLA -B*07:02
GPRAYAETTKM

SEQ ID NO: 6977 - protein, 11 aa, Homo sapiens
  Table 1.2; MAGEB6; ENSG00000176746; HLA -A*31:01,HLA-B*27:05
GQDEKSPSTSR

SEQ ID NO: 6978 - protein, 9 aa, Homo sapiens
  Table 1.2; MAGEB6; ENSG00000176746; HLA -A*11:01,HLA-A*25:01,HLA-A*26:01,HLA-A*29:02,HLA-A*30:02, HLA-A*32:01,HLA-B*15:01,HLA-B*15:03,HLA-B*46:01,HLA-B*58:01, HLA-C*01:02
GSPDAVVSY

SEQ ID NO: 6979 - protein, 11 aa, Homo sapiens
  Table 1.2; MAGEB6; ENSG00000176746; HLA -A*03:02,HLA-A*11:01,HLA-B*27:02
GSPDAVVSYSK

SEQ ID NO: 6980 - protein, 9 aa, Homo sapiens
  Table 1.2; MAGEB6; ENSG00000176746; HLA -B*13:02
GVSGSKYDV

SEQ ID NO: 6981 - protein, 11 aa, Homo sapiens
  Table 1.2; MAGEB6; ENSG00000176746; HLA -A*02:01
HLYEDALIDEV

SEQ ID NO: 6982 - protein, 11 aa, Homo sapiens
  Table 1.2; MAGEB6; ENSG00000176746; HLA -A*29:02
IITEDLVQDKY

SEQ ID NO: 6983 - protein, 10 aa, Homo sapiens
  Table 1.2; MAGEB6; ENSG00000176746; HLA -A*03:01,HLA-A*03:02
ILSGDNALPK

SEQ ID NO: 6984 - protein, 8 aa, Homo sapiens
  Table 1.2; MAGEB6; ENSG00000176746; HLA -B*51:01,HLA-B*56:01
IPQESQGV

SEQ ID NO: 6985 - protein, 10 aa, Homo sapiens
  Table 1.2; MAGEB6; ENSG00000176746; HLA -B*56:01
IPQESQGVSP

SEQ ID NO: 6986 - protein, 9 aa, Homo sapiens
  Table 1.2; MAGEB6; ENSG00000176746; HLA -A*01:01,HLA-A*03:02,HLA-A*11:01
ITEDLVQDK

SEQ ID NO: 6987 - protein, 10 aa, Homo sapiens
  Table 1.2; MAGEB6; ENSG00000176746; HLA -A*01:01,HLA-A*26:01,HLA-A*29:02,HLA-A*30:02,HLA-B*58:01
ITEDLVQDKY

SEQ ID NO: 6988 - protein, 9 aa, Homo sapiens
  Table 1.2; MAGEB6; ENSG00000176746; HLA -A*02:01,HLA-A*02:07,HLA-A*23:01,HLA-A*24:02,HLA-A*29:02, HLA-A*30:01,HLA-A*32:01,HLA-B*35:01,HLA-B*35:03,HLA-B*38:01, HLA-B*49:01,HLA-B*51:01,HLA-B*55:01,HLA-C*04:01,HLA-C*07:04
IYDGILHSI

SEQ ID NO: 6989 - protein, 10 aa, Homo sapiens
  Table 1.2; MAGEB6; ENSG00000176746; HLA -A*29:02
IYDGILHSIY

SEQ ID NO: 6990 - protein, 8 aa, Homo sapiens
  Table 1.2; MAGEB6; ENSG00000176746; HLA -A*24:02
IYGDARKI

SEQ ID NO: 6991 - protein, 9 aa, Homo sapiens
  Table 1.2; MAGEB6; ENSG00000176746; HLA -A*24:02
IYGDARKII

SEQ ID NO: 6992 - protein, 10 aa, Homo sapiens
  Table 1.2; MAGEB6; ENSG00000176746; HLA -A*25:01,HLA-A*26:01,HLA-A*30:01,HLA-A*30:02,HLA-A*32:01, HLA-B*15:01,HLA-B*15:03,HLA-B*18:01,HLA-B*27:02,HLA-B*37:01, HLA-B*39:01,HLA-B*40:01,HLA-B*40:02,HLA-B*44:02,HLA-B*44:03,
  HLA-B*46:01,HLA-B*49:01,HLA-B*58:01,HLA-C*02:02,HLA-C*16:04
KEMDSSGESY

SEQ ID NO: 6993 - protein, 9 aa, Homo sapiens
  Table 1.2; MAGEB6; ENSG00000176746; HLA -B*37:01,HLA-B*40:01
KESILKADM

SEQ ID NO: 6994 - protein, 10 aa, Homo sapiens
  Table 1.2; MAGEB6; ENSG00000176746; HLA -B*40:01
KESILKADML

SEQ ID NO: 6995 - protein, 11 aa, Homo sapiens
  Table 1.2; MAGEB6; ENSG00000176746; HLA -A*03:01,HLA-A*03:02,HLA-A*11:01
KIITEDLVQDK

SEQ ID NO: 6996 - protein, 8 aa, Homo sapiens
  Table 1.2; MAGEB6; ENSG00000176746; HLA -B*07:02,HLA-B*08:01
KPYFPQIL

SEQ ID NO: 6997 - protein, 9 aa, Homo sapiens
  Table 1.2; MAGEB6; ENSG00000176746; HLA -A*02:07,HLA-B*07:02,HLA-B*35:03,HLA-B*38:01,HLA-C*03:03, HLA-C*03:04,HLA-C*05:01,HLA-C*16:01
LIDEVERAL

SEQ ID NO: 6998 - protein, 11 aa, Homo sapiens
  Table 1.2; MAGEB6; ENSG00000176746; HLA -A*02:07
LIDEVERALRL

SEQ ID NO: 6999 - protein, 9 aa, Homo sapiens
  Table 1.2; MAGEB6; ENSG00000176746; HLA -A*02:01,HLA-A*02:04
LLMSLLVVI

SEQ ID NO: 7000 - protein, 8 aa, Homo sapiens
  Table 1.2; MAGEB6; ENSG00000176746; HLA -B*08:01,HLA-B*51:01
LPKSGLLM

SEQ ID NO: 7001 - protein, 10 aa, Homo sapiens
  Table 1.2; MAGEB6; ENSG00000176746; HLA -B*07:02
LPKSGLLMSL

SEQ ID NO: 7002 - protein, 9 aa, Homo sapiens
  Table 1.2; MAGEB6; ENSG00000176746; HLA -B*54:01,HLA-B*56:01
LPSEGILSG

SEQ ID NO: 7003 - protein, 8 aa, Homo sapiens
  Table 1.2; MAGEB6; ENSG00000176746; HLA -B*08:01
LVQDKYVV

SEQ ID NO: 7004 - protein, 9 aa, Homo sapiens
  Table 1.2; MAGEB6; ENSG00000176746; HLA -A*01:01,HLA-A*11:01,HLA-A*25:01,HLA-A*26:01,HLA-A*29:02, HLA-A*30:02,HLA-A*32:01,HLA-B*15:01,HLA-B*35:01,HLA-B*46:01, HLA-C*02:02,HLA-C*07:04,HLA-C*12:03,HLA-C*16:01
LVQDKYVVY

SEQ ID NO: 7005 - protein, 10 aa, Homo sapiens
  Table 1.2; MAGEB6; ENSG00000176746; HLA -A*03:02,HLA-A*11:01,HLA-A*31:01,HLA-A*33:01,HLA-A*33:03, HLA-A*68:01
LVQDKYVVYR

SEQ ID NO: 7006 - protein, 9 aa, Homo sapiens
  Table 1.2; MAGEB6; ENSG00000176746; HLA -A*02:07,HLA-A*30:01,HLA-A*68:02,HLA-B*35:01,HLA-B*35:03, HLA-B*40:01,HLA-B*46:01,HLA-B*54:01,HLA-C*02:02,HLA-C*03:03, HLA-C*03:04
LVVAFGVEL

SEQ ID NO: 7007 - protein, 8 aa, Homo sapiens
  Table 1.2; MAGEB6; ENSG00000176746; HLA -A*30:02
MDSSGESY

SEQ ID NO: 7008 - protein, 10 aa, Homo sapiens
  Table 1.2; MAGEB6; ENSG00000176746; HLA -B*38:01,HLA-B*39:01
MDSSGESYTL

SEQ ID NO: 7009 - protein, 8 aa, Homo sapiens
  Table 1.2; MAGEB6; ENSG00000176746; HLA -B*08:01
NALPKSGL

SEQ ID NO: 7010 - protein, 9 aa, Homo sapiens
  Table 1.2; MAGEB6; ENSG00000176746; HLA -B*08:01
NALPKSGLL

SEQ ID NO: 7011 - protein, 9 aa, Homo sapiens
  Table 1.2; MAGEB6; ENSG00000176746; HLA -A*01:01,HLA-B*35:01,HLA-B*38:01,HLA-B*58:01,HLA-C*05:01
NSDPPCYEF

SEQ ID NO: 7012 - protein, 10 aa, Homo sapiens
  Table 1.2; MAGEB6; ENSG00000176746; HLA -A*01:01
NSDPPCYEFL

SEQ ID NO: 7013 - protein, 10 aa, Homo sapiens
  Table 1.2; MAGEB6; ENSG00000176746; HLA -A*68:01,HLA-A*68:02
NTSPGLYPHL

SEQ ID NO: 7014 - protein, 11 aa, Homo sapiens
  Table 1.2; MAGEB6; ENSG00000176746; HLA -A*01:01,HLA-A*29:02,HLA-A*30:02
NTSPGLYPHLY

SEQ ID NO: 7015 - protein, 9 aa, Homo sapiens
  Table 1.2; MAGEB6; ENSG00000176746; HLA -B*27:02
PDAVVSYSK

SEQ ID NO: 7016 - protein, 11 aa, Homo sapiens
  Table 1.2; MAGEB6; ENSG00000176746; HLA -A*01:01,HLA-A*30:02
PTGSPDAVVSY

SEQ ID NO: 7017 - protein, 9 aa, Homo sapiens
  Table 1.2; MAGEB6; ENSG00000176746; HLA -A*31:01,HLA-A*33:01,HLA-A*33:03
PYFPQILNR

SEQ ID NO: 7018 - protein, 10 aa, Homo sapiens
  Table 1.2; MAGEB6; ENSG00000176746; HLA -A*30:01,HLA-B*40:01,HLA-B*44:02,HLA-B*44:03
QETNGQPQGL

SEQ ID NO: 7019 - protein, 10 aa, Homo sapiens
  Table 1.2; MAGEB6; ENSG00000176746; HLA -B*54:01,HLA-B*56:01
QPQGLTGPQA

SEQ ID NO: 7020 - protein, 9 aa, Homo sapiens
  Table 1.2; MAGEB6; ENSG00000176746; HLA -A*32:01,HLA-B*15:03,HLA-B*46:01,HLA-B*58:01,HLA-C*02:02, HLA-C*03:04,HLA-C*12:03,HLA-C*16:04
RAYAETTKM

SEQ ID NO: 7021 - protein, 9 aa, Homo sapiens
  Table 1.2; MAGEB6; ENSG00000176746; HLA -A*03:01,HLA-A*03:02
RLSKDAVKK

SEQ ID NO: 7022 - protein, 10 aa, Homo sapiens
  Table 1.2; MAGEB6; ENSG00000176746; HLA -A*03:01,HLA-A*03:02
RLSKDAVKKK

SEQ ID NO: 7023 - protein, 11 aa, Homo sapiens
  Table 1.2; MAGEB6; ENSG00000176746; HLA -B*39:01
RQETNGQPQGL

SEQ ID NO: 7024 - protein, 11 aa, Homo sapiens
  Table 1.2; MAGEB6; ENSG00000176746; HLA -A*30:02
RQVCNSDPPCY

SEQ ID NO: 7025 - protein, 10 aa, Homo sapiens
  Table 1.2; MAGEB6; ENSG00000176746; HLA -B*57:01
RTSQHLVVAF

SEQ ID NO: 7026 - protein, 9 aa, Homo sapiens
  Table 1.2; MAGEB6; ENSG00000176746; HLA -B*35:01,HLA-B*37:01,HLA-B*58:01,HLA-C*02:02,HLA-C*12:03, HLA-C*16:01
SASQKAIIF

SEQ ID NO: 7027 - protein, 10 aa, Homo sapiens
  Table 1.2; MAGEB6; ENSG00000176746; HLA -A*03:01,HLA-A*03:02,HLA-A*11:01,HLA-A*68:01
SASQKAIIFK

SEQ ID NO: 7028 - protein, 8 aa, Homo sapiens
  Table 1.2; MAGEB6; ENSG00000176746; HLA -B*37:01
SDPPCYEF

SEQ ID NO: 7029 - protein, 11 aa, Homo sapiens
  Table 1.2; MAGEB6; ENSG00000176746; HLA -A*30:01,HLA-B*40:01
SEGILSGDNAL

SEQ ID NO: 7030 - protein, 10 aa, Homo sapiens
  Table 1.2; MAGEB6; ENSG00000176746; HLA -A*03:02,HLA-A*11:01,HLA-A*68:01,HLA-B*27:02
SGESYTLVSK

SEQ ID NO: 7031 - protein, 9 aa, Homo sapiens
  Table 1.2; MAGEB6; ENSG00000176746; HLA -A*03:01,HLA-A*03:02,HLA-A*11:01
SILKADMLK

SEQ ID NO: 7032 - protein, 8 aa, Homo sapiens
  Table 1.2; MAGEB6; ENSG00000176746; HLA -A*30:02
SNTSPGLY

SEQ ID NO: 7033 - protein, 11 aa, Homo sapiens
  Table 1.2; MAGEB6; ENSG00000176746; HLA -A*01:01,HLA-A*30:02,HLA-B*35:01,HLA-B*55:01
SPDAGVSGSKY

SEQ ID NO: 7034 - protein, 8 aa, Homo sapiens
  Table 1.2; MAGEB6; ENSG00000176746; HLA -A*01:01,HLA-B*18:01,HLA-B*35:01,HLA-B*55:01
SPDAVVSY

SEQ ID NO: 7035 - protein, 8 aa, Homo sapiens
  Table 1.2; MAGEB6; ENSG00000176746; HLA -B*07:02
SPGLYPHL

SEQ ID NO: 7036 - protein, 9 aa, Homo sapiens
  Table 1.2; MAGEB6; ENSG00000176746; HLA -B*35:01
SPGLYPHLY

SEQ ID NO: 7037 - protein, 10 aa, Homo sapiens
  Table 1.2; MAGEB6; ENSG00000176746; HLA -B*07:02,HLA-B*56:01
SPSTSHDVSV

SEQ ID NO: 7038 - protein, 10 aa, Homo sapiens
  Table 1.2; MAGEB6; ENSG00000176746; HLA -B*07:02,HLA-C*07:02
SPSTSRDASV

SEQ ID NO: 7039 - protein, 10 aa, Homo sapiens
  Table 1.2; MAGEB6; ENSG00000176746; HLA -B*56:01
SPTGSPDAGV

SEQ ID NO: 7040 - protein, 9 aa, Homo sapiens
  Table 1.2; MAGEB6; ENSG00000176746; HLA -B*56:01
SPTGSPDAV

SEQ ID NO: 7041 - protein, 10 aa, Homo sapiens
  Table 1.2; MAGEB6; ENSG00000176746; HLA -B*35:03,HLA-B*56:01
SPTGSPDAVV

SEQ ID NO: 7042 - protein, 8 aa, Homo sapiens
  Table 1.2; MAGEB6; ENSG00000176746; HLA -A*32:01,HLA-B*13:02,HLA-B*15:01,HLA-B*15:03,HLA-B*18:01, HLA-B*37:01,HLA-C*07:04
SQHLVVAF

SEQ ID NO: 7043 - protein, 9 aa, Homo sapiens
  Table 1.2; MAGEB6; ENSG00000176746; HLA -A*31:01,HLA-A*33:01,HLA-A*33:03
SQKAIIFKR

SEQ ID NO: 7044 - protein, 11 aa, Homo sapiens
  Table 1.2; MAGEB6; ENSG00000176746; HLA -A*03:02,HLA-A*11:01,HLA-A*68:01
SSGESYTLVSK

SEQ ID NO: 7045 - protein, 9 aa, Homo sapiens
  Table 1.2; MAGEB6; ENSG00000176746; HLA -A*01:01,HLA-A*30:02,HLA-B*15:03
SSNTSPGLY

SEQ ID NO: 7046 - protein, 8 aa, Homo sapiens
  Table 1.2; MAGEB6; ENSG00000176746; HLA -C*16:01
SSSSRACL

SEQ ID NO: 7047 - protein, 9 aa, Homo sapiens
  Table 1.2; MAGEB6; ENSG00000176746; HLA -B*07:02,HLA-C*16:01
SSSSSRACL

SEQ ID NO: 7048 - protein, 9 aa, Homo sapiens
  Table 1.2; MAGEB6; ENSG00000176746; HLA -B*13:02
SVSASQKAI

SEQ ID NO: 7049 - protein, 8 aa, Homo sapiens
  Table 1.2; MAGEB6; ENSG00000176746; HLA -A*23:01,HLA-A*24:02,HLA-C*14:02
SYTLVSKL

SEQ ID NO: 7050 - protein, 9 aa, Homo sapiens
  Table 1.2; MAGEB6; ENSG00000176746; HLA -A*01:01,HLA-B*18:01,HLA-B*44:02,HLA-B*44:03
TEDLVQDKY

SEQ ID NO: 7051 - protein, 10 aa, Homo sapiens
  Table 1.2; MAGEB6; ENSG00000176746; HLA -B*49:01
TEDLVQDKYV

SEQ ID NO: 7052 - protein, 8 aa, Homo sapiens
  Table 1.2; MAGEB6; ENSG00000176746; HLA -B*18:01
TEEEVWEF

SEQ ID NO: 7053 - protein, 10 aa, Homo sapiens
  Table 1.2; MAGEB6; ENSG00000176746; HLA -A*30:02,HLA-B*35:01,HLA-B*39:01,HLA-C*07:04,HLA-C*07:06
TGSPDAVVSY

SEQ ID NO: 7054 - protein, 9 aa, Homo sapiens
  Table 1.2; MAGEB6; ENSG00000176746; HLA -A*03:01,HLA-A*03:02
TLAQFLQKK

SEQ ID NO: 7055 - protein, 8 aa, Homo sapiens
  Table 1.2; MAGEB6; ENSG00000176746; HLA -B*08:01
TLVSKLGL

SEQ ID NO: 7056 - protein, 9 aa, Homo sapiens
  Table 1.2; MAGEB6; ENSG00000176746; HLA -A*02:07
TSPGLYPHL

SEQ ID NO: 7057 - protein, 10 aa, Homo sapiens
  Table 1.2; MAGEB6; ENSG00000176746; HLA -A*01:01,HLA-A*29:02,HLA-A*30:02
TSPGLYPHLY

SEQ ID NO: 7058 - protein, 9 aa, Homo sapiens
  Table 1.2; MAGEB6; ENSG00000176746; HLA -A*30:02,HLA-A*32:01,HLA-A*33:01,HLA-B*35:01,HLA-B*57:01, HLA-B*58:01,HLA-C*12:03,HLA-C*16:01
TSQHLVVAF

SEQ ID NO: 7059 - protein, 9 aa, Homo sapiens
  Table 1.2; MAGEB6; ENSG00000176746; HLA -A*30:02
VCNSDPPCY

SEQ ID NO: 7060 - protein, 8 aa, Homo sapiens
  Table 1.2; MAGEB6; ENSG00000176746; HLA -B*56:01
VPQESQGA

SEQ ID NO: 7061 - protein, 10 aa, Homo sapiens
  Table 1.2; MAGEB6; ENSG00000176746; HLA -B*56:01
VPQESQGASP

SEQ ID NO: 7062 - protein, 8 aa, Homo sapiens
  Table 1.2; MAGEB6; ENSG00000176746; HLA -B*15:01,HLA-B*15:03
VQDKYVVY

SEQ ID NO: 7063 - protein, 9 aa, Homo sapiens
  Table 1.2; MAGEB6; ENSG00000176746; HLA -A*31:01
VQDKYVVYR

SEQ ID NO: 7064 - protein, 11 aa, Homo sapiens
  Table 1.2; MAGEB6; ENSG00000176746; HLA -A*03:01,HLA-A*03:02,HLA-A*11:01
VSASQKAIIFK

SEQ ID NO: 7065 - protein, 8 aa, Homo sapiens
  Table 1.2; MAGEB6; ENSG00000176746; HLA -C*03:03,HLA-C*03:04
VVAFGVEL

SEQ ID NO: 7066 - protein, 9 aa, Homo sapiens
  Table 1.2; MAGEB6; ENSG00000176746; HLA -A*03:02,HLA-A*11:01
VVAFGVELK

SEQ ID NO: 7067 - protein, 9 aa, Homo sapiens
  Table 1.2; MAGEB6; ENSG00000176746; HLA -B*49:01
WEFLGLLGI

SEQ ID NO: 7068 - protein, 9 aa, Homo sapiens
  Table 1.2; MAGEB6; ENSG00000176746; HLA -A*01:01
YAETTKMRV

SEQ ID NO: 7069 - protein, 8 aa, Homo sapiens
  Table 1.2; MAGEB6; ENSG00000176746; HLA -A*30:01,HLA-B*13:02,HLA-B*37:01
YDGILHSI

SEQ ID NO: 7070 - protein, 11 aa, Homo sapiens
  Table 1.2; MAGEB6; ENSG00000176746; HLA -B*27:02
YDVAANGQDEK

SEQ ID NO: 7071 - protein, 9 aa, Homo sapiens
  Table 1.2; MAGEB6; ENSG00000176746; HLA -A*30:01,HLA-B*40:01,HLA-B*49:01
YEDALIDEV

SEQ ID NO: 7072 - protein, 10 aa, Homo sapiens
  Table 1.2; MAGEB6; ENSG00000176746; HLA -B*44:02
YEFLWGPRAY

SEQ ID NO: 7073 - protein, 8 aa, Homo sapiens
  Table 1.2; MAGEB6; ENSG00000176746; HLA -B*54:01
YPHLYEDA

SEQ ID NO: 7074 - protein, 9 aa, Homo sapiens
  Table 1.2; MAGEB6; ENSG00000176746; HLA -B*35:01,HLA-B*35:03
YPHLYEDAL

SEQ ID NO: 7075 - protein, 8 aa, Homo sapiens
  Table 1.2; MAGEC1; ENSG00000155495; HLA -A*30:01,HLA-B*18:01,HLA-B*37:01,HLA-B*40:01,HLA-B*40:02, HLA-B*44:02,HLA-B*44:03,HLA-B*49:01
AEMLTNVI

SEQ ID NO: 7076 - protein, 11 aa, Homo sapiens
  Table 1.2; MAGEC1; ENSG00000155495; HLA -A*30:02,HLA-B*27:02,HLA-B*40:01,HLA-B*44:02,HLA-B*44:03, HLA-C*16:04
AEMLTNVISRY

SEQ ID NO: 7077 - protein, 9 aa, Homo sapiens
  Table 1.2; MAGEC1; ENSG00000155495; HLA -A*02:01
AMLKNTVPI

SEQ ID NO: 7078 - protein, 11 aa, Homo sapiens
  Table 1.2; MAGEC1; ENSG00000155495; HLA -A*23:01
AMLKNTVPITF

SEQ ID NO: 7079 - protein, 8 aa, Homo sapiens
  Table 1.2; MAGEC1; ENSG00000155495; HLA -B*37:01
AQSAFEGF

SEQ ID NO: 7080 - protein, 9 aa, Homo sapiens
  Table 1.2; MAGEC1; ENSG00000155495; HLA -A*02:01,HLA-A*30:01,HLA-A*68:02,HLA-B*13:02,HLA-B*27:05, HLA-B*37:01,HLA-B*39:01,HLA-B*56:01,HLA-C*07:04
AQSPLQIPV

SEQ ID NO: 7081 - protein, 9 aa, Homo sapiens
  Table 1.2; MAGEC1; ENSG00000155495; HLA -B*13:02,HLA-B*37:01,HLA-C*06:02
AQSPLQRPV

SEQ ID NO: 7082 - protein, 9 aa, Homo sapiens
  Table 1.2; MAGEC1; ENSG00000155495; HLA -B*13:02,HLA-B*39:01
AQSPLQSPV

SEQ ID NO: 7083 - protein, 9 aa, Homo sapiens
  Table 1.2; MAGEC1; ENSG00000155495; HLA -A*02:01,HLA-B*13:02,HLA-B*27:05,HLA-B*39:01,HLA-B*56:01
AQSSLQIPV

SEQ ID NO: 7084 - protein, 8 aa, Homo sapiens
  Table 1.2; MAGEC1; ENSG00000155495; HLA -B*37:01
AQSTFEGF

SEQ ID NO: 7085 - protein, 9 aa, Homo sapiens
  Table 1.2; MAGEC1; ENSG00000155495; HLA -A*30:01,HLA-B*13:02,HLA-B*58:01
ASSSTLVSI

SEQ ID NO: 7086 - protein, 10 aa, Homo sapiens
  Table 1.2; MAGEC1; ENSG00000155495; HLA -A*30:02,HLA-B*27:05,HLA-B*58:01
ASSSVMSPSF

SEQ ID NO: 7087 - protein, 9 aa, Homo sapiens
  Table 1.2; MAGEC1; ENSG00000155495; HLA -A*33:01,HLA-A*33:03,HLA-A*68:01,HLA-B*51:01,HLA-C*07:06
DALKDVEER

SEQ ID NO: 7088 - protein, 10 aa, Homo sapiens
  Table 1.2; MAGEC1; ENSG00000155495; HLA -B*18:01,HLA-B*44:02,HLA-B*44:03
DEKVDELARF

SEQ ID NO: 7089 - protein, 8 aa, Homo sapiens
  Table 1.2; MAGEC1; ENSG00000155495; HLA -B*18:01
DELARFLL

SEQ ID NO: 7090 - protein, 10 aa, Homo sapiens
  Table 1.2; MAGEC1; ENSG00000155495; HLA -A*30:01,HLA-B*18:01,HLA-B*40:01
DEYTSSSDTL

SEQ ID NO: 7091 - protein, 10 aa, Homo sapiens
  Table 1.2; MAGEC1; ENSG00000155495; HLA -A*25:01,HLA-A*26:01
DMPTAGMPSL

SEQ ID NO: 7092 - protein, 8 aa, Homo sapiens
  Table 1.2; MAGEC1; ENSG00000155495; HLA -B*35:01,HLA-B*35:03,HLA-B*55:01
DPDDSYVF

SEQ ID NO: 7093 - protein, 9 aa, Homo sapiens
  Table 1.2; MAGEC1; ENSG00000155495; HLA -B*51:01
DPDDSYVFV

SEQ ID NO: 7094 - protein, 8 aa, Homo sapiens
  Table 1.2; MAGEC1; ENSG00000155495; HLA -B*51:01
DSLSPLEI

SEQ ID NO: 7095 - protein, 8 aa, Homo sapiens
  Table 1.2; MAGEC1; ENSG00000155495; HLA -B*51:01
DSLSPLQI

SEQ ID NO: 7096 - protein, 9 aa, Homo sapiens
  Table 1.2; MAGEC1; ENSG00000155495; HLA -A*33:01
DSLSSLHFP

SEQ ID NO: 7097 - protein, 9 aa, Homo sapiens
  Table 1.2; MAGEC1; ENSG00000155495; HLA -B*35:03
DSLTDSESL

SEQ ID NO: 7098 - protein, 8 aa, Homo sapiens
  Table 1.2; MAGEC1; ENSG00000155495; HLA -A*68:01
DSSDPLQR

SEQ ID NO: 7099 - protein, 9 aa, Homo sapiens
  Table 1.2; MAGEC1; ENSG00000155495; HLA -A*25:01,HLA-A*33:01,HLA-A*68:02,HLA-B*18:01,HLA-B*51:01
DSYVFVNTL

SEQ ID NO: 7100 - protein, 9 aa, Homo sapiens
  Table 1.2; MAGEC1; ENSG00000155495; HLA -B*35:03
DTLLESDSL

SEQ ID NO: 7101 - protein, 10 aa, Homo sapiens
  Table 1.2; MAGEC1; ENSG00000155495; HLA -A*33:01
DTLYPLQSPQ

SEQ ID NO: 7102 - protein, 9 aa, Homo sapiens
  Table 1.2; MAGEC1; ENSG00000155495; HLA -B*08:01
DVEERAQAI

SEQ ID NO: 7103 - protein, 9 aa, Homo sapiens
  Table 1.2; MAGEC1; ENSG00000155495; HLA -A*25:01,HLA-A*26:01,HLA-A*33:01,HLA-A*33:03,HLA-A*68:01, HLA-C*07:06
DVLSGIGVR

SEQ ID NO: 7104 - protein, 10 aa, Homo sapiens
  Table 1.2; MAGEC1; ENSG00000155495; HLA -A*26:01,HLA-A*68:02,HLA-B*54:01
DVLSGIGVRA

SEQ ID NO: 7105 - protein, 8 aa, Homo sapiens
  Table 1.2; MAGEC1; ENSG00000155495; HLA -B*18:01
EDSLSPHY

SEQ ID NO: 7106 - protein, 9 aa, Homo sapiens
  Table 1.2; MAGEC1; ENSG00000155495; HLA -B*37:01,HLA-B*44:02
EDSLSPHYF

SEQ ID NO: 7107 - protein, 9 aa, Homo sapiens
  Table 1.2; MAGEC1; ENSG00000155495; HLA -B*37:01
EDSLSPLHF

SEQ ID NO: 7108 - protein, 9 aa, Homo sapiens
  Table 1.2; MAGEC1; ENSG00000155495; HLA -B*37:01
EDSLSSLHF

SEQ ID NO: 7109 - protein, 8 aa, Homo sapiens
  Table 1.2; MAGEC1; ENSG00000155495; HLA -B*18:01
EDSMSPLY

SEQ ID NO: 7110 - protein, 9 aa, Homo sapiens
  Table 1.2; MAGEC1; ENSG00000155495; HLA -A*33:03,HLA-A*68:01
EDSSDPLQR

SEQ ID NO: 7111 - protein, 11 aa, Homo sapiens
  Table 1.2; MAGEC1; ENSG00000155495; HLA -B*49:01
EEFQSSLQSPV

SEQ ID NO: 7112 - protein, 10 aa, Homo sapiens
  Table 1.2; MAGEC1; ENSG00000155495; HLA -B*39:01,HLA-B*44:02,HLA-B*44:03
EESSSPVDEY

SEQ ID NO: 7113 - protein, 8 aa, Homo sapiens
  Table 1.2; MAGEC1; ENSG00000155495; HLA -B*18:01
EEVIWDVL

SEQ ID NO: 7114 - protein, 9 aa, Homo sapiens
  Table 1.2; MAGEC1; ENSG00000155495; HLA -C*05:01
EGDDTQSPL

SEQ ID NO: 7115 - protein, 11 aa, Homo sapiens
  Table 1.2; MAGEC1; ENSG00000155495; HLA -A*33:01,HLA-A*33:03,HLA-A*68:01
EGEDSSDPLQR

SEQ ID NO: 7116 - protein, 8 aa, Homo sapiens
  Table 1.2; MAGEC1; ENSG00000155495; HLA -B*51:01
EGFAQSSL

SEQ ID NO: 7117 - protein, 10 aa, Homo sapiens
  Table 1.2; MAGEC1; ENSG00000155495; HLA -A*68:01
EGPAQSPLQR

SEQ ID NO: 7118 - protein, 9 aa, Homo sapiens
  Table 1.2; MAGEC1; ENSG00000155495; HLA -A*33:01,HLA-A*33:03
EHFAFGEPR

SEQ ID NO: 7119 - protein, 10 aa, Homo sapiens
  Table 1.2; MAGEC1; ENSG00000155495; HLA -A*29:02
ELARFLLLKY

SEQ ID NO: 7120 - protein, 9 aa, Homo sapiens
  Table 1.2; MAGEC1; ENSG00000155495; HLA -A*31:01,HLA-A*33:01,HLA-A*33:03,HLA-A*68:01,HLA-C*07:06
EMLTNVISR

SEQ ID NO: 7121 - protein, 10 aa, Homo sapiens
  Table 1.2; MAGEC1; ENSG00000155495; HLA -A*01:01,HLA-A*25:01,HLA-A*26:01,HLA-A*29:02,HLA-A*30:02, HLA-B*44:02,HLA-B*44:03
EMLTNVISRY

SEQ ID NO: 7122 - protein, 8 aa, Homo sapiens
  Table 1.2; MAGEC1; ENSG00000155495; HLA -B*35:01
EPLFTYTL

SEQ ID NO: 7123 - protein, 10 aa, Homo sapiens
  Table 1.2; MAGEC1; ENSG00000155495; HLA -A*25:01,HLA-A*26:01
ESAQSAFEGF

SEQ ID NO: 7124 - protein, 10 aa, Homo sapiens
  Table 1.2; MAGEC1; ENSG00000155495; HLA -A*25:01,HLA-A*26:01
ESAQSTFEGF

SEQ ID NO: 7125 - protein, 8 aa, Homo sapiens
  Table 1.2; MAGEC1; ENSG00000155495; HLA -A*01:01
ESEPLFTY

SEQ ID NO: 7126 - protein, 11 aa, Homo sapiens
  Table 1.2; MAGEC1; ENSG00000155495; HLA -A*25:01
ESPLQSPVISF

SEQ ID NO: 7127 - protein, 9 aa, Homo sapiens
  Table 1.2; MAGEC1; ENSG00000155495; HLA -A*01:01,HLA-A*25:01,HLA-A*26:01,HLA-A*30:02,HLA-B*35:01
ESSSPVDEY

SEQ ID NO: 7128 - protein, 10 aa, Homo sapiens
  Table 1.2; MAGEC1; ENSG00000155495; HLA -A*25:01
ESTQSPFEGF

SEQ ID NO: 7129 - protein, 8 aa, Homo sapiens
  Table 1.2; MAGEC1; ENSG00000155495; HLA -A*01:01
EVDPDDSY

SEQ ID NO: 7130 - protein, 9 aa, Homo sapiens
  Table 1.2; MAGEC1; ENSG00000155495; HLA -C*05:01
EVDPDDSYV

SEQ ID NO: 7131 - protein, 10 aa, Homo sapiens
  Table 1.2; MAGEC1; ENSG00000155495; HLA -A*25:01,HLA-A*26:01,HLA-B*35:01,HLA-B*38:01,HLA-C*03:03
EVDPDDSYVF

SEQ ID NO: 7132 - protein, 11 aa, Homo sapiens
  Table 1.2; MAGEC1; ENSG00000155495; HLA -A*01:01,HLA-A*02:07,HLA-A*68:02
EVDPDDSYVFV

SEQ ID NO: 7133 - protein, 10 aa, Homo sapiens
  Table 1.2; MAGEC1; ENSG00000155495; HLA -A*25:01,HLA-A*26:01
EVIKRKVVEF

SEQ ID NO: 7134 - protein, 10 aa, Homo sapiens
  Table 1.2; MAGEC1; ENSG00000155495; HLA -A*25:01,HLA-A*26:01,HLA-A*68:02
EVIWDVLSGI

SEQ ID NO: 7135 - protein, 9 aa, Homo sapiens
  Table 1.2; MAGEC1; ENSG00000155495; HLA -A*26:01,HLA-A*33:01,HLA-A*33:03,HLA-A*68:01,HLA-C*07:06
EVPNSSPPR

SEQ ID NO: 7136 - protein, 10 aa, Homo sapiens
  Table 1.2; MAGEC1; ENSG00000155495; HLA -A*25:01,HLA-A*26:01,HLA-A*29:02
EVPNSSPPRY

SEQ ID NO: 7137 - protein, 9 aa, Homo sapiens
  Table 1.2; MAGEC1; ENSG00000155495; HLA -A*24:02
EYTSSSDTL

SEQ ID NO: 7138 - protein, 9 aa, Homo sapiens
  Table 1.2; MAGEC1; ENSG00000155495; HLA -A*02:03,HLA-A*30:01,HLA-A*68:02,HLA-B*15:03,HLA-B*35:01, HLA-B*35:03,HLA-B*40:01,HLA-B*46:01,HLA-B*51:01,HLA-B*54:01, HLA-C*02:02,HLA-C*03:03,HLA-C*03:04,HLA-C*12:03,HLA-C*16:01,
  HLA-C*16:02,HLA-C*16:04
FAFGEPREL

SEQ ID NO: 7139 - protein, 8 aa, Homo sapiens
  Table 1.2; MAGEC1; ENSG00000155495; HLA -B*51:01
FAQSPLQI

SEQ ID NO: 7140 - protein, 10 aa, Homo sapiens
  Table 1.2; MAGEC1; ENSG00000155495; HLA -A*68:02,HLA-B*54:01
FAQSPLQIPV

SEQ ID NO: 7141 - protein, 8 aa, Homo sapiens
  Table 1.2; MAGEC1; ENSG00000155495; HLA -B*51:01
FAQSSLQI

SEQ ID NO: 7142 - protein, 11 aa, Homo sapiens
  Table 1.2; MAGEC1; ENSG00000155495; HLA -B*49:01
FEGFAQSPLQI

SEQ ID NO: 7143 - protein, 9 aa, Homo sapiens
  Table 1.2; MAGEC1; ENSG00000155495; HLA -A*30:01,HLA-B*40:01,HLA-B*40:02,HLA-B*49:01
FEGFAQSSL

SEQ ID NO: 7144 - protein, 11 aa, Homo sapiens
  Table 1.2; MAGEC1; ENSG00000155495; HLA -B*49:01
FEGFAQSSLQI

SEQ ID NO: 7145 - protein, 8 aa, Homo sapiens
  Table 1.2; MAGEC1; ENSG00000155495; HLA -A*30:01,HLA-B*18:01,HLA-B*40:01
FEGFPQSL

SEQ ID NO: 7146 - protein, 9 aa, Homo sapiens
  Table 1.2; MAGEC1; ENSG00000155495; HLA -A*30:01,HLA-B*40:01,HLA-B*49:01
FEGFPQSLL

SEQ ID NO: 7147 - protein, 8 aa, Homo sapiens
  Table 1.2; MAGEC1; ENSG00000155495; HLA -B*49:01
FEGFPQSV

SEQ ID NO: 7148 - protein, 9 aa, Homo sapiens
  Table 1.2; MAGEC1; ENSG00000155495; HLA -A*30:01,HLA-B*40:01,HLA-B*40:02,HLA-B*49:01
FEGFPQSVL

SEQ ID NO: 7149 - protein, 9 aa, Homo sapiens
  Table 1.2; MAGEC1; ENSG00000155495; HLA -A*23:01
FFSSALLSI

SEQ ID NO: 7150 - protein, 10 aa, Homo sapiens
  Table 1.2; MAGEC1; ENSG00000155495; HLA -A*29:02
FFSSALLSIF

SEQ ID NO: 7151 - protein, 9 aa, Homo sapiens
  Table 1.2; MAGEC1; ENSG00000155495; HLA -A*02:03
FLAMLKNTV

SEQ ID NO: 7152 - protein, 8 aa, Homo sapiens
  Table 1.2; MAGEC1; ENSG00000155495; HLA -B*51:01
FPQSLLQI

SEQ ID NO: 7153 - protein, 11 aa, Homo sapiens
  Table 1.2; MAGEC1; ENSG00000155495; HLA -B*35:01,HLA-B*35:03,HLA-B*54:01,HLA-B*55:01,HLA-B*56:01
FPQSPLQGEEF

SEQ ID NO: 7154 - protein, 8 aa, Homo sapiens
  Table 1.2; MAGEC1; ENSG00000155495; HLA -B*51:01
FPQSPLQI

SEQ ID NO: 7155 - protein, 10 aa, Homo sapiens
  Table 1.2; MAGEC1; ENSG00000155495; HLA -B*54:01,HLA-B*56:01
FPQSPLQIPG

SEQ ID NO: 7156 - protein, 10 aa, Homo sapiens
  Table 1.2; MAGEC1; ENSG00000155495; HLA -B*35:01,HLA-B*35:03,HLA-B*54:01,HLA-B*56:01
FPQSPLQIPM

SEQ ID NO: 7157 - protein, 10 aa, Homo sapiens
  Table 1.2; MAGEC1; ENSG00000155495; HLA -B*54:01,HLA-B*56:01
FPQSPLQIPV

SEQ ID NO: 7158 - protein, 11 aa, Homo sapiens
  Table 1.2; MAGEC1; ENSG00000155495; HLA -B*54:01
FPQSPLQIPVS

SEQ ID NO: 7159 - protein, 11 aa, Homo sapiens
  Table 1.2; MAGEC1; ENSG00000155495; HLA -B*35:01,HLA-B*35:03,HLA-B*38:01,HLA-B*39:01,HLA-B*55:01
FPQSPQGEDSL

SEQ ID NO: 7160 - protein, 8 aa, Homo sapiens
  Table 1.2; MAGEC1; ENSG00000155495; HLA -B*51:01
FPQSVLQI

SEQ ID NO: 7161 - protein, 10 aa, Homo sapiens
  Table 1.2; MAGEC1; ENSG00000155495; HLA -B*54:01,HLA-B*56:01
FPQSVLQIPV

SEQ ID NO: 7162 - protein, 9 aa, Homo sapiens
  Table 1.2; MAGEC1; ENSG00000155495; HLA -A*25:01,HLA-A*30:01,HLA-B*07:02,HLA-B*08:01,HLA-B*15:03, HLA-B*27:05,HLA-B*35:01,HLA-B*35:03,HLA-B*38:01,HLA-B*39:01, HLA-B*40:01,HLA-B*46:01,HLA-B*51:01,HLA-B*54:01,HLA-B*55:01,
  HLA-B*56:01,HLA-C*01:02,HLA-C*02:02,HLA-C*03:03,HLA-C*03:04, HLA-C*04:01,HLA-C*05:01,HLA-C*07:02,HLA-C*07:04,HLA-C*12:03, HLA-C*14:02
FPSSTSSSL

SEQ ID NO: 7163 - protein, 9 aa, Homo sapiens
  Table 1.2; MAGEC1; ENSG00000155495; HLA -B*07:02,HLA-B*08:01,HLA-B*35:01,HLA-B*35:03,HLA-B*55:01
FPSSYKDAL

SEQ ID NO: 7164 - protein, 8 aa, Homo sapiens
  Table 1.2; MAGEC1; ENSG00000155495; HLA -B*54:01
FPVIFRKA

SEQ ID NO: 7165 - protein, 9 aa, Homo sapiens
  Table 1.2; MAGEC1; ENSG00000155495; HLA -A*68:02,HLA-B*13:02
FQSSLQSPV

SEQ ID NO: 7166 - protein, 11 aa, Homo sapiens
  Table 1.2; MAGEC1; ENSG00000155495; HLA -B*38:01,HLA-B*39:01
FQSSLQSPVSI

SEQ ID NO: 7167 - protein, 9 aa, Homo sapiens
  Table 1.2; MAGEC1; ENSG00000155495; HLA -A*01:01,HLA-A*32:01,HLA-B*46:01,HLA-B*58:01,HLA-C*05:01
FSERTQSTF

SEQ ID NO: 7168 - protein, 9 aa, Homo sapiens
  Table 1.2; MAGEC1; ENSG00000155495; HLA -B*57:01,HLA-C*02:02
FSSALLSIF

SEQ ID NO: 7169 - protein, 9 aa, Homo sapiens
  Table 1.2; MAGEC1; ENSG00000155495; HLA -A*01:01
FSSTLLSLF

SEQ ID NO: 7170 - protein, 9 aa, Homo sapiens
  Table 1.2; MAGEC1; ENSG00000155495; HLA -A*01:01,HLA-B*57:01,HLA-C*02:02
FSSTLVSLF

SEQ ID NO: 7171 - protein, 8 aa, Homo sapiens
  Table 1.2; MAGEC1; ENSG00000155495; HLA -B*46:01,HLA-C*03:03
FSYTLASL

SEQ ID NO: 7172 - protein, 9 aa, Homo sapiens
  Table 1.2; MAGEC1; ENSG00000155495; HLA -A*01:01,HLA-C*02:02,HLA-C*12:03
FSYTLASLL

SEQ ID NO: 7173 - protein, 9 aa, Homo sapiens
  Table 1.2; MAGEC1; ENSG00000155495; HLA -B*57:01
FSYTLLSLF

SEQ ID NO: 7174 - protein, 9 aa, Homo sapiens
  Table 1.2; MAGEC1; ENSG00000155495; HLA -A*68:02
FTYTLDEKV

SEQ ID NO: 7175 - protein, 9 aa, Homo sapiens
  Table 1.2; MAGEC1; ENSG00000155495; HLA -B*18:01,HLA-B*44:02,HLA-B*44:03
GEDSLSPHY

SEQ ID NO: 7176 - protein, 10 aa, Homo sapiens
  Table 1.2; MAGEC1; ENSG00000155495; HLA -B*40:01,HLA-B*44:02,HLA-B*44:03
GEDSLSPHYF

SEQ ID NO: 7177 - protein, 10 aa, Homo sapiens
  Table 1.2; MAGEC1; ENSG00000155495; HLA -A*30:01,HLA-B*40:01,HLA-B*49:01
GEDSLSPLQI

SEQ ID NO: 7178 - protein, 10 aa, Homo sapiens
  Table 1.2; MAGEC1; ENSG00000155495; HLA -A*30:01,HLA-B*27:02,HLA-B*40:01,HLA-B*44:02,HLA-B*44:03, HLA-B*49:01
GEDSLSSLHF

SEQ ID NO: 7179 - protein, 9 aa, Homo sapiens
  Table 1.2; MAGEC1; ENSG00000155495; HLA -B*44:03
GEDSMSPLY

SEQ ID NO: 7180 - protein, 10 aa, Homo sapiens
  Table 1.2; MAGEC1; ENSG00000155495; HLA -B*40:01,HLA-B*44:03,HLA-B*49:01
GEDSMSPLYF

SEQ ID NO: 7181 - protein, 10 aa, Homo sapiens
  Table 1.2; MAGEC1; ENSG00000155495; HLA -A*30:01,HLA-B*40:01,HLA-B*49:01
GEDSQSPLQI

SEQ ID NO: 7182 - protein, 10 aa, Homo sapiens
  Table 1.2; MAGEC1; ENSG00000155495; HLA -A*30:01,HLA-B*40:01,HLA-B*49:01
GENTHSPLQI

SEQ ID NO: 7183 - protein, 11 aa, Homo sapiens
  Table 1.2; MAGEC1; ENSG00000155495; HLA -B*44:02,HLA-B*44:03
GEPRELLTKVW

SEQ ID NO: 7184 - protein, 9 aa, Homo sapiens
  Table 1.2; MAGEC1; ENSG00000155495; HLA -A*23:01,HLA-A*30:01,HLA-B*13:02
GFAQSPLQI

SEQ ID NO: 7185 - protein, 9 aa, Homo sapiens
  Table 1.2; MAGEC1; ENSG00000155495; HLA -B*13:02
GMSQNRLLI

SEQ ID NO: 7186 - protein, 10 aa, Homo sapiens
  Table 1.2; MAGEC1; ENSG00000155495; HLA -B*56:01
GPAQSPLQSP

SEQ ID NO: 7187 - protein, 8 aa, Homo sapiens
  Table 1.2; MAGEC1; ENSG00000155495; HLA -B*07:02
GPRAHSEV

SEQ ID NO: 7188 - protein, 9 aa, Homo sapiens
  Table 1.2; MAGEC1; ENSG00000155495; HLA -B*07:02,HLA-C*07:02
GPRAHSEVI

SEQ ID NO: 7189 - protein, 10 aa, Homo sapiens
  Table 1.2; MAGEC1; ENSG00000155495; HLA -B*56:01
GPVQSPLHSP

SEQ ID NO: 7190 - protein, 10 aa, Homo sapiens
  Table 1.2; MAGEC1; ENSG00000155495; HLA -B*57:01
GTYASEEVIW

SEQ ID NO: 7191 - protein, 8 aa, Homo sapiens
  Table 1.2; MAGEC1; ENSG00000155495; HLA -A*31:01
GYFPVIFR

SEQ ID NO: 7192 - protein, 9 aa, Homo sapiens
  Table 1.2; MAGEC1; ENSG00000155495; HLA -A*29:02,HLA-A*31:01,HLA-B*57:01
GYFPVIFRK

SEQ ID NO: 7193 - protein, 9 aa, Homo sapiens
  Table 1.2; MAGEC1; ENSG00000155495; HLA -A*30:01,HLA-B*18:01,HLA-B*37:01,HLA-B*40:01,HLA-B*40:02, HLA-B*44:02,HLA-B*44:03,HLA-B*49:01
IEILFGISL

SEQ ID NO: 7194 - protein, 9 aa, Homo sapiens
  Table 1.2; MAGEC1; ENSG00000155495; HLA -A*23:01,HLA-A*25:01,HLA-A*29:02,HLA-A*30:01,HLA-A*30:02, HLA-B*15:03,HLA-B*18:01,HLA-B*27:02,HLA-B*27:05,HLA-B*35:01, HLA-B*37:01,HLA-B*40:01,HLA-B*40:02,HLA-B*44:02,HLA-B*44:03,
  HLA-B*49:01,HLA-C*02:02,HLA-C*16:04
IESEPLFTY

SEQ ID NO: 7195 - protein, 10 aa, Homo sapiens
  Table 1.2; MAGEC1; ENSG00000155495; HLA -B*49:01
IESEPLFTYT

SEQ ID NO: 7196 - protein, 11 aa, Homo sapiens
  Table 1.2; MAGEC1; ENSG00000155495; HLA -A*30:01,HLA-B*40:01,HLA-B*49:01
IESEPLFTYTL

SEQ ID NO: 7197 - protein, 9 aa, Homo sapiens
  Table 1.2; MAGEC1; ENSG00000155495; HLA -C*14:02
IFQSSPESA

SEQ ID NO: 7198 - protein, 9 aa, Homo sapiens
  Table 1.2; MAGEC1; ENSG00000155495; HLA -C*14:02
IFQSSPEST

SEQ ID NO: 7199 - protein, 8 aa, Homo sapiens
  Table 1.2; MAGEC1; ENSG00000155495; HLA -B*15:01,HLA-B*15:03
IIFIKGTY

SEQ ID NO: 7200 - protein, 9 aa, Homo sapiens
  Table 1.2; MAGEC1; ENSG00000155495; HLA -A*02:03
IIFIKGTYA

SEQ ID NO: 7201 - protein, 10 aa, Homo sapiens
  Table 1.2; MAGEC1; ENSG00000155495; HLA -A*02:01,HLA-A*02:03,HLA-A*02:04
ILFGISLREV

SEQ ID NO: 7202 - protein, 9 aa, Homo sapiens
  Table 1.2; MAGEC1; ENSG00000155495; HLA -A*02:01,HLA-A*02:04
ILILSIIFI

SEQ ID NO: 7203 - protein, 9 aa, Homo sapiens
  Table 1.2; MAGEC1; ENSG00000155495; HLA -A*02:01,HLA-A*02:03
ILQSSPESA

SEQ ID NO: 7204 - protein, 11 aa, Homo sapiens
  Table 1.2; MAGEC1; ENSG00000155495; HLA -B*07:02
IPGSPSFSSTL

SEQ ID NO: 7205 - protein, 10 aa, Homo sapiens
  Table 1.2; MAGEC1; ENSG00000155495; HLA -B*56:01
IPMTSSFSST

SEQ ID NO: 7206 - protein, 11 aa, Homo sapiens
  Table 1.2; MAGEC1; ENSG00000155495; HLA -A*23:01,HLA-B*07:02,HLA-B*35:01,HLA-B*35:03,HLA-B*51:01, HLA-C*07:02
IPMTSSFSSTL

SEQ ID NO: 7207 - protein, 11 aa, Homo sapiens
  Table 1.2; MAGEC1; ENSG00000155495; HLA -B*07:02,HLA-B*35:01,HLA-B*35:03,HLA-C*07:02
IPVSAASSSTL

SEQ ID NO: 7208 - protein, 9 aa, Homo sapiens
  Table 1.2; MAGEC1; ENSG00000155495; HLA -B*56:01
IPVSPSFSS

SEQ ID NO: 7209 - protein, 10 aa, Homo sapiens
  Table 1.2; MAGEC1; ENSG00000155495; HLA -B*56:01
IPVSPSFSST

SEQ ID NO: 7210 - protein, 11 aa, Homo sapiens
  Table 1.2; MAGEC1; ENSG00000155495; HLA -B*07:02,HLA-B*35:01,HLA-B*35:03,HLA-B*51:01,HLA-B*56:01, HLA-C*07:02
IPVSPSFSSTL

SEQ ID NO: 7211 - protein, 9 aa, Homo sapiens
  Table 1.2; MAGEC1; ENSG00000155495; HLA -B*56:01
IPVSPSSSS

SEQ ID NO: 7212 - protein, 11 aa, Homo sapiens
  Table 1.2; MAGEC1; ENSG00000155495; HLA -B*07:02,HLA-B*35:01,HLA-B*35:03,HLA-B*51:01,HLA-C*03:04, HLA-C*07:02
IPVSPSSSSTL

SEQ ID NO: 7213 - protein, 11 aa, Homo sapiens
  Table 1.2; MAGEC1; ENSG00000155495; HLA -B*07:02,HLA-C*07:02
IPVSRSFSSTL

SEQ ID NO: 7214 - protein, 9 aa, Homo sapiens
  Table 1.2; MAGEC1; ENSG00000155495; HLA -A*29:02,HLA-B*35:01,HLA-B*55:01
IPVSSSFSY

SEQ ID NO: 7215 - protein, 11 aa, Homo sapiens
  Table 1.2; MAGEC1; ENSG00000155495; HLA -A*23:01,HLA-B*35:03
IPVSSSFSYTL

SEQ ID NO: 7216 - protein, 11 aa, Homo sapiens
  Table 1.2; MAGEC1; ENSG00000155495; HLA -B*07:02,HLA-B*35:01,HLA-B*35:03,HLA-C*07:02
IPVSSSSSSTL

SEQ ID NO: 7217 - protein, 9 aa, Homo sapiens
  Table 1.2; MAGEC1; ENSG00000155495; HLA -A*23:01,HLA-A*30:01,HLA-A*32:01,HLA-B*15:01,HLA-B*15:03, HLA-B*35:03,HLA-B*39:01,HLA-B*40:01,HLA-B*46:01,HLA-B*58:01, HLA-C*01:02,HLA-C*02:02,HLA-C*03:03,HLA-C*03:04,HLA-C*07:02,
  HLA-C*14:02,HLA-C*16:04
ISFSSSTSL

SEQ ID NO: 7218 - protein, 10 aa, Homo sapiens
  Table 1.2; MAGEC1; ENSG00000155495; HLA -C*04:01
IWDVLSGIGV

SEQ ID NO: 7219 - protein, 9 aa, Homo sapiens
  Table 1.2; MAGEC1; ENSG00000155495; HLA -B*57:01
KAREFIEIL

SEQ ID NO: 7220 - protein, 10 aa, Homo sapiens
  Table 1.2; MAGEC1; ENSG00000155495; HLA -B*57:01
KAREFIEILF

SEQ ID NO: 7221 - protein, 8 aa, Homo sapiens
  Table 1.2; MAGEC1; ENSG00000155495; HLA -B*37:01
KDMPTAGM

SEQ ID NO: 7222 - protein, 9 aa, Homo sapiens
  Table 1.2; MAGEC1; ENSG00000155495; HLA -B*37:01
KDSLSPLEI

SEQ ID NO: 7223 - protein, 9 aa, Homo sapiens
  Table 1.2; MAGEC1; ENSG00000155495; HLA -B*37:01
KDSQSPLQI

SEQ ID NO: 7224 - protein, 9 aa, Homo sapiens
  Table 1.2; MAGEC1; ENSG00000155495; HLA -A*02:07,HLA-A*03:01
KVDELARFL

SEQ ID NO: 7225 - protein, 10 aa, Homo sapiens
  Table 1.2; MAGEC1; ENSG00000155495; HLA -A*02:07
KVDELARFLL

SEQ ID NO: 7226 - protein, 11 aa, Homo sapiens
  Table 1.2; MAGEC1; ENSG00000155495; HLA -A*02:07,HLA-A*03:01
KVDELARFLLL

SEQ ID NO: 7227 - protein, 9 aa, Homo sapiens
  Table 1.2; MAGEC1; ENSG00000155495; HLA -A*02:01,HLA-A*02:03,HLA-A*02:04,HLA-A*02:07,HLA-A*68:02
KVVEFLAML

SEQ ID NO: 7228 - protein, 10 aa, Homo sapiens
  Table 1.2; MAGEC1; ENSG00000155495; HLA -A*03:01,HLA-A*03:02,HLA-A*11:01
KVVEFLAMLK

SEQ ID NO: 7229 - protein, 9 aa, Homo sapiens
  Table 1.2; MAGEC1; ENSG00000155495; HLA -A*02:04,HLA-A*02:07
KVWVQEHYL

SEQ ID NO: 7230 - protein, 10 aa, Homo sapiens
  Table 1.2; MAGEC1; ENSG00000155495; HLA -A*03:02,HLA-A*31:01,HLA-C*06:02
KYQVKQPITK

SEQ ID NO: 7231 - protein, 8 aa, Homo sapiens
  Table 1.2; MAGEC1; ENSG00000155495; HLA -B*08:01
LAMLKNTV

SEQ ID NO: 7232 - protein, 9 aa, Homo sapiens
  Table 1.2; MAGEC1; ENSG00000155495; HLA -A*29:02
LARFLLLKY

SEQ ID NO: 7233 - protein, 10 aa, Homo sapiens
  Table 1.2; MAGEC1; ENSG00000155495; HLA -A*30:01,HLA-B*40:01
LEGEDSLSSL

SEQ ID NO: 7234 - protein, 10 aa, Homo sapiens
  Table 1.2; MAGEC1; ENSG00000155495; HLA -A*24:02,HLA-B*57:01
LHFPQSPPEW

SEQ ID NO: 7235 - protein, 10 aa, Homo sapiens
  Table 1.2; MAGEC1; ENSG00000155495; HLA -A*01:01,HLA-A*29:02
LIESEPLFTY

SEQ ID NO: 7236 - protein, 8 aa, Homo sapiens
  Table 1.2; MAGEC1; ENSG00000155495; HLA -A*02:04
LILSIIFI

SEQ ID NO: 7237 - protein, 9 aa, Homo sapiens
  Table 1.2; MAGEC1; ENSG00000155495; HLA -B*15:03
LKNTVPITF

SEQ ID NO: 7238 - protein, 10 aa, Homo sapiens
  Table 1.2; MAGEC1; ENSG00000155495; HLA -B*46:01
LLQIPMTSSF

SEQ ID NO: 7239 - protein, 9 aa, Homo sapiens
  Table 1.2; MAGEC1; ENSG00000155495; HLA -B*54:01,HLA-B*56:01
LPQSFPESP

SEQ ID NO: 7240 - protein, 9 aa, Homo sapiens
  Table 1.2; MAGEC1; ENSG00000155495; HLA -A*23:01,HLA-A*24:02,HLA-A*25:01,HLA-A*26:01,HLA-A*32:01, HLA-B*15:01,HLA-B*15:03,HLA-B*38:01,HLA-B*39:01,HLA-B*46:01, HLA-B*58:01,HLA-C*03:03,HLA-C*03:04,HLA-C*07:04
LQIPGSPSF

SEQ ID NO: 7241 - protein, 9 aa, Homo sapiens
  Table 1.2; MAGEC1; ENSG00000155495; HLA -A*23:01,HLA-A*24:02,HLA-A*25:01,HLA-A*26:01,HLA-A*30:02, HLA-A*32:01,HLA-B*15:01,HLA-B*15:03,HLA-B*18:01,HLA-B*27:02, HLA-B*37:01,HLA-B*38:01,HLA-B*46:01,HLA-B*58:01,HLA-C*02:02,
  HLA-C*07:04,HLA-C*14:02,HLA-C*16:04
LQIPMTSSF

SEQ ID NO: 7242 - protein, 9 aa, Homo sapiens
  Table 1.2; MAGEC1; ENSG00000155495; HLA -A*02:01,HLA-A*02:07,HLA-A*23:01,HLA-A*24:02,HLA-A*25:01, HLA-A*26:01,HLA-A*30:01,HLA-A*30:02,HLA-A*32:01,HLA-B*13:02, HLA-B*15:01,HLA-B*15:03,HLA-B*18:01,HLA-B*27:02,HLA-B*27:05,
  HLA-B*35:01,HLA-B*35:03,HLA-B*37:01,HLA-B*38:01,HLA-B*39:01, HLA-B*40:01,HLA-B*44:02,HLA-B*44:03,HLA-B*46:01,HLA-B*57:01, HLA-B*58:01,HLA-C*02:02,HLA-C*03:03,HLA-C*03:04,HLA-C*07:04, HLA-C*14:02,HLA-C*16:01,HLA-C*16:04
LQIPVSPSF

SEQ ID NO: 7243 - protein, 9 aa, Homo sapiens
  Table 1.2; MAGEC1; ENSG00000155495; HLA -A*23:01,HLA-A*24:02,HLA-A*32:01,HLA-B*15:01,HLA-B*15:03, HLA-B*46:01,HLA-B*57:01,HLA-B*58:01
LQIPVSRSF

SEQ ID NO: 7244 - protein, 9 aa, Homo sapiens
  Table 1.2; MAGEC1; ENSG00000155495; HLA -A*23:01,HLA-A*24:02,HLA-A*25:01,HLA-A*26:01,HLA-A*30:02, HLA-A*32:01,HLA-B*15:01,HLA-B*15:03,HLA-B*18:01,HLA-B*38:01, HLA-B*46:01,HLA-B*58:01,HLA-C*02:02,HLA-C*03:03,HLA-C*07:04,
  HLA-C*14:02,HLA-C*16:04
LQIPVSSSF

SEQ ID NO: 7245 - protein, 11 aa, Homo sapiens
  Table 1.2; MAGEC1; ENSG00000155495; HLA -A*29:02,HLA-A*30:02,HLA-A*32:01,HLA-B*15:01
LQIPVSSSFSY

SEQ ID NO: 7246 - protein, 8 aa, Homo sapiens
  Table 1.2; MAGEC1; ENSG00000155495; HLA -A*32:01,HLA-B*15:01,HLA-B*15:03,HLA-B*39:01,HLA-B*46:01
LQNPASSF

SEQ ID NO: 7247 - protein, 9 aa, Homo sapiens
  Table 1.2; MAGEC1; ENSG00000155495; HLA -A*30:02,HLA-A*32:01,HLA-B*15:01,HLA-B*15:03,HLA-C*07:04
LQNPASSFF

SEQ ID NO: 7248 - protein, 8 aa, Homo sapiens
  Table 1.2; MAGEC1; ENSG00000155495; HLA -A*32:01,HLA-B*15:01,HLA-B*15:03,HLA-B*46:01
LQRPVSSF

SEQ ID NO: 7249 - protein, 9 aa, Homo sapiens
  Table 1.2; MAGEC1; ENSG00000155495; HLA -A*32:01,HLA-B*15:01,HLA-B*15:03
LQRPVSSFF

SEQ ID NO: 7250 - protein, 11 aa, Homo sapiens
  Table 1.2; MAGEC1; ENSG00000155495; HLA -A*30:02
LQRPVSSFFSY

SEQ ID NO: 7251 - protein, 8 aa, Homo sapiens
  Table 1.2; MAGEC1; ENSG00000155495; HLA -A*32:01,HLA-B*15:01,HLA-B*37:01
LQSPVISF

SEQ ID NO: 7252 - protein, 9 aa, Homo sapiens
  Table 1.2; MAGEC1; ENSG00000155495; HLA -B*27:05
LQSPVSICS

SEQ ID NO: 7253 - protein, 8 aa, Homo sapiens
  Table 1.2; MAGEC1; ENSG00000155495; HLA -A*32:01,HLA-B*15:01,HLA-B*15:03,HLA-B*37:01,HLA-B*39:01
LQSPVSSF

SEQ ID NO: 7254 - protein, 9 aa, Homo sapiens
  Table 1.2; MAGEC1; ENSG00000155495; HLA -A*02:07,HLA-A*24:02
LSPLHFPQF

SEQ ID NO: 7255 - protein, 10 aa, Homo sapiens
  Table 1.2; MAGEC1; ENSG00000155495; HLA -A*25:01,HLA-A*30:02,HLA-B*58:01
LSQSSPVSSF

SEQ ID NO: 7256 - protein, 8 aa, Homo sapiens
  Table 1.2; MAGEC1; ENSG00000155495; HLA -C*05:01
LTDSESLI

SEQ ID NO: 7257 - protein, 8 aa, Homo sapiens
  Table 1.2; MAGEC1; ENSG00000155495; HLA -A*01:01,HLA-A*30:02,HLA-A*32:01,HLA-B*15:01,HLA-B*46:01
LTNVISRY

SEQ ID NO: 7258 - protein, 10 aa, Homo sapiens
  Table 1.2; MAGEC1; ENSG00000155495; HLA -A*23:01,HLA-A*24:02,HLA-B*46:01
MLKNTVPITF

SEQ ID NO: 7259 - protein, 8 aa, Homo sapiens
  Table 1.2; MAGEC1; ENSG00000155495; HLA -A*33:03
MLTNVISR

SEQ ID NO: 7260 - protein, 9 aa, Homo sapiens
  Table 1.2; MAGEC1; ENSG00000155495; HLA -A*01:01,HLA-A*03:01,HLA-A*24:02,HLA-A*25:01,HLA-A*26:01, HLA-A*29:02,HLA-A*30:02,HLA-A*32:01,HLA-B*15:01,HLA-B*15:03, HLA-B*35:01,HLA-B*44:02,HLA-B*44:03,HLA-B*46:01,HLA-B*58:01,
  HLA-C*02:02,HLA-C*07:04,HLA-C*16:01,HLA-C*16:02
MLTNVISRY

SEQ ID NO: 7261 - protein, 9 aa, Homo sapiens
  Table 1.2; MAGEC1; ENSG00000155495; HLA -B*54:01,HLA-B*56:01
MPSLLQSSS

SEQ ID NO: 7262 - protein, 9 aa, Homo sapiens
  Table 1.2; MAGEC1; ENSG00000155495; HLA -B*07:02,HLA-B*08:01,HLA-B*35:01,HLA-B*35:03,HLA-B*39:01, HLA-B*51:01,HLA-B*54:01,HLA-B*55:01,HLA-B*56:01,HLA-C*03:03, HLA-C*03:04,HLA-C*07:02
MPTAGMPSL

SEQ ID NO: 7263 - protein, 10 aa, Homo sapiens
  Table 1.2; MAGEC1; ENSG00000155495; HLA -B*35:03
MPTAGMPSLL

SEQ ID NO: 7264 - protein, 9 aa, Homo sapiens
  Table 1.2; MAGEC1; ENSG00000155495; HLA -A*68:02,HLA-B*35:03,HLA-C*03:04
MTSSFSSTL

SEQ ID NO: 7265 - protein, 10 aa, Homo sapiens
  Table 1.2; MAGEC1; ENSG00000155495; HLA -B*54:01,HLA-B*55:01,HLA-B*56:01
NPASSFFSSA

SEQ ID NO: 7266 - protein, 11 aa, Homo sapiens
  Table 1.2; MAGEC1; ENSG00000155495; HLA -B*07:02
NPASSFFSSAL

SEQ ID NO: 7267 - protein, 9 aa, Homo sapiens
  Table 1.2; MAGEC1; ENSG00000155495; HLA -A*32:01,HLA-B*57:01,HLA-B*58:01,HLA-C*16:01
NSSPPRYEF

SEQ ID NO: 7268 - protein, 11 aa, Homo sapiens
  Table 1.2; MAGEC1; ENSG00000155495; HLA -A*01:01,HLA-A*25:01,HLA-A*26:01,HLA-A*29:02,HLA-A*30:02
NTVPITFPSSY

SEQ ID NO: 7269 - protein, 9 aa, Homo sapiens
  Table 1.2; MAGEC1; ENSG00000155495; HLA -A*25:01,HLA-A*26:01,HLA-A*29:02,HLA-A*30:02,HLA-A*32:01, HLA-B*46:01
NVISRYTGY

SEQ ID NO: 7270 - protein, 9 aa, Homo sapiens
  Table 1.2; MAGEC1; ENSG00000155495; HLA -B*40:01
PEGPVQSPL

SEQ ID NO: 7271 - protein, 8 aa, Homo sapiens
  Table 1.2; MAGEC1; ENSG00000155495; HLA -B*37:01
PESAQSAF

SEQ ID NO: 7272 - protein, 8 aa, Homo sapiens
  Table 1.2; MAGEC1; ENSG00000155495; HLA -B*37:01
PESAQSTF

SEQ ID NO: 7273 - protein, 9 aa, Homo sapiens
  Table 1.2; MAGEC1; ENSG00000155495; HLA -B*15:01,HLA-C*14:02
PLQNPASSF

SEQ ID NO: 7274 - protein, 9 aa, Homo sapiens
  Table 1.2; MAGEC1; ENSG00000155495; HLA -A*24:02
PLQRPVSSF

SEQ ID NO: 7275 - protein, 9 aa, Homo sapiens
  Table 1.2; MAGEC1; ENSG00000155495; HLA -A*24:02,HLA-B*15:01
PLQSPVSSF

SEQ ID NO: 7276 - protein, 11 aa, Homo sapiens
  Table 1.2; MAGEC1; ENSG00000155495; HLA -B*38:01,HLA-B*39:01
PQSPPQGEDSL

SEQ ID NO: 7277 - protein, 11 aa, Homo sapiens
  Table 1.2; MAGEC1; ENSG00000155495; HLA -B*39:01
PQSPPQGEDSM

SEQ ID NO: 7278 - protein, 8 aa, Homo sapiens
  Table 1.2; MAGEC1; ENSG00000155495; HLA -A*30:02
PVSSSFSY

SEQ ID NO: 7279 - protein, 10 aa, Homo sapiens
  Table 1.2; MAGEC1; ENSG00000155495; HLA -A*30:02
QGEDSLSPHY

SEQ ID NO: 7280 - protein, 10 aa, Homo sapiens
  Table 1.2; MAGEC1; ENSG00000155495; HLA -A*01:01
QGEDSMSPLY

SEQ ID NO: 7281 - protein, 10 aa, Homo sapiens
  Table 1.2; MAGEC1; ENSG00000155495; HLA -A*30:02
QIPVSSSFSY

SEQ ID NO: 7282 - protein, 9 aa, Homo sapiens
  Table 1.2; MAGEC1; ENSG00000155495; HLA -A*25:01,HLA-B*57:01,HLA-B*58:01
QIVPSLPEW

SEQ ID NO: 7283 - protein, 8 aa, Homo sapiens
  Table 1.2; MAGEC1; ENSG00000155495; HLA -B*07:02,HLA-B*08:01,HLA-B*35:03
QPITKAEM

SEQ ID NO: 7284 - protein, 9 aa, Homo sapiens
  Table 1.2; MAGEC1; ENSG00000155495; HLA -B*07:02,HLA-B*08:01,HLA-B*35:01,HLA-B*35:03,HLA-C*07:02
QPITKAEML

SEQ ID NO: 7285 - protein, 11 aa, Homo sapiens
  Table 1.2; MAGEC1; ENSG00000155495; HLA -A*25:01,HLA-A*26:01,HLA-A*30:02,HLA-A*32:01,HLA-B*15:01, HLA-B*15:03,HLA-B*46:01,HLA-B*57:01,HLA-B*58:01,HLA-C*12:03
QSFSERTQSTF

SEQ ID NO: 7286 - protein, 9 aa, Homo sapiens
  Table 1.2; MAGEC1; ENSG00000155495; HLA -C*01:02
QSPLQGEEF

SEQ ID NO: 7287 - protein, 10 aa, Homo sapiens
  Table 1.2; MAGEC1; ENSG00000155495; HLA -A*68:01
QSPLQIPVSR

SEQ ID NO: 7288 - protein, 9 aa, Homo sapiens
  Table 1.2; MAGEC1; ENSG00000155495; HLA -C*01:02
QSPQGEDSL

SEQ ID NO: 7289 - protein, 11 aa, Homo sapiens
  Table 1.2; MAGEC1; ENSG00000155495; HLA -A*32:01,HLA-B*57:01,HLA-B*58:01
QSSPERTHSTF

SEQ ID NO: 7290 - protein, 11 aa, Homo sapiens
  Table 1.2; MAGEC1; ENSG00000155495; HLA -A*25:01,HLA-A*30:02,HLA-A*32:01,HLA-B*15:01,HLA-B*57:01, HLA-B*58:01
QSSPERTQSTF

SEQ ID NO: 7291 - protein, 11 aa, Homo sapiens
  Table 1.2; MAGEC1; ENSG00000155495; HLA -A*25:01,HLA-A*30:02,HLA-A*32:01,HLA-B*15:01,HLA-B*39:01, HLA-B*46:01,HLA-B*57:01,HLA-B*58:01
QSSPESAQSAF

SEQ ID NO: 7292 - protein, 11 aa, Homo sapiens
  Table 1.2; MAGEC1; ENSG00000155495; HLA -A*25:01,HLA-A*30:02,HLA-A*32:01,HLA-B*15:01,HLA-B*57:01, HLA-B*58:01
QSSPESAQSTF

SEQ ID NO: 7293 - protein, 11 aa, Homo sapiens
  Table 1.2; MAGEC1; ENSG00000155495; HLA -A*01:01
QSSPESDDTLY

SEQ ID NO: 7294 - protein, 11 aa, Homo sapiens
  Table 1.2; MAGEC1; ENSG00000155495; HLA -A*01:01,HLA-A*30:02,HLA-B*58:01
QSSPESTQSPF

SEQ ID NO: 7295 - protein, 8 aa, Homo sapiens
  Table 1.2; MAGEC1; ENSG00000155495; HLA -A*32:01,HLA-B*37:01
QSSPVSSF

SEQ ID NO: 7296 - protein, 8 aa, Homo sapiens
  Table 1.2; MAGEC1; ENSG00000155495; HLA -A*03:01,HLA-A*03:02,HLA-A*31:01,HLA-A*33:03
QVKQPITK

SEQ ID NO: 7297 - protein, 9 aa, Homo sapiens
  Table 1.2; MAGEC1; ENSG00000155495; HLA -A*02:03,HLA-B*54:01,HLA-B*55:01,HLA-B*56:01
QVKQPITKA

SEQ ID NO: 7298 - protein, 9 aa, Homo sapiens
  Table 1.2; MAGEC1; ENSG00000155495; HLA -A*31:01,HLA-A*33:01
RAHSEVIKR

SEQ ID NO: 7299 - protein, 9 aa, Homo sapiens
  Table 1.2; MAGEC1; ENSG00000155495; HLA -A*30:02,HLA-B*15:03,HLA-B*18:01,HLA-B*40:01,HLA-B*44:02, HLA-B*44:03,HLA-C*16:04
REVDPDDSY

SEQ ID NO: 7300 - protein, 10 aa, Homo sapiens
  Table 1.2; MAGEC1; ENSG00000155495; HLA -B*40:01,HLA-B*49:01
REVDPDDSYV

SEQ ID NO: 7301 - protein, 11 aa, Homo sapiens
  Table 1.2; MAGEC1; ENSG00000155495; HLA -A*23:01,HLA-A*24:02,HLA-A*30:01,HLA-B*40:01,HLA-B*44:02, HLA-B*44:03,HLA-B*57:01,HLA-C*16:04
REVDPDDSYVF

SEQ ID NO: 7302 - protein, 11 aa, Homo sapiens
  Table 1.2; MAGEC1; ENSG00000155495; HLA -A*30:02,HLA-B*44:02,HLA-B*44:03
REVPNSSPPRY

SEQ ID NO: 7303 - protein, 9 aa, Homo sapiens
  Table 1.2; MAGEC1; ENSG00000155495; HLA -A*02:04
RLLILILSI

SEQ ID NO: 7304 - protein, 9 aa, Homo sapiens
  Table 1.2; MAGEC1; ENSG00000155495; HLA -A*30:02,HLA-B*35:01
RPVSSFFSY

SEQ ID NO: 7305 - protein, 11 aa, Homo sapiens
  Table 1.2; MAGEC1; ENSG00000155495; HLA -B*57:01
RSFSSTLLSIF

SEQ ID NO: 7306 - protein, 9 aa, Homo sapiens
  Table 1.2; MAGEC1; ENSG00000155495; HLA -B*57:01
RTHSTFEGF

SEQ ID NO: 7307 - protein, 9 aa, Homo sapiens
  Table 1.2; MAGEC1; ENSG00000155495; HLA -A*32:01,HLA-B*57:01,HLA-B*58:01
RTQSTFEGF

SEQ ID NO: 7308 - protein, 9 aa, Homo sapiens
  Table 1.2; MAGEC1; ENSG00000155495; HLA -A*23:01,HLA-A*24:02
RYTGYFPVI

SEQ ID NO: 7309 - protein, 10 aa, Homo sapiens
  Table 1.2; MAGEC1; ENSG00000155495; HLA -A*24:02
RYTGYFPVIF

SEQ ID NO: 7310 - protein, 8 aa, Homo sapiens
  Table 1.2; MAGEC1; ENSG00000155495; HLA -C*03:03,HLA-C*03:04
SAASSSTL

SEQ ID NO: 7311 - protein, 9 aa, Homo sapiens
  Table 1.2; MAGEC1; ENSG00000155495; HLA -C*01:02
SAPEGEDSL

SEQ ID NO: 7312 - protein, 9 aa, Homo sapiens
  Table 1.2; MAGEC1; ENSG00000155495; HLA -A*30:02
SAQSTFEGF

SEQ ID NO: 7313 - protein, 11 aa, Homo sapiens
  Table 1.2; MAGEC1; ENSG00000155495; HLA -A*30:02
SEESSSPVDEY

SEQ ID NO: 7314 - protein, 9 aa, Homo sapiens
  Table 1.2; MAGEC1; ENSG00000155495; HLA -B*40:01
SEEVIWDVL

SEQ ID NO: 7315 - protein, 10 aa, Homo sapiens
  Table 1.2; MAGEC1; ENSG00000155495; HLA -B*40:01
SEGEDSSDPL

SEQ ID NO: 7316 - protein, 9 aa, Homo sapiens
  Table 1.2; MAGEC1; ENSG00000155495; HLA -A*30:01,HLA-B*37:01,HLA-B*40:01,HLA-B*40:02,HLA-B*44:02, HLA-B*44:03,HLA-B*49:01
SEPLFTYTL

SEQ ID NO: 7317 - protein, 8 aa, Homo sapiens
  Table 1.2; MAGEC1; ENSG00000155495; HLA -B*15:03,HLA-B*18:01,HLA-B*37:01
SERTQSTF

SEQ ID NO: 7318 - protein, 11 aa, Homo sapiens
  Table 1.2; MAGEC1; ENSG00000155495; HLA -B*44:02,HLA-B*44:03
SERTQSTFEGF

SEQ ID NO: 7319 - protein, 10 aa, Homo sapiens
  Table 1.2; MAGEC1; ENSG00000155495; HLA -B*40:01
SESLIESEPL

SEQ ID NO: 7320 - protein, 10 aa, Homo sapiens
  Table 1.2; MAGEC1; ENSG00000155495; HLA -C*01:02,HLA-C*14:02
SFPSSTSSSL

SEQ ID NO: 7321 - protein, 10 aa, Homo sapiens
  Table 1.2; MAGEC1; ENSG00000155495; HLA -A*23:01,HLA-A*24:02,HLA-C*14:02
SFSERTQSTF

SEQ ID NO: 7322 - protein, 8 aa, Homo sapiens
  Table 1.2; MAGEC1; ENSG00000155495; HLA -C*14:02
SFSSSTSL

SEQ ID NO: 7323 - protein, 9 aa, Homo sapiens
  Table 1.2; MAGEC1; ENSG00000155495; HLA -A*23:01,HLA-B*13:02
SFSSTLLSI

SEQ ID NO: 7324 - protein, 9 aa, Homo sapiens
  Table 1.2; MAGEC1; ENSG00000155495; HLA -C*14:02
SFSSTLLSL

SEQ ID NO: 7325 - protein, 9 aa, Homo sapiens
  Table 1.2; MAGEC1; ENSG00000155495; HLA -A*23:01,HLA-C*14:02
SFSSTLVSL

SEQ ID NO: 7326 - protein, 9 aa, Homo sapiens
  Table 1.2; MAGEC1; ENSG00000155495; HLA -A*31:01
SGIGVRAGR

SEQ ID NO: 7327 - protein, 9 aa, Homo sapiens
  Table 1.2; MAGEC1; ENSG00000155495; HLA -B*07:02,HLA-C*01:02
SICSSSTSL

SEQ ID NO: 7328 - protein, 9 aa, Homo sapiens
  Table 1.2; MAGEC1; ENSG00000155495; HLA -A*03:02,HLA-A*11:01,HLA-A*31:01,HLA-A*68:01,HLA-C*07:06
SIFQSSPER

SEQ ID NO: 7329 - protein, 10 aa, Homo sapiens
  Table 1.2; MAGEC1; ENSG00000155495; HLA -A*02:03
SIFQSSPESA

SEQ ID NO: 7330 - protein, 9 aa, Homo sapiens
  Table 1.2; MAGEC1; ENSG00000155495; HLA -A*26:01,HLA-A*29:02,HLA-A*30:02,HLA-A*32:01,HLA-B*15:01, HLA-B*46:01
SIIFIKGTY

SEQ ID NO: 7331 - protein, 10 aa, Homo sapiens
  Table 1.2; MAGEC1; ENSG00000155495; HLA -A*02:03
SIIFIKGTYA

SEQ ID NO: 7332 - protein, 9 aa, Homo sapiens
  Table 1.2; MAGEC1; ENSG00000155495; HLA -A*02:03,HLA-A*03:01,HLA-A*31:01,HLA-A*33:01,HLA-A*33:03, HLA-A*68:01
SLFQSFSER

SEQ ID NO: 7333 - protein, 9 aa, Homo sapiens
  Table 1.2; MAGEC1; ENSG00000155495; HLA -A*02:01
SLFQSSPEC

SEQ ID NO: 7334 - protein, 9 aa, Homo sapiens
  Table 1.2; MAGEC1; ENSG00000155495; HLA -A*31:01
SLFQSSPER

SEQ ID NO: 7335 - protein, 10 aa, Homo sapiens
  Table 1.2; MAGEC1; ENSG00000155495; HLA -A*02:03
SLFQSSPERT

SEQ ID NO: 7336 - protein, 9 aa, Homo sapiens
  Table 1.2; MAGEC1; ENSG00000155495; HLA -A*02:01,HLA-A*02:04,HLA-A*02:07,HLA-A*23:01,HLA-A*24:02, HLA-A*26:01,HLA-A*32:01,HLA-B*15:01,HLA-B*15:03,HLA-B*38:01
SLIESEPLF

SEQ ID NO: 7337 - protein, 11 aa, Homo sapiens
  Table 1.2; MAGEC1; ENSG00000155495; HLA -A*25:01,HLA-A*26:01,HLA-A*29:02,HLA-A*30:02
SLIESEPLFTY

SEQ ID NO: 7338 - protein, 9 aa, Homo sapiens
  Table 1.2; MAGEC1; ENSG00000155495; HLA -A*02:07
SLPEWEDSL

SEQ ID NO: 7339 - protein, 9 aa, Homo sapiens
  Table 1.2; MAGEC1; ENSG00000155495; HLA -A*02:07
SLPQSFPES

SEQ ID NO: 7340 - protein, 10 aa, Homo sapiens
  Table 1.2; MAGEC1; ENSG00000155495; HLA -A*30:02
SLQIPVSPSF

SEQ ID NO: 7341 - protein, 11 aa, Homo sapiens
  Table 1.2; MAGEC1; ENSG00000155495; HLA -A*30:02,HLA-B*15:01
SLREVDPDDSY

SEQ ID NO: 7342 - protein, 8 aa, Homo sapiens
  Table 1.2; MAGEC1; ENSG00000155495; HLA -B*37:01
SLSLPQSF

SEQ ID NO: 7343 - protein, 11 aa, Homo sapiens
  Table 1.2; MAGEC1; ENSG00000155495; HLA -A*25:01,HLA-B*15:01
SLSQSSPVSSF

SEQ ID NO: 7344 - protein, 9 aa, Homo sapiens
  Table 1.2; MAGEC1; ENSG00000155495; HLA -A*02:01,HLA-B*13:02
SLTDSESLI

SEQ ID NO: 7345 - protein, 11 aa, Homo sapiens
  Table 1.2; MAGEC1; ENSG00000155495; HLA -B*35:03
SPEGDDTQSPL

SEQ ID NO: 7346 - protein, 8 aa, Homo sapiens
  Table 1.2; MAGEC1; ENSG00000155495; HLA -B*07:02,HLA-C*07:02
SPEGKDSL

SEQ ID NO: 7347 - protein, 9 aa, Homo sapiens
  Table 1.2; MAGEC1; ENSG00000155495; HLA -B*07:02,HLA-B*35:01,HLA-B*38:01,HLA-B*55:01,HLA-C*07:02
SPERTHSTF

SEQ ID NO: 7348 - protein, 9 aa, Homo sapiens
  Table 1.2; MAGEC1; ENSG00000155495; HLA -B*07:02,HLA-B*35:01,HLA-B*38:01,HLA-B*55:01,HLA-C*07:02
SPERTQSTF

SEQ ID NO: 7349 - protein, 9 aa, Homo sapiens
  Table 1.2; MAGEC1; ENSG00000155495; HLA -B*07:02,HLA-B*35:01,HLA-B*35:03,HLA-B*55:01,HLA-C*03:03, HLA-C*05:01,HLA-C*07:02
SPESAQSAF

SEQ ID NO: 7350 - protein, 9 aa, Homo sapiens
  Table 1.2; MAGEC1; ENSG00000155495; HLA -B*07:02,HLA-B*35:01,HLA-B*35:03,HLA-B*55:01,HLA-C*05:01, HLA-C*07:02
SPESAQSTF

SEQ ID NO: 7351 - protein, 9 aa, Homo sapiens
  Table 1.2; MAGEC1; ENSG00000155495; HLA -B*35:01,HLA-B*55:01
SPESDDTLY

SEQ ID NO: 7352 - protein, 11 aa, Homo sapiens
  Table 1.2; MAGEC1; ENSG00000155495; HLA -B*35:03
SPESDDTLYPL

SEQ ID NO: 7353 - protein, 9 aa, Homo sapiens
  Table 1.2; MAGEC1; ENSG00000155495; HLA -B*56:01
SPESPLQSP

SEQ ID NO: 7354 - protein, 11 aa, Homo sapiens
  Table 1.2; MAGEC1; ENSG00000155495; HLA -B*35:03
SPESPLQSPVI

SEQ ID NO: 7355 - protein, 9 aa, Homo sapiens
  Table 1.2; MAGEC1; ENSG00000155495; HLA -B*07:02,HLA-B*35:01,HLA-B*35:03,HLA-B*55:01
SPESTQSPF

SEQ ID NO: 7356 - protein, 9 aa, Homo sapiens
  Table 1.2; MAGEC1; ENSG00000155495; HLA -B*54:01,HLA-B*56:01
SPFEGFPQS

SEQ ID NO: 7357 - protein, 10 aa, Homo sapiens
  Table 1.2; MAGEC1; ENSG00000155495; HLA -B*56:01
SPFEGFPQSP

SEQ ID NO: 7358 - protein, 11 aa, Homo sapiens
  Table 1.2; MAGEC1; ENSG00000155495; HLA -B*07:02
SPFEGFPQSPL

SEQ ID NO: 7359 - protein, 10 aa, Homo sapiens
  Table 1.2; MAGEC1; ENSG00000155495; HLA -A*02:03,HLA-B*07:02,HLA-B*35:03,HLA-B*51:01,HLA-B*54:01, HLA-B*55:01,HLA-B*56:01,HLA-C*07:02
SPFEGFPQSV

SEQ ID NO: 7360 - protein, 11 aa, Homo sapiens
  Table 1.2; MAGEC1; ENSG00000155495; HLA -B*07:02,HLA-B*35:01,HLA-B*35:03,HLA-B*56:01
SPFEGFPQSVL

SEQ ID NO: 7361 - protein, 9 aa, Homo sapiens
  Table 1.2; MAGEC1; ENSG00000155495; HLA -B*56:01
SPHYFPQSP

SEQ ID NO: 7362 - protein, 9 aa, Homo sapiens
  Table 1.2; MAGEC1; ENSG00000155495; HLA -B*07:02,HLA-B*35:01,HLA-B*35:03,HLA-B*39:01,HLA-B*55:01
SPLEGEDSL

SEQ ID NO: 7363 - protein, 9 aa, Homo sapiens
  Table 1.2; MAGEC1; ENSG00000155495; HLA -B*56:01
SPLEISQSP

SEQ ID NO: 7364 - protein, 8 aa, Homo sapiens
  Table 1.2; MAGEC1; ENSG00000155495; HLA -B*35:01
SPLQGEEF

SEQ ID NO: 7365 - protein, 11 aa, Homo sapiens
  Table 1.2; MAGEC1; ENSG00000155495; HLA -B*35:01
SPLQIPGSPSF

SEQ ID NO: 7366 - protein, 10 aa, Homo sapiens
  Table 1.2; MAGEC1; ENSG00000155495; HLA -B*07:02,HLA-B*56:01,HLA-C*07:02
SPLQIPQSPL

SEQ ID NO: 7367 - protein, 9 aa, Homo sapiens
  Table 1.2; MAGEC1; ENSG00000155495; HLA -B*54:01,HLA-B*55:01,HLA-B*56:01
SPLQIPVSP

SEQ ID NO: 7368 - protein, 9 aa, Homo sapiens
  Table 1.2; MAGEC1; ENSG00000155495; HLA -A*33:03,HLA-A*68:01,HLA-B*56:01
SPLQIPVSR

SEQ ID NO: 7369 - protein, 9 aa, Homo sapiens
  Table 1.2; MAGEC1; ENSG00000155495; HLA -B*56:01
SPLQIPVSS

SEQ ID NO: 7370 - protein, 11 aa, Homo sapiens
  Table 1.2; MAGEC1; ENSG00000155495; HLA -A*23:01,HLA-B*35:01
SPLQIPVSSSF

SEQ ID NO: 7371 - protein, 9 aa, Homo sapiens
  Table 1.2; MAGEC1; ENSG00000155495; HLA -A*23:01,HLA-B*07:02,HLA-B*35:01,HLA-B*35:03,HLA-B*55:01, HLA-B*56:01,HLA-C*07:02
SPLQIVPSL

SEQ ID NO: 7372 - protein, 10 aa, Homo sapiens
  Table 1.2; MAGEC1; ENSG00000155495; HLA -B*07:02,HLA-B*35:01,HLA-C*07:02
SPLQNPASSF

SEQ ID NO: 7373 - protein, 9 aa, Homo sapiens
  Table 1.2; MAGEC1; ENSG00000155495; HLA -B*08:01,HLA-B*56:01
SPLQRPVSS

SEQ ID NO: 7374 - protein, 10 aa, Homo sapiens
  Table 1.2; MAGEC1; ENSG00000155495; HLA -B*07:02,HLA-C*07:02
SPLQRPVSSF

SEQ ID NO: 7375 - protein, 9 aa, Homo sapiens
  Table 1.2; MAGEC1; ENSG00000155495; HLA -B*54:01,HLA-B*56:01
SPLQSPESA

SEQ ID NO: 7376 - protein, 8 aa, Homo sapiens
  Table 1.2; MAGEC1; ENSG00000155495; HLA -B*51:01
SPLQSPVI

SEQ ID NO: 7377 - protein, 10 aa, Homo sapiens
  Table 1.2; MAGEC1; ENSG00000155495; HLA -B*07:02,HLA-B*35:01,HLA-B*55:01,HLA-B*56:01
SPLQSPVISF

SEQ ID NO: 7378 - protein, 10 aa, Homo sapiens
  Table 1.2; MAGEC1; ENSG00000155495; HLA -B*07:02,HLA-B*35:01,HLA-C*07:02
SPLQSPVSSF

SEQ ID NO: 7379 - protein, 9 aa, Homo sapiens
  Table 1.2; MAGEC1; ENSG00000155495; HLA -B*56:01
SPLYFPQSP

SEQ ID NO: 7380 - protein, 10 aa, Homo sapiens
  Table 1.2; MAGEC1; ENSG00000155495; HLA -B*07:02
SPLYFPQSPL

SEQ ID NO: 7381 - protein, 11 aa, Homo sapiens
  Table 1.2; MAGEC1; ENSG00000155495; HLA -B*07:02
SPPEGPVQSPL

SEQ ID NO: 7382 - protein, 9 aa, Homo sapiens
  Table 1.2; MAGEC1; ENSG00000155495; HLA -B*07:02,HLA-B*35:01,HLA-C*07:02
SPQSPPEGM

SEQ ID NO: 7383 - protein, 8 aa, Homo sapiens
  Table 1.2; MAGEC1; ENSG00000155495; HLA -B*07:02
SPSFSSTL

SEQ ID NO: 7384 - protein, 9 aa, Homo sapiens
  Table 1.2; MAGEC1; ENSG00000155495; HLA -B*07:02,HLA-B*35:03,HLA-C*07:02
SPSFSSTLL

SEQ ID NO: 7385 - protein, 11 aa, Homo sapiens
  Table 1.2; MAGEC1; ENSG00000155495; HLA -B*07:02
SPSFSSTLLSL

SEQ ID NO: 7386 - protein, 9 aa, Homo sapiens
  Table 1.2; MAGEC1; ENSG00000155495; HLA -B*07:02,HLA-B*56:01
SPSFSSTLV

SEQ ID NO: 7387 - protein, 11 aa, Homo sapiens
  Table 1.2; MAGEC1; ENSG00000155495; HLA -B*07:02
SPSFSSTLVSL

SEQ ID NO: 7388 - protein, 8 aa, Homo sapiens
  Table 1.2; MAGEC1; ENSG00000155495; HLA -B*07:02,HLA-C*07:02
SPSSSSTL

SEQ ID NO: 7389 - protein, 9 aa, Homo sapiens
  Table 1.2; MAGEC1; ENSG00000155495; HLA -B*07:02,HLA-B*35:03,HLA-C*07:02
SPSSSSTLL

SEQ ID NO: 7390 - protein, 11 aa, Homo sapiens
  Table 1.2; MAGEC1; ENSG00000155495; HLA -B*07:02,HLA-C*07:02
SPSSSSTLLSL

SEQ ID NO: 7391 - protein, 9 aa, Homo sapiens
  Table 1.2; MAGEC1; ENSG00000155495; HLA -B*56:01
SPVISFSSS

SEQ ID NO: 7392 - protein, 9 aa, Homo sapiens
  Table 1.2; MAGEC1; ENSG00000155495; HLA -B*56:01
SPVSSFPSS

SEQ ID NO: 7393 - protein, 10 aa, Homo sapiens
  Table 1.2; MAGEC1; ENSG00000155495; HLA -B*56:01
SPVSSFPSST

SEQ ID NO: 7394 - protein, 9 aa, Homo sapiens
  Table 1.2; MAGEC1; ENSG00000155495; HLA -A*02:04,HLA-B*13:02
SQNRLLILI

SEQ ID NO: 7395 - protein, 11 aa, Homo sapiens
  Table 1.2; MAGEC1; ENSG00000155495; HLA -B*27:05,HLA-B*38:01,HLA-B*39:01
SQSSPEGKDSL

SEQ ID NO: 7396 - protein, 9 aa, Homo sapiens
  Table 1.2; MAGEC1; ENSG00000155495; HLA -A*25:01,HLA-A*26:01,HLA-A*30:02,HLA-A*32:01,HLA-B*13:02, HLA-B*15:01,HLA-B*15:03,HLA-B*27:05,HLA-B*37:01,HLA-B*38:01, HLA-B*39:01,HLA-B*44:02,HLA-B*46:01,HLA-C*02:02,HLA-C*05:01,
  HLA-C*07:04,HLA-C*14:02,HLA-C*16:04
SQSSPVSSF

SEQ ID NO: 7397 - protein, 11 aa, Homo sapiens
  Table 1.2; MAGEC1; ENSG00000155495; HLA -A*32:01,HLA-A*68:01,HLA-B*07:02,HLA-B*46:01,HLA-B*58:01, HLA-C*03:03,HLA-C*03:04
SSFPSSTSSSL

SEQ ID NO: 7398 - protein, 9 aa, Homo sapiens
  Table 1.2; MAGEC1; ENSG00000155495; HLA -A*23:01,HLA-B*13:02
SSLQSPVSI

SEQ ID NO: 7399 - protein, 9 aa, Homo sapiens
  Table 1.2; MAGEC1; ENSG00000155495; HLA -C*01:02
SSPEGKDSL

SEQ ID NO: 7400 - protein, 10 aa, Homo sapiens
  Table 1.2; MAGEC1; ENSG00000155495; HLA -A*25:01
SSPERTQSTF

SEQ ID NO: 7401 - protein, 10 aa, Homo sapiens
  Table 1.2; MAGEC1; ENSG00000155495; HLA -C*01:02
SSPESAQSAF

SEQ ID NO: 7402 - protein, 10 aa, Homo sapiens
  Table 1.2; MAGEC1; ENSG00000155495; HLA -B*57:01
SSPPRYEFLW

SEQ ID NO: 7403 - protein, 8 aa, Homo sapiens
  Table 1.2; MAGEC1; ENSG00000155495; HLA -A*30:02
SSSPVDEY

SEQ ID NO: 7404 - protein, 11 aa, Homo sapiens
  Table 1.2; MAGEC1; ENSG00000155495; HLA -A*30:02
SSSSSTLLSLF

SEQ ID NO: 7405 - protein, 9 aa, Homo sapiens
  Table 1.2; MAGEC1; ENSG00000155495; HLA -B*57:01
SSSTLLSLF

SEQ ID NO: 7406 - protein, 9 aa, Homo sapiens
  Table 1.2; MAGEC1; ENSG00000155495; HLA -A*25:01,HLA-A*26:01,HLA-B*57:01,HLA-B*58:01,HLA-C*02:02, HLA-C*12:03
SSSTLVSIF

SEQ ID NO: 7407 - protein, 9 aa, Homo sapiens
  Table 1.2; MAGEC1; ENSG00000155495; HLA -A*32:01,HLA-B*15:03,HLA-B*58:01
SSSVMSPSF

SEQ ID NO: 7408 - protein, 8 aa, Homo sapiens
  Table 1.2; MAGEC1; ENSG00000155495; HLA -B*37:01
SSTLVSIF

SEQ ID NO: 7409 - protein, 8 aa, Homo sapiens
  Table 1.2; MAGEC1; ENSG00000155495; HLA -B*37:01
SSTLVSLF

SEQ ID NO: 7410 - protein, 11 aa, Homo sapiens
  Table 1.2; MAGEC1; ENSG00000155495; HLA -B*57:01,HLA-B*58:01
SSTPSSLPQSF

SEQ ID NO: 7411 - protein, 9 aa, Homo sapiens
  Table 1.2; MAGEC1; ENSG00000155495; HLA -A*11:01
SSTSSSLSK

SEQ ID NO: 7412 - protein, 8 aa, Homo sapiens
  Table 1.2; MAGEC1; ENSG00000155495; HLA -B*58:01
SSVMSPSF

SEQ ID NO: 7413 - protein, 11 aa, Homo sapiens
  Table 1.2; MAGEC1; ENSG00000155495; HLA -A*68:02
STFEGFAQSPL

SEQ ID NO: 7414 - protein, 11 aa, Homo sapiens
  Table 1.2; MAGEC1; ENSG00000155495; HLA -A*25:01,HLA-A*26:01,HLA-A*68:02,HLA-B*27:05
STFEGFAQSSL

SEQ ID NO: 7415 - protein, 10 aa, Homo sapiens
  Table 1.2; MAGEC1; ENSG00000155495; HLA -A*02:03,HLA-A*25:01,HLA-A*26:01,HLA-A*68:01,HLA-A*68:02, HLA-C*02:02,HLA-C*12:03
STFEGFPQSL

SEQ ID NO: 7416 - protein, 11 aa, Homo sapiens
  Table 1.2; MAGEC1; ENSG00000155495; HLA -A*68:02
STFEGFPQSLL

SEQ ID NO: 7417 - protein, 11 aa, Homo sapiens
  Table 1.2; MAGEC1; ENSG00000155495; HLA -A*68:02
STFEGFPQSPL

SEQ ID NO: 7418 - protein, 10 aa, Homo sapiens
  Table 1.2; MAGEC1; ENSG00000155495; HLA -B*57:01
STLLSLFQSF

SEQ ID NO: 7419 - protein, 10 aa, Homo sapiens
  Table 1.2; MAGEC1; ENSG00000155495; HLA -A*25:01,HLA-A*26:01
STPSSLPQSF

SEQ ID NO: 7420 - protein, 9 aa, Homo sapiens
  Table 1.2; MAGEC1; ENSG00000155495; HLA -A*02:01,HLA-B*54:01,HLA-B*55:01,HLA-B*56:01
SVLQIPVSA

SEQ ID NO: 7421 - protein, 10 aa, Homo sapiens
  Table 1.2; MAGEC1; ENSG00000155495; HLA -B*56:01
SVLQIPVSAA

SEQ ID NO: 7422 - protein, 10 aa, Homo sapiens
  Table 1.2; MAGEC1; ENSG00000155495; HLA -A*26:01,HLA-C*01:02
SVMSPSFSSE

SEQ ID NO: 7423 - protein, 8 aa, Homo sapiens
  Table 1.2; MAGEC1; ENSG00000155495; HLA -A*23:01,HLA-A*24:02,HLA-C*14:02
SYTLASLL

SEQ ID NO: 7424 - protein, 8 aa, Homo sapiens
  Table 1.2; MAGEC1; ENSG00000155495; HLA -A*24:02
SYTLLSLF

SEQ ID NO: 7425 - protein, 8 aa, Homo sapiens
  Table 1.2; MAGEC1; ENSG00000155495; HLA -A*23:01,HLA-A*24:02,HLA-C*14:02
SYVFVNTL

SEQ ID NO: 7426 - protein, 11 aa, Homo sapiens
  Table 1.2; MAGEC1; ENSG00000155495; HLA -B*35:01,HLA-B*35:03,HLA-B*39:01,HLA-C*03:03,HLA-C*03:04
TATESASSSVM

SEQ ID NO: 7427 - protein, 8 aa, Homo sapiens
  Table 1.2; MAGEC1; ENSG00000155495; HLA -B*49:01
TESASSSV

SEQ ID NO: 7428 - protein, 9 aa, Homo sapiens
  Table 1.2; MAGEC1; ENSG00000155495; HLA -A*30:01,HLA-B*18:01,HLA-B*37:01,HLA-B*39:01,HLA-B*40:01, HLA-B*40:02,HLA-B*49:01
TESASSSVM

SEQ ID NO: 7429 - protein, 9 aa, Homo sapiens
  Table 1.2; MAGEC1; ENSG00000155495; HLA -A*23:01,HLA-A*32:01,HLA-B*35:03,HLA-C*04:01,HLA-C*14:02
TFEGFPQSL

SEQ ID NO: 7430 - protein, 8 aa, Homo sapiens
  Table 1.2; MAGEC1; ENSG00000155495; HLA -C*12:03
TGYFPVIF

SEQ ID NO: 7431 - protein, 9 aa, Homo sapiens
  Table 1.2; MAGEC1; ENSG00000155495; HLA -A*03:01,HLA-A*11:01,HLA-A*31:01,HLA-A*33:01,HLA-A*33:03, HLA-A*68:01,HLA-A*68:02
TGYFPVIFR

SEQ ID NO: 7432 - protein, 11 aa, Homo sapiens
  Table 1.2; MAGEC1; ENSG00000155495; HLA -B*38:01
THSPLQIVPSL

SEQ ID NO: 7433 - protein, 8 aa, Homo sapiens
  Table 1.2; MAGEC1; ENSG00000155495; HLA -B*38:01
THSTFEGF

SEQ ID NO: 7434 - protein, 9 aa, Homo sapiens
  Table 1.2; MAGEC1; ENSG00000155495; HLA -B*15:03
TKVWVQEHY

SEQ ID NO: 7435 - protein, 9 aa, Homo sapiens
  Table 1.2; MAGEC1; ENSG00000155495; HLA -A*02:01,HLA-A*02:04,HLA-A*02:07,HLA-B*35:03,HLA-B*38:01, HLA-B*39:01,HLA-B*55:01,HLA-C*05:01
TLDEKVDEL

SEQ ID NO: 7436 - protein, 9 aa, Homo sapiens
  Table 1.2; MAGEC1; ENSG00000155495; HLA -A*02:07,HLA-A*23:01,HLA-A*24:02,HLA-A*29:02
TLLSLFQSF

SEQ ID NO: 7437 - protein, 11 aa, Homo sapiens
  Table 1.2; MAGEC1; ENSG00000155495; HLA -A*03:01,HLA-A*03:02,HLA-A*11:01,HLA-A*31:01,HLA-A*33:01, HLA-A*33:03,HLA-A*68:01
TLYPLQSPQSR

SEQ ID NO: 7438 - protein, 9 aa, Homo sapiens
  Table 1.2; MAGEC1; ENSG00000155495; HLA -B*07:02,HLA-B*15:03,HLA-B*18:01,HLA-B*35:01,HLA-B*35:03, HLA-B*38:01,HLA-B*55:01
TPSSLPQSF

SEQ ID NO: 7439 - protein, 8 aa, Homo sapiens
  Table 1.2; MAGEC1; ENSG00000155495; HLA -B*37:01
TQSPFEGF

SEQ ID NO: 7440 - protein, 8 aa, Homo sapiens
  Table 1.2; MAGEC1; ENSG00000155495; HLA -B*37:01
TQSTFEGF

SEQ ID NO: 7441 - protein, 9 aa, Homo sapiens
  Table 1.2; MAGEC1; ENSG00000155495; HLA -A*23:01,HLA-A*29:02,HLA-A*30:02,HLA-A*32:01,HLA-A*33:03, HLA-B*18:01,HLA-B*35:01,HLA-B*46:01,HLA-B*57:01,HLA-B*58:01
TSLSLPQSF

SEQ ID NO: 7442 - protein, 10 aa, Homo sapiens
  Table 1.2; MAGEC1; ENSG00000155495; HLA -A*25:01,HLA-A*26:01,HLA-A*30:02,HLA-C*07:04
TVPITFPSSY

SEQ ID NO: 7443 - protein, 9 aa, Homo sapiens
  Table 1.2; MAGEC1; ENSG00000155495; HLA -A*23:01,HLA-A*24:02
VDPDDSYVF

SEQ ID NO: 7444 - protein, 9 aa, Homo sapiens
  Table 1.2; MAGEC1; ENSG00000155495; HLA -B*40:01,HLA-B*49:01
VEERAQAII

SEQ ID NO: 7445 - protein, 8 aa, Homo sapiens
  Table 1.2; MAGEC1; ENSG00000155495; HLA -A*23:01,HLA-C*14:02
VFVNTLDL

SEQ ID NO: 7446 - protein, 9 aa, Homo sapiens
  Table 1.2; MAGEC1; ENSG00000155495; HLA -B*08:01
VIKRKVVEF

SEQ ID NO: 7447 - protein, 9 aa, Homo sapiens
  Table 1.2; MAGEC1; ENSG00000155495; HLA -A*02:01,HLA-A*02:03,HLA-A*02:04,HLA-A*02:07
VIWDVLSGI

SEQ ID NO: 7448 - protein, 11 aa, Homo sapiens
  Table 1.2; MAGEC1; ENSG00000155495; HLA -A*02:01,HLA-A*02:04,HLA-A*02:07
VIWDVLSGIGV

SEQ ID NO: 7449 - protein, 10 aa, Homo sapiens
  Table 1.2; MAGEC1; ENSG00000155495; HLA -B*15:03
VKQPITKAEM

SEQ ID NO: 7450 - protein, 9 aa, Homo sapiens
  Table 1.2; MAGEC1; ENSG00000155495; HLA -A*02:01,HLA-A*02:03
VLQIPVSAA

SEQ ID NO: 7451 - protein, 9 aa, Homo sapiens
  Table 1.2; MAGEC1; ENSG00000155495; HLA -A*02:01,HLA-A*02:03,HLA-A*02:04
VLSGIGVRA

SEQ ID NO: 7452 - protein, 11 aa, Homo sapiens
  Table 1.2; MAGEC1; ENSG00000155495; HLA -A*31:01
VLSGIGVRAGR

SEQ ID NO: 7453 - protein, 8 aa, Homo sapiens
  Table 1.2; MAGEC1; ENSG00000155495; HLA -B*51:01
VPITFPSS

SEQ ID NO: 7454 - protein, 9 aa, Homo sapiens
  Table 1.2; MAGEC1; ENSG00000155495; HLA -A*01:01,HLA-A*23:01,HLA-A*25:01,HLA-A*26:01,HLA-A*29:02, HLA-A*30:02,HLA-B*07:02,HLA-B*15:01,HLA-B*15:03,HLA-B*18:01, HLA-B*35:01,HLA-B*35:03,HLA-B*46:01,HLA-B*51:01,HLA-B*54:01,
  HLA-B*55:01,HLA-B*56:01,HLA-C*02:02,HLA-C*07:02,HLA-C*14:02
VPITFPSSY

SEQ ID NO: 7455 - protein, 9 aa, Homo sapiens
  Table 1.2; MAGEC1; ENSG00000155495; HLA -A*30:02,HLA-B*35:01,HLA-B*55:01
VPNSSPPRY

SEQ ID NO: 7456 - protein, 11 aa, Homo sapiens
  Table 1.2; MAGEC1; ENSG00000155495; HLA -A*23:01,HLA-B*07:02,HLA-B*35:01,HLA-B*55:01
VPNSSPPRYEF

SEQ ID NO: 7457 - protein, 8 aa, Homo sapiens
  Table 1.2; MAGEC1; ENSG00000155495; HLA -A*01:01
VQEHYLEY

SEQ ID NO: 7458 - protein, 9 aa, Homo sapiens
  Table 1.2; MAGEC1; ENSG00000155495; HLA -B*39:01
VQSPLQNPA

SEQ ID NO: 7459 - protein, 9 aa, Homo sapiens
  Table 1.2; MAGEC1; ENSG00000155495; HLA -B*58:01,HLA-C*03:03,HLA-C*03:04
VSAASSSTL

SEQ ID NO: 7460 - protein, 9 aa, Homo sapiens
  Table 1.2; MAGEC1; ENSG00000155495; HLA -C*01:02
VSPSFSSTL

SEQ ID NO: 7461 - protein, 9 aa, Homo sapiens
  Table 1.2; MAGEC1; ENSG00000155495; HLA -C*01:02
VSPSSSSTL

SEQ ID NO: 7462 - protein, 9 aa, Homo sapiens
  Table 1.2; MAGEC1; ENSG00000155495; HLA -B*46:01
VSRSFSSTL

SEQ ID NO: 7463 - protein, 9 aa, Homo sapiens
  Table 1.2; MAGEC1; ENSG00000155495; HLA -C*03:04
VSSSSSSTL

SEQ ID NO: 7464 - protein, 9 aa, Homo sapiens
  Table 1.2; MAGEC1; ENSG00000155495; HLA -A*03:02,HLA-A*11:01
VVEFLAMLK

SEQ ID NO: 7465 - protein, 10 aa, Homo sapiens
  Table 1.2; MAGEC1; ENSG00000155495; HLA -A*29:02
VWVQEHYLEY

SEQ ID NO: 7466 - protein, 9 aa, Homo sapiens
  Table 1.2; MAGEC1; ENSG00000155495; HLA -A*01:01,HLA-A*25:01,HLA-A*26:01,HLA-A*29:02
WVQEHYLEY

SEQ ID NO: 7467 - protein, 9 aa, Homo sapiens
  Table 1.2; MAGEC1; ENSG00000155495; HLA -A*33:01,HLA-A*33:03,HLA-A*68:01,HLA-B*35:01,HLA-B*35:03, HLA-B*51:01,HLA-B*54:01,HLA-B*56:01
YPLQSPQSR

SEQ ID NO: 7468 - protein, 9 aa, Homo sapiens
  Table 1.2; MAGEC1; ENSG00000155495; HLA -A*03:01,HLA-A*03:02,HLA-A*11:01,HLA-B*13:02,HLA-B*27:05, HLA-C*02:02
YQVKQPITK

SEQ ID NO: 7469 - protein, 8 aa, Homo sapiens
  Table 1.2; MAGEC1; ENSG00000155495; HLA -B*51:01
YTGYFPVI

SEQ ID NO: 7470 - protein, 9 aa, Homo sapiens
  Table 1.2; MAGEC1; ENSG00000155495; HLA -A*24:02
YTGYFPVIF

SEQ ID NO: 7471 - protein, 10 aa, Homo sapiens
  Table 1.2; MAGEC1; ENSG00000155495; HLA -A*68:02
YTGYFPVIFR

SEQ ID NO: 7472 - protein, 10 aa, Homo sapiens
  Table 1.2; MAGEC1; ENSG00000155495; HLA -A*02:01,HLA-A*02:04,HLA-A*25:01,HLA-A*26:01,HLA-A*68:02
YTLDEKVDEL

SEQ ID NO: 7473 - protein, 8 aa, Homo sapiens
  Table 1.2; MAGEC1; ENSG00000155495; HLA -B*39:01
YTSSSDTL

SEQ ID NO: 7474 - protein, 9 aa, Homo sapiens
  Table 1.2; MAGEC1; ENSG00000155495; HLA -A*68:02,HLA-B*35:03
YTSSSDTLL

SEQ ID NO: 7475 - protein, 9 aa, Homo sapiens
  Table 1.2; MAGEC1; ENSG00000155495; HLA -B*13:02,HLA-B*46:01,HLA-C*03:03,HLA-C*03:04
YVFVNTLDL

SEQ ID NO: 7476 - protein, 10 aa, Homo sapiens
  Table 1.2; MAGEC2; ENSG00000046774; HLA -A*30:01,HLA-B*39:01,HLA-B*40:01,HLA-B*40:02,HLA-B*44:03, HLA-B*49:01
AEEPVTEAEM

SEQ ID NO: 7477 - protein, 11 aa, Homo sapiens
  Table 1.2; MAGEC2; ENSG00000046774; HLA -A*30:01,HLA-B*38:01,HLA-B*40:01
AEEPVTEAEML

SEQ ID NO: 7478 - protein, 9 aa, Homo sapiens
  Table 1.2; MAGEC2; ENSG00000046774; HLA -B*44:02,HLA-B*44:03,HLA-B*49:01
AELVEFLLL

SEQ ID NO: 7479 - protein, 11 aa, Homo sapiens
  Table 1.2; MAGEC2; ENSG00000046774; HLA -B*44:02,HLA-B*44:03
AELVEFLLLKY

SEQ ID NO: 7480 - protein, 8 aa, Homo sapiens
  Table 1.2; MAGEC2; ENSG00000046774; HLA -B*44:02,HLA-B*49:01
AEMLMIVI

SEQ ID NO: 7481 - protein, 10 aa, Homo sapiens
  Table 1.2; MAGEC2; ENSG00000046774; HLA -A*30:01,HLA-B*18:01,HLA-B*27:02,HLA-B*44:02,HLA-B*44:03, HLA-C*16:04
AEMLMIVIKY

SEQ ID NO: 7482 - protein, 11 aa, Homo sapiens
  Table 1.2; MAGEC2; ENSG00000046774; HLA -A*23:01,HLA-B*15:03
AKLNNTVPSSF

SEQ ID NO: 7483 - protein, 10 aa, Homo sapiens
  Table 1.2; MAGEC2; ENSG00000046774; HLA -A*02:07,HLA-A*23:01,HLA-B*15:01
ALIEVGPDHF

SEQ ID NO: 7484 - protein, 9 aa, Homo sapiens
  Table 1.2; MAGEC2; ENSG00000046774; HLA -A*02:01,HLA-A*02:03,HLA-A*02:04,HLA-A*02:07,HLA-B*13:02, HLA-B*55:01
ALKDVEERV

SEQ ID NO: 7485 - protein, 11 aa, Homo sapiens
  Table 1.2; MAGEC2; ENSG00000046774; HLA -A*02:01,HLA-A*02:03,HLA-B*55:01
ALKDVEERVQA

SEQ ID NO: 7486 - protein, 9 aa, Homo sapiens
  Table 1.2; MAGEC2; ENSG00000046774; HLA -A*02:07
ASEEVIWEV

SEQ ID NO: 7487 - protein, 8 aa, Homo sapiens
  Table 1.2; MAGEC2; ENSG00000046774; HLA -C*05:01
ASESLSVM

SEQ ID NO: 7488 - protein, 9 aa, Homo sapiens
  Table 1.2; MAGEC2; ENSG00000046774; HLA -A*01:01,HLA-A*26:01,HLA-A*29:02,HLA-A*30:02,HLA-A*32:01, HLA-B*15:01,HLA-B*15:03,HLA-B*46:01,HLA-B*58:01,HLA-C*02:02
ASSASSTLY

SEQ ID NO: 7489 - protein, 9 aa, Homo sapiens
  Table 1.2; MAGEC2; ENSG00000046774; HLA -A*01:01,HLA-A*03:01,HLA-A*11:01,HLA-A*23:01,HLA-A*29:02, HLA-A*30:02,HLA-A*32:01,HLA-B*27:02,HLA-B*57:01,HLA-B*58:01, HLA-C*02:02,HLA-C*16:04
ASSTLYLVF

SEQ ID NO: 7490 - protein, 11 aa, Homo sapiens
  Table 1.2; MAGEC2; ENSG00000046774; HLA -A*68:02
ATIDTADDATV

SEQ ID NO: 7491 - protein, 9 aa, Homo sapiens
  Table 1.2; MAGEC2; ENSG00000046774; HLA -B*15:01,HLA-B*40:01,HLA-B*46:01,HLA-B*58:01,HLA-C*01:02, HLA-C*03:03,HLA-C*03:04
ATVMASESL

SEQ ID NO: 7492 - protein, 9 aa, Homo sapiens
  Table 1.2; MAGEC2; ENSG00000046774; HLA -A*02:03,HLA-A*03:02,HLA-B*13:02,HLA-B*15:03,HLA-B*27:05, HLA-B*58:01
CVFANTVGL

SEQ ID NO: 7493 - protein, 9 aa, Homo sapiens
  Table 1.2; MAGEC2; ENSG00000046774; HLA -A*33:01,HLA-A*33:03,HLA-A*68:01,HLA-B*51:01,HLA-C*07:06
DALKDVEER

SEQ ID NO: 7494 - protein, 9 aa, Homo sapiens
  Table 1.2; MAGEC2; ENSG00000046774; HLA -A*30:01,HLA-B*18:01
DEGMPENSL

SEQ ID NO: 7495 - protein, 10 aa, Homo sapiens
  Table 1.2; MAGEC2; ENSG00000046774; HLA -B*40:01
DEGMPENSLL

SEQ ID NO: 7496 - protein, 8 aa, Homo sapiens
  Table 1.2; MAGEC2; ENSG00000046774; HLA -B*18:01
DEKVAELV

SEQ ID NO: 7497 - protein, 10 aa, Homo sapiens
  Table 1.2; MAGEC2; ENSG00000046774; HLA -B*18:01
DEKVAELVEF

SEQ ID NO: 7498 - protein, 10 aa, Homo sapiens
  Table 1.2; MAGEC2; ENSG00000046774; HLA -B*38:01,HLA-B*39:01,HLA-C*05:01
DNDSPTSVEL

SEQ ID NO: 7499 - protein, 8 aa, Homo sapiens
  Table 1.2; MAGEC2; ENSG00000046774; HLA -A*01:01
DSESSFTY

SEQ ID NO: 7500 - protein, 8 aa, Homo sapiens
  Table 1.2; MAGEC2; ENSG00000046774; HLA -B*08:01,HLA-B*51:01,HLA-C*01:02
DSPTSVEL

SEQ ID NO: 7501 - protein, 11 aa, Homo sapiens
  Table 1.2; MAGEC2; ENSG00000046774; HLA -A*33:01
DSPTSVELEDW

SEQ ID NO: 7502 - protein, 9 aa, Homo sapiens
  Table 1.2; MAGEC2; ENSG00000046774; HLA -A*25:01,HLA-A*26:01,HLA-A*68:01,HLA-B*35:01,HLA-B*35:03, HLA-B*39:01
DTADDATVM

SEQ ID NO: 7503 - protein, 10 aa, Homo sapiens
  Table 1.2; MAGEC2; ENSG00000046774; HLA -A*68:01
DTADDATVMA

SEQ ID NO: 7504 - protein, 10 aa, Homo sapiens
  Table 1.2; MAGEC2; ENSG00000046774; HLA -A*25:01
DVEERVQATI

SEQ ID NO: 7505 - protein, 8 aa, Homo sapiens
  Table 1.2; MAGEC2; ENSG00000046774; HLA -A*33:01,HLA-A*33:03
DYFPVILK

SEQ ID NO: 7506 - protein, 9 aa, Homo sapiens
  Table 1.2; MAGEC2; ENSG00000046774; HLA -A*24:02,HLA-A*29:02,HLA-A*31:01,HLA-A*33:01,HLA-A*33:03, HLA-A*68:01,HLA-A*68:02
DYFPVILKR

SEQ ID NO: 7507 - protein, 9 aa, Homo sapiens
  Table 1.2; MAGEC2; ENSG00000046774; HLA -C*05:01
EAEEPVTEA

SEQ ID NO: 7508 - protein, 9 aa, Homo sapiens
  Table 1.2; MAGEC2; ENSG00000046774; HLA -A*25:01,HLA-A*26:01,HLA-B*35:01,HLA-B*35:03,HLA-B*39:01, HLA-B*51:01,HLA-C*03:03,HLA-C*03:04
EASSASSTL

SEQ ID NO: 7509 - protein, 10 aa, Homo sapiens
  Table 1.2; MAGEC2; ENSG00000046774; HLA -A*01:01,HLA-A*25:01,HLA-A*26:01,HLA-A*30:02,HLA-A*68:01, HLA-B*35:01
EASSASSTLY

SEQ ID NO: 7510 - protein, 10 aa, Homo sapiens
  Table 1.2; MAGEC2; ENSG00000046774; HLA -A*30:01,HLA-B*40:01,HLA-B*44:03
EEASSASSTL

SEQ ID NO: 7511 - protein, 11 aa, Homo sapiens
  Table 1.2; MAGEC2; ENSG00000046774; HLA -A*26:01,HLA-B*18:01,HLA-B*44:02,HLA-B*44:03,HLA-C*16:04
EEASSASSTLY

SEQ ID NO: 7512 - protein, 11 aa, Homo sapiens
  Table 1.2; MAGEC2; ENSG00000046774; HLA -B*40:01
EEEASSASSTL

SEQ ID NO: 7513 - protein, 9 aa, Homo sapiens
  Table 1.2; MAGEC2; ENSG00000046774; HLA -B*49:01
EEEVPSGVI

SEQ ID NO: 7514 - protein, 9 aa, Homo sapiens
  Table 1.2; MAGEC2; ENSG00000046774; HLA -B*44:02,HLA-B*44:03
EEPVTEAEM

SEQ ID NO: 7515 - protein, 10 aa, Homo sapiens
  Table 1.2; MAGEC2; ENSG00000046774; HLA -B*40:01
EEPVTEAEML

SEQ ID NO: 7516 - protein, 8 aa, Homo sapiens
  Table 1.2; MAGEC2; ENSG00000046774; HLA -B*18:01
EEVIWEVL

SEQ ID NO: 7517 - protein, 8 aa, Homo sapiens
  Table 1.2; MAGEC2; ENSG00000046774; HLA -B*49:01
EEVPSGVI

SEQ ID NO: 7518 - protein, 11 aa, Homo sapiens
  Table 1.2; MAGEC2; ENSG00000046774; HLA -A*25:01,HLA-A*30:01,HLA-B*40:01,HLA-B*44:02,HLA-B*44:03
EEVPSGVIPNL

SEQ ID NO: 7519 - protein, 9 aa, Homo sapiens
  Table 1.2; MAGEC2; ENSG00000046774; HLA -A*33:01,HLA-A*33:03
EHFVYGEPR

SEQ ID NO: 7520 - protein, 10 aa, Homo sapiens
  Table 1.2; MAGEC2; ENSG00000046774; HLA -A*25:01,HLA-A*26:01,HLA-A*29:02
ELVEFLLLKY

SEQ ID NO: 7521 - protein, 9 aa, Homo sapiens
  Table 1.2; MAGEC2; ENSG00000046774; HLA -A*01:01,HLA-A*23:01,HLA-A*26:01,HLA-A*29:02,HLA-A*33:03, HLA-B*18:01,HLA-B*35:01,HLA-B*44:02,HLA-B*44:03,HLA-C*07:01
EMLMIVIKY

SEQ ID NO: 7522 - protein, 8 aa, Homo sapiens
  Table 1.2; MAGEC2; ENSG00000046774; HLA -B*35:01,HLA-B*35:03
EPVTEAEM

SEQ ID NO: 7523 - protein, 9 aa, Homo sapiens
  Table 1.2; MAGEC2; ENSG00000046774; HLA -B*35:03
EPVTEAEML

SEQ ID NO: 7524 - protein, 10 aa, Homo sapiens
  Table 1.2; MAGEC2; ENSG00000046774; HLA -B*35:03
EPVTEAEMLM

SEQ ID NO: 7525 - protein, 8 aa, Homo sapiens
  Table 1.2; MAGEC2; ENSG00000046774; HLA -B*08:01
ESIKKKVL

SEQ ID NO: 7526 - protein, 9 aa, Homo sapiens
  Table 1.2; MAGEC2; ENSG00000046774; HLA -A*68:02
EVGPDHFCV

SEQ ID NO: 7527 - protein, 10 aa, Homo sapiens
  Table 1.2; MAGEC2; ENSG00000046774; HLA -A*25:01,HLA-A*26:01
EVGPDHFCVF

SEQ ID NO: 7528 - protein, 9 aa, Homo sapiens
  Table 1.2; MAGEC2; ENSG00000046774; HLA -A*26:01,HLA-A*68:02
EVIWEVLNA

SEQ ID NO: 7529 - protein, 10 aa, Homo sapiens
  Table 1.2; MAGEC2; ENSG00000046774; HLA -A*25:01,HLA-A*26:01,HLA-A*68:02
EVIWEVLNAV

SEQ ID NO: 7530 - protein, 9 aa, Homo sapiens
  Table 1.2; MAGEC2; ENSG00000046774; HLA -A*25:01,HLA-A*26:01,HLA-A*29:02,HLA-A*30:02,HLA-A*33:01, HLA-A*33:03,HLA-A*68:01,HLA-B*15:01,HLA-B*15:03,HLA-B*35:01, HLA-B*39:01,HLA-B*44:03,HLA-C*07:04,HLA-C*07:06,HLA-C*12:03
EVLNAVGVY

SEQ ID NO: 7531 - protein, 10 aa, Homo sapiens
  Table 1.2; MAGEC2; ENSG00000046774; HLA -A*26:01,HLA-A*33:03,HLA-A*68:01,HLA-A*68:02
EVLNAVGVYA

SEQ ID NO: 7532 - protein, 9 aa, Homo sapiens
  Table 1.2; MAGEC2; ENSG00000046774; HLA -A*25:01,HLA-A*26:01,HLA-A*29:02
EVPHSSPPY

SEQ ID NO: 7533 - protein, 10 aa, Homo sapiens
  Table 1.2; MAGEC2; ENSG00000046774; HLA -A*25:01,HLA-A*26:01
EVPHSSPPYY

SEQ ID NO: 7534 - protein, 10 aa, Homo sapiens
  Table 1.2; MAGEC2; ENSG00000046774; HLA -A*23:01,HLA-A*24:02,HLA-A*25:01,HLA-A*26:01,HLA-A*33:03, HLA-A*68:01,HLA-A*68:02
EVPSGVIPNL

SEQ ID NO: 7535 - protein, 9 aa, Homo sapiens
  Table 1.2; MAGEC2; ENSG00000046774; HLA -A*02:01,HLA-A*02:03,HLA-A*02:04,HLA-A*68:02,HLA-B*13:02, HLA-B*55:01
FLAKLNNTV

SEQ ID NO: 7536 - protein, 8 aa, Homo sapiens
  Table 1.2; MAGEC2; ENSG00000046774; HLA -B*54:01
FPVILKRA

SEQ ID NO: 7537 - protein, 9 aa, Homo sapiens
  Table 1.2; MAGEC2; ENSG00000046774; HLA -A*01:01
FSEESSSQK

SEQ ID NO: 7538 - protein, 9 aa, Homo sapiens
  Table 1.2; MAGEC2; ENSG00000046774; HLA -C*03:03,HLA-C*03:04
FSTSSSLIL

SEQ ID NO: 7539 - protein, 9 aa, Homo sapiens
  Table 1.2; MAGEC2; ENSG00000046774; HLA -A*01:01,HLA-A*68:02,HLA-B*13:02
FTYTLDEKV

SEQ ID NO: 7540 - protein, 9 aa, Homo sapiens
  Table 1.2; MAGEC2; ENSG00000046774; HLA -A*02:01,HLA-A*02:03,HLA-A*02:04,HLA-A*02:07,HLA-A*03:01, HLA-A*25:01,HLA-A*26:01,HLA-A*32:01,HLA-A*68:02,HLA-B*15:03, HLA-B*35:03,HLA-B*40:01,HLA-B*46:01,HLA-B*51:01,HLA-B*55:01,
  HLA-B*58:01,HLA-C*02:02,HLA-C*03:03,HLA-C*03:04,HLA-C*07:04, HLA-C*12:03,HLA-C*16:01,HLA-C*16:02,HLA-C*16:04
FVYGEPREL

SEQ ID NO: 7541 - protein, 10 aa, Homo sapiens
  Table 1.2; MAGEC2; ENSG00000046774; HLA -A*02:01
FVYGEPRELL

SEQ ID NO: 7542 - protein, 10 aa, Homo sapiens
  Table 1.2; MAGEC2; ENSG00000046774; HLA -A*30:01,HLA-B*40:01,HLA-B*44:03,HLA-B*49:01
GEDTGTCQGL

SEQ ID NO: 7543 - protein, 11 aa, Homo sapiens
  Table 1.2; MAGEC2; ENSG00000046774; HLA -B*44:02,HLA-B*44:03
GEPRELLTKVW

SEQ ID NO: 7544 - protein, 9 aa, Homo sapiens
  Table 1.2; MAGEC2; ENSG00000046774; HLA -A*26:01,HLA-A*32:01,HLA-B*15:01,HLA-B*15:03,HLA-B*46:01, HLA-C*01:02
GLPDSESSF

SEQ ID NO: 7545 - protein, 11 aa, Homo sapiens
  Table 1.2; MAGEC2; ENSG00000046774; HLA -A*26:01,HLA-A*29:02,HLA-A*30:02,HLA-A*32:01,HLA-B*15:01, HLA-B*15:03,HLA-B*46:01
GLPDSESSFTY

SEQ ID NO: 7546 - protein, 9 aa, Homo sapiens
  Table 1.2; MAGEC2; ENSG00000046774; HLA -B*07:02,HLA-C*07:02
GPRAHSESI

SEQ ID NO: 7547 - protein, 10 aa, Homo sapiens
  Table 1.2; MAGEC2; ENSG00000046774; HLA -B*07:02,HLA-B*56:01
GPSQSPLSSC

SEQ ID NO: 7548 - protein, 10 aa, Homo sapiens
  Table 1.2; MAGEC2; ENSG00000046774; HLA -A*25:01
GVIPNLTESI

SEQ ID NO: 7549 - protein, 9 aa, Homo sapiens
  Table 1.2; MAGEC2; ENSG00000046774; HLA -A*32:01,HLA-B*15:01
GVYAGREHF

SEQ ID NO: 7550 - protein, 10 aa, Homo sapiens
  Table 1.2; MAGEC2; ENSG00000046774; HLA -A*02:01,HLA-A*02:03
GVYAGREHFV

SEQ ID NO: 7551 - protein, 11 aa, Homo sapiens
  Table 1.2; MAGEC2; ENSG00000046774; HLA -A*03:01,HLA-A*29:02,HLA-A*30:02
GVYAGREHFVY

SEQ ID NO: 7552 - protein, 10 aa, Homo sapiens
  Table 1.2; MAGEC2; ENSG00000046774; HLA -B*35:03
HPTDEEEEEA

SEQ ID NO: 7553 - protein, 9 aa, Homo sapiens
  Table 1.2; MAGEC2; ENSG00000046774; HLA -B*57:01
HSSPPYYEF

SEQ ID NO: 7554 - protein, 8 aa, Homo sapiens
  Table 1.2; MAGEC2; ENSG00000046774; HLA -B*18:01
IEVGPDHF

SEQ ID NO: 7555 - protein, 9 aa, Homo sapiens
  Table 1.2; MAGEC2; ENSG00000046774; HLA -A*03:01
IILSVIFIK

SEQ ID NO: 7556 - protein, 8 aa, Homo sapiens
  Table 1.2; MAGEC2; ENSG00000046774; HLA -B*51:01,HLA-B*56:01
IPNLTESI

SEQ ID NO: 7557 - protein, 9 aa, Homo sapiens
  Table 1.2; MAGEC2; ENSG00000046774; HLA -B*56:01
IPSSPPQGP

SEQ ID NO: 7558 - protein, 9 aa, Homo sapiens
  Table 1.2; MAGEC2; ENSG00000046774; HLA -B*57:01
IVIKYKDYF

SEQ ID NO: 7559 - protein, 9 aa, Homo sapiens
  Table 1.2; MAGEC2; ENSG00000046774; HLA -A*30:01,HLA-B*40:02
KDVEERVQA

SEQ ID NO: 7560 - protein, 11 aa, Homo sapiens
  Table 1.2; MAGEC2; ENSG00000046774; HLA -A*30:01
KDVEERVQATI

SEQ ID NO: 7561 - protein, 8 aa, Homo sapiens
  Table 1.2; MAGEC2; ENSG00000046774; HLA -B*37:01
KDYFPVIL

SEQ ID NO: 7562 - protein, 9 aa, Homo sapiens
  Table 1.2; MAGEC2; ENSG00000046774; HLA -A*03:01,HLA-A*03:02
KDYFPVILK

SEQ ID NO: 7563 - protein, 10 aa, Homo sapiens
  Table 1.2; MAGEC2; ENSG00000046774; HLA -A*03:01,HLA-A*03:02,HLA-A*23:01,HLA-A*24:02,HLA-A*30:02, HLA-A*32:01,HLA-B*15:01,HLA-B*15:03,HLA-B*46:01,HLA-C*01:02
KLNNTVPSSF

SEQ ID NO: 7564 - protein, 9 aa, Homo sapiens
  Table 1.2; MAGEC2; ENSG00000046774; HLA -A*02:01,HLA-A*02:03,HLA-A*02:04,HLA-A*02:07,HLA-A*68:02, HLA-B*27:05,HLA-B*58:01
KVAELVEFL

SEQ ID NO: 7565 - protein, 10 aa, Homo sapiens
  Table 1.2; MAGEC2; ENSG00000046774; HLA -A*02:04
KVAELVEFLL

SEQ ID NO: 7566 - protein, 8 aa, Homo sapiens
  Table 1.2; MAGEC2; ENSG00000046774; HLA -A*03:01
KVLEFLAK

SEQ ID NO: 7567 - protein, 9 aa, Homo sapiens
  Table 1.2; MAGEC2; ENSG00000046774; HLA -A*02:01,HLA-A*02:03,HLA-A*02:04,HLA-A*02:07,HLA-A*03:01, HLA-A*24:02,HLA-A*31:01,HLA-B*57:01
KVLEFLAKL

SEQ ID NO: 7568 - protein, 9 aa, Homo sapiens
  Table 1.2; MAGEC2; ENSG00000046774; HLA -A*02:04
KVWVQGHYL

SEQ ID NO: 7569 - protein, 11 aa, Homo sapiens
  Table 1.2; MAGEC2; ENSG00000046774; HLA -A*03:01,HLA-A*29:02
KVWVQGHYLEY

SEQ ID NO: 7570 - protein, 9 aa, Homo sapiens
  Table 1.2; MAGEC2; ENSG00000046774; HLA -A*24:02
KYKDYFPVI

SEQ ID NO: 7571 - protein, 10 aa, Homo sapiens
  Table 1.2; MAGEC2; ENSG00000046774; HLA -A*24:02
KYKDYFPVIL

SEQ ID NO: 7572 - protein, 8 aa, Homo sapiens
  Table 1.2; MAGEC2; ENSG00000046774; HLA -B*08:01,HLA-B*51:01
LAKLNNTV

SEQ ID NO: 7573 - protein, 8 aa, Homo sapiens
  Table 1.2; MAGEC2; ENSG00000046774; HLA -B*37:01
LDEKVAEL

SEQ ID NO: 7574 - protein, 8 aa, Homo sapiens
  Table 1.2; MAGEC2; ENSG00000046774; HLA -A*02:04
LLFGLALI

SEQ ID NO: 7575 - protein, 10 aa, Homo sapiens
  Table 1.2; MAGEC2; ENSG00000046774; HLA -A*02:01,HLA-A*02:03,HLA-A*02:04,HLA-A*02:07
LLFGLALIEV

SEQ ID NO: 7576 - protein, 8 aa, Homo sapiens
  Table 1.2; MAGEC2; ENSG00000046774; HLA -B*55:01,HLA-C*05:01
LPDSESSF

SEQ ID NO: 7577 - protein, 10 aa, Homo sapiens
  Table 1.2; MAGEC2; ENSG00000046774; HLA -A*01:01,HLA-B*35:01,HLA-B*55:01,HLA-C*03:03
LPDSESSFTY

SEQ ID NO: 7578 - protein, 10 aa, Homo sapiens
  Table 1.2; MAGEC2; ENSG00000046774; HLA -B*57:01,HLA-B*58:01
LSVMSSNVSF

SEQ ID NO: 7579 - protein, 11 aa, Homo sapiens
  Table 1.2; MAGEC2; ENSG00000046774; HLA -C*05:01
LTDEGSDDEGM

SEQ ID NO: 7580 - protein, 9 aa, Homo sapiens
  Table 1.2; MAGEC2; ENSG00000046774; HLA -A*01:01,HLA-A*29:02
LVEFLLLKY

SEQ ID NO: 7581 - protein, 8 aa, Homo sapiens
  Table 1.2; MAGEC2; ENSG00000046774; HLA -A*25:01,HLA-A*26:01,HLA-A*32:01,HLA-B*39:01,HLA-B*46:01, HLA-C*05:01,HLA-C*12:03
LVFSPSSF

SEQ ID NO: 7582 - protein, 10 aa, Homo sapiens
  Table 1.2; MAGEC2; ENSG00000046774; HLA -A*23:01,HLA-A*24:02,HLA-A*29:02,HLA-C*14:02
LYLVFSPSSF

SEQ ID NO: 7583 - protein, 8 aa, Homo sapiens
  Table 1.2; MAGEC2; ENSG00000046774; HLA -B*51:01
MASESLSV

SEQ ID NO: 7584 - protein, 9 aa, Homo sapiens
  Table 1.2; MAGEC2; ENSG00000046774; HLA -A*25:01,HLA-A*26:01,HLA-A*68:01,HLA-B*07:02,HLA-B*15:01, HLA-B*15:03,HLA-B*27:05,HLA-B*35:01,HLA-B*35:03,HLA-B*38:01, HLA-B*39:01,HLA-B*46:01,HLA-B*51:01,HLA-B*54:01,HLA-B*55:01,
  HLA-B*58:01,HLA-C*02:02,HLA-C*03:03,HLA-C*03:04,HLA-C*05:01, HLA-C*07:04,HLA-C*07:06,HLA-C*12:03,HLA-C*14:02,HLA-C*16:01, HLA-C*16:02,HLA-C*16:04
MASESLSVM

SEQ ID NO: 7585 - protein, 9 aa, Homo sapiens
  Table 1.2; MAGEC2; ENSG00000046774; HLA -B*18:01
MELLFGLAL

SEQ ID NO: 7586 - protein, 8 aa, Homo sapiens
  Table 1.2; MAGEC2; ENSG00000046774; HLA -B*18:01,HLA-C*07:01
MLMIVIKY

SEQ ID NO: 7587 - protein, 9 aa, Homo sapiens
  Table 1.2; MAGEC2; ENSG00000046774; HLA -B*35:03,HLA-B*51:01
MPENSLLII

SEQ ID NO: 7588 - protein, 11 aa, Homo sapiens
  Table 1.2; MAGEC2; ENSG00000046774; HLA -B*35:01,HLA-B*35:03
MPENSLLIIIL

SEQ ID NO: 7589 - protein, 9 aa, Homo sapiens
  Table 1.2; MAGEC2; ENSG00000046774; HLA -B*07:02,HLA-B*35:01,HLA-B*35:03,HLA-B*54:01,HLA-B*55:01
MPPVPGVPF

SEQ ID NO: 7590 - protein, 9 aa, Homo sapiens
  Table 1.2; MAGEC2; ENSG00000046774; HLA -A*26:01,HLA-A*33:01,HLA-A*33:03,HLA-A*68:01,HLA-A*68:02, HLA-B*27:02,HLA-C*07:06
NAVGVYAGR

SEQ ID NO: 7591 - protein, 9 aa, Homo sapiens
  Table 1.2; MAGEC2; ENSG00000046774; HLA -A*30:01,HLA-B*27:05,HLA-B*35:03,HLA-B*37:01,HLA-B*38:01, HLA-B*39:01,HLA-B*40:01
NDSPTSVEL

SEQ ID NO: 7592 - protein, 10 aa, Homo sapiens
  Table 1.2; MAGEC2; ENSG00000046774; HLA -A*25:01,HLA-A*26:01,HLA-B*57:01,HLA-B*58:01
NTVPSSFPSW

SEQ ID NO: 7593 - protein, 10 aa, Homo sapiens
  Table 1.2; MAGEC2; ENSG00000046774; HLA -C*05:01
NVDNDSPTSV

SEQ ID NO: 7594 - protein, 9 aa, Homo sapiens
  Table 1.2; MAGEC2; ENSG00000046774; HLA -A*03:01,HLA-A*03:02,HLA-A*11:01
RAHSESIKK

SEQ ID NO: 7595 - protein, 10 aa, Homo sapiens
  Table 1.2; MAGEC2; ENSG00000046774; HLA -B*57:01
RAREFMELLF

SEQ ID NO: 7596 - protein, 10 aa, Homo sapiens
  Table 1.2; MAGEC2; ENSG00000046774; HLA -A*30:02,HLA-B*44:03
REVPHSSPPY

SEQ ID NO: 7597 - protein, 11 aa, Homo sapiens
  Table 1.2; MAGEC2; ENSG00000046774; HLA -A*30:02,HLA-B*44:03
REVPHSSPPYY

SEQ ID NO: 7598 - protein, 8 aa, Homo sapiens
  Table 1.2; MAGEC2; ENSG00000046774; HLA -B*37:01
SASSTLYL

SEQ ID NO: 7599 - protein, 9 aa, Homo sapiens
  Table 1.2; MAGEC2; ENSG00000046774; HLA -A*02:01,HLA-A*02:04,HLA-A*68:02,HLA-B*13:02,HLA-C*02:02
SASSTLYLV

SEQ ID NO: 7600 - protein, 10 aa, Homo sapiens
  Table 1.2; MAGEC2; ENSG00000046774; HLA -B*35:01
SASSTLYLVF

SEQ ID NO: 7601 - protein, 9 aa, Homo sapiens
  Table 1.2; MAGEC2; ENSG00000046774; HLA -A*30:01,HLA-B*40:01
SEEVIWEVL

SEQ ID NO: 7602 - protein, 9 aa, Homo sapiens
  Table 1.2; MAGEC2; ENSG00000046774; HLA -B*37:01,HLA-B*44:03
SESIKKKVL

SEQ ID NO: 7603 - protein, 9 aa, Homo sapiens
  Table 1.2; MAGEC2; ENSG00000046774; HLA -A*23:01,HLA-A*30:01,HLA-B*18:01,HLA-B*27:02,HLA-B*37:01, HLA-B*38:01,HLA-B*39:01,HLA-B*40:01,HLA-B*40:02,HLA-B*44:02, HLA-B*44:03,HLA-B*49:01,HLA-C*16:04
SESSFTYTL

SEQ ID NO: 7604 - protein, 8 aa, Homo sapiens
  Table 1.2; MAGEC2; ENSG00000046774; HLA -C*14:02
SFSTSSSL

SEQ ID NO: 7605 - protein, 9 aa, Homo sapiens
  Table 1.2; MAGEC2; ENSG00000046774; HLA -A*23:01
SFSTSSSLI

SEQ ID NO: 7606 - protein, 9 aa, Homo sapiens
  Table 1.2; MAGEC2; ENSG00000046774; HLA -B*08:01
SIKKKVLEF

SEQ ID NO: 7607 - protein, 9 aa, Homo sapiens
  Table 1.2; MAGEC2; ENSG00000046774; HLA -A*02:01,HLA-A*02:03,HLA-A*02:04,HLA-A*02:07
SLLIIILSV

SEQ ID NO: 7608 - protein, 9 aa, Homo sapiens
  Table 1.2; MAGEC2; ENSG00000046774; HLA -A*02:01,HLA-A*02:03,HLA-B*13:02
SLSVMSSNV

SEQ ID NO: 7609 - protein, 9 aa, Homo sapiens
  Table 1.2; MAGEC2; ENSG00000046774; HLA -B*56:01
SPSSFSTSS

SEQ ID NO: 7610 - protein, 11 aa, Homo sapiens
  Table 1.2; MAGEC2; ENSG00000046774; HLA -B*07:02,HLA-B*35:01,HLA-B*35:03,HLA-B*56:01,HLA-C*07:02
SPSSFSTSSSL

SEQ ID NO: 7611 - protein, 8 aa, Homo sapiens
  Table 1.2; MAGEC2; ENSG00000046774; HLA -A*30:02
SSASSTLY

SEQ ID NO: 7612 - protein, 9 aa, Homo sapiens
  Table 1.2; MAGEC2; ENSG00000046774; HLA -A*01:01,HLA-A*03:01,HLA-A*11:01
SSASSTLYL

SEQ ID NO: 7613 - protein, 11 aa, Homo sapiens
  Table 1.2; MAGEC2; ENSG00000046774; HLA -B*57:01
SSASSTLYLVF

SEQ ID NO: 7614 - protein, 11 aa, Homo sapiens
  Table 1.2; MAGEC2; ENSG00000046774; HLA -A*03:01,HLA-A*03:02,HLA-A*11:01,HLA-A*68:01,HLA-B*27:02, HLA-B*27:05,HLA-C*07:06
SSFSEESSSQK

SEQ ID NO: 7615 - protein, 9 aa, Homo sapiens
  Table 1.2; MAGEC2; ENSG00000046774; HLA -A*32:01,HLA-B*07:02,HLA-B*15:01,HLA-B*15:03,HLA-B*40:01, HLA-B*46:01,HLA-B*58:01,HLA-C*01:02,HLA-C*03:03,HLA-C*03:04, HLA-C*07:02
SSFSTSSSL

SEQ ID NO: 7616 - protein, 10 aa, Homo sapiens
  Table 1.2; MAGEC2; ENSG00000046774; HLA -A*11:01
SSFTYTLDEK

SEQ ID NO: 7617 - protein, 10 aa, Homo sapiens
  Table 1.2; MAGEC2; ENSG00000046774; HLA -B*57:01
SSPPYYEFLW

SEQ ID NO: 7618 - protein, 9 aa, Homo sapiens
  Table 1.2; MAGEC2; ENSG00000046774; HLA -A*03:02,HLA-A*11:01,HLA-A*23:01,HLA-A*24:02,HLA-A*25:01, HLA-A*26:01,HLA-A*29:02,HLA-A*30:02,HLA-A*31:01,HLA-A*32:01, HLA-B*07:02,HLA-B*08:01,HLA-B*13:02,HLA-B*15:01,HLA-B*15:03,
  HLA-B*35:01,HLA-B*35:03,HLA-B*37:01,HLA-B*38:01,HLA-B*39:01, HLA-B*44:03,HLA-B*46:01,HLA-B*55:01,HLA-B*57:01,HLA-B*58:01, HLA-C*01:02,HLA-C*02:02,HLA-C*03:03,HLA-C*07:02,HLA-C*07:04, HLA-C*07:06,HLA-C*14:02,HLA-C*16:04
SVMSSNVSF

SEQ ID NO: 7619 - protein, 8 aa, Homo sapiens
  Table 1.2; MAGEC2; ENSG00000046774; HLA -A*32:01,HLA-B*35:01,HLA-B*35:03,HLA-B*39:01,HLA-B*55:01, HLA-C*03:03,HLA-C*03:04,HLA-C*04:01,HLA-C*05:01,HLA-C*07:04
TADDATVM

SEQ ID NO: 7620 - protein, 9 aa, Homo sapiens
  Table 1.2; MAGEC2; ENSG00000046774; HLA -B*35:03,HLA-B*39:01,HLA-B*54:01,HLA-C*05:01
TADDATVMA

SEQ ID NO: 7621 - protein, 8 aa, Homo sapiens
  Table 1.2; MAGEC2; ENSG00000046774; HLA -B*49:01
TEAEMLMI

SEQ ID NO: 7622 - protein, 9 aa, Homo sapiens
  Table 1.2; MAGEC2; ENSG00000046774; HLA -B*18:01,HLA-B*49:01
TEAEMLMIV

SEQ ID NO: 7623 - protein, 10 aa, Homo sapiens
  Table 1.2; MAGEC2; ENSG00000046774; HLA -A*30:01,HLA-B*49:01
TEAEMLMIVI

SEQ ID NO: 7624 - protein, 10 aa, Homo sapiens
  Table 1.2; MAGEC2; ENSG00000046774; HLA -C*05:01
TIDTADDATV

SEQ ID NO: 7625 - protein, 11 aa, Homo sapiens
  Table 1.2; MAGEC2; ENSG00000046774; HLA -B*35:03,HLA-B*55:01,HLA-C*05:01
TIDTADDATVM

SEQ ID NO: 7626 - protein, 9 aa, Homo sapiens
  Table 1.2; MAGEC2; ENSG00000046774; HLA -A*02:01,HLA-A*02:03,HLA-A*02:04,HLA-A*02:07,HLA-A*32:01, HLA-B*08:01,HLA-B*35:03,HLA-B*38:01,HLA-B*39:01,HLA-B*55:01, HLA-C*04:01,HLA-C*05:01
TLDEKVAEL

SEQ ID NO: 7627 - protein, 8 aa, Homo sapiens
  Table 1.2; MAGEC2; ENSG00000046774; HLA -B*35:03
TVMASESL

SEQ ID NO: 7628 - protein, 10 aa, Homo sapiens
  Table 1.2; MAGEC2; ENSG00000046774; HLA -A*02:03,HLA-A*25:01,HLA-B*13:02
TVMASESLSV

SEQ ID NO: 7629 - protein, 11 aa, Homo sapiens
  Table 1.2; MAGEC2; ENSG00000046774; HLA -A*25:01,HLA-A*26:01,HLA-B*15:01,HLA-B*35:01,HLA-B*35:03, HLA-C*01:02,HLA-C*04:01,HLA-C*07:02,HLA-C*07:04,HLA-C*14:02
TVMASESLSVM

SEQ ID NO: 7630 - protein, 9 aa, Homo sapiens
  Table 1.2; MAGEC2; ENSG00000046774; HLA -A*02:07,HLA-A*24:02,HLA-A*25:01,HLA-A*26:01,HLA-A*32:01, HLA-B*57:01,HLA-B*58:01
TVPSSFPSW

SEQ ID NO: 7631 - protein, 8 aa, Homo sapiens
  Table 1.2; MAGEC2; ENSG00000046774; HLA -C*05:01
VAELVEFL

SEQ ID NO: 7632 - protein, 9 aa, Homo sapiens
  Table 1.2; MAGEC2; ENSG00000046774; HLA -A*02:01,HLA-A*02:03,HLA-A*30:01,HLA-A*32:01,HLA-B*13:02, HLA-B*37:01,HLA-B*49:01,HLA-B*56:01,HLA-C*12:03,HLA-C*16:04
VDNDSPTSV

SEQ ID NO: 7633 - protein, 9 aa, Homo sapiens
  Table 1.2; MAGEC2; ENSG00000046774; HLA -A*30:01,HLA-B*40:01,HLA-B*40:02,HLA-B*44:02,HLA-B*44:03, HLA-B*49:01
VEERVQATI

SEQ ID NO: 7634 - protein, 8 aa, Homo sapiens
  Table 1.2; MAGEC2; ENSG00000046774; HLA -B*18:01,HLA-B*44:02,HLA-B*44:03
VEFLLLKY

SEQ ID NO: 7635 - protein, 8 aa, Homo sapiens
  Table 1.2; MAGEC2; ENSG00000046774; HLA -A*23:01,HLA-C*14:02
VFANTVGL

SEQ ID NO: 7636 - protein, 9 aa, Homo sapiens
  Table 1.2; MAGEC2; ENSG00000046774; HLA -A*24:02
VGPDHFCVF

SEQ ID NO: 7637 - protein, 9 aa, Homo sapiens
  Table 1.2; MAGEC2; ENSG00000046774; HLA -A*02:07,HLA-A*24:02,HLA-C*01:02
VIPNLTESI

SEQ ID NO: 7638 - protein, 9 aa, Homo sapiens
  Table 1.2; MAGEC2; ENSG00000046774; HLA -A*02:01,HLA-A*02:03,HLA-A*02:04,HLA-A*02:07,HLA-B*13:02, HLA-B*51:01,HLA-B*55:01
VIWEVLNAV

SEQ ID NO: 7639 - protein, 11 aa, Homo sapiens
  Table 1.2; MAGEC2; ENSG00000046774; HLA -A*02:01,HLA-A*02:07
VIWEVLNAVGV

SEQ ID NO: 7640 - protein, 8 aa, Homo sapiens
  Table 1.2; MAGEC2; ENSG00000046774; HLA -A*03:01,HLA-A*30:02,HLA-A*32:01,HLA-B*15:01,HLA-B*15:03, HLA-B*39:01,HLA-B*46:01,HLA-C*07:04
VLNAVGVY

SEQ ID NO: 7641 - protein, 9 aa, Homo sapiens
  Table 1.2; MAGEC2; ENSG00000046774; HLA -A*02:01,HLA-A*02:03,HLA-A*02:04,HLA-A*02:07,HLA-A*03:01, HLA-A*03:02,HLA-B*13:02,HLA-B*46:01,HLA-B*56:01
VLNAVGVYA

SEQ ID NO: 7642 - protein, 11 aa, Homo sapiens
  Table 1.2; MAGEC2; ENSG00000046774; HLA -A*31:01
VLNAVGVYAGR

SEQ ID NO: 7643 - protein, 9 aa, Homo sapiens
  Table 1.2; MAGEC2; ENSG00000046774; HLA -A*02:01,HLA-A*02:03,HLA-B*13:02,HLA-B*55:01
VMASESLSV

SEQ ID NO: 7644 - protein, 10 aa, Homo sapiens
  Table 1.2; MAGEC2; ENSG00000046774; HLA -B*15:01,HLA-B*46:01,HLA-C*14:02
VMASESLSVM

SEQ ID NO: 7645 - protein, 8 aa, Homo sapiens
  Table 1.2; MAGEC2; ENSG00000046774; HLA -A*23:01,HLA-A*32:01,HLA-B*37:01,HLA-B*46:01,HLA-C*04:01
VMSSNVSF

SEQ ID NO: 7646 - protein, 9 aa, Homo sapiens
  Table 1.2; MAGEC2; ENSG00000046774; HLA -B*51:01,HLA-B*56:01
VPGVPFRNV

SEQ ID NO: 7647 - protein, 8 aa, Homo sapiens
  Table 1.2; MAGEC2; ENSG00000046774; HLA -A*30:02,HLA-B*35:01
VPHSSPPY

SEQ ID NO: 7648 - protein, 9 aa, Homo sapiens
  Table 1.2; MAGEC2; ENSG00000046774; HLA -A*30:02,HLA-B*35:01
VPHSSPPYY

SEQ ID NO: 7649 - protein, 11 aa, Homo sapiens
  Table 1.2; MAGEC2; ENSG00000046774; HLA -B*35:01
VPHSSPPYYEF

SEQ ID NO: 7650 - protein, 9 aa, Homo sapiens
  Table 1.2; MAGEC2; ENSG00000046774; HLA -A*02:01,HLA-A*02:04,HLA-A*02:07,HLA-A*23:01,HLA-A*24:02, HLA-A*30:01,HLA-A*68:01,HLA-A*68:02,HLA-B*07:02,HLA-B*35:01, HLA-B*35:03,HLA-B*38:01,HLA-B*39:01,HLA-B*51:01,HLA-B*54:01,
  HLA-B*55:01,HLA-B*56:01,HLA-B*58:01,HLA-C*07:02,HLA-C*07:04, HLA-C*16:01,HLA-C*16:02
VPSGVIPNL

SEQ ID NO: 7651 - protein, 10 aa, Homo sapiens
  Table 1.2; MAGEC2; ENSG00000046774; HLA -B*56:01
VPSGVIPNLT

SEQ ID NO: 7652 - protein, 8 aa, Homo sapiens
  Table 1.2; MAGEC2; ENSG00000046774; HLA -B*51:01
VPSSFPSW

SEQ ID NO: 7653 - protein, 8 aa, Homo sapiens
  Table 1.2; MAGEC2; ENSG00000046774; HLA -A*29:02,HLA-A*30:02,HLA-A*32:01,HLA-B*15:01,HLA-B*15:03, HLA-C*07:01
VQGHYLEY

SEQ ID NO: 7654 - protein, 10 aa, Homo sapiens
  Table 1.2; MAGEC2; ENSG00000046774; HLA -A*29:02
VWVQGHYLEY

SEQ ID NO: 7655 - protein, 9 aa, Homo sapiens
  Table 1.2; MAGEC2; ENSG00000046774; HLA -A*24:02
VYAGREHFV

SEQ ID NO: 7656 - protein, 10 aa, Homo sapiens
  Table 1.2; MAGEC2; ENSG00000046774; HLA -A*29:02
VYAGREHFVY

SEQ ID NO: 7657 - protein, 8 aa, Homo sapiens
  Table 1.2; MAGEC2; ENSG00000046774; HLA -A*23:01,HLA-A*24:02,HLA-C*14:02,HLA-C*16:01
VYGEPREL

SEQ ID NO: 7658 - protein, 9 aa, Homo sapiens
  Table 1.2; MAGEC2; ENSG00000046774; HLA -A*23:01,HLA-A*24:02
VYGEPRELL

SEQ ID NO: 7659 - protein, 11 aa, Homo sapiens
  Table 1.2; MAGEC2; ENSG00000046774; HLA -A*33:01
VYGEPRELLTK

SEQ ID NO: 7660 - protein, 9 aa, Homo sapiens
  Table 1.2; MAGEC2; ENSG00000046774; HLA -A*30:01,HLA-B*49:01
WEVLNAVGV

SEQ ID NO: 7661 - protein, 9 aa, Homo sapiens
  Table 1.2; MAGEC2; ENSG00000046774; HLA -A*01:01,HLA-A*26:01,HLA-A*29:02,HLA-A*30:02
WVQGHYLEY

SEQ ID NO: 7662 - protein, 9 aa, Homo sapiens
  Table 1.2; MAGEC2; ENSG00000046774; HLA -A*29:02
YAGREHFVY

SEQ ID NO: 7663 - protein, 9 aa, Homo sapiens
  Table 1.2; MAGEC2; ENSG00000046774; HLA -B*49:01
YEAEEPVTE

SEQ ID NO: 7664 - protein, 10 aa, Homo sapiens
  Table 1.2; MAGEC2; ENSG00000046774; HLA -A*30:01,HLA-B*40:01,HLA-B*49:01
YEAEEPVTEA

SEQ ID NO: 7665 - protein, 8 aa, Homo sapiens
  Table 1.2; MAGEC2; ENSG00000046774; HLA -A*33:03
YFPVILKR

SEQ ID NO: 7666 - protein, 9 aa, Homo sapiens
  Table 1.2; MAGEC2; ENSG00000046774; HLA -A*01:01,HLA-A*02:03,HLA-A*02:07,HLA-A*23:01,HLA-A*24:02, HLA-A*25:01,HLA-A*26:01,HLA-A*29:02,HLA-B*15:01,HLA-B*15:03, HLA-B*46:01,HLA-C*02:02,HLA-C*07:04,HLA-C*14:02
YLVFSPSSF

SEQ ID NO: 7667 - protein, 10 aa, Homo sapiens
  Table 1.2; MAGEC2; ENSG00000046774; HLA -A*01:01,HLA-A*02:01,HLA-A*02:03,HLA-A*02:04,HLA-A*25:01, HLA-A*26:01,HLA-A*68:02
YTLDEKVAEL

SEQ ID NO: 7668 - protein, 11 aa, Homo sapiens
  Table 1.2; MAGEC2; ENSG00000046774; HLA -A*68:02
YTLDEKVAELV

SEQ ID NO: 7669 - protein, 10 aa, Homo sapiens
  Table 1.2; MORC1; ENSG00000114487; HLA -B*40:01,HLA-B*49:01
AELMQQFDVI

SEQ ID NO: 7670 - protein, 9 aa, Homo sapiens
  Table 1.2; MORC1; ENSG00000114487; HLA -A*30:01,HLA-B*18:01,HLA-B*27:02,HLA-B*37:01,HLA-B*40:01, HLA-B*44:02,HLA-B*44:03,HLA-B*49:01,HLA-C*16:04
AEQQPQPQF

SEQ ID NO: 7671 - protein, 10 aa, Homo sapiens
  Table 1.2; MORC1; ENSG00000114487; HLA -B*44:02,HLA-B*44:03,HLA-B*49:01
AEQQPQPQFI

SEQ ID NO: 7672 - protein, 9 aa, Homo sapiens
  Table 1.2; MORC1; ENSG00000114487; HLA -A*30:01,HLA-B*37:01,HLA-B*40:02,HLA-B*49:01
AERLDVFSV

SEQ ID NO: 7673 - protein, 9 aa, Homo sapiens
  Table 1.2; MORC1; ENSG00000114487; HLA -B*49:01
AERSQRSQI

SEQ ID NO: 7674 - protein, 10 aa, Homo sapiens
  Table 1.2; MORC1; ENSG00000114487; HLA -B*40:01,HLA-B*44:02,HLA-B*44:03,HLA-B*49:01
AESILKEAQI

SEQ ID NO: 7675 - protein, 9 aa, Homo sapiens
  Table 1.2; MORC1; ENSG00000114487; HLA -A*32:01,HLA-B*15:01,HLA-B*15:03,HLA-B*37:01,HLA-B*46:01, HLA-B*55:01,HLA-C*02:02,HLA-C*16:01
AGAERLDVF

SEQ ID NO: 7676 - protein, 11 aa, Homo sapiens
  Table 1.2; MORC1; ENSG00000114487; HLA -B*57:01
AGALEDFPARW

SEQ ID NO: 7677 - protein, 9 aa, Homo sapiens
  Table 1.2; MORC1; ENSG00000114487; HLA -A*02:01,HLA-A*02:03,HLA-A*02:04,HLA-A*02:07,HLA-B*55:01
ALAELLDNA

SEQ ID NO: 7678 - protein, 10 aa, Homo sapiens
  Table 1.2; MORC1; ENSG00000114487; HLA -B*27:02
ALAELLDNAR

SEQ ID NO: 7679 - protein, 9 aa, Homo sapiens
  Table 1.2; MORC1; ENSG00000114487; HLA -A*01:01,HLA-A*02:07,HLA-B*44:02,HLA-B*44:03
ALEDFPARW

SEQ ID NO: 7680 - protein, 11 aa, Homo sapiens
  Table 1.2; MORC1; ENSG00000114487; HLA -A*02:04
ALEDFPARWSF

SEQ ID NO: 7681 - protein, 10 aa, Homo sapiens
  Table 1.2; MORC1; ENSG00000114487; HLA -A*03:02
ALEDVEAKQK

SEQ ID NO: 7682 - protein, 9 aa, Homo sapiens
  Table 1.2; MORC1; ENSG00000114487; HLA -A*02:01
ALLKEDNLL

SEQ ID NO: 7683 - protein, 9 aa, Homo sapiens
  Table 1.2; MORC1; ENSG00000114487; HLA -A*02:04
ALLLQKLQL

SEQ ID NO: 7684 - protein, 9 aa, Homo sapiens
  Table 1.2; MORC1; ENSG00000114487; HLA -A*02:03,HLA-A*02:07
ALPENVKLA

SEQ ID NO: 7685 - protein, 9 aa, Homo sapiens
  Table 1.2; MORC1; ENSG00000114487; HLA -A*03:01,HLA-A*03:02,HLA-A*11:01
AMELSIIYK

SEQ ID NO: 7686 - protein, 10 aa, Homo sapiens
  Table 1.2; MORC1; ENSG00000114487; HLA -A*01:01,HLA-A*29:02,HLA-A*30:02
AMELSIIYKY

SEQ ID NO: 7687 - protein, 8 aa, Homo sapiens
  Table 1.2; MORC1; ENSG00000114487; HLA -B*08:01
AMKRSSSL

SEQ ID NO: 7688 - protein, 8 aa, Homo sapiens
  Table 1.2; MORC1; ENSG00000114487; HLA -B*37:01
ANSTTHSF

SEQ ID NO: 7689 - protein, 8 aa, Homo sapiens
  Table 1.2; MORC1; ENSG00000114487; HLA -B*13:02,HLA-B*27:05
AQAASWEM

SEQ ID NO: 7690 - protein, 9 aa, Homo sapiens
  Table 1.2; MORC1; ENSG00000114487; HLA -A*11:01
AQPTEGCLK

SEQ ID NO: 7691 - protein, 9 aa, Homo sapiens
  Table 1.2; MORC1; ENSG00000114487; HLA -B*38:01
ARDAGAERL

SEQ ID NO: 7692 - protein, 10 aa, Homo sapiens
  Table 1.2; MORC1; ENSG00000114487; HLA -B*27:05
ARVSVSGSCK

SEQ ID NO: 7693 - protein, 9 aa, Homo sapiens
  Table 1.2; MORC1; ENSG00000114487; HLA -A*11:01,HLA-A*31:01
ASDIIYFGR

SEQ ID NO: 7694 - protein, 9 aa, Homo sapiens
  Table 1.2; MORC1; ENSG00000114487; HLA -A*03:01,HLA-A*03:02,HLA-A*11:01
ASSQSTPVK

SEQ ID NO: 7695 - protein, 9 aa, Homo sapiens
  Table 1.2; MORC1; ENSG00000114487; HLA -B*07:02,HLA-B*15:01
AVKIAESIL

SEQ ID NO: 7696 - protein, 10 aa, Homo sapiens
  Table 1.2; MORC1; ENSG00000114487; HLA -A*03:01,HLA-A*03:02,HLA-A*11:01
AVKIAESILK

SEQ ID NO: 7697 - protein, 8 aa, Homo sapiens
  Table 1.2; MORC1; ENSG00000114487; HLA -A*23:01,HLA-A*24:02
AYTSVLYF

SEQ ID NO: 7698 - protein, 9 aa, Homo sapiens
  Table 1.2; MORC1; ENSG00000114487; HLA -B*49:01
CEEESLSEV

SEQ ID NO: 7699 - protein, 9 aa, Homo sapiens
  Table 1.2; MORC1; ENSG00000114487; HLA -A*23:01,HLA-A*24:02,HLA-A*29:02,HLA-A*30:02,HLA-B*15:01, HLA-B*15:03,HLA-C*14:02
CFNQIQNTY

SEQ ID NO: 7700 - protein, 10 aa, Homo sapiens
  Table 1.2; MORC1; ENSG00000114487; HLA -A*25:01
CLKNAQAASW

SEQ ID NO: 7701 - protein, 9 aa, Homo sapiens
  Table 1.2; MORC1; ENSG00000114487; HLA -B*51:01
DAGAERLDV

SEQ ID NO: 7702 - protein, 10 aa, Homo sapiens
  Table 1.2; MORC1; ENSG00000114487; HLA -A*25:01
DAGAERLDVF

SEQ ID NO: 7703 - protein, 8 aa, Homo sapiens
  Table 1.2; MORC1; ENSG00000114487; HLA -B*08:01,HLA-B*18:01,HLA-B*37:01,HLA-B*40:02
DDLKHESL

SEQ ID NO: 7704 - protein, 9 aa, Homo sapiens
  Table 1.2; MORC1; ENSG00000114487; HLA -A*33:01,HLA-A*33:03,HLA-A*68:01
DDRYPALQR

SEQ ID NO: 7705 - protein, 8 aa, Homo sapiens
  Table 1.2; MORC1; ENSG00000114487; HLA -B*18:01
DEITVTST

SEQ ID NO: 7706 - protein, 9 aa, Homo sapiens
  Table 1.2; MORC1; ENSG00000114487; HLA -A*30:01,HLA-B*18:01,HLA-B*49:01
DEITVTSTC

SEQ ID NO: 7707 - protein, 10 aa, Homo sapiens
  Table 1.2; MORC1; ENSG00000114487; HLA -A*30:01,HLA-B*18:01,HLA-B*40:01
DEITVTSTCL

SEQ ID NO: 7708 - protein, 9 aa, Homo sapiens
  Table 1.2; MORC1; ENSG00000114487; HLA -B*18:01
DEVKKAEEA

SEQ ID NO: 7709 - protein, 9 aa, Homo sapiens
  Table 1.2; MORC1; ENSG00000114487; HLA -B*38:01,HLA-B*39:01
DKSNTDVSL

SEQ ID NO: 7710 - protein, 10 aa, Homo sapiens
  Table 1.2; MORC1; ENSG00000114487; HLA -A*25:01,HLA-A*26:01
DLKHESLSSF

SEQ ID NO: 7711 - protein, 10 aa, Homo sapiens
  Table 1.2; MORC1; ENSG00000114487; HLA -A*33:01,HLA-A*68:01
DNARDAGAER

SEQ ID NO: 7712 - protein, 9 aa, Homo sapiens
  Table 1.2; MORC1; ENSG00000114487; HLA -B*07:02,HLA-B*08:01,HLA-B*35:03
DPQKFAMEL

SEQ ID NO: 7713 - protein, 10 aa, Homo sapiens
  Table 1.2; MORC1; ENSG00000114487; HLA -A*01:01
DSDIILVSDK

SEQ ID NO: 7714 - protein, 11 aa, Homo sapiens
  Table 1.2; MORC1; ENSG00000114487; HLA -A*01:01
DSDVEYISETK

SEQ ID NO: 7715 - protein, 9 aa, Homo sapiens
  Table 1.2; MORC1; ENSG00000114487; HLA -A*01:01,HLA-A*11:01
DTYLEALLK

SEQ ID NO: 7716 - protein, 9 aa, Homo sapiens
  Table 1.2; MORC1; ENSG00000114487; HLA -A*25:01,HLA-A*26:01,HLA-A*33:01
DVEKPLNSF

SEQ ID NO: 7717 - protein, 11 aa, Homo sapiens
  Table 1.2; MORC1; ENSG00000114487; HLA -A*01:01,HLA-A*26:01
DVEKPLNSFQY

SEQ ID NO: 7718 - protein, 9 aa, Homo sapiens
  Table 1.2; MORC1; ENSG00000114487; HLA -A*68:01
DVEYISETK

SEQ ID NO: 7719 - protein, 10 aa, Homo sapiens
  Table 1.2; MORC1; ENSG00000114487; HLA -A*68:02
DVEYISETKI

SEQ ID NO: 7720 - protein, 9 aa, Homo sapiens
  Table 1.2; MORC1; ENSG00000114487; HLA -A*33:01,HLA-A*68:01
DVFSVDNEK

SEQ ID NO: 7721 - protein, 10 aa, Homo sapiens
  Table 1.2; MORC1; ENSG00000114487; HLA -A*25:01,HLA-A*26:01,HLA-A*68:01,HLA-A*68:02,HLA-B*35:03
DVFSVDNEKL

SEQ ID NO: 7722 - protein, 10 aa, Homo sapiens
  Table 1.2; MORC1; ENSG00000114487; HLA -A*25:01,HLA-A*26:01,HLA-A*33:01
DVIYGKCGTL

SEQ ID NO: 7723 - protein, 11 aa, Homo sapiens
  Table 1.2; MORC1; ENSG00000114487; HLA -A*33:01,HLA-A*33:03,HLA-A*68:01
DVNLSSGHIAR

SEQ ID NO: 7724 - protein, 9 aa, Homo sapiens
  Table 1.2; MORC1; ENSG00000114487; HLA -A*68:02
EASDIIYFG

SEQ ID NO: 7725 - protein, 10 aa, Homo sapiens
  Table 1.2; MORC1; ENSG00000114487; HLA -A*26:01,HLA-A*33:01,HLA-A*33:03,HLA-A*68:01,HLA-A*68:02, HLA-B*27:02,HLA-C*07:06
EASDIIYFGR

SEQ ID NO: 7726 - protein, 9 aa, Homo sapiens
  Table 1.2; MORC1; ENSG00000114487; HLA -A*23:01,HLA-A*25:01,HLA-A*26:01,HLA-A*68:01,HLA-A*68:02, HLA-B*35:01,HLA-B*35:03,HLA-B*51:01,HLA-B*58:01
EAVKIAESI

SEQ ID NO: 7727 - protein, 10 aa, Homo sapiens
  Table 1.2; MORC1; ENSG00000114487; HLA -B*35:03
EAVKIAESIL

SEQ ID NO: 7728 - protein, 11 aa, Homo sapiens
  Table 1.2; MORC1; ENSG00000114487; HLA -A*68:01
EAVKIAESILK

SEQ ID NO: 7729 - protein, 9 aa, Homo sapiens
  Table 1.2; MORC1; ENSG00000114487; HLA -B*18:01,HLA-B*44:02,HLA-B*44:03
EDFPARWSF

SEQ ID NO: 7730 - protein, 9 aa, Homo sapiens
  Table 1.2; MORC1; ENSG00000114487; HLA -B*40:02
EDILMAGAL

SEQ ID NO: 7731 - protein, 9 aa, Homo sapiens
  Table 1.2; MORC1; ENSG00000114487; HLA -B*18:01,HLA-B*44:02,HLA-B*44:03
EEASDIIYF

SEQ ID NO: 7732 - protein, 10 aa, Homo sapiens
  Table 1.2; MORC1; ENSG00000114487; HLA -B*44:02
EEAVKIAESI

SEQ ID NO: 7733 - protein, 9 aa, Homo sapiens
  Table 1.2; MORC1; ENSG00000114487; HLA -B*49:01
EESLSEVVV

SEQ ID NO: 7734 - protein, 9 aa, Homo sapiens
  Table 1.2; MORC1; ENSG00000114487; HLA -B*18:01,HLA-B*44:02,HLA-B*44:03
EETDSDVEY

SEQ ID NO: 7735 - protein, 8 aa, Homo sapiens
  Table 1.2; MORC1; ENSG00000114487; HLA -B*18:01
EETMTCVF

SEQ ID NO: 7736 - protein, 9 aa, Homo sapiens
  Table 1.2; MORC1; ENSG00000114487; HLA -B*18:01,HLA-B*44:02,HLA-B*44:03
EETMTCVFF

SEQ ID NO: 7737 - protein, 8 aa, Homo sapiens
  Table 1.2; MORC1; ENSG00000114487; HLA -C*14:02
EFLNVQEY

SEQ ID NO: 7738 - protein, 10 aa, Homo sapiens
  Table 1.2; MORC1; ENSG00000114487; HLA -A*01:01
EGDLEQTDTY

SEQ ID NO: 7739 - protein, 9 aa, Homo sapiens
  Table 1.2; MORC1; ENSG00000114487; HLA -A*26:01
ELCNDVLAM

SEQ ID NO: 7740 - protein, 11 aa, Homo sapiens
  Table 1.2; MORC1; ENSG00000114487; HLA -A*68:01
ELCNDVLAMKR

SEQ ID NO: 7741 - protein, 8 aa, Homo sapiens
  Table 1.2; MORC1; ENSG00000114487; HLA -B*08:01
ELKTARTL

SEQ ID NO: 7742 - protein, 10 aa, Homo sapiens
  Table 1.2; MORC1; ENSG00000114487; HLA -B*08:01
ELKTARTLSL

SEQ ID NO: 7743 - protein, 9 aa, Homo sapiens
  Table 1.2; MORC1; ENSG00000114487; HLA -A*24:02,HLA-A*25:01
ELMQQFDVI

SEQ ID NO: 7744 - protein, 8 aa, Homo sapiens
  Table 1.2; MORC1; ENSG00000114487; HLA -B*18:01
ELSIIYKY

SEQ ID NO: 7745 - protein, 8 aa, Homo sapiens
  Table 1.2; MORC1; ENSG00000114487; HLA -B*08:01
EMKRKQSL

SEQ ID NO: 7746 - protein, 8 aa, Homo sapiens
  Table 1.2; MORC1; ENSG00000114487; HLA -A*33:01,HLA-A*33:03
ENVKLAER

SEQ ID NO: 7747 - protein, 9 aa, Homo sapiens
  Table 1.2; MORC1; ENSG00000114487; HLA -B*08:01
EQMNKKLKM

SEQ ID NO: 7748 - protein, 9 aa, Homo sapiens
  Table 1.2; MORC1; ENSG00000114487; HLA -B*13:02,HLA-B*38:01
EQQPQPQFI

SEQ ID NO: 7749 - protein, 10 aa, Homo sapiens
  Table 1.2; MORC1; ENSG00000114487; HLA -B*39:01
EQTDTYLEAL

SEQ ID NO: 7750 - protein, 10 aa, Homo sapiens
  Table 1.2; MORC1; ENSG00000114487; HLA -A*33:03
ESLSEVVVPM

SEQ ID NO: 7751 - protein, 9 aa, Homo sapiens
  Table 1.2; MORC1; ENSG00000114487; HLA -A*33:01,HLA-A*33:03,HLA-A*68:01
ESVIKYQNR

SEQ ID NO: 7752 - protein, 9 aa, Homo sapiens
  Table 1.2; MORC1; ENSG00000114487; HLA -A*68:01
ESVTDDPQK

SEQ ID NO: 7753 - protein, 10 aa, Homo sapiens
  Table 1.2; MORC1; ENSG00000114487; HLA -A*25:01,HLA-A*26:01,HLA-A*68:01
ESVTDDPQKF

SEQ ID NO: 7754 - protein, 8 aa, Homo sapiens
  Table 1.2; MORC1; ENSG00000114487; HLA -A*01:01
ETDSDVEY

SEQ ID NO: 7755 - protein, 9 aa, Homo sapiens
  Table 1.2; MORC1; ENSG00000114487; HLA -A*26:01
EVKKAEEAV

SEQ ID NO: 7756 - protein, 10 aa, Homo sapiens
  Table 1.2; MORC1; ENSG00000114487; HLA -A*33:03
EVKKAEEAVK

SEQ ID NO: 7757 - protein, 9 aa, Homo sapiens
  Table 1.2; MORC1; ENSG00000114487; HLA -A*03:01,HLA-A*03:02,HLA-A*11:01,HLA-A*25:01,HLA-A*33:01, HLA-A*33:03,HLA-A*68:01,HLA-C*07:06
EVMEPSHNK

SEQ ID NO: 7758 - protein, 9 aa, Homo sapiens
  Table 1.2; MORC1; ENSG00000114487; HLA -A*25:01,HLA-A*26:01,HLA-B*44:02,HLA-B*44:03,HLA-B*57:01, HLA-B*58:01
EVVVPMPSW

SEQ ID NO: 7759 - protein, 8 aa, Homo sapiens
  Table 1.2; MORC1; ENSG00000114487; HLA -A*23:01
EYISETKI

SEQ ID NO: 7760 - protein, 9 aa, Homo sapiens
  Table 1.2; MORC1; ENSG00000114487; HLA -A*23:01,HLA-A*24:02
EYISETKIM

SEQ ID NO: 7761 - protein, 10 aa, Homo sapiens
  Table 1.2; MORC1; ENSG00000114487; HLA -A*33:01,HLA-A*33:03
EYISETKIMK

SEQ ID NO: 7762 - protein, 11 aa, Homo sapiens
  Table 1.2; MORC1; ENSG00000114487; HLA -A*24:02,HLA-A*33:01,HLA-A*33:03,HLA-A*68:01
EYISETKIMKK

SEQ ID NO: 7763 - protein, 9 aa, Homo sapiens
  Table 1.2; MORC1; ENSG00000114487; HLA -A*29:02,HLA-B*35:01,HLA-B*46:01,HLA-C*02:02
FAMELSIIY

SEQ ID NO: 7764 - protein, 10 aa, Homo sapiens
  Table 1.2; MORC1; ENSG00000114487; HLA -A*11:01,HLA-B*27:02
FAMELSIIYK

SEQ ID NO: 7765 - protein, 11 aa, Homo sapiens
  Table 1.2; MORC1; ENSG00000114487; HLA -B*27:02
FGYQNDIDVEK

SEQ ID NO: 7766 - protein, 9 aa, Homo sapiens
  Table 1.2; MORC1; ENSG00000114487; HLA -C*01:02
FIGQYGNGL

SEQ ID NO: 7767 - protein, 9 aa, Homo sapiens
  Table 1.2; MORC1; ENSG00000114487; HLA -A*32:01,HLA-B*46:01
FIHANSTTH

SEQ ID NO: 7768 - protein, 9 aa, Homo sapiens
  Table 1.2; MORC1; ENSG00000114487; HLA -A*02:07
FIPVDEITV

SEQ ID NO: 7769 - protein, 9 aa, Homo sapiens
  Table 1.2; MORC1; ENSG00000114487; HLA -A*02:03
FIYSNNRLI

SEQ ID NO: 7770 - protein, 8 aa, Homo sapiens
  Table 1.2; MORC1; ENSG00000114487; HLA -C*05:01
FLDDGCGM

SEQ ID NO: 7771 - protein, 10 aa, Homo sapiens
  Table 1.2; MORC1; ENSG00000114487; HLA -A*01:01
FLDDGCGMSP

SEQ ID NO: 7772 - protein, 9 aa, Homo sapiens
  Table 1.2; MORC1; ENSG00000114487; HLA -A*02:01,HLA-A*02:03,HLA-A*02:04,HLA-A*02:07,HLA-B*46:01
FLFGALAEL

SEQ ID NO: 7773 - protein, 10 aa, Homo sapiens
  Table 1.2; MORC1; ENSG00000114487; HLA -A*02:03,HLA-A*02:04
FLFGALAELL

SEQ ID NO: 7774 - protein, 9 aa, Homo sapiens
  Table 1.2; MORC1; ENSG00000114487; HLA -C*04:01
FNQIQNTYM

SEQ ID NO: 7775 - protein, 10 aa, Homo sapiens
  Table 1.2; MORC1; ENSG00000114487; HLA -B*35:01,HLA-B*35:03
FPEHQLPSEL

SEQ ID NO: 7776 - protein, 10 aa, Homo sapiens
  Table 1.2; MORC1; ENSG00000114487; HLA -A*32:01,HLA-B*13:02,HLA-B*38:01
FQNNLNKVTI

SEQ ID NO: 7777 - protein, 9 aa, Homo sapiens
  Table 1.2; MORC1; ENSG00000114487; HLA -B*08:01
FQYQRRQAM

SEQ ID NO: 7778 - protein, 9 aa, Homo sapiens
  Table 1.2; MORC1; ENSG00000114487; HLA -A*31:01,HLA-A*33:01,HLA-A*33:03
FYGVNVENR

SEQ ID NO: 7779 - protein, 9 aa, Homo sapiens
  Table 1.2; MORC1; ENSG00000114487; HLA -A*03:01,HLA-A*03:02,HLA-A*11:01
GAFKDEVKK

SEQ ID NO: 7780 - protein, 9 aa, Homo sapiens
  Table 1.2; MORC1; ENSG00000114487; HLA -A*11:01,HLA-A*31:01
GALEDFPAR

SEQ ID NO: 7781 - protein, 10 aa, Homo sapiens
  Table 1.2; MORC1; ENSG00000114487; HLA -B*57:01
GALEDFPARW

SEQ ID NO: 7782 - protein, 9 aa, Homo sapiens
  Table 1.2; MORC1; ENSG00000114487; HLA -A*30:01,HLA-B*37:01,HLA-B*40:01,HLA-B*40:02
GDDLKHESL

SEQ ID NO: 7783 - protein, 9 aa, Homo sapiens
  Table 1.2; MORC1; ENSG00000114487; HLA -A*32:01,HLA-B*07:02,HLA-B*08:01,HLA-B*37:01,HLA-C*07:02
GINNRNLTL

SEQ ID NO: 7784 - protein, 9 aa, Homo sapiens
  Table 1.2; MORC1; ENSG00000114487; HLA -A*02:01,HLA-A*02:03,HLA-A*02:04,HLA-A*30:01,HLA-B*13:02
GIVNIPLEV

SEQ ID NO: 7785 - protein, 9 aa, Homo sapiens
  Table 1.2; MORC1; ENSG00000114487; HLA -A*02:03
GLKSGSMRI

SEQ ID NO: 7786 - protein, 9 aa, Homo sapiens
  Table 1.2; MORC1; ENSG00000114487; HLA -A*31:01
GMFIYSNNR

SEQ ID NO: 7787 - protein, 9 aa, Homo sapiens
  Table 1.2; MORC1; ENSG00000114487; HLA -B*13:02,HLA-B*27:05
GQYGNGLKS

SEQ ID NO: 7788 - protein, 11 aa, Homo sapiens
  Table 1.2; MORC1; ENSG00000114487; HLA -B*27:05
GQYGNGLKSGS

SEQ ID NO: 7789 - protein, 8 aa, Homo sapiens
  Table 1.2; MORC1; ENSG00000114487; HLA -B*13:02
GQYLVQYC

SEQ ID NO: 7790 - protein, 9 aa, Homo sapiens
  Table 1.2; MORC1; ENSG00000114487; HLA -A*02:04
GTLLVIYNL

SEQ ID NO: 7791 - protein, 10 aa, Homo sapiens
  Table 1.2; MORC1; ENSG00000114487; HLA -A*03:01,HLA-A*11:01
GTLLVIYNLK

SEQ ID NO: 7792 - protein, 10 aa, Homo sapiens
  Table 1.2; MORC1; ENSG00000114487; HLA -A*03:01,HLA-A*03:02,HLA-A*11:01,HLA-B*27:02
GTMSTISPSK

SEQ ID NO: 7793 - protein, 10 aa, Homo sapiens
  Table 1.2; MORC1; ENSG00000114487; HLA -B*27:02
GYQNDIDVEK

SEQ ID NO: 7794 - protein, 9 aa, Homo sapiens
  Table 1.2; MORC1; ENSG00000114487; HLA -A*23:01,HLA-A*25:01,HLA-A*26:01,HLA-A*30:02,HLA-A*32:01, HLA-A*33:01,HLA-B*08:01,HLA-B*15:01,HLA-B*15:03,HLA-B*35:01, HLA-B*35:03,HLA-B*38:01,HLA-B*39:01,HLA-B*46:01,HLA-B*55:01,
  HLA-B*58:01,HLA-C*02:02,HLA-C*03:03,HLA-C*03:04,HLA-C*07:06, HLA-C*16:01,HLA-C*16:02,HLA-C*16:04
HANSTTHSF

SEQ ID NO: 7795 - protein, 8 aa, Homo sapiens
  Table 1.2; MORC1; ENSG00000114487; HLA -A*30:01,HLA-B*08:01,HLA-B*18:01,HLA-B*37:01,HLA-B*40:01, HLA-B*40:02
HEKVGSQL

SEQ ID NO: 7796 - protein, 10 aa, Homo sapiens
  Table 1.2; MORC1; ENSG00000114487; HLA -A*30:01
HEKVGSQLKL

SEQ ID NO: 7797 - protein, 9 aa, Homo sapiens
  Table 1.2; MORC1; ENSG00000114487; HLA -A*30:01,HLA-B*37:01,HLA-B*40:01,HLA-B*40:02
HESLSSFEL

SEQ ID NO: 7798 - protein, 9 aa, Homo sapiens
  Table 1.2; MORC1; ENSG00000114487; HLA -A*29:02,HLA-A*30:02
HLLKVMGQY

SEQ ID NO: 7799 - protein, 9 aa, Homo sapiens
  Table 1.2; MORC1; ENSG00000114487; HLA -A*02:01,HLA-B*13:02,HLA-B*38:01,HLA-B*51:01
HQVECLPSI

SEQ ID NO: 7800 - protein, 9 aa, Homo sapiens
  Table 1.2; MORC1; ENSG00000114487; HLA -B*54:01
HSFLFGALA

SEQ ID NO: 7801 - protein, 9 aa, Homo sapiens
  Table 1.2; MORC1; ENSG00000114487; HLA -B*54:01
IAESILKEA

SEQ ID NO: 7802 - protein, 8 aa, Homo sapiens
  Table 1.2; MORC1; ENSG00000114487; HLA -A*23:01,HLA-A*25:01,HLA-A*32:01,HLA-B*08:01,HLA-B*46:01, HLA-B*57:01,HLA-B*58:01,HLA-C*16:01
IANITTVW

SEQ ID NO: 7803 - protein, 9 aa, Homo sapiens
  Table 1.2; MORC1; ENSG00000114487; HLA -A*31:01,HLA-A*33:01
IANITTVWR

SEQ ID NO: 7804 - protein, 10 aa, Homo sapiens
  Table 1.2; MORC1; ENSG00000114487; HLA -A*23:01,HLA-A*30:01,HLA-B*37:01
IDVEKPLNSF

SEQ ID NO: 7805 - protein, 8 aa, Homo sapiens
  Table 1.2; MORC1; ENSG00000114487; HLA -C*01:02
IGQYGNGL

SEQ ID NO: 7806 - protein, 9 aa, Homo sapiens
  Table 1.2; MORC1; ENSG00000114487; HLA -A*03:02,HLA-A*11:01
IGQYGNGLK

SEQ ID NO: 7807 - protein, 11 aa, Homo sapiens
  Table 1.2; MORC1; ENSG00000114487; HLA -C*04:01
IGQYGNGLKSG

SEQ ID NO: 7808 - protein, 10 aa, Homo sapiens
  Table 1.2; MORC1; ENSG00000114487; HLA -B*38:01
IHANSTTHSF

SEQ ID NO: 7809 - protein, 11 aa, Homo sapiens
  Table 1.2; MORC1; ENSG00000114487; HLA -B*38:01
IHANSTTHSFL

SEQ ID NO: 7810 - protein, 10 aa, Homo sapiens
  Table 1.2; MORC1; ENSG00000114487; HLA -A*02:03,HLA-A*25:01
IIYDSNTRGI

SEQ ID NO: 7811 - protein, 8 aa, Homo sapiens
  Table 1.2; MORC1; ENSG00000114487; HLA -A*03:01
IIYFGRSK

SEQ ID NO: 7812 - protein, 9 aa, Homo sapiens
  Table 1.2; MORC1; ENSG00000114487; HLA -A*03:01
IIYFGRSKK

SEQ ID NO: 7813 - protein, 9 aa, Homo sapiens
  Table 1.2; MORC1; ENSG00000114487; HLA -A*03:01
IIYKYSPFK

SEQ ID NO: 7814 - protein, 9 aa, Homo sapiens
  Table 1.2; MORC1; ENSG00000114487; HLA -A*02:01,HLA-A*02:03,HLA-A*02:07,HLA-B*55:01
ILKEAQIKV

SEQ ID NO: 7815 - protein, 10 aa, Homo sapiens
  Table 1.2; MORC1; ENSG00000114487; HLA -B*15:01
ILMAGALEDF

SEQ ID NO: 7816 - protein, 9 aa, Homo sapiens
  Table 1.2; MORC1; ENSG00000114487; HLA -A*23:01,HLA-A*24:02
INNRNLTLF

SEQ ID NO: 7817 - protein, 9 aa, Homo sapiens
  Table 1.2; MORC1; ENSG00000114487; HLA -B*35:01,HLA-B*35:03
IPFIIQCDL

SEQ ID NO: 7818 - protein, 8 aa, Homo sapiens
  Table 1.2; MORC1; ENSG00000114487; HLA -B*54:01
IPLEVMEP

SEQ ID NO: 7819 - protein, 9 aa, Homo sapiens
  Table 1.2; MORC1; ENSG00000114487; HLA -A*23:01,HLA-B*07:02,HLA-B*35:03,HLA-B*49:01,HLA-B*51:01, HLA-B*54:01,HLA-B*56:01
IPLGTMSTI

SEQ ID NO: 7820 - protein, 11 aa, Homo sapiens
  Table 1.2; MORC1; ENSG00000114487; HLA -B*07:02,HLA-B*35:03,HLA-B*55:01
IPLLNQEKQEL

SEQ ID NO: 7821 - protein, 9 aa, Homo sapiens
  Table 1.2; MORC1; ENSG00000114487; HLA -B*35:01,HLA-B*35:03,HLA-B*51:01,HLA-B*54:01,HLA-B*56:01
IPVALPENV

SEQ ID NO: 7822 - protein, 11 aa, Homo sapiens
  Table 1.2; MORC1; ENSG00000114487; HLA -A*23:01,HLA-B*35:01,HLA-B*35:03,HLA-B*55:01
IPVALPENVKL

SEQ ID NO: 7823 - protein, 8 aa, Homo sapiens
  Table 1.2; MORC1; ENSG00000114487; HLA -B*51:01,HLA-B*56:01
IPVDEITV

SEQ ID NO: 7824 - protein, 9 aa, Homo sapiens
  Table 1.2; MORC1; ENSG00000114487; HLA -B*35:03,HLA-B*55:01,HLA-B*56:01
IPVDEITVT

SEQ ID NO: 7825 - protein, 11 aa, Homo sapiens
  Table 1.2; MORC1; ENSG00000114487; HLA -B*35:01,HLA-B*54:01,HLA-B*56:01
IPVDEITVTST

SEQ ID NO: 7826 - protein, 9 aa, Homo sapiens
  Table 1.2; MORC1; ENSG00000114487; HLA -A*03:01,HLA-A*03:02,HLA-A*23:01,HLA-A*26:01,HLA-A*29:02, HLA-A*30:02,HLA-A*32:01,HLA-B*15:01,HLA-B*15:03,HLA-B*18:01, HLA-B*27:02,HLA-B*46:01,HLA-C*02:02,HLA-C*07:04,HLA-C*14:02,
  HLA-C*16:04
IQNTYMVQY

SEQ ID NO: 7827 - protein, 9 aa, Homo sapiens
  Table 1.2; MORC1; ENSG00000114487; HLA -A*01:01,HLA-A*11:01
ISETKIMKK

SEQ ID NO: 7828 - protein, 8 aa, Homo sapiens
  Table 1.2; MORC1; ENSG00000114487; HLA -B*13:02
IVNIPLEV

SEQ ID NO: 7829 - protein, 9 aa, Homo sapiens
  Table 1.2; MORC1; ENSG00000114487; HLA -B*15:01,HLA-B*35:01,HLA-B*46:01
IVNIPLEVM

SEQ ID NO: 7830 - protein, 9 aa, Homo sapiens
  Table 1.2; MORC1; ENSG00000114487; HLA -A*23:01,HLA-A*24:02,HLA-B*35:03,HLA-C*04:01,HLA-C*14:02, HLA-C*16:02
IYDSNTRGI

SEQ ID NO: 7831 - protein, 9 aa, Homo sapiens
  Table 1.2; MORC1; ENSG00000114487; HLA -A*23:01,HLA-A*24:02
IYGKCGTLL

SEQ ID NO: 7832 - protein, 8 aa, Homo sapiens
  Table 1.2; MORC1; ENSG00000114487; HLA -A*23:01
IYNLKLLL

SEQ ID NO: 7833 - protein, 10 aa, Homo sapiens
  Table 1.2; MORC1; ENSG00000114487; HLA -A*24:02
IYSNNRLIKM

SEQ ID NO: 7834 - protein, 8 aa, Homo sapiens
  Table 1.2; MORC1; ENSG00000114487; HLA -C*05:01
KAEEAVKI

SEQ ID NO: 7835 - protein, 10 aa, Homo sapiens
  Table 1.2; MORC1; ENSG00000114487; HLA -B*40:01
KEDILMAGAL

SEQ ID NO: 7836 - protein, 11 aa, Homo sapiens
  Table 1.2; MORC1; ENSG00000114487; HLA -A*30:01,HLA-B*40:01
KEDNLLFQNNL

SEQ ID NO: 7837 - protein, 8 aa, Homo sapiens
  Table 1.2; MORC1; ENSG00000114487; HLA -B*49:01
KEETMTCV

SEQ ID NO: 7838 - protein, 9 aa, Homo sapiens
  Table 1.2; MORC1; ENSG00000114487; HLA -B*18:01,HLA-B*37:01,HLA-B*40:01
KEETMTCVF

SEQ ID NO: 7839 - protein, 10 aa, Homo sapiens
  Table 1.2; MORC1; ENSG00000114487; HLA -B*44:02,HLA-B*44:03
KEIPLLNQEK

SEQ ID NO: 7840 - protein, 9 aa, Homo sapiens
  Table 1.2; MORC1; ENSG00000114487; HLA -B*44:02,HLA-B*44:03,HLA-B*49:01
KENTKTQKI

SEQ ID NO: 7841 - protein, 10 aa, Homo sapiens
  Table 1.2; MORC1; ENSG00000114487; HLA -B*38:01
KHESLSSFEL

SEQ ID NO: 7842 - protein, 8 aa, Homo sapiens
  Table 1.2; MORC1; ENSG00000114487; HLA -A*03:01,HLA-A*03:02
KIAESILK

SEQ ID NO: 7843 - protein, 10 aa, Homo sapiens
  Table 1.2; MORC1; ENSG00000114487; HLA -A*02:01,HLA-A*02:03
KIAESILKEA

SEQ ID NO: 7844 - protein, 9 aa, Homo sapiens
  Table 1.2; MORC1; ENSG00000114487; HLA -A*02:03,HLA-A*02:04
KLALLLQKL

SEQ ID NO: 7845 - protein, 10 aa, Homo sapiens
  Table 1.2; MORC1; ENSG00000114487; HLA -A*02:03
KLKSLLGAGV

SEQ ID NO: 7846 - protein, 10 aa, Homo sapiens
  Table 1.2; MORC1; ENSG00000114487; HLA -A*02:01,HLA-A*02:04
KLLLNGEPEL

SEQ ID NO: 7847 - protein, 9 aa, Homo sapiens
  Table 1.2; MORC1; ENSG00000114487; HLA -B*57:01
KLREILLYF

SEQ ID NO: 7848 - protein, 9 aa, Homo sapiens
  Table 1.2; MORC1; ENSG00000114487; HLA -B*13:02
KMNSQQQRI

SEQ ID NO: 7849 - protein, 8 aa, Homo sapiens
  Table 1.2; MORC1; ENSG00000114487; HLA -B*35:01
KPLNSFQY

SEQ ID NO: 7850 - protein, 10 aa, Homo sapiens
  Table 1.2; MORC1; ENSG00000114487; HLA -A*01:01,HLA-A*30:02,HLA-B*15:01,HLA-C*07:01
KQEFLNVQEY

SEQ ID NO: 7851 - protein, 10 aa, Homo sapiens
  Table 1.2; MORC1; ENSG00000114487; HLA -A*30:02,HLA-B*15:01
KQLRESVIKY

SEQ ID NO: 7852 - protein, 9 aa, Homo sapiens
  Table 1.2; MORC1; ENSG00000114487; HLA -A*31:01
KQRELKTAR

SEQ ID NO: 7853 - protein, 9 aa, Homo sapiens
  Table 1.2; MORC1; ENSG00000114487; HLA -A*03:01,HLA-A*03:02,HLA-A*11:01
KSNTDVSLK

SEQ ID NO: 7854 - protein, 9 aa, Homo sapiens
  Table 1.2; MORC1; ENSG00000114487; HLA -B*57:01
KTARTLSLF

SEQ ID NO: 7855 - protein, 10 aa, Homo sapiens
  Table 1.2; MORC1; ENSG00000114487; HLA -A*01:01,HLA-A*29:02
KTARTLSLFY

SEQ ID NO: 7856 - protein, 9 aa, Homo sapiens
  Table 1.2; MORC1; ENSG00000114487; HLA -A*01:01
KTDKEDILM

SEQ ID NO: 7857 - protein, 10 aa, Homo sapiens
  Table 1.2; MORC1; ENSG00000114487; HLA -B*58:01
KTEAELMQQF

SEQ ID NO: 7858 - protein, 9 aa, Homo sapiens
  Table 1.2; MORC1; ENSG00000114487; HLA -A*03:01,HLA-A*03:02,HLA-A*11:01
KVGSQLKLK

SEQ ID NO: 7859 - protein, 10 aa, Homo sapiens
  Table 1.2; MORC1; ENSG00000114487; HLA -A*03:01,HLA-A*03:02,HLA-A*11:01,HLA-A*25:01,HLA-A*26:01, HLA-A*29:02,HLA-A*30:02,HLA-A*31:01,HLA-A*32:01,HLA-B*15:01, HLA-B*46:01,HLA-B*57:01,HLA-B*58:01,HLA-C*02:02
KVMGQYLVQY

SEQ ID NO: 7860 - protein, 9 aa, Homo sapiens
  Table 1.2; MORC1; ENSG00000114487; HLA -A*23:01,HLA-A*24:02,HLA-A*32:01,HLA-C*14:02
KYLYVTSSF

SEQ ID NO: 7861 - protein, 9 aa, Homo sapiens
  Table 1.2; MORC1; ENSG00000114487; HLA -B*08:01,HLA-C*03:03,HLA-C*03:04
LAMKRSSSL

SEQ ID NO: 7862 - protein, 10 aa, Homo sapiens
  Table 1.2; MORC1; ENSG00000114487; HLA -A*33:01
LCNDVLAMKR

SEQ ID NO: 7863 - protein, 10 aa, Homo sapiens
  Table 1.2; MORC1; ENSG00000114487; HLA -B*27:02
LDVFSVDNEK

SEQ ID NO: 7864 - protein, 8 aa, Homo sapiens
  Table 1.2; MORC1; ENSG00000114487; HLA -B*44:02,HLA-B*44:03
LEDFPARW

SEQ ID NO: 7865 - protein, 10 aa, Homo sapiens
  Table 1.2; MORC1; ENSG00000114487; HLA -B*40:01
LEEPALSCEL

SEQ ID NO: 7866 - protein, 9 aa, Homo sapiens
  Table 1.2; MORC1; ENSG00000114487; HLA -B*15:03
LKHESLSSF

SEQ ID NO: 7867 - protein, 9 aa, Homo sapiens
  Table 1.2; MORC1; ENSG00000114487; HLA -A*03:01
LLFQNNLNK

SEQ ID NO: 7868 - protein, 10 aa, Homo sapiens
  Table 1.2; MORC1; ENSG00000114487; HLA -A*02:03,HLA-A*02:04
LLFQNNLNKV

SEQ ID NO: 7869 - protein, 9 aa, Homo sapiens
  Table 1.2; MORC1; ENSG00000114487; HLA -A*02:01,HLA-A*02:03,HLA-A*02:04
LLGAGVVGI

SEQ ID NO: 7870 - protein, 9 aa, Homo sapiens
  Table 1.2; MORC1; ENSG00000114487; HLA -A*01:01,HLA-A*23:01,HLA-A*24:02,HLA-A*29:02
LLKEDNLLF

SEQ ID NO: 7871 - protein, 9 aa, Homo sapiens
  Table 1.2; MORC1; ENSG00000114487; HLA -A*02:03
LLKVMGQYL

SEQ ID NO: 7872 - protein, 9 aa, Homo sapiens
  Table 1.2; MORC1; ENSG00000114487; HLA -A*02:01,HLA-A*02:04,HLA-B*55:01
LLLNGEPEL

SEQ ID NO: 7873 - protein, 9 aa, Homo sapiens
  Table 1.2; MORC1; ENSG00000114487; HLA -B*08:01
LLNQEKQEL

SEQ ID NO: 7874 - protein, 10 aa, Homo sapiens
  Table 1.2; MORC1; ENSG00000114487; HLA -A*02:01,HLA-A*02:03,HLA-A*02:04
LLYFFPEHQL

SEQ ID NO: 7875 - protein, 9 aa, Homo sapiens
  Table 1.2; MORC1; ENSG00000114487; HLA -B*46:01
LMAGALEDF

SEQ ID NO: 7876 - protein, 9 aa, Homo sapiens
  Table 1.2; MORC1; ENSG00000114487; HLA -A*33:01,HLA-A*33:03
LNKVTIDAR

SEQ ID NO: 7877 - protein, 8 aa, Homo sapiens
  Table 1.2; MORC1; ENSG00000114487; HLA -B*08:01
LNQEKQEL

SEQ ID NO: 7878 - protein, 10 aa, Homo sapiens
  Table 1.2; MORC1; ENSG00000114487; HLA -B*35:01,HLA-B*35:03,HLA-B*55:01,HLA-B*56:01,HLA-C*03:03
LPSELEEPAL

SEQ ID NO: 7879 - protein, 9 aa, Homo sapiens
  Table 1.2; MORC1; ENSG00000114487; HLA -B*07:02,HLA-B*35:01,HLA-B*35:03,HLA-B*51:01,HLA-B*54:01, HLA-B*55:01,HLA-B*56:01,HLA-C*07:02
LPSIPLGTM

SEQ ID NO: 7880 - protein, 10 aa, Homo sapiens
  Table 1.2; MORC1; ENSG00000114487; HLA -B*27:02
LSSFELSASR

SEQ ID NO: 7881 - protein, 9 aa, Homo sapiens
  Table 1.2; MORC1; ENSG00000114487; HLA -A*02:03
LSSGHIARV

SEQ ID NO: 7882 - protein, 9 aa, Homo sapiens
  Table 1.2; MORC1; ENSG00000114487; HLA -A*24:02
LYFFPEHQL

SEQ ID NO: 7883 - protein, 11 aa, Homo sapiens
  Table 1.2; MORC1; ENSG00000114487; HLA -A*24:02
LYVTSSFKGAF

SEQ ID NO: 7884 - protein, 10 aa, Homo sapiens
  Table 1.2; MORC1; ENSG00000114487; HLA -A*26:01,HLA-A*29:02,HLA-A*30:02,HLA-B*15:03,HLA-B*35:01
MCFNQIQNTY

SEQ ID NO: 7885 - protein, 9 aa, Homo sapiens
  Table 1.2; MORC1; ENSG00000114487; HLA -A*29:02,HLA-A*30:02,HLA-B*18:01,HLA-B*44:02,HLA-B*44:03
MELSIIYKY

SEQ ID NO: 7886 - protein, 10 aa, Homo sapiens
  Table 1.2; MORC1; ENSG00000114487; HLA -B*44:03
MEPSHNKQEF

SEQ ID NO: 7887 - protein, 9 aa, Homo sapiens
  Table 1.2; MORC1; ENSG00000114487; HLA -B*38:01,HLA-B*39:01
MHEKVGSQL

SEQ ID NO: 7888 - protein, 10 aa, Homo sapiens
  Table 1.2; MORC1; ENSG00000114487; HLA -A*03:02,HLA-A*11:01,HLA-B*27:02
MQQFDVIYGK

SEQ ID NO: 7889 - protein, 9 aa, Homo sapiens
  Table 1.2; MORC1; ENSG00000114487; HLA -B*35:01,HLA-B*35:03,HLA-B*55:01
NAQAASWEM

SEQ ID NO: 7890 - protein, 11 aa, Homo sapiens
  Table 1.2; MORC1; ENSG00000114487; HLA -A*33:01
NAQAASWEMKR

SEQ ID NO: 7891 - protein, 9 aa, Homo sapiens
  Table 1.2; MORC1; ENSG00000114487; HLA -A*33:01,HLA-A*33:03,HLA-C*07:06
NARDAGAER

SEQ ID NO: 7892 - protein, 9 aa, Homo sapiens
  Table 1.2; MORC1; ENSG00000114487; HLA -A*30:01,HLA-B*18:01,HLA-B*40:01,HLA-B*44:03,HLA-B*49:01
NEFGYQNDI

SEQ ID NO: 7893 - protein, 8 aa, Homo sapiens
  Table 1.2; MORC1; ENSG00000114487; HLA -B*18:01
NEKLQGGF

SEQ ID NO: 7894 - protein, 11 aa, Homo sapiens
  Table 1.2; MORC1; ENSG00000114487; HLA -A*01:01,HLA-B*55:01
NIEETDSDVEY

SEQ ID NO: 7895 - protein, 9 aa, Homo sapiens
  Table 1.2; MORC1; ENSG00000114487; HLA -A*02:03,HLA-B*08:01
NLKEKQREL

SEQ ID NO: 7896 - protein, 8 aa, Homo sapiens
  Table 1.2; MORC1; ENSG00000114487; HLA -B*08:01
NLRIKLAL

SEQ ID NO: 7897 - protein, 9 aa, Homo sapiens
  Table 1.2; MORC1; ENSG00000114487; HLA -A*33:01,HLA-A*68:01
NLSSGHIAR

SEQ ID NO: 7898 - protein, 10 aa, Homo sapiens
  Table 1.2; MORC1; ENSG00000114487; HLA -A*02:03
NLSSGHIARV

SEQ ID NO: 7899 - protein, 8 aa, Homo sapiens
  Table 1.2; MORC1; ENSG00000114487; HLA -B*08:01
NNLNKVTI

SEQ ID NO: 7900 - protein, 11 aa, Homo sapiens
  Table 1.2; MORC1; ENSG00000114487; HLA -A*33:01
NNLNKVTIDAR

SEQ ID NO: 7901 - protein, 10 aa, Homo sapiens
  Table 1.2; MORC1; ENSG00000114487; HLA -B*54:01
NPWMRIFIQA

SEQ ID NO: 7902 - protein, 9 aa, Homo sapiens
  Table 1.2; MORC1; ENSG00000114487; HLA -A*02:01,HLA-A*02:03,HLA-A*02:04,HLA-A*30:01,HLA-B*13:02, HLA-B*27:05,HLA-B*39:01
NQIQNTYMV

SEQ ID NO: 7903 - protein, 11 aa, Homo sapiens
  Table 1.2; MORC1; ENSG00000114487; HLA -A*30:02,HLA-B*15:01
NQIQNTYMVQY

SEQ ID NO: 7904 - protein, 9 aa, Homo sapiens
  Table 1.2; MORC1; ENSG00000114487; HLA -C*16:01
NSQQQRIPV

SEQ ID NO: 7905 - protein, 9 aa, Homo sapiens
  Table 1.2; MORC1; ENSG00000114487; HLA -A*29:02,HLA-C*16:01
NSTTHSFLF

SEQ ID NO: 7906 - protein, 10 aa, Homo sapiens
  Table 1.2; MORC1; ENSG00000114487; HLA -A*01:01
NTDVSLKQEK

SEQ ID NO: 7907 - protein, 9 aa, Homo sapiens
  Table 1.2; MORC1; ENSG00000114487; HLA -B*35:03
NTSDSDIIL

SEQ ID NO: 7908 - protein, 10 aa, Homo sapiens
  Table 1.2; MORC1; ENSG00000114487; HLA -A*68:02
NTSDSDIILV

SEQ ID NO: 7909 - protein, 9 aa, Homo sapiens
  Table 1.2; MORC1; ENSG00000114487; HLA -A*03:02,HLA-A*11:01,HLA-A*68:01
NTYMVQYEK

SEQ ID NO: 7910 - protein, 10 aa, Homo sapiens
  Table 1.2; MORC1; ENSG00000114487; HLA -A*68:01
NTYMVQYEKK

SEQ ID NO: 7911 - protein, 9 aa, Homo sapiens
  Table 1.2; MORC1; ENSG00000114487; HLA -C*01:02
NVPMEDVNL

SEQ ID NO: 7912 - protein, 9 aa, Homo sapiens
  Table 1.2; MORC1; ENSG00000114487; HLA -A*02:01,HLA-A*02:04,HLA-A*02:07,HLA-A*68:02,HLA-B*35:03, HLA-B*38:01,HLA-B*55:01,HLA-C*16:02
NVQEYNHLL

SEQ ID NO: 7913 - protein, 10 aa, Homo sapiens
  Table 1.2; MORC1; ENSG00000114487; HLA -A*03:02,HLA-A*11:01,HLA-A*33:01
NVQEYNHLLK

SEQ ID NO: 7914 - protein, 9 aa, Homo sapiens
  Table 1.2; MORC1; ENSG00000114487; HLA -A*31:01
PLNSFQYQR

SEQ ID NO: 7915 - protein, 9 aa, Homo sapiens
  Table 1.2; MORC1; ENSG00000114487; HLA -A*31:01,HLA-A*33:03,HLA-A*68:01
QAASWEMKR

SEQ ID NO: 7916 - protein, 8 aa, Homo sapiens
  Table 1.2; MORC1; ENSG00000114487; HLA -B*51:01
QAMGIPFI

SEQ ID NO: 7917 - protein, 9 aa, Homo sapiens
  Table 1.2; MORC1; ENSG00000114487; HLA -B*51:01
QAMGIPFII

SEQ ID NO: 7918 - protein, 9 aa, Homo sapiens
  Table 1.2; MORC1; ENSG00000114487; HLA -A*25:01,HLA-A*26:01,HLA-A*30:01,HLA-A*30:02,HLA-B*15:01, HLA-B*15:03,HLA-B*18:01,HLA-B*27:02,HLA-B*27:05,HLA-B*35:01, HLA-B*37:01,HLA-B*40:01,HLA-B*44:02,HLA-B*44:03,HLA-B*49:01,
  HLA-C*02:02,HLA-C*12:03,HLA-C*16:04
QEFLNVQEY

SEQ ID NO: 7919 - protein, 9 aa, Homo sapiens
  Table 1.2; MORC1; ENSG00000114487; HLA -B*44:02
QEKEFFDIW

SEQ ID NO: 7920 - protein, 9 aa, Homo sapiens
  Table 1.2; MORC1; ENSG00000114487; HLA -A*30:01,HLA-B*40:01,HLA-B*40:02
QEKKEIPLL

SEQ ID NO: 7921 - protein, 9 aa, Homo sapiens
  Table 1.2; MORC1; ENSG00000114487; HLA -A*30:01,HLA-B*44:03,HLA-B*49:01
QEYNHLLKV

SEQ ID NO: 7922 - protein, 10 aa, Homo sapiens
  Table 1.2; MORC1; ENSG00000114487; HLA -B*44:02,HLA-B*44:03
QEYNHLLKVM

SEQ ID NO: 7923 - protein, 8 aa, Homo sapiens
  Table 1.2; MORC1; ENSG00000114487; HLA -A*02:03
QIANITTV

SEQ ID NO: 7924 - protein, 9 aa, Homo sapiens
  Table 1.2; MORC1; ENSG00000114487; HLA -A*23:01,HLA-A*24:02,HLA-A*25:01,HLA-A*26:01,HLA-A*32:01, HLA-A*33:03,HLA-A*68:01,HLA-A*68:02,HLA-B*15:01,HLA-B*15:03, HLA-B*35:01,HLA-B*38:01,HLA-B*44:02,HLA-B*44:03,HLA-B*57:01,
  HLA-B*58:01,HLA-C*07:04,HLA-C*12:03,HLA-C*16:04
QIANITTVW

SEQ ID NO: 7925 - protein, 10 aa, Homo sapiens
  Table 1.2; MORC1; ENSG00000114487; HLA -A*68:01
QIANITTVWR

SEQ ID NO: 7926 - protein, 10 aa, Homo sapiens
  Table 1.2; MORC1; ENSG00000114487; HLA -A*03:02,HLA-A*29:02,HLA-A*30:02,HLA-C*07:04
QIQNTYMVQY

SEQ ID NO: 7927 - protein, 8 aa, Homo sapiens
  Table 1.2; MORC1; ENSG00000114487; HLA -B*08:01
QLKLKSLL

SEQ ID NO: 7928 - protein, 9 aa, Homo sapiens
  Table 1.2; MORC1; ENSG00000114487; HLA -A*01:01,HLA-A*03:01,HLA-A*26:01,HLA-A*29:02,HLA-A*30:02, HLA-B*15:01,HLA-B*15:03,HLA-B*46:01
QLRESVIKY

SEQ ID NO: 7929 - protein, 9 aa, Homo sapiens
  Table 1.2; MORC1; ENSG00000114487; HLA -B*54:01,HLA-B*56:01
QPQPQFIPV

SEQ ID NO: 7930 - protein, 9 aa, Homo sapiens
  Table 1.2; MORC1; ENSG00000114487; HLA -A*03:01,HLA-A*03:02,HLA-A*11:01,HLA-A*31:01,HLA-B*27:05
QQFDVIYGK

SEQ ID NO: 7931 - protein, 9 aa, Homo sapiens
  Table 1.2; MORC1; ENSG00000114487; HLA -A*02:04,HLA-A*32:01,HLA-B*13:02,HLA-B*15:01,HLA-B*15:03, HLA-B*27:05,HLA-B*38:01,HLA-B*39:01
QQQRIPVAL

SEQ ID NO: 7932 - protein, 8 aa, Homo sapiens
  Table 1.2; MORC1; ENSG00000114487; HLA -B*08:01,HLA-B*15:01,HLA-B*15:03
QQRIPVAL

SEQ ID NO: 7933 - protein, 10 aa, Homo sapiens
  Table 1.2; MORC1; ENSG00000114487; HLA -A*68:01
QSIIYDSNTR

SEQ ID NO: 7934 - protein, 9 aa, Homo sapiens
  Table 1.2; MORC1; ENSG00000114487; HLA -A*32:01,HLA-A*68:02,HLA-B*13:02,HLA-B*58:01,HLA-C*16:01, HLA-C*16:02
QSTPVKETV

SEQ ID NO: 7935 - protein, 9 aa, Homo sapiens
  Table 1.2; MORC1; ENSG00000114487; HLA -A*01:01
QTDTYLEAL

SEQ ID NO: 7936 - protein, 10 aa, Homo sapiens
  Table 1.2; MORC1; ENSG00000114487; HLA -A*01:01
QTDTYLEALL

SEQ ID NO: 7937 - protein, 9 aa, Homo sapiens
  Table 1.2; MORC1; ENSG00000114487; HLA -A*03:02,HLA-A*11:01,HLA-B*27:02
RALEDVEAK

SEQ ID NO: 7938 - protein, 11 aa, Homo sapiens
  Table 1.2; MORC1; ENSG00000114487; HLA -A*03:02,HLA-A*11:01
RALEDVEAKQK

SEQ ID NO: 7939 - protein, 9 aa, Homo sapiens
  Table 1.2; MORC1; ENSG00000114487; HLA -B*07:02
RAQPTEGCL

SEQ ID NO: 7940 - protein, 10 aa, Homo sapiens
  Table 1.2; MORC1; ENSG00000114487; HLA -A*03:02,HLA-A*11:01
RAQPTEGCLK

SEQ ID NO: 7941 - protein, 9 aa, Homo sapiens
  Table 1.2; MORC1; ENSG00000114487; HLA -A*03:01,HLA-B*57:01
RAYTSVLYF

SEQ ID NO: 7942 - protein, 8 aa, Homo sapiens
  Table 1.2; MORC1; ENSG00000114487; HLA -B*37:01
RDAGAERL

SEQ ID NO: 7943 - protein, 11 aa, Homo sapiens
  Table 1.2; MORC1; ENSG00000114487; HLA -B*44:02,HLA-B*44:03
RESVTDDPQKF

SEQ ID NO: 7944 - protein, 10 aa, Homo sapiens
  Table 1.2; MORC1; ENSG00000114487; HLA -A*03:01
RIFIQAKRVK

SEQ ID NO: 7945 - protein, 9 aa, Homo sapiens
  Table 1.2; MORC1; ENSG00000114487; HLA -B*57:01
RIGKDFILF

SEQ ID NO: 7946 - protein, 10 aa, Homo sapiens
  Table 1.2; MORC1; ENSG00000114487; HLA -A*02:07
RIPVALPENV

SEQ ID NO: 7947 - protein, 11 aa, Homo sapiens
  Table 1.2; MORC1; ENSG00000114487; HLA -A*03:02
RLDVFSVDNEK

SEQ ID NO: 7948 - protein, 9 aa, Homo sapiens
  Table 1.2; MORC1; ENSG00000114487; HLA -A*03:02
RLPLEKNEK

SEQ ID NO: 7949 - protein, 9 aa, Homo sapiens
  Table 1.2; MORC1; ENSG00000114487; HLA -B*13:02
RQAMGIPFI

SEQ ID NO: 7950 - protein, 9 aa, Homo sapiens
  Table 1.2; MORC1; ENSG00000114487; HLA -A*30:02,HLA-B*57:01,HLA-B*58:01
RSQAGMFIY

SEQ ID NO: 7951 - protein, 11 aa, Homo sapiens
  Table 1.2; MORC1; ENSG00000114487; HLA -B*57:01,HLA-B*58:01
RSQIANITTVW

SEQ ID NO: 7952 - protein, 8 aa, Homo sapiens
  Table 1.2; MORC1; ENSG00000114487; HLA -B*57:01,HLA-B*58:01
RSSSLPSW

SEQ ID NO: 7953 - protein, 9 aa, Homo sapiens
  Table 1.2; MORC1; ENSG00000114487; HLA -A*02:04
RTLSLFYGV

SEQ ID NO: 7954 - protein, 9 aa, Homo sapiens
  Table 1.2; MORC1; ENSG00000114487; HLA -A*03:01,HLA-A*03:02,HLA-A*25:01,HLA-A*26:01,HLA-A*29:02, HLA-A*30:02,HLA-A*31:01,HLA-A*32:01,HLA-B*15:01,HLA-B*15:03, HLA-B*46:01,HLA-B*57:01,HLA-B*58:01,HLA-C*07:04
RVLPSSTNY

SEQ ID NO: 7955 - protein, 9 aa, Homo sapiens
  Table 1.2; MORC1; ENSG00000114487; HLA -A*03:01,HLA-A*03:02
RVSVSGSCK

SEQ ID NO: 7956 - protein, 10 aa, Homo sapiens
  Table 1.2; MORC1; ENSG00000114487; HLA -A*24:02
RYPALQRAQL

SEQ ID NO: 7957 - protein, 8 aa, Homo sapiens
  Table 1.2; MORC1; ENSG00000114487; HLA -A*31:01,HLA-A*33:01,HLA-A*33:03,HLA-A*68:01
SAKDVLQR

SEQ ID NO: 7958 - protein, 9 aa, Homo sapiens
  Table 1.2; MORC1; ENSG00000114487; HLA -B*54:01
SAKDVLQRA

SEQ ID NO: 7959 - protein, 9 aa, Homo sapiens
  Table 1.2; MORC1; ENSG00000114487; HLA -A*11:01
SDIILVSDK

SEQ ID NO: 7960 - protein, 10 aa, Homo sapiens
  Table 1.2; MORC1; ENSG00000114487; HLA -A*30:01
SDKSNTDVSL

SEQ ID NO: 7961 - protein, 11 aa, Homo sapiens
  Table 1.2; MORC1; ENSG00000114487; HLA -A*11:01
SDKSNTDVSLK

SEQ ID NO: 7962 - protein, 8 aa, Homo sapiens
  Table 1.2; MORC1; ENSG00000114487; HLA -B*37:01
SDSDIILV

SEQ ID NO: 7963 - protein, 8 aa, Homo sapiens
  Table 1.2; MORC1; ENSG00000114487; HLA -A*30:01,HLA-B*18:01,HLA-B*40:01
SELEEPAL

SEQ ID NO: 7964 - protein, 10 aa, Homo sapiens
  Table 1.2; MORC1; ENSG00000114487; HLA -A*25:01,HLA-A*30:01,HLA-B*27:02,HLA-B*44:02,HLA-B*44:03, HLA-B*49:01,HLA-C*16:04
SEVVVPMPSW

SEQ ID NO: 7965 - protein, 10 aa, Homo sapiens
  Table 1.2; MORC1; ENSG00000114487; HLA -A*29:02
SFRAYTSVLY

SEQ ID NO: 7966 - protein, 9 aa, Homo sapiens
  Table 1.2; MORC1; ENSG00000114487; HLA -B*07:02,HLA-B*08:01
SGHIARVSV

SEQ ID NO: 7967 - protein, 9 aa, Homo sapiens
  Table 1.2; MORC1; ENSG00000114487; HLA -A*68:01,HLA-C*07:06
SIIYDSNTR

SEQ ID NO: 7968 - protein, 9 aa, Homo sapiens
  Table 1.2; MORC1; ENSG00000114487; HLA -A*03:02
SILKEAQIK

SEQ ID NO: 7969 - protein, 8 aa, Homo sapiens
  Table 1.2; MORC1; ENSG00000114487; HLA -A*02:01,HLA-A*02:04,HLA-B*13:02
SLFYGVNV

SEQ ID NO: 7970 - protein, 11 aa, Homo sapiens
  Table 1.2; MORC1; ENSG00000114487; HLA -A*31:01,HLA-A*68:01
SLFYGVNVENR

SEQ ID NO: 7971 - protein, 10 aa, Homo sapiens
  Table 1.2; MORC1; ENSG00000114487; HLA -A*02:01,HLA-A*02:03,HLA-A*02:04,HLA-B*55:01
SLLGAGVVGI

SEQ ID NO: 7972 - protein, 9 aa, Homo sapiens
  Table 1.2; MORC1; ENSG00000114487; HLA -A*03:02
SLNFVEECK

SEQ ID NO: 7973 - protein, 9 aa, Homo sapiens
  Table 1.2; MORC1; ENSG00000114487; HLA -A*02:04,HLA-A*02:07,HLA-A*24:02
SLPSWKSLL

SEQ ID NO: 7974 - protein, 11 aa, Homo sapiens
  Table 1.2; MORC1; ENSG00000114487; HLA -A*02:07
SLPSWKSLLNV

SEQ ID NO: 7975 - protein, 9 aa, Homo sapiens
  Table 1.2; MORC1; ENSG00000114487; HLA -A*02:01,HLA-A*02:04,HLA-A*02:07,HLA-B*37:01
SLSEVVVPM

SEQ ID NO: 7976 - protein, 9 aa, Homo sapiens
  Table 1.2; MORC1; ENSG00000114487; HLA -B*39:01
SLSSAKDVL

SEQ ID NO: 7977 - protein, 9 aa, Homo sapiens
  Table 1.2; MORC1; ENSG00000114487; HLA -A*02:01,HLA-B*13:02
SLSSFELSA

SEQ ID NO: 7978 - protein, 10 aa, Homo sapiens
  Table 1.2; MORC1; ENSG00000114487; HLA -B*07:02,HLA-B*56:01,HLA-C*07:02
SPASSQSTPV

SEQ ID NO: 7979 - protein, 11 aa, Homo sapiens
  Table 1.2; MORC1; ENSG00000114487; HLA -A*11:01
SPASSQSTPVK

SEQ ID NO: 7980 - protein, 9 aa, Homo sapiens
  Table 1.2; MORC1; ENSG00000114487; HLA -B*35:03
SPEEASDII

SEQ ID NO: 7981 - protein, 10 aa, Homo sapiens
  Table 1.2; MORC1; ENSG00000114487; HLA -B*35:01,HLA-B*35:03,HLA-B*55:01,HLA-C*03:03
SPEEASDIIY

SEQ ID NO: 7982 - protein, 11 aa, Homo sapiens
  Table 1.2; MORC1; ENSG00000114487; HLA -B*35:01,HLA-B*35:03,HLA-B*55:01
SPEEASDIIYF

SEQ ID NO: 7983 - protein, 9 aa, Homo sapiens
  Table 1.2; MORC1; ENSG00000114487; HLA -B*07:02,HLA-B*08:01,HLA-B*35:01,HLA-B*35:03,HLA-B*39:01, HLA-B*40:01,HLA-B*55:01,HLA-B*56:01,HLA-C*07:02
SPFKTEAEL

SEQ ID NO: 7984 - protein, 10 aa, Homo sapiens
  Table 1.2; MORC1; ENSG00000114487; HLA -B*07:02,HLA-B*35:01
SPFKTEAELM

SEQ ID NO: 7985 - protein, 11 aa, Homo sapiens
  Table 1.2; MORC1; ENSG00000114487; HLA -B*07:02,HLA-C*07:02
SPSKNEKEKQL

SEQ ID NO: 7986 - protein, 8 aa, Homo sapiens
  Table 1.2; MORC1; ENSG00000114487; HLA -A*30:02,HLA-B*15:01,HLA-B*15:03
SQAGMFIY

SEQ ID NO: 7987 - protein, 9 aa, Homo sapiens
  Table 1.2; MORC1; ENSG00000114487; HLA -A*02:01,HLA-A*02:03,HLA-A*02:04,HLA-A*26:01,HLA-A*30:01, HLA-A*32:01,HLA-B*13:02,HLA-B*15:01,HLA-B*15:03,HLA-B*39:01, HLA-B*40:02,HLA-B*46:01,HLA-B*49:01,HLA-B*55:01,HLA-C*02:02,
  HLA-C*06:02
SQIANITTV

SEQ ID NO: 7988 - protein, 10 aa, Homo sapiens
  Table 1.2; MORC1; ENSG00000114487; HLA -A*25:01,HLA-A*26:01,HLA-A*32:01,HLA-B*15:01,HLA-B*27:02, HLA-B*44:02,HLA-B*44:03,HLA-B*57:01,HLA-B*58:01,HLA-C*16:04
SQIANITTVW

SEQ ID NO: 7989 - protein, 9 aa, Homo sapiens
  Table 1.2; MORC1; ENSG00000114487; HLA -B*13:02
SQQQRIPVA

SEQ ID NO: 7990 - protein, 9 aa, Homo sapiens
  Table 1.2; MORC1; ENSG00000114487; HLA -A*02:03,HLA-B*13:02
SQRSQIANI

SEQ ID NO: 7991 - protein, 10 aa, Homo sapiens
  Table 1.2; MORC1; ENSG00000114487; HLA -B*13:02
SQSTPVKETV

SEQ ID NO: 7992 - protein, 11 aa, Homo sapiens
  Table 1.2; MORC1; ENSG00000114487; HLA -C*07:06
SQSTPVKETVR

SEQ ID NO: 7993 - protein, 9 aa, Homo sapiens
  Table 1.2; MORC1; ENSG00000114487; HLA -A*33:03,HLA-A*68:01,HLA-C*07:06
SSAKDVLQR

SEQ ID NO: 7994 - protein, 9 aa, Homo sapiens
  Table 1.2; MORC1; ENSG00000114487; HLA -A*11:01,HLA-A*31:01,HLA-A*33:01,HLA-A*33:03,HLA-A*68:01, HLA-B*27:05,HLA-C*07:06
SSFELSASR

SEQ ID NO: 7995 - protein, 10 aa, Homo sapiens
  Table 1.2; MORC1; ENSG00000114487; HLA -A*31:01,HLA-A*68:01,HLA-C*07:06
SSFELSASRR

SEQ ID NO: 7996 - protein, 9 aa, Homo sapiens
  Table 1.2; MORC1; ENSG00000114487; HLA -A*11:01
STCLTSAHK

SEQ ID NO: 7997 - protein, 10 aa, Homo sapiens
  Table 1.2; MORC1; ENSG00000114487; HLA -A*03:01,HLA-A*03:02,HLA-A*11:01,HLA-A*68:01,HLA-C*07:06
STISPSKNEK

SEQ ID NO: 7998 - protein, 9 aa, Homo sapiens
  Table 1.2; MORC1; ENSG00000114487; HLA -A*01:01,HLA-A*03:01,HLA-A*11:01,HLA-A*25:01,HLA-A*26:01, HLA-A*29:02,HLA-A*30:02,HLA-A*32:01,HLA-B*44:03,HLA-B*57:01
STLKFIGQY

SEQ ID NO: 7999 - protein, 10 aa, Homo sapiens
  Table 1.2; MORC1; ENSG00000114487; HLA -A*11:01
STPVKETVRK

SEQ ID NO: 8000 - protein, 8 aa, Homo sapiens
  Table 1.2; MORC1; ENSG00000114487; HLA -B*57:01
STTHSFLF

SEQ ID NO: 8001 - protein, 8 aa, Homo sapiens
  Table 1.2; MORC1; ENSG00000114487; HLA -A*31:01
SVIKYQNR

SEQ ID NO: 8002 - protein, 9 aa, Homo sapiens
  Table 1.2; MORC1; ENSG00000114487; HLA -A*24:02,HLA-A*25:01,HLA-A*26:01,HLA-A*29:02,HLA-A*32:01, HLA-A*68:01,HLA-B*38:01,HLA-B*58:01
SVTDDPQKF

SEQ ID NO: 8003 - protein, 9 aa, Homo sapiens
  Table 1.2; MORC1; ENSG00000114487; HLA -A*29:02
TARTLSLFY

SEQ ID NO: 8004 - protein, 9 aa, Homo sapiens
  Table 1.2; MORC1; ENSG00000114487; HLA -B*37:01
TDDPQKFAM

SEQ ID NO: 8005 - protein, 8 aa, Homo sapiens
  Table 1.2; MORC1; ENSG00000114487; HLA -B*37:01
TDKEDILM

SEQ ID NO: 8006 - protein, 10 aa, Homo sapiens
  Table 1.2; MORC1; ENSG00000114487; HLA -B*27:02
TDTYLEALLK

SEQ ID NO: 8007 - protein, 9 aa, Homo sapiens
  Table 1.2; MORC1; ENSG00000114487; HLA -A*25:01,HLA-A*30:01,HLA-B*18:01,HLA-B*27:02,HLA-B*37:01, HLA-B*38:01,HLA-B*40:01,HLA-B*44:02,HLA-B*44:03,HLA-B*49:01, HLA-C*02:02,HLA-C*16:04
TEAELMQQF

SEQ ID NO: 8008 - protein, 10 aa, Homo sapiens
  Table 1.2; MORC1; ENSG00000114487; HLA -B*08:01
TGINNRNLTL

SEQ ID NO: 8009 - protein, 11 aa, Homo sapiens
  Table 1.2; MORC1; ENSG00000114487; HLA -A*24:02
TGINNRNLTLF

SEQ ID NO: 8010 - protein, 9 aa, Homo sapiens
  Table 1.2; MORC1; ENSG00000114487; HLA -A*03:02
TISPSKNEK

SEQ ID NO: 8011 - protein, 9 aa, Homo sapiens
  Table 1.2; MORC1; ENSG00000114487; HLA -A*29:02,HLA-A*30:02
TLFCNEFGY

SEQ ID NO: 8012 - protein, 8 aa, Homo sapiens
  Table 1.2; MORC1; ENSG00000114487; HLA -A*30:02,HLA-B*15:01,HLA-B*46:01
TLKFIGQY

SEQ ID NO: 8013 - protein, 8 aa, Homo sapiens
  Table 1.2; MORC1; ENSG00000114487; HLA -A*02:04
TLLVIYNL

SEQ ID NO: 8014 - protein, 10 aa, Homo sapiens
  Table 1.2; MORC1; ENSG00000114487; HLA -A*02:04
TLLVIYNLKL

SEQ ID NO: 8015 - protein, 9 aa, Homo sapiens
  Table 1.2; MORC1; ENSG00000114487; HLA -A*03:01,HLA-A*03:02,HLA-A*11:01
TMSTISPSK

SEQ ID NO: 8016 - protein, 10 aa, Homo sapiens
  Table 1.2; MORC1; ENSG00000114487; HLA -B*07:02
TPVKETVRKL

SEQ ID NO: 8017 - protein, 9 aa, Homo sapiens
  Table 1.2; MORC1; ENSG00000114487; HLA -A*01:01
TSDSDIILV

SEQ ID NO: 8018 - protein, 8 aa, Homo sapiens
  Table 1.2; MORC1; ENSG00000114487; HLA -C*16:01
TSSFKGAF

SEQ ID NO: 8019 - protein, 9 aa, Homo sapiens
  Table 1.2; MORC1; ENSG00000114487; HLA -B*57:01
TSVLYFNPW

SEQ ID NO: 8020 - protein, 9 aa, Homo sapiens
  Table 1.2; MORC1; ENSG00000114487; HLA -A*02:01,HLA-A*23:01,HLA-B*35:03,HLA-B*40:01,HLA-B*58:01, HLA-C*03:03,HLA-C*03:04,HLA-C*05:01,HLA-C*07:04
VALPENVKL

SEQ ID NO: 8021 - protein, 8 aa, Homo sapiens
  Table 1.2; MORC1; ENSG00000114487; HLA -B*37:01
VEAKQKNL

SEQ ID NO: 8022 - protein, 8 aa, Homo sapiens
  Table 1.2; MORC1; ENSG00000114487; HLA -B*18:01,HLA-B*37:01
VEKPLNSF

SEQ ID NO: 8023 - protein, 10 aa, Homo sapiens
  Table 1.2; MORC1; ENSG00000114487; HLA -A*29:02,HLA-A*30:02,HLA-B*18:01,HLA-B*27:02,HLA-B*44:02, HLA-B*44:03
VEKPLNSFQY

SEQ ID NO: 8024 - protein, 9 aa, Homo sapiens
  Table 1.2; MORC1; ENSG00000114487; HLA -A*30:01,HLA-B*37:01,HLA-B*40:01,HLA-B*44:03
VENRSQAGM

SEQ ID NO: 8025 - protein, 8 aa, Homo sapiens
  Table 1.2; MORC1; ENSG00000114487; HLA -B*18:01
VEYISETK

SEQ ID NO: 8026 - protein, 9 aa, Homo sapiens
  Table 1.2; MORC1; ENSG00000114487; HLA -A*23:01,HLA-A*30:01,HLA-B*13:02,HLA-B*18:01,HLA-B*40:01, HLA-B*40:02,HLA-B*44:02,HLA-B*44:03,HLA-B*49:01
VEYISETKI

SEQ ID NO: 8027 - protein, 10 aa, Homo sapiens
  Table 1.2; MORC1; ENSG00000114487; HLA -A*30:01,HLA-B*49:01
VEYISETKIM

SEQ ID NO: 8028 - protein, 9 aa, Homo sapiens
  Table 1.2; MORC1; ENSG00000114487; HLA -A*24:02
VFSVDNEKL

SEQ ID NO: 8029 - protein, 8 aa, Homo sapiens
  Table 1.2; MORC1; ENSG00000114487; HLA -B*08:01
VIKYQNRL

SEQ ID NO: 8030 - protein, 9 aa, Homo sapiens
  Table 1.2; MORC1; ENSG00000114487; HLA -A*02:04
VIYNLKLLL

SEQ ID NO: 8031 - protein, 8 aa, Homo sapiens
  Table 1.2; MORC1; ENSG00000114487; HLA -A*32:01,HLA-B*15:01,HLA-B*15:03,HLA-B*46:01
VLPSSTNY

SEQ ID NO: 8032 - protein, 9 aa, Homo sapiens
  Table 1.2; MORC1; ENSG00000114487; HLA -A*29:02,HLA-A*30:02,HLA-B*15:01,HLA-B*46:01,HLA-C*07:04
VMGQYLVQY

SEQ ID NO: 8033 - protein, 10 aa, Homo sapiens
  Table 1.2; MORC1; ENSG00000114487; HLA -A*33:01,HLA-A*33:03
VNLSSGHIAR

SEQ ID NO: 8034 - protein, 8 aa, Homo sapiens
  Table 1.2; MORC1; ENSG00000114487; HLA -B*35:03,HLA-B*55:01
VPMEDVNL

SEQ ID NO: 8035 - protein, 11 aa, Homo sapiens
  Table 1.2; MORC1; ENSG00000114487; HLA -B*56:01
VPMEDVNLSSG

SEQ ID NO: 8036 - protein, 8 aa, Homo sapiens
  Table 1.2; MORC1; ENSG00000114487; HLA -B*51:01
VPMPSWLI

SEQ ID NO: 8037 - protein, 9 aa, Homo sapiens
  Table 1.2; MORC1; ENSG00000114487; HLA -A*01:01
VQEYNHLLK

SEQ ID NO: 8038 - protein, 9 aa, Homo sapiens
  Table 1.2; MORC1; ENSG00000114487; HLA -B*13:02
VQYCKDTGI

SEQ ID NO: 8039 - protein, 9 aa, Homo sapiens
  Table 1.2; MORC1; ENSG00000114487; HLA -A*31:01
VQYEKKIKR

SEQ ID NO: 8040 - protein, 9 aa, Homo sapiens
  Table 1.2; MORC1; ENSG00000114487; HLA -A*01:01,HLA-C*05:01
VSDKSNTDV

SEQ ID NO: 8041 - protein, 11 aa, Homo sapiens
  Table 1.2; MORC1; ENSG00000114487; HLA -C*05:01
VSDKSNTDVSL

SEQ ID NO: 8042 - protein, 8 aa, Homo sapiens
  Table 1.2; MORC1; ENSG00000114487; HLA -A*01:01,HLA-A*32:01,HLA-B*39:01,HLA-B*58:01,HLA-C*04:01, HLA-C*05:01
VTDDPQKF

SEQ ID NO: 8043 - protein, 10 aa, Homo sapiens
  Table 1.2; MORC1; ENSG00000114487; HLA -A*01:01,HLA-A*02:07,HLA-C*05:01
VTDDPQKFAM

SEQ ID NO: 8044 - protein, 11 aa, Homo sapiens
  Table 1.2; MORC1; ENSG00000114487; HLA -A*01:01
VTDDPQKFAME

SEQ ID NO: 8045 - protein, 9 aa, Homo sapiens
  Table 1.2; MORC1; ENSG00000114487; HLA -A*32:01
VTIDARHRL

SEQ ID NO: 8046 - protein, 9 aa, Homo sapiens
  Table 1.2; MORC1; ENSG00000114487; HLA -A*25:01,HLA-A*26:01,HLA-A*30:02,HLA-A*32:01,HLA-C*16:01
VTSSFKGAF

SEQ ID NO: 8047 - protein, 10 aa, Homo sapiens
  Table 1.2; MORC1; ENSG00000114487; HLA -A*03:01,HLA-A*03:02,HLA-A*11:01
VTSSFKGAFK

SEQ ID NO: 8048 - protein, 9 aa, Homo sapiens
  Table 1.2; MORC1; ENSG00000114487; HLA -A*02:07
VVPMPSWLI

SEQ ID NO: 8049 - protein, 8 aa, Homo sapiens
  Table 1.2; MORC1; ENSG00000114487; HLA -A*25:01,HLA-B*57:01,HLA-B*58:01
VVVPMPSW

SEQ ID NO: 8050 - protein, 10 aa, Homo sapiens
  Table 1.2; MORC1; ENSG00000114487; HLA -A*31:01,HLA-A*33:01,HLA-A*33:03,HLA-A*68:01,HLA-C*07:06
YCKDTGINNR

SEQ ID NO: 8051 - protein, 8 aa, Homo sapiens
  Table 1.2; MORC1; ENSG00000114487; HLA -B*37:01
YDSNTRGI

SEQ ID NO: 8052 - protein, 8 aa, Homo sapiens
  Table 1.2; MORC1; ENSG00000114487; HLA -A*23:01
YFFPEHQL

SEQ ID NO: 8053 - protein, 9 aa, Homo sapiens
  Table 1.2; MORC1; ENSG00000114487; HLA -A*24:02
YFNPWMRIF

SEQ ID NO: 8054 - protein, 8 aa, Homo sapiens
  Table 1.2; MORC1; ENSG00000114487; HLA -B*27:02
YGVNVENR

SEQ ID NO: 8055 - protein, 9 aa, Homo sapiens
  Table 1.2; MORC1; ENSG00000114487; HLA -A*03:01,HLA-A*03:02,HLA-A*11:01,HLA-A*68:01
YISETKIMK

SEQ ID NO: 8056 - protein, 10 aa, Homo sapiens
  Table 1.2; MORC1; ENSG00000114487; HLA -A*03:01,HLA-A*11:01,HLA-A*68:01
YISETKIMKK

SEQ ID NO: 8057 - protein, 8 aa, Homo sapiens
  Table 1.2; MORC1; ENSG00000114487; HLA -B*15:01,HLA-B*15:03,HLA-B*37:01,HLA-B*46:01,HLA-C*14:02
YLYVTSSF

SEQ ID NO: 8058 - protein, 9 aa, Homo sapiens
  Table 1.2; MORC1; ENSG00000114487; HLA -A*03:01
YLYVTSSFK

SEQ ID NO: 8059 - protein, 9 aa, Homo sapiens
  Table 1.2; MORC1; ENSG00000114487; HLA -B*07:02,HLA-B*08:01,HLA-B*35:03,HLA-B*51:01,HLA-B*56:01, HLA-C*07:02
YPALQRAQL

SEQ ID NO: 8060 - protein, 11 aa, Homo sapiens
  Table 1.2; MORC1; ENSG00000114487; HLA -B*07:02
YPALQRAQLRL

SEQ ID NO: 8061 - protein, 9 aa, Homo sapiens
  Table 1.2; MORC1; ENSG00000114487; HLA -A*03:02,HLA-A*11:01,HLA-B*27:02,HLA-B*27:05
YQNDIDVEK

SEQ ID NO: 8062 - protein, 9 aa, Homo sapiens
  Table 1.2; MORC1; ENSG00000114487; HLA -B*08:01,HLA-B*46:01,HLA-C*16:01
YSNNRLIKM

SEQ ID NO: 8063 - protein, 9 aa, Homo sapiens
  Table 1.2; MORC1; ENSG00000114487; HLA -B*54:01
YVTSSFKGA

SEQ ID NO: 8064 - protein, 10 aa, Homo sapiens
  Table 1.2; MORC1; ENSG00000114487; HLA -A*25:01,HLA-A*26:01
YVTSSFKGAF

SEQ ID NO: 8065 - protein, 10 aa, Homo sapiens
  Table 1.2; PAGE1; ENSG00000068985; HLA -A*11:01,HLA-B*27:02
ADSQELVQPK

SEQ ID NO: 8066 - protein, 10 aa, Homo sapiens
  Table 1.2; PAGE1; ENSG00000068985; HLA -A*03:02,HLA-A*11:01,HLA-B*27:02
ADSQEQVHPK

SEQ ID NO: 8067 - protein, 8 aa, Homo sapiens
  Table 1.2; PAGE1; ENSG00000068985; HLA -B*18:01
DEVESPTQ

SEQ ID NO: 8068 - protein, 8 aa, Homo sapiens
  Table 1.2; PAGE1; ENSG00000068985; HLA -B*51:01
DGPDTKRV

SEQ ID NO: 8069 - protein, 8 aa, Homo sapiens
  Table 1.2; PAGE1; ENSG00000068985; HLA -B*39:01,HLA-B*51:01,HLA-C*01:02
DGPDVQEL

SEQ ID NO: 8070 - protein, 9 aa, Homo sapiens
  Table 1.2; PAGE1; ENSG00000068985; HLA -A*03:02,HLA-A*11:01,HLA-A*33:01,HLA-A*33:03,HLA-A*68:01, HLA-B*27:02,HLA-C*07:06
DSQELVQPK

SEQ ID NO: 8071 - protein, 9 aa, Homo sapiens
  Table 1.2; PAGE1; ENSG00000068985; HLA -A*03:02,HLA-A*11:01,HLA-A*33:01,HLA-A*33:03,HLA-A*68:01, HLA-B*27:02,HLA-C*07:06
DSQEQVHPK

SEQ ID NO: 8072 - protein, 8 aa, Homo sapiens
  Table 1.2; PAGE1; ENSG00000068985; HLA -A*33:01
DTKRVCLR

SEQ ID NO: 8073 - protein, 11 aa, Homo sapiens
  Table 1.2; PAGE1; ENSG00000068985; HLA -A*11:01,HLA-A*33:01,HLA-A*33:03,HLA-A*68:01,HLA-B*27:02, HLA-C*07:06
EADSQELVQPK

SEQ ID NO: 8074 - protein, 11 aa, Homo sapiens
  Table 1.2; PAGE1; ENSG00000068985; HLA -A*33:01,HLA-A*33:03,HLA-A*68:01,HLA-B*27:02
EADSQEQVHPK

SEQ ID NO: 8075 - protein, 10 aa, Homo sapiens
  Table 1.2; PAGE1; ENSG00000068985; HLA -A*33:01,HLA-A*33:03,HLA-A*68:01
ELGDGPDTKR

SEQ ID NO: 8076 - protein, 9 aa, Homo sapiens
  Table 1.2; PAGE1; ENSG00000068985; HLA -B*35:03
EPEADSQEL

SEQ ID NO: 8077 - protein, 11 aa, Homo sapiens
  Table 1.2; PAGE1; ENSG00000068985; HLA -B*38:01
ERGDGPDVQEL

SEQ ID NO: 8078 - protein, 9 aa, Homo sapiens
  Table 1.2; PAGE1; ENSG00000068985; HLA -B*37:01
GDGPDTKRV

SEQ ID NO: 8079 - protein, 11 aa, Homo sapiens
  Table 1.2; PAGE1; ENSG00000068985; HLA -A*30:01
GDGPDTKRVCL

SEQ ID NO: 8080 - protein, 9 aa, Homo sapiens
  Table 1.2; PAGE1; ENSG00000068985; HLA -A*30:01,HLA-B*37:01,HLA-B*38:01,HLA-B*40:01,HLA-B*40:02
GDGPDVQEL

SEQ ID NO: 8081 - protein, 9 aa, Homo sapiens
  Table 1.2; PAGE1; ENSG00000068985; HLA -B*07:02,HLA-B*08:01,HLA-C*07:02
GPDTKRVCL

SEQ ID NO: 8082 - protein, 9 aa, Homo sapiens
  Table 1.2; PAGE1; ENSG00000068985; HLA -B*35:03
GPDVQELGL

SEQ ID NO: 8083 - protein, 11 aa, Homo sapiens
  Table 1.2; PAGE1; ENSG00000068985; HLA -B*27:05,HLA-B*38:01,HLA-B*39:01
GQEPEADSQEL

SEQ ID NO: 8084 - protein, 11 aa, Homo sapiens
  Table 1.2; PAGE1; ENSG00000068985; HLA -A*02:01,HLA-A*02:07
KLPAEGPEPEA

SEQ ID NO: 8085 - protein, 9 aa, Homo sapiens
  Table 1.2; PAGE1; ENSG00000068985; HLA -A*02:01
LGLPNPEEV

SEQ ID NO: 8086 - protein, 8 aa, Homo sapiens
  Table 1.2; PAGE1; ENSG00000068985; HLA -B*51:01,HLA-B*54:01
LPAEGPEP

SEQ ID NO: 8087 - protein, 10 aa, Homo sapiens
  Table 1.2; PAGE1; ENSG00000068985; HLA -B*35:01,HLA-B*35:03,HLA-B*51:01,HLA-B*54:01,HLA-B*55:01, HLA-B*56:01
LPAEGPEPEA

SEQ ID NO: 8088 - protein, 9 aa, Homo sapiens
  Table 1.2; PAGE1; ENSG00000068985; HLA -B*35:03,HLA-B*55:01,HLA-B*56:01
LPNPEEVKT

SEQ ID NO: 8089 - protein, 9 aa, Homo sapiens
  Table 1.2; PAGE1; ENSG00000068985; HLA -B*27:05,HLA-B*38:01
LRNEEQMKL

SEQ ID NO: 8090 - protein, 9 aa, Homo sapiens
  Table 1.2; PAGE1; ENSG00000068985; HLA -B*18:01
NEEQMKLPA

SEQ ID NO: 8091 - protein, 9 aa, Homo sapiens
  Table 1.2; PAGE1; ENSG00000068985; HLA -A*68:01,HLA-B*27:02
QDSTPAEER

SEQ ID NO: 8092 - protein, 8 aa, Homo sapiens
  Table 1.2; PAGE1; ENSG00000068985; HLA -B*40:02
QELVQPKT

SEQ ID NO: 8093 - protein, 10 aa, Homo sapiens
  Table 1.2; PAGE1; ENSG00000068985; HLA -A*30:01,HLA-B*40:01,HLA-B*40:02,HLA-B*44:02,HLA-B*44:03, HLA-B*49:01
QEPEADSQEL

SEQ ID NO: 8094 - protein, 11 aa, Homo sapiens
  Table 1.2; PAGE1; ENSG00000068985; HLA -B*49:01
QEPEADSQELV

SEQ ID NO: 8095 - protein, 8 aa, Homo sapiens
  Table 1.2; PAGE1; ENSG00000068985; HLA -B*07:02,HLA-B*08:01,HLA-C*07:02
QPKTGCEL

SEQ ID NO: 8096 - protein, 11 aa, Homo sapiens
  Table 1.2; PAGE1; ENSG00000068985; HLA -A*33:01,HLA-A*33:03,HLA-A*68:01,HLA-C*07:06
QSQDSTPAEER

SEQ ID NO: 8097 - protein, 10 aa, Homo sapiens
  Table 1.2; PAGE1; ENSG00000068985; HLA -A*31:01
QVHPKTGCER

SEQ ID NO: 8098 - protein, 10 aa, Homo sapiens
  Table 1.2; PAGE1; ENSG00000068985; HLA -C*05:01
RGDGPDVQEL

SEQ ID NO: 8099 - protein, 9 aa, Homo sapiens
  Table 1.2; PAGE1; ENSG00000068985; HLA -B*56:01
RPMIYVESS

SEQ ID NO: 8100 - protein, 9 aa, Homo sapiens
  Table 1.2; PAGE1; ENSG00000068985; HLA -B*13:02
SQELVQPKT

SEQ ID NO: 8101 - protein, 8 aa, Homo sapiens
  Table 1.2; PAGE1; ENSG00000068985; HLA -A*03:02,HLA-A*11:01
SQEQVHPK

SEQ ID NO: 8102 - protein, 9 aa, Homo sapiens
  Table 1.2; PAGE1; ENSG00000068985; HLA -C*05:01
SSDEQPDEV

SEQ ID NO: 8103 - protein, 8 aa, Homo sapiens
  Table 1.2; PAGE1; ENSG00000068985; HLA -B*37:01
VESPTQSQ

SEQ ID NO: 8104 - protein, 9 aa, Homo sapiens
  Table 1.2; PAGE1; ENSG00000068985; HLA -B*15:03,HLA-B*46:01,HLA-C*01:02
VQPKTGCEL

SEQ ID NO: 8105 - protein, 10 aa, Homo sapiens
  Table 1.2; PAGE5; ENSG00000158639; HLA -B*27:02
AFQQELALLK

SEQ ID NO: 8106 - protein, 10 aa, Homo sapiens
  Table 1.2; PAGE5; ENSG00000158639; HLA -A*31:01
AGNRGWAGTR

SEQ ID NO: 8107 - protein, 9 aa, Homo sapiens
  Table 1.2; PAGE5; ENSG00000158639; HLA -B*07:02,HLA-B*55:01,HLA-B*56:01,HLA-C*07:02
APAVQGTDV

SEQ ID NO: 8108 - protein, 11 aa, Homo sapiens
  Table 1.2; PAGE5; ENSG00000158639; HLA -B*54:01,HLA-B*55:01,HLA-B*56:01
APAVQGTDVEA

SEQ ID NO: 8109 - protein, 10 aa, Homo sapiens
  Table 1.2; PAGE5; ENSG00000158639; HLA -B*56:01
APSGEIKNEG

SEQ ID NO: 8110 - protein, 10 aa, Homo sapiens
  Table 1.2; PAGE5; ENSG00000158639; HLA -A*25:01,HLA-A*30:02,HLA-B*15:01
AVQGTDVEAF

SEQ ID NO: 8111 - protein, 9 aa, Homo sapiens
  Table 1.2; PAGE5; ENSG00000158639; HLA -B*51:01
DAPGDGPDV

SEQ ID NO: 8112 - protein, 10 aa, Homo sapiens
  Table 1.2; PAGE5; ENSG00000158639; HLA -A*68:01
DAPGDGPDVR

SEQ ID NO: 8113 - protein, 8 aa, Homo sapiens
  Table 1.2; PAGE5; ENSG00000158639; HLA -A*33:01,HLA-A*33:03,HLA-A*68:01
DMSEHVTR

SEQ ID NO: 8114 - protein, 8 aa, Homo sapiens
  Table 1.2; PAGE5; ENSG00000158639; HLA -B*51:01,HLA-B*54:01,HLA-B*55:01,HLA-B*56:01
DPTKVLEA

SEQ ID NO: 8115 - protein, 9 aa, Homo sapiens
  Table 1.2; PAGE5; ENSG00000158639; HLA -A*68:01,HLA-A*68:02,HLA-B*35:03,HLA-B*38:01
DVEAFQQEL

SEQ ID NO: 8116 - protein, 10 aa, Homo sapiens
  Table 1.2; PAGE5; ENSG00000158639; HLA -A*25:01,HLA-A*26:01,HLA-A*33:01,HLA-A*33:03
DVREGTLPTF

SEQ ID NO: 8117 - protein, 9 aa, Homo sapiens
  Table 1.2; PAGE5; ENSG00000158639; HLA -A*25:01,HLA-A*68:01,HLA-B*35:01,HLA-B*35:03,HLA-B*39:01, HLA-B*51:01,HLA-C*03:03
EAFQQELAL

SEQ ID NO: 8118 - protein, 10 aa, Homo sapiens
  Table 1.2; PAGE5; ENSG00000158639; HLA -A*25:01,HLA-A*26:01,HLA-A*33:03,HLA-A*68:01,HLA-A*68:02
EAFQQELALL

SEQ ID NO: 8119 - protein, 11 aa, Homo sapiens
  Table 1.2; PAGE5; ENSG00000158639; HLA -A*68:01,HLA-B*27:02
EAFQQELALLK

SEQ ID NO: 8120 - protein, 11 aa, Homo sapiens
  Table 1.2; PAGE5; ENSG00000158639; HLA -A*33:01,HLA-A*68:01,HLA-A*68:02
EDAPGDGPDVR

SEQ ID NO: 8121 - protein, 11 aa, Homo sapiens
  Table 1.2; PAGE5; ENSG00000158639; HLA -B*38:01,HLA-B*44:02
EEEPPTDNQGI

SEQ ID NO: 8122 - protein, 10 aa, Homo sapiens
  Table 1.2; PAGE5; ENSG00000158639; HLA -B*44:02,HLA-B*44:03
EEPPTDNQGI

SEQ ID NO: 8123 - protein, 11 aa, Homo sapiens
  Table 1.2; PAGE5; ENSG00000158639; HLA -A*33:01,HLA-A*33:03
EHVTRSQSSER

SEQ ID NO: 8124 - protein, 10 aa, Homo sapiens
  Table 1.2; PAGE5; ENSG00000158639; HLA -A*25:01,HLA-A*26:01
EIKNEGAPAV

SEQ ID NO: 8125 - protein, 10 aa, Homo sapiens
  Table 1.2; PAGE5; ENSG00000158639; HLA -A*68:01,HLA-A*68:02
ESSQPVGPVI

SEQ ID NO: 8126 - protein, 9 aa, Homo sapiens
  Table 1.2; PAGE5; ENSG00000158639; HLA -A*26:01,HLA-A*68:02
EVRDMSEHV

SEQ ID NO: 8127 - protein, 11 aa, Homo sapiens
  Table 1.2; PAGE5; ENSG00000158639; HLA -A*31:01,HLA-A*33:01,HLA-A*33:03,HLA-A*68:01,HLA-B*57:01, HLA-C*07:06
EVRDMSEHVTR

SEQ ID NO: 8128 - protein, 10 aa, Homo sapiens
  Table 1.2; PAGE5; ENSG00000158639; HLA -A*02:01,HLA-A*02:03,HLA-A*02:04,HLA-B*13:02
FQQELALLKI

SEQ ID NO: 8129 - protein, 9 aa, Homo sapiens
  Table 1.2; PAGE5; ENSG00000158639; HLA -B*40:02
GEIKNEGAP

SEQ ID NO: 8130 - protein, 10 aa, Homo sapiens
  Table 1.2; PAGE5; ENSG00000158639; HLA -A*30:01,HLA-B*40:01,HLA-B*40:02,HLA-B*49:01
GEIKNEGAPA

SEQ ID NO: 8131 - protein, 11 aa, Homo sapiens
  Table 1.2; PAGE5; ENSG00000158639; HLA -A*30:01,HLA-B*13:02,HLA-B*40:01,HLA-B*40:02,HLA-B*44:03, HLA-B*49:01,HLA-C*16:04
GEIKNEGAPAV

SEQ ID NO: 8132 - protein, 9 aa, Homo sapiens
  Table 1.2; PAGE5; ENSG00000158639; HLA -A*03:02
GIAPSGEIK

SEQ ID NO: 8133 - protein, 9 aa, Homo sapiens
  Table 1.2; PAGE5; ENSG00000158639; HLA -B*07:02,HLA-B*35:03,HLA-C*05:01,HLA-C*07:02
GPDVREGTL

SEQ ID NO: 8134 - protein, 11 aa, Homo sapiens
  Table 1.2; PAGE5; ENSG00000158639; HLA -B*39:01
GTDVEAFQQEL

SEQ ID NO: 8135 - protein, 10 aa, Homo sapiens
  Table 1.2; PAGE5; ENSG00000158639; HLA -A*03:01,HLA-A*03:02,HLA-A*11:01,HLA-B*27:02,HLA-B*57:01
GTLPTFDPTK

SEQ ID NO: 8136 - protein, 9 aa, Homo sapiens
  Table 1.2; PAGE5; ENSG00000158639; HLA -C*16:01
GTREEVRDM

SEQ ID NO: 8137 - protein, 10 aa, Homo sapiens
  Table 1.2; PAGE5; ENSG00000158639; HLA -A*68:01,HLA-C*07:06
HVTRSQSSER

SEQ ID NO: 8138 - protein, 9 aa, Homo sapiens
  Table 1.2; PAGE5; ENSG00000158639; HLA -B*15:03
IKNEGAPAV

SEQ ID NO: 8139 - protein, 9 aa, Homo sapiens
  Table 1.2; PAGE5; ENSG00000158639; HLA -A*03:01,HLA-A*03:02,HLA-A*11:01
IVQQPTEEK

SEQ ID NO: 8140 - protein, 10 aa, Homo sapiens
  Table 1.2; PAGE5; ENSG00000158639; HLA -A*68:01
IVQQPTEEKR

SEQ ID NO: 8141 - protein, 10 aa, Homo sapiens
  Table 1.2; PAGE5; ENSG00000158639; HLA -B*27:05,HLA-B*40:01,HLA-B*40:02,HLA-B*58:01
KVLEAGEGQL

SEQ ID NO: 8142 - protein, 8 aa, Homo sapiens
  Table 1.2; PAGE5; ENSG00000158639; HLA -B*39:01,HLA-B*40:01
LEAGEGQL

SEQ ID NO: 8143 - protein, 8 aa, Homo sapiens
  Table 1.2; PAGE5; ENSG00000158639; HLA -B*27:02
LPTFDPTK

SEQ ID NO: 8144 - protein, 9 aa, Homo sapiens
  Table 1.2; PAGE5; ENSG00000158639; HLA -B*35:03,HLA-B*51:01,HLA-B*54:01,HLA-B*56:01
LPTFDPTKV

SEQ ID NO: 8145 - protein, 10 aa, Homo sapiens
  Table 1.2; PAGE5; ENSG00000158639; HLA -B*35:03
LPTFDPTKVL

SEQ ID NO: 8146 - protein, 9 aa, Homo sapiens
  Table 1.2; PAGE5; ENSG00000158639; HLA -A*31:01
MQAPWAGNR

SEQ ID NO: 8147 - protein, 11 aa, Homo sapiens
  Table 1.2; PAGE5; ENSG00000158639; HLA -B*57:01
MQAPWAGNRGW

SEQ ID NO: 8148 - protein, 11 aa, Homo sapiens
  Table 1.2; PAGE5; ENSG00000158639; HLA -B*27:02
PAVQGTDVEAF

SEQ ID NO: 8149 - protein, 8 aa, Homo sapiens
  Table 1.2; PAGE5; ENSG00000158639; HLA -B*44:03,HLA-B*49:01
QELALLKI

SEQ ID NO: 8150 - protein, 11 aa, Homo sapiens
  Table 1.2; PAGE5; ENSG00000158639; HLA -A*30:01,HLA-B*38:01,HLA-B*40:01,HLA-B*44:02,HLA-B*44:03, HLA-B*49:01
QESSQPVGPVI

SEQ ID NO: 8151 - protein, 9 aa, Homo sapiens
  Table 1.2; PAGE5; ENSG00000158639; HLA -B*07:02
QGIAPSGEI

SEQ ID NO: 8152 - protein, 10 aa, Homo sapiens
  Table 1.2; PAGE5; ENSG00000158639; HLA -B*27:02
QGIAPSGEIK

SEQ ID NO: 8153 - protein, 8 aa, Homo sapiens
  Table 1.2; PAGE5; ENSG00000158639; HLA -B*56:01
QPVGPVIV

SEQ ID NO: 8154 - protein, 9 aa, Homo sapiens
  Table 1.2; PAGE5; ENSG00000158639; HLA -B*35:01,HLA-B*56:01
QPVGPVIVQ

SEQ ID NO: 8155 - protein, 11 aa, Homo sapiens
  Table 1.2; PAGE5; ENSG00000158639; HLA -B*56:01
QPVGPVIVQQP

SEQ ID NO: 8156 - protein, 9 aa, Homo sapiens
  Table 1.2; PAGE5; ENSG00000158639; HLA -B*13:02,HLA-B*38:01
QQELALLKI

SEQ ID NO: 8157 - protein, 9 aa, Homo sapiens
  Table 1.2; PAGE5; ENSG00000158639; HLA -A*31:01
RDMSEHVTR

SEQ ID NO: 8158 - protein, 8 aa, Homo sapiens
  Table 1.2; PAGE5; ENSG00000158639; HLA -B*37:01
REGTLPTF

SEQ ID NO: 8159 - protein, 8 aa, Homo sapiens
  Table 1.2; PAGE5; ENSG00000158639; HLA -B*13:02,HLA-B*15:03,HLA-B*39:01,HLA-B*51:01
SQPVGPVI

SEQ ID NO: 8160 - protein, 9 aa, Homo sapiens
  Table 1.2; PAGE5; ENSG00000158639; HLA -A*02:03,HLA-A*02:07,HLA-B*13:02
SQPVGPVIV

SEQ ID NO: 8161 - protein, 9 aa, Homo sapiens
  Table 1.2; PAGE5; ENSG00000158639; HLA -A*23:01,HLA-A*32:01,HLA-B*13:02,HLA-B*38:01,HLA-B*39:01, HLA-B*46:01,HLA-B*51:01,HLA-B*58:01,HLA-C*03:03,HLA-C*03:04, HLA-C*16:02
SSQPVGPVI

SEQ ID NO: 8162 - protein, 10 aa, Homo sapiens
  Table 1.2; PAGE5; ENSG00000158639; HLA -A*30:01,HLA-A*68:02,HLA-B*38:01,HLA-B*39:01,HLA-B*40:01, HLA-B*40:02
TDVEAFQQEL

SEQ ID NO: 8163 - protein, 8 aa, Homo sapiens
  Table 1.2; PAGE5; ENSG00000158639; HLA -C*04:01
TFDPTKVL

SEQ ID NO: 8164 - protein, 9 aa, Homo sapiens
  Table 1.2; PAGE5; ENSG00000158639; HLA -C*04:01
TFDPTKVLE

SEQ ID NO: 8165 - protein, 9 aa, Homo sapiens
  Table 1.2; PAGE5; ENSG00000158639; HLA -A*02:07
TLPTFDPTK

SEQ ID NO: 8166 - protein, 10 aa, Homo sapiens
  Table 1.2; PAGE5; ENSG00000158639; HLA -A*02:01,HLA-A*02:03,HLA-A*02:04,HLA-A*02:07,HLA-A*68:02
TLPTFDPTKV

SEQ ID NO: 8167 - protein, 11 aa, Homo sapiens
  Table 1.2; PAGE5; ENSG00000158639; HLA -A*02:01,HLA-A*02:03,HLA-A*02:07,HLA-A*24:02
TLPTFDPTKVL

SEQ ID NO: 8168 - protein, 8 aa, Homo sapiens
  Table 1.2; PAGE5; ENSG00000158639; HLA -A*30:01,HLA-B*18:01,HLA-B*37:01,HLA-B*39:01,HLA-B*40:01, HLA-B*40:02,HLA-B*49:01,HLA-C*16:04
VEAFQQEL

SEQ ID NO: 8169 - protein, 9 aa, Homo sapiens
  Table 1.2; PAGE5; ENSG00000158639; HLA -B*49:01
VEAFQQELA

SEQ ID NO: 8170 - protein, 10 aa, Homo sapiens
  Table 1.2; PAGE5; ENSG00000158639; HLA -A*30:01,HLA-B*40:01
VEAFQQELAL

SEQ ID NO: 8171 - protein, 11 aa, Homo sapiens
  Table 1.2; PAGE5; ENSG00000158639; HLA -B*40:01
VEAFQQELALL

SEQ ID NO: 8172 - protein, 10 aa, Homo sapiens
  Table 1.2; PAGE5; ENSG00000158639; HLA -A*03:01,HLA-A*03:02,HLA-A*11:01
VIVQQPTEEK

SEQ ID NO: 8173 - protein, 9 aa, Homo sapiens
  Table 1.2; PAGE5; ENSG00000158639; HLA -A*02:01,HLA-B*39:01,HLA-C*05:01
VLEAGEGQL

SEQ ID NO: 8174 - protein, 9 aa, Homo sapiens
  Table 1.2; PAGE5; ENSG00000158639; HLA -A*32:01,HLA-B*15:01,HLA-B*15:03,HLA-B*38:01,HLA-B*39:01
VQGTDVEAF

SEQ ID NO: 8175 - protein, 10 aa, Homo sapiens
  Table 1.2; PAGE5; ENSG00000158639; HLA -B*27:05
VRDMSEHVTR

SEQ ID NO: 8176 - protein, 9 aa, Homo sapiens
  Table 1.2; PAGE5; ENSG00000158639; HLA -B*27:02,HLA-B*27:05
VREGTLPTF

SEQ ID NO: 8177 - protein, 9 aa, Homo sapiens
  Table 1.2; PAGE5; ENSG00000158639; HLA -A*31:01,HLA-A*33:01,HLA-A*33:03
VTRSQSSER

SEQ ID NO: 8178 - protein, 9 aa, Homo sapiens
  Table 1.2; PASD1; ENSG00000166049; HLA -A*32:01,HLA-B*07:02,HLA-B*13:02,HLA-B*15:03,HLA-B*39:01, HLA-B*46:01,HLA-B*51:01,HLA-B*58:01,HLA-C*01:02,HLA-C*03:03, HLA-C*03:04,HLA-C*16:02
AAAAAAAAI

SEQ ID NO: 8179 - protein, 9 aa, Homo sapiens
  Table 1.2; PASD1; ENSG00000166049; HLA -C*05:01
AAEQQPSGF

SEQ ID NO: 8180 - protein, 10 aa, Homo sapiens
  Table 1.2; PASD1; ENSG00000166049; HLA -A*01:01,HLA-A*30:02
AAEQQPSGFY

SEQ ID NO: 8181 - protein, 9 aa, Homo sapiens
  Table 1.2; PASD1; ENSG00000166049; HLA -C*01:02
AAGASAQPL

SEQ ID NO: 8182 - protein, 8 aa, Homo sapiens
  Table 1.2; PASD1; ENSG00000166049; HLA -C*05:01
AAYQPDQM

SEQ ID NO: 8183 - protein, 9 aa, Homo sapiens
  Table 1.2; PASD1; ENSG00000166049; HLA -A*33:01,HLA-A*33:03,HLA-A*68:01,HLA-C*07:06
AAYQPDQMR

SEQ ID NO: 8184 - protein, 11 aa, Homo sapiens
  Table 1.2; PASD1; ENSG00000166049; HLA -B*54:01,HLA-B*56:01
AAYQPDQMRSA

SEQ ID NO: 8185 - protein, 10 aa, Homo sapiens
  Table 1.2; PASD1; ENSG00000166049; HLA -A*30:02,HLA-B*15:03
ACVPQEDRLY

SEQ ID NO: 8186 - protein, 8 aa, Homo sapiens
  Table 1.2; PASD1; ENSG00000166049; HLA -B*37:01
ADPVDLEF

SEQ ID NO: 8187 - protein, 8 aa, Homo sapiens
  Table 1.2; PASD1; ENSG00000166049; HLA -A*30:01,HLA-B*37:01,HLA-B*40:01,HLA-B*44:02,HLA-B*44:03
AEIVGKKL

SEQ ID NO: 8188 - protein, 9 aa, Homo sapiens
  Table 1.2; PASD1; ENSG00000166049; HLA -A*30:01,HLA-B*37:01,HLA-B*40:01,HLA-B*40:02,HLA-B*44:02, HLA-B*44:03,HLA-B*49:01
AEIVGKKLL

SEQ ID NO: 8189 - protein, 8 aa, Homo sapiens
  Table 1.2; PASD1; ENSG00000166049; HLA -A*30:01,HLA-B*37:01,HLA-B*40:01,HLA-B*49:01
AENISSLL

SEQ ID NO: 8190 - protein, 9 aa, Homo sapiens
  Table 1.2; PASD1; ENSG00000166049; HLA -B*49:01
AENISSLLG

SEQ ID NO: 8191 - protein, 11 aa, Homo sapiens
  Table 1.2; PASD1; ENSG00000166049; HLA -A*30:01,HLA-B*40:01,HLA-B*44:02,HLA-B*44:03,HLA-B*49:01
AENISSLLGHL

SEQ ID NO: 8192 - protein, 8 aa, Homo sapiens
  Table 1.2; PASD1; ENSG00000166049; HLA -B*37:01,HLA-B*44:02,HLA-B*44:03
AEQQPSGF

SEQ ID NO: 8193 - protein, 9 aa, Homo sapiens
  Table 1.2; PASD1; ENSG00000166049; HLA -A*30:02,HLA-B*15:01,HLA-B*15:03,HLA-B*27:02,HLA-B*37:01, HLA-B*44:02,HLA-B*44:03,HLA-C*16:04
AEQQPSGFY

SEQ ID NO: 8194 - protein, 10 aa, Homo sapiens
  Table 1.2; PASD1; ENSG00000166049; HLA -B*44:02
AEQQPSGFYQ

SEQ ID NO: 8195 - protein, 9 aa, Homo sapiens
  Table 1.2; PASD1; ENSG00000166049; HLA -B*37:01
AEQTRLMPA

SEQ ID NO: 8196 - protein, 8 aa, Homo sapiens
  Table 1.2; PASD1; ENSG00000166049; HLA -A*30:02,HLA-C*14:02
AFQGPAAY

SEQ ID NO: 8197 - protein, 8 aa, Homo sapiens
  Table 1.2; PASD1; ENSG00000166049; HLA -B*08:01
AGQVKRPL

SEQ ID NO: 8198 - protein, 9 aa, Homo sapiens
  Table 1.2; PASD1; ENSG00000166049; HLA -C*01:02,HLA-C*14:02
AIQNQQNAL

SEQ ID NO: 8199 - protein, 10 aa, Homo sapiens
  Table 1.2; PASD1; ENSG00000166049; HLA -A*25:01,HLA-A*26:01
AISSSSIPQF

SEQ ID NO: 8200 - protein, 9 aa, Homo sapiens
  Table 1.2; PASD1; ENSG00000166049; HLA -A*03:02,HLA-A*11:01,HLA-A*31:01,HLA-A*33:03,HLA-A*68:01, HLA-B*13:02,HLA-B*27:05,HLA-C*07:06
AQPIVPVQR

SEQ ID NO: 8201 - protein, 8 aa, Homo sapiens
  Table 1.2; PASD1; ENSG00000166049; HLA -B*56:01
AVYVEPAA

SEQ ID NO: 8202 - protein, 9 aa, Homo sapiens
  Table 1.2; PASD1; ENSG00000166049; HLA -A*02:01,HLA-A*02:03,HLA-A*03:01,HLA-A*03:02,HLA-A*11:01, HLA-A*25:01,HLA-A*32:01,HLA-B*13:02,HLA-B*27:05,HLA-B*37:01, HLA-B*40:02,HLA-B*46:01,HLA-B*54:01,HLA-B*55:01,HLA-B*56:01,
  HLA-C*03:03
AVYVEPAAA

SEQ ID NO: 8203 - protein, 10 aa, Homo sapiens
  Table 1.2; PASD1; ENSG00000166049; HLA -A*02:03,HLA-A*03:01,HLA-B*54:01,HLA-B*56:01
AVYVEPAAAA

SEQ ID NO: 8204 - protein, 11 aa, Homo sapiens
  Table 1.2; PASD1; ENSG00000166049; HLA -A*03:01,HLA-B*56:01
AVYVEPAAAAA

SEQ ID NO: 8205 - protein, 9 aa, Homo sapiens
  Table 1.2; PASD1; ENSG00000166049; HLA -A*23:01,HLA-A*24:02,HLA-A*32:01,HLA-B*35:01,HLA-B*35:03, HLA-B*38:01,HLA-C*04:01,HLA-C*07:04,HLA-C*14:02
AYDIISQEL

SEQ ID NO: 8206 - protein, 11 aa, Homo sapiens
  Table 1.2; PASD1; ENSG00000166049; HLA -A*24:02
AYDIISQELEL

SEQ ID NO: 8207 - protein, 10 aa, Homo sapiens
  Table 1.2; PASD1; ENSG00000166049; HLA -A*23:01,HLA-A*24:02,HLA-C*14:02
AYQGPPVNQL

SEQ ID NO: 8208 - protein, 10 aa, Homo sapiens
  Table 1.2; PASD1; ENSG00000166049; HLA -C*14:02
AYQPDQMRSA

SEQ ID NO: 8209 - protein, 9 aa, Homo sapiens
  Table 1.2; PASD1; ENSG00000166049; HLA -A*02:01,HLA-A*02:03,HLA-A*25:01,HLA-A*26:01,HLA-A*32:01, HLA-B*27:05,HLA-B*46:01,HLA-C*01:02
CVAENISSL

SEQ ID NO: 8210 - protein, 9 aa, Homo sapiens
  Table 1.2; PASD1; ENSG00000166049; HLA -B*51:01
DAIQNQQNA

SEQ ID NO: 8211 - protein, 10 aa, Homo sapiens
  Table 1.2; PASD1; ENSG00000166049; HLA -A*25:01,HLA-A*68:01,HLA-B*35:03,HLA-B*51:01
DAIQNQQNAL

SEQ ID NO: 8212 - protein, 8 aa, Homo sapiens
  Table 1.2; PASD1; ENSG00000166049; HLA -B*18:01
DEEKDEVY

SEQ ID NO: 8213 - protein, 9 aa, Homo sapiens
  Table 1.2; PASD1; ENSG00000166049; HLA -A*30:01,HLA-B*18:01,HLA-B*39:01,HLA-B*40:01,HLA-B*40:02
DEEPFVGEL

SEQ ID NO: 8214 - protein, 11 aa, Homo sapiens
  Table 1.2; PASD1; ENSG00000166049; HLA -B*18:01
DESQSFYPEAY

SEQ ID NO: 8215 - protein, 9 aa, Homo sapiens
  Table 1.2; PASD1; ENSG00000166049; HLA -B*18:01
DEVYQKIIL

SEQ ID NO: 8216 - protein, 10 aa, Homo sapiens
  Table 1.2; PASD1; ENSG00000166049; HLA -B*38:01,HLA-B*39:01
DHLQKQPNTL

SEQ ID NO: 8217 - protein, 8 aa, Homo sapiens
  Table 1.2; PASD1; ENSG00000166049; HLA -A*26:01,HLA-B*18:01
DIAEVEQY

SEQ ID NO: 8218 - protein, 10 aa, Homo sapiens
  Table 1.2; PASD1; ENSG00000166049; HLA -A*25:01
DICNEFPVVF

SEQ ID NO: 8219 - protein, 9 aa, Homo sapiens
  Table 1.2; PASD1; ENSG00000166049; HLA -A*25:01,HLA-A*26:01,HLA-B*35:03
DIISQELEL

SEQ ID NO: 8220 - protein, 10 aa, Homo sapiens
  Table 1.2; PASD1; ENSG00000166049; HLA -A*25:01,HLA-A*26:01
DIISQELELM

SEQ ID NO: 8221 - protein, 10 aa, Homo sapiens
  Table 1.2; PASD1; ENSG00000166049; HLA -A*03:02,HLA-A*11:01,HLA-A*33:01,HLA-A*68:01,HLA-B*27:02
DLQSSEAVPK

SEQ ID NO: 8222 - protein, 11 aa, Homo sapiens
  Table 1.2; PASD1; ENSG00000166049; HLA -A*03:02,HLA-A*11:01,HLA-A*33:01,HLA-A*68:01
DLQSSEAVPKK

SEQ ID NO: 8223 - protein, 9 aa, Homo sapiens
  Table 1.2; PASD1; ENSG00000166049; HLA -B*35:03
DPENPVAPL

SEQ ID NO: 8224 - protein, 9 aa, Homo sapiens
  Table 1.2; PASD1; ENSG00000166049; HLA -B*35:01,HLA-B*35:03,HLA-B*51:01,HLA-B*54:01,HLA-B*56:01
DPVDLEFSV

SEQ ID NO: 8225 - protein, 9 aa, Homo sapiens
  Table 1.2; PASD1; ENSG00000166049; HLA -B*35:03,HLA-B*51:01
DPVDPEDSV

SEQ ID NO: 8226 - protein, 11 aa, Homo sapiens
  Table 1.2; PASD1; ENSG00000166049; HLA -B*35:03
DPVDPEDSVDL

SEQ ID NO: 8227 - protein, 11 aa, Homo sapiens
  Table 1.2; PASD1; ENSG00000166049; HLA -A*25:01,HLA-A*26:01,HLA-A*30:02,HLA-B*15:01,HLA-B*18:01, HLA-B*27:05,HLA-B*35:01
DQIDIAEVEQY

SEQ ID NO: 8228 - protein, 9 aa, Homo sapiens
  Table 1.2; PASD1; ENSG00000166049; HLA -B*39:01
DQQDPENPV

SEQ ID NO: 8229 - protein, 9 aa, Homo sapiens
  Table 1.2; PASD1; ENSG00000166049; HLA -A*26:01,HLA-A*33:01,HLA-A*33:03,HLA-A*68:02,HLA-B*51:01
DSLGPVVQV

SEQ ID NO: 8230 - protein, 9 aa, Homo sapiens
  Table 1.2; PASD1; ENSG00000166049; HLA -A*68:01
DSSAYENVK

SEQ ID NO: 8231 - protein, 10 aa, Homo sapiens
  Table 1.2; PASD1; ENSG00000166049; HLA -A*33:01
DSSAYENVKF

SEQ ID NO: 8232 - protein, 9 aa, Homo sapiens
  Table 1.2; PASD1; ENSG00000166049; HLA -A*02:01,HLA-A*23:01,HLA-A*25:01,HLA-A*26:01,HLA-A*33:01, HLA-A*33:03,HLA-A*68:01,HLA-A*68:02,HLA-B*08:01,HLA-B*18:01, HLA-B*27:02,HLA-B*27:05,HLA-B*35:01,HLA-B*35:03,HLA-B*38:01,
  HLA-B*39:01,HLA-B*40:01,HLA-B*40:02,HLA-B*51:01,HLA-B*58:01, HLA-C*03:03,HLA-C*03:04
DTMPESPAL

SEQ ID NO: 8233 - protein, 11 aa, Homo sapiens
  Table 1.2; PASD1; ENSG00000166049; HLA -A*25:01,HLA-A*26:01,HLA-A*33:01,HLA-A*33:03,HLA-A*68:01, HLA-C*07:06
DTMPESPALSL

SEQ ID NO: 8234 - protein, 9 aa, Homo sapiens
  Table 1.2; PASD1; ENSG00000166049; HLA -A*33:01
DVSVPLCNH

SEQ ID NO: 8235 - protein, 8 aa, Homo sapiens
  Table 1.2; PASD1; ENSG00000166049; HLA -A*23:01
DYFNQVTL

SEQ ID NO: 8236 - protein, 10 aa, Homo sapiens
  Table 1.2; PASD1; ENSG00000166049; HLA -A*23:01
DYFNQVTLQL

SEQ ID NO: 8237 - protein, 9 aa, Homo sapiens
  Table 1.2; PASD1; ENSG00000166049; HLA -A*24:02
DYIRLWQEL

SEQ ID NO: 8238 - protein, 8 aa, Homo sapiens
  Table 1.2; PASD1; ENSG00000166049; HLA -A*25:01,HLA-B*51:01
EAISSSSI

SEQ ID NO: 8239 - protein, 11 aa, Homo sapiens
  Table 1.2; PASD1; ENSG00000166049; HLA -A*23:01,HLA-A*25:01,HLA-A*26:01,HLA-A*68:01,HLA-B*35:01, HLA-B*58:01
EAISSSSIPQF

SEQ ID NO: 8240 - protein, 9 aa, Homo sapiens
  Table 1.2; PASD1; ENSG00000166049; HLA -A*33:03,HLA-A*68:01
EAVPKKQQK

SEQ ID NO: 8241 - protein, 8 aa, Homo sapiens
  Table 1.2; PASD1; ENSG00000166049; HLA -B*51:01
EAYQGPPV

SEQ ID NO: 8242 - protein, 11 aa, Homo sapiens
  Table 1.2; PASD1; ENSG00000166049; HLA -A*25:01,HLA-A*26:01,HLA-A*68:01,HLA-A*68:02
EAYQGPPVNQL

SEQ ID NO: 8243 - protein, 9 aa, Homo sapiens
  Table 1.2; PASD1; ENSG00000166049; HLA -B*40:01,HLA-B*44:02,HLA-B*44:03
EEEQQKQQL

SEQ ID NO: 8244 - protein, 10 aa, Homo sapiens
  Table 1.2; PASD1; ENSG00000166049; HLA -B*44:02,HLA-B*44:03
EEKDEVYQKI

SEQ ID NO: 8245 - protein, 9 aa, Homo sapiens
  Table 1.2; PASD1; ENSG00000166049; HLA -A*23:01,HLA-A*24:02,HLA-A*26:01
EFPVVFSGL

SEQ ID NO: 8246 - protein, 10 aa, Homo sapiens
  Table 1.2; PASD1; ENSG00000166049; HLA -A*24:02
EFPVVFSGLF

SEQ ID NO: 8247 - protein, 9 aa, Homo sapiens
  Table 1.2; PASD1; ENSG00000166049; HLA -A*25:01
EGPPDPQAF

SEQ ID NO: 8248 - protein, 8 aa, Homo sapiens
  Table 1.2; PASD1; ENSG00000166049; HLA -B*08:01
EIVGKKLL

SEQ ID NO: 8249 - protein, 10 aa, Homo sapiens
  Table 1.2; PASD1; ENSG00000166049; HLA -A*25:01
EIVGKKLLSL

SEQ ID NO: 8250 - protein, 9 aa, Homo sapiens
  Table 1.2; PASD1; ENSG00000166049; HLA -A*25:01,HLA-A*26:01,HLA-A*33:03
ELQEPCVAF

SEQ ID NO: 8251 - protein, 10 aa, Homo sapiens
  Table 1.2; PASD1; ENSG00000166049; HLA -A*26:01
ELSDSLGPVV

SEQ ID NO: 8252 - protein, 9 aa, Homo sapiens
  Table 1.2; PASD1; ENSG00000166049; HLA -A*33:03
ELSSSQGQR

SEQ ID NO: 8253 - protein, 9 aa, Homo sapiens
  Table 1.2; PASD1; ENSG00000166049; HLA -A*26:01
ENISSLLGH

SEQ ID NO: 8254 - protein, 9 aa, Homo sapiens
  Table 1.2; PASD1; ENSG00000166049; HLA -A*68:02
ENVKFIVNV

SEQ ID NO: 8255 - protein, 10 aa, Homo sapiens
  Table 1.2; PASD1; ENSG00000166049; HLA -A*33:03
ENVKFIVNVR

SEQ ID NO: 8256 - protein, 9 aa, Homo sapiens
  Table 1.2; PASD1; ENSG00000166049; HLA -B*35:03,HLA-B*54:01,HLA-B*56:01
EPAAAAAAA

SEQ ID NO: 8257 - protein, 8 aa, Homo sapiens
  Table 1.2; PASD1; ENSG00000166049; HLA -A*01:01,HLA-B*35:01,HLA-B*55:01,HLA-C*03:03
EPEVNPLY

SEQ ID NO: 8258 - protein, 9 aa, Homo sapiens
  Table 1.2; PASD1; ENSG00000166049; HLA -A*33:03,HLA-A*68:01
EPEVNPLYR

SEQ ID NO: 8259 - protein, 11 aa, Homo sapiens
  Table 1.2; PASD1; ENSG00000166049; HLA -A*26:01
EQGTLHGQPTY

SEQ ID NO: 8260 - protein, 9 aa, Homo sapiens
  Table 1.2; PASD1; ENSG00000166049; HLA -A*33:03
EQHLKEQQR

SEQ ID NO: 8261 - protein, 9 aa, Homo sapiens
  Table 1.2; PASD1; ENSG00000166049; HLA -B*08:01
EQPLKHNVI

SEQ ID NO: 8262 - protein, 8 aa, Homo sapiens
  Table 1.2; PASD1; ENSG00000166049; HLA -A*30:02,HLA-B*39:01
EQQPSGFY

SEQ ID NO: 8263 - protein, 9 aa, Homo sapiens
  Table 1.2; PASD1; ENSG00000166049; HLA -A*30:01,HLA-A*68:02,HLA-B*13:02,HLA-B*39:01
EQYGPQENV

SEQ ID NO: 8264 - protein, 11 aa, Homo sapiens
  Table 1.2; PASD1; ENSG00000166049; HLA -A*26:01,HLA-B*27:05,HLA-B*38:01,HLA-B*39:01
EQYGPQENVHM

SEQ ID NO: 8265 - protein, 10 aa, Homo sapiens
  Table 1.2; PASD1; ENSG00000166049; HLA -A*26:01
ESPALSLQDF

SEQ ID NO: 8266 - protein, 10 aa, Homo sapiens
  Table 1.2; PASD1; ENSG00000166049; HLA -A*01:01,HLA-A*25:01,HLA-A*26:01,HLA-A*30:02
ESQSFYPEAY

SEQ ID NO: 8267 - protein, 9 aa, Homo sapiens
  Table 1.2; PASD1; ENSG00000166049; HLA -A*68:02
ETPQDYIRL

SEQ ID NO: 8268 - protein, 10 aa, Homo sapiens
  Table 1.2; PASD1; ENSG00000166049; HLA -A*25:01,HLA-B*44:02,HLA-B*57:01
ETPQDYIRLW

SEQ ID NO: 8269 - protein, 11 aa, Homo sapiens
  Table 1.2; PASD1; ENSG00000166049; HLA -A*68:02
EVEQYGPQENV

SEQ ID NO: 8270 - protein, 8 aa, Homo sapiens
  Table 1.2; PASD1; ENSG00000166049; HLA -B*08:01
EVYQKIIL

SEQ ID NO: 8271 - protein, 9 aa, Homo sapiens
  Table 1.2; PASD1; ENSG00000166049; HLA -A*03:01,HLA-A*11:01,HLA-A*26:01,HLA-A*33:01,HLA-A*33:03, HLA-A*68:01
EVYQKIILK

SEQ ID NO: 8272 - protein, 10 aa, Homo sapiens
  Table 1.2; PASD1; ENSG00000166049; HLA -A*25:01,HLA-A*26:01,HLA-A*33:01,HLA-A*33:03,HLA-A*68:02
EVYQKIILKF

SEQ ID NO: 8273 - protein, 10 aa, Homo sapiens
  Table 1.2; PASD1; ENSG00000166049; HLA -A*02:01
FLDTMPESPA

SEQ ID NO: 8274 - protein, 11 aa, Homo sapiens
  Table 1.2; PASD1; ENSG00000166049; HLA -A*02:01,HLA-A*02:07,HLA-B*38:01
FLDTMPESPAL

SEQ ID NO: 8275 - protein, 10 aa, Homo sapiens
  Table 1.2; PASD1; ENSG00000166049; HLA -A*02:01,HLA-A*02:03
FLQAQPIVPV

SEQ ID NO: 8276 - protein, 10 aa, Homo sapiens
  Table 1.2; PASD1; ENSG00000166049; HLA -A*02:01,HLA-A*02:03
FMITLSTDGV

SEQ ID NO: 8277 - protein, 9 aa, Homo sapiens
  Table 1.2; PASD1; ENSG00000166049; HLA -B*35:01,HLA-B*35:03,HLA-B*51:01,HLA-B*54:01,HLA-B*56:01
FPITSDSTI

SEQ ID NO: 8278 - protein, 8 aa, Homo sapiens
  Table 1.2; PASD1; ENSG00000166049; HLA -B*54:01
FPLLNSET

SEQ ID NO: 8279 - protein, 9 aa, Homo sapiens
  Table 1.2; PASD1; ENSG00000166049; HLA -B*35:01
FPLLNSETH

SEQ ID NO: 8280 - protein, 10 aa, Homo sapiens
  Table 1.2; PASD1; ENSG00000166049; HLA -B*51:01
FPLLNSETHI

SEQ ID NO: 8281 - protein, 10 aa, Homo sapiens
  Table 1.2; PASD1; ENSG00000166049; HLA -B*54:01
FPTYDYFNQV

SEQ ID NO: 8282 - protein, 8 aa, Homo sapiens
  Table 1.2; PASD1; ENSG00000166049; HLA -B*08:01,HLA-B*35:01,HLA-B*35:03,HLA-B*51:01,HLA-B*54:01
FPVVFSGL

SEQ ID NO: 8283 - protein, 9 aa, Homo sapiens
  Table 1.2; PASD1; ENSG00000166049; HLA -B*35:01
FPVVFSGLF

SEQ ID NO: 8284 - protein, 9 aa, Homo sapiens
  Table 1.2; PASD1; ENSG00000166049; HLA -B*27:05
FQGPAAYQP

SEQ ID NO: 8285 - protein, 10 aa, Homo sapiens
  Table 1.2; PASD1; ENSG00000166049; HLA -B*27:05
FRGEPEVNPL

SEQ ID NO: 8286 - protein, 9 aa, Homo sapiens
  Table 1.2; PASD1; ENSG00000166049; HLA -A*02:01,HLA-A*02:03,HLA-A*02:07,HLA-A*68:02
FSVDQVDSV

SEQ ID NO: 8287 - protein, 8 aa, Homo sapiens
  Table 1.2; PASD1; ENSG00000166049; HLA -A*01:01,HLA-B*39:01,HLA-B*55:01,HLA-C*05:01
FVDSDSTY

SEQ ID NO: 8288 - protein, 9 aa, Homo sapiens
  Table 1.2; PASD1; ENSG00000166049; HLA -A*02:01,HLA-A*02:07,HLA-B*35:03,HLA-C*05:01
FVDSDSTYC

SEQ ID NO: 8289 - protein, 10 aa, Homo sapiens
  Table 1.2; PASD1; ENSG00000166049; HLA -B*40:01
GAAGASAQPL

SEQ ID NO: 8290 - protein, 10 aa, Homo sapiens
  Table 1.2; PASD1; ENSG00000166049; HLA -B*27:02
GDSSAYENVK

SEQ ID NO: 8291 - protein, 9 aa, Homo sapiens
  Table 1.2; PASD1; ENSG00000166049; HLA -A*30:01
GELQEPCVA

SEQ ID NO: 8292 - protein, 10 aa, Homo sapiens
  Table 1.2; PASD1; ENSG00000166049; HLA -A*30:01,HLA-B*18:01,HLA-B*40:01,HLA-B*40:02,HLA-B*44:02, HLA-B*44:03
GELQEPCVAF

SEQ ID NO: 8293 - protein, 8 aa, Homo sapiens
  Table 1.2; PASD1; ENSG00000166049; HLA -B*37:01
GEPEVNPL

SEQ ID NO: 8294 - protein, 9 aa, Homo sapiens
  Table 1.2; PASD1; ENSG00000166049; HLA -A*26:01,HLA-A*29:02,HLA-A*30:01,HLA-A*30:02,HLA-B*15:01, HLA-B*15:03,HLA-B*18:01,HLA-B*27:02,HLA-B*27:05,HLA-B*37:01, HLA-B*40:01,HLA-B*44:02,HLA-B*44:03,HLA-B*49:01,HLA-B*58:01,
  HLA-C*16:04
GEPEVNPLY

SEQ ID NO: 8295 - protein, 10 aa, Homo sapiens
  Table 1.2; PASD1; ENSG00000166049; HLA -B*27:02,HLA-B*40:01,HLA-B*44:03,HLA-B*49:01
GEPEVNPLYR

SEQ ID NO: 8296 - protein, 10 aa, Homo sapiens
  Table 1.2; PASD1; ENSG00000166049; HLA -B*27:02,HLA-B*27:05
GHLPAEIVGK

SEQ ID NO: 8297 - protein, 9 aa, Homo sapiens
  Table 1.2; PASD1; ENSG00000166049; HLA -B*15:03
GHTSMKAVY

SEQ ID NO: 8298 - protein, 9 aa, Homo sapiens
  Table 1.2; PASD1; ENSG00000166049; HLA -A*03:01,HLA-A*03:02
GLSLSNSLK

SEQ ID NO: 8299 - protein, 11 aa, Homo sapiens
  Table 1.2; PASD1; ENSG00000166049; HLA -A*29:02,HLA-A*30:02
GNVEHGDSSAY

SEQ ID NO: 8300 - protein, 9 aa, Homo sapiens
  Table 1.2; PASD1; ENSG00000166049; HLA -B*07:02,HLA-B*35:01,HLA-B*55:01
GPQENVHMF

SEQ ID NO: 8301 - protein, 10 aa, Homo sapiens
  Table 1.2; PASD1; ENSG00000166049; HLA -B*56:01
GPQENVHMFV

SEQ ID NO: 8302 - protein, 9 aa, Homo sapiens
  Table 1.2; PASD1; ENSG00000166049; HLA -A*25:01,HLA-B*35:01,HLA-B*44:02,HLA-B*44:03,HLA-B*57:01, HLA-B*58:01,HLA-C*16:04
GPVVQVNTW

SEQ ID NO: 8303 - protein, 8 aa, Homo sapiens
  Table 1.2; PASD1; ENSG00000166049; HLA -B*13:02
GQPTYHQV

SEQ ID NO: 8304 - protein, 10 aa, Homo sapiens
  Table 1.2; PASD1; ENSG00000166049; HLA -A*30:01,HLA-B*13:02
GQPTYHQVQV

SEQ ID NO: 8305 - protein, 10 aa, Homo sapiens
  Table 1.2; PASD1; ENSG00000166049; HLA -B*15:01
GQQEDESQSF

SEQ ID NO: 8306 - protein, 11 aa, Homo sapiens
  Table 1.2; PASD1; ENSG00000166049; HLA -A*30:02,HLA-B*15:01,HLA-B*27:05
GQQEDESQSFY

SEQ ID NO: 8307 - protein, 8 aa, Homo sapiens
  Table 1.2; PASD1; ENSG00000166049; HLA -B*15:01,HLA-B*15:03
GQRGHTSM

SEQ ID NO: 8308 - protein, 9 aa, Homo sapiens
  Table 1.2; PASD1; ENSG00000166049; HLA -A*03:01
GQVKRPLPH

SEQ ID NO: 8309 - protein, 9 aa, Homo sapiens
  Table 1.2; PASD1; ENSG00000166049; HLA -A*01:01,HLA-A*11:01,HLA-A*26:01,HLA-A*29:02,HLA-A*30:02, HLA-A*32:01,HLA-B*15:01,HLA-B*15:03,HLA-B*39:01,HLA-B*57:01, HLA-B*58:01
GTLHGQPTY

SEQ ID NO: 8310 - protein, 11 aa, Homo sapiens
  Table 1.2; PASD1; ENSG00000166049; HLA -B*39:01
GVEGPPDPQAF

SEQ ID NO: 8311 - protein, 11 aa, Homo sapiens
  Table 1.2; PASD1; ENSG00000166049; HLA -A*30:01
HDAIQNQQNAL

SEQ ID NO: 8312 - protein, 9 aa, Homo sapiens
  Table 1.2; PASD1; ENSG00000166049; HLA -A*32:01,HLA-B*13:02,HLA-C*16:02
HGQPTYHQV

SEQ ID NO: 8313 - protein, 9 aa, Homo sapiens
  Table 1.2; PASD1; ENSG00000166049; HLA -A*02:03,HLA-B*08:01
HLKEQQRQL

SEQ ID NO: 8314 - protein, 9 aa, Homo sapiens
  Table 1.2; PASD1; ENSG00000166049; HLA -A*02:07,HLA-A*03:01,HLA-A*03:02,HLA-A*11:01,HLA-A*68:01
HLPAEIVGK

SEQ ID NO: 8315 - protein, 10 aa, Homo sapiens
  Table 1.2; PASD1; ENSG00000166049; HLA -A*03:01
HLPAEIVGKK

SEQ ID NO: 8316 - protein, 11 aa, Homo sapiens
  Table 1.2; PASD1; ENSG00000166049; HLA -A*02:07
HLPAEIVGKKL

SEQ ID NO: 8317 - protein, 9 aa, Homo sapiens
  Table 1.2; PASD1; ENSG00000166049; HLA -A*02:03,HLA-A*02:04,HLA-A*03:02,HLA-B*08:01
HLQKQPNTL

SEQ ID NO: 8318 - protein, 10 aa, Homo sapiens
  Table 1.2; PASD1; ENSG00000166049; HLA -A*01:01,HLA-A*25:01,HLA-A*26:01,HLA-A*29:02,HLA-A*30:02, HLA-A*32:01,HLA-B*15:01,HLA-B*15:03,HLA-B*35:01,HLA-B*46:01, HLA-B*55:01,HLA-B*58:01,HLA-C*07:04
HMFVDSDSTY

SEQ ID NO: 8319 - protein, 9 aa, Homo sapiens
  Table 1.2; PASD1; ENSG00000166049; HLA -A*33:01,HLA-A*33:03,HLA-A*68:01,HLA-C*07:06
HNVIVGNER

SEQ ID NO: 8320 - protein, 8 aa, Homo sapiens
  Table 1.2; PASD1; ENSG00000166049; HLA -B*54:01,HLA-B*56:01
HPVRFLQA

SEQ ID NO: 8321 - protein, 8 aa, Homo sapiens
  Table 1.2; PASD1; ENSG00000166049; HLA -A*30:01,HLA-B*13:02,HLA-B*39:01,HLA-B*40:02
HQVQVSEV

SEQ ID NO: 8322 - protein, 10 aa, Homo sapiens
  Table 1.2; PASD1; ENSG00000166049; HLA -B*13:02,HLA-B*39:01
HQVQVSEVGV

SEQ ID NO: 8323 - protein, 9 aa, Homo sapiens
  Table 1.2; PASD1; ENSG00000166049; HLA -A*68:02
HTSMKAVYV

SEQ ID NO: 8324 - protein, 9 aa, Homo sapiens
  Table 1.2; PASD1; ENSG00000166049; HLA -A*30:02,HLA-B*15:01,HLA-B*15:03,HLA-B*18:01,HLA-B*27:02, HLA-B*35:01,HLA-B*44:02,HLA-B*44:03
IDIAEVEQY

SEQ ID NO: 8325 - protein, 10 aa, Homo sapiens
  Table 1.2; PASD1; ENSG00000166049; HLA -B*27:02
IISQELELMK

SEQ ID NO: 8326 - protein, 10 aa, Homo sapiens
  Table 1.2; PASD1; ENSG00000166049; HLA -A*02:03
ILRTQLLQQL

SEQ ID NO: 8327 - protein, 9 aa, Homo sapiens
  Table 1.2; PASD1; ENSG00000166049; HLA -B*56:01
IPDLQSSEA

SEQ ID NO: 8328 - protein, 9 aa, Homo sapiens
  Table 1.2; PASD1; ENSG00000166049; HLA -A*29:02,HLA-B*35:01,HLA-B*55:01
IPSFPTYDY

SEQ ID NO: 8329 - protein, 8 aa, Homo sapiens
  Table 1.2; PASD1; ENSG00000166049; HLA -B*15:01,HLA-B*15:03,HLA-B*39:01
IQNQQNAL

SEQ ID NO: 8330 - protein, 11 aa, Homo sapiens
  Table 1.2; PASD1; ENSG00000166049; HLA -B*15:01
IQNQQNALELM

SEQ ID NO: 8331 - protein, 8 aa, Homo sapiens
  Table 1.2; PASD1; ENSG00000166049; HLA -C*05:01
ISDDQIDI

SEQ ID NO: 8332 - protein, 9 aa, Homo sapiens
  Table 1.2; PASD1; ENSG00000166049; HLA -A*11:01,HLA-B*27:02
ISQELELMK

SEQ ID NO: 8333 - protein, 10 aa, Homo sapiens
  Table 1.2; PASD1; ENSG00000166049; HLA -A*11:01
ISQELELMKK

SEQ ID NO: 8334 - protein, 9 aa, Homo sapiens
  Table 1.2; PASD1; ENSG00000166049; HLA -A*23:01,HLA-A*24:02,HLA-A*25:01,HLA-A*26:01,HLA-A*30:02, HLA-A*32:01,HLA-B*57:01,HLA-B*58:01,HLA-C*16:01
ISSSSIPQF

SEQ ID NO: 8335 - protein, 10 aa, Homo sapiens
  Table 1.2; PASD1; ENSG00000166049; HLA -A*01:01
ISTLETPQDY

SEQ ID NO: 8336 - protein, 10 aa, Homo sapiens
  Table 1.2; PASD1; ENSG00000166049; HLA -A*25:01,HLA-A*68:01
ITSDSTISTL

SEQ ID NO: 8337 - protein, 9 aa, Homo sapiens
  Table 1.2; PASD1; ENSG00000166049; HLA -B*08:01
IVGKKLLSL

SEQ ID NO: 8338 - protein, 9 aa, Homo sapiens
  Table 1.2; PASD1; ENSG00000166049; HLA -A*30:01,HLA-B*35:03,HLA-B*40:01,HLA-B*58:01,HLA-C*03:03, HLA-C*03:04,HLA-C*16:02
KAVSDEAVL

SEQ ID NO: 8339 - protein, 9 aa, Homo sapiens
  Table 1.2; PASD1; ENSG00000166049; HLA -B*07:02,HLA-B*40:02,HLA-B*54:01,HLA-B*56:01,HLA-B*58:01
KAVYVEPAA

SEQ ID NO: 8340 - protein, 10 aa, Homo sapiens
  Table 1.2; PASD1; ENSG00000166049; HLA -B*56:01
KAVYVEPAAA

SEQ ID NO: 8341 - protein, 11 aa, Homo sapiens
  Table 1.2; PASD1; ENSG00000166049; HLA -B*56:01
KAVYVEPAAAA

SEQ ID NO: 8342 - protein, 9 aa, Homo sapiens
  Table 1.2; PASD1; ENSG00000166049; HLA -B*44:02,HLA-B*44:03
KEQLEERTW

SEQ ID NO: 8343 - protein, 10 aa, Homo sapiens
  Table 1.2; PASD1; ENSG00000166049; HLA -A*31:01
KHNVIVGNER

SEQ ID NO: 8344 - protein, 9 aa, Homo sapiens
  Table 1.2; PASD1; ENSG00000166049; HLA -A*02:04,HLA-A*02:07,HLA-A*24:02
KIILKFPLL

SEQ ID NO: 8345 - protein, 9 aa, Homo sapiens
  Table 1.2; PASD1; ENSG00000166049; HLA -A*31:01,HLA-B*46:01
KLKEQLEER

SEQ ID NO: 8346 - protein, 11 aa, Homo sapiens
  Table 1.2; PASD1; ENSG00000166049; HLA -B*57:01
KLKEQLEERTW

SEQ ID NO: 8347 - protein, 10 aa, Homo sapiens
  Table 1.2; PASD1; ENSG00000166049; HLA -A*03:01,HLA-A*03:02,HLA-A*11:01
KLQEQKMQEK

SEQ ID NO: 8348 - protein, 10 aa, Homo sapiens
  Table 1.2; PASD1; ENSG00000166049; HLA -A*03:02,HLA-A*11:01
KQQLQEQPLK

SEQ ID NO: 8349 - protein, 9 aa, Homo sapiens
  Table 1.2; PASD1; ENSG00000166049; HLA -A*03:01,HLA-A*03:02,HLA-A*31:01,HLA-A*32:01,HLA-A*33:01, HLA-A*33:03
KVNPKSSQR

SEQ ID NO: 8350 - protein, 10 aa, Homo sapiens
  Table 1.2; PASD1; ENSG00000166049; HLA -A*03:01,HLA-A*03:02
KVNPKSSQRK

SEQ ID NO: 8351 - protein, 8 aa, Homo sapiens
  Table 1.2; PASD1; ENSG00000166049; HLA -B*18:01,HLA-B*49:01
LEFSVDQV

SEQ ID NO: 8352 - protein, 11 aa, Homo sapiens
  Table 1.2; PASD1; ENSG00000166049; HLA -B*49:01
LEFSVDQVDSV

SEQ ID NO: 8353 - protein, 8 aa, Homo sapiens
  Table 1.2; PASD1; ENSG00000166049; HLA -B*49:01
LETPQDYI

SEQ ID NO: 8354 - protein, 11 aa, Homo sapiens
  Table 1.2; PASD1; ENSG00000166049; HLA -B*44:02,HLA-B*44:03,HLA-B*57:01
LETPQDYIRLW

SEQ ID NO: 8355 - protein, 10 aa, Homo sapiens
  Table 1.2; PASD1; ENSG00000166049; HLA -A*25:01,HLA-B*58:01
LGPVVQVNTW

SEQ ID NO: 8356 - protein, 9 aa, Homo sapiens
  Table 1.2; PASD1; ENSG00000166049; HLA -A*02:01,HLA-A*02:04,HLA-A*02:07,HLA-B*38:01
LLDGFMITL

SEQ ID NO: 8357 - protein, 9 aa, Homo sapiens
  Table 1.2; PASD1; ENSG00000166049; HLA -A*02:01,HLA-A*02:03,HLA-A*02:04
LLGHLPAEI

SEQ ID NO: 8358 - protein, 10 aa, Homo sapiens
  Table 1.2; PASD1; ENSG00000166049; HLA -A*32:01,HLA-B*15:01
LLNSETHIEF

SEQ ID NO: 8359 - protein, 11 aa, Homo sapiens
  Table 1.2; PASD1; ENSG00000166049; HLA -B*15:01
LLPDEEKDEVY

SEQ ID NO: 8360 - protein, 9 aa, Homo sapiens
  Table 1.2; PASD1; ENSG00000166049; HLA -A*03:02,HLA-A*11:01
LLQQLYTSK

SEQ ID NO: 8361 - protein, 11 aa, Homo sapiens
  Table 1.2; PASD1; ENSG00000166049; HLA -A*02:07
LMDPVDPEDSV

SEQ ID NO: 8362 - protein, 9 aa, Homo sapiens
  Table 1.2; PASD1; ENSG00000166049; HLA -A*29:02,HLA-C*16:01
LNSETHIEF

SEQ ID NO: 8363 - protein, 9 aa, Homo sapiens
  Table 1.2; PASD1; ENSG00000166049; HLA -B*51:01
LPAEIVGKK

SEQ ID NO: 8364 - protein, 10 aa, Homo sapiens
  Table 1.2; PASD1; ENSG00000166049; HLA -B*07:02,HLA-B*35:01,HLA-B*35:03,HLA-B*51:01,HLA-B*56:01
LPAEIVGKKL

SEQ ID NO: 8365 - protein, 9 aa, Homo sapiens
  Table 1.2; PASD1; ENSG00000166049; HLA -B*35:03,HLA-B*51:01,HLA-B*55:01
LPDEEKDEV

SEQ ID NO: 8366 - protein, 10 aa, Homo sapiens
  Table 1.2; PASD1; ENSG00000166049; HLA -A*01:01,HLA-B*35:01,HLA-B*35:03,HLA-B*55:01,HLA-C*03:03
LPDEEKDEVY

SEQ ID NO: 8367 - protein, 11 aa, Homo sapiens
  Table 1.2; PASD1; ENSG00000166049; HLA -B*54:01,HLA-B*56:01
LPLIDTSNSEA

SEQ ID NO: 8368 - protein, 9 aa, Homo sapiens
  Table 1.2; PASD1; ENSG00000166049; HLA -A*02:01,HLA-A*02:03,HLA-B*13:02
LQAQPIVPV

SEQ ID NO: 8369 - protein, 11 aa, Homo sapiens
  Table 1.2; PASD1; ENSG00000166049; HLA -A*31:01,HLA-A*68:01,HLA-C*07:06
LQAQPIVPVQR

SEQ ID NO: 8370 - protein, 8 aa, Homo sapiens
  Table 1.2; PASD1; ENSG00000166049; HLA -B*08:01
LQKQPNTL

SEQ ID NO: 8371 - protein, 9 aa, Homo sapiens
  Table 1.2; PASD1; ENSG00000166049; HLA -A*31:01
LQKQPNTLR

SEQ ID NO: 8372 - protein, 9 aa, Homo sapiens
  Table 1.2; PASD1; ENSG00000166049; HLA -A*02:01,HLA-A*02:03,HLA-A*32:01,HLA-B*08:01,HLA-B*13:02, HLA-B*37:01
LQNPRDVSV

SEQ ID NO: 8373 - protein, 9 aa, Homo sapiens
  Table 1.2; PASD1; ENSG00000166049; HLA -A*01:01,HLA-A*29:02,HLA-A*30:02,HLA-A*32:01,HLA-B*15:01, HLA-B*15:03,HLA-B*46:01,HLA-C*02:02,HLA-C*07:04,HLA-C*14:02
LQPSSPVAY

SEQ ID NO: 8374 - protein, 9 aa, Homo sapiens
  Table 1.2; PASD1; ENSG00000166049; HLA -A*03:02
LQSSEAVPK

SEQ ID NO: 8375 - protein, 9 aa, Homo sapiens
  Table 1.2; PASD1; ENSG00000166049; HLA -A*01:01
LSDSLGPVV

SEQ ID NO: 8376 - protein, 9 aa, Homo sapiens
  Table 1.2; PASD1; ENSG00000166049; HLA -A*03:02,HLA-A*11:01
LVQQEQHLK

SEQ ID NO: 8377 - protein, 9 aa, Homo sapiens
  Table 1.2; PASD1; ENSG00000166049; HLA -A*23:01,HLA-A*24:02
LYLVGNVCI

SEQ ID NO: 8378 - protein, 11 aa, Homo sapiens
  Table 1.2; PASD1; ENSG00000166049; HLA -A*23:01,HLA-A*24:02
LYRADPVDLEF

SEQ ID NO: 8379 - protein, 9 aa, Homo sapiens
  Table 1.2; PASD1; ENSG00000166049; HLA -A*23:01,HLA-A*29:02,HLA-A*30:02,HLA-B*15:01,HLA-B*15:03, HLA-B*35:01,HLA-B*35:03,HLA-B*39:01,HLA-B*46:01,HLA-B*55:01, HLA-C*04:01,HLA-C*07:04,HLA-C*14:02
MFVDSDSTY

SEQ ID NO: 8380 - protein, 11 aa, Homo sapiens
  Table 1.2; PASD1; ENSG00000166049; HLA -B*55:01
MPAEQRDSNKP

SEQ ID NO: 8381 - protein, 9 aa, Homo sapiens
  Table 1.2; PASD1; ENSG00000166049; HLA -B*07:02,HLA-B*08:01,HLA-B*35:01,HLA-B*35:03,HLA-B*51:01, HLA-B*54:01,HLA-B*55:01,HLA-B*56:01,HLA-C*03:03,HLA-C*03:04, HLA-C*05:01,HLA-C*07:02
MPESPALSL

SEQ ID NO: 8382 - protein, 9 aa, Homo sapiens
  Table 1.2; PASD1; ENSG00000166049; HLA -B*27:05
MRSAEQTRL

SEQ ID NO: 8383 - protein, 8 aa, Homo sapiens
  Table 1.2; PASD1; ENSG00000166049; HLA -B*18:01
NEFPVVFS

SEQ ID NO: 8384 - protein, 10 aa, Homo sapiens
  Table 1.2; PASD1; ENSG00000166049; HLA -A*30:01,HLA-B*18:01,HLA-B*40:01,HLA-B*44:02,HLA-B*44:03, HLA-B*49:01
NEFPVVFSGL

SEQ ID NO: 8385 - protein, 11 aa, Homo sapiens
  Table 1.2; PASD1; ENSG00000166049; HLA -B*44:02,HLA-B*44:03
NEFPVVFSGLF

SEQ ID NO: 8386 - protein, 9 aa, Homo sapiens
  Table 1.2; PASD1; ENSG00000166049; HLA -B*07:02
NPKSSQRKL

SEQ ID NO: 8387 - protein, 9 aa, Homo sapiens
  Table 1.2; PASD1; ENSG00000166049; HLA -B*07:02,HLA-B*35:01,HLA-B*35:03,HLA-C*07:02
NPRDVSVPL

SEQ ID NO: 8388 - protein, 9 aa, Homo sapiens
  Table 1.2; PASD1; ENSG00000166049; HLA -B*54:01,HLA-B*55:01,HLA-B*56:01
NPVAPLDQA

SEQ ID NO: 8389 - protein, 11 aa, Homo sapiens
  Table 1.2; PASD1; ENSG00000166049; HLA -B*35:03
NPVAPLDQAGL

SEQ ID NO: 8390 - protein, 8 aa, Homo sapiens
  Table 1.2; PASD1; ENSG00000166049; HLA -C*05:01,HLA-C*16:01
NSETHIEF

SEQ ID NO: 8391 - protein, 10 aa, Homo sapiens
  Table 1.2; PASD1; ENSG00000166049; HLA -A*01:01
NVEHGDSSAY

SEQ ID NO: 8392 - protein, 8 aa, Homo sapiens
  Table 1.2; PASD1; ENSG00000166049; HLA -A*68:01
NVIVGNER

SEQ ID NO: 8393 - protein, 9 aa, Homo sapiens
  Table 1.2; PASD1; ENSG00000166049; HLA -A*68:02
NVIVGNERV

SEQ ID NO: 8394 - protein, 9 aa, Homo sapiens
  Table 1.2; PASD1; ENSG00000166049; HLA -A*31:01,HLA-A*33:01,HLA-A*33:03,HLA-A*68:01
NVKFIVNVR

SEQ ID NO: 8395 - protein, 9 aa, Homo sapiens
  Table 1.2; PASD1; ENSG00000166049; HLA -A*23:01,HLA-A*24:02,HLA-A*29:02
NWIPSFPTY

SEQ ID NO: 8396 - protein, 10 aa, Homo sapiens
  Table 1.2; PASD1; ENSG00000166049; HLA -B*07:02
PAAAAAAAAI

SEQ ID NO: 8397 - protein, 10 aa, Homo sapiens
  Table 1.2; PASD1; ENSG00000166049; HLA -A*68:01
PAAYQPDQMR

SEQ ID NO: 8398 - protein, 10 aa, Homo sapiens
  Table 1.2; PASD1; ENSG00000166049; HLA -B*07:02
PAEIVGKKLL

SEQ ID NO: 8399 - protein, 11 aa, Homo sapiens
  Table 1.2; PASD1; ENSG00000166049; HLA -A*03:02,HLA-A*11:01,HLA-B*27:02
PDLQSSEAVPK

SEQ ID NO: 8400 - protein, 10 aa, Homo sapiens
  Table 1.2; PASD1; ENSG00000166049; HLA -B*40:01
PEEEQQKQQL

SEQ ID NO: 8401 - protein, 8 aa, Homo sapiens
  Table 1.2; PASD1; ENSG00000166049; HLA -B*37:01
PESPALSL

SEQ ID NO: 8402 - protein, 10 aa, Homo sapiens
  Table 1.2; PASD1; ENSG00000166049; HLA -A*30:02,HLA-B*15:01
PLQPSSPVAY

SEQ ID NO: 8403 - protein, 10 aa, Homo sapiens
  Table 1.2; PASD1; ENSG00000166049; HLA -A*30:02
PQAFQGPAAY

SEQ ID NO: 8404 - protein, 9 aa, Homo sapiens
  Table 1.2; PASD1; ENSG00000166049; HLA -A*68:02
PTYDYFNQV

SEQ ID NO: 8405 - protein, 8 aa, Homo sapiens
  Table 1.2; PASD1; ENSG00000166049; HLA -B*54:01
QAFQGPAA

SEQ ID NO: 8406 - protein, 9 aa, Homo sapiens
  Table 1.2; PASD1; ENSG00000166049; HLA -A*01:01,HLA-A*25:01,HLA-A*26:01,HLA-A*29:02,HLA-A*30:02, HLA-A*32:01,HLA-B*15:01,HLA-B*15:03,HLA-B*18:01,HLA-B*35:01, HLA-B*39:01,HLA-B*46:01,HLA-B*58:01,HLA-C*02:02,HLA-C*16:04
QAFQGPAAY

SEQ ID NO: 8407 - protein, 9 aa, Homo sapiens
  Table 1.2; PASD1; ENSG00000166049; HLA -A*32:01
QAQPIVPVQ

SEQ ID NO: 8408 - protein, 10 aa, Homo sapiens
  Table 1.2; PASD1; ENSG00000166049; HLA -A*03:02,HLA-A*11:01,HLA-A*31:01,HLA-A*33:01,HLA-A*33:03, HLA-A*68:01,HLA-A*68:02,HLA-B*57:01,HLA-C*07:06
QAQPIVPVQR

SEQ ID NO: 8409 - protein, 9 aa, Homo sapiens
  Table 1.2; PASD1; ENSG00000166049; HLA -A*30:01,HLA-B*37:01
QDFRGEPEV

SEQ ID NO: 8410 - protein, 8 aa, Homo sapiens
  Table 1.2; PASD1; ENSG00000166049; HLA -B*18:01,HLA-B*37:01,HLA-B*44:02
QEDESQSF

SEQ ID NO: 8411 - protein, 9 aa, Homo sapiens
  Table 1.2; PASD1; ENSG00000166049; HLA -A*01:01,HLA-B*44:02,HLA-B*44:03
QEDESQSFY

SEQ ID NO: 8412 - protein, 9 aa, Homo sapiens
  Table 1.2; PASD1; ENSG00000166049; HLA -A*30:01,HLA-B*18:01,HLA-B*37:01,HLA-B*44:02,HLA-B*44:03, HLA-B*49:01
QELELMKKL

SEQ ID NO: 8413 - protein, 10 aa, Homo sapiens
  Table 1.2; PASD1; ENSG00000166049; HLA -B*49:01
QELSDSLGPV

SEQ ID NO: 8414 - protein, 11 aa, Homo sapiens
  Table 1.2; PASD1; ENSG00000166049; HLA -B*49:01
QELSDSLGPVV

SEQ ID NO: 8415 - protein, 8 aa, Homo sapiens
  Table 1.2; PASD1; ENSG00000166049; HLA -B*49:01
QENVHMFV

SEQ ID NO: 8416 - protein, 9 aa, Homo sapiens
  Table 1.2; PASD1; ENSG00000166049; HLA -B*37:01,HLA-B*44:02,HLA-B*44:03,HLA-B*49:01
QEQPLKHNV

SEQ ID NO: 8417 - protein, 10 aa, Homo sapiens
  Table 1.2; PASD1; ENSG00000166049; HLA -B*44:02,HLA-B*44:03,HLA-B*49:01
QEQPLKHNVI

SEQ ID NO: 8418 - protein, 10 aa, Homo sapiens
  Table 1.2; PASD1; ENSG00000166049; HLA -A*01:01
QIDIAEVEQY

SEQ ID NO: 8419 - protein, 9 aa, Homo sapiens
  Table 1.2; PASD1; ENSG00000166049; HLA -A*01:01,HLA-A*02:01,HLA-A*02:04,HLA-A*02:07
QLEERTWLL

SEQ ID NO: 8420 - protein, 10 aa, Homo sapiens
  Table 1.2; PASD1; ENSG00000166049; HLA -A*02:01,HLA-A*02:03,HLA-A*02:04,HLA-A*02:07,HLA-A*03:01
QLLDGFMITL

SEQ ID NO: 8421 - protein, 10 aa, Homo sapiens
  Table 1.2; PASD1; ENSG00000166049; HLA -A*03:01,HLA-A*03:02,HLA-A*11:01,HLA-B*27:02
QLLQQLYTSK

SEQ ID NO: 8422 - protein, 8 aa, Homo sapiens
  Table 1.2; PASD1; ENSG00000166049; HLA -A*03:02
QLQEQPLK

SEQ ID NO: 8423 - protein, 9 aa, Homo sapiens
  Table 1.2; PASD1; ENSG00000166049; HLA -A*01:01,HLA-A*03:01,HLA-A*03:02
QLQEQPLKH

SEQ ID NO: 8424 - protein, 9 aa, Homo sapiens
  Table 1.2; PASD1; ENSG00000166049; HLA -A*02:03,HLA-A*02:04,HLA-B*07:02,HLA-B*08:01
QLREQLQQL

SEQ ID NO: 8425 - protein, 9 aa, Homo sapiens
  Table 1.2; PASD1; ENSG00000166049; HLA -B*38:01
QLVQQEQHL

SEQ ID NO: 8426 - protein, 10 aa, Homo sapiens
  Table 1.2; PASD1; ENSG00000166049; HLA -A*03:02
QLVQQEQHLK

SEQ ID NO: 8427 - protein, 8 aa, Homo sapiens
  Table 1.2; PASD1; ENSG00000166049; HLA -B*08:01
QLYTSKAV

SEQ ID NO: 8428 - protein, 8 aa, Homo sapiens
  Table 1.2; PASD1; ENSG00000166049; HLA -B*55:01,HLA-B*56:01
QPDQMRSA

SEQ ID NO: 8429 - protein, 8 aa, Homo sapiens
  Table 1.2; PASD1; ENSG00000166049; HLA -A*31:01,HLA-A*33:01,HLA-A*33:03,HLA-A*68:01
QPIVPVQR

SEQ ID NO: 8430 - protein, 9 aa, Homo sapiens
  Table 1.2; PASD1; ENSG00000166049; HLA -B*07:02,HLA-B*51:01,HLA-B*54:01,HLA-B*55:01,HLA-B*56:01
QPIVPVQRA

SEQ ID NO: 8431 - protein, 10 aa, Homo sapiens
  Table 1.2; PASD1; ENSG00000166049; HLA -B*54:01,HLA-B*56:01
QPIVPVQRAA

SEQ ID NO: 8432 - protein, 8 aa, Homo sapiens
  Table 1.2; PASD1; ENSG00000166049; HLA -B*08:01,HLA-B*51:01
QPLKHNVI

SEQ ID NO: 8433 - protein, 9 aa, Homo sapiens
  Table 1.2; PASD1; ENSG00000166049; HLA -B*07:02,HLA-B*51:01,HLA-B*54:01,HLA-B*56:01,HLA-C*07:02
QPLQPSSPV

SEQ ID NO: 8434 - protein, 10 aa, Homo sapiens
  Table 1.2; PASD1; ENSG00000166049; HLA -B*54:01,HLA-B*55:01,HLA-B*56:01
QPLQPSSPVA

SEQ ID NO: 8435 - protein, 11 aa, Homo sapiens
  Table 1.2; PASD1; ENSG00000166049; HLA -A*29:02,HLA-A*30:02,HLA-B*15:03,HLA-B*35:01,HLA-B*55:01
QPLQPSSPVAY

SEQ ID NO: 8436 - protein, 9 aa, Homo sapiens
  Table 1.2; PASD1; ENSG00000166049; HLA -B*07:02,HLA-B*08:01,HLA-B*56:01
QPNTLRHVV

SEQ ID NO: 8437 - protein, 8 aa, Homo sapiens
  Table 1.2; PASD1; ENSG00000166049; HLA -B*35:01
QPSSPVAY

SEQ ID NO: 8438 - protein, 9 aa, Homo sapiens
  Table 1.2; PASD1; ENSG00000166049; HLA -B*07:02,HLA-B*35:03,HLA-B*51:01,HLA-B*54:01,HLA-B*55:01, HLA-B*56:01,HLA-C*16:02
QPTYHQVQV

SEQ ID NO: 8439 - protein, 9 aa, Homo sapiens
  Table 1.2; PASD1; ENSG00000166049; HLA -B*38:01,HLA-B*39:01
QQDPENPVA

SEQ ID NO: 8440 - protein, 10 aa, Homo sapiens
  Table 1.2; PASD1; ENSG00000166049; HLA -B*39:01
QQDPENPVAP

SEQ ID NO: 8441 - protein, 11 aa, Homo sapiens
  Table 1.2; PASD1; ENSG00000166049; HLA -B*27:05,HLA-B*38:01,HLA-B*39:01
QQDPENPVAPL

SEQ ID NO: 8442 - protein, 9 aa, Homo sapiens
  Table 1.2; PASD1; ENSG00000166049; HLA -B*15:01,HLA-B*15:03,HLA-B*38:01,HLA-B*39:01
QQEDESQSF

SEQ ID NO: 8443 - protein, 10 aa, Homo sapiens
  Table 1.2; PASD1; ENSG00000166049; HLA -A*01:01,HLA-A*30:02
QQEDESQSFY

SEQ ID NO: 8444 - protein, 9 aa, Homo sapiens
  Table 1.2; PASD1; ENSG00000166049; HLA -A*03:02,HLA-A*11:01
QQLQEQPLK

SEQ ID NO: 8445 - protein, 9 aa, Homo sapiens
  Table 1.2; PASD1; ENSG00000166049; HLA -B*13:02
QQLYTSKAV

SEQ ID NO: 8446 - protein, 9 aa, Homo sapiens
  Table 1.2; PASD1; ENSG00000166049; HLA -B*13:02,HLA-B*38:01
QQNALELMM

SEQ ID NO: 8447 - protein, 11 aa, Homo sapiens
  Table 1.2; PASD1; ENSG00000166049; HLA -B*27:05,HLA-B*38:01
QQQLVQQEQHL

SEQ ID NO: 8448 - protein, 11 aa, Homo sapiens
  Table 1.2; PASD1; ENSG00000166049; HLA -B*39:01
QRAAEQQPSGF

SEQ ID NO: 8449 - protein, 8 aa, Homo sapiens
  Table 1.2; PASD1; ENSG00000166049; HLA -A*01:01,HLA-A*30:02
QSFYPEAY

SEQ ID NO: 8450 - protein, 9 aa, Homo sapiens
  Table 1.2; PASD1; ENSG00000166049; HLA -A*03:01,HLA-A*03:02,HLA-A*11:01,HLA-A*68:01,HLA-C*07:06
QSSEAVPKK

SEQ ID NO: 8451 - protein, 10 aa, Homo sapiens
  Table 1.2; PASD1; ENSG00000166049; HLA -A*31:01,HLA-A*33:03
QTRLMPAEQR

SEQ ID NO: 8452 - protein, 11 aa, Homo sapiens
  Table 1.2; PASD1; ENSG00000166049; HLA -A*23:01,HLA-A*24:02
QYGPQENVHMF

SEQ ID NO: 8453 - protein, 11 aa, Homo sapiens
  Table 1.2; PASD1; ENSG00000166049; HLA -A*30:02,HLA-B*15:01
RAAEQQPSGFY

SEQ ID NO: 8454 - protein, 9 aa, Homo sapiens
  Table 1.2; PASD1; ENSG00000166049; HLA -A*01:01,HLA-A*02:07,HLA-A*23:01,HLA-A*32:01,HLA-B*35:01, HLA-B*35:03,HLA-B*38:01,HLA-B*55:01,HLA-B*57:01,HLA-B*58:01, HLA-C*03:03,HLA-C*03:04,HLA-C*05:01
RADPVDLEF

SEQ ID NO: 8455 - protein, 10 aa, Homo sapiens
  Table 1.2; PASD1; ENSG00000166049; HLA -A*01:01,HLA-A*30:02,HLA-B*57:01,HLA-B*58:01
RGEPEVNPLY

SEQ ID NO: 8456 - protein, 11 aa, Homo sapiens
  Table 1.2; PASD1; ENSG00000166049; HLA -A*31:01
RGEPEVNPLYR

SEQ ID NO: 8457 - protein, 10 aa, Homo sapiens
  Table 1.2; PASD1; ENSG00000166049; HLA -A*30:02
RGHTSMKAVY

SEQ ID NO: 8458 - protein, 9 aa, Homo sapiens
  Table 1.2; PASD1; ENSG00000166049; HLA -B*57:01,HLA-B*58:01,HLA-C*16:01,HLA-C*16:02
RSAEQTRLM

SEQ ID NO: 8459 - protein, 9 aa, Homo sapiens
  Table 1.2; PASD1; ENSG00000166049; HLA -A*01:01,HLA-A*29:02,HLA-A*30:02,HLA-A*32:01,HLA-B*57:01, HLA-B*58:01
RTQLLQQLY

SEQ ID NO: 8460 - protein, 8 aa, Homo sapiens
  Table 1.2; PASD1; ENSG00000166049; HLA -B*08:01,HLA-B*37:01,HLA-B*46:01,HLA-B*58:01,HLA-C*02:02, HLA-C*05:01
SAYENVKF

SEQ ID NO: 8461 - protein, 9 aa, Homo sapiens
  Table 1.2; PASD1; ENSG00000166049; HLA -A*02:01,HLA-A*02:03,HLA-A*02:04,HLA-A*68:02,HLA-B*13:02, HLA-B*49:01,HLA-B*51:01,HLA-C*02:02,HLA-C*12:03,HLA-C*16:02
SAYENVKFI

SEQ ID NO: 8462 - protein, 8 aa, Homo sapiens
  Table 1.2; PASD1; ENSG00000166049; HLA -C*05:01
SCDEQGTL

SEQ ID NO: 8463 - protein, 8 aa, Homo sapiens
  Table 1.2; PASD1; ENSG00000166049; HLA -B*37:01,HLA-B*40:02
SDSLGPVV

SEQ ID NO: 8464 - protein, 10 aa, Homo sapiens
  Table 1.2; PASD1; ENSG00000166049; HLA -B*37:01
SDSLGPVVQV

SEQ ID NO: 8465 - protein, 8 aa, Homo sapiens
  Table 1.2; PASD1; ENSG00000166049; HLA -B*37:01
SDSTISTL

SEQ ID NO: 8466 - protein, 9 aa, Homo sapiens
  Table 1.2; PASD1; ENSG00000166049; HLA -A*30:01,HLA-B*13:02,HLA-B*37:01,HLA-B*40:01,HLA-B*40:02, HLA-B*44:02,HLA-B*44:03,HLA-B*49:01
SEAISSSSI

SEQ ID NO: 8467 - protein, 9 aa, Homo sapiens
  Table 1.2; PASD1; ENSG00000166049; HLA -B*44:03
SEAVPKKQQ

SEQ ID NO: 8468 - protein, 8 aa, Homo sapiens
  Table 1.2; PASD1; ENSG00000166049; HLA -A*02:01,HLA-A*02:03,HLA-A*02:04,HLA-A*02:07,HLA-B*13:02, HLA-B*37:01,HLA-B*55:01
SLGPVVQV

SEQ ID NO: 8469 - protein, 9 aa, Homo sapiens
  Table 1.2; PASD1; ENSG00000166049; HLA -A*32:01
SLGPVVQVN

SEQ ID NO: 8470 - protein, 11 aa, Homo sapiens
  Table 1.2; PASD1; ENSG00000166049; HLA -A*25:01,HLA-A*32:01,HLA-B*44:02,HLA-B*44:03,HLA-B*57:01, HLA-B*58:01
SLGPVVQVNTW

SEQ ID NO: 8471 - protein, 8 aa, Homo sapiens
  Table 1.2; PASD1; ENSG00000166049; HLA -B*08:01
SLKNTGEL

SEQ ID NO: 8472 - protein, 10 aa, Homo sapiens
  Table 1.2; PASD1; ENSG00000166049; HLA -A*02:01,HLA-A*02:03,HLA-A*02:04
SLLGHLPAEI

SEQ ID NO: 8473 - protein, 11 aa, Homo sapiens
  Table 1.2; PASD1; ENSG00000166049; HLA -A*02:01
SLQDFRGEPEV

SEQ ID NO: 8474 - protein, 9 aa, Homo sapiens
  Table 1.2; PASD1; ENSG00000166049; HLA -B*07:02,HLA-B*35:01
SPALSLQDF

SEQ ID NO: 8475 - protein, 9 aa, Homo sapiens
  Table 1.2; PASD1; ENSG00000166049; HLA -A*30:02,HLA-B*15:01,HLA-B*15:03,HLA-B*18:01,HLA-B*27:02, HLA-B*27:05,HLA-C*07:04
SQSFYPEAY

SEQ ID NO: 8476 - protein, 9 aa, Homo sapiens
  Table 1.2; PASD1; ENSG00000166049; HLA -B*58:01
SSAYENVKF

SEQ ID NO: 8477 - protein, 8 aa, Homo sapiens
  Table 1.2; PASD1; ENSG00000166049; HLA -A*11:01
SSEAVPKK

SEQ ID NO: 8478 - protein, 9 aa, Homo sapiens
  Table 1.2; PASD1; ENSG00000166049; HLA -A*01:01,HLA-A*02:01,HLA-A*02:04,HLA-A*02:07,HLA-A*03:01, HLA-A*11:01,HLA-A*30:01,HLA-A*68:01,HLA-A*68:02,HLA-B*13:02, HLA-B*35:01,HLA-B*35:03,HLA-B*38:01,HLA-B*55:01,HLA-C*04:01,
  HLA-C*05:01,HLA-C*07:04
STDGVIICV

SEQ ID NO: 8479 - protein, 9 aa, Homo sapiens
  Table 1.2; PASD1; ENSG00000166049; HLA -A*01:01,HLA-A*29:02,HLA-A*30:02
STLETPQDY

SEQ ID NO: 8480 - protein, 9 aa, Homo sapiens
  Table 1.2; PASD1; ENSG00000166049; HLA -A*25:01,HLA-A*26:01,HLA-B*15:01,HLA-B*15:03,HLA-B*46:01
STYCSSTVF

SEQ ID NO: 8481 - protein, 8 aa, Homo sapiens
  Table 1.2; PASD1; ENSG00000166049; HLA -C*05:01
SVDQEGPM

SEQ ID NO: 8482 - protein, 8 aa, Homo sapiens
  Table 1.2; PASD1; ENSG00000166049; HLA -C*05:01
SVDQVDSV

SEQ ID NO: 8483 - protein, 8 aa, Homo sapiens
  Table 1.2; PASD1; ENSG00000166049; HLA -A*30:01
TDGVIICV

SEQ ID NO: 8484 - protein, 8 aa, Homo sapiens
  Table 1.2; PASD1; ENSG00000166049; HLA -A*30:02,HLA-B*15:03,HLA-B*39:01
TLHGQPTY

SEQ ID NO: 8485 - protein, 9 aa, Homo sapiens
  Table 1.2; PASD1; ENSG00000166049; HLA -B*38:01
TLSTDGVII

SEQ ID NO: 8486 - protein, 11 aa, Homo sapiens
  Table 1.2; PASD1; ENSG00000166049; HLA -A*02:01,HLA-A*02:04
TLSTDGVIICV

SEQ ID NO: 8487 - protein, 8 aa, Homo sapiens
  Table 1.2; PASD1; ENSG00000166049; HLA -A*02:07,HLA-B*08:01,HLA-C*01:02
TMPESPAL

SEQ ID NO: 8488 - protein, 10 aa, Homo sapiens
  Table 1.2; PASD1; ENSG00000166049; HLA -A*02:07,HLA-C*01:02
TMPESPALSL

SEQ ID NO: 8489 - protein, 9 aa, Homo sapiens
  Table 1.2; PASD1; ENSG00000166049; HLA -B*44:02,HLA-B*57:01
TPQDYIRLW

SEQ ID NO: 8490 - protein, 9 aa, Homo sapiens
  Table 1.2; PASD1; ENSG00000166049; HLA -B*38:01
TQDSDEEPF

SEQ ID NO: 8491 - protein, 8 aa, Homo sapiens
  Table 1.2; PASD1; ENSG00000166049; HLA -B*15:01,HLA-B*15:03,HLA-B*39:01
TQLLQQLY

SEQ ID NO: 8492 - protein, 9 aa, Homo sapiens
  Table 1.2; PASD1; ENSG00000166049; HLA -B*13:02
TQLLQQLYT

SEQ ID NO: 8493 - protein, 11 aa, Homo sapiens
  Table 1.2; PASD1; ENSG00000166049; HLA -A*11:01,HLA-B*27:02
TQLLQQLYTSK

SEQ ID NO: 8494 - protein, 9 aa, Homo sapiens
  Table 1.2; PASD1; ENSG00000166049; HLA -B*27:05
TRLMPAEQR

SEQ ID NO: 8495 - protein, 9 aa, Homo sapiens
  Table 1.2; PASD1; ENSG00000166049; HLA -C*05:01
TSDSTISTL

SEQ ID NO: 8496 - protein, 9 aa, Homo sapiens
  Table 1.2; PASD1; ENSG00000166049; HLA -A*23:01,HLA-A*24:02
TYCSSTVFL

SEQ ID NO: 8497 - protein, 10 aa, Homo sapiens
  Table 1.2; PASD1; ENSG00000166049; HLA -A*23:01,HLA-A*24:02,HLA-B*35:03
TYDYFNQVTL

SEQ ID NO: 8498 - protein, 8 aa, Homo sapiens
  Table 1.2; PASD1; ENSG00000166049; HLA -C*05:01
VAENISSL

SEQ ID NO: 8499 - protein, 9 aa, Homo sapiens
  Table 1.2; PASD1; ENSG00000166049; HLA -A*23:01,HLA-C*05:01
VAENISSLL

SEQ ID NO: 8500 - protein, 8 aa, Homo sapiens
  Table 1.2; PASD1; ENSG00000166049; HLA -C*03:04
VAFNQQQL

SEQ ID NO: 8501 - protein, 9 aa, Homo sapiens
  Table 1.2; PASD1; ENSG00000166049; HLA -B*13:02,HLA-B*51:01,HLA-C*02:02,HLA-C*12:03,HLA-C*16:02
VAFNQQQLV

SEQ ID NO: 8502 - protein, 9 aa, Homo sapiens
  Table 1.2; PASD1; ENSG00000166049; HLA -C*01:02
VAPLDQAGL

SEQ ID NO: 8503 - protein, 10 aa, Homo sapiens
  Table 1.2; PASD1; ENSG00000166049; HLA -A*23:01,HLA-A*25:01,HLA-A*30:01,HLA-B*35:03,HLA-C*02:02, HLA-C*03:04,HLA-C*16:04
VAYDIISQEL

SEQ ID NO: 8504 - protein, 9 aa, Homo sapiens
  Table 1.2; PASD1; ENSG00000166049; HLA -A*24:02,HLA-B*08:01
VCILRTQLL

SEQ ID NO: 8505 - protein, 9 aa, Homo sapiens
  Table 1.2; PASD1; ENSG00000166049; HLA -A*30:01,HLA-B*18:01,HLA-B*40:02,HLA-B*49:01
VEGPPDPQA

SEQ ID NO: 8506 - protein, 10 aa, Homo sapiens
  Table 1.2; PASD1; ENSG00000166049; HLA -A*23:01,HLA-A*24:02,HLA-A*25:01,HLA-A*30:01,HLA-A*32:01, HLA-B*18:01,HLA-B*27:02,HLA-B*27:05,HLA-B*37:01,HLA-B*38:01, HLA-B*39:01,HLA-B*40:01,HLA-B*40:02,HLA-B*44:02,HLA-B*44:03,
  HLA-C*16:04
VEGPPDPQAF

SEQ ID NO: 8507 - protein, 9 aa, Homo sapiens
  Table 1.2; PASD1; ENSG00000166049; HLA -A*30:01,HLA-A*30:02,HLA-A*32:01,HLA-B*15:01,HLA-B*15:03, HLA-B*18:01,HLA-B*37:01,HLA-B*40:01,HLA-B*44:02,HLA-B*44:03, HLA-B*46:01,HLA-C*16:04
VEHGDSSAY

SEQ ID NO: 8508 - protein, 10 aa, Homo sapiens
  Table 1.2; PASD1; ENSG00000166049; HLA -B*49:01
VEQYGPQENV

SEQ ID NO: 8509 - protein, 8 aa, Homo sapiens
  Table 1.2; PASD1; ENSG00000166049; HLA -B*08:01
VGNERVQI

SEQ ID NO: 8510 - protein, 9 aa, Homo sapiens
  Table 1.2; PASD1; ENSG00000166049; HLA -B*13:02
VIICVAENI

SEQ ID NO: 8511 - protein, 11 aa, Homo sapiens
  Table 1.2; PASD1; ENSG00000166049; HLA -A*02:07
VIPDLQSSEAV

SEQ ID NO: 8512 - protein, 9 aa, Homo sapiens
  Table 1.2; PASD1; ENSG00000166049; HLA -A*23:01,HLA-A*24:02,HLA-B*07:02,HLA-B*08:01,HLA-B*35:01, HLA-B*35:03,HLA-B*51:01,HLA-B*55:01,HLA-C*07:02
VPQEDRLYL

SEQ ID NO: 8513 - protein, 10 aa, Homo sapiens
  Table 1.2; PASD1; ENSG00000166049; HLA -B*55:01,HLA-B*56:01
VPQEDRLYLV

SEQ ID NO: 8514 - protein, 8 aa, Homo sapiens
  Table 1.2; PASD1; ENSG00000166049; HLA -B*13:02
VQVSEVGV

SEQ ID NO: 8515 - protein, 9 aa, Homo sapiens
  Table 1.2; PASD1; ENSG00000166049; HLA -B*57:01
VTLQLLDGF

SEQ ID NO: 8516 - protein, 9 aa, Homo sapiens
  Table 1.2; PASD1; ENSG00000166049; HLA -A*23:01,HLA-A*24:02,HLA-A*29:02
VYQKIILKF

SEQ ID NO: 8517 - protein, 8 aa, Homo sapiens
  Table 1.2; PASD1; ENSG00000166049; HLA -B*39:01,HLA-C*14:02
VYVEPAAA

SEQ ID NO: 8518 - protein, 9 aa, Homo sapiens
  Table 1.2; PASD1; ENSG00000166049; HLA -A*23:01,HLA-A*24:02,HLA-B*39:01,HLA-B*46:01,HLA-B*54:01, HLA-B*56:01,HLA-C*01:02,HLA-C*03:03,HLA-C*14:02
VYVEPAAAA

SEQ ID NO: 8519 - protein, 10 aa, Homo sapiens
  Table 1.2; PASD1; ENSG00000166049; HLA -C*14:02
VYVEPAAAAA

SEQ ID NO: 8520 - protein, 10 aa, Homo sapiens
  Table 1.2; PASD1; ENSG00000166049; HLA -A*29:02
WIPSFPTYDY

SEQ ID NO: 8521 - protein, 8 aa, Homo sapiens
  Table 1.2; PASD1; ENSG00000166049; HLA -A*30:01,HLA-B*13:02,HLA-B*18:01,HLA-B*37:01,HLA-B*38:01, HLA-B*40:01,HLA-B*40:02,HLA-B*49:01,HLA-C*03:04
YDIISQEL

SEQ ID NO: 8522 - protein, 9 aa, Homo sapiens
  Table 1.2; PASD1; ENSG00000166049; HLA -A*30:01,HLA-B*40:02
YDYFNQVTL

SEQ ID NO: 8523 - protein, 8 aa, Homo sapiens
  Table 1.2; PASD1; ENSG00000166049; HLA -B*37:01,HLA-B*49:01
YENVKFIV

SEQ ID NO: 8524 - protein, 10 aa, Homo sapiens
  Table 1.2; PASD1; ENSG00000166049; HLA -B*49:01
YENVKFIVNV

SEQ ID NO: 8525 - protein, 9 aa, Homo sapiens
  Table 1.2; PASD1; ENSG00000166049; HLA -A*23:01,HLA-A*24:02,HLA-A*29:02,HLA-C*14:02
YFNQVTLQL

SEQ ID NO: 8526 - protein, 9 aa, Homo sapiens
  Table 1.2; PASD1; ENSG00000166049; HLA -B*38:01,HLA-B*39:01
YHQVQVSEV

SEQ ID NO: 8527 - protein, 9 aa, Homo sapiens
  Table 1.2; PASD1; ENSG00000166049; HLA -A*02:01,HLA-A*02:03,HLA-A*02:04
YLVGNVCIL

SEQ ID NO: 8528 - protein, 10 aa, Homo sapiens
  Table 1.2; PASD1; ENSG00000166049; HLA -B*51:01,HLA-B*54:01
YPEAYQGPPV

SEQ ID NO: 8529 - protein, 9 aa, Homo sapiens
  Table 1.2; PASD1; ENSG00000166049; HLA -A*02:01,HLA-A*02:03,HLA-A*02:04,HLA-A*23:01,HLA-A*24:02, HLA-A*30:01,HLA-A*32:01,HLA-B*13:02,HLA-B*15:01,HLA-B*15:03, HLA-B*27:05,HLA-B*37:01,HLA-B*38:01,HLA-B*39:01,HLA-B*40:01,
  HLA-B*40:02,HLA-B*58:01,HLA-C*02:02,HLA-C*07:04
YQGPPVNQL

SEQ ID NO: 8530 - protein, 8 aa, Homo sapiens
  Table 1.2; PASD1; ENSG00000166049; HLA -B*08:01
YQKIILKF

SEQ ID NO: 8531 - protein, 10 aa, Homo sapiens
  Table 1.2; PASD1; ENSG00000166049; HLA -B*27:02,HLA-B*27:05,HLA-B*38:01
YRADPVDLEF

SEQ ID NO: 8532 - protein, 8 aa, Homo sapiens
  Table 1.2; PASD1; ENSG00000166049; HLA -B*39:01
YVEPAAAA

SEQ ID NO: 8533 - protein, 9 aa, Homo sapiens
  Table 1.2; PASD1; ENSG00000166049; HLA -B*35:03,HLA-B*39:01,HLA-B*54:01,HLA-B*56:01,HLA-C*03:03
YVEPAAAAA

SEQ ID NO: 8534 - protein, 8 aa, Homo sapiens
  Table 1.2; PRDM7; ENSG00000126856; HLA -A*32:01,HLA-B*39:01,HLA-B*46:01,HLA-B*58:01,HLA-C*05:01, HLA-C*16:01
AAHGPPTF

SEQ ID NO: 8535 - protein, 9 aa, Homo sapiens
  Table 1.2; PRDM7; ENSG00000126856; HLA -A*02:03,HLA-A*32:01,HLA-B*13:02,HLA-B*51:01
AAHGPPTFV

SEQ ID NO: 8536 - protein, 10 aa, Homo sapiens
  Table 1.2; PRDM7; ENSG00000126856; HLA -A*03:01,HLA-A*03:02,HLA-A*11:01
AAHGPPTFVK

SEQ ID NO: 8537 - protein, 8 aa, Homo sapiens
  Table 1.2; PRDM7; ENSG00000126856; HLA -A*32:01,HLA-B*58:01
AANSGYSW

SEQ ID NO: 8538 - protein, 9 aa, Homo sapiens
  Table 1.2; PRDM7; ENSG00000126856; HLA -A*25:01,HLA-A*32:01,HLA-B*58:01,HLA-C*16:01
AASGRKSSW

SEQ ID NO: 8539 - protein, 10 aa, Homo sapiens
  Table 1.2; PRDM7; ENSG00000126856; HLA -B*44:02
AEMGDWEKTR

SEQ ID NO: 8540 - protein, 11 aa, Homo sapiens
  Table 1.2; PRDM7; ENSG00000126856; HLA -B*44:02,HLA-B*44:03
AEMGDWEKTRY

SEQ ID NO: 8541 - protein, 8 aa, Homo sapiens
  Table 1.2; PRDM7; ENSG00000126856; HLA -B*37:01,HLA-B*49:01
AESLGQAV

SEQ ID NO: 8542 - protein, 11 aa, Homo sapiens
  Table 1.2; PRDM7; ENSG00000126856; HLA -B*27:02,HLA-B*44:02,HLA-B*44:03,HLA-B*49:01,HLA-C*16:04
AESLGQAVNCW

SEQ ID NO: 8543 - protein, 8 aa, Homo sapiens
  Table 1.2; PRDM7; ENSG00000126856; HLA -A*30:02
AFKDISIY

SEQ ID NO: 8544 - protein, 9 aa, Homo sapiens
  Table 1.2; PRDM7; ENSG00000126856; HLA -A*23:01,HLA-A*24:02,HLA-A*29:02,HLA-A*31:01,HLA-B*57:01
AFKDISIYF

SEQ ID NO: 8545 - protein, 11 aa, Homo sapiens
  Table 1.2; PRDM7; ENSG00000126856; HLA -A*31:01
AFKDISIYFTK

SEQ ID NO: 8546 - protein, 8 aa, Homo sapiens
  Table 1.2; PRDM7; ENSG00000126856; HLA -B*39:01
AHGPPTFV

SEQ ID NO: 8547 - protein, 9 aa, Homo sapiens
  Table 1.2; PRDM7; ENSG00000126856; HLA -A*03:01,HLA-A*03:02,HLA-A*11:01,HLA-A*31:01,HLA-B*27:05
AHGPPTFVK

SEQ ID NO: 8548 - protein, 9 aa, Homo sapiens
  Table 1.2; PRDM7; ENSG00000126856; HLA -A*02:01,HLA-A*02:03,HLA-A*02:04,HLA-A*02:07,HLA-A*29:02, HLA-B*13:02
ALITVGLRA

SEQ ID NO: 8549 - protein, 10 aa, Homo sapiens
  Table 1.2; PRDM7; ENSG00000126856; HLA -A*02:03
ALITVGLRAT

SEQ ID NO: 8550 - protein, 11 aa, Homo sapiens
  Table 1.2; PRDM7; ENSG00000126856; HLA -A*31:01
ALITVGLRATR

SEQ ID NO: 8551 - protein, 8 aa, Homo sapiens
  Table 1.2; PRDM7; ENSG00000126856; HLA -B*37:01
ALSLPPGL

SEQ ID NO: 8552 - protein, 9 aa, Homo sapiens
  Table 1.2; PRDM7; ENSG00000126856; HLA -A*30:02,HLA-A*31:01,HLA-A*32:01,HLA-B*40:02
AQKPVSPPG

SEQ ID NO: 8553 - protein, 9 aa, Homo sapiens
  Table 1.2; PRDM7; ENSG00000126856; HLA -B*38:01,HLA-B*39:01
ARDDEEQNL

SEQ ID NO: 8554 - protein, 8 aa, Homo sapiens
  Table 1.2; PRDM7; ENSG00000126856; HLA -A*01:01,HLA-C*05:01
ASDLPLGL

SEQ ID NO: 8555 - protein, 9 aa, Homo sapiens
  Table 1.2; PRDM7; ENSG00000126856; HLA -A*01:01
ASDLPLGLH

SEQ ID NO: 8556 - protein, 10 aa, Homo sapiens
  Table 1.2; PRDM7; ENSG00000126856; HLA -A*01:01
ASDLPLGLHF

SEQ ID NO: 8557 - protein, 9 aa, Homo sapiens
  Table 1.2; PRDM7; ENSG00000126856; HLA -B*15:01,HLA-B*46:01,HLA-B*58:01,HLA-C*01:02,HLA-C*03:03, HLA-C*03:04
ASFNNESSL

SEQ ID NO: 8558 - protein, 10 aa, Homo sapiens
  Table 1.2; PRDM7; ENSG00000126856; HLA -A*68:01,HLA-C*07:06
ASFNNESSLR

SEQ ID NO: 8559 - protein, 8 aa, Homo sapiens
  Table 1.2; PRDM7; ENSG00000126856; HLA -A*32:01,HLA-B*58:01
ASGRKSSW

SEQ ID NO: 8560 - protein, 9 aa, Homo sapiens
  Table 1.2; PRDM7; ENSG00000126856; HLA -A*31:01,HLA-A*68:01,HLA-C*07:06
ASSGAASGR

SEQ ID NO: 8561 - protein, 9 aa, Homo sapiens
  Table 1.2; PRDM7; ENSG00000126856; HLA -A*03:01,HLA-A*31:01
ATRPAFMCH

SEQ ID NO: 8562 - protein, 10 aa, Homo sapiens
  Table 1.2; PRDM7; ENSG00000126856; HLA -A*31:01
ATRPAFMCHR

SEQ ID NO: 8563 - protein, 9 aa, Homo sapiens
  Table 1.2; PRDM7; ENSG00000126856; HLA -A*03:01,HLA-A*03:02,HLA-A*11:01,HLA-A*31:01
AVDKGHPNR

SEQ ID NO: 8564 - protein, 8 aa, Homo sapiens
  Table 1.2; PRDM7; ENSG00000126856; HLA -B*08:01
AVMTKPKV

SEQ ID NO: 8565 - protein, 9 aa, Homo sapiens
  Table 1.2; PRDM7; ENSG00000126856; HLA -A*03:01,HLA-A*03:02,HLA-A*11:01,HLA-A*31:01,HLA-A*32:01
AVMTKPKVK

SEQ ID NO: 8566 - protein, 10 aa, Homo sapiens
  Table 1.2; PRDM7; ENSG00000126856; HLA -A*03:01,HLA-A*11:01,HLA-A*31:01,HLA-A*33:01,HLA-A*33:03
AVMTKPKVKR

SEQ ID NO: 8567 - protein, 9 aa, Homo sapiens
  Table 1.2; PRDM7; ENSG00000126856; HLA -B*58:01
CAAHGPPTF

SEQ ID NO: 8568 - protein, 8 aa, Homo sapiens
  Table 1.2; PRDM7; ENSG00000126856; HLA -B*35:03,HLA-B*51:01
DAFKDISI

SEQ ID NO: 8569 - protein, 9 aa, Homo sapiens
  Table 1.2; PRDM7; ENSG00000126856; HLA -A*25:01,HLA-A*26:01,HLA-A*33:01,HLA-B*18:01,HLA-B*35:01, HLA-B*35:03,HLA-B*51:01
DAFKDISIY

SEQ ID NO: 8570 - protein, 10 aa, Homo sapiens
  Table 1.2; PRDM7; ENSG00000126856; HLA -A*25:01,HLA-A*26:01,HLA-A*33:01
DAFKDISIYF

SEQ ID NO: 8571 - protein, 10 aa, Homo sapiens
  Table 1.2; PRDM7; ENSG00000126856; HLA -A*33:01,HLA-B*18:01
DDEEQNLVAF

SEQ ID NO: 8572 - protein, 8 aa, Homo sapiens
  Table 1.2; PRDM7; ENSG00000126856; HLA -B*18:01
DDYLYCEM

SEQ ID NO: 8573 - protein, 9 aa, Homo sapiens
  Table 1.2; PRDM7; ENSG00000126856; HLA -B*18:01
DEEAANSGY

SEQ ID NO: 8574 - protein, 11 aa, Homo sapiens
  Table 1.2; PRDM7; ENSG00000126856; HLA -B*18:01,HLA-B*27:02,HLA-B*44:02,HLA-B*44:03
DEEAANSGYSW

SEQ ID NO: 8575 - protein, 9 aa, Homo sapiens
  Table 1.2; PRDM7; ENSG00000126856; HLA -A*30:01,HLA-B*18:01,HLA-B*40:01,HLA-B*44:02,HLA-B*44:03
DEEQNLVAF

SEQ ID NO: 8576 - protein, 11 aa, Homo sapiens
  Table 1.2; PRDM7; ENSG00000126856; HLA -B*18:01,HLA-B*44:02,HLA-B*44:03
DEEQNLVAFQY

SEQ ID NO: 8577 - protein, 9 aa, Homo sapiens
  Table 1.2; PRDM7; ENSG00000126856; HLA -A*30:01,HLA-B*18:01,HLA-B*38:01,HLA-B*39:01,HLA-B*44:02, HLA-B*44:03,HLA-B*49:01,HLA-B*51:01
DEYGQELGI

SEQ ID NO: 8578 - protein, 10 aa, Homo sapiens
  Table 1.2; PRDM7; ENSG00000126856; HLA -A*25:01
DGKDKSSANW

SEQ ID NO: 8579 - protein, 9 aa, Homo sapiens
  Table 1.2; PRDM7; ENSG00000126856; HLA -A*25:01,HLA-A*26:01,HLA-A*33:03,HLA-A*68:01,HLA-B*35:01, HLA-B*39:01,HLA-B*57:01,HLA-B*58:01
EAANSGYSW

SEQ ID NO: 8580 - protein, 9 aa, Homo sapiens
  Table 1.2; PRDM7; ENSG00000126856; HLA -A*25:01,HLA-A*26:01,HLA-A*33:03,HLA-A*68:01,HLA-A*68:02, HLA-B*27:05,HLA-B*35:01,HLA-B*35:03,HLA-B*38:01,HLA-B*39:01, HLA-C*07:06
EASDLPLGL

SEQ ID NO: 8581 - protein, 11 aa, Homo sapiens
  Table 1.2; PRDM7; ENSG00000126856; HLA -A*25:01,HLA-A*26:01,HLA-A*68:01,HLA-A*68:02
EASDLPLGLHF

SEQ ID NO: 8582 - protein, 10 aa, Homo sapiens
  Table 1.2; PRDM7; ENSG00000126856; HLA -A*33:03,HLA-A*68:01
EASTSGQHSR

SEQ ID NO: 8583 - protein, 11 aa, Homo sapiens
  Table 1.2; PRDM7; ENSG00000126856; HLA -A*68:01
EASTSGQHSRL

SEQ ID NO: 8584 - protein, 8 aa, Homo sapiens
  Table 1.2; PRDM7; ENSG00000126856; HLA -B*18:01,HLA-B*44:03
EEAANSGY

SEQ ID NO: 8585 - protein, 10 aa, Homo sapiens
  Table 1.2; PRDM7; ENSG00000126856; HLA -A*25:01,HLA-B*27:02,HLA-B*44:02,HLA-B*44:03,HLA-C*16:04
EEAANSGYSW

SEQ ID NO: 8586 - protein, 8 aa, Homo sapiens
  Table 1.2; PRDM7; ENSG00000126856; HLA -B*18:01,HLA-B*44:02
EEQNLVAF

SEQ ID NO: 8587 - protein, 10 aa, Homo sapiens
  Table 1.2; PRDM7; ENSG00000126856; HLA -A*30:02,HLA-B*18:01,HLA-B*27:02,HLA-B*27:05,HLA-B*44:02, HLA-B*44:03
EEQNLVAFQY

SEQ ID NO: 8588 - protein, 9 aa, Homo sapiens
  Table 1.2; PRDM7; ENSG00000126856; HLA -B*44:02,HLA-B*44:03
EEWAEMGDW

SEQ ID NO: 8589 - protein, 9 aa, Homo sapiens
  Table 1.2; PRDM7; ENSG00000126856; HLA -B*44:02,HLA-B*44:03,HLA-B*49:01
EEWTPRQQV

SEQ ID NO: 8590 - protein, 8 aa, Homo sapiens
  Table 1.2; PRDM7; ENSG00000126856; HLA -B*08:01
ELGIRSSI

SEQ ID NO: 8591 - protein, 9 aa, Homo sapiens
  Table 1.2; PRDM7; ENSG00000126856; HLA -A*68:02,HLA-B*38:01
ELSGTPNLL

SEQ ID NO: 8592 - protein, 9 aa, Homo sapiens
  Table 1.2; PRDM7; ENSG00000126856; HLA -A*33:01,HLA-A*33:03
EMGDWEKTR

SEQ ID NO: 8593 - protein, 10 aa, Homo sapiens
  Table 1.2; PRDM7; ENSG00000126856; HLA -B*54:01
ENFSNQRIPA

SEQ ID NO: 8594 - protein, 10 aa, Homo sapiens
  Table 1.2; PRDM7; ENSG00000126856; HLA -B*56:01
EPAESLGQAV

SEQ ID NO: 8595 - protein, 9 aa, Homo sapiens
  Table 1.2; PRDM7; ENSG00000126856; HLA -B*35:01,HLA-B*55:01,HLA-C*03:03
EPQDDDYLY

SEQ ID NO: 8596 - protein, 9 aa, Homo sapiens
  Table 1.2; PRDM7; ENSG00000126856; HLA -B*39:01
EQAQKPVSP

SEQ ID NO: 8597 - protein, 9 aa, Homo sapiens
  Table 1.2; PRDM7; ENSG00000126856; HLA -A*26:01,HLA-A*29:02,HLA-A*30:02,HLA-A*32:01,HLA-B*15:01, HLA-B*15:03,HLA-B*18:01,HLA-B*27:02,HLA-B*35:01,HLA-B*44:02, HLA-B*44:03,HLA-C*16:04
EQNLVAFQY

SEQ ID NO: 8598 - protein, 10 aa, Homo sapiens
  Table 1.2; PRDM7; ENSG00000126856; HLA -A*25:01,HLA-A*26:01,HLA-A*33:01,HLA-A*33:03,HLA-A*68:01, HLA-B*57:01,HLA-B*58:01
ESLGQAVNCW

SEQ ID NO: 8599 - protein, 9 aa, Homo sapiens
  Table 1.2; PRDM7; ENSG00000126856; HLA -A*25:01,HLA-A*26:01,HLA-A*33:03,HLA-A*68:01,HLA-A*68:02, HLA-B*08:01
ETEGKMYSL

SEQ ID NO: 8600 - protein, 10 aa, Homo sapiens
  Table 1.2; PRDM7; ENSG00000126856; HLA -A*33:01,HLA-A*33:03,HLA-A*68:01
ETEGKMYSLR

SEQ ID NO: 8601 - protein, 9 aa, Homo sapiens
  Table 1.2; PRDM7; ENSG00000126856; HLA -A*33:03
EYGQELGIR

SEQ ID NO: 8602 - protein, 10 aa, Homo sapiens
  Table 1.2; PRDM7; ENSG00000126856; HLA -C*07:02
FGPYEGRITE

SEQ ID NO: 8603 - protein, 8 aa, Homo sapiens
  Table 1.2; PRDM7; ENSG00000126856; HLA -A*33:03
FNNESSLR

SEQ ID NO: 8604 - protein, 8 aa, Homo sapiens
  Table 1.2; PRDM7; ENSG00000126856; HLA -B*13:02
FQVKNFSV

SEQ ID NO: 8605 - protein, 9 aa, Homo sapiens
  Table 1.2; PRDM7; ENSG00000126856; HLA -A*03:01,HLA-A*29:02,HLA-C*02:02
FQYHRQIFY

SEQ ID NO: 8606 - protein, 9 aa, Homo sapiens
  Table 1.2; PRDM7; ENSG00000126856; HLA -C*16:01
FSNQRIPAQ

SEQ ID NO: 8607 - protein, 9 aa, Homo sapiens
  Table 1.2; PRDM7; ENSG00000126856; HLA -A*26:01,HLA-B*46:01
FTKEEWAEM

SEQ ID NO: 8608 - protein, 10 aa, Homo sapiens
  Table 1.2; PRDM7; ENSG00000126856; HLA -A*25:01,HLA-A*32:01,HLA-B*58:01,HLA-C*16:01,HLA-C*16:02
GAASGRKSSW

SEQ ID NO: 8609 - protein, 9 aa, Homo sapiens
  Table 1.2; PRDM7; ENSG00000126856; HLA -A*30:01,HLA-B*13:02,HLA-B*27:02,HLA-B*40:01,HLA-B*44:02, HLA-B*44:03,HLA-B*49:01,HLA-C*16:04
GENQSQRSI

SEQ ID NO: 8610 - protein, 11 aa, Homo sapiens
  Table 1.2; PRDM7; ENSG00000126856; HLA -B*49:01
GENQSQRSIHV

SEQ ID NO: 8611 - protein, 10 aa, Homo sapiens
  Table 1.2; PRDM7; ENSG00000126856; HLA -A*25:01
GIPQAGLGVW

SEQ ID NO: 8612 - protein, 10 aa, Homo sapiens
  Table 1.2; PRDM7; ENSG00000126856; HLA -A*02:03
GLRATRPAFM

SEQ ID NO: 8613 - protein, 9 aa, Homo sapiens
  Table 1.2; PRDM7; ENSG00000126856; HLA -A*02:03
GLRIGPSGI

SEQ ID NO: 8614 - protein, 10 aa, Homo sapiens
  Table 1.2; PRDM7; ENSG00000126856; HLA -B*56:01
GPPTFVKDSA

SEQ ID NO: 8615 - protein, 8 aa, Homo sapiens
  Table 1.2; PRDM7; ENSG00000126856; HLA -B*56:01
GPSGIPQA

SEQ ID NO: 8616 - protein, 10 aa, Homo sapiens
  Table 1.2; PRDM7; ENSG00000126856; HLA -B*07:02,HLA-C*07:02
GPSGIPQAGL

SEQ ID NO: 8617 - protein, 9 aa, Homo sapiens
  Table 1.2; PRDM7; ENSG00000126856; HLA -B*07:02,HLA-B*56:01,HLA-C*07:02
GPYEGRITE

SEQ ID NO: 8618 - protein, 10 aa, Homo sapiens
  Table 1.2; PRDM7; ENSG00000126856; HLA -B*13:02
GQELGIRSSI

SEQ ID NO: 8619 - protein, 9 aa, Homo sapiens
  Table 1.2; PRDM7; ENSG00000126856; HLA -A*03:01,HLA-A*68:01
HAAVMTKPK

SEQ ID NO: 8620 - protein, 10 aa, Homo sapiens
  Table 1.2; PRDM7; ENSG00000126856; HLA -A*33:03,HLA-A*68:01
HLQENFSNQR

SEQ ID NO: 8621 - protein, 9 aa, Homo sapiens
  Table 1.2; PRDM7; ENSG00000126856; HLA -B*07:02,HLA-B*08:01,HLA-B*35:03,HLA-C*07:02
HPNRSALSL

SEQ ID NO: 8622 - protein, 10 aa, Homo sapiens
  Table 1.2; PRDM7; ENSG00000126856; HLA -B*15:01
HQKGMPKASF

SEQ ID NO: 8623 - protein, 8 aa, Homo sapiens
  Table 1.2; PRDM7; ENSG00000126856; HLA -B*08:01
HSRLKLEL

SEQ ID NO: 8624 - protein, 9 aa, Homo sapiens
  Table 1.2; PRDM7; ENSG00000126856; HLA -A*33:01
HSRLKLELR

SEQ ID NO: 8625 - protein, 11 aa, Homo sapiens
  Table 1.2; PRDM7; ENSG00000126856; HLA -A*30:01,HLA-B*13:02,HLA-B*40:01,HLA-B*40:02,HLA-B*49:01
IEPAESLGQAV

SEQ ID NO: 8626 - protein, 8 aa, Homo sapiens
  Table 1.2; PRDM7; ENSG00000126856; HLA -B*08:01
ILIHAAVM

SEQ ID NO: 8627 - protein, 8 aa, Homo sapiens
  Table 1.2; PRDM7; ENSG00000126856; HLA -B*07:02,HLA-B*08:01,HLA-B*51:01,HLA-B*56:01
IPAQGIRI

SEQ ID NO: 8628 - protein, 8 aa, Homo sapiens
  Table 1.2; PRDM7; ENSG00000126856; HLA -B*51:01
IPQAGLGV

SEQ ID NO: 8629 - protein, 9 aa, Homo sapiens
  Table 1.2; PRDM7; ENSG00000126856; HLA -A*01:01
ISEPQDDDY

SEQ ID NO: 8630 - protein, 11 aa, Homo sapiens
  Table 1.2; PRDM7; ENSG00000126856; HLA -A*01:01,HLA-B*57:01,HLA-B*58:01
ISEPQDDDYLY

SEQ ID NO: 8631 - protein, 10 aa, Homo sapiens
  Table 1.2; PRDM7; ENSG00000126856; HLA -B*57:01
ISIYFTKEEW

SEQ ID NO: 8632 - protein, 9 aa, Homo sapiens
  Table 1.2; PRDM7; ENSG00000126856; HLA -A*31:01,HLA-A*33:03,HLA-A*68:01,HLA-B*57:01
ITVGLRATR

SEQ ID NO: 8633 - protein, 8 aa, Homo sapiens
  Table 1.2; PRDM7; ENSG00000126856; HLA -A*24:02
IYFTKEEW

SEQ ID NO: 8634 - protein, 11 aa, Homo sapiens
  Table 1.2; PRDM7; ENSG00000126856; HLA -A*30:02
KEISEPQDDDY

SEQ ID NO: 8635 - protein, 8 aa, Homo sapiens
  Table 1.2; PRDM7; ENSG00000126856; HLA -B*18:01,HLA-B*37:01,HLA-B*44:02,HLA-B*44:03,HLA-C*16:02
KETEGKMY

SEQ ID NO: 8636 - protein, 10 aa, Homo sapiens
  Table 1.2; PRDM7; ENSG00000126856; HLA -A*30:01,HLA-B*40:01,HLA-B*40:02,HLA-B*44:02,HLA-B*49:01
KETEGKMYSL

SEQ ID NO: 8637 - protein, 9 aa, Homo sapiens
  Table 1.2; PRDM7; ENSG00000126856; HLA -A*32:01,HLA-B*07:02
KGHPNRSAL

SEQ ID NO: 8638 - protein, 8 aa, Homo sapiens
  Table 1.2; PRDM7; ENSG00000126856; HLA -A*32:01,HLA-B*08:01,HLA-B*37:01,HLA-C*16:01
KGMPKASF

SEQ ID NO: 8639 - protein, 10 aa, Homo sapiens
  Table 1.2; PRDM7; ENSG00000126856; HLA -A*02:01,HLA-A*02:03,HLA-A*02:04,HLA-A*02:07
KMNYNALITV

SEQ ID NO: 8640 - protein, 8 aa, Homo sapiens
  Table 1.2; PRDM7; ENSG00000126856; HLA -B*07:02,HLA-B*08:01
KPMVKDAF

SEQ ID NO: 8641 - protein, 9 aa, Homo sapiens
  Table 1.2; PRDM7; ENSG00000126856; HLA -B*07:02,HLA-B*54:01,HLA-B*55:01,HLA-B*56:01
KPVSPPGEA

SEQ ID NO: 8642 - protein, 11 aa, Homo sapiens
  Table 1.2; PRDM7; ENSG00000126856; HLA -B*56:01
KPVSPPGEAST

SEQ ID NO: 8643 - protein, 9 aa, Homo sapiens
  Table 1.2; PRDM7; ENSG00000126856; HLA -A*01:01
KSSANWMRY

SEQ ID NO: 8644 - protein, 9 aa, Homo sapiens
  Table 1.2; PRDM7; ENSG00000126856; HLA -A*03:01,HLA-A*03:02
LIHAAVMTK

SEQ ID NO: 8645 - protein, 9 aa, Homo sapiens
  Table 1.2; PRDM7; ENSG00000126856; HLA -A*01:01,HLA-A*29:02,HLA-B*15:01,HLA-B*15:03,HLA-B*46:01
LLVWSGDEY

SEQ ID NO: 8646 - protein, 9 aa, Homo sapiens
  Table 1.2; PRDM7; ENSG00000126856; HLA -B*51:01,HLA-B*57:01
LSLPPGLRI

SEQ ID NO: 8647 - protein, 9 aa, Homo sapiens
  Table 1.2; PRDM7; ENSG00000126856; HLA -B*57:01
MGMSMARNW

SEQ ID NO: 8648 - protein, 9 aa, Homo sapiens
  Table 1.2; PRDM7; ENSG00000126856; HLA -A*68:02,HLA-B*51:01,HLA-B*54:01,HLA-B*56:01
MNYNALITV

SEQ ID NO: 8649 - protein, 10 aa, Homo sapiens
  Table 1.2; PRDM7; ENSG00000126856; HLA -B*54:01
MPKASFNNES

SEQ ID NO: 8650 - protein, 8 aa, Homo sapiens
  Table 1.2; PRDM7; ENSG00000126856; HLA -A*33:03
MTKPKVKR

SEQ ID NO: 8651 - protein, 8 aa, Homo sapiens
  Table 1.2; PRDM7; ENSG00000126856; HLA -B*08:01,HLA-B*51:01
NALITVGL

SEQ ID NO: 8652 - protein, 9 aa, Homo sapiens
  Table 1.2; PRDM7; ENSG00000126856; HLA -A*33:01,HLA-A*33:03,HLA-A*68:01
NALITVGLR

SEQ ID NO: 8653 - protein, 10 aa, Homo sapiens
  Table 1.2; PRDM7; ENSG00000126856; HLA -A*30:01,HLA-B*40:01,HLA-B*44:02,HLA-B*44:03
NEASDLPLGL

SEQ ID NO: 8654 - protein, 8 aa, Homo sapiens
  Table 1.2; PRDM7; ENSG00000126856; HLA -B*18:01,HLA-B*37:01,HLA-B*44:02
NESSLREL

SEQ ID NO: 8655 - protein, 8 aa, Homo sapiens
  Table 1.2; PRDM7; ENSG00000126856; HLA -B*08:01
NILIHAAV

SEQ ID NO: 8656 - protein, 9 aa, Homo sapiens
  Table 1.2; PRDM7; ENSG00000126856; HLA -A*02:01,HLA-A*02:04,HLA-A*02:07
NMWNAITPL

SEQ ID NO: 8657 - protein, 9 aa, Homo sapiens
  Table 1.2; PRDM7; ENSG00000126856; HLA -B*13:02,HLA-B*15:03
NQRIPAQGI

SEQ ID NO: 8658 - protein, 9 aa, Homo sapiens
  Table 1.2; PRDM7; ENSG00000126856; HLA -B*37:01
NQSQRSIHV

SEQ ID NO: 8659 - protein, 10 aa, Homo sapiens
  Table 1.2; PRDM7; ENSG00000126856; HLA -A*68:01,HLA-C*07:06
NTSDSEQAQK

SEQ ID NO: 8660 - protein, 9 aa, Homo sapiens
  Table 1.2; PRDM7; ENSG00000126856; HLA -A*25:01,HLA-B*07:02,HLA-B*08:01,HLA-C*01:02
NVKMNYNAL

SEQ ID NO: 8661 - protein, 9 aa, Homo sapiens
  Table 1.2; PRDM7; ENSG00000126856; HLA -A*33:03
NYNALITVG

SEQ ID NO: 8662 - protein, 10 aa, Homo sapiens
  Table 1.2; PRDM7; ENSG00000126856; HLA -A*23:01,HLA-A*24:02
NYNALITVGL

SEQ ID NO: 8663 - protein, 9 aa, Homo sapiens
  Table 1.2; PRDM7; ENSG00000126856; HLA -B*56:01
PPTFVKDSA

SEQ ID NO: 8664 - protein, 8 aa, Homo sapiens
  Table 1.2; PRDM7; ENSG00000126856; HLA -B*37:01
QDHLQENF

SEQ ID NO: 8665 - protein, 9 aa, Homo sapiens
  Table 1.2; PRDM7; ENSG00000126856; HLA -A*30:01,HLA-B*40:01,HLA-B*44:02,HLA-B*44:03,HLA-B*49:01
QELGIRSSI

SEQ ID NO: 8666 - protein, 9 aa, Homo sapiens
  Table 1.2; PRDM7; ENSG00000126856; HLA -B*13:02,HLA-B*40:01,HLA-B*44:02,HLA-B*44:03,HLA-B*49:01
QENFSNQRI

SEQ ID NO: 8667 - protein, 9 aa, Homo sapiens
  Table 1.2; PRDM7; ENSG00000126856; HLA -B*15:03
QKGMPKASF

SEQ ID NO: 8668 - protein, 8 aa, Homo sapiens
  Table 1.2; PRDM7; ENSG00000126856; HLA -A*29:02
QNLVAFQY

SEQ ID NO: 8669 - protein, 9 aa, Homo sapiens
  Table 1.2; PRDM7; ENSG00000126856; HLA -B*27:05
QRIPAQGIR

SEQ ID NO: 8670 - protein, 9 aa, Homo sapiens
  Table 1.2; PRDM7; ENSG00000126856; HLA -A*33:03
QVKNFSVNM

SEQ ID NO: 8671 - protein, 10 aa, Homo sapiens
  Table 1.2; PRDM7; ENSG00000126856; HLA -A*25:01,HLA-B*57:01
QVKNFSVNMW

SEQ ID NO: 8672 - protein, 9 aa, Homo sapiens
  Table 1.2; PRDM7; ENSG00000126856; HLA -A*25:01,HLA-A*31:01,HLA-B*57:01
QVKPPWMAF

SEQ ID NO: 8673 - protein, 10 aa, Homo sapiens
  Table 1.2; PRDM7; ENSG00000126856; HLA -A*31:01
QVKPPWMAFR

SEQ ID NO: 8674 - protein, 9 aa, Homo sapiens
  Table 1.2; PRDM7; ENSG00000126856; HLA -A*31:01,HLA-A*33:01
QYHRQIFYR

SEQ ID NO: 8675 - protein, 9 aa, Homo sapiens
  Table 1.2; PRDM7; ENSG00000126856; HLA -A*30:01,HLA-B*37:01,HLA-B*40:01,HLA-B*40:02,HLA-B*44:02, HLA-B*44:03,HLA-B*49:01
RELSGTPNL

SEQ ID NO: 8676 - protein, 10 aa, Homo sapiens
  Table 1.2; PRDM7; ENSG00000126856; HLA -A*30:01,HLA-B*40:01
RELSGTPNLL

SEQ ID NO: 8677 - protein, 10 aa, Homo sapiens
  Table 1.2; PRDM7; ENSG00000126856; HLA -A*02:01
RIGPSGIPQA

SEQ ID NO: 8678 - protein, 9 aa, Homo sapiens
  Table 1.2; PRDM7; ENSG00000126856; HLA -A*02:07
RIPAQGIRI

SEQ ID NO: 8679 - protein, 10 aa, Homo sapiens
  Table 1.2; PRDM7; ENSG00000126856; HLA -A*03:01
RIRSGNILIH

SEQ ID NO: 8680 - protein, 10 aa, Homo sapiens
  Table 1.2; PRDM7; ENSG00000126856; HLA -B*57:01
RSIHVPHAVW

SEQ ID NO: 8681 - protein, 9 aa, Homo sapiens
  Table 1.2; PRDM7; ENSG00000126856; HLA -A*03:01
RTERKPMVK

SEQ ID NO: 8682 - protein, 11 aa, Homo sapiens
  Table 1.2; PRDM7; ENSG00000126856; HLA -B*57:01
RTSQDHLQENF

SEQ ID NO: 8683 - protein, 9 aa, Homo sapiens
  Table 1.2; PRDM7; ENSG00000126856; HLA -C*03:04
RVIRPGCEL

SEQ ID NO: 8684 - protein, 9 aa, Homo sapiens
  Table 1.2; PRDM7; ENSG00000126856; HLA -A*02:01,HLA-A*02:04
SALSLPPGL

SEQ ID NO: 8685 - protein, 10 aa, Homo sapiens
  Table 1.2; PRDM7; ENSG00000126856; HLA -A*33:01,HLA-A*68:01
SAVDKGHPNR

SEQ ID NO: 8686 - protein, 9 aa, Homo sapiens
  Table 1.2; PRDM7; ENSG00000126856; HLA -B*37:01,HLA-B*44:02,HLA-B*44:03
SDLPLGLHF

SEQ ID NO: 8687 - protein, 9 aa, Homo sapiens
  Table 1.2; PRDM7; ENSG00000126856; HLA -B*40:01
SEPQDDDYL

SEQ ID NO: 8688 - protein, 8 aa, Homo sapiens
  Table 1.2; PRDM7; ENSG00000126856; HLA -C*14:02
SFNNESSL

SEQ ID NO: 8689 - protein, 9 aa, Homo sapiens
  Table 1.2; PRDM7; ENSG00000126856; HLA -A*31:01,HLA-A*33:01,HLA-A*33:03
SFNNESSLR

SEQ ID NO: 8690 - protein, 11 aa, Homo sapiens
  Table 1.2; PRDM7; ENSG00000126856; HLA -A*32:01
SGAASGRKSSW

SEQ ID NO: 8691 - protein, 9 aa, Homo sapiens
  Table 1.2; PRDM7; ENSG00000126856; HLA -B*35:03,HLA-B*39:01,HLA-C*05:01
SGDEYGQEL

SEQ ID NO: 8692 - protein, 9 aa, Homo sapiens
  Table 1.2; PRDM7; ENSG00000126856; HLA -A*11:01,HLA-A*31:01,HLA-A*33:03,HLA-A*68:01,HLA-C*07:06
SGMGMSMAR

SEQ ID NO: 8693 - protein, 9 aa, Homo sapiens
  Table 1.2; PRDM7; ENSG00000126856; HLA -B*54:01
SGNILIHAA

SEQ ID NO: 8694 - protein, 9 aa, Homo sapiens
  Table 1.2; PRDM7; ENSG00000126856; HLA -A*03:01,HLA-A*11:01,HLA-A*31:01
SGYSWLITK

SEQ ID NO: 8695 - protein, 11 aa, Homo sapiens
  Table 1.2; PRDM7; ENSG00000126856; HLA -A*31:01
SGYSWLITKGR

SEQ ID NO: 8696 - protein, 9 aa, Homo sapiens
  Table 1.2; PRDM7; ENSG00000126856; HLA -B*57:01
SIHVPHAVW

SEQ ID NO: 8697 - protein, 9 aa, Homo sapiens
  Table 1.2; PRDM7; ENSG00000126856; HLA -B*57:01
SIYFTKEEW

SEQ ID NO: 8698 - protein, 9 aa, Homo sapiens
  Table 1.2; PRDM7; ENSG00000126856; HLA -A*25:01
SLGQAVNCW

SEQ ID NO: 8699 - protein, 11 aa, Homo sapiens
  Table 1.2; PRDM7; ENSG00000126856; HLA -A*02:04
SLRELSGTPNL

SEQ ID NO: 8700 - protein, 9 aa, Homo sapiens
  Table 1.2; PRDM7; ENSG00000126856; HLA -B*38:01,HLA-C*05:01
SQDHLQENF

SEQ ID NO: 8701 - protein, 9 aa, Homo sapiens
  Table 1.2; PRDM7; ENSG00000126856; HLA -A*02:03
SSANWMRYV

SEQ ID NO: 8702 - protein, 9 aa, Homo sapiens
  Table 1.2; PRDM7; ENSG00000126856; HLA -A*25:01,HLA-A*30:01,HLA-B*07:02,HLA-B*15:01,HLA-B*35:03, HLA-B*39:01,HLA-B*40:01,HLA-B*46:01,HLA-B*58:01,HLA-C*01:02, HLA-C*03:03,HLA-C*03:04,HLA-C*05:01,HLA-C*07:02,HLA-C*14:02
SSIEPAESL

SEQ ID NO: 8703 - protein, 11 aa, Homo sapiens
  Table 1.2; PRDM7; ENSG00000126856; HLA -A*31:01,HLA-A*68:01,HLA-C*07:06
SSWQGENQSQR

SEQ ID NO: 8704 - protein, 10 aa, Homo sapiens
  Table 1.2; PRDM7; ENSG00000126856; HLA -A*11:01
STSGQHSRLK

SEQ ID NO: 8705 - protein, 11 aa, Homo sapiens
  Table 1.2; PRDM7; ENSG00000126856; HLA -A*01:01,HLA-B*44:02,HLA-B*44:03
TEDEEAANSGY

SEQ ID NO: 8706 - protein, 8 aa, Homo sapiens
  Table 1.2; PRDM7; ENSG00000126856; HLA -A*30:01,HLA-B*08:01,HLA-B*18:01,HLA-B*37:01,HLA-B*40:01, HLA-B*40:02,HLA-B*44:02,HLA-B*44:03,HLA-B*49:01
TEGKMYSL

SEQ ID NO: 8707 - protein, 9 aa, Homo sapiens
  Table 1.2; PRDM7; ENSG00000126856; HLA -A*01:01
TSDSEQAQK

SEQ ID NO: 8708 - protein, 10 aa, Homo sapiens
  Table 1.2; PRDM7; ENSG00000126856; HLA -B*57:01,HLA-B*58:01
TSQDHLQENF

SEQ ID NO: 8709 - protein, 9 aa, Homo sapiens
  Table 1.2; PRDM7; ENSG00000126856; HLA -B*51:01
VAFQYHRQI

SEQ ID NO: 8710 - protein, 8 aa, Homo sapiens
  Table 1.2; PRDM7; ENSG00000126856; HLA -A*33:01
VDKGHPNR

SEQ ID NO: 8711 - protein, 8 aa, Homo sapiens
  Table 1.2; PRDM7; ENSG00000126856; HLA -B*07:02
VIRPGCEL

SEQ ID NO: 8712 - protein, 8 aa, Homo sapiens
  Table 1.2; PRDM7; ENSG00000126856; HLA -A*03:01,HLA-A*03:02
VMTKPKVK

SEQ ID NO: 8713 - protein, 9 aa, Homo sapiens
  Table 1.2; PRDM7; ENSG00000126856; HLA -A*31:01,HLA-A*33:01
VMTKPKVKR

SEQ ID NO: 8714 - protein, 9 aa, Homo sapiens
  Table 1.2; PRDM7; ENSG00000126856; HLA -A*24:02
VWPFQVKNF

SEQ ID NO: 8715 - protein, 10 aa, Homo sapiens
  Table 1.2; PRDM7; ENSG00000126856; HLA -B*54:01
WPFQVKNFSV

SEQ ID NO: 8716 - protein, 9 aa, Homo sapiens
  Table 1.2; PRDM7; ENSG00000126856; HLA -B*40:02,HLA-B*49:01
YEYVDGKDK

SEQ ID NO: 8717 - protein, 9 aa, Homo sapiens
  Table 1.2; PRDM7; ENSG00000126856; HLA -A*23:01,HLA-A*68:02
YNALITVGL

SEQ ID NO: 8718 - protein, 10 aa, Homo sapiens
  Table 1.2; PRDM7; ENSG00000126856; HLA -A*33:03
YNALITVGLR

SEQ ID NO: 8719 - protein, 9 aa, Homo sapiens
  Table 1.2; PRDM7; ENSG00000126856; HLA -A*31:01
YSWLITKGR

SEQ ID NO: 8720 - protein, 8 aa, Homo sapiens
  Table 1.2; PROKR1; ENSG00000169618; HLA -B*08:01,HLA-B*37:01
AAKIVIGM

SEQ ID NO: 8721 - protein, 10 aa, Homo sapiens
  Table 1.2; PROKR1; ENSG00000169618; HLA -A*30:01,HLA-B*37:01
ADLDLKTIGM

SEQ ID NO: 8722 - protein, 9 aa, Homo sapiens
  Table 1.2; PROKR1; ENSG00000169618; HLA -A*02:07
AIDRYLAIV

SEQ ID NO: 8723 - protein, 9 aa, Homo sapiens
  Table 1.2; PROKR1; ENSG00000169618; HLA -A*02:01,HLA-A*02:03,HLA-A*02:04,HLA-A*02:07,HLA-A*68:02, HLA-B*13:02
AISDFLVAI

SEQ ID NO: 8724 - protein, 10 aa, Homo sapiens
  Table 1.2; PROKR1; ENSG00000169618; HLA -A*02:03
AISDFLVAIV

SEQ ID NO: 8725 - protein, 9 aa, Homo sapiens
  Table 1.2; PROKR1; ENSG00000169618; HLA -A*31:01
AIVHPLRPR

SEQ ID NO: 8726 - protein, 9 aa, Homo sapiens
  Table 1.2; PROKR1; ENSG00000169618; HLA -B*15:03
AKIVIGMAL

SEQ ID NO: 8727 - protein, 9 aa, Homo sapiens
  Table 1.2; PROKR1; ENSG00000169618; HLA -A*03:01,HLA-A*03:02
ALLAIAIDR

SEQ ID NO: 8728 - protein, 10 aa, Homo sapiens
  Table 1.2; PROKR1; ENSG00000169618; HLA -A*29:02,HLA-A*30:02
ALLAIAIDRY

SEQ ID NO: 8729 - protein, 11 aa, Homo sapiens
  Table 1.2; PROKR1; ENSG00000169618; HLA -A*02:01,HLA-A*02:04
ALLAIAIDRYL

SEQ ID NO: 8730 - protein, 10 aa, Homo sapiens
  Table 1.2; PROKR1; ENSG00000169618; HLA -A*02:03,HLA-A*02:04
AMSNSMINTL

SEQ ID NO: 8731 - protein, 8 aa, Homo sapiens
  Table 1.2; PROKR1; ENSG00000169618; HLA -B*51:01,HLA-B*54:01,HLA-B*56:01
APFYGFTI

SEQ ID NO: 8732 - protein, 9 aa, Homo sapiens
  Table 1.2; PROKR1; ENSG00000169618; HLA -B*07:02,HLA-B*51:01,HLA-B*54:01,HLA-B*56:01
APFYGFTIV

SEQ ID NO: 8733 - protein, 10 aa, Homo sapiens
  Table 1.2; PROKR1; ENSG00000169618; HLA -A*32:01,HLA-B*56:01
ASYNGGKSSA

SEQ ID NO: 8734 - protein, 11 aa, Homo sapiens
  Table 1.2; PROKR1; ENSG00000169618; HLA -A*03:01,HLA-A*03:02,HLA-A*11:01
ATEEVDCIRLK

SEQ ID NO: 8735 - protein, 9 aa, Homo sapiens
  Table 1.2; PROKR1; ENSG00000169618; HLA -B*44:02,HLA-B*44:03,HLA-B*57:01
ATGLIALVW

SEQ ID NO: 8736 - protein, 8 aa, Homo sapiens
  Table 1.2; PROKR1; ENSG00000169618; HLA -A*32:01,HLA-B*46:01
ATNTSTSF

SEQ ID NO: 8737 - protein, 9 aa, Homo sapiens
  Table 1.2; PROKR1; ENSG00000169618; HLA -A*31:01,HLA-A*32:01,HLA-C*01:02
ATNTSTSFL

SEQ ID NO: 8738 - protein, 10 aa, Homo sapiens
  Table 1.2; PROKR1; ENSG00000169618; HLA -A*01:01,HLA-A*11:01,HLA-A*29:02,HLA-A*30:02
ATSFPFNFSY

SEQ ID NO: 8739 - protein, 9 aa, Homo sapiens
  Table 1.2; PROKR1; ENSG00000169618; HLA -A*23:01,HLA-A*24:02,HLA-C*14:02
AYFTTETVL

SEQ ID NO: 8740 - protein, 10 aa, Homo sapiens
  Table 1.2; PROKR1; ENSG00000169618; HLA -A*25:01,HLA-B*18:01,HLA-B*38:01,HLA-B*44:02,HLA-B*44:03
DEDVTNSRTF

SEQ ID NO: 8741 - protein, 11 aa, Homo sapiens
  Table 1.2; PROKR1; ENSG00000169618; HLA -B*44:02
DEDVTNSRTFF

SEQ ID NO: 8742 - protein, 9 aa, Homo sapiens
  Table 1.2; PROKR1; ENSG00000169618; HLA -A*33:01,HLA-A*33:03
DFFPTVFVK

SEQ ID NO: 8743 - protein, 9 aa, Homo sapiens
  Table 1.2; PROKR1; ENSG00000169618; HLA -B*08:01
DLDLKTIGM

SEQ ID NO: 8744 - protein, 10 aa, Homo sapiens
  Table 1.2; PROKR1; ENSG00000169618; HLA -A*25:01,HLA-A*26:01
DNATNTSTSF

SEQ ID NO: 8745 - protein, 9 aa, Homo sapiens
  Table 1.2; PROKR1; ENSG00000169618; HLA -A*25:01
DQQLYYKSY

SEQ ID NO: 8746 - protein, 9 aa, Homo sapiens
  Table 1.2; PROKR1; ENSG00000169618; HLA -A*68:02
DTVKYFKKI

SEQ ID NO: 8747 - protein, 8 aa, Homo sapiens
  Table 1.2; PROKR1; ENSG00000169618; HLA -A*25:01
DVTNSRTF

SEQ ID NO: 8748 - protein, 9 aa, Homo sapiens
  Table 1.2; PROKR1; ENSG00000169618; HLA -A*25:01,HLA-A*26:01
DVTNSRTFF

SEQ ID NO: 8749 - protein, 8 aa, Homo sapiens
  Table 1.2; PROKR1; ENSG00000169618; HLA -B*08:01,HLA-B*18:01,HLA-B*51:01
DYYVVRQL

SEQ ID NO: 8750 - protein, 10 aa, Homo sapiens
  Table 1.2; PROKR1; ENSG00000169618; HLA -A*24:02
DYYVVRQLSW

SEQ ID NO: 8751 - protein, 9 aa, Homo sapiens
  Table 1.2; PROKR1; ENSG00000169618; HLA -A*26:01
ECIAMSNSM

SEQ ID NO: 8752 - protein, 9 aa, Homo sapiens
  Table 1.2; PROKR1; ENSG00000169618; HLA -A*33:03,HLA-A*68:01,HLA-C*07:06
EDEDVTNSR

SEQ ID NO: 8753 - protein, 11 aa, Homo sapiens
  Table 1.2; PROKR1; ENSG00000169618; HLA -B*38:01,HLA-B*44:02,HLA-B*44:03
EDEDVTNSRTF

SEQ ID NO: 8754 - protein, 9 aa, Homo sapiens
  Table 1.2; PROKR1; ENSG00000169618; HLA -A*25:01,HLA-A*26:01,HLA-B*18:01,HLA-B*44:02,HLA-B*44:03, HLA-C*16:04
EDVTNSRTF

SEQ ID NO: 8755 - protein, 9 aa, Homo sapiens
  Table 1.2; PROKR1; ENSG00000169618; HLA -A*23:01,HLA-A*26:01,HLA-A*33:03,HLA-B*35:01
EFVGPVVTM

SEQ ID NO: 8756 - protein, 11 aa, Homo sapiens
  Table 1.2; PROKR1; ENSG00000169618; HLA -A*23:01
EFVGPVVTMTL

SEQ ID NO: 8757 - protein, 8 aa, Homo sapiens
  Table 1.2; PROKR1; ENSG00000169618; HLA -A*33:03
ETVLVIVK

SEQ ID NO: 8758 - protein, 9 aa, Homo sapiens
  Table 1.2; PROKR1; ENSG00000169618; HLA -A*26:01,HLA-A*68:01,HLA-A*68:02,HLA-B*27:05,HLA-B*35:01, HLA-B*35:03,HLA-B*46:01,HLA-B*51:01,HLA-B*54:01,HLA-C*02:02, HLA-C*07:06,HLA-C*12:03
FAAKIVIGM

SEQ ID NO: 8759 - protein, 8 aa, Homo sapiens
  Table 1.2; PROKR1; ENSG00000169618; HLA -B*49:01
FEMDYYVV

SEQ ID NO: 8760 - protein, 9 aa, Homo sapiens
  Table 1.2; PROKR1; ENSG00000169618; HLA -A*03:01
FIAALVRYK

SEQ ID NO: 8761 - protein, 10 aa, Homo sapiens
  Table 1.2; PROKR1; ENSG00000169618; HLA -A*29:02
FIFIAALVRY

SEQ ID NO: 8762 - protein, 10 aa, Homo sapiens
  Table 1.2; PROKR1; ENSG00000169618; HLA -A*02:01,HLA-A*02:03,HLA-A*02:04
FLFIFGIEFV

SEQ ID NO: 8763 - protein, 10 aa, Homo sapiens
  Table 1.2; PROKR1; ENSG00000169618; HLA -B*35:01
FPFNFSYSDY

SEQ ID NO: 8764 - protein, 9 aa, Homo sapiens
  Table 1.2; PROKR1; ENSG00000169618; HLA -A*68:02,HLA-B*13:02
FTTETVLVI

SEQ ID NO: 8765 - protein, 10 aa, Homo sapiens
  Table 1.2; PROKR1; ENSG00000169618; HLA -A*68:02
FTTETVLVIV

SEQ ID NO: 8766 - protein, 11 aa, Homo sapiens
  Table 1.2; PROKR1; ENSG00000169618; HLA -B*27:02
FTTETVLVIVK

SEQ ID NO: 8767 - protein, 8 aa, Homo sapiens
  Table 1.2; PROKR1; ENSG00000169618; HLA -A*32:01,HLA-B*35:01,HLA-B*35:03,HLA-B*37:01,HLA-B*46:01, HLA-C*07:04
FVGPVVTM

SEQ ID NO: 8768 - protein, 10 aa, Homo sapiens
  Table 1.2; PROKR1; ENSG00000169618; HLA -A*02:07,HLA-A*25:01,HLA-A*26:01,HLA-A*30:01,HLA-A*68:02, HLA-B*35:01,HLA-B*35:03,HLA-B*38:01,HLA-C*02:02,HLA-C*03:04
FVGPVVTMTL

SEQ ID NO: 8769 - protein, 8 aa, Homo sapiens
  Table 1.2; PROKR1; ENSG00000169618; HLA -B*08:01
FVKEKHYL

SEQ ID NO: 8770 - protein, 9 aa, Homo sapiens
  Table 1.2; PROKR1; ENSG00000169618; HLA -A*02:01
FVTVKNDTV

SEQ ID NO: 8771 - protein, 11 aa, Homo sapiens
  Table 1.2; PROKR1; ENSG00000169618; HLA -A*01:01
FVTVKNDTVKY

SEQ ID NO: 8772 - protein, 9 aa, Homo sapiens
  Table 1.2; PROKR1; ENSG00000169618; HLA -A*02:01,HLA-A*02:03,HLA-A*02:04,HLA-A*02:07,HLA-B*13:02, HLA-B*55:01
GLIALVWTV

SEQ ID NO: 8773 - protein, 9 aa, Homo sapiens
  Table 1.2; PROKR1; ENSG00000169618; HLA -A*02:01
GMALVGIML

SEQ ID NO: 8774 - protein, 8 aa, Homo sapiens
  Table 1.2; PROKR1; ENSG00000169618; HLA -B*07:02,HLA-B*56:01
GPVVTMTL

SEQ ID NO: 8775 - protein, 10 aa, Homo sapiens
  Table 1.2; PROKR1; ENSG00000169618; HLA -B*13:02
GQIWPVDQQL

SEQ ID NO: 8776 - protein, 11 aa, Homo sapiens
  Table 1.2; PROKR1; ENSG00000169618; HLA -A*30:02,HLA-B*15:01
GQIWPVDQQLY

SEQ ID NO: 8777 - protein, 9 aa, Homo sapiens
  Table 1.2; PROKR1; ENSG00000169618; HLA -A*26:01,HLA-A*29:02,HLA-A*30:02,HLA-B*15:03,HLA-B*35:01, HLA-C*07:04
HVLCTSVNY

SEQ ID NO: 8778 - protein, 9 aa, Homo sapiens
  Table 1.2; PROKR1; ENSG00000169618; HLA -A*23:01,HLA-A*24:02,HLA-A*25:01,HLA-B*08:01,HLA-B*13:02, HLA-B*46:01,HLA-B*51:01,HLA-C*02:02,HLA-C*03:03,HLA-C*03:04, HLA-C*16:02
IAIDRYLAI

SEQ ID NO: 8779 - protein, 8 aa, Homo sapiens
  Table 1.2; PROKR1; ENSG00000169618; HLA -A*23:01,HLA-B*57:01,HLA-B*58:01
IAIPSAYF

SEQ ID NO: 8780 - protein, 9 aa, Homo sapiens
  Table 1.2; PROKR1; ENSG00000169618; HLA -B*51:01
IALVWTVSI

SEQ ID NO: 8781 - protein, 8 aa, Homo sapiens
  Table 1.2; PROKR1; ENSG00000169618; HLA -B*51:01
IAMSNSMI

SEQ ID NO: 8782 - protein, 11 aa, Homo sapiens
  Table 1.2; PROKR1; ENSG00000169618; HLA -A*23:01,HLA-B*35:03,HLA-C*03:03
IAMSNSMINTL

SEQ ID NO: 8783 - protein, 9 aa, Homo sapiens
  Table 1.2; PROKR1; ENSG00000169618; HLA -B*46:01
IANLAISDF

SEQ ID NO: 8784 - protein, 8 aa, Homo sapiens
  Table 1.2; PROKR1; ENSG00000169618; HLA -A*30:01,HLA-B*13:02,HLA-B*18:01,HLA-B*37:01,HLA-B*40:01, HLA-B*40:02,HLA-B*49:01,HLA-B*51:01
IEFVGPVV

SEQ ID NO: 8785 - protein, 9 aa, Homo sapiens
  Table 1.2; PROKR1; ENSG00000169618; HLA -A*30:01,HLA-B*18:01,HLA-B*40:01,HLA-B*40:02,HLA-B*49:01
IEFVGPVVT

SEQ ID NO: 8786 - protein, 10 aa, Homo sapiens
  Table 1.2; PROKR1; ENSG00000169618; HLA -A*30:01,HLA-B*18:01,HLA-B*37:01,HLA-B*40:01,HLA-B*40:02, HLA-B*49:01
IEFVGPVVTM

SEQ ID NO: 8787 - protein, 9 aa, Homo sapiens
  Table 1.2; PROKR1; ENSG00000169618; HLA -A*23:01,HLA-A*24:02,HLA-A*29:02
IFIAALVRY

SEQ ID NO: 8788 - protein, 9 aa, Homo sapiens
  Table 1.2; PROKR1; ENSG00000169618; HLA -B*46:01
IGMPATEEV

SEQ ID NO: 8789 - protein, 9 aa, Homo sapiens
  Table 1.2; PROKR1; ENSG00000169618; HLA -B*54:01,HLA-B*56:01
IGNFIFIAA

SEQ ID NO: 8790 - protein, 9 aa, Homo sapiens
  Table 1.2; PROKR1; ENSG00000169618; HLA -A*01:01,HLA-A*03:01,HLA-A*23:01,HLA-A*25:01,HLA-A*26:01, HLA-A*29:02,HLA-A*30:02,HLA-A*32:01,HLA-B*15:01,HLA-B*15:03, HLA-B*18:01,HLA-B*46:01,HLA-C*02:02,HLA-C*07:04,HLA-C*14:02
ILIAIPSAY

SEQ ID NO: 8791 - protein, 10 aa, Homo sapiens
  Table 1.2; PROKR1; ENSG00000169618; HLA -A*23:01,HLA-A*24:02
ILIAIPSAYF

SEQ ID NO: 8792 - protein, 9 aa, Homo sapiens
  Table 1.2; PROKR1; ENSG00000169618; HLA -A*01:01
ISDFLVAIV

SEQ ID NO: 8793 - protein, 9 aa, Homo sapiens
  Table 1.2; PROKR1; ENSG00000169618; HLA -A*02:03,HLA-A*02:07,HLA-B*51:01,HLA-B*54:01
IVRDFFPTV

SEQ ID NO: 8794 - protein, 10 aa, Homo sapiens
  Table 1.2; PROKR1; ENSG00000169618; HLA -B*57:01
IVRDFFPTVF

SEQ ID NO: 8795 - protein, 9 aa, Homo sapiens
  Table 1.2; PROKR1; ENSG00000169618; HLA -A*24:02
KYFKKIMLL

SEQ ID NO: 8796 - protein, 9 aa, Homo sapiens
  Table 1.2; PROKR1; ENSG00000169618; HLA -B*57:01
LAIAIDRYL

SEQ ID NO: 8797 - protein, 9 aa, Homo sapiens
  Table 1.2; PROKR1; ENSG00000169618; HLA -B*54:01
LAISDFLVA

SEQ ID NO: 8798 - protein, 8 aa, Homo sapiens
  Table 1.2; PROKR1; ENSG00000169618; HLA -B*37:01
LDLKTIGM

SEQ ID NO: 8799 - protein, 8 aa, Homo sapiens
  Table 1.2; PROKR1; ENSG00000169618; HLA -A*01:01
LIAIPSAY

SEQ ID NO: 8800 - protein, 9 aa, Homo sapiens
  Table 1.2; PROKR1; ENSG00000169618; HLA -A*01:01,HLA-A*29:02
LLAIAIDRY

SEQ ID NO: 8801 - protein, 9 aa, Homo sapiens
  Table 1.2; PROKR1; ENSG00000169618; HLA -A*02:04,HLA-A*02:07,HLA-C*03:04
LSWEHGHVL

SEQ ID NO: 8802 - protein, 9 aa, Homo sapiens
  Table 1.2; PROKR1; ENSG00000169618; HLA -A*02:04
LTNLLIANL

SEQ ID NO: 8803 - protein, 9 aa, Homo sapiens
  Table 1.2; PROKR1; ENSG00000169618; HLA -A*24:02
LWFKAVPGF

SEQ ID NO: 8804 - protein, 8 aa, Homo sapiens
  Table 1.2; PROKR1; ENSG00000169618; HLA -A*23:01,HLA-C*14:02
LYVSTNAL

SEQ ID NO: 8805 - protein, 9 aa, Homo sapiens
  Table 1.2; PROKR1; ENSG00000169618; HLA -A*23:01,HLA-A*24:02,HLA-C*14:02
LYVSTNALL

SEQ ID NO: 8806 - protein, 11 aa, Homo sapiens
  Table 1.2; PROKR1; ENSG00000169618; HLA -A*23:01
LYVSTNALLAI

SEQ ID NO: 8807 - protein, 9 aa, Homo sapiens
  Table 1.2; PROKR1; ENSG00000169618; HLA -A*24:02
LYYKSYFLF

SEQ ID NO: 8808 - protein, 8 aa, Homo sapiens
  Table 1.2; PROKR1; ENSG00000169618; HLA -C*03:04
MALVGIML

SEQ ID NO: 8809 - protein, 9 aa, Homo sapiens
  Table 1.2; PROKR1; ENSG00000169618; HLA -B*51:01,HLA-B*54:01
MALVGIMLV

SEQ ID NO: 8810 - protein, 9 aa, Homo sapiens
  Table 1.2; PROKR1; ENSG00000169618; HLA -A*29:02
MLLHWKASY

SEQ ID NO: 8811 - protein, 9 aa, Homo sapiens
  Table 1.2; PROKR1; ENSG00000169618; HLA -B*35:03,HLA-B*55:01
MPATEEVDC

SEQ ID NO: 8812 - protein, 10 aa, Homo sapiens
  Table 1.2; PROKR1; ENSG00000169618; HLA -B*35:03,HLA-B*55:01
MPATEEVDCI

SEQ ID NO: 8813 - protein, 9 aa, Homo sapiens
  Table 1.2; PROKR1; ENSG00000169618; HLA -B*35:03
MPLDEDEDV

SEQ ID NO: 8814 - protein, 10 aa, Homo sapiens
  Table 1.2; PROKR1; ENSG00000169618; HLA -B*35:03
MPLDEDEDVT

SEQ ID NO: 8815 - protein, 9 aa, Homo sapiens
  Table 1.2; PROKR1; ENSG00000169618; HLA -B*35:01,HLA-B*35:03,HLA-B*58:01,HLA-C*03:04,HLA-C*07:04
MSNSMINTL

SEQ ID NO: 8816 - protein, 8 aa, Homo sapiens
  Table 1.2; PROKR1; ENSG00000169618; HLA -B*51:01
NALLAIAI

SEQ ID NO: 8817 - protein, 9 aa, Homo sapiens
  Table 1.2; PROKR1; ENSG00000169618; HLA -A*23:01,HLA-A*25:01,HLA-A*32:01,HLA-B*15:03,HLA-B*35:01, HLA-B*35:03,HLA-B*39:01,HLA-B*46:01,HLA-B*55:01,HLA-B*58:01, HLA-C*02:02,HLA-C*03:03,HLA-C*03:04,HLA-C*14:02,HLA-C*16:01,
  HLA-C*16:02
NATNTSTSF

SEQ ID NO: 8818 - protein, 11 aa, Homo sapiens
  Table 1.2; PROKR1; ENSG00000169618; HLA -A*29:02
NFIFIAALVRY

SEQ ID NO: 8819 - protein, 10 aa, Homo sapiens
  Table 1.2; PROKR1; ENSG00000169618; HLA -A*02:04
NLTNLLIANL

SEQ ID NO: 8820 - protein, 10 aa, Homo sapiens
  Table 1.2; PROKR1; ENSG00000169618; HLA -B*07:02,HLA-B*35:01,HLA-C*07:02
NPHGAHATSF

SEQ ID NO: 8821 - protein, 9 aa, Homo sapiens
  Table 1.2; PROKR1; ENSG00000169618; HLA -A*11:01
NTLCFVTVK

SEQ ID NO: 8822 - protein, 9 aa, Homo sapiens
  Table 1.2; PROKR1; ENSG00000169618; HLA -A*68:02
NTSTSFLSV

SEQ ID NO: 8823 - protein, 8 aa, Homo sapiens
  Table 1.2; PROKR1; ENSG00000169618; HLA -A*23:01,HLA-A*24:02,HLA-C*14:02
NYLRTVSL

SEQ ID NO: 8824 - protein, 9 aa, Homo sapiens
  Table 1.2; PROKR1; ENSG00000169618; HLA -A*23:01,HLA-A*24:02,HLA-A*29:02
NYLRTVSLY

SEQ ID NO: 8825 - protein, 8 aa, Homo sapiens
  Table 1.2; PROKR1; ENSG00000169618; HLA -A*01:01
PVDQQLYY

SEQ ID NO: 8826 - protein, 9 aa, Homo sapiens
  Table 1.2; PROKR1; ENSG00000169618; HLA -A*03:02
PVDQQLYYK

SEQ ID NO: 8827 - protein, 9 aa, Homo sapiens
  Table 1.2; PROKR1; ENSG00000169618; HLA -A*29:02
PVVTMTLCY

SEQ ID NO: 8828 - protein, 9 aa, Homo sapiens
  Table 1.2; PROKR1; ENSG00000169618; HLA -A*02:04,HLA-A*02:07,HLA-B*35:03
QIWPVDQQL

SEQ ID NO: 8829 - protein, 10 aa, Homo sapiens
  Table 1.2; PROKR1; ENSG00000169618; HLA -A*29:02
QIWPVDQQLY

SEQ ID NO: 8830 - protein, 11 aa, Homo sapiens
  Table 1.2; PROKR1; ENSG00000169618; HLA -A*29:02
QIWPVDQQLYY

SEQ ID NO: 8831 - protein, 11 aa, Homo sapiens
  Table 1.2; PROKR1; ENSG00000169618; HLA -B*57:01
QTATGLIALVW

SEQ ID NO: 8832 - protein, 8 aa, Homo sapiens
  Table 1.2; PROKR1; ENSG00000169618; HLA -B*37:01
RDFFPTVF

SEQ ID NO: 8833 - protein, 9 aa, Homo sapiens
  Table 1.2; PROKR1; ENSG00000169618; HLA -A*23:01,HLA-A*24:02,HLA-A*31:01
RYLAIVHPL

SEQ ID NO: 8834 - protein, 9 aa, Homo sapiens
  Table 1.2; PROKR1; ENSG00000169618; HLA -B*38:01,HLA-B*51:01,HLA-C*05:01
SADLDLKTI

SEQ ID NO: 8835 - protein, 9 aa, Homo sapiens
  Table 1.2; PROKR1; ENSG00000169618; HLA -A*02:01,HLA-B*13:02,HLA-B*46:01,HLA-B*51:01,HLA-C*02:02, HLA-C*03:04,HLA-C*16:04
SAYFTTETV

SEQ ID NO: 8836 - protein, 10 aa, Homo sapiens
  Table 1.2; PROKR1; ENSG00000169618; HLA -B*35:03
SAYFTTETVL

SEQ ID NO: 8837 - protein, 8 aa, Homo sapiens
  Table 1.2; PROKR1; ENSG00000169618; HLA -B*37:01
SDFLVAIV

SEQ ID NO: 8838 - protein, 8 aa, Homo sapiens
  Table 1.2; PROKR1; ENSG00000169618; HLA -A*29:02
SFPFNFSY

SEQ ID NO: 8839 - protein, 9 aa, Homo sapiens
  Table 1.2; PROKR1; ENSG00000169618; HLA -A*02:01,HLA-A*02:04
SILIAIPSA

SEQ ID NO: 8840 - protein, 10 aa, Homo sapiens
  Table 1.2; PROKR1; ENSG00000169618; HLA -A*30:02
SILIAIPSAY

SEQ ID NO: 8841 - protein, 9 aa, Homo sapiens
  Table 1.2; PROKR1; ENSG00000169618; HLA -A*02:01,HLA-A*02:03,HLA-A*02:04,HLA-A*30:01,HLA-B*07:02, HLA-B*08:01,HLA-B*13:02,HLA-B*15:01,HLA-B*15:03,HLA-B*37:01, HLA-B*46:01,HLA-C*01:02,HLA-C*03:03,HLA-C*14:02
SLYVSTNAL

SEQ ID NO: 8842 - protein, 9 aa, Homo sapiens
  Table 1.2; PROKR1; ENSG00000169618; HLA -A*02:01,HLA-A*02:03
SMINTLCFV

SEQ ID NO: 8843 - protein, 11 aa, Homo sapiens
  Table 1.2; PROKR1; ENSG00000169618; HLA -A*30:02
SVNYLRTVSLY

SEQ ID NO: 8844 - protein, 9 aa, Homo sapiens
  Table 1.2; PROKR1; ENSG00000169618; HLA -C*14:02
SYNGGKSSA

SEQ ID NO: 8845 - protein, 8 aa, Homo sapiens
  Table 1.2; PROKR1; ENSG00000169618; HLA -B*54:01,HLA-B*56:01
TAFYIVEC

SEQ ID NO: 8846 - protein, 9 aa, Homo sapiens
  Table 1.2; PROKR1; ENSG00000169618; HLA -A*68:02,HLA-B*13:02,HLA-B*51:01,HLA-B*54:01
TAFYIVECI

SEQ ID NO: 8847 - protein, 9 aa, Homo sapiens
  Table 1.2; PROKR1; ENSG00000169618; HLA -A*68:02,HLA-B*13:02,HLA-C*02:02,HLA-C*16:02
TATGLIALV

SEQ ID NO: 8848 - protein, 10 aa, Homo sapiens
  Table 1.2; PROKR1; ENSG00000169618; HLA -B*44:02
TATGLIALVW

SEQ ID NO: 8849 - protein, 9 aa, Homo sapiens
  Table 1.2; PROKR1; ENSG00000169618; HLA -B*40:01
TEEVDCIRL

SEQ ID NO: 8850 - protein, 8 aa, Homo sapiens
  Table 1.2; PROKR1; ENSG00000169618; HLA -A*30:01,HLA-B*18:01,HLA-B*49:01
TETVLVIV

SEQ ID NO: 8851 - protein, 9 aa, Homo sapiens
  Table 1.2; PROKR1; ENSG00000169618; HLA -B*18:01,HLA-B*49:01
TETVLVIVK

SEQ ID NO: 8852 - protein, 9 aa, Homo sapiens
  Table 1.2; PROKR1; ENSG00000169618; HLA -A*23:01
TFFAAKIVI

SEQ ID NO: 8853 - protein, 9 aa, Homo sapiens
  Table 1.2; PROKR1; ENSG00000169618; HLA -A*01:01,HLA-A*29:02,HLA-A*30:02,HLA-A*32:01,HLA-B*35:01, HLA-B*57:01,HLA-B*58:01,HLA-C*02:02
TSFPFNFSY

SEQ ID NO: 8854 - protein, 9 aa, Homo sapiens
  Table 1.2; PROKR1; ENSG00000169618; HLA -C*16:02
TSTSFLSVL

SEQ ID NO: 8855 - protein, 9 aa, Homo sapiens
  Table 1.2; PROKR1; ENSG00000169618; HLA -A*02:03,HLA-C*16:02
TSVNYLRTV

SEQ ID NO: 8856 - protein, 9 aa, Homo sapiens
  Table 1.2; PROKR1; ENSG00000169618; HLA -A*01:01,HLA-A*68:02
TTETVLVIV

SEQ ID NO: 8857 - protein, 10 aa, Homo sapiens
  Table 1.2; PROKR1; ENSG00000169618; HLA -A*01:01,HLA-A*11:01,HLA-A*68:01,HLA-B*27:02
TTETVLVIVK

SEQ ID NO: 8858 - protein, 9 aa, Homo sapiens
  Table 1.2; PROKR1; ENSG00000169618; HLA -A*25:01,HLA-A*26:01,HLA-A*29:02,HLA-A*30:02,HLA-A*32:01, HLA-A*33:01,HLA-A*33:03,HLA-B*15:01,HLA-B*15:03,HLA-B*35:01, HLA-B*46:01,HLA-B*58:01,HLA-C*02:02,HLA-C*07:04
TVKNDTVKY

SEQ ID NO: 8859 - protein, 10 aa, Homo sapiens
  Table 1.2; PROKR1; ENSG00000169618; HLA -A*25:01
TVKNDTVKYF

SEQ ID NO: 8860 - protein, 9 aa, Homo sapiens
  Table 1.2; PROKR1; ENSG00000169618; HLA -A*02:07,HLA-A*23:01,HLA-A*24:02,HLA-B*08:01,HLA-B*46:01, HLA-B*51:01,HLA-C*01:02,HLA-C*14:02
VGPVVTMTL

SEQ ID NO: 8861 - protein, 8 aa, Homo sapiens
  Table 1.2; PROKR1; ENSG00000169618; HLA -B*15:03
VKNDTVKY

SEQ ID NO: 8862 - protein, 9 aa, Homo sapiens
  Table 1.2; PROKR1; ENSG00000169618; HLA -A*03:01,HLA-A*29:02,HLA-B*15:01,HLA-B*15:03,HLA-B*46:01
VLMCILTAY

SEQ ID NO: 8863 - protein, 9 aa, Homo sapiens
  Table 1.2; PROKR1; ENSG00000169618; HLA -A*02:03,HLA-A*32:01
VLNPHGAHA

SEQ ID NO: 8864 - protein, 9 aa, Homo sapiens
  Table 1.2; PROKR1; ENSG00000169618; HLA -B*08:01,HLA-B*37:01,HLA-B*51:01,HLA-C*01:02,HLA-C*14:02, HLA-C*16:01
VNYLRTVSL

SEQ ID NO: 8865 - protein, 9 aa, Homo sapiens
  Table 1.2; PROKR1; ENSG00000169618; HLA -B*51:01
VPGFQTEQI

SEQ ID NO: 8866 - protein, 9 aa, Homo sapiens
  Table 1.2; PROKR1; ENSG00000169618; HLA -B*13:02
VSTNALLAI

SEQ ID NO: 8867 - protein, 8 aa, Homo sapiens
  Table 1.2; PROKR1; ENSG00000169618; HLA -A*32:01
VTNSRTFF

SEQ ID NO: 8868 - protein, 9 aa, Homo sapiens
  Table 1.2; PROKR1; ENSG00000169618; HLA -A*11:01
VTVKNDTVK

SEQ ID NO: 8869 - protein, 10 aa, Homo sapiens
  Table 1.2; PROKR1; ENSG00000169618; HLA -A*01:01,HLA-A*26:01,HLA-A*30:02,HLA-B*57:01,HLA-B*58:01
VTVKNDTVKY

SEQ ID NO: 8870 - protein, 11 aa, Homo sapiens
  Table 1.2; PROKR1; ENSG00000169618; HLA -B*57:01
VTVKNDTVKYF

SEQ ID NO: 8871 - protein, 9 aa, Homo sapiens
  Table 1.2; PROKR1; ENSG00000169618; HLA -A*29:02,HLA-B*35:01
WPVDQQLYY

SEQ ID NO: 8872 - protein, 9 aa, Homo sapiens
  Table 1.2; PROKR1; ENSG00000169618; HLA -A*68:02
WTVSILIAI

SEQ ID NO: 8873 - protein, 8 aa, Homo sapiens
  Table 1.2; PROKR1; ENSG00000169618; HLA -B*08:01
YARISREL

SEQ ID NO: 8874 - protein, 9 aa, Homo sapiens
  Table 1.2; PROKR1; ENSG00000169618; HLA -B*57:01
YARISRELW

SEQ ID NO: 8875 - protein, 10 aa, Homo sapiens
  Table 1.2; PROKR1; ENSG00000169618; HLA -A*29:02
YFLFIFGIEF

SEQ ID NO: 8876 - protein, 8 aa, Homo sapiens
  Table 1.2; PROKR1; ENSG00000169618; HLA -C*14:02
YFTTETVL

SEQ ID NO: 8877 - protein, 8 aa, Homo sapiens
  Table 1.2; PROKR1; ENSG00000169618; HLA -A*02:03,HLA-A*02:04
YLAIVHPL

SEQ ID NO: 8878 - protein, 8 aa, Homo sapiens
  Table 1.2; PROKR1; ENSG00000169618; HLA -B*46:01
YLRTVSLY

SEQ ID NO: 8879 - protein, 9 aa, Homo sapiens
  Table 1.2; PROKR1; ENSG00000169618; HLA -A*02:01,HLA-A*02:03,HLA-A*02:07
YLRTVSLYV

SEQ ID NO: 8880 - protein, 9 aa, Homo sapiens
  Table 1.2; PROKR1; ENSG00000169618; HLA -A*29:02
YVLCWAPFY

SEQ ID NO: 8881 - protein, 10 aa, Homo sapiens
  Table 1.2; PROKR1; ENSG00000169618; HLA -A*25:01
YVSTNALLAI

SEQ ID NO: 8882 - protein, 9 aa, Homo sapiens
  Table 1.2; PROKR1; ENSG00000169618; HLA -A*24:02
YYKSYFLFI

SEQ ID NO: 8883 - protein, 9 aa, Homo sapiens
  Table 1.2; PROKR1; ENSG00000169618; HLA -A*23:01,HLA-A*24:02
YYVVRQLSW

SEQ ID NO: 8884 - protein, 8 aa, Homo sapiens
  Table 1.2; R3HDML; ENSG00000101074; HLA -B*15:01,HLA-B*15:03,HLA-B*37:01,HLA-B*46:01,HLA-C*02:02, HLA-C*12:03,HLA-C*16:02,HLA-C*16:04
AAYLVCNY

SEQ ID NO: 8885 - protein, 9 aa, Homo sapiens
  Table 1.2; R3HDML; ENSG00000101074; HLA -B*54:01
AAYLVCNYA

SEQ ID NO: 8886 - protein, 9 aa, Homo sapiens
  Table 1.2; R3HDML; ENSG00000101074; HLA -A*30:01,HLA-B*13:02,HLA-B*27:02,HLA-B*37:01,HLA-B*40:01, HLA-B*40:02,HLA-B*44:02,HLA-B*44:03,HLA-B*49:01
AEAWATQCI

SEQ ID NO: 8887 - protein, 10 aa, Homo sapiens
  Table 1.2; R3HDML; ENSG00000101074; HLA -B*44:02,HLA-B*44:03
AEAWATQCIW

SEQ ID NO: 8888 - protein, 8 aa, Homo sapiens
  Table 1.2; R3HDML; ENSG00000101074; HLA -B*27:05,HLA-B*38:01,HLA-B*39:01
AHGPSQLM

SEQ ID NO: 8889 - protein, 10 aa, Homo sapiens
  Table 1.2; R3HDML; ENSG00000101074; HLA -A*30:02
AHGPSQLMRY

SEQ ID NO: 8890 - protein, 9 aa, Homo sapiens
  Table 1.2; R3HDML; ENSG00000101074; HLA -A*02:01,HLA-A*02:04,HLA-A*02:07,HLA-B*13:02
ALLDYHNHI

SEQ ID NO: 8891 - protein, 9 aa, Homo sapiens
  Table 1.2; R3HDML; ENSG00000101074; HLA -B*54:01,HLA-B*55:01,HLA-B*56:01
APAQPESTA

SEQ ID NO: 8892 - protein, 10 aa, Homo sapiens
  Table 1.2; R3HDML; ENSG00000101074; HLA -B*07:02,HLA-B*35:01,HLA-B*35:03,HLA-B*55:01,HLA-B*56:01, HLA-C*03:03,HLA-C*07:02
APAQPESTAM

SEQ ID NO: 8893 - protein, 11 aa, Homo sapiens
  Table 1.2; R3HDML; ENSG00000101074; HLA -A*68:01
APAQPESTAMR

SEQ ID NO: 8894 - protein, 9 aa, Homo sapiens
  Table 1.2; R3HDML; ENSG00000101074; HLA -A*23:01,HLA-A*24:02
AYLVCNYAI

SEQ ID NO: 8895 - protein, 9 aa, Homo sapiens
  Table 1.2; R3HDML; ENSG00000101074; HLA -B*57:01
CSHYTQMVW

SEQ ID NO: 8896 - protein, 8 aa, Homo sapiens
  Table 1.2; R3HDML; ENSG00000101074; HLA -B*51:01
EAWATQCI

SEQ ID NO: 8897 - protein, 9 aa, Homo sapiens
  Table 1.2; R3HDML; ENSG00000101074; HLA -B*57:01
EAWATQCIW

SEQ ID NO: 8898 - protein, 9 aa, Homo sapiens
  Table 1.2; R3HDML; ENSG00000101074; HLA -A*24:02
EYMVWDKRL

SEQ ID NO: 8899 - protein, 9 aa, Homo sapiens
  Table 1.2; R3HDML; ENSG00000101074; HLA -B*55:01
FPAPRDCNP

SEQ ID NO: 8900 - protein, 9 aa, Homo sapiens
  Table 1.2; R3HDML; ENSG00000101074; HLA -A*02:04
GLLFWAGQA

SEQ ID NO: 8901 - protein, 10 aa, Homo sapiens
  Table 1.2; R3HDML; ENSG00000101074; HLA -A*02:04
GLLFWAGQAV

SEQ ID NO: 8902 - protein, 9 aa, Homo sapiens
  Table 1.2; R3HDML; ENSG00000101074; HLA -A*29:02
GNWIGESPY

SEQ ID NO: 8903 - protein, 8 aa, Homo sapiens
  Table 1.2; R3HDML; ENSG00000101074; HLA -B*13:02
GQAVNALI

SEQ ID NO: 8904 - protein, 9 aa, Homo sapiens
  Table 1.2; R3HDML; ENSG00000101074; HLA -B*13:02,HLA-B*15:01,HLA-B*15:03,HLA-B*27:05,HLA-C*07:04, HLA-C*12:03
GQAVNALIM

SEQ ID NO: 8905 - protein, 9 aa, Homo sapiens
  Table 1.2; R3HDML; ENSG00000101074; HLA -A*32:01,HLA-B*13:02,HLA-B*15:01
GQNLSIHSG

SEQ ID NO: 8906 - protein, 11 aa, Homo sapiens
  Table 1.2; R3HDML; ENSG00000101074; HLA -A*29:02,HLA-A*30:02,HLA-A*32:01,HLA-B*15:01,HLA-B*15:03, HLA-B*27:02,HLA-B*27:05,HLA-C*04:01,HLA-C*07:04,HLA-C*16:04
GQNLSIHSGQY

SEQ ID NO: 8907 - protein, 9 aa, Homo sapiens
  Table 1.2; R3HDML; ENSG00000101074; HLA -A*30:01,HLA-B*13:02,HLA-B*15:01,HLA-B*15:03,HLA-B*27:05, HLA-B*39:01,HLA-B*40:01,HLA-B*40:02,HLA-C*07:04
GQYRSVVDL

SEQ ID NO: 8908 - protein, 10 aa, Homo sapiens
  Table 1.2; R3HDML; ENSG00000101074; HLA -B*15:03
GQYRSVVDLM

SEQ ID NO: 8909 - protein, 10 aa, Homo sapiens
  Table 1.2; R3HDML; ENSG00000101074; HLA -B*54:01
HIRASVYPPA

SEQ ID NO: 8910 - protein, 9 aa, Homo sapiens
  Table 1.2; R3HDML; ENSG00000101074; HLA -A*25:01,HLA-A*26:01,HLA-B*57:01
HTCSSISVW

SEQ ID NO: 8911 - protein, 10 aa, Homo sapiens
  Table 1.2; R3HDML; ENSG00000101074; HLA -A*02:01,HLA-A*02:03
IMPNATPAPA

SEQ ID NO: 8912 - protein, 9 aa, Homo sapiens
  Table 1.2; R3HDML; ENSG00000101074; HLA -B*58:01,HLA-C*03:03,HLA-C*03:04
ISVRDMNAL

SEQ ID NO: 8913 - protein, 8 aa, Homo sapiens
  Table 1.2; R3HDML; ENSG00000101074; HLA -B*57:01,HLA-B*58:01
ISVWGNTW

SEQ ID NO: 8914 - protein, 10 aa, Homo sapiens
  Table 1.2; R3HDML; ENSG00000101074; HLA -A*30:02
KGNWIGESPY

SEQ ID NO: 8915 - protein, 8 aa, Homo sapiens
  Table 1.2; R3HDML; ENSG00000101074; HLA -B*57:01
LARAAEAW

SEQ ID NO: 8916 - protein, 9 aa, Homo sapiens
  Table 1.2; R3HDML; ENSG00000101074; HLA -A*02:01,HLA-A*02:03,HLA-B*46:01,HLA-B*54:01
LIMPNATPA

SEQ ID NO: 8917 - protein, 11 aa, Homo sapiens
  Table 1.2; R3HDML; ENSG00000101074; HLA -A*02:01
LIMPNATPAPA

SEQ ID NO: 8918 - protein, 9 aa, Homo sapiens
  Table 1.2; R3HDML; ENSG00000101074; HLA -A*02:01,HLA-A*02:03,HLA-A*02:04,HLA-A*02:07,HLA-B*13:02
LLFWAGQAV

SEQ ID NO: 8919 - protein, 8 aa, Homo sapiens
  Table 1.2; R3HDML; ENSG00000101074; HLA -A*02:07
LLPSTVGL

SEQ ID NO: 8920 - protein, 9 aa, Homo sapiens
  Table 1.2; R3HDML; ENSG00000101074; HLA -A*02:03,HLA-A*02:07
LLPSTVGLA

SEQ ID NO: 8921 - protein, 11 aa, Homo sapiens
  Table 1.2; R3HDML; ENSG00000101074; HLA -A*02:04,HLA-A*02:07
LLPSTVGLAGL

SEQ ID NO: 8922 - protein, 10 aa, Homo sapiens
  Table 1.2; R3HDML; ENSG00000101074; HLA -A*01:01,HLA-A*29:02,HLA-A*30:02
LLSGLEVPRY

SEQ ID NO: 8923 - protein, 9 aa, Homo sapiens
  Table 1.2; R3HDML; ENSG00000101074; HLA -B*56:01
LPSTVGLAG

SEQ ID NO: 8924 - protein, 10 aa, Homo sapiens
  Table 1.2; R3HDML; ENSG00000101074; HLA -B*35:03
LPSTVGLAGL

SEQ ID NO: 8925 - protein, 9 aa, Homo sapiens
  Table 1.2; R3HDML; ENSG00000101074; HLA -A*01:01,HLA-A*30:02,HLA-B*57:01,HLA-B*58:01
LSGLEVPRY

SEQ ID NO: 8926 - protein, 8 aa, Homo sapiens
  Table 1.2; R3HDML; ENSG00000101074; HLA -A*30:02,HLA-B*15:01,HLA-B*39:01,HLA-B*46:01,HLA-B*58:01
LSIHSGQY

SEQ ID NO: 8927 - protein, 9 aa, Homo sapiens
  Table 1.2; R3HDML; ENSG00000101074; HLA -A*31:01,HLA-A*33:01,HLA-A*33:03,HLA-B*57:01
LSIHSGQYR

SEQ ID NO: 8928 - protein, 8 aa, Homo sapiens
  Table 1.2; R3HDML; ENSG00000101074; HLA -B*08:01,HLA-B*51:01,HLA-B*54:01,HLA-B*56:01
MPLLPSTV

SEQ ID NO: 8929 - protein, 9 aa, Homo sapiens
  Table 1.2; R3HDML; ENSG00000101074; HLA -B*54:01,HLA-B*56:01
MPLLPSTVG

SEQ ID NO: 8930 - protein, 10 aa, Homo sapiens
  Table 1.2; R3HDML; ENSG00000101074; HLA -B*07:02,HLA-B*35:01,HLA-B*35:03,HLA-B*54:01,HLA-B*55:01, HLA-B*56:01,HLA-C*07:02
MPLLPSTVGL

SEQ ID NO: 8931 - protein, 11 aa, Homo sapiens
  Table 1.2; R3HDML; ENSG00000101074; HLA -B*54:01,HLA-B*56:01
MPLLPSTVGLA

SEQ ID NO: 8932 - protein, 8 aa, Homo sapiens
  Table 1.2; R3HDML; ENSG00000101074; HLA -B*54:01,HLA-B*55:01,HLA-B*56:01
MPNATPAP

SEQ ID NO: 8933 - protein, 9 aa, Homo sapiens
  Table 1.2; R3HDML; ENSG00000101074; HLA -B*35:01,HLA-B*35:03,HLA-B*54:01,HLA-B*55:01,HLA-B*56:01
MPNATPAPA

SEQ ID NO: 8934 - protein, 10 aa, Homo sapiens
  Table 1.2; R3HDML; ENSG00000101074; HLA -B*35:01,HLA-B*55:01
MPNATPAPAQ

SEQ ID NO: 8935 - protein, 11 aa, Homo sapiens
  Table 1.2; R3HDML; ENSG00000101074; HLA -B*56:01
MPNATPAPAQP

SEQ ID NO: 8936 - protein, 8 aa, Homo sapiens
  Table 1.2; R3HDML; ENSG00000101074; HLA -B*08:01,HLA-B*27:05,HLA-C*06:02
MRYVGQNL

SEQ ID NO: 8937 - protein, 9 aa, Homo sapiens
  Table 1.2; R3HDML; ENSG00000101074; HLA -A*03:01,HLA-A*31:01
MVWDKRLAR

SEQ ID NO: 8938 - protein, 8 aa, Homo sapiens
  Table 1.2; R3HDML; ENSG00000101074; HLA -B*51:01,HLA-B*54:01
NALIMPNA

SEQ ID NO: 8939 - protein, 8 aa, Homo sapiens
  Table 1.2; R3HDML; ENSG00000101074; HLA -B*15:03
NHIRASVY

SEQ ID NO: 8940 - protein, 9 aa, Homo sapiens
  Table 1.2; R3HDML; ENSG00000101074; HLA -A*01:01,HLA-A*26:01,HLA-A*29:02,HLA-A*30:02,HLA-A*32:01, HLA-B*15:01,HLA-C*07:04
NLSIHSGQY

SEQ ID NO: 8941 - protein, 10 aa, Homo sapiens
  Table 1.2; R3HDML; ENSG00000101074; HLA -B*27:02
PAQPESTAMR

SEQ ID NO: 8942 - protein, 9 aa, Homo sapiens
  Table 1.2; R3HDML; ENSG00000101074; HLA -A*02:01,HLA-A*02:03,HLA-A*02:04,HLA-A*23:01,HLA-A*24:02
PLLPSTVGL

SEQ ID NO: 8943 - protein, 8 aa, Homo sapiens
  Table 1.2; R3HDML; ENSG00000101074; HLA -B*35:01,HLA-B*35:03
QAVNALIM

SEQ ID NO: 8944 - protein, 10 aa, Homo sapiens
  Table 1.2; R3HDML; ENSG00000101074; HLA -A*26:01,HLA-A*29:02,HLA-A*30:02
QNLSIHSGQY

SEQ ID NO: 8945 - protein, 11 aa, Homo sapiens
  Table 1.2; R3HDML; ENSG00000101074; HLA -A*33:01,HLA-A*33:03
QNLSIHSGQYR

SEQ ID NO: 8946 - protein, 9 aa, Homo sapiens
  Table 1.2; R3HDML; ENSG00000101074; HLA -B*07:02,HLA-B*35:01,HLA-B*35:03
QPESTAMRL

SEQ ID NO: 8947 - protein, 10 aa, Homo sapiens
  Table 1.2; R3HDML; ENSG00000101074; HLA -B*07:02
QPESTAMRLL

SEQ ID NO: 8948 - protein, 9 aa, Homo sapiens
  Table 1.2; R3HDML; ENSG00000101074; HLA -A*23:01,HLA-A*24:02
QYRSVVDLM

SEQ ID NO: 8949 - protein, 9 aa, Homo sapiens
  Table 1.2; R3HDML; ENSG00000101074; HLA -A*30:02
RAAYLVCNY

SEQ ID NO: 8950 - protein, 9 aa, Homo sapiens
  Table 1.2; R3HDML; ENSG00000101074; HLA -B*57:01
RLARAAEAW

SEQ ID NO: 8951 - protein, 10 aa, Homo sapiens
  Table 1.2; R3HDML; ENSG00000101074; HLA -A*31:01
RLLSGLEVPR

SEQ ID NO: 8952 - protein, 11 aa, Homo sapiens
  Table 1.2; R3HDML; ENSG00000101074; HLA -A*02:04,HLA-A*03:01,HLA-A*29:02,HLA-A*30:02
RLLSGLEVPRY

SEQ ID NO: 8953 - protein, 10 aa, Homo sapiens
  Table 1.2; R3HDML; ENSG00000101074; HLA -B*57:01
RSVVDLMKSW

SEQ ID NO: 8954 - protein, 9 aa, Homo sapiens
  Table 1.2; R3HDML; ENSG00000101074; HLA -A*23:01,HLA-A*24:02,HLA-C*14:02
RYVGQNLSI

SEQ ID NO: 8955 - protein, 9 aa, Homo sapiens
  Table 1.2; R3HDML; ENSG00000101074; HLA -B*44:02
SEEKWHYLF

SEQ ID NO: 8956 - protein, 8 aa, Homo sapiens
  Table 1.2; R3HDML; ENSG00000101074; HLA -A*30:02,HLA-A*32:01,HLA-B*15:03,HLA-B*18:01,HLA-C*16:01
SGLEVPRY

SEQ ID NO: 8957 - protein, 9 aa, Homo sapiens
  Table 1.2; R3HDML; ENSG00000101074; HLA -A*31:01
SGLEVPRYR

SEQ ID NO: 8958 - protein, 8 aa, Homo sapiens
  Table 1.2; R3HDML; ENSG00000101074; HLA -B*08:01
SGQYRSVV

SEQ ID NO: 8959 - protein, 10 aa, Homo sapiens
  Table 1.2; R3HDML; ENSG00000101074; HLA -A*02:03
SIHSGQYRSV

SEQ ID NO: 8960 - protein, 9 aa, Homo sapiens
  Table 1.2; R3HDML; ENSG00000101074; HLA -A*25:01,HLA-A*32:01
SISVWGNTW

SEQ ID NO: 8961 - protein, 9 aa, Homo sapiens
  Table 1.2; R3HDML; ENSG00000101074; HLA -B*56:01
SPYKMGKPC

SEQ ID NO: 8962 - protein, 10 aa, Homo sapiens
  Table 1.2; R3HDML; ENSG00000101074; HLA -A*25:01,HLA-B*44:02,HLA-B*44:03,HLA-B*57:01,HLA-B*58:01, HLA-C*16:04
SSISVWGNTW

SEQ ID NO: 8963 - protein, 11 aa, Homo sapiens
  Table 1.2; R3HDML; ENSG00000101074; HLA -B*57:01
STVGLAGLLFW

SEQ ID NO: 8964 - protein, 8 aa, Homo sapiens
  Table 1.2; R3HDML; ENSG00000101074; HLA -B*07:02
SVRDMNAL

SEQ ID NO: 8965 - protein, 9 aa, Homo sapiens
  Table 1.2; R3HDML; ENSG00000101074; HLA -B*07:02
SVRDMNALL

SEQ ID NO: 8966 - protein, 11 aa, Homo sapiens
  Table 1.2; R3HDML; ENSG00000101074; HLA -A*29:02,HLA-A*30:02
SVRDMNALLDY

SEQ ID NO: 8967 - protein, 9 aa, Homo sapiens
  Table 1.2; R3HDML; ENSG00000101074; HLA -A*25:01,HLA-A*26:01,HLA-A*32:01,HLA-B*44:02,HLA-B*44:03, HLA-B*57:01,HLA-B*58:01
SVVDLMKSW

SEQ ID NO: 8968 - protein, 9 aa, Homo sapiens
  Table 1.2; R3HDML; ENSG00000101074; HLA -A*31:01
SVWGNTWHR

SEQ ID NO: 8969 - protein, 9 aa, Homo sapiens
  Table 1.2; R3HDML; ENSG00000101074; HLA -A*03:01,HLA-A*03:02,HLA-A*11:01,HLA-A*25:01,HLA-A*26:01, HLA-A*30:02,HLA-A*32:01,HLA-A*33:01,HLA-A*33:03,HLA-B*07:02, HLA-B*15:01,HLA-B*27:05,HLA-B*35:01,HLA-B*37:01,HLA-B*46:01,
  HLA-B*56:01,HLA-C*01:02,HLA-C*02:02,HLA-C*03:03,HLA-C*03:04, HLA-C*07:06
SVYPPAANM

SEQ ID NO: 8970 - protein, 11 aa, Homo sapiens
  Table 1.2; R3HDML; ENSG00000101074; HLA -A*01:01,HLA-A*03:01,HLA-A*03:02,HLA-A*11:01,HLA-A*25:01, HLA-A*26:01,HLA-A*29:02,HLA-A*30:02,HLA-A*31:01,HLA-A*32:01, HLA-B*15:01,HLA-B*15:03,HLA-B*35:01,HLA-B*46:01,HLA-B*57:01,
  HLA-B*58:01,HLA-C*02:02,HLA-C*07:06,HLA-C*12:03,HLA-C*16:04
SVYPPAANMEY

SEQ ID NO: 8971 - protein, 9 aa, Homo sapiens
  Table 1.2; R3HDML; ENSG00000101074; HLA -B*08:01
TAMRLLSGL

SEQ ID NO: 8972 - protein, 9 aa, Homo sapiens
  Table 1.2; R3HDML; ENSG00000101074; HLA -B*55:01,HLA-B*56:01
TPAPAQPES

SEQ ID NO: 8973 - protein, 11 aa, Homo sapiens
  Table 1.2; R3HDML; ENSG00000101074; HLA -B*54:01,HLA-B*55:01,HLA-B*56:01
TPAPAQPESTA

SEQ ID NO: 8974 - protein, 10 aa, Homo sapiens
  Table 1.2; R3HDML; ENSG00000101074; HLA -A*31:01
TQMVWASSNR

SEQ ID NO: 8975 - protein, 11 aa, Homo sapiens
  Table 1.2; R3HDML; ENSG00000101074; HLA -B*38:01
TQMVWASSNRL

SEQ ID NO: 8976 - protein, 9 aa, Homo sapiens
  Table 1.2; R3HDML; ENSG00000101074; HLA -A*24:02,HLA-B*57:01
VGLAGLLFW

SEQ ID NO: 8977 - protein, 8 aa, Homo sapiens
  Table 1.2; R3HDML; ENSG00000101074; HLA -A*23:01,HLA-A*24:02,HLA-C*01:02,HLA-C*04:01,HLA-C*14:02
VYPPAANM

SEQ ID NO: 8978 - protein, 10 aa, Homo sapiens
  Table 1.2; R3HDML; ENSG00000101074; HLA -A*23:01,HLA-A*24:02,HLA-A*29:02,HLA-A*30:02,HLA-B*15:01, HLA-B*15:03,HLA-B*46:01,HLA-C*01:02,HLA-C*14:02
VYPPAANMEY

SEQ ID NO: 8979 - protein, 11 aa, Homo sapiens
  Table 1.2; R3HDML; ENSG00000101074; HLA -A*23:01,HLA-A*24:02
VYPPAANMEYM

SEQ ID NO: 8980 - protein, 9 aa, Homo sapiens
  Table 1.2; R3HDML; ENSG00000101074; HLA -A*02:01,HLA-A*02:03
YLFPAPRDC

SEQ ID NO: 8981 - protein, 9 aa, Homo sapiens
  Table 1.2; R3HDML; ENSG00000101074; HLA -A*01:01,HLA-A*26:01,HLA-A*29:02,HLA-B*35:01,HLA-B*35:03, HLA-B*46:01,HLA-B*51:01,HLA-B*55:01
YPPAANMEY

SEQ ID NO: 8982 - protein, 10 aa, Homo sapiens
  Table 1.2; R3HDML; ENSG00000101074; HLA -B*35:03
YPPAANMEYM

SEQ ID NO: 8983 - protein, 9 aa, Homo sapiens
  Table 1.2; R3HDML; ENSG00000101074; HLA -B*27:05
YRSVVDLMK

SEQ ID NO: 8984 - protein, 8 aa, Homo sapiens
  Table 1.2; R3HDML; ENSG00000101074; HLA -B*13:02,HLA-B*51:01
YVGQNLSI

SEQ ID NO: 8985 - protein, 8 aa, Homo sapiens
  Table 1.2; SLC7A13; ENSG00000164893; HLA -B*37:01
ADRAFPSL

SEQ ID NO: 8986 - protein, 8 aa, Homo sapiens
  Table 1.2; SLC7A13; ENSG00000164893; HLA -B*49:01
AEISISFP

SEQ ID NO: 8987 - protein, 9 aa, Homo sapiens
  Table 1.2; SLC7A13; ENSG00000164893; HLA -B*49:01
AEISISFPC

SEQ ID NO: 8988 - protein, 9 aa, Homo sapiens
  Table 1.2; SLC7A13; ENSG00000164893; HLA -A*30:01,HLA-B*27:02,HLA-B*37:01,HLA-B*40:01,HLA-B*40:02, HLA-B*44:02,HLA-B*44:03,HLA-B*49:01,HLA-C*16:04
AELPDISHL

SEQ ID NO: 8989 - protein, 10 aa, Homo sapiens
  Table 1.2; SLC7A13; ENSG00000164893; HLA -A*30:01,HLA-B*40:01,HLA-B*44:02,HLA-B*44:03,HLA-B*49:01
AELPDISHLI

SEQ ID NO: 8990 - protein, 8 aa, Homo sapiens
  Table 1.2; SLC7A13; ENSG00000164893; HLA -B*18:01,HLA-B*37:01,HLA-B*44:02
AEYSIQPF

SEQ ID NO: 8991 - protein, 9 aa, Homo sapiens
  Table 1.2; SLC7A13; ENSG00000164893; HLA -A*30:01,HLA-B*27:02,HLA-B*37:01,HLA-B*40:01,HLA-B*44:02, HLA-B*44:03,HLA-B*49:01,HLA-C*16:04
AEYSIQPFF

SEQ ID NO: 8992 - protein, 9 aa, Homo sapiens
  Table 1.2; SLC7A13; ENSG00000164893; HLA -C*04:01
AFDAELPDI

SEQ ID NO: 8993 - protein, 9 aa, Homo sapiens
  Table 1.2; SLC7A13; ENSG00000164893; HLA -A*23:01
AFLNLWTSL

SEQ ID NO: 8994 - protein, 10 aa, Homo sapiens
  Table 1.2; SLC7A13; ENSG00000164893; HLA -A*30:02
AGQALLLAEY

SEQ ID NO: 8995 - protein, 9 aa, Homo sapiens
  Table 1.2; SLC7A13; ENSG00000164893; HLA -A*01:01,HLA-A*03:01,HLA-A*29:02,HLA-A*30:02,HLA-A*32:01, HLA-B*15:01,HLA-B*46:01
AIFQGYFAY

SEQ ID NO: 8996 - protein, 9 aa, Homo sapiens
  Table 1.2; SLC7A13; ENSG00000164893; HLA -A*02:01,HLA-A*02:03,HLA-A*02:04,HLA-A*02:07,HLA-A*23:01, HLA-A*24:02,HLA-A*25:01,HLA-A*30:01,HLA-A*32:01,HLA-B*07:02, HLA-B*15:01,HLA-B*15:03,HLA-B*37:01,HLA-B*40:01,HLA-B*46:01,
  HLA-B*55:01,HLA-B*58:01,HLA-C*01:02,HLA-C*03:03,HLA-C*03:04, HLA-C*14:02
AILAMTSTL

SEQ ID NO: 8997 - protein, 10 aa, Homo sapiens
  Table 1.2; SLC7A13; ENSG00000164893; HLA -A*02:04
ALAMLWIVGI

SEQ ID NO: 8998 - protein, 9 aa, Homo sapiens
  Table 1.2; SLC7A13; ENSG00000164893; HLA -A*02:01,HLA-A*02:04
ALLLAEYSI

SEQ ID NO: 8999 - protein, 9 aa, Homo sapiens
  Table 1.2; SLC7A13; ENSG00000164893; HLA -A*01:01,HLA-A*03:01,HLA-A*23:01,HLA-A*26:01,HLA-A*29:02, HLA-A*30:02,HLA-A*32:01,HLA-B*15:01,HLA-B*15:03,HLA-B*46:01, HLA-C*02:02,HLA-C*07:04,HLA-C*16:04
ALPLVTVVY

SEQ ID NO: 9000 - protein, 10 aa, Homo sapiens
  Table 1.2; SLC7A13; ENSG00000164893; HLA -A*02:07
ALPLVTVVYL

SEQ ID NO: 9001 - protein, 9 aa, Homo sapiens
  Table 1.2; SLC7A13; ENSG00000164893; HLA -A*02:01,HLA-A*02:03,HLA-B*55:01
AMTSTLCSA

SEQ ID NO: 9002 - protein, 9 aa, Homo sapiens
  Table 1.2; SLC7A13; ENSG00000164893; HLA -A*32:01,HLA-B*13:02,HLA-B*58:01
ASSVLKVSI

SEQ ID NO: 9003 - protein, 9 aa, Homo sapiens
  Table 1.2; SLC7A13; ENSG00000164893; HLA -A*29:02
AWFEKMTCY

SEQ ID NO: 9004 - protein, 8 aa, Homo sapiens
  Table 1.2; SLC7A13; ENSG00000164893; HLA -C*14:02
AYSGGACF

SEQ ID NO: 9005 - protein, 11 aa, Homo sapiens
  Table 1.2; SLC7A13; ENSG00000164893; HLA -A*24:02
AYSGGACFTLI

SEQ ID NO: 9006 - protein, 8 aa, Homo sapiens
  Table 1.2; SLC7A13; ENSG00000164893; HLA -B*46:01,HLA-C*01:02,HLA-C*14:02
CMNVGVSL

SEQ ID NO: 9007 - protein, 9 aa, Homo sapiens
  Table 1.2; SLC7A13; ENSG00000164893; HLA -A*23:01,HLA-A*25:01,HLA-A*30:02,HLA-A*32:01,HLA-B*15:01, HLA-B*15:03,HLA-B*35:01,HLA-B*46:01,HLA-B*57:01,HLA-B*58:01, HLA-C*02:02,HLA-C*12:03,HLA-C*16:01,HLA-C*16:04
CSAEISISF

SEQ ID NO: 9008 - protein, 9 aa, Homo sapiens
  Table 1.2; SLC7A13; ENSG00000164893; HLA -A*24:02
CYLQLLFNI

SEQ ID NO: 9009 - protein, 11 aa, Homo sapiens
  Table 1.2; SLC7A13; ENSG00000164893; HLA -A*33:01
DAELPDISHLI

SEQ ID NO: 9010 - protein, 10 aa, Homo sapiens
  Table 1.2; SLC7A13; ENSG00000164893; HLA -A*68:01
DAVAITWADR

SEQ ID NO: 9011 - protein, 9 aa, Homo sapiens
  Table 1.2; SLC7A13; ENSG00000164893; HLA -A*25:01,HLA-A*68:02
DISHLIQAI

SEQ ID NO: 9012 - protein, 8 aa, Homo sapiens
  Table 1.2; SLC7A13; ENSG00000164893; HLA -B*08:01
DRGEKIQL

SEQ ID NO: 9013 - protein, 9 aa, Homo sapiens
  Table 1.2; SLC7A13; ENSG00000164893; HLA -B*08:01
ELKKPRTTI

SEQ ID NO: 9014 - protein, 9 aa, Homo sapiens
  Table 1.2; SLC7A13; ENSG00000164893; HLA -A*02:07,HLA-A*23:01,HLA-A*24:02,HLA-A*26:01,HLA-A*68:02, HLA-B*13:02
ELPDISHLI

SEQ ID NO: 9015 - protein, 11 aa, Homo sapiens
  Table 1.2; SLC7A13; ENSG00000164893; HLA -A*02:07,HLA-A*68:02
ELPDISHLIQA

SEQ ID NO: 9016 - protein, 8 aa, Homo sapiens
  Table 1.2; SLC7A13; ENSG00000164893; HLA -B*35:01
EPNLSIPY

SEQ ID NO: 9017 - protein, 8 aa, Homo sapiens
  Table 1.2; SLC7A13; ENSG00000164893; HLA -A*23:01
FAISTSLF

SEQ ID NO: 9018 - protein, 8 aa, Homo sapiens
  Table 1.2; SLC7A13; ENSG00000164893; HLA -C*03:03,HLA-C*03:04
FAYSGGAC

SEQ ID NO: 9019 - protein, 9 aa, Homo sapiens
  Table 1.2; SLC7A13; ENSG00000164893; HLA -A*23:01,HLA-A*25:01,HLA-A*26:01,HLA-B*15:01,HLA-B*15:03, HLA-B*35:01,HLA-B*35:03,HLA-B*39:01,HLA-B*46:01,HLA-B*51:01, HLA-B*54:01,HLA-B*58:01,HLA-C*02:02,HLA-C*03:03,HLA-C*03:04,
  HLA-C*05:01,HLA-C*07:02,HLA-C*14:02,HLA-C*16:01,HLA-C*16:04
FAYSGGACF

SEQ ID NO: 9020 - protein, 9 aa, Homo sapiens
  Table 1.2; SLC7A13; ENSG00000164893; HLA -B*15:01,HLA-B*46:01,HLA-C*07:04
FISLTGVVF

SEQ ID NO: 9021 - protein, 8 aa, Homo sapiens
  Table 1.2; SLC7A13; ENSG00000164893; HLA -A*02:01
FLGSGVVA

SEQ ID NO: 9022 - protein, 9 aa, Homo sapiens
  Table 1.2; SLC7A13; ENSG00000164893; HLA -A*02:01
FLGSGVVAG

SEQ ID NO: 9023 - protein, 9 aa, Homo sapiens
  Table 1.2; SLC7A13; ENSG00000164893; HLA -A*02:01,HLA-A*02:03,HLA-A*02:04
FLLINIIGA

SEQ ID NO: 9024 - protein, 9 aa, Homo sapiens
  Table 1.2; SLC7A13; ENSG00000164893; HLA -A*02:04
FLNLWTSLF

SEQ ID NO: 9025 - protein, 9 aa, Homo sapiens
  Table 1.2; SLC7A13; ENSG00000164893; HLA -A*02:01,HLA-A*02:03,HLA-A*02:04,HLA-A*02:07,HLA-A*68:02
FLSFPLATI

SEQ ID NO: 9026 - protein, 8 aa, Homo sapiens
  Table 1.2; SLC7A13; ENSG00000164893; HLA -B*35:01
FPCSGAQY

SEQ ID NO: 9027 - protein, 9 aa, Homo sapiens
  Table 1.2; SLC7A13; ENSG00000164893; HLA -A*01:01,HLA-A*29:02,HLA-B*35:01
FPCSGAQYY

SEQ ID NO: 9028 - protein, 8 aa, Homo sapiens
  Table 1.2; SLC7A13; ENSG00000164893; HLA -B*35:03,HLA-B*51:01,HLA-B*54:01,HLA-B*56:01
FPLATIVI

SEQ ID NO: 9029 - protein, 10 aa, Homo sapiens
  Table 1.2; SLC7A13; ENSG00000164893; HLA -B*54:01,HLA-B*56:01
FPLATIVIDV

SEQ ID NO: 9030 - protein, 11 aa, Homo sapiens
  Table 1.2; SLC7A13; ENSG00000164893; HLA -B*35:01,HLA-B*54:01
FPLATIVIDVG

SEQ ID NO: 9031 - protein, 9 aa, Homo sapiens
  Table 1.2; SLC7A13; ENSG00000164893; HLA -B*35:03
FPSCSVPKL

SEQ ID NO: 9032 - protein, 8 aa, Homo sapiens
  Table 1.2; SLC7A13; ENSG00000164893; HLA -B*35:03
FPSLAWIM

SEQ ID NO: 9033 - protein, 9 aa, Homo sapiens
  Table 1.2; SLC7A13; ENSG00000164893; HLA -A*02:01,HLA-A*30:01,HLA-B*13:02,HLA-B*27:05,HLA-B*35:03, HLA-B*38:01,HLA-B*39:01
FQNAFDAEL

SEQ ID NO: 9034 - protein, 9 aa, Homo sapiens
  Table 1.2; SLC7A13; ENSG00000164893; HLA -B*57:01
FSNLLISIF

SEQ ID NO: 9035 - protein, 10 aa, Homo sapiens
  Table 1.2; SLC7A13; ENSG00000164893; HLA -B*27:02
FSNLLISIFK

SEQ ID NO: 9036 - protein, 9 aa, Homo sapiens
  Table 1.2; SLC7A13; ENSG00000164893; HLA -A*02:01,HLA-A*02:03,HLA-A*68:02,HLA-B*46:01,HLA-B*51:01, HLA-B*54:01,HLA-B*56:01,HLA-C*02:02,HLA-C*03:03,HLA-C*03:04
FTALPLVTV

SEQ ID NO: 9037 - protein, 10 aa, Homo sapiens
  Table 1.2; SLC7A13; ENSG00000164893; HLA -A*68:02
FTALPLVTVV

SEQ ID NO: 9038 - protein, 11 aa, Homo sapiens
  Table 1.2; SLC7A13; ENSG00000164893; HLA -A*01:01,HLA-A*29:02
FTALPLVTVVY

SEQ ID NO: 9039 - protein, 8 aa, Homo sapiens
  Table 1.2; SLC7A13; ENSG00000164893; HLA -B*40:02,HLA-B*46:01,HLA-C*03:03,HLA-C*03:04,HLA-C*14:02
FTLIAGEL

SEQ ID NO: 9040 - protein, 9 aa, Homo sapiens
  Table 1.2; SLC7A13; ENSG00000164893; HLA -A*01:01,HLA-A*11:01
FTLIAGELK

SEQ ID NO: 9041 - protein, 8 aa, Homo sapiens
  Table 1.2; SLC7A13; ENSG00000164893; HLA -B*08:01
FVSPKGVL

SEQ ID NO: 9042 - protein, 10 aa, Homo sapiens
  Table 1.2; SLC7A13; ENSG00000164893; HLA -A*01:01,HLA-A*03:01,HLA-A*25:01,HLA-A*26:01,HLA-A*29:02, HLA-A*30:02,HLA-A*32:01,HLA-B*15:01,HLA-B*35:01,HLA-B*46:01, HLA-C*02:02
FVSPKGVLAY

SEQ ID NO: 9043 - protein, 8 aa, Homo sapiens
  Table 1.2; SLC7A13; ENSG00000164893; HLA -A*23:01,HLA-A*24:02
FYIPLIHF

SEQ ID NO: 9044 - protein, 9 aa, Homo sapiens
  Table 1.2; SLC7A13; ENSG00000164893; HLA -A*29:02
FYIPLIHFK

SEQ ID NO: 9045 - protein, 10 aa, Homo sapiens
  Table 1.2; SLC7A13; ENSG00000164893; HLA -A*24:02
FYIPLIHFKI

SEQ ID NO: 9046 - protein, 9 aa, Homo sapiens
  Table 1.2; SLC7A13; ENSG00000164893; HLA -A*03:01,HLA-A*03:02,HLA-A*11:01,HLA-B*27:02
GAGIFVSPK

SEQ ID NO: 9047 - protein, 9 aa, Homo sapiens
  Table 1.2; SLC7A13; ENSG00000164893; HLA -A*31:01
GAQYYFLKR

SEQ ID NO: 9048 - protein, 9 aa, Homo sapiens
  Table 1.2; SLC7A13; ENSG00000164893; HLA -A*02:01,HLA-A*02:03,HLA-B*13:02
GIFVSPKGV

SEQ ID NO: 9049 - protein, 9 aa, Homo sapiens
  Table 1.2; SLC7A13; ENSG00000164893; HLA -A*02:01,HLA-A*02:03,HLA-A*02:04,HLA-A*02:07
GLLFYIPLI

SEQ ID NO: 9050 - protein, 8 aa, Homo sapiens
  Table 1.2; SLC7A13; ENSG00000164893; HLA -B*13:02
GLVVIPLV

SEQ ID NO: 9051 - protein, 9 aa, Homo sapiens
  Table 1.2; SLC7A13; ENSG00000164893; HLA -A*03:01,HLA-A*03:02,HLA-A*11:01
GLVVIPLVK

SEQ ID NO: 9052 - protein, 9 aa, Homo sapiens
  Table 1.2; SLC7A13; ENSG00000164893; HLA -A*26:01,HLA-A*29:02,HLA-A*30:02,HLA-A*32:01,HLA-B*13:02, HLA-B*15:01,HLA-B*15:03,HLA-B*18:01,HLA-B*27:02,HLA-B*27:05, HLA-B*39:01,HLA-B*44:02,HLA-B*44:03,HLA-B*46:01,HLA-C*02:02,
  HLA-C*07:04,HLA-C*16:04
GQALLLAEY

SEQ ID NO: 9053 - protein, 11 aa, Homo sapiens
  Table 1.2; SLC7A13; ENSG00000164893; HLA -B*13:02
GQALLLAEYSI

SEQ ID NO: 9054 - protein, 10 aa, Homo sapiens
  Table 1.2; SLC7A13; ENSG00000164893; HLA -A*02:04,HLA-A*30:01,HLA-B*13:02,HLA-B*15:01
GQLPLLFNTL

SEQ ID NO: 9055 - protein, 10 aa, Homo sapiens
  Table 1.2; SLC7A13; ENSG00000164893; HLA -B*57:01
GSTVAFLNLW

SEQ ID NO: 9056 - protein, 9 aa, Homo sapiens
  Table 1.2; SLC7A13; ENSG00000164893; HLA -A*68:02
GTSFLLINI

SEQ ID NO: 9057 - protein, 9 aa, Homo sapiens
  Table 1.2; SLC7A13; ENSG00000164893; HLA -B*40:01
GVVAGQALL

SEQ ID NO: 9058 - protein, 9 aa, Homo sapiens
  Table 1.2; SLC7A13; ENSG00000164893; HLA -A*03:01,HLA-A*11:01
GVVFLIRGK

SEQ ID NO: 9059 - protein, 11 aa, Homo sapiens
  Table 1.2; SLC7A13; ENSG00000164893; HLA -A*24:02
GYFAYSGGACF

SEQ ID NO: 9060 - protein, 10 aa, Homo sapiens
  Table 1.2; SLC7A13; ENSG00000164893; HLA -A*26:01,HLA-A*29:02
HLIQAIFQGY

SEQ ID NO: 9061 - protein, 9 aa, Homo sapiens
  Table 1.2; SLC7A13; ENSG00000164893; HLA -A*26:01,HLA-A*32:01,HLA-A*68:02,HLA-B*35:01,HLA-B*35:03, HLA-B*38:01,HLA-B*39:01,HLA-B*40:01,HLA-B*46:01,HLA-B*57:01, HLA-B*58:01,HLA-C*02:02,HLA-C*03:03,HLA-C*03:04,HLA-C*12:03,
  HLA-C*16:02
HSSPFTAVL

SEQ ID NO: 9062 - protein, 10 aa, Homo sapiens
  Table 1.2; SLC7A13; ENSG00000164893; HLA -A*68:02
HSSPFTAVLL

SEQ ID NO: 9063 - protein, 9 aa, Homo sapiens
  Table 1.2; SLC7A13; ENSG00000164893; HLA -A*31:01,HLA-A*33:01,HLA-A*33:03
IAGELKKPR

SEQ ID NO: 9064 - protein, 8 aa, Homo sapiens
  Table 1.2; SLC7A13; ENSG00000164893; HLA -B*13:02,HLA-B*49:01,HLA-B*51:01,HLA-C*12:03,HLA-C*16:02
IASSVLKV

SEQ ID NO: 9065 - protein, 8 aa, Homo sapiens
  Table 1.2; SLC7A13; ENSG00000164893; HLA -A*29:02
IFQGYFAY

SEQ ID NO: 9066 - protein, 9 aa, Homo sapiens
  Table 1.2; SLC7A13; ENSG00000164893; HLA -A*23:01,HLA-C*14:02
IFVSPKGVL

SEQ ID NO: 9067 - protein, 11 aa, Homo sapiens
  Table 1.2; SLC7A13; ENSG00000164893; HLA -A*23:01,HLA-A*24:02,HLA-A*29:02,HLA-A*30:02
IFVSPKGVLAY

SEQ ID NO: 9068 - protein, 9 aa, Homo sapiens
  Table 1.2; SLC7A13; ENSG00000164893; HLA -B*27:05
IGAGIFVSP

SEQ ID NO: 9069 - protein, 10 aa, Homo sapiens
  Table 1.2; SLC7A13; ENSG00000164893; HLA -B*27:02
IGAGIFVSPK

SEQ ID NO: 9070 - protein, 8 aa, Homo sapiens
  Table 1.2; SLC7A13; ENSG00000164893; HLA -B*15:01,HLA-B*46:01
ILAMTSTL

SEQ ID NO: 9071 - protein, 10 aa, Homo sapiens
  Table 1.2; SLC7A13; ENSG00000164893; HLA -A*02:01,HLA-A*02:03,HLA-A*02:04
ILSFISLTGV

SEQ ID NO: 9072 - protein, 9 aa, Homo sapiens
  Table 1.2; SLC7A13; ENSG00000164893; HLA -A*02:01,HLA-A*02:04,HLA-B*13:02,HLA-B*35:03,HLA-B*38:01, HLA-B*55:01
ILSSDAVAI

SEQ ID NO: 9073 - protein, 11 aa, Homo sapiens
  Table 1.2; SLC7A13; ENSG00000164893; HLA -A*32:01,HLA-B*44:02,HLA-B*44:03,HLA-B*57:01,HLA-B*58:01
ILSSDAVAITW

SEQ ID NO: 9074 - protein, 9 aa, Homo sapiens
  Table 1.2; SLC7A13; ENSG00000164893; HLA -A*02:01,HLA-A*02:04,HLA-B*13:02
ILTSLIDLI

SEQ ID NO: 9075 - protein, 10 aa, Homo sapiens
  Table 1.2; SLC7A13; ENSG00000164893; HLA -A*02:03
ILTSRGVKEV

SEQ ID NO: 9076 - protein, 10 aa, Homo sapiens
  Table 1.2; SLC7A13; ENSG00000164893; HLA -A*02:07,HLA-C*01:02
IMPFAISTSL

SEQ ID NO: 9077 - protein, 11 aa, Homo sapiens
  Table 1.2; SLC7A13; ENSG00000164893; HLA -A*24:02
IMPFAISTSLF

SEQ ID NO: 9078 - protein, 9 aa, Homo sapiens
  Table 1.2; SLC7A13; ENSG00000164893; HLA -B*07:02,HLA-B*08:01,HLA-C*07:02
IPKCIFTAL

SEQ ID NO: 9079 - protein, 8 aa, Homo sapiens
  Table 1.2; SLC7A13; ENSG00000164893; HLA -B*51:01
IPLIHFKI

SEQ ID NO: 9080 - protein, 9 aa, Homo sapiens
  Table 1.2; SLC7A13; ENSG00000164893; HLA -B*51:01,HLA-B*56:01
IPLVKSPNV

SEQ ID NO: 9081 - protein, 9 aa, Homo sapiens
  Table 1.2; SLC7A13; ENSG00000164893; HLA -B*35:01,HLA-B*51:01,HLA-B*54:01
IPYKVFLSF

SEQ ID NO: 9082 - protein, 8 aa, Homo sapiens
  Table 1.2; SLC7A13; ENSG00000164893; HLA -A*30:02,HLA-A*32:01,HLA-B*15:01,HLA-B*15:03,HLA-B*18:01
IQAIFQGY

SEQ ID NO: 9083 - protein, 9 aa, Homo sapiens
  Table 1.2; SLC7A13; ENSG00000164893; HLA -B*15:03
IQAIFQGYF

SEQ ID NO: 9084 - protein, 10 aa, Homo sapiens
  Table 1.2; SLC7A13; ENSG00000164893; HLA -A*01:01,HLA-A*29:02,HLA-A*30:02,HLA-B*15:01,HLA-B*15:03, HLA-B*46:01,HLA-B*58:01
ISFPCSGAQY

SEQ ID NO: 9085 - protein, 11 aa, Homo sapiens
  Table 1.2; SLC7A13; ENSG00000164893; HLA -A*01:01,HLA-A*29:02,HLA-A*30:02
ISFPCSGAQYY

SEQ ID NO: 9086 - protein, 9 aa, Homo sapiens
  Table 1.2; SLC7A13; ENSG00000164893; HLA -A*23:01,HLA-A*24:02,HLA-B*57:01,HLA-B*58:01
ISHLIQAIF

SEQ ID NO: 9087 - protein, 8 aa, Homo sapiens
  Table 1.2; SLC7A13; ENSG00000164893; HLA -A*23:01,HLA-B*15:03,HLA-B*46:01,HLA-B*57:01,HLA-B*58:01
ISLTGVVF

SEQ ID NO: 9088 - protein, 9 aa, Homo sapiens
  Table 1.2; SLC7A13; ENSG00000164893; HLA -A*23:01,HLA-B*58:01
ISLTGVVFL

SEQ ID NO: 9089 - protein, 9 aa, Homo sapiens
  Table 1.2; SLC7A13; ENSG00000164893; HLA -A*23:01,HLA-A*24:02,HLA-B*58:01
ISTSLFSNL

SEQ ID NO: 9090 - protein, 8 aa, Homo sapiens
  Table 1.2; SLC7A13; ENSG00000164893; HLA -A*31:01,HLA-A*33:01,HLA-A*33:03
IVGILTSR

SEQ ID NO: 9091 - protein, 9 aa, Homo sapiens
  Table 1.2; SLC7A13; ENSG00000164893; HLA -A*02:01,HLA-A*02:03,HLA-A*02:07,HLA-A*23:01,HLA-A*26:01, HLA-A*30:01,HLA-A*32:01,HLA-A*68:02,HLA-B*13:02,HLA-B*46:01, HLA-B*49:01,HLA-C*02:02,HLA-C*03:03,HLA-C*03:04
IVIDVGLVV

SEQ ID NO: 9092 - protein, 10 aa, Homo sapiens
  Table 1.2; SLC7A13; ENSG00000164893; HLA -A*02:01,HLA-A*23:01,HLA-A*25:01,HLA-A*68:02
IVIDVGLVVI

SEQ ID NO: 9093 - protein, 10 aa, Homo sapiens
  Table 1.2; SLC7A13; ENSG00000164893; HLA -A*23:01
IYLASQEGQL

SEQ ID NO: 9094 - protein, 9 aa, Homo sapiens
  Table 1.2; SLC7A13; ENSG00000164893; HLA -A*29:02,HLA-A*30:02,HLA-A*32:01,HLA-B*57:01,HLA-B*58:01
KSPNVHYVY

SEQ ID NO: 9095 - protein, 10 aa, Homo sapiens
  Table 1.2; SLC7A13; ENSG00000164893; HLA -A*02:07
KSPNVHYVYV

SEQ ID NO: 9096 - protein, 8 aa, Homo sapiens
  Table 1.2; SLC7A13; ENSG00000164893; HLA -B*08:01,HLA-B*46:01,HLA-B*51:01
LAIILTSL

SEQ ID NO: 9097 - protein, 9 aa, Homo sapiens
  Table 1.2; SLC7A13; ENSG00000164893; HLA -B*51:01
LAIILTSLI

SEQ ID NO: 9098 - protein, 10 aa, Homo sapiens
  Table 1.2; SLC7A13; ENSG00000164893; HLA -B*54:01
LAMTSTLCSA

SEQ ID NO: 9099 - protein, 8 aa, Homo sapiens
  Table 1.2; SLC7A13; ENSG00000164893; HLA -B*51:01
LAYSCMNV

SEQ ID NO: 9100 - protein, 9 aa, Homo sapiens
  Table 1.2; SLC7A13; ENSG00000164893; HLA -C*14:02
LFLGSGVVA

SEQ ID NO: 9101 - protein, 9 aa, Homo sapiens
  Table 1.2; SLC7A13; ENSG00000164893; HLA -A*23:01
LFSNLLISI

SEQ ID NO: 9102 - protein, 9 aa, Homo sapiens
  Table 1.2; SLC7A13; ENSG00000164893; HLA -A*24:02,HLA-A*29:02
LFYIPLIHF

SEQ ID NO: 9103 - protein, 9 aa, Homo sapiens
  Table 1.2; SLC7A13; ENSG00000164893; HLA -B*27:05
LGSGVVAGQ

SEQ ID NO: 9104 - protein, 9 aa, Homo sapiens
  Table 1.2; SLC7A13; ENSG00000164893; HLA -A*02:07
LIDLINYIF

SEQ ID NO: 9105 - protein, 10 aa, Homo sapiens
  Table 1.2; SLC7A13; ENSG00000164893; HLA -A*02:07
LIDLINYIFF

SEQ ID NO: 9106 - protein, 9 aa, Homo sapiens
  Table 1.2; SLC7A13; ENSG00000164893; HLA -A*01:01,HLA-A*26:01,HLA-A*29:02,HLA-A*30:02,HLA-A*32:01, HLA-B*15:01,HLA-B*46:01
LIQAIFQGY

SEQ ID NO: 9107 - protein, 8 aa, Homo sapiens
  Table 1.2; SLC7A13; ENSG00000164893; HLA -A*02:04
LLFYIPLI

SEQ ID NO: 9108 - protein, 10 aa, Homo sapiens
  Table 1.2; SLC7A13; ENSG00000164893; HLA -A*02:04,HLA-A*02:07
LLFYIPLIHF

SEQ ID NO: 9109 - protein, 10 aa, Homo sapiens
  Table 1.2; SLC7A13; ENSG00000164893; HLA -A*02:01,HLA-A*02:03,HLA-A*02:04
LLINIIGAGI

SEQ ID NO: 9110 - protein, 8 aa, Homo sapiens
  Table 1.2; SLC7A13; ENSG00000164893; HLA -A*02:04
LLVNISYL

SEQ ID NO: 9111 - protein, 11 aa, Homo sapiens
  Table 1.2; SLC7A13; ENSG00000164893; HLA -A*02:04
LLVNISYLTVL

SEQ ID NO: 9112 - protein, 9 aa, Homo sapiens
  Table 1.2; SLC7A13; ENSG00000164893; HLA -A*31:01
LMIGILRRR

SEQ ID NO: 9113 - protein, 8 aa, Homo sapiens
  Table 1.2; SLC7A13; ENSG00000164893; HLA -B*51:01
LPDISHLI

SEQ ID NO: 9114 - protein, 10 aa, Homo sapiens
  Table 1.2; SLC7A13; ENSG00000164893; HLA -B*54:01,HLA-B*56:01
LPDISHLIQA

SEQ ID NO: 9115 - protein, 8 aa, Homo sapiens
  Table 1.2; SLC7A13; ENSG00000164893; HLA -B*08:01
LPKKCLAL

SEQ ID NO: 9116 - protein, 8 aa, Homo sapiens
  Table 1.2; SLC7A13; ENSG00000164893; HLA -B*07:02,HLA-B*08:01,HLA-B*35:01,HLA-B*35:03,HLA-B*51:01, HLA-B*54:01
LPLLFNTL

SEQ ID NO: 9117 - protein, 8 aa, Homo sapiens
  Table 1.2; SLC7A13; ENSG00000164893; HLA -B*15:03,HLA-B*18:01,HLA-B*35:01,HLA-B*51:01,HLA-B*55:01
LPLVTVVY

SEQ ID NO: 9118 - protein, 9 aa, Homo sapiens
  Table 1.2; SLC7A13; ENSG00000164893; HLA -B*35:01,HLA-B*35:03,HLA-B*51:01
LPLVTVVYL

SEQ ID NO: 9119 - protein, 8 aa, Homo sapiens
  Table 1.2; SLC7A13; ENSG00000164893; HLA -B*15:01,HLA-B*15:03
LQIASSVL

SEQ ID NO: 9120 - protein, 9 aa, Homo sapiens
  Table 1.2; SLC7A13; ENSG00000164893; HLA -A*11:01
LQIASSVLK

SEQ ID NO: 9121 - protein, 10 aa, Homo sapiens
  Table 1.2; SLC7A13; ENSG00000164893; HLA -A*02:03,HLA-B*13:02
LQIASSVLKV

SEQ ID NO: 9122 - protein, 9 aa, Homo sapiens
  Table 1.2; SLC7A13; ENSG00000164893; HLA -A*02:03,HLA-A*68:02
LSFISLTGV

SEQ ID NO: 9123 - protein, 11 aa, Homo sapiens
  Table 1.2; SLC7A13; ENSG00000164893; HLA -B*57:01
LSFISLTGVVF

SEQ ID NO: 9124 - protein, 9 aa, Homo sapiens
  Table 1.2; SLC7A13; ENSG00000164893; HLA -C*12:03
LSFPLATIV

SEQ ID NO: 9125 - protein, 10 aa, Homo sapiens
  Table 1.2; SLC7A13; ENSG00000164893; HLA -A*23:01,HLA-A*25:01,HLA-B*27:02,HLA-B*44:02,HLA-B*57:01, HLA-B*58:01
LSSDAVAITW

SEQ ID NO: 9126 - protein, 10 aa, Homo sapiens
  Table 1.2; SLC7A13; ENSG00000164893; HLA -A*01:01
LTSLIDLINY

SEQ ID NO: 9127 - protein, 11 aa, Homo sapiens
  Table 1.2; SLC7A13; ENSG00000164893; HLA -B*57:01
LTSRGVKEVTW

SEQ ID NO: 9128 - protein, 9 aa, Homo sapiens
  Table 1.2; SLC7A13; ENSG00000164893; HLA -A*30:02,HLA-A*32:01,HLA-B*15:01,HLA-B*46:01
LVKSPNVHY

SEQ ID NO: 9129 - protein, 11 aa, Homo sapiens
  Table 1.2; SLC7A13; ENSG00000164893; HLA -A*29:02
LVKSPNVHYVY

SEQ ID NO: 9130 - protein, 9 aa, Homo sapiens
  Table 1.2; SLC7A13; ENSG00000164893; HLA -A*01:01,HLA-A*29:02
LVLSGLLFY

SEQ ID NO: 9131 - protein, 10 aa, Homo sapiens
  Table 1.2; SLC7A13; ENSG00000164893; HLA -A*02:04
LVLSGLLFYI

SEQ ID NO: 9132 - protein, 9 aa, Homo sapiens
  Table 1.2; SLC7A13; ENSG00000164893; HLA -B*51:01
LVNISYLTV

SEQ ID NO: 9133 - protein, 9 aa, Homo sapiens
  Table 1.2; SLC7A13; ENSG00000164893; HLA -A*02:01
MLWIVGILT

SEQ ID NO: 9134 - protein, 8 aa, Homo sapiens
  Table 1.2; SLC7A13; ENSG00000164893; HLA -B*54:01
MPFAISTS

SEQ ID NO: 9135 - protein, 9 aa, Homo sapiens
  Table 1.2; SLC7A13; ENSG00000164893; HLA -A*23:01,HLA-A*25:01,HLA-A*30:01,HLA-B*07:02,HLA-B*08:01, HLA-B*15:03,HLA-B*35:01,HLA-B*35:03,HLA-B*39:01,HLA-B*46:01, HLA-B*51:01,HLA-B*54:01,HLA-B*55:01,HLA-B*56:01,HLA-C*03:03,
  HLA-C*03:04,HLA-C*07:02,HLA-C*14:02
MPFAISTSL

SEQ ID NO: 9136 - protein, 10 aa, Homo sapiens
  Table 1.2; SLC7A13; ENSG00000164893; HLA -B*35:01,HLA-B*35:03,HLA-B*51:01,HLA-B*54:01
MPFAISTSLF

SEQ ID NO: 9137 - protein, 11 aa, Homo sapiens
  Table 1.2; SLC7A13; ENSG00000164893; HLA -B*54:01
MPFAISTSLFS

SEQ ID NO: 9138 - protein, 9 aa, Homo sapiens
  Table 1.2; SLC7A13; ENSG00000164893; HLA -A*02:03,HLA-A*68:02
NIIGAGIFV

SEQ ID NO: 9139 - protein, 9 aa, Homo sapiens
  Table 1.2; SLC7A13; ENSG00000164893; HLA -B*54:01
NSHSSPFTA

SEQ ID NO: 9140 - protein, 9 aa, Homo sapiens
  Table 1.2; SLC7A13; ENSG00000164893; HLA -A*25:01
NVGVSLCVW

SEQ ID NO: 9141 - protein, 10 aa, Homo sapiens
  Table 1.2; SLC7A13; ENSG00000164893; HLA -A*24:02,HLA-A*29:02
NYIFFTGSLW

SEQ ID NO: 9142 - protein, 9 aa, Homo sapiens
  Table 1.2; SLC7A13; ENSG00000164893; HLA -A*23:01,HLA-A*24:02
PFAISTSLF

SEQ ID NO: 9143 - protein, 9 aa, Homo sapiens
  Table 1.2; SLC7A13; ENSG00000164893; HLA -A*02:03
PLATIVIDV

SEQ ID NO: 9144 - protein, 9 aa, Homo sapiens
  Table 1.2; SLC7A13; ENSG00000164893; HLA -B*54:01
QAIFQGYFA

SEQ ID NO: 9145 - protein, 10 aa, Homo sapiens
  Table 1.2; SLC7A13; ENSG00000164893; HLA -A*29:02,HLA-A*30:02,HLA-B*35:01
QAIFQGYFAY

SEQ ID NO: 9146 - protein, 8 aa, Homo sapiens
  Table 1.2; SLC7A13; ENSG00000164893; HLA -A*30:02,HLA-B*15:01,HLA-B*15:03,HLA-B*18:01,HLA-B*35:01, HLA-B*46:01,HLA-C*07:01
QALLLAEY

SEQ ID NO: 9147 - protein, 8 aa, Homo sapiens
  Table 1.2; SLC7A13; ENSG00000164893; HLA -A*30:01,HLA-B*18:01,HLA-B*40:01,HLA-B*44:02,HLA-B*44:03, HLA-B*49:01
QEGQLPLL

SEQ ID NO: 9148 - protein, 9 aa, Homo sapiens
  Table 1.2; SLC7A13; ENSG00000164893; HLA -A*24:02,HLA-A*30:01,HLA-B*18:01,HLA-B*27:02,HLA-B*37:01, HLA-B*40:01,HLA-B*44:02,HLA-B*44:03,HLA-B*49:01,HLA-C*16:04
QEGQLPLLF

SEQ ID NO: 9149 - protein, 9 aa, Homo sapiens
  Table 1.2; SLC7A13; ENSG00000164893; HLA -A*29:02,HLA-B*18:01,HLA-B*44:02,HLA-B*44:03
QEPNLSIPY

SEQ ID NO: 9150 - protein, 8 aa, Homo sapiens
  Table 1.2; SLC7A13; ENSG00000164893; HLA -A*03:02,HLA-A*11:01
QIASSVLK

SEQ ID NO: 9151 - protein, 9 aa, Homo sapiens
  Table 1.2; SLC7A13; ENSG00000164893; HLA -A*02:01,HLA-A*02:03,HLA-A*02:04,HLA-A*02:07,HLA-A*03:01, HLA-A*26:01,HLA-A*68:01,HLA-A*68:02,HLA-B*13:02,HLA-B*51:01, HLA-B*55:01,HLA-C*02:02,HLA-C*12:03,HLA-C*16:02
QIASSVLKV

SEQ ID NO: 9152 - protein, 9 aa, Homo sapiens
  Table 1.2; SLC7A13; ENSG00000164893; HLA -A*02:07,HLA-A*24:02,HLA-C*01:02
QLPLLFNTL

SEQ ID NO: 9153 - protein, 9 aa, Homo sapiens
  Table 1.2; SLC7A13; ENSG00000164893; HLA -B*07:02,HLA-B*51:01,HLA-B*54:01,HLA-B*56:01
QPFFPSCSV

SEQ ID NO: 9154 - protein, 8 aa, Homo sapiens
  Table 1.2; SLC7A13; ENSG00000164893; HLA -B*57:01
RAFPSLAW

SEQ ID NO: 9155 - protein, 10 aa, Homo sapiens
  Table 1.2; SLC7A13; ENSG00000164893; HLA -B*57:01
RAFPSLAWIM

SEQ ID NO: 9156 - protein, 9 aa, Homo sapiens
  Table 1.2; SLC7A13; ENSG00000164893; HLA -A*30:01,HLA-B*40:01,HLA-B*40:02,HLA-B*49:01
REILSSDAV

SEQ ID NO: 9157 - protein, 11 aa, Homo sapiens
  Table 1.2; SLC7A13; ENSG00000164893; HLA -A*30:01,HLA-B*40:01,HLA-B*49:01
REILSSDAVAI

SEQ ID NO: 9158 - protein, 9 aa, Homo sapiens
  Table 1.2; SLC7A13; ENSG00000164893; HLA -A*23:01,HLA-A*24:02,HLA-A*30:02,HLA-A*31:01,HLA-A*32:01, HLA-B*15:03,HLA-B*46:01,HLA-B*57:01,HLA-C*14:02
RYFGSTVAF

SEQ ID NO: 9159 - protein, 10 aa, Homo sapiens
  Table 1.2; SLC7A13; ENSG00000164893; HLA -A*24:02
RYFGSTVAFL

SEQ ID NO: 9160 - protein, 9 aa, Homo sapiens
  Table 1.2; SLC7A13; ENSG00000164893; HLA -A*23:01,HLA-A*24:02,HLA-C*14:02
RYQEPNLSI

SEQ ID NO: 9161 - protein, 11 aa, Homo sapiens
  Table 1.2; SLC7A13; ENSG00000164893; HLA -A*29:02,HLA-A*30:02,HLA-A*31:01
RYQEPNLSIPY

SEQ ID NO: 9162 - protein, 8 aa, Homo sapiens
  Table 1.2; SLC7A13; ENSG00000164893; HLA -C*05:01
SAEISISF

SEQ ID NO: 9163 - protein, 9 aa, Homo sapiens
  Table 1.2; SLC7A13; ENSG00000164893; HLA -A*23:01,HLA-A*30:01,HLA-B*07:02,HLA-B*15:01,HLA-B*15:03, HLA-B*35:01,HLA-B*35:03,HLA-B*39:01,HLA-B*40:01,HLA-B*46:01, HLA-C*01:02,HLA-C*03:03,HLA-C*03:04,HLA-C*07:02,HLA-C*14:02,
  HLA-C*16:04
SCMNVGVSL

SEQ ID NO: 9164 - protein, 8 aa, Homo sapiens
  Table 1.2; SLC7A13; ENSG00000164893; HLA -B*18:01,HLA-B*37:01,HLA-B*44:02,HLA-B*44:03
SDAVAITW

SEQ ID NO: 9165 - protein, 10 aa, Homo sapiens
  Table 1.2; SLC7A13; ENSG00000164893; HLA -A*23:01,HLA-A*24:02,HLA-A*29:02,HLA-C*14:02
SFISLTGVVF

SEQ ID NO: 9166 - protein, 9 aa, Homo sapiens
  Table 1.2; SLC7A13; ENSG00000164893; HLA -A*29:02,HLA-C*14:02
SFPCSGAQY

SEQ ID NO: 9167 - protein, 10 aa, Homo sapiens
  Table 1.2; SLC7A13; ENSG00000164893; HLA -A*29:02
SFPCSGAQYY

SEQ ID NO: 9168 - protein, 9 aa, Homo sapiens
  Table 1.2; SLC7A13; ENSG00000164893; HLA -A*11:01
SGAQYYFLK

SEQ ID NO: 9169 - protein, 9 aa, Homo sapiens
  Table 1.2; SLC7A13; ENSG00000164893; HLA -B*15:03,HLA-B*35:03,HLA-B*39:01,HLA-B*40:01,HLA-B*46:01, HLA-C*01:02,HLA-C*03:03,HLA-C*03:04,HLA-C*14:02
SGVVAGQAL

SEQ ID NO: 9170 - protein, 9 aa, Homo sapiens
  Table 1.2; SLC7A13; ENSG00000164893; HLA -B*38:01,HLA-B*39:01
SHSSPFTAV

SEQ ID NO: 9171 - protein, 10 aa, Homo sapiens
  Table 1.2; SLC7A13; ENSG00000164893; HLA -B*38:01,HLA-B*39:01
SHSSPFTAVL

SEQ ID NO: 9172 - protein, 11 aa, Homo sapiens
  Table 1.2; SLC7A13; ENSG00000164893; HLA -B*38:01
SHSSPFTAVLL

SEQ ID NO: 9173 - protein, 11 aa, Homo sapiens
  Table 1.2; SLC7A13; ENSG00000164893; HLA -A*02:03,HLA-A*02:04,HLA-A*03:01
SIFKSSRPIYL

SEQ ID NO: 9174 - protein, 11 aa, Homo sapiens
  Table 1.2; SLC7A13; ENSG00000164893; HLA -A*02:01,HLA-A*02:03,HLA-A*02:04
SILSFISLTGV

SEQ ID NO: 9175 - protein, 9 aa, Homo sapiens
  Table 1.2; SLC7A13; ENSG00000164893; HLA -A*02:01,HLA-A*02:03,HLA-A*02:04,HLA-A*02:07,HLA-A*68:02, HLA-B*08:01,HLA-B*46:01,HLA-B*55:01
SLAIILTSL

SEQ ID NO: 9176 - protein, 9 aa, Homo sapiens
  Table 1.2; SLC7A13; ENSG00000164893; HLA -A*02:03,HLA-B*13:02
SLFLGSGVV

SEQ ID NO: 9177 - protein, 10 aa, Homo sapiens
  Table 1.2; SLC7A13; ENSG00000164893; HLA -A*02:03,HLA-B*54:01,HLA-B*56:01
SLFLGSGVVA

SEQ ID NO: 9178 - protein, 11 aa, Homo sapiens
  Table 1.2; SLC7A13; ENSG00000164893; HLA -A*02:01,HLA-A*02:03,HLA-A*02:04
SLFLGSGVVAG

SEQ ID NO: 9179 - protein, 10 aa, Homo sapiens
  Table 1.2; SLC7A13; ENSG00000164893; HLA -A*02:01,HLA-A*02:03,HLA-A*02:04
SLFSNLLISI

SEQ ID NO: 9180 - protein, 9 aa, Homo sapiens
  Table 1.2; SLC7A13; ENSG00000164893; HLA -A*02:01,HLA-A*02:03,HLA-A*02:04,HLA-A*02:07,HLA-A*23:01, HLA-A*68:02,HLA-B*13:02
SLIDLINYI

SEQ ID NO: 9181 - protein, 8 aa, Homo sapiens
  Table 1.2; SLC7A13; ENSG00000164893; HLA -A*02:01,HLA-A*02:04
SLTGVVFL

SEQ ID NO: 9182 - protein, 9 aa, Homo sapiens
  Table 1.2; SLC7A13; ENSG00000164893; HLA -A*02:01,HLA-A*02:03,HLA-A*02:04,HLA-A*02:07,HLA-A*23:01, HLA-A*24:02,HLA-A*30:01,HLA-A*68:02,HLA-B*13:02,HLA-B*55:01
SLTGVVFLI

SEQ ID NO: 9183 - protein, 9 aa, Homo sapiens
  Table 1.2; SLC7A13; ENSG00000164893; HLA -A*02:01,HLA-A*02:03,HLA-A*02:04,HLA-A*02:07
SLWSILLMI

SEQ ID NO: 9184 - protein, 8 aa, Homo sapiens
  Table 1.2; SLC7A13; ENSG00000164893; HLA -B*51:01,HLA-B*56:01
SPFTAVLL

SEQ ID NO: 9185 - protein, 9 aa, Homo sapiens
  Table 1.2; SLC7A13; ENSG00000164893; HLA -B*07:02,HLA-B*35:01,HLA-B*51:01,HLA-B*56:01
SPFTAVLLL

SEQ ID NO: 9186 - protein, 10 aa, Homo sapiens
  Table 1.2; SLC7A13; ENSG00000164893; HLA -B*56:01
SPKGVLAYSC

SEQ ID NO: 9187 - protein, 8 aa, Homo sapiens
  Table 1.2; SLC7A13; ENSG00000164893; HLA -A*32:01,HLA-B*08:01,HLA-B*35:01,HLA-B*55:01
SPNVHYVY

SEQ ID NO: 9188 - protein, 9 aa, Homo sapiens
  Table 1.2; SLC7A13; ENSG00000164893; HLA -B*07:02,HLA-B*51:01,HLA-B*54:01,HLA-B*56:01
SPNVHYVYV

SEQ ID NO: 9189 - protein, 9 aa, Homo sapiens
  Table 1.2; SLC7A13; ENSG00000164893; HLA -A*02:04,HLA-B*38:01,HLA-B*39:01
SQEGQLPLL

SEQ ID NO: 9190 - protein, 10 aa, Homo sapiens
  Table 1.2; SLC7A13; ENSG00000164893; HLA -A*29:02,HLA-B*27:02,HLA-B*38:01
SQEGQLPLLF

SEQ ID NO: 9191 - protein, 9 aa, Homo sapiens
  Table 1.2; SLC7A13; ENSG00000164893; HLA -A*01:01,HLA-A*02:07,HLA-A*25:01,HLA-A*32:01,HLA-B*44:02, HLA-B*44:03,HLA-B*57:01,HLA-B*58:01,HLA-C*05:01
SSDAVAITW

SEQ ID NO: 9192 - protein, 9 aa, Homo sapiens
  Table 1.2; SLC7A13; ENSG00000164893; HLA -C*01:02
SSPFTAVLL

SEQ ID NO: 9193 - protein, 8 aa, Homo sapiens
  Table 1.2; SLC7A13; ENSG00000164893; HLA -B*08:01
SSVLKVSI

SEQ ID NO: 9194 - protein, 9 aa, Homo sapiens
  Table 1.2; SLC7A13; ENSG00000164893; HLA -A*25:01,HLA-B*57:01
STVAFLNLW

SEQ ID NO: 9195 - protein, 10 aa, Homo sapiens
  Table 1.2; SLC7A13; ENSG00000164893; HLA -A*25:01
SVLKVSILSF

SEQ ID NO: 9196 - protein, 9 aa, Homo sapiens
  Table 1.2; SLC7A13; ENSG00000164893; HLA -A*29:02,HLA-A*31:01,HLA-A*33:01,HLA-A*33:03
SYLTVLTPR

SEQ ID NO: 9197 - protein, 8 aa, Homo sapiens
  Table 1.2; SLC7A13; ENSG00000164893; HLA -B*51:01
TALPLVTV

SEQ ID NO: 9198 - protein, 9 aa, Homo sapiens
  Table 1.2; SLC7A13; ENSG00000164893; HLA -A*02:01,HLA-A*02:03,HLA-A*68:02,HLA-B*13:02,HLA-B*35:01, HLA-B*39:01,HLA-B*51:01,HLA-B*54:01,HLA-B*56:01,HLA-C*02:02, HLA-C*12:03,HLA-C*16:02
TALPLVTVV

SEQ ID NO: 9199 - protein, 10 aa, Homo sapiens
  Table 1.2; SLC7A13; ENSG00000164893; HLA -A*23:01,HLA-A*25:01,HLA-A*29:02,HLA-A*30:02,HLA-B*35:01
TALPLVTVVY

SEQ ID NO: 9200 - protein, 9 aa, Homo sapiens
  Table 1.2; SLC7A13; ENSG00000164893; HLA -B*35:01,HLA-B*35:03,HLA-B*51:01,HLA-B*54:01
TAVLLLVTL

SEQ ID NO: 9201 - protein, 11 aa, Homo sapiens
  Table 1.2; SLC7A13; ENSG00000164893; HLA -A*31:01
TLIAGELKKPR

SEQ ID NO: 9202 - protein, 9 aa, Homo sapiens
  Table 1.2; SLC7A13; ENSG00000164893; HLA -A*03:01,HLA-A*30:02,HLA-A*32:01,HLA-B*15:01,HLA-B*37:01, HLA-B*46:01,HLA-C*07:04,HLA-C*14:02
TLNSHSSPF

SEQ ID NO: 9203 - protein, 11 aa, Homo sapiens
  Table 1.2; SLC7A13; ENSG00000164893; HLA -B*07:02,HLA-B*54:01,HLA-B*55:01,HLA-B*56:01
TPREILSSDAV

SEQ ID NO: 9204 - protein, 9 aa, Homo sapiens
  Table 1.2; SLC7A13; ENSG00000164893; HLA -B*51:01
TSFLLINII

SEQ ID NO: 9205 - protein, 11 aa, Homo sapiens
  Table 1.2; SLC7A13; ENSG00000164893; HLA -B*54:01
TSLFLGSGVVA

SEQ ID NO: 9206 - protein, 9 aa, Homo sapiens
  Table 1.2; SLC7A13; ENSG00000164893; HLA -A*30:02,HLA-B*57:01,HLA-B*58:01
TSLIDLINY

SEQ ID NO: 9207 - protein, 10 aa, Homo sapiens
  Table 1.2; SLC7A13; ENSG00000164893; HLA -B*57:01
TSRGVKEVTW

SEQ ID NO: 9208 - protein, 9 aa, Homo sapiens
  Table 1.2; SLC7A13; ENSG00000164893; HLA -B*07:02
TVLTPREIL

SEQ ID NO: 9209 - protein, 9 aa, Homo sapiens
  Table 1.2; SLC7A13; ENSG00000164893; HLA -A*68:02
TVVYLLVNI

SEQ ID NO: 9210 - protein, 10 aa, Homo sapiens
  Table 1.2; SLC7A13; ENSG00000164893; HLA -A*24:02
TWADRAFPSL

SEQ ID NO: 9211 - protein, 8 aa, Homo sapiens
  Table 1.2; SLC7A13; ENSG00000164893; HLA -A*23:01,HLA-B*51:01
VAGQALLL

SEQ ID NO: 9212 - protein, 11 aa, Homo sapiens
  Table 1.2; SLC7A13; ENSG00000164893; HLA -A*30:02
VAGQALLLAEY

SEQ ID NO: 9213 - protein, 8 aa, Homo sapiens
  Table 1.2; SLC7A13; ENSG00000164893; HLA -B*18:01,HLA-B*37:01
VERFQNAF

SEQ ID NO: 9214 - protein, 10 aa, Homo sapiens
  Table 1.2; SLC7A13; ENSG00000164893; HLA -A*23:01
VFLSFPLATI

SEQ ID NO: 9215 - protein, 8 aa, Homo sapiens
  Table 1.2; SLC7A13; ENSG00000164893; HLA -C*05:01
VIDVGLVV

SEQ ID NO: 9216 - protein, 9 aa, Homo sapiens
  Table 1.2; SLC7A13; ENSG00000164893; HLA -A*02:07,HLA-B*38:01,HLA-C*05:01
VIDVGLVVI

SEQ ID NO: 9217 - protein, 10 aa, Homo sapiens
  Table 1.2; SLC7A13; ENSG00000164893; HLA -A*02:07
VIPLVKSPNV

SEQ ID NO: 9218 - protein, 8 aa, Homo sapiens
  Table 1.2; SLC7A13; ENSG00000164893; HLA -B*15:03
VKSPNVHY

SEQ ID NO: 9219 - protein, 10 aa, Homo sapiens
  Table 1.2; SLC7A13; ENSG00000164893; HLA -A*29:02,HLA-B*15:03
VKSPNVHYVY

SEQ ID NO: 9220 - protein, 9 aa, Homo sapiens
  Table 1.2; SLC7A13; ENSG00000164893; HLA -A*02:03,HLA-A*23:01,HLA-A*24:02,HLA-B*08:01,HLA-B*46:01
VLKVSILSF

SEQ ID NO: 9221 - protein, 10 aa, Homo sapiens
  Table 1.2; SLC7A13; ENSG00000164893; HLA -A*02:03
VLKVSILSFI

SEQ ID NO: 9222 - protein, 9 aa, Homo sapiens
  Table 1.2; SLC7A13; ENSG00000164893; HLA -A*02:04
VLLLVLSGL

SEQ ID NO: 9223 - protein, 9 aa, Homo sapiens
  Table 1.2; SLC7A13; ENSG00000164893; HLA -A*02:01,HLA-A*02:03,HLA-A*02:04,HLA-A*02:07
VLSGLLFYI

SEQ ID NO: 9224 - protein, 9 aa, Homo sapiens
  Table 1.2; SLC7A13; ENSG00000164893; HLA -B*07:02
VPKLPKKCL

SEQ ID NO: 9225 - protein, 9 aa, Homo sapiens
  Table 1.2; SLC7A13; ENSG00000164893; HLA -C*03:03,HLA-C*03:04
VSILSFISL

SEQ ID NO: 9226 - protein, 9 aa, Homo sapiens
  Table 1.2; SLC7A13; ENSG00000164893; HLA -A*01:01,HLA-A*25:01,HLA-A*26:01,HLA-A*29:02,HLA-A*30:02, HLA-A*32:01,HLA-B*15:01,HLA-B*15:03,HLA-B*46:01,HLA-B*57:01, HLA-B*58:01,HLA-C*01:02,HLA-C*02:02,HLA-C*16:01
VSPKGVLAY

SEQ ID NO: 9227 - protein, 9 aa, Homo sapiens
  Table 1.2; SLC7A13; ENSG00000164893; HLA -A*23:01
VTLGSLAII

SEQ ID NO: 9228 - protein, 9 aa, Homo sapiens
  Table 1.2; SLC7A13; ENSG00000164893; HLA -A*03:01,HLA-A*11:01,HLA-A*23:01,HLA-A*24:02,HLA-A*29:02, HLA-B*13:02
VVAGQALLL

SEQ ID NO: 9229 - protein, 9 aa, Homo sapiens
  Table 1.2; SLC7A13; ENSG00000164893; HLA -A*32:01
VVIPLVKSP

SEQ ID NO: 9230 - protein, 10 aa, Homo sapiens
  Table 1.2; SLC7A13; ENSG00000164893; HLA -A*31:01
VVIPLVKSPN

SEQ ID NO: 9231 - protein, 10 aa, Homo sapiens
  Table 1.2; SLC7A13; ENSG00000164893; HLA -A*30:02
VVYLLVNISY

SEQ ID NO: 9232 - protein, 9 aa, Homo sapiens
  Table 1.2; SLC7A13; ENSG00000164893; HLA -A*23:01,HLA-A*24:02,HLA-A*29:02,HLA-A*30:02,HLA-C*14:02
VYLLVNISY

SEQ ID NO: 9233 - protein, 10 aa, Homo sapiens
  Table 1.2; SLC7A13; ENSG00000164893; HLA -A*23:01,HLA-A*24:02
VYLLVNISYL

SEQ ID NO: 9234 - protein, 8 aa, Homo sapiens
  Table 1.2; SLC7A13; ENSG00000164893; HLA -A*23:01
VYVLLLVL

SEQ ID NO: 9235 - protein, 9 aa, Homo sapiens
  Table 1.2; SLC7A13; ENSG00000164893; HLA -A*31:01
WIVGILTSR

SEQ ID NO: 9236 - protein, 8 aa, Homo sapiens
  Table 1.2; SLC7A13; ENSG00000164893; HLA -A*23:01,HLA-A*24:02,HLA-C*14:02
YFGSTVAF

SEQ ID NO: 9237 - protein, 9 aa, Homo sapiens
  Table 1.2; SLC7A13; ENSG00000164893; HLA -A*23:01,HLA-A*24:02,HLA-A*29:02
YFGSTVAFL

SEQ ID NO: 9238 - protein, 9 aa, Homo sapiens
  Table 1.2; SLC7A13; ENSG00000164893; HLA -A*29:02
YIFFTGSLW

SEQ ID NO: 9239 - protein, 9 aa, Homo sapiens
  Table 1.2; SLC7A13; ENSG00000164893; HLA -A*02:07,HLA-A*24:02
YIPLIHFKI

SEQ ID NO: 9240 - protein, 9 aa, Homo sapiens
  Table 1.2; SLC7A13; ENSG00000164893; HLA -A*02:01,HLA-A*02:03,HLA-B*39:01
YLASQEGQL

SEQ ID NO: 9241 - protein, 9 aa, Homo sapiens
  Table 1.2; SLC7A13; ENSG00000164893; HLA -A*02:01,HLA-A*02:03,HLA-A*02:04,HLA-A*02:07
YLLVNISYL

SEQ ID NO: 9242 - protein, 8 aa, Homo sapiens
  Table 1.2; SLC7A13; ENSG00000164893; HLA -A*02:04
YLQLLFNI

SEQ ID NO: 9243 - protein, 8 aa, Homo sapiens
  Table 1.2; SLC7A13; ENSG00000164893; HLA -B*13:02
YQEPNLSI

SEQ ID NO: 9244 - protein, 10 aa, Homo sapiens
  Table 1.2; SLC7A13; ENSG00000164893; HLA -A*01:01,HLA-A*29:02,HLA-A*30:02,HLA-B*15:01,HLA-B*15:03, HLA-B*27:02,HLA-B*39:01,HLA-C*07:01,HLA-C*07:04
YQEPNLSIPY

SEQ ID NO: 9245 - protein, 9 aa, Homo sapiens
  Table 1.2; SLC7A13; ENSG00000164893; HLA -A*02:04
YVYVLLLVL

SEQ ID NO: 9246 - protein, 9 aa, Homo sapiens
  Table 1.2; SMC1B; ENSG00000077935; HLA -A*02:04
AALALLFAV

SEQ ID NO: 9247 - protein, 10 aa, Homo sapiens
  Table 1.2; SMC1B; ENSG00000077935; HLA -A*03:01,HLA-A*03:02,HLA-A*11:01
AALDNTNIGK

SEQ ID NO: 9248 - protein, 8 aa, Homo sapiens
  Table 1.2; SMC1B; ENSG00000077935; HLA -C*01:02
AAPNLRAL

SEQ ID NO: 9249 - protein, 9 aa, Homo sapiens
  Table 1.2; SMC1B; ENSG00000077935; HLA -A*30:01,HLA-B*18:01,HLA-B*27:02,HLA-B*37:01,HLA-B*39:01, HLA-B*40:01,HLA-B*44:02,HLA-B*44:03,HLA-B*49:01,HLA-C*16:04
AEEDAQFNF

SEQ ID NO: 9250 - protein, 9 aa, Homo sapiens
  Table 1.2; SMC1B; ENSG00000077935; HLA -B*49:01
AEENCLQTV

SEQ ID NO: 9251 - protein, 8 aa, Homo sapiens
  Table 1.2; SMC1B; ENSG00000077935; HLA -B*49:01
AEKVQTQI

SEQ ID NO: 9252 - protein, 8 aa, Homo sapiens
  Table 1.2; SMC1B; ENSG00000077935; HLA -B*37:01,HLA-B*44:02,HLA-B*44:03
AELEKIGI

SEQ ID NO: 9253 - protein, 9 aa, Homo sapiens
  Table 1.2; SMC1B; ENSG00000077935; HLA -B*37:01,HLA-B*40:01,HLA-B*44:02,HLA-B*44:03,HLA-B*49:01
AELEKIGII

SEQ ID NO: 9254 - protein, 10 aa, Homo sapiens
  Table 1.2; SMC1B; ENSG00000077935; HLA -B*49:01
AELEKIGIIV

SEQ ID NO: 9255 - protein, 9 aa, Homo sapiens
  Table 1.2; SMC1B; ENSG00000077935; HLA -A*30:01,HLA-B*40:01,HLA-B*44:02,HLA-B*44:03,HLA-B*49:01
AEPETFLAL

SEQ ID NO: 9256 - protein, 8 aa, Homo sapiens
  Table 1.2; SMC1B; ENSG00000077935; HLA -B*49:01
AESTQATI

SEQ ID NO: 9257 - protein, 10 aa, Homo sapiens
  Table 1.2; SMC1B; ENSG00000077935; HLA -B*49:01
AESTQATIDI

SEQ ID NO: 9258 - protein, 11 aa, Homo sapiens
  Table 1.2; SMC1B; ENSG00000077935; HLA -A*30:02,HLA-B*27:02,HLA-B*44:02,HLA-B*44:03
AESTQATIDIY

SEQ ID NO: 9259 - protein, 11 aa, Homo sapiens
  Table 1.2; SMC1B; ENSG00000077935; HLA -B*44:02
AEVLEHLKRLY

SEQ ID NO: 9260 - protein, 9 aa, Homo sapiens
  Table 1.2; SMC1B; ENSG00000077935; HLA -C*14:02
AFYQEQSQL

SEQ ID NO: 9261 - protein, 9 aa, Homo sapiens
  Table 1.2; SMC1B; ENSG00000077935; HLA -A*11:01
AGIDTHEGK

SEQ ID NO: 9262 - protein, 8 aa, Homo sapiens
  Table 1.2; SMC1B; ENSG00000077935; HLA -A*02:04
ALALLFAV

SEQ ID NO: 9263 - protein, 9 aa, Homo sapiens
  Table 1.2; SMC1B; ENSG00000077935; HLA -A*01:01,HLA-A*03:01,HLA-A*03:02,HLA-A*11:01
ALDGTLFLK

SEQ ID NO: 9264 - protein, 9 aa, Homo sapiens
  Table 1.2; SMC1B; ENSG00000077935; HLA -A*01:01,HLA-A*03:01,HLA-A*03:02,HLA-A*11:01
ALDNTNIGK

SEQ ID NO: 9265 - protein, 10 aa, Homo sapiens
  Table 1.2; SMC1B; ENSG00000077935; HLA -A*02:01,HLA-A*02:07,HLA-B*55:01
ALDNTNIGKV

SEQ ID NO: 9266 - protein, 9 aa, Homo sapiens
  Table 1.2; SMC1B; ENSG00000077935; HLA -A*03:01,HLA-A*23:01,HLA-A*25:01,HLA-A*26:01,HLA-A*29:02, HLA-A*30:02,HLA-A*32:01,HLA-B*15:01,HLA-B*15:03,HLA-B*35:01, HLA-B*44:03,HLA-B*46:01,HLA-B*58:01,HLA-C*02:02
ALIGIYPEY

SEQ ID NO: 9267 - protein, 9 aa, Homo sapiens
  Table 1.2; SMC1B; ENSG00000077935; HLA -A*02:04,HLA-A*24:02,HLA-A*32:01,HLA-B*44:02
ALLFAVHSF

SEQ ID NO: 9268 - protein, 9 aa, Homo sapiens
  Table 1.2; SMC1B; ENSG00000077935; HLA -A*03:01,HLA-A*03:02,HLA-A*11:01
ALSFVMGEK

SEQ ID NO: 9269 - protein, 9 aa, Homo sapiens
  Table 1.2; SMC1B; ENSG00000077935; HLA -A*03:01,HLA-A*03:02
ALSGPERQK

SEQ ID NO: 9270 - protein, 9 aa, Homo sapiens
  Table 1.2; SMC1B; ENSG00000077935; HLA -B*56:01
APFFVLDEV

SEQ ID NO: 9271 - protein, 9 aa, Homo sapiens
  Table 1.2; SMC1B; ENSG00000077935; HLA -B*07:02,HLA-C*07:02
APNLRALEN

SEQ ID NO: 9272 - protein, 10 aa, Homo sapiens
  Table 1.2; SMC1B; ENSG00000077935; HLA -B*07:02,HLA-C*07:02
APNLRALENL

SEQ ID NO: 9273 - protein, 9 aa, Homo sapiens
  Table 1.2; SMC1B; ENSG00000077935; HLA -A*03:01,HLA-A*03:02,HLA-A*11:01,HLA-C*07:06
ASQEDILLK

SEQ ID NO: 9274 - protein, 8 aa, Homo sapiens
  Table 1.2; SMC1B; ENSG00000077935; HLA -A*11:01
ATIDIYEK

SEQ ID NO: 9275 - protein, 9 aa, Homo sapiens
  Table 1.2; SMC1B; ENSG00000077935; HLA -A*03:01,HLA-A*03:02,HLA-A*11:01
ATMTQQLEK

SEQ ID NO: 9276 - protein, 9 aa, Homo sapiens
  Table 1.2; SMC1B; ENSG00000077935; HLA -A*02:07,HLA-C*05:01
AVDREVGKL

SEQ ID NO: 9277 - protein, 11 aa, Homo sapiens
  Table 1.2; SMC1B; ENSG00000077935; HLA -A*11:01
AVDREVGKLQK

SEQ ID NO: 9278 - protein, 8 aa, Homo sapiens
  Table 1.2; SMC1B; ENSG00000077935; HLA -A*31:01
AVTKVFGR

SEQ ID NO: 9279 - protein, 9 aa, Homo sapiens
  Table 1.2; SMC1B; ENSG00000077935; HLA -B*49:01
CEEIGVENI

SEQ ID NO: 9280 - protein, 10 aa, Homo sapiens
  Table 1.2; SMC1B; ENSG00000077935; HLA -A*03:01,HLA-A*03:02,HLA-A*11:01
CIIGPNGSGK

SEQ ID NO: 9281 - protein, 11 aa, Homo sapiens
  Table 1.2; SMC1B; ENSG00000077935; HLA -A*03:02
CLQTVNELMAK

SEQ ID NO: 9282 - protein, 9 aa, Homo sapiens
  Table 1.2; SMC1B; ENSG00000077935; HLA -A*02:01,HLA-A*02:03,HLA-A*02:04,HLA-B*08:01
CMFSRVLTL

SEQ ID NO: 9283 - protein, 9 aa, Homo sapiens
  Table 1.2; SMC1B; ENSG00000077935; HLA -C*16:04
CRNNSAQAF

SEQ ID NO: 9284 - protein, 9 aa, Homo sapiens
  Table 1.2; SMC1B; ENSG00000077935; HLA -A*29:02
CVAALALLF

SEQ ID NO: 9285 - protein, 9 aa, Homo sapiens
  Table 1.2; SMC1B; ENSG00000077935; HLA -B*51:01
DAALDNTNI

SEQ ID NO: 9286 - protein, 11 aa, Homo sapiens
  Table 1.2; SMC1B; ENSG00000077935; HLA -A*68:01
DAALDNTNIGK

SEQ ID NO: 9287 - protein, 8 aa, Homo sapiens
  Table 1.2; SMC1B; ENSG00000077935; HLA -B*51:01
DAFEASRK

SEQ ID NO: 9288 - protein, 10 aa, Homo sapiens
  Table 1.2; SMC1B; ENSG00000077935; HLA -B*54:01
DAFEASRKEA

SEQ ID NO: 9289 - protein, 11 aa, Homo sapiens
  Table 1.2; SMC1B; ENSG00000077935; HLA -A*33:01
DAFEASRKEAR

SEQ ID NO: 9290 - protein, 10 aa, Homo sapiens
  Table 1.2; SMC1B; ENSG00000077935; HLA -A*25:01,HLA-A*26:01,HLA-A*33:01
DALIGIYPEY

SEQ ID NO: 9291 - protein, 8 aa, Homo sapiens
  Table 1.2; SMC1B; ENSG00000077935; HLA -A*33:01,HLA-B*27:02
DAQFNFNK

SEQ ID NO: 9292 - protein, 9 aa, Homo sapiens
  Table 1.2; SMC1B; ENSG00000077935; HLA -A*33:01,HLA-A*68:01
DAQFNFNKK

SEQ ID NO: 9293 - protein, 10 aa, Homo sapiens
  Table 1.2; SMC1B; ENSG00000077935; HLA -A*33:01
DCIRFLKEER

SEQ ID NO: 9294 - protein, 8 aa, Homo sapiens
  Table 1.2; SMC1B; ENSG00000077935; HLA -B*18:01
DDIIEVEM

SEQ ID NO: 9295 - protein, 8 aa, Homo sapiens
  Table 1.2; SMC1B; ENSG00000077935; HLA -B*18:01
DEKELKNL

SEQ ID NO: 9296 - protein, 9 aa, Homo sapiens
  Table 1.2; SMC1B; ENSG00000077935; HLA -B*08:01
DIKALETEL

SEQ ID NO: 9297 - protein, 8 aa, Homo sapiens
  Table 1.2; SMC1B; ENSG00000077935; HLA -A*33:01,HLA-A*33:03
DIKPINER

SEQ ID NO: 9298 - protein, 9 aa, Homo sapiens
  Table 1.2; SMC1B; ENSG00000077935; HLA -B*08:01
DIKPINERL

SEQ ID NO: 9299 - protein, 10 aa, Homo sapiens
  Table 1.2; SMC1B; ENSG00000077935; HLA -A*33:01
DIKPINERLR

SEQ ID NO: 9300 - protein, 8 aa, Homo sapiens
  Table 1.2; SMC1B; ENSG00000077935; HLA -B*08:01
DILLKTAA

SEQ ID NO: 9301 - protein, 9 aa, Homo sapiens
  Table 1.2; SMC1B; ENSG00000077935; HLA -A*25:01,HLA-A*26:01,HLA-B*08:01,HLA-B*18:01,HLA-B*35:01
DIYEKEEAF

SEQ ID NO: 9302 - protein, 9 aa, Homo sapiens
  Table 1.2; SMC1B; ENSG00000077935; HLA -A*33:01
DLCHPIHKK

SEQ ID NO: 9303 - protein, 8 aa, Homo sapiens
  Table 1.2; SMC1B; ENSG00000077935; HLA -B*08:01
DLKQIQTL

SEQ ID NO: 9304 - protein, 9 aa, Homo sapiens
  Table 1.2; SMC1B; ENSG00000077935; HLA -B*08:01
DLSVKRESL

SEQ ID NO: 9305 - protein, 9 aa, Homo sapiens
  Table 1.2; SMC1B; ENSG00000077935; HLA -B*18:01
DNLVSRSVY

SEQ ID NO: 9306 - protein, 11 aa, Homo sapiens
  Table 1.2; SMC1B; ENSG00000077935; HLA -A*25:01,HLA-A*26:01
DNTNIGKVSSY

SEQ ID NO: 9307 - protein, 9 aa, Homo sapiens
  Table 1.2; SMC1B; ENSG00000077935; HLA -A*33:01
DQEIEAHLR

SEQ ID NO: 9308 - protein, 8 aa, Homo sapiens
  Table 1.2; SMC1B; ENSG00000077935; HLA -B*51:01
DQFQMIVI

SEQ ID NO: 9309 - protein, 10 aa, Homo sapiens
  Table 1.2; SMC1B; ENSG00000077935; HLA -A*68:01
DTEGQESSKR

SEQ ID NO: 9310 - protein, 10 aa, Homo sapiens
  Table 1.2; SMC1B; ENSG00000077935; HLA -A*25:01,HLA-A*26:01,HLA-A*68:01
DVIKTQFPQL

SEQ ID NO: 9311 - protein, 11 aa, Homo sapiens
  Table 1.2; SMC1B; ENSG00000077935; HLA -A*33:01,HLA-A*33:03
DYLDIKPINER

SEQ ID NO: 9312 - protein, 9 aa, Homo sapiens
  Table 1.2; SMC1B; ENSG00000077935; HLA -B*51:01
EAESTQATI

SEQ ID NO: 9313 - protein, 10 aa, Homo sapiens
  Table 1.2; SMC1B; ENSG00000077935; HLA -A*25:01,HLA-A*26:01,HLA-A*68:01,HLA-A*68:02,HLA-B*35:01, HLA-B*35:03
EAFEIDYSSL

SEQ ID NO: 9314 - protein, 8 aa, Homo sapiens
  Table 1.2; SMC1B; ENSG00000077935; HLA -B*08:01
EAHLRLLL

SEQ ID NO: 9315 - protein, 9 aa, Homo sapiens
  Table 1.2; SMC1B; ENSG00000077935; HLA -B*27:02
EDAQFNFNK

SEQ ID NO: 9316 - protein, 10 aa, Homo sapiens
  Table 1.2; SMC1B; ENSG00000077935; HLA -A*68:01
EDAQFNFNKK

SEQ ID NO: 9317 - protein, 9 aa, Homo sapiens
  Table 1.2; SMC1B; ENSG00000077935; HLA -A*25:01,HLA-A*30:01,HLA-B*08:01,HLA-B*18:01,HLA-B*37:01, HLA-B*40:01,HLA-B*44:02,HLA-B*44:03,HLA-C*16:04
EEAERYQSL

SEQ ID NO: 9318 - protein, 8 aa, Homo sapiens
  Table 1.2; SMC1B; ENSG00000077935; HLA -B*18:01
EEAFEIDY

SEQ ID NO: 9319 - protein, 8 aa, Homo sapiens
  Table 1.2; SMC1B; ENSG00000077935; HLA -B*18:01,HLA-B*37:01
EEARHIAL

SEQ ID NO: 9320 - protein, 8 aa, Homo sapiens
  Table 1.2; SMC1B; ENSG00000077935; HLA -B*18:01,HLA-B*44:02,HLA-B*44:03
EEDAQFNF

SEQ ID NO: 9321 - protein, 10 aa, Homo sapiens
  Table 1.2; SMC1B; ENSG00000077935; HLA -A*30:01,HLA-B*40:01
EEFYSRADAL

SEQ ID NO: 9322 - protein, 8 aa, Homo sapiens
  Table 1.2; SMC1B; ENSG00000077935; HLA -B*18:01,HLA-B*49:01
EEIGVENI

SEQ ID NO: 9323 - protein, 11 aa, Homo sapiens
  Table 1.2; SMC1B; ENSG00000077935; HLA -A*25:01,HLA-A*26:01,HLA-A*30:01,HLA-B*18:01,HLA-B*27:02, HLA-B*44:02,HLA-B*44:03,HLA-C*16:04
EEIGVENIREF

SEQ ID NO: 9324 - protein, 9 aa, Homo sapiens
  Table 1.2; SMC1B; ENSG00000077935; HLA -A*30:01,HLA-B*40:01,HLA-B*44:02,HLA-B*44:03
EEISTSGEL

SEQ ID NO: 9325 - protein, 10 aa, Homo sapiens
  Table 1.2; SMC1B; ENSG00000077935; HLA -B*40:01,HLA-B*44:02,HLA-B*44:03,HLA-B*49:01
EEISTSGELI

SEQ ID NO: 9326 - protein, 10 aa, Homo sapiens
  Table 1.2; SMC1B; ENSG00000077935; HLA -B*40:01
EELKMNKIQL

SEQ ID NO: 9327 - protein, 10 aa, Homo sapiens
  Table 1.2; SMC1B; ENSG00000077935; HLA -A*30:01,HLA-B*18:01,HLA-B*40:01,HLA-B*44:02,HLA-B*44:03
EELNLIRSEL

SEQ ID NO: 9328 - protein, 10 aa, Homo sapiens
  Table 1.2; SMC1B; ENSG00000077935; HLA -B*18:01,HLA-B*44:02,HLA-B*44:03
EEPYLEGISY

SEQ ID NO: 9329 - protein, 9 aa, Homo sapiens
  Table 1.2; SMC1B; ENSG00000077935; HLA -B*18:01,HLA-B*44:02,HLA-B*44:03
EERAEPETF

SEQ ID NO: 9330 - protein, 9 aa, Homo sapiens
  Table 1.2; SMC1B; ENSG00000077935; HLA -B*44:02,HLA-B*44:03
EESGEEKTF

SEQ ID NO: 9331 - protein, 8 aa, Homo sapiens
  Table 1.2; SMC1B; ENSG00000077935; HLA -B*18:01,HLA-B*49:01
EETLVDEI

SEQ ID NO: 9332 - protein, 8 aa, Homo sapiens
  Table 1.2; SMC1B; ENSG00000077935; HLA -B*08:01,HLA-B*18:01
EEYTKTCM

SEQ ID NO: 9333 - protein, 9 aa, Homo sapiens
  Table 1.2; SMC1B; ENSG00000077935; HLA -A*33:01,HLA-A*33:03
EFENKHVKR

SEQ ID NO: 9334 - protein, 10 aa, Homo sapiens
  Table 1.2; SMC1B; ENSG00000077935; HLA -A*33:03
EFNEELNLIR

SEQ ID NO: 9335 - protein, 11 aa, Homo sapiens
  Table 1.2; SMC1B; ENSG00000077935; HLA -A*33:01
EFRFNDNLVSR

SEQ ID NO: 9336 - protein, 9 aa, Homo sapiens
  Table 1.2; SMC1B; ENSG00000077935; HLA -B*08:01
EFYSRADAL

SEQ ID NO: 9337 - protein, 9 aa, Homo sapiens
  Table 1.2; SMC1B; ENSG00000077935; HLA -B*38:01
EHGMLTRQL

SEQ ID NO: 9338 - protein, 9 aa, Homo sapiens
  Table 1.2; SMC1B; ENSG00000077935; HLA -B*38:01,HLA-B*39:01
EHVNRDLSV

SEQ ID NO: 9339 - protein, 10 aa, Homo sapiens
  Table 1.2; SMC1B; ENSG00000077935; HLA -B*38:01
EHVSISIDQI

SEQ ID NO: 9340 - protein, 9 aa, Homo sapiens
  Table 1.2; SMC1B; ENSG00000077935; HLA -A*01:01
EIDQKRYFY

SEQ ID NO: 9341 - protein, 10 aa, Homo sapiens
  Table 1.2; SMC1B; ENSG00000077935; HLA -A*25:01
EIGVENIREF

SEQ ID NO: 9342 - protein, 9 aa, Homo sapiens
  Table 1.2; SMC1B; ENSG00000077935; HLA -A*25:01
EIILLSGSL

SEQ ID NO: 9343 - protein, 9 aa, Homo sapiens
  Table 1.2; SMC1B; ENSG00000077935; HLA -A*68:02
EKIGIIVKA

SEQ ID NO: 9344 - protein, 9 aa, Homo sapiens
  Table 1.2; SMC1B; ENSG00000077935; HLA -A*25:01
ELADLDAAW

SEQ ID NO: 9345 - protein, 10 aa, Homo sapiens
  Table 1.2; SMC1B; ENSG00000077935; HLA -A*01:01
ELEASQLDRY

SEQ ID NO: 9346 - protein, 9 aa, Homo sapiens
  Table 1.2; SMC1B; ENSG00000077935; HLA -A*33:01,HLA-A*33:03,HLA-A*68:01
ELIGEYEEK

SEQ ID NO: 9347 - protein, 9 aa, Homo sapiens
  Table 1.2; SMC1B; ENSG00000077935; HLA -B*08:01
ELKMNKIQL

SEQ ID NO: 9348 - protein, 9 aa, Homo sapiens
  Table 1.2; SMC1B; ENSG00000077935; HLA -A*25:01,HLA-A*26:01,HLA-B*08:01
ELMAKQQQL

SEQ ID NO: 9349 - protein, 9 aa, Homo sapiens
  Table 1.2; SMC1B; ENSG00000077935; HLA -B*08:01
ELNLIRSEL

SEQ ID NO: 9350 - protein, 9 aa, Homo sapiens
  Table 1.2; SMC1B; ENSG00000077935; HLA -A*25:01,HLA-A*26:01,HLA-B*15:03,HLA-B*18:01,HLA-B*35:01, HLA-B*35:03,HLA-B*55:01,HLA-C*03:03
EPYLEGISY

SEQ ID NO: 9351 - protein, 9 aa, Homo sapiens
  Table 1.2; SMC1B; ENSG00000077935; HLA -B*39:01
EQSQLQSEL

SEQ ID NO: 9352 - protein, 10 aa, Homo sapiens
  Table 1.2; SMC1B; ENSG00000077935; HLA -B*38:01
EQSQLQSELL

SEQ ID NO: 9353 - protein, 9 aa, Homo sapiens
  Table 1.2; SMC1B; ENSG00000077935; HLA -B*38:01,HLA-B*39:01
ERAEPETFL

SEQ ID NO: 9354 - protein, 9 aa, Homo sapiens
  Table 1.2; SMC1B; ENSG00000077935; HLA -A*33:01,HLA-A*33:03
ESISVKKPK

SEQ ID NO: 9355 - protein, 10 aa, Homo sapiens
  Table 1.2; SMC1B; ENSG00000077935; HLA -A*33:01,HLA-A*33:03,HLA-A*68:01,HLA-C*07:06
ESTDAFEASR

SEQ ID NO: 9356 - protein, 11 aa, Homo sapiens
  Table 1.2; SMC1B; ENSG00000077935; HLA -A*33:03
ETLVDEIEKTK

SEQ ID NO: 9357 - protein, 9 aa, Homo sapiens
  Table 1.2; SMC1B; ENSG00000077935; HLA -A*25:01,HLA-A*26:01
ETMEEARHI

SEQ ID NO: 9358 - protein, 11 aa, Homo sapiens
  Table 1.2; SMC1B; ENSG00000077935; HLA -A*25:01,HLA-A*33:03,HLA-A*68:01,HLA-A*68:02
ETMEEARHIAL

SEQ ID NO: 9359 - protein, 9 aa, Homo sapiens
  Table 1.2; SMC1B; ENSG00000077935; HLA -A*25:01
EVQGNLKQI

SEQ ID NO: 9360 - protein, 9 aa, Homo sapiens
  Table 1.2; SMC1B; ENSG00000077935; HLA -A*23:01,HLA-A*25:01,HLA-A*26:01,HLA-A*33:03,HLA-A*68:01, HLA-A*68:02,HLA-B*35:01,HLA-B*35:03,HLA-C*07:06
EVVSIQTSL

SEQ ID NO: 9361 - protein, 10 aa, Homo sapiens
  Table 1.2; SMC1B; ENSG00000077935; HLA -A*26:01
EVVSIQTSLE

SEQ ID NO: 9362 - protein, 9 aa, Homo sapiens
  Table 1.2; SMC1B; ENSG00000077935; HLA -A*33:03
EYDDCMFSR

SEQ ID NO: 9363 - protein, 10 aa, Homo sapiens
  Table 1.2; SMC1B; ENSG00000077935; HLA -B*40:01
FEEISTSGEL

SEQ ID NO: 9364 - protein, 11 aa, Homo sapiens
  Table 1.2; SMC1B; ENSG00000077935; HLA -B*38:01,HLA-B*40:01,HLA-B*49:01
FEEISTSGELI

SEQ ID NO: 9365 - protein, 8 aa, Homo sapiens
  Table 1.2; SMC1B; ENSG00000077935; HLA -A*30:01,HLA-B*18:01,HLA-B*40:01,HLA-B*49:01
FEHVSISI

SEQ ID NO: 9366 - protein, 8 aa, Homo sapiens
  Table 1.2; SMC1B; ENSG00000077935; HLA -A*30:01,HLA-B*49:01
FEIDYSSL

SEQ ID NO: 9367 - protein, 9 aa, Homo sapiens
  Table 1.2; SMC1B; ENSG00000077935; HLA -B*49:01
FEIDYSSLK

SEQ ID NO: 9368 - protein, 9 aa, Homo sapiens
  Table 1.2; SMC1B; ENSG00000077935; HLA -A*30:01,HLA-B*40:01,HLA-B*49:01
FEKQIEEEI

SEQ ID NO: 9369 - protein, 10 aa, Homo sapiens
  Table 1.2; SMC1B; ENSG00000077935; HLA -B*40:01
FEKQIEEEIL

SEQ ID NO: 9370 - protein, 10 aa, Homo sapiens
  Table 1.2; SMC1B; ENSG00000077935; HLA -A*02:03
FLKSGVISGG

SEQ ID NO: 9371 - protein, 11 aa, Homo sapiens
  Table 1.2; SMC1B; ENSG00000077935; HLA -A*01:01
FLSPENPEEPY

SEQ ID NO: 9372 - protein, 8 aa, Homo sapiens
  Table 1.2; SMC1B; ENSG00000077935; HLA -A*33:03
FNDNLVSR

SEQ ID NO: 9373 - protein, 11 aa, Homo sapiens
  Table 1.2; SMC1B; ENSG00000077935; HLA -A*01:01
FNDNLVSRSVY

SEQ ID NO: 9374 - protein, 8 aa, Homo sapiens
  Table 1.2; SMC1B; ENSG00000077935; HLA -B*08:01
FPQLKKVI

SEQ ID NO: 9375 - protein, 8 aa, Homo sapiens
  Table 1.2; SMC1B; ENSG00000077935; HLA -B*39:01
FQESTDAF

SEQ ID NO: 9376 - protein, 8 aa, Homo sapiens
  Table 1.2; SMC1B; ENSG00000077935; HLA -B*13:02
FQGTVESI

SEQ ID NO: 9377 - protein, 8 aa, Homo sapiens
  Table 1.2; SMC1B; ENSG00000077935; HLA -B*13:02,HLA-B*15:01
FQMIVISL

SEQ ID NO: 9378 - protein, 10 aa, Homo sapiens
  Table 1.2; SMC1B; ENSG00000077935; HLA -A*02:01,HLA-B*35:03
FVLDEVDAAL

SEQ ID NO: 9379 - protein, 10 aa, Homo sapiens
  Table 1.2; SMC1B; ENSG00000077935; HLA -A*02:01,HLA-A*02:03,HLA-A*02:04,HLA-A*02:07,HLA-A*25:01, HLA-A*26:01,HLA-A*33:03,HLA-A*68:02
FVMGEKIANL

SEQ ID NO: 9380 - protein, 8 aa, Homo sapiens
  Table 1.2; SMC1B; ENSG00000077935; HLA -C*14:02
FYQEQSQL

SEQ ID NO: 9381 - protein, 9 aa, Homo sapiens
  Table 1.2; SMC1B; ENSG00000077935; HLA -B*40:01,HLA-B*44:03,HLA-B*49:01
GEEKTFARI

SEQ ID NO: 9382 - protein, 10 aa, Homo sapiens
  Table 1.2; SMC1B; ENSG00000077935; HLA -B*49:01
GEEKTFARII

SEQ ID NO: 9383 - protein, 9 aa, Homo sapiens
  Table 1.2; SMC1B; ENSG00000077935; HLA -B*49:01
GEKIANLRV

SEQ ID NO: 9384 - protein, 10 aa, Homo sapiens
  Table 1.2; SMC1B; ENSG00000077935; HLA -B*27:02
GELIGEYEEK

SEQ ID NO: 9385 - protein, 10 aa, Homo sapiens
  Table 1.2; SMC1B; ENSG00000077935; HLA -A*30:01,HLA-B*44:02,HLA-B*44:03,HLA-B*49:01
GEVQGNLKQI

SEQ ID NO: 9386 - protein, 9 aa, Homo sapiens
  Table 1.2; SMC1B; ENSG00000077935; HLA -B*15:03
GKSNVMDAL

SEQ ID NO: 9387 - protein, 10 aa, Homo sapiens
  Table 1.2; SMC1B; ENSG00000077935; HLA -B*07:02,HLA-C*07:02
GPERQKTVAL

SEQ ID NO: 9388 - protein, 11 aa, Homo sapiens
  Table 1.2; SMC1B; ENSG00000077935; HLA -B*07:02
GPNGSGKSNVM

SEQ ID NO: 9389 - protein, 9 aa, Homo sapiens
  Table 1.2; SMC1B; ENSG00000077935; HLA -B*27:05
GRFITAIVV

SEQ ID NO: 9390 - protein, 9 aa, Homo sapiens
  Table 1.2; SMC1B; ENSG00000077935; HLA -B*27:05
GRQVIGPFR

SEQ ID NO: 9391 - protein, 9 aa, Homo sapiens
  Table 1.2; SMC1B; ENSG00000077935; HLA -A*03:02,HLA-A*11:01
GSEDIDHLK

SEQ ID NO: 9392 - protein, 10 aa, Homo sapiens
  Table 1.2; SMC1B; ENSG00000077935; HLA -A*01:01,HLA-A*11:01
GSEDIDHLKK

SEQ ID NO: 9393 - protein, 9 aa, Homo sapiens
  Table 1.2; SMC1B; ENSG00000077935; HLA -A*02:01,HLA-A*02:04
GSLDDIIEV

SEQ ID NO: 9394 - protein, 8 aa, Homo sapiens
  Table 1.2; SMC1B; ENSG00000077935; HLA -A*32:01
GTQTRLKY

SEQ ID NO: 9395 - protein, 9 aa, Homo sapiens
  Table 1.2; SMC1B; ENSG00000077935; HLA -A*03:01,HLA-A*03:02,HLA-A*11:01,HLA-A*68:01,HLA-C*07:06
GTVESISVK

SEQ ID NO: 9396 - protein, 10 aa, Homo sapiens
  Table 1.2; SMC1B; ENSG00000077935; HLA -A*03:01,HLA-A*03:02,HLA-A*11:01,HLA-A*68:01,HLA-B*27:02, HLA-C*07:06
GTVESISVKK

SEQ ID NO: 9397 - protein, 10 aa, Homo sapiens
  Table 1.2; SMC1B; ENSG00000077935; HLA -B*40:01
GVISGGSSDL

SEQ ID NO: 9398 - protein, 11 aa, Homo sapiens
  Table 1.2; SMC1B; ENSG00000077935; HLA -A*03:01,HLA-A*03:02,HLA-A*11:01,HLA-B*27:02
GVISGGSSDLK

SEQ ID NO: 9399 - protein, 8 aa, Homo sapiens
  Table 1.2; SMC1B; ENSG00000077935; HLA -B*18:01,HLA-B*37:01
HENIVKAR

SEQ ID NO: 9400 - protein, 8 aa, Homo sapiens
  Table 1.2; SMC1B; ENSG00000077935; HLA -B*08:01
HGMLTRQL

SEQ ID NO: 9401 - protein, 9 aa, Homo sapiens
  Table 1.2; SMC1B; ENSG00000077935; HLA -A*68:01
HIALSGPER

SEQ ID NO: 9402 - protein, 10 aa, Homo sapiens
  Table 1.2; SMC1B; ENSG00000077935; HLA -A*02:04
HLLNTKLEHV

SEQ ID NO: 9403 - protein, 9 aa, Homo sapiens
  Table 1.2; SMC1B; ENSG00000077935; HLA -A*02:03
HLRLLLQQV

SEQ ID NO: 9404 - protein, 9 aa, Homo sapiens
  Table 1.2; SMC1B; ENSG00000077935; HLA -B*08:01
HPIHKKYQL

SEQ ID NO: 9405 - protein, 9 aa, Homo sapiens
  Table 1.2; SMC1B; ENSG00000077935; HLA -B*57:01
HSFRPAPFF

SEQ ID NO: 9406 - protein, 9 aa, Homo sapiens
  Table 1.2; SMC1B; ENSG00000077935; HLA -A*03:01,HLA-A*03:02
HVNRDLSVK

SEQ ID NO: 9407 - protein, 9 aa, Homo sapiens
  Table 1.2; SMC1B; ENSG00000077935; HLA -B*38:01
HVSISIDQI

SEQ ID NO: 9408 - protein, 10 aa, Homo sapiens
  Table 1.2; SMC1B; ENSG00000077935; HLA -B*35:01
HVSISIDQIY

SEQ ID NO: 9409 - protein, 11 aa, Homo sapiens
  Table 1.2; SMC1B; ENSG00000077935; HLA -A*03:02,HLA-A*11:01
HVSISIDQIYK

SEQ ID NO: 9410 - protein, 9 aa, Homo sapiens
  Table 1.2; SMC1B; ENSG00000077935; HLA -B*51:01
IANLRVKNI

SEQ ID NO: 9411 - protein, 8 aa, Homo sapiens
  Table 1.2; SMC1B; ENSG00000077935; HLA -B*37:01
IDQIYKKL

SEQ ID NO: 9412 - protein, 8 aa, Homo sapiens
  Table 1.2; SMC1B; ENSG00000077935; HLA -B*18:01,HLA-B*37:01
IDVIKTQF

SEQ ID NO: 9413 - protein, 10 aa, Homo sapiens
  Table 1.2; SMC1B; ENSG00000077935; HLA -A*30:01,HLA-B*40:01
IEIILLSGSL

SEQ ID NO: 9414 - protein, 8 aa, Homo sapiens
  Table 1.2; SMC1B; ENSG00000077935; HLA -A*30:01,HLA-B*18:01,HLA-B*37:01,HLA-B*40:01,HLA-B*49:01
IELEASQL

SEQ ID NO: 9415 - protein, 11 aa, Homo sapiens
  Table 1.2; SMC1B; ENSG00000077935; HLA -A*30:02,HLA-B*18:01,HLA-B*44:02,HLA-B*44:03
IELEASQLDRY

SEQ ID NO: 9416 - protein, 9 aa, Homo sapiens
  Table 1.2; SMC1B; ENSG00000077935; HLA -A*30:01,HLA-B*18:01,HLA-B*40:01,HLA-B*40:02,HLA-B*49:01
IEVEMGTEA

SEQ ID NO: 9417 - protein, 9 aa, Homo sapiens
  Table 1.2; SMC1B; ENSG00000077935; HLA -A*32:01,HLA-B*46:01
IGKPISSSA

SEQ ID NO: 9418 - protein, 9 aa, Homo sapiens
  Table 1.2; SMC1B; ENSG00000077935; HLA -B*46:01,HLA-B*58:01,HLA-C*16:01
IGVENIREF

SEQ ID NO: 9419 - protein, 9 aa, Homo sapiens
  Table 1.2; SMC1B; ENSG00000077935; HLA -A*03:01,HLA-A*03:02
IIGPNGSGK

SEQ ID NO: 9420 - protein, 9 aa, Homo sapiens
  Table 1.2; SMC1B; ENSG00000077935; HLA -B*46:01
IIRGGCSEF

SEQ ID NO: 9421 - protein, 11 aa, Homo sapiens
  Table 1.2; SMC1B; ENSG00000077935; HLA -A*03:01,HLA-A*03:02,HLA-B*27:02
IIYVEESGEEK

SEQ ID NO: 9422 - protein, 9 aa, Homo sapiens
  Table 1.2; SMC1B; ENSG00000077935; HLA -B*15:03
IKEQTQDQF

SEQ ID NO: 9423 - protein, 10 aa, Homo sapiens
  Table 1.2; SMC1B; ENSG00000077935; HLA -B*38:01
IQELIHGAHI

SEQ ID NO: 9424 - protein, 9 aa, Homo sapiens
  Table 1.2; SMC1B; ENSG00000077935; HLA -A*03:01,HLA-A*03:02
IQGTQTRLK

SEQ ID NO: 9425 - protein, 10 aa, Homo sapiens
  Table 1.2; SMC1B; ENSG00000077935; HLA -A*30:02,HLA-A*32:01
IQGTQTRLKY

SEQ ID NO: 9426 - protein, 9 aa, Homo sapiens
  Table 1.2; SMC1B; ENSG00000077935; HLA -A*29:02,HLA-A*30:02
IQLQLFQLY

SEQ ID NO: 9427 - protein, 10 aa, Homo sapiens
  Table 1.2; SMC1B; ENSG00000077935; HLA -A*01:01,HLA-A*30:02
ISGGSSDLKY

SEQ ID NO: 9428 - protein, 11 aa, Homo sapiens
  Table 1.2; SMC1B; ENSG00000077935; HLA -A*03:02
ISGGSSDLKYK

SEQ ID NO: 9429 - protein, 8 aa, Homo sapiens
  Table 1.2; SMC1B; ENSG00000077935; HLA -A*11:01
ISIDQIYK

SEQ ID NO: 9430 - protein, 9 aa, Homo sapiens
  Table 1.2; SMC1B; ENSG00000077935; HLA -A*03:02,HLA-A*11:01
ISIDQIYKK

SEQ ID NO: 9431 - protein, 10 aa, Homo sapiens
  Table 1.2; SMC1B; ENSG00000077935; HLA -B*57:01
ISIDQIYKKL

SEQ ID NO: 9432 - protein, 10 aa, Homo sapiens
  Table 1.2; SMC1B; ENSG00000077935; HLA -B*57:01
ISLKEEFYSR

SEQ ID NO: 9433 - protein, 11 aa, Homo sapiens
  Table 1.2; SMC1B; ENSG00000077935; HLA -A*30:02
ISSSASVKIIY

SEQ ID NO: 9434 - protein, 11 aa, Homo sapiens
  Table 1.2; SMC1B; ENSG00000077935; HLA -A*01:01,HLA-A*30:02,HLA-B*58:01
ISTSGELIGEY

SEQ ID NO: 9435 - protein, 10 aa, Homo sapiens
  Table 1.2; SMC1B; ENSG00000077935; HLA -A*03:01,HLA-A*03:02,HLA-B*27:02
ITAIVVASEK

SEQ ID NO: 9436 - protein, 11 aa, Homo sapiens
  Table 1.2; SMC1B; ENSG00000077935; HLA -A*68:02
ITAIVVASEKV

SEQ ID NO: 9437 - protein, 9 aa, Homo sapiens
  Table 1.2; SMC1B; ENSG00000077935; HLA -A*23:01,HLA-A*24:02,HLA-A*25:01,HLA-A*26:01,HLA-A*29:02, HLA-A*30:02,HLA-A*32:01,HLA-B*15:01,HLA-B*35:01,HLA-B*46:01, HLA-B*57:01,HLA-B*58:01
IVISLKEEF

SEQ ID NO: 9438 - protein, 10 aa, Homo sapiens
  Table 1.2; SMC1B; ENSG00000077935; HLA -A*29:02,HLA-A*30:02
IVISLKEEFY

SEQ ID NO: 9439 - protein, 10 aa, Homo sapiens
  Table 1.2; SMC1B; ENSG00000077935; HLA -A*03:02,HLA-A*11:01
IVVASEKVAK

SEQ ID NO: 9440 - protein, 10 aa, Homo sapiens
  Table 1.2; SMC1B; ENSG00000077935; HLA -B*27:02
IYVEESGEEK

SEQ ID NO: 9441 - protein, 10 aa, Homo sapiens
  Table 1.2; SMC1B; ENSG00000077935; HLA -B*58:01
KAEEDAQFNF

SEQ ID NO: 9442 - protein, 10 aa, Homo sapiens
  Table 1.2; SMC1B; ENSG00000077935; HLA -B*37:01,HLA-B*40:01
KEEAERYQSL

SEQ ID NO: 9443 - protein, 10 aa, Homo sapiens
  Table 1.2; SMC1B; ENSG00000077935; HLA -B*40:01
KEERAEPETF

SEQ ID NO: 9444 - protein, 11 aa, Homo sapiens
  Table 1.2; SMC1B; ENSG00000077935; HLA -B*40:01
KEERAEPETFL

SEQ ID NO: 9445 - protein, 10 aa, Homo sapiens
  Table 1.2; SMC1B; ENSG00000077935; HLA -A*30:01,HLA-B*40:01,HLA-B*40:02
KEKKQQEETL

SEQ ID NO: 9446 - protein, 9 aa, Homo sapiens
  Table 1.2; SMC1B; ENSG00000077935; HLA -A*30:01,HLA-B*37:01,HLA-B*40:01,HLA-B*40:02,HLA-B*49:01
KELKSVETL

SEQ ID NO: 9447 - protein, 10 aa, Homo sapiens
  Table 1.2; SMC1B; ENSG00000077935; HLA -B*40:01
KELKSVETLL

SEQ ID NO: 9448 - protein, 8 aa, Homo sapiens
  Table 1.2; SMC1B; ENSG00000077935; HLA -B*37:01
KENTSHHL

SEQ ID NO: 9449 - protein, 10 aa, Homo sapiens
  Table 1.2; SMC1B; ENSG00000077935; HLA -A*30:01,HLA-B*40:01
KEQTQDQFQM

SEQ ID NO: 9450 - protein, 11 aa, Homo sapiens
  Table 1.2; SMC1B; ENSG00000077935; HLA -A*30:01,HLA-B*40:01,HLA-B*44:02,HLA-B*44:03
KETDLKQIQTL

SEQ ID NO: 9451 - protein, 10 aa, Homo sapiens
  Table 1.2; SMC1B; ENSG00000077935; HLA -A*30:01,HLA-B*40:01,HLA-B*40:02
KEVVSIQTSL

SEQ ID NO: 9452 - protein, 9 aa, Homo sapiens
  Table 1.2; SMC1B; ENSG00000077935; HLA -A*23:01,HLA-A*24:02,HLA-A*32:01,HLA-C*14:02
KFQESTDAF

SEQ ID NO: 9453 - protein, 10 aa, Homo sapiens
  Table 1.2; SMC1B; ENSG00000077935; HLA -A*03:02,HLA-A*11:01
KGSEDIDHLK

SEQ ID NO: 9454 - protein, 9 aa, Homo sapiens
  Table 1.2; SMC1B; ENSG00000077935; HLA -A*32:01,HLA-B*58:01
KINTLKETI

SEQ ID NO: 9455 - protein, 11 aa, Homo sapiens
  Table 1.2; SMC1B; ENSG00000077935; HLA -A*03:01,HLA-A*03:02
KINTLKETIQK

SEQ ID NO: 9456 - protein, 10 aa, Homo sapiens
  Table 1.2; SMC1B; ENSG00000077935; HLA -A*03:01,HLA-A*03:02
KIQELKGLMK

SEQ ID NO: 9457 - protein, 9 aa, Homo sapiens
  Table 1.2; SMC1B; ENSG00000077935; HLA -A*02:04
KIQLQLFQL

SEQ ID NO: 9458 - protein, 9 aa, Homo sapiens
  Table 1.2; SMC1B; ENSG00000077935; HLA -A*03:01,HLA-A*03:02
KLNKINTLK

SEQ ID NO: 9459 - protein, 9 aa, Homo sapiens
  Table 1.2; SMC1B; ENSG00000077935; HLA -A*02:01,HLA-A*02:03,HLA-A*02:04
KLQKEVVSI

SEQ ID NO: 9460 - protein, 9 aa, Homo sapiens
  Table 1.2; SMC1B; ENSG00000077935; HLA -A*03:01
KMNKIQLQL

SEQ ID NO: 9461 - protein, 9 aa, Homo sapiens
  Table 1.2; SMC1B; ENSG00000077935; HLA -B*07:02,HLA-B*55:01,HLA-B*56:01,HLA-C*07:02
KPISSSASV

SEQ ID NO: 9462 - protein, 10 aa, Homo sapiens
  Table 1.2; SMC1B; ENSG00000077935; HLA -A*11:01
KQIEEEILHK

SEQ ID NO: 9463 - protein, 11 aa, Homo sapiens
  Table 1.2; SMC1B; ENSG00000077935; HLA -A*11:01
KQIEEEILHKK

SEQ ID NO: 9464 - protein, 10 aa, Homo sapiens
  Table 1.2; SMC1B; ENSG00000077935; HLA -A*03:01,HLA-A*03:02,HLA-A*11:01,HLA-B*58:01
KSVETLLNQK

SEQ ID NO: 9465 - protein, 9 aa, Homo sapiens
  Table 1.2; SMC1B; ENSG00000077935; HLA -A*01:01,HLA-A*32:01,HLA-B*57:01,HLA-B*58:01,HLA-C*05:01
KTDEERLAF

SEQ ID NO: 9466 - protein, 9 aa, Homo sapiens
  Table 1.2; SMC1B; ENSG00000077935; HLA -A*03:01,HLA-A*03:02,HLA-A*11:01
KTQFPQLKK

SEQ ID NO: 9467 - protein, 9 aa, Homo sapiens
  Table 1.2; SMC1B; ENSG00000077935; HLA -B*58:01
KTVALDGTL

SEQ ID NO: 9468 - protein, 10 aa, Homo sapiens
  Table 1.2; SMC1B; ENSG00000077935; HLA -B*57:01,HLA-B*58:01
KTVALDGTLF

SEQ ID NO: 9469 - protein, 9 aa, Homo sapiens
  Table 1.2; SMC1B; ENSG00000077935; HLA -A*32:01,HLA-B*58:01
KVATMTQQL

SEQ ID NO: 9470 - protein, 11 aa, Homo sapiens
  Table 1.2; SMC1B; ENSG00000077935; HLA -A*03:01
KVATMTQQLEK

SEQ ID NO: 9471 - protein, 9 aa, Homo sapiens
  Table 1.2; SMC1B; ENSG00000077935; HLA -A*03:02
KVEDDIFQH

SEQ ID NO: 9472 - protein, 10 aa, Homo sapiens
  Table 1.2; SMC1B; ENSG00000077935; HLA -A*02:07,HLA-B*57:01,HLA-B*58:01
KVEDDIFQHF

SEQ ID NO: 9473 - protein, 10 aa, Homo sapiens
  Table 1.2; SMC1B; ENSG00000077935; HLA -A*02:03
KVFGRFITAI

SEQ ID NO: 9474 - protein, 10 aa, Homo sapiens
  Table 1.2; SMC1B; ENSG00000077935; HLA -A*02:04,HLA-A*02:07,HLA-A*03:02
KVQDIEIILL

SEQ ID NO: 9475 - protein, 10 aa, Homo sapiens
  Table 1.2; SMC1B; ENSG00000077935; HLA -A*31:01
KVQTQIEEER

SEQ ID NO: 9476 - protein, 11 aa, Homo sapiens
  Table 1.2; SMC1B; ENSG00000077935; HLA -A*03:02
KVQTQIEEERK

SEQ ID NO: 9477 - protein, 9 aa, Homo sapiens
  Table 1.2; SMC1B; ENSG00000077935; HLA -A*24:02
KYQLAVTKV

SEQ ID NO: 9478 - protein, 10 aa, Homo sapiens
  Table 1.2; SMC1B; ENSG00000077935; HLA -A*24:02
KYQLAVTKVF

SEQ ID NO: 9479 - protein, 9 aa, Homo sapiens
  Table 1.2; SMC1B; ENSG00000077935; HLA -B*18:01,HLA-B*44:02,HLA-B*44:03
LEASQLDRY

SEQ ID NO: 9480 - protein, 9 aa, Homo sapiens
  Table 1.2; SMC1B; ENSG00000077935; HLA -B*49:01
LEELKMNKI

SEQ ID NO: 9481 - protein, 9 aa, Homo sapiens
  Table 1.2; SMC1B; ENSG00000077935; HLA -B*49:01
LEGISYNCV

SEQ ID NO: 9482 - protein, 9 aa, Homo sapiens
  Table 1.2; SMC1B; ENSG00000077935; HLA -B*18:01,HLA-B*44:02,HLA-B*44:03
LEKEEAERY

SEQ ID NO: 9483 - protein, 9 aa, Homo sapiens
  Table 1.2; SMC1B; ENSG00000077935; HLA -B*18:01,HLA-B*37:01,HLA-B*44:02,HLA-B*44:03
LELLLVENF

SEQ ID NO: 9484 - protein, 8 aa, Homo sapiens
  Table 1.2; SMC1B; ENSG00000077935; HLA -B*18:01
LETELADL

SEQ ID NO: 9485 - protein, 10 aa, Homo sapiens
  Table 1.2; SMC1B; ENSG00000077935; HLA -A*03:02
LIQGTQTRLK

SEQ ID NO: 9486 - protein, 11 aa, Homo sapiens
  Table 1.2; SMC1B; ENSG00000077935; HLA -A*29:02
LIQGTQTRLKY

SEQ ID NO: 9487 - protein, 8 aa, Homo sapiens
  Table 1.2; SMC1B; ENSG00000077935; HLA -B*37:01
LLFAVHSF

SEQ ID NO: 9488 - protein, 9 aa, Homo sapiens
  Table 1.2; SMC1B; ENSG00000077935; HLA -A*02:03
LLKTAAPNL

SEQ ID NO: 9489 - protein, 9 aa, Homo sapiens
  Table 1.2; SMC1B; ENSG00000077935; HLA -A*32:01
LLNQKRPQY

SEQ ID NO: 9490 - protein, 9 aa, Homo sapiens
  Table 1.2; SMC1B; ENSG00000077935; HLA -A*02:01,HLA-A*02:03,HLA-A*02:04
LLNTKLEHV

SEQ ID NO: 9491 - protein, 9 aa, Homo sapiens
  Table 1.2; SMC1B; ENSG00000077935; HLA -A*25:01
LLVENFKSW

SEQ ID NO: 9492 - protein, 8 aa, Homo sapiens
  Table 1.2; SMC1B; ENSG00000077935; HLA -B*08:01
LNLIRSEL

SEQ ID NO: 9493 - protein, 10 aa, Homo sapiens
  Table 1.2; SMC1B; ENSG00000077935; HLA -B*15:01
LQKAEEDAQF

SEQ ID NO: 9494 - protein, 8 aa, Homo sapiens
  Table 1.2; SMC1B; ENSG00000077935; HLA -B*15:01
LQKEVVSI

SEQ ID NO: 9495 - protein, 11 aa, Homo sapiens
  Table 1.2; SMC1B; ENSG00000077935; HLA -B*27:05
LQSDQEIEAHL

SEQ ID NO: 9496 - protein, 10 aa, Homo sapiens
  Table 1.2; SMC1B; ENSG00000077935; HLA -A*01:01
LTRLNVQLEY

SEQ ID NO: 9497 - protein, 10 aa, Homo sapiens
  Table 1.2; SMC1B; ENSG00000077935; HLA -A*02:01,HLA-A*02:03,HLA-A*25:01,HLA-A*68:02,HLA-B*51:01
LVFQGTVESI

SEQ ID NO: 9498 - protein, 9 aa, Homo sapiens
  Table 1.2; SMC1B; ENSG00000077935; HLA -A*33:03
LYPDSVFGR

SEQ ID NO: 9499 - protein, 10 aa, Homo sapiens
  Table 1.2; SMC1B; ENSG00000077935; HLA -A*23:01,HLA-A*24:02
LYPDSVFGRL

SEQ ID NO: 9500 - protein, 11 aa, Homo sapiens
  Table 1.2; SMC1B; ENSG00000077935; HLA -A*24:02,HLA-A*29:02
LYPDSVFGRLF

SEQ ID NO: 9501 - protein, 8 aa, Homo sapiens
  Table 1.2; SMC1B; ENSG00000077935; HLA -A*30:01,HLA-B*18:01,HLA-B*37:01
MDALSFVM

SEQ ID NO: 9502 - protein, 9 aa, Homo sapiens
  Table 1.2; SMC1B; ENSG00000077935; HLA -A*30:01,HLA-B*08:01,HLA-B*18:01,HLA-B*37:01,HLA-B*40:01, HLA-B*40:02
MEEARHIAL

SEQ ID NO: 9503 - protein, 9 aa, Homo sapiens
  Table 1.2; SMC1B; ENSG00000077935; HLA -A*33:01,HLA-A*33:03
MLSEGIKER

SEQ ID NO: 9504 - protein, 9 aa, Homo sapiens
  Table 1.2; SMC1B; ENSG00000077935; HLA -A*02:01,HLA-A*02:04
MLTRLNVQL

SEQ ID NO: 9505 - protein, 9 aa, Homo sapiens
  Table 1.2; SMC1B; ENSG00000077935; HLA -B*56:01
MPMDNLSGG

SEQ ID NO: 9506 - protein, 11 aa, Homo sapiens
  Table 1.2; SMC1B; ENSG00000077935; HLA -B*35:01
MPMDNLSGGEK

SEQ ID NO: 9507 - protein, 10 aa, Homo sapiens
  Table 1.2; SMC1B; ENSG00000077935; HLA -B*57:01
MTQQLEKLQW

SEQ ID NO: 9508 - protein, 9 aa, Homo sapiens
  Table 1.2; SMC1B; ENSG00000077935; HLA -A*25:01,HLA-A*26:01
MVIDVIKTQ

SEQ ID NO: 9509 - protein, 10 aa, Homo sapiens
  Table 1.2; SMC1B; ENSG00000077935; HLA -A*23:01,HLA-A*25:01,HLA-A*26:01,HLA-A*32:01,HLA-A*68:01, HLA-B*15:01,HLA-B*35:01
MVIDVIKTQF

SEQ ID NO: 9510 - protein, 9 aa, Homo sapiens
  Table 1.2; SMC1B; ENSG00000077935; HLA -B*37:01
NDNLVSRSV

SEQ ID NO: 9511 - protein, 10 aa, Homo sapiens
  Table 1.2; SMC1B; ENSG00000077935; HLA -B*18:01
NDNLVSRSVY

SEQ ID NO: 9512 - protein, 8 aa, Homo sapiens
  Table 1.2; SMC1B; ENSG00000077935; HLA -B*18:01
NELEMIKK

SEQ ID NO: 9513 - protein, 10 aa, Homo sapiens
  Table 1.2; SMC1B; ENSG00000077935; HLA -A*30:01,HLA-B*40:01
NELMAKQQQL

SEQ ID NO: 9514 - protein, 9 aa, Homo sapiens
  Table 1.2; SMC1B; ENSG00000077935; HLA -A*02:04
NIQELIHGA

SEQ ID NO: 9515 - protein, 9 aa, Homo sapiens
  Table 1.2; SMC1B; ENSG00000077935; HLA -A*02:03
NLVSRSVYI

SEQ ID NO: 9516 - protein, 9 aa, Homo sapiens
  Table 1.2; SMC1B; ENSG00000077935; HLA -A*31:01,HLA-A*33:01,HLA-A*33:03,HLA-A*68:01
NTKLEHVNR

SEQ ID NO: 9517 - protein, 9 aa, Homo sapiens
  Table 1.2; SMC1B; ENSG00000077935; HLA -A*03:01,HLA-A*03:02,HLA-A*11:01,HLA-A*33:01
NTLKETIQK

SEQ ID NO: 9518 - protein, 10 aa, Homo sapiens
  Table 1.2; SMC1B; ENSG00000077935; HLA -A*25:01,HLA-A*26:01,HLA-A*30:02
NTNIGKVSSY

SEQ ID NO: 9519 - protein, 9 aa, Homo sapiens
  Table 1.2; SMC1B; ENSG00000077935; HLA -A*02:01,HLA-A*02:03,HLA-A*02:07,HLA-A*26:01,HLA-A*68:02
NVMDALSFV

SEQ ID NO: 9520 - protein, 8 aa, Homo sapiens
  Table 1.2; SMC1B; ENSG00000077935; HLA -C*14:02
PYLEGISY

SEQ ID NO: 9521 - protein, 9 aa, Homo sapiens
  Table 1.2; SMC1B; ENSG00000077935; HLA -B*27:02
QATIDIYEK

SEQ ID NO: 9522 - protein, 8 aa, Homo sapiens
  Table 1.2; SMC1B; ENSG00000077935; HLA -B*44:02
QEDDIKAL

SEQ ID NO: 9523 - protein, 9 aa, Homo sapiens
  Table 1.2; SMC1B; ENSG00000077935; HLA -B*49:01
QEDILLKTA

SEQ ID NO: 9524 - protein, 10 aa, Homo sapiens
  Table 1.2; SMC1B; ENSG00000077935; HLA -B*49:01
QEDILLKTAA

SEQ ID NO: 9525 - protein, 9 aa, Homo sapiens
  Table 1.2; SMC1B; ENSG00000077935; HLA -B*40:01,HLA-B*49:01
QEETLVDEI

SEQ ID NO: 9526 - protein, 11 aa, Homo sapiens
  Table 1.2; SMC1B; ENSG00000077935; HLA -B*27:02
QEETLVDEIEK

SEQ ID NO: 9527 - protein, 9 aa, Homo sapiens
  Table 1.2; SMC1B; ENSG00000077935; HLA -B*44:02,HLA-B*44:03
QEFEQVKKR

SEQ ID NO: 9528 - protein, 8 aa, Homo sapiens
  Table 1.2; SMC1B; ENSG00000077935; HLA -B*44:03
QEIDQKRY

SEQ ID NO: 9529 - protein, 9 aa, Homo sapiens
  Table 1.2; SMC1B; ENSG00000077935; HLA -B*44:02,HLA-B*44:03
QEIDQKRYF

SEQ ID NO: 9530 - protein, 10 aa, Homo sapiens
  Table 1.2; SMC1B; ENSG00000077935; HLA -B*44:02,HLA-B*44:03
QEIDQKRYFY

SEQ ID NO: 9531 - protein, 9 aa, Homo sapiens
  Table 1.2; SMC1B; ENSG00000077935; HLA -A*30:01,HLA-B*37:01,HLA-B*40:01,HLA-B*44:02,HLA-B*44:03, HLA-B*49:01
QEIEAHLRL

SEQ ID NO: 9532 - protein, 10 aa, Homo sapiens
  Table 1.2; SMC1B; ENSG00000077935; HLA -B*44:02,HLA-B*44:03
QEIEAHLRLL

SEQ ID NO: 9533 - protein, 11 aa, Homo sapiens
  Table 1.2; SMC1B; ENSG00000077935; HLA -B*44:02
QEIEAHLRLLL

SEQ ID NO: 9534 - protein, 9 aa, Homo sapiens
  Table 1.2; SMC1B; ENSG00000077935; HLA -B*37:01,HLA-B*49:01
QELIHGAHI

SEQ ID NO: 9535 - protein, 10 aa, Homo sapiens
  Table 1.2; SMC1B; ENSG00000077935; HLA -B*44:02,HLA-B*44:03
QELKGLMKTL

SEQ ID NO: 9536 - protein, 10 aa, Homo sapiens
  Table 1.2; SMC1B; ENSG00000077935; HLA -A*30:01,HLA-B*40:01
QEQSQLQSEL

SEQ ID NO: 9537 - protein, 11 aa, Homo sapiens
  Table 1.2; SMC1B; ENSG00000077935; HLA -A*30:01,HLA-B*40:01
QEQSQLQSELL

SEQ ID NO: 9538 - protein, 9 aa, Homo sapiens
  Table 1.2; SMC1B; ENSG00000077935; HLA -A*23:01
QFQMIVISL

SEQ ID NO: 9539 - protein, 9 aa, Homo sapiens
  Table 1.2; SMC1B; ENSG00000077935; HLA -C*16:01
QGTQTRLKY

SEQ ID NO: 9540 - protein, 9 aa, Homo sapiens
  Table 1.2; SMC1B; ENSG00000077935; HLA -A*01:01,HLA-A*03:02,HLA-A*11:01
QIEEEILHK

SEQ ID NO: 9541 - protein, 10 aa, Homo sapiens
  Table 1.2; SMC1B; ENSG00000077935; HLA -A*03:02
QIEEEILHKK

SEQ ID NO: 9542 - protein, 9 aa, Homo sapiens
  Table 1.2; SMC1B; ENSG00000077935; HLA -A*02:03
QLKKVIQFV

SEQ ID NO: 9543 - protein, 10 aa, Homo sapiens
  Table 1.2; SMC1B; ENSG00000077935; HLA -A*03:02
QLQQTEKELK

SEQ ID NO: 9544 - protein, 9 aa, Homo sapiens
  Table 1.2; SMC1B; ENSG00000077935; HLA -A*02:04
QLQSELLNI

SEQ ID NO: 9545 - protein, 9 aa, Homo sapiens
  Table 1.2; SMC1B; ENSG00000077935; HLA -B*13:02
QQVASQEDI

SEQ ID NO: 9546 - protein, 11 aa, Homo sapiens
  Table 1.2; SMC1B; ENSG00000077935; HLA -B*38:01
QQVASQEDILL

SEQ ID NO: 9547 - protein, 10 aa, Homo sapiens
  Table 1.2; SMC1B; ENSG00000077935; HLA -A*01:01
QSDQEIEAHL

SEQ ID NO: 9548 - protein, 11 aa, Homo sapiens
  Table 1.2; SMC1B; ENSG00000077935; HLA -A*01:01
QSDQEIEAHLR

SEQ ID NO: 9549 - protein, 10 aa, Homo sapiens
  Table 1.2; SMC1B; ENSG00000077935; HLA -A*33:03
QTLIQGTQTR

SEQ ID NO: 9550 - protein, 9 aa, Homo sapiens
  Table 1.2; SMC1B; ENSG00000077935; HLA -A*03:01,HLA-A*03:02,HLA-A*11:01,HLA-A*68:01
QTVNELMAK

SEQ ID NO: 9551 - protein, 11 aa, Homo sapiens
  Table 1.2; SMC1B; ENSG00000077935; HLA -A*03:01,HLA-A*03:02,HLA-A*11:01,HLA-A*68:01,HLA-B*27:02
QVASQEDILLK

SEQ ID NO: 9552 - protein, 9 aa, Homo sapiens
  Table 1.2; SMC1B; ENSG00000077935; HLA -B*08:01
QVRKKVATM

SEQ ID NO: 9553 - protein, 9 aa, Homo sapiens
  Table 1.2; SMC1B; ENSG00000077935; HLA -A*01:01
RADALIGIY

SEQ ID NO: 9554 - protein, 9 aa, Homo sapiens
  Table 1.2; SMC1B; ENSG00000077935; HLA -B*51:01,HLA-B*58:01,HLA-C*16:02
RALENLKTV

SEQ ID NO: 9555 - protein, 10 aa, Homo sapiens
  Table 1.2; SMC1B; ENSG00000077935; HLA -A*30:01,HLA-B*40:01
RDIELEASQL

SEQ ID NO: 9556 - protein, 9 aa, Homo sapiens
  Table 1.2; SMC1B; ENSG00000077935; HLA -A*31:01,HLA-A*33:01,HLA-A*33:03
RFNDNLVSR

SEQ ID NO: 9557 - protein, 9 aa, Homo sapiens
  Table 1.2; SMC1B; ENSG00000077935; HLA -B*38:01
RHGEVQGNL

SEQ ID NO: 9558 - protein, 8 aa, Homo sapiens
  Table 1.2; SMC1B; ENSG00000077935; HLA -A*03:01,HLA-A*30:02
RLNVQLEY

SEQ ID NO: 9559 - protein, 10 aa, Homo sapiens
  Table 1.2; SMC1B; ENSG00000077935; HLA -A*03:01,HLA-A*31:01
RLYPDSVFGR

SEQ ID NO: 9560 - protein, 11 aa, Homo sapiens
  Table 1.2; SMC1B; ENSG00000077935; HLA -A*02:03,HLA-A*02:04,HLA-A*02:07,HLA-A*03:01,HLA-A*31:01
RLYPDSVFGRL

SEQ ID NO: 9561 - protein, 9 aa, Homo sapiens
  Table 1.2; SMC1B; ENSG00000077935; HLA -A*02:01
RMSEFNEEL

SEQ ID NO: 9562 - protein, 9 aa, Homo sapiens
  Table 1.2; SMC1B; ENSG00000077935; HLA -A*03:02
RQEFEQVKK

SEQ ID NO: 9563 - protein, 10 aa, Homo sapiens
  Table 1.2; SMC1B; ENSG00000077935; HLA -A*30:02,HLA-B*15:01
RQQEIDQKRY

SEQ ID NO: 9564 - protein, 9 aa, Homo sapiens
  Table 1.2; SMC1B; ENSG00000077935; HLA -A*03:02
RSQKIQELK

SEQ ID NO: 9565 - protein, 10 aa, Homo sapiens
  Table 1.2; SMC1B; ENSG00000077935; HLA -A*29:02,HLA-A*30:02,HLA-B*57:01
RVLTLDLSQY

SEQ ID NO: 9566 - protein, 10 aa, Homo sapiens
  Table 1.2; SMC1B; ENSG00000077935; HLA -A*03:02
RVTQNSSAEK

SEQ ID NO: 9567 - protein, 9 aa, Homo sapiens
  Table 1.2; SMC1B; ENSG00000077935; HLA -A*24:02
RYDLFTQCF

SEQ ID NO: 9568 - protein, 9 aa, Homo sapiens
  Table 1.2; SMC1B; ENSG00000077935; HLA -A*23:01,HLA-A*24:02
RYQSLLEEL

SEQ ID NO: 9569 - protein, 9 aa, Homo sapiens
  Table 1.2; SMC1B; ENSG00000077935; HLA -B*51:01,HLA-B*58:01,HLA-C*05:01
SAEKVQTQI

SEQ ID NO: 9570 - protein, 8 aa, Homo sapiens
  Table 1.2; SMC1B; ENSG00000077935; HLA -C*16:01
SASVKIIY

SEQ ID NO: 9571 - protein, 9 aa, Homo sapiens
  Table 1.2; SMC1B; ENSG00000077935; HLA -A*02:03,HLA-A*02:04,HLA-A*68:02,HLA-C*02:02,HLA-C*12:03
SASVKIIYV

SEQ ID NO: 9572 - protein, 9 aa, Homo sapiens
  Table 1.2; SMC1B; ENSG00000077935; HLA -A*30:01,HLA-B*40:01,HLA-B*44:02,HLA-B*44:03,HLA-B*49:01
SEFNEELNL

SEQ ID NO: 9573 - protein, 10 aa, Homo sapiens
  Table 1.2; SMC1B; ENSG00000077935; HLA -A*30:01,HLA-B*40:01,HLA-B*44:03,HLA-B*49:01
SEFNEELNLI

SEQ ID NO: 9574 - protein, 9 aa, Homo sapiens
  Table 1.2; SMC1B; ENSG00000077935; HLA -A*30:01,HLA-B*40:01,HLA-B*44:03,HLA-B*49:01
SEFRFNDNL

SEQ ID NO: 9575 - protein, 10 aa, Homo sapiens
  Table 1.2; SMC1B; ENSG00000077935; HLA -B*49:01
SEFRFNDNLV

SEQ ID NO: 9576 - protein, 8 aa, Homo sapiens
  Table 1.2; SMC1B; ENSG00000077935; HLA -A*03:02,HLA-A*11:01
SIDQIYKK

SEQ ID NO: 9577 - protein, 9 aa, Homo sapiens
  Table 1.2; SMC1B; ENSG00000077935; HLA -A*02:07
SIDQIYKKL

SEQ ID NO: 9578 - protein, 9 aa, Homo sapiens
  Table 1.2; SMC1B; ENSG00000077935; HLA -A*03:02,HLA-A*11:01
SIQTSLEQK

SEQ ID NO: 9579 - protein, 9 aa, Homo sapiens
  Table 1.2; SMC1B; ENSG00000077935; HLA -A*03:01,HLA-A*03:02,HLA-A*11:01
SISIDQIYK

SEQ ID NO: 9580 - protein, 8 aa, Homo sapiens
  Table 1.2; SMC1B; ENSG00000077935; HLA -A*02:01,HLA-A*02:07,HLA-C*05:01
SLDDIIEV

SEQ ID NO: 9581 - protein, 10 aa, Homo sapiens
  Table 1.2; SMC1B; ENSG00000077935; HLA -A*02:01,HLA-A*02:07,HLA-B*38:01,HLA-B*55:01
SLDDIIEVEM

SEQ ID NO: 9582 - protein, 9 aa, Homo sapiens
  Table 1.2; SMC1B; ENSG00000077935; HLA -A*02:03,HLA-A*02:04,HLA-B*08:01,HLA-B*46:01
SLKEDLKAL

SEQ ID NO: 9583 - protein, 9 aa, Homo sapiens
  Table 1.2; SMC1B; ENSG00000077935; HLA -A*31:01,HLA-A*33:01,HLA-A*33:03
SLKEEFYSR

SEQ ID NO: 9584 - protein, 10 aa, Homo sapiens
  Table 1.2; SMC1B; ENSG00000077935; HLA -B*13:02
SQLQSELLNI

SEQ ID NO: 9585 - protein, 10 aa, Homo sapiens
  Table 1.2; SMC1B; ENSG00000077935; HLA -A*11:01
SQNELEMIKK

SEQ ID NO: 9586 - protein, 11 aa, Homo sapiens
  Table 1.2; SMC1B; ENSG00000077935; HLA -B*27:05
SQYPDTEGQES

SEQ ID NO: 9587 - protein, 9 aa, Homo sapiens
  Table 1.2; SMC1B; ENSG00000077935; HLA -B*27:05
SRADALIGI

SEQ ID NO: 9588 - protein, 10 aa, Homo sapiens
  Table 1.2; SMC1B; ENSG00000077935; HLA -B*27:02
SRADALIGIY

SEQ ID NO: 9589 - protein, 9 aa, Homo sapiens
  Table 1.2; SMC1B; ENSG00000077935; HLA -A*01:01,HLA-A*30:02,HLA-A*32:01,HLA-B*58:01,HLA-C*02:02, HLA-C*16:01
SSASVKIIY

SEQ ID NO: 9590 - protein, 10 aa, Homo sapiens
  Table 1.2; SMC1B; ENSG00000077935; HLA -A*30:02
SSSASVKIIY

SEQ ID NO: 9591 - protein, 10 aa, Homo sapiens
  Table 1.2; SMC1B; ENSG00000077935; HLA -A*03:02
STDAFEASRK

SEQ ID NO: 9592 - protein, 9 aa, Homo sapiens
  Table 1.2; SMC1B; ENSG00000077935; HLA -A*01:01,HLA-A*30:02
STQATIDIY

SEQ ID NO: 9593 - protein, 11 aa, Homo sapiens
  Table 1.2; SMC1B; ENSG00000077935; HLA -A*03:02,HLA-A*11:01
STQATIDIYEK

SEQ ID NO: 9594 - protein, 10 aa, Homo sapiens
  Table 1.2; SMC1B; ENSG00000077935; HLA -A*01:01,HLA-A*25:01,HLA-A*26:01,HLA-A*29:02,HLA-A*30:02
STSGELIGEY

SEQ ID NO: 9595 - protein, 9 aa, Homo sapiens
  Table 1.2; SMC1B; ENSG00000077935; HLA -A*03:01,HLA-A*03:02,HLA-A*11:01
SVETLLNQK

SEQ ID NO: 9596 - protein, 10 aa, Homo sapiens
  Table 1.2; SMC1B; ENSG00000077935; HLA -A*68:01
SVETLLNQKR

SEQ ID NO: 9597 - protein, 9 aa, Homo sapiens
  Table 1.2; SMC1B; ENSG00000077935; HLA -A*02:04
SVFGRLFDL

SEQ ID NO: 9598 - protein, 9 aa, Homo sapiens
  Table 1.2; SMC1B; ENSG00000077935; HLA -A*03:01,HLA-A*11:01
SVYIAELEK

SEQ ID NO: 9599 - protein, 11 aa, Homo sapiens
  Table 1.2; SMC1B; ENSG00000077935; HLA -A*23:01,HLA-A*24:02
SYIKEQTQDQF

SEQ ID NO: 9600 - protein, 9 aa, Homo sapiens
  Table 1.2; SMC1B; ENSG00000077935; HLA -A*32:01,HLA-B*07:02,HLA-B*08:01,HLA-B*35:03,HLA-B*46:01, HLA-B*58:01,HLA-C*01:02,HLA-C*02:02,HLA-C*03:03,HLA-C*03:04, HLA-C*16:01,HLA-C*16:02
TAAPNLRAL

SEQ ID NO: 9601 - protein, 9 aa, Homo sapiens
  Table 1.2; SMC1B; ENSG00000077935; HLA -A*68:01,HLA-C*07:06
TAIVVASEK

SEQ ID NO: 9602 - protein, 8 aa, Homo sapiens
  Table 1.2; SMC1B; ENSG00000077935; HLA -B*37:01
TDEERLAF

SEQ ID NO: 9603 - protein, 9 aa, Homo sapiens
  Table 1.2; SMC1B; ENSG00000077935; HLA -A*30:01,HLA-B*37:01
TDLKQIQTL

SEQ ID NO: 9604 - protein, 10 aa, Homo sapiens
  Table 1.2; SMC1B; ENSG00000077935; HLA -A*30:01,HLA-B*40:01,HLA-B*49:01
TEAESTQATI

SEQ ID NO: 9605 - protein, 11 aa, Homo sapiens
  Table 1.2; SMC1B; ENSG00000077935; HLA -A*30:01,HLA-B*40:01
TEKELKSVETL

SEQ ID NO: 9606 - protein, 10 aa, Homo sapiens
  Table 1.2; SMC1B; ENSG00000077935; HLA -B*44:02,HLA-B*44:03
TELADLDAAW

SEQ ID NO: 9607 - protein, 11 aa, Homo sapiens
  Table 1.2; SMC1B; ENSG00000077935; HLA -A*03:02
TLIQGTQTRLK

SEQ ID NO: 9608 - protein, 9 aa, Homo sapiens
  Table 1.2; SMC1B; ENSG00000077935; HLA -A*02:04
TMTQQLEKL

SEQ ID NO: 9609 - protein, 9 aa, Homo sapiens
  Table 1.2; SMC1B; ENSG00000077935; HLA -A*25:01,HLA-A*26:01,HLA-A*29:02,HLA-A*30:02,HLA-A*32:01, HLA-B*15:01,HLA-B*15:03,HLA-B*18:01,HLA-B*35:01,HLA-B*46:01
TNIGKVSSY

SEQ ID NO: 9610 - protein, 8 aa, Homo sapiens
  Table 1.2; SMC1B; ENSG00000077935; HLA -B*15:01,HLA-B*15:03
TQATIDIY

SEQ ID NO: 9611 - protein, 10 aa, Homo sapiens
  Table 1.2; SMC1B; ENSG00000077935; HLA -B*27:02
TQATIDIYEK

SEQ ID NO: 9612 - protein, 9 aa, Homo sapiens
  Table 1.2; SMC1B; ENSG00000077935; HLA -B*13:02,HLA-B*38:01
TQCFEHVSI

SEQ ID NO: 9613 - protein, 8 aa, Homo sapiens
  Table 1.2; SMC1B; ENSG00000077935; HLA -B*13:02,HLA-B*38:01
TQDQFQMI

SEQ ID NO: 9614 - protein, 10 aa, Homo sapiens
  Table 1.2; SMC1B; ENSG00000077935; HLA -B*38:01
TQDQFQMIVI

SEQ ID NO: 9615 - protein, 9 aa, Homo sapiens
  Table 1.2; SMC1B; ENSG00000077935; HLA -A*02:03,HLA-B*13:02
TQFPQLKKV

SEQ ID NO: 9616 - protein, 9 aa, Homo sapiens
  Table 1.2; SMC1B; ENSG00000077935; HLA -B*13:02
TQNSSAEKV

SEQ ID NO: 9617 - protein, 9 aa, Homo sapiens
  Table 1.2; SMC1B; ENSG00000077935; HLA -A*29:02,HLA-B*27:02,HLA-B*27:05,HLA-C*16:04
TRLNVQLEY

SEQ ID NO: 9618 - protein, 9 aa, Homo sapiens
  Table 1.2; SMC1B; ENSG00000077935; HLA -B*27:05
TRQLQQTEK

SEQ ID NO: 9619 - protein, 9 aa, Homo sapiens
  Table 1.2; SMC1B; ENSG00000077935; HLA -A*01:01,HLA-A*26:01,HLA-A*30:02,HLA-B*35:01
TSGELIGEY

SEQ ID NO: 9620 - protein, 11 aa, Homo sapiens
  Table 1.2; SMC1B; ENSG00000077935; HLA -A*03:02,HLA-A*11:01
TVALDGTLFLK

SEQ ID NO: 9621 - protein, 8 aa, Homo sapiens
  Table 1.2; SMC1B; ENSG00000077935; HLA -A*03:02
TVESISVK

SEQ ID NO: 9622 - protein, 9 aa, Homo sapiens
  Table 1.2; SMC1B; ENSG00000077935; HLA -A*03:01,HLA-A*03:02,HLA-A*11:01,HLA-A*68:01
TVESISVKK

SEQ ID NO: 9623 - protein, 11 aa, Homo sapiens
  Table 1.2; SMC1B; ENSG00000077935; HLA -A*03:02
TVESISVKKPK

SEQ ID NO: 9624 - protein, 8 aa, Homo sapiens
  Table 1.2; SMC1B; ENSG00000077935; HLA -A*03:02,HLA-A*11:01
TVNELMAK

SEQ ID NO: 9625 - protein, 8 aa, Homo sapiens
  Table 1.2; SMC1B; ENSG00000077935; HLA -A*23:01
VAALALLF

SEQ ID NO: 9626 - protein, 8 aa, Homo sapiens
  Table 1.2; SMC1B; ENSG00000077935; HLA -A*23:01
VALDGTLF

SEQ ID NO: 9627 - protein, 9 aa, Homo sapiens
  Table 1.2; SMC1B; ENSG00000077935; HLA -A*02:01,HLA-A*23:01,HLA-C*03:03,HLA-C*03:04
VALDGTLFL

SEQ ID NO: 9628 - protein, 10 aa, Homo sapiens
  Table 1.2; SMC1B; ENSG00000077935; HLA -A*03:01,HLA-A*03:02,HLA-A*11:01,HLA-B*27:02
VALDGTLFLK

SEQ ID NO: 9629 - protein, 9 aa, Homo sapiens
  Table 1.2; SMC1B; ENSG00000077935; HLA -B*35:03,HLA-B*38:01
VASQEDILL

SEQ ID NO: 9630 - protein, 10 aa, Homo sapiens
  Table 1.2; SMC1B; ENSG00000077935; HLA -A*03:02,HLA-A*11:01,HLA-B*27:02
VASQEDILLK

SEQ ID NO: 9631 - protein, 9 aa, Homo sapiens
  Table 1.2; SMC1B; ENSG00000077935; HLA -A*02:07,HLA-A*23:01,HLA-A*24:02,HLA-A*30:01,HLA-B*18:01, HLA-B*37:01,HLA-B*38:01,HLA-B*40:01,HLA-B*44:02,HLA-B*44:03, HLA-B*49:01,HLA-C*16:04
VEDDIFQHF

SEQ ID NO: 9632 - protein, 10 aa, Homo sapiens
  Table 1.2; SMC1B; ENSG00000077935; HLA -B*40:01,HLA-B*44:02,HLA-B*44:03
VEESGEEKTF

SEQ ID NO: 9633 - protein, 9 aa, Homo sapiens
  Table 1.2; SMC1B; ENSG00000077935; HLA -A*23:01,HLA-A*24:02,HLA-C*04:01,HLA-C*14:02
VFQGTVESI

SEQ ID NO: 9634 - protein, 9 aa, Homo sapiens
  Table 1.2; SMC1B; ENSG00000077935; HLA -A*01:01,HLA-A*02:07,HLA-A*23:01,HLA-A*32:01,HLA-C*05:01
VIDVIKTQF

SEQ ID NO: 9635 - protein, 9 aa, Homo sapiens
  Table 1.2; SMC1B; ENSG00000077935; HLA -A*02:04,HLA-A*23:01,HLA-A*24:02
VIKTQFPQL

SEQ ID NO: 9636 - protein, 9 aa, Homo sapiens
  Table 1.2; SMC1B; ENSG00000077935; HLA -C*01:02
VISGGSSDL

SEQ ID NO: 9637 - protein, 10 aa, Homo sapiens
  Table 1.2; SMC1B; ENSG00000077935; HLA -A*03:02,HLA-A*11:01
VISGGSSDLK

SEQ ID NO: 9638 - protein, 11 aa, Homo sapiens
  Table 1.2; SMC1B; ENSG00000077935; HLA -A*01:01,HLA-A*29:02,HLA-A*30:02,HLA-A*32:01,HLA-B*15:01, HLA-B*58:01
VISGGSSDLKY

SEQ ID NO: 9639 - protein, 8 aa, Homo sapiens
  Table 1.2; SMC1B; ENSG00000077935; HLA -B*37:01
VISLKEEF

SEQ ID NO: 9640 - protein, 9 aa, Homo sapiens
  Table 1.2; SMC1B; ENSG00000077935; HLA -A*01:01
VISLKEEFY

SEQ ID NO: 9641 - protein, 9 aa, Homo sapiens
  Table 1.2; SMC1B; ENSG00000077935; HLA -A*02:01,HLA-A*02:07,HLA-B*35:03,HLA-B*55:01,HLA-C*05:01
VLDEVDAAL

SEQ ID NO: 9642 - protein, 9 aa, Homo sapiens
  Table 1.2; SMC1B; ENSG00000077935; HLA -A*01:01,HLA-B*15:01
VLTLDLSQY

SEQ ID NO: 9643 - protein, 9 aa, Homo sapiens
  Table 1.2; SMC1B; ENSG00000077935; HLA -A*02:07
VMDALSFVM

SEQ ID NO: 9644 - protein, 9 aa, Homo sapiens
  Table 1.2; SMC1B; ENSG00000077935; HLA -A*02:01,HLA-A*02:03,HLA-A*02:04,HLA-A*02:07,HLA-B*08:01, HLA-B*55:01
VMGEKIANL

SEQ ID NO: 9645 - protein, 9 aa, Homo sapiens
  Table 1.2; SMC1B; ENSG00000077935; HLA -A*33:01,HLA-A*33:03
VNRDLSVKR

SEQ ID NO: 9646 - protein, 9 aa, Homo sapiens
  Table 1.2; SMC1B; ENSG00000077935; HLA -A*02:07,HLA-B*27:05,HLA-B*38:01
VQDIEIILL

SEQ ID NO: 9647 - protein, 10 aa, Homo sapiens
  Table 1.2; SMC1B; ENSG00000077935; HLA -A*03:02,HLA-A*11:01,HLA-B*27:02
VSIQTSLEQK

SEQ ID NO: 9648 - protein, 9 aa, Homo sapiens
  Table 1.2; SMC1B; ENSG00000077935; HLA -A*01:01,HLA-A*29:02,HLA-A*30:02,HLA-B*15:01,HLA-B*46:01, HLA-B*58:01
VSISIDQIY

SEQ ID NO: 9649 - protein, 10 aa, Homo sapiens
  Table 1.2; SMC1B; ENSG00000077935; HLA -A*03:02,HLA-A*11:01,HLA-B*27:02
VSISIDQIYK

SEQ ID NO: 9650 - protein, 11 aa, Homo sapiens
  Table 1.2; SMC1B; ENSG00000077935; HLA -A*11:01
VSISIDQIYKK

SEQ ID NO: 9651 - protein, 9 aa, Homo sapiens
  Table 1.2; SMC1B; ENSG00000077935; HLA -A*03:02,HLA-A*11:01
VTQNSSAEK

SEQ ID NO: 9652 - protein, 9 aa, Homo sapiens
  Table 1.2; SMC1B; ENSG00000077935; HLA -A*03:01,HLA-A*03:02,HLA-A*11:01
VVASEKVAK

SEQ ID NO: 9653 - protein, 11 aa, Homo sapiens
  Table 1.2; SMC1B; ENSG00000077935; HLA -A*03:01,HLA-A*03:02,HLA-A*11:01,HLA-B*27:02
VVSIQTSLEQK

SEQ ID NO: 9654 - protein, 9 aa, Homo sapiens
  Table 1.2; SMC1B; ENSG00000077935; HLA -A*23:01,HLA-A*24:02
VYIAELEKI

SEQ ID NO: 9655 - protein, 8 aa, Homo sapiens
  Table 1.2; SMC1B; ENSG00000077935; HLA -B*37:01
YDLFTQCF

SEQ ID NO: 9656 - protein, 9 aa, Homo sapiens
  Table 1.2; SMC1B; ENSG00000077935; HLA -B*49:01
YEKEEAFEI

SEQ ID NO: 9657 - protein, 10 aa, Homo sapiens
  Table 1.2; SMC1B; ENSG00000077935; HLA -B*15:01,HLA-B*46:01
YIKEQTQDQF

SEQ ID NO: 9658 - protein, 9 aa, Homo sapiens
  Table 1.2; SMC1B; ENSG00000077935; HLA -A*01:01
YLDIKPINE

SEQ ID NO: 9659 - protein, 10 aa, Homo sapiens
  Table 1.2; SMC1B; ENSG00000077935; HLA -A*01:01
YLDIKPINER

SEQ ID NO: 9660 - protein, 11 aa, Homo sapiens
  Table 1.2; SMC1B; ENSG00000077935; HLA -A*02:07
YLDIKPINERL

SEQ ID NO: 9661 - protein, 9 aa, Homo sapiens
  Table 1.2; SMC1B; ENSG00000077935; HLA -A*02:07,HLA-B*35:03
YPDSVFGRL

SEQ ID NO: 9662 - protein, 10 aa, Homo sapiens
  Table 1.2; SMC1B; ENSG00000077935; HLA -B*35:01
YPDSVFGRLF

SEQ ID NO: 9663 - protein, 11 aa, Homo sapiens
  Table 1.2; SMC1B; ENSG00000077935; HLA -A*01:01,HLA-B*27:02
YPDTEGQESSK

SEQ ID NO: 9664 - protein, 9 aa, Homo sapiens
  Table 1.2; SMC1B; ENSG00000077935; HLA -B*35:01,HLA-B*35:03,HLA-B*55:01
YPEYDDCMF

SEQ ID NO: 9665 - protein, 11 aa, Homo sapiens
  Table 1.2; SMC1B; ENSG00000077935; HLA -B*27:05,HLA-B*38:01,HLA-B*39:01
YQEQSQLQSEL

SEQ ID NO: 9666 - protein, 8 aa, Homo sapiens
  Table 1.2; SMC1B; ENSG00000077935; HLA -A*02:01,HLA-B*13:02,HLA-B*49:01
YQLAVTKV

SEQ ID NO: 9667 - protein, 9 aa, Homo sapiens
  Table 1.2; SMC1B; ENSG00000077935; HLA -A*23:01,HLA-B*15:03
YQLAVTKVF

SEQ ID NO: 9668 - protein, 8 aa, Homo sapiens
  Table 1.2; SMC1B; ENSG00000077935; HLA -B*39:01
YQSLLEEL

SEQ ID NO: 9669 - protein, 10 aa, Homo sapiens
  Table 1.2; SMC1B; ENSG00000077935; HLA -B*27:02
YSQNELEMIK

SEQ ID NO: 9670 - protein, 11 aa, Homo sapiens
  Table 1.2; SMC1B; ENSG00000077935; HLA -A*11:01
YSQNELEMIKK

SEQ ID NO: 9671 - protein, 9 aa, Homo sapiens
  Table 1.2; SMC1B; ENSG00000077935; HLA -A*01:01
YSSLKEDLK

SEQ ID NO: 9672 - protein, 9 aa, Homo sapiens
  Table 1.2; SMC1B; ENSG00000077935; HLA -A*01:01
YVEESGEEK

SEQ ID NO: 9673 - protein, 11 aa, Homo sapiens
  Table 1.2; SMC1B; ENSG00000077935; HLA -B*38:01,HLA-C*05:01
YVEESGEEKTF

SEQ ID NO: 9674 - protein, 10 aa, Homo sapiens
  Table 1.2; SMR3A; ENSG00000109208; HLA -A*11:01,HLA-A*31:01,HLA-A*33:03,HLA-A*68:01,HLA-C*07:06
ACFTPGESQR

SEQ ID NO: 9675 - protein, 9 aa, Homo sapiens
  Table 1.2; SMR3A; ENSG00000109208; HLA -B*51:01,HLA-B*55:01,HLA-B*56:01
DPALPTPAP

SEQ ID NO: 9676 - protein, 9 aa, Homo sapiens
  Table 1.2; SMR3A; ENSG00000109208; HLA -B*54:01
FPFGTGFVP

SEQ ID NO: 9677 - protein, 9 aa, Homo sapiens
  Table 1.2; SMR3A; ENSG00000109208; HLA -A*29:02,HLA-B*35:01
FPPPLSPPY

SEQ ID NO: 9678 - protein, 11 aa, Homo sapiens
  Table 1.2; SMR3A; ENSG00000109208; HLA -B*35:01,HLA-B*35:03,HLA-B*56:01
FPVNSPTDPAL

SEQ ID NO: 9679 - protein, 9 aa, Homo sapiens
  Table 1.2; SMR3A; ENSG00000109208; HLA -A*02:07,HLA-B*54:01
FVPPPHPPP

SEQ ID NO: 9680 - protein, 10 aa, Homo sapiens
  Table 1.2; SMR3A; ENSG00000109208; HLA -A*01:01,HLA-A*02:07,HLA-A*26:01,HLA-A*29:02
FVPPPHPPPY

SEQ ID NO: 9681 - protein, 11 aa, Homo sapiens
  Table 1.2; SMR3A; ENSG00000109208; HLA -A*29:02
GFVPPPHPPPY

SEQ ID NO: 9682 - protein, 11 aa, Homo sapiens
  Table 1.2; SMR3A; ENSG00000109208; HLA -B*07:02,HLA-C*07:02
GPRGPYPPGPL

SEQ ID NO: 9683 - protein, 9 aa, Homo sapiens
  Table 1.2; SMR3A; ENSG00000109208; HLA -B*07:02,HLA-B*54:01,HLA-B*55:01,HLA-B*56:01
GPYPPGPLA

SEQ ID NO: 9684 - protein, 10 aa, Homo sapiens
  Table 1.2; SMR3A; ENSG00000109208; HLA -B*56:01
GPYPPGPLAP

SEQ ID NO: 9685 - protein, 9 aa, Homo sapiens
  Table 1.2; SMR3A; ENSG00000109208; HLA -B*27:05
GRFPPPLSP

SEQ ID NO: 9686 - protein, 9 aa, Homo sapiens
  Table 1.2; SMR3A; ENSG00000109208; HLA -B*27:05
GRIPPSPPP

SEQ ID NO: 9687 - protein, 11 aa, Homo sapiens
  Table 1.2; SMR3A; ENSG00000109208; HLA -A*29:02,HLA-A*30:02
HSLPPPYGPGY

SEQ ID NO: 9688 - protein, 9 aa, Homo sapiens
  Table 1.2; SMR3A; ENSG00000109208; HLA -A*29:02,HLA-B*35:01,HLA-B*54:01,HLA-B*55:01,HLA-B*56:01
IPPSPPPPY

SEQ ID NO: 9689 - protein, 10 aa, Homo sapiens
  Table 1.2; SMR3A; ENSG00000109208; HLA -A*30:02
IQSHSLPPPY

SEQ ID NO: 9690 - protein, 9 aa, Homo sapiens
  Table 1.2; SMR3A; ENSG00000109208; HLA -A*02:04
KSLTWILGL

SEQ ID NO: 9691 - protein, 10 aa, Homo sapiens
  Table 1.2; SMR3A; ENSG00000109208; HLA -B*57:01
KSLTWILGLW

SEQ ID NO: 9692 - protein, 9 aa, Homo sapiens
  Table 1.2; SMR3A; ENSG00000109208; HLA -B*51:01
LAPPPPPCF

SEQ ID NO: 9693 - protein, 9 aa, Homo sapiens
  Table 1.2; SMR3A; ENSG00000109208; HLA -A*26:01,HLA-A*29:02,HLA-B*35:01,HLA-B*35:03,HLA-B*55:01
LPPPYGPGY

SEQ ID NO: 9694 - protein, 11 aa, Homo sapiens
  Table 1.2; SMR3A; ENSG00000109208; HLA -A*31:01,HLA-A*33:01
PGYPQPPSQPR

SEQ ID NO: 9695 - protein, 10 aa, Homo sapiens
  Table 1.2; SMR3A; ENSG00000109208; HLA -A*30:02
PQPPSQPRPY

SEQ ID NO: 9696 - protein, 9 aa, Homo sapiens
  Table 1.2; SMR3A; ENSG00000109208; HLA -A*24:02
PYPPGPPFF

SEQ ID NO: 9697 - protein, 9 aa, Homo sapiens
  Table 1.2; SMR3A; ENSG00000109208; HLA -A*01:01,HLA-A*30:02
QSHSLPPPY

SEQ ID NO: 9698 - protein, 10 aa, Homo sapiens
  Table 1.2; SMR3A; ENSG00000109208; HLA -A*29:02,HLA-A*30:02
RFPPPLSPPY

SEQ ID NO: 9699 - protein, 10 aa, Homo sapiens
  Table 1.2; SMR3A; ENSG00000109208; HLA -A*03:01,HLA-A*30:02
RIPPSPPPPY

SEQ ID NO: 9700 - protein, 11 aa, Homo sapiens
  Table 1.2; SMR3A; ENSG00000109208; HLA -A*30:02
RIQSHSLPPPY

SEQ ID NO: 9701 - protein, 9 aa, Homo sapiens
  Table 1.2; SMR3A; ENSG00000109208; HLA -B*07:02,HLA-B*56:01
RPYPPGPPF

SEQ ID NO: 9702 - protein, 10 aa, Homo sapiens
  Table 1.2; SMR3A; ENSG00000109208; HLA -A*01:01,HLA-A*02:07,HLA-A*26:01,HLA-A*29:02,HLA-A*30:02, HLA-B*15:01
SLPPPYGPGY

SEQ ID NO: 9703 - protein, 10 aa, Homo sapiens
  Table 1.2; SMR3A; ENSG00000109208; HLA -B*56:01
SPTDPALPTP

SEQ ID NO: 9704 - protein, 11 aa, Homo sapiens
  Table 1.2; SMR3A; ENSG00000109208; HLA -B*56:01
SPTDPALPTPA

SEQ ID NO: 9705 - protein, 9 aa, Homo sapiens
  Table 1.2; SMR3A; ENSG00000109208; HLA -A*30:02
SQRGPRGPY

SEQ ID NO: 9706 - protein, 9 aa, Homo sapiens
  Table 1.2; SMR3A; ENSG00000109208; HLA -B*35:03
VNSPTDPAL

SEQ ID NO: 9707 - protein, 9 aa, Homo sapiens
  Table 1.2; SMR3A; ENSG00000109208; HLA -A*01:01,HLA-A*23:01,HLA-A*24:02,HLA-A*29:02,HLA-A*30:02, HLA-B*07:02,HLA-B*35:01,HLA-B*55:01,HLA-B*56:01,HLA-C*04:01
VPPPHPPPY

SEQ ID NO: 9708 - protein, 9 aa, Homo sapiens
  Table 1.2; SMR3A; ENSG00000109208; HLA -A*33:01,HLA-A*33:03,HLA-A*68:01
YPQPPSQPR

SEQ ID NO: 9709 - protein, 11 aa, Homo sapiens
  Table 1.2; SMR3A; ENSG00000109208; HLA -A*30:02
YPQPPSQPRPY

SEQ ID NO: 9710 - protein, 10 aa, Homo sapiens
  Table 1.2; SSX1; ENSG00000126752; HLA -B*49:01
AEDENDSKGV

SEQ ID NO: 9711 - protein, 8 aa, Homo sapiens
  Table 1.2; SSX1; ENSG00000126752; HLA -A*29:02,HLA-A*30:02,HLA-A*32:01,HLA-B*35:01,HLA-B*55:01, HLA-C*04:01,HLA-C*14:02
AFDDIATY

SEQ ID NO: 9712 - protein, 9 aa, Homo sapiens
  Table 1.2; SSX1; ENSG00000126752; HLA -A*02:01,HLA-A*02:07,HLA-A*23:01,HLA-A*24:02,HLA-A*29:02, HLA-A*32:01,HLA-A*33:03,HLA-B*18:01,HLA-B*35:01,HLA-B*35:03, HLA-B*38:01,HLA-B*44:02,HLA-B*44:03,HLA-B*46:01,HLA-B*55:01,
  HLA-C*02:02,HLA-C*04:01,HLA-C*05:01,HLA-C*07:04,HLA-C*12:03, HLA-C*14:02
AFDDIATYF

SEQ ID NO: 9713 - protein, 9 aa, Homo sapiens
  Table 1.2; SSX1; ENSG00000126752; HLA -A*02:01,HLA-A*02:04,HLA-B*13:02,HLA-B*55:01
AMTKLGFKV

SEQ ID NO: 9714 - protein, 9 aa, Homo sapiens
  Table 1.2; SSX1; ENSG00000126752; HLA -A*03:02,HLA-A*11:01
ANISEKINK

SEQ ID NO: 9715 - protein, 10 aa, Homo sapiens
  Table 1.2; SSX1; ENSG00000126752; HLA -A*33:03
ANISEKINKR

SEQ ID NO: 9716 - protein, 9 aa, Homo sapiens
  Table 1.2; SSX1; ENSG00000126752; HLA -A*01:01,HLA-B*39:01,HLA-C*04:01,HLA-C*05:01
ATDFQGNDF

SEQ ID NO: 9717 - protein, 9 aa, Homo sapiens
  Table 1.2; SSX1; ENSG00000126752; HLA -A*32:01,HLA-B*57:01
ATYFSKKEW

SEQ ID NO: 9718 - protein, 8 aa, Homo sapiens
  Table 1.2; SSX1; ENSG00000126752; HLA -A*33:01,HLA-A*33:03
DAKASEKR

SEQ ID NO: 9719 - protein, 9 aa, Homo sapiens
  Table 1.2; SSX1; ENSG00000126752; HLA -A*33:01
DDAKASEKR

SEQ ID NO: 9720 - protein, 9 aa, Homo sapiens
  Table 1.2; SSX1; ENSG00000126752; HLA -A*33:01
DDIATYFSK

SEQ ID NO: 9721 - protein, 9 aa, Homo sapiens
  Table 1.2; SSX1; ENSG00000126752; HLA -A*33:01
DDTFAKRPR

SEQ ID NO: 9722 - protein, 8 aa, Homo sapiens
  Table 1.2; SSX1; ENSG00000126752; HLA -A*33:01,HLA-A*33:03
DFDNDHNR

SEQ ID NO: 9723 - protein, 9 aa, Homo sapiens
  Table 1.2; SSX1; ENSG00000126752; HLA -A*26:01,HLA-A*33:01,HLA-A*68:01
DIATYFSKK

SEQ ID NO: 9724 - protein, 11 aa, Homo sapiens
  Table 1.2; SSX1; ENSG00000126752; HLA -A*33:01
DSKGVSEASGP

SEQ ID NO: 9725 - protein, 10 aa, Homo sapiens
  Table 1.2; SSX1; ENSG00000126752; HLA -A*68:01,HLA-B*27:02
EASGPQNDGK

SEQ ID NO: 9726 - protein, 8 aa, Homo sapiens
  Table 1.2; SSX1; ENSG00000126752; HLA -B*18:01,HLA-B*37:01,HLA-C*04:01
FDDIATYF

SEQ ID NO: 9727 - protein, 10 aa, Homo sapiens
  Table 1.2; SSX1; ENSG00000126752; HLA -B*27:02
FDDIATYFSK

SEQ ID NO: 9728 - protein, 10 aa, Homo sapiens
  Table 1.2; SSX1; ENSG00000126752; HLA -A*33:01
GDDTFAKRPR

SEQ ID NO: 9729 - protein, 9 aa, Homo sapiens
  Table 1.2; SSX1; ENSG00000126752; HLA -B*13:02,HLA-B*38:01
GKANISEKI

SEQ ID NO: 9730 - protein, 9 aa, Homo sapiens
  Table 1.2; SSX1; ENSG00000126752; HLA -B*07:02,HLA-C*07:02
GPQNDGKQL

SEQ ID NO: 9731 - protein, 8 aa, Homo sapiens
  Table 1.2; SSX1; ENSG00000126752; HLA -B*08:01,HLA-B*51:01
HPPGKANI

SEQ ID NO: 9732 - protein, 9 aa, Homo sapiens
  Table 1.2; SSX1; ENSG00000126752; HLA -B*07:02
HPQMTFGRL

SEQ ID NO: 9733 - protein, 10 aa, Homo sapiens
  Table 1.2; SSX1; ENSG00000126752; HLA -B*57:01
IATYFSKKEW

SEQ ID NO: 9734 - protein, 8 aa, Homo sapiens
  Table 1.2; SSX1; ENSG00000126752; HLA -A*03:01
IIPKIMPK

SEQ ID NO: 9735 - protein, 9 aa, Homo sapiens
  Table 1.2; SSX1; ENSG00000126752; HLA -A*03:01
IIPKIMPKK

SEQ ID NO: 9736 - protein, 8 aa, Homo sapiens
  Table 1.2; SSX1; ENSG00000126752; HLA -A*30:01,HLA-A*32:01,HLA-B*08:01,HLA-B*13:02,HLA-B*15:01, HLA-B*15:03,HLA-B*18:01,HLA-B*37:01,HLA-B*39:01,HLA-B*40:02, HLA-B*46:01,HLA-B*58:01,HLA-C*03:04,HLA-C*07:04,HLA-C*16:01,
  HLA-C*16:02
IQVEHPQM

SEQ ID NO: 9737 - protein, 9 aa, Homo sapiens
  Table 1.2; SSX1; ENSG00000126752; HLA -B*13:02
IQVEHPQMT

SEQ ID NO: 9738 - protein, 10 aa, Homo sapiens
  Table 1.2; SSX1; ENSG00000126752; HLA -A*23:01,HLA-A*24:02,HLA-A*25:01,HLA-A*26:01,HLA-A*30:01, HLA-A*32:01,HLA-B*13:02,HLA-B*15:01,HLA-B*15:03,HLA-B*38:01, HLA-B*46:01,HLA-B*57:01,HLA-B*58:01,HLA-C*16:04
IQVEHPQMTF

SEQ ID NO: 9739 - protein, 9 aa, Homo sapiens
  Table 1.2; SSX1; ENSG00000126752; HLA -A*01:01,HLA-A*02:01,HLA-A*02:03,HLA-A*02:04,HLA-A*02:07, HLA-A*03:01,HLA-A*03:02,HLA-A*11:01,HLA-A*23:01,HLA-A*25:01, HLA-A*26:01,HLA-A*29:02,HLA-A*30:02,HLA-A*31:01,HLA-A*32:01,
  HLA-A*33:01,HLA-A*33:03,HLA-A*68:01,HLA-B*15:01,HLA-B*15:03, HLA-B*18:01,HLA-B*27:02,HLA-B*27:05,HLA-B*35:01,HLA-B*35:03, HLA-B*38:01,HLA-B*39:01,HLA-B*44:02,HLA-B*44:03,HLA-B*46:01, HLA-B*54:01,HLA-B*55:01,HLA-B*56:01,HLA-B*57:01,HLA-B*58:01,
  HLA-C*01:02,HLA-C*02:02,HLA-C*03:03,HLA-C*03:04,HLA-C*07:04, HLA-C*07:06,HLA-C*12:03,HLA-C*16:01,HLA-C*16:02,HLA-C*16:04
KAFDDIATY

SEQ ID NO: 9740 - protein, 10 aa, Homo sapiens
  Table 1.2; SSX1; ENSG00000126752; HLA -A*01:01,HLA-A*02:01,HLA-A*02:03,HLA-A*02:04,HLA-A*02:07, HLA-A*03:01,HLA-A*03:02,HLA-A*23:01,HLA-A*24:02,HLA-A*25:01, HLA-A*26:01,HLA-A*29:02,HLA-A*30:02,HLA-A*31:01,HLA-A*32:01,
  HLA-A*68:02,HLA-B*13:02,HLA-B*15:01,HLA-B*15:03,HLA-B*27:02, HLA-B*35:01,HLA-B*44:02,HLA-B*44:03,HLA-B*46:01,HLA-B*57:01, HLA-B*58:01,HLA-C*02:02,HLA-C*12:03,HLA-C*16:04
KAFDDIATYF

SEQ ID NO: 9741 - protein, 8 aa, Homo sapiens
  Table 1.2; SSX1; ENSG00000126752; HLA -B*08:01,HLA-C*16:01
KAMTKLGF

SEQ ID NO: 9742 - protein, 9 aa, Homo sapiens
  Table 1.2; SSX1; ENSG00000126752; HLA -A*03:01
KAMTKLGFK

SEQ ID NO: 9743 - protein, 10 aa, Homo sapiens
  Table 1.2; SSX1; ENSG00000126752; HLA -A*03:01,HLA-A*03:02,HLA-A*11:01,HLA-A*31:01
KANISEKINK

SEQ ID NO: 9744 - protein, 11 aa, Homo sapiens
  Table 1.2; SSX1; ENSG00000126752; HLA -A*31:01
KANISEKINKR

SEQ ID NO: 9745 - protein, 9 aa, Homo sapiens
  Table 1.2; SSX1; ENSG00000126752; HLA -A*03:01
KINKRSGPK

SEQ ID NO: 9746 - protein, 9 aa, Homo sapiens
  Table 1.2; SSX1; ENSG00000126752; HLA -A*31:01
KISYVYMKR

SEQ ID NO: 9747 - protein, 11 aa, Homo sapiens
  Table 1.2; SSX1; ENSG00000126752; HLA -B*15:01
KQATDFQGNDF

SEQ ID NO: 9748 - protein, 9 aa, Homo sapiens
  Table 1.2; SSX1; ENSG00000126752; HLA -A*02:01,HLA-A*02:04,HLA-A*02:07,HLA-A*24:02,HLA-A*30:01, HLA-B*13:02
KQLVIYEEI

SEQ ID NO: 9749 - protein, 8 aa, Homo sapiens
  Table 1.2; SSX1; ENSG00000126752; HLA -C*16:01
KYSEKISY

SEQ ID NO: 9750 - protein, 9 aa, Homo sapiens
  Table 1.2; SSX1; ENSG00000126752; HLA -A*24:02
KYSEKISYV

SEQ ID NO: 9751 - protein, 10 aa, Homo sapiens
  Table 1.2; SSX1; ENSG00000126752; HLA -A*23:01,HLA-A*24:02,HLA-A*29:02,HLA-A*30:02
KYSEKISYVY

SEQ ID NO: 9752 - protein, 11 aa, Homo sapiens
  Table 1.2; SSX1; ENSG00000126752; HLA -A*24:02
KYSEKISYVYM

SEQ ID NO: 9753 - protein, 9 aa, Homo sapiens
  Table 1.2; SSX1; ENSG00000126752; HLA -B*15:03
MKYSEKISY

SEQ ID NO: 9754 - protein, 8 aa, Homo sapiens
  Table 1.2; SSX1; ENSG00000126752; HLA -B*08:01,HLA-B*40:02
MTKLGFKV

SEQ ID NO: 9755 - protein, 9 aa, Homo sapiens
  Table 1.2; SSX1; ENSG00000126752; HLA -A*33:01,HLA-A*33:03,HLA-A*68:01,HLA-A*68:02,HLA-B*27:02
NDFDNDHNR

SEQ ID NO: 9756 - protein, 9 aa, Homo sapiens
  Table 1.2; SSX1; ENSG00000126752; HLA -A*33:01,HLA-A*33:03,HLA-A*68:01
NGDDTFAKR

SEQ ID NO: 9757 - protein, 11 aa, Homo sapiens
  Table 1.2; SSX1; ENSG00000126752; HLA -A*33:01
NGDDTFAKRPR

SEQ ID NO: 9758 - protein, 9 aa, Homo sapiens
  Table 1.2; SSX1; ENSG00000126752; HLA -A*33:01,HLA-A*33:03,HLA-A*68:01,HLA-C*07:06
NISEKINKR

SEQ ID NO: 9759 - protein, 10 aa, Homo sapiens
  Table 1.2; SSX1; ENSG00000126752; HLA -B*15:03,HLA-B*27:02,HLA-B*35:01,HLA-B*38:01,HLA-B*39:01
QATDFQGNDF

SEQ ID NO: 9760 - protein, 11 aa, Homo sapiens
  Table 1.2; SSX1; ENSG00000126752; HLA -A*31:01,HLA-A*33:01,HLA-A*33:03,HLA-A*68:01,HLA-C*07:06
QGNDFDNDHNR

SEQ ID NO: 9761 - protein, 9 aa, Homo sapiens
  Table 1.2; SSX1; ENSG00000126752; HLA -A*25:01,HLA-A*32:01,HLA-B*15:01,HLA-B*57:01,HLA-B*58:01, HLA-C*05:01
QVEHPQMTF

SEQ ID NO: 9762 - protein, 9 aa, Homo sapiens
  Table 1.2; SSX1; ENSG00000126752; HLA -A*03:01,HLA-A*03:02,HLA-A*11:01,HLA-A*31:01
RIIPKIMPK

SEQ ID NO: 9763 - protein, 10 aa, Homo sapiens
  Table 1.2; SSX1; ENSG00000126752; HLA -A*03:01
RIIPKIMPKK

SEQ ID NO: 9764 - protein, 9 aa, Homo sapiens
  Table 1.2; SSX1; ENSG00000126752; HLA -A*32:01
RIQVEHPQM

SEQ ID NO: 9765 - protein, 11 aa, Homo sapiens
  Table 1.2; SSX1; ENSG00000126752; HLA -A*32:01,HLA-B*57:01,HLA-B*58:01
RIQVEHPQMTF

SEQ ID NO: 9766 - protein, 9 aa, Homo sapiens
  Table 1.2; SSX1; ENSG00000126752; HLA -A*02:04
RLHRIIPKI

SEQ ID NO: 9767 - protein, 9 aa, Homo sapiens
  Table 1.2; SSX1; ENSG00000126752; HLA -A*03:01
RNYKAMTKL

SEQ ID NO: 9768 - protein, 11 aa, Homo sapiens
  Table 1.2; SSX1; ENSG00000126752; HLA -B*07:02
RPRDDAKASEK

SEQ ID NO: 9769 - protein, 11 aa, Homo sapiens
  Table 1.2; SSX1; ENSG00000126752; HLA -A*30:02,HLA-A*31:01,HLA-B*15:01,HLA-B*46:01,HLA-B*57:01, HLA-B*58:01
RSKAFDDIATY

SEQ ID NO: 9770 - protein, 8 aa, Homo sapiens
  Table 1.2; SSX1; ENSG00000126752; HLA -A*30:01,HLA-B*08:01,HLA-B*15:01,HLA-B*15:03,HLA-B*18:01, HLA-B*37:01,HLA-B*40:02,HLA-B*44:02,HLA-B*44:03,HLA-C*07:01
SEKISYVY

SEQ ID NO: 9771 - protein, 9 aa, Homo sapiens
  Table 1.2; SSX1; ENSG00000126752; HLA -A*30:01,HLA-B*37:01,HLA-B*40:01,HLA-B*40:02,HLA-B*44:02, HLA-B*44:03,HLA-B*49:01
SEKISYVYM

SEQ ID NO: 9772 - protein, 10 aa, Homo sapiens
  Table 1.2; SSX1; ENSG00000126752; HLA -B*15:03
SKAFDDIATY

SEQ ID NO: 9773 - protein, 9 aa, Homo sapiens
  Table 1.2; SSX1; ENSG00000126752; HLA -A*29:02
SYVYMKRNY

SEQ ID NO: 9774 - protein, 8 aa, Homo sapiens
  Table 1.2; SSX1; ENSG00000126752; HLA -B*18:01,HLA-B*37:01
TDFQGNDF

SEQ ID NO: 9775 - protein, 9 aa, Homo sapiens
  Table 1.2; SSX1; ENSG00000126752; HLA -A*03:01,HLA-A*03:02
TLPPFMCNK

SEQ ID NO: 9776 - protein, 8 aa, Homo sapiens
  Table 1.2; SSX1; ENSG00000126752; HLA -A*23:01,HLA-A*30:01,HLA-A*32:01,HLA-B*15:03,HLA-B*18:01, HLA-B*37:01,HLA-B*40:02,HLA-B*44:02,HLA-B*44:03,HLA-B*49:01, HLA-C*04:01,HLA-C*16:04
VEHPQMTF

SEQ ID NO: 9777 - protein, 9 aa, Homo sapiens
  Table 1.2; SSX1; ENSG00000126752; HLA -B*49:01
VEHPQMTFG

SEQ ID NO: 9778 - protein, 10 aa, Homo sapiens
  Table 1.2; SSX1; ENSG00000126752; HLA -A*03:01,HLA-A*03:02,HLA-A*11:01,HLA-A*31:01
VTLPPFMCNK

SEQ ID NO: 9779 - protein, 9 aa, Homo sapiens
  Table 1.2; SSX1; ENSG00000126752; HLA -A*24:02
VYMKRNYKA

SEQ ID NO: 9780 - protein, 9 aa, Homo sapiens
  Table 1.2; SSX1; ENSG00000126752; HLA -B*15:03
YKAMTKLGF

SEQ ID NO: 9781 - protein, 8 aa, Homo sapiens
  Table 1.2; SSX1; ENSG00000126752; HLA -A*01:01
YSEKISYV

SEQ ID NO: 9782 - protein, 9 aa, Homo sapiens
  Table 1.2; SSX1; ENSG00000126752; HLA -A*01:01,HLA-A*26:01,HLA-A*29:02,HLA-A*30:02,HLA-B*18:01, HLA-B*35:01,HLA-B*57:01,HLA-B*58:01
YSEKISYVY

SEQ ID NO: 9783 - protein, 10 aa, Homo sapiens
  Table 1.2; SSX1; ENSG00000126752; HLA -A*01:01
YSEKISYVYM

SEQ ID NO: 9784 - protein, 8 aa, Homo sapiens
  Table 1.2; SSX1; ENSG00000126752; HLA -B*08:01
YVYMKRNY

SEQ ID NO: 9785 - protein, 9 aa, Homo sapiens
  Table 1.2; STRA8; ENSG00000146857; HLA -A*11:01
AALFNNLRK

SEQ ID NO: 9786 - protein, 8 aa, Homo sapiens
  Table 1.2; STRA8; ENSG00000146857; HLA -B*54:01,HLA-B*56:01
AALPIVSA

SEQ ID NO: 9787 - protein, 9 aa, Homo sapiens
  Table 1.2; STRA8; ENSG00000146857; HLA -A*02:01,HLA-A*32:01,HLA-B*46:01,HLA-B*54:01,HLA-B*55:01, HLA-B*56:01,HLA-C*02:02
AALPIVSAA

SEQ ID NO: 9788 - protein, 10 aa, Homo sapiens
  Table 1.2; STRA8; ENSG00000146857; HLA -A*23:01,HLA-A*25:01
AALPIVSAAI

SEQ ID NO: 9789 - protein, 10 aa, Homo sapiens
  Table 1.2; STRA8; ENSG00000146857; HLA -B*49:01
AEGSVKDSGV

SEQ ID NO: 9790 - protein, 8 aa, Homo sapiens
  Table 1.2; STRA8; ENSG00000146857; HLA -B*35:01,HLA-B*35:03,HLA-C*04:01,HLA-C*05:01,HLA-C*07:04
AFDVASFL

SEQ ID NO: 9791 - protein, 9 aa, Homo sapiens
  Table 1.2; STRA8; ENSG00000146857; HLA -A*02:04,HLA-A*68:02
AISHLWQNL

SEQ ID NO: 9792 - protein, 8 aa, Homo sapiens
  Table 1.2; STRA8; ENSG00000146857; HLA -A*03:01
ALFNNLRK

SEQ ID NO: 9793 - protein, 9 aa, Homo sapiens
  Table 1.2; STRA8; ENSG00000146857; HLA -A*02:03,HLA-A*02:04
ALFNNLRKT

SEQ ID NO: 9794 - protein, 10 aa, Homo sapiens
  Table 1.2; STRA8; ENSG00000146857; HLA -A*02:01,HLA-A*02:03
ALFNNLRKTV

SEQ ID NO: 9795 - protein, 11 aa, Homo sapiens
  Table 1.2; STRA8; ENSG00000146857; HLA -A*29:02,HLA-A*30:02,HLA-A*32:01,HLA-B*15:01
ALFNNLRKTVY

SEQ ID NO: 9796 - protein, 9 aa, Homo sapiens
  Table 1.2; STRA8; ENSG00000146857; HLA -A*02:01,HLA-A*02:03,HLA-A*02:07,HLA-A*23:01,HLA-A*24:02, HLA-A*30:01,HLA-A*32:01,HLA-B*13:02,HLA-B*15:01,HLA-B*15:03, HLA-B*46:01,HLA-C*01:02
ALPIVSAAI

SEQ ID NO: 9797 - protein, 11 aa, Homo sapiens
  Table 1.2; STRA8; ENSG00000146857; HLA -A*03:02
ALPIVSAAISH

SEQ ID NO: 9798 - protein, 9 aa, Homo sapiens
  Table 1.2; STRA8; ENSG00000146857; HLA -A*31:01
AQLQELEHR

SEQ ID NO: 9799 - protein, 9 aa, Homo sapiens
  Table 1.2; STRA8; ENSG00000146857; HLA -A*30:02,HLA-A*32:01,HLA-B*15:01,HLA-B*15:03,HLA-B*27:05, HLA-B*35:01,HLA-B*35:03,HLA-B*40:01,HLA-B*46:01,HLA-B*57:01, HLA-B*58:01,HLA-C*02:02,HLA-C*03:04,HLA-C*16:02,HLA-C*16:04
ASFPVDEEM

SEQ ID NO: 9800 - protein, 9 aa, Homo sapiens
  Table 1.2; STRA8; ENSG00000146857; HLA -A*03:01,HLA-A*31:01
ASKWQVLNK

SEQ ID NO: 9801 - protein, 10 aa, Homo sapiens
  Table 1.2; STRA8; ENSG00000146857; HLA -A*03:01,HLA-A*11:01
ASLRQAWAQK

SEQ ID NO: 9802 - protein, 10 aa, Homo sapiens
  Table 1.2; STRA8; ENSG00000146857; HLA -B*58:01
ASMYSGNDSF

SEQ ID NO: 9803 - protein, 9 aa, Homo sapiens
  Table 1.2; STRA8; ENSG00000146857; HLA -A*11:01
ASSLEEVKK

SEQ ID NO: 9804 - protein, 11 aa, Homo sapiens
  Table 1.2; STRA8; ENSG00000146857; HLA -A*01:01,HLA-A*30:02,HLA-A*32:01,HLA-B*57:01
ASSLEEVKKEY

SEQ ID NO: 9805 - protein, 9 aa, Homo sapiens
  Table 1.2; STRA8; ENSG00000146857; HLA -A*31:01
ATLAALFNN

SEQ ID NO: 9806 - protein, 10 aa, Homo sapiens
  Table 1.2; STRA8; ENSG00000146857; HLA -A*03:01,HLA-A*11:01,HLA-A*31:01
ATLAALFNNL

SEQ ID NO: 9807 - protein, 11 aa, Homo sapiens
  Table 1.2; STRA8; ENSG00000146857; HLA -A*11:01,HLA-A*31:01
ATLAALFNNLR

SEQ ID NO: 9808 - protein, 10 aa, Homo sapiens
  Table 1.2; STRA8; ENSG00000146857; HLA -A*11:01
ATPEENSNPH

SEQ ID NO: 9809 - protein, 9 aa, Homo sapiens
  Table 1.2; STRA8; ENSG00000146857; HLA -A*02:07,HLA-A*24:02,HLA-A*31:01,HLA-A*32:01,HLA-A*68:02, HLA-C*01:02
ATPQLPAQL

SEQ ID NO: 9810 - protein, 8 aa, Homo sapiens
  Table 1.2; STRA8; ENSG00000146857; HLA -A*25:01,HLA-A*26:01,HLA-A*33:01,HLA-A*33:03,HLA-A*68:01, HLA-B*18:01,HLA-B*35:01,HLA-B*35:03,HLA-B*46:01,HLA-B*51:01
DAFDVASF

SEQ ID NO: 9811 - protein, 9 aa, Homo sapiens
  Table 1.2; STRA8; ENSG00000146857; HLA -A*23:01,HLA-A*25:01,HLA-A*26:01,HLA-A*33:01,HLA-A*33:03, HLA-A*68:01,HLA-A*68:02,HLA-B*18:01,HLA-B*35:01,HLA-B*35:03, HLA-B*38:01,HLA-B*39:01,HLA-B*51:01,HLA-C*02:02,HLA-C*07:06,
  HLA-C*12:03
DAFDVASFL

SEQ ID NO: 9812 - protein, 11 aa, Homo sapiens
  Table 1.2; STRA8; ENSG00000146857; HLA -A*11:01,HLA-A*33:01,HLA-A*68:01,HLA-A*68:02,HLA-B*27:02
DAFDVASFLDK

SEQ ID NO: 9813 - protein, 9 aa, Homo sapiens
  Table 1.2; STRA8; ENSG00000146857; HLA -B*18:01
DEEMIMLQC

SEQ ID NO: 9814 - protein, 9 aa, Homo sapiens
  Table 1.2; STRA8; ENSG00000146857; HLA -A*68:02
DLIASKWQV

SEQ ID NO: 9815 - protein, 11 aa, Homo sapiens
  Table 1.2; STRA8; ENSG00000146857; HLA -A*33:01
DLLTGSGIITP

SEQ ID NO: 9816 - protein, 10 aa, Homo sapiens
  Table 1.2; STRA8; ENSG00000146857; HLA -A*33:01
DNLLKLKASF

SEQ ID NO: 9817 - protein, 11 aa, Homo sapiens
  Table 1.2; STRA8; ENSG00000146857; HLA -B*39:01
DRATPQLPAQL

SEQ ID NO: 9818 - protein, 11 aa, Homo sapiens
  Table 1.2; STRA8; ENSG00000146857; HLA -A*01:01,HLA-A*25:01,HLA-A*26:01,HLA-A*33:01,HLA-A*33:03, HLA-A*68:01,HLA-B*57:01,HLA-B*58:01,HLA-C*04:01
DSFPQNGSSPW

SEQ ID NO: 9819 - protein, 8 aa, Homo sapiens
  Table 1.2; STRA8; ENSG00000146857; HLA -A*68:01,HLA-B*27:02
DVASFLDK

SEQ ID NO: 9820 - protein, 9 aa, Homo sapiens
  Table 1.2; STRA8; ENSG00000146857; HLA -A*33:01
DVASFLDKS

SEQ ID NO: 9821 - protein, 11 aa, Homo sapiens
  Table 1.2; STRA8; ENSG00000146857; HLA -A*26:01,HLA-A*68:02
DVASFLDKSEV

SEQ ID NO: 9822 - protein, 8 aa, Homo sapiens
  Table 1.2; STRA8; ENSG00000146857; HLA -A*01:01
DVDKILFF

SEQ ID NO: 9823 - protein, 9 aa, Homo sapiens
  Table 1.2; STRA8; ENSG00000146857; HLA -A*25:01,HLA-A*26:01,HLA-A*33:01,HLA-A*33:03,HLA-A*68:01, HLA-A*68:02,HLA-B*27:05,HLA-B*35:01,HLA-B*35:03,HLA-B*39:01, HLA-B*51:01,HLA-B*54:01,HLA-B*55:01,HLA-B*56:01,HLA-C*07:06,
  HLA-C*12:03
EAALPIVSA

SEQ ID NO: 9824 - protein, 11 aa, Homo sapiens
  Table 1.2; STRA8; ENSG00000146857; HLA -A*25:01
EAALPIVSAAI

SEQ ID NO: 9825 - protein, 10 aa, Homo sapiens
  Table 1.2; STRA8; ENSG00000146857; HLA -B*35:01,HLA-B*35:03
EASFPVDEEM

SEQ ID NO: 9826 - protein, 9 aa, Homo sapiens
  Table 1.2; STRA8; ENSG00000146857; HLA -A*25:01,HLA-A*26:01,HLA-B*18:01,HLA-B*44:02
EDAFDVASF

SEQ ID NO: 9827 - protein, 10 aa, Homo sapiens
  Table 1.2; STRA8; ENSG00000146857; HLA -A*68:02
EDAFDVASFL

SEQ ID NO: 9828 - protein, 8 aa, Homo sapiens
  Table 1.2; STRA8; ENSG00000146857; HLA -B*18:01
EEILFEDA

SEQ ID NO: 9829 - protein, 9 aa, Homo sapiens
  Table 1.2; STRA8; ENSG00000146857; HLA -B*18:01,HLA-B*27:02,HLA-B*44:02,HLA-B*44:03
EEILFEDAF

SEQ ID NO: 9830 - protein, 8 aa, Homo sapiens
  Table 1.2; STRA8; ENSG00000146857; HLA -B*18:01,HLA-B*49:01
EEMIMLQC

SEQ ID NO: 9831 - protein, 9 aa, Homo sapiens
  Table 1.2; STRA8; ENSG00000146857; HLA -A*33:01,HLA-A*33:03
EENSNPHDR

SEQ ID NO: 9832 - protein, 10 aa, Homo sapiens
  Table 1.2; STRA8; ENSG00000146857; HLA -A*30:01,HLA-B*40:02,HLA-B*44:02,HLA-B*44:03
EEVKKEYASM

SEQ ID NO: 9833 - protein, 11 aa, Homo sapiens
  Table 1.2; STRA8; ENSG00000146857; HLA -B*44:02,HLA-B*44:03
EEVKKEYASMY

SEQ ID NO: 9834 - protein, 10 aa, Homo sapiens
  Table 1.2; STRA8; ENSG00000146857; HLA -A*26:01
ENPEEKFQLY

SEQ ID NO: 9835 - protein, 10 aa, Homo sapiens
  Table 1.2; STRA8; ENSG00000146857; HLA -A*68:01
EPACAEGSVK

SEQ ID NO: 9836 - protein, 8 aa, Homo sapiens
  Table 1.2; STRA8; ENSG00000146857; HLA -B*38:01,HLA-B*39:01
EQTLDNLL

SEQ ID NO: 9837 - protein, 9 aa, Homo sapiens
  Table 1.2; STRA8; ENSG00000146857; HLA -A*25:01,HLA-A*26:01,HLA-A*33:01,HLA-A*33:03,HLA-B*08:01
EVKKEYASM

SEQ ID NO: 9838 - protein, 10 aa, Homo sapiens
  Table 1.2; STRA8; ENSG00000146857; HLA -A*25:01,HLA-A*26:01,HLA-A*30:02
EVKKEYASMY

SEQ ID NO: 9839 - protein, 9 aa, Homo sapiens
  Table 1.2; STRA8; ENSG00000146857; HLA -A*26:01
EVPSTSSSS

SEQ ID NO: 9840 - protein, 10 aa, Homo sapiens
  Table 1.2; STRA8; ENSG00000146857; HLA -A*26:01
EVPSTSSSSS

SEQ ID NO: 9841 - protein, 11 aa, Homo sapiens
  Table 1.2; STRA8; ENSG00000146857; HLA -A*25:01,HLA-A*26:01
EVPSTSSSSSV

SEQ ID NO: 9842 - protein, 9 aa, Homo sapiens
  Table 1.2; STRA8; ENSG00000146857; HLA -B*27:02
FDVASFLDK

SEQ ID NO: 9843 - protein, 8 aa, Homo sapiens
  Table 1.2; STRA8; ENSG00000146857; HLA -B*49:01
FEDAFDVA

SEQ ID NO: 9844 - protein, 10 aa, Homo sapiens
  Table 1.2; STRA8; ENSG00000146857; HLA -B*18:01,HLA-B*37:01,HLA-B*40:01,HLA-B*49:01
FEDAFDVASF

SEQ ID NO: 9845 - protein, 9 aa, Homo sapiens
  Table 1.2; STRA8; ENSG00000146857; HLA -B*57:01
FFNQEIRLW

SEQ ID NO: 9846 - protein, 10 aa, Homo sapiens
  Table 1.2; STRA8; ENSG00000146857; HLA -A*02:01
FLDKSEVPST

SEQ ID NO: 9847 - protein, 9 aa, Homo sapiens
  Table 1.2; STRA8; ENSG00000146857; HLA -B*08:01,HLA-B*46:01,HLA-C*16:01
FNNLRKTVY

SEQ ID NO: 9848 - protein, 10 aa, Homo sapiens
  Table 1.2; STRA8; ENSG00000146857; HLA -A*02:04
FNQEIRLWQL

SEQ ID NO: 9849 - protein, 9 aa, Homo sapiens
  Table 1.2; STRA8; ENSG00000146857; HLA -A*25:01,HLA-B*35:01
FPQNGSSPW

SEQ ID NO: 9850 - protein, 10 aa, Homo sapiens
  Table 1.2; STRA8; ENSG00000146857; HLA -A*30:02
FPQNGSSPWY

SEQ ID NO: 9851 - protein, 8 aa, Homo sapiens
  Table 1.2; STRA8; ENSG00000146857; HLA -B*35:03,HLA-B*51:01
FPVDEEMI

SEQ ID NO: 9852 - protein, 9 aa, Homo sapiens
  Table 1.2; STRA8; ENSG00000146857; HLA -B*35:01,HLA-B*35:03,HLA-B*54:01,HLA-B*55:01,HLA-C*03:03
FPVDEEMIM

SEQ ID NO: 9853 - protein, 10 aa, Homo sapiens
  Table 1.2; STRA8; ENSG00000146857; HLA -B*35:01,HLA-B*35:03,HLA-B*54:01,HLA-B*55:01
FPVDEEMIML

SEQ ID NO: 9854 - protein, 9 aa, Homo sapiens
  Table 1.2; STRA8; ENSG00000146857; HLA -A*23:01,HLA-A*24:02
FYKQTMDLL

SEQ ID NO: 9855 - protein, 9 aa, Homo sapiens
  Table 1.2; STRA8; ENSG00000146857; HLA -B*38:01,HLA-B*39:01
GHASSLEEV

SEQ ID NO: 9856 - protein, 10 aa, Homo sapiens
  Table 1.2; STRA8; ENSG00000146857; HLA -B*27:02,HLA-B*27:05
GHASSLEEVK

SEQ ID NO: 9857 - protein, 11 aa, Homo sapiens
  Table 1.2; STRA8; ENSG00000146857; HLA -B*27:05
GHASSLEEVKK

SEQ ID NO: 9858 - protein, 10 aa, Homo sapiens
  Table 1.2; STRA8; ENSG00000146857; HLA -B*40:01
GIITPQEAAL

SEQ ID NO: 9859 - protein, 10 aa, Homo sapiens
  Table 1.2; STRA8; ENSG00000146857; HLA -B*15:03
GKIDVDKILF

SEQ ID NO: 9860 - protein, 9 aa, Homo sapiens
  Table 1.2; STRA8; ENSG00000146857; HLA -A*02:01,HLA-A*02:03,HLA-B*13:02,HLA-B*55:01
GLSCANTQV

SEQ ID NO: 9861 - protein, 10 aa, Homo sapiens
  Table 1.2; STRA8; ENSG00000146857; HLA -A*03:01,HLA-A*03:02
GLSCANTQVK

SEQ ID NO: 9862 - protein, 8 aa, Homo sapiens
  Table 1.2; STRA8; ENSG00000146857; HLA -B*55:01,HLA-B*56:01
GPATLAEA

SEQ ID NO: 9863 - protein, 9 aa, Homo sapiens
  Table 1.2; STRA8; ENSG00000146857; HLA -B*56:01
GPATLAEAC

SEQ ID NO: 9864 - protein, 9 aa, Homo sapiens
  Table 1.2; STRA8; ENSG00000146857; HLA -B*57:01
GSSPWYLNF

SEQ ID NO: 9865 - protein, 10 aa, Homo sapiens
  Table 1.2; STRA8; ENSG00000146857; HLA -A*29:02,HLA-A*30:02
GSSPWYLNFY

SEQ ID NO: 9866 - protein, 11 aa, Homo sapiens
  Table 1.2; STRA8; ENSG00000146857; HLA -B*27:05,HLA-B*35:03
GVDSQGASCSL

SEQ ID NO: 9867 - protein, 8 aa, Homo sapiens
  Table 1.2; STRA8; ENSG00000146857; HLA -B*51:01,HLA-B*54:01
HASSLEEV

SEQ ID NO: 9868 - protein, 9 aa, Homo sapiens
  Table 1.2; STRA8; ENSG00000146857; HLA -A*68:01,HLA-B*27:02,HLA-B*35:01,HLA-C*07:06
HASSLEEVK

SEQ ID NO: 9869 - protein, 10 aa, Homo sapiens
  Table 1.2; STRA8; ENSG00000146857; HLA -A*03:02,HLA-A*11:01,HLA-A*68:01,HLA-B*27:02
HASSLEEVKK

SEQ ID NO: 9870 - protein, 8 aa, Homo sapiens
  Table 1.2; STRA8; ENSG00000146857; HLA -B*37:01
HDRATPQL

SEQ ID NO: 9871 - protein, 9 aa, Homo sapiens
  Table 1.2; STRA8; ENSG00000146857; HLA -A*02:07,HLA-A*68:02,HLA-B*27:05,HLA-B*35:03,HLA-B*38:01, HLA-B*39:01,HLA-B*51:01,HLA-C*01:02
HIPELEQTL

SEQ ID NO: 9872 - protein, 8 aa, Homo sapiens
  Table 1.2; STRA8; ENSG00000146857; HLA -B*37:01
IDVDKILF

SEQ ID NO: 9873 - protein, 9 aa, Homo sapiens
  Table 1.2; STRA8; ENSG00000146857; HLA -A*23:01,HLA-A*24:02,HLA-B*44:02,HLA-B*44:03,HLA-B*57:01
IDVDKILFF

SEQ ID NO: 9874 - protein, 9 aa, Homo sapiens
  Table 1.2; STRA8; ENSG00000146857; HLA -A*30:01,HLA-A*32:01,HLA-B*35:03,HLA-B*39:01,HLA-B*40:01, HLA-B*46:01,HLA-B*58:01,HLA-C*01:02,HLA-C*03:03,HLA-C*03:04, HLA-C*07:04
IITPQEAAL

SEQ ID NO: 9875 - protein, 9 aa, Homo sapiens
  Table 1.2; STRA8; ENSG00000146857; HLA -A*02:01,HLA-A*02:04,HLA-A*02:07,HLA-B*13:02
ILFEDAFDV

SEQ ID NO: 9876 - protein, 10 aa, Homo sapiens
  Table 1.2; STRA8; ENSG00000146857; HLA -A*02:01
ILFEDAFDVA

SEQ ID NO: 9877 - protein, 8 aa, Homo sapiens
  Table 1.2; STRA8; ENSG00000146857; HLA -B*13:02
ILFFNQEI

SEQ ID NO: 9878 - protein, 10 aa, Homo sapiens
  Table 1.2; STRA8; ENSG00000146857; HLA -A*02:01,HLA-A*02:04
ILFFNQEIRL

SEQ ID NO: 9879 - protein, 11 aa, Homo sapiens
  Table 1.2; STRA8; ENSG00000146857; HLA -B*57:01
ILFFNQEIRLW

SEQ ID NO: 9880 - protein, 9 aa, Homo sapiens
  Table 1.2; STRA8; ENSG00000146857; HLA -A*23:01,HLA-A*24:02,HLA-B*58:01
IMLQCTETF

SEQ ID NO: 9881 - protein, 8 aa, Homo sapiens
  Table 1.2; STRA8; ENSG00000146857; HLA -B*35:03
IPELEQTL

SEQ ID NO: 9882 - protein, 11 aa, Homo sapiens
  Table 1.2; STRA8; ENSG00000146857; HLA -A*02:07
ITPQEAALPIV

SEQ ID NO: 9883 - protein, 9 aa, Homo sapiens
  Table 1.2; STRA8; ENSG00000146857; HLA -A*02:03,HLA-A*02:04,HLA-A*03:01,HLA-A*23:01,HLA-A*25:01, HLA-A*26:01,HLA-A*32:01,HLA-A*68:01,HLA-A*68:02,HLA-B*27:05, HLA-B*58:01,HLA-C*01:02,HLA-C*03:04,HLA-C*05:01,HLA-C*07:04
IVSAAISHL

SEQ ID NO: 9884 - protein, 10 aa, Homo sapiens
  Table 1.2; STRA8; ENSG00000146857; HLA -A*24:02,HLA-A*25:01,HLA-B*44:02,HLA-B*57:01,HLA-B*58:01
IVSAAISHLW

SEQ ID NO: 9885 - protein, 9 aa, Homo sapiens
  Table 1.2; STRA8; ENSG00000146857; HLA -B*46:01,HLA-B*58:01,HLA-C*12:03
KAKSHIPEL

SEQ ID NO: 9886 - protein, 8 aa, Homo sapiens
  Table 1.2; STRA8; ENSG00000146857; HLA -A*32:01,HLA-C*16:01
KASLRQAW

SEQ ID NO: 9887 - protein, 9 aa, Homo sapiens
  Table 1.2; STRA8; ENSG00000146857; HLA -B*40:02,HLA-B*49:01
KEYASMYSG

SEQ ID NO: 9888 - protein, 9 aa, Homo sapiens
  Table 1.2; STRA8; ENSG00000146857; HLA -A*02:07
KIDVDKILF

SEQ ID NO: 9889 - protein, 10 aa, Homo sapiens
  Table 1.2; STRA8; ENSG00000146857; HLA -A*02:07
KIDVDKILFF

SEQ ID NO: 9890 - protein, 9 aa, Homo sapiens
  Table 1.2; STRA8; ENSG00000146857; HLA -A*02:01,HLA-A*02:04,HLA-A*02:07
KILFFNQEI

SEQ ID NO: 9891 - protein, 9 aa, Homo sapiens
  Table 1.2; STRA8; ENSG00000146857; HLA -B*58:01
KTVYSQSDL

SEQ ID NO: 9892 - protein, 10 aa, Homo sapiens
  Table 1.2; STRA8; ENSG00000146857; HLA -B*07:02
KTVYSQSDLI

SEQ ID NO: 9893 - protein, 8 aa, Homo sapiens
  Table 1.2; STRA8; ENSG00000146857; HLA -B*51:01,HLA-C*03:03,HLA-C*03:04
LAALFNNL

SEQ ID NO: 9894 - protein, 9 aa, Homo sapiens
  Table 1.2; STRA8; ENSG00000146857; HLA -A*68:01
LAALFNNLR

SEQ ID NO: 9895 - protein, 9 aa, Homo sapiens
  Table 1.2; STRA8; ENSG00000146857; HLA -A*30:01,HLA-B*07:02,HLA-B*18:01,HLA-B*35:03,HLA-B*37:01, HLA-B*38:01,HLA-B*39:01,HLA-B*40:01,HLA-B*40:02,HLA-B*44:02, HLA-B*44:03,HLA-B*49:01,HLA-C*03:03,HLA-C*03:04,HLA-C*05:01
LEDGHASSL

SEQ ID NO: 9896 - protein, 8 aa, Homo sapiens
  Table 1.2; STRA8; ENSG00000146857; HLA -B*18:01,HLA-B*44:02,HLA-B*44:03
LEEVKKEY

SEQ ID NO: 9897 - protein, 9 aa, Homo sapiens
  Table 1.2; STRA8; ENSG00000146857; HLA -B*40:01
LEQTLDNLL

SEQ ID NO: 9898 - protein, 10 aa, Homo sapiens
  Table 1.2; STRA8; ENSG00000146857; HLA -B*57:01
LFFNQEIRLW

SEQ ID NO: 9899 - protein, 10 aa, Homo sapiens
  Table 1.2; STRA8; ENSG00000146857; HLA -A*29:02
LFNNLRKTVY

SEQ ID NO: 9900 - protein, 8 aa, Homo sapiens
  Table 1.2; STRA8; ENSG00000146857; HLA -B*08:01
LLKLKASF

SEQ ID NO: 9901 - protein, 8 aa, Homo sapiens
  Table 1.2; STRA8; ENSG00000146857; HLA -B*08:01
LNFYKQTM

SEQ ID NO: 9902 - protein, 8 aa, Homo sapiens
  Table 1.2; STRA8; ENSG00000146857; HLA -B*07:02,HLA-B*08:01,HLA-B*35:01,HLA-B*35:03,HLA-B*51:01, HLA-B*56:01
LPAQLQEL

SEQ ID NO: 9903 - protein, 10 aa, Homo sapiens
  Table 1.2; STRA8; ENSG00000146857; HLA -B*35:01
LPAQLQELEH

SEQ ID NO: 9904 - protein, 8 aa, Homo sapiens
  Table 1.2; STRA8; ENSG00000146857; HLA -B*07:02,HLA-B*08:01,HLA-B*35:01,HLA-B*35:03,HLA-B*51:01, HLA-B*54:01,HLA-B*56:01
LPIVSAAI

SEQ ID NO: 9905 - protein, 11 aa, Homo sapiens
  Table 1.2; STRA8; ENSG00000146857; HLA -B*35:03
LPIVSAAISHL

SEQ ID NO: 9906 - protein, 9 aa, Homo sapiens
  Table 1.2; STRA8; ENSG00000146857; HLA -B*08:01,HLA-C*01:02,HLA-C*03:03,HLA-C*03:04
LSEERKASL

SEQ ID NO: 9907 - protein, 9 aa, Homo sapiens
  Table 1.2; STRA8; ENSG00000146857; HLA -B*35:03
LVSTPEEIL

SEQ ID NO: 9908 - protein, 10 aa, Homo sapiens
  Table 1.2; STRA8; ENSG00000146857; HLA -B*27:02,HLA-B*57:01
LVSTPEEILF

SEQ ID NO: 9909 - protein, 8 aa, Homo sapiens
  Table 1.2; STRA8; ENSG00000146857; HLA -A*23:01,HLA-A*24:02
LYMQIINF

SEQ ID NO: 9910 - protein, 9 aa, Homo sapiens
  Table 1.2; STRA8; ENSG00000146857; HLA -A*23:01,HLA-A*24:02,HLA-A*29:02
LYMQIINFF

SEQ ID NO: 9911 - protein, 11 aa, Homo sapiens
  Table 1.2; STRA8; ENSG00000146857; HLA -C*04:01
MATPEENSNPH

SEQ ID NO: 9912 - protein, 8 aa, Homo sapiens
  Table 1.2; STRA8; ENSG00000146857; HLA -B*39:01,HLA-C*04:01,HLA-C*14:02
MYSGNDSF

SEQ ID NO: 9913 - protein, 10 aa, Homo sapiens
  Table 1.2; STRA8; ENSG00000146857; HLA -A*02:03,HLA-C*01:02
NLEDGHASSL

SEQ ID NO: 9914 - protein, 10 aa, Homo sapiens
  Table 1.2; STRA8; ENSG00000146857; HLA -B*07:02,HLA-B*08:01
NLSEERKASL

SEQ ID NO: 9915 - protein, 8 aa, Homo sapiens
  Table 1.2; STRA8; ENSG00000146857; HLA -B*08:01
NPEEKFQL

SEQ ID NO: 9916 - protein, 9 aa, Homo sapiens
  Table 1.2; STRA8; ENSG00000146857; HLA -A*01:01,HLA-A*29:02,HLA-B*35:01,HLA-B*55:01,HLA-C*03:03
NPEEKFQLY

SEQ ID NO: 9917 - protein, 9 aa, Homo sapiens
  Table 1.2; STRA8; ENSG00000146857; HLA -B*35:01,HLA-B*35:03,HLA-B*38:01,HLA-B*55:01,HLA-C*03:03, HLA-C*05:01
NPENPEEKF

SEQ ID NO: 9918 - protein, 10 aa, Homo sapiens
  Table 1.2; STRA8; ENSG00000146857; HLA -B*07:02,HLA-B*35:03,HLA-C*07:02
NPHDRATPQL

SEQ ID NO: 9919 - protein, 9 aa, Homo sapiens
  Table 1.2; STRA8; ENSG00000146857; HLA -A*02:04
NQEIRLWQL

SEQ ID NO: 9920 - protein, 8 aa, Homo sapiens
  Table 1.2; STRA8; ENSG00000146857; HLA -B*18:01
PEEKFQLY

SEQ ID NO: 9921 - protein, 11 aa, Homo sapiens
  Table 1.2; STRA8; ENSG00000146857; HLA -A*01:01,HLA-A*29:02,HLA-A*30:02,HLA-B*44:02
PENPEEKFQLY

SEQ ID NO: 9922 - protein, 9 aa, Homo sapiens
  Table 1.2; STRA8; ENSG00000146857; HLA -B*38:01
PHDRATPQL

SEQ ID NO: 9923 - protein, 9 aa, Homo sapiens
  Table 1.2; STRA8; ENSG00000146857; HLA -A*30:02
PQNGSSPWY

SEQ ID NO: 9924 - protein, 9 aa, Homo sapiens
  Table 1.2; STRA8; ENSG00000146857; HLA -A*02:07
PVDEEMIML

SEQ ID NO: 9925 - protein, 8 aa, Homo sapiens
  Table 1.2; STRA8; ENSG00000146857; HLA -B*08:01
QARHRATL

SEQ ID NO: 9926 - protein, 8 aa, Homo sapiens
  Table 1.2; STRA8; ENSG00000146857; HLA -B*49:01
QEAALPIV

SEQ ID NO: 9927 - protein, 10 aa, Homo sapiens
  Table 1.2; STRA8; ENSG00000146857; HLA -A*30:01,HLA-B*40:02,HLA-B*49:01,HLA-B*56:01
QEAALPIVSA

SEQ ID NO: 9928 - protein, 11 aa, Homo sapiens
  Table 1.2; STRA8; ENSG00000146857; HLA -B*40:01
QEASFPVDEEM

SEQ ID NO: 9929 - protein, 9 aa, Homo sapiens
  Table 1.2; STRA8; ENSG00000146857; HLA -B*44:02,HLA-B*44:03,HLA-B*49:01
QEIRLWQLI

SEQ ID NO: 9930 - protein, 9 aa, Homo sapiens
  Table 1.2; STRA8; ENSG00000146857; HLA -B*44:02
QELEHRVAR

SEQ ID NO: 9931 - protein, 9 aa, Homo sapiens
  Table 1.2; STRA8; ENSG00000146857; HLA -A*02:07,HLA-A*68:02
QIINFFKGL

SEQ ID NO: 9932 - protein, 9 aa, Homo sapiens
  Table 1.2; STRA8; ENSG00000146857; HLA -B*15:03
QKHRGPATL

SEQ ID NO: 9933 - protein, 9 aa, Homo sapiens
  Table 1.2; STRA8; ENSG00000146857; HLA -A*02:07,HLA-C*01:02
QLPAQLQEL

SEQ ID NO: 9934 - protein, 9 aa, Homo sapiens
  Table 1.2; STRA8; ENSG00000146857; HLA -A*02:01,HLA-A*02:03,HLA-A*02:04,HLA-A*02:07,HLA-B*13:02, HLA-B*55:01,HLA-C*16:02
QLQELEHRV

SEQ ID NO: 9935 - protein, 11 aa, Homo sapiens
  Table 1.2; STRA8; ENSG00000146857; HLA -A*31:01
QLQELEHRVAR

SEQ ID NO: 9936 - protein, 9 aa, Homo sapiens
  Table 1.2; STRA8; ENSG00000146857; HLA -A*02:04,HLA-B*44:02,HLA-B*44:03
QLYMQIINF

SEQ ID NO: 9937 - protein, 9 aa, Homo sapiens
  Table 1.2; STRA8; ENSG00000146857; HLA -A*01:01,HLA-A*25:01,HLA-A*32:01,HLA-B*07:02,HLA-B*38:01, HLA-B*44:02,HLA-B*44:03,HLA-B*57:01,HLA-B*58:01,HLA-C*05:01, HLA-C*16:04
QSDLIASKW

SEQ ID NO: 9938 - protein, 8 aa, Homo sapiens
  Table 1.2; STRA8; ENSG00000146857; HLA -A*11:01
QTLDNLLK

SEQ ID NO: 9939 - protein, 9 aa, Homo sapiens
  Table 1.2; STRA8; ENSG00000146857; HLA -A*01:01,HLA-A*02:01,HLA-A*02:04,HLA-A*02:07,HLA-A*03:01, HLA-A*11:01,HLA-A*23:01,HLA-A*24:02,HLA-A*25:01,HLA-A*29:02, HLA-A*31:01,HLA-A*33:03,HLA-A*68:02,HLA-B*40:02,HLA-C*06:02
QTLDNLLKL

SEQ ID NO: 9940 - protein, 10 aa, Homo sapiens
  Table 1.2; STRA8; ENSG00000146857; HLA -A*03:01,HLA-A*03:02,HLA-A*11:01,HLA-B*27:02
QTLDNLLKLK

SEQ ID NO: 9941 - protein, 8 aa, Homo sapiens
  Table 1.2; STRA8; ENSG00000146857; HLA -B*37:01,HLA-B*58:01
RATLAALF

SEQ ID NO: 9942 - protein, 10 aa, Homo sapiens
  Table 1.2; STRA8; ENSG00000146857; HLA -B*58:01
RATPQLPAQL

SEQ ID NO: 9943 - protein, 9 aa, Homo sapiens
  Table 1.2; STRA8; ENSG00000146857; HLA -B*46:01
RGPATLAEA

SEQ ID NO: 9944 - protein, 8 aa, Homo sapiens
  Table 1.2; STRA8; ENSG00000146857; HLA -B*57:01,HLA-B*58:01
SAAISHLW

SEQ ID NO: 9945 - protein, 8 aa, Homo sapiens
  Table 1.2; STRA8; ENSG00000146857; HLA -B*18:01,HLA-B*27:02,HLA-B*37:01,HLA-B*44:02,HLA-B*44:03
SDLIASKW

SEQ ID NO: 9946 - protein, 8 aa, Homo sapiens
  Table 1.2; STRA8; ENSG00000146857; HLA -B*37:01
SEERKASL

SEQ ID NO: 9947 - protein, 9 aa, Homo sapiens
  Table 1.2; STRA8; ENSG00000146857; HLA -B*49:01
SEVPSTSSS

SEQ ID NO: 9948 - protein, 10 aa, Homo sapiens
  Table 1.2; STRA8; ENSG00000146857; HLA -B*27:05,HLA-B*38:01,HLA-B*39:01
SHIPELEQTL

SEQ ID NO: 9949 - protein, 9 aa, Homo sapiens
  Table 1.2; STRA8; ENSG00000146857; HLA -A*01:01,HLA-A*29:02,HLA-A*30:02,HLA-A*32:01,HLA-B*15:01, HLA-B*15:03,HLA-B*18:01,HLA-B*44:02,HLA-B*44:03,HLA-B*46:01, HLA-B*58:01,HLA-C*07:04,HLA-C*16:01,HLA-C*16:02,HLA-C*16:04
SLEEVKKEY

SEQ ID NO: 9950 - protein, 9 aa, Homo sapiens
  Table 1.2; STRA8; ENSG00000146857; HLA -A*03:01
SLRQAWAQK

SEQ ID NO: 9951 - protein, 9 aa, Homo sapiens
  Table 1.2; STRA8; ENSG00000146857; HLA -A*02:01,HLA-A*02:03,HLA-B*13:02
SLVSTPEEI

SEQ ID NO: 9952 - protein, 9 aa, Homo sapiens
  Table 1.2; STRA8; ENSG00000146857; HLA -A*02:01,HLA-A*23:01,HLA-A*24:02,HLA-A*25:01,HLA-A*26:01, HLA-A*29:02,HLA-A*30:02,HLA-A*32:01,HLA-B*07:02,HLA-B*13:02, HLA-B*15:01,HLA-B*15:03,HLA-B*27:05,HLA-B*35:01,HLA-B*37:01,
  HLA-B*38:01,HLA-B*39:01,HLA-B*46:01,HLA-B*55:01,HLA-B*58:01, HLA-C*01:02,HLA-C*02:02,HLA-C*05:01,HLA-C*07:04,HLA-C*14:02, HLA-C*16:01,HLA-C*16:04
SMYSGNDSF

SEQ ID NO: 9953 - protein, 9 aa, Homo sapiens
  Table 1.2; STRA8; ENSG00000146857; HLA -B*15:03
SQARHRATL

SEQ ID NO: 9954 - protein, 9 aa, Homo sapiens
  Table 1.2; STRA8; ENSG00000146857; HLA -B*13:02
SQGASCSLV

SEQ ID NO: 9955 - protein, 9 aa, Homo sapiens
  Table 1.2; STRA8; ENSG00000146857; HLA -A*03:02,HLA-A*11:01,HLA-B*27:05,HLA-C*07:06
SQSDLIASK

SEQ ID NO: 9956 - protein, 10 aa, Homo sapiens
  Table 1.2; STRA8; ENSG00000146857; HLA -A*11:01,HLA-A*23:01,HLA-A*24:02,HLA-A*25:01,HLA-A*26:01, HLA-A*30:01,HLA-A*30:02,HLA-A*32:01,HLA-A*68:02,HLA-B*13:02, HLA-B*15:01,HLA-B*27:02,HLA-B*27:05,HLA-B*38:01,HLA-B*44:02,
  HLA-B*44:03,HLA-B*57:01,HLA-B*58:01,HLA-C*02:02,HLA-C*07:04, HLA-C*07:06,HLA-C*12:03,HLA-C*16:04
SQSDLIASKW

SEQ ID NO: 9957 - protein, 10 aa, Homo sapiens
  Table 1.2; STRA8; ENSG00000146857; HLA -A*29:02,HLA-A*30:02,HLA-B*44:02,HLA-B*44:03,HLA-B*57:01, HLA-B*58:01
SSLEEVKKEY

SEQ ID NO: 9958 - protein, 9 aa, Homo sapiens
  Table 1.2; STRA8; ENSG00000146857; HLA -B*56:01
SSSSVLASC

SEQ ID NO: 9959 - protein, 10 aa, Homo sapiens
  Table 1.2; STRA8; ENSG00000146857; HLA -C*06:02
SSSSVLASCN

SEQ ID NO: 9960 - protein, 9 aa, Homo sapiens
  Table 1.2; STRA8; ENSG00000146857; HLA -B*35:03,HLA-B*39:01,HLA-C*03:03
STSSSSSVL

SEQ ID NO: 9961 - protein, 9 aa, Homo sapiens
  Table 1.2; STRA8; ENSG00000146857; HLA -A*30:01,HLA-B*40:01,HLA-B*40:02
TETFDDEDL

SEQ ID NO: 9962 - protein, 9 aa, Homo sapiens
  Table 1.2; STRA8; ENSG00000146857; HLA -B*07:02,HLA-B*27:05,HLA-C*04:01,HLA-C*06:02,HLA-C*12:03
TGSGIITPQ

SEQ ID NO: 9963 - protein, 9 aa, Homo sapiens
  Table 1.2; STRA8; ENSG00000146857; HLA -A*02:01,HLA-A*02:03,HLA-A*02:04,HLA-A*02:07,HLA-A*03:01, HLA-A*03:02,HLA-A*23:01,HLA-A*24:02,HLA-A*25:01,HLA-A*30:01, HLA-A*31:01,HLA-A*32:01,HLA-A*33:03,HLA-A*68:01,HLA-A*68:02,
  HLA-B*13:02,HLA-B*27:05,HLA-B*35:03,HLA-B*38:01,HLA-B*39:01, HLA-B*40:02,HLA-B*55:01,HLA-C*01:02,HLA-C*02:02,HLA-C*06:02, HLA-C*07:04
TLAALFNNL

SEQ ID NO: 9964 - protein, 8 aa, Homo sapiens
  Table 1.2; STRA8; ENSG00000146857; HLA -A*01:01,HLA-A*02:01,HLA-A*02:04,HLA-A*02:07
TLDNLLKL

SEQ ID NO: 9965 - protein, 9 aa, Homo sapiens
  Table 1.2; STRA8; ENSG00000146857; HLA -A*03:01,HLA-A*03:02
TLDNLLKLK

SEQ ID NO: 9966 - protein, 10 aa, Homo sapiens
  Table 1.2; STRA8; ENSG00000146857; HLA -A*02:07
TLDNLLKLKA

SEQ ID NO: 9967 - protein, 10 aa, Homo sapiens
  Table 1.2; STRA8; ENSG00000146857; HLA -C*04:01
TMDLLTGSGI

SEQ ID NO: 9968 - protein, 11 aa, Homo sapiens
  Table 1.2; STRA8; ENSG00000146857; HLA -B*35:01,HLA-B*55:01
TPEEILFEDAF

SEQ ID NO: 9969 - protein, 9 aa, Homo sapiens
  Table 1.2; STRA8; ENSG00000146857; HLA -B*35:01,HLA-B*55:01
TPEENSNPH

SEQ ID NO: 9970 - protein, 11 aa, Homo sapiens
  Table 1.2; STRA8; ENSG00000146857; HLA -A*68:01
TPEENSNPHDR

SEQ ID NO: 9971 - protein, 9 aa, Homo sapiens
  Table 1.2; STRA8; ENSG00000146857; HLA -B*35:03,HLA-B*51:01
TPQEAALPI

SEQ ID NO: 9972 - protein, 10 aa, Homo sapiens
  Table 1.2; STRA8; ENSG00000146857; HLA -B*54:01,HLA-B*56:01
TPQEAALPIV

SEQ ID NO: 9973 - protein, 8 aa, Homo sapiens
  Table 1.2; STRA8; ENSG00000146857; HLA -B*07:02,HLA-B*08:01,HLA-C*07:02
TPQLPAQL

SEQ ID NO: 9974 - protein, 11 aa, Homo sapiens
  Table 1.2; STRA8; ENSG00000146857; HLA -B*07:02,HLA-C*07:02
TPQLPAQLQEL

SEQ ID NO: 9975 - protein, 9 aa, Homo sapiens
  Table 1.2; STRA8; ENSG00000146857; HLA -A*23:01,HLA-A*32:01,HLA-B*13:02,HLA-B*15:01,HLA-B*15:03, HLA-B*18:01,HLA-B*27:02,HLA-B*27:05,HLA-B*38:01,HLA-B*39:01, HLA-B*44:03,HLA-B*46:01,HLA-B*58:01,HLA-C*07:04,HLA-C*16:04
TQVKQEASF

SEQ ID NO: 9976 - protein, 8 aa, Homo sapiens
  Table 1.2; STRA8; ENSG00000146857; HLA -C*05:01
TSSSSSVL

SEQ ID NO: 9977 - protein, 9 aa, Homo sapiens
  Table 1.2; STRA8; ENSG00000146857; HLA -A*68:02,HLA-B*13:02,HLA-B*27:05,HLA-B*38:01,HLA-B*49:01, HLA-B*51:01
TVYSQSDLI

SEQ ID NO: 9978 - protein, 10 aa, Homo sapiens
  Table 1.2; STRA8; ENSG00000146857; HLA -B*54:01,HLA-B*56:01
TVYSQSDLIA

SEQ ID NO: 9979 - protein, 11 aa, Homo sapiens
  Table 1.2; STRA8; ENSG00000146857; HLA -A*03:01,HLA-A*11:01,HLA-A*31:01,HLA-A*33:01
TVYSQSDLIAS

SEQ ID NO: 9980 - protein, 10 aa, Homo sapiens
  Table 1.2; STRA8; ENSG00000146857; HLA -B*37:01
VDSQGASCSL

SEQ ID NO: 9981 - protein, 9 aa, Homo sapiens
  Table 1.2; STRA8; ENSG00000146857; HLA -B*15:03
VKKEYASMY

SEQ ID NO: 9982 - protein, 10 aa, Homo sapiens
  Table 1.2; STRA8; ENSG00000146857; HLA -B*07:02,HLA-B*56:01
VPSTSSSSSV

SEQ ID NO: 9983 - protein, 11 aa, Homo sapiens
  Table 1.2; STRA8; ENSG00000146857; HLA -B*07:02,HLA-B*35:01,HLA-B*35:03,HLA-B*55:01,HLA-C*03:03, HLA-C*07:02
VPSTSSSSSVL

SEQ ID NO: 9984 - protein, 9 aa, Homo sapiens
  Table 1.2; STRA8; ENSG00000146857; HLA -A*01:01,HLA-A*23:01,HLA-A*24:02,HLA-A*25:01,HLA-A*32:01, HLA-B*44:02,HLA-B*44:03,HLA-B*57:01,HLA-B*58:01
VSAAISHLW

SEQ ID NO: 9985 - protein, 9 aa, Homo sapiens
  Table 1.2; STRA8; ENSG00000146857; HLA -A*23:01,HLA-B*57:01,HLA-B*58:01
VSTPEEILF

SEQ ID NO: 9986 - protein, 8 aa, Homo sapiens
  Table 1.2; STRA8; ENSG00000146857; HLA -A*24:02
VYSQSDLI

SEQ ID NO: 9987 - protein, 11 aa, Homo sapiens
  Table 1.2; STRA8; ENSG00000146857; HLA -A*33:01
VYSQSDLIASK

SEQ ID NO: 9988 - protein, 11 aa, Homo sapiens
  Table 1.2; STRA8; ENSG00000146857; HLA -B*38:01
YASMYSGNDSF

SEQ ID NO: 9989 - protein, 9 aa, Homo sapiens
  Table 1.2; STRA8; ENSG00000146857; HLA -A*02:04,HLA-B*08:01
YLNFYKQTM

SEQ ID NO: 9990 - protein, 10 aa, Homo sapiens
  Table 1.2; STRA8; ENSG00000146857; HLA -A*01:01,HLA-A*03:02,HLA-A*11:01,HLA-B*27:02
YSQSDLIASK

SEQ ID NO: 9991 - protein, 11 aa, Homo sapiens
  Table 1.2; STRA8; ENSG00000146857; HLA -A*01:01,HLA-A*25:01,HLA-A*32:01,HLA-A*33:01,HLA-B*44:02, HLA-B*57:01,HLA-B*58:01,HLA-C*12:03
YSQSDLIASKW

SEQ ID NO: 9992 - protein, 8 aa, Homo sapiens
  Table 1.2; TFDP3; ENSG00000183434; HLA -B*13:02,HLA-C*12:03
AASNIPVV

SEQ ID NO: 9993 - protein, 10 aa, Homo sapiens
  Table 1.2; TFDP3; ENSG00000183434; HLA -A*30:01,HLA-B*40:01,HLA-B*44:02,HLA-B*44:03
AEDLKMARNL

SEQ ID NO: 9994 - protein, 8 aa, Homo sapiens
  Table 1.2; TFDP3; ENSG00000183434; HLA -A*31:01
AFKNLVLR

SEQ ID NO: 9995 - protein, 9 aa, Homo sapiens
  Table 1.2; TFDP3; ENSG00000183434; HLA -B*58:01
AGSRSNGTW

SEQ ID NO: 9996 - protein, 9 aa, Homo sapiens
  Table 1.2; TFDP3; ENSG00000183434; HLA -B*15:03
AKYVSLTEA

SEQ ID NO: 9997 - protein, 9 aa, Homo sapiens
  Table 1.2; TFDP3; ENSG00000183434; HLA -A*01:01,HLA-A*02:01,HLA-A*02:03,HLA-A*02:04,HLA-A*02:07, HLA-A*29:02,HLA-A*32:01,HLA-B*13:02,HLA-B*15:01,HLA-B*39:01, HLA-B*46:01,HLA-B*55:01,HLA-C*01:02,HLA-C*05:01,HLA-C*07:04,
  HLA-C*16:02
ALEPYVTEM

SEQ ID NO: 9998 - protein, 9 aa, Homo sapiens
  Table 1.2; TFDP3; ENSG00000183434; HLA -A*03:01,HLA-A*03:02,HLA-A*11:01,HLA-A*31:01
AMNIISREK

SEQ ID NO: 9999 - protein, 8 aa, Homo sapiens
  Table 1.2; TFDP3; ENSG00000183434; HLA -B*13:02
AQGTFGGV

SEQ ID NO: 10000 - protein, 9 aa, Homo sapiens
  Table 1.2; TFDP3; ENSG00000183434; HLA -A*26:01,HLA-A*30:02,HLA-A*32:01,HLA-B*13:02,HLA-B*15:01, HLA-B*15:03,HLA-B*27:02,HLA-B*27:05,HLA-B*37:01,HLA-B*38:01, HLA-B*39:01,HLA-B*44:02,HLA-B*44:03,HLA-B*46:01,HLA-C*02:02,
  HLA-C*04:01,HLA-C*07:04,HLA-C*16:04
AQGTFGGVF

SEQ ID NO: 10001 - protein, 9 aa, Homo sapiens
  Table 1.2; TFDP3; ENSG00000183434; HLA -B*13:02
AQNCQNLRV

SEQ ID NO: 10002 - protein, 9 aa, Homo sapiens
  Table 1.2; TFDP3; ENSG00000183434; HLA -B*27:05,HLA-C*16:04
ARNLVPKAL

SEQ ID NO: 10003 - protein, 9 aa, Homo sapiens
  Table 1.2; TFDP3; ENSG00000183434; HLA -A*01:01,HLA-B*38:01,HLA-B*58:01,HLA-C*05:01
ASDLTNIAI

SEQ ID NO: 10004 - protein, 11 aa, Homo sapiens
  Table 1.2; TFDP3; ENSG00000183434; HLA -A*01:01
ASDLTNIAIGM

SEQ ID NO: 10005 - protein, 9 aa, Homo sapiens
  Table 1.2; TFDP3; ENSG00000183434; HLA -A*31:01
ASNIPVVGS

SEQ ID NO: 10006 - protein, 11 aa, Homo sapiens
  Table 1.2; TFDP3; ENSG00000183434; HLA -A*03:02,HLA-A*11:01
ASPNESAYDVK

SEQ ID NO: 10007 - protein, 8 aa, Homo sapiens
  Table 1.2; TFDP3; ENSG00000183434; HLA -A*30:02,HLA-A*32:01,HLA-B*39:01,HLA-B*58:01,HLA-C*16:01, HLA-C*16:02
ASQNQHSY

SEQ ID NO: 10008 - protein, 9 aa, Homo sapiens
  Table 1.2; TFDP3; ENSG00000183434; HLA -A*01:01,HLA-A*11:01,HLA-A*25:01,HLA-A*26:01,HLA-A*29:02, HLA-A*30:02,HLA-A*32:01,HLA-B*15:01,HLA-B*15:03,HLA-B*39:01, HLA-B*46:01,HLA-B*58:01,HLA-C*01:02,HLA-C*02:02,HLA-C*07:04,
  HLA-C*14:02,HLA-C*16:01,HLA-C*16:02
ATSSGGSQY

SEQ ID NO: 10009 - protein, 9 aa, Homo sapiens
  Table 1.2; TFDP3; ENSG00000183434; HLA -A*31:01,HLA-A*33:03
AYDVKNIKR

SEQ ID NO: 10010 - protein, 9 aa, Homo sapiens
  Table 1.2; TFDP3; ENSG00000183434; HLA -B*13:02
CQEVVGELV

SEQ ID NO: 10011 - protein, 11 aa, Homo sapiens
  Table 1.2; TFDP3; ENSG00000183434; HLA -B*27:02
CQEVVGELVAK

SEQ ID NO: 10012 - protein, 10 aa, Homo sapiens
  Table 1.2; TFDP3; ENSG00000183434; HLA -A*01:01,HLA-A*30:02,HLA-B*15:01
CSISDDKSEY

SEQ ID NO: 10013 - protein, 8 aa, Homo sapiens
  Table 1.2; TFDP3; ENSG00000183434; HLA -B*51:01,HLA-B*54:01
DALNVLMA

SEQ ID NO: 10014 - protein, 9 aa, Homo sapiens
  Table 1.2; TFDP3; ENSG00000183434; HLA -A*23:01,HLA-A*25:01,HLA-A*26:01,HLA-A*33:01,HLA-A*33:03, HLA-B*18:01,HLA-B*35:01,HLA-B*35:03,HLA-B*46:01,HLA-B*51:01, HLA-B*54:01
DALNVLMAM

SEQ ID NO: 10015 - protein, 9 aa, Homo sapiens
  Table 1.2; TFDP3; ENSG00000183434; HLA -A*33:01
DDKSEYLFK

SEQ ID NO: 10016 - protein, 8 aa, Homo sapiens
  Table 1.2; TFDP3; ENSG00000183434; HLA -B*18:01
DDTEVLMW

SEQ ID NO: 10017 - protein, 9 aa, Homo sapiens
  Table 1.2; TFDP3; ENSG00000183434; HLA -B*18:01
DENQTSRPV

SEQ ID NO: 10018 - protein, 10 aa, Homo sapiens
  Table 1.2; TFDP3; ENSG00000183434; HLA -B*18:01
DENQTSRPVA

SEQ ID NO: 10019 - protein, 11 aa, Homo sapiens
  Table 1.2; TFDP3; ENSG00000183434; HLA -A*30:01,HLA-A*33:01,HLA-B*18:01
DENQTSRPVAV

SEQ ID NO: 10020 - protein, 8 aa, Homo sapiens
  Table 1.2; TFDP3; ENSG00000183434; HLA -B*08:01
DLKMARNL

SEQ ID NO: 10021 - protein, 11 aa, Homo sapiens
  Table 1.2; TFDP3; ENSG00000183434; HLA -A*33:01
DLKMARNLVPK

SEQ ID NO: 10022 - protein, 9 aa, Homo sapiens
  Table 1.2; TFDP3; ENSG00000183434; HLA -A*26:01,HLA-A*33:01,HLA-A*33:03,HLA-A*68:01,HLA-A*68:02, HLA-B*39:01,HLA-C*07:04
DLTNIAIGM

SEQ ID NO: 10023 - protein, 8 aa, Homo sapiens
  Table 1.2; TFDP3; ENSG00000183434; HLA -B*08:01,HLA-B*18:01
DQQVVIGM

SEQ ID NO: 10024 - protein, 8 aa, Homo sapiens
  Table 1.2; TFDP3; ENSG00000183434; HLA -A*33:01
DVKNIKRR

SEQ ID NO: 10025 - protein, 8 aa, Homo sapiens
  Table 1.2; TFDP3; ENSG00000183434; HLA -B*51:01
EANEELKV

SEQ ID NO: 10026 - protein, 9 aa, Homo sapiens
  Table 1.2; TFDP3; ENSG00000183434; HLA -A*25:01,HLA-A*33:01,HLA-A*33:03,HLA-B*35:03
EANEELKVL

SEQ ID NO: 10027 - protein, 10 aa, Homo sapiens
  Table 1.2; TFDP3; ENSG00000183434; HLA -A*26:01,HLA-A*33:03,HLA-B*35:01,HLA-C*07:06
EANEELKVLM

SEQ ID NO: 10028 - protein, 9 aa, Homo sapiens
  Table 1.2; TFDP3; ENSG00000183434; HLA -B*40:01,HLA-B*44:02,HLA-B*44:03
EEQVSQRPL

SEQ ID NO: 10029 - protein, 9 aa, Homo sapiens
  Table 1.2; TFDP3; ENSG00000183434; HLA -A*25:01,HLA-B*35:03
EIHDDTEVL

SEQ ID NO: 10030 - protein, 11 aa, Homo sapiens
  Table 1.2; TFDP3; ENSG00000183434; HLA -A*25:01
EIHDDTEVLMW

SEQ ID NO: 10031 - protein, 10 aa, Homo sapiens
  Table 1.2; TFDP3; ENSG00000183434; HLA -A*68:02
ELQQLILQQI

SEQ ID NO: 10032 - protein, 9 aa, Homo sapiens
  Table 1.2; TFDP3; ENSG00000183434; HLA -B*08:01
ELVAKFRAA

SEQ ID NO: 10033 - protein, 10 aa, Homo sapiens
  Table 1.2; TFDP3; ENSG00000183434; HLA -A*26:01
EMAQGTFGGV

SEQ ID NO: 10034 - protein, 11 aa, Homo sapiens
  Table 1.2; TFDP3; ENSG00000183434; HLA -A*25:01,HLA-A*26:01,HLA-A*33:01
EMAQGTFGGVF

SEQ ID NO: 10035 - protein, 8 aa, Homo sapiens
  Table 1.2; TFDP3; ENSG00000183434; HLA -B*51:01,HLA-B*54:01,HLA-B*55:01,HLA-B*56:01
EPYVTEMA

SEQ ID NO: 10036 - protein, 9 aa, Homo sapiens
  Table 1.2; TFDP3; ENSG00000183434; HLA -A*33:03,HLA-A*68:01,HLA-A*68:02
ESAYDVKNI

SEQ ID NO: 10037 - protein, 10 aa, Homo sapiens
  Table 1.2; TFDP3; ENSG00000183434; HLA -A*33:03,HLA-A*68:01
ESAYDVKNIK

SEQ ID NO: 10038 - protein, 11 aa, Homo sapiens
  Table 1.2; TFDP3; ENSG00000183434; HLA -A*33:03,HLA-A*68:01
ESAYDVKNIKR

SEQ ID NO: 10039 - protein, 9 aa, Homo sapiens
  Table 1.2; TFDP3; ENSG00000183434; HLA -A*03:02,HLA-A*11:01,HLA-A*25:01,HLA-A*26:01,HLA-A*33:01, HLA-A*33:03,HLA-A*68:01,HLA-A*68:02,HLA-C*07:06
EVVGELVAK

SEQ ID NO: 10040 - protein, 10 aa, Homo sapiens
  Table 1.2; TFDP3; ENSG00000183434; HLA -A*23:01,HLA-A*25:01,HLA-A*26:01,HLA-A*29:02,HLA-A*33:01, HLA-A*33:03,HLA-A*68:01,HLA-A*68:02,HLA-B*35:01,HLA-B*44:02, HLA-B*44:03,HLA-B*57:01,HLA-C*07:06
EVVGELVAKF

SEQ ID NO: 10041 - protein, 11 aa, Homo sapiens
  Table 1.2; TFDP3; ENSG00000183434; HLA -A*33:01,HLA-A*33:03,HLA-A*68:01
EVVGELVAKFR

SEQ ID NO: 10042 - protein, 10 aa, Homo sapiens
  Table 1.2; TFDP3; ENSG00000183434; HLA -A*24:02
EYLFKFNSSF

SEQ ID NO: 10043 - protein, 9 aa, Homo sapiens
  Table 1.2; TFDP3; ENSG00000183434; HLA -A*01:01,HLA-A*25:01,HLA-A*26:01,HLA-A*29:02,HLA-A*30:02, HLA-A*32:01,HLA-A*68:01,HLA-B*15:01,HLA-B*15:03,HLA-B*27:02, HLA-B*27:05,HLA-B*35:01,HLA-B*39:01,HLA-B*44:03,HLA-B*46:01,
  HLA-B*54:01,HLA-B*55:01,HLA-B*57:01,HLA-B*58:01,HLA-C*01:02, HLA-C*02:02,HLA-C*03:03,HLA-C*03:04,HLA-C*07:04,HLA-C*07:06, HLA-C*12:03,HLA-C*14:02,HLA-C*16:01,HLA-C*16:02,HLA-C*16:04
FASQNQHSY

SEQ ID NO: 10044 - protein, 9 aa, Homo sapiens
  Table 1.2; TFDP3; ENSG00000183434; HLA -A*30:01,HLA-B*40:01,HLA-B*40:02,HLA-B*49:01
FEIHDDTEV

SEQ ID NO: 10045 - protein, 10 aa, Homo sapiens
  Table 1.2; TFDP3; ENSG00000183434; HLA -A*30:01,HLA-B*40:01,HLA-B*40:02,HLA-B*49:01
FEIHDDTEVL

SEQ ID NO: 10046 - protein, 11 aa, Homo sapiens
  Table 1.2; TFDP3; ENSG00000183434; HLA -B*40:01
FEIHDDTEVLM

SEQ ID NO: 10047 - protein, 8 aa, Homo sapiens
  Table 1.2; TFDP3; ENSG00000183434; HLA -B*39:01,HLA-B*46:01,HLA-B*54:01
FGGVFTTA

SEQ ID NO: 10048 - protein, 9 aa, Homo sapiens
  Table 1.2; TFDP3; ENSG00000183434; HLA -B*46:01
FGGVFTTAG

SEQ ID NO: 10049 - protein, 8 aa, Homo sapiens
  Table 1.2; TFDP3; ENSG00000183434; HLA -B*40:01,HLA-B*40:02
GEKNGMGL

SEQ ID NO: 10050 - protein, 9 aa, Homo sapiens
  Table 1.2; TFDP3; ENSG00000183434; HLA -B*49:01
GEKNGMGLC

SEQ ID NO: 10051 - protein, 9 aa, Homo sapiens
  Table 1.2; TFDP3; ENSG00000183434; HLA -B*15:03
GKQLLPKTF

SEQ ID NO: 10052 - protein, 11 aa, Homo sapiens
  Table 1.2; TFDP3; ENSG00000183434; HLA -A*30:01,HLA-B*13:02,HLA-B*27:05,HLA-B*38:01,HLA-C*06:02
GQSSVNIDQQV

SEQ ID NO: 10053 - protein, 9 aa, Homo sapiens
  Table 1.2; TFDP3; ENSG00000183434; HLA -A*02:01,HLA-A*02:03,HLA-A*02:04,HLA-A*03:02,HLA-A*11:01, HLA-A*29:02,HLA-A*31:01,HLA-A*32:01,HLA-B*13:02,HLA-B*27:05, HLA-C*16:02
GTFGGVFTT

SEQ ID NO: 10054 - protein, 10 aa, Homo sapiens
  Table 1.2; TFDP3; ENSG00000183434; HLA -A*02:01,HLA-A*02:03,HLA-A*02:04,HLA-A*02:07,HLA-A*03:01, HLA-A*11:01,HLA-A*25:01,HLA-A*26:01,HLA-A*30:01,HLA-A*31:01, HLA-A*32:01,HLA-A*68:02,HLA-B*13:02,HLA-B*15:01,HLA-B*27:05,
  HLA-B*40:02,HLA-B*46:01,HLA-B*49:01,HLA-B*54:01,HLA-B*55:01, HLA-B*56:01,HLA-B*57:01,HLA-B*58:01,HLA-C*02:02,HLA-C*12:03, HLA-C*16:04
GTFGGVFTTA

SEQ ID NO: 10055 - protein, 11 aa, Homo sapiens
  Table 1.2; TFDP3; ENSG00000183434; HLA -A*31:01
GTFGGVFTTAG

SEQ ID NO: 10056 - protein, 9 aa, Homo sapiens
  Table 1.2; TFDP3; ENSG00000183434; HLA -A*03:01,HLA-A*03:02,HLA-A*11:01,HLA-A*31:01,HLA-A*33:03, HLA-A*68:01,HLA-B*27:05,HLA-C*07:06
GVFTTAGSR

SEQ ID NO: 10057 - protein, 9 aa, Homo sapiens
  Table 1.2; TFDP3; ENSG00000183434; HLA -A*01:01,HLA-A*25:01,HLA-A*26:01,HLA-A*29:02,HLA-A*30:02, HLA-A*32:01,HLA-A*68:01,HLA-B*15:01,HLA-B*15:03,HLA-B*27:05, HLA-B*35:01,HLA-B*35:03,HLA-B*38:01,HLA-B*39:01,HLA-B*46:01,
  HLA-B*55:01,HLA-B*58:01,HLA-C*01:02,HLA-C*02:02,HLA-C*03:03, HLA-C*03:04,HLA-C*07:04,HLA-C*07:06,HLA-C*16:01,HLA-C*16:02, HLA-C*16:04
HASPNESAY

SEQ ID NO: 10058 - protein, 10 aa, Homo sapiens
  Table 1.2; TFDP3; ENSG00000183434; HLA -A*29:02,HLA-A*30:02
HFASQNQHSY

SEQ ID NO: 10059 - protein, 10 aa, Homo sapiens
  Table 1.2; TFDP3; ENSG00000183434; HLA -A*01:01,HLA-A*03:01,HLA-A*03:02,HLA-A*11:01,HLA-A*33:03, HLA-A*68:01,HLA-A*68:02,HLA-B*27:02,HLA-B*27:05,HLA-C*07:06
HTSTVNPLGK

SEQ ID NO: 10060 - protein, 9 aa, Homo sapiens
  Table 1.2; TFDP3; ENSG00000183434; HLA -A*68:02
HVPFIIISS

SEQ ID NO: 10061 - protein, 8 aa, Homo sapiens
  Table 1.2; TFDP3; ENSG00000183434; HLA -B*08:01,HLA-B*51:01,HLA-C*03:03,HLA-C*03:04
IAFKNLVL

SEQ ID NO: 10062 - protein, 9 aa, Homo sapiens
  Table 1.2; TFDP3; ENSG00000183434; HLA -A*31:01,HLA-A*33:01,HLA-A*33:03,HLA-B*57:01
IAFKNLVLR

SEQ ID NO: 10063 - protein, 9 aa, Homo sapiens
  Table 1.2; TFDP3; ENSG00000183434; HLA -B*27:05
IAIGMLATS

SEQ ID NO: 10064 - protein, 9 aa, Homo sapiens
  Table 1.2; TFDP3; ENSG00000183434; HLA -B*37:01
IDQQVVIGM

SEQ ID NO: 10065 - protein, 9 aa, Homo sapiens
  Table 1.2; TFDP3; ENSG00000183434; HLA -B*54:01,HLA-B*56:01,HLA-C*16:01
IGMPQRPAA

SEQ ID NO: 10066 - protein, 8 aa, Homo sapiens
  Table 1.2; TFDP3; ENSG00000183434; HLA -B*38:01,HLA-B*39:01,HLA-C*05:01
IHDDTEVL

SEQ ID NO: 10067 - protein, 9 aa, Homo sapiens
  Table 1.2; TFDP3; ENSG00000183434; HLA -B*35:03,HLA-B*38:01,HLA-B*39:01,HLA-C*04:01,HLA-C*05:01
IHDDTEVLM

SEQ ID NO: 10068 - protein, 10 aa, Homo sapiens
  Table 1.2; TFDP3; ENSG00000183434; HLA -B*38:01
IHDDTEVLMW

SEQ ID NO: 10069 - protein, 8 aa, Homo sapiens
  Table 1.2; TFDP3; ENSG00000183434; HLA -A*03:02
ILQQIAFK

SEQ ID NO: 10070 - protein, 11 aa, Homo sapiens
  Table 1.2; TFDP3; ENSG00000183434; HLA -A*02:04
ILQQIAFKNLV

SEQ ID NO: 10071 - protein, 10 aa, Homo sapiens
  Table 1.2; TFDP3; ENSG00000183434; HLA -B*56:01
IPVVGSPNPP

SEQ ID NO: 10072 - protein, 8 aa, Homo sapiens
  Table 1.2; TFDP3; ENSG00000183434; HLA -A*01:01,HLA-C*05:01,HLA-C*16:02
ISDDKSEY

SEQ ID NO: 10073 - protein, 9 aa, Homo sapiens
  Table 1.2; TFDP3; ENSG00000183434; HLA -A*01:01,HLA-A*02:01,HLA-A*02:07,HLA-A*32:01,HLA-B*38:01, HLA-B*39:01,HLA-C*03:04,HLA-C*04:01,HLA-C*05:01
ISDDKSEYL

SEQ ID NO: 10074 - protein, 10 aa, Homo sapiens
  Table 1.2; TFDP3; ENSG00000183434; HLA -A*01:01,HLA-A*02:07,HLA-B*57:01,HLA-C*04:01,HLA-C*05:01
ISDDKSEYLF

SEQ ID NO: 10075 - protein, 11 aa, Homo sapiens
  Table 1.2; TFDP3; ENSG00000183434; HLA -A*03:01
ISDDKSEYLFK

SEQ ID NO: 10076 - protein, 10 aa, Homo sapiens
  Table 1.2; TFDP3; ENSG00000183434; HLA -A*23:01,HLA-A*32:01,HLA-B*27:02,HLA-B*40:01,HLA-B*40:02, HLA-B*46:01,HLA-B*57:01,HLA-B*58:01,HLA-C*01:02,HLA-C*02:02, HLA-C*03:04,HLA-C*12:03,HLA-C*16:02,HLA-C*16:04
KALEPYVTEM

SEQ ID NO: 10077 - protein, 9 aa, Homo sapiens
  Table 1.2; TFDP3; ENSG00000183434; HLA -A*03:01,HLA-A*03:02
KMARNLVPK

SEQ ID NO: 10078 - protein, 9 aa, Homo sapiens
  Table 1.2; TFDP3; ENSG00000183434; HLA -A*30:02
KNLVLRNQY

SEQ ID NO: 10079 - protein, 10 aa, Homo sapiens
  Table 1.2; TFDP3; ENSG00000183434; HLA -B*40:02
KQKQSELQQL

SEQ ID NO: 10080 - protein, 11 aa, Homo sapiens
  Table 1.2; TFDP3; ENSG00000183434; HLA -B*13:02
KQKQSELQQLI

SEQ ID NO: 10081 - protein, 9 aa, Homo sapiens
  Table 1.2; TFDP3; ENSG00000183434; HLA -A*30:01,HLA-B*13:02,HLA-B*38:01,HLA-C*06:02
KQSELQQLI

SEQ ID NO: 10082 - protein, 10 aa, Homo sapiens
  Table 1.2; TFDP3; ENSG00000183434; HLA -B*13:02
KQSELQQLIL

SEQ ID NO: 10083 - protein, 10 aa, Homo sapiens
  Table 1.2; TFDP3; ENSG00000183434; HLA -B*58:01
KTFGQSSVNI

SEQ ID NO: 10084 - protein, 11 aa, Homo sapiens
  Table 1.2; TFDP3; ENSG00000183434; HLA -A*31:01
KVLMDENQTSR

SEQ ID NO: 10085 - protein, 8 aa, Homo sapiens
  Table 1.2; TFDP3; ENSG00000183434; HLA -A*31:01
KVWETVQR

SEQ ID NO: 10086 - protein, 9 aa, Homo sapiens
  Table 1.2; TFDP3; ENSG00000183434; HLA -A*03:01,HLA-A*03:02,HLA-A*11:01,HLA-A*31:01
KVWETVQRK

SEQ ID NO: 10087 - protein, 9 aa, Homo sapiens
  Table 1.2; TFDP3; ENSG00000183434; HLA -B*39:01
LATSSGGSQ

SEQ ID NO: 10088 - protein, 10 aa, Homo sapiens
  Table 1.2; TFDP3; ENSG00000183434; HLA -A*01:01,HLA-A*26:01,HLA-A*30:02,HLA-B*15:01,HLA-B*15:03, HLA-B*39:01,HLA-B*46:01,HLA-C*02:02,HLA-C*07:04,HLA-C*16:02
LATSSGGSQY

SEQ ID NO: 10089 - protein, 8 aa, Homo sapiens
  Table 1.2; TFDP3; ENSG00000183434; HLA -A*30:01,HLA-B*18:01,HLA-B*37:01,HLA-B*40:01,HLA-B*40:02, HLA-B*49:01,HLA-B*51:01
LEPYVTEM

SEQ ID NO: 10090 - protein, 9 aa, Homo sapiens
  Table 1.2; TFDP3; ENSG00000183434; HLA -A*03:01
LILQQIAFK

SEQ ID NO: 10091 - protein, 11 aa, Homo sapiens
  Table 1.2; TFDP3; ENSG00000183434; HLA -A*02:07
LLPKTFGQSSV

SEQ ID NO: 10092 - protein, 9 aa, Homo sapiens
  Table 1.2; TFDP3; ENSG00000183434; HLA -A*33:03
LMAMNIISR

SEQ ID NO: 10093 - protein, 9 aa, Homo sapiens
  Table 1.2; TFDP3; ENSG00000183434; HLA -A*01:01
LMDENQTSR

SEQ ID NO: 10094 - protein, 11 aa, Homo sapiens
  Table 1.2; TFDP3; ENSG00000183434; HLA -A*02:01
LMDENQTSRPV

SEQ ID NO: 10095 - protein, 10 aa, Homo sapiens
  Table 1.2; TFDP3; ENSG00000183434; HLA -B*07:02,HLA-B*08:01,HLA-B*51:01,HLA-B*54:01,HLA-B*55:01, HLA-B*56:01,HLA-C*07:02
LPKTFGQSSV

SEQ ID NO: 10096 - protein, 8 aa, Homo sapiens
  Table 1.2; TFDP3; ENSG00000183434; HLA -B*51:01,HLA-B*56:01
LPNSVIHV

SEQ ID NO: 10097 - protein, 9 aa, Homo sapiens
  Table 1.2; TFDP3; ENSG00000183434; HLA -B*54:01,HLA-B*56:01
LPNSVIHVP

SEQ ID NO: 10098 - protein, 10 aa, Homo sapiens
  Table 1.2; TFDP3; ENSG00000183434; HLA -B*35:01
LPNSVIHVPF

SEQ ID NO: 10099 - protein, 9 aa, Homo sapiens
  Table 1.2; TFDP3; ENSG00000183434; HLA -A*02:03,HLA-A*02:04,HLA-A*30:01,HLA-B*13:02,HLA-B*38:01, HLA-C*06:02,HLA-C*07:04
LQQLILQQI

SEQ ID NO: 10100 - protein, 9 aa, Homo sapiens
  Table 1.2; TFDP3; ENSG00000183434; HLA -A*68:02
LSMKVWETV

SEQ ID NO: 10101 - protein, 9 aa, Homo sapiens
  Table 1.2; TFDP3; ENSG00000183434; HLA -A*01:01
LTEANEELK

SEQ ID NO: 10102 - protein, 10 aa, Homo sapiens
  Table 1.2; TFDP3; ENSG00000183434; HLA -A*01:01
LTEANEELKV

SEQ ID NO: 10103 - protein, 10 aa, Homo sapiens
  Table 1.2; TFDP3; ENSG00000183434; HLA -A*01:01
LTNIAIGMLA

SEQ ID NO: 10104 - protein, 9 aa, Homo sapiens
  Table 1.2; TFDP3; ENSG00000183434; HLA -A*01:01,HLA-A*29:02,HLA-B*46:01
LVPKALEPY

SEQ ID NO: 10105 - protein, 10 aa, Homo sapiens
  Table 1.2; TFDP3; ENSG00000183434; HLA -A*02:07
LVPKALEPYV

SEQ ID NO: 10106 - protein, 10 aa, Homo sapiens
  Table 1.2; TFDP3; ENSG00000183434; HLA -B*54:01
MAKYVSLTEA

SEQ ID NO: 10107 - protein, 8 aa, Homo sapiens
  Table 1.2; TFDP3; ENSG00000183434; HLA -A*11:01,HLA-A*31:01,HLA-A*33:01,HLA-A*33:03,HLA-A*68:01, HLA-B*27:05,HLA-B*54:01,HLA-C*07:06
MAMNIISR

SEQ ID NO: 10108 - protein, 10 aa, Homo sapiens
  Table 1.2; TFDP3; ENSG00000183434; HLA -A*03:01,HLA-A*11:01,HLA-A*68:01,HLA-B*27:02
MAMNIISREK

SEQ ID NO: 10109 - protein, 10 aa, Homo sapiens
  Table 1.2; TFDP3; ENSG00000183434; HLA -A*30:02
MAQGTFGGVF

SEQ ID NO: 10110 - protein, 9 aa, Homo sapiens
  Table 1.2; TFDP3; ENSG00000183434; HLA -B*54:01
MARNLVPKA

SEQ ID NO: 10111 - protein, 10 aa, Homo sapiens
  Table 1.2; TFDP3; ENSG00000183434; HLA -C*04:01,HLA-C*06:02,HLA-C*07:01
MDENQTSRPV

SEQ ID NO: 10112 - protein, 11 aa, Homo sapiens
  Table 1.2; TFDP3; ENSG00000183434; HLA -A*01:01,HLA-A*25:01,HLA-A*26:01,HLA-A*29:02,HLA-A*30:02, HLA-A*32:01,HLA-B*15:01,HLA-B*15:03,HLA-B*35:01,HLA-B*46:01, HLA-C*07:04,HLA-C*14:02
MLATSSGGSQY

SEQ ID NO: 10113 - protein, 10 aa, Homo sapiens
  Table 1.2; TFDP3; ENSG00000183434; HLA -B*07:02,HLA-B*51:01
MPQRPAASNI

SEQ ID NO: 10114 - protein, 10 aa, Homo sapiens
  Table 1.2; TFDP3; ENSG00000183434; HLA -C*07:01
MTFGLESGSC

SEQ ID NO: 10115 - protein, 9 aa, Homo sapiens
  Table 1.2; TFDP3; ENSG00000183434; HLA -A*33:01,HLA-A*33:03
NCQNLRVER

SEQ ID NO: 10116 - protein, 8 aa, Homo sapiens
  Table 1.2; TFDP3; ENSG00000183434; HLA -B*18:01,HLA-B*37:01
NEELKVLM

SEQ ID NO: 10117 - protein, 10 aa, Homo sapiens
  Table 1.2; TFDP3; ENSG00000183434; HLA -B*44:02,HLA-B*44:03,HLA-B*49:01
NESAYDVKNI

SEQ ID NO: 10118 - protein, 9 aa, Homo sapiens
  Table 1.2; TFDP3; ENSG00000183434; HLA -B*38:01,HLA-B*39:01
NHASPNESA

SEQ ID NO: 10119 - protein, 10 aa, Homo sapiens
  Table 1.2; TFDP3; ENSG00000183434; HLA -A*30:02,HLA-B*38:01,HLA-B*39:01
NHASPNESAY

SEQ ID NO: 10120 - protein, 8 aa, Homo sapiens
  Table 1.2; TFDP3; ENSG00000183434; HLA -B*38:01,HLA-C*04:01,HLA-C*05:01
NIDQQVVI

SEQ ID NO: 10121 - protein, 10 aa, Homo sapiens
  Table 1.2; TFDP3; ENSG00000183434; HLA -A*02:07
NIDQQVVIGM

SEQ ID NO: 10122 - protein, 8 aa, Homo sapiens
  Table 1.2; TFDP3; ENSG00000183434; HLA -B*08:01
NPLGKQLL

SEQ ID NO: 10123 - protein, 9 aa, Homo sapiens
  Table 1.2; TFDP3; ENSG00000183434; HLA -A*02:01,HLA-A*02:03,HLA-B*08:01,HLA-B*13:02,HLA-B*37:01, HLA-B*39:01,HLA-B*55:01,HLA-C*16:01,HLA-C*16:02
NQTSRPVAV

SEQ ID NO: 10124 - protein, 8 aa, Homo sapiens
  Table 1.2; TFDP3; ENSG00000183434; HLA -B*13:02
NQYVEEQV

SEQ ID NO: 10125 - protein, 9 aa, Homo sapiens
  Table 1.2; TFDP3; ENSG00000183434; HLA -B*27:05
NQYVEEQVS

SEQ ID NO: 10126 - protein, 10 aa, Homo sapiens
  Table 1.2; TFDP3; ENSG00000183434; HLA -B*27:05
NQYVEEQVSQ

SEQ ID NO: 10127 - protein, 11 aa, Homo sapiens
  Table 1.2; TFDP3; ENSG00000183434; HLA -A*31:01,HLA-A*68:01,HLA-B*27:05,HLA-C*07:06
NQYVEEQVSQR

SEQ ID NO: 10128 - protein, 10 aa, Homo sapiens
  Table 1.2; TFDP3; ENSG00000183434; HLA -A*68:01
NSAQNCQNLR

SEQ ID NO: 10129 - protein, 9 aa, Homo sapiens
  Table 1.2; TFDP3; ENSG00000183434; HLA -C*12:03
PAASNIPVV

SEQ ID NO: 10130 - protein, 9 aa, Homo sapiens
  Table 1.2; TFDP3; ENSG00000183434; HLA -A*02:07
PLPNSVIHV

SEQ ID NO: 10131 - protein, 9 aa, Homo sapiens
  Table 1.2; TFDP3; ENSG00000183434; HLA -A*02:03
PVAVHTSTV

SEQ ID NO: 10132 - protein, 10 aa, Homo sapiens
  Table 1.2; TFDP3; ENSG00000183434; HLA -B*07:02
PVVGSPNPPS

SEQ ID NO: 10133 - protein, 11 aa, Homo sapiens
  Table 1.2; TFDP3; ENSG00000183434; HLA -A*24:02
PYVTEMAQGTF

SEQ ID NO: 10134 - protein, 8 aa, Homo sapiens
  Table 1.2; TFDP3; ENSG00000183434; HLA -A*30:01,HLA-B*18:01,HLA-B*37:01,HLA-B*40:01,HLA-B*49:01
QEVVGELV

SEQ ID NO: 10135 - protein, 9 aa, Homo sapiens
  Table 1.2; TFDP3; ENSG00000183434; HLA -A*30:01,HLA-B*18:01,HLA-B*40:01,HLA-B*40:02,HLA-B*49:01
QEVVGELVA

SEQ ID NO: 10136 - protein, 10 aa, Homo sapiens
  Table 1.2; TFDP3; ENSG00000183434; HLA -B*27:02
QEVVGELVAK

SEQ ID NO: 10137 - protein, 11 aa, Homo sapiens
  Table 1.2; TFDP3; ENSG00000183434; HLA -A*25:01,HLA-A*30:01,HLA-B*18:01,HLA-B*27:02,HLA-B*40:01, HLA-B*44:02,HLA-B*44:03
QEVVGELVAKF

SEQ ID NO: 10138 - protein, 8 aa, Homo sapiens
  Table 1.2; TFDP3; ENSG00000183434; HLA -C*07:04
QGTFGGVF

SEQ ID NO: 10139 - protein, 9 aa, Homo sapiens
  Table 1.2; TFDP3; ENSG00000183434; HLA -B*38:01
QHSYSSPPW

SEQ ID NO: 10140 - protein, 9 aa, Homo sapiens
  Table 1.2; TFDP3; ENSG00000183434; HLA -B*08:01
QIAFKNLVL

SEQ ID NO: 10141 - protein, 9 aa, Homo sapiens
  Table 1.2; TFDP3; ENSG00000183434; HLA -A*23:01,HLA-A*24:02,HLA-A*32:01,HLA-B*15:01,HLA-B*15:03, HLA-B*44:02,HLA-B*44:03,HLA-B*46:01
QLILQQIAF

SEQ ID NO: 10142 - protein, 9 aa, Homo sapiens
  Table 1.2; TFDP3; ENSG00000183434; HLA -B*13:02
QQIAFKNLV

SEQ ID NO: 10143 - protein, 11 aa, Homo sapiens
  Table 1.2; TFDP3; ENSG00000183434; HLA -A*31:01
QQIAFKNLVLR

SEQ ID NO: 10144 - protein, 8 aa, Homo sapiens
  Table 1.2; TFDP3; ENSG00000183434; HLA -B*13:02
QQLILQQI

SEQ ID NO: 10145 - protein, 9 aa, Homo sapiens
  Table 1.2; TFDP3; ENSG00000183434; HLA -B*13:02
QQLILQQIA

SEQ ID NO: 10146 - protein, 10 aa, Homo sapiens
  Table 1.2; TFDP3; ENSG00000183434; HLA -B*15:01,HLA-B*15:03
QQLILQQIAF

SEQ ID NO: 10147 - protein, 9 aa, Homo sapiens
  Table 1.2; TFDP3; ENSG00000183434; HLA -A*01:01
QSELQQLIL

SEQ ID NO: 10148 - protein, 9 aa, Homo sapiens
  Table 1.2; TFDP3; ENSG00000183434; HLA -A*03:01,HLA-A*03:02,HLA-A*11:01,HLA-A*32:01
QTSRPVAVH

SEQ ID NO: 10149 - protein, 9 aa, Homo sapiens
  Table 1.2; TFDP3; ENSG00000183434; HLA -A*31:01,HLA-A*68:01,HLA-C*07:06
QVVIGMPQR

SEQ ID NO: 10150 - protein, 10 aa, Homo sapiens
  Table 1.2; TFDP3; ENSG00000183434; HLA -A*31:01,HLA-A*33:01,HLA-A*33:03,HLA-A*68:01,HLA-B*27:02, HLA-C*07:06
QYVEEQVSQR

SEQ ID NO: 10151 - protein, 9 aa, Homo sapiens
  Table 1.2; TFDP3; ENSG00000183434; HLA -B*08:01
RIKQKQSEL

SEQ ID NO: 10152 - protein, 9 aa, Homo sapiens
  Table 1.2; TFDP3; ENSG00000183434; HLA -B*07:02,HLA-B*56:01
RPAASNIPV

SEQ ID NO: 10153 - protein, 10 aa, Homo sapiens
  Table 1.2; TFDP3; ENSG00000183434; HLA -B*07:02,HLA-B*55:01,HLA-B*56:01
RPAASNIPVV

SEQ ID NO: 10154 - protein, 10 aa, Homo sapiens
  Table 1.2; TFDP3; ENSG00000183434; HLA -B*56:01
RPLPNSVIHV

SEQ ID NO: 10155 - protein, 9 aa, Homo sapiens
  Table 1.2; TFDP3; ENSG00000183434; HLA -B*07:02,HLA-B*56:01
RPVAVHTST

SEQ ID NO: 10156 - protein, 10 aa, Homo sapiens
  Table 1.2; TFDP3; ENSG00000183434; HLA -B*07:02,HLA-B*51:01,HLA-B*54:01,HLA-B*55:01,HLA-B*56:01, HLA-C*07:02
RPVAVHTSTV

SEQ ID NO: 10157 - protein, 9 aa, Homo sapiens
  Table 1.2; TFDP3; ENSG00000183434; HLA -A*03:01,HLA-B*46:01,HLA-B*58:01
RTYDALNVL

SEQ ID NO: 10158 - protein, 10 aa, Homo sapiens
  Table 1.2; TFDP3; ENSG00000183434; HLA -A*03:01,HLA-A*23:01,HLA-A*31:01,HLA-B*57:01,HLA-B*58:01
RTYDALNVLM

SEQ ID NO: 10159 - protein, 9 aa, Homo sapiens
  Table 1.2; TFDP3; ENSG00000183434; HLA -A*11:01,HLA-A*31:01,HLA-A*33:01,HLA-A*33:03,HLA-A*68:01, HLA-C*07:06
SAEDLKMAR

SEQ ID NO: 10160 - protein, 9 aa, Homo sapiens
  Table 1.2; TFDP3; ENSG00000183434; HLA -A*33:03,HLA-C*07:06
SAQNCQNLR

SEQ ID NO: 10161 - protein, 9 aa, Homo sapiens
  Table 1.2; TFDP3; ENSG00000183434; HLA -C*12:03
SASDLTNIA

SEQ ID NO: 10162 - protein, 10 aa, Homo sapiens
  Table 1.2; TFDP3; ENSG00000183434; HLA -A*68:01,HLA-A*68:02,HLA-B*13:02,HLA-B*39:01,HLA-C*07:06
SASDLTNIAI

SEQ ID NO: 10163 - protein, 8 aa, Homo sapiens
  Table 1.2; TFDP3; ENSG00000183434; HLA -B*13:02,HLA-B*51:01,HLA-C*12:03,HLA-C*16:02
SAYDVKNI

SEQ ID NO: 10164 - protein, 9 aa, Homo sapiens
  Table 1.2; TFDP3; ENSG00000183434; HLA -A*03:01,HLA-A*03:02,HLA-A*11:01,HLA-A*68:01,HLA-C*02:02, HLA-C*07:06,HLA-C*16:01
SAYDVKNIK

SEQ ID NO: 10165 - protein, 10 aa, Homo sapiens
  Table 1.2; TFDP3; ENSG00000183434; HLA -A*11:01,HLA-A*31:01,HLA-A*33:01,HLA-A*33:03,HLA-A*68:01, HLA-C*07:06
SAYDVKNIKR

SEQ ID NO: 10166 - protein, 11 aa, Homo sapiens
  Table 1.2; TFDP3; ENSG00000183434; HLA -A*33:01
SAYDVKNIKRR

SEQ ID NO: 10167 - protein, 9 aa, Homo sapiens
  Table 1.2; TFDP3; ENSG00000183434; HLA -B*38:01
SDDKSEYLF

SEQ ID NO: 10168 - protein, 8 aa, Homo sapiens
  Table 1.2; TFDP3; ENSG00000183434; HLA -B*37:01
SDLTNIAI

SEQ ID NO: 10169 - protein, 11 aa, Homo sapiens
  Table 1.2; TFDP3; ENSG00000183434; HLA -A*30:01,HLA-B*44:02,HLA-B*44:03,HLA-B*49:01
SELQQLILQQI

SEQ ID NO: 10170 - protein, 9 aa, Homo sapiens
  Table 1.2; TFDP3; ENSG00000183434; HLA -A*26:01,HLA-A*29:02,HLA-A*30:02,HLA-A*32:01,HLA-B*15:01, HLA-B*46:01
SISDDKSEY

SEQ ID NO: 10171 - protein, 9 aa, Homo sapiens
  Table 1.2; TFDP3; ENSG00000183434; HLA -A*02:01,HLA-A*02:03,HLA-B*35:03,HLA-B*39:01,HLA-B*55:01, HLA-C*01:02,HLA-C*14:02
SLTEANEEL

SEQ ID NO: 10172 - protein, 10 aa, Homo sapiens
  Table 1.2; TFDP3; ENSG00000183434; HLA -A*03:02
SLTEANEELK

SEQ ID NO: 10173 - protein, 11 aa, Homo sapiens
  Table 1.2; TFDP3; ENSG00000183434; HLA -A*02:01
SLTEANEELKV

SEQ ID NO: 10174 - protein, 10 aa, Homo sapiens
  Table 1.2; TFDP3; ENSG00000183434; HLA -A*31:01,HLA-A*33:03
SMKVWETVQR

SEQ ID NO: 10175 - protein, 11 aa, Homo sapiens
  Table 1.2; TFDP3; ENSG00000183434; HLA -A*30:02
SNHASPNESAY

SEQ ID NO: 10176 - protein, 9 aa, Homo sapiens
  Table 1.2; TFDP3; ENSG00000183434; HLA -B*07:02,HLA-B*35:01,HLA-B*35:03,HLA-B*55:01,HLA-B*56:01
SPNESAYDV

SEQ ID NO: 10177 - protein, 10 aa, Homo sapiens
  Table 1.2; TFDP3; ENSG00000183434; HLA -B*27:02,HLA-B*35:01
SPNESAYDVK

SEQ ID NO: 10178 - protein, 9 aa, Homo sapiens
  Table 1.2; TFDP3; ENSG00000183434; HLA -A*23:01,HLA-A*24:02,HLA-A*25:01,HLA-A*30:02,HLA-A*32:01, HLA-A*33:01,HLA-A*33:03,HLA-B*07:02,HLA-B*08:01,HLA-B*15:01, HLA-B*15:03,HLA-B*35:01,HLA-B*35:03,HLA-B*37:01,HLA-B*38:01,
  HLA-B*44:03,HLA-B*46:01,HLA-B*51:01,HLA-B*55:01,HLA-B*56:01, HLA-B*57:01,HLA-B*58:01,HLA-C*03:03,HLA-C*07:02,HLA-C*07:06, HLA-C*16:01
SPNPPSTHF

SEQ ID NO: 10179 - protein, 10 aa, Homo sapiens
  Table 1.2; TFDP3; ENSG00000183434; HLA -B*54:01,HLA-B*56:01
SPNPPSTHFA

SEQ ID NO: 10180 - protein, 9 aa, Homo sapiens
  Table 1.2; TFDP3; ENSG00000183434; HLA -A*02:03,HLA-A*32:01,HLA-B*13:02,HLA-B*15:03,HLA-B*40:02
SQRPLPNSV

SEQ ID NO: 10181 - protein, 8 aa, Homo sapiens
  Table 1.2; TFDP3; ENSG00000183434; HLA -B*13:02
SQYSGSRV

SEQ ID NO: 10182 - protein, 11 aa, Homo sapiens
  Table 1.2; TFDP3; ENSG00000183434; HLA -A*32:01,HLA-B*15:01
SQYSGSRVETP

SEQ ID NO: 10183 - protein, 11 aa, Homo sapiens
  Table 1.2; TFDP3; ENSG00000183434; HLA -A*68:02
SSFEIHDDTEV

SEQ ID NO: 10184 - protein, 11 aa, Homo sapiens
  Table 1.2; TFDP3; ENSG00000183434; HLA -A*31:01
SSPPWAGQHNR

SEQ ID NO: 10185 - protein, 9 aa, Homo sapiens
  Table 1.2; TFDP3; ENSG00000183434; HLA -A*68:02,HLA-B*13:02
SSVNIDQQV

SEQ ID NO: 10186 - protein, 8 aa, Homo sapiens
  Table 1.2; TFDP3; ENSG00000183434; HLA -A*03:01,HLA-A*11:01,HLA-A*68:01
STVNPLGK

SEQ ID NO: 10187 - protein, 10 aa, Homo sapiens
  Table 1.2; TFDP3; ENSG00000183434; HLA -A*68:02
SVIHVPFIII

SEQ ID NO: 10188 - protein, 9 aa, Homo sapiens
  Table 1.2; TFDP3; ENSG00000183434; HLA -B*13:02
SVNIDQQVV

SEQ ID NO: 10189 - protein, 10 aa, Homo sapiens
  Table 1.2; TFDP3; ENSG00000183434; HLA -A*25:01
TAGSRSNGTW

SEQ ID NO: 10190 - protein, 9 aa, Homo sapiens
  Table 1.2; TFDP3; ENSG00000183434; HLA -A*30:01,HLA-B*13:02,HLA-B*40:01,HLA-B*44:03,HLA-B*49:01
TEANEELKV

SEQ ID NO: 10191 - protein, 10 aa, Homo sapiens
  Table 1.2; TFDP3; ENSG00000183434; HLA -A*30:01,HLA-B*27:05,HLA-B*40:01,HLA-B*40:02,HLA-B*44:02, HLA-B*44:03,HLA-B*49:01
TEANEELKVL

SEQ ID NO: 10192 - protein, 11 aa, Homo sapiens
  Table 1.2; TFDP3; ENSG00000183434; HLA -A*30:01,HLA-B*40:01,HLA-B*44:02,HLA-B*44:03
TEANEELKVLM

SEQ ID NO: 10193 - protein, 8 aa, Homo sapiens
  Table 1.2; TFDP3; ENSG00000183434; HLA -B*18:01,HLA-B*37:01,HLA-B*44:03
TEMAQGTF

SEQ ID NO: 10194 - protein, 9 aa, Homo sapiens
  Table 1.2; TFDP3; ENSG00000183434; HLA -B*49:01
TEMAQGTFG

SEQ ID NO: 10195 - protein, 11 aa, Homo sapiens
  Table 1.2; TFDP3; ENSG00000183434; HLA -B*49:01
TEMAQGTFGGV

SEQ ID NO: 10196 - protein, 9 aa, Homo sapiens
  Table 1.2; TFDP3; ENSG00000183434; HLA -A*23:01,HLA-A*24:02,HLA-B*54:01,HLA-B*55:01,HLA-C*14:02
TFGGVFTTA

SEQ ID NO: 10197 - protein, 10 aa, Homo sapiens
  Table 1.2; TFDP3; ENSG00000183434; HLA -C*04:01
TFGGVFTTAG

SEQ ID NO: 10198 - protein, 9 aa, Homo sapiens
  Table 1.2; TFDP3; ENSG00000183434; HLA -A*23:01
TFGQSSVNI

SEQ ID NO: 10199 - protein, 11 aa, Homo sapiens
  Table 1.2; TFDP3; ENSG00000183434; HLA -A*30:02,HLA-A*32:01,HLA-B*38:01
THFASQNQHSY

SEQ ID NO: 10200 - protein, 9 aa, Homo sapiens
  Table 1.2; TFDP3; ENSG00000183434; HLA -B*54:01
TNIAIGMLA

SEQ ID NO: 10201 - protein, 9 aa, Homo sapiens
  Table 1.2; TFDP3; ENSG00000183434; HLA -C*06:02
TSRPVAVHT

SEQ ID NO: 10202 - protein, 8 aa, Homo sapiens
  Table 1.2; TFDP3; ENSG00000183434; HLA -A*01:01,HLA-A*30:02,HLA-B*39:01,HLA-C*05:01
TSSGGSQY

SEQ ID NO: 10203 - protein, 9 aa, Homo sapiens
  Table 1.2; TFDP3; ENSG00000183434; HLA -A*03:02,HLA-A*11:01,HLA-A*68:01
TSTVNPLGK

SEQ ID NO: 10204 - protein, 11 aa, Homo sapiens
  Table 1.2; TFDP3; ENSG00000183434; HLA -A*25:01,HLA-A*32:01,HLA-B*58:01
TTAGSRSNGTW

SEQ ID NO: 10205 - protein, 9 aa, Homo sapiens
  Table 1.2; TFDP3; ENSG00000183434; HLA -A*25:01,HLA-A*31:01,HLA-A*32:01,HLA-B*07:02,HLA-B*27:05, HLA-C*01:02
TVNPLGKQL

SEQ ID NO: 10206 - protein, 10 aa, Homo sapiens
  Table 1.2; TFDP3; ENSG00000183434; HLA -A*23:01,HLA-A*31:01,HLA-A*32:01
TVNPLGKQLL

SEQ ID NO: 10207 - protein, 11 aa, Homo sapiens
  Table 1.2; TFDP3; ENSG00000183434; HLA -A*24:02
TWLSASDLTNI

SEQ ID NO: 10208 - protein, 8 aa, Homo sapiens
  Table 1.2; TFDP3; ENSG00000183434; HLA -A*23:01,HLA-B*35:01,HLA-B*35:03,HLA-C*04:01
TYDALNVL

SEQ ID NO: 10209 - protein, 9 aa, Homo sapiens
  Table 1.2; TFDP3; ENSG00000183434; HLA -A*02:07,HLA-A*23:01,HLA-A*24:02,HLA-A*29:02,HLA-A*32:01, HLA-A*33:03,HLA-B*35:01,HLA-B*35:03,HLA-B*38:01,HLA-B*55:01, HLA-C*04:01,HLA-C*05:01,HLA-C*07:04,HLA-C*14:02
TYDALNVLM

SEQ ID NO: 10210 - protein, 9 aa, Homo sapiens
  Table 1.2; TFDP3; ENSG00000183434; HLA -B*08:01
VAKFRAASN

SEQ ID NO: 10211 - protein, 8 aa, Homo sapiens
  Table 1.2; TFDP3; ENSG00000183434; HLA -B*46:01,HLA-B*51:01
VAVHTSTV

SEQ ID NO: 10212 - protein, 10 aa, Homo sapiens
  Table 1.2; TFDP3; ENSG00000183434; HLA -A*30:01,HLA-B*40:01,HLA-B*40:02,HLA-B*49:01
VEEQVSQRPL

SEQ ID NO: 10213 - protein, 8 aa, Homo sapiens
  Table 1.2; TFDP3; ENSG00000183434; HLA -B*18:01,HLA-B*37:01,HLA-B*39:01
VGELVAKF

SEQ ID NO: 10214 - protein, 11 aa, Homo sapiens
  Table 1.2; TFDP3; ENSG00000183434; HLA -A*23:01,HLA-A*24:02,HLA-A*30:02
VGSPNPPSTHF

SEQ ID NO: 10215 - protein, 9 aa, Homo sapiens
  Table 1.2; TFDP3; ENSG00000183434; HLA -B*38:01,HLA-B*39:01,HLA-C*07:04
VHTSTVNPL

SEQ ID NO: 10216 - protein, 10 aa, Homo sapiens
  Table 1.2; TFDP3; ENSG00000183434; HLA -A*03:01,HLA-A*03:02,HLA-A*11:01,HLA-A*31:01,HLA-A*33:01, HLA-A*33:03,HLA-A*68:01,HLA-B*57:01
VLMDENQTSR

SEQ ID NO: 10217 - protein, 9 aa, Homo sapiens
  Table 1.2; TFDP3; ENSG00000183434; HLA -A*23:01,HLA-B*13:02
VNIDQQVVI

SEQ ID NO: 10218 - protein, 8 aa, Homo sapiens
  Table 1.2; TFDP3; ENSG00000183434; HLA -C*01:02
VNPLGKQL

SEQ ID NO: 10219 - protein, 8 aa, Homo sapiens
  Table 1.2; TFDP3; ENSG00000183434; HLA -B*54:01,HLA-B*56:01
VPFIIISS

SEQ ID NO: 10220 - protein, 9 aa, Homo sapiens
  Table 1.2; TFDP3; ENSG00000183434; HLA -B*54:01,HLA-B*56:01
VPFIIISSS

SEQ ID NO: 10221 - protein, 9 aa, Homo sapiens
  Table 1.2; TFDP3; ENSG00000183434; HLA -B*51:01,HLA-B*54:01,HLA-B*55:01,HLA-B*56:01
VPKALEPYV

SEQ ID NO: 10222 - protein, 11 aa, Homo sapiens
  Table 1.2; TFDP3; ENSG00000183434; HLA -A*03:02,HLA-A*11:01,HLA-B*27:02
VSLTEANEELK

SEQ ID NO: 10223 - protein, 9 aa, Homo sapiens
  Table 1.2; TFDP3; ENSG00000183434; HLA -A*01:01,HLA-C*05:01
VTEMAQGTF

SEQ ID NO: 10224 - protein, 8 aa, Homo sapiens
  Table 1.2; TFDP3; ENSG00000183434; HLA -A*03:01,HLA-A*03:02,HLA-A*11:01,HLA-B*27:02
VVGELVAK

SEQ ID NO: 10225 - protein, 9 aa, Homo sapiens
  Table 1.2; TFDP3; ENSG00000183434; HLA -A*01:01,HLA-A*02:07,HLA-A*03:01,HLA-A*03:02,HLA-A*11:01, HLA-A*23:01,HLA-A*24:02,HLA-A*25:01,HLA-A*26:01,HLA-A*29:02, HLA-A*30:02,HLA-A*31:01,HLA-A*32:01,HLA-A*33:01,HLA-A*33:03,
  HLA-A*68:01,HLA-A*68:02,HLA-B*15:01,HLA-B*15:03,HLA-B*18:01, HLA-B*27:02,HLA-B*27:05,HLA-B*35:01,HLA-B*37:01,HLA-B*38:01, HLA-B*44:02,HLA-B*44:03,HLA-B*46:01,HLA-B*57:01,HLA-B*58:01, HLA-C*02:02,HLA-C*07:04,HLA-C*12:03
VVGELVAKF

SEQ ID NO: 10226 - protein, 8 aa, Homo sapiens
  Table 1.2; TFDP3; ENSG00000183434; HLA -A*31:01
VVIGMPQR

SEQ ID NO: 10227 - protein, 9 aa, Homo sapiens
  Table 1.2; TFDP3; ENSG00000183434; HLA -A*32:01
VVIGMPQRP

SEQ ID NO: 10228 - protein, 11 aa, Homo sapiens
  Table 1.2; TFDP3; ENSG00000183434; HLA -B*54:01
VVIGMPQRPAA

SEQ ID NO: 10229 - protein, 8 aa, Homo sapiens
  Table 1.2; TFDP3; ENSG00000183434; HLA -A*30:01,HLA-B*37:01,HLA-B*40:02
YDALNVLM

SEQ ID NO: 10230 - protein, 10 aa, Homo sapiens
  Table 1.2; TFDP3; ENSG00000183434; HLA -A*01:01
YSSPPWAGQH

SEQ ID NO: 10231 - protein, 9 aa, Homo sapiens
  Table 1.2; TFDP3; ENSG00000183434; HLA -A*01:01,HLA-A*03:02,HLA-A*11:01,HLA-A*26:01,HLA-A*31:01, HLA-A*33:01,HLA-A*33:03,HLA-A*68:01,HLA-C*05:01,HLA-C*07:06
YVEEQVSQR

SEQ ID NO: 10232 - protein, 11 aa, Homo sapiens
  Table 1.2; TFDP3; ENSG00000183434; HLA -B*27:05,HLA-C*03:03,HLA-C*03:04
YVEEQVSQRPL

SEQ ID NO: 10233 - protein, 10 aa, Homo sapiens
  Table 1.2; TFDP3; ENSG00000183434; HLA -A*25:01,HLA-A*26:01
YVTEMAQGTF

SEQ ID NO: 10234 - protein, 9 aa, Homo sapiens
  Table 1.2; XAGE3; ENSG00000171402; HLA -C*05:01
AAETQVPDL

SEQ ID NO: 10235 - protein, 10 aa, Homo sapiens
  Table 1.2; XAGE3; ENSG00000171402; HLA -B*27:02
ADLQELSQSK

SEQ ID NO: 10236 - protein, 8 aa, Homo sapiens
  Table 1.2; XAGE3; ENSG00000171402; HLA -A*30:01,HLA-B*18:01,HLA-B*37:01,HLA-B*40:01,HLA-B*40:02, HLA-B*44:02,HLA-B*44:03,HLA-B*49:01
AETQVPDL

SEQ ID NO: 10237 - protein, 10 aa, Homo sapiens
  Table 1.2; XAGE3; ENSG00000171402; HLA -A*30:01,HLA-B*49:01
AETQVPDLEA

SEQ ID NO: 10238 - protein, 9 aa, Homo sapiens
  Table 1.2; XAGE3; ENSG00000171402; HLA -A*33:01,HLA-B*27:02
DDQGKILPK

SEQ ID NO: 10239 - protein, 9 aa, Homo sapiens
  Table 1.2; XAGE3; ENSG00000171402; HLA -A*03:02,HLA-A*33:01,HLA-A*33:03
DLQELSQSK

SEQ ID NO: 10240 - protein, 11 aa, Homo sapiens
  Table 1.2; XAGE3; ENSG00000171402; HLA -A*33:01,HLA-A*33:03
ESRDPAPGQER

SEQ ID NO: 10241 - protein, 10 aa, Homo sapiens
  Table 1.2; XAGE3; ENSG00000171402; HLA -B*15:03
GKILPKSEQF

SEQ ID NO: 10242 - protein, 9 aa, Homo sapiens
  Table 1.2; XAGE3; ENSG00000171402; HLA -B*07:02,HLA-B*35:03,HLA-C*07:02
GPDDQGKIL

SEQ ID NO: 10243 - protein, 11 aa, Homo sapiens
  Table 1.2; XAGE3; ENSG00000171402; HLA -A*03:01,HLA-A*03:02,HLA-A*11:01,HLA-B*27:02
GPDDQGKILPK

SEQ ID NO: 10244 - protein, 9 aa, Homo sapiens
  Table 1.2; XAGE3; ENSG00000171402; HLA -A*23:01,HLA-A*24:02,HLA-A*30:02,HLA-A*31:01,HLA-A*32:01, HLA-B*15:01,HLA-B*37:01,HLA-B*57:01,HLA-B*58:01
KILPKSEQF

SEQ ID NO: 10245 - protein, 10 aa, Homo sapiens
  Table 1.2; XAGE3; ENSG00000171402; HLA -A*03:01
KILPKSEQFK

SEQ ID NO: 10246 - protein, 8 aa, Homo sapiens
  Table 1.2; XAGE3; ENSG00000171402; HLA -A*30:01,HLA-B*18:01,HLA-B*40:01,HLA-B*49:01
LEADLQEL

SEQ ID NO: 10247 - protein, 11 aa, Homo sapiens
  Table 1.2; XAGE3; ENSG00000171402; HLA -B*07:02,HLA-B*35:01,HLA-B*35:03,HLA-B*51:01,HLA-B*54:01, HLA-B*55:01,HLA-B*56:01,HLA-C*03:03,HLA-C*07:02,HLA-C*16:02
MPEGGDRQPQV

SEQ ID NO: 10248 - protein, 8 aa, Homo sapiens
  Table 1.2; XAGE3; ENSG00000171402; HLA -B*58:01
RSVPPPEL

SEQ ID NO: 10249 - protein, 9 aa, Homo sapiens
  Table 1.2; XAGE3; ENSG00000171402; HLA -B*57:01,HLA-B*58:01
RSVPPPELI

SEQ ID NO: 10250 - protein, 10 aa, Homo sapiens
  Table 1.2; XAGE3; ENSG00000171402; HLA -B*27:05
SRDPAPGQER

SEQ ID NO: 10251 - protein, 8 aa, Homo sapiens
  Table 1.2; XAGE3; ENSG00000171402; HLA -A*31:01
STYRPRPR

SEQ ID NO: 10252 - protein, 11 aa, Homo sapiens
  Table 1.2; XAGE3; ENSG00000171402; HLA -A*26:01
SVPPPELIGPM

SEQ ID NO: 10253 - protein, 10 aa, Homo sapiens
  Table 1.2; XAGE3; ENSG00000171402; HLA -B*39:01
TQVPDLEADL

SEQ ID NO: 10254 - protein, 8 aa, Homo sapiens
  Table 1.2; XAGE3; ENSG00000171402; HLA -B*35:03
VPDLEADL

SEQ ID NO: 10255 - protein, 11 aa, Homo sapiens
  Table 1.2; XAGE3; ENSG00000171402; HLA -B*35:01,HLA-B*35:03,HLA-B*55:01
VPDLEADLQEL

SEQ ID NO: 10256 - protein, 11 aa, Homo sapiens
  Table 1.2; XAGE3; ENSG00000171402; HLA -B*35:03
VPPPELIGPML

SEQ ID NO: 10257 - protein, 10 aa, Homo sapiens
  Table 1.2; XAGE5; ENSG00000171405; HLA -B*27:02
ADLQELSQSK

SEQ ID NO: 10258 - protein, 8 aa, Homo sapiens
  Table 1.2; XAGE5; ENSG00000171405; HLA -A*30:01,HLA-B*18:01,HLA-B*37:01,HLA-B*40:01,HLA-B*40:02, HLA-B*44:02,HLA-B*44:03,HLA-B*49:01
AEIQVPNL

SEQ ID NO: 10259 - protein, 10 aa, Homo sapiens
  Table 1.2; XAGE5; ENSG00000171405; HLA -A*30:01,HLA-B*44:03,HLA-B*49:01
AEIQVPNLEA

SEQ ID NO: 10260 - protein, 8 aa, Homo sapiens
  Table 1.2; XAGE5; ENSG00000171405; HLA -B*13:02,HLA-B*15:01,HLA-B*15:03
AQLVGPML

SEQ ID NO: 10261 - protein, 9 aa, Homo sapiens
  Table 1.2; XAGE5; ENSG00000171405; HLA -A*33:01
DLQELSQSK

SEQ ID NO: 10262 - protein, 9 aa, Homo sapiens
  Table 1.2; XAGE5; ENSG00000171405; HLA -A*03:02,HLA-A*11:01,HLA-A*33:01,HLA-A*33:03,HLA-A*68:01
DVQGKILPK

SEQ ID NO: 10263 - protein, 11 aa, Homo sapiens
  Table 1.2; XAGE5; ENSG00000171405; HLA -A*33:01,HLA-A*33:03,HLA-A*68:01
ESQDHTPGQKR

SEQ ID NO: 10264 - protein, 10 aa, Homo sapiens
  Table 1.2; XAGE5; ENSG00000171405; HLA -B*15:03
GKILPKSEQF

SEQ ID NO: 10265 - protein, 8 aa, Homo sapiens
  Table 1.2; XAGE5; ENSG00000171405; HLA -A*24:02
ILPKSEQF

SEQ ID NO: 10266 - protein, 9 aa, Homo sapiens
  Table 1.2; XAGE5; ENSG00000171405; HLA -A*23:01,HLA-A*24:02,HLA-A*30:02,HLA-A*32:01,HLA-B*15:01, HLA-B*37:01,HLA-B*57:01,HLA-B*58:01
KILPKSEQF

SEQ ID NO: 10267 - protein, 10 aa, Homo sapiens
  Table 1.2; XAGE5; ENSG00000171405; HLA -A*03:01
KILPKSEQFK

SEQ ID NO: 10268 - protein, 9 aa, Homo sapiens
  Table 1.2; XAGE5; ENSG00000171405; HLA -B*35:03,HLA-C*03:03,HLA-C*03:04
LAQLVGPML

SEQ ID NO: 10269 - protein, 8 aa, Homo sapiens
  Table 1.2; XAGE5; ENSG00000171405; HLA -A*30:01,HLA-B*18:01,HLA-B*40:01,HLA-B*49:01
LEADLQEL

SEQ ID NO: 10270 - protein, 11 aa, Homo sapiens
  Table 1.2; XAGE5; ENSG00000171405; HLA -B*07:02,HLA-B*35:01,HLA-B*35:03,HLA-B*38:01,HLA-B*55:01, HLA-C*03:03,HLA-C*07:02
MPEGGEGKPQL

SEQ ID NO: 10271 - protein, 10 aa, Homo sapiens
  Table 1.2; XAGE5; ENSG00000171405; HLA -B*40:02
PEGGEGKPQL

SEQ ID NO: 10272 - protein, 10 aa, Homo sapiens
  Table 1.2; XAGE5; ENSG00000171405; HLA -B*40:01,HLA-B*49:01
REDDQGAAEI

SEQ ID NO: 10273 - protein, 10 aa, Homo sapiens
  Table 1.2; XAGE5; ENSG00000171405; HLA -A*02:01,HLA-A*02:04
RLAQLVGPML

SEQ ID NO: 10274 - protein, 9 aa, Homo sapiens
  Table 1.2; XAGE5; ENSG00000171405; HLA -B*07:02,HLA-B*35:03,HLA-C*07:02
SPDVQGKIL

SEQ ID NO: 10275 - protein, 11 aa, Homo sapiens
  Table 1.2; XAGE5; ENSG00000171405; HLA -B*35:03
VPNLEADLQEL

SEQ ID NO: 10276 - protein, 8 aa, Homo sapiens
  Table 1.2; ZFP42; ENSG00000179059; HLA -B*08:01
AALRKHLL

SEQ ID NO: 10277 - protein, 9 aa, Homo sapiens
  Table 1.2; ZFP42; ENSG00000179059; HLA -B*40:02
AEFARKKPP

SEQ ID NO: 10278 - protein, 10 aa, Homo sapiens
  Table 1.2; ZFP42; ENSG00000179059; HLA -B*40:02
AEFARKKPPI

SEQ ID NO: 10279 - protein, 8 aa, Homo sapiens
  Table 1.2; ZFP42; ENSG00000179059; HLA -A*30:01,HLA-B*18:01,HLA-B*37:01,HLA-B*40:01,HLA-B*40:02, HLA-B*49:01,HLA-B*56:01
AEIEPVSA

SEQ ID NO: 10280 - protein, 9 aa, Homo sapiens
  Table 1.2; ZFP42; ENSG00000179059; HLA -A*02:01,HLA-A*02:03,HLA-A*30:01,HLA-B*13:02,HLA-B*15:01, HLA-B*18:01,HLA-B*27:02,HLA-B*27:05,HLA-B*37:01,HLA-B*40:01, HLA-B*40:02,HLA-B*44:02,HLA-B*44:03,HLA-B*46:01,HLA-B*49:01,
  HLA-B*56:01,HLA-C*02:02,HLA-C*16:04
AEIEPVSAV

SEQ ID NO: 10281 - protein, 10 aa, Homo sapiens
  Table 1.2; ZFP42; ENSG00000179059; HLA -A*25:01,HLA-A*30:01,HLA-A*30:02,HLA-B*18:01,HLA-B*27:02, HLA-B*27:05,HLA-B*37:01,HLA-B*40:01,HLA-B*40:02,HLA-B*44:02, HLA-B*44:03,HLA-B*49:01,HLA-B*57:01,HLA-B*58:01,HLA-C*16:04
AEIEPVSAVW

SEQ ID NO: 10282 - protein, 8 aa, Homo sapiens
  Table 1.2; ZFP42; ENSG00000179059; HLA -A*23:01,HLA-C*01:02,HLA-C*04:01,HLA-C*14:02
AFVESSKL

SEQ ID NO: 10283 - protein, 11 aa, Homo sapiens
  Table 1.2; ZFP42; ENSG00000179059; HLA -A*68:01
AIACPQSGCTR

SEQ ID NO: 10284 - protein, 9 aa, Homo sapiens
  Table 1.2; ZFP42; ENSG00000179059; HLA -A*03:01,HLA-A*03:02,HLA-A*25:01,HLA-A*26:01,HLA-A*29:02, HLA-A*30:02,HLA-B*15:01,HLA-C*07:04
ALCDGYVCY

SEQ ID NO: 10285 - protein, 10 aa, Homo sapiens
  Table 1.2; ZFP42; ENSG00000179059; HLA -B*07:02
APSGAKPRQG

SEQ ID NO: 10286 - protein, 11 aa, Homo sapiens
  Table 1.2; ZFP42; ENSG00000179059; HLA -B*07:02
APSGAKPRQGK

SEQ ID NO: 10287 - protein, 10 aa, Homo sapiens
  Table 1.2; ZFP42; ENSG00000179059; HLA -A*01:01,HLA-A*30:02,HLA-C*07:01
ASSLECSLEY

SEQ ID NO: 10288 - protein, 9 aa, Homo sapiens
  Table 1.2; ZFP42; ENSG00000179059; HLA -A*29:02,HLA-A*30:02
AVWALCDGY

SEQ ID NO: 10289 - protein, 9 aa, Homo sapiens
  Table 1.2; ZFP42; ENSG00000179059; HLA -A*23:01,HLA-A*24:02,HLA-A*32:01,HLA-B*27:05,HLA-B*35:03, HLA-B*38:01,HLA-B*39:01,HLA-C*01:02,HLA-C*04:01,HLA-C*14:02, HLA-C*16:02
CYEPGPQAL

SEQ ID NO: 10290 - protein, 8 aa, Homo sapiens
  Table 1.2; ZFP42; ENSG00000179059; HLA -B*51:01
DCYIECVI

SEQ ID NO: 10291 - protein, 9 aa, Homo sapiens
  Table 1.2; ZFP42; ENSG00000179059; HLA -A*33:01
DCYIECVIR

SEQ ID NO: 10292 - protein, 8 aa, Homo sapiens
  Table 1.2; ZFP42; ENSG00000179059; HLA -B*08:01
DFNLRTHV

SEQ ID NO: 10293 - protein, 9 aa, Homo sapiens
  Table 1.2; ZFP42; ENSG00000179059; HLA -A*33:01,HLA-A*33:03
DFNLRTHVR

SEQ ID NO: 10294 - protein, 11 aa, Homo sapiens
  Table 1.2; ZFP42; ENSG00000179059; HLA -A*25:01,HLA-A*26:01
DLSDPKQLAEF

SEQ ID NO: 10295 - protein, 8 aa, Homo sapiens
  Table 1.2; ZFP42; ENSG00000179059; HLA -A*25:01,HLA-A*33:01,HLA-A*33:03,HLA-B*08:01,HLA-B*35:01
DPKQLAEF

SEQ ID NO: 10296 - protein, 9 aa, Homo sapiens
  Table 1.2; ZFP42; ENSG00000179059; HLA -B*54:01
DPKQLAEFA

SEQ ID NO: 10297 - protein, 10 aa, Homo sapiens
  Table 1.2; ZFP42; ENSG00000179059; HLA -A*33:01,HLA-A*33:03,HLA-A*68:01
DPKQLAEFAR

SEQ ID NO: 10298 - protein, 11 aa, Homo sapiens
  Table 1.2; ZFP42; ENSG00000179059; HLA -A*33:01
DPKQLAEFARK

SEQ ID NO: 10299 - protein, 9 aa, Homo sapiens
  Table 1.2; ZFP42; ENSG00000179059; HLA -A*01:01,HLA-A*25:01,HLA-A*26:01,HLA-A*29:02,HLA-A*33:01, HLA-B*18:01,HLA-B*35:01,HLA-C*07:01
DSLFESLEY

SEQ ID NO: 10300 - protein, 10 aa, Homo sapiens
  Table 1.2; ZFP42; ENSG00000179059; HLA -A*33:01
DSLFESLEYL

SEQ ID NO: 10301 - protein, 11 aa, Homo sapiens
  Table 1.2; ZFP42; ENSG00000179059; HLA -A*11:01,HLA-A*33:01,HLA-B*27:02
DSLFESLEYLK

SEQ ID NO: 10302 - protein, 9 aa, Homo sapiens
  Table 1.2; ZFP42; ENSG00000179059; HLA -A*33:03,HLA-A*68:01,HLA-B*27:05,HLA-B*35:01,HLA-B*35:03, HLA-B*38:01,HLA-B*39:01
EASSLECSL

SEQ ID NO: 10303 - protein, 11 aa, Homo sapiens
  Table 1.2; ZFP42; ENSG00000179059; HLA -A*26:01,HLA-C*07:01
EASSLECSLEY

SEQ ID NO: 10304 - protein, 8 aa, Homo sapiens
  Table 1.2; ZFP42; ENSG00000179059; HLA -B*37:01
EDSLFESL

SEQ ID NO: 10305 - protein, 10 aa, Homo sapiens
  Table 1.2; ZFP42; ENSG00000179059; HLA -B*27:02
EDSLFESLEY

SEQ ID NO: 10306 - protein, 9 aa, Homo sapiens
  Table 1.2; ZFP42; ENSG00000179059; HLA -A*30:01,HLA-B*18:01,HLA-B*38:01,HLA-B*39:01,HLA-B*40:01, HLA-B*40:02,HLA-B*44:02,HLA-B*44:03,HLA-B*49:01
EEDSLFESL

SEQ ID NO: 10307 - protein, 11 aa, Homo sapiens
  Table 1.2; ZFP42; ENSG00000179059; HLA -B*18:01,HLA-B*44:02,HLA-B*44:03
EEDSLFESLEY

SEQ ID NO: 10308 - protein, 9 aa, Homo sapiens
  Table 1.2; ZFP42; ENSG00000179059; HLA -B*08:01
EGCGKRFSL

SEQ ID NO: 10309 - protein, 9 aa, Homo sapiens
  Table 1.2; ZFP42; ENSG00000179059; HLA -A*24:02,HLA-A*25:01,HLA-A*26:01,HLA-A*32:01,HLA-A*33:03, HLA-A*68:01,HLA-A*68:02,HLA-B*18:01,HLA-B*35:01,HLA-B*38:01, HLA-B*39:01,HLA-B*44:02,HLA-B*44:03,HLA-B*57:01,HLA-B*58:01,
  HLA-C*07:04
EIEPVSAVW

SEQ ID NO: 10310 - protein, 11 aa, Homo sapiens
  Table 1.2; ZFP42; ENSG00000179059; HLA -A*02:07,HLA-A*68:02
EIEPVSAVWAL

SEQ ID NO: 10311 - protein, 9 aa, Homo sapiens
  Table 1.2; ZFP42; ENSG00000179059; HLA -A*01:01,HLA-A*25:01,HLA-A*26:01
ENSLEYSEY

SEQ ID NO: 10312 - protein, 9 aa, Homo sapiens
  Table 1.2; ZFP42; ENSG00000179059; HLA -A*26:01,HLA-A*33:03,HLA-A*68:01,HLA-A*68:02,HLA-B*07:02, HLA-B*35:01,HLA-B*35:03,HLA-B*39:01,HLA-B*54:01,HLA-B*55:01, HLA-B*56:01
EPVSAVWAL

SEQ ID NO: 10313 - protein, 8 aa, Homo sapiens
  Table 1.2; ZFP42; ENSG00000179059; HLA -B*13:02
EQQLSQKV

SEQ ID NO: 10314 - protein, 9 aa, Homo sapiens
  Table 1.2; ZFP42; ENSG00000179059; HLA -B*15:01,HLA-B*15:03,HLA-B*27:02,HLA-B*44:02,HLA-B*44:03, HLA-C*07:04
EQQLSQKVF

SEQ ID NO: 10315 - protein, 8 aa, Homo sapiens
  Table 1.2; ZFP42; ENSG00000179059; HLA -A*33:03
ESLEYLKK

SEQ ID NO: 10316 - protein, 8 aa, Homo sapiens
  Table 1.2; ZFP42; ENSG00000179059; HLA -C*04:01
EYDSLSAI

SEQ ID NO: 10317 - protein, 11 aa, Homo sapiens
  Table 1.2; ZFP42; ENSG00000179059; HLA -A*23:01,HLA-A*24:02,HLA-A*33:01,HLA-A*33:03
EYLKKGSEQQL

SEQ ID NO: 10318 - protein, 8 aa, Homo sapiens
  Table 1.2; ZFP42; ENSG00000179059; HLA -A*33:03,HLA-C*04:01
EYMKKGVK

SEQ ID NO: 10319 - protein, 9 aa, Homo sapiens
  Table 1.2; ZFP42; ENSG00000179059; HLA -A*24:02,HLA-A*33:01,HLA-A*33:03
EYMKKGVKK

SEQ ID NO: 10320 - protein, 8 aa, Homo sapiens
  Table 1.2; ZFP42; ENSG00000179059; HLA -A*23:01,HLA-A*24:02,HLA-A*33:03,HLA-B*08:01,HLA-C*07:01, HLA-C*14:02
EYMTGKKL

SEQ ID NO: 10321 - protein, 9 aa, Homo sapiens
  Table 1.2; ZFP42; ENSG00000179059; HLA -A*03:02,HLA-A*11:01,HLA-A*26:01,HLA-A*31:01,HLA-A*33:01, HLA-A*33:03,HLA-A*68:01,HLA-B*27:02,HLA-B*27:05,HLA-C*07:01, HLA-C*07:06
EYSEYMTGK

SEQ ID NO: 10322 - protein, 11 aa, Homo sapiens
  Table 1.2; ZFP42; ENSG00000179059; HLA -A*24:02
EYSEYMTGKKL

SEQ ID NO: 10323 - protein, 8 aa, Homo sapiens
  Table 1.2; ZFP42; ENSG00000179059; HLA -A*30:01,HLA-B*49:01
FEASSLEC

SEQ ID NO: 10324 - protein, 10 aa, Homo sapiens
  Table 1.2; ZFP42; ENSG00000179059; HLA -A*30:01,HLA-B*18:01,HLA-B*40:01,HLA-B*40:02,HLA-B*49:01
FEASSLECSL

SEQ ID NO: 10325 - protein, 8 aa, Homo sapiens
  Table 1.2; ZFP42; ENSG00000179059; HLA -B*27:02
FESLEYLK

SEQ ID NO: 10326 - protein, 8 aa, Homo sapiens
  Table 1.2; ZFP42; ENSG00000179059; HLA -A*03:02
FIQSNNLK

SEQ ID NO: 10327 - protein, 9 aa, Homo sapiens
  Table 1.2; ZFP42; ENSG00000179059; HLA -B*54:01
FIQSNNLKA

SEQ ID NO: 10328 - protein, 9 aa, Homo sapiens
  Table 1.2; ZFP42; ENSG00000179059; HLA -A*01:01
FSDCYIECV

SEQ ID NO: 10329 - protein, 8 aa, Homo sapiens
  Table 1.2; ZFP42; ENSG00000179059; HLA -A*33:03
FSLDFNLR

SEQ ID NO: 10330 - protein, 10 aa, Homo sapiens
  Table 1.2; ZFP42; ENSG00000179059; HLA -A*31:01
FVCPFQGCNR

SEQ ID NO: 10331 - protein, 9 aa, Homo sapiens
  Table 1.2; ZFP42; ENSG00000179059; HLA -A*33:01,HLA-A*33:03,HLA-A*68:01
FVESSKLKR

SEQ ID NO: 10332 - protein, 8 aa, Homo sapiens
  Table 1.2; ZFP42; ENSG00000179059; HLA -A*30:01,HLA-B*18:01,HLA-B*27:05,HLA-B*37:01,HLA-B*40:01, HLA-B*40:02,HLA-B*44:03,HLA-B*49:01
GEFSQPIL

SEQ ID NO: 10333 - protein, 9 aa, Homo sapiens
  Table 1.2; ZFP42; ENSG00000179059; HLA -B*37:01,HLA-B*40:02,HLA-B*44:02,HLA-B*44:03
GEKPFRCTF

SEQ ID NO: 10334 - protein, 10 aa, Homo sapiens
  Table 1.2; ZFP42; ENSG00000179059; HLA -A*26:01,HLA-A*29:02,HLA-A*30:01,HLA-A*30:02,HLA-B*15:01, HLA-B*15:03,HLA-B*18:01,HLA-B*27:02,HLA-B*27:05,HLA-B*39:01, HLA-B*40:01,HLA-B*44:02,HLA-B*44:03,HLA-B*49:01,HLA-C*07:01,
  HLA-C*16:04
GENSLEYSEY

SEQ ID NO: 10335 - protein, 9 aa, Homo sapiens
  Table 1.2; ZFP42; ENSG00000179059; HLA -A*01:01
GGDDFSDCY

SEQ ID NO: 10336 - protein, 10 aa, Homo sapiens
  Table 1.2; ZFP42; ENSG00000179059; HLA -C*06:02
GGRAPSGAKP

SEQ ID NO: 10337 - protein, 11 aa, Homo sapiens
  Table 1.2; ZFP42; ENSG00000179059; HLA -A*31:01,HLA-A*33:01
GGRAPSGAKPR

SEQ ID NO: 10338 - protein, 10 aa, Homo sapiens
  Table 1.2; ZFP42; ENSG00000179059; HLA -B*15:03
GKAFVESSKL

SEQ ID NO: 10339 - protein, 10 aa, Homo sapiens
  Table 1.2; ZFP42; ENSG00000179059; HLA -A*02:03
GLGGRAPSGA

SEQ ID NO: 10340 - protein, 11 aa, Homo sapiens
  Table 1.2; ZFP42; ENSG00000179059; HLA -A*03:02
GLGGRAPSGAK

SEQ ID NO: 10341 - protein, 10 aa, Homo sapiens
  Table 1.2; ZFP42; ENSG00000179059; HLA -B*39:01
GPQALGGDDF

SEQ ID NO: 10342 - protein, 9 aa, Homo sapiens
  Table 1.2; ZFP42; ENSG00000179059; HLA -B*27:05,HLA-C*06:02
GRAPSGAKP

SEQ ID NO: 10343 - protein, 10 aa, Homo sapiens
  Table 1.2; ZFP42; ENSG00000179059; HLA -B*27:05,HLA-C*06:02,HLA-C*07:02
GRAPSGAKPR

SEQ ID NO: 10344 - protein, 9 aa, Homo sapiens
  Table 1.2; ZFP42; ENSG00000179059; HLA -A*03:02,HLA-A*11:01
GSEQQLSQK

SEQ ID NO: 10345 - protein, 11 aa, Homo sapiens
  Table 1.2; ZFP42; ENSG00000179059; HLA -B*58:01
GSEQQLSQKVF

SEQ ID NO: 10346 - protein, 9 aa, Homo sapiens
  Table 1.2; ZFP42; ENSG00000179059; HLA -A*03:01,HLA-A*03:02,HLA-A*11:01
GVKKELPQK

SEQ ID NO: 10347 - protein, 10 aa, Homo sapiens
  Table 1.2; ZFP42; ENSG00000179059; HLA -A*03:01,HLA-A*03:02,HLA-A*11:01,HLA-A*68:01
HILTHANTNK

SEQ ID NO: 10348 - protein, 8 aa, Homo sapiens
  Table 1.2; ZFP42; ENSG00000179059; HLA -A*33:03
HTGEKPFR

SEQ ID NO: 10349 - protein, 9 aa, Homo sapiens
  Table 1.2; ZFP42; ENSG00000179059; HLA -C*04:01
IACPQSGCT

SEQ ID NO: 10350 - protein, 10 aa, Homo sapiens
  Table 1.2; ZFP42; ENSG00000179059; HLA -A*31:01,HLA-A*33:01,HLA-A*33:03,HLA-A*68:01,HLA-B*27:05, HLA-C*04:01,HLA-C*07:01,HLA-C*07:06
IACPQSGCTR

SEQ ID NO: 10351 - protein, 9 aa, Homo sapiens
  Table 1.2; ZFP42; ENSG00000179059; HLA -A*30:01,HLA-B*07:02,HLA-B*37:01,HLA-B*40:01,HLA-B*40:02, HLA-B*44:03,HLA-C*06:02,HLA-C*07:01,HLA-C*16:02
IDLSDPKQL

SEQ ID NO: 10352 - protein, 9 aa, Homo sapiens
  Table 1.2; ZFP42; ENSG00000179059; HLA -B*18:01,HLA-B*37:01,HLA-B*44:02,HLA-B*44:03
IECVIRGEF

SEQ ID NO: 10353 - protein, 8 aa, Homo sapiens
  Table 1.2; ZFP42; ENSG00000179059; HLA -B*18:01,HLA-B*37:01,HLA-B*44:02,HLA-B*44:03,HLA-B*49:01, HLA-B*57:01
IEPVSAVW

SEQ ID NO: 10354 - protein, 10 aa, Homo sapiens
  Table 1.2; ZFP42; ENSG00000179059; HLA -B*40:01
IEPVSAVWAL

SEQ ID NO: 10355 - protein, 11 aa, Homo sapiens
  Table 1.2; ZFP42; ENSG00000179059; HLA -A*02:07
ILEEDSLFESL

SEQ ID NO: 10356 - protein, 9 aa, Homo sapiens
  Table 1.2; ZFP42; ENSG00000179059; HLA -A*03:01,HLA-A*03:02
ILTHANTNK

SEQ ID NO: 10357 - protein, 10 aa, Homo sapiens
  Table 1.2; ZFP42; ENSG00000179059; HLA -B*27:02
IPGIDLSDPK

SEQ ID NO: 10358 - protein, 10 aa, Homo sapiens
  Table 1.2; ZFP42; ENSG00000179059; HLA -B*13:02
IQSNNLKAHI

SEQ ID NO: 10359 - protein, 9 aa, Homo sapiens
  Table 1.2; ZFP42; ENSG00000179059; HLA -A*01:01,HLA-A*03:01,HLA-A*03:02,HLA-A*11:01,HLA-A*25:01, HLA-A*26:01,HLA-A*29:02,HLA-A*30:02,HLA-A*32:01,HLA-B*15:01, HLA-B*15:03,HLA-B*18:01,HLA-B*27:05,HLA-B*35:01,HLA-B*39:01,
  HLA-B*46:01,HLA-B*55:01,HLA-B*58:01,HLA-C*02:02,HLA-C*07:01, HLA-C*07:04,HLA-C*07:06,HLA-C*14:02,HLA-C*16:02
IVGENSLEY

SEQ ID NO: 10360 - protein, 8 aa, Homo sapiens
  Table 1.2; ZFP42; ENSG00000179059; HLA -B*58:01
KAFVESSK

SEQ ID NO: 10361 - protein, 9 aa, Homo sapiens
  Table 1.2; ZFP42; ENSG00000179059; HLA -A*02:01,HLA-A*02:03,HLA-A*02:07,HLA-A*03:01,HLA-A*03:02, HLA-A*23:01,HLA-A*24:02,HLA-A*30:01,HLA-A*31:01,HLA-A*32:01, HLA-A*68:02,HLA-B*07:02,HLA-B*13:02,HLA-B*15:01,HLA-B*15:03,
  HLA-B*27:05,HLA-B*35:03,HLA-B*37:01,HLA-B*38:01,HLA-B*40:01, HLA-B*40:02,HLA-B*46:01,HLA-B*49:01,HLA-B*51:01,HLA-B*55:01, HLA-B*57:01,HLA-B*58:01,HLA-C*01:02,HLA-C*02:02,HLA-C*03:03, HLA-C*03:04,HLA-C*04:01,HLA-C*05:01,HLA-C*06:02,HLA-C*07:01,
  HLA-C*07:02,HLA-C*12:03,HLA-C*16:02,HLA-C*16:04
KAFVESSKL

SEQ ID NO: 10362 - protein, 10 aa, Homo sapiens
  Table 1.2; ZFP42; ENSG00000179059; HLA -A*03:01,HLA-A*03:02,HLA-A*11:01,HLA-A*31:01,HLA-B*27:02, HLA-B*57:01,HLA-C*06:02
KAFVESSKLK

SEQ ID NO: 10363 - protein, 11 aa, Homo sapiens
  Table 1.2; ZFP42; ENSG00000179059; HLA -A*03:01,HLA-A*31:01,HLA-B*57:01
KAFVESSKLKR

SEQ ID NO: 10364 - protein, 8 aa, Homo sapiens
  Table 1.2; ZFP42; ENSG00000179059; HLA -B*37:01
KELPQKIV

SEQ ID NO: 10365 - protein, 9 aa, Homo sapiens
  Table 1.2; ZFP42; ENSG00000179059; HLA -B*40:02
KELPQKIVG

SEQ ID NO: 10366 - protein, 8 aa, Homo sapiens
  Table 1.2; ZFP42; ENSG00000179059; HLA -B*37:01,HLA-B*49:01
KEYDSLSA

SEQ ID NO: 10367 - protein, 9 aa, Homo sapiens
  Table 1.2; ZFP42; ENSG00000179059; HLA -A*30:01,HLA-B*18:01,HLA-B*37:01,HLA-B*40:01,HLA-B*40:02, HLA-B*44:02,HLA-B*44:03,HLA-B*49:01
KEYDSLSAI

SEQ ID NO: 10368 - protein, 10 aa, Homo sapiens
  Table 1.2; ZFP42; ENSG00000179059; HLA -A*30:01,HLA-B*40:02,HLA-B*49:01
KEYDSLSAIA

SEQ ID NO: 10369 - protein, 11 aa, Homo sapiens
  Table 1.2; ZFP42; ENSG00000179059; HLA -A*30:01,HLA-B*40:01,HLA-B*40:02,HLA-B*49:01
KEYDSLSAIAC

SEQ ID NO: 10370 - protein, 10 aa, Homo sapiens
  Table 1.2; ZFP42; ENSG00000179059; HLA -A*03:01,HLA-A*03:02,HLA-A*11:01
KGSEQQLSQK

SEQ ID NO: 10371 - protein, 11 aa, Homo sapiens
  Table 1.2; ZFP42; ENSG00000179059; HLA -C*06:02
KGSEQQLSQKV

SEQ ID NO: 10372 - protein, 9 aa, Homo sapiens
  Table 1.2; ZFP42; ENSG00000179059; HLA -A*31:01
KHLLIHGPR

SEQ ID NO: 10373 - protein, 10 aa, Homo sapiens
  Table 1.2; ZFP42; ENSG00000179059; HLA -A*03:01,HLA-A*25:01,HLA-A*26:01,HLA-A*29:02,HLA-A*30:02, HLA-A*32:01,HLA-B*15:01,HLA-B*15:03,HLA-B*46:01,HLA-B*57:01, HLA-B*58:01,HLA-C*16:04
KIVGENSLEY

SEQ ID NO: 10374 - protein, 9 aa, Homo sapiens
  Table 1.2; ZFP42; ENSG00000179059; HLA -B*15:03,HLA-C*04:01
KKPPINKEY

SEQ ID NO: 10375 - protein, 10 aa, Homo sapiens
  Table 1.2; ZFP42; ENSG00000179059; HLA -A*02:01,HLA-A*02:03,HLA-A*02:04,HLA-A*02:07,HLA-A*03:01, HLA-A*03:02,HLA-A*23:01,HLA-A*24:02,HLA-A*32:01,HLA-B*13:02, HLA-B*55:01,HLA-B*58:01,HLA-C*06:02
KLPPGGIPGI

SEQ ID NO: 10376 - protein, 11 aa, Homo sapiens
  Table 1.2; ZFP42; ENSG00000179059; HLA -B*07:02
KPPINKEYDSL

SEQ ID NO: 10377 - protein, 11 aa, Homo sapiens
  Table 1.2; ZFP42; ENSG00000179059; HLA -B*07:02,HLA-C*07:02
KPRQGKSSQDL

SEQ ID NO: 10378 - protein, 9 aa, Homo sapiens
  Table 1.2; ZFP42; ENSG00000179059; HLA -B*27:05
KRFSLDFNL

SEQ ID NO: 10379 - protein, 10 aa, Homo sapiens
  Table 1.2; ZFP42; ENSG00000179059; HLA -B*58:01
KSSQDLQAEI

SEQ ID NO: 10380 - protein, 11 aa, Homo sapiens
  Table 1.2; ZFP42; ENSG00000179059; HLA -A*31:01
KTRHQKGLGGR

SEQ ID NO: 10381 - protein, 8 aa, Homo sapiens
  Table 1.2; ZFP42; ENSG00000179059; HLA -A*25:01,HLA-A*32:01,HLA-B*07:02,HLA-B*08:01,HLA-B*15:01, HLA-B*15:03,HLA-B*27:05,HLA-B*37:01,HLA-B*40:02,HLA-B*46:01, HLA-B*58:01,HLA-C*01:02,HLA-C*03:03,HLA-C*03:04,HLA-C*05:01,
  HLA-C*12:03,HLA-C*14:02
KVFEASSL

SEQ ID NO: 10382 - protein, 10 aa, Homo sapiens
  Table 1.2; ZFP42; ENSG00000179059; HLA -A*02:01,HLA-A*02:03,HLA-A*02:07,HLA-B*27:05,HLA-B*40:02, HLA-B*55:01,HLA-B*56:01
KVFEASSLEC

SEQ ID NO: 10383 - protein, 10 aa, Homo sapiens
  Table 1.2; ZFP42; ENSG00000179059; HLA -A*30:01,HLA-B*18:01,HLA-B*40:01,HLA-B*40:02,HLA-B*49:01
LEEDSLFESL

SEQ ID NO: 10384 - protein, 8 aa, Homo sapiens
  Table 1.2; ZFP42; ENSG00000179059; HLA -B*49:01
LEYMKKGV

SEQ ID NO: 10385 - protein, 9 aa, Homo sapiens
  Table 1.2; ZFP42; ENSG00000179059; HLA -B*40:02,HLA-B*49:01
LEYSEYMTG

SEQ ID NO: 10386 - protein, 10 aa, Homo sapiens
  Table 1.2; ZFP42; ENSG00000179059; HLA -A*03:01,HLA-A*11:01,HLA-B*27:02,HLA-B*49:01
LEYSEYMTGK

SEQ ID NO: 10387 - protein, 8 aa, Homo sapiens
  Table 1.2; ZFP42; ENSG00000179059; HLA -C*04:01
LFESLEYL

SEQ ID NO: 10388 - protein, 9 aa, Homo sapiens
  Table 1.2; ZFP42; ENSG00000179059; HLA -B*27:02
LFESLEYLK

SEQ ID NO: 10389 - protein, 10 aa, Homo sapiens
  Table 1.2; ZFP42; ENSG00000179059; HLA -A*30:02
LGGDDFSDCY

SEQ ID NO: 10390 - protein, 9 aa, Homo sapiens
  Table 1.2; ZFP42; ENSG00000179059; HLA -A*02:07,HLA-B*35:03,HLA-B*51:01,HLA-B*54:01,HLA-B*55:01, HLA-B*56:01
LPPGGIPGI

SEQ ID NO: 10391 - protein, 11 aa, Homo sapiens
  Table 1.2; ZFP42; ENSG00000179059; HLA -B*35:03,HLA-C*07:02
LPPGGIPGIDL

SEQ ID NO: 10392 - protein, 11 aa, Homo sapiens
  Table 1.2; ZFP42; ENSG00000179059; HLA -B*07:02,HLA-B*35:01,HLA-B*35:03,HLA-B*55:01
LPQKIVGENSL

SEQ ID NO: 10393 - protein, 10 aa, Homo sapiens
  Table 1.2; ZFP42; ENSG00000179059; HLA -A*02:01,HLA-A*02:03,HLA-B*27:05
LQAEIEPVSA

SEQ ID NO: 10394 - protein, 9 aa, Homo sapiens
  Table 1.2; ZFP42; ENSG00000179059; HLA -A*01:01
LSDPKQLAE

SEQ ID NO: 10395 - protein, 10 aa, Homo sapiens
  Table 1.2; ZFP42; ENSG00000179059; HLA -A*01:01,HLA-A*02:07,HLA-B*46:01,HLA-B*57:01,HLA-B*58:01, HLA-C*04:01,HLA-C*05:01,HLA-C*07:01
LSDPKQLAEF

SEQ ID NO: 10396 - protein, 11 aa, Homo sapiens
  Table 1.2; ZFP42; ENSG00000179059; HLA -A*01:01
LSDPKQLAEFA

SEQ ID NO: 10397 - protein, 9 aa, Homo sapiens
  Table 1.2; ZFP42; ENSG00000179059; HLA -A*32:01,HLA-B*57:01
LVHTGEKPF

SEQ ID NO: 10398 - protein, 9 aa, Homo sapiens
  Table 1.2; ZFP42; ENSG00000179059; HLA -A*02:03,HLA-A*03:01,HLA-A*33:01,HLA-B*08:01,HLA-C*07:01
NLKAHILTH

SEQ ID NO: 10399 - protein, 10 aa, Homo sapiens
  Table 1.2; ZFP42; ENSG00000179059; HLA -A*02:03
NLKAHILTHA

SEQ ID NO: 10400 - protein, 8 aa, Homo sapiens
  Table 1.2; ZFP42; ENSG00000179059; HLA -B*08:01
NNLKAHIL

SEQ ID NO: 10401 - protein, 8 aa, Homo sapiens
  Table 1.2; ZFP42; ENSG00000179059; HLA -A*30:02,HLA-B*18:01,HLA-B*35:01,HLA-B*39:01,HLA-B*46:01, HLA-C*01:02,HLA-C*07:01,HLA-C*14:02,HLA-C*16:01
NSLEYSEY

SEQ ID NO: 10402 - protein, 9 aa, Homo sapiens
  Table 1.2; ZFP42; ENSG00000179059; HLA -A*01:01,HLA-B*35:01,HLA-B*35:03,HLA-B*55:01,HLA-C*04:01
NSLEYSEYM

SEQ ID NO: 10403 - protein, 10 aa, Homo sapiens
  Table 1.2; ZFP42; ENSG00000179059; HLA -A*03:02,HLA-A*11:01,HLA-A*33:03,HLA-A*68:01,HLA-B*27:02, HLA-C*07:01,HLA-C*07:06
NTNKNEQEGK

SEQ ID NO: 10404 - protein, 9 aa, Homo sapiens
  Table 1.2; ZFP42; ENSG00000179059; HLA -A*11:01,HLA-B*27:02
PGIDLSDPK

SEQ ID NO: 10405 - protein, 10 aa, Homo sapiens
  Table 1.2; ZFP42; ENSG00000179059; HLA -B*07:02
PPINKEYDSL

SEQ ID NO: 10406 - protein, 8 aa, Homo sapiens
  Table 1.2; ZFP42; ENSG00000179059; HLA -C*07:04
PQKIVGEN

SEQ ID NO: 10407 - protein, 9 aa, Homo sapiens
  Table 1.2; ZFP42; ENSG00000179059; HLA -C*06:02
PQSGCTRKL

SEQ ID NO: 10408 - protein, 8 aa, Homo sapiens
  Table 1.2; ZFP42; ENSG00000179059; HLA -B*07:02
PVSAVWAL

SEQ ID NO: 10409 - protein, 9 aa, Homo sapiens
  Table 1.2; ZFP42; ENSG00000179059; HLA -B*54:01,HLA-C*05:01
QAEIEPVSA

SEQ ID NO: 10410 - protein, 11 aa, Homo sapiens
  Table 1.2; ZFP42; ENSG00000179059; HLA -B*57:01,HLA-B*58:01
QAEIEPVSAVW

SEQ ID NO: 10411 - protein, 11 aa, Homo sapiens
  Table 1.2; ZFP42; ENSG00000179059; HLA -B*27:02
QDLQAEIEPVS

SEQ ID NO: 10412 - protein, 9 aa, Homo sapiens
  Table 1.2; ZFP42; ENSG00000179059; HLA -B*15:03,HLA-B*38:01,HLA-B*39:01
QKIVGENSL

SEQ ID NO: 10413 - protein, 9 aa, Homo sapiens
  Table 1.2; ZFP42; ENSG00000179059; HLA -B*15:03,HLA-B*38:01,HLA-B*39:01
QKVFEASSL

SEQ ID NO: 10414 - protein, 9 aa, Homo sapiens
  Table 1.2; ZFP42; ENSG00000179059; HLA -A*03:01,HLA-A*03:02,HLA-A*11:01
QLAEFARKK

SEQ ID NO: 10415 - protein, 9 aa, Homo sapiens
  Table 1.2; ZFP42; ENSG00000179059; HLA -A*02:01,HLA-A*02:03,HLA-A*02:04,HLA-A*03:02,HLA-B*08:01, HLA-B*13:02,HLA-B*54:01,HLA-B*55:01
QLSQKVFEA

SEQ ID NO: 10416 - protein, 9 aa, Homo sapiens
  Table 1.2; ZFP42; ENSG00000179059; HLA -B*07:02,HLA-B*35:01,HLA-B*35:03,HLA-B*38:01,HLA-B*39:01, HLA-B*55:01,HLA-C*03:03
QPILEEDSL

SEQ ID NO: 10417 - protein, 10 aa, Homo sapiens
  Table 1.2; ZFP42; ENSG00000179059; HLA -B*35:01,HLA-B*35:03,HLA-B*55:01
QPILEEDSLF

SEQ ID NO: 10418 - protein, 8 aa, Homo sapiens
  Table 1.2; ZFP42; ENSG00000179059; HLA -B*15:03
QQLSQKVF

SEQ ID NO: 10419 - protein, 9 aa, Homo sapiens
  Table 1.2; ZFP42; ENSG00000179059; HLA -A*31:01
RAPSGAKPR

SEQ ID NO: 10420 - protein, 8 aa, Homo sapiens
  Table 1.2; ZFP42; ENSG00000179059; HLA -A*23:01
RFIQSNNL

SEQ ID NO: 10421 - protein, 9 aa, Homo sapiens
  Table 1.2; ZFP42; ENSG00000179059; HLA -A*31:01
RFSLDFNLR

SEQ ID NO: 10422 - protein, 10 aa, Homo sapiens
  Table 1.2; ZFP42; ENSG00000179059; HLA -A*30:02
RKKPPINKEY

SEQ ID NO: 10423 - protein, 9 aa, Homo sapiens
  Table 1.2; ZFP42; ENSG00000179059; HLA -B*27:05,HLA-C*06:02
RRFIQSNNL

SEQ ID NO: 10424 - protein, 10 aa, Homo sapiens
  Table 1.2; ZFP42; ENSG00000179059; HLA -B*27:05,HLA-C*06:02
RRFIQSNNLK

SEQ ID NO: 10425 - protein, 9 aa, Homo sapiens
  Table 1.2; ZFP42; ENSG00000179059; HLA -A*24:02,HLA-B*37:01,HLA-B*44:02,HLA-B*44:03
SDPKQLAEF

SEQ ID NO: 10426 - protein, 9 aa, Homo sapiens
  Table 1.2; ZFP42; ENSG00000179059; HLA -A*30:01,HLA-B*13:02,HLA-B*18:01,HLA-B*27:02,HLA-B*37:01, HLA-B*40:01,HLA-B*40:02,HLA-B*44:02,HLA-B*44:03,HLA-B*49:01
SEQQLSQKV

SEQ ID NO: 10427 - protein, 10 aa, Homo sapiens
  Table 1.2; ZFP42; ENSG00000179059; HLA -A*30:01,HLA-B*18:01,HLA-B*27:02,HLA-B*37:01,HLA-B*40:01, HLA-B*40:02,HLA-B*44:02,HLA-B*44:03,HLA-C*16:04
SEQQLSQKVF

SEQ ID NO: 10428 - protein, 9 aa, Homo sapiens
  Table 1.2; ZFP42; ENSG00000179059; HLA -A*30:01,HLA-B*18:01,HLA-B*27:02,HLA-B*27:05,HLA-B*37:01, HLA-B*40:01,HLA-B*40:02,HLA-B*44:02,HLA-B*44:03,HLA-B*49:01, HLA-C*16:04
SEYMTGKKL

SEQ ID NO: 10429 - protein, 10 aa, Homo sapiens
  Table 1.2; ZFP42; ENSG00000179059; HLA -B*40:02
SEYMTGKKLP

SEQ ID NO: 10430 - protein, 9 aa, Homo sapiens
  Table 1.2; ZFP42; ENSG00000179059; HLA -A*03:01,HLA-A*03:02
SLDFNLRTH

SEQ ID NO: 10431 - protein, 10 aa, Homo sapiens
  Table 1.2; ZFP42; ENSG00000179059; HLA -A*01:01,HLA-A*02:01,HLA-A*02:03,HLA-A*02:04,HLA-A*02:07
SLDFNLRTHV

SEQ ID NO: 10432 - protein, 8 aa, Homo sapiens
  Table 1.2; ZFP42; ENSG00000179059; HLA -A*01:01
SLECSLEY

SEQ ID NO: 10433 - protein, 9 aa, Homo sapiens
  Table 1.2; ZFP42; ENSG00000179059; HLA -C*06:02
SLEYMKKGV

SEQ ID NO: 10434 - protein, 11 aa, Homo sapiens
  Table 1.2; ZFP42; ENSG00000179059; HLA -A*03:01,HLA-A*03:02
SLEYSEYMTGK

SEQ ID NO: 10435 - protein, 8 aa, Homo sapiens
  Table 1.2; ZFP42; ENSG00000179059; HLA -A*01:01,HLA-A*03:01,HLA-A*26:01,HLA-A*29:02,HLA-A*30:02, HLA-A*32:01,HLA-B*13:02,HLA-B*15:01,HLA-B*15:03,HLA-B*18:01, HLA-B*35:01,HLA-B*39:01,HLA-B*46:01,HLA-C*02:02,HLA-C*07:01,
  HLA-C*14:02
SLFESLEY

SEQ ID NO: 10436 - protein, 9 aa, Homo sapiens
  Table 1.2; ZFP42; ENSG00000179059; HLA -A*02:01,HLA-A*02:03,HLA-A*02:04,HLA-A*02:07,HLA-A*03:01, HLA-A*68:02,HLA-B*13:02,HLA-B*40:01,HLA-B*40:02,HLA-B*55:01
SLFESLEYL

SEQ ID NO: 10437 - protein, 10 aa, Homo sapiens
  Table 1.2; ZFP42; ENSG00000179059; HLA -A*03:01,HLA-A*03:02,HLA-A*11:01,HLA-B*27:02
SLFESLEYLK

SEQ ID NO: 10438 - protein, 11 aa, Homo sapiens
  Table 1.2; ZFP42; ENSG00000179059; HLA -A*03:01,HLA-A*11:01
SLFESLEYLKK

SEQ ID NO: 10439 - protein, 9 aa, Homo sapiens
  Table 1.2; ZFP42; ENSG00000179059; HLA -A*03:02,HLA-C*06:02
SLSAIACPQ

SEQ ID NO: 10440 - protein, 9 aa, Homo sapiens
  Table 1.2; ZFP42; ENSG00000179059; HLA -B*08:01
SNNLKAHIL

SEQ ID NO: 10441 - protein, 8 aa, Homo sapiens
  Table 1.2; ZFP42; ENSG00000179059; HLA -B*13:02,HLA-B*38:01,HLA-C*05:01
SQDLQAEI

SEQ ID NO: 10442 - protein, 10 aa, Homo sapiens
  Table 1.2; ZFP42; ENSG00000179059; HLA -B*15:01,HLA-B*40:02
SQKVFEASSL

SEQ ID NO: 10443 - protein, 9 aa, Homo sapiens
  Table 1.2; ZFP42; ENSG00000179059; HLA -A*01:01,HLA-A*03:01,HLA-A*11:01,HLA-A*26:01,HLA-A*29:02, HLA-A*30:02,HLA-B*15:01,HLA-B*15:03,HLA-B*35:01,HLA-B*46:01, HLA-B*57:01,HLA-B*58:01,HLA-C*07:01,HLA-C*16:01
SSLECSLEY

SEQ ID NO: 10444 - protein, 9 aa, Homo sapiens
  Table 1.2; ZFP42; ENSG00000179059; HLA -B*13:02
SSQDLQAEI

SEQ ID NO: 10445 - protein, 9 aa, Homo sapiens
  Table 1.2; ZFP42; ENSG00000179059; HLA -A*33:01,HLA-A*33:03
TNKNEQEGK

SEQ ID NO: 10446 - protein, 9 aa, Homo sapiens
  Table 1.2; ZFP42; ENSG00000179059; HLA -B*54:01,HLA-B*55:01,HLA-B*56:01,HLA-C*03:03,HLA-C*03:04, HLA-C*12:03
VCYEPGPQA

SEQ ID NO: 10447 - protein, 10 aa, Homo sapiens
  Table 1.2; ZFP42; ENSG00000179059; HLA -A*02:01,HLA-A*02:03,HLA-A*02:07,HLA-A*03:01,HLA-A*03:02, HLA-A*23:01,HLA-A*24:02,HLA-A*30:01,HLA-A*31:01,HLA-A*32:01, HLA-A*68:02,HLA-B*07:02,HLA-B*13:02,HLA-B*15:01,HLA-B*15:03,
  HLA-B*27:05,HLA-B*35:03,HLA-B*38:01,HLA-B*39:01,HLA-B*40:01, HLA-B*40:02,HLA-B*46:01,HLA-B*51:01,HLA-B*55:01,HLA-B*56:01, HLA-B*58:01,HLA-C*01:02,HLA-C*02:02,HLA-C*03:03,HLA-C*03:04, HLA-C*04:01,HLA-C*05:01,HLA-C*06:02,HLA-C*07:01,HLA-C*07:04,
  HLA-C*12:03,HLA-C*14:02,HLA-C*16:01,HLA-C*16:02,HLA-C*16:04
VCYEPGPQAL

SEQ ID NO: 10448 - protein, 9 aa, Homo sapiens
  Table 1.2; ZFP42; ENSG00000179059; HLA -C*07:01
VFEASSLEC

SEQ ID NO: 10449 - protein, 8 aa, Homo sapiens
  Table 1.2; ZFP42; ENSG00000179059; HLA -A*01:01,HLA-B*39:01,HLA-B*46:01
VGENSLEY

SEQ ID NO: 10450 - protein, 11 aa, Homo sapiens
  Table 1.2; ZFP42; ENSG00000179059; HLA -A*01:01
VGENSLEYSEY

SEQ ID NO: 10451 - protein, 8 aa, Homo sapiens
  Table 1.2; ZFP42; ENSG00000179059; HLA -B*27:05
VRIHTGEK

SEQ ID NO: 10452 - protein, 9 aa, Homo sapiens
  Table 1.2; ZFP42; ENSG00000179059; HLA -B*27:05
VRIHTGEKR

SEQ ID NO: 10453 - protein, 9 aa, Homo sapiens
  Table 1.2; ZFP42; ENSG00000179059; HLA -B*37:01,HLA-B*40:02
YDSLSAIAC

SEQ ID NO: 10454 - protein, 8 aa, Homo sapiens
  Table 1.2; ZFP42; ENSG00000179059; HLA -A*02:07,HLA-A*30:01,HLA-B*07:02,HLA-B*08:01,HLA-B*13:02, HLA-B*18:01,HLA-B*37:01,HLA-B*39:01,HLA-B*40:01,HLA-B*40:02, HLA-B*44:02,HLA-B*44:03,HLA-B*49:01,HLA-B*58:01,HLA-C*01:02,
  HLA-C*03:04,HLA-C*04:01,HLA-C*06:02,HLA-C*07:01,HLA-C*07:02, HLA-C*07:04,HLA-C*12:03,HLA-C*16:04
YEPGPQAL

SEQ ID NO: 10455 - protein, 9 aa, Homo sapiens
  Table 1.2; ZFP42; ENSG00000179059; HLA -B*49:01
YEPGPQALG

SEQ ID NO: 10456 - protein, 10 aa, Homo sapiens
  Table 1.2; ZFP42; ENSG00000179059; HLA -A*02:03,HLA-B*08:01,HLA-B*40:02
YLKKGSEQQL

SEQ ID NO: 10457 - protein, 8 aa, Homo sapiens
  Table 1.2; ZFP42; ENSG00000179059; HLA -B*27:02
YSEYMTGK

SEQ ID NO: 10458 - protein, 9 aa, Homo sapiens
  Table 1.2; ZFP42; ENSG00000179059; HLA -A*01:01
YSEYMTGKK

SEQ ID NO: 10459 - protein, 10 aa, Homo sapiens
  Table 1.2; ZFP42; ENSG00000179059; HLA -B*54:01
YVCYEPGPQA

SEQ ID NO: 10460 - protein, 9 aa, Homo sapiens
  Table 1.2; ZNF560; ENSG00000198028; HLA -A*24:02
AFASFSARI

SEQ ID NO: 10461 - protein, 8 aa, Homo sapiens
  Table 1.2; ZNF560; ENSG00000198028; HLA -A*23:01
AFISYPSL

SEQ ID NO: 10462 - protein, 9 aa, Homo sapiens
  Table 1.2; ZNF560; ENSG00000198028; HLA -A*23:01,HLA-A*24:02,HLA-A*29:02
AFISYPSLF

SEQ ID NO: 10463 - protein, 8 aa, Homo sapiens
  Table 1.2; ZNF560; ENSG00000198028; HLA -C*01:02,HLA-C*14:02
AFVVSSSL

SEQ ID NO: 10464 - protein, 8 aa, Homo sapiens
  Table 1.2; ZNF560; ENSG00000198028; HLA -B*08:01
AIKHQTSV

SEQ ID NO: 10465 - protein, 8 aa, Homo sapiens
  Table 1.2; ZNF560; ENSG00000198028; HLA -B*15:03
AKDLLSLY

SEQ ID NO: 10466 - protein, 9 aa, Homo sapiens
  Table 1.2; ZNF560; ENSG00000198028; HLA -A*02:04,HLA-A*02:07
ALQQEFWKI

SEQ ID NO: 10467 - protein, 9 aa, Homo sapiens
  Table 1.2; ZNF560; ENSG00000198028; HLA -A*02:01,HLA-A*02:04
ALWQDNFCL

SEQ ID NO: 10468 - protein, 9 aa, Homo sapiens
  Table 1.2; ZNF560; ENSG00000198028; HLA -B*27:02,HLA-B*38:01,HLA-B*39:01
ARNQNGEEL

SEQ ID NO: 10469 - protein, 10 aa, Homo sapiens
  Table 1.2; ZNF560; ENSG00000198028; HLA -B*27:02,HLA-C*16:04
ARNQNGEELY

SEQ ID NO: 10470 - protein, 9 aa, Homo sapiens
  Table 1.2; ZNF560; ENSG00000198028; HLA -A*32:01,HLA-C*16:01
ASFSARIAH

SEQ ID NO: 10471 - protein, 11 aa, Homo sapiens
  Table 1.2; ZNF560; ENSG00000198028; HLA -A*03:01
ASFSARIAHLK

SEQ ID NO: 10472 - protein, 9 aa, Homo sapiens
  Table 1.2; ZNF560; ENSG00000198028; HLA -B*58:01
AVDFTQEEW

SEQ ID NO: 10473 - protein, 9 aa, Homo sapiens
  Table 1.2; ZNF560; ENSG00000198028; HLA -B*58:01
AVEFTQEEW

SEQ ID NO: 10474 - protein, 9 aa, Homo sapiens
  Table 1.2; ZNF560; ENSG00000198028; HLA -A*24:02,HLA-A*32:01,HLA-B*13:02,HLA-B*58:01
AVNVETHII

SEQ ID NO: 10475 - protein, 10 aa, Homo sapiens
  Table 1.2; ZNF560; ENSG00000198028; HLA -A*03:01,HLA-A*03:02,HLA-A*11:01
AVNVETHIIK

SEQ ID NO: 10476 - protein, 8 aa, Homo sapiens
  Table 1.2; ZNF560; ENSG00000198028; HLA -A*31:01
CGKAFTER

SEQ ID NO: 10477 - protein, 9 aa, Homo sapiens
  Table 1.2; ZNF560; ENSG00000198028; HLA -B*38:01,HLA-B*39:01
CHSDLTNHV

SEQ ID NO: 10478 - protein, 9 aa, Homo sapiens
  Table 1.2; ZNF560; ENSG00000198028; HLA -B*08:01
CLKTKGPAL

SEQ ID NO: 10479 - protein, 9 aa, Homo sapiens
  Table 1.2; ZNF560; ENSG00000198028; HLA -A*31:01
CSYLTKHLR

SEQ ID NO: 10480 - protein, 8 aa, Homo sapiens
  Table 1.2; ZNF560; ENSG00000198028; HLA -A*23:01,HLA-A*24:02,HLA-C*14:02
CYQYSVTF

SEQ ID NO: 10481 - protein, 8 aa, Homo sapiens
  Table 1.2; ZNF560; ENSG00000198028; HLA -B*51:01
DCGKAFVV

SEQ ID NO: 10482 - protein, 8 aa, Homo sapiens
  Table 1.2; ZNF560; ENSG00000198028; HLA -B*08:01
DFRYPTHL

SEQ ID NO: 10483 - protein, 9 aa, Homo sapiens
  Table 1.2; ZNF560; ENSG00000198028; HLA -B*15:03
DKSFEGTDY

SEQ ID NO: 10484 - protein, 8 aa, Homo sapiens
  Table 1.2; ZNF560; ENSG00000198028; HLA -A*33:01
DLLSLYNK

SEQ ID NO: 10485 - protein, 8 aa, Homo sapiens
  Table 1.2; ZNF560; ENSG00000198028; HLA -B*08:01
DLTNHVRI

SEQ ID NO: 10486 - protein, 8 aa, Homo sapiens
  Table 1.2; ZNF560; ENSG00000198028; HLA -B*51:01
DLVTFDSV

SEQ ID NO: 10487 - protein, 8 aa, Homo sapiens
  Table 1.2; ZNF560; ENSG00000198028; HLA -B*08:01,HLA-B*35:01
DPAQRNLY

SEQ ID NO: 10488 - protein, 8 aa, Homo sapiens
  Table 1.2; ZNF560; ENSG00000198028; HLA -B*08:01,HLA-B*35:01
DPVQRNLY

SEQ ID NO: 10489 - protein, 10 aa, Homo sapiens
  Table 1.2; ZNF560; ENSG00000198028; HLA -A*25:01,HLA-A*26:01
DQCGKAFASF

SEQ ID NO: 10490 - protein, 10 aa, Homo sapiens
  Table 1.2; ZNF560; ENSG00000198028; HLA -A*25:01
DQCGKVFVSF

SEQ ID NO: 10491 - protein, 11 aa, Homo sapiens
  Table 1.2; ZNF560; ENSG00000198028; HLA -A*25:01
DTAVDFTQEEW

SEQ ID NO: 10492 - protein, 10 aa, Homo sapiens
  Table 1.2; ZNF560; ENSG00000198028; HLA -A*25:01
DVMLENYENV

SEQ ID NO: 10493 - protein, 10 aa, Homo sapiens
  Table 1.2; ZNF560; ENSG00000198028; HLA -A*25:01
DVMLENYKNL

SEQ ID NO: 10494 - protein, 9 aa, Homo sapiens
  Table 1.2; ZNF560; ENSG00000198028; HLA -A*25:01,HLA-A*26:01,HLA-A*33:01,HLA-A*33:03,HLA-B*35:01, HLA-B*46:01,HLA-B*51:01,HLA-C*12:03
EAFTHSTSH

SEQ ID NO: 10495 - protein, 9 aa, Homo sapiens
  Table 1.2; ZNF560; ENSG00000198028; HLA -B*40:01
EEEEELSTL

SEQ ID NO: 10496 - protein, 8 aa, Homo sapiens
  Table 1.2; ZNF560; ENSG00000198028; HLA -B*18:01
EEEELRTL

SEQ ID NO: 10497 - protein, 11 aa, Homo sapiens
  Table 1.2; ZNF560; ENSG00000198028; HLA -A*30:01,HLA-B*18:01,HLA-B*40:01,HLA-B*40:02,HLA-B*44:02, HLA-B*44:03
EEELSTLPRVL

SEQ ID NO: 10498 - protein, 9 aa, Homo sapiens
  Table 1.2; ZNF560; ENSG00000198028; HLA -B*44:03,HLA-B*49:01
EELSTLPRV

SEQ ID NO: 10499 - protein, 10 aa, Homo sapiens
  Table 1.2; ZNF560; ENSG00000198028; HLA -B*18:01,HLA-B*40:01,HLA-B*40:02,HLA-B*44:02,HLA-B*44:03
EELSTLPRVL

SEQ ID NO: 10500 - protein, 9 aa, Homo sapiens
  Table 1.2; ZNF560; ENSG00000198028; HLA -A*25:01
EGTDYGKAF

SEQ ID NO: 10501 - protein, 8 aa, Homo sapiens
  Table 1.2; ZNF560; ENSG00000198028; HLA -A*33:01,HLA-A*33:03
ENYENVAK

SEQ ID NO: 10502 - protein, 9 aa, Homo sapiens
  Table 1.2; ZNF560; ENSG00000198028; HLA -A*26:01,HLA-A*33:03,HLA-A*68:02,HLA-B*51:01
ENYENVAKV

SEQ ID NO: 10503 - protein, 11 aa, Homo sapiens
  Table 1.2; ZNF560; ENSG00000198028; HLA -A*26:01
ENYENVAKVGF

SEQ ID NO: 10504 - protein, 9 aa, Homo sapiens
  Table 1.2; ZNF560; ENSG00000198028; HLA -A*33:01,HLA-B*51:01
ENYKNLSSV

SEQ ID NO: 10505 - protein, 11 aa, Homo sapiens
  Table 1.2; ZNF560; ENSG00000198028; HLA -A*25:01,HLA-A*26:01
ENYKNLSSVGY

SEQ ID NO: 10506 - protein, 9 aa, Homo sapiens
  Table 1.2; ZNF560; ENSG00000198028; HLA -B*27:05
ERSDLTKHL

SEQ ID NO: 10507 - protein, 9 aa, Homo sapiens
  Table 1.2; ZNF560; ENSG00000198028; HLA -A*01:01,HLA-A*26:01
ETHIIKNPY

SEQ ID NO: 10508 - protein, 9 aa, Homo sapiens
  Table 1.2; ZNF560; ENSG00000198028; HLA -B*54:01
FASFSARIA

SEQ ID NO: 10509 - protein, 8 aa, Homo sapiens
  Table 1.2; ZNF560; ENSG00000198028; HLA -A*30:01,HLA-B*18:01,HLA-B*37:01,HLA-C*07:04
FDSVAVEF

SEQ ID NO: 10510 - protein, 8 aa, Homo sapiens
  Table 1.2; ZNF560; ENSG00000198028; HLA -B*18:01,HLA-B*37:01,HLA-B*40:01,HLA-C*04:01,HLA-C*05:01
FEDTAVDF

SEQ ID NO: 10511 - protein, 8 aa, Homo sapiens
  Table 1.2; ZNF560; ENSG00000198028; HLA -B*27:02
FEGTDYGK

SEQ ID NO: 10512 - protein, 10 aa, Homo sapiens
  Table 1.2; ZNF560; ENSG00000198028; HLA -B*07:02,HLA-B*44:02,HLA-B*44:03,HLA-C*16:04
FEGTDYGKAF

SEQ ID NO: 10513 - protein, 11 aa, Homo sapiens
  Table 1.2; ZNF560; ENSG00000198028; HLA -A*68:01,HLA-B*27:02
FGTSSGVIEDR

SEQ ID NO: 10514 - protein, 9 aa, Homo sapiens
  Table 1.2; ZNF560; ENSG00000198028; HLA -B*54:01
FIYQSYLEA

SEQ ID NO: 10515 - protein, 9 aa, Homo sapiens
  Table 1.2; ZNF560; ENSG00000198028; HLA -A*01:01
FTERSDLTK

SEQ ID NO: 10516 - protein, 9 aa, Homo sapiens
  Table 1.2; ZNF560; ENSG00000198028; HLA -A*01:01
FTERSYLTK

SEQ ID NO: 10517 - protein, 9 aa, Homo sapiens
  Table 1.2; ZNF560; ENSG00000198028; HLA -A*32:01,HLA-A*68:02,HLA-B*46:01
FTHSTSHAV

SEQ ID NO: 10518 - protein, 11 aa, Homo sapiens
  Table 1.2; ZNF560; ENSG00000198028; HLA -A*68:02
FTVPSGFLEHV

SEQ ID NO: 10519 - protein, 11 aa, Homo sapiens
  Table 1.2; ZNF560; ENSG00000198028; HLA -A*02:07,HLA-A*23:01,HLA-A*68:02
FVVSSSLVDHL

SEQ ID NO: 10520 - protein, 9 aa, Homo sapiens
  Table 1.2; ZNF560; ENSG00000198028; HLA -B*49:01
GEAFTHSTS

SEQ ID NO: 10521 - protein, 10 aa, Homo sapiens
  Table 1.2; ZNF560; ENSG00000198028; HLA -B*44:02,HLA-B*44:03
GEKPYEHKEY

SEQ ID NO: 10522 - protein, 9 aa, Homo sapiens
  Table 1.2; ZNF560; ENSG00000198028; HLA -B*15:01
GIQMDLVTF

SEQ ID NO: 10523 - protein, 9 aa, Homo sapiens
  Table 1.2; ZNF560; ENSG00000198028; HLA -B*15:03
GKAFASFSA

SEQ ID NO: 10524 - protein, 8 aa, Homo sapiens
  Table 1.2; ZNF560; ENSG00000198028; HLA -B*15:03
GKAFGTSA

SEQ ID NO: 10525 - protein, 9 aa, Homo sapiens
  Table 1.2; ZNF560; ENSG00000198028; HLA -A*29:02,HLA-B*15:03
GKAFIYQSY

SEQ ID NO: 10526 - protein, 9 aa, Homo sapiens
  Table 1.2; ZNF560; ENSG00000198028; HLA -B*15:03
GKAFTERSY

SEQ ID NO: 10527 - protein, 9 aa, Homo sapiens
  Table 1.2; ZNF560; ENSG00000198028; HLA -B*15:03
GKAFTKCSY

SEQ ID NO: 10528 - protein, 10 aa, Homo sapiens
  Table 1.2; ZNF560; ENSG00000198028; HLA -B*15:03
GKAFVVSSSL

SEQ ID NO: 10529 - protein, 9 aa, Homo sapiens
  Table 1.2; ZNF560; ENSG00000198028; HLA -B*15:03
GKTFTVPSG

SEQ ID NO: 10530 - protein, 10 aa, Homo sapiens
  Table 1.2; ZNF560; ENSG00000198028; HLA -B*15:03
GKTFTVPSGF

SEQ ID NO: 10531 - protein, 9 aa, Homo sapiens
  Table 1.2; ZNF560; ENSG00000198028; HLA -A*29:02,HLA-A*30:02,HLA-B*39:01
GNTSECIQY

SEQ ID NO: 10532 - protein, 9 aa, Homo sapiens
  Table 1.2; ZNF560; ENSG00000198028; HLA -A*01:01
GTDYGKAFI

SEQ ID NO: 10533 - protein, 10 aa, Homo sapiens
  Table 1.2; ZNF560; ENSG00000198028; HLA -A*01:01,HLA-A*29:02
GTDYGKAFIY

SEQ ID NO: 10534 - protein, 9 aa, Homo sapiens
  Table 1.2; ZNF560; ENSG00000198028; HLA -A*03:01,HLA-A*03:02,HLA-A*11:01
GTSAGLIEH

SEQ ID NO: 10535 - protein, 10 aa, Homo sapiens
  Table 1.2; ZNF560; ENSG00000198028; HLA -A*68:02
GTSAGLIEHI

SEQ ID NO: 10536 - protein, 10 aa, Homo sapiens
  Table 1.2; ZNF560; ENSG00000198028; HLA -A*03:02,HLA-A*11:01,HLA-A*31:01,HLA-A*68:01,HLA-B*27:02, HLA-C*07:06
GTSSGVIEDR

SEQ ID NO: 10537 - protein, 9 aa, Homo sapiens
  Table 1.2; ZNF560; ENSG00000198028; HLA -B*54:01,HLA-C*12:03,HLA-C*16:02
HAAEKTSEC

SEQ ID NO: 10538 - protein, 9 aa, Homo sapiens
  Table 1.2; ZNF560; ENSG00000198028; HLA -A*23:01,HLA-A*68:02,HLA-B*13:02,HLA-B*35:03,HLA-B*38:01, HLA-B*39:01,HLA-B*51:01,HLA-B*58:01
HAVNVETHI

SEQ ID NO: 10539 - protein, 10 aa, Homo sapiens
  Table 1.2; ZNF560; ENSG00000198028; HLA -B*38:01
HAVNVETHII

SEQ ID NO: 10540 - protein, 11 aa, Homo sapiens
  Table 1.2; ZNF560; ENSG00000198028; HLA -A*68:01
HAVNVETHIIK

SEQ ID NO: 10541 - protein, 9 aa, Homo sapiens
  Table 1.2; ZNF560; ENSG00000198028; HLA -A*03:01,HLA-A*33:01
HLKTHAAEK

SEQ ID NO: 10542 - protein, 8 aa, Homo sapiens
  Table 1.2; ZNF560; ENSG00000198028; HLA -B*08:01
HMQTHIGI

SEQ ID NO: 10543 - protein, 8 aa, Homo sapiens
  Table 1.2; ZNF560; ENSG00000198028; HLA -B*08:01
HPCLKTNM

SEQ ID NO: 10544 - protein, 8 aa, Homo sapiens
  Table 1.2; ZNF560; ENSG00000198028; HLA -A*30:01,HLA-B*13:02,HLA-B*15:01,HLA-B*15:03,HLA-B*37:01, HLA-B*39:01
HQTSVSAL

SEQ ID NO: 10545 - protein, 8 aa, Homo sapiens
  Table 1.2; ZNF560; ENSG00000198028; HLA -A*01:01
HSDLTNHV

SEQ ID NO: 10546 - protein, 9 aa, Homo sapiens
  Table 1.2; ZNF560; ENSG00000198028; HLA -A*01:01,HLA-A*33:03,HLA-A*68:01
HSDLTNHVR

SEQ ID NO: 10547 - protein, 9 aa, Homo sapiens
  Table 1.2; ZNF560; ENSG00000198028; HLA -A*68:02,HLA-B*13:02,HLA-C*16:02
HSTSHAVNV

SEQ ID NO: 10548 - protein, 9 aa, Homo sapiens
  Table 1.2; ZNF560; ENSG00000198028; HLA -A*01:01,HLA-A*11:01,HLA-A*25:01,HLA-A*26:01,HLA-A*29:02, HLA-A*30:02,HLA-A*32:01,HLA-A*33:01,HLA-A*33:03,HLA-A*68:01, HLA-B*35:01,HLA-B*57:01,HLA-C*02:02,HLA-C*12:03,HLA-C*16:01,
  HLA-C*16:02,HLA-C*16:04
HTGDKPYEY

SEQ ID NO: 10549 - protein, 10 aa, Homo sapiens
  Table 1.2; ZNF560; ENSG00000198028; HLA -A*03:01,HLA-A*11:01,HLA-A*33:01
HTGDKPYEYK

SEQ ID NO: 10550 - protein, 9 aa, Homo sapiens
  Table 1.2; ZNF560; ENSG00000198028; HLA -A*03:01
IIKNPYECK

SEQ ID NO: 10551 - protein, 8 aa, Homo sapiens
  Table 1.2; ZNF560; ENSG00000198028; HLA -A*31:01,HLA-A*33:03
ILLDPVQR

SEQ ID NO: 10552 - protein, 10 aa, Homo sapiens
  Table 1.2; ZNF560; ENSG00000198028; HLA -A*02:01,HLA-A*02:03,HLA-A*02:04,HLA-A*03:01
ILLDPVQRNL

SEQ ID NO: 10553 - protein, 11 aa, Homo sapiens
  Table 1.2; ZNF560; ENSG00000198028; HLA -A*01:01,HLA-A*03:01,HLA-A*23:01,HLA-A*29:02,HLA-A*30:02, HLA-A*32:01,HLA-C*16:01
ILLDPVQRNLY

SEQ ID NO: 10554 - protein, 8 aa, Homo sapiens
  Table 1.2; ZNF560; ENSG00000198028; HLA -A*31:01,HLA-A*33:03
ILNVQVQR

SEQ ID NO: 10555 - protein, 9 aa, Homo sapiens
  Table 1.2; ZNF560; ENSG00000198028; HLA -A*03:01,HLA-A*03:02,HLA-A*11:01
ILNVQVQRK

SEQ ID NO: 10556 - protein, 8 aa, Homo sapiens
  Table 1.2; ZNF560; ENSG00000198028; HLA -A*23:01,HLA-B*15:01,HLA-B*15:03
IQMDLVTF

SEQ ID NO: 10557 - protein, 11 aa, Homo sapiens
  Table 1.2; ZNF560; ENSG00000198028; HLA -A*02:01,HLA-B*13:02
IQMDLVTFDSV

SEQ ID NO: 10558 - protein, 9 aa, Homo sapiens
  Table 1.2; ZNF560; ENSG00000198028; HLA -B*13:02,HLA-B*15:01,HLA-B*15:03,HLA-B*27:05,HLA-B*39:01
IQTSNGIQM

SEQ ID NO: 10559 - protein, 8 aa, Homo sapiens
  Table 1.2; ZNF560; ENSG00000198028; HLA -B*08:01,HLA-B*13:02,HLA-B*15:03
IQYAKDLL

SEQ ID NO: 10560 - protein, 11 aa, Homo sapiens
  Table 1.2; ZNF560; ENSG00000198028; HLA -A*30:02
IQYAKDLLSLY

SEQ ID NO: 10561 - protein, 10 aa, Homo sapiens
  Table 1.2; ZNF560; ENSG00000198028; HLA -B*57:01
ISYPSLFGHL

SEQ ID NO: 10562 - protein, 11 aa, Homo sapiens
  Table 1.2; ZNF560; ENSG00000198028; HLA -A*31:01,HLA-B*57:01
ISYPSLFGHLR

SEQ ID NO: 10563 - protein, 8 aa, Homo sapiens
  Table 1.2; ZNF560; ENSG00000198028; HLA -C*14:02
IYQSYLEA

SEQ ID NO: 10564 - protein, 9 aa, Homo sapiens
  Table 1.2; ZNF560; ENSG00000198028; HLA -C*14:02
IYQSYLEAH

SEQ ID NO: 10565 - protein, 10 aa, Homo sapiens
  Table 1.2; ZNF560; ENSG00000198028; HLA -A*31:01,HLA-A*33:03
IYQSYLEAHR

SEQ ID NO: 10566 - protein, 8 aa, Homo sapiens
  Table 1.2; ZNF560; ENSG00000198028; HLA -A*32:01,HLA-B*54:01,HLA-B*56:01
KAFASFSA

SEQ ID NO: 10567 - protein, 9 aa, Homo sapiens
  Table 1.2; ZNF560; ENSG00000198028; HLA -A*03:01,HLA-A*30:02,HLA-A*31:01,HLA-A*33:01,HLA-A*33:03, HLA-B*46:01,HLA-B*57:01
KAFASFSAR

SEQ ID NO: 10568 - protein, 9 aa, Homo sapiens
  Table 1.2; ZNF560; ENSG00000198028; HLA -B*58:01,HLA-C*03:03,HLA-C*03:04
KAFGTSAGL

SEQ ID NO: 10569 - protein, 9 aa, Homo sapiens
  Table 1.2; ZNF560; ENSG00000198028; HLA -A*02:03,HLA-A*32:01
KAFGTSSGV

SEQ ID NO: 10570 - protein, 9 aa, Homo sapiens
  Table 1.2; ZNF560; ENSG00000198028; HLA -A*23:01,HLA-A*32:01,HLA-B*07:02,HLA-B*15:03,HLA-B*40:02, HLA-B*46:01,HLA-B*57:01,HLA-B*58:01,HLA-C*01:02,HLA-C*02:02, HLA-C*03:03,HLA-C*03:04,HLA-C*16:04
KAFISYPSL

SEQ ID NO: 10571 - protein, 10 aa, Homo sapiens
  Table 1.2; ZNF560; ENSG00000198028; HLA -B*57:01
KAFISYPSLF

SEQ ID NO: 10572 - protein, 8 aa, Homo sapiens
  Table 1.2; ZNF560; ENSG00000198028; HLA -A*30:02,HLA-B*57:01
KAFIYQSY

SEQ ID NO: 10573 - protein, 11 aa, Homo sapiens
  Table 1.2; ZNF560; ENSG00000198028; HLA -A*03:01,HLA-A*03:02,HLA-B*57:01
KAFTERSDLTK

SEQ ID NO: 10574 - protein, 8 aa, Homo sapiens
  Table 1.2; ZNF560; ENSG00000198028; HLA -A*30:02,HLA-A*32:01,HLA-C*16:01
KAFTERSY

SEQ ID NO: 10575 - protein, 9 aa, Homo sapiens
  Table 1.2; ZNF560; ENSG00000198028; HLA -A*31:01,HLA-B*57:01
KAFTERSYL

SEQ ID NO: 10576 - protein, 11 aa, Homo sapiens
  Table 1.2; ZNF560; ENSG00000198028; HLA -A*03:01,HLA-B*57:01
KAFTERSYLTK

SEQ ID NO: 10577 - protein, 9 aa, Homo sapiens
  Table 1.2; ZNF560; ENSG00000198028; HLA -A*30:01,HLA-A*32:01,HLA-B*07:02,HLA-B*08:01,HLA-B*15:01, HLA-B*15:03,HLA-B*40:01,HLA-B*40:02,HLA-B*46:01,HLA-B*51:01, HLA-B*58:01,HLA-C*01:02,HLA-C*02:02,HLA-C*03:03,HLA-C*03:04,
  HLA-C*07:02,HLA-C*16:04
KAFVVSSSL

SEQ ID NO: 10578 - protein, 9 aa, Homo sapiens
  Table 1.2; ZNF560; ENSG00000198028; HLA -B*08:01,HLA-C*03:04,HLA-C*12:03
KAYSRSCVL

SEQ ID NO: 10579 - protein, 9 aa, Homo sapiens
  Table 1.2; ZNF560; ENSG00000198028; HLA -A*31:01
KCGKAFTER

SEQ ID NO: 10580 - protein, 9 aa, Homo sapiens
  Table 1.2; ZNF560; ENSG00000198028; HLA -B*38:01,HLA-B*39:01
KHQTSVSAL

SEQ ID NO: 10581 - protein, 8 aa, Homo sapiens
  Table 1.2; ZNF560; ENSG00000198028; HLA -A*30:02
KNLSSVGY

SEQ ID NO: 10582 - protein, 10 aa, Homo sapiens
  Table 1.2; ZNF560; ENSG00000198028; HLA -A*23:01
KNLSSVGYQL

SEQ ID NO: 10583 - protein, 9 aa, Homo sapiens
  Table 1.2; ZNF560; ENSG00000198028; HLA -B*07:02,HLA-B*35:03,HLA-C*07:02
KPFTSSACL

SEQ ID NO: 10584 - protein, 8 aa, Homo sapiens
  Table 1.2; ZNF560; ENSG00000198028; HLA -B*08:01
KPYEHKEY

SEQ ID NO: 10585 - protein, 9 aa, Homo sapiens
  Table 1.2; ZNF560; ENSG00000198028; HLA -A*03:02
KQCEDVFCK

SEQ ID NO: 10586 - protein, 8 aa, Homo sapiens
  Table 1.2; ZNF560; ENSG00000198028; HLA -A*30:02,HLA-A*32:01,HLA-B*15:01,HLA-B*15:03,HLA-B*39:01, HLA-B*46:01,HLA-B*58:01
KSFEGTDY

SEQ ID NO: 10587 - protein, 10 aa, Homo sapiens
  Table 1.2; ZNF560; ENSG00000198028; HLA -A*03:01,HLA-A*03:02,HLA-A*11:01,HLA-B*27:02,HLA-B*57:01, HLA-B*58:01
KSFEGTDYGK

SEQ ID NO: 10588 - protein, 11 aa, Homo sapiens
  Table 1.2; ZNF560; ENSG00000198028; HLA -B*58:01
KSFEGTDYGKA

SEQ ID NO: 10589 - protein, 9 aa, Homo sapiens
  Table 1.2; ZNF560; ENSG00000198028; HLA -A*02:04
KSFRLILNV

SEQ ID NO: 10590 - protein, 9 aa, Homo sapiens
  Table 1.2; ZNF560; ENSG00000198028; HLA -A*03:02,HLA-A*23:01,HLA-A*25:01,HLA-A*26:01,HLA-A*30:02, HLA-A*31:01,HLA-A*32:01,HLA-B*46:01,HLA-B*57:01,HLA-B*58:01
KTFTVPSGF

SEQ ID NO: 10591 - protein, 10 aa, Homo sapiens
  Table 1.2; ZNF560; ENSG00000198028; HLA -A*03:01
KTFTVPSGFL

SEQ ID NO: 10592 - protein, 8 aa, Homo sapiens
  Table 1.2; ZNF560; ENSG00000198028; HLA -B*57:01
KTKGPALW

SEQ ID NO: 10593 - protein, 8 aa, Homo sapiens
  Table 1.2; ZNF560; ENSG00000198028; HLA -A*23:01
KTLNGIQL

SEQ ID NO: 10594 - protein, 10 aa, Homo sapiens
  Table 1.2; ZNF560; ENSG00000198028; HLA -A*03:01,HLA-A*03:02,HLA-A*11:01,HLA-A*31:01,HLA-A*33:03, HLA-B*57:01
KTLNGIQLAR

SEQ ID NO: 10595 - protein, 9 aa, Homo sapiens
  Table 1.2; ZNF560; ENSG00000198028; HLA -A*03:01,HLA-A*30:02,HLA-B*57:01
KTLTKIKPY

SEQ ID NO: 10596 - protein, 9 aa, Homo sapiens
  Table 1.2; ZNF560; ENSG00000198028; HLA -A*03:01,HLA-A*03:02,HLA-A*11:01,HLA-A*31:01,HLA-A*32:01, HLA-A*33:01,HLA-A*33:03,HLA-A*68:01
KTNMSTQNR

SEQ ID NO: 10597 - protein, 11 aa, Homo sapiens
  Table 1.2; ZNF560; ENSG00000198028; HLA -A*25:01,HLA-A*31:01,HLA-A*32:01,HLA-B*57:01,HLA-B*58:01
KTQSGEKLNEW

SEQ ID NO: 10598 - protein, 8 aa, Homo sapiens
  Table 1.2; ZNF560; ENSG00000198028; HLA -C*06:02
KTSTIRKV

SEQ ID NO: 10599 - protein, 9 aa, Homo sapiens
  Table 1.2; ZNF560; ENSG00000198028; HLA -A*02:07,HLA-A*25:01,HLA-A*32:01,HLA-B*46:01,HLA-C*01:02, HLA-C*03:03,HLA-C*03:04
KVFVSFSSL

SEQ ID NO: 10600 - protein, 10 aa, Homo sapiens
  Table 1.2; ZNF560; ENSG00000198028; HLA -A*03:01
KVSVFSKHGK

SEQ ID NO: 10601 - protein, 11 aa, Homo sapiens
  Table 1.2; ZNF560; ENSG00000198028; HLA -A*30:02
LARNQNGEELY

SEQ ID NO: 10602 - protein, 10 aa, Homo sapiens
  Table 1.2; ZNF560; ENSG00000198028; HLA -B*40:01
LEEEEELSTL

SEQ ID NO: 10603 - protein, 9 aa, Homo sapiens
  Table 1.2; ZNF560; ENSG00000198028; HLA -A*30:01,HLA-B*18:01,HLA-B*40:01,HLA-B*40:02,HLA-B*49:01
LEEEELRTL

SEQ ID NO: 10604 - protein, 10 aa, Homo sapiens
  Table 1.2; ZNF560; ENSG00000198028; HLA -B*49:01
LENYENVAKV

SEQ ID NO: 10605 - protein, 9 aa, Homo sapiens
  Table 1.2; ZNF560; ENSG00000198028; HLA -A*24:02,HLA-B*57:01
LFKPSLISW

SEQ ID NO: 10606 - protein, 9 aa, Homo sapiens
  Table 1.2; ZNF560; ENSG00000198028; HLA -A*23:01,HLA-A*24:02,HLA-B*57:01
LFKPSVISW

SEQ ID NO: 10607 - protein, 9 aa, Homo sapiens
  Table 1.2; ZNF560; ENSG00000198028; HLA -A*11:01,HLA-A*31:01,HLA-A*33:01,HLA-A*33:03,HLA-A*68:01, HLA-C*07:06
LILNVQVQR

SEQ ID NO: 10608 - protein, 9 aa, Homo sapiens
  Table 1.2; ZNF560; ENSG00000198028; HLA -A*02:01,HLA-A*02:04,HLA-A*02:07,HLA-A*03:01,HLA-C*03:04
LLDPAQRNL

SEQ ID NO: 10609 - protein, 10 aa, Homo sapiens
  Table 1.2; ZNF560; ENSG00000198028; HLA -A*01:01,HLA-A*02:07,HLA-A*29:02,HLA-A*30:02,HLA-A*32:01, HLA-B*15:01
LLDPAQRNLY

SEQ ID NO: 10610 - protein, 9 aa, Homo sapiens
  Table 1.2; ZNF560; ENSG00000198028; HLA -A*02:01,HLA-A*02:04,HLA-A*02:07,HLA-A*03:01,HLA-A*68:02, HLA-C*03:03,HLA-C*03:04,HLA-C*16:02
LLDPVQRNL

SEQ ID NO: 10611 - protein, 10 aa, Homo sapiens
  Table 1.2; ZNF560; ENSG00000198028; HLA -A*01:01,HLA-A*02:07,HLA-A*29:02,HLA-A*30:02,HLA-A*32:01, HLA-B*15:01
LLDPVQRNLY

SEQ ID NO: 10612 - protein, 9 aa, Homo sapiens
  Table 1.2; ZNF560; ENSG00000198028; HLA -A*32:01,HLA-B*44:02
LQQGVLQDW

SEQ ID NO: 10613 - protein, 8 aa, Homo sapiens
  Table 1.2; ZNF560; ENSG00000198028; HLA -C*03:04
LSSVGYQL

SEQ ID NO: 10614 - protein, 9 aa, Homo sapiens
  Table 1.2; ZNF560; ENSG00000198028; HLA -B*57:01
LSSVGYQLF

SEQ ID NO: 10615 - protein, 8 aa, Homo sapiens
  Table 1.2; ZNF560; ENSG00000198028; HLA -C*16:01
LSTLPRVL

SEQ ID NO: 10616 - protein, 11 aa, Homo sapiens
  Table 1.2; ZNF560; ENSG00000198028; HLA -B*57:01
LSTLPRVLQEW

SEQ ID NO: 10617 - protein, 11 aa, Homo sapiens
  Table 1.2; ZNF560; ENSG00000198028; HLA -A*01:01
LVDHLRTHTGY

SEQ ID NO: 10618 - protein, 8 aa, Homo sapiens
  Table 1.2; ZNF560; ENSG00000198028; HLA -A*23:01,HLA-A*24:02,HLA-B*51:01,HLA-C*14:02
LYNKTSTI

SEQ ID NO: 10619 - protein, 9 aa, Homo sapiens
  Table 1.2; ZNF560; ENSG00000198028; HLA -A*33:03
LYNKTSTIR

SEQ ID NO: 10620 - protein, 10 aa, Homo sapiens
  Table 1.2; ZNF560; ENSG00000198028; HLA -A*29:02
LYRDVMLENY

SEQ ID NO: 10621 - protein, 10 aa, Homo sapiens
  Table 1.2; ZNF560; ENSG00000198028; HLA -A*23:01,HLA-A*24:02,HLA-A*29:02,HLA-A*30:02
LYSDVMLENY

SEQ ID NO: 10622 - protein, 10 aa, Homo sapiens
  Table 1.2; ZNF560; ENSG00000198028; HLA -A*03:02,HLA-B*27:02
MLENYENVAK

SEQ ID NO: 10623 - protein, 10 aa, Homo sapiens
  Table 1.2; ZNF560; ENSG00000198028; HLA -C*07:01
MQTHIGIKPY

SEQ ID NO: 10624 - protein, 9 aa, Homo sapiens
  Table 1.2; ZNF560; ENSG00000198028; HLA -A*33:01,HLA-A*33:03,HLA-A*68:01,HLA-C*07:06
NACEKAYSR

SEQ ID NO: 10625 - protein, 9 aa, Homo sapiens
  Table 1.2; ZNF560; ENSG00000198028; HLA -B*38:01
NHMQTHIGI

SEQ ID NO: 10626 - protein, 9 aa, Homo sapiens
  Table 1.2; ZNF560; ENSG00000198028; HLA -A*02:01,HLA-A*02:04,HLA-A*02:07,HLA-A*23:01,HLA-A*68:02, HLA-B*13:02,HLA-B*27:05,HLA-B*35:03,HLA-B*38:01,HLA-B*39:01, HLA-B*55:01
NLSSVGYQL

SEQ ID NO: 10627 - protein, 11 aa, Homo sapiens
  Table 1.2; ZNF560; ENSG00000198028; HLA -A*29:02,HLA-A*30:02
NLYSDVMLENY

SEQ ID NO: 10628 - protein, 8 aa, Homo sapiens
  Table 1.2; ZNF560; ENSG00000198028; HLA -A*01:01
NTSECIQY

SEQ ID NO: 10629 - protein, 9 aa, Homo sapiens
  Table 1.2; ZNF560; ENSG00000198028; HLA -A*02:04,HLA-A*68:01,HLA-A*68:02,HLA-B*35:03
NVAKVGFQL

SEQ ID NO: 10630 - protein, 10 aa, Homo sapiens
  Table 1.2; ZNF560; ENSG00000198028; HLA -A*25:01
NVAKVGFQLF

SEQ ID NO: 10631 - protein, 10 aa, Homo sapiens
  Table 1.2; ZNF560; ENSG00000198028; HLA -A*23:01,HLA-A*24:02,HLA-C*04:01,HLA-C*14:02
NYENVAKVGF

SEQ ID NO: 10632 - protein, 10 aa, Homo sapiens
  Table 1.2; ZNF560; ENSG00000198028; HLA -A*29:02,HLA-A*30:02,HLA-A*33:03,HLA-C*14:02
NYKNLSSVGY

SEQ ID NO: 10633 - protein, 9 aa, Homo sapiens
  Table 1.2; ZNF560; ENSG00000198028; HLA -A*23:01
QCGKVFVSF

SEQ ID NO: 10634 - protein, 10 aa, Homo sapiens
  Table 1.2; ZNF560; ENSG00000198028; HLA -A*30:02,HLA-B*15:03,HLA-C*07:01
QDKSFEGTDY

SEQ ID NO: 10635 - protein, 10 aa, Homo sapiens
  Table 1.2; ZNF560; ENSG00000198028; HLA -B*57:01
QLFKPSLISW

SEQ ID NO: 10636 - protein, 10 aa, Homo sapiens
  Table 1.2; ZNF560; ENSG00000198028; HLA -A*25:01,HLA-B*44:02,HLA-B*57:01
QLFKPSVISW

SEQ ID NO: 10637 - protein, 9 aa, Homo sapiens
  Table 1.2; ZNF560; ENSG00000198028; HLA -A*25:01,HLA-B*58:01
QSGEKLNEW

SEQ ID NO: 10638 - protein, 9 aa, Homo sapiens
  Table 1.2; ZNF560; ENSG00000198028; HLA -A*03:01,HLA-A*03:02,HLA-A*11:01
QSYLEAHRK

SEQ ID NO: 10639 - protein, 9 aa, Homo sapiens
  Table 1.2; ZNF560; ENSG00000198028; HLA -A*01:01
QTHIGIKPY

SEQ ID NO: 10640 - protein, 9 aa, Homo sapiens
  Table 1.2; ZNF560; ENSG00000198028; HLA -A*23:01,HLA-A*24:02
QYAKDLLSL

SEQ ID NO: 10641 - protein, 10 aa, Homo sapiens
  Table 1.2; ZNF560; ENSG00000198028; HLA -A*29:02,HLA-A*30:02
QYAKDLLSLY

SEQ ID NO: 10642 - protein, 10 aa, Homo sapiens
  Table 1.2; ZNF560; ENSG00000198028; HLA -A*30:02
RGNTSECIQY

SEQ ID NO: 10643 - protein, 10 aa, Homo sapiens
  Table 1.2; ZNF560; ENSG00000198028; HLA -A*03:01,HLA-A*03:02
RIHTGEKPYK

SEQ ID NO: 10644 - protein, 10 aa, Homo sapiens
  Table 1.2; ZNF560; ENSG00000198028; HLA -A*31:01
RLILNVQVQR

SEQ ID NO: 10645 - protein, 11 aa, Homo sapiens
  Table 1.2; ZNF560; ENSG00000198028; HLA -A*03:01,HLA-A*03:02
RLILNVQVQRK

SEQ ID NO: 10646 - protein, 9 aa, Homo sapiens
  Table 1.2; ZNF560; ENSG00000198028; HLA -A*30:02
RNQNGEELY

SEQ ID NO: 10647 - protein, 9 aa, Homo sapiens
  Table 1.2; ZNF560; ENSG00000198028; HLA -B*58:01
RSCVLTQHL

SEQ ID NO: 10648 - protein, 9 aa, Homo sapiens
  Table 1.2; ZNF560; ENSG00000198028; HLA -A*32:01,HLA-B*57:01,HLA-B*58:01
RSNTGQKRF

SEQ ID NO: 10649 - protein, 9 aa, Homo sapiens
  Table 1.2; ZNF560; ENSG00000198028; HLA -A*31:01
RSYLTKHLR

SEQ ID NO: 10650 - protein, 9 aa, Homo sapiens
  Table 1.2; ZNF560; ENSG00000198028; HLA -A*30:02,HLA-B*57:01
RTHTEERLY

SEQ ID NO: 10651 - protein, 10 aa, Homo sapiens
  Table 1.2; ZNF560; ENSG00000198028; HLA -A*03:01
RTHTGYKPYK

SEQ ID NO: 10652 - protein, 11 aa, Homo sapiens
  Table 1.2; ZNF560; ENSG00000198028; HLA -B*57:01,HLA-B*58:01
RTLQQGVLQDW

SEQ ID NO: 10653 - protein, 9 aa, Homo sapiens
  Table 1.2; ZNF560; ENSG00000198028; HLA -A*30:02
RVHNGEKPY

SEQ ID NO: 10654 - protein, 10 aa, Homo sapiens
  Table 1.2; ZNF560; ENSG00000198028; HLA -A*24:02
RYPTHLNNHM

SEQ ID NO: 10655 - protein, 9 aa, Homo sapiens
  Table 1.2; ZNF560; ENSG00000198028; HLA -A*33:03,HLA-A*68:01,HLA-B*57:01,HLA-C*07:06
SAGLIEHIR

SEQ ID NO: 10656 - protein, 8 aa, Homo sapiens
  Table 1.2; ZNF560; ENSG00000198028; HLA -B*57:01,HLA-B*58:01
SALQQEFW

SEQ ID NO: 10657 - protein, 9 aa, Homo sapiens
  Table 1.2; ZNF560; ENSG00000198028; HLA -A*11:01
SCVLTQHLK

SEQ ID NO: 10658 - protein, 9 aa, Homo sapiens
  Table 1.2; ZNF560; ENSG00000198028; HLA -B*37:01
SDLTNHVRI

SEQ ID NO: 10659 - protein, 8 aa, Homo sapiens
  Table 1.2; ZNF560; ENSG00000198028; HLA -B*18:01
SDVMLENY

SEQ ID NO: 10660 - protein, 10 aa, Homo sapiens
  Table 1.2; ZNF560; ENSG00000198028; HLA -B*44:03
SECNACGNSF

SEQ ID NO: 10661 - protein, 9 aa, Homo sapiens
  Table 1.2; ZNF560; ENSG00000198028; HLA -B*37:01
SFSARIAHL

SEQ ID NO: 10662 - protein, 9 aa, Homo sapiens
  Table 1.2; ZNF560; ENSG00000198028; HLA -A*23:01,HLA-A*24:02,HLA-A*29:02
SFSSLFAHL

SEQ ID NO: 10663 - protein, 9 aa, Homo sapiens
  Table 1.2; ZNF560; ENSG00000198028; HLA -B*38:01
SHAVNVETH

SEQ ID NO: 10664 - protein, 10 aa, Homo sapiens
  Table 1.2; ZNF560; ENSG00000198028; HLA -B*38:01
SHAVNVETHI

SEQ ID NO: 10665 - protein, 11 aa, Homo sapiens
  Table 1.2; ZNF560; ENSG00000198028; HLA -B*38:01
SHAVNVETHII

SEQ ID NO: 10666 - protein, 9 aa, Homo sapiens
  Table 1.2; ZNF560; ENSG00000198028; HLA -A*02:03,HLA-A*03:01
SLFAHLRTH

SEQ ID NO: 10667 - protein, 8 aa, Homo sapiens
  Table 1.2; ZNF560; ENSG00000198028; HLA -B*08:01
SLYNKTST

SEQ ID NO: 10668 - protein, 9 aa, Homo sapiens
  Table 1.2; ZNF560; ENSG00000198028; HLA -A*02:01,HLA-A*02:03,HLA-A*02:04,HLA-A*02:07,HLA-A*23:01, HLA-A*25:01,HLA-A*30:01,HLA-A*32:01,HLA-B*08:01,HLA-B*13:02, HLA-B*15:03,HLA-B*46:01,HLA-B*51:01,HLA-B*55:01,HLA-C*02:02
SLYNKTSTI

SEQ ID NO: 10669 - protein, 10 aa, Homo sapiens
  Table 1.2; ZNF560; ENSG00000198028; HLA -A*03:01
SLYNKTSTIR

SEQ ID NO: 10670 - protein, 11 aa, Homo sapiens
  Table 1.2; ZNF560; ENSG00000198028; HLA -A*03:01,HLA-A*03:02,HLA-A*11:01
SLYNKTSTIRK

SEQ ID NO: 10671 - protein, 9 aa, Homo sapiens
  Table 1.2; ZNF560; ENSG00000198028; HLA -A*68:01
SSSLVDHLR

SEQ ID NO: 10672 - protein, 9 aa, Homo sapiens
  Table 1.2; ZNF560; ENSG00000198028; HLA -A*03:01,HLA-A*03:02,HLA-A*11:01
SSVGYQLFK

SEQ ID NO: 10673 - protein, 8 aa, Homo sapiens
  Table 1.2; ZNF560; ENSG00000198028; HLA -B*08:01
STIRKVSV

SEQ ID NO: 10674 - protein, 9 aa, Homo sapiens
  Table 1.2; ZNF560; ENSG00000198028; HLA -A*25:01,HLA-A*26:01,HLA-A*32:01,HLA-B*46:01,HLA-B*57:01, HLA-B*58:01,HLA-C*02:02,HLA-C*12:03
STIRKVSVF

SEQ ID NO: 10675 - protein, 11 aa, Homo sapiens
  Table 1.2; ZNF560; ENSG00000198028; HLA -A*11:01
STIRKVSVFSK

SEQ ID NO: 10676 - protein, 10 aa, Homo sapiens
  Table 1.2; ZNF560; ENSG00000198028; HLA -A*24:02,HLA-A*25:01,HLA-A*31:01,HLA-A*32:01,HLA-B*44:02, HLA-B*57:01,HLA-B*58:01
STLPRVLQEW

SEQ ID NO: 10677 - protein, 11 aa, Homo sapiens
  Table 1.2; ZNF560; ENSG00000198028; HLA -A*25:01,HLA-B*57:01
SVAVEFTQEEW

SEQ ID NO: 10678 - protein, 8 aa, Homo sapiens
  Table 1.2; ZNF560; ENSG00000198028; HLA -A*03:01,HLA-A*11:01
SVGYQLFK

SEQ ID NO: 10679 - protein, 9 aa, Homo sapiens
  Table 1.2; ZNF560; ENSG00000198028; HLA -A*26:01,HLA-A*29:02,HLA-A*30:02,HLA-A*32:01,HLA-B*15:01, HLA-B*35:01,HLA-B*58:01,HLA-C*02:02
SVSALQQEF

SEQ ID NO: 10680 - protein, 10 aa, Homo sapiens
  Table 1.2; ZNF560; ENSG00000198028; HLA -A*25:01,HLA-B*57:01,HLA-B*58:01
SVSALQQEFW

SEQ ID NO: 10681 - protein, 9 aa, Homo sapiens
  Table 1.2; ZNF560; ENSG00000198028; HLA -B*35:03
SVTFEDTAV

SEQ ID NO: 10682 - protein, 9 aa, Homo sapiens
  Table 1.2; ZNF560; ENSG00000198028; HLA -A*31:01
SYLTKHLRR

SEQ ID NO: 10683 - protein, 9 aa, Homo sapiens
  Table 1.2; ZNF560; ENSG00000198028; HLA -A*23:01,HLA-A*24:02,HLA-A*29:02
SYPSLFGHL

SEQ ID NO: 10684 - protein, 10 aa, Homo sapiens
  Table 1.2; ZNF560; ENSG00000198028; HLA -A*29:02,HLA-A*31:01
SYPSLFGHLR

SEQ ID NO: 10685 - protein, 10 aa, Homo sapiens
  Table 1.2; ZNF560; ENSG00000198028; HLA -A*25:01,HLA-A*26:01,HLA-A*68:01,HLA-B*35:01,HLA-B*57:01, HLA-B*58:01,HLA-C*07:06
TAVDFTQEEW

SEQ ID NO: 10686 - protein, 9 aa, Homo sapiens
  Table 1.2; ZNF560; ENSG00000198028; HLA -A*29:02,HLA-B*18:01,HLA-B*37:01
TDYGKAFIY

SEQ ID NO: 10687 - protein, 9 aa, Homo sapiens
  Table 1.2; ZNF560; ENSG00000198028; HLA -A*02:07,HLA-A*23:01,HLA-A*24:02,HLA-A*29:02,HLA-A*32:01, HLA-A*33:03,HLA-B*18:01,HLA-B*35:01,HLA-B*35:03,HLA-B*38:01, HLA-B*55:01,HLA-C*04:01,HLA-C*05:01,HLA-C*07:04,HLA-C*14:02
TFDSVAVEF

SEQ ID NO: 10688 - protein, 9 aa, Homo sapiens
  Table 1.2; ZNF560; ENSG00000198028; HLA -A*23:01,HLA-B*35:01,HLA-B*35:03,HLA-C*04:01,HLA-C*14:02
TFEDTAVDF

SEQ ID NO: 10689 - protein, 8 aa, Homo sapiens
  Table 1.2; ZNF560; ENSG00000198028; HLA -A*01:01,HLA-B*35:01,HLA-C*05:01
TGDKPYEY

SEQ ID NO: 10690 - protein, 9 aa, Homo sapiens
  Table 1.2; ZNF560; ENSG00000198028; HLA -A*03:02,HLA-A*11:01
TGDKPYEYK

SEQ ID NO: 10691 - protein, 10 aa, Homo sapiens
  Table 1.2; ZNF560; ENSG00000198028; HLA -B*38:01
THSTSHAVNV

SEQ ID NO: 10692 - protein, 8 aa, Homo sapiens
  Table 1.2; ZNF560; ENSG00000198028; HLA -B*08:01
TIRKVSVF

SEQ ID NO: 10693 - protein, 10 aa, Homo sapiens
  Table 1.2; ZNF560; ENSG00000198028; HLA -A*02:01,HLA-A*02:03,HLA-A*02:04,HLA-A*03:01
TLLDPAQRNL

SEQ ID NO: 10694 - protein, 11 aa, Homo sapiens
  Table 1.2; ZNF560; ENSG00000198028; HLA -A*01:01,HLA-A*03:01,HLA-A*23:01,HLA-A*29:02,HLA-A*30:02, HLA-A*32:01,HLA-B*15:01,HLA-B*15:03,HLA-C*07:04
TLLDPAQRNLY

SEQ ID NO: 10695 - protein, 9 aa, Homo sapiens
  Table 1.2; ZNF560; ENSG00000198028; HLA -A*03:01,HLA-A*03:02,HLA-A*29:02,HLA-A*31:01,HLA-A*33:01, HLA-A*33:03,HLA-A*68:01,HLA-C*07:06
TLNGIQLAR

SEQ ID NO: 10696 - protein, 9 aa, Homo sapiens
  Table 1.2; ZNF560; ENSG00000198028; HLA -A*02:07,HLA-A*24:02,HLA-A*25:01,HLA-B*57:01
TLPRVLQEW

SEQ ID NO: 10697 - protein, 10 aa, Homo sapiens
  Table 1.2; ZNF560; ENSG00000198028; HLA -A*25:01
TLQQGVLQDW

SEQ ID NO: 10698 - protein, 8 aa, Homo sapiens
  Table 1.2; ZNF560; ENSG00000198028; HLA -A*33:01,HLA-A*33:03
TNMSTQNR

SEQ ID NO: 10699 - protein, 9 aa, Homo sapiens
  Table 1.2; ZNF560; ENSG00000198028; HLA -B*08:01
TQHLKTHAA

SEQ ID NO: 10700 - protein, 10 aa, Homo sapiens
  Table 1.2; ZNF560; ENSG00000198028; HLA -A*25:01,HLA-B*38:01
TQSGEKLNEW

SEQ ID NO: 10701 - protein, 9 aa, Homo sapiens
  Table 1.2; ZNF560; ENSG00000198028; HLA -A*68:01,HLA-A*68:02,HLA-B*13:02,HLA-B*38:01
TSAGLIEHI

SEQ ID NO: 10702 - protein, 10 aa, Homo sapiens
  Table 1.2; ZNF560; ENSG00000198028; HLA -A*33:03,HLA-A*68:01
TSAGLIEHIR

SEQ ID NO: 10703 - protein, 9 aa, Homo sapiens
  Table 1.2; ZNF560; ENSG00000198028; HLA -A*03:02,HLA-A*11:01
TSECIQYAK

SEQ ID NO: 10704 - protein, 9 aa, Homo sapiens
  Table 1.2; ZNF560; ENSG00000198028; HLA -B*58:01
TSHAVNVET

SEQ ID NO: 10705 - protein, 9 aa, Homo sapiens
  Table 1.2; ZNF560; ENSG00000198028; HLA -C*16:02
TSSGRIQHL

SEQ ID NO: 10706 - protein, 9 aa, Homo sapiens
  Table 1.2; ZNF560; ENSG00000198028; HLA -A*33:03,HLA-A*68:01,HLA-C*07:06
TSSGVIEDR

SEQ ID NO: 10707 - protein, 10 aa, Homo sapiens
  Table 1.2; ZNF560; ENSG00000198028; HLA -A*68:01
TSSGVIEDRR

SEQ ID NO: 10708 - protein, 9 aa, Homo sapiens
  Table 1.2; ZNF560; ENSG00000198028; HLA -B*08:01,HLA-C*16:01
TSTIRKVSV

SEQ ID NO: 10709 - protein, 10 aa, Homo sapiens
  Table 1.2; ZNF560; ENSG00000198028; HLA -B*57:01,HLA-B*58:01
TSVSALQQEF

SEQ ID NO: 10710 - protein, 11 aa, Homo sapiens
  Table 1.2; ZNF560; ENSG00000198028; HLA -B*57:01,HLA-B*58:01
TSVSALQQEFW

SEQ ID NO: 10711 - protein, 9 aa, Homo sapiens
  Table 1.2; ZNF560; ENSG00000198028; HLA -A*03:01,HLA-A*26:01
TVPSGFLEH

SEQ ID NO: 10712 - protein, 10 aa, Homo sapiens
  Table 1.2; ZNF560; ENSG00000198028; HLA -A*02:07,HLA-A*68:02
TVPSGFLEHV

SEQ ID NO: 10713 - protein, 8 aa, Homo sapiens
  Table 1.2; ZNF560; ENSG00000198028; HLA -A*32:01,HLA-B*08:01,HLA-B*40:02,HLA-B*46:01,HLA-C*01:02, HLA-C*03:04,HLA-C*16:01
VAKVGFQL

SEQ ID NO: 10714 - protein, 9 aa, Homo sapiens
  Table 1.2; ZNF560; ENSG00000198028; HLA -A*23:01,HLA-A*24:02,HLA-B*57:01
VAKVGFQLF

SEQ ID NO: 10715 - protein, 10 aa, Homo sapiens
  Table 1.2; ZNF560; ENSG00000198028; HLA -A*25:01,HLA-B*57:01,HLA-B*58:01,HLA-C*16:04
VAVEFTQEEW

SEQ ID NO: 10716 - protein, 8 aa, Homo sapiens
  Table 1.2; ZNF560; ENSG00000198028; HLA -B*18:01,HLA-B*44:02,HLA-B*44:03,HLA-C*16:04
VEFTQEEW

SEQ ID NO: 10717 - protein, 10 aa, Homo sapiens
  Table 1.2; ZNF560; ENSG00000198028; HLA -A*30:01,HLA-B*40:01
VEFTQEEWTL

SEQ ID NO: 10718 - protein, 10 aa, Homo sapiens
  Table 1.2; ZNF560; ENSG00000198028; HLA -B*18:01,HLA-B*44:03
VETHIIKNPY

SEQ ID NO: 10719 - protein, 9 aa, Homo sapiens
  Table 1.2; ZNF560; ENSG00000198028; HLA -A*24:02
VFSKHGKSF

SEQ ID NO: 10720 - protein, 8 aa, Homo sapiens
  Table 1.2; ZNF560; ENSG00000198028; HLA -A*23:01,HLA-C*14:02
VFVSFSSL

SEQ ID NO: 10721 - protein, 9 aa, Homo sapiens
  Table 1.2; ZNF560; ENSG00000198028; HLA -A*23:01,HLA-A*24:02,HLA-A*29:02
VFVSFSSLF

SEQ ID NO: 10722 - protein, 9 aa, Homo sapiens
  Table 1.2; ZNF560; ENSG00000198028; HLA -A*02:04,HLA-A*03:01,HLA-A*03:02
VLQDWAIKH

SEQ ID NO: 10723 - protein, 9 aa, Homo sapiens
  Table 1.2; ZNF560; ENSG00000198028; HLA -A*02:04
VLQEWKMCL

SEQ ID NO: 10724 - protein, 9 aa, Homo sapiens
  Table 1.2; ZNF560; ENSG00000198028; HLA -A*02:01,HLA-A*02:03,HLA-A*02:04,HLA-A*02:07,HLA-B*55:01
VMLENYENV

SEQ ID NO: 10725 - protein, 11 aa, Homo sapiens
  Table 1.2; ZNF560; ENSG00000198028; HLA -A*03:02,HLA-A*11:01,HLA-B*27:02
VMLENYENVAK

SEQ ID NO: 10726 - protein, 9 aa, Homo sapiens
  Table 1.2; ZNF560; ENSG00000198028; HLA -A*02:01,HLA-A*02:03,HLA-A*02:04,HLA-A*02:07,HLA-A*24:02
VMLENYKNL

SEQ ID NO: 10727 - protein, 9 aa, Homo sapiens
  Table 1.2; ZNF560; ENSG00000198028; HLA -A*68:02,HLA-B*07:02,HLA-B*51:01,HLA-B*54:01,HLA-B*55:01, HLA-B*56:01
VPSGFLEHV

SEQ ID NO: 10728 - protein, 10 aa, Homo sapiens
  Table 1.2; ZNF560; ENSG00000198028; HLA -A*68:01
VPSGFLEHVR

SEQ ID NO: 10729 - protein, 8 aa, Homo sapiens
  Table 1.2; ZNF560; ENSG00000198028; HLA -B*58:01,HLA-C*16:01
VSALQQEF

SEQ ID NO: 10730 - protein, 9 aa, Homo sapiens
  Table 1.2; ZNF560; ENSG00000198028; HLA -B*57:01,HLA-B*58:01
VSALQQEFW

SEQ ID NO: 10731 - protein, 9 aa, Homo sapiens
  Table 1.2; ZNF560; ENSG00000198028; HLA -B*27:05,HLA-C*16:02
VSSSLVDHL

SEQ ID NO: 10732 - protein, 10 aa, Homo sapiens
  Table 1.2; ZNF560; ENSG00000198028; HLA -A*03:02,HLA-A*11:01,HLA-A*23:01,HLA-A*24:02,HLA-A*25:01, HLA-A*26:01,HLA-A*29:02,HLA-A*30:02,HLA-A*32:01,HLA-A*68:01, HLA-A*68:02,HLA-B*15:01,HLA-B*27:02,HLA-B*35:01,HLA-B*46:01,
  HLA-B*57:01,HLA-B*58:01,HLA-C*02:02,HLA-C*12:03
VTFDSVAVEF

SEQ ID NO: 10733 - protein, 10 aa, Homo sapiens
  Table 1.2; ZNF560; ENSG00000198028; HLA -A*11:01,HLA-B*27:02,HLA-B*46:01,HLA-B*57:01,HLA-B*58:01
VTFEDTAVDF

SEQ ID NO: 10734 - protein, 9 aa, Homo sapiens
  Table 1.2; ZNF560; ENSG00000198028; HLA -A*03:02
VVSSSLVDH

SEQ ID NO: 10735 - protein, 10 aa, Homo sapiens
  Table 1.2; ZNF560; ENSG00000198028; HLA -B*27:05
VVSSSLVDHL

SEQ ID NO: 10736 - protein, 9 aa, Homo sapiens
  Table 1.2; ZNF560; ENSG00000198028; HLA -B*08:01,HLA-B*51:01,HLA-B*54:01
WAIKHQTSV

SEQ ID NO: 10737 - protein, 9 aa, Homo sapiens
  Table 1.2; ZNF560; ENSG00000198028; HLA -A*33:03
WTLLDPAQR

SEQ ID NO: 10738 - protein, 8 aa, Homo sapiens
  Table 1.2; ZNF560; ENSG00000198028; HLA -B*08:01,HLA-B*46:01
YAKDLLSL

SEQ ID NO: 10739 - protein, 9 aa, Homo sapiens
  Table 1.2; ZNF560; ENSG00000198028; HLA -A*01:01,HLA-A*25:01,HLA-A*26:01,HLA-A*29:02,HLA-A*30:02, HLA-B*15:03,HLA-B*35:01,HLA-B*46:01,HLA-C*02:02,HLA-C*12:03
YAKDLLSLY

SEQ ID NO: 10740 - protein, 11 aa, Homo sapiens
  Table 1.2; ZNF560; ENSG00000198028; HLA -A*33:01
YAKDLLSLYNK

SEQ ID NO: 10741 - protein, 9 aa, Homo sapiens
  Table 1.2; ZNF560; ENSG00000198028; HLA -A*29:02
YCLTNCYQY

SEQ ID NO: 10742 - protein, 10 aa, Homo sapiens
  Table 1.2; ZNF560; ENSG00000198028; HLA -B*44:02,HLA-B*44:03
YEHKEYGKAF

SEQ ID NO: 10743 - protein, 9 aa, Homo sapiens
  Table 1.2; ZNF560; ENSG00000198028; HLA -A*23:01,HLA-A*24:02,HLA-A*30:01,HLA-A*32:01,HLA-B*08:01, HLA-B*15:01,HLA-B*15:03,HLA-B*18:01,HLA-B*27:02,HLA-B*37:01, HLA-B*40:01,HLA-B*40:02,HLA-B*44:02,HLA-B*44:03,HLA-B*49:01,
  HLA-C*07:04,HLA-C*16:04
YENVAKVGF

SEQ ID NO: 10744 - protein, 11 aa, Homo sapiens
  Table 1.2; ZNF560; ENSG00000198028; HLA -A*30:01
YENVAKVGFQL

SEQ ID NO: 10745 - protein, 10 aa, Homo sapiens
  Table 1.2; ZNF560; ENSG00000198028; HLA -A*29:02,HLA-A*30:02,HLA-B*46:01
YGKAFIYQSY

SEQ ID NO: 10746 - protein, 9 aa, Homo sapiens
  Table 1.2; ZNF560; ENSG00000198028; HLA -B*15:01,HLA-B*15:03,HLA-C*07:01
YKNLSSVGY

SEQ ID NO: 10747 - protein, 8 aa, Homo sapiens
  Table 1.2; ZNF560; ENSG00000198028; HLA -B*07:02,HLA-B*08:01,HLA-B*51:01,HLA-B*54:01
YPSLFGHL

SEQ ID NO: 10748 - protein, 9 aa, Homo sapiens
  Table 1.2; ZNF560; ENSG00000198028; HLA -A*33:01
YPSLFGHLR

SEQ ID NO: 10749 - protein, 10 aa, Homo sapiens
  Table 1.2; ZNF560; ENSG00000198028; HLA -B*54:01
YPSLFGHLRV

SEQ ID NO: 10750 - protein, 9 aa, Homo sapiens
  Table 1.2; ZNF560; ENSG00000198028; HLA -B*35:01,HLA-B*35:03,HLA-B*54:01
YPTHLNNHM

SEQ ID NO: 10751 - protein, 9 aa, Homo sapiens
  Table 1.2; ZNF560; ENSG00000198028; HLA -A*02:01,HLA-A*02:03,HLA-A*02:04,HLA-A*30:01
YQLFKPSLI

SEQ ID NO: 10752 - protein, 9 aa, Homo sapiens
  Table 1.2; ZNF560; ENSG00000198028; HLA -A*01:01
YRDVMLENY

SEQ ID NO: 10753 - protein, 9 aa, Homo sapiens
  Table 1.2; ZNF560; ENSG00000198028; HLA -A*01:01,HLA-A*29:02,HLA-A*30:02,HLA-B*18:01,HLA-B*35:01, HLA-B*55:01,HLA-B*58:01,HLA-C*04:01,HLA-C*05:01
YSDVMLENY

SEQ ID NO: 10754 - protein, 10 aa, Homo sapiens
  Table 1.2; ZNF560; ENSG00000198028; HLA -A*01:01
YSDVMLENYK

SEQ ID NO: 10755 - protein, 8 aa, Homo sapiens
  Table A; HLA-A*02:06; CREB3L1; V414I; 0
AADGIYTA

SEQ ID NO: 10756 - protein, 9 aa, Homo sapiens
  Table A; HLA-A*02:07; CREB3L1; V414I; 0
AADGIYTAS

SEQ ID NO: 10757 - protein, 9 aa, Homo sapiens
  Table A; HLA-A*02:05; SF3B1; R957Q; 0
AADLISQTA

SEQ ID NO: 10758 - protein, 9 aa, Homo sapiens
  Table A; HLA-A*02:07; SF3B1; R957Q; 0
AADLISQTA

SEQ ID NO: 10759 - protein, 9 aa, Homo sapiens
  Table A; HLA-B*15:02; SF3B1; R957Q; 0
AADLISQTA

SEQ ID NO: 10760 - protein, 9 aa, Homo sapiens
  Table A; HLA-B*35:02; SF3B1; R957Q; 0
AADLISQTA

SEQ ID NO: 10761 - protein, 9 aa, Homo sapiens
  Table A; HLA-B*35:03; SF3B1; R957Q; 0
AADLISQTA

SEQ ID NO: 10762 - protein, 9 aa, Homo sapiens
  Table A; HLA-B*35:12; SF3B1; R957Q; 0
AADLISQTA

SEQ ID NO: 10763 - protein, 9 aa, Homo sapiens
  Table A; HLA-B*48:01; SF3B1; R957Q; 0
AADLISQTA

SEQ ID NO: 10764 - protein, 9 aa, Homo sapiens
  Table A; HLA-B*54:01; SF3B1; R957Q; 0
AADLISQTA

SEQ ID NO: 10765 - protein, 9 aa, Homo sapiens
  Table A; HLA-B*55:02; SF3B1; R957Q; 0
AADLISQTA

SEQ ID NO: 10766 - protein, 9 aa, Homo sapiens
  Table A; HLA-B*56:01; SF3B1; R957Q; 0
AADLISQTA

SEQ ID NO: 10767 - protein, 9 aa, Homo sapiens
  Table A; HLA-B*58:01; SF3B1; R957Q; 0
AADLISQTA

SEQ ID NO: 10768 - protein, 9 aa, Homo sapiens
  Table A; HLA-C*05:01; SF3B1; R957Q; 1
AADLISQTA

SEQ ID NO: 10769 - protein, 9 aa, Homo sapiens
  Table A; HLA-C*08:01; SF3B1; R957Q; 0
AADLISQTA

SEQ ID NO: 10770 - protein, 9 aa, Homo sapiens
  Table A; HLA-C*08:02; SF3B1; R957Q; 1
AADLISQTA

SEQ ID NO: 10771 - protein, 10 aa, Homo sapiens
  Table A; HLA-A*02:01; SF3B1; R957Q; 1
AADLISQTAV

SEQ ID NO: 10772 - protein, 10 aa, Homo sapiens
  Table A; HLA-A*02:07; SF3B1; R957Q; 0
AADLISQTAV

SEQ ID NO: 10773 - protein, 10 aa, Homo sapiens
  Table A; HLA-C*05:01; SF3B1; R957Q; 1
AADLISQTAV

SEQ ID NO: 10774 - protein, 10 aa, Homo sapiens
  Table A; HLA-C*08:01; SF3B1; R957Q; 0
AADLISQTAV

SEQ ID NO: 10775 - protein, 10 aa, Homo sapiens
  Table A; HLA-C*08:02; SF3B1; R957Q; 1
AADLISQTAV

SEQ ID NO: 10776 - protein, 9 aa, Homo sapiens
  Table A; HLA-A*02:04; PPP2R1A; S256F; 0
AAEDKFWRV

SEQ ID NO: 10777 - protein, 9 aa, Homo sapiens
  Table A; HLA-A*02:06; PPP2R1A; S256F; 0
AAEDKFWRV

SEQ ID NO: 10778 - protein, 9 aa, Homo sapiens
  Table A; HLA-A*02:07; PPP2R1A; S256F; 0
AAEDKFWRV

SEQ ID NO: 10779 - protein, 9 aa, Homo sapiens
  Table A; HLA-A*68:02; PPP2R1A; S256F; 0
AAEDKFWRV

SEQ ID NO: 10780 - protein, 9 aa, Homo sapiens
  Table A; HLA-C*02:02; PPP2R1A; S256F; 0
AAEDKFWRV

SEQ ID NO: 10781 - protein, 9 aa, Homo sapiens
  Table A; HLA-C*05:01; PPP2R1A; S256F; 1
AAEDKFWRV

SEQ ID NO: 10782 - protein, 9 aa, Homo sapiens
  Table A; HLA-C*12:03; PPP2R1A; S256F; 1
AAEDKFWRV

SEQ ID NO: 10783 - protein, 9 aa, Homo sapiens
  Table A; HLA-C*15:02; PPP2R1A; S256F; 0
AAEDKFWRV

SEQ ID NO: 10784 - protein, 9 aa, Homo sapiens
  Table A; HLA-B*07:02; KRAS; G12A; 1
AAGVGKSAL

SEQ ID NO: 10785 - protein, 9 aa, Homo sapiens
  Table A; HLA-B*08:01; KRAS; G12A; 1
AAGVGKSAL

SEQ ID NO: 10786 - protein, 9 aa, Homo sapiens
  Table A; HLA-B*15:01; KRAS; G12A; 1
AAGVGKSAL

SEQ ID NO: 10787 - protein, 9 aa, Homo sapiens
  Table A; HLA-C*01:02; KRAS; G12A; 1
AAGVGKSAL

SEQ ID NO: 10788 - protein, 9 aa, Homo sapiens
  Table A; HLA-C*03:04; KRAS; G12A; 1
AAGVGKSAL

SEQ ID NO: 10789 - protein, 9 aa, Homo sapiens
  Table A; HLA-C*08:01; KRAS; G12A; 0
AAGVGKSAL

SEQ ID NO: 10790 - protein, 9 aa, Homo sapiens
  Table A; HLA-C*16:01; KRAS; G12A; 1
AAGVGKSAL

SEQ ID NO: 10791 - protein, 10 aa, Homo sapiens
  Table A; HLA-A*03:02; KDR; R1032Q; 0
AAQNILLSEK

SEQ ID NO: 10792 - protein, 10 aa, Homo sapiens
  Table A; HLA-A*11:01; KDR; R1032Q; 1
AAQNILLSEK

SEQ ID NO: 10793 - protein, 9 aa, Homo sapiens
  Table A; HLA-A*30:01; PCBP1; L100Q; 0
AASRPPVTQ

SEQ ID NO: 10794 - protein, 9 aa, Homo sapiens
  Table A; HLA-A*31:01; PCBP1; L100Q; 0
AASRPPVTQ

SEQ ID NO: 10795 - protein, 9 aa, Homo sapiens
  Table A; HLA-B*07:02; PCBP1; L100Q; 1
AASRPPVTQ

SEQ ID NO: 10796 - protein, 9 aa, Homo sapiens
  Table A; HLA-B*54:01; PCBP1; L100Q; 0
AASRPPVTQ

SEQ ID NO: 10797 - protein, 9 aa, Homo sapiens
  Table A; HLA-B*57:01; PCBP1; L100Q; 0
AASRPPVTQ

SEQ ID NO: 10798 - protein, 9 aa, Homo sapiens
  Table A; HLA-B*58:01; PCBP1; L100Q; 0
AASRPPVTQ

SEQ ID NO: 10799 - protein, 10 aa, Homo sapiens
  Table A; HLA-A*03:01; PCBP1; L100Q; 1
AASRPPVTQR

SEQ ID NO: 10800 - protein, 10 aa, Homo sapiens
  Table A; HLA-A*03:02; PCBP1; L100Q; 0
AASRPPVTQR

SEQ ID NO: 10801 - protein, 10 aa, Homo sapiens
  Table A; HLA-A*11:01; PCBP1; L100Q; 1
AASRPPVTQR

SEQ ID NO: 10802 - protein, 10 aa, Homo sapiens
  Table A; HLA-A*26:03; PCBP1; L100Q; 0
AASRPPVTQR

SEQ ID NO: 10803 - protein, 10 aa, Homo sapiens
  Table A; HLA-A*30:01; PCBP1; L100Q; 0
AASRPPVTQR

SEQ ID NO: 10804 - protein, 10 aa, Homo sapiens
  Table A; HLA-A*31:01; PCBP1; L100Q; 0
AASRPPVTQR

SEQ ID NO: 10805 - protein, 10 aa, Homo sapiens
  Table A; HLA-A*33:01; PCBP1; L100Q; 0
AASRPPVTQR

SEQ ID NO: 10806 - protein, 10 aa, Homo sapiens
  Table A; HLA-A*33:03; PCBP1; L100Q; 0
AASRPPVTQR

SEQ ID NO: 10807 - protein, 10 aa, Homo sapiens
  Table A; HLA-A*68:01; PCBP1; L100Q; 0
AASRPPVTQR

SEQ ID NO: 10808 - protein, 10 aa, Homo sapiens
  Table A; HLA-A*68:02; PCBP1; L100Q; 0
AASRPPVTQR

SEQ ID NO: 10809 - protein, 10 aa, Homo sapiens
  Table A; HLA-B*57:01; PCBP1; L100Q; 0
AASRPPVTQR

SEQ ID NO: 10810 - protein, 11 aa, Homo sapiens
  Table A; HLA-A*68:02; PCBP1; L100Q; 0
AASRPPVTQRL

SEQ ID NO: 10811 - protein, 9 aa, Homo sapiens
  Table A; HLA-B*07:02; KRAS; G12C; 1
ACGVGKSAL

SEQ ID NO: 10812 - protein, 9 aa, Homo sapiens
  Table A; HLA-C*01:02; KRAS; G12C; 1
ACGVGKSAL

SEQ ID NO: 10813 - protein, 9 aa, Homo sapiens
  Table A; HLA-B*07:02; NRAS; G12C; 1
ACGVGKSAL

SEQ ID NO: 10814 - protein, 9 aa, Homo sapiens
  Table A; HLA-C*01:02; NRAS; G12C; 0
ACGVGKSAL

SEQ ID NO: 10815 - protein, 10 aa, Homo sapiens
  Table A; HLA-A*02:03; CCND1; T286I; 0
ACIPTDVRDV

SEQ ID NO: 10816 - protein, 10 aa, Homo sapiens
  Table A; HLA-B*44:05; CCND1; T286I; 0
ACIPTDVRDV

SEQ ID NO: 10817 - protein, 8 aa, Homo sapiens
  Table A; HLA-B*48:01; CREB3L1; V414I; 0
ADGIYTAS

SEQ ID NO: 10818 - protein, 9 aa, Homo sapiens
  Table A; HLA-B*07:02; KRAS; G12D; 1
ADGVGKSAL

SEQ ID NO: 10819 - protein, 9 aa, Homo sapiens
  Table A; HLA-B*37:01; KRAS; G12D; 1
ADGVGKSAL

SEQ ID NO: 10820 - protein, 9 aa, Homo sapiens
  Table A; HLA-B*40:02; KRAS; G12D; 1
ADGVGKSAL

SEQ ID NO: 10821 - protein, 9 aa, Homo sapiens
  Table A; HLA-B*41:02; KRAS; G12D; 1
ADGVGKSAL

SEQ ID NO: 10822 - protein, 9 aa, Homo sapiens
  Table A; HLA-B*44:05; KRAS; G12D; 1
ADGVGKSAL

SEQ ID NO: 10823 - protein, 9 aa, Homo sapiens
  Table A; HLA-B*07:02; NRAS; G12D; 1
ADGVGKSAL

SEQ ID NO: 10824 - protein, 9 aa, Homo sapiens
  Table A; HLA-B*37:01; NRAS; G12D; 0
ADGVGKSAL

SEQ ID NO: 10825 - protein, 9 aa, Homo sapiens
  Table A; HLA-B*40:02; NRAS; G12D; 0
ADGVGKSAL

SEQ ID NO: 10826 - protein, 9 aa, Homo sapiens
  Table A; HLA-B*41:02; NRAS; G12D; 0
ADGVGKSAL

SEQ ID NO: 10827 - protein, 9 aa, Homo sapiens
  Table A; HLA-B*44:05; NRAS; G12D; 0
ADGVGKSAL

SEQ ID NO: 10828 - protein, 8 aa, Homo sapiens
  Table A; HLA-B*37:01; SF3B1; R957Q; 0
ADLISQTA

SEQ ID NO: 10829 - protein, 8 aa, Homo sapiens
  Table A; HLA-B*39:06; SF3B1; R957Q; 0
ADLISQTA

SEQ ID NO: 10830 - protein, 8 aa, Homo sapiens
  Table A; HLA-B*40:02; SF3B1; R957Q; 0
ADLISQTA

SEQ ID NO: 10831 - protein, 8 aa, Homo sapiens
  Table A; HLA-B*40:06; SF3B1; R957Q; 0
ADLISQTA

SEQ ID NO: 10832 - protein, 8 aa, Homo sapiens
  Table A; HLA-B*41:02; SF3B1; R957Q; 0
ADLISQTA

SEQ ID NO: 10833 - protein, 8 aa, Homo sapiens
  Table A; HLA-B*50:01; SF3B1; R957Q; 0
ADLISQTA

SEQ ID NO: 10834 - protein, 9 aa, Homo sapiens
  Table A; HLA-A*02:01; SF3B1; R957Q; 1
ADLISQTAV

SEQ ID NO: 10835 - protein, 9 aa, Homo sapiens
  Table A; HLA-A*02:05; SF3B1; R957Q; 0
ADLISQTAV

SEQ ID NO: 10836 - protein, 9 aa, Homo sapiens
  Table A; HLA-A*02:06; SF3B1; R957Q; 0
ADLISQTAV

SEQ ID NO: 10837 - protein, 9 aa, Homo sapiens
  Table A; HLA-A*30:01; SF3B1; R957Q; 0
ADLISQTAV

SEQ ID NO: 10838 - protein, 9 aa, Homo sapiens
  Table A; HLA-B*13:02; SF3B1; R957Q; 0
ADLISQTAV

SEQ ID NO: 10839 - protein, 9 aa, Homo sapiens
  Table A; HLA-B*37:01; SF3B1; R957Q; 0
ADLISQTAV

SEQ ID NO: 10840 - protein, 9 aa, Homo sapiens
  Table A; HLA-B*40:02; SF3B1; R957Q; 0
ADLISQTAV

SEQ ID NO: 10841 - protein, 9 aa, Homo sapiens
  Table A; HLA-B*40:06; SF3B1; R957Q; 0
ADLISQTAV

SEQ ID NO: 10842 - protein, 9 aa, Homo sapiens
  Table A; HLA-B*41:02; SF3B1; R957Q; 0
ADLISQTAV

SEQ ID NO: 10843 - protein, 9 aa, Homo sapiens
  Table A; HLA-B*44:05; SF3B1; R957Q; 0
ADLISQTAV

SEQ ID NO: 10844 - protein, 9 aa, Homo sapiens
  Table A; HLA-B*48:01; SF3B1; R957Q; 0
ADLISQTAV

SEQ ID NO: 10845 - protein, 9 aa, Homo sapiens
  Table A; HLA-B*49:01; SF3B1; R957Q; 0
ADLISQTAV

SEQ ID NO: 10846 - protein, 9 aa, Homo sapiens
  Table A; HLA-B*50:01; SF3B1; R957Q; 0
ADLISQTAV

SEQ ID NO: 10847 - protein, 9 aa, Homo sapiens
  Table A; HLA-C*08:03; SF3B1; R957Q; 0
ADLISQTAV

SEQ ID NO: 10848 - protein, 10 aa, Homo sapiens
  Table A; HLA-B*40:02; SF3B1; R957Q; 0
ADLISQTAVV

SEQ ID NO: 10849 - protein, 10 aa, Homo sapiens
  Table A; HLA-B*44:05; SF3B1; R957Q; 0
ADLISQTAVV

SEQ ID NO: 10850 - protein, 11 aa, Homo sapiens
  Table A; HLA-B*40:02; SF3B1; R957Q; 0
ADLISQTAVVM

SEQ ID NO: 10851 - protein, 11 aa, Homo sapiens
  Table A; HLA-B*44:05; SF3B1; R957Q; 0
ADLISQTAVVM

SEQ ID NO: 10852 - protein, 10 aa, Homo sapiens
  Table A; HLA-B*40:02; PTPRT; M903I; 0
ADLLQHITQI

SEQ ID NO: 10853 - protein, 10 aa, Homo sapiens
  Table A; HLA-B*44:05; PTPRT; M903I; 0
ADLLQHITQI

SEQ ID NO: 10854 - protein, 9 aa, Homo sapiens
  Table A; HLA-A*02:01; TPR; S2155L; 1
AEAIHLPQV

SEQ ID NO: 10855 - protein, 9 aa, Homo sapiens
  Table A; HLA-A*02:03; TPR; S2155L; 0
AEAIHLPQV

SEQ ID NO: 10856 - protein, 9 aa, Homo sapiens
  Table A; HLA-A*02:04; TPR; S2155L; 0
AEAIHLPQV

SEQ ID NO: 10857 - protein, 9 aa, Homo sapiens
  Table A; HLA-A*02:05; TPR; S2155L; 0
AEAIHLPQV

SEQ ID NO: 10858 - protein, 9 aa, Homo sapiens
  Table A; HLA-A*02:06; TPR; S2155L; 0
AEAIHLPQV

SEQ ID NO: 10859 - protein, 9 aa, Homo sapiens
  Table A; HLA-A*02:08; TPR; S2155L; 0
AEAIHLPQV

SEQ ID NO: 10860 - protein, 9 aa, Homo sapiens
  Table A; HLA-A*11:01; TPR; S2155L; 0
AEAIHLPQV

SEQ ID NO: 10861 - protein, 9 aa, Homo sapiens
  Table A; HLA-A*23:01; TPR; S2155L; 0
AEAIHLPQV

SEQ ID NO: 10862 - protein, 9 aa, Homo sapiens
  Table A; HLA-A*30:01; TPR; S2155L; 0
AEAIHLPQV

SEQ ID NO: 10863 - protein, 9 aa, Homo sapiens
  Table A; HLA-A*68:02; TPR; S2155L; 0
AEAIHLPQV

SEQ ID NO: 10864 - protein, 9 aa, Homo sapiens
  Table A; HLA-B*07:02; TPR; S2155L; 1
AEAIHLPQV

SEQ ID NO: 10865 - protein, 9 aa, Homo sapiens
  Table A; HLA-B*08:01; TPR; S2155L; 0
AEAIHLPQV

SEQ ID NO: 10866 - protein, 9 aa, Homo sapiens
  Table A; HLA-B*13:02; TPR; S2155L; 0
AEAIHLPQV

SEQ ID NO: 10867 - protein, 9 aa, Homo sapiens
  Table A; HLA-B*15:01; TPR; S2155L; 0
AEAIHLPQV

SEQ ID NO: 10868 - protein, 9 aa, Homo sapiens
  Table A; HLA-B*18:01; TPR; S2155L; 0
AEAIHLPQV

SEQ ID NO: 10869 - protein, 9 aa, Homo sapiens
  Table A; HLA-B*37:01; TPR; S2155L; 0
AEAIHLPQV

SEQ ID NO: 10870 - protein, 9 aa, Homo sapiens
  Table A; HLA-B*40:01; TPR; S2155L; 0
AEAIHLPQV

SEQ ID NO: 10871 - protein, 9 aa, Homo sapiens
  Table A; HLA-B*40:02; TPR; S2155L; 0
AEAIHLPQV

SEQ ID NO: 10872 - protein, 9 aa, Homo sapiens
  Table A; HLA-B*40:06; TPR; S2155L; 0
AEAIHLPQV

SEQ ID NO: 10873 - protein, 9 aa, Homo sapiens
  Table A; HLA-B*41:02; TPR; S2155L; 0
AEAIHLPQV

SEQ ID NO: 10874 - protein, 9 aa, Homo sapiens
  Table A; HLA-B*44:02; TPR; S2155L; 0
AEAIHLPQV

SEQ ID NO: 10875 - protein, 9 aa, Homo sapiens
  Table A; HLA-B*44:03; TPR; S2155L; 0
AEAIHLPQV

SEQ ID NO: 10876 - protein, 9 aa, Homo sapiens
  Table A; HLA-B*44:05; TPR; S2155L; 0
AEAIHLPQV

SEQ ID NO: 10877 - protein, 9 aa, Homo sapiens
  Table A; HLA-B*49:01; TPR; S2155L; 0
AEAIHLPQV

SEQ ID NO: 10878 - protein, 9 aa, Homo sapiens
  Table A; HLA-B*50:01; TPR; S2155L; 0
AEAIHLPQV

SEQ ID NO: 10879 - protein, 9 aa, Homo sapiens
  Table A; HLA-B*58:01; TPR; S2155L; 0
AEAIHLPQV

SEQ ID NO: 10880 - protein, 9 aa, Homo sapiens
  Table A; HLA-C*03:02; TPR; S2155L; 0
AEAIHLPQV

SEQ ID NO: 10881 - protein, 9 aa, Homo sapiens
  Table A; HLA-C*16:04; TPR; S2155L; 0
AEAIHLPQV

SEQ ID NO: 10882 - protein, 10 aa, Homo sapiens
  Table A; HLA-A*02:05; TPR; S2155L; 0
AEAIHLPQVA

SEQ ID NO: 10883 - protein, 10 aa, Homo sapiens
  Table A; HLA-A*02:08; TPR; S2155L; 0
AEAIHLPQVA

SEQ ID NO: 10884 - protein, 10 aa, Homo sapiens
  Table A; HLA-A*30:01; TPR; S2155L; 0
AEAIHLPQVA

SEQ ID NO: 10885 - protein, 10 aa, Homo sapiens
  Table A; HLA-B*40:02; TPR; S2155L; 0
AEAIHLPQVA

SEQ ID NO: 10886 - protein, 10 aa, Homo sapiens
  Table A; HLA-B*40:06; TPR; S2155L; 0
AEAIHLPQVA

SEQ ID NO: 10887 - protein, 10 aa, Homo sapiens
  Table A; HLA-B*41:02; TPR; S2155L; 0
AEAIHLPQVA

SEQ ID NO: 10888 - protein, 10 aa, Homo sapiens
  Table A; HLA-B*44:05; TPR; S2155L; 0
AEAIHLPQVA

SEQ ID NO: 10889 - protein, 10 aa, Homo sapiens
  Table A; HLA-B*49:01; TPR; S2155L; 0
AEAIHLPQVA

SEQ ID NO: 10890 - protein, 10 aa, Homo sapiens
  Table A; HLA-B*50:01; TPR; S2155L; 0
AEAIHLPQVA

SEQ ID NO: 10891 - protein, 8 aa, Homo sapiens
  Table A; HLA-B*49:01; PPP2R1A; S256F; 0
AEDKFWRV

SEQ ID NO: 10892 - protein, 10 aa, Homo sapiens
  Table A; HLA-B*44:03; PPP2R1A; S256F; 1
AEDKFWRVRY

SEQ ID NO: 10893 - protein, 9 aa, Homo sapiens
  Table A; HLA-B*40:01; CSMD3; R100Q; 1
AEEQNRIQI

SEQ ID NO: 10894 - protein, 9 aa, Homo sapiens
  Table A; HLA-B*40:02; CSMD3; R100Q; 0
AEEQNRIQI

SEQ ID NO: 10895 - protein, 9 aa, Homo sapiens
  Table A; HLA-B*41:02; CSMD3; R100Q; 0
AEEQNRIQI

SEQ ID NO: 10896 - protein, 9 aa, Homo sapiens
  Table A; HLA-B*44:02; CSMD3; R100Q; 1
AEEQNRIQI

SEQ ID NO: 10897 - protein, 9 aa, Homo sapiens
  Table A; HLA-B*44:03; CSMD3; R100Q; 1
AEEQNRIQI

SEQ ID NO: 10898 - protein, 9 aa, Homo sapiens
  Table A; HLA-B*44:05; CSMD3; R100Q; 0
AEEQNRIQI

SEQ ID NO: 10899 - protein, 9 aa, Homo sapiens
  Table A; HLA-B*49:01; CSMD3; R100Q; 0
AEEQNRIQI

SEQ ID NO: 10900 - protein, 10 aa, Homo sapiens
  Table A; HLA-B*41:02; CSMD3; R100Q; 0
AEEQNRIQIV

SEQ ID NO: 10901 - protein, 10 aa, Homo sapiens
  Table A; HLA-B*44:05; CSMD3; R100Q; 0
AEEQNRIQIV

SEQ ID NO: 10902 - protein, 10 aa, Homo sapiens
  Table A; HLA-B*49:01; CSMD3; R100Q; 0
AEEQNRIQIV

SEQ ID NO: 10903 - protein, 11 aa, Homo sapiens
  Table A; HLA-B*40:01; CSMD3; R100Q; 1
AEEQNRIQIVF

SEQ ID NO: 10904 - protein, 11 aa, Homo sapiens
  Table A; HLA-B*40:02; CSMD3; R100Q; 0
AEEQNRIQIVF

SEQ ID NO: 10905 - protein, 11 aa, Homo sapiens
  Table A; HLA-B*41:02; CSMD3; R100Q; 0
AEEQNRIQIVF

SEQ ID NO: 10906 - protein, 11 aa, Homo sapiens
  Table A; HLA-B*44:02; CSMD3; R100Q; 1
AEEQNRIQIVF

SEQ ID NO: 10907 - protein, 11 aa, Homo sapiens
  Table A; HLA-B*44:03; CSMD3; R100Q; 1
AEEQNRIQIVF

SEQ ID NO: 10908 - protein, 11 aa, Homo sapiens
  Table A; HLA-B*44:05; CSMD3; R100Q; 0
AEEQNRIQIVF

SEQ ID NO: 10909 - protein, 9 aa, Homo sapiens
  Table A; HLA-B*49:01; ATM; R2691C; 0
AEFCLAGGV

SEQ ID NO: 10910 - protein, 11 aa, Homo sapiens
  Table A; HLA-B*40:01; ATM; R2691C; 0
AEFCLAGGVNL

SEQ ID NO: 10911 - protein, 11 aa, Homo sapiens
  Table A; HLA-B*40:02; ATM; R2691C; 0
AEFCLAGGVNL

SEQ ID NO: 10912 - protein, 11 aa, Homo sapiens
  Table A; HLA-B*44:05; ATM; R2691C; 0
AEFCLAGGVNL

SEQ ID NO: 10913 - protein, 8 aa, Homo sapiens
  Table A; HLA-B*49:01; TNC; L1626I; 0
AEPEVDNI

SEQ ID NO: 10914 - protein, 9 aa, Homo sapiens
  Table A; HLA-B*40:01; TNC; L1626I; 1
AEPEVDNIL

SEQ ID NO: 10915 - protein, 9 aa, Homo sapiens
  Table A; HLA-B*40:02; TNC; L1626I; 0
AEPEVDNIL

SEQ ID NO: 10916 - protein, 9 aa, Homo sapiens
  Table A; HLA-B*41:02; TNC; L1626I; 0
AEPEVDNIL

SEQ ID NO: 10917 - protein, 9 aa, Homo sapiens
  Table A; HLA-B*44:05; TNC; L1626I; 0
AEPEVDNIL

SEQ ID NO: 10918 - protein, 10 aa, Homo sapiens
  Table A; HLA-B*40:02; TNC; L1626I; 0
AEPEVDNILV

SEQ ID NO: 10919 - protein, 10 aa, Homo sapiens
  Table A; HLA-B*44:05; TNC; L1626I; 0
AEPEVDNILV

SEQ ID NO: 10920 - protein, 10 aa, Homo sapiens
  Table A; HLA-B*49:01; TNC; L1626I; 0
AEPEVDNILV

SEQ ID NO: 10921 - protein, 10 aa, Homo sapiens
  Table A; HLA-B*40:02; POLE; S297F; 0
AETDQIMMIF

SEQ ID NO: 10922 - protein, 10 aa, Homo sapiens
  Table A; HLA-B*44:02; POLE; S297F; 0
AETDQIMMIF

SEQ ID NO: 10923 - protein, 10 aa, Homo sapiens
  Table A; HLA-B*44:03; POLE; S297F; 0
AETDQIMMIF

SEQ ID NO: 10924 - protein, 10 aa, Homo sapiens
  Table A; HLA-B*44:05; POLE; S297F; 0
AETDQIMMIF

SEQ ID NO: 10925 - protein, 11 aa, Homo sapiens
  Table A; HLA-B*44:03; POLE; S297F; 0
AETDQIMMIFY

SEQ ID NO: 10926 - protein, 10 aa, Homo sapiens
  Table A; HLA-A*02:01; RAC1; P29L; 1
AFLGEYIPTV

SEQ ID NO: 10927 - protein, 10 aa, Homo sapiens
  Table A; HLA-A*02:03; RAC1; P29L; 0
AFLGEYIPTV

SEQ ID NO: 10928 - protein, 10 aa, Homo sapiens
  Table A; HLA-A*02:04; RAC1; P29L; 0
AFLGEYIPTV

SEQ ID NO: 10929 - protein, 10 aa, Homo sapiens
  Table A; HLA-A*30:01; RAC1; P29L; 0
AFLGEYIPTV

SEQ ID NO: 10930 - protein, 11 aa, Homo sapiens
  Table A; HLA-A*23:01; RAC1; P29L; 0
AFLGEYIPTVF

SEQ ID NO: 10931 - protein, 9 aa, Homo sapiens
  Table A; HLA-B*48:01; RAC1; P29S; 0
AFSGEYIPT

SEQ ID NO: 10932 - protein, 9 aa, Homo sapiens
  Table A; HLA-C*08:03; RAC1; P29S; 0
AFSGEYIPT

SEQ ID NO: 10933 - protein, 10 aa, Homo sapiens
  Table A; HLA-A*02:01; RAC1; P29S; 1
AFSGEYIPTV

SEQ ID NO: 10934 - protein, 10 aa, Homo sapiens
  Table A; HLA-A*02:04; RAC1; P29S; 0
AFSGEYIPTV

SEQ ID NO: 10935 - protein, 11 aa, Homo sapiens
  Table A; HLA-A*23:01; RAC1; P29S; 0
AFSGEYIPTVF

SEQ ID NO: 10936 - protein, 9 aa, Homo sapiens
  Table A; HLA-A*30:04; CDKN2A; D108Y; 0
AGARLDVRY

SEQ ID NO: 10937 - protein, 9 aa, Homo sapiens
  Table A; HLA-B*15:01; CDKN2A; D108Y; 1
AGARLDVRY

SEQ ID NO: 10938 - protein, 9 aa, Homo sapiens
  Table A; HLA-B*35:01; CDKN2A; D108Y; 1
AGARLDVRY

SEQ ID NO: 10939 - protein, 9 aa, Homo sapiens
  Table A; HLA-B*57:01; CDKN2A; D108Y; 0
AGARLDVRY

SEQ ID NO: 10940 - protein, 10 aa, Homo sapiens
  Table A; HLA-A*11:01; CTNNB1; S37A; 1
AGATTTAPSL

SEQ ID NO: 10941 - protein, 10 aa, Homo sapiens
  Table A; HLA-B*40:02; CTNNB1; S37A; 0
AGATTTAPSL

SEQ ID NO: 10942 - protein, 10 aa, Homo sapiens
  Table A; HLA-B*44:05; CTNNB1; S37A; 0
AGATTTAPSL

SEQ ID NO: 10943 - protein, 9 aa, Homo sapiens
  Table A; HLA-B*07:02; KRAS; G13C; 1
AGCVGKSAL

SEQ ID NO: 10944 - protein, 9 aa, Homo sapiens
  Table A; HLA-B*08:01; KRAS; G13C; 1
AGCVGKSAL

SEQ ID NO: 10945 - protein, 9 aa, Homo sapiens
  Table A; HLA-B*07:02; KRAS; G13D; 1
AGDVGKSAL

SEQ ID NO: 10946 - protein, 9 aa, Homo sapiens
  Table A; HLA-B*08:01; KRAS; G13D; 1
AGDVGKSAL

SEQ ID NO: 10947 - protein, 9 aa, Homo sapiens
  Table A; HLA-B*15:01; KRAS; G13D; 1
AGDVGKSAL

SEQ ID NO: 10948 - protein, 9 aa, Homo sapiens
  Table A; HLA-B*15:13; KRAS; G13D; 0
AGDVGKSAL

SEQ ID NO: 10949 - protein, 9 aa, Homo sapiens
  Table A; HLA-B*35:02; KRAS; G13D; 0
AGDVGKSAL

SEQ ID NO: 10950 - protein, 9 aa, Homo sapiens
  Table A; HLA-B*39:01; KRAS; G13D; 0
AGDVGKSAL

SEQ ID NO: 10951 - protein, 9 aa, Homo sapiens
  Table A; HLA-B*41:02; KRAS; G13D; 0
AGDVGKSAL

SEQ ID NO: 10952 - protein, 9 aa, Homo sapiens
  Table A; HLA-C*03:04; KRAS; G13D; 1
AGDVGKSAL

SEQ ID NO: 10953 - protein, 9 aa, Homo sapiens
  Table A; HLA-C*05:01; KRAS; G13D; 1
AGDVGKSAL

SEQ ID NO: 10954 - protein, 9 aa, Homo sapiens
  Table A; HLA-C*08:01; KRAS; G13D; 0
AGDVGKSAL

SEQ ID NO: 10955 - protein, 9 aa, Homo sapiens
  Table A; HLA-C*08:02; KRAS; G13D; 1
AGDVGKSAL

SEQ ID NO: 10956 - protein, 8 aa, Homo sapiens
  Table A; HLA-B*39:06; KRAS; Q61H; 0
AGHEEYSA

SEQ ID NO: 10957 - protein, 8 aa, Homo sapiens
  Table A; HLA-B*39:06; NRAS; Q61H; 0
AGHEEYSA

SEQ ID NO: 10958 - protein, 9 aa, Homo sapiens
  Table A; HLA-B*15:01; KRAS; Q61H; 1
AGHEEYSAM

SEQ ID NO: 10959 - protein, 9 aa, Homo sapiens
  Table A; HLA-B*35:02; KRAS; Q61H; 0
AGHEEYSAM

SEQ ID NO: 10960 - protein, 9 aa, Homo sapiens
  Table A; HLA-B*35:08; KRAS; Q61H; 0
AGHEEYSAM

SEQ ID NO: 10961 - protein, 9 aa, Homo sapiens
  Table A; HLA-B*35:12; KRAS; Q61H; 0
AGHEEYSAM

SEQ ID NO: 10962 - protein, 9 aa, Homo sapiens
  Table A; HLA-C*08:01; KRAS; Q61H; 0
AGHEEYSAM

SEQ ID NO: 10963 - protein, 9 aa, Homo sapiens
  Table A; HLA-B*15:01; NRAS; Q61H; 1
AGHEEYSAM

SEQ ID NO: 10964 - protein, 9 aa, Homo sapiens
  Table A; HLA-B*15:13; NRAS; Q61H; 0
AGHEEYSAM

SEQ ID NO: 10965 - protein, 9 aa, Homo sapiens
  Table A; HLA-B*35:01; NRAS; Q61H; 1
AGHEEYSAM

SEQ ID NO: 10966 - protein, 9 aa, Homo sapiens
  Table A; HLA-B*35:02; NRAS; Q61H; 0
AGHEEYSAM

SEQ ID NO: 10967 - protein, 9 aa, Homo sapiens
  Table A; HLA-B*35:08; NRAS; Q61H; 0
AGHEEYSAM

SEQ ID NO: 10968 - protein, 9 aa, Homo sapiens
  Table A; HLA-B*35:12; NRAS; Q61H; 0
AGHEEYSAM

SEQ ID NO: 10969 - protein, 9 aa, Homo sapiens
  Table A; HLA-C*08:01; NRAS; Q61H; 0
AGHEEYSAM

SEQ ID NO: 10970 - protein, 9 aa, Homo sapiens
  Table A; HLA-B*15:01; HRAS; Q61K; 0
AGKEEYSAM

SEQ ID NO: 10971 - protein, 9 aa, Homo sapiens
  Table A; HLA-B*15:01; NRAS; Q61K; 1
AGKEEYSAM

SEQ ID NO: 10972 - protein, 10 aa, Homo sapiens
  Table A; HLA-A*31:01; NRAS; Q61K; 1
AGKEEYSAMR

SEQ ID NO: 10973 - protein, 9 aa, Homo sapiens
  Table A; HLA-B*15:01; PTEN; R130G; 1
AGKGGTGVM

SEQ ID NO: 10974 - protein, 9 aa, Homo sapiens
  Table A; HLA-B*46:01; PTEN; R130G; 0
AGKGGTGVM

SEQ ID NO: 10975 - protein, 9 aa, Homo sapiens
  Table A; HLA-B*15:01; PTEN; R130L; 1
AGKGLTGVM

SEQ ID NO: 10976 - protein, 9 aa, Homo sapiens
  Table A; HLA-B*41:02; PTEN; R130L; 0
AGKGLTGVM

SEQ ID NO: 10977 - protein, 9 aa, Homo sapiens
  Table A; HLA-B*07:02; PTEN; R130P; 1
AGKGPTGVM

SEQ ID NO: 10978 - protein, 9 aa, Homo sapiens
  Table A; HLA-B*15:01; PTEN; R130P; 1
AGKGPTGVM

SEQ ID NO: 10979 - protein, 9 aa, Homo sapiens
  Table A; HLA-B*15:03; PTEN; R130P; 0
AGKGPTGVM

SEQ ID NO: 10980 - protein, 9 aa, Homo sapiens
  Table A; HLA-B*41:02; PTEN; R130P; 0
AGKGPTGVM

SEQ ID NO: 10981 - protein, 10 aa, Homo sapiens
  Table A; HLA-B*44:05; PTEN; R130P; 0
AGKGPTGVMI

SEQ ID NO: 10982 - protein, 9 aa, Homo sapiens
  Table A; HLA-B*15:01; PTEN; R130Q; 1
AGKGQTGVM

SEQ ID NO: 10983 - protein, 8 aa, Homo sapiens
  Table A; HLA-B*39:06; KRAS; Q61L; 0
AGLEEYSA

SEQ ID NO: 10984 - protein, 8 aa, Homo sapiens
  Table A; HLA-B*39:06; NRAS; Q61L; 0
AGLEEYSA

SEQ ID NO: 10985 - protein, 9 aa, Homo sapiens
  Table A; HLA-B*15:01; KRAS; Q61L; 0
AGLEEYSAM

SEQ ID NO: 10986 - protein, 9 aa, Homo sapiens
  Table A; HLA-B*15:02; KRAS; Q61L; 0
AGLEEYSAM

SEQ ID NO: 10987 - protein, 9 aa, Homo sapiens
  Table A; HLA-B*35:08; KRAS; Q61L; 0
AGLEEYSAM

SEQ ID NO: 10988 - protein, 9 aa, Homo sapiens
  Table A; HLA-B*35:12; KRAS; Q61L; 0
AGLEEYSAM

SEQ ID NO: 10989 - protein, 9 aa, Homo sapiens
  Table A; HLA-C*08:01; KRAS; Q61L; 0
AGLEEYSAM

SEQ ID NO: 10990 - protein, 9 aa, Homo sapiens
  Table A; HLA-B*15:01; NRAS; Q61L; 1
AGLEEYSAM

SEQ ID NO: 10991 - protein, 9 aa, Homo sapiens
  Table A; HLA-B*15:02; NRAS; Q61L; 0
AGLEEYSAM

SEQ ID NO: 10992 - protein, 9 aa, Homo sapiens
  Table A; HLA-B*35:01; NRAS; Q61L; 1
AGLEEYSAM

SEQ ID NO: 10993 - protein, 9 aa, Homo sapiens
  Table A; HLA-B*35:02; NRAS; Q61L; 0
AGLEEYSAM

SEQ ID NO: 10994 - protein, 9 aa, Homo sapiens
  Table A; HLA-B*35:08; NRAS; Q61L; 0
AGLEEYSAM

SEQ ID NO: 10995 - protein, 9 aa, Homo sapiens
  Table A; HLA-B*35:12; NRAS; Q61L; 0
AGLEEYSAM

SEQ ID NO: 10996 - protein, 9 aa, Homo sapiens
  Table A; HLA-B*48:01; NRAS; Q61L; 0
AGLEEYSAM

SEQ ID NO: 10997 - protein, 9 aa, Homo sapiens
  Table A; HLA-C*08:01; NRAS; Q61L; 0
AGLEEYSAM

SEQ ID NO: 10998 - protein, 10 aa, Homo sapiens
  Table A; HLA-B*27:02; NRAS; Q61L; 0
AGLEEYSAMR

SEQ ID NO: 10999 - protein, 9 aa, Homo sapiens
  Table A; HLA-B*07:02; KRAS; Q61R; 1
AGREEYSAM

SEQ ID NO: 11000 - protein, 9 aa, Homo sapiens
  Table A; HLA-B*15:01; KRAS; Q61R; 0
AGREEYSAM

SEQ ID NO: 11001 - protein, 9 aa, Homo sapiens
  Table A; HLA-B*07:02; NRAS; Q61R; 1
AGREEYSAM

SEQ ID NO: 11002 - protein, 9 aa, Homo sapiens
  Table A; HLA-B*15:01; NRAS; Q61R; 1
AGREEYSAM

SEQ ID NO: 11003 - protein, 9 aa, Homo sapiens
  Table A; HLA-B*07:02; NRAS; G13R; 1
AGRVGKSAL

SEQ ID NO: 11004 - protein, 9 aa, Homo sapiens
  Table A; HLA-B*08:01; NRAS; G13R; 1
AGRVGKSAL

SEQ ID NO: 11005 - protein, 9 aa, Homo sapiens
  Table A; HLA-B*41:02; NRAS; G13R; 0
AGRVGKSAL

SEQ ID NO: 11006 - protein, 8 aa, Homo sapiens
  Table A; HLA-B*07:02; KRAS; G12A; 1
AGVGKSAL

SEQ ID NO: 11007 - protein, 8 aa, Homo sapiens
  Table A; HLA-B*08:01; KRAS; G12A; 1
AGVGKSAL

SEQ ID NO: 11008 - protein, 8 aa, Homo sapiens
  Table A; HLA-B*14:02; KRAS; G12A; 1
AGVGKSAL

SEQ ID NO: 11009 - protein, 8 aa, Homo sapiens
  Table A; HLA-B*41:02; KRAS; G12A; 0
AGVGKSAL

SEQ ID NO: 11010 - protein, 10 aa, Homo sapiens
  Table A; HLA-B*13:02; KRAS; G12A; 1
AGVGKSALTI

SEQ ID NO: 11011 - protein, 9 aa, Homo sapiens
  Table A; HLA-B*13:01; ARHGEF12; R113Q; 0
AGVQTGDQI

SEQ ID NO: 11012 - protein, 9 aa, Homo sapiens
  Table A; HLA-B*13:02; ARHGEF12; R113Q; 0
AGVQTGDQI

SEQ ID NO: 11013 - protein, 9 aa, Homo sapiens
  Table A; HLA-B*38:01; ARHGEF12; R113Q; 0
AGVQTGDQI

SEQ ID NO: 11014 - protein, 11 aa, Homo sapiens
  Table A; HLA-A*11:01; ARHGEF12; R113Q; 0
AGVQTGDQIIK

SEQ ID NO: 11015 - protein, 11 aa, Homo sapiens
  Table A; HLA-B*27:02; ARHGEF12; R113Q; 0
AGVQTGDQIIK

SEQ ID NO: 11016 - protein, 10 aa, Homo sapiens
  Table A; HLA-B*15:10; SIRPA; V233I; 0
AHITLQGDPL

SEQ ID NO: 11017 - protein, 10 aa, Homo sapiens
  Table A; HLA-B*38:01; SIRPA; V233I; 0
AHITLQGDPL

SEQ ID NO: 11018 - protein, 10 aa, Homo sapiens
  Table A; HLA-B*39:01; SIRPA; V233I; 0
AHITLQGDPL

SEQ ID NO: 11019 - protein, 10 aa, Homo sapiens
  Table A; HLA-B*40:02; SIRPA; V233I; 0
AHITLQGDPL

SEQ ID NO: 11020 - protein, 10 aa, Homo sapiens
  Table A; HLA-B*48:01; SIRPA; V233I; 0
AHITLQGDPL

SEQ ID NO: 11021 - protein, 10 aa, Homo sapiens
  Table A; HLA-C*08:03; SIRPA; V233I; 0
AHITLQGDPL

SEQ ID NO: 11022 - protein, 9 aa, Homo sapiens
  Table A; HLA-B*39:06; ACVR1; R206H; 0
AHQITLLEC

SEQ ID NO: 11023 - protein, 11 aa, Homo sapiens
  Table A; HLA-B*38:01; GRIN2A; R1067W; 0
AHSDISETSNW

SEQ ID NO: 11024 - protein, 10 aa, Homo sapiens
  Table A; HLA-B*15:10; CHST11; A159T; 0
AHVSTNLKTL

SEQ ID NO: 11025 - protein, 9 aa, Homo sapiens
  Table A; HLA-B*15:01; TP53; Y163H; 0
AIHKQSQHM

SEQ ID NO: 11026 - protein, 10 aa, Homo sapiens
  Table A; HLA-A*02:01; TPR; S2155L; 1
AIHLPQVAGV

SEQ ID NO: 11027 - protein, 10 aa, Homo sapiens
  Table A; HLA-A*02:03; TPR; S2155L; 0
AIHLPQVAGV

SEQ ID NO: 11028 - protein, 10 aa, Homo sapiens
  Table A; HLA-A*02:04; TPR; S2155L; 0
AIHLPQVAGV

SEQ ID NO: 11029 - protein, 10 aa, Homo sapiens
  Table A; HLA-A*02:07; TPR; S2155L; 0
AIHLPQVAGV

SEQ ID NO: 11030 - protein, 10 aa, Homo sapiens
  Table A; HLA-A*02:08; TPR; S2155L; 0
AIHLPQVAGV

SEQ ID NO: 11031 - protein, 10 aa, Homo sapiens
  Table A; HLA-B*40:02; TPR; S2155L; 0
AIHLPQVAGV

SEQ ID NO: 11032 - protein, 10 aa, Homo sapiens
  Table A; HLA-A*03:01; PIK3CA; E542K; 1
AISTRDPLSK

SEQ ID NO: 11033 - protein, 10 aa, Homo sapiens
  Table A; HLA-A*03:02; PIK3CA; E542K; 0
AISTRDPLSK

SEQ ID NO: 11034 - protein, 10 aa, Homo sapiens
  Table A; HLA-A*02:03; PIK3CA; E542V; 0
AISTRDPLSV

SEQ ID NO: 11035 - protein, 8 aa, Homo sapiens
  Table A; HLA-B*08:01; AXIN1; R146Q; 1
AIYQKYIL

SEQ ID NO: 11036 - protein, 10 aa, Homo sapiens
  Table A; HLA-A*02:04; FGFR2; C382R; 0
AIYRIGVFLI

SEQ ID NO: 11037 - protein, 9 aa, Homo sapiens
  Table A; HLA-B*15:03; TP53; S127F; 0
AKSVTCTYF

SEQ ID NO: 11038 - protein, 8 aa, Homo sapiens
  Table A; HLA-B*15:03; TP53; C141Y; 0
AKTYPVQL

SEQ ID NO: 11039 - protein, 8 aa, Homo sapiens
  Table A; HLA-B*48:01; TP53; C141Y; 0
AKTYPVQL

SEQ ID NO: 11040 - protein, 9 aa, Homo sapiens
  Table A; HLA-A*02:03; PIK3CA; M1043V; 0
ALEYFMKQV

SEQ ID NO: 11041 - protein, 9 aa, Homo sapiens
  Table A; HLA-A*02:07; PIK3CA; M1043V; 0
ALEYFMKQV

SEQ ID NO: 11042 - protein, 9 aa, Homo sapiens
  Table A; HLA-A*02:03; PIK3CA; H1047L; 0
ALHGGWTTK

SEQ ID NO: 11043 - protein, 9 aa, Homo sapiens
  Table A; HLA-A*03:01; PIK3CA; H1047L; 1
ALHGGWTTK

SEQ ID NO: 11044 - protein, 9 aa, Homo sapiens
  Table A; HLA-A*03:02; PIK3CA; H1047L; 0
ALHGGWTTK

SEQ ID NO: 11045 - protein, 9 aa, Homo sapiens
  Table A; HLA-A*11:01; PIK3CA; H1047L; 1
ALHGGWTTK

SEQ ID NO: 11046 - protein, 9 aa, Homo sapiens
  Table A; HLA-A*03:01; EZH2; E745K; 1
ALKYVGIKR

SEQ ID NO: 11047 - protein, 9 aa, Homo sapiens
  Table A; HLA-A*31:01; EZH2; E745K; 0
ALKYVGIKR

SEQ ID NO: 11048 - protein, 9 aa, Homo sapiens
  Table A; HLA-A*33:03; EZH2; E745K; 0
ALKYVGIKR

SEQ ID NO: 11049 - protein, 9 aa, Homo sapiens
  Table A; HLA-A*02:04; BAZ1A; R1480C; 0
ALNIICEKV

SEQ ID NO: 11050 - protein, 9 aa, Homo sapiens
  Table A; HLA-B*13:02; BAZ1A; R1480C; 0
ALNIICEKV

SEQ ID NO: 11051 - protein, 9 aa, Homo sapiens
  Table A; HLA-A*02:01; TP53; C135F; 1
ALNKMFFQL

SEQ ID NO: 11052 - protein, 9 aa, Homo sapiens
  Table A; HLA-A*02:03; TP53; C135F; 0
ALNKMFFQL

SEQ ID NO: 11053 - protein, 9 aa, Homo sapiens
  Table A; HLA-A*02:04; TP53; C135F; 0
ALNKMFFQL

SEQ ID NO: 11054 - protein, 9 aa, Homo sapiens
  Table A; HLA-A*02:07; TP53; C135F; 0
ALNKMFFQL

SEQ ID NO: 11055 - protein, 9 aa, Homo sapiens
  Table A; HLA-A*03:01; TP53; C135F; 1
ALNKMFFQL

SEQ ID NO: 11056 - protein, 9 aa, Homo sapiens
  Table A; HLA-A*02:01; TP53; F134L; 1
ALNKMLCQL

SEQ ID NO: 11057 - protein, 9 aa, Homo sapiens
  Table A; HLA-A*02:03; TP53; F134L; 0
ALNKMLCQL

SEQ ID NO: 11058 - protein, 9 aa, Homo sapiens
  Table A; HLA-A*02:04; TP53; F134L; 0
ALNKMLCQL

SEQ ID NO: 11059 - protein, 9 aa, Homo sapiens
  Table A; HLA-A*02:01; TP53; K132N; 1
ALNNMFCQL

SEQ ID NO: 11060 - protein, 9 aa, Homo sapiens
  Table A; HLA-A*02:03; TP53; K132N; 0
ALNNMFCQL

SEQ ID NO: 11061 - protein, 9 aa, Homo sapiens
  Table A; HLA-A*02:04; TP53; K132N; 0
ALNNMFCQL

SEQ ID NO: 11062 - protein, 9 aa, Homo sapiens
  Table A; HLA-A*02:07; TP53; K132N; 0
ALNNMFCQL

SEQ ID NO: 11063 - protein, 9 aa, Homo sapiens
  Table A; HLA-A*03:01; TP53; K132N; 1
ALNNMFCQL

SEQ ID NO: 11064 - protein, 9 aa, Homo sapiens
  Table A; HLA-A*31:01; TP53; K132N; 0
ALNNMFCQL

SEQ ID NO: 11065 - protein, 9 aa, Homo sapiens
  Table A; HLA-A*02:04; TP53; K132R; 0
ALNRMFCQL

SEQ ID NO: 11066 - protein, 8 aa, Homo sapiens
  Table A; HLA-A*31:01; MTOR; S2215Y; 0
ANDPTYLR

SEQ ID NO: 11067 - protein, 8 aa, Homo sapiens
  Table A; HLA-A*33:03; MTOR; S2215Y; 0
ANDPTYLR

SEQ ID NO: 11068 - protein, 9 aa, Homo sapiens
  Table A; HLA-A*03:01; MTOR; S2215Y; 1
ANDPTYLRK

SEQ ID NO: 11069 - protein, 9 aa, Homo sapiens
  Table A; HLA-A*03:02; MTOR; S2215Y; 0
ANDPTYLRK

SEQ ID NO: 11070 - protein, 9 aa, Homo sapiens
  Table A; HLA-A*11:01; MTOR; S2215Y; 1
ANDPTYLRK

SEQ ID NO: 11071 - protein, 9 aa, Homo sapiens
  Table A; HLA-B*35:01; CDH11; K357T; 1
ANVHIDPTF

SEQ ID NO: 11072 - protein, 9 aa, Homo sapiens
  Table A; HLA-B*35:02; CDH11; K357T; 0
ANVHIDPTF

SEQ ID NO: 11073 - protein, 9 aa, Homo sapiens
  Table A; HLA-B*35:03; CDH11; K357T; 0
ANVHIDPTF

SEQ ID NO: 11074 - protein, 9 aa, Homo sapiens
  Table A; HLA-B*35:12; CDH11; K357T; 0
ANVHIDPTF

SEQ ID NO: 11075 - protein, 9 aa, Homo sapiens
  Table A; HLA-B*57:01; CDH11; K357T; 0
ANVHIDPTF

SEQ ID NO: 11076 - protein, 9 aa, Homo sapiens
  Table A; HLA-B*58:01; CDH11; K357T; 0
ANVHIDPTF

SEQ ID NO: 11077 - protein, 8 aa, Homo sapiens
  Table A; HLA-A*26:01; CTNNB1; S45F; 0
APFLSGKG

SEQ ID NO: 11078 - protein, 8 aa, Homo sapiens
  Table A; HLA-B*07:02; CTNNB1; S45F; 1
APFLSGKG

SEQ ID NO: 11079 - protein, 8 aa, Homo sapiens
  Table A; HLA-B*54:01; CTNNB1; S45F; 0
APFLSGKG

SEQ ID NO: 11080 - protein, 8 aa, Homo sapiens
  Table A; HLA-B*55:01; CTNNB1; S45F; 0
APFLSGKG

SEQ ID NO: 11081 - protein, 8 aa, Homo sapiens
  Table A; HLA-B*55:02; CTNNB1; S45F; 0
APFLSGKG

SEQ ID NO: 11082 - protein, 8 aa, Homo sapiens
  Table A; HLA-B*56:01; CTNNB1; S45F; 0
APFLSGKG

SEQ ID NO: 11083 - protein, 10 aa, Homo sapiens
  Table A; HLA-B*07:02; CTNNB1; S45F; 1
APFLSGKGNP

SEQ ID NO: 11084 - protein, 10 aa, Homo sapiens
  Table A; HLA-B*55:01; CTNNB1; S45F; 0
APFLSGKGNP

SEQ ID NO: 11085 - protein, 10 aa, Homo sapiens
  Table A; HLA-B*55:02; CTNNB1; S45F; 0
APFLSGKGNP

SEQ ID NO: 11086 - protein, 10 aa, Homo sapiens
  Table A; HLA-B*56:01; CTNNB1; S45F; 0
APFLSGKGNP

SEQ ID NO: 11087 - protein, 8 aa, Homo sapiens
  Table A; HLA-A*11:01; ABI1; K445N; 1
APNNYIEK

SEQ ID NO: 11088 - protein, 9 aa, Homo sapiens
  Table A; HLA-A*02:01; ABI1; K445N; 1
APNNYIEKV

SEQ ID NO: 11089 - protein, 9 aa, Homo sapiens
  Table A; HLA-A*02:03; ABI1; K445N; 0
APNNYIEKV

SEQ ID NO: 11090 - protein, 9 aa, Homo sapiens
  Table A; HLA-A*02:06; ABI1; K445N; 0
APNNYIEKV

SEQ ID NO: 11091 - protein, 9 aa, Homo sapiens
  Table A; HLA-A*68:02; ABI1; K445N; 0
APNNYIEKV

SEQ ID NO: 11092 - protein, 9 aa, Homo sapiens
  Table A; HLA-B*07:02; ABI1; K445N; 1
APNNYIEKV

SEQ ID NO: 11093 - protein, 9 aa, Homo sapiens
  Table A; HLA-B*13:02; ABI1; K445N; 0
APNNYIEKV

SEQ ID NO: 11094 - protein, 9 aa, Homo sapiens
  Table A; HLA-B*35:03; ABI1; K445N; 0
APNNYIEKV

SEQ ID NO: 11095 - protein, 9 aa, Homo sapiens
  Table A; HLA-B*51:01; ABI1; K445N; 1
APNNYIEKV

SEQ ID NO: 11096 - protein, 9 aa, Homo sapiens
  Table A; HLA-B*54:01; ABI1; K445N; 0
APNNYIEKV

SEQ ID NO: 11097 - protein, 9 aa, Homo sapiens
  Table A; HLA-B*55:01; ABI1; K445N; 0
APNNYIEKV

SEQ ID NO: 11098 - protein, 9 aa, Homo sapiens
  Table A; HLA-B*55:02; ABI1; K445N; 0
APNNYIEKV

SEQ ID NO: 11099 - protein, 9 aa, Homo sapiens
  Table A; HLA-B*56:01; ABI1; K445N; 0
APNNYIEKV

SEQ ID NO: 11100 - protein, 10 aa, Homo sapiens
  Table A; HLA-B*54:01; ABI1; K445N; 0
APNNYIEKVV

SEQ ID NO: 11101 - protein, 10 aa, Homo sapiens
  Table A; HLA-B*55:02; ABI1; K445N; 0
APNNYIEKVV

SEQ ID NO: 11102 - protein, 10 aa, Homo sapiens
  Table A; HLA-B*56:01; ABI1; K445N; 0
APNNYIEKVV

SEQ ID NO: 11103 - protein, 11 aa, Homo sapiens
  Table A; HLA-B*54:01; ABI1; K445N; 0
APNNYIEKVVA

SEQ ID NO: 11104 - protein, 11 aa, Homo sapiens
  Table A; HLA-B*55:01; ABI1; K445N; 0
APNNYIEKVVA

SEQ ID NO: 11105 - protein, 11 aa, Homo sapiens
  Table A; HLA-B*55:02; ABI1; K445N; 0
APNNYIEKVVA

SEQ ID NO: 11106 - protein, 11 aa, Homo sapiens
  Table A; HLA-B*56:01; ABI1; K445N; 0
APNNYIEKVVA

SEQ ID NO: 11107 - protein, 10 aa, Homo sapiens
  Table A; HLA-B*07:02; ERBB4; R711C; 1
APNQAQLCIL

SEQ ID NO: 11108 - protein, 9 aa, Homo sapiens
  Table A; HLA-B*07:02; CDKN2A; P48L; 1
APNSYGRRL

SEQ ID NO: 11109 - protein, 10 aa, Homo sapiens
  Table A; HLA-B*07:02; CDKN2A; P48L; 1
APNSYGRRLI

SEQ ID NO: 11110 - protein, 9 aa, Homo sapiens
  Table A; HLA-B*51:01; TP53; I195N; 0
APPQHLNRV

SEQ ID NO: 11111 - protein, 9 aa, Homo sapiens
  Table A; HLA-B*55:01; TP53; I195N; 0
APPQHLNRV

SEQ ID NO: 11112 - protein, 9 aa, Homo sapiens
  Table A; HLA-B*07:02; TP53; I195T; 1
APPQHLTRV

SEQ ID NO: 11113 - protein, 9 aa, Homo sapiens
  Table A; HLA-B*51:01; TP53; I195T; 1
APPQHLTRV

SEQ ID NO: 11114 - protein, 9 aa, Homo sapiens
  Table A; HLA-A*02:07; TP53; H193L; 0
APPQLLIRV

SEQ ID NO: 11115 - protein, 9 aa, Homo sapiens
  Table A; HLA-A*68:02; TP53; H193L; 0
APPQLLIRV

SEQ ID NO: 11116 - protein, 9 aa, Homo sapiens
  Table A; HLA-B*39:06; TP53; H193L; 0
APPQLLIRV

SEQ ID NO: 11117 - protein, 9 aa, Homo sapiens
  Table A; HLA-B*51:01; TP53; H193L; 0
APPQLLIRV

SEQ ID NO: 11118 - protein, 9 aa, Homo sapiens
  Table A; HLA-B*54:01; TP53; H193L; 0
APPQLLIRV

SEQ ID NO: 11119 - protein, 9 aa, Homo sapiens
  Table A; HLA-B*55:02; TP53; H193L; 0
APPQLLIRV

SEQ ID NO: 11120 - protein, 9 aa, Homo sapiens
  Table A; HLA-B*56:01; TP53; H193L; 0
APPQLLIRV

SEQ ID NO: 11121 - protein, 9 aa, Homo sapiens
  Table A; HLA-A*02:07; TP53; H193Y; 0
APPQYLIRV

SEQ ID NO: 11122 - protein, 9 aa, Homo sapiens
  Table A; HLA-B*51:01; TP53; H193Y; 0
APPQYLIRV

SEQ ID NO: 11123 - protein, 9 aa, Homo sapiens
  Table A; HLA-B*54:01; TP53; H193Y; 0
APPQYLIRV

SEQ ID NO: 11124 - protein, 9 aa, Homo sapiens
  Table A; HLA-B*55:02; TP53; H193Y; 0
APPQYLIRV

SEQ ID NO: 11125 - protein, 9 aa, Homo sapiens
  Table A; HLA-B*56:01; TP53; H193Y; 0
APPQYLIRV

SEQ ID NO: 11126 - protein, 9 aa, Homo sapiens
  Table A; HLA-A*03:01; PIK3CA; H1047Q; 1
AQHGGWTTK

SEQ ID NO: 11127 - protein, 9 aa, Homo sapiens
  Table A; HLA-A*03:02; PIK3CA; H1047Q; 0
AQHGGWTTK

SEQ ID NO: 11128 - protein, 9 aa, Homo sapiens
  Table A; HLA-A*11:01; PIK3CA; H1047Q; 0
AQHGGWTTK

SEQ ID NO: 11129 - protein, 9 aa, Homo sapiens
  Table A; HLA-A*30:01; PIK3CA; H1047Q; 0
AQHGGWTTK

SEQ ID NO: 11130 - protein, 9 aa, Homo sapiens
  Table A; HLA-A*03:01; KDR; R1032Q; 1
AQNILLSEK

SEQ ID NO: 11131 - protein, 9 aa, Homo sapiens
  Table A; HLA-A*03:02; KDR; R1032Q; 0
AQNILLSEK

SEQ ID NO: 11132 - protein, 9 aa, Homo sapiens
  Table A; HLA-A*11:01; KDR; R1032Q; 1
AQNILLSEK

SEQ ID NO: 11133 - protein, 8 aa, Homo sapiens
  Table A; HLA-B*15:01; PTEN; D92E; 0
AQYPFEEH

SEQ ID NO: 11134 - protein, 8 aa, Homo sapiens
  Table A; HLA-B*48:01; PTEN; D92E; 0
AQYPFEEH

SEQ ID NO: 11135 - protein, 9 aa, Homo sapiens
  Table A; HLA-B*07:02; KRAS; G12R; 1
ARGVGKSAL

SEQ ID NO: 11136 - protein, 9 aa, Homo sapiens
  Table A; HLA-B*14:01; KRAS; G12R; 1
ARGVGKSAL

SEQ ID NO: 11137 - protein, 9 aa, Homo sapiens
  Table A; HLA-B*39:01; KRAS; G12R; 1
ARGVGKSAL

SEQ ID NO: 11138 - protein, 9 aa, Homo sapiens
  Table A; HLA-B*27:05; PIK3CA; H1047R; 1
ARHGGWTTK

SEQ ID NO: 11139 - protein, 8 aa, Homo sapiens
  Table A; HLA-B*39:06; CDKN2A; D108Y; 0
ARLDVRYA

SEQ ID NO: 11140 - protein, 9 aa, Homo sapiens
  Table A; HLA-B*27:05; CDKN2A; D108Y; 0
ARLDVRYAW

SEQ ID NO: 11141 - protein, 9 aa, Homo sapiens
  Table A; HLA-B*44:03; CDKN2A; D108Y; 1
ARLDVRYAW

SEQ ID NO: 11142 - protein, 9 aa, Homo sapiens
  Table A; HLA-B*57:01; CDKN2A; D108Y; 0
ARLDVRYAW

SEQ ID NO: 11143 - protein, 9 aa, Homo sapiens
  Table A; HLA-B*39:06; BIRC6; G271R; 0
ARPELRVGP

SEQ ID NO: 11144 - protein, 9 aa, Homo sapiens
  Table A; HLA-B*07:02; KRAS; G12S; 1
ASGVGKSAL

SEQ ID NO: 11145 - protein, 9 aa, Homo sapiens
  Table A; HLA-C*01:02; KRAS; G12S; 0
ASGVGKSAL

SEQ ID NO: 11146 - protein, 9 aa, Homo sapiens
  Table A; HLA-A*03:01; MAX; R60Q; 1
ASQAQILDK

SEQ ID NO: 11147 - protein, 9 aa, Homo sapiens
  Table A; HLA-A*03:02; MAX; R60Q; 0
ASQAQILDK

SEQ ID NO: 11148 - protein, 9 aa, Homo sapiens
  Table A; HLA-A*11:01; MAX; R60Q; 1
ASQAQILDK

SEQ ID NO: 11149 - protein, 8 aa, Homo sapiens
  Table A; HLA-A*11:01; PCBP1; L100Q; 1
ASRPPVTQ

SEQ ID NO: 11150 - protein, 8 aa, Homo sapiens
  Table A; HLA-A*30:01; PCBP1; L100Q; 0
ASRPPVTQ

SEQ ID NO: 11151 - protein, 8 aa, Homo sapiens
  Table A; HLA-A*31:01; PCBP1; L100Q; 0
ASRPPVTQ

SEQ ID NO: 11152 - protein, 8 aa, Homo sapiens
  Table A; HLA-B*07:02; PCBP1; L100Q; 1
ASRPPVTQ

SEQ ID NO: 11153 - protein, 8 aa, Homo sapiens
  Table A; HLA-B*08:01; PCBP1; L100Q; 1
ASRPPVTQ

SEQ ID NO: 11154 - protein, 8 aa, Homo sapiens
  Table A; HLA-B*15:01; PCBP1; L100Q; 1
ASRPPVTQ

SEQ ID NO: 11155 - protein, 8 aa, Homo sapiens
  Table A; HLA-B*57:01; PCBP1; L100Q; 0
ASRPPVTQ

SEQ ID NO: 11156 - protein, 8 aa, Homo sapiens
  Table A; HLA-B*58:01; PCBP1; L100Q; 0
ASRPPVTQ

SEQ ID NO: 11157 - protein, 9 aa, Homo sapiens
  Table A; HLA-A*02:03; PCBP1; L100Q; 0
ASRPPVTQR

SEQ ID NO: 11158 - protein, 9 aa, Homo sapiens
  Table A; HLA-A*03:01; PCBP1; L100Q; 1
ASRPPVTQR

SEQ ID NO: 11159 - protein, 9 aa, Homo sapiens
  Table A; HLA-A*03:02; PCBP1; L100Q; 0
ASRPPVTQR

SEQ ID NO: 11160 - protein, 9 aa, Homo sapiens
  Table A; HLA-A*11:01; PCBP1; L100Q; 1
ASRPPVTQR

SEQ ID NO: 11161 - protein, 9 aa, Homo sapiens
  Table A; HLA-A*26:03; PCBP1; L100Q; 0
ASRPPVTQR

SEQ ID NO: 11162 - protein, 9 aa, Homo sapiens
  Table A; HLA-A*30:01; PCBP1; L100Q; 0
ASRPPVTQR

SEQ ID NO: 11163 - protein, 9 aa, Homo sapiens
  Table A; HLA-A*31:01; PCBP1; L100Q; 0
ASRPPVTQR

SEQ ID NO: 11164 - protein, 9 aa, Homo sapiens
  Table A; HLA-A*33:01; PCBP1; L100Q; 0
ASRPPVTQR

SEQ ID NO: 11165 - protein, 9 aa, Homo sapiens
  Table A; HLA-A*33:03; PCBP1; L100Q; 0
ASRPPVTQR

SEQ ID NO: 11166 - protein, 9 aa, Homo sapiens
  Table A; HLA-A*68:01; PCBP1; L100Q; 0
ASRPPVTQR

SEQ ID NO: 11167 - protein, 9 aa, Homo sapiens
  Table A; HLA-B*07:02; PCBP1; L100Q; 1
ASRPPVTQR

SEQ ID NO: 11168 - protein, 9 aa, Homo sapiens
  Table A; HLA-B*15:01; PCBP1; L100Q; 1
ASRPPVTQR

SEQ ID NO: 11169 - protein, 9 aa, Homo sapiens
  Table A; HLA-B*27:05; PCBP1; L100Q; 0
ASRPPVTQR

SEQ ID NO: 11170 - protein, 9 aa, Homo sapiens
  Table A; HLA-B*50:01; PCBP1; L100Q; 0
ASRPPVTQR

SEQ ID NO: 11171 - protein, 9 aa, Homo sapiens
  Table A; HLA-B*54:01; PCBP1; L100Q; 0
ASRPPVTQR

SEQ ID NO: 11172 - protein, 9 aa, Homo sapiens
  Table A; HLA-B*55:01; PCBP1; L100Q; 0
ASRPPVTQR

SEQ ID NO: 11173 - protein, 9 aa, Homo sapiens
  Table A; HLA-B*57:01; PCBP1; L100Q; 0
ASRPPVTQR

SEQ ID NO: 11174 - protein, 9 aa, Homo sapiens
  Table A; HLA-B*58:01; PCBP1; L100Q; 0
ASRPPVTQR

SEQ ID NO: 11175 - protein, 9 aa, Homo sapiens
  Table A; HLA-C*03:02; PCBP1; L100Q; 0
ASRPPVTQR

SEQ ID NO: 11176 - protein, 10 aa, Homo sapiens
  Table A; HLA-A*02:03; PCBP1; L100Q; 0
ASRPPVTQRL

SEQ ID NO: 11177 - protein, 10 aa, Homo sapiens
  Table A; HLA-A*02:08; PCBP1; L100Q; 0
ASRPPVTQRL

SEQ ID NO: 11178 - protein, 10 aa, Homo sapiens
  Table A; HLA-A*03:01; PCBP1; L100Q; 1
ASRPPVTQRL

SEQ ID NO: 11179 - protein, 10 aa, Homo sapiens
  Table A; HLA-A*11:01; PCBP1; L100Q; 1
ASRPPVTQRL

SEQ ID NO: 11180 - protein, 10 aa, Homo sapiens
  Table A; HLA-A*30:01; PCBP1; L100Q; 0
ASRPPVTQRL

SEQ ID NO: 11181 - protein, 10 aa, Homo sapiens
  Table A; HLA-A*31:01; PCBP1; L100Q; 0
ASRPPVTQRL

SEQ ID NO: 11182 - protein, 10 aa, Homo sapiens
  Table A; HLA-B*07:02; PCBP1; L100Q; 1
ASRPPVTQRL

SEQ ID NO: 11183 - protein, 10 aa, Homo sapiens
  Table A; HLA-B*15:01; PCBP1; L100Q; 1
ASRPPVTQRL

SEQ ID NO: 11184 - protein, 10 aa, Homo sapiens
  Table A; HLA-B*40:02; PCBP1; L100Q; 0
ASRPPVTQRL

SEQ ID NO: 11185 - protein, 10 aa, Homo sapiens
  Table A; HLA-B*44:05; PCBP1; L100Q; 0
ASRPPVTQRL

SEQ ID NO: 11186 - protein, 10 aa, Homo sapiens
  Table A; HLA-B*57:01; PCBP1; L100Q; 0
ASRPPVTQRL

SEQ ID NO: 11187 - protein, 10 aa, Homo sapiens
  Table A; HLA-B*58:01; PCBP1; L100Q; 0
ASRPPVTQRL

SEQ ID NO: 11188 - protein, 10 aa, Homo sapiens
  Table A; HLA-C*15:02; PCBP1; L100Q; 0
ASRPPVTQRL

SEQ ID NO: 11189 - protein, 11 aa, Homo sapiens
  Table A; HLA-A*02:03; PCBP1; L100Q; 0
ASRPPVTQRLV

SEQ ID NO: 11190 - protein, 8 aa, Homo sapiens
  Table A; HLA-A*02:03; CTCF; K365T; 0
ASVEVSTL

SEQ ID NO: 11191 - protein, 8 aa, Homo sapiens
  Table A; HLA-A*02:05; CTCF; K365T; 0
ASVEVSTL

SEQ ID NO: 11192 - protein, 8 aa, Homo sapiens
  Table A; HLA-A*02:06; CTCF; K365T; 0
ASVEVSTL

SEQ ID NO: 11193 - protein, 8 aa, Homo sapiens
  Table A; HLA-A*23:01; CTCF; K365T; 0
ASVEVSTL

SEQ ID NO: 11194 - protein, 8 aa, Homo sapiens
  Table A; HLA-A*30:01; CTCF; K365T; 0
ASVEVSTL

SEQ ID NO: 11195 - protein, 8 aa, Homo sapiens
  Table A; HLA-B*07:02; CTCF; K365T; 1
ASVEVSTL

SEQ ID NO: 11196 - protein, 8 aa, Homo sapiens
  Table A; HLA-B*13:02; CTCF; K365T; 0
ASVEVSTL

SEQ ID NO: 11197 - protein, 8 aa, Homo sapiens
  Table A; HLA-B*14:02; CTCF; K365T; 0
ASVEVSTL

SEQ ID NO: 11198 - protein, 8 aa, Homo sapiens
  Table A; HLA-B*15:01; CTCF; K365T; 1
ASVEVSTL

SEQ ID NO: 11199 - protein, 8 aa, Homo sapiens
  Table A; HLA-B*15:03; CTCF; K365T; 0
ASVEVSTL

SEQ ID NO: 11200 - protein, 8 aa, Homo sapiens
  Table A; HLA-B*40:01; CTCF; K365T; 1
ASVEVSTL

SEQ ID NO: 11201 - protein, 8 aa, Homo sapiens
  Table A; HLA-B*40:02; CTCF; K365T; 0
ASVEVSTL

SEQ ID NO: 11202 - protein, 8 aa, Homo sapiens
  Table A; HLA-B*41:02; CTCF; K365T; 0
ASVEVSTL

SEQ ID NO: 11203 - protein, 8 aa, Homo sapiens
  Table A; HLA-B*44:05; CTCF; K365T; 0
ASVEVSTL

SEQ ID NO: 11204 - protein, 8 aa, Homo sapiens
  Table A; HLA-B*46:01; CTCF; K365T; 0
ASVEVSTL

SEQ ID NO: 11205 - protein, 8 aa, Homo sapiens
  Table A; HLA-B*48:01; CTCF; K365T; 0
ASVEVSTL

SEQ ID NO: 11206 - protein, 8 aa, Homo sapiens
  Table A; HLA-B*57:01; CTCF; K365T; 0
ASVEVSTL

SEQ ID NO: 11207 - protein, 8 aa, Homo sapiens
  Table A; HLA-B*58:01; CTCF; K365T; 0
ASVEVSTL

SEQ ID NO: 11208 - protein, 8 aa, Homo sapiens
  Table A; HLA-C*03:02; CTCF; K365T; 0
ASVEVSTL

SEQ ID NO: 11209 - protein, 8 aa, Homo sapiens
  Table A; HLA-C*03:03; CTCF; K365T; 1
ASVEVSTL

SEQ ID NO: 11210 - protein, 8 aa, Homo sapiens
  Table A; HLA-C*03:04; CTCF; K365T; 1
ASVEVSTL

SEQ ID NO: 11211 - protein, 8 aa, Homo sapiens
  Table A; HLA-C*08:01; CTCF; K365T; 0
ASVEVSTL

SEQ ID NO: 11212 - protein, 8 aa, Homo sapiens
  Table A; HLA-C*08:03; CTCF; K365T; 0
ASVEVSTL

SEQ ID NO: 11213 - protein, 8 aa, Homo sapiens
  Table A; HLA-C*12:03; CTCF; K365T; 1
ASVEVSTL

SEQ ID NO: 11214 - protein, 8 aa, Homo sapiens
  Table A; HLA-C*15:02; CTCF; K365T; 0
ASVEVSTL

SEQ ID NO: 11215 - protein, 9 aa, Homo sapiens
  Table A; HLA-A*03:01; CTCF; K365T; 1
ASVEVSTLK

SEQ ID NO: 11216 - protein, 9 aa, Homo sapiens
  Table A; HLA-A*03:02; CTCF; K365T; 0
ASVEVSTLK

SEQ ID NO: 11217 - protein, 9 aa, Homo sapiens
  Table A; HLA-A*11:01; CTCF; K365T; 1
ASVEVSTLK

SEQ ID NO: 11218 - protein, 9 aa, Homo sapiens
  Table A; HLA-A*26:03; CTCF; K365T; 0
ASVEVSTLK

SEQ ID NO: 11219 - protein, 9 aa, Homo sapiens
  Table A; HLA-A*30:01; CTCF; K365T; 0
ASVEVSTLK

SEQ ID NO: 11220 - protein, 9 aa, Homo sapiens
  Table A; HLA-A*31:01; CTCF; K365T; 0
ASVEVSTLK

SEQ ID NO: 11221 - protein, 9 aa, Homo sapiens
  Table A; HLA-A*33:03; CTCF; K365T; 0
ASVEVSTLK

SEQ ID NO: 11222 - protein, 9 aa, Homo sapiens
  Table A; HLA-A*68:01; CTCF; K365T; 0
ASVEVSTLK

SEQ ID NO: 11223 - protein, 9 aa, Homo sapiens
  Table A; HLA-A*68:02; CTCF; K365T; 0
ASVEVSTLK

SEQ ID NO: 11224 - protein, 9 aa, Homo sapiens
  Table A; HLA-B*13:02; CTCF; K365T; 0
ASVEVSTLK

SEQ ID NO: 11225 - protein, 9 aa, Homo sapiens
  Table A; HLA-B*27:02; CTCF; K365T; 0
ASVEVSTLK

SEQ ID NO: 11226 - protein, 9 aa, Homo sapiens
  Table A; HLA-B*27:05; CTCF; K365T; 0
ASVEVSTLK

SEQ ID NO: 11227 - protein, 9 aa, Homo sapiens
  Table A; HLA-B*57:01; CTCF; K365T; 0
ASVEVSTLK

SEQ ID NO: 11228 - protein, 9 aa, Homo sapiens
  Table A; HLA-B*58:01; CTCF; K365T; 0
ASVEVSTLK

SEQ ID NO: 11229 - protein, 9 aa, Homo sapiens
  Table A; HLA-C*08:03; CTCF; K365T; 0
ASVEVSTLK

SEQ ID NO: 11230 - protein, 10 aa, Homo sapiens
  Table A; HLA-A*11:01; CTCF; K365T; 1
ASVEVSTLKR

SEQ ID NO: 11231 - protein, 10 aa, Homo sapiens
  Table A; HLA-A*26:03; CTCF; K365T; 0
ASVEVSTLKR

SEQ ID NO: 11232 - protein, 10 aa, Homo sapiens
  Table A; HLA-A*68:01; CTCF; K365T; 0
ASVEVSTLKR

SEQ ID NO: 11233 - protein, 10 aa, Homo sapiens
  Table A; HLA-B*57:01; CTCF; K365T; 0
ASVEVSTLKR

SEQ ID NO: 11234 - protein, 9 aa, Homo sapiens
  Table A; HLA-A*02:01; CTNNB1; T41A; 1
ATAPSLSGK

SEQ ID NO: 11235 - protein, 9 aa, Homo sapiens
  Table A; HLA-A*02:03; CTNNB1; T41A; 0
ATAPSLSGK

SEQ ID NO: 11236 - protein, 9 aa, Homo sapiens
  Table A; HLA-A*02:08; CTNNB1; T41A; 0
ATAPSLSGK

SEQ ID NO: 11237 - protein, 9 aa, Homo sapiens
  Table A; HLA-A*03:01; CTNNB1; T41A; 1
ATAPSLSGK

SEQ ID NO: 11238 - protein, 9 aa, Homo sapiens
  Table A; HLA-A*03:02; CTNNB1; T41A; 0
ATAPSLSGK

SEQ ID NO: 11239 - protein, 9 aa, Homo sapiens
  Table A; HLA-A*11:01; CTNNB1; T41A; 1
ATAPSLSGK

SEQ ID NO: 11240 - protein, 9 aa, Homo sapiens
  Table A; HLA-A*26:01; CTNNB1; T41A; 1
ATAPSLSGK

SEQ ID NO: 11241 - protein, 9 aa, Homo sapiens
  Table A; HLA-A*26:03; CTNNB1; T41A; 0
ATAPSLSGK

SEQ ID NO: 11242 - protein, 9 aa, Homo sapiens
  Table A; HLA-A*30:01; CTNNB1; T41A; 1
ATAPSLSGK

SEQ ID NO: 11243 - protein, 9 aa, Homo sapiens
  Table A; HLA-A*31:01; CTNNB1; T41A; 1
ATAPSLSGK

SEQ ID NO: 11244 - protein, 9 aa, Homo sapiens
  Table A; HLA-A*33:03; CTNNB1; T41A; 0
ATAPSLSGK

SEQ ID NO: 11245 - protein, 9 aa, Homo sapiens
  Table A; HLA-A*68:01; CTNNB1; T41A; 1
ATAPSLSGK

SEQ ID NO: 11246 - protein, 9 aa, Homo sapiens
  Table A; HLA-A*68:02; CTNNB1; T41A; 0
ATAPSLSGK

SEQ ID NO: 11247 - protein, 9 aa, Homo sapiens
  Table A; HLA-B*27:02; CTNNB1; T41A; 0
ATAPSLSGK

SEQ ID NO: 11248 - protein, 9 aa, Homo sapiens
  Table A; HLA-B*27:05; CTNNB1; T41A; 1
ATAPSLSGK

SEQ ID NO: 11249 - protein, 9 aa, Homo sapiens
  Table A; HLA-B*57:01; CTNNB1; T41A; 1
ATAPSLSGK

SEQ ID NO: 11250 - protein, 9 aa, Homo sapiens
  Table A; HLA-B*58:01; CTNNB1; T41A; 0
ATAPSLSGK

SEQ ID NO: 11251 - protein, 10 aa, Homo sapiens
  Table A; HLA-A*02:05; CTNNB1; T41A; 0
ATAPSLSGKG

SEQ ID NO: 11252 - protein, 10 aa, Homo sapiens
  Table A; HLA-A*03:01; CTNNB1; T41A; 1
ATAPSLSGKG

SEQ ID NO: 11253 - protein, 10 aa, Homo sapiens
  Table A; HLA-A*11:01; CTNNB1; T41A; 1
ATAPSLSGKG

SEQ ID NO: 11254 - protein, 10 aa, Homo sapiens
  Table A; HLA-A*26:01; CTNNB1; T41A; 1
ATAPSLSGKG

SEQ ID NO: 11255 - protein, 10 aa, Homo sapiens
  Table A; HLA-A*29:02; CTNNB1; T41A; 1
ATAPSLSGKG

SEQ ID NO: 11256 - protein, 10 aa, Homo sapiens
  Table A; HLA-A*68:02; CTNNB1; T41A; 0
ATAPSLSGKG

SEQ ID NO: 11257 - protein, 8 aa, Homo sapiens
  Table A; HLA-A*02:01; CTNNB1; T41A; 1
ATATAPSL

SEQ ID NO: 11258 - protein, 8 aa, Homo sapiens
  Table A; HLA-A*02:03; CTNNB1; T41A; 0
ATATAPSL

SEQ ID NO: 11259 - protein, 8 aa, Homo sapiens
  Table A; HLA-A*02:04; CTNNB1; T41A; 0
ATATAPSL

SEQ ID NO: 11260 - protein, 8 aa, Homo sapiens
  Table A; HLA-A*02:05; CTNNB1; T41A; 0
ATATAPSL

SEQ ID NO: 11261 - protein, 8 aa, Homo sapiens
  Table A; HLA-A*02:06; CTNNB1; T41A; 0
ATATAPSL

SEQ ID NO: 11262 - protein, 8 aa, Homo sapiens
  Table A; HLA-A*03:02; CTNNB1; T41A; 0
ATATAPSL

SEQ ID NO: 11263 - protein, 8 aa, Homo sapiens
  Table A; HLA-A*11:01; CTNNB1; T41A; 1
ATATAPSL

SEQ ID NO: 11264 - protein, 8 aa, Homo sapiens
  Table A; HLA-A*30:01; CTNNB1; T41A; 1
ATATAPSL

SEQ ID NO: 11265 - protein, 8 aa, Homo sapiens
  Table A; HLA-B*07:02; CTNNB1; T41A; 1
ATATAPSL

SEQ ID NO: 11266 - protein, 8 aa, Homo sapiens
  Table A; HLA-B*08:01; CTNNB1; T41A; 1
ATATAPSL

SEQ ID NO: 11267 - protein, 8 aa, Homo sapiens
  Table A; HLA-B*13:02; CTNNB1; T41A; 1
ATATAPSL

SEQ ID NO: 11268 - protein, 8 aa, Homo sapiens
  Table A; HLA-B*15:01; CTNNB1; T41A; 1
ATATAPSL

SEQ ID NO: 11269 - protein, 8 aa, Homo sapiens
  Table A; HLA-B*15:02; CTNNB1; T41A; 0
ATATAPSL

SEQ ID NO: 11270 - protein, 8 aa, Homo sapiens
  Table A; HLA-B*15:10; CTNNB1; T41A; 0
ATATAPSL

SEQ ID NO: 11271 - protein, 8 aa, Homo sapiens
  Table A; HLA-B*27:05; CTNNB1; T41A; 1
ATATAPSL

SEQ ID NO: 11272 - protein, 8 aa, Homo sapiens
  Table A; HLA-B*35:03; CTNNB1; T41A; 1
ATATAPSL

SEQ ID NO: 11273 - protein, 8 aa, Homo sapiens
  Table A; HLA-B*37:01; CTNNB1; T41A; 1
ATATAPSL

SEQ ID NO: 11274 - protein, 8 aa, Homo sapiens
  Table A; HLA-B*38:01; CTNNB1; T41A; 1
ATATAPSL

SEQ ID NO: 11275 - protein, 8 aa, Homo sapiens
  Table A; HLA-B*39:01; CTNNB1; T41A; 1
ATATAPSL

SEQ ID NO: 11276 - protein, 8 aa, Homo sapiens
  Table A; HLA-B*40:01; CTNNB1; T41A; 1
ATATAPSL

SEQ ID NO: 11277 - protein, 8 aa, Homo sapiens
  Table A; HLA-B*40:02; CTNNB1; T41A; 1
ATATAPSL

SEQ ID NO: 11278 - protein, 8 aa, Homo sapiens
  Table A; HLA-B*41:02; CTNNB1; T41A; 0
ATATAPSL

SEQ ID NO: 11279 - protein, 8 aa, Homo sapiens
  Table A; HLA-B*44:05; CTNNB1; T41A; 0
ATATAPSL

SEQ ID NO: 11280 - protein, 8 aa, Homo sapiens
  Table A; HLA-B*46:01; CTNNB1; T41A; 0
ATATAPSL

SEQ ID NO: 11281 - protein, 8 aa, Homo sapiens
  Table A; HLA-B*48:01; CTNNB1; T41A; 0
ATATAPSL

SEQ ID NO: 11282 - protein, 8 aa, Homo sapiens
  Table A; HLA-B*57:01; CTNNB1; T41A; 1
ATATAPSL

SEQ ID NO: 11283 - protein, 8 aa, Homo sapiens
  Table A; HLA-B*58:01; CTNNB1; T41A; 0
ATATAPSL

SEQ ID NO: 11284 - protein, 8 aa, Homo sapiens
  Table A; HLA-C*01:02; CTNNB1; T41A; 1
ATATAPSL

SEQ ID NO: 11285 - protein, 8 aa, Homo sapiens
  Table A; HLA-C*03:03; CTNNB1; T41A; 1
ATATAPSL

SEQ ID NO: 11286 - protein, 8 aa, Homo sapiens
  Table A; HLA-C*03:04; CTNNB1; T41A; 1
ATATAPSL

SEQ ID NO: 11287 - protein, 8 aa, Homo sapiens
  Table A; HLA-C*08:01; CTNNB1; T41A; 0
ATATAPSL

SEQ ID NO: 11288 - protein, 8 aa, Homo sapiens
  Table A; HLA-C*08:03; CTNNB1; T41A; 0
ATATAPSL

SEQ ID NO: 11289 - protein, 8 aa, Homo sapiens
  Table A; HLA-C*14:02; CTNNB1; T41A; 1
ATATAPSL

SEQ ID NO: 11290 - protein, 8 aa, Homo sapiens
  Table A; HLA-C*14:03; CTNNB1; T41A; 0
ATATAPSL

SEQ ID NO: 11291 - protein, 8 aa, Homo sapiens
  Table A; HLA-C*15:02; CTNNB1; T41A; 1
ATATAPSL

SEQ ID NO: 11292 - protein, 8 aa, Homo sapiens
  Table A; HLA-C*16:01; CTNNB1; T41A; 1
ATATAPSL

SEQ ID NO: 11293 - protein, 8 aa, Homo sapiens
  Table A; HLA-C*16:02; CTNNB1; T41A; 0
ATATAPSL

SEQ ID NO: 11294 - protein, 8 aa, Homo sapiens
  Table A; HLA-C*17:01; CTNNB1; T41A; 0
ATATAPSL

SEQ ID NO: 11295 - protein, 9 aa, Homo sapiens
  Table A; HLA-A*01:01; CTNNB1; T41A; 1
ATATAPSLS

SEQ ID NO: 11296 - protein, 9 aa, Homo sapiens
  Table A; HLA-A*03:01; CTNNB1; T41A; 1
ATATAPSLS

SEQ ID NO: 11297 - protein, 9 aa, Homo sapiens
  Table A; HLA-A*03:02; CTNNB1; T41A; 0
ATATAPSLS

SEQ ID NO: 11298 - protein, 9 aa, Homo sapiens
  Table A; HLA-A*11:01; CTNNB1; T41A; 1
ATATAPSLS

SEQ ID NO: 11299 - protein, 10 aa, Homo sapiens
  Table A; HLA-A*01:01; CTNNB1; T41A; 1
ATATAPSLSG

SEQ ID NO: 11300 - protein, 10 aa, Homo sapiens
  Table A; HLA-A*03:01; CTNNB1; T41A; 1
ATATAPSLSG

SEQ ID NO: 11301 - protein, 10 aa, Homo sapiens
  Table A; HLA-A*11:01; CTNNB1; T41A; 1
ATATAPSLSG

SEQ ID NO: 11302 - protein, 10 aa, Homo sapiens
  Table A; HLA-A*30:01; CTNNB1; T41A; 1
ATATAPSLSG

SEQ ID NO: 11303 - protein, 10 aa, Homo sapiens
  Table A; HLA-A*68:01; CTNNB1; T41A; 1
ATATAPSLSG

SEQ ID NO: 11304 - protein, 10 aa, Homo sapiens
  Table A; HLA-B*08:01; CTNNB1; T41A; 1
ATATAPSLSG

SEQ ID NO: 11305 - protein, 10 aa, Homo sapiens
  Table A; HLA-B*58:01; CTNNB1; T41A; 0
ATATAPSLSG

SEQ ID NO: 11306 - protein, 11 aa, Homo sapiens
  Table A; HLA-A*03:01; CTNNB1; T41A; 1
ATATAPSLSGK

SEQ ID NO: 11307 - protein, 11 aa, Homo sapiens
  Table A; HLA-A*03:02; CTNNB1; T41A; 0
ATATAPSLSGK

SEQ ID NO: 11308 - protein, 11 aa, Homo sapiens
  Table A; HLA-A*11:01; CTNNB1; T41A; 1
ATATAPSLSGK

SEQ ID NO: 11309 - protein, 11 aa, Homo sapiens
  Table A; HLA-A*26:03; CTNNB1; T41A; 0
ATATAPSLSGK

SEQ ID NO: 11310 - protein, 11 aa, Homo sapiens
  Table A; HLA-A*30:01; CTNNB1; T41A; 1
ATATAPSLSGK

SEQ ID NO: 11311 - protein, 11 aa, Homo sapiens
  Table A; HLA-A*31:01; CTNNB1; T41A; 1
ATATAPSLSGK

SEQ ID NO: 11312 - protein, 11 aa, Homo sapiens
  Table A; HLA-A*33:03; CTNNB1; T41A; 0
ATATAPSLSGK

SEQ ID NO: 11313 - protein, 11 aa, Homo sapiens
  Table A; HLA-A*68:01; CTNNB1; T41A; 1
ATATAPSLSGK

SEQ ID NO: 11314 - protein, 11 aa, Homo sapiens
  Table A; HLA-A*68:02; CTNNB1; T41A; 0
ATATAPSLSGK

SEQ ID NO: 11315 - protein, 11 aa, Homo sapiens
  Table A; HLA-B*27:02; CTNNB1; T41A; 0
ATATAPSLSGK

SEQ ID NO: 11316 - protein, 11 aa, Homo sapiens
  Table A; HLA-B*57:01; CTNNB1; T41A; 1
ATATAPSLSGK

SEQ ID NO: 11317 - protein, 8 aa, Homo sapiens
  Table A; HLA-A*02:01; CTNNB1; T41I; 1
ATITAPSL

SEQ ID NO: 11318 - protein, 8 aa, Homo sapiens
  Table A; HLA-A*02:03; CTNNB1; T41I; 0
ATITAPSL

SEQ ID NO: 11319 - protein, 8 aa, Homo sapiens
  Table A; HLA-A*02:04; CTNNB1; T41I; 0
ATITAPSL

SEQ ID NO: 11320 - protein, 8 aa, Homo sapiens
  Table A; HLA-A*02:05; CTNNB1; T41I; 0
ATITAPSL

SEQ ID NO: 11321 - protein, 8 aa, Homo sapiens
  Table A; HLA-A*02:06; CTNNB1; T41I; 0
ATITAPSL

SEQ ID NO: 11322 - protein, 8 aa, Homo sapiens
  Table A; HLA-A*02:07; CTNNB1; T41I; 0
ATITAPSL

SEQ ID NO: 11323 - protein, 8 aa, Homo sapiens
  Table A; HLA-A*02:08; CTNNB1; T41I; 0
ATITAPSL

SEQ ID NO: 11324 - protein, 8 aa, Homo sapiens
  Table A; HLA-A*03:01; CTNNB1; T41I; 1
ATITAPSL

SEQ ID NO: 11325 - protein, 8 aa, Homo sapiens
  Table A; HLA-A*03:02; CTNNB1; T41I; 0
ATITAPSL

SEQ ID NO: 11326 - protein, 8 aa, Homo sapiens
  Table A; HLA-A*11:01; CTNNB1; T41I; 1
ATITAPSL

SEQ ID NO: 11327 - protein, 8 aa, Homo sapiens
  Table A; HLA-A*23:01; CTNNB1; T41I; 0
ATITAPSL

SEQ ID NO: 11328 - protein, 8 aa, Homo sapiens
  Table A; HLA-A*24:02; CTNNB1; T41I; 1
ATITAPSL

SEQ ID NO: 11329 - protein, 8 aa, Homo sapiens
  Table A; HLA-A*25:01; CTNNB1; T41I; 0
ATITAPSL

SEQ ID NO: 11330 - protein, 8 aa, Homo sapiens
  Table A; HLA-A*26:01; CTNNB1; T41I; 0
ATITAPSL

SEQ ID NO: 11331 - protein, 8 aa, Homo sapiens
  Table A; HLA-A*30:01; CTNNB1; T41I; 0
ATITAPSL

SEQ ID NO: 11332 - protein, 8 aa, Homo sapiens
  Table A; HLA-A*31:01; CTNNB1; T41I; 0
ATITAPSL

SEQ ID NO: 11333 - protein, 8 aa, Homo sapiens
  Table A; HLA-A*68:01; CTNNB1; T41I; 0
ATITAPSL

SEQ ID NO: 11334 - protein, 8 aa, Homo sapiens
  Table A; HLA-A*68:02; CTNNB1; T41I; 0
ATITAPSL

SEQ ID NO: 11335 - protein, 8 aa, Homo sapiens
  Table A; HLA-B*07:02; CTNNB1; T41I; 1
ATITAPSL

SEQ ID NO: 11336 - protein, 8 aa, Homo sapiens
  Table A; HLA-B*08:01; CTNNB1; T41I; 1
ATITAPSL

SEQ ID NO: 11337 - protein, 8 aa, Homo sapiens
  Table A; HLA-B*13:02; CTNNB1; T41I; 0
ATITAPSL

SEQ ID NO: 11338 - protein, 8 aa, Homo sapiens
  Table A; HLA-B*15:01; CTNNB1; T41I; 1
ATITAPSL

SEQ ID NO: 11339 - protein, 8 aa, Homo sapiens
  Table A; HLA-B*15:02; CTNNB1; T41I; 0
ATITAPSL

SEQ ID NO: 11340 - protein, 8 aa, Homo sapiens
  Table A; HLA-B*15:03; CTNNB1; T41I; 0
ATITAPSL

SEQ ID NO: 11341 - protein, 8 aa, Homo sapiens
  Table A; HLA-B*15:10; CTNNB1; T41I; 0
ATITAPSL

SEQ ID NO: 11342 - protein, 8 aa, Homo sapiens
  Table A; HLA-B*27:05; CTNNB1; T41I; 1
ATITAPSL

SEQ ID NO: 11343 - protein, 8 aa, Homo sapiens
  Table A; HLA-B*35:01; CTNNB1; T41I; 1
ATITAPSL

SEQ ID NO: 11344 - protein, 8 aa, Homo sapiens
  Table A; HLA-B*35:03; CTNNB1; T41I; 0
ATITAPSL

SEQ ID NO: 11345 - protein, 8 aa, Homo sapiens
  Table A; HLA-B*37:01; CTNNB1; T41I; 0
ATITAPSL

SEQ ID NO: 11346 - protein, 8 aa, Homo sapiens
  Table A; HLA-B*38:01; CTNNB1; T41I; 0
ATITAPSL

SEQ ID NO: 11347 - protein, 8 aa, Homo sapiens
  Table A; HLA-B*39:01; CTNNB1; T41I; 0
ATITAPSL

SEQ ID NO: 11348 - protein, 8 aa, Homo sapiens
  Table A; HLA-B*40:01; CTNNB1; T41I; 1
ATITAPSL

SEQ ID NO: 11349 - protein, 8 aa, Homo sapiens
  Table A; HLA-B*40:02; CTNNB1; T41I; 0
ATITAPSL

SEQ ID NO: 11350 - protein, 8 aa, Homo sapiens
  Table A; HLA-B*41:02; CTNNB1; T41I; 0
ATITAPSL

SEQ ID NO: 11351 - protein, 8 aa, Homo sapiens
  Table A; HLA-B*44:03; CTNNB1; T41I; 1
ATITAPSL

SEQ ID NO: 11352 - protein, 8 aa, Homo sapiens
  Table A; HLA-B*44:05; CTNNB1; T41I; 0
ATITAPSL

SEQ ID NO: 11353 - protein, 8 aa, Homo sapiens
  Table A; HLA-B*46:01; CTNNB1; T41I; 0
ATITAPSL

SEQ ID NO: 11354 - protein, 8 aa, Homo sapiens
  Table A; HLA-B*48:01; CTNNB1; T41I; 0
ATITAPSL

SEQ ID NO: 11355 - protein, 8 aa, Homo sapiens
  Table A; HLA-B*57:01; CTNNB1; T41I; 1
ATITAPSL

SEQ ID NO: 11356 - protein, 8 aa, Homo sapiens
  Table A; HLA-B*58:01; CTNNB1; T41I; 0
ATITAPSL

SEQ ID NO: 11357 - protein, 8 aa, Homo sapiens
  Table A; HLA-C*01:02; CTNNB1; T41I; 0
ATITAPSL

SEQ ID NO: 11358 - protein, 8 aa, Homo sapiens
  Table A; HLA-C*03:02; CTNNB1; T41I; 0
ATITAPSL

SEQ ID NO: 11359 - protein, 8 aa, Homo sapiens
  Table A; HLA-C*03:03; CTNNB1; T41I; 1
ATITAPSL

SEQ ID NO: 11360 - protein, 8 aa, Homo sapiens
  Table A; HLA-C*03:04; CTNNB1; T41I; 1
ATITAPSL

SEQ ID NO: 11361 - protein, 8 aa, Homo sapiens
  Table A; HLA-C*07:04; CTNNB1; T41I; 0
ATITAPSL

SEQ ID NO: 11362 - protein, 8 aa, Homo sapiens
  Table A; HLA-C*08:01; CTNNB1; T41I; 0
ATITAPSL

SEQ ID NO: 11363 - protein, 8 aa, Homo sapiens
  Table A; HLA-C*08:02; CTNNB1; T41I; 1
ATITAPSL

SEQ ID NO: 11364 - protein, 8 aa, Homo sapiens
  Table A; HLA-C*08:03; CTNNB1; T41I; 0
ATITAPSL

SEQ ID NO: 11365 - protein, 8 aa, Homo sapiens
  Table A; HLA-C*14:02; CTNNB1; T41I; 0
ATITAPSL

SEQ ID NO: 11366 - protein, 8 aa, Homo sapiens
  Table A; HLA-C*14:03; CTNNB1; T41I; 0
ATITAPSL

SEQ ID NO: 11367 - protein, 8 aa, Homo sapiens
  Table A; HLA-C*15:02; CTNNB1; T41I; 0
ATITAPSL

SEQ ID NO: 11368 - protein, 8 aa, Homo sapiens
  Table A; HLA-C*16:01; CTNNB1; T41I; 1
ATITAPSL

SEQ ID NO: 11369 - protein, 8 aa, Homo sapiens
  Table A; HLA-C*16:02; CTNNB1; T41I; 0
ATITAPSL

SEQ ID NO: 11370 - protein, 8 aa, Homo sapiens
  Table A; HLA-C*17:01; CTNNB1; T41I; 0
ATITAPSL

SEQ ID NO: 11371 - protein, 9 aa, Homo sapiens
  Table A; HLA-A*11:01; CTNNB1; T41I; 1
ATITAPSLS

SEQ ID NO: 11372 - protein, 9 aa, Homo sapiens
  Table A; HLA-A*31:01; CTNNB1; T41I; 0
ATITAPSLS

SEQ ID NO: 11373 - protein, 9 aa, Homo sapiens
  Table A; HLA-A*33:03; CTNNB1; T41I; 0
ATITAPSLS

SEQ ID NO: 11374 - protein, 9 aa, Homo sapiens
  Table A; HLA-A*68:01; CTNNB1; T41I; 0
ATITAPSLS

SEQ ID NO: 11375 - protein, 9 aa, Homo sapiens
  Table A; HLA-A*68:02; CTNNB1; T41I; 0
ATITAPSLS

SEQ ID NO: 11376 - protein, 9 aa, Homo sapiens
  Table A; HLA-B*27:05; CTNNB1; T41I; 1
ATITAPSLS

SEQ ID NO: 11377 - protein, 10 aa, Homo sapiens
  Table A; HLA-A*03:01; CTNNB1; T41I; 1
ATITAPSLSG

SEQ ID NO: 11378 - protein, 10 aa, Homo sapiens
  Table A; HLA-A*11:01; CTNNB1; T41I; 1
ATITAPSLSG

SEQ ID NO: 11379 - protein, 10 aa, Homo sapiens
  Table A; HLA-A*30:01; CTNNB1; T41I; 0
ATITAPSLSG

SEQ ID NO: 11380 - protein, 10 aa, Homo sapiens
  Table A; HLA-A*68:01; CTNNB1; T41I; 0
ATITAPSLSG

SEQ ID NO: 11381 - protein, 10 aa, Homo sapiens
  Table A; HLA-A*68:02; CTNNB1; T41I; 0
ATITAPSLSG

SEQ ID NO: 11382 - protein, 10 aa, Homo sapiens
  Table A; HLA-B*08:01; CTNNB1; T41I; 1
ATITAPSLSG

SEQ ID NO: 11383 - protein, 10 aa, Homo sapiens
  Table A; HLA-B*50:01; CTNNB1; T41I; 0
ATITAPSLSG

SEQ ID NO: 11384 - protein, 11 aa, Homo sapiens
  Table A; HLA-A*03:01; CTNNB1; T41I; 1
ATITAPSLSGK

SEQ ID NO: 11385 - protein, 11 aa, Homo sapiens
  Table A; HLA-A*03:02; CTNNB1; T41I; 0
ATITAPSLSGK

SEQ ID NO: 11386 - protein, 11 aa, Homo sapiens
  Table A; HLA-A*11:01; CTNNB1; T41I; 1
ATITAPSLSGK

SEQ ID NO: 11387 - protein, 11 aa, Homo sapiens
  Table A; HLA-A*26:03; CTNNB1; T41I; 0
ATITAPSLSGK

SEQ ID NO: 11388 - protein, 11 aa, Homo sapiens
  Table A; HLA-A*30:01; CTNNB1; T41I; 0
ATITAPSLSGK

SEQ ID NO: 11389 - protein, 11 aa, Homo sapiens
  Table A; HLA-A*31:01; CTNNB1; T41I; 0
ATITAPSLSGK

SEQ ID NO: 11390 - protein, 11 aa, Homo sapiens
  Table A; HLA-A*33:03; CTNNB1; T41I; 0
ATITAPSLSGK

SEQ ID NO: 11391 - protein, 11 aa, Homo sapiens
  Table A; HLA-A*68:01; CTNNB1; T41I; 0
ATITAPSLSGK

SEQ ID NO: 11392 - protein, 11 aa, Homo sapiens
  Table A; HLA-A*68:02; CTNNB1; T41I; 0
ATITAPSLSGK

SEQ ID NO: 11393 - protein, 11 aa, Homo sapiens
  Table A; HLA-B*27:02; CTNNB1; T41I; 0
ATITAPSLSGK

SEQ ID NO: 11394 - protein, 11 aa, Homo sapiens
  Table A; HLA-B*57:01; CTNNB1; T41I; 1
ATITAPSLSGK

SEQ ID NO: 11395 - protein, 11 aa, Homo sapiens
  Table A; HLA-B*58:01; CTNNB1; T41I; 0
ATITAPSLSGK

SEQ ID NO: 11396 - protein, 8 aa, Homo sapiens
  Table A; HLA-A*30:02; CDKN2A; H83Y; 0
ATLTRPVY

SEQ ID NO: 11397 - protein, 8 aa, Homo sapiens
  Table A; HLA-A*32:01; CDKN2A; H83Y; 0
ATLTRPVY

SEQ ID NO: 11398 - protein, 8 aa, Homo sapiens
  Table A; HLA-B*15:01; CDKN2A; H83Y; 0
ATLTRPVY

SEQ ID NO: 11399 - protein, 8 aa, Homo sapiens
  Table A; HLA-B*57:01; CDKN2A; H83Y; 0
ATLTRPVY

SEQ ID NO: 11400 - protein, 8 aa, Homo sapiens
  Table A; HLA-B*58:01; CDKN2A; H83Y; 0
ATLTRPVY

SEQ ID NO: 11401 - protein, 8 aa, Homo sapiens
  Table A; HLA-C*16:01; CDKN2A; H83Y; 0
ATLTRPVY

SEQ ID NO: 11402 - protein, 8 aa, Homo sapiens
  Table A; HLA-A*02:04; CTNNB1; S45F; 0
ATTTAPFL

SEQ ID NO: 11403 - protein, 8 aa, Homo sapiens
  Table A; HLA-A*02:06; CTNNB1; S45F; 0
ATTTAPFL

SEQ ID NO: 11404 - protein, 8 aa, Homo sapiens
  Table A; HLA-A*03:02; CTNNB1; S45F; 0
ATTTAPFL

SEQ ID NO: 11405 - protein, 8 aa, Homo sapiens
  Table A; HLA-A*11:01; CTNNB1; S45F; 1
ATTTAPFL

SEQ ID NO: 11406 - protein, 8 aa, Homo sapiens
  Table A; HLA-A*23:01; CTNNB1; S45F; 0
ATTTAPFL

SEQ ID NO: 11407 - protein, 8 aa, Homo sapiens
  Table A; HLA-A*30:01; CTNNB1; S45F; 0
ATTTAPFL

SEQ ID NO: 11408 - protein, 8 aa, Homo sapiens
  Table A; HLA-A*31:01; CTNNB1; S45F; 0
ATTTAPFL

SEQ ID NO: 11409 - protein, 8 aa, Homo sapiens
  Table A; HLA-A*68:02; CTNNB1; S45F; 0
ATTTAPFL

SEQ ID NO: 11410 - protein, 8 aa, Homo sapiens
  Table A; HLA-B*07:02; CTNNB1; S45F; 1
ATTTAPFL

SEQ ID NO: 11411 - protein, 8 aa, Homo sapiens
  Table A; HLA-B*13:02; CTNNB1; S45F; 0
ATTTAPFL

SEQ ID NO: 11412 - protein, 8 aa, Homo sapiens
  Table A; HLA-B*15:01; CTNNB1; S45F; 1
ATTTAPFL

SEQ ID NO: 11413 - protein, 8 aa, Homo sapiens
  Table A; HLA-B*15:10; CTNNB1; S45F; 0
ATTTAPFL

SEQ ID NO: 11414 - protein, 8 aa, Homo sapiens
  Table A; HLA-B*27:05; CTNNB1; S45F; 0
ATTTAPFL

SEQ ID NO: 11415 - protein, 8 aa, Homo sapiens
  Table A; HLA-B*39:01; CTNNB1; S45F; 0
ATTTAPFL

SEQ ID NO: 11416 - protein, 8 aa, Homo sapiens
  Table A; HLA-B*40:02; CTNNB1; S45F; 0
ATTTAPFL

SEQ ID NO: 11417 - protein, 8 aa, Homo sapiens
  Table A; HLA-B*44:05; CTNNB1; S45F; 0
ATTTAPFL

SEQ ID NO: 11418 - protein, 8 aa, Homo sapiens
  Table A; HLA-B*48:01; CTNNB1; S45F; 0
ATTTAPFL

SEQ ID NO: 11419 - protein, 8 aa, Homo sapiens
  Table A; HLA-B*57:01; CTNNB1; S45F; 1
ATTTAPFL

SEQ ID NO: 11420 - protein, 8 aa, Homo sapiens
  Table A; HLA-B*58:01; CTNNB1; S45F; 0
ATTTAPFL

SEQ ID NO: 11421 - protein, 8 aa, Homo sapiens
  Table A; HLA-C*03:03; CTNNB1; S45F; 1
ATTTAPFL

SEQ ID NO: 11422 - protein, 8 aa, Homo sapiens
  Table A; HLA-C*03:04; CTNNB1; S45F; 1
ATTTAPFL

SEQ ID NO: 11423 - protein, 8 aa, Homo sapiens
  Table A; HLA-C*08:01; CTNNB1; S45F; 0
ATTTAPFL

SEQ ID NO: 11424 - protein, 8 aa, Homo sapiens
  Table A; HLA-C*08:03; CTNNB1; S45F; 0
ATTTAPFL

SEQ ID NO: 11425 - protein, 8 aa, Homo sapiens
  Table A; HLA-C*14:03; CTNNB1; S45F; 0
ATTTAPFL

SEQ ID NO: 11426 - protein, 8 aa, Homo sapiens
  Table A; HLA-C*15:02; CTNNB1; S45F; 0
ATTTAPFL

SEQ ID NO: 11427 - protein, 8 aa, Homo sapiens
  Table A; HLA-C*16:01; CTNNB1; S45F; 0
ATTTAPFL

SEQ ID NO: 11428 - protein, 8 aa, Homo sapiens
  Table A; HLA-C*16:02; CTNNB1; S45F; 0
ATTTAPFL

SEQ ID NO: 11429 - protein, 8 aa, Homo sapiens
  Table A; HLA-C*17:01; CTNNB1; S45F; 0
ATTTAPFL

SEQ ID NO: 11430 - protein, 9 aa, Homo sapiens
  Table A; HLA-A*11:01; CTNNB1; S45F; 1
ATTTAPFLS

SEQ ID NO: 11431 - protein, 9 aa, Homo sapiens
  Table A; HLA-A*31:01; CTNNB1; S45F; 0
ATTTAPFLS

SEQ ID NO: 11432 - protein, 9 aa, Homo sapiens
  Table A; HLA-A*68:02; CTNNB1; S45F; 0
ATTTAPFLS

SEQ ID NO: 11433 - protein, 9 aa, Homo sapiens
  Table A; HLA-B*27:05; CTNNB1; S45F; 0
ATTTAPFLS

SEQ ID NO: 11434 - protein, 9 aa, Homo sapiens
  Table A; HLA-B*58:01; CTNNB1; S45F; 0
ATTTAPFLS

SEQ ID NO: 11435 - protein, 10 aa, Homo sapiens
  Table A; HLA-A*11:01; CTNNB1; S45F; 1
ATTTAPFLSG

SEQ ID NO: 11436 - protein, 11 aa, Homo sapiens
  Table A; HLA-A*03:01; CTNNB1; S45F; 1
ATTTAPFLSGK

SEQ ID NO: 11437 - protein, 11 aa, Homo sapiens
  Table A; HLA-A*03:02; CTNNB1; S45F; 0
ATTTAPFLSGK

SEQ ID NO: 11438 - protein, 11 aa, Homo sapiens
  Table A; HLA-A*11:01; CTNNB1; S45F; 1
ATTTAPFLSGK

SEQ ID NO: 11439 - protein, 11 aa, Homo sapiens
  Table A; HLA-A*31:01; CTNNB1; S45F; 0
ATTTAPFLSGK

SEQ ID NO: 11440 - protein, 11 aa, Homo sapiens
  Table A; HLA-A*68:01; CTNNB1; S45F; 0
ATTTAPFLSGK

SEQ ID NO: 11441 - protein, 11 aa, Homo sapiens
  Table A; HLA-A*68:02; CTNNB1; S45F; 0
ATTTAPFLSGK

SEQ ID NO: 11442 - protein, 11 aa, Homo sapiens
  Table A; HLA-B*27:02; CTNNB1; S45F; 0
ATTTAPFLSGK

SEQ ID NO: 11443 - protein, 8 aa, Homo sapiens
  Table A; HLA-A*11:01; CTNNB1; S45P; 1
ATTTAPPL

SEQ ID NO: 11444 - protein, 8 aa, Homo sapiens
  Table A; HLA-A*30:01; CTNNB1; S45P; 1
ATTTAPPL

SEQ ID NO: 11445 - protein, 8 aa, Homo sapiens
  Table A; HLA-B*07:02; CTNNB1; S45P; 1
ATTTAPPL

SEQ ID NO: 11446 - protein, 8 aa, Homo sapiens
  Table A; HLA-B*13:02; CTNNB1; S45P; 1
ATTTAPPL

SEQ ID NO: 11447 - protein, 8 aa, Homo sapiens
  Table A; HLA-B*15:01; CTNNB1; S45P; 1
ATTTAPPL

SEQ ID NO: 11448 - protein, 8 aa, Homo sapiens
  Table A; HLA-B*15:10; CTNNB1; S45P; 0
ATTTAPPL

SEQ ID NO: 11449 - protein, 8 aa, Homo sapiens
  Table A; HLA-B*35:03; CTNNB1; S45P; 1
ATTTAPPL

SEQ ID NO: 11450 - protein, 8 aa, Homo sapiens
  Table A; HLA-B*39:01; CTNNB1; S45P; 0
ATTTAPPL

SEQ ID NO: 11451 - protein, 8 aa, Homo sapiens
  Table A; HLA-B*40:02; CTNNB1; S45P; 0
ATTTAPPL

SEQ ID NO: 11452 - protein, 8 aa, Homo sapiens
  Table A; HLA-B*41:02; CTNNB1; S45P; 0
ATTTAPPL

SEQ ID NO: 11453 - protein, 8 aa, Homo sapiens
  Table A; HLA-B*44:05; CTNNB1; S45P; 0
ATTTAPPL

SEQ ID NO: 11454 - protein, 8 aa, Homo sapiens
  Table A; HLA-B*48:01; CTNNB1; S45P; 0
ATTTAPPL

SEQ ID NO: 11455 - protein, 8 aa, Homo sapiens
  Table A; HLA-B*58:01; CTNNB1; S45P; 0
ATTTAPPL

SEQ ID NO: 11456 - protein, 8 aa, Homo sapiens
  Table A; HLA-C*01:02; CTNNB1; S45P; 1
ATTTAPPL

SEQ ID NO: 11457 - protein, 8 aa, Homo sapiens
  Table A; HLA-C*03:03; CTNNB1; S45P; 1
ATTTAPPL

SEQ ID NO: 11458 - protein, 8 aa, Homo sapiens
  Table A; HLA-C*03:04; CTNNB1; S45P; 1
ATTTAPPL

SEQ ID NO: 11459 - protein, 8 aa, Homo sapiens
  Table A; HLA-C*08:01; CTNNB1; S45P; 0
ATTTAPPL

SEQ ID NO: 11460 - protein, 8 aa, Homo sapiens
  Table A; HLA-C*08:03; CTNNB1; S45P; 0
ATTTAPPL

SEQ ID NO: 11461 - protein, 8 aa, Homo sapiens
  Table A; HLA-C*14:02; CTNNB1; S45P; 0
ATTTAPPL

SEQ ID NO: 11462 - protein, 8 aa, Homo sapiens
  Table A; HLA-C*14:03; CTNNB1; S45P; 0
ATTTAPPL

SEQ ID NO: 11463 - protein, 8 aa, Homo sapiens
  Table A; HLA-C*16:01; CTNNB1; S45P; 1
ATTTAPPL

SEQ ID NO: 11464 - protein, 8 aa, Homo sapiens
  Table A; HLA-C*16:02; CTNNB1; S45P; 0
ATTTAPPL

SEQ ID NO: 11465 - protein, 9 aa, Homo sapiens
  Table A; HLA-A*11:01; CTNNB1; S45P; 1
ATTTAPPLS

SEQ ID NO: 11466 - protein, 9 aa, Homo sapiens
  Table A; HLA-A*30:01; CTNNB1; S45P; 1
ATTTAPPLS

SEQ ID NO: 11467 - protein, 9 aa, Homo sapiens
  Table A; HLA-B*13:02; CTNNB1; S45P; 1
ATTTAPPLS

SEQ ID NO: 11468 - protein, 9 aa, Homo sapiens
  Table A; HLA-B*48:01; CTNNB1; S45P; 0
ATTTAPPLS

SEQ ID NO: 11469 - protein, 9 aa, Homo sapiens
  Table A; HLA-B*58:01; CTNNB1; S45P; 0
ATTTAPPLS

SEQ ID NO: 11470 - protein, 9 aa, Homo sapiens
  Table A; HLA-C*08:03; CTNNB1; S45P; 0
ATTTAPPLS

SEQ ID NO: 11471 - protein, 10 aa, Homo sapiens
  Table A; HLA-A*11:01; CTNNB1; S45P; 1
ATTTAPPLSG

SEQ ID NO: 11472 - protein, 10 aa, Homo sapiens
  Table A; HLA-A*30:01; CTNNB1; S45P; 1
ATTTAPPLSG

SEQ ID NO: 11473 - protein, 11 aa, Homo sapiens
  Table A; HLA-A*03:01; CTNNB1; S45P; 1
ATTTAPPLSGK

SEQ ID NO: 11474 - protein, 11 aa, Homo sapiens
  Table A; HLA-A*03:02; CTNNB1; S45P; 0
ATTTAPPLSGK

SEQ ID NO: 11475 - protein, 11 aa, Homo sapiens
  Table A; HLA-A*11:01; CTNNB1; S45P; 1
ATTTAPPLSGK

SEQ ID NO: 11476 - protein, 11 aa, Homo sapiens
  Table A; HLA-A*31:01; CTNNB1; S45P; 1
ATTTAPPLSGK

SEQ ID NO: 11477 - protein, 11 aa, Homo sapiens
  Table A; HLA-A*68:01; CTNNB1; S45P; 1
ATTTAPPLSGK

SEQ ID NO: 11478 - protein, 11 aa, Homo sapiens
  Table A; HLA-A*68:02; CTNNB1; S45P; 0
ATTTAPPLSGK

SEQ ID NO: 11479 - protein, 11 aa, Homo sapiens
  Table A; HLA-B*27:02; CTNNB1; S45P; 0
ATTTAPPLSGK

SEQ ID NO: 11480 - protein, 9 aa, Homo sapiens
  Table A; HLA-A*03:01; PIK3CA; V344M; 1
ATYMNLNIR

SEQ ID NO: 11481 - protein, 9 aa, Homo sapiens
  Table A; HLA-A*11:01; PIK3CA; V344M; 1
ATYMNLNIR

SEQ ID NO: 11482 - protein, 9 aa, Homo sapiens
  Table A; HLA-A*31:01; PIK3CA; V344M; 0
ATYMNLNIR

SEQ ID NO: 11483 - protein, 9 aa, Homo sapiens
  Table A; HLA-A*33:03; PIK3CA; V344M; 0
ATYMNLNIR

SEQ ID NO: 11484 - protein, 9 aa, Homo sapiens
  Table A; HLA-A*68:01; PIK3CA; V344M; 0
ATYMNLNIR

SEQ ID NO: 11485 - protein, 9 aa, Homo sapiens
  Table A; HLA-A*03:01; PIK3CA; N345K; 1
ATYVKLNIR

SEQ ID NO: 11486 - protein, 9 aa, Homo sapiens
  Table A; HLA-A*11:01; PIK3CA; N345K; 1
ATYVKLNIR

SEQ ID NO: 11487 - protein, 9 aa, Homo sapiens
  Table A; HLA-A*31:01; PIK3CA; N345K; 0
ATYVKLNIR

SEQ ID NO: 11488 - protein, 9 aa, Homo sapiens
  Table A; HLA-A*33:03; PIK3CA; N345K; 0
ATYVKLNIR

SEQ ID NO: 11489 - protein, 10 aa, Homo sapiens
  Table A; HLA-A*31:01; KEAP1; G480W; 0
AVGGFDWTNR

SEQ ID NO: 11490 - protein, 10 aa, Homo sapiens
  Table A; HLA-A*33:03; KEAP1; G480W; 0
AVGGFDWTNR

SEQ ID NO: 11491 - protein, 9 aa, Homo sapiens
  Table A; HLA-B*07:02; KRAS; G12V; 1
AVGVGKSAL

SEQ ID NO: 11492 - protein, 9 aa, Homo sapiens
  Table A; HLA-B*08:01; KRAS; G12V; 1
AVGVGKSAL

SEQ ID NO: 11493 - protein, 9 aa, Homo sapiens
  Table A; HLA-B*15:01; KRAS; G12V; 1
AVGVGKSAL

SEQ ID NO: 11494 - protein, 9 aa, Homo sapiens
  Table A; HLA-B*48:01; KRAS; G12V; 0
AVGVGKSAL

SEQ ID NO: 11495 - protein, 9 aa, Homo sapiens
  Table A; HLA-C*01:02; KRAS; G12V; 1
AVGVGKSAL

SEQ ID NO: 11496 - protein, 9 aa, Homo sapiens
  Table A; HLA-C*17:01; ARID2; S297F; 0
AVILRNLFF

SEQ ID NO: 11497 - protein, 9 aa, Homo sapiens
  Table A; HLA-A*02:03; RAC1; A159V; 0
AVKYLECSV

SEQ ID NO: 11498 - protein, 9 aa, Homo sapiens
  Table A; HLA-A*30:01; RAC1; A159V; 0
AVKYLECSV

SEQ ID NO: 11499 - protein, 9 aa, Homo sapiens
  Table A; HLA-A*68:02; RAC1; A159V; 0
AVKYLECSV

SEQ ID NO: 11500 - protein, 9 aa, Homo sapiens
  Table A; HLA-B*13:02; RAC1; A159V; 0
AVKYLECSV

SEQ ID NO: 11501 - protein, 9 aa, Homo sapiens
  Table A; HLA-A*02:04; MTOR; E1799K; 0
AVMNFKAVL

SEQ ID NO: 11502 - protein, 9 aa, Homo sapiens
  Table A; HLA-B*07:02; MTOR; E1799K; 1
AVMNFKAVL

SEQ ID NO: 11503 - protein, 9 aa, Homo sapiens
  Table A; HLA-B*08:01; MTOR; E1799K; 1
AVMNFKAVL

SEQ ID NO: 11504 - protein, 9 aa, Homo sapiens
  Table A; HLA-B*15:01; MTOR; E1799K; 1
AVMNFKAVL

SEQ ID NO: 11505 - protein, 10 aa, Homo sapiens
  Table A; HLA-A*03:01; MTOR; E1799K; 1
AVMNFKAVLH

SEQ ID NO: 11506 - protein, 10 aa, Homo sapiens
  Table A; HLA-A*03:02; MTOR; E1799K; 0
AVMNFKAVLH

SEQ ID NO: 11507 - protein, 11 aa, Homo sapiens
  Table A; HLA-A*03:01; MTOR; E1799K; 1
AVMNFKAVLHY

SEQ ID NO: 11508 - protein, 11 aa, Homo sapiens
  Table A; HLA-A*29:02; MTOR; E1799K; 1
AVMNFKAVLHY

SEQ ID NO: 11509 - protein, 11 aa, Homo sapiens
  Table A; HLA-B*15:01; MTOR; E1799K; 1
AVMNFKAVLHY

SEQ ID NO: 11510 - protein, 9 aa, Homo sapiens
  Table A; HLA-A*32:01; ROBO2; D1014N; 0
AVNLPDPQW

SEQ ID NO: 11511 - protein, 9 aa, Homo sapiens
  Table A; HLA-B*13:01; ROBO2; D1014N; 0
AVNLPDPQW

SEQ ID NO: 11512 - protein, 9 aa, Homo sapiens
  Table A; HLA-B*15:01; ROBO2; D1014N; 1
AVNLPDPQW

SEQ ID NO: 11513 - protein, 9 aa, Homo sapiens
  Table A; HLA-B*15:13; ROBO2; D1014N; 0
AVNLPDPQW

SEQ ID NO: 11514 - protein, 9 aa, Homo sapiens
  Table A; HLA-B*35:02; ROBO2; D1014N; 0
AVNLPDPQW

SEQ ID NO: 11515 - protein, 9 aa, Homo sapiens
  Table A; HLA-B*35:12; ROBO2; D1014N; 0
AVNLPDPQW

SEQ ID NO: 11516 - protein, 9 aa, Homo sapiens
  Table A; HLA-B*38:01; ROBO2; D1014N; 0
AVNLPDPQW

SEQ ID NO: 11517 - protein, 9 aa, Homo sapiens
  Table A; HLA-B*57:01; ROBO2; D1014N; 0
AVNLPDPQW

SEQ ID NO: 11518 - protein, 9 aa, Homo sapiens
  Table A; HLA-B*58:01; ROBO2; D1014N; 0
AVNLPDPQW

SEQ ID NO: 11519 - protein, 10 aa, Homo sapiens
  Table A; HLA-A*03:02; ROBO2; D1014N; 0
AVNLPDPQWK

SEQ ID NO: 11520 - protein, 10 aa, Homo sapiens
  Table A; HLA-A*11:01; ROBO2; D1014N; 1
AVNLPDPQWK

SEQ ID NO: 11521 - protein, 9 aa, Homo sapiens
  Table A; HLA-A*11:01; CNTNAP2; R483Q; 1
AVQTNSPLQ

SEQ ID NO: 11522 - protein, 10 aa, Homo sapiens
  Table A; HLA-A*02:03; CNTNAP2; R483Q; 0
AVQTNSPLQV

SEQ ID NO: 11523 - protein, 10 aa, Homo sapiens
  Table A; HLA-A*03:02; CNTNAP2; R483Q; 0
AVQTNSPLQV

SEQ ID NO: 11524 - protein, 10 aa, Homo sapiens
  Table A; HLA-B*13:02; CNTNAP2; R483Q; 0
AVQTNSPLQV

SEQ ID NO: 11525 - protein, 11 aa, Homo sapiens
  Table A; HLA-A*03:01; CNTNAP2; R483Q; 1
AVQTNSPLQVK

SEQ ID NO: 11526 - protein, 11 aa, Homo sapiens
  Table A; HLA-A*03:02; CNTNAP2; R483Q; 0
AVQTNSPLQVK

SEQ ID NO: 11527 - protein, 11 aa, Homo sapiens
  Table A; HLA-A*11:01; CNTNAP2; R483Q; 1
AVQTNSPLQVK

SEQ ID NO: 11528 - protein, 11 aa, Homo sapiens
  Table A; HLA-A*31:01; CNTNAP2; R483Q; 0
AVQTNSPLQVK

SEQ ID NO: 11529 - protein, 11 aa, Homo sapiens
  Table A; HLA-A*68:01; CNTNAP2; R483Q; 0
AVQTNSPLQVK

SEQ ID NO: 11530 - protein, 9 aa, Homo sapiens
  Table A; HLA-A*31:01; PTK6; H126P; 0
AVRPYKIWR

SEQ ID NO: 11531 - protein, 10 aa, Homo sapiens
  Table A; HLA-A*31:01; PTK6; H126P; 0
AVRPYKIWRR

SEQ ID NO: 11532 - protein, 10 aa, Homo sapiens
  Table A; HLA-A*02:05; EGFR; G598V; 0
AVVMGENNTL

SEQ ID NO: 11533 - protein, 10 aa, Homo sapiens
  Table A; HLA-A*02:06; EGFR; G598V; 0
AVVMGENNTL

SEQ ID NO: 11534 - protein, 10 aa, Homo sapiens
  Table A; HLA-A*02:08; EGFR; G598V; 0
AVVMGENNTL

SEQ ID NO: 11535 - protein, 9 aa, Homo sapiens
  Table A; HLA-A*31:01; PIK3CA; H1047Y; 0
AYHGGWTTK

SEQ ID NO: 11536 - protein, 9 aa, Homo sapiens
  Table A; HLA-A*33:03; PIK3CA; H1047Y; 0
AYHGGWTTK

SEQ ID NO: 11537 - protein, 10 aa, Homo sapiens
  Table A; HLA-C*14:02; PIK3CA; H1047Y; 0
AYHGGWTTKM

SEQ ID NO: 11538 - protein, 9 aa, Homo sapiens
  Table A; HLA-A*68:02; PIK3CA; N345K; 0
CATYVKLNI

SEQ ID NO: 11539 - protein, 9 aa, Homo sapiens
  Table A; HLA-B*13:02; PIK3CA; N345K; 1
CATYVKLNI

SEQ ID NO: 11540 - protein, 11 aa, Homo sapiens
  Table A; HLA-B*40:02; CTCF; K365T; 0
CDYASVEVSTL

SEQ ID NO: 11541 - protein, 11 aa, Homo sapiens
  Table A; HLA-B*48:01; CTCF; K365T; 0
CDYASVEVSTL

SEQ ID NO: 11542 - protein, 11 aa, Homo sapiens
  Table A; HLA-C*08:03; CTCF; K365T; 0
CDYASVEVSTL

SEQ ID NO: 11543 - protein, 8 aa, Homo sapiens
  Table A; HLA-A*30:01; PIK3CA; R38C; 0
CEATLVTI

SEQ ID NO: 11544 - protein, 8 aa, Homo sapiens
  Table A; HLA-B*18:01; PIK3CA; R38C; 0
CEATLVTI

SEQ ID NO: 11545 - protein, 8 aa, Homo sapiens
  Table A; HLA-B*40:02; PIK3CA; R38C; 0
CEATLVTI

SEQ ID NO: 11546 - protein, 8 aa, Homo sapiens
  Table A; HLA-B*41:02; PIK3CA; R38C; 0
CEATLVTI

SEQ ID NO: 11547 - protein, 8 aa, Homo sapiens
  Table A; HLA-B*44:05; PIK3CA; R38C; 0
CEATLVTI

SEQ ID NO: 11548 - protein, 8 aa, Homo sapiens
  Table A; HLA-B*49:01; PIK3CA; R38C; 0
CEATLVTI

SEQ ID NO: 11549 - protein, 9 aa, Homo sapiens
  Table A; HLA-B*49:01; PIK3CA; R38C; 0
CEATLVTIK

SEQ ID NO: 11550 - protein, 8 aa, Homo sapiens
  Table A; HLA-B*14:02; SIRPA; V233I; 0
CEVAHITL

SEQ ID NO: 11551 - protein, 8 aa, Homo sapiens
  Table A; HLA-B*18:01; SIRPA; V233I; 0
CEVAHITL

SEQ ID NO: 11552 - protein, 8 aa, Homo sapiens
  Table A; HLA-B*37:01; SIRPA; V233I; 0
CEVAHITL

SEQ ID NO: 11553 - protein, 8 aa, Homo sapiens
  Table A; HLA-B*40:01; SIRPA; V233I; 0
CEVAHITL

SEQ ID NO: 11554 - protein, 8 aa, Homo sapiens
  Table A; HLA-B*40:02; SIRPA; V233I; 0
CEVAHITL

SEQ ID NO: 11555 - protein, 8 aa, Homo sapiens
  Table A; HLA-B*41:02; SIRPA; V233I; 0
CEVAHITL

SEQ ID NO: 11556 - protein, 8 aa, Homo sapiens
  Table A; HLA-B*44:05; SIRPA; V233I; 0
CEVAHITL

SEQ ID NO: 11557 - protein, 8 aa, Homo sapiens
  Table A; HLA-B*49:01; SIRPA; V233I; 0
CEVAHITL

SEQ ID NO: 11558 - protein, 11 aa, Homo sapiens
  Table A; HLA-B*15:01; CTNNB1; S33C; 1
CGIHSGATTTA

SEQ ID NO: 11559 - protein, 8 aa, Homo sapiens
  Table A; HLA-B*08:01; KRAS; G12C; 1
CGVGKSAL

SEQ ID NO: 11560 - protein, 8 aa, Homo sapiens
  Table A; HLA-B*08:01; NRAS; G12C; 1
CGVGKSAL

SEQ ID NO: 11561 - protein, 8 aa, Homo sapiens
  Table A; HLA-B*14:02; NRAS; G12C; 0
CGVGKSAL

SEQ ID NO: 11562 - protein, 8 aa, Homo sapiens
  Table A; HLA-B*15:10; CSMD3; R1529H; 0
CHDPGVPM

SEQ ID NO: 11563 - protein, 8 aa, Homo sapiens
  Table A; HLA-B*39:06; GNAS; R201H; 0
CHVLTSGI

SEQ ID NO: 11564 - protein, 9 aa, Homo sapiens
  Table A; HLA-C*01:02; CCND1; T286I; 0
CIPTDVRDV

SEQ ID NO: 11565 - protein, 10 aa, Homo sapiens
  Table A; HLA-A*03:01; ATM; R2691C; 1
CLAGGVNLPK

SEQ ID NO: 11566 - protein, 10 aa, Homo sapiens
  Table A; HLA-A*03:02; ATM; R2691C; 0
CLAGGVNLPK

SEQ ID NO: 11567 - protein, 10 aa, Homo sapiens
  Table A; HLA-A*11:01; ATM; R2691C; 0
CLAGGVNLPK

SEQ ID NO: 11568 - protein, 10 aa, Homo sapiens
  Table A; HLA-B*27:02; ATM; R2691C; 0
CLAGGVNLPK

SEQ ID NO: 11569 - protein, 8 aa, Homo sapiens
  Table A; HLA-C*05:01; TP53; Y205C; 1
CLDDRNTF

SEQ ID NO: 11570 - protein, 8 aa, Homo sapiens
  Table A; HLA-C*08:02; TP53; Y205C; 0
CLDDRNTF

SEQ ID NO: 11571 - protein, 8 aa, Homo sapiens
  Table A; HLA-B*13:02; PIK3CA; R38H; 0
CLHEATLV

SEQ ID NO: 11572 - protein, 10 aa, Homo sapiens
  Table A; HLA-A*02:01; PIK3CA; R38H; 1
CLHEATLVTI

SEQ ID NO: 11573 - protein, 10 aa, Homo sapiens
  Table A; HLA-A*02:03; PIK3CA; R38H; 0
CLHEATLVTI

SEQ ID NO: 11574 - protein, 10 aa, Homo sapiens
  Table A; HLA-A*02:04; PIK3CA; R38H; 0
CLHEATLVTI

SEQ ID NO: 11575 - protein, 11 aa, Homo sapiens
  Table A; HLA-A*03:02; HRAS; Q61K; 0
CLLDILDTAGK

SEQ ID NO: 11576 - protein, 11 aa, Homo sapiens
  Table A; HLA-A*03:02; NRAS; Q61K; 0
CLLDILDTAGK

SEQ ID NO: 11577 - protein, 11 aa, Homo sapiens
  Table A; HLA-A*02:04; KRAS; Q61L; 0
CLLDILDTAGL

SEQ ID NO: 11578 - protein, 11 aa, Homo sapiens
  Table A; HLA-A*02:04; NRAS; Q61L; 0
CLLDILDTAGL

SEQ ID NO: 11579 - protein, 10 aa, Homo sapiens
  Table A; HLA-B*15:01; PTPRC; Q895H; 1
CLMVHVEAQY

SEQ ID NO: 11580 - protein, 8 aa, Homo sapiens
  Table A; HLA-A*02:04; CTNNB1; N387K; 0
CLWTLRKL

SEQ ID NO: 11581 - protein, 8 aa, Homo sapiens
  Table A; HLA-C*16:01; SF3B1; R625C; 0
CNTTARAF

SEQ ID NO: 11582 - protein, 8 aa, Homo sapiens
  Table A; HLA-B*55:02; SMAD4; G352V; 0
CPIVTVDV

SEQ ID NO: 11583 - protein, 9 aa, Homo sapiens
  Table A; HLA-B*15:02; SMAD4; G352V; 0
CPIVTVDVY

SEQ ID NO: 11584 - protein, 9 aa, Homo sapiens
  Table A; HLA-B*27:02; SMAD4; G352V; 0
CPIVTVDVY

SEQ ID NO: 11585 - protein, 9 aa, Homo sapiens
  Table A; HLA-B*35:01; SMAD4; G352V; 1
CPIVTVDVY

SEQ ID NO: 11586 - protein, 9 aa, Homo sapiens
  Table A; HLA-B*35:03; SMAD4; G352V; 0
CPIVTVDVY

SEQ ID NO: 11587 - protein, 9 aa, Homo sapiens
  Table A; HLA-B*35:08; SMAD4; G352V; 0
CPIVTVDVY

SEQ ID NO: 11588 - protein, 9 aa, Homo sapiens
  Table A; HLA-A*02:01; TP53; C141Y; 1
CQLAKTYPV

SEQ ID NO: 11589 - protein, 9 aa, Homo sapiens
  Table A; HLA-B*13:02; TP53; C141Y; 0
CQLAKTYPV

SEQ ID NO: 11590 - protein, 9 aa, Homo sapiens
  Table A; HLA-B*48:01; TP53; C141Y; 0
CQLAKTYPV

SEQ ID NO: 11591 - protein, 9 aa, Homo sapiens
  Table A; HLA-B*15:01; TP63; R379C; 1
CQNTHGIQM

SEQ ID NO: 11592 - protein, 10 aa, Homo sapiens
  Table A; HLA-A*11:01; PPP2R1A; R183W; 1
CSDDTPMVRW

SEQ ID NO: 11593 - protein, 10 aa, Homo sapiens
  Table A; HLA-B*44:03; PPP2R1A; R183W; 1
CSDDTPMVRW

SEQ ID NO: 11594 - protein, 10 aa, Homo sapiens
  Table A; HLA-B*57:01; PPP2R1A; R183W; 0
CSDDTPMVRW

SEQ ID NO: 11595 - protein, 10 aa, Homo sapiens
  Table A; HLA-B*58:01; PPP2R1A; R183W; 0
CSDDTPMVRW

SEQ ID NO: 11596 - protein, 8 aa, Homo sapiens
  Table A; HLA-C*05:01; PPP2R1A; P179R; 1
CSDDTRMV

SEQ ID NO: 11597 - protein, 8 aa, Homo sapiens
  Table A; HLA-C*08:02; PPP2R1A; P179R; 1
CSDDTRMV

SEQ ID NO: 11598 - protein, 9 aa, Homo sapiens
  Table A; HLA-A*03:01; PPP2R1A; P179R; 1
CSDDTRMVR

SEQ ID NO: 11599 - protein, 9 aa, Homo sapiens
  Table A; HLA-A*11:01; PPP2R1A; P179R; 1
CSDDTRMVR

SEQ ID NO: 11600 - protein, 9 aa, Homo sapiens
  Table A; HLA-A*31:01; PPP2R1A; P179R; 1
CSDDTRMVR

SEQ ID NO: 11601 - protein, 9 aa, Homo sapiens
  Table A; HLA-A*33:03; PPP2R1A; P179R; 0
CSDDTRMVR

SEQ ID NO: 11602 - protein, 9 aa, Homo sapiens
  Table A; HLA-A*02:05; ISX; R86C; 0
CTTFTTEQL

SEQ ID NO: 11603 - protein, 9 aa, Homo sapiens
  Table A; HLA-A*02:06; ISX; R86C; 0
CTTFTTEQL

SEQ ID NO: 11604 - protein, 9 aa, Homo sapiens
  Table A; HLA-A*02:08; ISX; R86C; 0
CTTFTTEQL

SEQ ID NO: 11605 - protein, 9 aa, Homo sapiens
  Table A; HLA-A*68:02; ISX; R86C; 0
CTTFTTEQL

SEQ ID NO: 11606 - protein, 9 aa, Homo sapiens
  Table A; HLA-B*48:01; ISX; R86C; 0
CTTFTTEQL

SEQ ID NO: 11607 - protein, 9 aa, Homo sapiens
  Table A; HLA-B*50:01; ISX; R86C; 0
CTTFTTEQL

SEQ ID NO: 11608 - protein, 9 aa, Homo sapiens
  Table A; HLA-A*68:02; TP53; M237I; 0
CTTIHYNYI

SEQ ID NO: 11609 - protein, 9 aa, Homo sapiens
  Table A; HLA-A*03:01; RGS7; R44C; 1
CTVKSFLSK

SEQ ID NO: 11610 - protein, 9 aa, Homo sapiens
  Table A; HLA-A*11:01; RGS7; R44C; 1
CTVKSFLSK

SEQ ID NO: 11611 - protein, 9 aa, Homo sapiens
  Table A; HLA-A*03:01; TP53; S127F; 1
CTYFPALNK

SEQ ID NO: 11612 - protein, 9 aa, Homo sapiens
  Table A; HLA-A*03:02; TP53; S127F; 0
CTYFPALNK

SEQ ID NO: 11613 - protein, 9 aa, Homo sapiens
  Table A; HLA-A*11:01; TP53; S127F; 0
CTYFPALNK

SEQ ID NO: 11614 - protein, 9 aa, Homo sapiens
  Table A; HLA-A*03:01; TP53; L130F; 1
CTYSPAFNK

SEQ ID NO: 11615 - protein, 9 aa, Homo sapiens
  Table A; HLA-A*03:02; TP53; L130F; 0
CTYSPAFNK

SEQ ID NO: 11616 - protein, 9 aa, Homo sapiens
  Table A; HLA-A*11:01; TP53; L130F; 0
CTYSPAFNK

SEQ ID NO: 11617 - protein, 9 aa, Homo sapiens
  Table A; HLA-A*31:01; TP53; L130F; 0
CTYSPAFNK

SEQ ID NO: 11618 - protein, 9 aa, Homo sapiens
  Table A; HLA-A*33:03; TP53; L130F; 0
CTYSPAFNK

SEQ ID NO: 11619 - protein, 9 aa, Homo sapiens
  Table A; HLA-B*27:05; TP53; L130F; 0
CTYSPAFNK

SEQ ID NO: 11620 - protein, 10 aa, Homo sapiens
  Table A; HLA-A*03:01; TP53; L130F; 1
CTYSPAFNKM

SEQ ID NO: 11621 - protein, 9 aa, Homo sapiens
  Table A; HLA-A*03:01; TP53; K132R; 1
CTYSPALNR

SEQ ID NO: 11622 - protein, 9 aa, Homo sapiens
  Table A; HLA-A*03:02; TP53; K132R; 0
CTYSPALNR

SEQ ID NO: 11623 - protein, 9 aa, Homo sapiens
  Table A; HLA-A*11:01; TP53; K132R; 0
CTYSPALNR

SEQ ID NO: 11624 - protein, 9 aa, Homo sapiens
  Table A; HLA-A*26:03; TP53; K132R; 0
CTYSPALNR

SEQ ID NO: 11625 - protein, 9 aa, Homo sapiens
  Table A; HLA-A*31:01; TP53; K132R; 0
CTYSPALNR

SEQ ID NO: 11626 - protein, 9 aa, Homo sapiens
  Table A; HLA-A*33:01; TP53; K132R; 0
CTYSPALNR

SEQ ID NO: 11627 - protein, 9 aa, Homo sapiens
  Table A; HLA-A*33:03; TP53; K132R; 0
CTYSPALNR

SEQ ID NO: 11628 - protein, 9 aa, Homo sapiens
  Table A; HLA-A*68:01; TP53; K132R; 0
CTYSPALNR

SEQ ID NO: 11629 - protein, 10 aa, Homo sapiens
  Table A; HLA-A*03:02; RHOA; Y42C; 0
CVADIEVDGK

SEQ ID NO: 11630 - protein, 10 aa, Homo sapiens
  Table A; HLA-A*11:01; RHOA; Y42C; 1
CVADIEVDGK

SEQ ID NO: 11631 - protein, 10 aa, Homo sapiens
  Table A; HLA-A*68:01; RHOA; Y42C; 0
CVADIEVDGK

SEQ ID NO: 11632 - protein, 10 aa, Homo sapiens
  Table A; HLA-A*68:02; RHOA; Y42C; 0
CVADIEVDGK

SEQ ID NO: 11633 - protein, 10 aa, Homo sapiens
  Table A; HLA-B*27:02; RHOA; Y42C; 0
CVADIEVDGK

SEQ ID NO: 11634 - protein, 9 aa, Homo sapiens
  Table A; HLA-B*13:02; KRAS; G13C; 0
CVGKSALTI

SEQ ID NO: 11635 - protein, 11 aa, Homo sapiens
  Table A; HLA-A*03:01; GNAS; R201C; 1
CVLTSGIFETK

SEQ ID NO: 11636 - protein, 11 aa, Homo sapiens
  Table A; HLA-A*03:02; GNAS; R201C; 0
CVLTSGIFETK

SEQ ID NO: 11637 - protein, 11 aa, Homo sapiens
  Table A; HLA-A*11:01; GNAS; R201C; 0
CVLTSGIFETK

SEQ ID NO: 11638 - protein, 11 aa, Homo sapiens
  Table A; HLA-B*27:02; GNAS; R201C; 0
CVLTSGIFETK

SEQ ID NO: 11639 - protein, 9 aa, Homo sapiens
  Table A; HLA-A*03:01; FKBP9; R107H; 1
CVNERHFVK

SEQ ID NO: 11640 - protein, 9 aa, Homo sapiens
  Table A; HLA-A*03:02; FKBP9; R107H; 0
CVNERHFVK

SEQ ID NO: 11641 - protein, 9 aa, Homo sapiens
  Table A; HLA-A*11:01; FKBP9; R107H; 1
CVNERHFVK

SEQ ID NO: 11642 - protein, 8 aa, Homo sapiens
  Table A; HLA-B*14:02; DICER1; S1344L; 0
DAHEGRLL

SEQ ID NO: 11643 - protein, 8 aa, Homo sapiens
  Table A; HLA-B*51:01; DICER1; S1344L; 1
DAHEGRLL

SEQ ID NO: 11644 - protein, 8 aa, Homo sapiens
  Table A; HLA-C*03:04; DICER1; S1344L; 1
DAHEGRLL

SEQ ID NO: 11645 - protein, 8 aa, Homo sapiens
  Table A; HLA-C*16:01; DICER1; S1344L; 0
DAHEGRLL

SEQ ID NO: 11646 - protein, 9 aa, Homo sapiens
  Table A; HLA-A*25:01; DICER1; S1344L; 0
DAHEGRLLY

SEQ ID NO: 11647 - protein, 9 aa, Homo sapiens
  Table A; HLA-A*26:01; DICER1; S1344L; 0
DAHEGRLLY

SEQ ID NO: 11648 - protein, 9 aa, Homo sapiens
  Table A; HLA-A*29:02; DICER1; S1344L; 0
DAHEGRLLY

SEQ ID NO: 11649 - protein, 9 aa, Homo sapiens
  Table A; HLA-A*33:01; DICER1; S1344L; 0
DAHEGRLLY

SEQ ID NO: 11650 - protein, 9 aa, Homo sapiens
  Table A; HLA-B*15:02; DICER1; S1344L; 0
DAHEGRLLY

SEQ ID NO: 11651 - protein, 9 aa, Homo sapiens
  Table A; HLA-B*35:01; DICER1; S1344L; 1
DAHEGRLLY

SEQ ID NO: 11652 - protein, 9 aa, Homo sapiens
  Table A; HLA-B*35:08; DICER1; S1344L; 0
DAHEGRLLY

SEQ ID NO: 11653 - protein, 9 aa, Homo sapiens
  Table A; HLA-B*51:01; DICER1; S1344L; 1
DAHEGRLLY

SEQ ID NO: 11654 - protein, 9 aa, Homo sapiens
  Table A; HLA-C*03:02; DICER1; S1344L; 0
DAHEGRLLY

SEQ ID NO: 11655 - protein, 9 aa, Homo sapiens
  Table A; HLA-C*08:01; DICER1; S1344L; 0
DAHEGRLLY

SEQ ID NO: 11656 - protein, 10 aa, Homo sapiens
  Table A; HLA-A*33:01; DICER1; S1344L; 0
DAHEGRLLYM

SEQ ID NO: 11657 - protein, 10 aa, Homo sapiens
  Table A; HLA-B*51:01; DICER1; S1344L; 1
DAHEGRLLYM

SEQ ID NO: 11658 - protein, 11 aa, Homo sapiens
  Table A; HLA-A*33:01; DICER1; S1344L; 0
DAHEGRLLYMR

SEQ ID NO: 11659 - protein, 10 aa, Homo sapiens
  Table A; HLA-A*33:01; PIK3CA; H1047L; 0
DALHGGWTTK

SEQ ID NO: 11660 - protein, 10 aa, Homo sapiens
  Table A; HLA-A*68:01; PIK3CA; H1047L; 1
DALHGGWTTK

SEQ ID NO: 11661 - protein, 10 aa, Homo sapiens
  Table A; HLA-A*33:01; EZH2; E745K; 0
DALKYVGIKR

SEQ ID NO: 11662 - protein, 10 aa, Homo sapiens
  Table A; HLA-A*33:03; EZH2; E745K; 0
DALKYVGIKR

SEQ ID NO: 11663 - protein, 10 aa, Homo sapiens
  Table A; HLA-A*68:01; EZH2; E745K; 0
DALKYVGIKR

SEQ ID NO: 11664 - protein, 10 aa, Homo sapiens
  Table A; HLA-A*33:01; PIK3CA; H1047Q; 0
DAQHGGWTTK

SEQ ID NO: 11665 - protein, 8 aa, Homo sapiens
  Table A; HLA-B*51:01; CDKN2A; P114L; 1
DAWGRLLV

SEQ ID NO: 11666 - protein, 9 aa, Homo sapiens
  Table A; HLA-A*33:01; PIK3CA; H1047Y; 0
DAYHGGWTT

SEQ ID NO: 11667 - protein, 9 aa, Homo sapiens
  Table A; HLA-B*51:01; PIK3CA; H1047Y; 0
DAYHGGWTT

SEQ ID NO: 11668 - protein, 9 aa, Homo sapiens
  Table A; HLA-B*54:01; PIK3CA; H1047Y; 0
DAYHGGWTT

SEQ ID NO: 11669 - protein, 10 aa, Homo sapiens
  Table A; HLA-A*03:01; PIK3CA; H1047Y; 1
DAYHGGWTTK

SEQ ID NO: 11670 - protein, 10 aa, Homo sapiens
  Table A; HLA-A*33:01; PIK3CA; H1047Y; 0
DAYHGGWTTK

SEQ ID NO: 11671 - protein, 10 aa, Homo sapiens
  Table A; HLA-A*68:01; PIK3CA; H1047Y; 0
DAYHGGWTTK

SEQ ID NO: 11672 - protein, 10 aa, Homo sapiens
  Table A; HLA-A*68:02; PIK3CA; H1047Y; 0
DAYHGGWTTK

SEQ ID NO: 11673 - protein, 10 aa, Homo sapiens
  Table A; HLA-B*27:02; PIK3CA; H1047Y; 0
DAYHGGWTTK

SEQ ID NO: 11674 - protein, 10 aa, Homo sapiens
  Table A; HLA-B*51:01; PIK3CA; H1047Y; 0
DAYHGGWTTK

SEQ ID NO: 11675 - protein, 8 aa, Homo sapiens
  Table A; HLA-B*15:02; FGFR2; Y375C; 0
DCLEIAIY

SEQ ID NO: 11676 - protein, 9 aa, Homo sapiens
  Table A; HLA-A*26:01; TP53; Y234C; 0
DCTTIHCNY

SEQ ID NO: 11677 - protein, 9 aa, Homo sapiens
  Table A; HLA-A*33:01; TP53; Y234C; 0
DCTTIHCNY

SEQ ID NO: 11678 - protein, 8 aa, Homo sapiens
  Table A; HLA-A*33:01; TP53; R213Q; 0
DDRNTFQH

SEQ ID NO: 11679 - protein, 9 aa, Homo sapiens
  Table A; HLA-A*33:01; TP53; R213Q; 0
DDRNTFQHS

SEQ ID NO: 11680 - protein, 8 aa, Homo sapiens
  Table A; HLA-A*33:01; TP53; H214R; 0
DDRNTFRR

SEQ ID NO: 11681 - protein, 8 aa, Homo sapiens
  Table A; HLA-A*23:01; PPP2R1A; R183W; 0
DDTPMVRW

SEQ ID NO: 11682 - protein, 8 aa, Homo sapiens
  Table A; HLA-B*18:01; PPP2R1A; R183W; 1
DDTPMVRW

SEQ ID NO: 11683 - protein, 8 aa, Homo sapiens
  Table A; HLA-B*44:03; PPP2R1A; R183W; 1
DDTPMVRW

SEQ ID NO: 11684 - protein, 8 aa, Homo sapiens
  Table A; HLA-B*44:05; PPP2R1A; R183W; 0
DDTPMVRW

SEQ ID NO: 11685 - protein, 8 aa, Homo sapiens
  Table A; HLA-A*33:01; PPP2R1A; P179R; 0
DDTRMVRR

SEQ ID NO: 11686 - protein, 8 aa, Homo sapiens
  Table A; HLA-A*33:03; PPP2R1A; P179R; 0
DDTRMVRR

SEQ ID NO: 11687 - protein, 8 aa, Homo sapiens
  Table A; HLA-B*44:03; PIK3CB; E1051K; 0
DEALRKSW

SEQ ID NO: 11688 - protein, 8 aa, Homo sapiens
  Table A; HLA-B*18:01; CNTNAP2; R483Q; 1
DEASAVQT

SEQ ID NO: 11689 - protein, 8 aa, Homo sapiens
  Table A; HLA-B*18:01; NFE2L2; T80P; 0
DEEPGEFL

SEQ ID NO: 11690 - protein, 9 aa, Homo sapiens
  Table A; HLA-B*18:01; RGS7; R44C; 1
DEKNGIPIC

SEQ ID NO: 11691 - protein, 9 aa, Homo sapiens
  Table A; HLA-B*40:02; RGS7; R44C; 0
DEKNGIPIC

SEQ ID NO: 11692 - protein, 9 aa, Homo sapiens
  Table A; HLA-B*40:06; RGS7; R44C; 0
DEKNGIPIC

SEQ ID NO: 11693 - protein, 9 aa, Homo sapiens
  Table A; HLA-B*41:02; RGS7; R44C; 0
DEKNGIPIC

SEQ ID NO: 11694 - protein, 9 aa, Homo sapiens
  Table A; HLA-B*50:01; RGS7; R44C; 0
DEKNGIPIC

SEQ ID NO: 11695 - protein, 9 aa, Homo sapiens
  Table A; HLA-A*23:01; SF3B1; K700E; 0
DEQQEVRTI

SEQ ID NO: 11696 - protein, 9 aa, Homo sapiens
  Table A; HLA-A*30:01; SF3B1; K700E; 0
DEQQEVRTI

SEQ ID NO: 11697 - protein, 9 aa, Homo sapiens
  Table A; HLA-B*14:02; SF3B1; K700E; 0
DEQQEVRTI

SEQ ID NO: 11698 - protein, 9 aa, Homo sapiens
  Table A; HLA-B*18:01; SF3B1; K700E; 1
DEQQEVRTI

SEQ ID NO: 11699 - protein, 9 aa, Homo sapiens
  Table A; HLA-B*38:01; SF3B1; K700E; 0
DEQQEVRTI

SEQ ID NO: 11700 - protein, 9 aa, Homo sapiens
  Table A; HLA-B*39:01; SF3B1; K700E; 0
DEQQEVRTI

SEQ ID NO: 11701 - protein, 9 aa, Homo sapiens
  Table A; HLA-B*40:01; SF3B1; K700E; 1
DEQQEVRTI

SEQ ID NO: 11702 - protein, 9 aa, Homo sapiens
  Table A; HLA-B*40:02; SF3B1; K700E; 0
DEQQEVRTI

SEQ ID NO: 11703 - protein, 9 aa, Homo sapiens
  Table A; HLA-B*41:02; SF3B1; K700E; 0
DEQQEVRTI

SEQ ID NO: 11704 - protein, 9 aa, Homo sapiens
  Table A; HLA-B*44:02; SF3B1; K700E; 1
DEQQEVRTI

SEQ ID NO: 11705 - protein, 9 aa, Homo sapiens
  Table A; HLA-B*44:03; SF3B1; K700E; 1
DEQQEVRTI

SEQ ID NO: 11706 - protein, 9 aa, Homo sapiens
  Table A; HLA-B*44:05; SF3B1; K700E; 0
DEQQEVRTI

SEQ ID NO: 11707 - protein, 9 aa, Homo sapiens
  Table A; HLA-B*49:01; SF3B1; K700E; 0
DEQQEVRTI

SEQ ID NO: 11708 - protein, 9 aa, Homo sapiens
  Table A; HLA-B*51:01; SF3B1; K700E; 1
DEQQEVRTI

SEQ ID NO: 11709 - protein, 9 aa, Homo sapiens
  Table A; HLA-B*58:01; SF3B1; K700E; 0
DEQQEVRTI

SEQ ID NO: 11710 - protein, 11 aa, Homo sapiens
  Table A; HLA-B*39:06; SF3B1; K700E; 0
DEQQEVRTISA

SEQ ID NO: 11711 - protein, 8 aa, Homo sapiens
  Table A; HLA-B*18:01; NFE2L2; E79Q; 1
DEQTGEFL

SEQ ID NO: 11712 - protein, 9 aa, Homo sapiens
  Table A; HLA-B*18:01; PIK3CA; R88Q; 1
DETRQLCDL

SEQ ID NO: 11713 - protein, 8 aa, Homo sapiens
  Table A; HLA-B*18:01; SF3B1; R625C; 0
DEYVCNTT

SEQ ID NO: 11714 - protein, 9 aa, Homo sapiens
  Table A; HLA-A*02:05; SF3B1; R625C; 0
DEYVCNTTA

SEQ ID NO: 11715 - protein, 9 aa, Homo sapiens
  Table A; HLA-B*14:02; SF3B1; R625C; 0
DEYVCNTTA

SEQ ID NO: 11716 - protein, 9 aa, Homo sapiens
  Table A; HLA-B*18:01; SF3B1; R625C; 0
DEYVCNTTA

SEQ ID NO: 11717 - protein, 9 aa, Homo sapiens
  Table A; HLA-B*39:06; SF3B1; R625C; 0
DEYVCNTTA

SEQ ID NO: 11718 - protein, 9 aa, Homo sapiens
  Table A; HLA-B*40:06; SF3B1; R625C; 0
DEYVCNTTA

SEQ ID NO: 11719 - protein, 9 aa, Homo sapiens
  Table A; HLA-B*49:01; SF3B1; R625C; 0
DEYVCNTTA

SEQ ID NO: 11720 - protein, 9 aa, Homo sapiens
  Table A; HLA-B*50:01; SF3B1; R625C; 0
DEYVCNTTA

SEQ ID NO: 11721 - protein, 8 aa, Homo sapiens
  Table A; HLA-B*08:01; SF3B1; R625H; 1
DEYVHNTT

SEQ ID NO: 11722 - protein, 8 aa, Homo sapiens
  Table A; HLA-B*14:01; SF3B1; R625H; 0
DEYVHNTT

SEQ ID NO: 11723 - protein, 8 aa, Homo sapiens
  Table A; HLA-B*14:02; SF3B1; R625H; 0
DEYVHNTT

SEQ ID NO: 11724 - protein, 8 aa, Homo sapiens
  Table A; HLA-B*18:01; SF3B1; R625H; 0
DEYVHNTT

SEQ ID NO: 11725 - protein, 8 aa, Homo sapiens
  Table A; HLA-B*39:06; SF3B1; R625H; 0
DEYVHNTT

SEQ ID NO: 11726 - protein, 8 aa, Homo sapiens
  Table A; HLA-B*40:02; SF3B1; R625H; 0
DEYVHNTT

SEQ ID NO: 11727 - protein, 9 aa, Homo sapiens
  Table A; HLA-A*02:05; SF3B1; R625H; 0
DEYVHNTTA

SEQ ID NO: 11728 - protein, 9 aa, Homo sapiens
  Table A; HLA-A*02:08; SF3B1; R625H; 0
DEYVHNTTA

SEQ ID NO: 11729 - protein, 9 aa, Homo sapiens
  Table A; HLA-A*23:01; SF3B1; R625H; 0
DEYVHNTTA

SEQ ID NO: 11730 - protein, 9 aa, Homo sapiens
  Table A; HLA-A*30:01; SF3B1; R625H; 0
DEYVHNTTA

SEQ ID NO: 11731 - protein, 9 aa, Homo sapiens
  Table A; HLA-B*08:01; SF3B1; R625H; 1
DEYVHNTTA

SEQ ID NO: 11732 - protein, 9 aa, Homo sapiens
  Table A; HLA-B*14:01; SF3B1; R625H; 0
DEYVHNTTA

SEQ ID NO: 11733 - protein, 9 aa, Homo sapiens
  Table A; HLA-B*14:02; SF3B1; R625H; 0
DEYVHNTTA

SEQ ID NO: 11734 - protein, 9 aa, Homo sapiens
  Table A; HLA-B*15:02; SF3B1; R625H; 0
DEYVHNTTA

SEQ ID NO: 11735 - protein, 9 aa, Homo sapiens
  Table A; HLA-B*18:01; SF3B1; R625H; 0
DEYVHNTTA

SEQ ID NO: 11736 - protein, 9 aa, Homo sapiens
  Table A; HLA-B*37:01; SF3B1; R625H; 0
DEYVHNTTA

SEQ ID NO: 11737 - protein, 9 aa, Homo sapiens
  Table A; HLA-B*39:06; SF3B1; R625H; 0
DEYVHNTTA

SEQ ID NO: 11738 - protein, 9 aa, Homo sapiens
  Table A; HLA-B*40:02; SF3B1; R625H; 0
DEYVHNTTA

SEQ ID NO: 11739 - protein, 9 aa, Homo sapiens
  Table A; HLA-B*40:06; SF3B1; R625H; 0
DEYVHNTTA

SEQ ID NO: 11740 - protein, 9 aa, Homo sapiens
  Table A; HLA-B*41:02; SF3B1; R625H; 0
DEYVHNTTA

SEQ ID NO: 11741 - protein, 9 aa, Homo sapiens
  Table A; HLA-B*44:05; SF3B1; R625H; 0
DEYVHNTTA

SEQ ID NO: 11742 - protein, 9 aa, Homo sapiens
  Table A; HLA-B*48:01; SF3B1; R625H; 0
DEYVHNTTA

SEQ ID NO: 11743 - protein, 9 aa, Homo sapiens
  Table A; HLA-B*49:01; SF3B1; R625H; 0
DEYVHNTTA

SEQ ID NO: 11744 - protein, 9 aa, Homo sapiens
  Table A; HLA-B*50:01; SF3B1; R625H; 0
DEYVHNTTA

SEQ ID NO: 11745 - protein, 9 aa, Homo sapiens
  Table A; HLA-B*51:01; SF3B1; R625H; 0
DEYVHNTTA

SEQ ID NO: 11746 - protein, 9 aa, Homo sapiens
  Table A; HLA-B*54:01; SF3B1; R625H; 0
DEYVHNTTA

SEQ ID NO: 11747 - protein, 9 aa, Homo sapiens
  Table A; HLA-C*03:02; SF3B1; R625H; 0
DEYVHNTTA

SEQ ID NO: 11748 - protein, 9 aa, Homo sapiens
  Table A; HLA-C*08:01; SF3B1; R625H; 0
DEYVHNTTA

SEQ ID NO: 11749 - protein, 10 aa, Homo sapiens
  Table A; HLA-A*33:01; SF3B1; R625H; 0
DEYVHNTTAR

SEQ ID NO: 11750 - protein, 10 aa, Homo sapiens
  Table A; HLA-A*68:01; SF3B1; R625H; 0
DEYVHNTTAR

SEQ ID NO: 11751 - protein, 10 aa, Homo sapiens
  Table A; HLA-B*27:02; SF3B1; R625H; 0
DEYVHNTTAR

SEQ ID NO: 11752 - protein, 8 aa, Homo sapiens
  Table A; HLA-C*08:03; PIK3CA; D939G; 0
DFGHFLGH

SEQ ID NO: 11753 - protein, 8 aa, Homo sapiens
  Table A; HLA-A*33:03; CTNNB1; S33F; 0
DFGIHSGA

SEQ ID NO: 11754 - protein, 8 aa, Homo sapiens
  Table A; HLA-B*39:06; CTNNB1; S33F; 0
DFGIHSGA

SEQ ID NO: 11755 - protein, 8 aa, Homo sapiens
  Table A; HLA-B*48:01; CTNNB1; S33F; 0
DFGIHSGA

SEQ ID NO: 11756 - protein, 8 aa, Homo sapiens
  Table A; HLA-C*08:03; CTNNB1; S33F; 0
DFGIHSGA

SEQ ID NO: 11757 - protein, 9 aa, Homo sapiens
  Table A; HLA-B*48:01; CTNNB1; S33F; 0
DFGIHSGAT

SEQ ID NO: 11758 - protein, 9 aa, Homo sapiens
  Table A; HLA-C*08:03; CTNNB1; S33F; 0
DFGIHSGAT

SEQ ID NO: 11759 - protein, 8 aa, Homo sapiens
  Table A; HLA-B*08:01; EGFR; L861Q; 1
DFGLAKQL

SEQ ID NO: 11760 - protein, 9 aa, Homo sapiens
  Table A; HLA-A*23:01; KNSTRN; S24F; 0
DFHPLPPSY

SEQ ID NO: 11761 - protein, 9 aa, Homo sapiens
  Table A; HLA-A*26:01; KNSTRN; S24F; 1
DFHPLPPSY

SEQ ID NO: 11762 - protein, 9 aa, Homo sapiens
  Table A; HLA-A*29:01; KNSTRN; S24F; 0
DFHPLPPSY

SEQ ID NO: 11763 - protein, 9 aa, Homo sapiens
  Table A; HLA-A*29:02; KNSTRN; S24F; 1
DFHPLPPSY

SEQ ID NO: 11764 - protein, 9 aa, Homo sapiens
  Table A; HLA-A*30:02; KNSTRN; S24F; 0
DFHPLPPSY

SEQ ID NO: 11765 - protein, 9 aa, Homo sapiens
  Table A; HLA-B*15:02; KNSTRN; S24F; 0
DFHPLPPSY

SEQ ID NO: 11766 - protein, 9 aa, Homo sapiens
  Table A; HLA-B*18:01; KNSTRN; S24F; 1
DFHPLPPSY

SEQ ID NO: 11767 - protein, 9 aa, Homo sapiens
  Table A; HLA-B*35:01; KNSTRN; S24F; 1
DFHPLPPSY

SEQ ID NO: 11768 - protein, 9 aa, Homo sapiens
  Table A; HLA-B*39:01; KNSTRN; S24F; 0
DFHPLPPSY

SEQ ID NO: 11769 - protein, 9 aa, Homo sapiens
  Table A; HLA-C*08:01; KNSTRN; S24F; 0
DFHPLPPSY

SEQ ID NO: 11770 - protein, 9 aa, Homo sapiens
  Table A; HLA-C*14:02; KNSTRN; S24F; 0
DFHPLPPSY

SEQ ID NO: 11771 - protein, 10 aa, Homo sapiens
  Table A; HLA-A*33:01; KNSTRN; S24F; 0
DFHPLPPSYR

SEQ ID NO: 11772 - protein, 10 aa, Homo sapiens
  Table A; HLA-A*33:03; KNSTRN; S24F; 0
DFHPLPPSYR

SEQ ID NO: 11773 - protein, 8 aa, Homo sapiens
  Table A; HLA-B*39:06; NFE2L2; E82D; 0
DFLPIQPA

SEQ ID NO: 11774 - protein, 9 aa, Homo sapiens
  Table A; HLA-B*35:03; TPR; S2155L; 0
DGFAEAIHL

SEQ ID NO: 11775 - protein, 9 aa, Homo sapiens
  Table A; HLA-B*51:01; TPR; S2155L; 0
DGFAEAIHL

SEQ ID NO: 11776 - protein, 9 aa, Homo sapiens
  Table A; HLA-A*26:01; CREB3L1; V414I; 0
DGIYTASQM

SEQ ID NO: 11777 - protein, 9 aa, Homo sapiens
  Table A; HLA-A*26:02; CREB3L1; V414I; 0
DGIYTASQM

SEQ ID NO: 11778 - protein, 9 aa, Homo sapiens
  Table A; HLA-B*08:01; CREB3L1; V414I; 0
DGIYTASQM

SEQ ID NO: 11779 - protein, 9 aa, Homo sapiens
  Table A; HLA-B*15:02; CREB3L1; V414I; 0
DGIYTASQM

SEQ ID NO: 11780 - protein, 9 aa, Homo sapiens
  Table A; HLA-B*35:01; CREB3L1; V414I; 0
DGIYTASQM

SEQ ID NO: 11781 - protein, 9 aa, Homo sapiens
  Table A; HLA-B*51:01; CREB3L1; V414I; 0
DGIYTASQM

SEQ ID NO: 11782 - protein, 9 aa, Homo sapiens
  Table A; HLA-C*08:01; CREB3L1; V414I; 0
DGIYTASQM

SEQ ID NO: 11783 - protein, 11 aa, Homo sapiens
  Table A; HLA-A*33:01; TP53; I195N; 0
DGLAPPQHLNR

SEQ ID NO: 11784 - protein, 11 aa, Homo sapiens
  Table A; HLA-A*33:03; TP53; I195N; 0
DGLAPPQHLNR

SEQ ID NO: 11785 - protein, 11 aa, Homo sapiens
  Table A; HLA-A*33:01; TP53; I195T; 0
DGLAPPQHLTR

SEQ ID NO: 11786 - protein, 11 aa, Homo sapiens
  Table A; HLA-A*33:03; TP53; I195T; 0
DGLAPPQHLTR

SEQ ID NO: 11787 - protein, 11 aa, Homo sapiens
  Table A; HLA-A*68:01; TP53; I195T; 0
DGLAPPQHLTR

SEQ ID NO: 11788 - protein, 9 aa, Homo sapiens
  Table A; HLA-A*33:01; TP53; L194R; 0
DGLAPPQHR

SEQ ID NO: 11789 - protein, 9 aa, Homo sapiens
  Table A; HLA-A*33:03; TP53; L194R; 0
DGLAPPQHR

SEQ ID NO: 11790 - protein, 9 aa, Homo sapiens
  Table A; HLA-A*68:01; TP53; L194R; 0
DGLAPPQHR

SEQ ID NO: 11791 - protein, 10 aa, Homo sapiens
  Table A; HLA-B*51:01; TP53; L194R; 1
DGLAPPQHRI

SEQ ID NO: 11792 - protein, 11 aa, Homo sapiens
  Table A; HLA-A*33:01; TP53; L194R; 0
DGLAPPQHRIR

SEQ ID NO: 11793 - protein, 8 aa, Homo sapiens
  Table A; HLA-B*39:01; TP53; H193L; 0
DGLAPPQL

SEQ ID NO: 11794 - protein, 8 aa, Homo sapiens
  Table A; HLA-B*51:01; TP53; H193L; 0
DGLAPPQL

SEQ ID NO: 11795 - protein, 9 aa, Homo sapiens
  Table A; HLA-B*51:01; TP53; H193L; 0
DGLAPPQLL

SEQ ID NO: 11796 - protein, 10 aa, Homo sapiens
  Table A; HLA-B*51:01; TP53; H193L; 0
DGLAPPQLLI

SEQ ID NO: 11797 - protein, 11 aa, Homo sapiens
  Table A; HLA-A*33:01; TP53; H193L; 0
DGLAPPQLLIR

SEQ ID NO: 11798 - protein, 9 aa, Homo sapiens
  Table A; HLA-B*51:01; TP53; H193R; 0
DGLAPPQRL

SEQ ID NO: 11799 - protein, 10 aa, Homo sapiens
  Table A; HLA-B*51:01; TP53; H193R; 0
DGLAPPQRLI

SEQ ID NO: 11800 - protein, 11 aa, Homo sapiens
  Table A; HLA-A*33:01; TP53; H193R; 0
DGLAPPQRLIR

SEQ ID NO: 11801 - protein, 8 aa, Homo sapiens
  Table A; HLA-B*15:02; TP53; H193Y; 0
DGLAPPQY

SEQ ID NO: 11802 - protein, 8 aa, Homo sapiens
  Table A; HLA-B*18:01; TP53; H193Y; 0
DGLAPPQY

SEQ ID NO: 11803 - protein, 8 aa, Homo sapiens
  Table A; HLA-B*35:01; TP53; H193Y; 0
DGLAPPQY

SEQ ID NO: 11804 - protein, 8 aa, Homo sapiens
  Table A; HLA-B*39:01; TP53; H193Y; 0
DGLAPPQY

SEQ ID NO: 11805 - protein, 8 aa, Homo sapiens
  Table A; HLA-B*51:01; TP53; H193Y; 0
DGLAPPQY

SEQ ID NO: 11806 - protein, 11 aa, Homo sapiens
  Table A; HLA-A*33:01; TP53; H193Y; 0
DGLAPPQYLIR

SEQ ID NO: 11807 - protein, 8 aa, Homo sapiens
  Table A; HLA-B*51:01; PTPRT; E324K; 1
DGPIILKK

SEQ ID NO: 11808 - protein, 9 aa, Homo sapiens
  Table A; HLA-B*51:01; PTPRT; E324K; 1
DGPIILKKV

SEQ ID NO: 11809 - protein, 9 aa, Homo sapiens
  Table A; HLA-A*33:01; EP300; A1629V; 0
DGRDVFLTL

SEQ ID NO: 11810 - protein, 9 aa, Homo sapiens
  Table A; HLA-B*51:01; EP300; A1629V; 1
DGRDVFLTL

SEQ ID NO: 11811 - protein, 8 aa, Homo sapiens
  Table A; HLA-B*08:01; KRAS; G12D; 1
DGVGKSAL

SEQ ID NO: 11812 - protein, 8 aa, Homo sapiens
  Table A; HLA-B*14:01; KRAS; G12D; 1
DGVGKSAL

SEQ ID NO: 11813 - protein, 8 aa, Homo sapiens
  Table A; HLA-B*14:02; KRAS; G12D; 1
DGVGKSAL

SEQ ID NO: 11814 - protein, 8 aa, Homo sapiens
  Table A; HLA-B*07:02; NRAS; G12D; 1
DGVGKSAL

SEQ ID NO: 11815 - protein, 8 aa, Homo sapiens
  Table A; HLA-B*08:01; NRAS; G12D; 1
DGVGKSAL

SEQ ID NO: 11816 - protein, 8 aa, Homo sapiens
  Table A; HLA-B*14:01; NRAS; G12D; 0
DGVGKSAL

SEQ ID NO: 11817 - protein, 8 aa, Homo sapiens
  Table A; HLA-B*14:02; NRAS; G12D; 0
DGVGKSAL

SEQ ID NO: 11818 - protein, 8 aa, Homo sapiens
  Table A; HLA-B*48:01; NRAS; G12D; 0
DGVGKSAL

SEQ ID NO: 11819 - protein, 9 aa, Homo sapiens
  Table A; HLA-B*39:01; NRAS; G12D; 0
DGVGKSALT

SEQ ID NO: 11820 - protein, 10 aa, Homo sapiens
  Table A; HLA-B*51:01; KRAS; G12D; 1
DGVGKSALTI

SEQ ID NO: 11821 - protein, 10 aa, Homo sapiens
  Table A; HLA-B*51:01; NRAS; G12D; 0
DGVGKSALTI

SEQ ID NO: 11822 - protein, 8 aa, Homo sapiens
  Table A; HLA-B*08:01; CNTNAP2; E149K; 1
DGVVRHKL

SEQ ID NO: 11823 - protein, 8 aa, Homo sapiens
  Table A; HLA-B*14:02; CNTNAP2; E149K; 0
DGVVRHKL

SEQ ID NO: 11824 - protein, 8 aa, Homo sapiens
  Table A; HLA-B*15:10; TGFBR2; R528C; 0
DHDPEACL

SEQ ID NO: 11825 - protein, 8 aa, Homo sapiens
  Table A; HLA-B*35:02; TGFBR2; R528C; 0
DHDPEACL

SEQ ID NO: 11826 - protein, 8 aa, Homo sapiens
  Table A; HLA-B*35:12; TGFBR2; R528C; 0
DHDPEACL

SEQ ID NO: 11827 - protein, 8 aa, Homo sapiens
  Table A; HLA-B*38:01; TGFBR2; R528C; 0
DHDPEACL

SEQ ID NO: 11828 - protein, 8 aa, Homo sapiens
  Table A; HLA-B*39:01; TGFBR2; R528C; 0
DHDPEACL

SEQ ID NO: 11829 - protein, 8 aa, Homo sapiens
  Table A; HLA-B*39:06; SMAD4; R361H; 0
DHFCLGQL

SEQ ID NO: 11830 - protein, 10 aa, Homo sapiens
  Table A; HLA-B*39:06; PLCG1; R1275Q; 0
DHFDSQERRA

SEQ ID NO: 11831 - protein, 11 aa, Homo sapiens
  Table A; HLA-B*35:01; NFE2L2; R34G; 0
DIDLGVSGEVF

SEQ ID NO: 11832 - protein, 11 aa, Homo sapiens
  Table A; HLA-B*35:08; NFE2L2; R34G; 0
DIDLGVSGEVF

SEQ ID NO: 11833 - protein, 11 aa, Homo sapiens
  Table A; HLA-B*35:12; NFE2L2; R34G; 0
DIDLGVSGEVF

SEQ ID NO: 11834 - protein, 11 aa, Homo sapiens
  Table A; HLA-B*38:01; NFE2L2; R34G; 0
DIDLGVSGEVF

SEQ ID NO: 11835 - protein, 11 aa, Homo sapiens
  Table A; HLA-B*39:01; NFE2L2; R34G; 0
DIDLGVSGEVF

SEQ ID NO: 11836 - protein, 11 aa, Homo sapiens
  Table A; HLA-B*35:08; NFE2L2; R34Q; 0
DIDLGVSQEVF

SEQ ID NO: 11837 - protein, 11 aa, Homo sapiens
  Table A; HLA-B*38:01; NFE2L2; R34Q; 0
DIDLGVSQEVF

SEQ ID NO: 11838 - protein, 8 aa, Homo sapiens
  Table A; HLA-A*33:01; NFE2L2; D29G; 0
DIGLGVSR

SEQ ID NO: 11839 - protein, 8 aa, Homo sapiens
  Table A; HLA-A*33:03; NFE2L2; D29G; 0
DIGLGVSR

SEQ ID NO: 11840 - protein, 8 aa, Homo sapiens
  Table A; HLA-A*68:01; NFE2L2; D29G; 0
DIGLGVSR

SEQ ID NO: 11841 - protein, 8 aa, Homo sapiens
  Table A; HLA-A*26:03; NFE2L2; D29H; 0
DIHLGVSR

SEQ ID NO: 11842 - protein, 8 aa, Homo sapiens
  Table A; HLA-A*33:01; NFE2L2; D29H; 0
DIHLGVSR

SEQ ID NO: 11843 - protein, 8 aa, Homo sapiens
  Table A; HLA-A*33:03; NFE2L2; D29H; 0
DIHLGVSR

SEQ ID NO: 11844 - protein, 8 aa, Homo sapiens
  Table A; HLA-A*68:01; NFE2L2; D29H; 0
DIHLGVSR

SEQ ID NO: 11845 - protein, 8 aa, Homo sapiens
  Table A; HLA-B*15:02; NFE2L2; D29H; 0
DIHLGVSR

SEQ ID NO: 11846 - protein, 8 aa, Homo sapiens
  Table A; HLA-B*48:01; NFE2L2; D29H; 0
DIHLGVSR

SEQ ID NO: 11847 - protein, 10 aa, Homo sapiens
  Table A; HLA-A*33:03; NRAS; Q61H; 0
DILDTAGHEE

SEQ ID NO: 11848 - protein, 11 aa, Homo sapiens
  Table A; HLA-A*26:01; KRAS; Q61H; 1
DILDTAGHEEY

SEQ ID NO: 11849 - protein, 11 aa, Homo sapiens
  Table A; HLA-A*26:02; KRAS; Q61H; 0
DILDTAGHEEY

SEQ ID NO: 11850 - protein, 11 aa, Homo sapiens
  Table A; HLA-A*26:03; KRAS; Q61H; 0
DILDTAGHEEY

SEQ ID NO: 11851 - protein, 11 aa, Homo sapiens
  Table A; HLA-A*29:01; KRAS; Q61H; 0
DILDTAGHEEY

SEQ ID NO: 11852 - protein, 11 aa, Homo sapiens
  Table A; HLA-A*29:02; KRAS; Q61H; 1
DILDTAGHEEY

SEQ ID NO: 11853 - protein, 11 aa, Homo sapiens
  Table A; HLA-A*33:01; KRAS; Q61H; 0
DILDTAGHEEY

SEQ ID NO: 11854 - protein, 11 aa, Homo sapiens
  Table A; HLA-A*68:01; KRAS; Q61H; 1
DILDTAGHEEY

SEQ ID NO: 11855 - protein, 11 aa, Homo sapiens
  Table A; HLA-B*08:01; KRAS; Q61H; 1
DILDTAGHEEY

SEQ ID NO: 11856 - protein, 11 aa, Homo sapiens
  Table A; HLA-B*15:01; KRAS; Q61H; 1
DILDTAGHEEY

SEQ ID NO: 11857 - protein, 11 aa, Homo sapiens
  Table A; HLA-B*15:02; KRAS; Q61H; 0
DILDTAGHEEY

SEQ ID NO: 11858 - protein, 11 aa, Homo sapiens
  Table A; HLA-B*18:01; KRAS; Q61H; 1
DILDTAGHEEY

SEQ ID NO: 11859 - protein, 11 aa, Homo sapiens
  Table A; HLA-B*27:02; KRAS; Q61H; 0
DILDTAGHEEY

SEQ ID NO: 11860 - protein, 11 aa, Homo sapiens
  Table A; HLA-B*35:01; KRAS; Q61H; 1
DILDTAGHEEY

SEQ ID NO: 11861 - protein, 11 aa, Homo sapiens
  Table A; HLA-B*35:08; KRAS; Q61H; 0
DILDTAGHEEY

SEQ ID NO: 11862 - protein, 11 aa, Homo sapiens
  Table A; HLA-C*08:01; KRAS; Q61H; 0
DILDTAGHEEY

SEQ ID NO: 11863 - protein, 11 aa, Homo sapiens
  Table A; HLA-A*25:01; NRAS; Q61H; 0
DILDTAGHEEY

SEQ ID NO: 11864 - protein, 11 aa, Homo sapiens
  Table A; HLA-A*26:01; NRAS; Q61H; 0
DILDTAGHEEY

SEQ ID NO: 11865 - protein, 11 aa, Homo sapiens
  Table A; HLA-A*26:02; NRAS; Q61H; 0
DILDTAGHEEY

SEQ ID NO: 11866 - protein, 11 aa, Homo sapiens
  Table A; HLA-A*26:03; NRAS; Q61H; 0
DILDTAGHEEY

SEQ ID NO: 11867 - protein, 11 aa, Homo sapiens
  Table A; HLA-A*29:01; NRAS; Q61H; 0
DILDTAGHEEY

SEQ ID NO: 11868 - protein, 11 aa, Homo sapiens
  Table A; HLA-A*29:02; NRAS; Q61H; 0
DILDTAGHEEY

SEQ ID NO: 11869 - protein, 11 aa, Homo sapiens
  Table A; HLA-A*30:02; NRAS; Q61H; 0
DILDTAGHEEY

SEQ ID NO: 11870 - protein, 11 aa, Homo sapiens
  Table A; HLA-A*33:01; NRAS; Q61H; 0
DILDTAGHEEY

SEQ ID NO: 11871 - protein, 11 aa, Homo sapiens
  Table A; HLA-A*68:01; NRAS; Q61H; 0
DILDTAGHEEY

SEQ ID NO: 11872 - protein, 11 aa, Homo sapiens
  Table A; HLA-B*08:01; NRAS; Q61H; 1
DILDTAGHEEY

SEQ ID NO: 11873 - protein, 11 aa, Homo sapiens
  Table A; HLA-B*15:01; NRAS; Q61H; 1
DILDTAGHEEY

SEQ ID NO: 11874 - protein, 11 aa, Homo sapiens
  Table A; HLA-B*15:02; NRAS; Q61H; 0
DILDTAGHEEY

SEQ ID NO: 11875 - protein, 11 aa, Homo sapiens
  Table A; HLA-B*18:01; NRAS; Q61H; 1
DILDTAGHEEY

SEQ ID NO: 11876 - protein, 11 aa, Homo sapiens
  Table A; HLA-B*27:02; NRAS; Q61H; 0
DILDTAGHEEY

SEQ ID NO: 11877 - protein, 11 aa, Homo sapiens
  Table A; HLA-B*35:01; NRAS; Q61H; 1
DILDTAGHEEY

SEQ ID NO: 11878 - protein, 11 aa, Homo sapiens
  Table A; HLA-B*35:08; NRAS; Q61H; 0
DILDTAGHEEY

SEQ ID NO: 11879 - protein, 11 aa, Homo sapiens
  Table A; HLA-C*08:01; NRAS; Q61H; 0
DILDTAGHEEY

SEQ ID NO: 11880 - protein, 11 aa, Homo sapiens
  Table A; HLA-A*26:01; HRAS; Q61K; 0
DILDTAGKEEY

SEQ ID NO: 11881 - protein, 11 aa, Homo sapiens
  Table A; HLA-A*26:02; HRAS; Q61K; 0
DILDTAGKEEY

SEQ ID NO: 11882 - protein, 11 aa, Homo sapiens
  Table A; HLA-A*33:01; HRAS; Q61K; 0
DILDTAGKEEY

SEQ ID NO: 11883 - protein, 11 aa, Homo sapiens
  Table A; HLA-B*15:01; HRAS; Q61K; 0
DILDTAGKEEY

SEQ ID NO: 11884 - protein, 11 aa, Homo sapiens
  Table A; HLA-B*15:02; HRAS; Q61K; 0
DILDTAGKEEY

SEQ ID NO: 11885 - protein, 11 aa, Homo sapiens
  Table A; HLA-B*27:02; HRAS; Q61K; 0
DILDTAGKEEY

SEQ ID NO: 11886 - protein, 11 aa, Homo sapiens
  Table A; HLA-B*35:01; HRAS; Q61K; 0
DILDTAGKEEY

SEQ ID NO: 11887 - protein, 11 aa, Homo sapiens
  Table A; HLA-B*35:08; HRAS; Q61K; 0
DILDTAGKEEY

SEQ ID NO: 11888 - protein, 11 aa, Homo sapiens
  Table A; HLA-A*26:01; NRAS; Q61K; 1
DILDTAGKEEY

SEQ ID NO: 11889 - protein, 11 aa, Homo sapiens
  Table A; HLA-A*26:02; NRAS; Q61K; 0
DILDTAGKEEY

SEQ ID NO: 11890 - protein, 11 aa, Homo sapiens
  Table A; HLA-A*33:01; NRAS; Q61K; 1
DILDTAGKEEY

SEQ ID NO: 11891 - protein, 11 aa, Homo sapiens
  Table A; HLA-B*15:01; NRAS; Q61K; 1
DILDTAGKEEY

SEQ ID NO: 11892 - protein, 11 aa, Homo sapiens
  Table A; HLA-B*15:02; NRAS; Q61K; 0
DILDTAGKEEY

SEQ ID NO: 11893 - protein, 11 aa, Homo sapiens
  Table A; HLA-B*27:02; NRAS; Q61K; 0
DILDTAGKEEY

SEQ ID NO: 11894 - protein, 11 aa, Homo sapiens
  Table A; HLA-B*35:01; NRAS; Q61K; 1
DILDTAGKEEY

SEQ ID NO: 11895 - protein, 11 aa, Homo sapiens
  Table A; HLA-B*35:08; NRAS; Q61K; 0
DILDTAGKEEY

SEQ ID NO: 11896 - protein, 11 aa, Homo sapiens
  Table A; HLA-C*08:03; NRAS; Q61K; 0
DILDTAGKEEY

SEQ ID NO: 11897 - protein, 11 aa, Homo sapiens
  Table A; HLA-A*25:01; KRAS; Q61L; 0
DILDTAGLEEY

SEQ ID NO: 11898 - protein, 11 aa, Homo sapiens
  Table A; HLA-A*26:01; KRAS; Q61L; 0
DILDTAGLEEY

SEQ ID NO: 11899 - protein, 11 aa, Homo sapiens
  Table A; HLA-A*26:02; KRAS; Q61L; 0
DILDTAGLEEY

SEQ ID NO: 11900 - protein, 11 aa, Homo sapiens
  Table A; HLA-A*26:03; KRAS; Q61L; 0
DILDTAGLEEY

SEQ ID NO: 11901 - protein, 11 aa, Homo sapiens
  Table A; HLA-A*29:01; KRAS; Q61L; 0
DILDTAGLEEY

SEQ ID NO: 11902 - protein, 11 aa, Homo sapiens
  Table A; HLA-A*29:02; KRAS; Q61L; 0
DILDTAGLEEY

SEQ ID NO: 11903 - protein, 11 aa, Homo sapiens
  Table A; HLA-A*30:02; KRAS; Q61L; 0
DILDTAGLEEY

SEQ ID NO: 11904 - protein, 11 aa, Homo sapiens
  Table A; HLA-A*33:01; KRAS; Q61L; 0
DILDTAGLEEY

SEQ ID NO: 11905 - protein, 11 aa, Homo sapiens
  Table A; HLA-B*15:01; KRAS; Q61L; 0
DILDTAGLEEY

SEQ ID NO: 11906 - protein, 11 aa, Homo sapiens
  Table A; HLA-B*15:02; KRAS; Q61L; 0
DILDTAGLEEY

SEQ ID NO: 11907 - protein, 11 aa, Homo sapiens
  Table A; HLA-B*27:02; KRAS; Q61L; 0
DILDTAGLEEY

SEQ ID NO: 11908 - protein, 11 aa, Homo sapiens
  Table A; HLA-B*35:01; KRAS; Q61L; 0
DILDTAGLEEY

SEQ ID NO: 11909 - protein, 11 aa, Homo sapiens
  Table A; HLA-B*35:08; KRAS; Q61L; 0
DILDTAGLEEY

SEQ ID NO: 11910 - protein, 11 aa, Homo sapiens
  Table A; HLA-A*25:01; NRAS; Q61L; 1
DILDTAGLEEY

SEQ ID NO: 11911 - protein, 11 aa, Homo sapiens
  Table A; HLA-A*26:01; NRAS; Q61L; 1
DILDTAGLEEY

SEQ ID NO: 11912 - protein, 11 aa, Homo sapiens
  Table A; HLA-A*26:02; NRAS; Q61L; 0
DILDTAGLEEY

SEQ ID NO: 11913 - protein, 11 aa, Homo sapiens
  Table A; HLA-A*26:03; NRAS; Q61L; 0
DILDTAGLEEY

SEQ ID NO: 11914 - protein, 11 aa, Homo sapiens
  Table A; HLA-A*29:01; NRAS; Q61L; 0
DILDTAGLEEY

SEQ ID NO: 11915 - protein, 11 aa, Homo sapiens
  Table A; HLA-A*29:02; NRAS; Q61L; 1
DILDTAGLEEY

SEQ ID NO: 11916 - protein, 11 aa, Homo sapiens
  Table A; HLA-A*30:02; NRAS; Q61L; 0
DILDTAGLEEY

SEQ ID NO: 11917 - protein, 11 aa, Homo sapiens
  Table A; HLA-A*33:01; NRAS; Q61L; 0
DILDTAGLEEY

SEQ ID NO: 11918 - protein, 11 aa, Homo sapiens
  Table A; HLA-A*68:01; NRAS; Q61L; 1
DILDTAGLEEY

SEQ ID NO: 11919 - protein, 11 aa, Homo sapiens
  Table A; HLA-B*15:01; NRAS; Q61L; 1
DILDTAGLEEY

SEQ ID NO: 11920 - protein, 11 aa, Homo sapiens
  Table A; HLA-B*15:02; NRAS; Q61L; 0
DILDTAGLEEY

SEQ ID NO: 11921 - protein, 11 aa, Homo sapiens
  Table A; HLA-B*27:02; NRAS; Q61L; 0
DILDTAGLEEY

SEQ ID NO: 11922 - protein, 11 aa, Homo sapiens
  Table A; HLA-B*35:01; NRAS; Q61L; 1
DILDTAGLEEY

SEQ ID NO: 11923 - protein, 11 aa, Homo sapiens
  Table A; HLA-B*35:08; NRAS; Q61L; 0
DILDTAGLEEY

SEQ ID NO: 11924 - protein, 11 aa, Homo sapiens
  Table A; HLA-A*25:01; KRAS; Q61R; 0
DILDTAGREEY

SEQ ID NO: 11925 - protein, 11 aa, Homo sapiens
  Table A; HLA-A*26:01; KRAS; Q61R; 0
DILDTAGREEY

SEQ ID NO: 11926 - protein, 11 aa, Homo sapiens
  Table A; HLA-A*26:02; KRAS; Q61R; 0
DILDTAGREEY

SEQ ID NO: 11927 - protein, 11 aa, Homo sapiens
  Table A; HLA-B*15:01; KRAS; Q61R; 0
DILDTAGREEY

SEQ ID NO: 11928 - protein, 11 aa, Homo sapiens
  Table A; HLA-B*15:02; KRAS; Q61R; 0
DILDTAGREEY

SEQ ID NO: 11929 - protein, 11 aa, Homo sapiens
  Table A; HLA-B*18:01; KRAS; Q61R; 0
DILDTAGREEY

SEQ ID NO: 11930 - protein, 11 aa, Homo sapiens
  Table A; HLA-B*27:02; KRAS; Q61R; 0
DILDTAGREEY

SEQ ID NO: 11931 - protein, 11 aa, Homo sapiens
  Table A; HLA-B*35:01; KRAS; Q61R; 0
DILDTAGREEY

SEQ ID NO: 11932 - protein, 11 aa, Homo sapiens
  Table A; HLA-B*35:08; KRAS; Q61R; 0
DILDTAGREEY

SEQ ID NO: 11933 - protein, 11 aa, Homo sapiens
  Table A; HLA-B*44:03; KRAS; Q61R; 0
DILDTAGREEY

SEQ ID NO: 11934 - protein, 11 aa, Homo sapiens
  Table A; HLA-A*25:01; NRAS; Q61R; 1
DILDTAGREEY

SEQ ID NO: 11935 - protein, 11 aa, Homo sapiens
  Table A; HLA-A*26:01; NRAS; Q61R; 1
DILDTAGREEY

SEQ ID NO: 11936 - protein, 11 aa, Homo sapiens
  Table A; HLA-A*26:02; NRAS; Q61R; 0
DILDTAGREEY

SEQ ID NO: 11937 - protein, 11 aa, Homo sapiens
  Table A; HLA-A*33:01; NRAS; Q61R; 1
DILDTAGREEY

SEQ ID NO: 11938 - protein, 11 aa, Homo sapiens
  Table A; HLA-A*68:01; NRAS; Q61R; 1
DILDTAGREEY

SEQ ID NO: 11939 - protein, 11 aa, Homo sapiens
  Table A; HLA-B*15:01; NRAS; Q61R; 1
DILDTAGREEY

SEQ ID NO: 11940 - protein, 11 aa, Homo sapiens
  Table A; HLA-B*15:02; NRAS; Q61R; 0
DILDTAGREEY

SEQ ID NO: 11941 - protein, 11 aa, Homo sapiens
  Table A; HLA-B*18:01; NRAS; Q61R; 1
DILDTAGREEY

SEQ ID NO: 11942 - protein, 11 aa, Homo sapiens
  Table A; HLA-B*27:02; NRAS; Q61R; 0
DILDTAGREEY

SEQ ID NO: 11943 - protein, 11 aa, Homo sapiens
  Table A; HLA-B*35:01; NRAS; Q61R; 1
DILDTAGREEY

SEQ ID NO: 11944 - protein, 11 aa, Homo sapiens
  Table A; HLA-B*35:08; NRAS; Q61R; 0
DILDTAGREEY

SEQ ID NO: 11945 - protein, 11 aa, Homo sapiens
  Table A; HLA-B*44:03; NRAS; Q61R; 1
DILDTAGREEY

SEQ ID NO: 11946 - protein, 8 aa, Homo sapiens
  Table A; HLA-A*25:01; GRIN2A; R1067W; 0
DISETSNW

SEQ ID NO: 11947 - protein, 8 aa, Homo sapiens
  Table A; HLA-B*51:01; STAG1; A116T; 0
DITLLDLI

SEQ ID NO: 11948 - protein, 11 aa, Homo sapiens
  Table A; HLA-A*33:01; PTEN; S170N; 0
DKKGVTIPNQR

SEQ ID NO: 11949 - protein, 8 aa, Homo sapiens
  Table A; HLA-B*08:01; PIK3CA; E726K; 1
DKTQKVQM

SEQ ID NO: 11950 - protein, 8 aa, Homo sapiens
  Table A; HLA-B*14:02; PIK3CA; E726K; 1
DKTQKVQM

SEQ ID NO: 11951 - protein, 9 aa, Homo sapiens
  Table A; HLA-A*68:02; CCND1; T286I; 0
DLACIPTDV

SEQ ID NO: 11952 - protein, 10 aa, Homo sapiens
  Table A; HLA-A*26:03; CCND1; T286I; 0
DLACIPTDVR

SEQ ID NO: 11953 - protein, 10 aa, Homo sapiens
  Table A; HLA-A*68:01; CCND1; T286I; 0
DLACIPTDVR

SEQ ID NO: 11954 - protein, 10 aa, Homo sapiens
  Table A; HLA-A*68:02; CCND1; T286I; 0
DLACIPTDVR

SEQ ID NO: 11955 - protein, 10 aa, Homo sapiens
  Table A; HLA-B*27:02; CCND1; T286I; 0
DLACIPTDVR

SEQ ID NO: 11956 - protein, 9 aa, Homo sapiens
  Table A; HLA-B*15:01; NFE2L2; R34G; 1
DLGVSGEVF

SEQ ID NO: 11957 - protein, 9 aa, Homo sapiens
  Table A; HLA-B*15:02; NFE2L2; R34G; 0
DLGVSGEVF

SEQ ID NO: 11958 - protein, 9 aa, Homo sapiens
  Table A; HLA-B*38:01; NFE2L2; R34G; 0
DLGVSGEVF

SEQ ID NO: 11959 - protein, 9 aa, Homo sapiens
  Table A; HLA-C*08:01; NFE2L2; R34G; 0
DLGVSGEVF

SEQ ID NO: 11960 - protein, 8 aa, Homo sapiens
  Table A; HLA-B*48:01; NFE2L2; R34Q; 0
DLGVSQEV

SEQ ID NO: 11961 - protein, 8 aa, Homo sapiens
  Table A; HLA-C*08:03; NFE2L2; R34Q; 0
DLGVSQEV

SEQ ID NO: 11962 - protein, 9 aa, Homo sapiens
  Table A; HLA-B*15:02; NFE2L2; R34Q; 0
DLGVSQEVF

SEQ ID NO: 11963 - protein, 9 aa, Homo sapiens
  Table A; HLA-C*08:01; NFE2L2; R34Q; 0
DLGVSQEVF

SEQ ID NO: 11964 - protein, 9 aa, Homo sapiens
  Table A; HLA-A*26:03; PIK3R1; L573P; 0
DLIQPRKTR

SEQ ID NO: 11965 - protein, 9 aa, Homo sapiens
  Table A; HLA-A*33:01; PIK3R1; L573P; 0
DLIQPRKTR

SEQ ID NO: 11966 - protein, 9 aa, Homo sapiens
  Table A; HLA-A*33:03; PIK3R1; L573P; 0
DLIQPRKTR

SEQ ID NO: 11967 - protein, 8 aa, Homo sapiens
  Table A; HLA-A*26:01; SF3B1; R957Q; 0
DLISQTAV

SEQ ID NO: 11968 - protein, 8 aa, Homo sapiens
  Table A; HLA-A*68:02; SF3B1; R957Q; 0
DLISQTAV

SEQ ID NO: 11969 - protein, 8 aa, Homo sapiens
  Table A; HLA-B*08:01; SF3B1; R957Q; 1
DLISQTAV

SEQ ID NO: 11970 - protein, 8 aa, Homo sapiens
  Table A; HLA-B*13:02; SF3B1; R957Q; 0
DLISQTAV

SEQ ID NO: 11971 - protein, 8 aa, Homo sapiens
  Table A; HLA-B*15:02; SF3B1; R957Q; 0
DLISQTAV

SEQ ID NO: 11972 - protein, 8 aa, Homo sapiens
  Table A; HLA-B*39:01; SF3B1; R957Q; 0
DLISQTAV

SEQ ID NO: 11973 - protein, 8 aa, Homo sapiens
  Table A; HLA-B*39:06; SF3B1; R957Q; 0
DLISQTAV

SEQ ID NO: 11974 - protein, 8 aa, Homo sapiens
  Table A; HLA-B*48:01; SF3B1; R957Q; 0
DLISQTAV

SEQ ID NO: 11975 - protein, 8 aa, Homo sapiens
  Table A; HLA-B*51:01; SF3B1; R957Q; 1
DLISQTAV

SEQ ID NO: 11976 - protein, 8 aa, Homo sapiens
  Table A; HLA-C*08:01; SF3B1; R957Q; 0
DLISQTAV

SEQ ID NO: 11977 - protein, 9 aa, Homo sapiens
  Table A; HLA-A*02:01; SF3B1; R957Q; 1
DLISQTAVV

SEQ ID NO: 11978 - protein, 9 aa, Homo sapiens
  Table A; HLA-A*02:03; SF3B1; R957Q; 0
DLISQTAVV

SEQ ID NO: 11979 - protein, 9 aa, Homo sapiens
  Table A; HLA-A*02:04; SF3B1; R957Q; 0
DLISQTAVV

SEQ ID NO: 11980 - protein, 9 aa, Homo sapiens
  Table A; HLA-A*02:05; SF3B1; R957Q; 0
DLISQTAVV

SEQ ID NO: 11981 - protein, 9 aa, Homo sapiens
  Table A; HLA-A*25:01; SF3B1; R957Q; 0
DLISQTAVV

SEQ ID NO: 11982 - protein, 9 aa, Homo sapiens
  Table A; HLA-A*26:01; SF3B1; R957Q; 0
DLISQTAVV

SEQ ID NO: 11983 - protein, 9 aa, Homo sapiens
  Table A; HLA-A*26:02; SF3B1; R957Q; 0
DLISQTAVV

SEQ ID NO: 11984 - protein, 9 aa, Homo sapiens
  Table A; HLA-A*26:03; SF3B1; R957Q; 0
DLISQTAVV

SEQ ID NO: 11985 - protein, 9 aa, Homo sapiens
  Table A; HLA-A*33:01; SF3B1; R957Q; 0
DLISQTAVV

SEQ ID NO: 11986 - protein, 9 aa, Homo sapiens
  Table A; HLA-A*68:01; SF3B1; R957Q; 0
DLISQTAVV

SEQ ID NO: 11987 - protein, 9 aa, Homo sapiens
  Table A; HLA-A*68:02; SF3B1; R957Q; 0
DLISQTAVV

SEQ ID NO: 11988 - protein, 9 aa, Homo sapiens
  Table A; HLA-B*08:01; SF3B1; R957Q; 1
DLISQTAVV

SEQ ID NO: 11989 - protein, 9 aa, Homo sapiens
  Table A; HLA-B*13:02; SF3B1; R957Q; 0
DLISQTAVV

SEQ ID NO: 11990 - protein, 9 aa, Homo sapiens
  Table A; HLA-B*15:02; SF3B1; R957Q; 0
DLISQTAVV

SEQ ID NO: 11991 - protein, 9 aa, Homo sapiens
  Table A; HLA-B*35:03; SF3B1; R957Q; 0
DLISQTAVV

SEQ ID NO: 11992 - protein, 9 aa, Homo sapiens
  Table A; HLA-B*39:01; SF3B1; R957Q; 0
DLISQTAVV

SEQ ID NO: 11993 - protein, 9 aa, Homo sapiens
  Table A; HLA-B*39:06; SF3B1; R957Q; 0
DLISQTAVV

SEQ ID NO: 11994 - protein, 9 aa, Homo sapiens
  Table A; HLA-B*48:01; SF3B1; R957Q; 0
DLISQTAVV

SEQ ID NO: 11995 - protein, 9 aa, Homo sapiens
  Table A; HLA-B*51:01; SF3B1; R957Q; 1
DLISQTAVV

SEQ ID NO: 11996 - protein, 9 aa, Homo sapiens
  Table A; HLA-C*08:01; SF3B1; R957Q; 0
DLISQTAVV

SEQ ID NO: 11997 - protein, 10 aa, Homo sapiens
  Table A; HLA-A*26:01; SF3B1; R957Q; 0
DLISQTAVVM

SEQ ID NO: 11998 - protein, 10 aa, Homo sapiens
  Table A; HLA-A*26:02; SF3B1; R957Q; 0
DLISQTAVVM

SEQ ID NO: 11999 - protein, 10 aa, Homo sapiens
  Table A; HLA-A*26:03; SF3B1; R957Q; 0
DLISQTAVVM

SEQ ID NO: 12000 - protein, 10 aa, Homo sapiens
  Table A; HLA-A*68:01; SF3B1; R957Q; 0
DLISQTAVVM

SEQ ID NO: 12001 - protein, 10 aa, Homo sapiens
  Table A; HLA-A*68:02; SF3B1; R957Q; 0
DLISQTAVVM

SEQ ID NO: 12002 - protein, 10 aa, Homo sapiens
  Table A; HLA-B*08:01; SF3B1; R957Q; 1
DLISQTAVVM

SEQ ID NO: 12003 - protein, 10 aa, Homo sapiens
  Table A; HLA-B*15:01; SF3B1; R957Q; 1
DLISQTAVVM

SEQ ID NO: 12004 - protein, 10 aa, Homo sapiens
  Table A; HLA-B*15:02; SF3B1; R957Q; 0
DLISQTAVVM

SEQ ID NO: 12005 - protein, 10 aa, Homo sapiens
  Table A; HLA-B*35:01; SF3B1; R957Q; 1
DLISQTAVVM

SEQ ID NO: 12006 - protein, 10 aa, Homo sapiens
  Table A; HLA-B*35:03; SF3B1; R957Q; 0
DLISQTAVVM

SEQ ID NO: 12007 - protein, 10 aa, Homo sapiens
  Table A; HLA-B*39:01; SF3B1; R957Q; 0
DLISQTAVVM

SEQ ID NO: 12008 - protein, 10 aa, Homo sapiens
  Table A; HLA-B*48:01; SF3B1; R957Q; 0
DLISQTAVVM

SEQ ID NO: 12009 - protein, 10 aa, Homo sapiens
  Table A; HLA-C*08:01; SF3B1; R957Q; 0
DLISQTAVVM

SEQ ID NO: 12010 - protein, 10 aa, Homo sapiens
  Table A; HLA-C*08:03; SF3B1; R957Q; 0
DLISQTAVVM

SEQ ID NO: 12011 - protein, 11 aa, Homo sapiens
  Table A; HLA-A*03:02; SF3B1; R957Q; 0
DLISQTAVVMK

SEQ ID NO: 12012 - protein, 11 aa, Homo sapiens
  Table A; HLA-A*11:01; SF3B1; R957Q; 1
DLISQTAVVMK

SEQ ID NO: 12013 - protein, 11 aa, Homo sapiens
  Table A; HLA-A*33:01; SF3B1; R957Q; 0
DLISQTAVVMK

SEQ ID NO: 12014 - protein, 11 aa, Homo sapiens
  Table A; HLA-A*68:01; SF3B1; R957Q; 0
DLISQTAVVMK

SEQ ID NO: 12015 - protein, 11 aa, Homo sapiens
  Table A; HLA-A*68:02; SF3B1; R957Q; 0
DLISQTAVVMK

SEQ ID NO: 12016 - protein, 11 aa, Homo sapiens
  Table A; HLA-B*27:02; SF3B1; R957Q; 0
DLISQTAVVMK

SEQ ID NO: 12017 - protein, 9 aa, Homo sapiens
  Table A; HLA-A*02:01; PTPRT; M903I; 1
DLLQHITQI

SEQ ID NO: 12018 - protein, 9 aa, Homo sapiens
  Table A; HLA-A*02:03; PTPRT; M903I; 0
DLLQHITQI

SEQ ID NO: 12019 - protein, 9 aa, Homo sapiens
  Table A; HLA-A*02:04; PTPRT; M903I; 0
DLLQHITQI

SEQ ID NO: 12020 - protein, 9 aa, Homo sapiens
  Table A; HLA-A*23:01; PTPRT; M903I; 0
DLLQHITQI

SEQ ID NO: 12021 - protein, 9 aa, Homo sapiens
  Table A; HLA-A*26:02; PTPRT; M903I; 0
DLLQHITQI

SEQ ID NO: 12022 - protein, 9 aa, Homo sapiens
  Table A; HLA-A*68:02; PTPRT; M903I; 0
DLLQHITQI

SEQ ID NO: 12023 - protein, 9 aa, Homo sapiens
  Table A; HLA-B*08:01; PTPRT; M903I; 1
DLLQHITQI

SEQ ID NO: 12024 - protein, 9 aa, Homo sapiens
  Table A; HLA-B*13:02; PTPRT; M903I; 0
DLLQHITQI

SEQ ID NO: 12025 - protein, 9 aa, Homo sapiens
  Table A; HLA-B*15:02; PTPRT; M903I; 0
DLLQHITQI

SEQ ID NO: 12026 - protein, 9 aa, Homo sapiens
  Table A; HLA-B*51:01; PTPRT; M903I; 1
DLLQHITQI

SEQ ID NO: 12027 - protein, 9 aa, Homo sapiens
  Table A; HLA-C*08:01; PTPRT; M903I; 0
DLLQHITQI

SEQ ID NO: 12028 - protein, 8 aa, Homo sapiens
  Table A; HLA-B*08:01; GNAS; R201H; 1
DLLRCHVL

SEQ ID NO: 12029 - protein, 9 aa, Homo sapiens
  Table A; HLA-A*25:01; EP300; A1629V; 0
DLMDGRDVF

SEQ ID NO: 12030 - protein, 9 aa, Homo sapiens
  Table A; HLA-B*15:02; EP300; A1629V; 0
DLMDGRDVF

SEQ ID NO: 12031 - protein, 10 aa, Homo sapiens
  Table A; HLA-A*02:04; EP300; A1629V; 0
DLMDGRDVFL

SEQ ID NO: 12032 - protein, 10 aa, Homo sapiens
  Table A; HLA-A*68:02; EP300; A1629V; 0
DLMDGRDVFL

SEQ ID NO: 12033 - protein, 9 aa, Homo sapiens
  Table A; HLA-A*02:04; PIK3CA; R93Q; 0
DLQLFQPFL

SEQ ID NO: 12034 - protein, 10 aa, Homo sapiens
  Table A; HLA-A*33:01; PIK3CA; R93Q; 0
DLQLFQPFLK

SEQ ID NO: 12035 - protein, 10 aa, Homo sapiens
  Table A; HLA-B*27:02; PIK3CA; R93Q; 0
DLQLFQPFLK

SEQ ID NO: 12036 - protein, 8 aa, Homo sapiens
  Table A; HLA-B*15:02; PTPRB; R529Q; 0
DLVPGQKY

SEQ ID NO: 12037 - protein, 9 aa, Homo sapiens
  Table A; HLA-A*02:04; PIK3CA; R93W; 0
DLWLFQPFL

SEQ ID NO: 12038 - protein, 8 aa, Homo sapiens
  Table A; HLA-B*08:01; TP53; G245D; 1
DMNRRPIL

SEQ ID NO: 12039 - protein, 9 aa, Homo sapiens
  Table A; HLA-A*33:01; SF3B1; R625H; 0
DNMDEYVHN

SEQ ID NO: 12040 - protein, 10 aa, Homo sapiens
  Table A; HLA-A*26:03; PIK3CA; C378R; 0
DNVNTQRVPR

SEQ ID NO: 12041 - protein, 10 aa, Homo sapiens
  Table A; HLA-A*33:01; PIK3CA; C378R; 0
DNVNTQRVPR

SEQ ID NO: 12042 - protein, 10 aa, Homo sapiens
  Table A; HLA-A*33:03; PIK3CA; C378R; 0
DNVNTQRVPR

SEQ ID NO: 12043 - protein, 10 aa, Homo sapiens
  Table A; HLA-A*68:01; PIK3CA; C378R; 0
DNVNTQRVPR

SEQ ID NO: 12044 - protein, 10 aa, Homo sapiens
  Table A; HLA-A*68:02; PIK3CA; C378R; 0
DNVNTQRVPR

SEQ ID NO: 12045 - protein, 10 aa, Homo sapiens
  Table A; HLA-A*25:01; CDKN2A; H83Y; 0
DPATLTRPVY

SEQ ID NO: 12046 - protein, 10 aa, Homo sapiens
  Table A; HLA-A*26:01; CDKN2A; H83Y; 0
DPATLTRPVY

SEQ ID NO: 12047 - protein, 10 aa, Homo sapiens
  Table A; HLA-A*26:02; CDKN2A; H83Y; 0
DPATLTRPVY

SEQ ID NO: 12048 - protein, 10 aa, Homo sapiens
  Table A; HLA-A*68:01; CDKN2A; H83Y; 0
DPATLTRPVY

SEQ ID NO: 12049 - protein, 10 aa, Homo sapiens
  Table A; HLA-B*15:02; CDKN2A; H83Y; 0
DPATLTRPVY

SEQ ID NO: 12050 - protein, 10 aa, Homo sapiens
  Table A; HLA-B*18:01; CDKN2A; H83Y; 0
DPATLTRPVY

SEQ ID NO: 12051 - protein, 10 aa, Homo sapiens
  Table A; HLA-B*35:01; CDKN2A; H83Y; 0
DPATLTRPVY

SEQ ID NO: 12052 - protein, 10 aa, Homo sapiens
  Table A; HLA-B*35:08; CDKN2A; H83Y; 0
DPATLTRPVY

SEQ ID NO: 12053 - protein, 10 aa, Homo sapiens
  Table A; HLA-B*54:01; CDKN2A; H83Y; 0
DPATLTRPVY

SEQ ID NO: 12054 - protein, 10 aa, Homo sapiens
  Table A; HLA-C*08:01; CDKN2A; H83Y; 0
DPATLTRPVY

SEQ ID NO: 12055 - protein, 9 aa, Homo sapiens
  Table A; HLA-B*35:01; ABI1; K445N; 1
DPAWAPNNY

SEQ ID NO: 12056 - protein, 10 aa, Homo sapiens
  Table A; HLA-B*51:01; ABI1; K445N; 1
DPAWAPNNYI

SEQ ID NO: 12057 - protein, 8 aa, Homo sapiens
  Table A; HLA-B*08:01; PTPRK; E358K; 1
DPDTKYEI

SEQ ID NO: 12058 - protein, 8 aa, Homo sapiens
  Table A; HLA-B*35:02; PTPRK; E358K; 0
DPDTKYEI

SEQ ID NO: 12059 - protein, 8 aa, Homo sapiens
  Table A; HLA-B*35:12; PTPRK; E358K; 0
DPDTKYEI

SEQ ID NO: 12060 - protein, 8 aa, Homo sapiens
  Table A; HLA-B*51:01; CREB3L1; V414I; 0
DPLAADGI

SEQ ID NO: 12061 - protein, 9 aa, Homo sapiens
  Table A; HLA-B*15:02; CREB3L1; V414I; 0
DPLAADGIY

SEQ ID NO: 12062 - protein, 9 aa, Homo sapiens
  Table A; HLA-B*35:01; CREB3L1; V414I; 0
DPLAADGIY

SEQ ID NO: 12063 - protein, 9 aa, Homo sapiens
  Table A; HLA-B*35:03; CREB3L1; V414I; 0
DPLAADGIY

SEQ ID NO: 12064 - protein, 9 aa, Homo sapiens
  Table A; HLA-B*35:08; CREB3L1; V414I; 0
DPLAADGIY

SEQ ID NO: 12065 - protein, 9 aa, Homo sapiens
  Table A; HLA-B*35:12; CREB3L1; V414I; 0
DPLAADGIY

SEQ ID NO: 12066 - protein, 11 aa, Homo sapiens
  Table A; HLA-B*35:01; CREB3L1; V414I; 0
DPLAADGIYTA

SEQ ID NO: 12067 - protein, 11 aa, Homo sapiens
  Table A; HLA-B*35:03; CREB3L1; V414I; 0
DPLAADGIYTA

SEQ ID NO: 12068 - protein, 11 aa, Homo sapiens
  Table A; HLA-B*35:12; CREB3L1; V414I; 0
DPLAADGIYTA

SEQ ID NO: 12069 - protein, 11 aa, Homo sapiens
  Table A; HLA-B*39:06; CREB3L1; V414I; 0
DPLAADGIYTA

SEQ ID NO: 12070 - protein, 11 aa, Homo sapiens
  Table A; HLA-B*54:01; CREB3L1; V414I; 0
DPLAADGIYTA

SEQ ID NO: 12071 - protein, 11 aa, Homo sapiens
  Table A; HLA-B*55:02; CREB3L1; V414I; 0
DPLAADGIYTA

SEQ ID NO: 12072 - protein, 11 aa, Homo sapiens
  Table A; HLA-B*56:01; CREB3L1; V414I; 0
DPLAADGIYTA

SEQ ID NO: 12073 - protein, 8 aa, Homo sapiens
  Table A; HLA-B*35:02; PIK3CA; E545A; 0
DPLSEITA

SEQ ID NO: 12074 - protein, 8 aa, Homo sapiens
  Table A; HLA-B*35:12; PIK3CA; E545A; 0
DPLSEITA

SEQ ID NO: 12075 - protein, 8 aa, Homo sapiens
  Table A; HLA-B*39:06; PIK3CA; E545A; 0
DPLSEITA

SEQ ID NO: 12076 - protein, 8 aa, Homo sapiens
  Table A; HLA-B*54:01; PIK3CA; E545A; 0
DPLSEITA

SEQ ID NO: 12077 - protein, 11 aa, Homo sapiens
  Table A; HLA-B*27:02; PIK3CA; E545D; 0
DPLSEITDQEK

SEQ ID NO: 12078 - protein, 9 aa, Homo sapiens
  Table A; HLA-B*35:01; PIK3CA; Q546K; 1
DPLSEITEK

SEQ ID NO: 12079 - protein, 9 aa, Homo sapiens
  Table A; HLA-A*33:01; PIK3CA; Q546R; 0
DPLSEITER

SEQ ID NO: 12080 - protein, 9 aa, Homo sapiens
  Table A; HLA-A*33:03; PIK3CA; Q546R; 0
DPLSEITER

SEQ ID NO: 12081 - protein, 9 aa, Homo sapiens
  Table A; HLA-A*68:01; PIK3CA; Q546R; 0
DPLSEITER

SEQ ID NO: 12082 - protein, 9 aa, Homo sapiens
  Table A; HLA-B*27:02; PIK3CA; Q546R; 0
DPLSEITER

SEQ ID NO: 12083 - protein, 9 aa, Homo sapiens
  Table A; HLA-B*35:01; PIK3CA; Q546R; 1
DPLSEITER

SEQ ID NO: 12084 - protein, 11 aa, Homo sapiens
  Table A; HLA-B*27:02; PIK3CA; E545G; 0
DPLSEITGQEK

SEQ ID NO: 12085 - protein, 9 aa, Homo sapiens
  Table A; HLA-B*35:01; PIK3CA; E542V; 0
DPLSVITEQ

SEQ ID NO: 12086 - protein, 11 aa, Homo sapiens
  Table A; HLA-B*27:02; PIK3CA; E542V; 0
DPLSVITEQEK

SEQ ID NO: 12087 - protein, 11 aa, Homo sapiens
  Table A; HLA-B*35:01; CDH1; D254Y; 1
DPMEILITVTY

SEQ ID NO: 12088 - protein, 11 aa, Homo sapiens
  Table A; HLA-B*35:08; CDH1; D254Y; 0
DPMEILITVTY

SEQ ID NO: 12089 - protein, 10 aa, Homo sapiens
  Table A; HLA-B*54:01; MAPK1; E322K; 0
DPSDKPIAEA

SEQ ID NO: 12090 - protein, 10 aa, Homo sapiens
  Table A; HLA-B*35:03; SMAD4; R361H; 0
DPSGGDHFCL

SEQ ID NO: 12091 - protein, 8 aa, Homo sapiens
  Table A; HLA-B*08:01; ARHGEF12; R113Q; 1
DQIIKVNG

SEQ ID NO: 12092 - protein, 8 aa, Homo sapiens
  Table A; HLA-B*15:02; POLE; S297F; 0
DQIMMIFY

SEQ ID NO: 12093 - protein, 9 aa, Homo sapiens
  Table A; HLA-A*26:01; SMARCA4; G1232S; 0
DQKVIQASM

SEQ ID NO: 12094 - protein, 9 aa, Homo sapiens
  Table A; HLA-A*26:02; SMARCA4; G1232S; 0
DQKVIQASM

SEQ ID NO: 12095 - protein, 9 aa, Homo sapiens
  Table A; HLA-A*30:01; SMARCA4; G1232S; 0
DQKVIQASM

SEQ ID NO: 12096 - protein, 9 aa, Homo sapiens
  Table A; HLA-B*08:01; SMARCA4; G1232S; 1
DQKVIQASM

SEQ ID NO: 12097 - protein, 9 aa, Homo sapiens
  Table A; HLA-B*13:02; SMARCA4; G1232S; 0
DQKVIQASM

SEQ ID NO: 12098 - protein, 9 aa, Homo sapiens
  Table A; HLA-B*14:01; SMARCA4; G1232S; 0
DQKVIQASM

SEQ ID NO: 12099 - protein, 9 aa, Homo sapiens
  Table A; HLA-B*14:02; SMARCA4; G1232S; 0
DQKVIQASM

SEQ ID NO: 12100 - protein, 9 aa, Homo sapiens
  Table A; HLA-B*15:01; SMARCA4; G1232S; 0
DQKVIQASM

SEQ ID NO: 12101 - protein, 9 aa, Homo sapiens
  Table A; HLA-B*15:02; SMARCA4; G1232S; 0
DQKVIQASM

SEQ ID NO: 12102 - protein, 9 aa, Homo sapiens
  Table A; HLA-B*15:03; SMARCA4; G1232S; 0
DQKVIQASM

SEQ ID NO: 12103 - protein, 9 aa, Homo sapiens
  Table A; HLA-B*15:10; SMARCA4; G1232S; 0
DQKVIQASM

SEQ ID NO: 12104 - protein, 9 aa, Homo sapiens
  Table A; HLA-B*18:01; SMARCA4; G1232S; 0
DQKVIQASM

SEQ ID NO: 12105 - protein, 9 aa, Homo sapiens
  Table A; HLA-B*39:01; SMARCA4; G1232S; 0
DQKVIQASM

SEQ ID NO: 12106 - protein, 9 aa, Homo sapiens
  Table A; HLA-B*39:06; SMARCA4; G1232S; 0
DQKVIQASM

SEQ ID NO: 12107 - protein, 9 aa, Homo sapiens
  Table A; HLA-B*46:01; SMARCA4; G1232S; 0
DQKVIQASM

SEQ ID NO: 12108 - protein, 9 aa, Homo sapiens
  Table A; HLA-B*48:01; SMARCA4; G1232S; 0
DQKVIQASM

SEQ ID NO: 12109 - protein, 9 aa, Homo sapiens
  Table A; HLA-B*51:01; SMARCA4; G1232S; 0
DQKVIQASM

SEQ ID NO: 12110 - protein, 9 aa, Homo sapiens
  Table A; HLA-C*08:01; SMARCA4; G1232S; 0
DQKVIQASM

SEQ ID NO: 12111 - protein, 9 aa, Homo sapiens
  Table A; HLA-B*15:02; NT5C2; R8Q; 0
DQLQNAADM

SEQ ID NO: 12112 - protein, 8 aa, Homo sapiens
  Table A; HLA-B*14:02; ARID1A; G2087R; 0
DRLLHWAV

SEQ ID NO: 12113 - protein, 9 aa, Homo sapiens
  Table A; HLA-A*68:02; TP53; R213Q; 0
DRNTFQHSV

SEQ ID NO: 12114 - protein, 9 aa, Homo sapiens
  Table A; HLA-B*14:01; TP53; R213Q; 0
DRNTFQHSV

SEQ ID NO: 12115 - protein, 9 aa, Homo sapiens
  Table A; HLA-B*14:02; TP53; R213Q; 0
DRNTFQHSV

SEQ ID NO: 12116 - protein, 9 aa, Homo sapiens
  Table A; HLA-B*27:05; TP53; R213Q; 0
DRNTFQHSV

SEQ ID NO: 12117 - protein, 9 aa, Homo sapiens
  Table A; HLA-B*39:01; TP53; R213Q; 0
DRNTFQHSV

SEQ ID NO: 12118 - protein, 9 aa, Homo sapiens
  Table A; HLA-B*39:06; TP53; R213Q; 0
DRNTFQHSV

SEQ ID NO: 12119 - protein, 9 aa, Homo sapiens
  Table A; HLA-C*06:02; TP53; R213Q; 1
DRNTFQHSV

SEQ ID NO: 12120 - protein, 9 aa, Homo sapiens
  Table A; HLA-B*14:02; TP53; S215G; 0
DRNTFRHGV

SEQ ID NO: 12121 - protein, 9 aa, Homo sapiens
  Table A; HLA-B*14:01; TP53; V216M; 0
DRNTFRHSM

SEQ ID NO: 12122 - protein, 9 aa, Homo sapiens
  Table A; HLA-B*14:02; TP53; V216M; 0
DRNTFRHSM

SEQ ID NO: 12123 - protein, 9 aa, Homo sapiens
  Table A; HLA-B*14:01; TP53; H214R; 0
DRNTFRRSV

SEQ ID NO: 12124 - protein, 9 aa, Homo sapiens
  Table A; HLA-B*14:02; TP53; H214R; 0
DRNTFRRSV

SEQ ID NO: 12125 - protein, 11 aa, Homo sapiens
  Table A; HLA-A*33:01; TP53; L194R; 0
DSDGLAPPQHR

SEQ ID NO: 12126 - protein, 11 aa, Homo sapiens
  Table A; HLA-A*33:03; TP53; L194R; 0
DSDGLAPPQHR

SEQ ID NO: 12127 - protein, 11 aa, Homo sapiens
  Table A; HLA-A*68:01; TP53; L194R; 0
DSDGLAPPQHR

SEQ ID NO: 12128 - protein, 10 aa, Homo sapiens
  Table A; HLA-A*33:01; TP53; H193R; 0
DSDGLAPPQR

SEQ ID NO: 12129 - protein, 10 aa, Homo sapiens
  Table A; HLA-A*68:01; TP53; H193R; 0
DSDGLAPPQR

SEQ ID NO: 12130 - protein, 10 aa, Homo sapiens
  Table A; HLA-A*01:01; TP53; H193Y; 1
DSDGLAPPQY

SEQ ID NO: 12131 - protein, 10 aa, Homo sapiens
  Table A; HLA-A*26:01; TP53; H193Y; 0
DSDGLAPPQY

SEQ ID NO: 12132 - protein, 10 aa, Homo sapiens
  Table A; HLA-C*03:02; TP53; H193Y; 0
DSDGLAPPQY

SEQ ID NO: 12133 - protein, 9 aa, Homo sapiens
  Table A; HLA-B*48:01; CTNNB1; G34E; 0
DSEIHSGAT

SEQ ID NO: 12134 - protein, 9 aa, Homo sapiens
  Table A; HLA-C*08:03; CTNNB1; G34E; 0
DSEIHSGAT

SEQ ID NO: 12135 - protein, 8 aa, Homo sapiens
  Table A; HLA-B*48:01; CTNNB1; S37A; 0
DSGIHAGA

SEQ ID NO: 12136 - protein, 8 aa, Homo sapiens
  Table A; HLA-C*08:03; CTNNB1; S37A; 0
DSGIHAGA

SEQ ID NO: 12137 - protein, 9 aa, Homo sapiens
  Table A; HLA-B*08:01; CTNNB1; S37A; 1
DSGIHAGAT

SEQ ID NO: 12138 - protein, 9 aa, Homo sapiens
  Table A; HLA-B*48:01; CTNNB1; S37A; 0
DSGIHAGAT

SEQ ID NO: 12139 - protein, 9 aa, Homo sapiens
  Table A; HLA-C*08:03; CTNNB1; S37A; 0
DSGIHAGAT

SEQ ID NO: 12140 - protein, 8 aa, Homo sapiens
  Table A; HLA-B*39:06; CTNNB1; S37C; 0
DSGIHCGA

SEQ ID NO: 12141 - protein, 8 aa, Homo sapiens
  Table A; HLA-C*08:03; CTNNB1; S37C; 0
DSGIHCGA

SEQ ID NO: 12142 - protein, 8 aa, Homo sapiens
  Table A; HLA-A*11:01; CTNNB1; S37F; 1
DSGIHFGA

SEQ ID NO: 12143 - protein, 8 aa, Homo sapiens
  Table A; HLA-A*33:01; CTNNB1; S37F; 0
DSGIHFGA

SEQ ID NO: 12144 - protein, 8 aa, Homo sapiens
  Table A; HLA-A*33:03; CTNNB1; S37F; 0
DSGIHFGA

SEQ ID NO: 12145 - protein, 8 aa, Homo sapiens
  Table A; HLA-A*68:01; CTNNB1; S37F; 1
DSGIHFGA

SEQ ID NO: 12146 - protein, 8 aa, Homo sapiens
  Table A; HLA-A*68:02; CTNNB1; S37F; 0
DSGIHFGA

SEQ ID NO: 12147 - protein, 8 aa, Homo sapiens
  Table A; HLA-B*08:01; CTNNB1; S37F; 1
DSGIHFGA

SEQ ID NO: 12148 - protein, 8 aa, Homo sapiens
  Table A; HLA-B*39:06; CTNNB1; S37F; 0
DSGIHFGA

SEQ ID NO: 12149 - protein, 8 aa, Homo sapiens
  Table A; HLA-B*48:01; CTNNB1; S37F; 0
DSGIHFGA

SEQ ID NO: 12150 - protein, 8 aa, Homo sapiens
  Table A; HLA-B*54:01; CTNNB1; S37F; 0
DSGIHFGA

SEQ ID NO: 12151 - protein, 8 aa, Homo sapiens
  Table A; HLA-C*08:03; CTNNB1; S37F; 0
DSGIHFGA

SEQ ID NO: 12152 - protein, 9 aa, Homo sapiens
  Table A; HLA-A*11:01; CTNNB1; S37F; 1
DSGIHFGAT

SEQ ID NO: 12153 - protein, 9 aa, Homo sapiens
  Table A; HLA-A*33:03; CTNNB1; S37F; 0
DSGIHFGAT

SEQ ID NO: 12154 - protein, 9 aa, Homo sapiens
  Table A; HLA-B*08:01; CTNNB1; S37F; 1
DSGIHFGAT

SEQ ID NO: 12155 - protein, 9 aa, Homo sapiens
  Table A; HLA-B*48:01; CTNNB1; S37F; 0
DSGIHFGAT

SEQ ID NO: 12156 - protein, 9 aa, Homo sapiens
  Table A; HLA-C*08:03; CTNNB1; S37F; 0
DSGIHFGAT

SEQ ID NO: 12157 - protein, 8 aa, Homo sapiens
  Table A; HLA-A*68:01; CTNNB1; S37P; 0
DSGIHPGA

SEQ ID NO: 12158 - protein, 8 aa, Homo sapiens
  Table A; HLA-B*08:01; CTNNB1; S37P; 1
DSGIHPGA

SEQ ID NO: 12159 - protein, 8 aa, Homo sapiens
  Table A; HLA-B*39:06; CTNNB1; S37P; 0
DSGIHPGA

SEQ ID NO: 12160 - protein, 8 aa, Homo sapiens
  Table A; HLA-B*48:01; CTNNB1; S37P; 0
DSGIHPGA

SEQ ID NO: 12161 - protein, 8 aa, Homo sapiens
  Table A; HLA-B*54:01; CTNNB1; S37P; 0
DSGIHPGA

SEQ ID NO: 12162 - protein, 8 aa, Homo sapiens
  Table A; HLA-C*08:03; CTNNB1; S37P; 0
DSGIHPGA

SEQ ID NO: 12163 - protein, 9 aa, Homo sapiens
  Table A; HLA-B*08:01; CTNNB1; S37P; 1
DSGIHPGAT

SEQ ID NO: 12164 - protein, 9 aa, Homo sapiens
  Table A; HLA-B*48:01; CTNNB1; S37P; 0
DSGIHPGAT

SEQ ID NO: 12165 - protein, 9 aa, Homo sapiens
  Table A; HLA-C*08:03; CTNNB1; S37P; 0
DSGIHPGAT

SEQ ID NO: 12166 - protein, 11 aa, Homo sapiens
  Table A; HLA-A*33:01; BCORL1; K1207N; 0
DSHEEGSLENK

SEQ ID NO: 12167 - protein, 8 aa, Homo sapiens
  Table A; HLA-B*51:01; PIK3R1; N564D; 0
DSIKPDLI

SEQ ID NO: 12168 - protein, 10 aa, Homo sapiens
  Table A; HLA-A*68:01; PIK3R1; N564D; 0
DSIKPDLIQL

SEQ ID NO: 12169 - protein, 10 aa, Homo sapiens
  Table A; HLA-A*68:02; PIK3R1; N564D; 0
DSIKPDLIQL

SEQ ID NO: 12170 - protein, 11 aa, Homo sapiens
  Table A; HLA-A*11:01; PIK3R1; N564D; 0
DSIKPDLIQLR

SEQ ID NO: 12171 - protein, 11 aa, Homo sapiens
  Table A; HLA-A*26:03; PIK3R1; N564D; 0
DSIKPDLIQLR

SEQ ID NO: 12172 - protein, 11 aa, Homo sapiens
  Table A; HLA-A*31:01; PIK3R1; N564D; 0
DSIKPDLIQLR

SEQ ID NO: 12173 - protein, 11 aa, Homo sapiens
  Table A; HLA-A*33:01; PIK3R1; N564D; 0
DSIKPDLIQLR

SEQ ID NO: 12174 - protein, 11 aa, Homo sapiens
  Table A; HLA-A*33:03; PIK3R1; N564D; 0
DSIKPDLIQLR

SEQ ID NO: 12175 - protein, 11 aa, Homo sapiens
  Table A; HLA-A*68:01; PIK3R1; N564D; 0
DSIKPDLIQLR

SEQ ID NO: 12176 - protein, 11 aa, Homo sapiens
  Table A; HLA-A*68:02; PIK3R1; N564D; 0
DSIKPDLIQLR

SEQ ID NO: 12177 - protein, 11 aa, Homo sapiens
  Table A; HLA-B*27:02; PIK3R1; N564D; 0
DSIKPDLIQLR

SEQ ID NO: 12178 - protein, 8 aa, Homo sapiens
  Table A; HLA-A*33:01; ARHGAP5; V474A; 0
DSKEAYGR

SEQ ID NO: 12179 - protein, 8 aa, Homo sapiens
  Table A; HLA-A*33:03; ARHGAP5; V474A; 0
DSKEAYGR

SEQ ID NO: 12180 - protein, 11 aa, Homo sapiens
  Table A; HLA-A*33:01; ARHGAP5; V474A; 0
DSKEAYGRHQR

SEQ ID NO: 12181 - protein, 9 aa, Homo sapiens
  Table A; HLA-A*33:01; PLCG1; R1275Q; 0
DSQERRAPR

SEQ ID NO: 12182 - protein, 9 aa, Homo sapiens
  Table A; HLA-A*33:03; PLCG1; R1275Q; 0
DSQERRAPR

SEQ ID NO: 12183 - protein, 9 aa, Homo sapiens
  Table A; HLA-A*68:02; RUNX1T1; D198N; 0
DSSELLLNV

SEQ ID NO: 12184 - protein, 9 aa, Homo sapiens
  Table A; HLA-A*11:01; TP53; G266E; 0
DSSGNLLER

SEQ ID NO: 12185 - protein, 9 aa, Homo sapiens
  Table A; HLA-A*26:03; TP53; G266E; 0
DSSGNLLER

SEQ ID NO: 12186 - protein, 9 aa, Homo sapiens
  Table A; HLA-A*33:01; TP53; G266E; 0
DSSGNLLER

SEQ ID NO: 12187 - protein, 9 aa, Homo sapiens
  Table A; HLA-A*33:03; TP53; G266E; 0
DSSGNLLER

SEQ ID NO: 12188 - protein, 9 aa, Homo sapiens
  Table A; HLA-A*68:01; TP53; G266E; 0
DSSGNLLER

SEQ ID NO: 12189 - protein, 9 aa, Homo sapiens
  Table A; HLA-A*68:02; TP53; G266E; 0
DSSGNLLER

SEQ ID NO: 12190 - protein, 8 aa, Homo sapiens
  Table A; HLA-A*33:03; TP53; G266R; 0
DSSGNLLR

SEQ ID NO: 12191 - protein, 8 aa, Homo sapiens
  Table A; HLA-A*68:01; TP53; G266R; 0
DSSGNLLR

SEQ ID NO: 12192 - protein, 9 aa, Homo sapiens
  Table A; HLA-A*26:03; TP53; G266R; 0
DSSGNLLRR

SEQ ID NO: 12193 - protein, 9 aa, Homo sapiens
  Table A; HLA-A*33:01; TP53; G266R; 0
DSSGNLLRR

SEQ ID NO: 12194 - protein, 9 aa, Homo sapiens
  Table A; HLA-A*33:03; TP53; G266R; 0
DSSGNLLRR

SEQ ID NO: 12195 - protein, 9 aa, Homo sapiens
  Table A; HLA-A*68:01; TP53; G266R; 0
DSSGNLLRR

SEQ ID NO: 12196 - protein, 8 aa, Homo sapiens
  Table A; HLA-B*51:01; TP53; G266V; 0
DSSGNLLV

SEQ ID NO: 12197 - protein, 9 aa, Homo sapiens
  Table A; HLA-A*11:01; TP53; G266V; 0
DSSGNLLVR

SEQ ID NO: 12198 - protein, 9 aa, Homo sapiens
  Table A; HLA-A*26:03; TP53; G266V; 0
DSSGNLLVR

SEQ ID NO: 12199 - protein, 9 aa, Homo sapiens
  Table A; HLA-A*31:01; TP53; G266V; 0
DSSGNLLVR

SEQ ID NO: 12200 - protein, 9 aa, Homo sapiens
  Table A; HLA-A*33:01; TP53; G266V; 0
DSSGNLLVR

SEQ ID NO: 12201 - protein, 9 aa, Homo sapiens
  Table A; HLA-A*33:03; TP53; G266V; 0
DSSGNLLVR

SEQ ID NO: 12202 - protein, 9 aa, Homo sapiens
  Table A; HLA-A*68:01; TP53; G266V; 0
DSSGNLLVR

SEQ ID NO: 12203 - protein, 9 aa, Homo sapiens
  Table A; HLA-A*68:02; TP53; G266V; 0
DSSGNLLVR

SEQ ID NO: 12204 - protein, 10 aa, Homo sapiens
  Table A; HLA-A*68:01; TP53; G266V; 0
DSSGNLLVRN

SEQ ID NO: 12205 - protein, 9 aa, Homo sapiens
  Table A; HLA-A*26:03; TP53; G262V; 0
DSSVNLLGR

SEQ ID NO: 12206 - protein, 9 aa, Homo sapiens
  Table A; HLA-A*33:01; TP53; G262V; 0
DSSVNLLGR

SEQ ID NO: 12207 - protein, 9 aa, Homo sapiens
  Table A; HLA-A*33:03; TP53; G262V; 0
DSSVNLLGR

SEQ ID NO: 12208 - protein, 9 aa, Homo sapiens
  Table A; HLA-A*68:01; TP53; G262V; 0
DSSVNLLGR

SEQ ID NO: 12209 - protein, 10 aa, Homo sapiens
  Table A; HLA-A*01:01; TP53; V157F; 1
DSTPPPGTRF

SEQ ID NO: 12210 - protein, 10 aa, Homo sapiens
  Table A; HLA-A*25:01; TP53; V157F; 0
DSTPPPGTRF

SEQ ID NO: 12211 - protein, 10 aa, Homo sapiens
  Table A; HLA-A*26:01; TP53; V157F; 0
DSTPPPGTRF

SEQ ID NO: 12212 - protein, 10 aa, Homo sapiens
  Table A; HLA-A*26:02; TP53; V157F; 0
DSTPPPGTRF

SEQ ID NO: 12213 - protein, 10 aa, Homo sapiens
  Table A; HLA-A*68:01; TP53; V157F; 0
DSTPPPGTRF

SEQ ID NO: 12214 - protein, 11 aa, Homo sapiens
  Table A; HLA-A*33:01; TP53; V157F; 0
DSTPPPGTRFR

SEQ ID NO: 12215 - protein, 9 aa, Homo sapiens
  Table A; HLA-A*26:03; TP53; P151S; 0
DSTSPPGTR

SEQ ID NO: 12216 - protein, 9 aa, Homo sapiens
  Table A; HLA-A*33:01; TP53; P151S; 0
DSTSPPGTR

SEQ ID NO: 12217 - protein, 9 aa, Homo sapiens
  Table A; HLA-A*33:03; TP53; P151S; 0
DSTSPPGTR

SEQ ID NO: 12218 - protein, 9 aa, Homo sapiens
  Table A; HLA-A*68:01; TP53; P151S; 0
DSTSPPGTR

SEQ ID NO: 12219 - protein, 10 aa, Homo sapiens
  Table A; HLA-A*68:01; TP53; P151S; 0
DSTSPPGTRV

SEQ ID NO: 12220 - protein, 10 aa, Homo sapiens
  Table A; HLA-A*68:02; TP53; P151S; 0
DSTSPPGTRV

SEQ ID NO: 12221 - protein, 11 aa, Homo sapiens
  Table A; HLA-A*33:01; TP53; P151S; 0
DSTSPPGTRVR

SEQ ID NO: 12222 - protein, 11 aa, Homo sapiens
  Table A; HLA-A*33:03; TP53; P151S; 0
DSTSPPGTRVR

SEQ ID NO: 12223 - protein, 11 aa, Homo sapiens
  Table A; HLA-A*68:01; TP53; P151S; 0
DSTSPPGTRVR

SEQ ID NO: 12224 - protein, 8 aa, Homo sapiens
  Table A; HLA-B*08:01; CTNNB1; G34V; 1
DSVIHSGA

SEQ ID NO: 12225 - protein, 8 aa, Homo sapiens
  Table A; HLA-B*14:02; CTNNB1; G34V; 0
DSVIHSGA

SEQ ID NO: 12226 - protein, 8 aa, Homo sapiens
  Table A; HLA-B*39:06; CTNNB1; G34V; 0
DSVIHSGA

SEQ ID NO: 12227 - protein, 8 aa, Homo sapiens
  Table A; HLA-B*48:01; CTNNB1; G34V; 0
DSVIHSGA

SEQ ID NO: 12228 - protein, 8 aa, Homo sapiens
  Table A; HLA-B*51:01; CTNNB1; G34V; 1
DSVIHSGA

SEQ ID NO: 12229 - protein, 8 aa, Homo sapiens
  Table A; HLA-B*54:01; CTNNB1; G34V; 0
DSVIHSGA

SEQ ID NO: 12230 - protein, 8 aa, Homo sapiens
  Table A; HLA-C*08:03; CTNNB1; G34V; 0
DSVIHSGA

SEQ ID NO: 12231 - protein, 9 aa, Homo sapiens
  Table A; HLA-A*26:01; CTNNB1; G34V; 0
DSVIHSGAT

SEQ ID NO: 12232 - protein, 9 aa, Homo sapiens
  Table A; HLA-B*08:01; CTNNB1; G34V; 1
DSVIHSGAT

SEQ ID NO: 12233 - protein, 9 aa, Homo sapiens
  Table A; HLA-B*39:01; CTNNB1; G34V; 0
DSVIHSGAT

SEQ ID NO: 12234 - protein, 9 aa, Homo sapiens
  Table A; HLA-B*48:01; CTNNB1; G34V; 0
DSVIHSGAT

SEQ ID NO: 12235 - protein, 9 aa, Homo sapiens
  Table A; HLA-C*08:03; CTNNB1; G34V; 0
DSVIHSGAT

SEQ ID NO: 12236 - protein, 8 aa, Homo sapiens
  Table A; HLA-A*01:01; KRAS; Q61H; 1
DTAGHEEY

SEQ ID NO: 12237 - protein, 8 aa, Homo sapiens
  Table A; HLA-A*26:01; KRAS; Q61H; 1
DTAGHEEY

SEQ ID NO: 12238 - protein, 8 aa, Homo sapiens
  Table A; HLA-B*35:01; KRAS; Q61H; 1
DTAGHEEY

SEQ ID NO: 12239 - protein, 8 aa, Homo sapiens
  Table A; HLA-B*39:01; KRAS; Q61H; 0
DTAGHEEY

SEQ ID NO: 12240 - protein, 8 aa, Homo sapiens
  Table A; HLA-A*01:01; NRAS; Q61H; 1
DTAGHEEY

SEQ ID NO: 12241 - protein, 8 aa, Homo sapiens
  Table A; HLA-A*26:01; NRAS; Q61H; 0
DTAGHEEY

SEQ ID NO: 12242 - protein, 8 aa, Homo sapiens
  Table A; HLA-B*35:01; NRAS; Q61H; 1
DTAGHEEY

SEQ ID NO: 12243 - protein, 8 aa, Homo sapiens
  Table A; HLA-B*39:01; NRAS; Q61H; 0
DTAGHEEY

SEQ ID NO: 12244 - protein, 11 aa, Homo sapiens
  Table A; HLA-A*25:01; KRAS; Q61H; 1
DTAGHEEYSAM

SEQ ID NO: 12245 - protein, 11 aa, Homo sapiens
  Table A; HLA-A*26:01; KRAS; Q61H; 1
DTAGHEEYSAM

SEQ ID NO: 12246 - protein, 11 aa, Homo sapiens
  Table A; HLA-A*26:02; KRAS; Q61H; 0
DTAGHEEYSAM

SEQ ID NO: 12247 - protein, 11 aa, Homo sapiens
  Table A; HLA-A*26:03; KRAS; Q61H; 0
DTAGHEEYSAM

SEQ ID NO: 12248 - protein, 11 aa, Homo sapiens
  Table A; HLA-A*25:01; NRAS; Q61H; 0
DTAGHEEYSAM

SEQ ID NO: 12249 - protein, 11 aa, Homo sapiens
  Table A; HLA-A*26:01; NRAS; Q61H; 0
DTAGHEEYSAM

SEQ ID NO: 12250 - protein, 11 aa, Homo sapiens
  Table A; HLA-A*26:02; NRAS; Q61H; 0
DTAGHEEYSAM

SEQ ID NO: 12251 - protein, 11 aa, Homo sapiens
  Table A; HLA-A*26:03; NRAS; Q61H; 0
DTAGHEEYSAM

SEQ ID NO: 12252 - protein, 11 aa, Homo sapiens
  Table A; HLA-A*25:01; HRAS; Q61K; 0
DTAGKEEYSAM

SEQ ID NO: 12253 - protein, 11 aa, Homo sapiens
  Table A; HLA-A*26:01; HRAS; Q61K; 0
DTAGKEEYSAM

SEQ ID NO: 12254 - protein, 11 aa, Homo sapiens
  Table A; HLA-A*26:02; HRAS; Q61K; 0
DTAGKEEYSAM

SEQ ID NO: 12255 - protein, 11 aa, Homo sapiens
  Table A; HLA-A*25:01; NRAS; Q61K; 1
DTAGKEEYSAM

SEQ ID NO: 12256 - protein, 11 aa, Homo sapiens
  Table A; HLA-A*26:01; NRAS; Q61K; 1
DTAGKEEYSAM

SEQ ID NO: 12257 - protein, 11 aa, Homo sapiens
  Table A; HLA-A*26:02; NRAS; Q61K; 0
DTAGKEEYSAM

SEQ ID NO: 12258 - protein, 8 aa, Homo sapiens
  Table A; HLA-A*26:01; KRAS; Q61L; 0
DTAGLEEY

SEQ ID NO: 12259 - protein, 8 aa, Homo sapiens
  Table A; HLA-B*35:01; KRAS; Q61L; 0
DTAGLEEY

SEQ ID NO: 12260 - protein, 8 aa, Homo sapiens
  Table A; HLA-B*39:01; KRAS; Q61L; 0
DTAGLEEY

SEQ ID NO: 12261 - protein, 8 aa, Homo sapiens
  Table A; HLA-A*26:01; NRAS; Q61L; 1
DTAGLEEY

SEQ ID NO: 12262 - protein, 8 aa, Homo sapiens
  Table A; HLA-B*35:01; NRAS; Q61L; 1
DTAGLEEY

SEQ ID NO: 12263 - protein, 8 aa, Homo sapiens
  Table A; HLA-B*39:01; NRAS; Q61L; 0
DTAGLEEY

SEQ ID NO: 12264 - protein, 10 aa, Homo sapiens
  Table A; HLA-A*68:01; KRAS; Q61L; 0
DTAGLEEYSA

SEQ ID NO: 12265 - protein, 10 aa, Homo sapiens
  Table A; HLA-A*68:02; KRAS; Q61L; 0
DTAGLEEYSA

SEQ ID NO: 12266 - protein, 10 aa, Homo sapiens
  Table A; HLA-A*68:01; NRAS; Q61L; 1
DTAGLEEYSA

SEQ ID NO: 12267 - protein, 10 aa, Homo sapiens
  Table A; HLA-A*68:02; NRAS; Q61L; 0
DTAGLEEYSA

SEQ ID NO: 12268 - protein, 11 aa, Homo sapiens
  Table A; HLA-A*25:01; KRAS; Q61L; 0
DTAGLEEYSAM

SEQ ID NO: 12269 - protein, 11 aa, Homo sapiens
  Table A; HLA-A*26:01; KRAS; Q61L; 0
DTAGLEEYSAM

SEQ ID NO: 12270 - protein, 11 aa, Homo sapiens
  Table A; HLA-A*26:02; KRAS; Q61L; 0
DTAGLEEYSAM

SEQ ID NO: 12271 - protein, 11 aa, Homo sapiens
  Table A; HLA-A*26:03; KRAS; Q61L; 0
DTAGLEEYSAM

SEQ ID NO: 12272 - protein, 11 aa, Homo sapiens
  Table A; HLA-A*68:01; KRAS; Q61L; 0
DTAGLEEYSAM

SEQ ID NO: 12273 - protein, 11 aa, Homo sapiens
  Table A; HLA-A*25:01; NRAS; Q61L; 1
DTAGLEEYSAM

SEQ ID NO: 12274 - protein, 11 aa, Homo sapiens
  Table A; HLA-A*26:01; NRAS; Q61L; 1
DTAGLEEYSAM

SEQ ID NO: 12275 - protein, 11 aa, Homo sapiens
  Table A; HLA-A*26:02; NRAS; Q61L; 0
DTAGLEEYSAM

SEQ ID NO: 12276 - protein, 11 aa, Homo sapiens
  Table A; HLA-A*26:03; NRAS; Q61L; 0
DTAGLEEYSAM

SEQ ID NO: 12277 - protein, 11 aa, Homo sapiens
  Table A; HLA-A*68:01; NRAS; Q61L; 1
DTAGLEEYSAM

SEQ ID NO: 12278 - protein, 11 aa, Homo sapiens
  Table A; HLA-A*68:02; NRAS; Q61L; 0
DTAGLEEYSAM

SEQ ID NO: 12279 - protein, 8 aa, Homo sapiens
  Table A; HLA-A*26:01; KRAS; Q61R; 0
DTAGREEY

SEQ ID NO: 12280 - protein, 8 aa, Homo sapiens
  Table A; HLA-A*26:01; NRAS; Q61R; 1
DTAGREEY

SEQ ID NO: 12281 - protein, 8 aa, Homo sapiens
  Table A; HLA-C*16:01; NRAS; Q61R; 1
DTAGREEY

SEQ ID NO: 12282 - protein, 11 aa, Homo sapiens
  Table A; HLA-A*25:01; KRAS; Q61R; 0
DTAGREEYSAM

SEQ ID NO: 12283 - protein, 11 aa, Homo sapiens
  Table A; HLA-A*26:01; KRAS; Q61R; 0
DTAGREEYSAM

SEQ ID NO: 12284 - protein, 11 aa, Homo sapiens
  Table A; HLA-A*26:02; KRAS; Q61R; 0
DTAGREEYSAM

SEQ ID NO: 12285 - protein, 11 aa, Homo sapiens
  Table A; HLA-A*25:01; NRAS; Q61R; 1
DTAGREEYSAM

SEQ ID NO: 12286 - protein, 11 aa, Homo sapiens
  Table A; HLA-A*26:01; NRAS; Q61R; 1
DTAGREEYSAM

SEQ ID NO: 12287 - protein, 11 aa, Homo sapiens
  Table A; HLA-A*26:02; NRAS; Q61R; 0
DTAGREEYSAM

SEQ ID NO: 12288 - protein, 10 aa, Homo sapiens
  Table A; HLA-A*25:01; ARHGEF12; R705H; 0
DTLDGTPHTL

SEQ ID NO: 12289 - protein, 10 aa, Homo sapiens
  Table A; HLA-A*68:01; ARHGEF12; R705H; 0
DTLDGTPHTL

SEQ ID NO: 12290 - protein, 10 aa, Homo sapiens
  Table A; HLA-A*68:02; ARHGEF12; R705H; 0
DTLDGTPHTL

SEQ ID NO: 12291 - protein, 9 aa, Homo sapiens
  Table A; HLA-A*68:02; PPP2R1A; R183W; 0
DTPMVRWAA

SEQ ID NO: 12292 - protein, 9 aa, Homo sapiens
  Table A; HLA-B*39:06; PPP2R1A; R183W; 0
DTPMVRWAA

SEQ ID NO: 12293 - protein, 9 aa, Homo sapiens
  Table A; HLA-B*54:01; PPP2R1A; R183W; 0
DTPMVRWAA

SEQ ID NO: 12294 - protein, 8 aa, Homo sapiens
  Table A; HLA-B*18:01; PTK6; H126P; 1
DTQAVRPY

SEQ ID NO: 12295 - protein, 10 aa, Homo sapiens
  Table A; HLA-A*68:02; PTK6; H126P; 0
DTQAVRPYKI

SEQ ID NO: 12296 - protein, 9 aa, Homo sapiens
  Table A; HLA-B*51:01; KRAS; G13D; 1
DVGKSALTI

SEQ ID NO: 12297 - protein, 9 aa, Homo sapiens
  Table A; HLA-A*25:01; FAT1; D3120N; 0
DVNNNAPEF

SEQ ID NO: 12298 - protein, 9 aa, Homo sapiens
  Table A; HLA-A*26:01; FAT1; D3120N; 0
DVNNNAPEF

SEQ ID NO: 12299 - protein, 9 aa, Homo sapiens
  Table A; HLA-A*26:02; FAT1; D3120N; 0
DVNNNAPEF

SEQ ID NO: 12300 - protein, 9 aa, Homo sapiens
  Table A; HLA-A*33:01; FAT1; D3120N; 0
DVNNNAPEF

SEQ ID NO: 12301 - protein, 9 aa, Homo sapiens
  Table A; HLA-B*15:02; FAT1; D3120N; 0
DVNNNAPEF

SEQ ID NO: 12302 - protein, 9 aa, Homo sapiens
  Table A; HLA-B*35:01; FAT1; D3120N; 1
DVNNNAPEF

SEQ ID NO: 12303 - protein, 9 aa, Homo sapiens
  Table A; HLA-B*39:01; FAT1; D3120N; 0
DVNNNAPEF

SEQ ID NO: 12304 - protein, 9 aa, Homo sapiens
  Table A; HLA-A*25:01; PTPRD; S431L; 0
DVQARMLSL

SEQ ID NO: 12305 - protein, 9 aa, Homo sapiens
  Table A; HLA-B*08:01; PTPRD; S431L; 1
DVQARMLSL

SEQ ID NO: 12306 - protein, 9 aa, Homo sapiens
  Table A; HLA-B*14:02; PTPRD; S431L; 0
DVQARMLSL

SEQ ID NO: 12307 - protein, 9 aa, Homo sapiens
  Table A; HLA-A*25:01; PPP2R1A; R28C; 0
DVQLCLNSI

SEQ ID NO: 12308 - protein, 9 aa, Homo sapiens
  Table A; HLA-B*08:01; PPP2R1A; R28C; 1
DVQLCLNSI

SEQ ID NO: 12309 - protein, 9 aa, Homo sapiens
  Table A; HLA-B*51:01; PPP2R1A; R28C; 1
DVQLCLNSI

SEQ ID NO: 12310 - protein, 9 aa, Homo sapiens
  Table A; HLA-A*33:01; FGFR2; S252W; 1
DVVERWPHR

SEQ ID NO: 12311 - protein, 8 aa, Homo sapiens
  Table A; HLA-B*51:01; GRIN2A; S1425L; 0
DVYILEHV

SEQ ID NO: 12312 - protein, 9 aa, Homo sapiens
  Table A; HLA-B*15:02; GRIN2A; S1425L; 0
DVYILEHVM

SEQ ID NO: 12313 - protein, 9 aa, Homo sapiens
  Table A; HLA-B*35:01; GRIN2A; S1425L; 0
DVYILEHVM

SEQ ID NO: 12314 - protein, 9 aa, Homo sapiens
  Table A; HLA-C*08:01; GRIN2A; S1425L; 0
DVYILEHVM

SEQ ID NO: 12315 - protein, 11 aa, Homo sapiens
  Table A; HLA-A*33:01; SMAD4; G352V; 0
DVYVDPSGGDR

SEQ ID NO: 12316 - protein, 11 aa, Homo sapiens
  Table A; HLA-A*68:01; SMAD4; G352V; 0
DVYVDPSGGDR

SEQ ID NO: 12317 - protein, 9 aa, Homo sapiens
  Table A; HLA-A*33:03; CTCF; K365T; 0
DYASVEVST

SEQ ID NO: 12318 - protein, 9 aa, Homo sapiens
  Table A; HLA-B*27:02; CTCF; K365T; 0
DYASVEVST

SEQ ID NO: 12319 - protein, 9 aa, Homo sapiens
  Table A; HLA-B*39:01; CTCF; K365T; 0
DYASVEVST

SEQ ID NO: 12320 - protein, 9 aa, Homo sapiens
  Table A; HLA-B*39:06; CTCF; K365T; 0
DYASVEVST

SEQ ID NO: 12321 - protein, 10 aa, Homo sapiens
  Table A; HLA-A*23:01; CTCF; K365T; 0
DYASVEVSTL

SEQ ID NO: 12322 - protein, 10 aa, Homo sapiens
  Table A; HLA-A*24:02; CTCF; K365T; 1
DYASVEVSTL

SEQ ID NO: 12323 - protein, 10 aa, Homo sapiens
  Table A; HLA-A*25:01; CTCF; K365T; 0
DYASVEVSTL

SEQ ID NO: 12324 - protein, 10 aa, Homo sapiens
  Table A; HLA-A*33:03; CTCF; K365T; 0
DYASVEVSTL

SEQ ID NO: 12325 - protein, 10 aa, Homo sapiens
  Table A; HLA-A*68:01; CTCF; K365T; 0
DYASVEVSTL

SEQ ID NO: 12326 - protein, 10 aa, Homo sapiens
  Table A; HLA-A*68:02; CTCF; K365T; 0
DYASVEVSTL

SEQ ID NO: 12327 - protein, 10 aa, Homo sapiens
  Table A; HLA-B*38:01; CTCF; K365T; 0
DYASVEVSTL

SEQ ID NO: 12328 - protein, 10 aa, Homo sapiens
  Table A; HLA-B*39:01; CTCF; K365T; 0
DYASVEVSTL

SEQ ID NO: 12329 - protein, 10 aa, Homo sapiens
  Table A; HLA-B*44:05; CTCF; K365T; 0
DYASVEVSTL

SEQ ID NO: 12330 - protein, 10 aa, Homo sapiens
  Table A; HLA-B*48:01; CTCF; K365T; 0
DYASVEVSTL

SEQ ID NO: 12331 - protein, 11 aa, Homo sapiens
  Table A; HLA-A*33:01; CTCF; K365T; 0
DYASVEVSTLK

SEQ ID NO: 12332 - protein, 11 aa, Homo sapiens
  Table A; HLA-A*33:03; CTCF; K365T; 0
DYASVEVSTLK

SEQ ID NO: 12333 - protein, 11 aa, Homo sapiens
  Table A; HLA-A*68:01; CTCF; K365T; 0
DYASVEVSTLK

SEQ ID NO: 12334 - protein, 11 aa, Homo sapiens
  Table A; HLA-A*68:02; CTCF; K365T; 0
DYASVEVSTLK

SEQ ID NO: 12335 - protein, 11 aa, Homo sapiens
  Table A; HLA-B*27:02; CTCF; K365T; 0
DYASVEVSTLK

SEQ ID NO: 12336 - protein, 8 aa, Homo sapiens
  Table A; HLA-A*33:03; CTNNB1; S33Y; 0
DYGIHSGA

SEQ ID NO: 12337 - protein, 8 aa, Homo sapiens
  Table A; HLA-B*14:01; CTNNB1; S33Y; 0
DYGIHSGA

SEQ ID NO: 12338 - protein, 8 aa, Homo sapiens
  Table A; HLA-B*14:02; CTNNB1; S33Y; 0
DYGIHSGA

SEQ ID NO: 12339 - protein, 8 aa, Homo sapiens
  Table A; HLA-B*48:01; CTNNB1; S33Y; 0
DYGIHSGA

SEQ ID NO: 12340 - protein, 8 aa, Homo sapiens
  Table A; HLA-C*08:03; CTNNB1; S33Y; 0
DYGIHSGA

SEQ ID NO: 12341 - protein, 9 aa, Homo sapiens
  Table A; HLA-A*33:03; CTNNB1; S33Y; 0
DYGIHSGAT

SEQ ID NO: 12342 - protein, 9 aa, Homo sapiens
  Table A; HLA-B*08:01; CTNNB1; S33Y; 1
DYGIHSGAT

SEQ ID NO: 12343 - protein, 9 aa, Homo sapiens
  Table A; HLA-B*48:01; CTNNB1; S33Y; 0
DYGIHSGAT

SEQ ID NO: 12344 - protein, 9 aa, Homo sapiens
  Table A; HLA-C*08:03; CTNNB1; S33Y; 0
DYGIHSGAT

SEQ ID NO: 12345 - protein, 9 aa, Homo sapiens
  Table A; HLA-A*33:01; FGFR2; C382R; 0
DYLEIAIYR

SEQ ID NO: 12346 - protein, 9 aa, Homo sapiens
  Table A; HLA-A*33:03; FGFR2; C382R; 0
DYLEIAIYR

SEQ ID NO: 12347 - protein, 10 aa, Homo sapiens
  Table A; HLA-A*23:01; FGFR2; C382R; 0
DYLEIAIYRI

SEQ ID NO: 12348 - protein, 9 aa, Homo sapiens
  Table A; HLA-A*26:01; RGPD3; N756D; 0
DYSEGGPLY

SEQ ID NO: 12349 - protein, 9 aa, Homo sapiens
  Table A; HLA-A*29:02; RGPD3; N756D; 0
DYSEGGPLY

SEQ ID NO: 12350 - protein, 9 aa, Homo sapiens
  Table A; HLA-A*33:01; RGPD3; N756D; 0
DYSEGGPLY

SEQ ID NO: 12351 - protein, 9 aa, Homo sapiens
  Table A; HLA-B*18:01; RGPD3; N756D; 1
DYSEGGPLY

SEQ ID NO: 12352 - protein, 9 aa, Homo sapiens
  Table A; HLA-B*39:01; RGPD3; N756D; 0
DYSEGGPLY

SEQ ID NO: 12353 - protein, 10 aa, Homo sapiens
  Table A; HLA-A*33:01; RGPD3; N756D; 0
DYSEGGPLYK

SEQ ID NO: 12354 - protein, 10 aa, Homo sapiens
  Table A; HLA-A*33:03; RGPD3; N756D; 0
DYSEGGPLYK

SEQ ID NO: 12355 - protein, 10 aa, Homo sapiens
  Table A; HLA-A*68:01; RGPD3; N756D; 0
DYSEGGPLYK

SEQ ID NO: 12356 - protein, 11 aa, Homo sapiens
  Table A; HLA-A*33:01; RGPD3; N756D; 0
DYSEGGPLYKN

SEQ ID NO: 12357 - protein, 10 aa, Homo sapiens
  Table A; HLA-A*68:02; CDH11; K357T; 0
EAANVHIDPT

SEQ ID NO: 12358 - protein, 11 aa, Homo sapiens
  Table A; HLA-A*68:02; CDH11; K357T; 0
EAANVHIDPTF

SEQ ID NO: 12359 - protein, 11 aa, Homo sapiens
  Table A; HLA-B*35:01; CDH11; K357T; 1
EAANVHIDPTF

SEQ ID NO: 12360 - protein, 11 aa, Homo sapiens
  Table A; HLA-B*35:08; CDH11; K357T; 0
EAANVHIDPTF

SEQ ID NO: 12361 - protein, 8 aa, Homo sapiens
  Table A; HLA-B*51:01; MB21D2; Q311E; 0
EACKAIII

SEQ ID NO: 12362 - protein, 9 aa, Homo sapiens
  Table A; HLA-A*68:01; MB21D2; Q311E; 0
EACKAIIIK

SEQ ID NO: 12363 - protein, 10 aa, Homo sapiens
  Table A; HLA-A*68:01; MB21D2; Q311E; 0
EACKAIIIKL

SEQ ID NO: 12364 - protein, 10 aa, Homo sapiens
  Table A; HLA-A*68:02; MB21D2; Q311E; 0
EACKAIIIKL

SEQ ID NO: 12365 - protein, 10 aa, Homo sapiens
  Table A; HLA-A*33:03; ARHGAP5; V474A; 0
EADSKEAYGR

SEQ ID NO: 12366 - protein, 10 aa, Homo sapiens
  Table A; HLA-A*68:01; ARHGAP5; V474A; 0
EADSKEAYGR

SEQ ID NO: 12367 - protein, 10 aa, Homo sapiens
  Table A; HLA-B*35:02; TNC; L1626I; 0
EAEPEVDNIL

SEQ ID NO: 12368 - protein, 10 aa, Homo sapiens
  Table A; HLA-B*35:03; TNC; L1626I; 0
EAEPEVDNIL

SEQ ID NO: 12369 - protein, 10 aa, Homo sapiens
  Table A; HLA-B*35:12; TNC; L1626I; 0
EAEPEVDNIL

SEQ ID NO: 12370 - protein, 9 aa, Homo sapiens
  Table A; HLA-A*11:01; MAP2K1; K57N; 0
EAFLTQNQK

SEQ ID NO: 12371 - protein, 9 aa, Homo sapiens
  Table A; HLA-A*33:01; MAP2K1; K57N; 0
EAFLTQNQK

SEQ ID NO: 12372 - protein, 9 aa, Homo sapiens
  Table A; HLA-A*33:03; MAP2K1; K57N; 0
EAFLTQNQK

SEQ ID NO: 12373 - protein, 9 aa, Homo sapiens
  Table A; HLA-A*68:01; MAP2K1; K57N; 0
EAFLTQNQK

SEQ ID NO: 12374 - protein, 9 aa, Homo sapiens
  Table A; HLA-A*68:02; MAP2K1; K57N; 0
EAFLTQNQK

SEQ ID NO: 12375 - protein, 9 aa, Homo sapiens
  Table A; HLA-B*27:02; MAP2K1; K57N; 0
EAFLTQNQK

SEQ ID NO: 12376 - protein, 9 aa, Homo sapiens
  Table A; HLA-B*51:01; MAP2K1; K57N; 0
EAFLTQNQK

SEQ ID NO: 12377 - protein, 10 aa, Homo sapiens
  Table A; HLA-A*33:03; MAP2K1; K57N; 0
EAFLTQNQKV

SEQ ID NO: 12378 - protein, 10 aa, Homo sapiens
  Table A; HLA-A*68:01; MAP2K1; K57N; 0
EAFLTQNQKV

SEQ ID NO: 12379 - protein, 10 aa, Homo sapiens
  Table A; HLA-A*68:02; MAP2K1; K57N; 0
EAFLTQNQKV

SEQ ID NO: 12380 - protein, 10 aa, Homo sapiens
  Table A; HLA-B*51:01; MAP2K1; K57N; 0
EAFLTQNQKV

SEQ ID NO: 12381 - protein, 8 aa, Homo sapiens
  Table A; HLA-B*08:01; CHST11; A159T; 1
EAHVSTNL

SEQ ID NO: 12382 - protein, 8 aa, Homo sapiens
  Table A; HLA-B*48:01; CHST11; A159T; 0
EAHVSTNL

SEQ ID NO: 12383 - protein, 8 aa, Homo sapiens
  Table A; HLA-B*51:01; CHST11; A159T; 1
EAHVSTNL

SEQ ID NO: 12384 - protein, 9 aa, Homo sapiens
  Table A; HLA-A*33:03; CHST11; A159T; 0
EAHVSTNLK

SEQ ID NO: 12385 - protein, 9 aa, Homo sapiens
  Table A; HLA-A*68:01; CHST11; A159T; 0
EAHVSTNLK

SEQ ID NO: 12386 - protein, 8 aa, Homo sapiens
  Table A; HLA-A*02:03; TPR; S2155L; 0
EAIHLPQV

SEQ ID NO: 12387 - protein, 8 aa, Homo sapiens
  Table A; HLA-A*02:06; TPR; S2155L; 0
EAIHLPQV

SEQ ID NO: 12388 - protein, 8 aa, Homo sapiens
  Table A; HLA-A*11:01; TPR; S2155L; 0
EAIHLPQV

SEQ ID NO: 12389 - protein, 8 aa, Homo sapiens
  Table A; HLA-A*26:01; TPR; S2155L; 0
EAIHLPQV

SEQ ID NO: 12390 - protein, 8 aa, Homo sapiens
  Table A; HLA-A*26:03; TPR; S2155L; 0
EAIHLPQV

SEQ ID NO: 12391 - protein, 8 aa, Homo sapiens
  Table A; HLA-A*30:01; TPR; S2155L; 0
EAIHLPQV

SEQ ID NO: 12392 - protein, 8 aa, Homo sapiens
  Table A; HLA-A*33:03; TPR; S2155L; 0
EAIHLPQV

SEQ ID NO: 12393 - protein, 8 aa, Homo sapiens
  Table A; HLA-A*68:01; TPR; S2155L; 0
EAIHLPQV

SEQ ID NO: 12394 - protein, 8 aa, Homo sapiens
  Table A; HLA-A*68:02; TPR; S2155L; 0
EAIHLPQV

SEQ ID NO: 12395 - protein, 8 aa, Homo sapiens
  Table A; HLA-B*08:01; TPR; S2155L; 0
EAIHLPQV

SEQ ID NO: 12396 - protein, 8 aa, Homo sapiens
  Table A; HLA-B*13:02; TPR; S2155L; 0
EAIHLPQV

SEQ ID NO: 12397 - protein, 8 aa, Homo sapiens
  Table A; HLA-B*39:06; TPR; S2155L; 0
EAIHLPQV

SEQ ID NO: 12398 - protein, 8 aa, Homo sapiens
  Table A; HLA-B*40:02; TPR; S2155L; 0
EAIHLPQV

SEQ ID NO: 12399 - protein, 8 aa, Homo sapiens
  Table A; HLA-B*49:01; TPR; S2155L; 0
EAIHLPQV

SEQ ID NO: 12400 - protein, 8 aa, Homo sapiens
  Table A; HLA-B*51:01; TPR; S2155L; 0
EAIHLPQV

SEQ ID NO: 12401 - protein, 8 aa, Homo sapiens
  Table A; HLA-B*54:01; TPR; S2155L; 0
EAIHLPQV

SEQ ID NO: 12402 - protein, 8 aa, Homo sapiens
  Table A; HLA-B*55:01; TPR; S2155L; 0
EAIHLPQV

SEQ ID NO: 12403 - protein, 8 aa, Homo sapiens
  Table A; HLA-B*55:02; TPR; S2155L; 0
EAIHLPQV

SEQ ID NO: 12404 - protein, 8 aa, Homo sapiens
  Table A; HLA-B*56:01; TPR; S2155L; 0
EAIHLPQV

SEQ ID NO: 12405 - protein, 8 aa, Homo sapiens
  Table A; HLA-B*58:01; TPR; S2155L; 0
EAIHLPQV

SEQ ID NO: 12406 - protein, 8 aa, Homo sapiens
  Table A; HLA-C*03:02; TPR; S2155L; 0
EAIHLPQV

SEQ ID NO: 12407 - protein, 9 aa, Homo sapiens
  Table A; HLA-A*68:01; TPR; S2155L; 0
EAIHLPQVA

SEQ ID NO: 12408 - protein, 9 aa, Homo sapiens
  Table A; HLA-A*68:02; TPR; S2155L; 0
EAIHLPQVA

SEQ ID NO: 12409 - protein, 9 aa, Homo sapiens
  Table A; HLA-B*39:06; TPR; S2155L; 0
EAIHLPQVA

SEQ ID NO: 12410 - protein, 9 aa, Homo sapiens
  Table A; HLA-B*54:01; TPR; S2155L; 0
EAIHLPQVA

SEQ ID NO: 12411 - protein, 9 aa, Homo sapiens
  Table A; HLA-B*55:02; TPR; S2155L; 0
EAIHLPQVA

SEQ ID NO: 12412 - protein, 10 aa, Homo sapiens
  Table A; HLA-A*33:03; TPR; S2155L; 0
EAIHLPQVAG

SEQ ID NO: 12413 - protein, 10 aa, Homo sapiens
  Table A; HLA-A*68:01; TPR; S2155L; 0
EAIHLPQVAG

SEQ ID NO: 12414 - protein, 10 aa, Homo sapiens
  Table A; HLA-A*68:02; TPR; S2155L; 0
EAIHLPQVAG

SEQ ID NO: 12415 - protein, 10 aa, Homo sapiens
  Table A; HLA-B*54:01; TPR; S2155L; 0
EAIHLPQVAG

SEQ ID NO: 12416 - protein, 11 aa, Homo sapiens
  Table A; HLA-A*68:01; TPR; S2155L; 0
EAIHLPQVAGV

SEQ ID NO: 12417 - protein, 11 aa, Homo sapiens
  Table A; HLA-A*68:02; TPR; S2155L; 0
EAIHLPQVAGV

SEQ ID NO: 12418 - protein, 9 aa, Homo sapiens
  Table A; HLA-A*33:03; BCOR; N1425S; 0
EARRLIVSK

SEQ ID NO: 12419 - protein, 9 aa, Homo sapiens
  Table A; HLA-A*68:02; CNTNAP2; R483Q; 0
EASAVQTNS

SEQ ID NO: 12420 - protein, 11 aa, Homo sapiens
  Table A; HLA-A*68:01; CNTNAP2; R483Q; 0
EASAVQTNSPL

SEQ ID NO: 12421 - protein, 11 aa, Homo sapiens
  Table A; HLA-A*68:02; CNTNAP2; R483Q; 0
EASAVQTNSPL

SEQ ID NO: 12422 - protein, 8 aa, Homo sapiens
  Table A; HLA-A*33:03; ARHGAP5; V474A; 0
EAYGRHQR

SEQ ID NO: 12423 - protein, 8 aa, Homo sapiens
  Table A; HLA-A*33:03; ZNF429; L520R; 0
ECGKAFIR

SEQ ID NO: 12424 - protein, 9 aa, Homo sapiens
  Table A; HLA-B*15:02; TP53; Y205C; 0
ECLDDRNTF

SEQ ID NO: 12425 - protein, 10 aa, Homo sapiens
  Table A; HLA-A*33:03; TP53; Y205C; 0
ECLDDRNTFR

SEQ ID NO: 12426 - protein, 8 aa, Homo sapiens
  Table A; HLA-B*08:01; PIK3CA; E39K; 1
ECLRKATL

SEQ ID NO: 12427 - protein, 10 aa, Homo sapiens
  Table A; HLA-A*25:01; MAP2K1; P124S; 0
ECNSSYIVGF

SEQ ID NO: 12428 - protein, 10 aa, Homo sapiens
  Table A; HLA-A*26:01; MAP2K1; P124S; 1
ECNSSYIVGF

SEQ ID NO: 12429 - protein, 10 aa, Homo sapiens
  Table A; HLA-A*26:02; MAP2K1; P124S; 0
ECNSSYIVGF

SEQ ID NO: 12430 - protein, 10 aa, Homo sapiens
  Table A; HLA-A*33:03; MAP2K1; P124S; 0
ECNSSYIVGF

SEQ ID NO: 12431 - protein, 10 aa, Homo sapiens
  Table A; HLA-A*68:01; MAP2K1; P124S; 1
ECNSSYIVGF

SEQ ID NO: 12432 - protein, 8 aa, Homo sapiens
  Table A; HLA-A*31:01; RAC1; A159V; 0
ECSVLTQR

SEQ ID NO: 12433 - protein, 8 aa, Homo sapiens
  Table A; HLA-A*33:01; RAC1; A159V; 0
ECSVLTQR

SEQ ID NO: 12434 - protein, 8 aa, Homo sapiens
  Table A; HLA-A*33:03; RAC1; A159V; 0
ECSVLTQR

SEQ ID NO: 12435 - protein, 8 aa, Homo sapiens
  Table A; HLA-A*68:01; RAC1; A159V; 0
ECSVLTQR

SEQ ID NO: 12436 - protein, 10 aa, Homo sapiens
  Table A; HLA-A*68:02; RAC1; A159V; 0
ECSVLTQRGL

SEQ ID NO: 12437 - protein, 10 aa, Homo sapiens
  Table A; HLA-A*26:03; TP53; G266E; 0
EDSSGNLLER

SEQ ID NO: 12438 - protein, 10 aa, Homo sapiens
  Table A; HLA-A*33:01; TP53; G266E; 0
EDSSGNLLER

SEQ ID NO: 12439 - protein, 10 aa, Homo sapiens
  Table A; HLA-A*33:03; TP53; G266E; 0
EDSSGNLLER

SEQ ID NO: 12440 - protein, 10 aa, Homo sapiens
  Table A; HLA-A*68:01; TP53; G266E; 0
EDSSGNLLER

SEQ ID NO: 12441 - protein, 10 aa, Homo sapiens
  Table A; HLA-B*27:02; TP53; G266E; 0
EDSSGNLLER

SEQ ID NO: 12442 - protein, 9 aa, Homo sapiens
  Table A; HLA-A*26:03; TP53; G266R; 0
EDSSGNLLR

SEQ ID NO: 12443 - protein, 9 aa, Homo sapiens
  Table A; HLA-A*33:01; TP53; G266R; 0
EDSSGNLLR

SEQ ID NO: 12444 - protein, 9 aa, Homo sapiens
  Table A; HLA-A*33:03; TP53; G266R; 0
EDSSGNLLR

SEQ ID NO: 12445 - protein, 9 aa, Homo sapiens
  Table A; HLA-A*68:01; TP53; G266R; 0
EDSSGNLLR

SEQ ID NO: 12446 - protein, 9 aa, Homo sapiens
  Table A; HLA-B*27:02; TP53; G266R; 0
EDSSGNLLR

SEQ ID NO: 12447 - protein, 10 aa, Homo sapiens
  Table A; HLA-A*26:03; TP53; G266R; 0
EDSSGNLLRR

SEQ ID NO: 12448 - protein, 10 aa, Homo sapiens
  Table A; HLA-A*33:01; TP53; G266R; 0
EDSSGNLLRR

SEQ ID NO: 12449 - protein, 10 aa, Homo sapiens
  Table A; HLA-A*33:03; TP53; G266R; 0
EDSSGNLLRR

SEQ ID NO: 12450 - protein, 10 aa, Homo sapiens
  Table A; HLA-A*68:01; TP53; G266R; 0
EDSSGNLLRR

SEQ ID NO: 12451 - protein, 9 aa, Homo sapiens
  Table A; HLA-A*68:02; TP53; G266V; 0
EDSSGNLLV

SEQ ID NO: 12452 - protein, 9 aa, Homo sapiens
  Table A; HLA-B*38:01; TP53; G266V; 0
EDSSGNLLV

SEQ ID NO: 12453 - protein, 9 aa, Homo sapiens
  Table A; HLA-B*39:01; TP53; G266V; 0
EDSSGNLLV

SEQ ID NO: 12454 - protein, 10 aa, Homo sapiens
  Table A; HLA-A*26:03; TP53; G266V; 0
EDSSGNLLVR

SEQ ID NO: 12455 - protein, 10 aa, Homo sapiens
  Table A; HLA-A*33:01; TP53; G266V; 0
EDSSGNLLVR

SEQ ID NO: 12456 - protein, 10 aa, Homo sapiens
  Table A; HLA-A*33:03; TP53; G266V; 0
EDSSGNLLVR

SEQ ID NO: 12457 - protein, 10 aa, Homo sapiens
  Table A; HLA-A*68:01; TP53; G266V; 0
EDSSGNLLVR

SEQ ID NO: 12458 - protein, 10 aa, Homo sapiens
  Table A; HLA-B*27:02; TP53; G266V; 0
EDSSGNLLVR

SEQ ID NO: 12459 - protein, 8 aa, Homo sapiens
  Table A; HLA-B*37:01; TP53; G262V; 0
EDSSVNLL

SEQ ID NO: 12460 - protein, 8 aa, Homo sapiens
  Table A; HLA-B*38:01; TP53; G262V; 0
EDSSVNLL

SEQ ID NO: 12461 - protein, 8 aa, Homo sapiens
  Table A; HLA-B*40:02; TP53; G262V; 0
EDSSVNLL

SEQ ID NO: 12462 - protein, 8 aa, Homo sapiens
  Table A; HLA-B*41:02; TP53; G262V; 0
EDSSVNLL

SEQ ID NO: 12463 - protein, 8 aa, Homo sapiens
  Table A; HLA-B*44:05; TP53; G262V; 0
EDSSVNLL

SEQ ID NO: 12464 - protein, 8 aa, Homo sapiens
  Table A; HLA-B*48:01; TP53; G262V; 0
EDSSVNLL

SEQ ID NO: 12465 - protein, 10 aa, Homo sapiens
  Table A; HLA-A*26:03; TP53; G262V; 0
EDSSVNLLGR

SEQ ID NO: 12466 - protein, 10 aa, Homo sapiens
  Table A; HLA-A*33:01; TP53; G262V; 0
EDSSVNLLGR

SEQ ID NO: 12467 - protein, 10 aa, Homo sapiens
  Table A; HLA-A*33:03; TP53; G262V; 0
EDSSVNLLGR

SEQ ID NO: 12468 - protein, 10 aa, Homo sapiens
  Table A; HLA-A*68:01; TP53; G262V; 0
EDSSVNLLGR

SEQ ID NO: 12469 - protein, 10 aa, Homo sapiens
  Table A; HLA-A*68:02; TP53; G262V; 0
EDSSVNLLGR

SEQ ID NO: 12470 - protein, 10 aa, Homo sapiens
  Table A; HLA-B*27:02; TP53; G262V; 0
EDSSVNLLGR

SEQ ID NO: 12471 - protein, 10 aa, Homo sapiens
  Table A; HLA-B*44:05; FAT1; D3120N; 0
EDVNNNAPEF

SEQ ID NO: 12472 - protein, 8 aa, Homo sapiens
  Table A; HLA-A*33:01; ERBB2; V842I; 0
EDVRLIHR

SEQ ID NO: 12473 - protein, 8 aa, Homo sapiens
  Table A; HLA-A*33:03; ERBB2; V842I; 0
EDVRLIHR

SEQ ID NO: 12474 - protein, 10 aa, Homo sapiens
  Table A; HLA-A*26:01; RGPD3; N756D; 0
EDYSEGGPLY

SEQ ID NO: 12475 - protein, 10 aa, Homo sapiens
  Table A; HLA-B*35:01; RGPD3; N756D; 1
EDYSEGGPLY

SEQ ID NO: 12476 - protein, 10 aa, Homo sapiens
  Table A; HLA-B*35:08; RGPD3; N756D; 0
EDYSEGGPLY

SEQ ID NO: 12477 - protein, 10 aa, Homo sapiens
  Table A; HLA-C*08:03; RGPD3; N756D; 0
EDYSEGGPLY

SEQ ID NO: 12478 - protein, 11 aa, Homo sapiens
  Table A; HLA-A*11:01; RGPD3; N756D; 1
EDYSEGGPLYK

SEQ ID NO: 12479 - protein, 11 aa, Homo sapiens
  Table A; HLA-A*33:01; RGPD3; N756D; 0
EDYSEGGPLYK

SEQ ID NO: 12480 - protein, 11 aa, Homo sapiens
  Table A; HLA-A*33:03; RGPD3; N756D; 0
EDYSEGGPLYK

SEQ ID NO: 12481 - protein, 11 aa, Homo sapiens
  Table A; HLA-A*68:01; RGPD3; N756D; 0
EDYSEGGPLYK

SEQ ID NO: 12482 - protein, 11 aa, Homo sapiens
  Table A; HLA-A*68:02; RGPD3; N756D; 0
EDYSEGGPLYK

SEQ ID NO: 12483 - protein, 11 aa, Homo sapiens
  Table A; HLA-B*27:02; RGPD3; N756D; 0
EDYSEGGPLYK

SEQ ID NO: 12484 - protein, 11 aa, Homo sapiens
  Table A; HLA-C*08:03; RGPD3; N756D; 0
EDYSEGGPLYK

SEQ ID NO: 12485 - protein, 10 aa, Homo sapiens
  Table A; HLA-B*44:05; CCND1; T286I; 0
EEEEVDLACI

SEQ ID NO: 12486 - protein, 9 aa, Homo sapiens
  Table A; HLA-B*40:02; PIK3CA; K111E; 0
EEEILNREI

SEQ ID NO: 12487 - protein, 9 aa, Homo sapiens
  Table A; HLA-B*41:02; PIK3CA; K111E; 0
EEEILNREI

SEQ ID NO: 12488 - protein, 9 aa, Homo sapiens
  Table A; HLA-B*44:02; PIK3CA; K111E; 1
EEEILNREI

SEQ ID NO: 12489 - protein, 9 aa, Homo sapiens
  Table A; HLA-B*44:03; PIK3CA; K111E; 1
EEEILNREI

SEQ ID NO: 12490 - protein, 9 aa, Homo sapiens
  Table A; HLA-B*44:05; PIK3CA; K111E; 0
EEEILNREI

SEQ ID NO: 12491 - protein, 9 aa, Homo sapiens
  Table A; HLA-B*49:01; PIK3CA; K111E; 0
EEEILNREI

SEQ ID NO: 12492 - protein, 11 aa, Homo sapiens
  Table A; HLA-B*18:01; PIK3CA; K111E; 1
EEEILNREIGF

SEQ ID NO: 12493 - protein, 11 aa, Homo sapiens
  Table A; HLA-B*44:02; PIK3CA; K111E; 1
EEEILNREIGF

SEQ ID NO: 12494 - protein, 11 aa, Homo sapiens
  Table A; HLA-B*44:03; PIK3CA; K111E; 1
EEEILNREIGF

SEQ ID NO: 12495 - protein, 11 aa, Homo sapiens
  Table A; HLA-B*44:05; PIK3CA; K111E; 0
EEEILNREIGF

SEQ ID NO: 12496 - protein, 9 aa, Homo sapiens
  Table A; HLA-B*40:01; CCND1; T286I; 1
EEEVDLACI

SEQ ID NO: 12497 - protein, 9 aa, Homo sapiens
  Table A; HLA-B*44:05; CCND1; T286I; 0
EEEVDLACI

SEQ ID NO: 12498 - protein, 9 aa, Homo sapiens
  Table A; HLA-B*49:01; CCND1; T286I; 0
EEEVDLACI

SEQ ID NO: 12499 - protein, 10 aa, Homo sapiens
  Table A; HLA-A*68:02; PIK3CA; R88Q; 0
EEFFDETRQL

SEQ ID NO: 12500 - protein, 10 aa, Homo sapiens
  Table A; HLA-B*40:01; PIK3CA; R88Q; 1
EEFFDETRQL

SEQ ID NO: 12501 - protein, 10 aa, Homo sapiens
  Table A; HLA-B*40:02; PIK3CA; R88Q; 0
EEFFDETRQL

SEQ ID NO: 12502 - protein, 10 aa, Homo sapiens
  Table A; HLA-B*44:02; PIK3CA; R88Q; 1
EEFFDETRQL

SEQ ID NO: 12503 - protein, 10 aa, Homo sapiens
  Table A; HLA-B*44:03; PIK3CA; R88Q; 1
EEFFDETRQL

SEQ ID NO: 12504 - protein, 10 aa, Homo sapiens
  Table A; HLA-B*44:05; PIK3CA; R88Q; 0
EEFFDETRQL

SEQ ID NO: 12505 - protein, 10 aa, Homo sapiens
  Table A; HLA-B*49:01; PIK3CA; R88Q; 1
EEFFDETRQL

SEQ ID NO: 12506 - protein, 8 aa, Homo sapiens
  Table A; HLA-A*30:01; PTEN; D92E; 0
EEHNPPQL

SEQ ID NO: 12507 - protein, 8 aa, Homo sapiens
  Table A; HLA-B*18:01; PTEN; D92E; 0
EEHNPPQL

SEQ ID NO: 12508 - protein, 8 aa, Homo sapiens
  Table A; HLA-B*40:02; PTEN; D92E; 0
EEHNPPQL

SEQ ID NO: 12509 - protein, 8 aa, Homo sapiens
  Table A; HLA-B*41:02; PTEN; D92E; 0
EEHNPPQL

SEQ ID NO: 12510 - protein, 8 aa, Homo sapiens
  Table A; HLA-B*44:05; PTEN; D92E; 0
EEHNPPQL

SEQ ID NO: 12511 - protein, 10 aa, Homo sapiens
  Table A; HLA-B*40:02; PTEN; D92E; 0
EEHNPPQLEL

SEQ ID NO: 12512 - protein, 10 aa, Homo sapiens
  Table A; HLA-B*44:05; PTEN; D92E; 0
EEHNPPQLEL

SEQ ID NO: 12513 - protein, 8 aa, Homo sapiens
  Table A; HLA-A*23:01; PIK3CA; C420R; 0
EEHRPLAW

SEQ ID NO: 12514 - protein, 8 aa, Homo sapiens
  Table A; HLA-B*44:03; PIK3CA; C420R; 1
EEHRPLAW

SEQ ID NO: 12515 - protein, 8 aa, Homo sapiens
  Table A; HLA-B*40:02; PIK3CA; K111E; 0
EEILNREI

SEQ ID NO: 12516 - protein, 8 aa, Homo sapiens
  Table A; HLA-B*41:02; PIK3CA; K111E; 0
EEILNREI

SEQ ID NO: 12517 - protein, 8 aa, Homo sapiens
  Table A; HLA-B*44:05; PIK3CA; K111E; 0
EEILNREI

SEQ ID NO: 12518 - protein, 8 aa, Homo sapiens
  Table A; HLA-B*49:01; PIK3CA; K111E; 0
EEILNREI

SEQ ID NO: 12519 - protein, 10 aa, Homo sapiens
  Table A; HLA-A*23:01; PIK3CA; K111E; 0
EEILNREIGF

SEQ ID NO: 12520 - protein, 10 aa, Homo sapiens
  Table A; HLA-A*25:01; PIK3CA; K111E; 0
EEILNREIGF

SEQ ID NO: 12521 - protein, 10 aa, Homo sapiens
  Table A; HLA-A*30:01; PIK3CA; K111E; 0
EEILNREIGF

SEQ ID NO: 12522 - protein, 10 aa, Homo sapiens
  Table A; HLA-B*18:01; PIK3CA; K111E; 1
EEILNREIGF

SEQ ID NO: 12523 - protein, 10 aa, Homo sapiens
  Table A; HLA-B*37:01; PIK3CA; K111E; 0
EEILNREIGF

SEQ ID NO: 12524 - protein, 10 aa, Homo sapiens
  Table A; HLA-B*40:01; PIK3CA; K111E; 1
EEILNREIGF

SEQ ID NO: 12525 - protein, 10 aa, Homo sapiens
  Table A; HLA-B*40:02; PIK3CA; K111E; 0
EEILNREIGF

SEQ ID NO: 12526 - protein, 10 aa, Homo sapiens
  Table A; HLA-B*41:02; PIK3CA; K111E; 0
EEILNREIGF

SEQ ID NO: 12527 - protein, 10 aa, Homo sapiens
  Table A; HLA-B*44:02; PIK3CA; K111E; 1
EEILNREIGF

SEQ ID NO: 12528 - protein, 10 aa, Homo sapiens
  Table A; HLA-B*44:03; PIK3CA; K111E; 1
EEILNREIGF

SEQ ID NO: 12529 - protein, 10 aa, Homo sapiens
  Table A; HLA-B*44:05; PIK3CA; K111E; 0
EEILNREIGF

SEQ ID NO: 12530 - protein, 10 aa, Homo sapiens
  Table A; HLA-C*16:04; PIK3CA; K111E; 0
EEILNREIGF

SEQ ID NO: 12531 - protein, 9 aa, Homo sapiens
  Table A; HLA-B*44:05; SPOP; E50K; 0
EEMGKVIKS

SEQ ID NO: 12532 - protein, 9 aa, Homo sapiens
  Table A; HLA-A*23:01; PIK3CA; K111N; 0
EENILNREI

SEQ ID NO: 12533 - protein, 9 aa, Homo sapiens
  Table A; HLA-B*40:02; PIK3CA; K111N; 0
EENILNREI

SEQ ID NO: 12534 - protein, 9 aa, Homo sapiens
  Table A; HLA-B*41:02; PIK3CA; K111N; 0
EENILNREI

SEQ ID NO: 12535 - protein, 9 aa, Homo sapiens
  Table A; HLA-B*44:02; PIK3CA; K111N; 0
EENILNREI

SEQ ID NO: 12536 - protein, 9 aa, Homo sapiens
  Table A; HLA-B*44:03; PIK3CA; K111N; 0
EENILNREI

SEQ ID NO: 12537 - protein, 9 aa, Homo sapiens
  Table A; HLA-B*44:05; PIK3CA; K111N; 0
EENILNREI

SEQ ID NO: 12538 - protein, 9 aa, Homo sapiens
  Table A; HLA-B*49:01; PIK3CA; K111N; 0
EENILNREI

SEQ ID NO: 12539 - protein, 11 aa, Homo sapiens
  Table A; HLA-B*18:01; PIK3CA; K111N; 0
EENILNREIGF

SEQ ID NO: 12540 - protein, 11 aa, Homo sapiens
  Table A; HLA-B*44:02; PIK3CA; K111N; 0
EENILNREIGF

SEQ ID NO: 12541 - protein, 11 aa, Homo sapiens
  Table A; HLA-B*44:03; PIK3CA; K111N; 0
EENILNREIGF

SEQ ID NO: 12542 - protein, 11 aa, Homo sapiens
  Table A; HLA-B*44:05; PIK3CA; K111N; 0
EENILNREIGF

SEQ ID NO: 12543 - protein, 9 aa, Homo sapiens
  Table A; HLA-B*44:05; NFE2L2; T80P; 0
EEPGEFLPI

SEQ ID NO: 12544 - protein, 9 aa, Homo sapiens
  Table A; HLA-B*49:01; NFE2L2; T80P; 0
EEPGEFLPI

SEQ ID NO: 12545 - protein, 8 aa, Homo sapiens
  Table A; HLA-B*44:05; CSMD3; R100Q; 0
EEQNRIQI

SEQ ID NO: 12546 - protein, 9 aa, Homo sapiens
  Table A; HLA-B*41:02; CSMD3; R100Q; 0
EEQNRIQIV

SEQ ID NO: 12547 - protein, 9 aa, Homo sapiens
  Table A; HLA-B*44:05; CSMD3; R100Q; 0
EEQNRIQIV

SEQ ID NO: 12548 - protein, 9 aa, Homo sapiens
  Table A; HLA-B*49:01; CSMD3; R100Q; 0
EEQNRIQIV

SEQ ID NO: 12549 - protein, 10 aa, Homo sapiens
  Table A; HLA-A*23:01; CSMD3; R100Q; 0
EEQNRIQIVF

SEQ ID NO: 12550 - protein, 10 aa, Homo sapiens
  Table A; HLA-B*44:02; CSMD3; R100Q; 1
EEQNRIQIVF

SEQ ID NO: 12551 - protein, 10 aa, Homo sapiens
  Table A; HLA-B*44:03; CSMD3; R100Q; 1
EEQNRIQIVF

SEQ ID NO: 12552 - protein, 10 aa, Homo sapiens
  Table A; HLA-B*44:05; CSMD3; R100Q; 0
EEQNRIQIVF

SEQ ID NO: 12553 - protein, 9 aa, Homo sapiens
  Table A; HLA-B*49:01; NFE2L2; E82D; 0
EETGDFLPI

SEQ ID NO: 12554 - protein, 9 aa, Homo sapiens
  Table A; HLA-C*16:04; NFE2L2; E82D; 0
EETGDFLPI

SEQ ID NO: 12555 - protein, 10 aa, Homo sapiens
  Table A; HLA-A*68:01; SPOP; M117V; 0
EETKAVESQR

SEQ ID NO: 12556 - protein, 8 aa, Homo sapiens
  Table A; HLA-B*49:01; CCND1; T286I; 0
EEVDLACI

SEQ ID NO: 12557 - protein, 9 aa, Homo sapiens
  Table A; HLA-B*40:06; CCND1; T286I; 0
EEVDLACIP

SEQ ID NO: 12558 - protein, 9 aa, Homo sapiens
  Table A; HLA-B*50:01; CCND1; T286I; 0
EEVDLACIP

SEQ ID NO: 12559 - protein, 9 aa, Homo sapiens
  Table A; HLA-A*33:03; PIK3CA; R88Q; 0
EFFDETRQL

SEQ ID NO: 12560 - protein, 9 aa, Homo sapiens
  Table A; HLA-C*14:02; PIK3CA; R88Q; 1
EFFDETRQL

SEQ ID NO: 12561 - protein, 9 aa, Homo sapiens
  Table A; HLA-C*14:03; PIK3CA; R88Q; 0
EFFDETRQL

SEQ ID NO: 12562 - protein, 9 aa, Homo sapiens
  Table A; HLA-A*23:01; FAM135B; S11L; 0
EFLVELHKF

SEQ ID NO: 12563 - protein, 8 aa, Homo sapiens
  Table A; HLA-B*51:01; CSMD3; S300F; 0
EGFEPPTI

SEQ ID NO: 12564 - protein, 9 aa, Homo sapiens
  Table A; HLA-B*08:01; TP53; Y205C; 1
EGNLRVECL

SEQ ID NO: 12565 - protein, 9 aa, Homo sapiens
  Table A; HLA-B*14:01; TP53; Y205C; 0
EGNLRVECL

SEQ ID NO: 12566 - protein, 9 aa, Homo sapiens
  Table A; HLA-B*14:02; TP53; Y205C; 0
EGNLRVECL

SEQ ID NO: 12567 - protein, 10 aa, Homo sapiens
  Table A; HLA-B*38:01; PTPRD; R561Q; 0
EHGEEQQITI

SEQ ID NO: 12568 - protein, 10 aa, Homo sapiens
  Table A; HLA-B*39:01; PTPRD; R561Q; 0
EHGEEQQITI

SEQ ID NO: 12569 - protein, 9 aa, Homo sapiens
  Table A; HLA-B*39:06; DDIT3; R147H; 0
EHLTREVEA

SEQ ID NO: 12570 - protein, 9 aa, Homo sapiens
  Table A; HLA-B*15:10; PTEN; D92E; 0
EHNPPQLEL

SEQ ID NO: 12571 - protein, 9 aa, Homo sapiens
  Table A; HLA-B*35:03; PTEN; D92E; 0
EHNPPQLEL

SEQ ID NO: 12572 - protein, 9 aa, Homo sapiens
  Table A; HLA-B*38:01; PTEN; D92E; 0
EHNPPQLEL

SEQ ID NO: 12573 - protein, 9 aa, Homo sapiens
  Table A; HLA-B*39:01; PTEN; D92E; 0
EHNPPQLEL

SEQ ID NO: 12574 - protein, 9 aa, Homo sapiens
  Table A; HLA-B*39:06; PTEN; D92E; 0
EHNPPQLEL

SEQ ID NO: 12575 - protein, 9 aa, Homo sapiens
  Table A; HLA-B*44:05; PTEN; D92E; 0
EHNPPQLEL

SEQ ID NO: 12576 - protein, 9 aa, Homo sapiens
  Table A; HLA-B*48:01; PTEN; D92E; 0
EHNPPQLEL

SEQ ID NO: 12577 - protein, 10 aa, Homo sapiens
  Table A; HLA-B*38:01; PTEN; D92E; 0
EHNPPQLELI

SEQ ID NO: 12578 - protein, 9 aa, Homo sapiens
  Table A; HLA-B*15:10; CNTNAP2; R283H; 0
EHQGRSINL

SEQ ID NO: 12579 - protein, 9 aa, Homo sapiens
  Table A; HLA-B*38:01; CNTNAP2; R283H; 0
EHQGRSINL

SEQ ID NO: 12580 - protein, 9 aa, Homo sapiens
  Table A; HLA-B*39:01; CNTNAP2; R283H; 0
EHQGRSINL

SEQ ID NO: 12581 - protein, 9 aa, Homo sapiens
  Table A; HLA-A*68:02; FGFR2; C382R; 0
EIAIYRIGV

SEQ ID NO: 12582 - protein, 9 aa, Homo sapiens
  Table A; HLA-A*68:02; DDIT3; R147H; 0
EIEHLTREV

SEQ ID NO: 12583 - protein, 9 aa, Homo sapiens
  Table A; HLA-A*26:03; CTNNB1; G34E; 0
EIHSGATTT

SEQ ID NO: 12584 - protein, 9 aa, Homo sapiens
  Table A; HLA-A*33:03; CTNNB1; G34E; 0
EIHSGATTT

SEQ ID NO: 12585 - protein, 9 aa, Homo sapiens
  Table A; HLA-A*68:01; CTNNB1; G34E; 0
EIHSGATTT

SEQ ID NO: 12586 - protein, 9 aa, Homo sapiens
  Table A; HLA-B*08:01; CTNNB1; G34E; 1
EIHSGATTT

SEQ ID NO: 12587 - protein, 9 aa, Homo sapiens
  Table A; HLA-B*15:02; CTNNB1; G34E; 0
EIHSGATTT

SEQ ID NO: 12588 - protein, 9 aa, Homo sapiens
  Table A; HLA-B*48:01; CTNNB1; G34E; 0
EIHSGATTT

SEQ ID NO: 12589 - protein, 9 aa, Homo sapiens
  Table A; HLA-C*08:03; CTNNB1; G34E; 0
EIHSGATTT

SEQ ID NO: 12590 - protein, 10 aa, Homo sapiens
  Table A; HLA-A*02:03; CTNNB1; G34E; 0
EIHSGATTTA

SEQ ID NO: 12591 - protein, 10 aa, Homo sapiens
  Table A; HLA-A*02:05; CTNNB1; G34E; 0
EIHSGATTTA

SEQ ID NO: 12592 - protein, 10 aa, Homo sapiens
  Table A; HLA-A*02:08; CTNNB1; G34E; 0
EIHSGATTTA

SEQ ID NO: 12593 - protein, 10 aa, Homo sapiens
  Table A; HLA-A*25:01; CTNNB1; G34E; 0
EIHSGATTTA

SEQ ID NO: 12594 - protein, 10 aa, Homo sapiens
  Table A; HLA-A*26:01; CTNNB1; G34E; 0
EIHSGATTTA

SEQ ID NO: 12595 - protein, 10 aa, Homo sapiens
  Table A; HLA-A*26:02; CTNNB1; G34E; 0
EIHSGATTTA

SEQ ID NO: 12596 - protein, 10 aa, Homo sapiens
  Table A; HLA-A*26:03; CTNNB1; G34E; 0
EIHSGATTTA

SEQ ID NO: 12597 - protein, 10 aa, Homo sapiens
  Table A; HLA-A*33:03; CTNNB1; G34E; 0
EIHSGATTTA

SEQ ID NO: 12598 - protein, 10 aa, Homo sapiens
  Table A; HLA-A*68:01; CTNNB1; G34E; 0
EIHSGATTTA

SEQ ID NO: 12599 - protein, 10 aa, Homo sapiens
  Table A; HLA-A*68:02; CTNNB1; G34E; 0
EIHSGATTTA

SEQ ID NO: 12600 - protein, 10 aa, Homo sapiens
  Table A; HLA-B*39:06; CTNNB1; G34E; 0
EIHSGATTTA

SEQ ID NO: 12601 - protein, 10 aa, Homo sapiens
  Table A; HLA-B*50:01; CTNNB1; G34E; 0
EIHSGATTTA

SEQ ID NO: 12602 - protein, 10 aa, Homo sapiens
  Table A; HLA-B*54:01; CTNNB1; G34E; 0
EIHSGATTTA

SEQ ID NO: 12603 - protein, 10 aa, Homo sapiens
  Table A; HLA-C*08:01; CTNNB1; G34E; 0
EIHSGATTTA

SEQ ID NO: 12604 - protein, 8 aa, Homo sapiens
  Table A; HLA-B*15:02; CDH1; D254Y; 0
EILITVTY

SEQ ID NO: 12605 - protein, 8 aa, Homo sapiens
  Table A; HLA-B*35:01; CDH1; D254Y; 1
EILITVTY

SEQ ID NO: 12606 - protein, 8 aa, Homo sapiens
  Table A; HLA-C*08:01; CDH1; D254Y; 0
EILITVTY

SEQ ID NO: 12607 - protein, 9 aa, Homo sapiens
  Table A; HLA-A*26:03; CTNNB1; K335I; 0
EILLWTTSR

SEQ ID NO: 12608 - protein, 9 aa, Homo sapiens
  Table A; HLA-A*31:01; CTNNB1; K335I; 1
EILLWTTSR

SEQ ID NO: 12609 - protein, 9 aa, Homo sapiens
  Table A; HLA-A*33:01; CTNNB1; K335I; 0
EILLWTTSR

SEQ ID NO: 12610 - protein, 9 aa, Homo sapiens
  Table A; HLA-A*33:03; CTNNB1; K335I; 0
EILLWTTSR

SEQ ID NO: 12611 - protein, 9 aa, Homo sapiens
  Table A; HLA-A*68:01; CTNNB1; K335I; 1
EILLWTTSR

SEQ ID NO: 12612 - protein, 9 aa, Homo sapiens
  Table A; HLA-B*27:02; CTNNB1; K335I; 0
EILLWTTSR

SEQ ID NO: 12613 - protein, 10 aa, Homo sapiens
  Table A; HLA-A*68:02; CTNNB1; K335I; 0
EILLWTTSRV

SEQ ID NO: 12614 - protein, 9 aa, Homo sapiens
  Table A; HLA-A*23:01; PIK3CA; K111E; 0
EILNREIGF

SEQ ID NO: 12615 - protein, 9 aa, Homo sapiens
  Table A; HLA-A*25:01; PIK3CA; K111E; 0
EILNREIGF

SEQ ID NO: 12616 - protein, 9 aa, Homo sapiens
  Table A; HLA-A*26:01; PIK3CA; K111E; 0
EILNREIGF

SEQ ID NO: 12617 - protein, 9 aa, Homo sapiens
  Table A; HLA-A*26:02; PIK3CA; K111E; 0
EILNREIGF

SEQ ID NO: 12618 - protein, 9 aa, Homo sapiens
  Table A; HLA-A*68:02; PIK3CA; K111E; 0
EILNREIGF

SEQ ID NO: 12619 - protein, 9 aa, Homo sapiens
  Table A; HLA-B*08:01; PIK3CA; K111E; 1
EILNREIGF

SEQ ID NO: 12620 - protein, 9 aa, Homo sapiens
  Table A; HLA-B*15:02; PIK3CA; K111E; 0
EILNREIGF

SEQ ID NO: 12621 - protein, 9 aa, Homo sapiens
  Table A; HLA-A*26:03; FAM135B; S11L; 0
EIQGTVEFL

SEQ ID NO: 12622 - protein, 9 aa, Homo sapiens
  Table A; HLA-A*68:02; FAM135B; S11L; 0
EIQGTVEFL

SEQ ID NO: 12623 - protein, 10 aa, Homo sapiens
  Table A; HLA-A*68:02; PIK3CA; Q546P; 0
EITEPEKDFL

SEQ ID NO: 12624 - protein, 9 aa, Homo sapiens
  Table A; HLA-B*48:01; MAX; R60Q; 0
EKASQAQIL

SEQ ID NO: 12625 - protein, 9 aa, Homo sapiens
  Table A; HLA-A*02:01; TP53; R337L; 1
ELFEMFREL

SEQ ID NO: 12626 - protein, 9 aa, Homo sapiens
  Table A; HLA-A*02:03; TP53; R337L; 0
ELFEMFREL

SEQ ID NO: 12627 - protein, 9 aa, Homo sapiens
  Table A; HLA-A*02:04; TP53; R337L; 0
ELFEMFREL

SEQ ID NO: 12628 - protein, 9 aa, Homo sapiens
  Table A; HLA-A*02:07; TP53; R337L; 0
ELFEMFREL

SEQ ID NO: 12629 - protein, 9 aa, Homo sapiens
  Table A; HLA-A*68:02; TP53; R337L; 0
ELFEMFREL

SEQ ID NO: 12630 - protein, 10 aa, Homo sapiens
  Table A; HLA-A*26:03; STAG2; R370Q; 0
ELFTSQFKDR

SEQ ID NO: 12631 - protein, 10 aa, Homo sapiens
  Table A; HLA-A*33:03; STAG2; R370Q; 0
ELFTSQFKDR

SEQ ID NO: 12632 - protein, 11 aa, Homo sapiens
  Table A; HLA-A*68:02; STAG2; R370Q; 0
ELFTSQFKDRI

SEQ ID NO: 12633 - protein, 8 aa, Homo sapiens
  Table A; HLA-A*23:01; CHD4; R975H; 0
ELIVHVEL

SEQ ID NO: 12634 - protein, 8 aa, Homo sapiens
  Table A; HLA-A*26:03; CHD4; R975H; 0
ELIVHVEL

SEQ ID NO: 12635 - protein, 8 aa, Homo sapiens
  Table A; HLA-A*30:01; CHD4; R975H; 0
ELIVHVEL

SEQ ID NO: 12636 - protein, 8 aa, Homo sapiens
  Table A; HLA-A*33:03; CHD4; R975H; 0
ELIVHVEL

SEQ ID NO: 12637 - protein, 8 aa, Homo sapiens
  Table A; HLA-A*68:02; CHD4; R975H; 0
ELIVHVEL

SEQ ID NO: 12638 - protein, 8 aa, Homo sapiens
  Table A; HLA-B*07:02; CHD4; R975H; 1
ELIVHVEL

SEQ ID NO: 12639 - protein, 8 aa, Homo sapiens
  Table A; HLA-B*08:01; CHD4; R975H; 1
ELIVHVEL

SEQ ID NO: 12640 - protein, 8 aa, Homo sapiens
  Table A; HLA-B*14:01; CHD4; R975H; 0
ELIVHVEL

SEQ ID NO: 12641 - protein, 8 aa, Homo sapiens
  Table A; HLA-B*14:02; CHD4; R975H; 0
ELIVHVEL

SEQ ID NO: 12642 - protein, 8 aa, Homo sapiens
  Table A; HLA-B*15:02; CHD4; R975H; 0
ELIVHVEL

SEQ ID NO: 12643 - protein, 8 aa, Homo sapiens
  Table A; HLA-B*35:01; CHD4; R975H; 1
ELIVHVEL

SEQ ID NO: 12644 - protein, 8 aa, Homo sapiens
  Table A; HLA-B*35:03; CHD4; R975H; 0
ELIVHVEL

SEQ ID NO: 12645 - protein, 8 aa, Homo sapiens
  Table A; HLA-B*39:01; CHD4; R975H; 0
ELIVHVEL

SEQ ID NO: 12646 - protein, 8 aa, Homo sapiens
  Table A; HLA-B*40:01; CHD4; R975H; 1
ELIVHVEL

SEQ ID NO: 12647 - protein, 8 aa, Homo sapiens
  Table A; HLA-B*40:02; CHD4; R975H; 0
ELIVHVEL

SEQ ID NO: 12648 - protein, 8 aa, Homo sapiens
  Table A; HLA-B*41:02; CHD4; R975H; 0
ELIVHVEL

SEQ ID NO: 12649 - protein, 8 aa, Homo sapiens
  Table A; HLA-B*44:05; CHD4; R975H; 0
ELIVHVEL

SEQ ID NO: 12650 - protein, 8 aa, Homo sapiens
  Table A; HLA-B*48:01; CHD4; R975H; 0
ELIVHVEL

SEQ ID NO: 12651 - protein, 8 aa, Homo sapiens
  Table A; HLA-C*08:01; CHD4; R975H; 0
ELIVHVEL

SEQ ID NO: 12652 - protein, 8 aa, Homo sapiens
  Table A; HLA-C*08:03; CHD4; R975H; 0
ELIVHVEL

SEQ ID NO: 12653 - protein, 8 aa, Homo sapiens
  Table A; HLA-C*17:01; CHD4; R975H; 0
ELIVHVEL

SEQ ID NO: 12654 - protein, 11 aa, Homo sapiens
  Table A; HLA-B*27:02; RUNX1T1; D198N; 0
ELLLNVNENGK

SEQ ID NO: 12655 - protein, 10 aa, Homo sapiens
  Table A; HLA-A*25:01; PIK3CA; K111N; 0
ENILNREIGF

SEQ ID NO: 12656 - protein, 8 aa, Homo sapiens
  Table A; HLA-B*08:01; BCORL1; K1207N; 1
ENKAKSSF

SEQ ID NO: 12657 - protein, 9 aa, Homo sapiens
  Table A; HLA-A*33:03; BCORL1; K1207N; 0
ENKAKSSFR

SEQ ID NO: 12658 - protein, 8 aa, Homo sapiens
  Table A; HLA-A*33:03; PIK3R1; K567E; 0
EPDLIQLR

SEQ ID NO: 12659 - protein, 8 aa, Homo sapiens
  Table A; HLA-B*35:02; TNC; L1626I; 0
EPEVDNIL

SEQ ID NO: 12660 - protein, 8 aa, Homo sapiens
  Table A; HLA-B*35:12; TNC; L1626I; 0
EPEVDNIL

SEQ ID NO: 12661 - protein, 11 aa, Homo sapiens
  Table A; HLA-B*54:01; NFE2L2; T80P; 0
EPGEFLPIQPA

SEQ ID NO: 12662 - protein, 9 aa, Homo sapiens
  Table A; HLA-A*33:01; MTOR; A2056V; 0
EPLHVMMER

SEQ ID NO: 12663 - protein, 9 aa, Homo sapiens
  Table A; HLA-A*33:03; MTOR; A2056V; 0
EPLHVMMER

SEQ ID NO: 12664 - protein, 9 aa, Homo sapiens
  Table A; HLA-B*54:01; MTOR; A2056V; 0
EPLHVMMER

SEQ ID NO: 12665 - protein, 10 aa, Homo sapiens
  Table A; HLA-A*68:01; CNTNAP2; G362E; 0
EPSNVENLSF

SEQ ID NO: 12666 - protein, 10 aa, Homo sapiens
  Table A; HLA-B*35:01; CNTNAP2; G362E; 1
EPSNVENLSF

SEQ ID NO: 12667 - protein, 10 aa, Homo sapiens
  Table A; HLA-B*35:03; CNTNAP2; G362E; 0
EPSNVENLSF

SEQ ID NO: 12668 - protein, 10 aa, Homo sapiens
  Table A; HLA-B*35:08; CNTNAP2; G362E; 0
EPSNVENLSF

SEQ ID NO: 12669 - protein, 10 aa, Homo sapiens
  Table A; HLA-B*35:12; CNTNAP2; G362E; 0
EPSNVENLSF

SEQ ID NO: 12670 - protein, 10 aa, Homo sapiens
  Table A; HLA-B*38:01; CNTNAP2; G362E; 0
EPSNVENLSF

SEQ ID NO: 12671 - protein, 11 aa, Homo sapiens
  Table A; HLA-B*35:02; PIK3CA; K111E; 0
EPVGNREEEIL

SEQ ID NO: 12672 - protein, 11 aa, Homo sapiens
  Table A; HLA-B*35:03; PIK3CA; K111E; 0
EPVGNREEEIL

SEQ ID NO: 12673 - protein, 11 aa, Homo sapiens
  Table A; HLA-B*35:12; PIK3CA; K111E; 0
EPVGNREEEIL

SEQ ID NO: 12674 - protein, 11 aa, Homo sapiens
  Table A; HLA-B*07:02; PIK3CA; K111N; 1
EPVGNREENIL

SEQ ID NO: 12675 - protein, 11 aa, Homo sapiens
  Table A; HLA-B*35:02; PIK3CA; K111N; 0
EPVGNREENIL

SEQ ID NO: 12676 - protein, 11 aa, Homo sapiens
  Table A; HLA-B*35:03; PIK3CA; K111N; 0
EPVGNREENIL

SEQ ID NO: 12677 - protein, 11 aa, Homo sapiens
  Table A; HLA-B*35:12; PIK3CA; K111N; 0
EPVGNREENIL

SEQ ID NO: 12678 - protein, 8 aa, Homo sapiens
  Table A; HLA-B*15:02; CNTNAP2; T373M; 0
EPYMVPVF

SEQ ID NO: 12679 - protein, 8 aa, Homo sapiens
  Table A; HLA-B*35:01; CNTNAP2; T373M; 1
EPYMVPVF

SEQ ID NO: 12680 - protein, 8 aa, Homo sapiens
  Table A; HLA-B*51:01; CNTNAP2; T373M; 1
EPYMVPVF

SEQ ID NO: 12681 - protein, 8 aa, Homo sapiens
  Table A; HLA-B*54:01; CNTNAP2; T373M; 0
EPYMVPVF

SEQ ID NO: 12682 - protein, 8 aa, Homo sapiens
  Table A; HLA-C*08:01; CNTNAP2; T373M; 0
EPYMVPVF

SEQ ID NO: 12683 - protein, 9 aa, Homo sapiens
  Table A; HLA-A*68:02; CNTNAP2; T373M; 0
EPYMVPVFF

SEQ ID NO: 12684 - protein, 9 aa, Homo sapiens
  Table A; HLA-B*35:01; CNTNAP2; T373M; 1
EPYMVPVFF

SEQ ID NO: 12685 - protein, 9 aa, Homo sapiens
  Table A; HLA-B*54:01; CNTNAP2; T373M; 0
EPYMVPVFF

SEQ ID NO: 12686 - protein, 9 aa, Homo sapiens
  Table A; HLA-A*23:01; CSMD3; R100Q; 0
EQNRIQIVF

SEQ ID NO: 12687 - protein, 9 aa, Homo sapiens
  Table A; HLA-A*32:01; CSMD3; R100Q; 0
EQNRIQIVF

SEQ ID NO: 12688 - protein, 9 aa, Homo sapiens
  Table A; HLA-B*13:01; CSMD3; R100Q; 0
EQNRIQIVF

SEQ ID NO: 12689 - protein, 9 aa, Homo sapiens
  Table A; HLA-B*13:02; CSMD3; R100Q; 0
EQNRIQIVF

SEQ ID NO: 12690 - protein, 9 aa, Homo sapiens
  Table A; HLA-B*15:01; CSMD3; R100Q; 1
EQNRIQIVF

SEQ ID NO: 12691 - protein, 9 aa, Homo sapiens
  Table A; HLA-B*15:02; CSMD3; R100Q; 0
EQNRIQIVF

SEQ ID NO: 12692 - protein, 9 aa, Homo sapiens
  Table A; HLA-B*15:10; CSMD3; R100Q; 0
EQNRIQIVF

SEQ ID NO: 12693 - protein, 9 aa, Homo sapiens
  Table A; HLA-B*38:01; CSMD3; R100Q; 0
EQNRIQIVF

SEQ ID NO: 12694 - protein, 9 aa, Homo sapiens
  Table A; HLA-B*39:01; CSMD3; R100Q; 0
EQNRIQIVF

SEQ ID NO: 12695 - protein, 9 aa, Homo sapiens
  Table A; HLA-B*44:02; CSMD3; R100Q; 1
EQNRIQIVF

SEQ ID NO: 12696 - protein, 9 aa, Homo sapiens
  Table A; HLA-B*44:03; CSMD3; R100Q; 1
EQNRIQIVF

SEQ ID NO: 12697 - protein, 9 aa, Homo sapiens
  Table A; HLA-B*44:05; CSMD3; R100Q; 0
EQNRIQIVF

SEQ ID NO: 12698 - protein, 9 aa, Homo sapiens
  Table A; HLA-C*08:01; CSMD3; R100Q; 0
EQNRIQIVF

SEQ ID NO: 12699 - protein, 9 aa, Homo sapiens
  Table A; HLA-C*16:04; CSMD3; R100Q; 0
EQNRIQIVF

SEQ ID NO: 12700 - protein, 8 aa, Homo sapiens
  Table A; HLA-B*13:02; SF3B1; K700E; 0
EQQEVRTI

SEQ ID NO: 12701 - protein, 8 aa, Homo sapiens
  Table A; HLA-B*39:06; SF3B1; K700E; 0
EQQEVRTI

SEQ ID NO: 12702 - protein, 8 aa, Homo sapiens
  Table A; HLA-B*44:05; SF3B1; K700E; 0
EQQEVRTI

SEQ ID NO: 12703 - protein, 10 aa, Homo sapiens
  Table A; HLA-B*39:06; SF3B1; K700E; 0
EQQEVRTISA

SEQ ID NO: 12704 - protein, 10 aa, Homo sapiens
  Table A; HLA-B*54:01; SF3B1; K700E; 0
EQQEVRTISA

SEQ ID NO: 12705 - protein, 11 aa, Homo sapiens
  Table A; HLA-A*25:01; SF3B1; K700E; 0
EQQEVRTISAL

SEQ ID NO: 12706 - protein, 11 aa, Homo sapiens
  Table A; HLA-A*26:02; SF3B1; K700E; 0
EQQEVRTISAL

SEQ ID NO: 12707 - protein, 11 aa, Homo sapiens
  Table A; HLA-A*68:02; SF3B1; K700E; 0
EQQEVRTISAL

SEQ ID NO: 12708 - protein, 11 aa, Homo sapiens
  Table A; HLA-B*15:01; SF3B1; K700E; 1
EQQEVRTISAL

SEQ ID NO: 12709 - protein, 11 aa, Homo sapiens
  Table A; HLA-B*15:02; SF3B1; K700E; 0
EQQEVRTISAL

SEQ ID NO: 12710 - protein, 11 aa, Homo sapiens
  Table A; HLA-B*39:01; SF3B1; K700E; 0
EQQEVRTISAL

SEQ ID NO: 12711 - protein, 11 aa, Homo sapiens
  Table A; HLA-B*40:02; SF3B1; K700E; 0
EQQEVRTISAL

SEQ ID NO: 12712 - protein, 11 aa, Homo sapiens
  Table A; HLA-B*44:05; SF3B1; K700E; 0
EQQEVRTISAL

SEQ ID NO: 12713 - protein, 11 aa, Homo sapiens
  Table A; HLA-B*48:01; SF3B1; K700E; 0
EQQEVRTISAL

SEQ ID NO: 12714 - protein, 11 aa, Homo sapiens
  Table A; HLA-C*08:01; SF3B1; K700E; 0
EQQEVRTISAL

SEQ ID NO: 12715 - protein, 9 aa, Homo sapiens
  Table A; HLA-A*68:02; NFE2L2; E79Q; 0
EQTGEFLPI

SEQ ID NO: 12716 - protein, 9 aa, Homo sapiens
  Table A; HLA-B*13:02; NFE2L2; E79Q; 0
EQTGEFLPI

SEQ ID NO: 12717 - protein, 9 aa, Homo sapiens
  Table A; HLA-B*38:01; NFE2L2; E79Q; 0
EQTGEFLPI

SEQ ID NO: 12718 - protein, 9 aa, Homo sapiens
  Table A; HLA-B*39:01; NFE2L2; E79Q; 0
EQTGEFLPI

SEQ ID NO: 12719 - protein, 8 aa, Homo sapiens
  Table A; HLA-B*14:02; PDE4DIP; C1297R; 0
EREEHNSL

SEQ ID NO: 12720 - protein, 8 aa, Homo sapiens
  Table A; HLA-A*33:03; TP53; G266E; 0
ERNSFEVR

SEQ ID NO: 12721 - protein, 9 aa, Homo sapiens
  Table A; HLA-A*33:03; TP53; G266E; 0
ERNSFEVRV

SEQ ID NO: 12722 - protein, 9 aa, Homo sapiens
  Table A; HLA-A*68:02; TP53; G266E; 0
ERNSFEVRV

SEQ ID NO: 12723 - protein, 9 aa, Homo sapiens
  Table A; HLA-B*27:05; TP53; G266E; 0
ERNSFEVRV

SEQ ID NO: 12724 - protein, 9 aa, Homo sapiens
  Table A; HLA-B*38:01; TP53; G266E; 0
ERNSFEVRV

SEQ ID NO: 12725 - protein, 9 aa, Homo sapiens
  Table A; HLA-B*39:01; TP53; G266E; 0
ERNSFEVRV

SEQ ID NO: 12726 - protein, 9 aa, Homo sapiens
  Table A; HLA-B*39:06; TP53; G266E; 0
ERNSFEVRV

SEQ ID NO: 12727 - protein, 9 aa, Homo sapiens
  Table A; HLA-C*06:02; TP53; G266E; 0
ERNSFEVRV

SEQ ID NO: 12728 - protein, 10 aa, Homo sapiens
  Table A; HLA-A*68:01; ARID1A; G2087R; 0
ESICLPVLDR

SEQ ID NO: 12729 - protein, 9 aa, Homo sapiens
  Table A; HLA-A*68:02; SPOP; R121Q; 0
ESQQAYRFV

SEQ ID NO: 12730 - protein, 11 aa, Homo sapiens
  Table A; HLA-A*68:02; STAG1; A116T; 0
ESYKQDRDITL

SEQ ID NO: 12731 - protein, 10 aa, Homo sapiens
  Table A; HLA-A*01:01; POLE; S297F; 1
ETDQIMMIFY

SEQ ID NO: 12732 - protein, 10 aa, Homo sapiens
  Table A; HLA-A*68:02; NFE2L2; E82D; 0
ETGDFLPIQP

SEQ ID NO: 12733 - protein, 11 aa, Homo sapiens
  Table A; HLA-A*68:02; NFE2L2; E82D; 0
ETGDFLPIQPA

SEQ ID NO: 12734 - protein, 11 aa, Homo sapiens
  Table A; HLA-A*26:01; SPOP; R121Q; 0
ETKAMESQQAY

SEQ ID NO: 12735 - protein, 9 aa, Homo sapiens
  Table A; HLA-A*26:03; SPOP; M117V; 0
ETKAVESQR

SEQ ID NO: 12736 - protein, 9 aa, Homo sapiens
  Table A; HLA-A*31:01; SPOP; M117V; 0
ETKAVESQR

SEQ ID NO: 12737 - protein, 9 aa, Homo sapiens
  Table A; HLA-A*33:01; SPOP; M117V; 0
ETKAVESQR

SEQ ID NO: 12738 - protein, 9 aa, Homo sapiens
  Table A; HLA-A*33:03; SPOP; M117V; 0
ETKAVESQR

SEQ ID NO: 12739 - protein, 9 aa, Homo sapiens
  Table A; HLA-A*68:01; SPOP; M117V; 0
ETKAVESQR

SEQ ID NO: 12740 - protein, 11 aa, Homo sapiens
  Table A; HLA-A*25:01; SPOP; M117V; 0
ETKAVESQRAY

SEQ ID NO: 12741 - protein, 11 aa, Homo sapiens
  Table A; HLA-A*26:01; SPOP; M117V; 0
ETKAVESQRAY

SEQ ID NO: 12742 - protein, 9 aa, Homo sapiens
  Table A; HLA-A*33:03; PIK3CA; R88Q; 0
ETRQLCDLR

SEQ ID NO: 12743 - protein, 10 aa, Homo sapiens
  Table A; HLA-A*33:03; GRIN2A; R1067W; 0
ETSNWATCHR

SEQ ID NO: 12744 - protein, 10 aa, Homo sapiens
  Table A; HLA-A*68:02; KRAS; A146T; 0
ETSTKTRQGV

SEQ ID NO: 12745 - protein, 9 aa, Homo sapiens
  Table A; HLA-A*26:01; SIRPA; V233I; 0
EVAHITLQG

SEQ ID NO: 12746 - protein, 9 aa, Homo sapiens
  Table A; HLA-A*68:02; SIRPA; V233I; 0
EVAHITLQG

SEQ ID NO: 12747 - protein, 9 aa, Homo sapiens
  Table A; HLA-A*02:05; CTNND1; A781T; 0
EVITENLEA

SEQ ID NO: 12748 - protein, 9 aa, Homo sapiens
  Table A; HLA-A*02:06; CTNND1; A781T; 0
EVITENLEA

SEQ ID NO: 12749 - protein, 9 aa, Homo sapiens
  Table A; HLA-A*25:01; CTNND1; A781T; 0
EVITENLEA

SEQ ID NO: 12750 - protein, 9 aa, Homo sapiens
  Table A; HLA-A*26:01; CTNND1; A781T; 0
EVITENLEA

SEQ ID NO: 12751 - protein, 9 aa, Homo sapiens
  Table A; HLA-A*26:03; CTNND1; A781T; 0
EVITENLEA

SEQ ID NO: 12752 - protein, 9 aa, Homo sapiens
  Table A; HLA-A*68:01; CTNND1; A781T; 0
EVITENLEA

SEQ ID NO: 12753 - protein, 9 aa, Homo sapiens
  Table A; HLA-A*68:02; CTNND1; A781T; 0
EVITENLEA

SEQ ID NO: 12754 - protein, 9 aa, Homo sapiens
  Table A; HLA-B*13:02; CTNND1; A781T; 0
EVITENLEA

SEQ ID NO: 12755 - protein, 9 aa, Homo sapiens
  Table A; HLA-B*50:01; CTNND1; A781T; 0
EVITENLEA

SEQ ID NO: 12756 - protein, 9 aa, Homo sapiens
  Table A; HLA-B*54:01; CTNND1; A781T; 0
EVITENLEA

SEQ ID NO: 12757 - protein, 10 aa, Homo sapiens
  Table A; HLA-A*02:05; CTNND1; A781T; 0
EVITENLEAA

SEQ ID NO: 12758 - protein, 10 aa, Homo sapiens
  Table A; HLA-A*02:06; CTNND1; A781T; 0
EVITENLEAA

SEQ ID NO: 12759 - protein, 10 aa, Homo sapiens
  Table A; HLA-A*02:08; CTNND1; A781T; 0
EVITENLEAA

SEQ ID NO: 12760 - protein, 10 aa, Homo sapiens
  Table A; HLA-A*25:01; CTNND1; A781T; 0
EVITENLEAA

SEQ ID NO: 12761 - protein, 10 aa, Homo sapiens
  Table A; HLA-A*26:01; CTNND1; A781T; 0
EVITENLEAA

SEQ ID NO: 12762 - protein, 10 aa, Homo sapiens
  Table A; HLA-A*26:02; CTNND1; A781T; 0
EVITENLEAA

SEQ ID NO: 12763 - protein, 10 aa, Homo sapiens
  Table A; HLA-A*26:03; CTNND1; A781T; 0
EVITENLEAA

SEQ ID NO: 12764 - protein, 10 aa, Homo sapiens
  Table A; HLA-A*33:03; CTNND1; A781T; 0
EVITENLEAA

SEQ ID NO: 12765 - protein, 10 aa, Homo sapiens
  Table A; HLA-A*68:01; CTNND1; A781T; 0
EVITENLEAA

SEQ ID NO: 12766 - protein, 10 aa, Homo sapiens
  Table A; HLA-A*68:02; CTNND1; A781T; 0
EVITENLEAA

SEQ ID NO: 12767 - protein, 10 aa, Homo sapiens
  Table A; HLA-B*35:01; CTNND1; A781T; 0
EVITENLEAA

SEQ ID NO: 12768 - protein, 10 aa, Homo sapiens
  Table A; HLA-B*50:01; CTNND1; A781T; 0
EVITENLEAA

SEQ ID NO: 12769 - protein, 10 aa, Homo sapiens
  Table A; HLA-B*54:01; CTNND1; A781T; 0
EVITENLEAA

SEQ ID NO: 12770 - protein, 11 aa, Homo sapiens
  Table A; HLA-A*03:02; CTNND1; A781T; 0
EVITENLEAAK

SEQ ID NO: 12771 - protein, 11 aa, Homo sapiens
  Table A; HLA-A*11:01; CTNND1; A781T; 0
EVITENLEAAK

SEQ ID NO: 12772 - protein, 11 aa, Homo sapiens
  Table A; HLA-A*26:01; CTNND1; A781T; 0
EVITENLEAAK

SEQ ID NO: 12773 - protein, 11 aa, Homo sapiens
  Table A; HLA-A*26:03; CTNND1; A781T; 0
EVITENLEAAK

SEQ ID NO: 12774 - protein, 11 aa, Homo sapiens
  Table A; HLA-A*33:01; CTNND1; A781T; 0
EVITENLEAAK

SEQ ID NO: 12775 - protein, 11 aa, Homo sapiens
  Table A; HLA-A*33:03; CTNND1; A781T; 0
EVITENLEAAK

SEQ ID NO: 12776 - protein, 11 aa, Homo sapiens
  Table A; HLA-A*68:01; CTNND1; A781T; 0
EVITENLEAAK

SEQ ID NO: 12777 - protein, 11 aa, Homo sapiens
  Table A; HLA-A*68:02; CTNND1; A781T; 0
EVITENLEAAK

SEQ ID NO: 12778 - protein, 11 aa, Homo sapiens
  Table A; HLA-B*27:02; CTNND1; A781T; 0
EVITENLEAAK

SEQ ID NO: 12779 - protein, 8 aa, Homo sapiens
  Table A; HLA-A*68:02; MTOR; A2056V; 0
EVLEPLHV

SEQ ID NO: 12780 - protein, 8 aa, Homo sapiens
  Table A; HLA-B*13:02; MTOR; A2056V; 0
EVLEPLHV

SEQ ID NO: 12781 - protein, 8 aa, Homo sapiens
  Table A; HLA-B*39:06; MTOR; A2056V; 0
EVLEPLHV

SEQ ID NO: 12782 - protein, 8 aa, Homo sapiens
  Table A; HLA-B*51:01; MTOR; A2056V; 1
EVLEPLHV

SEQ ID NO: 12783 - protein, 9 aa, Homo sapiens
  Table A; HLA-A*25:01; MTOR; A2056V; 0
EVLEPLHVM

SEQ ID NO: 12784 - protein, 9 aa, Homo sapiens
  Table A; HLA-A*26:01; MTOR; A2056V; 0
EVLEPLHVM

SEQ ID NO: 12785 - protein, 9 aa, Homo sapiens
  Table A; HLA-A*26:02; MTOR; A2056V; 0
EVLEPLHVM

SEQ ID NO: 12786 - protein, 9 aa, Homo sapiens
  Table A; HLA-A*26:03; MTOR; A2056V; 0
EVLEPLHVM

SEQ ID NO: 12787 - protein, 9 aa, Homo sapiens
  Table A; HLA-A*33:01; MTOR; A2056V; 0
EVLEPLHVM

SEQ ID NO: 12788 - protein, 9 aa, Homo sapiens
  Table A; HLA-A*33:03; MTOR; A2056V; 0
EVLEPLHVM

SEQ ID NO: 12789 - protein, 9 aa, Homo sapiens
  Table A; HLA-A*68:02; MTOR; A2056V; 0
EVLEPLHVM

SEQ ID NO: 12790 - protein, 9 aa, Homo sapiens
  Table A; HLA-B*15:02; MTOR; A2056V; 0
EVLEPLHVM

SEQ ID NO: 12791 - protein, 9 aa, Homo sapiens
  Table A; HLA-B*35:01; MTOR; A2056V; 1
EVLEPLHVM

SEQ ID NO: 12792 - protein, 9 aa, Homo sapiens
  Table A; HLA-B*35:03; MTOR; A2056V; 0
EVLEPLHVM

SEQ ID NO: 12793 - protein, 9 aa, Homo sapiens
  Table A; HLA-B*54:01; MTOR; A2056V; 0
EVLEPLHVM

SEQ ID NO: 12794 - protein, 9 aa, Homo sapiens
  Table A; HLA-C*08:01; MTOR; A2056V; 0
EVLEPLHVM

SEQ ID NO: 12795 - protein, 10 aa, Homo sapiens
  Table A; HLA-A*26:02; MTOR; A2056V; 0
EVLEPLHVMM

SEQ ID NO: 12796 - protein, 10 aa, Homo sapiens
  Table A; HLA-A*33:03; MTOR; A2056V; 0
EVLEPLHVMM

SEQ ID NO: 12797 - protein, 10 aa, Homo sapiens
  Table A; HLA-A*68:01; MTOR; A2056V; 0
EVLEPLHVMM

SEQ ID NO: 12798 - protein, 10 aa, Homo sapiens
  Table A; HLA-A*68:02; MTOR; A2056V; 0
EVLEPLHVMM

SEQ ID NO: 12799 - protein, 8 aa, Homo sapiens
  Table A; HLA-A*02:03; SF3B1; K700E; 0
EVRTISAL

SEQ ID NO: 12800 - protein, 8 aa, Homo sapiens
  Table A; HLA-A*25:01; SF3B1; K700E; 0
EVRTISAL

SEQ ID NO: 12801 - protein, 8 aa, Homo sapiens
  Table A; HLA-A*26:01; SF3B1; K700E; 0
EVRTISAL

SEQ ID NO: 12802 - protein, 8 aa, Homo sapiens
  Table A; HLA-A*26:02; SF3B1; K700E; 0
EVRTISAL

SEQ ID NO: 12803 - protein, 8 aa, Homo sapiens
  Table A; HLA-A*26:03; SF3B1; K700E; 0
EVRTISAL

SEQ ID NO: 12804 - protein, 8 aa, Homo sapiens
  Table A; HLA-A*30:01; SF3B1; K700E; 0
EVRTISAL

SEQ ID NO: 12805 - protein, 8 aa, Homo sapiens
  Table A; HLA-A*33:03; SF3B1; K700E; 0
EVRTISAL

SEQ ID NO: 12806 - protein, 8 aa, Homo sapiens
  Table A; HLA-B*07:02; SF3B1; K700E; 1
EVRTISAL

SEQ ID NO: 12807 - protein, 8 aa, Homo sapiens
  Table A; HLA-B*08:01; SF3B1; K700E; 1
EVRTISAL

SEQ ID NO: 12808 - protein, 8 aa, Homo sapiens
  Table A; HLA-B*14:01; SF3B1; K700E; 0
EVRTISAL

SEQ ID NO: 12809 - protein, 8 aa, Homo sapiens
  Table A; HLA-B*14:02; SF3B1; K700E; 0
EVRTISAL

SEQ ID NO: 12810 - protein, 8 aa, Homo sapiens
  Table A; HLA-B*15:01; SF3B1; K700E; 1
EVRTISAL

SEQ ID NO: 12811 - protein, 8 aa, Homo sapiens
  Table A; HLA-B*15:02; SF3B1; K700E; 0
EVRTISAL

SEQ ID NO: 12812 - protein, 8 aa, Homo sapiens
  Table A; HLA-B*40:02; SF3B1; K700E; 0
EVRTISAL

SEQ ID NO: 12813 - protein, 8 aa, Homo sapiens
  Table A; HLA-B*48:01; SF3B1; K700E; 0
EVRTISAL

SEQ ID NO: 12814 - protein, 8 aa, Homo sapiens
  Table A; HLA-C*08:01; SF3B1; K700E; 0
EVRTISAL

SEQ ID NO: 12815 - protein, 8 aa, Homo sapiens
  Table A; HLA-C*12:03; SF3B1; K700E; 1
EVRTISAL

SEQ ID NO: 12816 - protein, 9 aa, Homo sapiens
  Table A; HLA-A*33:03; SF3B1; K700E; 0
EVRTISALA

SEQ ID NO: 12817 - protein, 9 aa, Homo sapiens
  Table A; HLA-A*68:02; SF3B1; K700E; 0
EVRTISALA

SEQ ID NO: 12818 - protein, 10 aa, Homo sapiens
  Table A; HLA-A*68:02; SF3B1; K700E; 0
EVRTISALAI

SEQ ID NO: 12819 - protein, 9 aa, Homo sapiens
  Table A; HLA-A*68:02; CTCF; K365T; 0
EVSTLKRHI

SEQ ID NO: 12820 - protein, 10 aa, Homo sapiens
  Table A; HLA-A*33:03; CTCF; K365T; 0
EVSTLKRHIR

SEQ ID NO: 12821 - protein, 11 aa, Homo sapiens
  Table A; HLA-A*68:02; RHOA; Y42C; 0
EVYVPTVFENC

SEQ ID NO: 12822 - protein, 11 aa, Homo sapiens
  Table A; HLA-A*31:01; NRAS; G13R; 0
EYKLVVVGAGR

SEQ ID NO: 12823 - protein, 11 aa, Homo sapiens
  Table A; HLA-A*33:01; NRAS; G13R; 0
EYKLVVVGAGR

SEQ ID NO: 12824 - protein, 11 aa, Homo sapiens
  Table A; HLA-A*33:03; NRAS; G13R; 0
EYKLVVVGAGR

SEQ ID NO: 12825 - protein, 10 aa, Homo sapiens
  Table A; HLA-A*33:03; KRAS; G12R; 0
EYKLVVVGAR

SEQ ID NO: 12826 - protein, 11 aa, Homo sapiens
  Table A; HLA-A*33:03; KRAS; G12S; 0
EYKLVVVGASG

SEQ ID NO: 12827 - protein, 11 aa, Homo sapiens
  Table A; HLA-A*33:03; TP53; H214R; 0
EYLDDRNTFRR

SEQ ID NO: 12828 - protein, 9 aa, Homo sapiens
  Table A; HLA-A*26:03; SF3B1; R625C; 0
EYVCNTTAR

SEQ ID NO: 12829 - protein, 9 aa, Homo sapiens
  Table A; HLA-A*33:01; SF3B1; R625C; 0
EYVCNTTAR

SEQ ID NO: 12830 - protein, 9 aa, Homo sapiens
  Table A; HLA-A*33:03; SF3B1; R625C; 0
EYVCNTTAR

SEQ ID NO: 12831 - protein, 9 aa, Homo sapiens
  Table A; HLA-A*68:01; SF3B1; R625C; 0
EYVCNTTAR

SEQ ID NO: 12832 - protein, 10 aa, Homo sapiens
  Table A; HLA-A*33:03; SF3B1; R625C; 0
EYVCNTTARA

SEQ ID NO: 12833 - protein, 11 aa, Homo sapiens
  Table A; HLA-A*23:01; SF3B1; R625C; 0
EYVCNTTARAF

SEQ ID NO: 12834 - protein, 8 aa, Homo sapiens
  Table A; HLA-A*33:03; SF3B1; R625H; 0
EYVHNTTA

SEQ ID NO: 12835 - protein, 8 aa, Homo sapiens
  Table A; HLA-B*39:06; SF3B1; R625H; 0
EYVHNTTA

SEQ ID NO: 12836 - protein, 9 aa, Homo sapiens
  Table A; HLA-A*25:01; SF3B1; R625H; 0
EYVHNTTAR

SEQ ID NO: 12837 - protein, 9 aa, Homo sapiens
  Table A; HLA-A*26:01; SF3B1; R625H; 0
EYVHNTTAR

SEQ ID NO: 12838 - protein, 9 aa, Homo sapiens
  Table A; HLA-A*26:03; SF3B1; R625H; 0
EYVHNTTAR

SEQ ID NO: 12839 - protein, 9 aa, Homo sapiens
  Table A; HLA-A*30:01; SF3B1; R625H; 0
EYVHNTTAR

SEQ ID NO: 12840 - protein, 9 aa, Homo sapiens
  Table A; HLA-A*31:01; SF3B1; R625H; 0
EYVHNTTAR

SEQ ID NO: 12841 - protein, 9 aa, Homo sapiens
  Table A; HLA-A*33:01; SF3B1; R625H; 0
EYVHNTTAR

SEQ ID NO: 12842 - protein, 9 aa, Homo sapiens
  Table A; HLA-A*33:03; SF3B1; R625H; 0
EYVHNTTAR

SEQ ID NO: 12843 - protein, 9 aa, Homo sapiens
  Table A; HLA-A*68:01; SF3B1; R625H; 0
EYVHNTTAR

SEQ ID NO: 12844 - protein, 9 aa, Homo sapiens
  Table A; HLA-A*68:02; SF3B1; R625H; 0
EYVHNTTAR

SEQ ID NO: 12845 - protein, 9 aa, Homo sapiens
  Table A; HLA-B*27:02; SF3B1; R625H; 0
EYVHNTTAR

SEQ ID NO: 12846 - protein, 9 aa, Homo sapiens
  Table A; HLA-B*35:01; SF3B1; R625H; 0
EYVHNTTAR

SEQ ID NO: 12847 - protein, 9 aa, Homo sapiens
  Table A; HLA-B*54:01; SF3B1; R625H; 0
EYVHNTTAR

SEQ ID NO: 12848 - protein, 10 aa, Homo sapiens
  Table A; HLA-A*33:03; SF3B1; R625H; 0
EYVHNTTARA

SEQ ID NO: 12849 - protein, 10 aa, Homo sapiens
  Table A; HLA-A*68:02; SF3B1; R625H; 0
EYVHNTTARA

SEQ ID NO: 12850 - protein, 11 aa, Homo sapiens
  Table A; HLA-A*23:01; SF3B1; R625H; 0
EYVHNTTARAF

SEQ ID NO: 12851 - protein, 11 aa, Homo sapiens
  Table A; HLA-A*24:02; SF3B1; R625H; 1
EYVHNTTARAF

SEQ ID NO: 12852 - protein, 11 aa, Homo sapiens
  Table A; HLA-A*31:01; SF3B1; R625H; 0
EYVHNTTARAF

SEQ ID NO: 12853 - protein, 11 aa, Homo sapiens
  Table A; HLA-A*33:03; SF3B1; R625H; 0
EYVHNTTARAF

SEQ ID NO: 12854 - protein, 10 aa, Homo sapiens
  Table A; HLA-A*02:07; TPR; S2155L; 0
FAEAIHLPQV

SEQ ID NO: 12855 - protein, 10 aa, Homo sapiens
  Table A; HLA-A*68:02; TPR; S2155L; 0
FAEAIHLPQV

SEQ ID NO: 12856 - protein, 10 aa, Homo sapiens
  Table A; HLA-B*54:01; TPR; S2155L; 0
FAEAIHLPQV

SEQ ID NO: 12857 - protein, 11 aa, Homo sapiens
  Table A; HLA-B*54:01; TPR; S2155L; 0
FAEAIHLPQVA

SEQ ID NO: 12858 - protein, 9 aa, Homo sapiens
  Table A; HLA-C*03:03; ATM; R2691C; 0
FCLAGGVNL

SEQ ID NO: 12859 - protein, 9 aa, Homo sapiens
  Table A; HLA-C*03:04; ATM; R2691C; 1
FCLAGGVNL

SEQ ID NO: 12860 - protein, 9 aa, Homo sapiens
  Table A; HLA-C*17:01; ATM; R2691C; 0
FCLAGGVNL

SEQ ID NO: 12861 - protein, 8 aa, Homo sapiens
  Table A; HLA-A*31:01; TP53; S241F; 0
FCMGGMNR

SEQ ID NO: 12862 - protein, 8 aa, Homo sapiens
  Table A; HLA-A*33:03; TP53; S241F; 0
FCMGGMNR

SEQ ID NO: 12863 - protein, 8 aa, Homo sapiens
  Table A; HLA-B*15:01; TP53; C141Y; 0
FCQLAKTY

SEQ ID NO: 12864 - protein, 8 aa, Homo sapiens
  Table A; HLA-B*15:02; TP53; C141Y; 0
FCQLAKTY

SEQ ID NO: 12865 - protein, 10 aa, Homo sapiens
  Table A; HLA-A*02:01; KEAP1; G480W; 1
FDWTNRLNSA

SEQ ID NO: 12866 - protein, 9 aa, Homo sapiens
  Table A; HLA-A*02:01; PTEN; D92E; 1
FEEHNPPQL

SEQ ID NO: 12867 - protein, 9 aa, Homo sapiens
  Table A; HLA-A*02:04; PTEN; D92E; 0
FEEHNPPQL

SEQ ID NO: 12868 - protein, 9 aa, Homo sapiens
  Table A; HLA-A*30:01; PTEN; D92E; 0
FEEHNPPQL

SEQ ID NO: 12869 - protein, 9 aa, Homo sapiens
  Table A; HLA-B*35:02; PTEN; D92E; 0
FEEHNPPQL

SEQ ID NO: 12870 - protein, 9 aa, Homo sapiens
  Table A; HLA-B*35:03; PTEN; D92E; 0
FEEHNPPQL

SEQ ID NO: 12871 - protein, 9 aa, Homo sapiens
  Table A; HLA-B*39:01; PTEN; D92E; 0
FEEHNPPQL

SEQ ID NO: 12872 - protein, 9 aa, Homo sapiens
  Table A; HLA-B*40:01; PTEN; D92E; 0
FEEHNPPQL

SEQ ID NO: 12873 - protein, 9 aa, Homo sapiens
  Table A; HLA-B*40:02; PTEN; D92E; 0
FEEHNPPQL

SEQ ID NO: 12874 - protein, 9 aa, Homo sapiens
  Table A; HLA-B*41:02; PTEN; D92E; 0
FEEHNPPQL

SEQ ID NO: 12875 - protein, 9 aa, Homo sapiens
  Table A; HLA-B*44:05; PTEN; D92E; 0
FEEHNPPQL

SEQ ID NO: 12876 - protein, 9 aa, Homo sapiens
  Table A; HLA-B*49:01; PTEN; D92E; 0
FEEHNPPQL

SEQ ID NO: 12877 - protein, 9 aa, Homo sapiens
  Table A; HLA-B*58:01; PTEN; D92E; 0
FEEHNPPQL

SEQ ID NO: 12878 - protein, 9 aa, Homo sapiens
  Table A; HLA-C*05:01; PTEN; D92E; 0
FEEHNPPQL

SEQ ID NO: 12879 - protein, 9 aa, Homo sapiens
  Table A; HLA-C*08:02; PTEN; D92E; 0
FEEHNPPQL

SEQ ID NO: 12880 - protein, 10 aa, Homo sapiens
  Table A; HLA-A*68:02; RHOA; Y42C; 0
FENCVADIEV

SEQ ID NO: 12881 - protein, 10 aa, Homo sapiens
  Table A; HLA-B*40:02; RHOA; Y42C; 0
FENCVADIEV

SEQ ID NO: 12882 - protein, 8 aa, Homo sapiens
  Table A; HLA-B*40:02; TP53; R273H; 0
FEVHVCAC

SEQ ID NO: 12883 - protein, 9 aa, Homo sapiens
  Table A; HLA-B*50:01; TP53; R273H; 0
FEVHVCACP

SEQ ID NO: 12884 - protein, 9 aa, Homo sapiens
  Table A; HLA-A*02:03; MTOR; A2056V; 0
FEVLEPLHV

SEQ ID NO: 12885 - protein, 9 aa, Homo sapiens
  Table A; HLA-A*30:01; MTOR; A2056V; 0
FEVLEPLHV

SEQ ID NO: 12886 - protein, 9 aa, Homo sapiens
  Table A; HLA-A*68:02; MTOR; A2056V; 0
FEVLEPLHV

SEQ ID NO: 12887 - protein, 9 aa, Homo sapiens
  Table A; HLA-B*13:02; MTOR; A2056V; 0
FEVLEPLHV

SEQ ID NO: 12888 - protein, 9 aa, Homo sapiens
  Table A; HLA-B*40:01; MTOR; A2056V; 1
FEVLEPLHV

SEQ ID NO: 12889 - protein, 9 aa, Homo sapiens
  Table A; HLA-B*40:02; MTOR; A2056V; 0
FEVLEPLHV

SEQ ID NO: 12890 - protein, 9 aa, Homo sapiens
  Table A; HLA-B*44:03; MTOR; A2056V; 1
FEVLEPLHV

SEQ ID NO: 12891 - protein, 9 aa, Homo sapiens
  Table A; HLA-B*49:01; MTOR; A2056V; 0
FEVLEPLHV

SEQ ID NO: 12892 - protein, 10 aa, Homo sapiens
  Table A; HLA-B*40:02; MTOR; A2056V; 0
FEVLEPLHVM

SEQ ID NO: 12893 - protein, 8 aa, Homo sapiens
  Table A; HLA-B*18:01; TP53; R273L; 0
FEVLVCAC

SEQ ID NO: 12894 - protein, 8 aa, Homo sapiens
  Table A; HLA-B*39:06; TP53; R273L; 0
FEVLVCAC

SEQ ID NO: 12895 - protein, 8 aa, Homo sapiens
  Table A; HLA-B*40:02; TP53; R273L; 0
FEVLVCAC

SEQ ID NO: 12896 - protein, 9 aa, Homo sapiens
  Table A; HLA-B*50:01; TP53; R273L; 0
FEVLVCACP

SEQ ID NO: 12897 - protein, 8 aa, Homo sapiens
  Table A; HLA-B*18:01; TP53; C275Y; 0
FEVRVYAC

SEQ ID NO: 12898 - protein, 8 aa, Homo sapiens
  Table A; HLA-B*39:06; TP53; C275Y; 0
FEVRVYAC

SEQ ID NO: 12899 - protein, 8 aa, Homo sapiens
  Table A; HLA-B*40:02; TP53; C275Y; 0
FEVRVYAC

SEQ ID NO: 12900 - protein, 9 aa, Homo sapiens
  Table A; HLA-B*50:01; TP53; C275Y; 0
FEVRVYACP

SEQ ID NO: 12901 - protein, 8 aa, Homo sapiens
  Table A; HLA-B*39:06; TP53; R273S; 0
FEVSVCAC

SEQ ID NO: 12902 - protein, 8 aa, Homo sapiens
  Table A; HLA-B*40:02; TP53; R273S; 0
FEVSVCAC

SEQ ID NO: 12903 - protein, 8 aa, Homo sapiens
  Table A; HLA-B*40:06; TP53; R273S; 0
FEVSVCAC

SEQ ID NO: 12904 - protein, 8 aa, Homo sapiens
  Table A; HLA-B*49:01; TP53; R273S; 0
FEVSVCAC

SEQ ID NO: 12905 - protein, 8 aa, Homo sapiens
  Table A; HLA-B*50:01; TP53; R273S; 0
FEVSVCAC

SEQ ID NO: 12906 - protein, 9 aa, Homo sapiens
  Table A; HLA-B*50:01; TP53; R273S; 0
FEVSVCACP

SEQ ID NO: 12907 - protein, 8 aa, Homo sapiens
  Table A; HLA-C*03:04; PIK3CA; R88Q; 1
FFDETRQL

SEQ ID NO: 12908 - protein, 8 aa, Homo sapiens
  Table A; HLA-C*04:01; PIK3CA; R88Q; 1
FFDETRQL

SEQ ID NO: 12909 - protein, 8 aa, Homo sapiens
  Table A; HLA-C*05:01; PIK3CA; R88Q; 1
FFDETRQL

SEQ ID NO: 12910 - protein, 8 aa, Homo sapiens
  Table A; HLA-C*08:02; PIK3CA; R88Q; 1
FFDETRQL

SEQ ID NO: 12911 - protein, 8 aa, Homo sapiens
  Table A; HLA-C*14:02; PIK3CA; R88Q; 1
FFDETRQL

SEQ ID NO: 12912 - protein, 8 aa, Homo sapiens
  Table A; HLA-C*14:03; PIK3CA; R88Q; 0
FFDETRQL

SEQ ID NO: 12913 - protein, 9 aa, Homo sapiens
  Table A; HLA-C*04:01; PIK3CA; R88Q; 1
FFDETRQLC

SEQ ID NO: 12914 - protein, 9 aa, Homo sapiens
  Table A; HLA-B*35:03; ARID2; S297F; 0
FFEEGNVKL

SEQ ID NO: 12915 - protein, 9 aa, Homo sapiens
  Table A; HLA-B*38:01; ARID2; S297F; 0
FFEEGNVKL

SEQ ID NO: 12916 - protein, 9 aa, Homo sapiens
  Table A; HLA-B*39:01; ARID2; S297F; 0
FFEEGNVKL

SEQ ID NO: 12917 - protein, 9 aa, Homo sapiens
  Table A; HLA-B*48:01; ARID2; S297F; 0
FFEEGNVKL

SEQ ID NO: 12918 - protein, 9 aa, Homo sapiens
  Table A; HLA-C*01:02; ARID2; S297F; 0
FFEEGNVKL

SEQ ID NO: 12919 - protein, 9 aa, Homo sapiens
  Table A; HLA-C*04:01; ARID2; S297F; 1
FFEEGNVKL

SEQ ID NO: 12920 - protein, 9 aa, Homo sapiens
  Table A; HLA-C*05:01; ARID2; S297F; 1
FFEEGNVKL

SEQ ID NO: 12921 - protein, 9 aa, Homo sapiens
  Table A; HLA-C*08:02; ARID2; S297F; 1
FFEEGNVKL

SEQ ID NO: 12922 - protein, 9 aa, Homo sapiens
  Table A; HLA-C*14:02; ARID2; S297F; 0
FFEEGNVKL

SEQ ID NO: 12923 - protein, 10 aa, Homo sapiens
  Table A; HLA-C*01:02; ARID2; S297F; 0
FFEEGNVKLL

SEQ ID NO: 12924 - protein, 10 aa, Homo sapiens
  Table A; HLA-C*03:04; ARID2; S297F; 1
FFEEGNVKLL

SEQ ID NO: 12925 - protein, 10 aa, Homo sapiens
  Table A; HLA-C*14:02; ARID2; S297F; 0
FFEEGNVKLL

SEQ ID NO: 12926 - protein, 9 aa, Homo sapiens
  Table A; HLA-C*14:02; RSPO2; R64Q; 0
FFFLQREGM

SEQ ID NO: 12927 - protein, 8 aa, Homo sapiens
  Table A; HLA-C*14:02; KDR; S1100F; 0
FFLGASPY

SEQ ID NO: 12928 - protein, 8 aa, Homo sapiens
  Table A; HLA-C*14:02; RSPO2; R64Q; 0
FFLQREGM

SEQ ID NO: 12929 - protein, 8 aa, Homo sapiens
  Table A; HLA-B*39:06; CTNNB1; S37F; 0
FGATTTAP

SEQ ID NO: 12930 - protein, 10 aa, Homo sapiens
  Table A; HLA-A*02:01; CTNNB1; S37F; 1
FGATTTAPSL

SEQ ID NO: 12931 - protein, 10 aa, Homo sapiens
  Table A; HLA-A*68:01; CTNNB1; S37F; 1
FGATTTAPSL

SEQ ID NO: 12932 - protein, 10 aa, Homo sapiens
  Table A; HLA-A*68:02; CTNNB1; S37F; 0
FGATTTAPSL

SEQ ID NO: 12933 - protein, 10 aa, Homo sapiens
  Table A; HLA-B*15:10; CTNNB1; S37F; 0
FGATTTAPSL

SEQ ID NO: 12934 - protein, 10 aa, Homo sapiens
  Table A; HLA-B*35:03; CTNNB1; S37F; 0
FGATTTAPSL

SEQ ID NO: 12935 - protein, 10 aa, Homo sapiens
  Table A; HLA-B*39:01; CTNNB1; S37F; 0
FGATTTAPSL

SEQ ID NO: 12936 - protein, 10 aa, Homo sapiens
  Table A; HLA-B*40:02; CTNNB1; S37F; 0
FGATTTAPSL

SEQ ID NO: 12937 - protein, 10 aa, Homo sapiens
  Table A; HLA-C*03:03; CTNNB1; S37F; 1
FGATTTAPSL

SEQ ID NO: 12938 - protein, 10 aa, Homo sapiens
  Table A; HLA-C*03:04; CTNNB1; S37F; 1
FGATTTAPSL

SEQ ID NO: 12939 - protein, 11 aa, Homo sapiens
  Table A; HLA-A*68:02; CTNNB1; S37F; 0
FGATTTAPSLS

SEQ ID NO: 12940 - protein, 8 aa, Homo sapiens
  Table A; HLA-A*02:05; MYCN; P44L; 0
FGGPDSTL

SEQ ID NO: 12941 - protein, 8 aa, Homo sapiens
  Table A; HLA-B*35:02; MYCN; P44L; 0
FGGPDSTL

SEQ ID NO: 12942 - protein, 8 aa, Homo sapiens
  Table A; HLA-B*35:03; MYCN; P44L; 0
FGGPDSTL

SEQ ID NO: 12943 - protein, 8 aa, Homo sapiens
  Table A; HLA-B*35:12; MYCN; P44L; 0
FGGPDSTL

SEQ ID NO: 12944 - protein, 8 aa, Homo sapiens
  Table A; HLA-B*38:01; MYCN; P44L; 0
FGGPDSTL

SEQ ID NO: 12945 - protein, 8 aa, Homo sapiens
  Table A; HLA-B*39:01; MYCN; P44L; 0
FGGPDSTL

SEQ ID NO: 12946 - protein, 8 aa, Homo sapiens
  Table A; HLA-B*48:01; MYCN; P44L; 0
FGGPDSTL

SEQ ID NO: 12947 - protein, 8 aa, Homo sapiens
  Table A; HLA-C*03:03; MYCN; P44L; 1
FGGPDSTL

SEQ ID NO: 12948 - protein, 8 aa, Homo sapiens
  Table A; HLA-C*03:04; MYCN; P44L; 1
FGGPDSTL

SEQ ID NO: 12949 - protein, 8 aa, Homo sapiens
  Table A; HLA-C*07:04; MYCN; P44L; 0
FGGPDSTL

SEQ ID NO: 12950 - protein, 8 aa, Homo sapiens
  Table A; HLA-C*08:01; MYCN; P44L; 0
FGGPDSTL

SEQ ID NO: 12951 - protein, 8 aa, Homo sapiens
  Table A; HLA-B*39:01; CTNNB1; S33F; 0
FGIHSGAT

SEQ ID NO: 12952 - protein, 9 aa, Homo sapiens
  Table A; HLA-A*02:05; CTNNB1; S33F; 0
FGIHSGATT

SEQ ID NO: 12953 - protein, 9 aa, Homo sapiens
  Table A; HLA-B*15:10; CTNNB1; S33F; 0
FGIHSGATT

SEQ ID NO: 12954 - protein, 9 aa, Homo sapiens
  Table A; HLA-B*35:03; CTNNB1; S33F; 0
FGIHSGATT

SEQ ID NO: 12955 - protein, 9 aa, Homo sapiens
  Table A; HLA-B*39:01; CTNNB1; S33F; 0
FGIHSGATT

SEQ ID NO: 12956 - protein, 9 aa, Homo sapiens
  Table A; HLA-B*54:01; CTNNB1; S33F; 0
FGIHSGATT

SEQ ID NO: 12957 - protein, 9 aa, Homo sapiens
  Table A; HLA-C*03:04; CTNNB1; S33F; 1
FGIHSGATT

SEQ ID NO: 12958 - protein, 10 aa, Homo sapiens
  Table A; HLA-B*08:01; CTNNB1; S33F; 1
FGIHSGATTT

SEQ ID NO: 12959 - protein, 10 aa, Homo sapiens
  Table A; HLA-B*48:01; CTNNB1; S33F; 0
FGIHSGATTT

SEQ ID NO: 12960 - protein, 10 aa, Homo sapiens
  Table A; HLA-C*08:03; CTNNB1; S33F; 0
FGIHSGATTT

SEQ ID NO: 12961 - protein, 11 aa, Homo sapiens
  Table A; HLA-A*02:01; CTNNB1; S33F; 1
FGIHSGATTTA

SEQ ID NO: 12962 - protein, 11 aa, Homo sapiens
  Table A; HLA-A*02:03; CTNNB1; S33F; 0
FGIHSGATTTA

SEQ ID NO: 12963 - protein, 11 aa, Homo sapiens
  Table A; HLA-A*02:05; CTNNB1; S33F; 0
FGIHSGATTTA

SEQ ID NO: 12964 - protein, 11 aa, Homo sapiens
  Table A; HLA-A*68:01; CTNNB1; S33F; 1
FGIHSGATTTA

SEQ ID NO: 12965 - protein, 11 aa, Homo sapiens
  Table A; HLA-B*08:01; CTNNB1; S33F; 1
FGIHSGATTTA

SEQ ID NO: 12966 - protein, 11 aa, Homo sapiens
  Table A; HLA-B*15:01; CTNNB1; S33F; 1
FGIHSGATTTA

SEQ ID NO: 12967 - protein, 11 aa, Homo sapiens
  Table A; HLA-B*46:01; CTNNB1; S33F; 0
FGIHSGATTTA

SEQ ID NO: 12968 - protein, 11 aa, Homo sapiens
  Table A; HLA-B*48:01; CTNNB1; S33F; 0
FGIHSGATTTA

SEQ ID NO: 12969 - protein, 11 aa, Homo sapiens
  Table A; HLA-B*50:01; CTNNB1; S33F; 0
FGIHSGATTTA

SEQ ID NO: 12970 - protein, 11 aa, Homo sapiens
  Table A; HLA-B*54:01; CTNNB1; S33F; 0
FGIHSGATTTA

SEQ ID NO: 12971 - protein, 9 aa, Homo sapiens
  Table A; HLA-B*08:01; EGFR; L861Q; 1
FGLAKQLGA

SEQ ID NO: 12972 - protein, 9 aa, Homo sapiens
  Table A; HLA-B*39:06; EGFR; L861Q; 0
FGLAKQLGA

SEQ ID NO: 12973 - protein, 9 aa, Homo sapiens
  Table A; HLA-B*54:01; EGFR; L861Q; 0
FGLAKQLGA

SEQ ID NO: 12974 - protein, 9 aa, Homo sapiens
  Table A; HLA-B*27:02; BRAF; K601E; 0
FGLATVESR

SEQ ID NO: 12975 - protein, 10 aa, Homo sapiens
  Table A; HLA-B*57:01; BRAF; K601E; 1
FGLATVESRW

SEQ ID NO: 12976 - protein, 9 aa, Homo sapiens
  Table A; HLA-A*02:03; EGFR; L858R; 0
FGRAKLLGA

SEQ ID NO: 12977 - protein, 9 aa, Homo sapiens
  Table A; HLA-B*54:01; TRRAP; S722F; 0
FGSVFLFAA

SEQ ID NO: 12978 - protein, 8 aa, Homo sapiens
  Table A; HLA-B*39:06; KNSTRN; S24F; 0
FHPLPPSY

SEQ ID NO: 12979 - protein, 9 aa, Homo sapiens
  Table A; HLA-A*26:03; KRAS; A146T; 0
FIETSTKTR

SEQ ID NO: 12980 - protein, 9 aa, Homo sapiens
  Table A; HLA-A*68:01; KRAS; A146T; 0
FIETSTKTR

SEQ ID NO: 12981 - protein, 10 aa, Homo sapiens
  Table A; HLA-A*02:01; TRRAP; S722F; 1
FLFAAENEQM

SEQ ID NO: 12982 - protein, 10 aa, Homo sapiens
  Table A; HLA-A*02:03; TRRAP; S722F; 0
FLFAAENEQM

SEQ ID NO: 12983 - protein, 10 aa, Homo sapiens
  Table A; HLA-A*02:04; TRRAP; S722F; 0
FLFAAENEQM

SEQ ID NO: 12984 - protein, 10 aa, Homo sapiens
  Table A; HLA-A*02:05; TRRAP; S722F; 0
FLFAAENEQM

SEQ ID NO: 12985 - protein, 10 aa, Homo sapiens
  Table A; HLA-A*02:07; TRRAP; S722F; 0
FLFAAENEQM

SEQ ID NO: 12986 - protein, 10 aa, Homo sapiens
  Table A; HLA-A*02:08; TRRAP; S722F; 0
FLFAAENEQM

SEQ ID NO: 12987 - protein, 10 aa, Homo sapiens
  Table A; HLA-B*13:01; TRRAP; S722F; 0
FLFAAENEQM

SEQ ID NO: 12988 - protein, 10 aa, Homo sapiens
  Table A; HLA-B*15:02; TRRAP; S722F; 0
FLFAAENEQM

SEQ ID NO: 12989 - protein, 10 aa, Homo sapiens
  Table A; HLA-C*08:01; TRRAP; S722F; 0
FLFAAENEQM

SEQ ID NO: 12990 - protein, 11 aa, Homo sapiens
  Table A; HLA-A*02:01; TRRAP; S722F; 1
FLFAAENEQML

SEQ ID NO: 12991 - protein, 11 aa, Homo sapiens
  Table A; HLA-A*02:03; TRRAP; S722F; 0
FLFAAENEQML

SEQ ID NO: 12992 - protein, 11 aa, Homo sapiens
  Table A; HLA-A*02:04; TRRAP; S722F; 0
FLFAAENEQML

SEQ ID NO: 12993 - protein, 11 aa, Homo sapiens
  Table A; HLA-A*02:05; TRRAP; S722F; 0
FLFAAENEQML

SEQ ID NO: 12994 - protein, 11 aa, Homo sapiens
  Table A; HLA-A*02:07; TRRAP; S722F; 0
FLFAAENEQML

SEQ ID NO: 12995 - protein, 11 aa, Homo sapiens
  Table A; HLA-B*48:01; TRRAP; S722F; 0
FLFAAENEQML

SEQ ID NO: 12996 - protein, 8 aa, Homo sapiens
  Table A; HLA-C*08:03; RAC1; P29L; 0
FLGEYIPT

SEQ ID NO: 12997 - protein, 9 aa, Homo sapiens
  Table A; HLA-A*02:01; RAC1; P29L; 1
FLGEYIPTV

SEQ ID NO: 12998 - protein, 9 aa, Homo sapiens
  Table A; HLA-A*02:03; RAC1; P29L; 0
FLGEYIPTV

SEQ ID NO: 12999 - protein, 9 aa, Homo sapiens
  Table A; HLA-A*02:04; RAC1; P29L; 0
FLGEYIPTV

SEQ ID NO: 13000 - protein, 9 aa, Homo sapiens
  Table A; HLA-A*02:05; RAC1; P29L; 0
FLGEYIPTV

SEQ ID NO: 13001 - protein, 9 aa, Homo sapiens
  Table A; HLA-A*02:06; RAC1; P29L; 0
FLGEYIPTV

SEQ ID NO: 13002 - protein, 9 aa, Homo sapiens
  Table A; HLA-A*02:07; RAC1; P29L; 0
FLGEYIPTV

SEQ ID NO: 13003 - protein, 9 aa, Homo sapiens
  Table A; HLA-A*02:08; RAC1; P29L; 0
FLGEYIPTV

SEQ ID NO: 13004 - protein, 9 aa, Homo sapiens
  Table A; HLA-A*30:01; RAC1; P29L; 0
FLGEYIPTV

SEQ ID NO: 13005 - protein, 9 aa, Homo sapiens
  Table A; HLA-A*68:02; RAC1; P29L; 0
FLGEYIPTV

SEQ ID NO: 13006 - protein, 9 aa, Homo sapiens
  Table A; HLA-B*08:01; RAC1; P29L; 1
FLGEYIPTV

SEQ ID NO: 13007 - protein, 9 aa, Homo sapiens
  Table A; HLA-B*13:02; RAC1; P29L; 0
FLGEYIPTV

SEQ ID NO: 13008 - protein, 9 aa, Homo sapiens
  Table A; HLA-B*35:03; RAC1; P29L; 0
FLGEYIPTV

SEQ ID NO: 13009 - protein, 9 aa, Homo sapiens
  Table A; HLA-B*39:06; RAC1; P29L; 0
FLGEYIPTV

SEQ ID NO: 13010 - protein, 9 aa, Homo sapiens
  Table A; HLA-B*40:02; RAC1; P29L; 0
FLGEYIPTV

SEQ ID NO: 13011 - protein, 9 aa, Homo sapiens
  Table A; HLA-B*48:01; RAC1; P29L; 0
FLGEYIPTV

SEQ ID NO: 13012 - protein, 9 aa, Homo sapiens
  Table A; HLA-B*50:01; RAC1; P29L; 0
FLGEYIPTV

SEQ ID NO: 13013 - protein, 9 aa, Homo sapiens
  Table A; HLA-B*51:01; RAC1; P29L; 1
FLGEYIPTV

SEQ ID NO: 13014 - protein, 9 aa, Homo sapiens
  Table A; HLA-B*54:01; RAC1; P29L; 0
FLGEYIPTV

SEQ ID NO: 13015 - protein, 9 aa, Homo sapiens
  Table A; HLA-C*07:04; RAC1; P29L; 0
FLGEYIPTV

SEQ ID NO: 13016 - protein, 9 aa, Homo sapiens
  Table A; HLA-C*15:02; RAC1; P29L; 0
FLGEYIPTV

SEQ ID NO: 13017 - protein, 10 aa, Homo sapiens
  Table A; HLA-A*02:01; RAC1; P29L; 1
FLGEYIPTVF

SEQ ID NO: 13018 - protein, 10 aa, Homo sapiens
  Table A; HLA-A*02:03; RAC1; P29L; 0
FLGEYIPTVF

SEQ ID NO: 13019 - protein, 10 aa, Homo sapiens
  Table A; HLA-A*02:04; RAC1; P29L; 0
FLGEYIPTVF

SEQ ID NO: 13020 - protein, 10 aa, Homo sapiens
  Table A; HLA-A*02:07; RAC1; P29L; 0
FLGEYIPTVF

SEQ ID NO: 13021 - protein, 10 aa, Homo sapiens
  Table A; HLA-A*29:02; RAC1; P29L; 0
FLGEYIPTVF

SEQ ID NO: 13022 - protein, 10 aa, Homo sapiens
  Table A; HLA-B*08:01; RAC1; P29L; 1
FLGEYIPTVF

SEQ ID NO: 13023 - protein, 10 aa, Homo sapiens
  Table A; HLA-B*15:01; RAC1; P29L; 1
FLGEYIPTVF

SEQ ID NO: 13024 - protein, 10 aa, Homo sapiens
  Table A; HLA-B*15:02; RAC1; P29L; 0
FLGEYIPTVF

SEQ ID NO: 13025 - protein, 10 aa, Homo sapiens
  Table A; HLA-B*27:02; RAC1; P29L; 0
FLGEYIPTVF

SEQ ID NO: 13026 - protein, 10 aa, Homo sapiens
  Table A; HLA-B*35:01; RAC1; P29L; 1
FLGEYIPTVF

SEQ ID NO: 13027 - protein, 10 aa, Homo sapiens
  Table A; HLA-C*08:01; RAC1; P29L; 0
FLGEYIPTVF

SEQ ID NO: 13028 - protein, 9 aa, Homo sapiens
  Table A; HLA-A*02:01; PIK3CA; G106V; 1
FLKVIEPVV

SEQ ID NO: 13029 - protein, 9 aa, Homo sapiens
  Table A; HLA-A*02:03; PIK3CA; G106V; 0
FLKVIEPVV

SEQ ID NO: 13030 - protein, 9 aa, Homo sapiens
  Table A; HLA-A*02:04; PIK3CA; G106V; 0
FLKVIEPVV

SEQ ID NO: 13031 - protein, 9 aa, Homo sapiens
  Table A; HLA-A*30:01; PIK3CA; G106V; 0
FLKVIEPVV

SEQ ID NO: 13032 - protein, 11 aa, Homo sapiens
  Table A; HLA-A*33:01; PIK3CA; G106V; 0
FLKVIEPVVNR

SEQ ID NO: 13033 - protein, 9 aa, Homo sapiens
  Table A; HLA-A*02:01; TP53; R110L; 1
FLLGFLHSG

SEQ ID NO: 13034 - protein, 9 aa, Homo sapiens
  Table A; HLA-A*02:04; TP53; R110L; 0
FLLGFLHSG

SEQ ID NO: 13035 - protein, 11 aa, Homo sapiens
  Table A; HLA-A*02:03; TP53; R110L; 0
FLLGFLHSGTA

SEQ ID NO: 13036 - protein, 8 aa, Homo sapiens
  Table A; HLA-B*13:02; MAP2K1; K57N; 0
FLTQNQKV

SEQ ID NO: 13037 - protein, 11 aa, Homo sapiens
  Table A; HLA-A*02:03; MAP2K1; K57N; 0
FLTQNQKVGEL

SEQ ID NO: 13038 - protein, 9 aa, Homo sapiens
  Table A; HLA-B*15:01; PIK3CA; M1043I; 1
FMKQINDAH

SEQ ID NO: 13039 - protein, 9 aa, Homo sapiens
  Table A; HLA-A*02:03; PIK3CA; H1047L; 0
FMKQMNDAL

SEQ ID NO: 13040 - protein, 9 aa, Homo sapiens
  Table A; HLA-A*02:04; PIK3CA; H1047L; 0
FMKQMNDAL

SEQ ID NO: 13041 - protein, 9 aa, Homo sapiens
  Table A; HLA-B*08:01; PIK3CA; H1047L; 1
FMKQMNDAL

SEQ ID NO: 13042 - protein, 9 aa, Homo sapiens
  Table A; HLA-B*46:01; PIK3CA; H1047L; 0
FMKQMNDAL

SEQ ID NO: 13043 - protein, 9 aa, Homo sapiens
  Table A; HLA-B*48:01; PIK3CA; H1047L; 0
FMKQMNDAL

SEQ ID NO: 13044 - protein, 9 aa, Homo sapiens
  Table A; HLA-A*31:01; PIK3CA; H1047R; 1
FMKQMNDAR

SEQ ID NO: 13045 - protein, 9 aa, Homo sapiens
  Table A; HLA-A*33:03; PIK3CA; H1047R; 0
FMKQMNDAR

SEQ ID NO: 13046 - protein, 9 aa, Homo sapiens
  Table A; HLA-A*29:01; PIK3CA; H1047Y; 0
FMKQMNDAY

SEQ ID NO: 13047 - protein, 9 aa, Homo sapiens
  Table A; HLA-A*29:02; PIK3CA; H1047Y; 0
FMKQMNDAY

SEQ ID NO: 13048 - protein, 9 aa, Homo sapiens
  Table A; HLA-A*30:02; PIK3CA; H1047Y; 0
FMKQMNDAY

SEQ ID NO: 13049 - protein, 9 aa, Homo sapiens
  Table A; HLA-B*15:01; PIK3CA; H1047Y; 1
FMKQMNDAY

SEQ ID NO: 13050 - protein, 9 aa, Homo sapiens
  Table A; HLA-B*15:02; PIK3CA; H1047Y; 0
FMKQMNDAY

SEQ ID NO: 13051 - protein, 9 aa, Homo sapiens
  Table A; HLA-B*15:03; PIK3CA; H1047Y; 0
FMKQMNDAY

SEQ ID NO: 13052 - protein, 9 aa, Homo sapiens
  Table A; HLA-B*46:01; PIK3CA; H1047Y; 0
FMKQMNDAY

SEQ ID NO: 13053 - protein, 9 aa, Homo sapiens
  Table A; HLA-C*08:01; PIK3CA; H1047Y; 0
FMKQMNDAY

SEQ ID NO: 13054 - protein, 9 aa, Homo sapiens
  Table A; HLA-B*15:01; PIK3CA; M1043V; 1
FMKQVNDAH

SEQ ID NO: 13055 - protein, 8 aa, Homo sapiens
  Table A; HLA-B*08:01; TP53; S127F; 1
FPALNKMF

SEQ ID NO: 13056 - protein, 8 aa, Homo sapiens
  Table A; HLA-B*35:01; TP53; S127F; 0
FPALNKMF

SEQ ID NO: 13057 - protein, 8 aa, Homo sapiens
  Table A; HLA-B*54:01; TP53; S127F; 0
FPALNKMF

SEQ ID NO: 13058 - protein, 9 aa, Homo sapiens
  Table A; HLA-B*54:01; TP53; S127F; 0
FPALNKMFC

SEQ ID NO: 13059 - protein, 11 aa, Homo sapiens
  Table A; HLA-B*07:02; MECOM; R750Q; 1
FPRSANLTQHL

SEQ ID NO: 13060 - protein, 11 aa, Homo sapiens
  Table A; HLA-B*54:01; MECOM; R750Q; 0
FPRSANLTQHL

SEQ ID NO: 13061 - protein, 8 aa, Homo sapiens
  Table A; HLA-B*39:06; TP53; R213Q; 0
FQHSVVVP

SEQ ID NO: 13062 - protein, 9 aa, Homo sapiens
  Table A; HLA-A*29:02; TP53; R213Q; 0
FQHSVVVPY

SEQ ID NO: 13063 - protein, 9 aa, Homo sapiens
  Table A; HLA-A*30:01; TP53; R213Q; 0
FQHSVVVPY

SEQ ID NO: 13064 - protein, 9 aa, Homo sapiens
  Table A; HLA-B*13:02; TP53; R213Q; 0
FQHSVVVPY

SEQ ID NO: 13065 - protein, 9 aa, Homo sapiens
  Table A; HLA-B*15:01; TP53; R213Q; 1
FQHSVVVPY

SEQ ID NO: 13066 - protein, 9 aa, Homo sapiens
  Table A; HLA-B*15:02; TP53; R213Q; 0
FQHSVVVPY

SEQ ID NO: 13067 - protein, 9 aa, Homo sapiens
  Table A; HLA-B*15:03; TP53; R213Q; 0
FQHSVVVPY

SEQ ID NO: 13068 - protein, 9 aa, Homo sapiens
  Table A; HLA-B*27:02; TP53; R213Q; 0
FQHSVVVPY

SEQ ID NO: 13069 - protein, 9 aa, Homo sapiens
  Table A; HLA-B*27:05; TP53; R213Q; 0
FQHSVVVPY

SEQ ID NO: 13070 - protein, 9 aa, Homo sapiens
  Table A; HLA-B*35:01; TP53; R213Q; 0
FQHSVVVPY

SEQ ID NO: 13071 - protein, 9 aa, Homo sapiens
  Table A; HLA-B*46:01; TP53; R213Q; 0
FQHSVVVPY

SEQ ID NO: 13072 - protein, 9 aa, Homo sapiens
  Table A; HLA-C*02:02; TP53; R213Q; 0
FQHSVVVPY

SEQ ID NO: 13073 - protein, 9 aa, Homo sapiens
  Table A; HLA-C*14:02; TP53; R213Q; 0
FQHSVVVPY

SEQ ID NO: 13074 - protein, 9 aa, Homo sapiens
  Table A; HLA-C*16:04; TP53; R213Q; 0
FQHSVVVPY

SEQ ID NO: 13075 - protein, 9 aa, Homo sapiens
  Table A; HLA-A*02:01; TP53; C135F; 1
FQLAKTCPV

SEQ ID NO: 13076 - protein, 9 aa, Homo sapiens
  Table A; HLA-A*02:03; TP53; C135F; 0
FQLAKTCPV

SEQ ID NO: 13077 - protein, 9 aa, Homo sapiens
  Table A; HLA-B*13:02; TP53; C135F; 0
FQLAKTCPV

SEQ ID NO: 13078 - protein, 9 aa, Homo sapiens
  Table A; HLA-B*39:06; TP53; C135F; 0
FQLAKTCPV

SEQ ID NO: 13079 - protein, 9 aa, Homo sapiens
  Table A; HLA-B*39:06; CSMD3; R2601Q; 0
FQLVGKSSA

SEQ ID NO: 13080 - protein, 9 aa, Homo sapiens
  Table A; HLA-B*38:01; POLE; P286R; 1
FRDAETDQI

SEQ ID NO: 13081 - protein, 9 aa, Homo sapiens
  Table A; HLA-B*27:02; TP53; S215G; 0
FRHGVVVPY

SEQ ID NO: 13082 - protein, 9 aa, Homo sapiens
  Table A; HLA-B*27:05; TP53; S215G; 0
FRHGVVVPY

SEQ ID NO: 13083 - protein, 9 aa, Homo sapiens
  Table A; HLA-C*06:02; TP53; S215G; 1
FRHGVVVPY

SEQ ID NO: 13084 - protein, 9 aa, Homo sapiens
  Table A; HLA-C*07:02; TP53; S215G; 1
FRHGVVVPY

SEQ ID NO: 13085 - protein, 9 aa, Homo sapiens
  Table A; HLA-B*27:05; TP53; V216M; 0
FRHSMVVPY

SEQ ID NO: 13086 - protein, 9 aa, Homo sapiens
  Table A; HLA-C*07:02; TP53; V216M; 1
FRHSMVVPY

SEQ ID NO: 13087 - protein, 9 aa, Homo sapiens
  Table A; HLA-C*07:02; TP53; H214R; 1
FRRSVVVPY

SEQ ID NO: 13088 - protein, 9 aa, Homo sapiens
  Table A; HLA-A*02:01; RAC1; P29S; 1
FSGEYIPTV

SEQ ID NO: 13089 - protein, 9 aa, Homo sapiens
  Table A; HLA-A*02:03; RAC1; P29S; 0
FSGEYIPTV

SEQ ID NO: 13090 - protein, 9 aa, Homo sapiens
  Table A; HLA-A*02:04; RAC1; P29S; 0
FSGEYIPTV

SEQ ID NO: 13091 - protein, 9 aa, Homo sapiens
  Table A; HLA-A*02:05; RAC1; P29S; 0
FSGEYIPTV

SEQ ID NO: 13092 - protein, 9 aa, Homo sapiens
  Table A; HLA-A*02:06; RAC1; P29S; 0
FSGEYIPTV

SEQ ID NO: 13093 - protein, 9 aa, Homo sapiens
  Table A; HLA-A*02:07; RAC1; P29S; 0
FSGEYIPTV

SEQ ID NO: 13094 - protein, 9 aa, Homo sapiens
  Table A; HLA-A*30:01; RAC1; P29S; 0
FSGEYIPTV

SEQ ID NO: 13095 - protein, 9 aa, Homo sapiens
  Table A; HLA-A*68:01; RAC1; P29S; 1
FSGEYIPTV

SEQ ID NO: 13096 - protein, 9 aa, Homo sapiens
  Table A; HLA-A*68:02; RAC1; P29S; 0
FSGEYIPTV

SEQ ID NO: 13097 - protein, 9 aa, Homo sapiens
  Table A; HLA-B*13:02; RAC1; P29S; 1
FSGEYIPTV

SEQ ID NO: 13098 - protein, 9 aa, Homo sapiens
  Table A; HLA-B*15:02; RAC1; P29S; 0
FSGEYIPTV

SEQ ID NO: 13099 - protein, 9 aa, Homo sapiens
  Table A; HLA-B*35:02; RAC1; P29S; 0
FSGEYIPTV

SEQ ID NO: 13100 - protein, 9 aa, Homo sapiens
  Table A; HLA-B*35:03; RAC1; P29S; 0
FSGEYIPTV

SEQ ID NO: 13101 - protein, 9 aa, Homo sapiens
  Table A; HLA-B*40:02; RAC1; P29S; 0
FSGEYIPTV

SEQ ID NO: 13102 - protein, 9 aa, Homo sapiens
  Table A; HLA-B*48:01; RAC1; P29S; 0
FSGEYIPTV

SEQ ID NO: 13103 - protein, 9 aa, Homo sapiens
  Table A; HLA-B*49:01; RAC1; P29S; 0
FSGEYIPTV

SEQ ID NO: 13104 - protein, 9 aa, Homo sapiens
  Table A; HLA-B*50:01; RAC1; P29S; 0
FSGEYIPTV

SEQ ID NO: 13105 - protein, 9 aa, Homo sapiens
  Table A; HLA-B*51:01; RAC1; P29S; 1
FSGEYIPTV

SEQ ID NO: 13106 - protein, 9 aa, Homo sapiens
  Table A; HLA-B*54:01; RAC1; P29S; 0
FSGEYIPTV

SEQ ID NO: 13107 - protein, 9 aa, Homo sapiens
  Table A; HLA-B*58:01; RAC1; P29S; 0
FSGEYIPTV

SEQ ID NO: 13108 - protein, 9 aa, Homo sapiens
  Table A; HLA-C*02:02; RAC1; P29S; 1
FSGEYIPTV

SEQ ID NO: 13109 - protein, 9 aa, Homo sapiens
  Table A; HLA-C*08:01; RAC1; P29S; 0
FSGEYIPTV

SEQ ID NO: 13110 - protein, 9 aa, Homo sapiens
  Table A; HLA-C*12:03; RAC1; P29S; 1
FSGEYIPTV

SEQ ID NO: 13111 - protein, 9 aa, Homo sapiens
  Table A; HLA-C*15:02; RAC1; P29S; 1
FSGEYIPTV

SEQ ID NO: 13112 - protein, 9 aa, Homo sapiens
  Table A; HLA-C*16:01; RAC1; P29S; 1
FSGEYIPTV

SEQ ID NO: 13113 - protein, 9 aa, Homo sapiens
  Table A; HLA-C*16:02; RAC1; P29S; 0
FSGEYIPTV

SEQ ID NO: 13114 - protein, 9 aa, Homo sapiens
  Table A; HLA-C*16:04; RAC1; P29S; 0
FSGEYIPTV

SEQ ID NO: 13115 - protein, 10 aa, Homo sapiens
  Table A; HLA-A*02:03; RAC1; P29S; 0
FSGEYIPTVF

SEQ ID NO: 13116 - protein, 10 aa, Homo sapiens
  Table A; HLA-A*26:02; RAC1; P29S; 0
FSGEYIPTVF

SEQ ID NO: 13117 - protein, 10 aa, Homo sapiens
  Table A; HLA-A*30:01; RAC1; P29S; 0
FSGEYIPTVF

SEQ ID NO: 13118 - protein, 10 aa, Homo sapiens
  Table A; HLA-A*68:01; RAC1; P29S; 1
FSGEYIPTVF

SEQ ID NO: 13119 - protein, 10 aa, Homo sapiens
  Table A; HLA-A*68:02; RAC1; P29S; 0
FSGEYIPTVF

SEQ ID NO: 13120 - protein, 10 aa, Homo sapiens
  Table A; HLA-B*15:01; RAC1; P29S; 1
FSGEYIPTVF

SEQ ID NO: 13121 - protein, 10 aa, Homo sapiens
  Table A; HLA-B*27:02; RAC1; P29S; 0
FSGEYIPTVF

SEQ ID NO: 13122 - protein, 10 aa, Homo sapiens
  Table A; HLA-B*35:01; RAC1; P29S; 1
FSGEYIPTVF

SEQ ID NO: 13123 - protein, 10 aa, Homo sapiens
  Table A; HLA-B*40:02; RAC1; P29S; 0
FSGEYIPTVF

SEQ ID NO: 13124 - protein, 10 aa, Homo sapiens
  Table A; HLA-B*44:05; RAC1; P29S; 0
FSGEYIPTVF

SEQ ID NO: 13125 - protein, 10 aa, Homo sapiens
  Table A; HLA-B*48:01; RAC1; P29S; 0
FSGEYIPTVF

SEQ ID NO: 13126 - protein, 10 aa, Homo sapiens
  Table A; HLA-B*57:01; RAC1; P29S; 1
FSGEYIPTVF

SEQ ID NO: 13127 - protein, 10 aa, Homo sapiens
  Table A; HLA-B*58:01; RAC1; P29S; 0
FSGEYIPTVF

SEQ ID NO: 13128 - protein, 10 aa, Homo sapiens
  Table A; HLA-C*02:02; RAC1; P29S; 1
FSGEYIPTVF

SEQ ID NO: 13129 - protein, 10 aa, Homo sapiens
  Table A; HLA-C*08:03; RAC1; P29S; 0
FSGEYIPTVF

SEQ ID NO: 13130 - protein, 10 aa, Homo sapiens
  Table A; HLA-C*12:03; RAC1; P29S; 1
FSGEYIPTVF

SEQ ID NO: 13131 - protein, 10 aa, Homo sapiens
  Table A; HLA-C*16:01; RAC1; P29S; 1
FSGEYIPTVF

SEQ ID NO: 13132 - protein, 10 aa, Homo sapiens
  Table A; HLA-C*17:01; RAC1; P29S; 0
FSGEYIPTVF

SEQ ID NO: 13133 - protein, 10 aa, Homo sapiens
  Table A; HLA-A*01:01; PTPRB; R529Q; 1
FTDLVPGQKY

SEQ ID NO: 13134 - protein, 10 aa, Homo sapiens
  Table A; HLA-A*29:01; PTPRB; R529Q; 0
FTDLVPGQKY

SEQ ID NO: 13135 - protein, 10 aa, Homo sapiens
  Table A; HLA-A*29:02; PTPRB; R529Q; 0
FTDLVPGQKY

SEQ ID NO: 13136 - protein, 10 aa, Homo sapiens
  Table A; HLA-B*35:01; PTPRB; R529Q; 0
FTDLVPGQKY

SEQ ID NO: 13137 - protein, 10 aa, Homo sapiens
  Table A; HLA-B*35:08; PTPRB; R529Q; 0
FTDLVPGQKY

SEQ ID NO: 13138 - protein, 10 aa, Homo sapiens
  Table A; HLA-B*58:01; PTPRB; R529Q; 0
FTDLVPGQKY

SEQ ID NO: 13139 - protein, 10 aa, Homo sapiens
  Table A; HLA-C*03:02; PTPRB; R529Q; 0
FTDLVPGQKY

SEQ ID NO: 13140 - protein, 9 aa, Homo sapiens
  Table A; HLA-A*68:02; STAG2; R370Q; 0
FTSQFKDRI

SEQ ID NO: 13141 - protein, 10 aa, Homo sapiens
  Table A; HLA-A*68:02; STAG2; R370Q; 0
FTSQFKDRIV

SEQ ID NO: 13142 - protein, 10 aa, Homo sapiens
  Table A; HLA-C*15:02; STAG2; R370Q; 0
FTSQFKDRIV

SEQ ID NO: 13143 - protein, 9 aa, Homo sapiens
  Table A; HLA-A*02:04; SPOP; F133L; 0
FVQGKDWGL

SEQ ID NO: 13144 - protein, 9 aa, Homo sapiens
  Table A; HLA-A*02:05; SPOP; F133L; 0
FVQGKDWGL

SEQ ID NO: 13145 - protein, 9 aa, Homo sapiens
  Table A; HLA-A*02:06; SPOP; F133L; 0
FVQGKDWGL

SEQ ID NO: 13146 - protein, 9 aa, Homo sapiens
  Table A; HLA-A*02:08; SPOP; F133L; 0
FVQGKDWGL

SEQ ID NO: 13147 - protein, 9 aa, Homo sapiens
  Table A; HLA-A*02:04; SPOP; F133V; 0
FVQGKDWGV

SEQ ID NO: 13148 - protein, 9 aa, Homo sapiens
  Table A; HLA-A*02:05; SPOP; F133V; 0
FVQGKDWGV

SEQ ID NO: 13149 - protein, 9 aa, Homo sapiens
  Table A; HLA-A*02:06; SPOP; F133V; 0
FVQGKDWGV

SEQ ID NO: 13150 - protein, 9 aa, Homo sapiens
  Table A; HLA-A*02:08; SPOP; F133V; 0
FVQGKDWGV

SEQ ID NO: 13151 - protein, 8 aa, Homo sapiens
  Table A; HLA-A*33:03; DCAF12L2; R378H; 0
FYDIHAQK

SEQ ID NO: 13152 - protein, 8 aa, Homo sapiens
  Table A; HLA-C*04:01; DCAF12L2; R378H; 1
FYDIHAQK

SEQ ID NO: 13153 - protein, 9 aa, Homo sapiens
  Table A; HLA-A*02:07; DCAF12L2; R378H; 0
FYDIHAQKF

SEQ ID NO: 13154 - protein, 9 aa, Homo sapiens
  Table A; HLA-A*23:01; DCAF12L2; R378H; 0
FYDIHAQKF

SEQ ID NO: 13155 - protein, 9 aa, Homo sapiens
  Table A; HLA-A*24:02; DCAF12L2; R378H; 0
FYDIHAQKF

SEQ ID NO: 13156 - protein, 9 aa, Homo sapiens
  Table A; HLA-A*29:02; DCAF12L2; R378H; 0
FYDIHAQKF

SEQ ID NO: 13157 - protein, 9 aa, Homo sapiens
  Table A; HLA-C*04:01; DCAF12L2; R378H; 1
FYDIHAQKF

SEQ ID NO: 13158 - protein, 9 aa, Homo sapiens
  Table A; HLA-C*05:01; DCAF12L2; R378H; 0
FYDIHAQKF

SEQ ID NO: 13159 - protein, 9 aa, Homo sapiens
  Table A; HLA-C*07:02; DCAF12L2; R378H; 1
FYDIHAQKF

SEQ ID NO: 13160 - protein, 9 aa, Homo sapiens
  Table A; HLA-C*08:02; DCAF12L2; R378H; 0
FYDIHAQKF

SEQ ID NO: 13161 - protein, 9 aa, Homo sapiens
  Table A; HLA-C*14:02; DCAF12L2; R378H; 0
FYDIHAQKF

SEQ ID NO: 13162 - protein, 9 aa, Homo sapiens
  Table A; HLA-C*14:03; DCAF12L2; R378H; 0
FYDIHAQKF

SEQ ID NO: 13163 - protein, 10 aa, Homo sapiens
  Table A; HLA-A*02:03; MYCN; P44L; 0
FYFGGPDSTL

SEQ ID NO: 13164 - protein, 10 aa, Homo sapiens
  Table A; HLA-A*23:01; MYCN; P44L; 0
FYFGGPDSTL

SEQ ID NO: 13165 - protein, 10 aa, Homo sapiens
  Table A; HLA-A*24:02; MYCN; P44L; 1
FYFGGPDSTL

SEQ ID NO: 13166 - protein, 10 aa, Homo sapiens
  Table A; HLA-B*35:03; MYCN; P44L; 0
FYFGGPDSTL

SEQ ID NO: 13167 - protein, 10 aa, Homo sapiens
  Table A; HLA-B*48:01; MYCN; P44L; 0
FYFGGPDSTL

SEQ ID NO: 13168 - protein, 10 aa, Homo sapiens
  Table A; HLA-C*03:03; MYCN; P44L; 1
FYFGGPDSTL

SEQ ID NO: 13169 - protein, 10 aa, Homo sapiens
  Table A; HLA-C*03:04; MYCN; P44L; 1
FYFGGPDSTL

SEQ ID NO: 13170 - protein, 10 aa, Homo sapiens
  Table A; HLA-C*14:02; MYCN; P44L; 0
FYFGGPDSTL

SEQ ID NO: 13171 - protein, 10 aa, Homo sapiens
  Table A; HLA-C*14:03; MYCN; P44L; 0
FYFGGPDSTL

SEQ ID NO: 13172 - protein, 9 aa, Homo sapiens
  Table A; HLA-A*24:02; POLE; S297F; 0
FYMIDGQGY

SEQ ID NO: 13173 - protein, 9 aa, Homo sapiens
  Table A; HLA-A*29:01; POLE; S297F; 0
FYMIDGQGY

SEQ ID NO: 13174 - protein, 9 aa, Homo sapiens
  Table A; HLA-A*29:02; POLE; S297F; 0
FYMIDGQGY

SEQ ID NO: 13175 - protein, 9 aa, Homo sapiens
  Table A; HLA-B*15:01; POLE; S297F; 0
FYMIDGQGY

SEQ ID NO: 13176 - protein, 9 aa, Homo sapiens
  Table A; HLA-B*15:02; POLE; S297F; 0
FYMIDGQGY

SEQ ID NO: 13177 - protein, 9 aa, Homo sapiens
  Table A; HLA-B*15:03; POLE; S297F; 0
FYMIDGQGY

SEQ ID NO: 13178 - protein, 9 aa, Homo sapiens
  Table A; HLA-B*35:01; POLE; S297F; 0
FYMIDGQGY

SEQ ID NO: 13179 - protein, 9 aa, Homo sapiens
  Table A; HLA-B*39:01; POLE; S297F; 0
FYMIDGQGY

SEQ ID NO: 13180 - protein, 9 aa, Homo sapiens
  Table A; HLA-C*14:02; POLE; S297F; 0
FYMIDGQGY

SEQ ID NO: 13181 - protein, 9 aa, Homo sapiens
  Table A; HLA-C*14:03; POLE; S297F; 0
FYMIDGQGY

SEQ ID NO: 13182 - protein, 11 aa, Homo sapiens
  Table A; HLA-A*23:01; POLE; S297F; 0
FYMIDGQGYLI

SEQ ID NO: 13183 - protein, 11 aa, Homo sapiens
  Table A; HLA-A*24:02; POLE; S297F; 0
FYMIDGQGYLI

SEQ ID NO: 13184 - protein, 9 aa, Homo sapiens
  Table A; HLA-B*54:01; KRAS; G12A; 0
GAAGVGKSA

SEQ ID NO: 13185 - protein, 9 aa, Homo sapiens
  Table A; HLA-B*56:01; KRAS; G12A; 0
GAAGVGKSA

SEQ ID NO: 13186 - protein, 9 aa, Homo sapiens
  Table A; HLA-C*03:04; KRAS; G12A; 1
GAAGVGKSA

SEQ ID NO: 13187 - protein, 10 aa, Homo sapiens
  Table A; HLA-B*07:02; KRAS; G12A; 1
GAAGVGKSAL

SEQ ID NO: 13188 - protein, 10 aa, Homo sapiens
  Table A; HLA-B*15:01; KRAS; G12A; 1
GAAGVGKSAL

SEQ ID NO: 13189 - protein, 10 aa, Homo sapiens
  Table A; HLA-B*40:01; KRAS; G12A; 1
GAAGVGKSAL

SEQ ID NO: 13190 - protein, 10 aa, Homo sapiens
  Table A; HLA-B*40:02; KRAS; G12A; 0
GAAGVGKSAL

SEQ ID NO: 13191 - protein, 10 aa, Homo sapiens
  Table A; HLA-B*48:01; KRAS; G12A; 0
GAAGVGKSAL

SEQ ID NO: 13192 - protein, 10 aa, Homo sapiens
  Table A; HLA-C*01:02; KRAS; G12A; 1
GAAGVGKSAL

SEQ ID NO: 13193 - protein, 10 aa, Homo sapiens
  Table A; HLA-C*03:03; KRAS; G12A; 1
GAAGVGKSAL

SEQ ID NO: 13194 - protein, 10 aa, Homo sapiens
  Table A; HLA-C*03:04; KRAS; G12A; 1
GAAGVGKSAL

SEQ ID NO: 13195 - protein, 10 aa, Homo sapiens
  Table A; HLA-B*07:02; KRAS; G12C; 1
GACGVGKSAL

SEQ ID NO: 13196 - protein, 10 aa, Homo sapiens
  Table A; HLA-B*48:01; KRAS; G12C; 0
GACGVGKSAL

SEQ ID NO: 13197 - protein, 10 aa, Homo sapiens
  Table A; HLA-C*03:04; KRAS; G12C; 1
GACGVGKSAL

SEQ ID NO: 13198 - protein, 10 aa, Homo sapiens
  Table A; HLA-B*07:02; NRAS; G12C; 1
GACGVGKSAL

SEQ ID NO: 13199 - protein, 10 aa, Homo sapiens
  Table A; HLA-B*15:01; NRAS; G12C; 0
GACGVGKSAL

SEQ ID NO: 13200 - protein, 10 aa, Homo sapiens
  Table A; HLA-B*48:01; NRAS; G12C; 0
GACGVGKSAL

SEQ ID NO: 13201 - protein, 10 aa, Homo sapiens
  Table A; HLA-C*03:04; NRAS; G12C; 1
GACGVGKSAL

SEQ ID NO: 13202 - protein, 10 aa, Homo sapiens
  Table A; HLA-A*02:07; KRAS; G12D; 0
GADGVGKSAL

SEQ ID NO: 13203 - protein, 10 aa, Homo sapiens
  Table A; HLA-B*07:02; KRAS; G12D; 1
GADGVGKSAL

SEQ ID NO: 13204 - protein, 10 aa, Homo sapiens
  Table A; HLA-B*13:01; KRAS; G12D; 0
GADGVGKSAL

SEQ ID NO: 13205 - protein, 10 aa, Homo sapiens
  Table A; HLA-B*15:02; KRAS; G12D; 0
GADGVGKSAL

SEQ ID NO: 13206 - protein, 10 aa, Homo sapiens
  Table A; HLA-B*15:13; KRAS; G12D; 0
GADGVGKSAL

SEQ ID NO: 13207 - protein, 10 aa, Homo sapiens
  Table A; HLA-B*35:02; KRAS; G12D; 1
GADGVGKSAL

SEQ ID NO: 13208 - protein, 10 aa, Homo sapiens
  Table A; HLA-B*35:03; KRAS; G12D; 1
GADGVGKSAL

SEQ ID NO: 13209 - protein, 10 aa, Homo sapiens
  Table A; HLA-B*35:12; KRAS; G12D; 0
GADGVGKSAL

SEQ ID NO: 13210 - protein, 10 aa, Homo sapiens
  Table A; HLA-B*40:01; KRAS; G12D; 1
GADGVGKSAL

SEQ ID NO: 13211 - protein, 10 aa, Homo sapiens
  Table A; HLA-B*48:01; KRAS; G12D; 0
GADGVGKSAL

SEQ ID NO: 13212 - protein, 10 aa, Homo sapiens
  Table A; HLA-C*01:02; KRAS; G12D; 1
GADGVGKSAL

SEQ ID NO: 13213 - protein, 10 aa, Homo sapiens
  Table A; HLA-C*03:03; KRAS; G12D; 1
GADGVGKSAL

SEQ ID NO: 13214 - protein, 10 aa, Homo sapiens
  Table A; HLA-C*03:04; KRAS; G12D; 1
GADGVGKSAL

SEQ ID NO: 13215 - protein, 10 aa, Homo sapiens
  Table A; HLA-C*05:01; KRAS; G12D; 1
GADGVGKSAL

SEQ ID NO: 13216 - protein, 10 aa, Homo sapiens
  Table A; HLA-C*08:01; KRAS; G12D; 0
GADGVGKSAL

SEQ ID NO: 13217 - protein, 10 aa, Homo sapiens
  Table A; HLA-C*08:02; KRAS; G12D; 1
GADGVGKSAL

SEQ ID NO: 13218 - protein, 10 aa, Homo sapiens
  Table A; HLA-A*02:06; NRAS; G12D; 0
GADGVGKSAL

SEQ ID NO: 13219 - protein, 10 aa, Homo sapiens
  Table A; HLA-A*02:07; NRAS; G12D; 0
GADGVGKSAL

SEQ ID NO: 13220 - protein, 10 aa, Homo sapiens
  Table A; HLA-B*07:02; NRAS; G12D; 1
GADGVGKSAL

SEQ ID NO: 13221 - protein, 10 aa, Homo sapiens
  Table A; HLA-B*13:01; NRAS; G12D; 0
GADGVGKSAL

SEQ ID NO: 13222 - protein, 10 aa, Homo sapiens
  Table A; HLA-B*15:01; NRAS; G12D; 1
GADGVGKSAL

SEQ ID NO: 13223 - protein, 10 aa, Homo sapiens
  Table A; HLA-B*15:02; NRAS; G12D; 0
GADGVGKSAL

SEQ ID NO: 13224 - protein, 10 aa, Homo sapiens
  Table A; HLA-B*15:13; NRAS; G12D; 0
GADGVGKSAL

SEQ ID NO: 13225 - protein, 10 aa, Homo sapiens
  Table A; HLA-B*35:02; NRAS; G12D; 0
GADGVGKSAL

SEQ ID NO: 13226 - protein, 10 aa, Homo sapiens
  Table A; HLA-B*35:03; NRAS; G12D; 0
GADGVGKSAL

SEQ ID NO: 13227 - protein, 10 aa, Homo sapiens
  Table A; HLA-B*35:12; NRAS; G12D; 0
GADGVGKSAL

SEQ ID NO: 13228 - protein, 10 aa, Homo sapiens
  Table A; HLA-B*39:01; NRAS; G12D; 0
GADGVGKSAL

SEQ ID NO: 13229 - protein, 10 aa, Homo sapiens
  Table A; HLA-B*40:01; NRAS; G12D; 1
GADGVGKSAL

SEQ ID NO: 13230 - protein, 10 aa, Homo sapiens
  Table A; HLA-B*44:05; NRAS; G12D; 0
GADGVGKSAL

SEQ ID NO: 13231 - protein, 10 aa, Homo sapiens
  Table A; HLA-B*48:01; NRAS; G12D; 0
GADGVGKSAL

SEQ ID NO: 13232 - protein, 10 aa, Homo sapiens
  Table A; HLA-C*01:02; NRAS; G12D; 0
GADGVGKSAL

SEQ ID NO: 13233 - protein, 10 aa, Homo sapiens
  Table A; HLA-C*03:03; NRAS; G12D; 0
GADGVGKSAL

SEQ ID NO: 13234 - protein, 10 aa, Homo sapiens
  Table A; HLA-C*03:04; NRAS; G12D; 1
GADGVGKSAL

SEQ ID NO: 13235 - protein, 10 aa, Homo sapiens
  Table A; HLA-C*05:01; NRAS; G12D; 1
GADGVGKSAL

SEQ ID NO: 13236 - protein, 10 aa, Homo sapiens
  Table A; HLA-C*08:01; NRAS; G12D; 0
GADGVGKSAL

SEQ ID NO: 13237 - protein, 10 aa, Homo sapiens
  Table A; HLA-C*08:02; NRAS; G12D; 0
GADGVGKSAL

SEQ ID NO: 13238 - protein, 10 aa, Homo sapiens
  Table A; HLA-B*07:02; KRAS; G13D; 1
GAGDVGKSAL

SEQ ID NO: 13239 - protein, 10 aa, Homo sapiens
  Table A; HLA-B*48:01; KRAS; G13D; 0
GAGDVGKSAL

SEQ ID NO: 13240 - protein, 10 aa, Homo sapiens
  Table A; HLA-C*01:02; KRAS; G13D; 1
GAGDVGKSAL

SEQ ID NO: 13241 - protein, 10 aa, Homo sapiens
  Table A; HLA-A*30:01; KRAS; G12R; 1
GARGVGKSAL

SEQ ID NO: 13242 - protein, 10 aa, Homo sapiens
  Table A; HLA-B*07:02; KRAS; G12R; 1
GARGVGKSAL

SEQ ID NO: 13243 - protein, 8 aa, Homo sapiens
  Table A; HLA-B*15:01; CDKN2A; D108Y; 1
GARLDVRY

SEQ ID NO: 13244 - protein, 8 aa, Homo sapiens
  Table A; HLA-B*57:01; CDKN2A; D108Y; 0
GARLDVRY

SEQ ID NO: 13245 - protein, 10 aa, Homo sapiens
  Table A; HLA-B*57:01; CDKN2A; D108Y; 0
GARLDVRYAW

SEQ ID NO: 13246 - protein, 11 aa, Homo sapiens
  Table A; HLA-C*16:01; DNAJB1; E18K; 0
GASDKEIKRAY

SEQ ID NO: 13247 - protein, 9 aa, Homo sapiens
  Table A; HLA-C*03:04; KRAS; G12S; 1
GASGVGKSA

SEQ ID NO: 13248 - protein, 10 aa, Homo sapiens
  Table A; HLA-B*07:02; KRAS; G12S; 1
GASGVGKSAL

SEQ ID NO: 13249 - protein, 10 aa, Homo sapiens
  Table A; HLA-B*15:01; KRAS; G12S; 1
GASGVGKSAL

SEQ ID NO: 13250 - protein, 10 aa, Homo sapiens
  Table A; HLA-B*40:01; KRAS; G12S; 1
GASGVGKSAL

SEQ ID NO: 13251 - protein, 10 aa, Homo sapiens
  Table A; HLA-B*48:01; KRAS; G12S; 0
GASGVGKSAL

SEQ ID NO: 13252 - protein, 10 aa, Homo sapiens
  Table A; HLA-C*01:02; KRAS; G12S; 0
GASGVGKSAL

SEQ ID NO: 13253 - protein, 10 aa, Homo sapiens
  Table A; HLA-C*03:04; KRAS; G12S; 1
GASGVGKSAL

SEQ ID NO: 13254 - protein, 9 aa, Homo sapiens
  Table A; HLA-A*02:01; CTNNB1; T41A; 1
GATATAPSL

SEQ ID NO: 13255 - protein, 9 aa, Homo sapiens
  Table A; HLA-A*02:04; CTNNB1; T41A; 0
GATATAPSL

SEQ ID NO: 13256 - protein, 9 aa, Homo sapiens
  Table A; HLA-A*02:05; CTNNB1; T41A; 0
GATATAPSL

SEQ ID NO: 13257 - protein, 9 aa, Homo sapiens
  Table A; HLA-A*02:06; CTNNB1; T41A; 0
GATATAPSL

SEQ ID NO: 13258 - protein, 9 aa, Homo sapiens
  Table A; HLA-A*11:01; CTNNB1; T41A; 1
GATATAPSL

SEQ ID NO: 13259 - protein, 9 aa, Homo sapiens
  Table A; HLA-A*30:01; CTNNB1; T41A; 1
GATATAPSL

SEQ ID NO: 13260 - protein, 9 aa, Homo sapiens
  Table A; HLA-A*68:02; CTNNB1; T41A; 0
GATATAPSL

SEQ ID NO: 13261 - protein, 9 aa, Homo sapiens
  Table A; HLA-B*07:02; CTNNB1; T41A; 1
GATATAPSL

SEQ ID NO: 13262 - protein, 9 aa, Homo sapiens
  Table A; HLA-B*13:01; CTNNB1; T41A; 0
GATATAPSL

SEQ ID NO: 13263 - protein, 9 aa, Homo sapiens
  Table A; HLA-B*13:02; CTNNB1; T41A; 1
GATATAPSL

SEQ ID NO: 13264 - protein, 9 aa, Homo sapiens
  Table A; HLA-B*15:01; CTNNB1; T41A; 1
GATATAPSL

SEQ ID NO: 13265 - protein, 9 aa, Homo sapiens
  Table A; HLA-B*15:02; CTNNB1; T41A; 0
GATATAPSL

SEQ ID NO: 13266 - protein, 9 aa, Homo sapiens
  Table A; HLA-B*15:10; CTNNB1; T41A; 0
GATATAPSL

SEQ ID NO: 13267 - protein, 9 aa, Homo sapiens
  Table A; HLA-B*15:13; CTNNB1; T41A; 0
GATATAPSL

SEQ ID NO: 13268 - protein, 9 aa, Homo sapiens
  Table A; HLA-B*35:01; CTNNB1; T41A; 1
GATATAPSL

SEQ ID NO: 13269 - protein, 9 aa, Homo sapiens
  Table A; HLA-B*35:02; CTNNB1; T41A; 1
GATATAPSL

SEQ ID NO: 13270 - protein, 9 aa, Homo sapiens
  Table A; HLA-B*35:03; CTNNB1; T41A; 1
GATATAPSL

SEQ ID NO: 13271 - protein, 9 aa, Homo sapiens
  Table A; HLA-B*35:12; CTNNB1; T41A; 0
GATATAPSL

SEQ ID NO: 13272 - protein, 9 aa, Homo sapiens
  Table A; HLA-B*38:01; CTNNB1; T41A; 1
GATATAPSL

SEQ ID NO: 13273 - protein, 9 aa, Homo sapiens
  Table A; HLA-B*39:01; CTNNB1; T41A; 1
GATATAPSL

SEQ ID NO: 13274 - protein, 9 aa, Homo sapiens
  Table A; HLA-B*40:01; CTNNB1; T41A; 1
GATATAPSL

SEQ ID NO: 13275 - protein, 9 aa, Homo sapiens
  Table A; HLA-B*40:02; CTNNB1; T41A; 1
GATATAPSL

SEQ ID NO: 13276 - protein, 9 aa, Homo sapiens
  Table A; HLA-B*41:02; CTNNB1; T41A; 0
GATATAPSL

SEQ ID NO: 13277 - protein, 9 aa, Homo sapiens
  Table A; HLA-B*44:05; CTNNB1; T41A; 0
GATATAPSL

SEQ ID NO: 13278 - protein, 9 aa, Homo sapiens
  Table A; HLA-B*46:01; CTNNB1; T41A; 0
GATATAPSL

SEQ ID NO: 13279 - protein, 9 aa, Homo sapiens
  Table A; HLA-B*48:01; CTNNB1; T41A; 0
GATATAPSL

SEQ ID NO: 13280 - protein, 9 aa, Homo sapiens
  Table A; HLA-B*51:01; CTNNB1; T41A; 1
GATATAPSL

SEQ ID NO: 13281 - protein, 9 aa, Homo sapiens
  Table A; HLA-B*58:01; CTNNB1; T41A; 0
GATATAPSL

SEQ ID NO: 13282 - protein, 9 aa, Homo sapiens
  Table A; HLA-C*02:02; CTNNB1; T41A; 1
GATATAPSL

SEQ ID NO: 13283 - protein, 9 aa, Homo sapiens
  Table A; HLA-C*03:03; CTNNB1; T41A; 1
GATATAPSL

SEQ ID NO: 13284 - protein, 9 aa, Homo sapiens
  Table A; HLA-C*03:04; CTNNB1; T41A; 1
GATATAPSL

SEQ ID NO: 13285 - protein, 9 aa, Homo sapiens
  Table A; HLA-C*08:01; CTNNB1; T41A; 0
GATATAPSL

SEQ ID NO: 13286 - protein, 9 aa, Homo sapiens
  Table A; HLA-C*08:03; CTNNB1; T41A; 0
GATATAPSL

SEQ ID NO: 13287 - protein, 9 aa, Homo sapiens
  Table A; HLA-C*12:03; CTNNB1; T41A; 1
GATATAPSL

SEQ ID NO: 13288 - protein, 9 aa, Homo sapiens
  Table A; HLA-C*15:02; CTNNB1; T41A; 1
GATATAPSL

SEQ ID NO: 13289 - protein, 9 aa, Homo sapiens
  Table A; HLA-C*16:01; CTNNB1; T41A; 1
GATATAPSL

SEQ ID NO: 13290 - protein, 9 aa, Homo sapiens
  Table A; HLA-C*16:02; CTNNB1; T41A; 0
GATATAPSL

SEQ ID NO: 13291 - protein, 9 aa, Homo sapiens
  Table A; HLA-C*16:04; CTNNB1; T41A; 0
GATATAPSL

SEQ ID NO: 13292 - protein, 9 aa, Homo sapiens
  Table A; HLA-C*17:01; CTNNB1; T41A; 0
GATATAPSL

SEQ ID NO: 13293 - protein, 10 aa, Homo sapiens
  Table A; HLA-B*48:01; CTNNB1; T41A; 0
GATATAPSLS

SEQ ID NO: 13294 - protein, 9 aa, Homo sapiens
  Table A; HLA-A*02:01; CTNNB1; T41I; 1
GATITAPSL

SEQ ID NO: 13295 - protein, 9 aa, Homo sapiens
  Table A; HLA-A*02:04; CTNNB1; T41I; 0
GATITAPSL

SEQ ID NO: 13296 - protein, 9 aa, Homo sapiens
  Table A; HLA-A*02:05; CTNNB1; T41I; 0
GATITAPSL

SEQ ID NO: 13297 - protein, 9 aa, Homo sapiens
  Table A; HLA-A*02:06; CTNNB1; T41I; 0
GATITAPSL

SEQ ID NO: 13298 - protein, 9 aa, Homo sapiens
  Table A; HLA-A*30:01; CTNNB1; T41I; 0
GATITAPSL

SEQ ID NO: 13299 - protein, 9 aa, Homo sapiens
  Table A; HLA-B*07:02; CTNNB1; T41I; 1
GATITAPSL

SEQ ID NO: 13300 - protein, 9 aa, Homo sapiens
  Table A; HLA-B*13:02; CTNNB1; T41I; 0
GATITAPSL

SEQ ID NO: 13301 - protein, 9 aa, Homo sapiens
  Table A; HLA-B*15:01; CTNNB1; T41I; 1
GATITAPSL

SEQ ID NO: 13302 - protein, 9 aa, Homo sapiens
  Table A; HLA-B*15:10; CTNNB1; T41I; 0
GATITAPSL

SEQ ID NO: 13303 - protein, 9 aa, Homo sapiens
  Table A; HLA-B*35:01; CTNNB1; T41I; 1
GATITAPSL

SEQ ID NO: 13304 - protein, 9 aa, Homo sapiens
  Table A; HLA-B*35:02; CTNNB1; T41I; 0
GATITAPSL

SEQ ID NO: 13305 - protein, 9 aa, Homo sapiens
  Table A; HLA-B*35:03; CTNNB1; T41I; 0
GATITAPSL

SEQ ID NO: 13306 - protein, 9 aa, Homo sapiens
  Table A; HLA-B*39:01; CTNNB1; T41I; 0
GATITAPSL

SEQ ID NO: 13307 - protein, 9 aa, Homo sapiens
  Table A; HLA-B*40:01; CTNNB1; T41I; 1
GATITAPSL

SEQ ID NO: 13308 - protein, 9 aa, Homo sapiens
  Table A; HLA-B*40:02; CTNNB1; T41I; 0
GATITAPSL

SEQ ID NO: 13309 - protein, 9 aa, Homo sapiens
  Table A; HLA-B*41:02; CTNNB1; T41I; 0
GATITAPSL

SEQ ID NO: 13310 - protein, 9 aa, Homo sapiens
  Table A; HLA-B*44:05; CTNNB1; T41I; 0
GATITAPSL

SEQ ID NO: 13311 - protein, 9 aa, Homo sapiens
  Table A; HLA-B*46:01; CTNNB1; T41I; 0
GATITAPSL

SEQ ID NO: 13312 - protein, 9 aa, Homo sapiens
  Table A; HLA-B*48:01; CTNNB1; T41I; 0
GATITAPSL

SEQ ID NO: 13313 - protein, 9 aa, Homo sapiens
  Table A; HLA-B*58:01; CTNNB1; T41I; 0
GATITAPSL

SEQ ID NO: 13314 - protein, 9 aa, Homo sapiens
  Table A; HLA-C*03:03; CTNNB1; T41I; 1
GATITAPSL

SEQ ID NO: 13315 - protein, 9 aa, Homo sapiens
  Table A; HLA-C*03:04; CTNNB1; T41I; 1
GATITAPSL

SEQ ID NO: 13316 - protein, 9 aa, Homo sapiens
  Table A; HLA-C*08:01; CTNNB1; T41I; 0
GATITAPSL

SEQ ID NO: 13317 - protein, 9 aa, Homo sapiens
  Table A; HLA-C*08:03; CTNNB1; T41I; 0
GATITAPSL

SEQ ID NO: 13318 - protein, 9 aa, Homo sapiens
  Table A; HLA-C*16:01; CTNNB1; T41I; 1
GATITAPSL

SEQ ID NO: 13319 - protein, 9 aa, Homo sapiens
  Table A; HLA-C*16:02; CTNNB1; T41I; 0
GATITAPSL

SEQ ID NO: 13320 - protein, 9 aa, Homo sapiens
  Table A; HLA-C*17:01; CTNNB1; T41I; 0
GATITAPSL

SEQ ID NO: 13321 - protein, 9 aa, Homo sapiens
  Table A; HLA-A*02:01; CTNNB1; S45F; 1
GATTTAPFL

SEQ ID NO: 13322 - protein, 9 aa, Homo sapiens
  Table A; HLA-A*02:04; CTNNB1; S45F; 0
GATTTAPFL

SEQ ID NO: 13323 - protein, 9 aa, Homo sapiens
  Table A; HLA-A*02:05; CTNNB1; S45F; 0
GATTTAPFL

SEQ ID NO: 13324 - protein, 9 aa, Homo sapiens
  Table A; HLA-A*02:06; CTNNB1; S45F; 0
GATTTAPFL

SEQ ID NO: 13325 - protein, 9 aa, Homo sapiens
  Table A; HLA-A*11:01; CTNNB1; S45F; 1
GATTTAPFL

SEQ ID NO: 13326 - protein, 9 aa, Homo sapiens
  Table A; HLA-A*30:01; CTNNB1; S45F; 0
GATTTAPFL

SEQ ID NO: 13327 - protein, 9 aa, Homo sapiens
  Table A; HLA-A*68:02; CTNNB1; S45F; 0
GATTTAPFL

SEQ ID NO: 13328 - protein, 9 aa, Homo sapiens
  Table A; HLA-B*13:02; CTNNB1; S45F; 0
GATTTAPFL

SEQ ID NO: 13329 - protein, 9 aa, Homo sapiens
  Table A; HLA-B*15:10; CTNNB1; S45F; 0
GATTTAPFL

SEQ ID NO: 13330 - protein, 9 aa, Homo sapiens
  Table A; HLA-B*27:05; CTNNB1; S45F; 0
GATTTAPFL

SEQ ID NO: 13331 - protein, 9 aa, Homo sapiens
  Table A; HLA-B*35:01; CTNNB1; S45F; 1
GATTTAPFL

SEQ ID NO: 13332 - protein, 9 aa, Homo sapiens
  Table A; HLA-B*35:03; CTNNB1; S45F; 0
GATTTAPFL

SEQ ID NO: 13333 - protein, 9 aa, Homo sapiens
  Table A; HLA-B*38:01; CTNNB1; S45F; 0
GATTTAPFL

SEQ ID NO: 13334 - protein, 9 aa, Homo sapiens
  Table A; HLA-B*39:01; CTNNB1; S45F; 0
GATTTAPFL

SEQ ID NO: 13335 - protein, 9 aa, Homo sapiens
  Table A; HLA-B*40:01; CTNNB1; S45F; 1
GATTTAPFL

SEQ ID NO: 13336 - protein, 9 aa, Homo sapiens
  Table A; HLA-B*40:02; CTNNB1; S45F; 0
GATTTAPFL

SEQ ID NO: 13337 - protein, 9 aa, Homo sapiens
  Table A; HLA-B*44:05; CTNNB1; S45F; 0
GATTTAPFL

SEQ ID NO: 13338 - protein, 9 aa, Homo sapiens
  Table A; HLA-B*48:01; CTNNB1; S45F; 0
GATTTAPFL

SEQ ID NO: 13339 - protein, 9 aa, Homo sapiens
  Table A; HLA-B*50:01; CTNNB1; S45F; 0
GATTTAPFL

SEQ ID NO: 13340 - protein, 9 aa, Homo sapiens
  Table A; HLA-B*58:01; CTNNB1; S45F; 0
GATTTAPFL

SEQ ID NO: 13341 - protein, 9 aa, Homo sapiens
  Table A; HLA-C*03:03; CTNNB1; S45F; 1
GATTTAPFL

SEQ ID NO: 13342 - protein, 9 aa, Homo sapiens
  Table A; HLA-C*03:04; CTNNB1; S45F; 1
GATTTAPFL

SEQ ID NO: 13343 - protein, 9 aa, Homo sapiens
  Table A; HLA-C*08:01; CTNNB1; S45F; 0
GATTTAPFL

SEQ ID NO: 13344 - protein, 9 aa, Homo sapiens
  Table A; HLA-C*08:03; CTNNB1; S45F; 0
GATTTAPFL

SEQ ID NO: 13345 - protein, 9 aa, Homo sapiens
  Table A; HLA-C*16:01; CTNNB1; S45F; 0
GATTTAPFL

SEQ ID NO: 13346 - protein, 9 aa, Homo sapiens
  Table A; HLA-C*16:02; CTNNB1; S45F; 0
GATTTAPFL

SEQ ID NO: 13347 - protein, 9 aa, Homo sapiens
  Table A; HLA-C*17:01; CTNNB1; S45F; 0
GATTTAPFL

SEQ ID NO: 13348 - protein, 9 aa, Homo sapiens
  Table A; HLA-A*02:06; CTNNB1; S45P; 0
GATTTAPPL

SEQ ID NO: 13349 - protein, 9 aa, Homo sapiens
  Table A; HLA-A*11:01; CTNNB1; S45P; 1
GATTTAPPL

SEQ ID NO: 13350 - protein, 9 aa, Homo sapiens
  Table A; HLA-A*30:01; CTNNB1; S45P; 1
GATTTAPPL

SEQ ID NO: 13351 - protein, 9 aa, Homo sapiens
  Table A; HLA-A*31:01; CTNNB1; S45P; 1
GATTTAPPL

SEQ ID NO: 13352 - protein, 9 aa, Homo sapiens
  Table A; HLA-A*68:01; CTNNB1; S45P; 1
GATTTAPPL

SEQ ID NO: 13353 - protein, 9 aa, Homo sapiens
  Table A; HLA-A*68:02; CTNNB1; S45P; 0
GATTTAPPL

SEQ ID NO: 13354 - protein, 9 aa, Homo sapiens
  Table A; HLA-B*07:02; CTNNB1; S45P; 1
GATTTAPPL

SEQ ID NO: 13355 - protein, 9 aa, Homo sapiens
  Table A; HLA-B*13:02; CTNNB1; S45P; 1
GATTTAPPL

SEQ ID NO: 13356 - protein, 9 aa, Homo sapiens
  Table A; HLA-B*15:01; CTNNB1; S45P; 1
GATTTAPPL

SEQ ID NO: 13357 - protein, 9 aa, Homo sapiens
  Table A; HLA-B*15:10; CTNNB1; S45P; 0
GATTTAPPL

SEQ ID NO: 13358 - protein, 9 aa, Homo sapiens
  Table A; HLA-B*35:01; CTNNB1; S45P; 1
GATTTAPPL

SEQ ID NO: 13359 - protein, 9 aa, Homo sapiens
  Table A; HLA-B*35:02; CTNNB1; S45P; 0
GATTTAPPL

SEQ ID NO: 13360 - protein, 9 aa, Homo sapiens
  Table A; HLA-B*35:03; CTNNB1; S45P; 1
GATTTAPPL

SEQ ID NO: 13361 - protein, 9 aa, Homo sapiens
  Table A; HLA-B*35:12; CTNNB1; S45P; 0
GATTTAPPL

SEQ ID NO: 13362 - protein, 9 aa, Homo sapiens
  Table A; HLA-B*39:01; CTNNB1; S45P; 0
GATTTAPPL

SEQ ID NO: 13363 - protein, 9 aa, Homo sapiens
  Table A; HLA-B*40:01; CTNNB1; S45P; 1
GATTTAPPL

SEQ ID NO: 13364 - protein, 9 aa, Homo sapiens
  Table A; HLA-B*40:02; CTNNB1; S45P; 0
GATTTAPPL

SEQ ID NO: 13365 - protein, 9 aa, Homo sapiens
  Table A; HLA-B*44:05; CTNNB1; S45P; 0
GATTTAPPL

SEQ ID NO: 13366 - protein, 9 aa, Homo sapiens
  Table A; HLA-B*46:01; CTNNB1; S45P; 0
GATTTAPPL

SEQ ID NO: 13367 - protein, 9 aa, Homo sapiens
  Table A; HLA-B*48:01; CTNNB1; S45P; 0
GATTTAPPL

SEQ ID NO: 13368 - protein, 9 aa, Homo sapiens
  Table A; HLA-B*58:01; CTNNB1; S45P; 0
GATTTAPPL

SEQ ID NO: 13369 - protein, 9 aa, Homo sapiens
  Table A; HLA-C*03:03; CTNNB1; S45P; 1
GATTTAPPL

SEQ ID NO: 13370 - protein, 9 aa, Homo sapiens
  Table A; HLA-C*03:04; CTNNB1; S45P; 1
GATTTAPPL

SEQ ID NO: 13371 - protein, 9 aa, Homo sapiens
  Table A; HLA-C*08:01; CTNNB1; S45P; 0
GATTTAPPL

SEQ ID NO: 13372 - protein, 9 aa, Homo sapiens
  Table A; HLA-C*08:03; CTNNB1; S45P; 0
GATTTAPPL

SEQ ID NO: 13373 - protein, 9 aa, Homo sapiens
  Table A; HLA-C*17:01; CTNNB1; S45P; 0
GATTTAPPL

SEQ ID NO: 13374 - protein, 9 aa, Homo sapiens
  Table A; HLA-A*02:05; KRAS; G12V; 1
GAVGVGKSA

SEQ ID NO: 13375 - protein, 9 aa, Homo sapiens
  Table A; HLA-B*54:01; KRAS; G12V; 0
GAVGVGKSA

SEQ ID NO: 13376 - protein, 9 aa, Homo sapiens
  Table A; HLA-B*56:01; KRAS; G12V; 1
GAVGVGKSA

SEQ ID NO: 13377 - protein, 9 aa, Homo sapiens
  Table A; HLA-C*03:04; KRAS; G12V; 1
GAVGVGKSA

SEQ ID NO: 13378 - protein, 10 aa, Homo sapiens
  Table A; HLA-A*02:06; KRAS; G12V; 1
GAVGVGKSAL

SEQ ID NO: 13379 - protein, 10 aa, Homo sapiens
  Table A; HLA-B*07:02; KRAS; G12V; 1
GAVGVGKSAL

SEQ ID NO: 13380 - protein, 10 aa, Homo sapiens
  Table A; HLA-B*15:01; KRAS; G12V; 1
GAVGVGKSAL

SEQ ID NO: 13381 - protein, 10 aa, Homo sapiens
  Table A; HLA-B*40:01; KRAS; G12V; 1
GAVGVGKSAL

SEQ ID NO: 13382 - protein, 10 aa, Homo sapiens
  Table A; HLA-B*40:02; KRAS; G12V; 1
GAVGVGKSAL

SEQ ID NO: 13383 - protein, 10 aa, Homo sapiens
  Table A; HLA-B*48:01; KRAS; G12V; 0
GAVGVGKSAL

SEQ ID NO: 13384 - protein, 10 aa, Homo sapiens
  Table A; HLA-C*03:03; KRAS; G12V; 1
GAVGVGKSAL

SEQ ID NO: 13385 - protein, 10 aa, Homo sapiens
  Table A; HLA-C*03:04; KRAS; G12V; 1
GAVGVGKSAL

SEQ ID NO: 13386 - protein, 10 aa, Homo sapiens
  Table A; HLA-C*08:01; KRAS; G12V; 0
GAVGVGKSAL

SEQ ID NO: 13387 - protein, 9 aa, Homo sapiens
  Table A; HLA-B*15:01; IDH1; R132C; 1
GCHAYGDQY

SEQ ID NO: 13388 - protein, 10 aa, Homo sapiens
  Table A; HLA-B*13:02; KRAS; G13C; 0
GCVGKSALTI

SEQ ID NO: 13389 - protein, 9 aa, Homo sapiens
  Table A; HLA-A*11:01; BRAF; V600E; 1
GDFGLATEK

SEQ ID NO: 13390 - protein, 9 aa, Homo sapiens
  Table A; HLA-B*27:02; BRAF; V600E; 1
GDFGLATEK

SEQ ID NO: 13391 - protein, 8 aa, Homo sapiens
  Table A; HLA-B*40:02; NFE2L2; E82D; 0
GDFLPIQP

SEQ ID NO: 13392 - protein, 8 aa, Homo sapiens
  Table A; HLA-B*40:06; NFE2L2; E82D; 0
GDFLPIQP

SEQ ID NO: 13393 - protein, 8 aa, Homo sapiens
  Table A; HLA-B*48:01; NFE2L2; E82D; 0
GDFLPIQP

SEQ ID NO: 13394 - protein, 9 aa, Homo sapiens
  Table A; HLA-A*02:05; NFE2L2; E82D; 0
GDFLPIQPA

SEQ ID NO: 13395 - protein, 9 aa, Homo sapiens
  Table A; HLA-B*40:02; NFE2L2; E82D; 0
GDFLPIQPA

SEQ ID NO: 13396 - protein, 9 aa, Homo sapiens
  Table A; HLA-B*40:06; NFE2L2; E82D; 0
GDFLPIQPA

SEQ ID NO: 13397 - protein, 9 aa, Homo sapiens
  Table A; HLA-B*50:01; NFE2L2; E82D; 0
GDFLPIQPA

SEQ ID NO: 13398 - protein, 9 aa, Homo sapiens
  Table A; HLA-A*03:01; PTPRT; E324K; 1
GDGPIILKK

SEQ ID NO: 13399 - protein, 9 aa, Homo sapiens
  Table A; HLA-A*11:01; PTPRT; E324K; 1
GDGPIILKK

SEQ ID NO: 13400 - protein, 9 aa, Homo sapiens
  Table A; HLA-B*27:02; PTPRT; E324K; 0
GDGPIILKK

SEQ ID NO: 13401 - protein, 9 aa, Homo sapiens
  Table A; HLA-B*37:01; TP53; G245D; 0
GDMNRRPIL

SEQ ID NO: 13402 - protein, 9 aa, Homo sapiens
  Table A; HLA-B*41:02; TP53; G245D; 0
GDMNRRPIL

SEQ ID NO: 13403 - protein, 11 aa, Homo sapiens
  Table A; HLA-B*40:02; ARHGEF12; R705H; 0
GDTLDGTPHTL

SEQ ID NO: 13404 - protein, 8 aa, Homo sapiens
  Table A; HLA-B*07:02; KRAS; G13D; 1
GDVGKSAL

SEQ ID NO: 13405 - protein, 8 aa, Homo sapiens
  Table A; HLA-B*40:02; KRAS; G13D; 0
GDVGKSAL

SEQ ID NO: 13406 - protein, 8 aa, Homo sapiens
  Table A; HLA-B*41:02; KRAS; G13D; 0
GDVGKSAL

SEQ ID NO: 13407 - protein, 8 aa, Homo sapiens
  Table A; HLA-B*48:01; KRAS; G13D; 0
GDVGKSAL

SEQ ID NO: 13408 - protein, 9 aa, Homo sapiens
  Table A; HLA-C*08:03; KRAS; G13D; 0
GDVGKSALT

SEQ ID NO: 13409 - protein, 10 aa, Homo sapiens
  Table A; HLA-B*13:02; KRAS; G13D; 1
GDVGKSALTI

SEQ ID NO: 13410 - protein, 10 aa, Homo sapiens
  Table A; HLA-B*40:02; KRAS; G13D; 0
GDVGKSALTI

SEQ ID NO: 13411 - protein, 8 aa, Homo sapiens
  Table A; HLA-B*49:01; PTPRD; R561Q; 0
GEEQQITI

SEQ ID NO: 13412 - protein, 8 aa, Homo sapiens
  Table A; HLA-B*40:01; NFE2L2; D77G; 0
GEETGEFL

SEQ ID NO: 13413 - protein, 8 aa, Homo sapiens
  Table A; HLA-B*40:02; NFE2L2; D77G; 0
GEETGEFL

SEQ ID NO: 13414 - protein, 10 aa, Homo sapiens
  Table A; HLA-B*40:01; NFE2L2; D77G; 0
GEETGEFLPI

SEQ ID NO: 13415 - protein, 10 aa, Homo sapiens
  Table A; HLA-B*40:02; NFE2L2; D77G; 0
GEETGEFLPI

SEQ ID NO: 13416 - protein, 10 aa, Homo sapiens
  Table A; HLA-B*44:05; NFE2L2; D77G; 0
GEETGEFLPI

SEQ ID NO: 13417 - protein, 10 aa, Homo sapiens
  Table A; HLA-B*49:01; NFE2L2; D77G; 0
GEETGEFLPI

SEQ ID NO: 13418 - protein, 9 aa, Homo sapiens
  Table A; HLA-B*13:01; PTPRD; R561Q; 0
GEHGEEQQI

SEQ ID NO: 13419 - protein, 9 aa, Homo sapiens
  Table A; HLA-B*40:01; PTPRD; R561Q; 0
GEHGEEQQI

SEQ ID NO: 13420 - protein, 9 aa, Homo sapiens
  Table A; HLA-B*40:02; PTPRD; R561Q; 0
GEHGEEQQI

SEQ ID NO: 13421 - protein, 9 aa, Homo sapiens
  Table A; HLA-B*41:02; PTPRD; R561Q; 0
GEHGEEQQI

SEQ ID NO: 13422 - protein, 9 aa, Homo sapiens
  Table A; HLA-B*44:03; PTPRD; R561Q; 0
GEHGEEQQI

SEQ ID NO: 13423 - protein, 9 aa, Homo sapiens
  Table A; HLA-B*44:05; PTPRD; R561Q; 0
GEHGEEQQI

SEQ ID NO: 13424 - protein, 9 aa, Homo sapiens
  Table A; HLA-B*49:01; PTPRD; R561Q; 0
GEHGEEQQI

SEQ ID NO: 13425 - protein, 11 aa, Homo sapiens
  Table A; HLA-B*40:01; PTPRD; R561Q; 0
GEHGEEQQITI

SEQ ID NO: 13426 - protein, 11 aa, Homo sapiens
  Table A; HLA-B*40:02; PTPRD; R561Q; 0
GEHGEEQQITI

SEQ ID NO: 13427 - protein, 11 aa, Homo sapiens
  Table A; HLA-B*44:05; PTPRD; R561Q; 0
GEHGEEQQITI

SEQ ID NO: 13428 - protein, 11 aa, Homo sapiens
  Table A; HLA-B*49:01; PTPRD; R561Q; 0
GEHGEEQQITI

SEQ ID NO: 13429 - protein, 9 aa, Homo sapiens
  Table A; HLA-A*02:05; CTCF; R377H; 0
GEHPFQCSL

SEQ ID NO: 13430 - protein, 9 aa, Homo sapiens
  Table A; HLA-A*02:08; CTCF; R377H; 0
GEHPFQCSL

SEQ ID NO: 13431 - protein, 9 aa, Homo sapiens
  Table A; HLA-A*30:01; CTCF; R377H; 0
GEHPFQCSL

SEQ ID NO: 13432 - protein, 9 aa, Homo sapiens
  Table A; HLA-B*07:02; CTCF; R377H; 1
GEHPFQCSL

SEQ ID NO: 13433 - protein, 9 aa, Homo sapiens
  Table A; HLA-B*14:02; CTCF; R377H; 0
GEHPFQCSL

SEQ ID NO: 13434 - protein, 9 aa, Homo sapiens
  Table A; HLA-B*15:10; CTCF; R377H; 0
GEHPFQCSL

SEQ ID NO: 13435 - protein, 9 aa, Homo sapiens
  Table A; HLA-B*18:01; CTCF; R377H; 1
GEHPFQCSL

SEQ ID NO: 13436 - protein, 9 aa, Homo sapiens
  Table A; HLA-B*37:01; CTCF; R377H; 0
GEHPFQCSL

SEQ ID NO: 13437 - protein, 9 aa, Homo sapiens
  Table A; HLA-B*40:01; CTCF; R377H; 1
GEHPFQCSL

SEQ ID NO: 13438 - protein, 9 aa, Homo sapiens
  Table A; HLA-B*40:02; CTCF; R377H; 0
GEHPFQCSL

SEQ ID NO: 13439 - protein, 9 aa, Homo sapiens
  Table A; HLA-B*40:06; CTCF; R377H; 0
GEHPFQCSL

SEQ ID NO: 13440 - protein, 9 aa, Homo sapiens
  Table A; HLA-B*41:02; CTCF; R377H; 0
GEHPFQCSL

SEQ ID NO: 13441 - protein, 9 aa, Homo sapiens
  Table A; HLA-B*44:02; CTCF; R377H; 1
GEHPFQCSL

SEQ ID NO: 13442 - protein, 9 aa, Homo sapiens
  Table A; HLA-B*44:03; CTCF; R377H; 1
GEHPFQCSL

SEQ ID NO: 13443 - protein, 9 aa, Homo sapiens
  Table A; HLA-B*44:05; CTCF; R377H; 0
GEHPFQCSL

SEQ ID NO: 13444 - protein, 9 aa, Homo sapiens
  Table A; HLA-B*48:01; CTCF; R377H; 0
GEHPFQCSL

SEQ ID NO: 13445 - protein, 9 aa, Homo sapiens
  Table A; HLA-B*49:01; CTCF; R377H; 0
GEHPFQCSL

SEQ ID NO: 13446 - protein, 9 aa, Homo sapiens
  Table A; HLA-B*50:01; CTCF; R377H; 0
GEHPFQCSL

SEQ ID NO: 13447 - protein, 9 aa, Homo sapiens
  Table A; HLA-A*30:01; MAX; R60Q; 0
GEKASQAQI

SEQ ID NO: 13448 - protein, 9 aa, Homo sapiens
  Table A; HLA-B*40:01; MAX; R60Q; 1
GEKASQAQI

SEQ ID NO: 13449 - protein, 9 aa, Homo sapiens
  Table A; HLA-B*40:02; MAX; R60Q; 0
GEKASQAQI

SEQ ID NO: 13450 - protein, 9 aa, Homo sapiens
  Table A; HLA-B*41:02; MAX; R60Q; 0
GEKASQAQI

SEQ ID NO: 13451 - protein, 9 aa, Homo sapiens
  Table A; HLA-B*44:03; MAX; R60Q; 1
GEKASQAQI

SEQ ID NO: 13452 - protein, 9 aa, Homo sapiens
  Table A; HLA-B*44:05; MAX; R60Q; 0
GEKASQAQI

SEQ ID NO: 13453 - protein, 9 aa, Homo sapiens
  Table A; HLA-B*49:01; MAX; R60Q; 0
GEKASQAQI

SEQ ID NO: 13454 - protein, 10 aa, Homo sapiens
  Table A; HLA-A*30:01; MAX; R60Q; 0
GEKASQAQIL

SEQ ID NO: 13455 - protein, 10 aa, Homo sapiens
  Table A; HLA-B*40:01; MAX; R60Q; 1
GEKASQAQIL

SEQ ID NO: 13456 - protein, 10 aa, Homo sapiens
  Table A; HLA-B*40:02; MAX; R60Q; 0
GEKASQAQIL

SEQ ID NO: 13457 - protein, 10 aa, Homo sapiens
  Table A; HLA-B*41:02; MAX; R60Q; 0
GEKASQAQIL

SEQ ID NO: 13458 - protein, 10 aa, Homo sapiens
  Table A; HLA-B*44:05; MAX; R60Q; 0
GEKASQAQIL

SEQ ID NO: 13459 - protein, 9 aa, Homo sapiens
  Table A; HLA-B*27:02; NFE2L2; R34G; 0
GEVFDFSQR

SEQ ID NO: 13460 - protein, 9 aa, Homo sapiens
  Table A; HLA-B*49:01; NFE2L2; R34G; 0
GEVFDFSQR

SEQ ID NO: 13461 - protein, 8 aa, Homo sapiens
  Table A; HLA-B*40:02; TPR; S2155L; 0
GFAEAIHL

SEQ ID NO: 13462 - protein, 8 aa, Homo sapiens
  Table A; HLA-C*14:02; TPR; S2155L; 0
GFAEAIHL

SEQ ID NO: 13463 - protein, 8 aa, Homo sapiens
  Table A; HLA-C*14:03; TPR; S2155L; 0
GFAEAIHL

SEQ ID NO: 13464 - protein, 11 aa, Homo sapiens
  Table A; HLA-A*02:01; TPR; S2155L; 1
GFAEAIHLPQV

SEQ ID NO: 13465 - protein, 8 aa, Homo sapiens
  Table A; HLA-C*04:01; KEAP1; G480W; 1
GFDWTNRL

SEQ ID NO: 13466 - protein, 9 aa, Homo sapiens
  Table A; HLA-A*02:03; KEAP1; G480W; 0
GGFDWTNRL

SEQ ID NO: 13467 - protein, 9 aa, Homo sapiens
  Table A; HLA-A*02:04; KEAP1; G480W; 0
GGFDWTNRL

SEQ ID NO: 13468 - protein, 9 aa, Homo sapiens
  Table A; HLA-A*02:05; KEAP1; G480W; 0
GGFDWTNRL

SEQ ID NO: 13469 - protein, 8 aa, Homo sapiens
  Table A; HLA-A*02:04; PREX2; H1404Y; 0
GGFKIYPV

SEQ ID NO: 13470 - protein, 8 aa, Homo sapiens
  Table A; HLA-B*39:06; PREX2; H1404Y; 0
GGFKIYPV

SEQ ID NO: 13471 - protein, 9 aa, Homo sapiens
  Table A; HLA-A*02:04; PREX2; H1404Y; 0
GGFKIYPVL

SEQ ID NO: 13472 - protein, 10 aa, Homo sapiens
  Table A; HLA-B*57:01; PREX2; H1404Y; 0
GGFKIYPVLF

SEQ ID NO: 13473 - protein, 9 aa, Homo sapiens
  Table A; HLA-B*15:01; IDH1; R132G; 1
GGHAYGDQY

SEQ ID NO: 13474 - protein, 9 aa, Homo sapiens
  Table A; HLA-B*15:03; IDH1; R132G; 0
GGHAYGDQY

SEQ ID NO: 13475 - protein, 9 aa, Homo sapiens
  Table A; HLA-B*39:01; IDH1; R132G; 0
GGHAYGDQY

SEQ ID NO: 13476 - protein, 10 aa, Homo sapiens
  Table A; HLA-B*48:01; SMARCA4; G1162S; 0
GGLSLNLQSA

SEQ ID NO: 13477 - protein, 9 aa, Homo sapiens
  Table A; HLA-B*07:02; TP53; R248L; 1
GGMNLRPIL

SEQ ID NO: 13478 - protein, 9 aa, Homo sapiens
  Table A; HLA-B*15:10; TP53; R248L; 0
GGMNLRPIL

SEQ ID NO: 13479 - protein, 9 aa, Homo sapiens
  Table A; HLA-B*27:05; TP53; R248L; 0
GGMNLRPIL

SEQ ID NO: 13480 - protein, 9 aa, Homo sapiens
  Table A; HLA-B*40:02; TP53; R248L; 0
GGMNLRPIL

SEQ ID NO: 13481 - protein, 9 aa, Homo sapiens
  Table A; HLA-B*41:02; TP53; R248L; 0
GGMNLRPIL

SEQ ID NO: 13482 - protein, 9 aa, Homo sapiens
  Table A; HLA-A*02:06; TP53; R248Q; 0
GGMNQRPIL

SEQ ID NO: 13483 - protein, 9 aa, Homo sapiens
  Table A; HLA-A*30:01; TP53; R248Q; 0
GGMNQRPIL

SEQ ID NO: 13484 - protein, 9 aa, Homo sapiens
  Table A; HLA-B*07:02; TP53; R248Q; 1
GGMNQRPIL

SEQ ID NO: 13485 - protein, 9 aa, Homo sapiens
  Table A; HLA-B*15:10; TP53; R248Q; 0
GGMNQRPIL

SEQ ID NO: 13486 - protein, 9 aa, Homo sapiens
  Table A; HLA-B*40:02; TP53; R248Q; 0
GGMNQRPIL

SEQ ID NO: 13487 - protein, 9 aa, Homo sapiens
  Table A; HLA-B*41:02; TP53; R248Q; 0
GGMNQRPIL

SEQ ID NO: 13488 - protein, 9 aa, Homo sapiens
  Table A; HLA-A*02:01; TP53; R249M; 1
GGMNRMPIL

SEQ ID NO: 13489 - protein, 9 aa, Homo sapiens
  Table A; HLA-A*02:04; TP53; R249M; 0
GGMNRMPIL

SEQ ID NO: 13490 - protein, 9 aa, Homo sapiens
  Table A; HLA-B*08:01; TP53; P250L; 0
GGMNRRLIL

SEQ ID NO: 13491 - protein, 9 aa, Homo sapiens
  Table A; HLA-A*02:01; TP53; R249S; 1
GGMNRSPIL

SEQ ID NO: 13492 - protein, 9 aa, Homo sapiens
  Table A; HLA-A*30:01; TP53; R249S; 0
GGMNRSPIL

SEQ ID NO: 13493 - protein, 9 aa, Homo sapiens
  Table A; HLA-B*15:10; TP53; R249S; 0
GGMNRSPIL

SEQ ID NO: 13494 - protein, 9 aa, Homo sapiens
  Table A; HLA-B*40:02; TP53; R249S; 0
GGMNRSPIL

SEQ ID NO: 13495 - protein, 9 aa, Homo sapiens
  Table A; HLA-B*41:02; TP53; R249S; 0
GGMNRSPIL

SEQ ID NO: 13496 - protein, 9 aa, Homo sapiens
  Table A; HLA-B*44:05; TP53; R249S; 0
GGMNRSPIL

SEQ ID NO: 13497 - protein, 9 aa, Homo sapiens
  Table A; HLA-B*48:01; TP53; R249S; 0
GGMNRSPIL

SEQ ID NO: 13498 - protein, 9 aa, Homo sapiens
  Table A; HLA-C*03:04; TP53; R249S; 1
GGMNRSPIL

SEQ ID NO: 13499 - protein, 9 aa, Homo sapiens
  Table A; HLA-A*02:04; TP53; R248W; 0
GGMNWRPIL

SEQ ID NO: 13500 - protein, 9 aa, Homo sapiens
  Table A; HLA-A*02:06; PTEN; R130G; 0
GGTGVMICA

SEQ ID NO: 13501 - protein, 9 aa, Homo sapiens
  Table A; HLA-B*39:01; IDH1; R132H; 1
GHHAYGDQY

SEQ ID NO: 13502 - protein, 9 aa, Homo sapiens
  Table A; HLA-B*15:10; FBXW7; R465C; 0
GHTSTVCCM

SEQ ID NO: 13503 - protein, 9 aa, Homo sapiens
  Table A; HLA-B*15:10; FBXW7; R465H; 0
GHTSTVHCM

SEQ ID NO: 13504 - protein, 9 aa, Homo sapiens
  Table A; HLA-B*27:05; FBXW7; R465H; 1
GHTSTVHCM

SEQ ID NO: 13505 - protein, 9 aa, Homo sapiens
  Table A; HLA-B*38:01; FBXW7; R465H; 0
GHTSTVHCM

SEQ ID NO: 13506 - protein, 8 aa, Homo sapiens
  Table A; HLA-B*39:06; FBXW7; R505C; 0
GHVAAVCC

SEQ ID NO: 13507 - protein, 9 aa, Homo sapiens
  Table A; HLA-B*15:10; FBXW7; R505C; 0
GHVAAVCCV

SEQ ID NO: 13508 - protein, 9 aa, Homo sapiens
  Table A; HLA-B*39:06; FBXW7; R505C; 0
GHVAAVCCV

SEQ ID NO: 13509 - protein, 8 aa, Homo sapiens
  Table A; HLA-B*39:06; FBXW7; R505G; 0
GHVAAVGC

SEQ ID NO: 13510 - protein, 9 aa, Homo sapiens
  Table A; HLA-B*15:10; FBXW7; R505G; 0
GHVAAVGCV

SEQ ID NO: 13511 - protein, 9 aa, Homo sapiens
  Table A; HLA-B*39:06; FBXW7; R505G; 0
GHVAAVGCV

SEQ ID NO: 13512 - protein, 8 aa, Homo sapiens
  Table A; HLA-C*08:03; CTNNB1; S37A; 0
GIHAGATT

SEQ ID NO: 13513 - protein, 9 aa, Homo sapiens
  Table A; HLA-A*02:03; CTNNB1; S37A; 0
GIHAGATTT

SEQ ID NO: 13514 - protein, 9 aa, Homo sapiens
  Table A; HLA-B*13:02; CTNNB1; S37A; 0
GIHAGATTT

SEQ ID NO: 13515 - protein, 9 aa, Homo sapiens
  Table A; HLA-B*15:01; CTNNB1; S37A; 1
GIHAGATTT

SEQ ID NO: 13516 - protein, 9 aa, Homo sapiens
  Table A; HLA-B*48:01; CTNNB1; S37A; 0
GIHAGATTT

SEQ ID NO: 13517 - protein, 9 aa, Homo sapiens
  Table A; HLA-C*08:03; CTNNB1; S37A; 0
GIHAGATTT

SEQ ID NO: 13518 - protein, 10 aa, Homo sapiens
  Table A; HLA-A*02:03; CTNNB1; S37A; 0
GIHAGATTTA

SEQ ID NO: 13519 - protein, 10 aa, Homo sapiens
  Table A; HLA-A*02:05; CTNNB1; S37A; 0
GIHAGATTTA

SEQ ID NO: 13520 - protein, 10 aa, Homo sapiens
  Table A; HLA-A*02:08; CTNNB1; S37A; 0
GIHAGATTTA

SEQ ID NO: 13521 - protein, 10 aa, Homo sapiens
  Table A; HLA-A*30:01; CTNNB1; S37A; 0
GIHAGATTTA

SEQ ID NO: 13522 - protein, 10 aa, Homo sapiens
  Table A; HLA-B*13:02; CTNNB1; S37A; 0
GIHAGATTTA

SEQ ID NO: 13523 - protein, 10 aa, Homo sapiens
  Table A; HLA-B*15:01; CTNNB1; S37A; 1
GIHAGATTTA

SEQ ID NO: 13524 - protein, 10 aa, Homo sapiens
  Table A; HLA-B*48:01; CTNNB1; S37A; 0
GIHAGATTTA

SEQ ID NO: 13525 - protein, 10 aa, Homo sapiens
  Table A; HLA-B*50:01; CTNNB1; S37A; 0
GIHAGATTTA

SEQ ID NO: 13526 - protein, 8 aa, Homo sapiens
  Table A; HLA-C*08:03; CTNNB1; S37F; 0
GIHFGATT

SEQ ID NO: 13527 - protein, 9 aa, Homo sapiens
  Table A; HLA-A*02:03; CTNNB1; S37F; 0
GIHFGATTT

SEQ ID NO: 13528 - protein, 9 aa, Homo sapiens
  Table A; HLA-B*13:02; CTNNB1; S37F; 1
GIHFGATTT

SEQ ID NO: 13529 - protein, 9 aa, Homo sapiens
  Table A; HLA-B*15:01; CTNNB1; S37F; 1
GIHFGATTT

SEQ ID NO: 13530 - protein, 9 aa, Homo sapiens
  Table A; HLA-B*46:01; CTNNB1; S37F; 0
GIHFGATTT

SEQ ID NO: 13531 - protein, 9 aa, Homo sapiens
  Table A; HLA-B*48:01; CTNNB1; S37F; 0
GIHFGATTT

SEQ ID NO: 13532 - protein, 9 aa, Homo sapiens
  Table A; HLA-C*08:03; CTNNB1; S37F; 0
GIHFGATTT

SEQ ID NO: 13533 - protein, 10 aa, Homo sapiens
  Table A; HLA-A*02:03; CTNNB1; S37F; 0
GIHFGATTTA

SEQ ID NO: 13534 - protein, 10 aa, Homo sapiens
  Table A; HLA-A*02:05; CTNNB1; S37F; 0
GIHFGATTTA

SEQ ID NO: 13535 - protein, 10 aa, Homo sapiens
  Table A; HLA-A*02:06; CTNNB1; S37F; 0
GIHFGATTTA

SEQ ID NO: 13536 - protein, 10 aa, Homo sapiens
  Table A; HLA-A*02:08; CTNNB1; S37F; 0
GIHFGATTTA

SEQ ID NO: 13537 - protein, 10 aa, Homo sapiens
  Table A; HLA-A*30:01; CTNNB1; S37F; 0
GIHFGATTTA

SEQ ID NO: 13538 - protein, 10 aa, Homo sapiens
  Table A; HLA-B*13:02; CTNNB1; S37F; 1
GIHFGATTTA

SEQ ID NO: 13539 - protein, 10 aa, Homo sapiens
  Table A; HLA-B*15:01; CTNNB1; S37F; 1
GIHFGATTTA

SEQ ID NO: 13540 - protein, 10 aa, Homo sapiens
  Table A; HLA-B*39:06; CTNNB1; S37F; 0
GIHFGATTTA

SEQ ID NO: 13541 - protein, 10 aa, Homo sapiens
  Table A; HLA-B*48:01; CTNNB1; S37F; 0
GIHFGATTTA

SEQ ID NO: 13542 - protein, 10 aa, Homo sapiens
  Table A; HLA-B*50:01; CTNNB1; S37F; 0
GIHFGATTTA

SEQ ID NO: 13543 - protein, 10 aa, Homo sapiens
  Table A; HLA-B*56:01; CTNNB1; S37F; 0
GIHFGATTTA

SEQ ID NO: 13544 - protein, 8 aa, Homo sapiens
  Table A; HLA-C*08:03; CTNNB1; S37P; 0
GIHPGATT

SEQ ID NO: 13545 - protein, 9 aa, Homo sapiens
  Table A; HLA-A*02:03; CTNNB1; S37P; 0
GIHPGATTT

SEQ ID NO: 13546 - protein, 9 aa, Homo sapiens
  Table A; HLA-B*15:01; CTNNB1; S37P; 1
GIHPGATTT

SEQ ID NO: 13547 - protein, 9 aa, Homo sapiens
  Table A; HLA-B*48:01; CTNNB1; S37P; 0
GIHPGATTT

SEQ ID NO: 13548 - protein, 9 aa, Homo sapiens
  Table A; HLA-C*08:03; CTNNB1; S37P; 0
GIHPGATTT

SEQ ID NO: 13549 - protein, 10 aa, Homo sapiens
  Table A; HLA-A*02:03; CTNNB1; S37P; 0
GIHPGATTTA

SEQ ID NO: 13550 - protein, 10 aa, Homo sapiens
  Table A; HLA-A*02:05; CTNNB1; S37P; 0
GIHPGATTTA

SEQ ID NO: 13551 - protein, 10 aa, Homo sapiens
  Table A; HLA-A*02:08; CTNNB1; S37P; 0
GIHPGATTTA

SEQ ID NO: 13552 - protein, 10 aa, Homo sapiens
  Table A; HLA-A*30:01; CTNNB1; S37P; 0
GIHPGATTTA

SEQ ID NO: 13553 - protein, 10 aa, Homo sapiens
  Table A; HLA-B*07:02; CTNNB1; S37P; 1
GIHPGATTTA

SEQ ID NO: 13554 - protein, 10 aa, Homo sapiens
  Table A; HLA-B*13:02; CTNNB1; S37P; 0
GIHPGATTTA

SEQ ID NO: 13555 - protein, 10 aa, Homo sapiens
  Table A; HLA-B*15:01; CTNNB1; S37P; 1
GIHPGATTTA

SEQ ID NO: 13556 - protein, 10 aa, Homo sapiens
  Table A; HLA-B*39:06; CTNNB1; S37P; 0
GIHPGATTTA

SEQ ID NO: 13557 - protein, 10 aa, Homo sapiens
  Table A; HLA-B*40:02; CTNNB1; S37P; 0
GIHPGATTTA

SEQ ID NO: 13558 - protein, 10 aa, Homo sapiens
  Table A; HLA-B*46:01; CTNNB1; S37P; 0
GIHPGATTTA

SEQ ID NO: 13559 - protein, 10 aa, Homo sapiens
  Table A; HLA-B*48:01; CTNNB1; S37P; 0
GIHPGATTTA

SEQ ID NO: 13560 - protein, 10 aa, Homo sapiens
  Table A; HLA-B*50:01; CTNNB1; S37P; 0
GIHPGATTTA

SEQ ID NO: 13561 - protein, 11 aa, Homo sapiens
  Table A; HLA-B*48:01; CTNNB1; S37P; 0
GIHPGATTTAP

SEQ ID NO: 13562 - protein, 9 aa, Homo sapiens
  Table A; HLA-A*02:03; CTNNB1; T41A; 0
GIHSGATAT

SEQ ID NO: 13563 - protein, 9 aa, Homo sapiens
  Table A; HLA-B*13:02; CTNNB1; T41A; 1
GIHSGATAT

SEQ ID NO: 13564 - protein, 9 aa, Homo sapiens
  Table A; HLA-B*15:01; CTNNB1; T41A; 1
GIHSGATAT

SEQ ID NO: 13565 - protein, 9 aa, Homo sapiens
  Table A; HLA-B*46:01; CTNNB1; T41A; 0
GIHSGATAT

SEQ ID NO: 13566 - protein, 9 aa, Homo sapiens
  Table A; HLA-B*48:01; CTNNB1; T41A; 0
GIHSGATAT

SEQ ID NO: 13567 - protein, 9 aa, Homo sapiens
  Table A; HLA-C*08:03; CTNNB1; T41A; 0
GIHSGATAT

SEQ ID NO: 13568 - protein, 10 aa, Homo sapiens
  Table A; HLA-A*02:01; CTNNB1; T41A; 1
GIHSGATATA

SEQ ID NO: 13569 - protein, 10 aa, Homo sapiens
  Table A; HLA-A*02:03; CTNNB1; T41A; 0
GIHSGATATA

SEQ ID NO: 13570 - protein, 10 aa, Homo sapiens
  Table A; HLA-A*02:05; CTNNB1; T41A; 0
GIHSGATATA

SEQ ID NO: 13571 - protein, 10 aa, Homo sapiens
  Table A; HLA-A*02:06; CTNNB1; T41A; 0
GIHSGATATA

SEQ ID NO: 13572 - protein, 10 aa, Homo sapiens
  Table A; HLA-A*02:08; CTNNB1; T41A; 0
GIHSGATATA

SEQ ID NO: 13573 - protein, 10 aa, Homo sapiens
  Table A; HLA-A*30:01; CTNNB1; T41A; 1
GIHSGATATA

SEQ ID NO: 13574 - protein, 10 aa, Homo sapiens
  Table A; HLA-B*13:02; CTNNB1; T41A; 1
GIHSGATATA

SEQ ID NO: 13575 - protein, 10 aa, Homo sapiens
  Table A; HLA-B*15:01; CTNNB1; T41A; 1
GIHSGATATA

SEQ ID NO: 13576 - protein, 10 aa, Homo sapiens
  Table A; HLA-B*40:02; CTNNB1; T41A; 1
GIHSGATATA

SEQ ID NO: 13577 - protein, 10 aa, Homo sapiens
  Table A; HLA-B*46:01; CTNNB1; T41A; 0
GIHSGATATA

SEQ ID NO: 13578 - protein, 10 aa, Homo sapiens
  Table A; HLA-B*48:01; CTNNB1; T41A; 0
GIHSGATATA

SEQ ID NO: 13579 - protein, 10 aa, Homo sapiens
  Table A; HLA-B*50:01; CTNNB1; T41A; 0
GIHSGATATA

SEQ ID NO: 13580 - protein, 10 aa, Homo sapiens
  Table A; HLA-B*55:02; CTNNB1; T41A; 0
GIHSGATATA

SEQ ID NO: 13581 - protein, 10 aa, Homo sapiens
  Table A; HLA-B*56:01; CTNNB1; T41A; 0
GIHSGATATA

SEQ ID NO: 13582 - protein, 11 aa, Homo sapiens
  Table A; HLA-B*15:01; CTNNB1; T41A; 1
GIHSGATATAP

SEQ ID NO: 13583 - protein, 8 aa, Homo sapiens
  Table A; HLA-B*13:02; CTNNB1; T41I; 0
GIHSGATI

SEQ ID NO: 13584 - protein, 8 aa, Homo sapiens
  Table A; HLA-B*15:01; CTNNB1; T41I; 1
GIHSGATI

SEQ ID NO: 13585 - protein, 8 aa, Homo sapiens
  Table A; HLA-B*48:01; CTNNB1; T41I; 0
GIHSGATI

SEQ ID NO: 13586 - protein, 9 aa, Homo sapiens
  Table A; HLA-B*15:01; CTNNB1; T41I; 1
GIHSGATIT

SEQ ID NO: 13587 - protein, 9 aa, Homo sapiens
  Table A; HLA-B*48:01; CTNNB1; T41I; 0
GIHSGATIT

SEQ ID NO: 13588 - protein, 9 aa, Homo sapiens
  Table A; HLA-C*08:03; CTNNB1; T41I; 0
GIHSGATIT

SEQ ID NO: 13589 - protein, 10 aa, Homo sapiens
  Table A; HLA-A*02:01; CTNNB1; T41I; 1
GIHSGATITA

SEQ ID NO: 13590 - protein, 10 aa, Homo sapiens
  Table A; HLA-A*02:03; CTNNB1; T41I; 0
GIHSGATITA

SEQ ID NO: 13591 - protein, 10 aa, Homo sapiens
  Table A; HLA-A*02:05; CTNNB1; T41I; 0
GIHSGATITA

SEQ ID NO: 13592 - protein, 10 aa, Homo sapiens
  Table A; HLA-A*02:06; CTNNB1; T41I; 0
GIHSGATITA

SEQ ID NO: 13593 - protein, 10 aa, Homo sapiens
  Table A; HLA-A*02:08; CTNNB1; T41I; 0
GIHSGATITA

SEQ ID NO: 13594 - protein, 10 aa, Homo sapiens
  Table A; HLA-A*03:01; CTNNB1; T41I; 1
GIHSGATITA

SEQ ID NO: 13595 - protein, 10 aa, Homo sapiens
  Table A; HLA-A*30:01; CTNNB1; T41I; 0
GIHSGATITA

SEQ ID NO: 13596 - protein, 10 aa, Homo sapiens
  Table A; HLA-B*13:02; CTNNB1; T41I; 0
GIHSGATITA

SEQ ID NO: 13597 - protein, 10 aa, Homo sapiens
  Table A; HLA-B*15:01; CTNNB1; T41I; 1
GIHSGATITA

SEQ ID NO: 13598 - protein, 10 aa, Homo sapiens
  Table A; HLA-B*39:06; CTNNB1; T41I; 0
GIHSGATITA

SEQ ID NO: 13599 - protein, 10 aa, Homo sapiens
  Table A; HLA-B*40:02; CTNNB1; T41I; 0
GIHSGATITA

SEQ ID NO: 13600 - protein, 10 aa, Homo sapiens
  Table A; HLA-B*48:01; CTNNB1; T41I; 0
GIHSGATITA

SEQ ID NO: 13601 - protein, 10 aa, Homo sapiens
  Table A; HLA-B*50:01; CTNNB1; T41I; 0
GIHSGATITA

SEQ ID NO: 13602 - protein, 10 aa, Homo sapiens
  Table A; HLA-B*55:02; CTNNB1; T41I; 0
GIHSGATITA

SEQ ID NO: 13603 - protein, 10 aa, Homo sapiens
  Table A; HLA-B*56:01; CTNNB1; T41I; 0
GIHSGATITA

SEQ ID NO: 13604 - protein, 11 aa, Homo sapiens
  Table A; HLA-B*48:01; CTNNB1; T41I; 0
GIHSGATITAP

SEQ ID NO: 13605 - protein, 10 aa, Homo sapiens
  Table A; HLA-A*03:01; TP63; E609K; 1
GILDHRQLHK

SEQ ID NO: 13606 - protein, 10 aa, Homo sapiens
  Table A; HLA-A*03:02; KRAS; A146T; 0
GIPFIETSTK

SEQ ID NO: 13607 - protein, 10 aa, Homo sapiens
  Table A; HLA-B*27:02; KRAS; A146T; 0
GIPFIETSTK

SEQ ID NO: 13608 - protein, 8 aa, Homo sapiens
  Table A; HLA-B*15:01; CREB3L1; V414I; 0
GIYTASQM

SEQ ID NO: 13609 - protein, 8 aa, Homo sapiens
  Table A; HLA-B*15:02; CREB3L1; V414I; 0
GIYTASQM

SEQ ID NO: 13610 - protein, 9 aa, Homo sapiens
  Table A; HLA-B*48:01; CREB3L1; V414I; 0
GIYTASQMP

SEQ ID NO: 13611 - protein, 11 aa, Homo sapiens
  Table A; HLA-A*03:01; CREB3L1; V414I; 1
GIYTASQMPSR

SEQ ID NO: 13612 - protein, 11 aa, Homo sapiens
  Table A; HLA-A*11:01; CREB3L1; V414I; 0
GIYTASQMPSR

SEQ ID NO: 13613 - protein, 11 aa, Homo sapiens
  Table A; HLA-A*68:01; CREB3L1; V414I; 0
GIYTASQMPSR

SEQ ID NO: 13614 - protein, 8 aa, Homo sapiens
  Table A; HLA-B*48:01; PTEN; R130G; 0
GKGGTGVM

SEQ ID NO: 13615 - protein, 9 aa, Homo sapiens
  Table A; HLA-B*48:01; PTEN; R130G; 0
GKGGTGVMI

SEQ ID NO: 13616 - protein, 8 aa, Homo sapiens
  Table A; HLA-B*48:01; PTEN; R130L; 0
GKGLTGVM

SEQ ID NO: 13617 - protein, 8 aa, Homo sapiens
  Table A; HLA-B*15:03; PTEN; R130P; 0
GKGPTGVM

SEQ ID NO: 13618 - protein, 8 aa, Homo sapiens
  Table A; HLA-B*39:01; PTEN; R130P; 0
GKGPTGVM

SEQ ID NO: 13619 - protein, 8 aa, Homo sapiens
  Table A; HLA-B*48:01; PTEN; R130P; 0
GKGPTGVM

SEQ ID NO: 13620 - protein, 9 aa, Homo sapiens
  Table A; HLA-B*15:03; PTEN; R130P; 0
GKGPTGVMI

SEQ ID NO: 13621 - protein, 9 aa, Homo sapiens
  Table A; HLA-B*48:01; PTEN; R130P; 0
GKGPTGVMI

SEQ ID NO: 13622 - protein, 9 aa, Homo sapiens
  Table A; HLA-C*08:03; PTEN; R130P; 0
GKGPTGVMI

SEQ ID NO: 13623 - protein, 8 aa, Homo sapiens
  Table A; HLA-B*48:01; PTEN; R130Q; 0
GKGQTGVM

SEQ ID NO: 13624 - protein, 9 aa, Homo sapiens
  Table A; HLA-B*48:01; PTEN; R130Q; 0
GKGQTGVMI

SEQ ID NO: 13625 - protein, 9 aa, Homo sapiens
  Table A; HLA-B*15:03; IDH2; R172K; 0
GKHAHGDQY

SEQ ID NO: 13626 - protein, 9 aa, Homo sapiens
  Table A; HLA-B*15:03; CNBD1; L396P; 0
GKPKEKESF

SEQ ID NO: 13627 - protein, 10 aa, Homo sapiens
  Table A; HLA-B*15:03; PTPRB; D1560N; 0
GKRNPTQQKF

SEQ ID NO: 13628 - protein, 9 aa, Homo sapiens
  Table A; HLA-B*15:01; SPOP; E50K; 1
GKVIKSSTF

SEQ ID NO: 13629 - protein, 9 aa, Homo sapiens
  Table A; HLA-B*15:03; SPOP; E50K; 0
GKVIKSSTF

SEQ ID NO: 13630 - protein, 9 aa, Homo sapiens
  Table A; HLA-B*48:01; SPOP; E50K; 0
GKVIKSSTF

SEQ ID NO: 13631 - protein, 9 aa, Homo sapiens
  Table A; HLA-B*15:03; EGFR; A289T; 0
GKYSFGTTC

SEQ ID NO: 13632 - protein, 9 aa, Homo sapiens
  Table A; HLA-B*15:03; EGFR; A289V; 0
GKYSFGVTC

SEQ ID NO: 13633 - protein, 9 aa, Homo sapiens
  Table A; HLA-B*48:01; EGFR; A289V; 0
GKYSFGVTC

SEQ ID NO: 13634 - protein, 9 aa, Homo sapiens
  Table A; HLA-B*50:01; EGFR; A289V; 0
GKYSFGVTC

SEQ ID NO: 13635 - protein, 10 aa, Homo sapiens
  Table A; HLA-A*03:01; TP53; I195N; 1
GLAPPQHLNR

SEQ ID NO: 13636 - protein, 10 aa, Homo sapiens
  Table A; HLA-A*03:02; TP53; I195N; 0
GLAPPQHLNR

SEQ ID NO: 13637 - protein, 10 aa, Homo sapiens
  Table A; HLA-A*26:03; TP53; I195N; 0
GLAPPQHLNR

SEQ ID NO: 13638 - protein, 10 aa, Homo sapiens
  Table A; HLA-A*31:01; TP53; I195N; 0
GLAPPQHLNR

SEQ ID NO: 13639 - protein, 10 aa, Homo sapiens
  Table A; HLA-A*68:01; TP53; I195N; 0
GLAPPQHLNR

SEQ ID NO: 13640 - protein, 10 aa, Homo sapiens
  Table A; HLA-B*27:02; TP53; I195N; 0
GLAPPQHLNR

SEQ ID NO: 13641 - protein, 11 aa, Homo sapiens
  Table A; HLA-A*02:01; TP53; I195N; 1
GLAPPQHLNRV

SEQ ID NO: 13642 - protein, 11 aa, Homo sapiens
  Table A; HLA-A*02:03; TP53; I195N; 0
GLAPPQHLNRV

SEQ ID NO: 13643 - protein, 11 aa, Homo sapiens
  Table A; HLA-A*02:04; TP53; I195N; 0
GLAPPQHLNRV

SEQ ID NO: 13644 - protein, 11 aa, Homo sapiens
  Table A; HLA-A*02:07; TP53; I195N; 0
GLAPPQHLNRV

SEQ ID NO: 13645 - protein, 11 aa, Homo sapiens
  Table A; HLA-A*68:02; TP53; I195N; 0
GLAPPQHLNRV

SEQ ID NO: 13646 - protein, 9 aa, Homo sapiens
  Table A; HLA-A*02:01; TP53; I195T; 1
GLAPPQHLT

SEQ ID NO: 13647 - protein, 9 aa, Homo sapiens
  Table A; HLA-A*02:03; TP53; I195T; 0
GLAPPQHLT

SEQ ID NO: 13648 - protein, 9 aa, Homo sapiens
  Table A; HLA-A*02:04; TP53; I195T; 0
GLAPPQHLT

SEQ ID NO: 13649 - protein, 9 aa, Homo sapiens
  Table A; HLA-A*02:05; TP53; I195T; 0
GLAPPQHLT

SEQ ID NO: 13650 - protein, 9 aa, Homo sapiens
  Table A; HLA-B*13:02; TP53; I195T; 0
GLAPPQHLT

SEQ ID NO: 13651 - protein, 9 aa, Homo sapiens
  Table A; HLA-B*48:01; TP53; I195T; 0
GLAPPQHLT

SEQ ID NO: 13652 - protein, 9 aa, Homo sapiens
  Table A; HLA-C*08:03; TP53; I195T; 0
GLAPPQHLT

SEQ ID NO: 13653 - protein, 10 aa, Homo sapiens
  Table A; HLA-A*03:01; TP53; I195T; 1
GLAPPQHLTR

SEQ ID NO: 13654 - protein, 10 aa, Homo sapiens
  Table A; HLA-A*03:02; TP53; I195T; 0
GLAPPQHLTR

SEQ ID NO: 13655 - protein, 10 aa, Homo sapiens
  Table A; HLA-A*11:01; TP53; I195T; 1
GLAPPQHLTR

SEQ ID NO: 13656 - protein, 10 aa, Homo sapiens
  Table A; HLA-A*26:03; TP53; I195T; 0
GLAPPQHLTR

SEQ ID NO: 13657 - protein, 10 aa, Homo sapiens
  Table A; HLA-A*31:01; TP53; I195T; 0
GLAPPQHLTR

SEQ ID NO: 13658 - protein, 10 aa, Homo sapiens
  Table A; HLA-A*68:01; TP53; I195T; 0
GLAPPQHLTR

SEQ ID NO: 13659 - protein, 10 aa, Homo sapiens
  Table A; HLA-B*27:02; TP53; I195T; 0
GLAPPQHLTR

SEQ ID NO: 13660 - protein, 11 aa, Homo sapiens
  Table A; HLA-A*02:01; TP53; I195T; 1
GLAPPQHLTRV

SEQ ID NO: 13661 - protein, 11 aa, Homo sapiens
  Table A; HLA-A*02:03; TP53; I195T; 0
GLAPPQHLTRV

SEQ ID NO: 13662 - protein, 11 aa, Homo sapiens
  Table A; HLA-A*02:04; TP53; I195T; 0
GLAPPQHLTRV

SEQ ID NO: 13663 - protein, 11 aa, Homo sapiens
  Table A; HLA-A*02:07; TP53; I195T; 0
GLAPPQHLTRV

SEQ ID NO: 13664 - protein, 11 aa, Homo sapiens
  Table A; HLA-A*68:02; TP53; I195T; 0
GLAPPQHLTRV

SEQ ID NO: 13665 - protein, 9 aa, Homo sapiens
  Table A; HLA-A*02:01; TP53; L194R; 1
GLAPPQHRI

SEQ ID NO: 13666 - protein, 9 aa, Homo sapiens
  Table A; HLA-A*02:03; TP53; L194R; 0
GLAPPQHRI

SEQ ID NO: 13667 - protein, 9 aa, Homo sapiens
  Table A; HLA-A*02:04; TP53; L194R; 0
GLAPPQHRI

SEQ ID NO: 13668 - protein, 9 aa, Homo sapiens
  Table A; HLA-A*02:05; TP53; L194R; 0
GLAPPQHRI

SEQ ID NO: 13669 - protein, 9 aa, Homo sapiens
  Table A; HLA-A*02:06; TP53; L194R; 0
GLAPPQHRI

SEQ ID NO: 13670 - protein, 9 aa, Homo sapiens
  Table A; HLA-A*02:07; TP53; L194R; 0
GLAPPQHRI

SEQ ID NO: 13671 - protein, 9 aa, Homo sapiens
  Table A; HLA-A*02:08; TP53; L194R; 0
GLAPPQHRI

SEQ ID NO: 13672 - protein, 9 aa, Homo sapiens
  Table A; HLA-B*13:01; TP53; L194R; 0
GLAPPQHRI

SEQ ID NO: 13673 - protein, 9 aa, Homo sapiens
  Table A; HLA-B*13:02; TP53; L194R; 0
GLAPPQHRI

SEQ ID NO: 13674 - protein, 9 aa, Homo sapiens
  Table A; HLA-B*15:01; TP53; L194R; 1
GLAPPQHRI

SEQ ID NO: 13675 - protein, 9 aa, Homo sapiens
  Table A; HLA-B*38:01; TP53; L194R; 0
GLAPPQHRI

SEQ ID NO: 13676 - protein, 9 aa, Homo sapiens
  Table A; HLA-B*40:02; TP53; L194R; 0
GLAPPQHRI

SEQ ID NO: 13677 - protein, 9 aa, Homo sapiens
  Table A; HLA-B*44:05; TP53; L194R; 0
GLAPPQHRI

SEQ ID NO: 13678 - protein, 9 aa, Homo sapiens
  Table A; HLA-B*48:01; TP53; L194R; 0
GLAPPQHRI

SEQ ID NO: 13679 - protein, 10 aa, Homo sapiens
  Table A; HLA-A*31:01; TP53; L194R; 0
GLAPPQHRIR

SEQ ID NO: 13680 - protein, 11 aa, Homo sapiens
  Table A; HLA-A*02:04; TP53; L194R; 0
GLAPPQHRIRV

SEQ ID NO: 13681 - protein, 8 aa, Homo sapiens
  Table A; HLA-C*17:01; TP53; H193L; 0
GLAPPQLL

SEQ ID NO: 13682 - protein, 9 aa, Homo sapiens
  Table A; HLA-A*02:01; TP53; H193L; 1
GLAPPQLLI

SEQ ID NO: 13683 - protein, 9 aa, Homo sapiens
  Table A; HLA-A*02:03; TP53; H193L; 0
GLAPPQLLI

SEQ ID NO: 13684 - protein, 9 aa, Homo sapiens
  Table A; HLA-A*02:04; TP53; H193L; 0
GLAPPQLLI

SEQ ID NO: 13685 - protein, 9 aa, Homo sapiens
  Table A; HLA-A*02:06; TP53; H193L; 0
GLAPPQLLI

SEQ ID NO: 13686 - protein, 9 aa, Homo sapiens
  Table A; HLA-A*03:01; TP53; H193L; 1
GLAPPQLLI

SEQ ID NO: 13687 - protein, 9 aa, Homo sapiens
  Table A; HLA-B*13:01; TP53; H193L; 0
GLAPPQLLI

SEQ ID NO: 13688 - protein, 9 aa, Homo sapiens
  Table A; HLA-B*13:02; TP53; H193L; 0
GLAPPQLLI

SEQ ID NO: 13689 - protein, 9 aa, Homo sapiens
  Table A; HLA-B*48:01; TP53; H193L; 0
GLAPPQLLI

SEQ ID NO: 13690 - protein, 11 aa, Homo sapiens
  Table A; HLA-A*02:01; TP53; H193L; 1
GLAPPQLLIRV

SEQ ID NO: 13691 - protein, 11 aa, Homo sapiens
  Table A; HLA-A*02:03; TP53; H193L; 0
GLAPPQLLIRV

SEQ ID NO: 13692 - protein, 11 aa, Homo sapiens
  Table A; HLA-A*02:04; TP53; H193L; 0
GLAPPQLLIRV

SEQ ID NO: 13693 - protein, 11 aa, Homo sapiens
  Table A; HLA-A*02:07; TP53; H193L; 0
GLAPPQLLIRV

SEQ ID NO: 13694 - protein, 11 aa, Homo sapiens
  Table A; HLA-A*68:02; TP53; H193L; 0
GLAPPQLLIRV

SEQ ID NO: 13695 - protein, 11 aa, Homo sapiens
  Table A; HLA-B*13:02; TP53; H193L; 0
GLAPPQLLIRV

SEQ ID NO: 13696 - protein, 8 aa, Homo sapiens
  Table A; HLA-A*02:04; TP53; H193R; 0
GLAPPQRL

SEQ ID NO: 13697 - protein, 8 aa, Homo sapiens
  Table A; HLA-B*39:01; TP53; H193R; 0
GLAPPQRL

SEQ ID NO: 13698 - protein, 8 aa, Homo sapiens
  Table A; HLA-C*17:01; TP53; H193R; 0
GLAPPQRL

SEQ ID NO: 13699 - protein, 9 aa, Homo sapiens
  Table A; HLA-A*02:01; TP53; H193R; 1
GLAPPQRLI

SEQ ID NO: 13700 - protein, 9 aa, Homo sapiens
  Table A; HLA-A*02:03; TP53; H193R; 0
GLAPPQRLI

SEQ ID NO: 13701 - protein, 9 aa, Homo sapiens
  Table A; HLA-A*02:04; TP53; H193R; 0
GLAPPQRLI

SEQ ID NO: 13702 - protein, 9 aa, Homo sapiens
  Table A; HLA-B*13:02; TP53; H193R; 0
GLAPPQRLI

SEQ ID NO: 13703 - protein, 9 aa, Homo sapiens
  Table A; HLA-B*15:10; TP53; H193R; 0
GLAPPQRLI

SEQ ID NO: 13704 - protein, 9 aa, Homo sapiens
  Table A; HLA-B*48:01; TP53; H193R; 0
GLAPPQRLI

SEQ ID NO: 13705 - protein, 10 aa, Homo sapiens
  Table A; HLA-A*31:01; TP53; H193R; 0
GLAPPQRLIR

SEQ ID NO: 13706 - protein, 11 aa, Homo sapiens
  Table A; HLA-A*02:01; TP53; H193R; 1
GLAPPQRLIRV

SEQ ID NO: 13707 - protein, 11 aa, Homo sapiens
  Table A; HLA-A*02:03; TP53; H193R; 0
GLAPPQRLIRV

SEQ ID NO: 13708 - protein, 11 aa, Homo sapiens
  Table A; HLA-A*02:04; TP53; H193R; 0
GLAPPQRLIRV

SEQ ID NO: 13709 - protein, 8 aa, Homo sapiens
  Table A; HLA-A*02:03; TP53; H193Y; 0
GLAPPQYL

SEQ ID NO: 13710 - protein, 8 aa, Homo sapiens
  Table A; HLA-A*02:04; TP53; H193Y; 0
GLAPPQYL

SEQ ID NO: 13711 - protein, 8 aa, Homo sapiens
  Table A; HLA-B*48:01; TP53; H193Y; 0
GLAPPQYL

SEQ ID NO: 13712 - protein, 8 aa, Homo sapiens
  Table A; HLA-C*17:01; TP53; H193Y; 0
GLAPPQYL

SEQ ID NO: 13713 - protein, 9 aa, Homo sapiens
  Table A; HLA-A*02:01; TP53; H193Y; 1
GLAPPQYLI

SEQ ID NO: 13714 - protein, 9 aa, Homo sapiens
  Table A; HLA-A*02:03; TP53; H193Y; 0
GLAPPQYLI

SEQ ID NO: 13715 - protein, 9 aa, Homo sapiens
  Table A; HLA-A*02:04; TP53; H193Y; 0
GLAPPQYLI

SEQ ID NO: 13716 - protein, 9 aa, Homo sapiens
  Table A; HLA-A*02:06; TP53; H193Y; 0
GLAPPQYLI

SEQ ID NO: 13717 - protein, 9 aa, Homo sapiens
  Table A; HLA-B*13:02; TP53; H193Y; 0
GLAPPQYLI

SEQ ID NO: 13718 - protein, 9 aa, Homo sapiens
  Table A; HLA-B*38:01; TP53; H193Y; 0
GLAPPQYLI

SEQ ID NO: 13719 - protein, 9 aa, Homo sapiens
  Table A; HLA-B*48:01; TP53; H193Y; 0
GLAPPQYLI

SEQ ID NO: 13720 - protein, 10 aa, Homo sapiens
  Table A; HLA-B*27:02; TP53; H193Y; 0
GLAPPQYLIR

SEQ ID NO: 13721 - protein, 11 aa, Homo sapiens
  Table A; HLA-A*02:01; TP53; H193Y; 1
GLAPPQYLIRV

SEQ ID NO: 13722 - protein, 11 aa, Homo sapiens
  Table A; HLA-A*02:03; TP53; H193Y; 0
GLAPPQYLIRV

SEQ ID NO: 13723 - protein, 11 aa, Homo sapiens
  Table A; HLA-A*02:04; TP53; H193Y; 0
GLAPPQYLIRV

SEQ ID NO: 13724 - protein, 11 aa, Homo sapiens
  Table A; HLA-A*02:07; TP53; H193Y; 0
GLAPPQYLIRV

SEQ ID NO: 13725 - protein, 11 aa, Homo sapiens
  Table A; HLA-A*68:02; TP53; H193Y; 0
GLAPPQYLIRV

SEQ ID NO: 13726 - protein, 9 aa, Homo sapiens
  Table A; HLA-B*13:01; BRAF; K601E; 0
GLATVESRW

SEQ ID NO: 13727 - protein, 9 aa, Homo sapiens
  Table A; HLA-B*15:13; BRAF; K601E; 0
GLATVESRW

SEQ ID NO: 13728 - protein, 9 aa, Homo sapiens
  Table A; HLA-B*44:03; BRAF; K601E; 1
GLATVESRW

SEQ ID NO: 13729 - protein, 9 aa, Homo sapiens
  Table A; HLA-B*57:01; BRAF; K601E; 1
GLATVESRW

SEQ ID NO: 13730 - protein, 9 aa, Homo sapiens
  Table A; HLA-B*58:01; BRAF; K601E; 0
GLATVESRW

SEQ ID NO: 13731 - protein, 8 aa, Homo sapiens
  Table A; HLA-A*02:01; NFE2L2; D29G; 1
GLGVSREV

SEQ ID NO: 13732 - protein, 8 aa, Homo sapiens
  Table A; HLA-A*02:03; NFE2L2; D29G; 0
GLGVSREV

SEQ ID NO: 13733 - protein, 8 aa, Homo sapiens
  Table A; HLA-B*13:02; NFE2L2; D29G; 0
GLGVSREV

SEQ ID NO: 13734 - protein, 9 aa, Homo sapiens
  Table A; HLA-B*15:01; NFE2L2; D29G; 1
GLGVSREVF

SEQ ID NO: 13735 - protein, 9 aa, Homo sapiens
  Table A; HLA-A*29:02; IDH1; R132L; 1
GLHAYGDQY

SEQ ID NO: 13736 - protein, 9 aa, Homo sapiens
  Table A; HLA-A*30:02; IDH1; R132L; 0
GLHAYGDQY

SEQ ID NO: 13737 - protein, 9 aa, Homo sapiens
  Table A; HLA-B*15:01; IDH1; R132L; 1
GLHAYGDQY

SEQ ID NO: 13738 - protein, 9 aa, Homo sapiens
  Table A; HLA-B*15:02; IDH1; R132L; 0
GLHAYGDQY

SEQ ID NO: 13739 - protein, 9 aa, Homo sapiens
  Table A; HLA-B*15:03; IDH1; R132L; 0
GLHAYGDQY

SEQ ID NO: 13740 - protein, 9 aa, Homo sapiens
  Table A; HLA-A*02:03; PIK3CA; E453K; 0
GLKDLLNPI

SEQ ID NO: 13741 - protein, 11 aa, Homo sapiens
  Table A; HLA-A*02:01; PIK3CA; E453K; 1
GLKDLLNPIGV

SEQ ID NO: 13742 - protein, 11 aa, Homo sapiens
  Table A; HLA-A*02:03; PIK3CA; E453K; 0
GLKDLLNPIGV

SEQ ID NO: 13743 - protein, 11 aa, Homo sapiens
  Table A; HLA-A*02:04; PIK3CA; E453K; 0
GLKDLLNPIGV

SEQ ID NO: 13744 - protein, 9 aa, Homo sapiens
  Table A; HLA-A*02:04; PIK3CA; E453Q; 0
GLQDLLNPI

SEQ ID NO: 13745 - protein, 11 aa, Homo sapiens
  Table A; HLA-A*02:01; PIK3CA; E453Q; 1
GLQDLLNPIGV

SEQ ID NO: 13746 - protein, 11 aa, Homo sapiens
  Table A; HLA-A*02:03; PIK3CA; E453Q; 0
GLQDLLNPIGV

SEQ ID NO: 13747 - protein, 11 aa, Homo sapiens
  Table A; HLA-A*02:04; PIK3CA; E453Q; 0
GLQDLLNPIGV

SEQ ID NO: 13748 - protein, 11 aa, Homo sapiens
  Table A; HLA-A*02:07; PIK3CA; E453Q; 0
GLQDLLNPIGV

SEQ ID NO: 13749 - protein, 9 aa, Homo sapiens
  Table A; HLA-A*02:03; SMARCA4; G1162S; 0
GLSLNLQSA

SEQ ID NO: 13750 - protein, 9 aa, Homo sapiens
  Table A; HLA-A*02:01; PTEN; R130L; 1
GLTGVMICA

SEQ ID NO: 13751 - protein, 9 aa, Homo sapiens
  Table A; HLA-A*02:06; PTEN; R130L; 0
GLTGVMICA

SEQ ID NO: 13752 - protein, 9 aa, Homo sapiens
  Table A; HLA-B*13:02; PTEN; R130L; 1
GLTGVMICA

SEQ ID NO: 13753 - protein, 9 aa, Homo sapiens
  Table A; HLA-B*50:01; PTEN; R130L; 0
GLTGVMICA

SEQ ID NO: 13754 - protein, 9 aa, Homo sapiens
  Table A; HLA-A*02:01; SF3B1; K700E; 1
GLVDEQQEV

SEQ ID NO: 13755 - protein, 9 aa, Homo sapiens
  Table A; HLA-A*02:03; SF3B1; K700E; 0
GLVDEQQEV

SEQ ID NO: 13756 - protein, 9 aa, Homo sapiens
  Table A; HLA-A*02:04; SF3B1; K700E; 0
GLVDEQQEV

SEQ ID NO: 13757 - protein, 9 aa, Homo sapiens
  Table A; HLA-A*02:05; SF3B1; K700E; 0
GLVDEQQEV

SEQ ID NO: 13758 - protein, 9 aa, Homo sapiens
  Table A; HLA-A*02:06; SF3B1; K700E; 0
GLVDEQQEV

SEQ ID NO: 13759 - protein, 9 aa, Homo sapiens
  Table A; HLA-A*02:07; SF3B1; K700E; 0
GLVDEQQEV

SEQ ID NO: 13760 - protein, 9 aa, Homo sapiens
  Table A; HLA-A*02:08; SF3B1; K700E; 0
GLVDEQQEV

SEQ ID NO: 13761 - protein, 9 aa, Homo sapiens
  Table A; HLA-B*13:01; SF3B1; K700E; 0
GLVDEQQEV

SEQ ID NO: 13762 - protein, 9 aa, Homo sapiens
  Table A; HLA-B*13:02; SF3B1; K700E; 0
GLVDEQQEV

SEQ ID NO: 13763 - protein, 9 aa, Homo sapiens
  Table A; HLA-B*15:01; SF3B1; K700E; 1
GLVDEQQEV

SEQ ID NO: 13764 - protein, 9 aa, Homo sapiens
  Table A; HLA-B*48:01; SF3B1; K700E; 0
GLVDEQQEV

SEQ ID NO: 13765 - protein, 9 aa, Homo sapiens
  Table A; HLA-B*50:01; SF3B1; K700E; 0
GLVDEQQEV

SEQ ID NO: 13766 - protein, 10 aa, Homo sapiens
  Table A; HLA-B*27:02; SF3B1; K700E; 0
GLVDEQQEVR

SEQ ID NO: 13767 - protein, 11 aa, Homo sapiens
  Table A; HLA-B*48:01; SF3B1; K700E; 0
GLVDEQQEVRT

SEQ ID NO: 13768 - protein, 11 aa, Homo sapiens
  Table A; HLA-C*08:03; SF3B1; K700E; 0
GLVDEQQEVRT

SEQ ID NO: 13769 - protein, 11 aa, Homo sapiens
  Table A; HLA-A*02:01; MTOR; A2056V; 1
GMFEVLEPLHV

SEQ ID NO: 13770 - protein, 11 aa, Homo sapiens
  Table A; HLA-A*02:03; MTOR; A2056V; 0
GMFEVLEPLHV

SEQ ID NO: 13771 - protein, 11 aa, Homo sapiens
  Table A; HLA-A*02:04; MTOR; A2056V; 0
GMFEVLEPLHV

SEQ ID NO: 13772 - protein, 11 aa, Homo sapiens
  Table A; HLA-A*02:07; MTOR; A2056V; 0
GMFEVLEPLHV

SEQ ID NO: 13773 - protein, 8 aa, Homo sapiens
  Table A; HLA-B*08:01; TP53; R248L; 1
GMNLRPIL

SEQ ID NO: 13774 - protein, 10 aa, Homo sapiens
  Table A; HLA-A*02:03; TP53; R248L; 0
GMNLRPILTI

SEQ ID NO: 13775 - protein, 8 aa, Homo sapiens
  Table A; HLA-B*08:01; TP53; R248Q; 1
GMNQRPIL

SEQ ID NO: 13776 - protein, 8 aa, Homo sapiens
  Table A; HLA-B*40:02; TP53; R248Q; 0
GMNQRPIL

SEQ ID NO: 13777 - protein, 8 aa, Homo sapiens
  Table A; HLA-B*41:02; TP53; R248Q; 0
GMNQRPIL

SEQ ID NO: 13778 - protein, 9 aa, Homo sapiens
  Table A; HLA-A*02:03; TP53; R248Q; 0
GMNQRPILT

SEQ ID NO: 13779 - protein, 10 aa, Homo sapiens
  Table A; HLA-A*02:03; TP53; R248Q; 0
GMNQRPILTI

SEQ ID NO: 13780 - protein, 10 aa, Homo sapiens
  Table A; HLA-B*13:02; TP53; R248Q; 1
GMNQRPILTI

SEQ ID NO: 13781 - protein, 10 aa, Homo sapiens
  Table A; HLA-B*13:02; TP53; R249M; 0
GMNRMPILTI

SEQ ID NO: 13782 - protein, 10 aa, Homo sapiens
  Table A; HLA-A*02:03; TP53; R249S; 0
GMNRSPILTI

SEQ ID NO: 13783 - protein, 10 aa, Homo sapiens
  Table A; HLA-B*13:02; TP53; R249S; 1
GMNRSPILTI

SEQ ID NO: 13784 - protein, 10 aa, Homo sapiens
  Table A; HLA-B*27:02; PTPRT; E324K; 0
GPIILKKVEY

SEQ ID NO: 13785 - protein, 10 aa, Homo sapiens
  Table A; HLA-B*35:01; PTPRT; E324K; 1
GPIILKKVEY

SEQ ID NO: 13786 - protein, 9 aa, Homo sapiens
  Table A; HLA-B*39:06; PTEN; R130P; 0
GPTGVMICA

SEQ ID NO: 13787 - protein, 9 aa, Homo sapiens
  Table A; HLA-B*54:01; PTEN; R130P; 0
GPTGVMICA

SEQ ID NO: 13788 - protein, 9 aa, Homo sapiens
  Table A; HLA-B*55:01; PTEN; R130P; 0
GPTGVMICA

SEQ ID NO: 13789 - protein, 9 aa, Homo sapiens
  Table A; HLA-B*55:02; PTEN; R130P; 0
GPTGVMICA

SEQ ID NO: 13790 - protein, 9 aa, Homo sapiens
  Table A; HLA-B*56:01; PTEN; R130P; 0
GPTGVMICA

SEQ ID NO: 13791 - protein, 10 aa, Homo sapiens
  Table A; HLA-B*35:01; PTEN; R130P; 1
GPTGVMICAY

SEQ ID NO: 13792 - protein, 8 aa, Homo sapiens
  Table A; HLA-B*13:02; PTPRB; R529Q; 0
GQKYMATV

SEQ ID NO: 13793 - protein, 9 aa, Homo sapiens
  Table A; HLA-A*30:01; BRAF; G466V; 0
GQRIGSVSF

SEQ ID NO: 13794 - protein, 9 aa, Homo sapiens
  Table A; HLA-B*13:02; BRAF; G466V; 0
GQRIGSVSF

SEQ ID NO: 13795 - protein, 9 aa, Homo sapiens
  Table A; HLA-B*15:01; BRAF; G466V; 1
GQRIGSVSF

SEQ ID NO: 13796 - protein, 9 aa, Homo sapiens
  Table A; HLA-B*15:02; BRAF; G466V; 0
GQRIGSVSF

SEQ ID NO: 13797 - protein, 9 aa, Homo sapiens
  Table A; HLA-B*15:03; BRAF; G466V; 0
GQRIGSVSF

SEQ ID NO: 13798 - protein, 9 aa, Homo sapiens
  Table A; HLA-B*46:01; BRAF; G466V; 0
GQRIGSVSF

SEQ ID NO: 13799 - protein, 9 aa, Homo sapiens
  Table A; HLA-B*48:01; BRAF; G466V; 0
GQRIGSVSF

SEQ ID NO: 13800 - protein, 9 aa, Homo sapiens
  Table A; HLA-C*08:01; BRAF; G466V; 0
GQRIGSVSF

SEQ ID NO: 13801 - protein, 9 aa, Homo sapiens
  Table A; HLA-C*08:03; BRAF; G466V; 0
GQRIGSVSF

SEQ ID NO: 13802 - protein, 8 aa, Homo sapiens
  Table A; HLA-B*13:02; PTEN; R130Q; 1
GQTGVMIC

SEQ ID NO: 13803 - protein, 8 aa, Homo sapiens
  Table A; HLA-B*39:06; PTEN; R130Q; 0
GQTGVMIC

SEQ ID NO: 13804 - protein, 8 aa, Homo sapiens
  Table A; HLA-B*48:01; PTEN; R130Q; 0
GQTGVMIC

SEQ ID NO: 13805 - protein, 9 aa, Homo sapiens
  Table A; HLA-A*02:05; PTEN; R130Q; 1
GQTGVMICA

SEQ ID NO: 13806 - protein, 9 aa, Homo sapiens
  Table A; HLA-A*02:06; PTEN; R130Q; 0
GQTGVMICA

SEQ ID NO: 13807 - protein, 9 aa, Homo sapiens
  Table A; HLA-A*02:08; PTEN; R130Q; 0
GQTGVMICA

SEQ ID NO: 13808 - protein, 9 aa, Homo sapiens
  Table A; HLA-B*13:02; PTEN; R130Q; 1
GQTGVMICA

SEQ ID NO: 13809 - protein, 9 aa, Homo sapiens
  Table A; HLA-B*15:01; PTEN; R130Q; 1
GQTGVMICA

SEQ ID NO: 13810 - protein, 9 aa, Homo sapiens
  Table A; HLA-B*39:06; PTEN; R130Q; 0
GQTGVMICA

SEQ ID NO: 13811 - protein, 9 aa, Homo sapiens
  Table A; HLA-B*48:01; PTEN; R130Q; 0
GQTGVMICA

SEQ ID NO: 13812 - protein, 9 aa, Homo sapiens
  Table A; HLA-B*50:01; PTEN; R130Q; 1
GQTGVMICA

SEQ ID NO: 13813 - protein, 10 aa, Homo sapiens
  Table A; HLA-A*30:02; PTEN; R130Q; 1
GQTGVMICAY

SEQ ID NO: 13814 - protein, 10 aa, Homo sapiens
  Table A; HLA-B*15:01; PTEN; R130Q; 1
GQTGVMICAY

SEQ ID NO: 13815 - protein, 10 aa, Homo sapiens
  Table A; HLA-B*27:02; PTEN; R130Q; 0
GQTGVMICAY

SEQ ID NO: 13816 - protein, 11 aa, Homo sapiens
  Table A; HLA-B*27:05; EGFR; L858R; 1
GRAKLLGAEEK

SEQ ID NO: 13817 - protein, 11 aa, Homo sapiens
  Table A; HLA-B*38:01; TP53; R283P; 0
GRDRPTEEENL

SEQ ID NO: 13818 - protein, 9 aa, Homo sapiens
  Table A; HLA-B*39:06; EP300; A1629V; 0
GRDVFLTLA

SEQ ID NO: 13819 - protein, 9 aa, Homo sapiens
  Table A; HLA-B*27:05; KRAS; Q61R; 0
GREEYSAMR

SEQ ID NO: 13820 - protein, 9 aa, Homo sapiens
  Table A; HLA-B*27:05; NRAS; Q61R; 1
GREEYSAMR

SEQ ID NO: 13821 - protein, 9 aa, Homo sapiens
  Table A; HLA-B*27:05; TP53; V272M; 0
GRNSFEMRV

SEQ ID NO: 13822 - protein, 9 aa, Homo sapiens
  Table A; HLA-C*06:02; TP53; V272M; 1
GRNSFEMRV

SEQ ID NO: 13823 - protein, 9 aa, Homo sapiens
  Table A; HLA-B*27:05; TP53; R273C; 1
GRNSFEVCV

SEQ ID NO: 13824 - protein, 9 aa, Homo sapiens
  Table A; HLA-B*39:01; TP53; R273C; 0
GRNSFEVCV

SEQ ID NO: 13825 - protein, 9 aa, Homo sapiens
  Table A; HLA-B*39:06; TP53; R273C; 0
GRNSFEVCV

SEQ ID NO: 13826 - protein, 9 aa, Homo sapiens
  Table A; HLA-B*27:05; TP53; R273H; 1
GRNSFEVHV

SEQ ID NO: 13827 - protein, 9 aa, Homo sapiens
  Table A; HLA-B*39:06; TP53; R273H; 0
GRNSFEVHV

SEQ ID NO: 13828 - protein, 9 aa, Homo sapiens
  Table A; HLA-C*06:02; TP53; R273H; 1
GRNSFEVHV

SEQ ID NO: 13829 - protein, 9 aa, Homo sapiens
  Table A; HLA-B*27:05; TP53; R273L; 0
GRNSFEVLV

SEQ ID NO: 13830 - protein, 9 aa, Homo sapiens
  Table A; HLA-C*06:02; TP53; R273L; 1
GRNSFEVLV

SEQ ID NO: 13831 - protein, 10 aa, Homo sapiens
  Table A; HLA-B*27:02; TP53; C275Y; 0
GRNSFEVRVY

SEQ ID NO: 13832 - protein, 10 aa, Homo sapiens
  Table A; HLA-B*27:05; TP53; C275Y; 0
GRNSFEVRVY

SEQ ID NO: 13833 - protein, 10 aa, Homo sapiens
  Table A; HLA-C*07:01; TP53; C275Y; 1
GRNSFEVRVY

SEQ ID NO: 13834 - protein, 9 aa, Homo sapiens
  Table A; HLA-B*13:02; TP53; R273S; 0
GRNSFEVSV

SEQ ID NO: 13835 - protein, 9 aa, Homo sapiens
  Table A; HLA-B*27:02; TP53; R273S; 0
GRNSFEVSV

SEQ ID NO: 13836 - protein, 9 aa, Homo sapiens
  Table A; HLA-B*27:05; TP53; R273S; 0
GRNSFEVSV

SEQ ID NO: 13837 - protein, 9 aa, Homo sapiens
  Table A; HLA-B*38:01; TP53; R273S; 0
GRNSFEVSV

SEQ ID NO: 13838 - protein, 9 aa, Homo sapiens
  Table A; HLA-B*39:01; TP53; R273S; 0
GRNSFEVSV

SEQ ID NO: 13839 - protein, 9 aa, Homo sapiens
  Table A; HLA-B*39:06; TP53; R273S; 0
GRNSFEVSV

SEQ ID NO: 13840 - protein, 9 aa, Homo sapiens
  Table A; HLA-B*48:01; TP53; R273S; 0
GRNSFEVSV

SEQ ID NO: 13841 - protein, 9 aa, Homo sapiens
  Table A; HLA-C*06:02; TP53; R273S; 0
GRNSFEVSV

SEQ ID NO: 13842 - protein, 9 aa, Homo sapiens
  Table A; HLA-C*08:03; TP53; R273S; 0
GRNSFEVSV

SEQ ID NO: 13843 - protein, 9 aa, Homo sapiens
  Table A; HLA-C*16:04; TP53; R273S; 0
GRNSFEVSV

SEQ ID NO: 13844 - protein, 9 aa, Homo sapiens
  Table A; HLA-B*27:05; TP53; E271K; 0
GRNSFKVRV

SEQ ID NO: 13845 - protein, 9 aa, Homo sapiens
  Table A; HLA-C*06:02; TP53; E271K; 1
GRNSFKVRV

SEQ ID NO: 13846 - protein, 8 aa, Homo sapiens
  Table A; HLA-B*27:05; CDKN2A; P48L; 0
GRRLIQVM

SEQ ID NO: 13847 - protein, 9 aa, Homo sapiens
  Table A; HLA-B*27:05; CDKN2A; P48L; 0
GRRLIQVMM

SEQ ID NO: 13848 - protein, 8 aa, Homo sapiens
  Table A; HLA-B*14:01; NRAS; G13R; 0
GRVGKSAL

SEQ ID NO: 13849 - protein, 8 aa, Homo sapiens
  Table A; HLA-B*14:02; NRAS; G13R; 0
GRVGKSAL

SEQ ID NO: 13850 - protein, 8 aa, Homo sapiens
  Table A; HLA-B*27:05; NRAS; G13R; 0
GRVGKSAL

SEQ ID NO: 13851 - protein, 9 aa, Homo sapiens
  Table A; HLA-B*27:05; NRAS; G13R; 0
GRVGKSALT

SEQ ID NO: 13852 - protein, 10 aa, Homo sapiens
  Table A; HLA-B*13:02; NRAS; G13R; 0
GRVGKSALTI

SEQ ID NO: 13853 - protein, 10 aa, Homo sapiens
  Table A; HLA-B*27:05; NRAS; G13R; 0
GRVGKSALTI

SEQ ID NO: 13854 - protein, 8 aa, Homo sapiens
  Table A; HLA-A*11:01; BRAF; G469V; 1
GSFVTVYK

SEQ ID NO: 13855 - protein, 8 aa, Homo sapiens
  Table A; HLA-A*02:06; BRAF; G469V; 0
GSGSFVTV

SEQ ID NO: 13856 - protein, 9 aa, Homo sapiens
  Table A; HLA-A*30:02; BRAF; G469V; 0
GSGSFVTVY

SEQ ID NO: 13857 - protein, 9 aa, Homo sapiens
  Table A; HLA-A*30:04; BRAF; G469V; 0
GSGSFVTVY

SEQ ID NO: 13858 - protein, 9 aa, Homo sapiens
  Table A; HLA-B*15:01; BRAF; G469V; 1
GSGSFVTVY

SEQ ID NO: 13859 - protein, 9 aa, Homo sapiens
  Table A; HLA-B*15:03; BRAF; G469V; 0
GSGSFVTVY

SEQ ID NO: 13860 - protein, 9 aa, Homo sapiens
  Table A; HLA-B*58:01; BRAF; G469V; 0
GSGSFVTVY

SEQ ID NO: 13861 - protein, 9 aa, Homo sapiens
  Table A; HLA-C*12:03; BRAF; G469V; 1
GSGSFVTVY

SEQ ID NO: 13862 - protein, 10 aa, Homo sapiens
  Table A; HLA-A*03:01; BRAF; G469V; 1
GSGSFVTVYK

SEQ ID NO: 13863 - protein, 10 aa, Homo sapiens
  Table A; HLA-A*03:02; BRAF; G469V; 0
GSGSFVTVYK

SEQ ID NO: 13864 - protein, 10 aa, Homo sapiens
  Table A; HLA-A*11:01; BRAF; G469V; 1
GSGSFVTVYK

SEQ ID NO: 13865 - protein, 10 aa, Homo sapiens
  Table A; HLA-B*27:02; BRAF; G469V; 0
GSGSFVTVYK

SEQ ID NO: 13866 - protein, 9 aa, Homo sapiens
  Table A; HLA-A*30:02; IDH1; R132S; 0
GSHAYGDQY

SEQ ID NO: 13867 - protein, 9 aa, Homo sapiens
  Table A; HLA-A*30:04; IDH1; R132S; 0
GSHAYGDQY

SEQ ID NO: 13868 - protein, 9 aa, Homo sapiens
  Table A; HLA-B*15:01; IDH1; R132S; 1
GSHAYGDQY

SEQ ID NO: 13869 - protein, 9 aa, Homo sapiens
  Table A; HLA-B*15:03; IDH1; R132S; 0
GSHAYGDQY

SEQ ID NO: 13870 - protein, 9 aa, Homo sapiens
  Table A; HLA-B*39:01; IDH1; R132S; 0
GSHAYGDQY

SEQ ID NO: 13871 - protein, 9 aa, Homo sapiens
  Table A; HLA-B*58:01; IDH1; R132S; 0
GSHAYGDQY

SEQ ID NO: 13872 - protein, 9 aa, Homo sapiens
  Table A; HLA-C*03:02; IDH1; R132S; 0
GSHAYGDQY

SEQ ID NO: 13873 - protein, 11 aa, Homo sapiens
  Table A; HLA-B*15:01; BCORL1; K1207N; 1
GSLENKAKSSF

SEQ ID NO: 13874 - protein, 11 aa, Homo sapiens
  Table A; HLA-B*58:01; BCORL1; K1207N; 0
GSLENKAKSSF

SEQ ID NO: 13875 - protein, 9 aa, Homo sapiens
  Table A; HLA-B*41:02; TP53; G245S; 0
GSMNRRPIL

SEQ ID NO: 13876 - protein, 9 aa, Homo sapiens
  Table A; HLA-C*16:01; TP53; G245S; 1
GSMNRRPIL

SEQ ID NO: 13877 - protein, 9 aa, Homo sapiens
  Table A; HLA-B*13:02; FBXW7; R479Q; 0
GSQDATLRV

SEQ ID NO: 13878 - protein, 9 aa, Homo sapiens
  Table A; HLA-C*15:02; FBXW7; R479Q; 0
GSQDATLRV

SEQ ID NO: 13879 - protein, 10 aa, Homo sapiens
  Table A; HLA-B*57:01; FBXW7; R479Q; 0
GSQDATLRVW

SEQ ID NO: 13880 - protein, 10 aa, Homo sapiens
  Table A; HLA-B*58:01; FBXW7; R479Q; 0
GSQDATLRVW

SEQ ID NO: 13881 - protein, 8 aa, Homo sapiens
  Table A; HLA-B*39:06; TRRAP; S722F; 0
GSVFLFAA

SEQ ID NO: 13882 - protein, 9 aa, Homo sapiens
  Table A; HLA-A*30:02; BRAF; G466V; 0
GSVSFGTVY

SEQ ID NO: 13883 - protein, 9 aa, Homo sapiens
  Table A; HLA-A*30:04; BRAF; G466V; 0
GSVSFGTVY

SEQ ID NO: 13884 - protein, 9 aa, Homo sapiens
  Table A; HLA-B*15:01; BRAF; G466V; 1
GSVSFGTVY

SEQ ID NO: 13885 - protein, 9 aa, Homo sapiens
  Table A; HLA-B*15:02; BRAF; G466V; 0
GSVSFGTVY

SEQ ID NO: 13886 - protein, 9 aa, Homo sapiens
  Table A; HLA-B*15:03; BRAF; G466V; 0
GSVSFGTVY

SEQ ID NO: 13887 - protein, 9 aa, Homo sapiens
  Table A; HLA-B*58:01; BRAF; G466V; 0
GSVSFGTVY

SEQ ID NO: 13888 - protein, 9 aa, Homo sapiens
  Table A; HLA-C*03:02; BRAF; G466V; 0
GSVSFGTVY

SEQ ID NO: 13889 - protein, 10 aa, Homo sapiens
  Table A; HLA-A*03:01; BRAF; G466V; 1
GSVSFGTVYK

SEQ ID NO: 13890 - protein, 10 aa, Homo sapiens
  Table A; HLA-A*03:02; BRAF; G466V; 0
GSVSFGTVYK

SEQ ID NO: 13891 - protein, 10 aa, Homo sapiens
  Table A; HLA-A*11:01; BRAF; G466V; 1
GSVSFGTVYK

SEQ ID NO: 13892 - protein, 10 aa, Homo sapiens
  Table A; HLA-B*27:02; FBXW7; R689W; 0
GSWNGTEETK

SEQ ID NO: 13893 - protein, 9 aa, Homo sapiens
  Table A; HLA-A*29:02; TP53; R110L; 0
GSYGFLLGF

SEQ ID NO: 13894 - protein, 9 aa, Homo sapiens
  Table A; HLA-B*57:01; TP53; R110L; 0
GSYGFLLGF

SEQ ID NO: 13895 - protein, 10 aa, Homo sapiens
  Table A; HLA-A*02:03; TP53; R110L; 0
GSYGFLLGFL

SEQ ID NO: 13896 - protein, 10 aa, Homo sapiens
  Table A; HLA-A*03:01; TP53; R110L; 1
GSYGFLLGFL

SEQ ID NO: 13897 - protein, 9 aa, Homo sapiens
  Table A; HLA-B*57:01; KAT6B; R1254H; 0
GTKHGLSKW

SEQ ID NO: 13898 - protein, 9 aa, Homo sapiens
  Table A; HLA-A*03:01; LIFR; E319K; 1
GTNVVFTTK

SEQ ID NO: 13899 - protein, 9 aa, Homo sapiens
  Table A; HLA-A*03:02; LIFR; E319K; 0
GTNVVFTTK

SEQ ID NO: 13900 - protein, 9 aa, Homo sapiens
  Table A; HLA-A*11:01; LIFR; E319K; 0
GTNVVFTTK

SEQ ID NO: 13901 - protein, 9 aa, Homo sapiens
  Table A; HLA-A*30:01; LIFR; E319K; 0
GTNVVFTTK

SEQ ID NO: 13902 - protein, 9 aa, Homo sapiens
  Table A; HLA-A*31:01; LIFR; E319K; 0
GTNVVFTTK

SEQ ID NO: 13903 - protein, 9 aa, Homo sapiens
  Table A; HLA-A*68:01; LIFR; E319K; 0
GTNVVFTTK

SEQ ID NO: 13904 - protein, 9 aa, Homo sapiens
  Table A; HLA-A*02:01; ARHGEF12; R705H; 1
GTPHTLNTV

SEQ ID NO: 13905 - protein, 9 aa, Homo sapiens
  Table A; HLA-A*02:03; ARHGEF12; R705H; 0
GTPHTLNTV

SEQ ID NO: 13906 - protein, 9 aa, Homo sapiens
  Table A; HLA-A*02:05; ARHGEF12; R705H; 0
GTPHTLNTV

SEQ ID NO: 13907 - protein, 9 aa, Homo sapiens
  Table A; HLA-A*02:06; ARHGEF12; R705H; 0
GTPHTLNTV

SEQ ID NO: 13908 - protein, 9 aa, Homo sapiens
  Table A; HLA-A*02:07; ARHGEF12; R705H; 0
GTPHTLNTV

SEQ ID NO: 13909 - protein, 9 aa, Homo sapiens
  Table A; HLA-A*02:08; ARHGEF12; R705H; 0
GTPHTLNTV

SEQ ID NO: 13910 - protein, 9 aa, Homo sapiens
  Table A; HLA-A*68:02; ARHGEF12; R705H; 0
GTPHTLNTV

SEQ ID NO: 13911 - protein, 9 aa, Homo sapiens
  Table A; HLA-B*50:01; ARHGEF12; R705H; 0
GTPHTLNTV

SEQ ID NO: 13912 - protein, 10 aa, Homo sapiens
  Table A; HLA-A*11:01; SMARCA4; E920K; 0
GTPLQNKLPK

SEQ ID NO: 13913 - protein, 9 aa, Homo sapiens
  Table A; HLA-A*02:01; FAM135B; S11L; 1
GTVEFLVEL

SEQ ID NO: 13914 - protein, 9 aa, Homo sapiens
  Table A; HLA-A*02:03; FAM135B; S11L; 0
GTVEFLVEL

SEQ ID NO: 13915 - protein, 9 aa, Homo sapiens
  Table A; HLA-A*02:04; FAM135B; S11L; 0
GTVEFLVEL

SEQ ID NO: 13916 - protein, 9 aa, Homo sapiens
  Table A; HLA-A*02:05; FAM135B; S11L; 0
GTVEFLVEL

SEQ ID NO: 13917 - protein, 9 aa, Homo sapiens
  Table A; HLA-A*02:06; FAM135B; S11L; 0
GTVEFLVEL

SEQ ID NO: 13918 - protein, 9 aa, Homo sapiens
  Table A; HLA-A*02:08; FAM135B; S11L; 0
GTVEFLVEL

SEQ ID NO: 13919 - protein, 9 aa, Homo sapiens
  Table A; HLA-A*68:02; FAM135B; S11L; 0
GTVEFLVEL

SEQ ID NO: 13920 - protein, 9 aa, Homo sapiens
  Table A; HLA-B*50:01; FAM135B; S11L; 0
GTVEFLVEL

SEQ ID NO: 13921 - protein, 9 aa, Homo sapiens
  Table A; HLA-C*15:02; FAM135B; S11L; 0
GTVEFLVEL

SEQ ID NO: 13922 - protein, 10 aa, Homo sapiens
  Table A; HLA-A*03:01; KEAP1; R470C; 1
GVAVLNCLLY

SEQ ID NO: 13923 - protein, 10 aa, Homo sapiens
  Table A; HLA-A*29:02; KEAP1; R470C; 0
GVAVLNCLLY

SEQ ID NO: 13924 - protein, 9 aa, Homo sapiens
  Table A; HLA-B*13:02; PABPC1; R518C; 0
GVCNPQQHL

SEQ ID NO: 13925 - protein, 9 aa, Homo sapiens
  Table A; HLA-B*13:02; KEAP1; D422N; 0
GVGVINGHI

SEQ ID NO: 13926 - protein, 10 aa, Homo sapiens
  Table A; HLA-B*15:01; KEAP1; D422N; 0
GVGVINGHIY

SEQ ID NO: 13927 - protein, 10 aa, Homo sapiens
  Table A; HLA-B*27:02; KEAP1; D422N; 0
GVGVINGHIY

SEQ ID NO: 13928 - protein, 8 aa, Homo sapiens
  Table A; HLA-A*26:01; KEAP1; D422N; 0
GVINGHIY

SEQ ID NO: 13929 - protein, 8 aa, Homo sapiens
  Table A; HLA-A*30:02; KEAP1; D422N; 0
GVINGHIY

SEQ ID NO: 13930 - protein, 8 aa, Homo sapiens
  Table A; HLA-B*15:01; KEAP1; D422N; 0
GVINGHIY

SEQ ID NO: 13931 - protein, 8 aa, Homo sapiens
  Table A; HLA-B*15:03; KEAP1; D422N; 0
GVINGHIY

SEQ ID NO: 13932 - protein, 8 aa, Homo sapiens
  Table A; HLA-B*27:05; KEAP1; D422N; 0
GVINGHIY

SEQ ID NO: 13933 - protein, 9 aa, Homo sapiens
  Table A; HLA-A*02:05; KEAP1; D422N; 0
GVINGHIYA

SEQ ID NO: 13934 - protein, 9 aa, Homo sapiens
  Table A; HLA-A*02:06; KEAP1; D422N; 0
GVINGHIYA

SEQ ID NO: 13935 - protein, 9 aa, Homo sapiens
  Table A; HLA-A*11:01; KEAP1; D422N; 0
GVINGHIYA

SEQ ID NO: 13936 - protein, 9 aa, Homo sapiens
  Table A; HLA-B*15:01; KEAP1; D422N; 0
GVINGHIYA

SEQ ID NO: 13937 - protein, 9 aa, Homo sapiens
  Table A; HLA-B*50:01; KEAP1; D422N; 0
GVINGHIYA

SEQ ID NO: 13938 - protein, 10 aa, Homo sapiens
  Table A; HLA-A*02:01; KEAP1; D422N; 1
GVINGHIYAV

SEQ ID NO: 13939 - protein, 10 aa, Homo sapiens
  Table A; HLA-A*02:03; KEAP1; D422N; 0
GVINGHIYAV

SEQ ID NO: 13940 - protein, 10 aa, Homo sapiens
  Table A; HLA-A*02:04; KEAP1; D422N; 0
GVINGHIYAV

SEQ ID NO: 13941 - protein, 10 aa, Homo sapiens
  Table A; HLA-A*02:05; KEAP1; D422N; 0
GVINGHIYAV

SEQ ID NO: 13942 - protein, 10 aa, Homo sapiens
  Table A; HLA-A*02:06; KEAP1; D422N; 0
GVINGHIYAV

SEQ ID NO: 13943 - protein, 10 aa, Homo sapiens
  Table A; HLA-A*02:07; KEAP1; D422N; 0
GVINGHIYAV

SEQ ID NO: 13944 - protein, 10 aa, Homo sapiens
  Table A; HLA-A*02:08; KEAP1; D422N; 0
GVINGHIYAV

SEQ ID NO: 13945 - protein, 10 aa, Homo sapiens
  Table A; HLA-A*03:01; KEAP1; D422N; 1
GVINGHIYAV

SEQ ID NO: 13946 - protein, 10 aa, Homo sapiens
  Table A; HLA-A*03:02; KEAP1; D422N; 0
GVINGHIYAV

SEQ ID NO: 13947 - protein, 10 aa, Homo sapiens
  Table A; HLA-A*11:01; KEAP1; D422N; 0
GVINGHIYAV

SEQ ID NO: 13948 - protein, 10 aa, Homo sapiens
  Table A; HLA-A*26:01; KEAP1; D422N; 0
GVINGHIYAV

SEQ ID NO: 13949 - protein, 10 aa, Homo sapiens
  Table A; HLA-A*26:03; KEAP1; D422N; 0
GVINGHIYAV

SEQ ID NO: 13950 - protein, 10 aa, Homo sapiens
  Table A; HLA-A*29:02; KEAP1; D422N; 0
GVINGHIYAV

SEQ ID NO: 13951 - protein, 10 aa, Homo sapiens
  Table A; HLA-A*30:01; KEAP1; D422N; 0
GVINGHIYAV

SEQ ID NO: 13952 - protein, 10 aa, Homo sapiens
  Table A; HLA-A*31:01; KEAP1; D422N; 0
GVINGHIYAV

SEQ ID NO: 13953 - protein, 10 aa, Homo sapiens
  Table A; HLA-A*68:02; KEAP1; D422N; 0
GVINGHIYAV

SEQ ID NO: 13954 - protein, 10 aa, Homo sapiens
  Table A; HLA-B*13:02; KEAP1; D422N; 0
GVINGHIYAV

SEQ ID NO: 13955 - protein, 10 aa, Homo sapiens
  Table A; HLA-B*15:01; KEAP1; D422N; 0
GVINGHIYAV

SEQ ID NO: 13956 - protein, 10 aa, Homo sapiens
  Table A; HLA-B*40:02; KEAP1; D422N; 0
GVINGHIYAV

SEQ ID NO: 13957 - protein, 10 aa, Homo sapiens
  Table A; HLA-B*50:01; KEAP1; D422N; 0
GVINGHIYAV

SEQ ID NO: 13958 - protein, 10 aa, Homo sapiens
  Table A; HLA-A*02:04; KDR; S1100F; 0
GVLLWEIFFL

SEQ ID NO: 13959 - protein, 9 aa, Homo sapiens
  Table A; HLA-B*07:02; TP53; G245V; 1
GVMNRRPIL

SEQ ID NO: 13960 - protein, 9 aa, Homo sapiens
  Table A; HLA-A*03:02; FAS; E261K; 0
GVNEAKIDK

SEQ ID NO: 13961 - protein, 9 aa, Homo sapiens
  Table A; HLA-A*11:01; FAS; E261K; 1
GVNEAKIDK

SEQ ID NO: 13962 - protein, 10 aa, Homo sapiens
  Table A; HLA-A*02:05; FAS; E261K; 0
GVNEAKIDKI

SEQ ID NO: 13963 - protein, 10 aa, Homo sapiens
  Table A; HLA-A*02:06; FAS; E261K; 0
GVNEAKIDKI

SEQ ID NO: 13964 - protein, 10 aa, Homo sapiens
  Table A; HLA-A*02:08; FAS; E261K; 0
GVNEAKIDKI

SEQ ID NO: 13965 - protein, 10 aa, Homo sapiens
  Table A; HLA-B*13:01; FAS; E261K; 0
GVNEAKIDKI

SEQ ID NO: 13966 - protein, 10 aa, Homo sapiens
  Table A; HLA-B*50:01; FAS; E261K; 0
GVNEAKIDKI

SEQ ID NO: 13967 - protein, 10 aa, Homo sapiens
  Table A; HLA-A*03:01; ARHGEF12; R113Q; 1
GVQTGDQIIK

SEQ ID NO: 13968 - protein, 10 aa, Homo sapiens
  Table A; HLA-A*03:02; ARHGEF12; R113Q; 0
GVQTGDQIIK

SEQ ID NO: 13969 - protein, 10 aa, Homo sapiens
  Table A; HLA-A*11:01; ARHGEF12; R113Q; 0
GVQTGDQIIK

SEQ ID NO: 13970 - protein, 10 aa, Homo sapiens
  Table A; HLA-B*27:02; ARHGEF12; R113Q; 0
GVQTGDQIIK

SEQ ID NO: 13971 - protein, 11 aa, Homo sapiens
  Table A; HLA-A*02:01; ARHGEF12; R113Q; 1
GVQTGDQIIKV

SEQ ID NO: 13972 - protein, 11 aa, Homo sapiens
  Table A; HLA-A*02:04; ARHGEF12; R113Q; 0
GVQTGDQIIKV

SEQ ID NO: 13973 - protein, 11 aa, Homo sapiens
  Table A; HLA-A*02:05; ARHGEF12; R113Q; 0
GVQTGDQIIKV

SEQ ID NO: 13974 - protein, 11 aa, Homo sapiens
  Table A; HLA-A*02:06; ARHGEF12; R113Q; 0
GVQTGDQIIKV

SEQ ID NO: 13975 - protein, 11 aa, Homo sapiens
  Table A; HLA-A*02:08; ARHGEF12; R113Q; 0
GVQTGDQIIKV

SEQ ID NO: 13976 - protein, 11 aa, Homo sapiens
  Table A; HLA-A*11:01; ARHGEF12; R113Q; 0
GVQTGDQIIKV

SEQ ID NO: 13977 - protein, 11 aa, Homo sapiens
  Table A; HLA-A*68:02; ARHGEF12; R113Q; 0
GVQTGDQIIKV

SEQ ID NO: 13978 - protein, 11 aa, Homo sapiens
  Table A; HLA-B*50:01; ARHGEF12; R113Q; 0
GVQTGDQIIKV

SEQ ID NO: 13979 - protein, 9 aa, Homo sapiens
  Table A; HLA-A*29:02; NFE2L2; R34G; 0
GVSGEVFDF

SEQ ID NO: 13980 - protein, 9 aa, Homo sapiens
  Table A; HLA-B*13:01; NFE2L2; R34G; 0
GVSGEVFDF

SEQ ID NO: 13981 - protein, 9 aa, Homo sapiens
  Table A; HLA-B*15:01; NFE2L2; R34G; 1
GVSGEVFDF

SEQ ID NO: 13982 - protein, 9 aa, Homo sapiens
  Table A; HLA-B*27:02; NFE2L2; R34G; 0
GVSGEVFDF

SEQ ID NO: 13983 - protein, 9 aa, Homo sapiens
  Table A; HLA-B*35:01; NFE2L2; R34G; 0
GVSGEVFDF

SEQ ID NO: 13984 - protein, 10 aa, Homo sapiens
  Table A; HLA-C*08:03; NFE2L2; R34G; 0
GVSGEVFDFS

SEQ ID NO: 13985 - protein, 9 aa, Homo sapiens
  Table A; HLA-B*15:01; NFE2L2; R34Q; 1
GVSQEVFDF

SEQ ID NO: 13986 - protein, 9 aa, Homo sapiens
  Table A; HLA-B*27:02; NFE2L2; R34Q; 0
GVSQEVFDF

SEQ ID NO: 13987 - protein, 8 aa, Homo sapiens
  Table A; HLA-A*31:01; PTEN; S170N; 0
GVTIPNQR

SEQ ID NO: 13988 - protein, 11 aa, Homo sapiens
  Table A; HLA-A*03:02; GLI1; R637Q; 0
GYNPNAGVTQR

SEQ ID NO: 13989 - protein, 11 aa, Homo sapiens
  Table A; HLA-A*31:01; GLI1; R637Q; 0
GYNPNAGVTQR

SEQ ID NO: 13990 - protein, 11 aa, Homo sapiens
  Table A; HLA-A*33:01; GLI1; R637Q; 0
GYNPNAGVTQR

SEQ ID NO: 13991 - protein, 11 aa, Homo sapiens
  Table A; HLA-A*33:03; GLI1; R637Q; 0
GYNPNAGVTQR

SEQ ID NO: 13992 - protein, 11 aa, Homo sapiens
  Table A; HLA-B*27:02; GLI1; R637Q; 0
GYNPNAGVTQR

SEQ ID NO: 13993 - protein, 11 aa, Homo sapiens
  Table A; HLA-A*31:01; A1CF; E34K; 0
GYSLVQKNGQR

SEQ ID NO: 13994 - protein, 11 aa, Homo sapiens
  Table A; HLA-A*23:01; SMAD4; R361C; 0
GYVDPSGGDCF

SEQ ID NO: 13995 - protein, 11 aa, Homo sapiens
  Table A; HLA-A*24:02; SMAD4; R361C; 1
GYVDPSGGDCF

SEQ ID NO: 13996 - protein, 11 aa, Homo sapiens
  Table A; HLA-B*13:01; SMAD4; R361C; 0
GYVDPSGGDCF

SEQ ID NO: 13997 - protein, 11 aa, Homo sapiens
  Table A; HLA-B*15:01; SMAD4; R361C; 1
GYVDPSGGDCF

SEQ ID NO: 13998 - protein, 11 aa, Homo sapiens
  Table A; HLA-B*15:03; SMAD4; R361C; 0
GYVDPSGGDCF

SEQ ID NO: 13999 - protein, 11 aa, Homo sapiens
  Table A; HLA-B*38:01; SMAD4; R361C; 0
GYVDPSGGDCF

SEQ ID NO: 14000 - protein, 11 aa, Homo sapiens
  Table A; HLA-B*39:01; SMAD4; R361C; 0
GYVDPSGGDCF

SEQ ID NO: 14001 - protein, 11 aa, Homo sapiens
  Table A; HLA-B*44:05; SMAD4; R361C; 0
GYVDPSGGDCF

SEQ ID NO: 14002 - protein, 11 aa, Homo sapiens
  Table A; HLA-B*48:01; SMAD4; R361C; 0
GYVDPSGGDCF

SEQ ID NO: 14003 - protein, 11 aa, Homo sapiens
  Table A; HLA-A*23:01; SMAD4; R361H; 0
GYVDPSGGDHF

SEQ ID NO: 14004 - protein, 11 aa, Homo sapiens
  Table A; HLA-A*24:02; SMAD4; R361H; 1
GYVDPSGGDHF

SEQ ID NO: 14005 - protein, 11 aa, Homo sapiens
  Table A; HLA-B*13:01; SMAD4; R361H; 0
GYVDPSGGDHF

SEQ ID NO: 14006 - protein, 11 aa, Homo sapiens
  Table A; HLA-B*38:01; SMAD4; R361H; 0
GYVDPSGGDHF

SEQ ID NO: 14007 - protein, 11 aa, Homo sapiens
  Table A; HLA-B*39:01; SMAD4; R361H; 0
GYVDPSGGDHF

SEQ ID NO: 14008 - protein, 11 aa, Homo sapiens
  Table A; HLA-B*44:05; SMAD4; R361H; 0
GYVDPSGGDHF

SEQ ID NO: 14009 - protein, 8 aa, Homo sapiens
  Table A; HLA-B*35:03; CTNNB1; S37A; 0
HAGATTTA

SEQ ID NO: 14010 - protein, 8 aa, Homo sapiens
  Table A; HLA-B*39:06; CTNNB1; S37A; 0
HAGATTTA

SEQ ID NO: 14011 - protein, 8 aa, Homo sapiens
  Table A; HLA-B*54:01; CTNNB1; S37A; 0
HAGATTTA

SEQ ID NO: 14012 - protein, 9 aa, Homo sapiens
  Table A; HLA-B*35:01; CTNNB1; S37A; 1
HAGATTTAP

SEQ ID NO: 14013 - protein, 9 aa, Homo sapiens
  Table A; HLA-B*35:03; CTNNB1; S37A; 0
HAGATTTAP

SEQ ID NO: 14014 - protein, 9 aa, Homo sapiens
  Table A; HLA-B*48:01; CTNNB1; S37A; 0
HAGATTTAP

SEQ ID NO: 14015 - protein, 9 aa, Homo sapiens
  Table A; HLA-B*54:01; CTNNB1; S37A; 0
HAGATTTAP

SEQ ID NO: 14016 - protein, 10 aa, Homo sapiens
  Table A; HLA-C*08:03; CTNNB1; S37A; 0
HAGATTTAPS

SEQ ID NO: 14017 - protein, 11 aa, Homo sapiens
  Table A; HLA-B*35:01; CTNNB1; S37A; 1
HAGATTTAPSL

SEQ ID NO: 14018 - protein, 11 aa, Homo sapiens
  Table A; HLA-B*35:03; CTNNB1; S37A; 0
HAGATTTAPSL

SEQ ID NO: 14019 - protein, 9 aa, Homo sapiens
  Table A; HLA-A*31:01; DCAF12L2; R378H; 0
HAQKFLEER

SEQ ID NO: 14020 - protein, 9 aa, Homo sapiens
  Table A; HLA-A*33:01; DCAF12L2; R378H; 0
HAQKFLEER

SEQ ID NO: 14021 - protein, 9 aa, Homo sapiens
  Table A; HLA-A*33:03; DCAF12L2; R378H; 0
HAQKFLEER

SEQ ID NO: 14022 - protein, 8 aa, Homo sapiens
  Table A; HLA-A*23:01; PIK3CA; R38H; 0
HEATLVTI

SEQ ID NO: 14023 - protein, 8 aa, Homo sapiens
  Table A; HLA-A*30:01; PIK3CA; R38H; 0
HEATLVTI

SEQ ID NO: 14024 - protein, 8 aa, Homo sapiens
  Table A; HLA-B*13:02; PIK3CA; R38H; 0
HEATLVTI

SEQ ID NO: 14025 - protein, 8 aa, Homo sapiens
  Table A; HLA-B*18:01; PIK3CA; R38H; 1
HEATLVTI

SEQ ID NO: 14026 - protein, 8 aa, Homo sapiens
  Table A; HLA-B*37:01; PIK3CA; R38H; 0
HEATLVTI

SEQ ID NO: 14027 - protein, 8 aa, Homo sapiens
  Table A; HLA-B*38:01; PIK3CA; R38H; 0
HEATLVTI

SEQ ID NO: 14028 - protein, 8 aa, Homo sapiens
  Table A; HLA-B*39:06; PIK3CA; R38H; 0
HEATLVTI

SEQ ID NO: 14029 - protein, 8 aa, Homo sapiens
  Table A; HLA-B*40:01; PIK3CA; R38H; 1
HEATLVTI

SEQ ID NO: 14030 - protein, 8 aa, Homo sapiens
  Table A; HLA-B*40:02; PIK3CA; R38H; 0
HEATLVTI

SEQ ID NO: 14031 - protein, 8 aa, Homo sapiens
  Table A; HLA-B*40:06; PIK3CA; R38H; 0
HEATLVTI

SEQ ID NO: 14032 - protein, 8 aa, Homo sapiens
  Table A; HLA-B*41:02; PIK3CA; R38H; 0
HEATLVTI

SEQ ID NO: 14033 - protein, 8 aa, Homo sapiens
  Table A; HLA-B*44:05; PIK3CA; R38H; 0
HEATLVTI

SEQ ID NO: 14034 - protein, 8 aa, Homo sapiens
  Table A; HLA-B*49:01; PIK3CA; R38H; 0
HEATLVTI

SEQ ID NO: 14035 - protein, 8 aa, Homo sapiens
  Table A; HLA-B*50:01; PIK3CA; R38H; 0
HEATLVTI

SEQ ID NO: 14036 - protein, 8 aa, Homo sapiens
  Table A; HLA-B*51:01; PIK3CA; R38H; 1
HEATLVTI

SEQ ID NO: 14037 - protein, 8 aa, Homo sapiens
  Table A; HLA-B*58:01; PIK3CA; R38H; 0
HEATLVTI

SEQ ID NO: 14038 - protein, 9 aa, Homo sapiens
  Table A; HLA-A*30:01; PIK3CA; R38H; 0
HEATLVTIK

SEQ ID NO: 14039 - protein, 9 aa, Homo sapiens
  Table A; HLA-A*68:01; PIK3CA; R38H; 0
HEATLVTIK

SEQ ID NO: 14040 - protein, 9 aa, Homo sapiens
  Table A; HLA-B*18:01; PIK3CA; R38H; 1
HEATLVTIK

SEQ ID NO: 14041 - protein, 9 aa, Homo sapiens
  Table A; HLA-B*27:02; PIK3CA; R38H; 0
HEATLVTIK

SEQ ID NO: 14042 - protein, 9 aa, Homo sapiens
  Table A; HLA-B*40:02; PIK3CA; R38H; 0
HEATLVTIK

SEQ ID NO: 14043 - protein, 9 aa, Homo sapiens
  Table A; HLA-B*49:01; PIK3CA; R38H; 0
HEATLVTIK

SEQ ID NO: 14044 - protein, 8 aa, Homo sapiens
  Table A; HLA-B*49:01; MAP2K1; P124S; 0
HECNSSYI

SEQ ID NO: 14045 - protein, 10 aa, Homo sapiens
  Table A; HLA-B*40:06; BCORL1; K1207N; 0
HEEGSLENKA

SEQ ID NO: 14046 - protein, 10 aa, Homo sapiens
  Table A; HLA-B*50:01; BCORL1; K1207N; 0
HEEGSLENKA

SEQ ID NO: 14047 - protein, 8 aa, Homo sapiens
  Table A; HLA-B*39:06; CTNNB1; S37F; 0
HFGATTTA

SEQ ID NO: 14048 - protein, 8 aa, Homo sapiens
  Table A; HLA-B*48:01; CTNNB1; S37F; 0
HFGATTTA

SEQ ID NO: 14049 - protein, 8 aa, Homo sapiens
  Table A; HLA-C*08:03; CTNNB1; S37F; 0
HFGATTTA

SEQ ID NO: 14050 - protein, 8 aa, Homo sapiens
  Table A; HLA-A*11:01; FKBP9; R107H; 1
HFVKIPPK

SEQ ID NO: 14051 - protein, 9 aa, Homo sapiens
  Table A; HLA-A*02:04; FKBP9; R107H; 0
HFVKIPPKL

SEQ ID NO: 14052 - protein, 9 aa, Homo sapiens
  Table A; HLA-A*23:01; FKBP9; R107H; 1
HFVKIPPKL

SEQ ID NO: 14053 - protein, 9 aa, Homo sapiens
  Table A; HLA-A*30:01; FKBP9; R107H; 0
HFVKIPPKL

SEQ ID NO: 14054 - protein, 11 aa, Homo sapiens
  Table A; HLA-A*29:02; FKBP9; R107H; 1
HFVKIPPKLAY

SEQ ID NO: 14055 - protein, 10 aa, Homo sapiens
  Table A; HLA-B*48:01; SF3B1; K700E; 0
HGLVDEQQEV

SEQ ID NO: 14056 - protein, 10 aa, Homo sapiens
  Table A; HLA-C*08:03; SF3B1; K700E; 0
HGLVDEQQEV

SEQ ID NO: 14057 - protein, 11 aa, Homo sapiens
  Table A; HLA-A*68:01; SF3B1; K700E; 0
HGLVDEQQEVR

SEQ ID NO: 14058 - protein, 11 aa, Homo sapiens
  Table A; HLA-B*27:02; SF3B1; K700E; 0
HGLVDEQQEVR

SEQ ID NO: 14059 - protein, 8 aa, Homo sapiens
  Table A; HLA-B*38:01; IDH1; R132H; 1
HHAYGDQY

SEQ ID NO: 14060 - protein, 8 aa, Homo sapiens
  Table A; HLA-B*39:01; IDH1; R132H; 1
HHAYGDQY

SEQ ID NO: 14061 - protein, 9 aa, Homo sapiens
  Table A; HLA-B*38:01; PREX2; E553K; 0
HHVLEKSKF

SEQ ID NO: 14062 - protein, 9 aa, Homo sapiens
  Table A; HLA-B*35:03; SIRPA; V233I; 0
HITLQGDPL

SEQ ID NO: 14063 - protein, 9 aa, Homo sapiens
  Table A; HLA-B*48:01; SIRPA; V233I; 0
HITLQGDPL

SEQ ID NO: 14064 - protein, 9 aa, Homo sapiens
  Table A; HLA-C*08:01; SIRPA; V233I; 0
HITLQGDPL

SEQ ID NO: 14065 - protein, 9 aa, Homo sapiens
  Table A; HLA-C*08:03; SIRPA; V233I; 0
HITLQGDPL

SEQ ID NO: 14066 - protein, 9 aa, Homo sapiens
  Table A; HLA-B*15:03; TP63; E609K; 0
HKFSSPSHL

SEQ ID NO: 14067 - protein, 8 aa, Homo sapiens
  Table A; HLA-B*35:08; PTPRK; E358K; 0
HLDPDTKY

SEQ ID NO: 14068 - protein, 8 aa, Homo sapiens
  Table A; HLA-B*39:01; PTPRK; E358K; 0
HLDPDTKY

SEQ ID NO: 14069 - protein, 10 aa, Homo sapiens
  Table A; HLA-A*02:01; PTPRK; E358K; 1
HLDPDTKYEI

SEQ ID NO: 14070 - protein, 10 aa, Homo sapiens
  Table A; HLA-A*02:04; PTPRK; E358K; 0
HLDPDTKYEI

SEQ ID NO: 14071 - protein, 10 aa, Homo sapiens
  Table A; HLA-A*02:06; PTPRK; E358K; 0
HLDPDTKYEI

SEQ ID NO: 14072 - protein, 10 aa, Homo sapiens
  Table A; HLA-A*02:07; PTPRK; E358K; 0
HLDPDTKYEI

SEQ ID NO: 14073 - protein, 10 aa, Homo sapiens
  Table A; HLA-B*13:01; PTPRK; E358K; 0
HLDPDTKYEI

SEQ ID NO: 14074 - protein, 10 aa, Homo sapiens
  Table A; HLA-B*13:02; PTPRK; E358K; 0
HLDPDTKYEI

SEQ ID NO: 14075 - protein, 10 aa, Homo sapiens
  Table A; HLA-B*38:01; PTPRK; E358K; 0
HLDPDTKYEI

SEQ ID NO: 14076 - protein, 8 aa, Homo sapiens
  Table A; HLA-A*02:01; NFE2L2; D29H; 1
HLGVSREV

SEQ ID NO: 14077 - protein, 8 aa, Homo sapiens
  Table A; HLA-A*02:03; NFE2L2; D29H; 0
HLGVSREV

SEQ ID NO: 14078 - protein, 8 aa, Homo sapiens
  Table A; HLA-B*08:01; NFE2L2; D29H; 1
HLGVSREV

SEQ ID NO: 14079 - protein, 8 aa, Homo sapiens
  Table A; HLA-B*13:02; NFE2L2; D29H; 0
HLGVSREV

SEQ ID NO: 14080 - protein, 8 aa, Homo sapiens
  Table A; HLA-B*15:10; NFE2L2; D29H; 0
HLGVSREV

SEQ ID NO: 14081 - protein, 9 aa, Homo sapiens
  Table A; HLA-B*15:01; NFE2L2; D29H; 0
HLGVSREVF

SEQ ID NO: 14082 - protein, 9 aa, Homo sapiens
  Table A; HLA-B*15:02; NFE2L2; D29H; 0
HLGVSREVF

SEQ ID NO: 14083 - protein, 8 aa, Homo sapiens
  Table A; HLA-A*02:03; TPR; S2155L; 0
HLPQVAGV

SEQ ID NO: 14084 - protein, 8 aa, Homo sapiens
  Table A; HLA-A*02:07; TPR; S2155L; 0
HLPQVAGV

SEQ ID NO: 14085 - protein, 8 aa, Homo sapiens
  Table A; HLA-B*13:02; TPR; S2155L; 0
HLPQVAGV

SEQ ID NO: 14086 - protein, 9 aa, Homo sapiens
  Table A; HLA-B*48:01; TPR; S2155L; 0
HLPQVAGVP

SEQ ID NO: 14087 - protein, 10 aa, Homo sapiens
  Table A; HLA-A*02:07; TPR; S2155L; 0
HLPQVAGVPR

SEQ ID NO: 14088 - protein, 10 aa, Homo sapiens
  Table A; HLA-A*26:03; TPR; S2155L; 0
HLPQVAGVPR

SEQ ID NO: 14089 - protein, 10 aa, Homo sapiens
  Table A; HLA-A*31:01; TPR; S2155L; 0
HLPQVAGVPR

SEQ ID NO: 14090 - protein, 10 aa, Homo sapiens
  Table A; HLA-A*33:01; TPR; S2155L; 0
HLPQVAGVPR

SEQ ID NO: 14091 - protein, 10 aa, Homo sapiens
  Table A; HLA-A*33:03; TPR; S2155L; 0
HLPQVAGVPR

SEQ ID NO: 14092 - protein, 10 aa, Homo sapiens
  Table A; HLA-A*68:01; TPR; S2155L; 0
HLPQVAGVPR

SEQ ID NO: 14093 - protein, 10 aa, Homo sapiens
  Table A; HLA-A*68:02; TPR; S2155L; 0
HLPQVAGVPR

SEQ ID NO: 14094 - protein, 10 aa, Homo sapiens
  Table A; HLA-B*27:02; TPR; S2155L; 0
HLPQVAGVPR

SEQ ID NO: 14095 - protein, 11 aa, Homo sapiens
  Table A; HLA-A*02:07; TPR; S2155L; 0
HLPQVAGVPRF

SEQ ID NO: 14096 - protein, 8 aa, Homo sapiens
  Table A; HLA-A*31:01; TP53; V173M; 0
HMTEVMRR

SEQ ID NO: 14097 - protein, 9 aa, Homo sapiens
  Table A; HLA-A*02:01; TP53; R175G; 1
HMTEVVRGC

SEQ ID NO: 14098 - protein, 9 aa, Homo sapiens
  Table A; HLA-A*02:03; TP53; R175G; 0
HMTEVVRGC

SEQ ID NO: 14099 - protein, 8 aa, Homo sapiens
  Table A; HLA-A*03:02; TP53; R175H; 0
HMTEVVRH

SEQ ID NO: 14100 - protein, 8 aa, Homo sapiens
  Table A; HLA-B*15:02; TP53; R175H; 0
HMTEVVRH

SEQ ID NO: 14101 - protein, 8 aa, Homo sapiens
  Table A; HLA-B*18:01; TP53; R175H; 1
HMTEVVRH

SEQ ID NO: 14102 - protein, 8 aa, Homo sapiens
  Table A; HLA-B*48:01; TP53; R175H; 0
HMTEVVRH

SEQ ID NO: 14103 - protein, 8 aa, Homo sapiens
  Table A; HLA-C*08:03; TP53; R175H; 0
HMTEVVRH

SEQ ID NO: 14104 - protein, 9 aa, Homo sapiens
  Table A; HLA-A*02:01; TP53; R175H; 1
HMTEVVRHC

SEQ ID NO: 14105 - protein, 9 aa, Homo sapiens
  Table A; HLA-A*02:04; TP53; C176F; 0
HMTEVVRRF

SEQ ID NO: 14106 - protein, 9 aa, Homo sapiens
  Table A; HLA-A*03:01; TP53; C176F; 1
HMTEVVRRF

SEQ ID NO: 14107 - protein, 9 aa, Homo sapiens
  Table A; HLA-A*23:01; TP53; C176F; 0
HMTEVVRRF

SEQ ID NO: 14108 - protein, 9 aa, Homo sapiens
  Table A; HLA-B*44:03; TP53; C176F; 1
HMTEVVRRF

SEQ ID NO: 14109 - protein, 9 aa, Homo sapiens
  Table A; HLA-B*57:01; TP53; C176F; 1
HMTEVVRRF

SEQ ID NO: 14110 - protein, 9 aa, Homo sapiens
  Table A; HLA-A*03:01; TP53; C176Y; 1
HMTEVVRRY

SEQ ID NO: 14111 - protein, 9 aa, Homo sapiens
  Table A; HLA-A*29:02; TP53; C176Y; 0
HMTEVVRRY

SEQ ID NO: 14112 - protein, 9 aa, Homo sapiens
  Table A; HLA-A*30:04; TP53; C176Y; 0
HMTEVVRRY

SEQ ID NO: 14113 - protein, 9 aa, Homo sapiens
  Table A; HLA-B*15:02; TP53; C176Y; 0
HMTEVVRRY

SEQ ID NO: 14114 - protein, 9 aa, Homo sapiens
  Table A; HLA-B*35:01; TP53; C176Y; 1
HMTEVVRRY

SEQ ID NO: 14115 - protein, 9 aa, Homo sapiens
  Table A; HLA-B*44:03; TP53; C176Y; 1
HMTEVVRRY

SEQ ID NO: 14116 - protein, 9 aa, Homo sapiens
  Table A; HLA-B*57:01; TP53; C176Y; 0
HMTEVVRRY

SEQ ID NO: 14117 - protein, 9 aa, Homo sapiens
  Table A; HLA-C*16:01; TP53; C176Y; 0
HMTEVVRRY

SEQ ID NO: 14118 - protein, 10 aa, Homo sapiens
  Table A; HLA-A*25:01; VHL; L89H; 0
HNFDGEPQPY

SEQ ID NO: 14119 - protein, 10 aa, Homo sapiens
  Table A; HLA-B*35:01; VHL; L89H; 1
HNFDGEPQPY

SEQ ID NO: 14120 - protein, 8 aa, Homo sapiens
  Table A; HLA-C*16:01; SF3B1; R625H; 0
HNTTARAF

SEQ ID NO: 14121 - protein, 10 aa, Homo sapiens
  Table A; HLA-B*35:01; CTCF; R377H; 1
HPFQCSLCSY

SEQ ID NO: 14122 - protein, 8 aa, Homo sapiens
  Table A; HLA-B*35:03; CTNNB1; S37P; 0
HPGATTTA

SEQ ID NO: 14123 - protein, 8 aa, Homo sapiens
  Table A; HLA-B*39:06; CTNNB1; S37P; 0
HPGATTTA

SEQ ID NO: 14124 - protein, 8 aa, Homo sapiens
  Table A; HLA-B*54:01; CTNNB1; S37P; 0
HPGATTTA

SEQ ID NO: 14125 - protein, 8 aa, Homo sapiens
  Table A; HLA-B*55:01; CTNNB1; S37P; 0
HPGATTTA

SEQ ID NO: 14126 - protein, 8 aa, Homo sapiens
  Table A; HLA-B*55:02; CTNNB1; S37P; 0
HPGATTTA

SEQ ID NO: 14127 - protein, 8 aa, Homo sapiens
  Table A; HLA-B*56:01; CTNNB1; S37P; 0
HPGATTTA

SEQ ID NO: 14128 - protein, 9 aa, Homo sapiens
  Table A; HLA-B*54:01; CTNNB1; S37P; 0
HPGATTTAP

SEQ ID NO: 14129 - protein, 9 aa, Homo sapiens
  Table A; HLA-B*55:01; CTNNB1; S37P; 0
HPGATTTAP

SEQ ID NO: 14130 - protein, 9 aa, Homo sapiens
  Table A; HLA-B*55:02; CTNNB1; S37P; 0
HPGATTTAP

SEQ ID NO: 14131 - protein, 11 aa, Homo sapiens
  Table A; HLA-B*07:02; CTNNB1; S37P; 1
HPGATTTAPSL

SEQ ID NO: 14132 - protein, 11 aa, Homo sapiens
  Table A; HLA-B*35:01; CTNNB1; S37P; 0
HPGATTTAPSL

SEQ ID NO: 14133 - protein, 11 aa, Homo sapiens
  Table A; HLA-B*35:03; CTNNB1; S37P; 0
HPGATTTAPSL

SEQ ID NO: 14134 - protein, 11 aa, Homo sapiens
  Table A; HLA-B*54:01; CTNNB1; S37P; 0
HPGATTTAPSL

SEQ ID NO: 14135 - protein, 11 aa, Homo sapiens
  Table A; HLA-B*55:02; CTNNB1; S37P; 0
HPGATTTAPSL

SEQ ID NO: 14136 - protein, 8 aa, Homo sapiens
  Table A; HLA-B*14:02; CNTNAP2; R283H; 0
HQGRSINL

SEQ ID NO: 14137 - protein, 8 aa, Homo sapiens
  Table A; HLA-B*15:10; CNTNAP2; R283H; 0
HQGRSINL

SEQ ID NO: 14138 - protein, 8 aa, Homo sapiens
  Table A; HLA-B*48:01; CNTNAP2; R283H; 0
HQGRSINL

SEQ ID NO: 14139 - protein, 8 aa, Homo sapiens
  Table A; HLA-B*13:02; ACVR1; R206H; 0
HQITLLEC

SEQ ID NO: 14140 - protein, 8 aa, Homo sapiens
  Table A; HLA-B*39:06; ACVR1; R206H; 0
HQITLLEC

SEQ ID NO: 14141 - protein, 9 aa, Homo sapiens
  Table A; HLA-A*02:05; ACVR1; R206H; 0
HQITLLECV

SEQ ID NO: 14142 - protein, 9 aa, Homo sapiens
  Table A; HLA-A*02:06; ACVR1; R206H; 0
HQITLLECV

SEQ ID NO: 14143 - protein, 9 aa, Homo sapiens
  Table A; HLA-A*02:08; ACVR1; R206H; 0
HQITLLECV

SEQ ID NO: 14144 - protein, 9 aa, Homo sapiens
  Table A; HLA-B*13:02; ACVR1; R206H; 0
HQITLLECV

SEQ ID NO: 14145 - protein, 9 aa, Homo sapiens
  Table A; HLA-B*39:06; ACVR1; R206H; 0
HQITLLECV

SEQ ID NO: 14146 - protein, 9 aa, Homo sapiens
  Table A; HLA-B*38:01; KDR; R1032Q; 0
HRDLAAQNI

SEQ ID NO: 14147 - protein, 10 aa, Homo sapiens
  Table A; HLA-B*58:01; GRIN2A; R1067W; 0
HSDISETSNW

SEQ ID NO: 14148 - protein, 8 aa, Homo sapiens
  Table A; HLA-B*39:06; CTNNB1; T41A; 0
HSGATATA

SEQ ID NO: 14149 - protein, 9 aa, Homo sapiens
  Table A; HLA-B*48:01; CTNNB1; T41A; 0
HSGATATAP

SEQ ID NO: 14150 - protein, 8 aa, Homo sapiens
  Table A; HLA-B*39:06; CTNNB1; T41I; 0
HSGATITA

SEQ ID NO: 14151 - protein, 8 aa, Homo sapiens
  Table A; HLA-B*54:01; CTNNB1; T41I; 0
HSGATITA

SEQ ID NO: 14152 - protein, 8 aa, Homo sapiens
  Table A; HLA-B*58:01; CTNNB1; T41I; 0
HSGATITA

SEQ ID NO: 14153 - protein, 8 aa, Homo sapiens
  Table A; HLA-C*08:03; CTNNB1; T41I; 0
HSGATITA

SEQ ID NO: 14154 - protein, 9 aa, Homo sapiens
  Table A; HLA-B*48:01; CTNNB1; T41I; 0
HSGATITAP

SEQ ID NO: 14155 - protein, 10 aa, Homo sapiens
  Table A; HLA-A*68:02; CTNNB1; S45F; 0
HSGATTTAPF

SEQ ID NO: 14156 - protein, 8 aa, Homo sapiens
  Table A; HLA-B*08:01; CTNNB1; D32H; 1
HSGIHSGA

SEQ ID NO: 14157 - protein, 8 aa, Homo sapiens
  Table A; HLA-B*39:06; CTNNB1; D32H; 0
HSGIHSGA

SEQ ID NO: 14158 - protein, 8 aa, Homo sapiens
  Table A; HLA-B*48:01; CTNNB1; D32H; 0
HSGIHSGA

SEQ ID NO: 14159 - protein, 8 aa, Homo sapiens
  Table A; HLA-C*08:03; CTNNB1; D32H; 0
HSGIHSGA

SEQ ID NO: 14160 - protein, 9 aa, Homo sapiens
  Table A; HLA-B*48:01; CTNNB1; D32H; 0
HSGIHSGAT

SEQ ID NO: 14161 - protein, 9 aa, Homo sapiens
  Table A; HLA-C*08:03; CTNNB1; D32H; 0
HSGIHSGAT

SEQ ID NO: 14162 - protein, 9 aa, Homo sapiens
  Table A; HLA-A*68:02; CNTNAP2; R283H; 0
HSVVIEHQG

SEQ ID NO: 14163 - protein, 10 aa, Homo sapiens
  Table A; HLA-A*68:01; CNTNAP2; R283H; 0
HSVVIEHQGR

SEQ ID NO: 14164 - protein, 9 aa, Homo sapiens
  Table A; HLA-A*68:02; CTCF; R377H; 0
HTGEHPFQC

SEQ ID NO: 14165 - protein, 10 aa, Homo sapiens
  Table A; HLA-A*26:01; FBXW7; R505G; 0
HVAAVGCVQY

SEQ ID NO: 14166 - protein, 10 aa, Homo sapiens
  Table A; HLA-A*26:02; FBXW7; R505G; 0
HVAAVGCVQY

SEQ ID NO: 14167 - protein, 10 aa, Homo sapiens
  Table A; HLA-A*26:03; FBXW7; R505G; 0
HVAAVGCVQY

SEQ ID NO: 14168 - protein, 10 aa, Homo sapiens
  Table A; HLA-A*29:01; FBXW7; R505G; 0
HVAAVGCVQY

SEQ ID NO: 14169 - protein, 10 aa, Homo sapiens
  Table A; HLA-A*29:02; FBXW7; R505G; 0
HVAAVGCVQY

SEQ ID NO: 14170 - protein, 10 aa, Homo sapiens
  Table A; HLA-A*30:04; FBXW7; R505G; 0
HVAAVGCVQY

SEQ ID NO: 14171 - protein, 10 aa, Homo sapiens
  Table A; HLA-A*68:01; FBXW7; R505G; 0
HVAAVGCVQY

SEQ ID NO: 14172 - protein, 10 aa, Homo sapiens
  Table A; HLA-B*15:01; FBXW7; R505G; 1
HVAAVGCVQY

SEQ ID NO: 14173 - protein, 10 aa, Homo sapiens
  Table A; HLA-B*15:02; FBXW7; R505G; 0
HVAAVGCVQY

SEQ ID NO: 14174 - protein, 10 aa, Homo sapiens
  Table A; HLA-B*35:01; FBXW7; R505G; 1
HVAAVGCVQY

SEQ ID NO: 14175 - protein, 10 aa, Homo sapiens
  Table A; HLA-B*35:08; FBXW7; R505G; 0
HVAAVGCVQY

SEQ ID NO: 14176 - protein, 9 aa, Homo sapiens
  Table A; HLA-A*03:01; CHD4; R975H; 1
HVELSPMQK

SEQ ID NO: 14177 - protein, 9 aa, Homo sapiens
  Table A; HLA-A*03:02; CHD4; R975H; 0
HVELSPMQK

SEQ ID NO: 14178 - protein, 9 aa, Homo sapiens
  Table A; HLA-A*11:01; CHD4; R975H; 1
HVELSPMQK

SEQ ID NO: 14179 - protein, 9 aa, Homo sapiens
  Table A; HLA-A*68:01; CHD4; R975H; 0
HVELSPMQK

SEQ ID NO: 14180 - protein, 10 aa, Homo sapiens
  Table A; HLA-A*03:01; CHD4; R975H; 1
HVELSPMQKK

SEQ ID NO: 14181 - protein, 10 aa, Homo sapiens
  Table A; HLA-A*03:02; CHD4; R975H; 0
HVELSPMQKK

SEQ ID NO: 14182 - protein, 10 aa, Homo sapiens
  Table A; HLA-A*11:01; CHD4; R975H; 1
HVELSPMQKK

SEQ ID NO: 14183 - protein, 9 aa, Homo sapiens
  Table A; HLA-A*31:01; EGFR; L858R; 1
HVKITDFGR

SEQ ID NO: 14184 - protein, 8 aa, Homo sapiens
  Table A; HLA-B*08:01; PREX2; E553K; 0
HVLEKSKF

SEQ ID NO: 14185 - protein, 9 aa, Homo sapiens
  Table A; HLA-A*03:01; PREX2; E553K; 1
HVLEKSKFK

SEQ ID NO: 14186 - protein, 9 aa, Homo sapiens
  Table A; HLA-A*11:01; PREX2; E553K; 0
HVLEKSKFK

SEQ ID NO: 14187 - protein, 8 aa, Homo sapiens
  Table A; HLA-B*15:02; GNAS; R201H; 0
HVLTSGIF

SEQ ID NO: 14188 - protein, 10 aa, Homo sapiens
  Table A; HLA-A*68:02; GNAS; R201H; 0
HVLTSGIFET

SEQ ID NO: 14189 - protein, 10 aa, Homo sapiens
  Table A; HLA-C*08:03; GNAS; R201H; 0
HVLTSGIFET

SEQ ID NO: 14190 - protein, 11 aa, Homo sapiens
  Table A; HLA-A*03:01; GNAS; R201H; 1
HVLTSGIFETK

SEQ ID NO: 14191 - protein, 11 aa, Homo sapiens
  Table A; HLA-A*03:02; GNAS; R201H; 0
HVLTSGIFETK

SEQ ID NO: 14192 - protein, 11 aa, Homo sapiens
  Table A; HLA-A*11:01; GNAS; R201H; 1
HVLTSGIFETK

SEQ ID NO: 14193 - protein, 11 aa, Homo sapiens
  Table A; HLA-A*31:01; GNAS; R201H; 0
HVLTSGIFETK

SEQ ID NO: 14194 - protein, 11 aa, Homo sapiens
  Table A; HLA-A*68:01; GNAS; R201H; 0
HVLTSGIFETK

SEQ ID NO: 14195 - protein, 11 aa, Homo sapiens
  Table A; HLA-A*68:02; GNAS; R201H; 0
HVLTSGIFETK

SEQ ID NO: 14196 - protein, 11 aa, Homo sapiens
  Table A; HLA-B*27:02; GNAS; R201H; 0
HVLTSGIFETK

SEQ ID NO: 14197 - protein, 11 aa, Homo sapiens
  Table A; HLA-B*07:02; MTOR; A2056V; 1
HVMMERGPQTL

SEQ ID NO: 14198 - protein, 9 aa, Homo sapiens
  Table A; HLA-A*02:03; CHST11; A159T; 0
HVSTNLKTL

SEQ ID NO: 14199 - protein, 9 aa, Homo sapiens
  Table A; HLA-A*02:04; CHST11; A159T; 0
HVSTNLKTL

SEQ ID NO: 14200 - protein, 9 aa, Homo sapiens
  Table A; HLA-A*02:05; CHST11; A159T; 0
HVSTNLKTL

SEQ ID NO: 14201 - protein, 9 aa, Homo sapiens
  Table A; HLA-A*02:06; CHST11; A159T; 0
HVSTNLKTL

SEQ ID NO: 14202 - protein, 9 aa, Homo sapiens
  Table A; HLA-A*02:08; CHST11; A159T; 0
HVSTNLKTL

SEQ ID NO: 14203 - protein, 9 aa, Homo sapiens
  Table A; HLA-A*68:02; CHST11; A159T; 0
HVSTNLKTL

SEQ ID NO: 14204 - protein, 9 aa, Homo sapiens
  Table A; HLA-B*15:02; CHST11; A159T; 0
HVSTNLKTL

SEQ ID NO: 14205 - protein, 9 aa, Homo sapiens
  Table A; HLA-C*16:02; CHST11; A159T; 0
HVSTNLKTL

SEQ ID NO: 14206 - protein, 9 aa, Homo sapiens
  Table A; HLA-A*23:01; CTNNB1; D32Y; 0
HWQQQSYLY

SEQ ID NO: 14207 - protein, 9 aa, Homo sapiens
  Table A; HLA-A*24:02; CTNNB1; D32Y; 1
HWQQQSYLY

SEQ ID NO: 14208 - protein, 9 aa, Homo sapiens
  Table A; HLA-A*29:01; CTNNB1; D32Y; 0
HWQQQSYLY

SEQ ID NO: 14209 - protein, 9 aa, Homo sapiens
  Table A; HLA-A*29:02; CTNNB1; D32Y; 1
HWQQQSYLY

SEQ ID NO: 14210 - protein, 9 aa, Homo sapiens
  Table A; HLA-A*23:01; TP53; S241F; 0
HYNYMCNSF

SEQ ID NO: 14211 - protein, 9 aa, Homo sapiens
  Table A; HLA-A*24:02; TP53; S241F; 1
HYNYMCNSF

SEQ ID NO: 14212 - protein, 9 aa, Homo sapiens
  Table A; HLA-C*14:02; TP53; S241F; 0
HYNYMCNSF

SEQ ID NO: 14213 - protein, 9 aa, Homo sapiens
  Table A; HLA-C*14:03; TP53; S241F; 0
HYNYMCNSF

SEQ ID NO: 14214 - protein, 8 aa, Homo sapiens
  Table A; HLA-B*08:01; PIK3CA; Y1021C; 1
IACIRKTL

SEQ ID NO: 14215 - protein, 8 aa, Homo sapiens
  Table A; HLA-C*16:01; PIK3CA; Y1021C; 0
IACIRKTL

SEQ ID NO: 14216 - protein, 9 aa, Homo sapiens
  Table A; HLA-C*16:01; FGFR2; C382R; 0
IAIYRIGVF

SEQ ID NO: 14217 - protein, 9 aa, Homo sapiens
  Table A; HLA-B*57:01; ARID2; S297F; 1
IAVILRNLF

SEQ ID NO: 14218 - protein, 10 aa, Homo sapiens
  Table A; HLA-B*57:01; ARID2; S297F; 1
IAVILRNLFF

SEQ ID NO: 14219 - protein, 9 aa, Homo sapiens
  Table A; HLA-C*08:02; SIRPA; V233I; 0
ICEVAHITL

SEQ ID NO: 14220 - protein, 9 aa, Homo sapiens
  Table A; HLA-A*02:04; ARID1A; G2087R; 0
ICLPVLDRL

SEQ ID NO: 14221 - protein, 9 aa, Homo sapiens
  Table A; HLA-A*30:01; NFE2L2; R34G; 0
IDLGVSGEV

SEQ ID NO: 14222 - protein, 9 aa, Homo sapiens
  Table A; HLA-A*68:01; NFE2L2; R34G; 0
IDLGVSGEV

SEQ ID NO: 14223 - protein, 9 aa, Homo sapiens
  Table A; HLA-A*68:02; NFE2L2; R34G; 0
IDLGVSGEV

SEQ ID NO: 14224 - protein, 9 aa, Homo sapiens
  Table A; HLA-B*13:02; NFE2L2; R34G; 0
IDLGVSGEV

SEQ ID NO: 14225 - protein, 9 aa, Homo sapiens
  Table A; HLA-B*37:01; NFE2L2; R34G; 0
IDLGVSGEV

SEQ ID NO: 14226 - protein, 9 aa, Homo sapiens
  Table A; HLA-B*39:01; NFE2L2; R34G; 0
IDLGVSGEV

SEQ ID NO: 14227 - protein, 9 aa, Homo sapiens
  Table A; HLA-B*40:02; NFE2L2; R34G; 0
IDLGVSGEV

SEQ ID NO: 14228 - protein, 9 aa, Homo sapiens
  Table A; HLA-B*41:02; NFE2L2; R34G; 0
IDLGVSGEV

SEQ ID NO: 14229 - protein, 9 aa, Homo sapiens
  Table A; HLA-B*48:01; NFE2L2; R34G; 0
IDLGVSGEV

SEQ ID NO: 14230 - protein, 9 aa, Homo sapiens
  Table A; HLA-B*49:01; NFE2L2; R34G; 0
IDLGVSGEV

SEQ ID NO: 14231 - protein, 9 aa, Homo sapiens
  Table A; HLA-B*51:01; NFE2L2; R34G; 0
IDLGVSGEV

SEQ ID NO: 14232 - protein, 10 aa, Homo sapiens
  Table A; HLA-A*23:01; NFE2L2; R34G; 0
IDLGVSGEVF

SEQ ID NO: 14233 - protein, 10 aa, Homo sapiens
  Table A; HLA-B*15:01; NFE2L2; R34G; 1
IDLGVSGEVF

SEQ ID NO: 14234 - protein, 10 aa, Homo sapiens
  Table A; HLA-B*18:01; NFE2L2; R34G; 0
IDLGVSGEVF

SEQ ID NO: 14235 - protein, 10 aa, Homo sapiens
  Table A; HLA-B*27:02; NFE2L2; R34G; 0
IDLGVSGEVF

SEQ ID NO: 14236 - protein, 10 aa, Homo sapiens
  Table A; HLA-B*38:01; NFE2L2; R34G; 0
IDLGVSGEVF

SEQ ID NO: 14237 - protein, 10 aa, Homo sapiens
  Table A; HLA-B*40:02; NFE2L2; R34G; 0
IDLGVSGEVF

SEQ ID NO: 14238 - protein, 10 aa, Homo sapiens
  Table A; HLA-B*44:05; NFE2L2; R34G; 0
IDLGVSGEVF

SEQ ID NO: 14239 - protein, 9 aa, Homo sapiens
  Table A; HLA-A*02:01; NFE2L2; R34Q; 1
IDLGVSQEV

SEQ ID NO: 14240 - protein, 9 aa, Homo sapiens
  Table A; HLA-A*02:06; NFE2L2; R34Q; 0
IDLGVSQEV

SEQ ID NO: 14241 - protein, 9 aa, Homo sapiens
  Table A; HLA-A*30:01; NFE2L2; R34Q; 0
IDLGVSQEV

SEQ ID NO: 14242 - protein, 9 aa, Homo sapiens
  Table A; HLA-A*68:02; NFE2L2; R34Q; 0
IDLGVSQEV

SEQ ID NO: 14243 - protein, 9 aa, Homo sapiens
  Table A; HLA-B*13:02; NFE2L2; R34Q; 0
IDLGVSQEV

SEQ ID NO: 14244 - protein, 9 aa, Homo sapiens
  Table A; HLA-B*15:10; NFE2L2; R34Q; 0
IDLGVSQEV

SEQ ID NO: 14245 - protein, 9 aa, Homo sapiens
  Table A; HLA-B*27:02; NFE2L2; R34Q; 0
IDLGVSQEV

SEQ ID NO: 14246 - protein, 9 aa, Homo sapiens
  Table A; HLA-B*35:03; NFE2L2; R34Q; 0
IDLGVSQEV

SEQ ID NO: 14247 - protein, 9 aa, Homo sapiens
  Table A; HLA-B*37:01; NFE2L2; R34Q; 0
IDLGVSQEV

SEQ ID NO: 14248 - protein, 9 aa, Homo sapiens
  Table A; HLA-B*38:01; NFE2L2; R34Q; 0
IDLGVSQEV

SEQ ID NO: 14249 - protein, 9 aa, Homo sapiens
  Table A; HLA-B*39:01; NFE2L2; R34Q; 0
IDLGVSQEV

SEQ ID NO: 14250 - protein, 9 aa, Homo sapiens
  Table A; HLA-B*40:01; NFE2L2; R34Q; 1
IDLGVSQEV

SEQ ID NO: 14251 - protein, 9 aa, Homo sapiens
  Table A; HLA-B*40:02; NFE2L2; R34Q; 0
IDLGVSQEV

SEQ ID NO: 14252 - protein, 9 aa, Homo sapiens
  Table A; HLA-B*41:02; NFE2L2; R34Q; 0
IDLGVSQEV

SEQ ID NO: 14253 - protein, 9 aa, Homo sapiens
  Table A; HLA-B*44:05; NFE2L2; R34Q; 0
IDLGVSQEV

SEQ ID NO: 14254 - protein, 9 aa, Homo sapiens
  Table A; HLA-B*48:01; NFE2L2; R34Q; 0
IDLGVSQEV

SEQ ID NO: 14255 - protein, 9 aa, Homo sapiens
  Table A; HLA-B*49:01; NFE2L2; R34Q; 0
IDLGVSQEV

SEQ ID NO: 14256 - protein, 9 aa, Homo sapiens
  Table A; HLA-B*51:01; NFE2L2; R34Q; 1
IDLGVSQEV

SEQ ID NO: 14257 - protein, 9 aa, Homo sapiens
  Table A; HLA-C*08:01; NFE2L2; R34Q; 0
IDLGVSQEV

SEQ ID NO: 14258 - protein, 9 aa, Homo sapiens
  Table A; HLA-C*08:03; NFE2L2; R34Q; 0
IDLGVSQEV

SEQ ID NO: 14259 - protein, 9 aa, Homo sapiens
  Table A; HLA-C*16:04; NFE2L2; R34Q; 0
IDLGVSQEV

SEQ ID NO: 14260 - protein, 10 aa, Homo sapiens
  Table A; HLA-B*27:02; NFE2L2; R34Q; 0
IDLGVSQEVF

SEQ ID NO: 14261 - protein, 10 aa, Homo sapiens
  Table A; HLA-B*40:02; NFE2L2; R34Q; 0
IDLGVSQEVF

SEQ ID NO: 14262 - protein, 10 aa, Homo sapiens
  Table A; HLA-B*44:05; NFE2L2; R34Q; 0
IDLGVSQEVF

SEQ ID NO: 14263 - protein, 9 aa, Homo sapiens
  Table A; HLA-A*30:01; CSMD3; S300F; 0
IEGFEPPTI

SEQ ID NO: 14264 - protein, 9 aa, Homo sapiens
  Table A; HLA-B*40:02; CSMD3; S300F; 0
IEGFEPPTI

SEQ ID NO: 14265 - protein, 9 aa, Homo sapiens
  Table A; HLA-B*44:05; CSMD3; S300F; 0
IEGFEPPTI

SEQ ID NO: 14266 - protein, 9 aa, Homo sapiens
  Table A; HLA-B*49:01; CSMD3; S300F; 0
IEGFEPPTI

SEQ ID NO: 14267 - protein, 8 aa, Homo sapiens
  Table A; HLA-B*40:02; DDIT3; R147H; 0
IEHLTREV

SEQ ID NO: 14268 - protein, 8 aa, Homo sapiens
  Table A; HLA-B*41:02; DDIT3; R147H; 0
IEHLTREV

SEQ ID NO: 14269 - protein, 8 aa, Homo sapiens
  Table A; HLA-B*49:01; DDIT3; R147H; 0
IEHLTREV

SEQ ID NO: 14270 - protein, 8 aa, Homo sapiens
  Table A; HLA-B*50:01; DDIT3; R147H; 0
IEHLTREV

SEQ ID NO: 14271 - protein, 10 aa, Homo sapiens
  Table A; HLA-B*50:01; DDIT3; R147H; 0
IEHLTREVEA

SEQ ID NO: 14272 - protein, 8 aa, Homo sapiens
  Table A; HLA-B*40:02; CNTNAP2; R283H; 0
IEHQGRSI

SEQ ID NO: 14273 - protein, 8 aa, Homo sapiens
  Table A; HLA-B*41:02; CNTNAP2; R283H; 0
IEHQGRSI

SEQ ID NO: 14274 - protein, 8 aa, Homo sapiens
  Table A; HLA-B*49:01; CNTNAP2; R283H; 0
IEHQGRSI

SEQ ID NO: 14275 - protein, 10 aa, Homo sapiens
  Table A; HLA-B*37:01; CNTNAP2; R283H; 0
IEHQGRSINL

SEQ ID NO: 14276 - protein, 10 aa, Homo sapiens
  Table A; HLA-B*40:02; CNTNAP2; R283H; 0
IEHQGRSINL

SEQ ID NO: 14277 - protein, 10 aa, Homo sapiens
  Table A; HLA-B*41:02; CNTNAP2; R283H; 0
IEHQGRSINL

SEQ ID NO: 14278 - protein, 10 aa, Homo sapiens
  Table A; HLA-B*44:05; CNTNAP2; R283H; 0
IEHQGRSINL

SEQ ID NO: 14279 - protein, 8 aa, Homo sapiens
  Table A; HLA-B*40:01; PIK3R1; K567E; 1
IEPDLIQL

SEQ ID NO: 14280 - protein, 8 aa, Homo sapiens
  Table A; HLA-B*40:02; PIK3R1; K567E; 0
IEPDLIQL

SEQ ID NO: 14281 - protein, 8 aa, Homo sapiens
  Table A; HLA-B*41:02; PIK3R1; K567E; 0
IEPDLIQL

SEQ ID NO: 14282 - protein, 8 aa, Homo sapiens
  Table A; HLA-B*49:01; PIK3R1; K567E; 0
IEPDLIQL

SEQ ID NO: 14283 - protein, 9 aa, Homo sapiens
  Table A; HLA-A*33:01; PIK3R1; K567E; 0
IEPDLIQLR

SEQ ID NO: 14284 - protein, 9 aa, Homo sapiens
  Table A; HLA-A*33:03; PIK3R1; K567E; 0
IEPDLIQLR

SEQ ID NO: 14285 - protein, 9 aa, Homo sapiens
  Table A; HLA-A*68:01; PIK3R1; K567E; 0
IEPDLIQLR

SEQ ID NO: 14286 - protein, 9 aa, Homo sapiens
  Table A; HLA-A*68:02; PIK3R1; K567E; 0
IEPDLIQLR

SEQ ID NO: 14287 - protein, 9 aa, Homo sapiens
  Table A; HLA-B*27:02; PIK3R1; K567E; 0
IEPDLIQLR

SEQ ID NO: 14288 - protein, 10 aa, Homo sapiens
  Table A; HLA-A*11:01; PIK3R1; K567E; 1
IEPDLIQLRK

SEQ ID NO: 14289 - protein, 10 aa, Homo sapiens
  Table A; HLA-B*27:02; PIK3R1; K567E; 0
IEPDLIQLRK

SEQ ID NO: 14290 - protein, 11 aa, Homo sapiens
  Table A; HLA-B*44:05; PIK3CA; R108H; 0
IEPVGNHEEKI

SEQ ID NO: 14291 - protein, 9 aa, Homo sapiens
  Table A; HLA-C*14:02; KDR; S1100F; 0
IFFLGASPY

SEQ ID NO: 14292 - protein, 10 aa, Homo sapiens
  Table A; HLA-A*29:02; POLE; S297F; 0
IFYMIDGQGY

SEQ ID NO: 14293 - protein, 10 aa, Homo sapiens
  Table A; HLA-B*27:02; POLE; S297F; 0
IFYMIDGQGY

SEQ ID NO: 14294 - protein, 10 aa, Homo sapiens
  Table A; HLA-B*27:02; BRAF; V600E; 1
IGDFGLATEK

SEQ ID NO: 14295 - protein, 10 aa, Homo sapiens
  Table A; HLA-A*11:01; PTPRT; E324K; 1
IGDGPIILKK

SEQ ID NO: 14296 - protein, 10 aa, Homo sapiens
  Table A; HLA-B*27:02; PTPRT; E324K; 0
IGDGPIILKK

SEQ ID NO: 14297 - protein, 9 aa, Homo sapiens
  Table A; HLA-A*02:04; NFE2L2; D29G; 0
IGLGVSREV

SEQ ID NO: 14298 - protein, 9 aa, Homo sapiens
  Table A; HLA-B*13:02; NFE2L2; D29G; 0
IGLGVSREV

SEQ ID NO: 14299 - protein, 9 aa, Homo sapiens
  Table A; HLA-B*15:10; NFE2L2; D29G; 0
IGLGVSREV

SEQ ID NO: 14300 - protein, 9 aa, Homo sapiens
  Table A; HLA-B*51:01; NFE2L2; D29G; 0
IGLGVSREV

SEQ ID NO: 14301 - protein, 9 aa, Homo sapiens
  Table A; HLA-B*57:01; NFE2L2; D29G; 0
IGLGVSREV

SEQ ID NO: 14302 - protein, 10 aa, Homo sapiens
  Table A; HLA-A*02:04; NFE2L2; D29G; 0
IGLGVSREVF

SEQ ID NO: 14303 - protein, 10 aa, Homo sapiens
  Table A; HLA-A*23:01; NFE2L2; D29G; 0
IGLGVSREVF

SEQ ID NO: 14304 - protein, 10 aa, Homo sapiens
  Table A; HLA-B*57:01; NFE2L2; D29G; 0
IGLGVSREVF

SEQ ID NO: 14305 - protein, 9 aa, Homo sapiens
  Table A; HLA-A*02:06; BRAF; G469V; 0
IGSGSFVTV

SEQ ID NO: 14306 - protein, 9 aa, Homo sapiens
  Table A; HLA-B*51:01; BRAF; G469V; 1
IGSGSFVTV

SEQ ID NO: 14307 - protein, 11 aa, Homo sapiens
  Table A; HLA-A*30:02; KEAP1; D422N; 0
IGVGVINGHIY

SEQ ID NO: 14308 - protein, 11 aa, Homo sapiens
  Table A; HLA-B*35:01; KEAP1; D422N; 0
IGVGVINGHIY

SEQ ID NO: 14309 - protein, 11 aa, Homo sapiens
  Table A; HLA-B*57:01; KEAP1; D422N; 0
IGVGVINGHIY

SEQ ID NO: 14310 - protein, 8 aa, Homo sapiens
  Table A; HLA-B*15:10; CTNNB1; S37A; 0
IHAGATTT

SEQ ID NO: 14311 - protein, 8 aa, Homo sapiens
  Table A; HLA-B*38:01; CTNNB1; S37A; 0
IHAGATTT

SEQ ID NO: 14312 - protein, 8 aa, Homo sapiens
  Table A; HLA-B*39:01; CTNNB1; S37A; 0
IHAGATTT

SEQ ID NO: 14313 - protein, 8 aa, Homo sapiens
  Table A; HLA-B*39:06; CTNNB1; S37A; 0
IHAGATTT

SEQ ID NO: 14314 - protein, 8 aa, Homo sapiens
  Table A; HLA-C*08:03; CTNNB1; S37A; 0
IHAGATTT

SEQ ID NO: 14315 - protein, 9 aa, Homo sapiens
  Table A; HLA-A*02:05; CTNNB1; S37A; 0
IHAGATTTA

SEQ ID NO: 14316 - protein, 9 aa, Homo sapiens
  Table A; HLA-B*15:10; CTNNB1; S37A; 0
IHAGATTTA

SEQ ID NO: 14317 - protein, 9 aa, Homo sapiens
  Table A; HLA-B*38:01; CTNNB1; S37A; 0
IHAGATTTA

SEQ ID NO: 14318 - protein, 9 aa, Homo sapiens
  Table A; HLA-B*39:01; CTNNB1; S37A; 0
IHAGATTTA

SEQ ID NO: 14319 - protein, 9 aa, Homo sapiens
  Table A; HLA-B*39:06; CTNNB1; S37A; 0
IHAGATTTA

SEQ ID NO: 14320 - protein, 9 aa, Homo sapiens
  Table A; HLA-B*48:01; CTNNB1; S37A; 0
IHAGATTTA

SEQ ID NO: 14321 - protein, 10 aa, Homo sapiens
  Table A; HLA-B*15:10; CTNNB1; S37A; 0
IHAGATTTAP

SEQ ID NO: 14322 - protein, 10 aa, Homo sapiens
  Table A; HLA-B*38:01; CTNNB1; S37A; 0
IHAGATTTAP

SEQ ID NO: 14323 - protein, 10 aa, Homo sapiens
  Table A; HLA-B*39:01; CTNNB1; S37A; 0
IHAGATTTAP

SEQ ID NO: 14324 - protein, 9 aa, Homo sapiens
  Table A; HLA-B*15:10; CTNNB1; S37C; 0
IHCGATTTA

SEQ ID NO: 14325 - protein, 9 aa, Homo sapiens
  Table A; HLA-B*39:01; CTNNB1; S37C; 0
IHCGATTTA

SEQ ID NO: 14326 - protein, 9 aa, Homo sapiens
  Table A; HLA-B*39:06; CTNNB1; S37C; 0
IHCGATTTA

SEQ ID NO: 14327 - protein, 9 aa, Homo sapiens
  Table A; HLA-B*15:10; PTEN; R130L; 0
IHCKAGKGL

SEQ ID NO: 14328 - protein, 8 aa, Homo sapiens
  Table A; HLA-B*15:10; ROBO2; D1014N; 0
IHELAVNL

SEQ ID NO: 14329 - protein, 8 aa, Homo sapiens
  Table A; HLA-B*39:01; ROBO2; D1014N; 0
IHELAVNL

SEQ ID NO: 14330 - protein, 8 aa, Homo sapiens
  Table A; HLA-B*15:10; CTNNB1; S37F; 0
IHFGATTT

SEQ ID NO: 14331 - protein, 8 aa, Homo sapiens
  Table A; HLA-B*27:05; CTNNB1; S37F; 1
IHFGATTT

SEQ ID NO: 14332 - protein, 8 aa, Homo sapiens
  Table A; HLA-B*39:01; CTNNB1; S37F; 0
IHFGATTT

SEQ ID NO: 14333 - protein, 8 aa, Homo sapiens
  Table A; HLA-B*39:06; CTNNB1; S37F; 0
IHFGATTT

SEQ ID NO: 14334 - protein, 8 aa, Homo sapiens
  Table A; HLA-B*48:01; CTNNB1; S37F; 0
IHFGATTT

SEQ ID NO: 14335 - protein, 8 aa, Homo sapiens
  Table A; HLA-C*08:03; CTNNB1; S37F; 0
IHFGATTT

SEQ ID NO: 14336 - protein, 9 aa, Homo sapiens
  Table A; HLA-A*02:05; CTNNB1; S37F; 0
IHFGATTTA

SEQ ID NO: 14337 - protein, 9 aa, Homo sapiens
  Table A; HLA-B*15:10; CTNNB1; S37F; 0
IHFGATTTA

SEQ ID NO: 14338 - protein, 9 aa, Homo sapiens
  Table A; HLA-B*38:01; CTNNB1; S37F; 1
IHFGATTTA

SEQ ID NO: 14339 - protein, 9 aa, Homo sapiens
  Table A; HLA-B*39:01; CTNNB1; S37F; 0
IHFGATTTA

SEQ ID NO: 14340 - protein, 9 aa, Homo sapiens
  Table A; HLA-B*39:06; CTNNB1; S37F; 0
IHFGATTTA

SEQ ID NO: 14341 - protein, 9 aa, Homo sapiens
  Table A; HLA-B*50:01; CTNNB1; S37F; 0
IHFGATTTA

SEQ ID NO: 14342 - protein, 9 aa, Homo sapiens
  Table A; HLA-B*54:01; CTNNB1; S37F; 0
IHFGATTTA

SEQ ID NO: 14343 - protein, 10 aa, Homo sapiens
  Table A; HLA-B*15:10; CTNNB1; S37F; 0
IHFGATTTAP

SEQ ID NO: 14344 - protein, 10 aa, Homo sapiens
  Table A; HLA-B*39:01; CTNNB1; S37F; 0
IHFGATTTAP

SEQ ID NO: 14345 - protein, 9 aa, Homo sapiens
  Table A; HLA-B*15:10; NFE2L2; D29H; 0
IHLGVSREV

SEQ ID NO: 14346 - protein, 9 aa, Homo sapiens
  Table A; HLA-B*39:06; NFE2L2; D29H; 0
IHLGVSREV

SEQ ID NO: 14347 - protein, 8 aa, Homo sapiens
  Table A; HLA-B*39:06; TPR; S2155L; 0
IHLPQVAG

SEQ ID NO: 14348 - protein, 9 aa, Homo sapiens
  Table A; HLA-A*02:01; TPR; S2155L; 1
IHLPQVAGV

SEQ ID NO: 14349 - protein, 9 aa, Homo sapiens
  Table A; HLA-A*02:04; TPR; S2155L; 0
IHLPQVAGV

SEQ ID NO: 14350 - protein, 9 aa, Homo sapiens
  Table A; HLA-B*15:10; TPR; S2155L; 0
IHLPQVAGV

SEQ ID NO: 14351 - protein, 9 aa, Homo sapiens
  Table A; HLA-B*39:01; TPR; S2155L; 0
IHLPQVAGV

SEQ ID NO: 14352 - protein, 9 aa, Homo sapiens
  Table A; HLA-B*39:06; TPR; S2155L; 0
IHLPQVAGV

SEQ ID NO: 14353 - protein, 11 aa, Homo sapiens
  Table A; HLA-A*31:01; TPR; S2155L; 0
IHLPQVAGVPR

SEQ ID NO: 14354 - protein, 11 aa, Homo sapiens
  Table A; HLA-A*33:03; TPR; S2155L; 0
IHLPQVAGVPR

SEQ ID NO: 14355 - protein, 11 aa, Homo sapiens
  Table A; HLA-B*27:02; TPR; S2155L; 0
IHLPQVAGVPR

SEQ ID NO: 14356 - protein, 8 aa, Homo sapiens
  Table A; HLA-B*39:06; CTNNB1; S37P; 0
IHPGATTT

SEQ ID NO: 14357 - protein, 9 aa, Homo sapiens
  Table A; HLA-B*15:10; CTNNB1; S37P; 0
IHPGATTTA

SEQ ID NO: 14358 - protein, 9 aa, Homo sapiens
  Table A; HLA-B*38:01; CTNNB1; S37P; 0
IHPGATTTA

SEQ ID NO: 14359 - protein, 9 aa, Homo sapiens
  Table A; HLA-B*39:01; CTNNB1; S37P; 0
IHPGATTTA

SEQ ID NO: 14360 - protein, 9 aa, Homo sapiens
  Table A; HLA-B*39:06; CTNNB1; S37P; 0
IHPGATTTA

SEQ ID NO: 14361 - protein, 8 aa, Homo sapiens
  Table A; HLA-B*15:10; CTNNB1; T41A; 0
IHSGATAT

SEQ ID NO: 14362 - protein, 8 aa, Homo sapiens
  Table A; HLA-B*39:01; CTNNB1; T41A; 1
IHSGATAT

SEQ ID NO: 14363 - protein, 8 aa, Homo sapiens
  Table A; HLA-B*39:06; CTNNB1; T41A; 0
IHSGATAT

SEQ ID NO: 14364 - protein, 8 aa, Homo sapiens
  Table A; HLA-C*08:03; CTNNB1; T41A; 0
IHSGATAT

SEQ ID NO: 14365 - protein, 9 aa, Homo sapiens
  Table A; HLA-B*15:10; CTNNB1; T41A; 0
IHSGATATA

SEQ ID NO: 14366 - protein, 9 aa, Homo sapiens
  Table A; HLA-B*38:01; CTNNB1; T41A; 1
IHSGATATA

SEQ ID NO: 14367 - protein, 9 aa, Homo sapiens
  Table A; HLA-B*39:01; CTNNB1; T41A; 1
IHSGATATA

SEQ ID NO: 14368 - protein, 9 aa, Homo sapiens
  Table A; HLA-B*39:06; CTNNB1; T41A; 0
IHSGATATA

SEQ ID NO: 14369 - protein, 10 aa, Homo sapiens
  Table A; HLA-B*15:10; CTNNB1; T41A; 0
IHSGATATAP

SEQ ID NO: 14370 - protein, 10 aa, Homo sapiens
  Table A; HLA-B*38:01; CTNNB1; T41A; 1
IHSGATATAP

SEQ ID NO: 14371 - protein, 10 aa, Homo sapiens
  Table A; HLA-B*39:01; CTNNB1; T41A; 1
IHSGATATAP

SEQ ID NO: 14372 - protein, 8 aa, Homo sapiens
  Table A; HLA-B*15:10; CTNNB1; T41I; 0
IHSGATIT

SEQ ID NO: 14373 - protein, 8 aa, Homo sapiens
  Table A; HLA-B*39:01; CTNNB1; T41I; 0
IHSGATIT

SEQ ID NO: 14374 - protein, 8 aa, Homo sapiens
  Table A; HLA-B*39:06; CTNNB1; T41I; 0
IHSGATIT

SEQ ID NO: 14375 - protein, 9 aa, Homo sapiens
  Table A; HLA-A*02:05; CTNNB1; T41I; 0
IHSGATITA

SEQ ID NO: 14376 - protein, 9 aa, Homo sapiens
  Table A; HLA-B*15:10; CTNNB1; T41I; 0
IHSGATITA

SEQ ID NO: 14377 - protein, 9 aa, Homo sapiens
  Table A; HLA-B*38:01; CTNNB1; T41I; 0
IHSGATITA

SEQ ID NO: 14378 - protein, 9 aa, Homo sapiens
  Table A; HLA-B*39:01; CTNNB1; T41I; 0
IHSGATITA

SEQ ID NO: 14379 - protein, 9 aa, Homo sapiens
  Table A; HLA-B*39:06; CTNNB1; T41I; 0
IHSGATITA

SEQ ID NO: 14380 - protein, 9 aa, Homo sapiens
  Table A; HLA-B*55:02; CTNNB1; T41I; 0
IHSGATITA

SEQ ID NO: 14381 - protein, 10 aa, Homo sapiens
  Table A; HLA-B*15:10; CTNNB1; T41I; 0
IHSGATITAP

SEQ ID NO: 14382 - protein, 10 aa, Homo sapiens
  Table A; HLA-B*38:01; CTNNB1; T41I; 0
IHSGATITAP

SEQ ID NO: 14383 - protein, 10 aa, Homo sapiens
  Table A; HLA-B*39:01; CTNNB1; T41I; 0
IHSGATITAP

SEQ ID NO: 14384 - protein, 11 aa, Homo sapiens
  Table A; HLA-B*15:10; CTNNB1; S45F; 0
IHSGATTTAPF

SEQ ID NO: 14385 - protein, 11 aa, Homo sapiens
  Table A; HLA-B*38:01; CTNNB1; S45F; 0
IHSGATTTAPF

SEQ ID NO: 14386 - protein, 9 aa, Homo sapiens
  Table A; HLA-A*02:05; CSMD3; R100Q; 0
IIAEEQNRI

SEQ ID NO: 14387 - protein, 9 aa, Homo sapiens
  Table A; HLA-B*13:02; CSMD3; R100Q; 0
IIAEEQNRI

SEQ ID NO: 14388 - protein, 9 aa, Homo sapiens
  Table A; HLA-B*50:01; CSMD3; R100Q; 0
IIAEEQNRI

SEQ ID NO: 14389 - protein, 11 aa, Homo sapiens
  Table A; HLA-A*02:04; PTPRT; E324K; 0
IIGDGPIILKK

SEQ ID NO: 14390 - protein, 11 aa, Homo sapiens
  Table A; HLA-A*03:01; PTPRT; E324K; 1
IIGDGPIILKK

SEQ ID NO: 14391 - protein, 11 aa, Homo sapiens
  Table A; HLA-A*03:02; PTPRT; E324K; 0
IIGDGPIILKK

SEQ ID NO: 14392 - protein, 11 aa, Homo sapiens
  Table A; HLA-A*11:01; PTPRT; E324K; 1
IIGDGPIILKK

SEQ ID NO: 14393 - protein, 11 aa, Homo sapiens
  Table A; HLA-B*27:02; PTPRT; E324K; 0
IIGDGPIILKK

SEQ ID NO: 14394 - protein, 8 aa, Homo sapiens
  Table A; HLA-A*30:02; IDH1; R132G; 0
IIIGGHAY

SEQ ID NO: 14395 - protein, 8 aa, Homo sapiens
  Table A; HLA-B*15:01; IDH1; R132G; 1
IIIGGHAY

SEQ ID NO: 14396 - protein, 8 aa, Homo sapiens
  Table A; HLA-B*46:01; IDH1; R132G; 0
IIIGGHAY

SEQ ID NO: 14397 - protein, 8 aa, Homo sapiens
  Table A; HLA-A*30:02; IDH1; R132S; 0
IIIGSHAY

SEQ ID NO: 14398 - protein, 8 aa, Homo sapiens
  Table A; HLA-B*15:01; IDH1; R132S; 1
IIIGSHAY

SEQ ID NO: 14399 - protein, 8 aa, Homo sapiens
  Table A; HLA-B*46:01; IDH1; R132S; 0
IIIGSHAY

SEQ ID NO: 14400 - protein, 8 aa, Homo sapiens
  Table A; HLA-A*31:01; CHD4; R1338I; 0
IIRKQVNY

SEQ ID NO: 14401 - protein, 8 aa, Homo sapiens
  Table A; HLA-B*15:01; CHD4; R1338I; 1
IIRKQVNY

SEQ ID NO: 14402 - protein, 8 aa, Homo sapiens
  Table A; HLA-B*15:02; CHD4; R1338I; 0
IIRKQVNY

SEQ ID NO: 14403 - protein, 8 aa, Homo sapiens
  Table A; HLA-B*57:01; CHD4; R1338I; 0
IIRKQVNY

SEQ ID NO: 14404 - protein, 9 aa, Homo sapiens
  Table A; HLA-B*15:03; PTPRT; M903I; 0
IKRGQGYGF

SEQ ID NO: 14405 - protein, 9 aa, Homo sapiens
  Table A; HLA-A*02:01; PIK3CA; N345K; 1
ILCATYVKL

SEQ ID NO: 14406 - protein, 9 aa, Homo sapiens
  Table A; HLA-A*02:04; PIK3CA; N345K; 0
ILCATYVKL

SEQ ID NO: 14407 - protein, 9 aa, Homo sapiens
  Table A; HLA-A*02:07; PIK3CA; N345K; 0
ILCATYVKL

SEQ ID NO: 14408 - protein, 9 aa, Homo sapiens
  Table A; HLA-A*03:01; TP63; E609K; 1
ILDHRQLHK

SEQ ID NO: 14409 - protein, 10 aa, Homo sapiens
  Table A; HLA-A*01:01; KRAS; Q61H; 1
ILDTAGHEEY

SEQ ID NO: 14410 - protein, 10 aa, Homo sapiens
  Table A; HLA-A*02:01; KRAS; Q61H; 1
ILDTAGHEEY

SEQ ID NO: 14411 - protein, 10 aa, Homo sapiens
  Table A; HLA-A*02:07; KRAS; Q61H; 0
ILDTAGHEEY

SEQ ID NO: 14412 - protein, 10 aa, Homo sapiens
  Table A; HLA-A*29:01; KRAS; Q61H; 0
ILDTAGHEEY

SEQ ID NO: 14413 - protein, 10 aa, Homo sapiens
  Table A; HLA-A*29:02; KRAS; Q61H; 1
ILDTAGHEEY

SEQ ID NO: 14414 - protein, 10 aa, Homo sapiens
  Table A; HLA-A*30:02; KRAS; Q61H; 0
ILDTAGHEEY

SEQ ID NO: 14415 - protein, 10 aa, Homo sapiens
  Table A; HLA-B*13:01; KRAS; Q61H; 0
ILDTAGHEEY

SEQ ID NO: 14416 - protein, 10 aa, Homo sapiens
  Table A; HLA-B*15:01; KRAS; Q61H; 1
ILDTAGHEEY

SEQ ID NO: 14417 - protein, 10 aa, Homo sapiens
  Table A; HLA-B*15:02; KRAS; Q61H; 0
ILDTAGHEEY

SEQ ID NO: 14418 - protein, 10 aa, Homo sapiens
  Table A; HLA-B*15:13; KRAS; Q61H; 0
ILDTAGHEEY

SEQ ID NO: 14419 - protein, 10 aa, Homo sapiens
  Table A; HLA-B*27:02; KRAS; Q61H; 0
ILDTAGHEEY

SEQ ID NO: 14420 - protein, 10 aa, Homo sapiens
  Table A; HLA-B*35:01; KRAS; Q61H; 1
ILDTAGHEEY

SEQ ID NO: 14421 - protein, 10 aa, Homo sapiens
  Table A; HLA-B*35:08; KRAS; Q61H; 0
ILDTAGHEEY

SEQ ID NO: 14422 - protein, 10 aa, Homo sapiens
  Table A; HLA-B*39:01; KRAS; Q61H; 0
ILDTAGHEEY

SEQ ID NO: 14423 - protein, 10 aa, Homo sapiens
  Table A; HLA-B*46:01; KRAS; Q61H; 0
ILDTAGHEEY

SEQ ID NO: 14424 - protein, 10 aa, Homo sapiens
  Table A; HLA-B*58:01; KRAS; Q61H; 0
ILDTAGHEEY

SEQ ID NO: 14425 - protein, 10 aa, Homo sapiens
  Table A; HLA-C*03:02; KRAS; Q61H; 0
ILDTAGHEEY

SEQ ID NO: 14426 - protein, 10 aa, Homo sapiens
  Table A; HLA-C*05:01; KRAS; Q61H; 1
ILDTAGHEEY

SEQ ID NO: 14427 - protein, 10 aa, Homo sapiens
  Table A; HLA-C*08:01; KRAS; Q61H; 0
ILDTAGHEEY

SEQ ID NO: 14428 - protein, 10 aa, Homo sapiens
  Table A; HLA-C*08:02; KRAS; Q61H; 1
ILDTAGHEEY

SEQ ID NO: 14429 - protein, 10 aa, Homo sapiens
  Table A; HLA-A*01:01; NRAS; Q61H; 1
ILDTAGHEEY

SEQ ID NO: 14430 - protein, 10 aa, Homo sapiens
  Table A; HLA-A*02:01; NRAS; Q61H; 1
ILDTAGHEEY

SEQ ID NO: 14431 - protein, 10 aa, Homo sapiens
  Table A; HLA-A*02:07; NRAS; Q61H; 0
ILDTAGHEEY

SEQ ID NO: 14432 - protein, 10 aa, Homo sapiens
  Table A; HLA-A*29:01; NRAS; Q61H; 0
ILDTAGHEEY

SEQ ID NO: 14433 - protein, 10 aa, Homo sapiens
  Table A; HLA-A*29:02; NRAS; Q61H; 0
ILDTAGHEEY

SEQ ID NO: 14434 - protein, 10 aa, Homo sapiens
  Table A; HLA-A*30:02; NRAS; Q61H; 0
ILDTAGHEEY

SEQ ID NO: 14435 - protein, 10 aa, Homo sapiens
  Table A; HLA-B*13:01; NRAS; Q61H; 0
ILDTAGHEEY

SEQ ID NO: 14436 - protein, 10 aa, Homo sapiens
  Table A; HLA-B*15:01; NRAS; Q61H; 1
ILDTAGHEEY

SEQ ID NO: 14437 - protein, 10 aa, Homo sapiens
  Table A; HLA-B*15:02; NRAS; Q61H; 0
ILDTAGHEEY

SEQ ID NO: 14438 - protein, 10 aa, Homo sapiens
  Table A; HLA-B*15:03; NRAS; Q61H; 0
ILDTAGHEEY

SEQ ID NO: 14439 - protein, 10 aa, Homo sapiens
  Table A; HLA-B*15:13; NRAS; Q61H; 0
ILDTAGHEEY

SEQ ID NO: 14440 - protein, 10 aa, Homo sapiens
  Table A; HLA-B*27:02; NRAS; Q61H; 0
ILDTAGHEEY

SEQ ID NO: 14441 - protein, 10 aa, Homo sapiens
  Table A; HLA-B*35:01; NRAS; Q61H; 1
ILDTAGHEEY

SEQ ID NO: 14442 - protein, 10 aa, Homo sapiens
  Table A; HLA-B*35:08; NRAS; Q61H; 0
ILDTAGHEEY

SEQ ID NO: 14443 - protein, 10 aa, Homo sapiens
  Table A; HLA-B*39:01; NRAS; Q61H; 0
ILDTAGHEEY

SEQ ID NO: 14444 - protein, 10 aa, Homo sapiens
  Table A; HLA-B*46:01; NRAS; Q61H; 0
ILDTAGHEEY

SEQ ID NO: 14445 - protein, 10 aa, Homo sapiens
  Table A; HLA-B*48:01; NRAS; Q61H; 0
ILDTAGHEEY

SEQ ID NO: 14446 - protein, 10 aa, Homo sapiens
  Table A; HLA-B*58:01; NRAS; Q61H; 0
ILDTAGHEEY

SEQ ID NO: 14447 - protein, 10 aa, Homo sapiens
  Table A; HLA-C*03:02; NRAS; Q61H; 0
ILDTAGHEEY

SEQ ID NO: 14448 - protein, 10 aa, Homo sapiens
  Table A; HLA-C*05:01; NRAS; Q61H; 1
ILDTAGHEEY

SEQ ID NO: 14449 - protein, 10 aa, Homo sapiens
  Table A; HLA-C*08:01; NRAS; Q61H; 0
ILDTAGHEEY

SEQ ID NO: 14450 - protein, 10 aa, Homo sapiens
  Table A; HLA-C*08:02; NRAS; Q61H; 0
ILDTAGHEEY

SEQ ID NO: 14451 - protein, 11 aa, Homo sapiens
  Table A; HLA-C*08:03; KRAS; Q61H; 0
ILDTAGHEEYS

SEQ ID NO: 14452 - protein, 11 aa, Homo sapiens
  Table A; HLA-C*08:03; NRAS; Q61H; 0
ILDTAGHEEYS

SEQ ID NO: 14453 - protein, 10 aa, Homo sapiens
  Table A; HLA-A*01:01; HRAS; Q61K; 1
ILDTAGKEEY

SEQ ID NO: 14454 - protein, 10 aa, Homo sapiens
  Table A; HLA-A*02:07; HRAS; Q61K; 0
ILDTAGKEEY

SEQ ID NO: 14455 - protein, 10 aa, Homo sapiens
  Table A; HLA-A*29:01; HRAS; Q61K; 0
ILDTAGKEEY

SEQ ID NO: 14456 - protein, 10 aa, Homo sapiens
  Table A; HLA-A*29:02; HRAS; Q61K; 0
ILDTAGKEEY

SEQ ID NO: 14457 - protein, 10 aa, Homo sapiens
  Table A; HLA-A*30:02; HRAS; Q61K; 0
ILDTAGKEEY

SEQ ID NO: 14458 - protein, 10 aa, Homo sapiens
  Table A; HLA-B*13:01; HRAS; Q61K; 0
ILDTAGKEEY

SEQ ID NO: 14459 - protein, 10 aa, Homo sapiens
  Table A; HLA-B*15:01; HRAS; Q61K; 0
ILDTAGKEEY

SEQ ID NO: 14460 - protein, 10 aa, Homo sapiens
  Table A; HLA-B*15:02; HRAS; Q61K; 0
ILDTAGKEEY

SEQ ID NO: 14461 - protein, 10 aa, Homo sapiens
  Table A; HLA-B*15:13; HRAS; Q61K; 0
ILDTAGKEEY

SEQ ID NO: 14462 - protein, 10 aa, Homo sapiens
  Table A; HLA-B*27:02; HRAS; Q61K; 0
ILDTAGKEEY

SEQ ID NO: 14463 - protein, 10 aa, Homo sapiens
  Table A; HLA-B*35:01; HRAS; Q61K; 0
ILDTAGKEEY

SEQ ID NO: 14464 - protein, 10 aa, Homo sapiens
  Table A; HLA-B*35:08; HRAS; Q61K; 0
ILDTAGKEEY

SEQ ID NO: 14465 - protein, 10 aa, Homo sapiens
  Table A; HLA-B*39:01; HRAS; Q61K; 0
ILDTAGKEEY

SEQ ID NO: 14466 - protein, 10 aa, Homo sapiens
  Table A; HLA-B*46:01; HRAS; Q61K; 0
ILDTAGKEEY

SEQ ID NO: 14467 - protein, 10 aa, Homo sapiens
  Table A; HLA-B*58:01; HRAS; Q61K; 0
ILDTAGKEEY

SEQ ID NO: 14468 - protein, 10 aa, Homo sapiens
  Table A; HLA-C*03:02; HRAS; Q61K; 0
ILDTAGKEEY

SEQ ID NO: 14469 - protein, 10 aa, Homo sapiens
  Table A; HLA-C*08:01; HRAS; Q61K; 0
ILDTAGKEEY

SEQ ID NO: 14470 - protein, 10 aa, Homo sapiens
  Table A; HLA-C*08:02; HRAS; Q61K; 0
ILDTAGKEEY

SEQ ID NO: 14471 - protein, 10 aa, Homo sapiens
  Table A; HLA-A*01:01; NRAS; Q61K; 1
ILDTAGKEEY

SEQ ID NO: 14472 - protein, 10 aa, Homo sapiens
  Table A; HLA-A*02:01; NRAS; Q61K; 1
ILDTAGKEEY

SEQ ID NO: 14473 - protein, 10 aa, Homo sapiens
  Table A; HLA-A*02:07; NRAS; Q61K; 0
ILDTAGKEEY

SEQ ID NO: 14474 - protein, 10 aa, Homo sapiens
  Table A; HLA-A*29:01; NRAS; Q61K; 0
ILDTAGKEEY

SEQ ID NO: 14475 - protein, 10 aa, Homo sapiens
  Table A; HLA-A*29:02; NRAS; Q61K; 1
ILDTAGKEEY

SEQ ID NO: 14476 - protein, 10 aa, Homo sapiens
  Table A; HLA-A*30:02; NRAS; Q61K; 1
ILDTAGKEEY

SEQ ID NO: 14477 - protein, 10 aa, Homo sapiens
  Table A; HLA-B*13:01; NRAS; Q61K; 0
ILDTAGKEEY

SEQ ID NO: 14478 - protein, 10 aa, Homo sapiens
  Table A; HLA-B*15:01; NRAS; Q61K; 1
ILDTAGKEEY

SEQ ID NO: 14479 - protein, 10 aa, Homo sapiens
  Table A; HLA-B*15:02; NRAS; Q61K; 0
ILDTAGKEEY

SEQ ID NO: 14480 - protein, 10 aa, Homo sapiens
  Table A; HLA-B*15:03; NRAS; Q61K; 0
ILDTAGKEEY

SEQ ID NO: 14481 - protein, 10 aa, Homo sapiens
  Table A; HLA-B*15:13; NRAS; Q61K; 0
ILDTAGKEEY

SEQ ID NO: 14482 - protein, 10 aa, Homo sapiens
  Table A; HLA-B*27:02; NRAS; Q61K; 0
ILDTAGKEEY

SEQ ID NO: 14483 - protein, 10 aa, Homo sapiens
  Table A; HLA-B*35:01; NRAS; Q61K; 1
ILDTAGKEEY

SEQ ID NO: 14484 - protein, 10 aa, Homo sapiens
  Table A; HLA-B*35:08; NRAS; Q61K; 0
ILDTAGKEEY

SEQ ID NO: 14485 - protein, 10 aa, Homo sapiens
  Table A; HLA-B*39:01; NRAS; Q61K; 1
ILDTAGKEEY

SEQ ID NO: 14486 - protein, 10 aa, Homo sapiens
  Table A; HLA-B*46:01; NRAS; Q61K; 0
ILDTAGKEEY

SEQ ID NO: 14487 - protein, 10 aa, Homo sapiens
  Table A; HLA-B*58:01; NRAS; Q61K; 0
ILDTAGKEEY

SEQ ID NO: 14488 - protein, 10 aa, Homo sapiens
  Table A; HLA-C*03:02; NRAS; Q61K; 0
ILDTAGKEEY

SEQ ID NO: 14489 - protein, 10 aa, Homo sapiens
  Table A; HLA-C*08:01; NRAS; Q61K; 0
ILDTAGKEEY

SEQ ID NO: 14490 - protein, 10 aa, Homo sapiens
  Table A; HLA-C*08:02; NRAS; Q61K; 1
ILDTAGKEEY

SEQ ID NO: 14491 - protein, 10 aa, Homo sapiens
  Table A; HLA-A*01:01; KRAS; Q61L; 1
ILDTAGLEEY

SEQ ID NO: 14492 - protein, 10 aa, Homo sapiens
  Table A; HLA-A*02:01; KRAS; Q61L; 1
ILDTAGLEEY

SEQ ID NO: 14493 - protein, 10 aa, Homo sapiens
  Table A; HLA-A*02:07; KRAS; Q61L; 0
ILDTAGLEEY

SEQ ID NO: 14494 - protein, 10 aa, Homo sapiens
  Table A; HLA-A*29:01; KRAS; Q61L; 0
ILDTAGLEEY

SEQ ID NO: 14495 - protein, 10 aa, Homo sapiens
  Table A; HLA-A*29:02; KRAS; Q61L; 0
ILDTAGLEEY

SEQ ID NO: 14496 - protein, 10 aa, Homo sapiens
  Table A; HLA-B*15:01; KRAS; Q61L; 0
ILDTAGLEEY

SEQ ID NO: 14497 - protein, 10 aa, Homo sapiens
  Table A; HLA-B*15:02; KRAS; Q61L; 0
ILDTAGLEEY

SEQ ID NO: 14498 - protein, 10 aa, Homo sapiens
  Table A; HLA-B*27:02; KRAS; Q61L; 0
ILDTAGLEEY

SEQ ID NO: 14499 - protein, 10 aa, Homo sapiens
  Table A; HLA-B*35:01; KRAS; Q61L; 0
ILDTAGLEEY

SEQ ID NO: 14500 - protein, 10 aa, Homo sapiens
  Table A; HLA-B*35:08; KRAS; Q61L; 0
ILDTAGLEEY

SEQ ID NO: 14501 - protein, 10 aa, Homo sapiens
  Table A; HLA-B*39:01; KRAS; Q61L; 0
ILDTAGLEEY

SEQ ID NO: 14502 - protein, 10 aa, Homo sapiens
  Table A; HLA-B*46:01; KRAS; Q61L; 0
ILDTAGLEEY

SEQ ID NO: 14503 - protein, 10 aa, Homo sapiens
  Table A; HLA-B*58:01; KRAS; Q61L; 0
ILDTAGLEEY

SEQ ID NO: 14504 - protein, 10 aa, Homo sapiens
  Table A; HLA-C*03:02; KRAS; Q61L; 0
ILDTAGLEEY

SEQ ID NO: 14505 - protein, 10 aa, Homo sapiens
  Table A; HLA-C*08:01; KRAS; Q61L; 0
ILDTAGLEEY

SEQ ID NO: 14506 - protein, 10 aa, Homo sapiens
  Table A; HLA-A*01:01; NRAS; Q61L; 1
ILDTAGLEEY

SEQ ID NO: 14507 - protein, 10 aa, Homo sapiens
  Table A; HLA-A*02:01; NRAS; Q61L; 1
ILDTAGLEEY

SEQ ID NO: 14508 - protein, 10 aa, Homo sapiens
  Table A; HLA-A*02:07; NRAS; Q61L; 0
ILDTAGLEEY

SEQ ID NO: 14509 - protein, 10 aa, Homo sapiens
  Table A; HLA-A*29:01; NRAS; Q61L; 0
ILDTAGLEEY

SEQ ID NO: 14510 - protein, 10 aa, Homo sapiens
  Table A; HLA-A*29:02; NRAS; Q61L; 1
ILDTAGLEEY

SEQ ID NO: 14511 - protein, 10 aa, Homo sapiens
  Table A; HLA-A*30:02; NRAS; Q61L; 0
ILDTAGLEEY

SEQ ID NO: 14512 - protein, 10 aa, Homo sapiens
  Table A; HLA-B*13:01; NRAS; Q61L; 0
ILDTAGLEEY

SEQ ID NO: 14513 - protein, 10 aa, Homo sapiens
  Table A; HLA-B*15:01; NRAS; Q61L; 1
ILDTAGLEEY

SEQ ID NO: 14514 - protein, 10 aa, Homo sapiens
  Table A; HLA-B*15:02; NRAS; Q61L; 0
ILDTAGLEEY

SEQ ID NO: 14515 - protein, 10 aa, Homo sapiens
  Table A; HLA-B*27:02; NRAS; Q61L; 0
ILDTAGLEEY

SEQ ID NO: 14516 - protein, 10 aa, Homo sapiens
  Table A; HLA-B*35:01; NRAS; Q61L; 1
ILDTAGLEEY

SEQ ID NO: 14517 - protein, 10 aa, Homo sapiens
  Table A; HLA-B*35:08; NRAS; Q61L; 0
ILDTAGLEEY

SEQ ID NO: 14518 - protein, 10 aa, Homo sapiens
  Table A; HLA-B*39:01; NRAS; Q61L; 0
ILDTAGLEEY

SEQ ID NO: 14519 - protein, 10 aa, Homo sapiens
  Table A; HLA-B*46:01; NRAS; Q61L; 0
ILDTAGLEEY

SEQ ID NO: 14520 - protein, 10 aa, Homo sapiens
  Table A; HLA-B*58:01; NRAS; Q61L; 0
ILDTAGLEEY

SEQ ID NO: 14521 - protein, 10 aa, Homo sapiens
  Table A; HLA-C*03:02; NRAS; Q61L; 0
ILDTAGLEEY

SEQ ID NO: 14522 - protein, 10 aa, Homo sapiens
  Table A; HLA-C*08:01; NRAS; Q61L; 0
ILDTAGLEEY

SEQ ID NO: 14523 - protein, 10 aa, Homo sapiens
  Table A; HLA-A*01:01; KRAS; Q61R; 1
ILDTAGREEY

SEQ ID NO: 14524 - protein, 10 aa, Homo sapiens
  Table A; HLA-A*02:01; KRAS; Q61R; 1
ILDTAGREEY

SEQ ID NO: 14525 - protein, 10 aa, Homo sapiens
  Table A; HLA-A*02:07; KRAS; Q61R; 0
ILDTAGREEY

SEQ ID NO: 14526 - protein, 10 aa, Homo sapiens
  Table A; HLA-A*29:01; KRAS; Q61R; 0
ILDTAGREEY

SEQ ID NO: 14527 - protein, 10 aa, Homo sapiens
  Table A; HLA-A*29:02; KRAS; Q61R; 0
ILDTAGREEY

SEQ ID NO: 14528 - protein, 10 aa, Homo sapiens
  Table A; HLA-A*30:02; KRAS; Q61R; 0
ILDTAGREEY

SEQ ID NO: 14529 - protein, 10 aa, Homo sapiens
  Table A; HLA-B*13:01; KRAS; Q61R; 0
ILDTAGREEY

SEQ ID NO: 14530 - protein, 10 aa, Homo sapiens
  Table A; HLA-B*15:01; KRAS; Q61R; 0
ILDTAGREEY

SEQ ID NO: 14531 - protein, 10 aa, Homo sapiens
  Table A; HLA-B*15:02; KRAS; Q61R; 0
ILDTAGREEY

SEQ ID NO: 14532 - protein, 10 aa, Homo sapiens
  Table A; HLA-B*15:03; KRAS; Q61R; 0
ILDTAGREEY

SEQ ID NO: 14533 - protein, 10 aa, Homo sapiens
  Table A; HLA-B*15:13; KRAS; Q61R; 0
ILDTAGREEY

SEQ ID NO: 14534 - protein, 10 aa, Homo sapiens
  Table A; HLA-B*27:02; KRAS; Q61R; 0
ILDTAGREEY

SEQ ID NO: 14535 - protein, 10 aa, Homo sapiens
  Table A; HLA-B*35:01; KRAS; Q61R; 0
ILDTAGREEY

SEQ ID NO: 14536 - protein, 10 aa, Homo sapiens
  Table A; HLA-B*35:08; KRAS; Q61R; 0
ILDTAGREEY

SEQ ID NO: 14537 - protein, 10 aa, Homo sapiens
  Table A; HLA-B*39:01; KRAS; Q61R; 0
ILDTAGREEY

SEQ ID NO: 14538 - protein, 10 aa, Homo sapiens
  Table A; HLA-B*46:01; KRAS; Q61R; 0
ILDTAGREEY

SEQ ID NO: 14539 - protein, 10 aa, Homo sapiens
  Table A; HLA-B*57:01; KRAS; Q61R; 0
ILDTAGREEY

SEQ ID NO: 14540 - protein, 10 aa, Homo sapiens
  Table A; HLA-B*58:01; KRAS; Q61R; 0
ILDTAGREEY

SEQ ID NO: 14541 - protein, 10 aa, Homo sapiens
  Table A; HLA-C*03:02; KRAS; Q61R; 0
ILDTAGREEY

SEQ ID NO: 14542 - protein, 10 aa, Homo sapiens
  Table A; HLA-C*08:01; KRAS; Q61R; 0
ILDTAGREEY

SEQ ID NO: 14543 - protein, 10 aa, Homo sapiens
  Table A; HLA-C*08:02; KRAS; Q61R; 0
ILDTAGREEY

SEQ ID NO: 14544 - protein, 10 aa, Homo sapiens
  Table A; HLA-A*01:01; NRAS; Q61R; 1
ILDTAGREEY

SEQ ID NO: 14545 - protein, 10 aa, Homo sapiens
  Table A; HLA-A*02:01; NRAS; Q61R; 1
ILDTAGREEY

SEQ ID NO: 14546 - protein, 10 aa, Homo sapiens
  Table A; HLA-A*02:07; NRAS; Q61R; 0
ILDTAGREEY

SEQ ID NO: 14547 - protein, 10 aa, Homo sapiens
  Table A; HLA-A*03:02; NRAS; Q61R; 0
ILDTAGREEY

SEQ ID NO: 14548 - protein, 10 aa, Homo sapiens
  Table A; HLA-A*29:01; NRAS; Q61R; 0
ILDTAGREEY

SEQ ID NO: 14549 - protein, 10 aa, Homo sapiens
  Table A; HLA-A*29:02; NRAS; Q61R; 1
ILDTAGREEY

SEQ ID NO: 14550 - protein, 10 aa, Homo sapiens
  Table A; HLA-A*30:02; NRAS; Q61R; 1
ILDTAGREEY

SEQ ID NO: 14551 - protein, 10 aa, Homo sapiens
  Table A; HLA-B*13:01; NRAS; Q61R; 0
ILDTAGREEY

SEQ ID NO: 14552 - protein, 10 aa, Homo sapiens
  Table A; HLA-B*15:01; NRAS; Q61R; 1
ILDTAGREEY

SEQ ID NO: 14553 - protein, 10 aa, Homo sapiens
  Table A; HLA-B*15:02; NRAS; Q61R; 0
ILDTAGREEY

SEQ ID NO: 14554 - protein, 10 aa, Homo sapiens
  Table A; HLA-B*15:03; NRAS; Q61R; 0
ILDTAGREEY

SEQ ID NO: 14555 - protein, 10 aa, Homo sapiens
  Table A; HLA-B*15:13; NRAS; Q61R; 0
ILDTAGREEY

SEQ ID NO: 14556 - protein, 10 aa, Homo sapiens
  Table A; HLA-B*18:01; NRAS; Q61R; 1
ILDTAGREEY

SEQ ID NO: 14557 - protein, 10 aa, Homo sapiens
  Table A; HLA-B*27:02; NRAS; Q61R; 0
ILDTAGREEY

SEQ ID NO: 14558 - protein, 10 aa, Homo sapiens
  Table A; HLA-B*35:01; NRAS; Q61R; 1
ILDTAGREEY

SEQ ID NO: 14559 - protein, 10 aa, Homo sapiens
  Table A; HLA-B*35:08; NRAS; Q61R; 0
ILDTAGREEY

SEQ ID NO: 14560 - protein, 10 aa, Homo sapiens
  Table A; HLA-B*39:01; NRAS; Q61R; 1
ILDTAGREEY

SEQ ID NO: 14561 - protein, 10 aa, Homo sapiens
  Table A; HLA-B*46:01; NRAS; Q61R; 0
ILDTAGREEY

SEQ ID NO: 14562 - protein, 10 aa, Homo sapiens
  Table A; HLA-B*57:01; NRAS; Q61R; 1
ILDTAGREEY

SEQ ID NO: 14563 - protein, 10 aa, Homo sapiens
  Table A; HLA-B*58:01; NRAS; Q61R; 1
ILDTAGREEY

SEQ ID NO: 14564 - protein, 10 aa, Homo sapiens
  Table A; HLA-C*03:02; NRAS; Q61R; 0
ILDTAGREEY

SEQ ID NO: 14565 - protein, 10 aa, Homo sapiens
  Table A; HLA-C*08:01; NRAS; Q61R; 0
ILDTAGREEY

SEQ ID NO: 14566 - protein, 10 aa, Homo sapiens
  Table A; HLA-C*08:02; NRAS; Q61R; 1
ILDTAGREEY

SEQ ID NO: 14567 - protein, 9 aa, Homo sapiens
  Table A; HLA-A*02:03; CREBBP; P2094L; 0
ILKSNLQLM

SEQ ID NO: 14568 - protein, 9 aa, Homo sapiens
  Table A; HLA-A*02:04; CREBBP; P2094L; 0
ILKSNLQLM

SEQ ID NO: 14569 - protein, 9 aa, Homo sapiens
  Table A; HLA-B*15:01; CREBBP; P2094L; 1
ILKSNLQLM

SEQ ID NO: 14570 - protein, 9 aa, Homo sapiens
  Table A; HLA-B*46:01; CREBBP; P2094L; 0
ILKSNLQLM

SEQ ID NO: 14571 - protein, 11 aa, Homo sapiens
  Table A; HLA-A*02:03; CREBBP; P2094L; 0
ILKSNLQLMAA

SEQ ID NO: 14572 - protein, 8 aa, Homo sapiens
  Table A; HLA-A*31:01; CTNNB1; K335I; 1
ILLWTTSR

SEQ ID NO: 14573 - protein, 9 aa, Homo sapiens
  Table A; HLA-A*02:01; CTNNB1; K335I; 1
ILLWTTSRV

SEQ ID NO: 14574 - protein, 9 aa, Homo sapiens
  Table A; HLA-A*02:03; CTNNB1; K335I; 0
ILLWTTSRV

SEQ ID NO: 14575 - protein, 9 aa, Homo sapiens
  Table A; HLA-A*02:04; CTNNB1; K335I; 0
ILLWTTSRV

SEQ ID NO: 14576 - protein, 9 aa, Homo sapiens
  Table A; HLA-A*02:07; CTNNB1; K335I; 0
ILLWTTSRV

SEQ ID NO: 14577 - protein, 9 aa, Homo sapiens
  Table A; HLA-A*03:01; CTNNB1; K335I; 1
ILLWTTSRV

SEQ ID NO: 14578 - protein, 10 aa, Homo sapiens
  Table A; HLA-A*02:03; CTNNB1; K335I; 0
ILLWTTSRVL

SEQ ID NO: 14579 - protein, 10 aa, Homo sapiens
  Table A; HLA-A*02:04; CTNNB1; K335I; 0
ILLWTTSRVL

SEQ ID NO: 14580 - protein, 10 aa, Homo sapiens
  Table A; HLA-A*03:01; CTNNB1; K335I; 1
ILLWTTSRVL

SEQ ID NO: 14581 - protein, 11 aa, Homo sapiens
  Table A; HLA-A*03:01; CTNNB1; K335I; 1
ILLWTTSRVLK

SEQ ID NO: 14582 - protein, 9 aa, Homo sapiens
  Table A; HLA-A*02:03; PIK3CA; G118D; 0
ILNREIDFA

SEQ ID NO: 14583 - protein, 9 aa, Homo sapiens
  Table A; HLA-A*02:01; NFE2L2; D29G; 1
ILWRQDIGL

SEQ ID NO: 14584 - protein, 9 aa, Homo sapiens
  Table A; HLA-A*02:04; NFE2L2; D29G; 0
ILWRQDIGL

SEQ ID NO: 14585 - protein, 9 aa, Homo sapiens
  Table A; HLA-A*02:07; NFE2L2; D29G; 0
ILWRQDIGL

SEQ ID NO: 14586 - protein, 11 aa, Homo sapiens
  Table A; HLA-A*02:04; NFE2L2; D29G; 0
ILWRQDIGLGV

SEQ ID NO: 14587 - protein, 11 aa, Homo sapiens
  Table A; HLA-A*02:07; NFE2L2; D29G; 0
ILWRQDIGLGV

SEQ ID NO: 14588 - protein, 9 aa, Homo sapiens
  Table A; HLA-A*02:01; NFE2L2; D29H; 1
ILWRQDIHL

SEQ ID NO: 14589 - protein, 9 aa, Homo sapiens
  Table A; HLA-A*02:04; NFE2L2; D29H; 0
ILWRQDIHL

SEQ ID NO: 14590 - protein, 9 aa, Homo sapiens
  Table A; HLA-A*02:07; NFE2L2; D29H; 0
ILWRQDIHL

SEQ ID NO: 14591 - protein, 9 aa, Homo sapiens
  Table A; HLA-A*02:03; CTNNB1; K335I; 0
IMRTYTYEI

SEQ ID NO: 14592 - protein, 9 aa, Homo sapiens
  Table A; HLA-A*02:04; CTNNB1; K335I; 0
IMRTYTYEI

SEQ ID NO: 14593 - protein, 9 aa, Homo sapiens
  Table A; HLA-A*02:07; CTNNB1; K335I; 0
IMRTYTYEI

SEQ ID NO: 14594 - protein, 9 aa, Homo sapiens
  Table A; HLA-A*24:02; CTNNB1; K335I; 1
IMRTYTYEI

SEQ ID NO: 14595 - protein, 9 aa, Homo sapiens
  Table A; HLA-A*30:01; CTNNB1; K335I; 0
IMRTYTYEI

SEQ ID NO: 14596 - protein, 9 aa, Homo sapiens
  Table A; HLA-B*48:01; CTNND1; A781T; 0
INEVITENL

SEQ ID NO: 14597 - protein, 9 aa, Homo sapiens
  Table A; HLA-C*08:02; CTNND1; A781T; 0
INEVITENL

SEQ ID NO: 14598 - protein, 8 aa, Homo sapiens
  Table A; HLA-A*02:01; KEAP1; D422N; 1
INGHIYAV

SEQ ID NO: 14599 - protein, 8 aa, Homo sapiens
  Table A; HLA-A*02:04; KEAP1; D422N; 0
INGHIYAV

SEQ ID NO: 14600 - protein, 8 aa, Homo sapiens
  Table A; HLA-A*11:01; KEAP1; D422N; 0
INGHIYAV

SEQ ID NO: 14601 - protein, 8 aa, Homo sapiens
  Table A; HLA-B*48:01; KEAP1; D422N; 0
INGHIYAV

SEQ ID NO: 14602 - protein, 8 aa, Homo sapiens
  Table A; HLA-B*54:01; KEAP1; D422N; 0
INGHIYAV

SEQ ID NO: 14603 - protein, 10 aa, Homo sapiens
  Table A; HLA-B*54:01; CHST11; A159T; 0
IPANEAHVST

SEQ ID NO: 14604 - protein, 10 aa, Homo sapiens
  Table A; HLA-B*56:01; CHST11; A159T; 0
IPANEAHVST

SEQ ID NO: 14605 - protein, 8 aa, Homo sapiens
  Table A; HLA-B*39:06; KRAS; A146T; 0
IPFIETST

SEQ ID NO: 14606 - protein, 8 aa, Homo sapiens
  Table A; HLA-B*54:01; KRAS; A146T; 0
IPFIETST

SEQ ID NO: 14607 - protein, 8 aa, Homo sapiens
  Table A; HLA-B*55:02; KRAS; A146T; 0
IPFIETST

SEQ ID NO: 14608 - protein, 8 aa, Homo sapiens
  Table A; HLA-B*56:01; KRAS; A146T; 0
IPFIETST

SEQ ID NO: 14609 - protein, 9 aa, Homo sapiens
  Table A; HLA-B*27:02; KRAS; A146T; 0
IPFIETSTK

SEQ ID NO: 14610 - protein, 9 aa, Homo sapiens
  Table A; HLA-B*51:01; KRAS; A146T; 1
IPFIETSTK

SEQ ID NO: 14611 - protein, 10 aa, Homo sapiens
  Table A; HLA-B*54:01; KRAS; A146T; 0
IPFIETSTKT

SEQ ID NO: 14612 - protein, 10 aa, Homo sapiens
  Table A; HLA-B*55:02; KRAS; A146T; 0
IPFIETSTKT

SEQ ID NO: 14613 - protein, 10 aa, Homo sapiens
  Table A; HLA-B*56:01; KRAS; A146T; 0
IPFIETSTKT

SEQ ID NO: 14614 - protein, 11 aa, Homo sapiens
  Table A; HLA-A*68:01; KRAS; A146T; 0
IPFIETSTKTR

SEQ ID NO: 14615 - protein, 11 aa, Homo sapiens
  Table A; HLA-B*27:02; KRAS; A146T; 0
IPFIETSTKTR

SEQ ID NO: 14616 - protein, 9 aa, Homo sapiens
  Table A; HLA-B*35:01; RGS7; R44C; 1
IPICTVKSF

SEQ ID NO: 14617 - protein, 10 aa, Homo sapiens
  Table A; HLA-B*27:02; EGFR; R108K; 0
IPLENLQIIK

SEQ ID NO: 14618 - protein, 11 aa, Homo sapiens
  Table A; HLA-B*54:01; EGFR; R108K; 0
IPLENLQIIKG

SEQ ID NO: 14619 - protein, 9 aa, Homo sapiens
  Table A; HLA-B*51:01; SFRP4; R232Q; 1
IPQTQVPLI

SEQ ID NO: 14620 - protein, 9 aa, Homo sapiens
  Table A; HLA-B*54:01; SFRP4; R232Q; 0
IPQTQVPLI

SEQ ID NO: 14621 - protein, 9 aa, Homo sapiens
  Table A; HLA-B*55:01; SFRP4; R232Q; 0
IPQTQVPLI

SEQ ID NO: 14622 - protein, 9 aa, Homo sapiens
  Table A; HLA-B*55:02; SFRP4; R232Q; 0
IPQTQVPLI

SEQ ID NO: 14623 - protein, 9 aa, Homo sapiens
  Table A; HLA-B*56:01; SFRP4; R232Q; 0
IPQTQVPLI

SEQ ID NO: 14624 - protein, 8 aa, Homo sapiens
  Table A; HLA-B*07:02; CCND1; T286I; 1
IPTDVRDV

SEQ ID NO: 14625 - protein, 8 aa, Homo sapiens
  Table A; HLA-B*51:01; CCND1; T286I; 1
IPTDVRDV

SEQ ID NO: 14626 - protein, 8 aa, Homo sapiens
  Table A; HLA-B*54:01; CCND1; T286I; 0
IPTDVRDV

SEQ ID NO: 14627 - protein, 8 aa, Homo sapiens
  Table A; HLA-B*55:01; CCND1; T286I; 0
IPTDVRDV

SEQ ID NO: 14628 - protein, 8 aa, Homo sapiens
  Table A; HLA-B*55:02; CCND1; T286I; 0
IPTDVRDV

SEQ ID NO: 14629 - protein, 8 aa, Homo sapiens
  Table A; HLA-B*56:01; CCND1; T286I; 0
IPTDVRDV

SEQ ID NO: 14630 - protein, 10 aa, Homo sapiens
  Table A; HLA-A*02:06; CCND1; T286I; 0
IPTDVRDVDI

SEQ ID NO: 14631 - protein, 10 aa, Homo sapiens
  Table A; HLA-A*68:01; CCND1; T286I; 0
IPTDVRDVDI

SEQ ID NO: 14632 - protein, 10 aa, Homo sapiens
  Table A; HLA-A*68:02; CCND1; T286I; 0
IPTDVRDVDI

SEQ ID NO: 14633 - protein, 10 aa, Homo sapiens
  Table A; HLA-B*07:02; CCND1; T286I; 1
IPTDVRDVDI

SEQ ID NO: 14634 - protein, 10 aa, Homo sapiens
  Table A; HLA-B*35:01; CCND1; T286I; 1
IPTDVRDVDI

SEQ ID NO: 14635 - protein, 10 aa, Homo sapiens
  Table A; HLA-B*35:02; CCND1; T286I; 0
IPTDVRDVDI

SEQ ID NO: 14636 - protein, 10 aa, Homo sapiens
  Table A; HLA-B*35:03; CCND1; T286I; 0
IPTDVRDVDI

SEQ ID NO: 14637 - protein, 10 aa, Homo sapiens
  Table A; HLA-B*35:08; CCND1; T286I; 0
IPTDVRDVDI

SEQ ID NO: 14638 - protein, 10 aa, Homo sapiens
  Table A; HLA-B*35:12; CCND1; T286I; 0
IPTDVRDVDI

SEQ ID NO: 14639 - protein, 10 aa, Homo sapiens
  Table A; HLA-B*38:01; CCND1; T286I; 0
IPTDVRDVDI

SEQ ID NO: 14640 - protein, 10 aa, Homo sapiens
  Table A; HLA-B*48:01; CCND1; T286I; 0
IPTDVRDVDI

SEQ ID NO: 14641 - protein, 10 aa, Homo sapiens
  Table A; HLA-B*51:01; CCND1; T286I; 1
IPTDVRDVDI

SEQ ID NO: 14642 - protein, 10 aa, Homo sapiens
  Table A; HLA-B*54:01; CCND1; T286I; 0
IPTDVRDVDI

SEQ ID NO: 14643 - protein, 10 aa, Homo sapiens
  Table A; HLA-B*55:02; CCND1; T286I; 0
IPTDVRDVDI

SEQ ID NO: 14644 - protein, 10 aa, Homo sapiens
  Table A; HLA-B*56:01; CCND1; T286I; 0
IPTDVRDVDI

SEQ ID NO: 14645 - protein, 9 aa, Homo sapiens
  Table A; HLA-B*57:01; CHD4; R1162W; 0
IQAFSRAHW

SEQ ID NO: 14646 - protein, 9 aa, Homo sapiens
  Table A; HLA-A*03:01; SMARCA4; G1232S; 1
IQASMFDQK

SEQ ID NO: 14647 - protein, 9 aa, Homo sapiens
  Table A; HLA-A*03:02; SMARCA4; G1232S; 0
IQASMFDQK

SEQ ID NO: 14648 - protein, 9 aa, Homo sapiens
  Table A; HLA-A*11:01; SMARCA4; G1232S; 0
IQASMFDQK

SEQ ID NO: 14649 - protein, 9 aa, Homo sapiens
  Table A; HLA-A*31:01; SMARCA4; G1232S; 0
IQASMFDQK

SEQ ID NO: 14650 - protein, 9 aa, Homo sapiens
  Table A; HLA-A*68:01; SMARCA4; G1232S; 0
IQASMFDQK

SEQ ID NO: 14651 - protein, 9 aa, Homo sapiens
  Table A; HLA-A*68:02; SMARCA4; G1232S; 0
IQASMFDQK

SEQ ID NO: 14652 - protein, 9 aa, Homo sapiens
  Table A; HLA-B*27:02; SMARCA4; G1232S; 0
IQASMFDQK

SEQ ID NO: 14653 - protein, 10 aa, Homo sapiens
  Table A; HLA-C*08:03; SMARCA4; G1232S; 0
IQASMFDQKS

SEQ ID NO: 14654 - protein, 8 aa, Homo sapiens
  Table A; HLA-A*02:05; FAM135B; S11L; 0
IQGTVEFL

SEQ ID NO: 14655 - protein, 9 aa, Homo sapiens
  Table A; HLA-B*13:02; FAM135B; S11L; 0
IQGTVEFLV

SEQ ID NO: 14656 - protein, 9 aa, Homo sapiens
  Table A; HLA-B*27:05; XPO1; R749Q; 0
IRSMQTVKR

SEQ ID NO: 14657 - protein, 8 aa, Homo sapiens
  Table A; HLA-B*08:01; SF3B1; R957Q; 1
ISQTAVVM

SEQ ID NO: 14658 - protein, 8 aa, Homo sapiens
  Table A; HLA-B*15:01; SF3B1; R957Q; 1
ISQTAVVM

SEQ ID NO: 14659 - protein, 8 aa, Homo sapiens
  Table A; HLA-B*15:02; SF3B1; R957Q; 0
ISQTAVVM

SEQ ID NO: 14660 - protein, 8 aa, Homo sapiens
  Table A; HLA-B*35:01; SF3B1; R957Q; 1
ISQTAVVM

SEQ ID NO: 14661 - protein, 8 aa, Homo sapiens
  Table A; HLA-B*35:03; SF3B1; R957Q; 0
ISQTAVVM

SEQ ID NO: 14662 - protein, 8 aa, Homo sapiens
  Table A; HLA-B*39:01; SF3B1; R957Q; 0
ISQTAVVM

SEQ ID NO: 14663 - protein, 8 aa, Homo sapiens
  Table A; HLA-B*46:01; SF3B1; R957Q; 0
ISQTAVVM

SEQ ID NO: 14664 - protein, 8 aa, Homo sapiens
  Table A; HLA-B*58:01; SF3B1; R957Q; 0
ISQTAVVM

SEQ ID NO: 14665 - protein, 8 aa, Homo sapiens
  Table A; HLA-C*03:04; SF3B1; R957Q; 1
ISQTAVVM

SEQ ID NO: 14666 - protein, 8 aa, Homo sapiens
  Table A; HLA-C*07:04; SF3B1; R957Q; 0
ISQTAVVM

SEQ ID NO: 14667 - protein, 8 aa, Homo sapiens
  Table A; HLA-C*08:03; SF3B1; R957Q; 0
ISQTAVVM

SEQ ID NO: 14668 - protein, 8 aa, Homo sapiens
  Table A; HLA-C*12:03; SF3B1; R957Q; 1
ISQTAVVM

SEQ ID NO: 14669 - protein, 8 aa, Homo sapiens
  Table A; HLA-C*14:02; SF3B1; R957Q; 0
ISQTAVVM

SEQ ID NO: 14670 - protein, 8 aa, Homo sapiens
  Table A; HLA-C*14:03; SF3B1; R957Q; 0
ISQTAVVM

SEQ ID NO: 14671 - protein, 8 aa, Homo sapiens
  Table A; HLA-C*16:01; SF3B1; R957Q; 1
ISQTAVVM

SEQ ID NO: 14672 - protein, 9 aa, Homo sapiens
  Table A; HLA-A*03:01; SF3B1; R957Q; 1
ISQTAVVMK

SEQ ID NO: 14673 - protein, 9 aa, Homo sapiens
  Table A; HLA-A*03:02; SF3B1; R957Q; 0
ISQTAVVMK

SEQ ID NO: 14674 - protein, 9 aa, Homo sapiens
  Table A; HLA-A*11:01; SF3B1; R957Q; 1
ISQTAVVMK

SEQ ID NO: 14675 - protein, 9 aa, Homo sapiens
  Table A; HLA-A*31:01; SF3B1; R957Q; 0
ISQTAVVMK

SEQ ID NO: 14676 - protein, 9 aa, Homo sapiens
  Table A; HLA-A*33:03; SF3B1; R957Q; 0
ISQTAVVMK

SEQ ID NO: 14677 - protein, 9 aa, Homo sapiens
  Table A; HLA-A*68:01; SF3B1; R957Q; 0
ISQTAVVMK

SEQ ID NO: 14678 - protein, 9 aa, Homo sapiens
  Table A; HLA-B*27:02; SF3B1; R957Q; 0
ISQTAVVMK

SEQ ID NO: 14679 - protein, 9 aa, Homo sapiens
  Table A; HLA-B*57:01; SF3B1; R957Q; 1
ISQTAVVMK

SEQ ID NO: 14680 - protein, 9 aa, Homo sapiens
  Table A; HLA-B*13:02; PIK3CA; E542V; 0
ISTRDPLSV

SEQ ID NO: 14681 - protein, 9 aa, Homo sapiens
  Table A; HLA-B*58:01; PIK3CA; E542V; 0
ISTRDPLSV

SEQ ID NO: 14682 - protein, 9 aa, Homo sapiens
  Table A; HLA-C*15:02; PIK3CA; E542V; 0
ISTRDPLSV

SEQ ID NO: 14683 - protein, 9 aa, Homo sapiens
  Table A; HLA-B*15:01; EP300; D1399N; 1
ISYLNSVHF

SEQ ID NO: 14684 - protein, 9 aa, Homo sapiens
  Table A; HLA-B*57:01; EP300; D1399N; 1
ISYLNSVHF

SEQ ID NO: 14685 - protein, 9 aa, Homo sapiens
  Table A; HLA-B*58:01; EP300; D1399N; 0
ISYLNSVHF

SEQ ID NO: 14686 - protein, 10 aa, Homo sapiens
  Table A; HLA-B*57:01; EP300; D1399N; 1
ISYLNSVHFF

SEQ ID NO: 14687 - protein, 9 aa, Homo sapiens
  Table A; HLA-A*02:03; RAC1; P29L; 0
ISYTTNAFL

SEQ ID NO: 14688 - protein, 9 aa, Homo sapiens
  Table A; HLA-A*02:05; RAC1; P29L; 0
ISYTTNAFL

SEQ ID NO: 14689 - protein, 9 aa, Homo sapiens
  Table A; HLA-A*02:06; RAC1; P29L; 0
ISYTTNAFL

SEQ ID NO: 14690 - protein, 9 aa, Homo sapiens
  Table A; HLA-A*68:02; RAC1; P29L; 0
ISYTTNAFL

SEQ ID NO: 14691 - protein, 9 aa, Homo sapiens
  Table A; HLA-B*13:02; RAC1; P29L; 0
ISYTTNAFL

SEQ ID NO: 14692 - protein, 9 aa, Homo sapiens
  Table A; HLA-B*15:02; RAC1; P29L; 0
ISYTTNAFL

SEQ ID NO: 14693 - protein, 9 aa, Homo sapiens
  Table A; HLA-B*57:01; RAC1; P29L; 0
ISYTTNAFL

SEQ ID NO: 14694 - protein, 9 aa, Homo sapiens
  Table A; HLA-B*58:01; RAC1; P29L; 0
ISYTTNAFL

SEQ ID NO: 14695 - protein, 9 aa, Homo sapiens
  Table A; HLA-C*03:03; RAC1; P29L; 1
ISYTTNAFL

SEQ ID NO: 14696 - protein, 9 aa, Homo sapiens
  Table A; HLA-C*03:04; RAC1; P29L; 1
ISYTTNAFL

SEQ ID NO: 14697 - protein, 9 aa, Homo sapiens
  Table A; HLA-C*08:01; RAC1; P29L; 0
ISYTTNAFL

SEQ ID NO: 14698 - protein, 9 aa, Homo sapiens
  Table A; HLA-C*15:02; RAC1; P29L; 0
ISYTTNAFL

SEQ ID NO: 14699 - protein, 9 aa, Homo sapiens
  Table A; HLA-C*17:01; RAC1; P29L; 0
ISYTTNAFL

SEQ ID NO: 14700 - protein, 10 aa, Homo sapiens
  Table A; HLA-A*68:02; RAC1; P29L; 0
ISYTTNAFLG

SEQ ID NO: 14701 - protein, 10 aa, Homo sapiens
  Table A; HLA-A*68:02; RAC1; P29S; 0
ISYTTNAFSG

SEQ ID NO: 14702 - protein, 9 aa, Homo sapiens
  Table A; HLA-A*02:01; CTNNB1; T41I; 1
ITAPSLSGK

SEQ ID NO: 14703 - protein, 9 aa, Homo sapiens
  Table A; HLA-A*02:03; CTNNB1; T41I; 0
ITAPSLSGK

SEQ ID NO: 14704 - protein, 9 aa, Homo sapiens
  Table A; HLA-A*02:08; CTNNB1; T41I; 0
ITAPSLSGK

SEQ ID NO: 14705 - protein, 9 aa, Homo sapiens
  Table A; HLA-A*03:01; CTNNB1; T41I; 1
ITAPSLSGK

SEQ ID NO: 14706 - protein, 9 aa, Homo sapiens
  Table A; HLA-A*03:02; CTNNB1; T41I; 0
ITAPSLSGK

SEQ ID NO: 14707 - protein, 9 aa, Homo sapiens
  Table A; HLA-A*11:01; CTNNB1; T41I; 1
ITAPSLSGK

SEQ ID NO: 14708 - protein, 9 aa, Homo sapiens
  Table A; HLA-A*26:01; CTNNB1; T41I; 0
ITAPSLSGK

SEQ ID NO: 14709 - protein, 9 aa, Homo sapiens
  Table A; HLA-A*26:03; CTNNB1; T41I; 0
ITAPSLSGK

SEQ ID NO: 14710 - protein, 9 aa, Homo sapiens
  Table A; HLA-A*30:01; CTNNB1; T41I; 0
ITAPSLSGK

SEQ ID NO: 14711 - protein, 9 aa, Homo sapiens
  Table A; HLA-A*31:01; CTNNB1; T41I; 0
ITAPSLSGK

SEQ ID NO: 14712 - protein, 9 aa, Homo sapiens
  Table A; HLA-A*33:03; CTNNB1; T41I; 0
ITAPSLSGK

SEQ ID NO: 14713 - protein, 9 aa, Homo sapiens
  Table A; HLA-A*68:01; CTNNB1; T41I; 0
ITAPSLSGK

SEQ ID NO: 14714 - protein, 9 aa, Homo sapiens
  Table A; HLA-A*68:02; CTNNB1; T41I; 0
ITAPSLSGK

SEQ ID NO: 14715 - protein, 9 aa, Homo sapiens
  Table A; HLA-B*27:05; CTNNB1; T41I; 1
ITAPSLSGK

SEQ ID NO: 14716 - protein, 9 aa, Homo sapiens
  Table A; HLA-B*46:01; CTNNB1; T41I; 0
ITAPSLSGK

SEQ ID NO: 14717 - protein, 9 aa, Homo sapiens
  Table A; HLA-B*57:01; CTNNB1; T41I; 1
ITAPSLSGK

SEQ ID NO: 14718 - protein, 9 aa, Homo sapiens
  Table A; HLA-B*58:01; CTNNB1; T41I; 0
ITAPSLSGK

SEQ ID NO: 14719 - protein, 10 aa, Homo sapiens
  Table A; HLA-A*02:05; CTNNB1; T41I; 0
ITAPSLSGKG

SEQ ID NO: 14720 - protein, 10 aa, Homo sapiens
  Table A; HLA-A*03:01; CTNNB1; T41I; 1
ITAPSLSGKG

SEQ ID NO: 14721 - protein, 10 aa, Homo sapiens
  Table A; HLA-A*11:01; CTNNB1; T41I; 1
ITAPSLSGKG

SEQ ID NO: 14722 - protein, 10 aa, Homo sapiens
  Table A; HLA-A*26:01; CTNNB1; T41I; 0
ITAPSLSGKG

SEQ ID NO: 14723 - protein, 10 aa, Homo sapiens
  Table A; HLA-A*29:02; CTNNB1; T41I; 1
ITAPSLSGKG

SEQ ID NO: 14724 - protein, 10 aa, Homo sapiens
  Table A; HLA-A*68:01; CTNNB1; T41I; 0
ITAPSLSGKG

SEQ ID NO: 14725 - protein, 10 aa, Homo sapiens
  Table A; HLA-A*68:02; CTNNB1; T41I; 0
ITAPSLSGKG

SEQ ID NO: 14726 - protein, 9 aa, Homo sapiens
  Table A; HLA-A*02:05; PIK3CA; E545A; 0
ITAQEKDFL

SEQ ID NO: 14727 - protein, 10 aa, Homo sapiens
  Table A; HLA-B*57:01; PIK3CA; E545A; 0
ITAQEKDFLW

SEQ ID NO: 14728 - protein, 10 aa, Homo sapiens
  Table A; HLA-A*68:02; EGFR; L861Q; 0
ITDFGLAKQL

SEQ ID NO: 14729 - protein, 8 aa, Homo sapiens
  Table A; HLA-A*03:01; EGFR; L858R; 1
ITDFGRAK

SEQ ID NO: 14730 - protein, 8 aa, Homo sapiens
  Table A; HLA-A*11:01; EGFR; L858R; 1
ITDFGRAK

SEQ ID NO: 14731 - protein, 9 aa, Homo sapiens
  Table A; HLA-C*03:04; EGFR; L858R; 1
ITDFGRAKL

SEQ ID NO: 14732 - protein, 9 aa, Homo sapiens
  Table A; HLA-C*05:01; EGFR; L858R; 1
ITDFGRAKL

SEQ ID NO: 14733 - protein, 9 aa, Homo sapiens
  Table A; HLA-C*08:02; EGFR; L858R; 1
ITDFGRAKL

SEQ ID NO: 14734 - protein, 8 aa, Homo sapiens
  Table A; HLA-C*05:01; PIK3CA; E545D; 1
ITDQEKDF

SEQ ID NO: 14735 - protein, 9 aa, Homo sapiens
  Table A; HLA-C*05:01; PIK3CA; E545D; 1
ITDQEKDFL

SEQ ID NO: 14736 - protein, 9 aa, Homo sapiens
  Table A; HLA-C*08:02; PIK3CA; E545D; 0
ITDQEKDFL

SEQ ID NO: 14737 - protein, 10 aa, Homo sapiens
  Table A; HLA-B*57:01; PIK3CA; E545D; 0
ITDQEKDFLW

SEQ ID NO: 14738 - protein, 10 aa, Homo sapiens
  Table A; HLA-A*01:01; ARHGAP5; V474A; 1
ITEADSKEAY

SEQ ID NO: 14739 - protein, 10 aa, Homo sapiens
  Table A; HLA-B*15:01; ARHGAP5; V474A; 1
ITEADSKEAY

SEQ ID NO: 14740 - protein, 10 aa, Homo sapiens
  Table A; HLA-B*35:08; ARHGAP5; V474A; 0
ITEADSKEAY

SEQ ID NO: 14741 - protein, 10 aa, Homo sapiens
  Table A; HLA-B*58:01; ARHGAP5; V474A; 0
ITEADSKEAY

SEQ ID NO: 14742 - protein, 10 aa, Homo sapiens
  Table A; HLA-C*03:02; ARHGAP5; V474A; 0
ITEADSKEAY

SEQ ID NO: 14743 - protein, 10 aa, Homo sapiens
  Table A; HLA-B*57:01; PIK3CA; Q546K; 0
ITEKEKDFLW

SEQ ID NO: 14744 - protein, 9 aa, Homo sapiens
  Table A; HLA-A*03:02; CTNND1; A781T; 0
ITENLEAAK

SEQ ID NO: 14745 - protein, 9 aa, Homo sapiens
  Table A; HLA-A*11:01; CTNND1; A781T; 0
ITENLEAAK

SEQ ID NO: 14746 - protein, 9 aa, Homo sapiens
  Table A; HLA-B*27:02; CTNND1; A781T; 0
ITENLEAAK

SEQ ID NO: 14747 - protein, 10 aa, Homo sapiens
  Table A; HLA-A*03:02; CTNND1; A781T; 0
ITENLEAAKK

SEQ ID NO: 14748 - protein, 10 aa, Homo sapiens
  Table A; HLA-A*11:01; CTNND1; A781T; 0
ITENLEAAKK

SEQ ID NO: 14749 - protein, 10 aa, Homo sapiens
  Table A; HLA-A*68:01; CTNND1; A781T; 0
ITENLEAAKK

SEQ ID NO: 14750 - protein, 10 aa, Homo sapiens
  Table A; HLA-A*68:02; CTNND1; A781T; 0
ITENLEAAKK

SEQ ID NO: 14751 - protein, 10 aa, Homo sapiens
  Table A; HLA-B*27:02; CTNND1; A781T; 0
ITENLEAAKK

SEQ ID NO: 14752 - protein, 10 aa, Homo sapiens
  Table A; HLA-B*57:01; PIK3CA; Q546P; 1
ITEPEKDFLW

SEQ ID NO: 14753 - protein, 10 aa, Homo sapiens
  Table A; HLA-B*57:01; PIK3CA; Q546R; 1
ITEREKDFLW

SEQ ID NO: 14754 - protein, 10 aa, Homo sapiens
  Table A; HLA-B*57:01; PIK3CA; E545G; 0
ITGQEKDFLW

SEQ ID NO: 14755 - protein, 10 aa, Homo sapiens
  Table A; HLA-B*57:01; PIK3CA; E545K; 1
ITKQEKDFLW

SEQ ID NO: 14756 - protein, 8 aa, Homo sapiens
  Table A; HLA-C*08:03; TP53; G262V; 0
ITLEDSSV

SEQ ID NO: 14757 - protein, 10 aa, Homo sapiens
  Table A; HLA-A*02:04; TP53; G262V; 0
ITLEDSSVNL

SEQ ID NO: 14758 - protein, 10 aa, Homo sapiens
  Table A; HLA-A*02:05; TP53; G262V; 0
ITLEDSSVNL

SEQ ID NO: 14759 - protein, 10 aa, Homo sapiens
  Table A; HLA-A*02:06; TP53; G262V; 0
ITLEDSSVNL

SEQ ID NO: 14760 - protein, 11 aa, Homo sapiens
  Table A; HLA-A*02:04; TP53; G262V; 0
ITLEDSSVNLL

SEQ ID NO: 14761 - protein, 11 aa, Homo sapiens
  Table A; HLA-A*02:05; TP53; G262V; 0
ITLEDSSVNLL

SEQ ID NO: 14762 - protein, 11 aa, Homo sapiens
  Table A; HLA-A*02:06; TP53; G262V; 0
ITLEDSSVNLL

SEQ ID NO: 14763 - protein, 11 aa, Homo sapiens
  Table A; HLA-A*02:08; TP53; G262V; 0
ITLEDSSVNLL

SEQ ID NO: 14764 - protein, 11 aa, Homo sapiens
  Table A; HLA-A*68:02; TP53; G262V; 0
ITLEDSSVNLL

SEQ ID NO: 14765 - protein, 11 aa, Homo sapiens
  Table A; HLA-B*38:01; TP53; G262V; 0
ITLEDSSVNLL

SEQ ID NO: 14766 - protein, 9 aa, Homo sapiens
  Table A; HLA-B*57:01; STAG1; A116T; 0
ITLLDLINF

SEQ ID NO: 14767 - protein, 9 aa, Homo sapiens
  Table A; HLA-B*58:01; STAG1; A116T; 0
ITLLDLINF

SEQ ID NO: 14768 - protein, 10 aa, Homo sapiens
  Table A; HLA-B*57:01; STAG1; A116T; 0
ITLLDLINFF

SEQ ID NO: 14769 - protein, 9 aa, Homo sapiens
  Table A; HLA-B*57:01; SIRPA; V233I; 0
ITLQGDPLR

SEQ ID NO: 14770 - protein, 9 aa, Homo sapiens
  Table A; HLA-A*26:03; CHD4; R975H; 0
IVHVELSPM

SEQ ID NO: 14771 - protein, 9 aa, Homo sapiens
  Table A; HLA-B*15:02; CHD4; R975H; 0
IVHVELSPM

SEQ ID NO: 14772 - protein, 9 aa, Homo sapiens
  Table A; HLA-B*35:01; CHD4; R975H; 1
IVHVELSPM

SEQ ID NO: 14773 - protein, 9 aa, Homo sapiens
  Table A; HLA-B*35:03; CHD4; R975H; 0
IVHVELSPM

SEQ ID NO: 14774 - protein, 9 aa, Homo sapiens
  Table A; HLA-B*35:08; CHD4; R975H; 0
IVHVELSPM

SEQ ID NO: 14775 - protein, 9 aa, Homo sapiens
  Table A; HLA-C*02:02; CHD4; R975H; 1
IVHVELSPM

SEQ ID NO: 14776 - protein, 9 aa, Homo sapiens
  Table A; HLA-C*08:01; CHD4; R975H; 0
IVHVELSPM

SEQ ID NO: 14777 - protein, 11 aa, Homo sapiens
  Table A; HLA-A*03:01; CHD4; R975H; 1
IVHVELSPMQK

SEQ ID NO: 14778 - protein, 11 aa, Homo sapiens
  Table A; HLA-A*03:02; CHD4; R975H; 0
IVHVELSPMQK

SEQ ID NO: 14779 - protein, 11 aa, Homo sapiens
  Table A; HLA-A*11:01; CHD4; R975H; 1
IVHVELSPMQK

SEQ ID NO: 14780 - protein, 11 aa, Homo sapiens
  Table A; HLA-A*68:01; CHD4; R975H; 0
IVHVELSPMQK

SEQ ID NO: 14781 - protein, 11 aa, Homo sapiens
  Table A; HLA-B*27:02; CHD4; R975H; 0
IVHVELSPMQK

SEQ ID NO: 14782 - protein, 10 aa, Homo sapiens
  Table A; HLA-A*02:05; BCOR; N1425S; 0
IVSKNAGETL

SEQ ID NO: 14783 - protein, 10 aa, Homo sapiens
  Table A; HLA-A*02:08; BCOR; N1425S; 0
IVSKNAGETL

SEQ ID NO: 14784 - protein, 10 aa, Homo sapiens
  Table A; HLA-B*13:01; BCOR; N1425S; 0
IVSKNAGETL

SEQ ID NO: 14785 - protein, 10 aa, Homo sapiens
  Table A; HLA-B*15:01; BCOR; N1425S; 1
IVSKNAGETL

SEQ ID NO: 14786 - protein, 10 aa, Homo sapiens
  Table A; HLA-B*38:01; BCOR; N1425S; 1
IVSKNAGETL

SEQ ID NO: 14787 - protein, 10 aa, Homo sapiens
  Table A; HLA-B*39:01; BCOR; N1425S; 0
IVSKNAGETL

SEQ ID NO: 14788 - protein, 11 aa, Homo sapiens
  Table A; HLA-A*02:08; BCOR; N1425S; 0
IVSKNAGETLL

SEQ ID NO: 14789 - protein, 10 aa, Homo sapiens
  Table A; HLA-A*23:01; BMP5; R208Q; 0
IYKDRSNNQF

SEQ ID NO: 14790 - protein, 10 aa, Homo sapiens
  Table A; HLA-A*24:02; BMP5; R208Q; 1
IYKDRSNNQF

SEQ ID NO: 14791 - protein, 10 aa, Homo sapiens
  Table A; HLA-C*14:02; BMP5; R208Q; 0
IYKDRSNNQF

SEQ ID NO: 14792 - protein, 10 aa, Homo sapiens
  Table A; HLA-C*14:03; BMP5; R208Q; 0
IYKDRSNNQF

SEQ ID NO: 14793 - protein, 10 aa, Homo sapiens
  Table A; HLA-C*01:02; PREX2; H1404Y; 0
IYPVLFAQAL

SEQ ID NO: 14794 - protein, 10 aa, Homo sapiens
  Table A; HLA-C*14:02; PREX2; H1404Y; 0
IYPVLFAQAL

SEQ ID NO: 14795 - protein, 9 aa, Homo sapiens
  Table A; HLA-A*24:02; FGFR2; C382R; 1
IYRIGVFLI

SEQ ID NO: 14796 - protein, 10 aa, Homo sapiens
  Table A; HLA-A*33:03; CREB3L1; V414I; 0
IYTASQMPSR

SEQ ID NO: 14797 - protein, 10 aa, Homo sapiens
  Table A; HLA-B*27:02; CREB3L1; V414I; 0
IYTASQMPSR

SEQ ID NO: 14798 - protein, 9 aa, Homo sapiens
  Table A; HLA-A*02:03; PTEN; R130L; 0
KAGKGLTGV

SEQ ID NO: 14799 - protein, 9 aa, Homo sapiens
  Table A; HLA-A*02:06; PTEN; R130L; 0
KAGKGLTGV

SEQ ID NO: 14800 - protein, 9 aa, Homo sapiens
  Table A; HLA-A*02:08; PTEN; R130L; 0
KAGKGLTGV

SEQ ID NO: 14801 - protein, 9 aa, Homo sapiens
  Table A; HLA-A*02:08; PTEN; R130Q; 0
KAGKGQTGV

SEQ ID NO: 14802 - protein, 11 aa, Homo sapiens
  Table A; HLA-A*03:01; PIK3CA; E542K; 1
KAISTRDPLSK

SEQ ID NO: 14803 - protein, 11 aa, Homo sapiens
  Table A; HLA-A*03:02; PIK3CA; E542K; 0
KAISTRDPLSK

SEQ ID NO: 14804 - protein, 9 aa, Homo sapiens
  Table A; HLA-A*29:01; SPOP; R121Q; 0
KAMESQQAY

SEQ ID NO: 14805 - protein, 9 aa, Homo sapiens
  Table A; HLA-A*30:02; SPOP; R121Q; 0
KAMESQQAY

SEQ ID NO: 14806 - protein, 9 aa, Homo sapiens
  Table A; HLA-A*30:04; SPOP; R121Q; 0
KAMESQQAY

SEQ ID NO: 14807 - protein, 9 aa, Homo sapiens
  Table A; HLA-A*32:01; SPOP; R121Q; 0
KAMESQQAY

SEQ ID NO: 14808 - protein, 9 aa, Homo sapiens
  Table A; HLA-B*15:01; SPOP; R121Q; 1
KAMESQQAY

SEQ ID NO: 14809 - protein, 9 aa, Homo sapiens
  Table A; HLA-B*15:02; SPOP; R121Q; 0
KAMESQQAY

SEQ ID NO: 14810 - protein, 9 aa, Homo sapiens
  Table A; HLA-B*15:03; SPOP; R121Q; 0
KAMESQQAY

SEQ ID NO: 14811 - protein, 9 aa, Homo sapiens
  Table A; HLA-B*15:13; SPOP; R121Q; 0
KAMESQQAY

SEQ ID NO: 14812 - protein, 9 aa, Homo sapiens
  Table A; HLA-B*35:01; SPOP; R121Q; 1
KAMESQQAY

SEQ ID NO: 14813 - protein, 9 aa, Homo sapiens
  Table A; HLA-B*35:08; SPOP; R121Q; 0
KAMESQQAY

SEQ ID NO: 14814 - protein, 9 aa, Homo sapiens
  Table A; HLA-B*46:01; SPOP; R121Q; 0
KAMESQQAY

SEQ ID NO: 14815 - protein, 9 aa, Homo sapiens
  Table A; HLA-B*57:01; SPOP; R121Q; 0
KAMESQQAY

SEQ ID NO: 14816 - protein, 9 aa, Homo sapiens
  Table A; HLA-B*58:01; SPOP; R121Q; 0
KAMESQQAY

SEQ ID NO: 14817 - protein, 9 aa, Homo sapiens
  Table A; HLA-C*02:02; SPOP; R121Q; 0
KAMESQQAY

SEQ ID NO: 14818 - protein, 9 aa, Homo sapiens
  Table A; HLA-C*03:02; SPOP; R121Q; 0
KAMESQQAY

SEQ ID NO: 14819 - protein, 9 aa, Homo sapiens
  Table A; HLA-C*14:03; SPOP; R121Q; 0
KAMESQQAY

SEQ ID NO: 14820 - protein, 9 aa, Homo sapiens
  Table A; HLA-C*16:01; SPOP; R121Q; 0
KAMESQQAY

SEQ ID NO: 14821 - protein, 9 aa, Homo sapiens
  Table A; HLA-C*16:02; SPOP; R121Q; 0
KAMESQQAY

SEQ ID NO: 14822 - protein, 9 aa, Homo sapiens
  Table A; HLA-C*16:04; SPOP; R121Q; 0
KAMESQQAY

SEQ ID NO: 14823 - protein, 10 aa, Homo sapiens
  Table A; HLA-A*11:01; SPOP; R121Q; 1
KAMESQQAYR

SEQ ID NO: 14824 - protein, 10 aa, Homo sapiens
  Table A; HLA-A*31:01; SPOP; R121Q; 0
KAMESQQAYR

SEQ ID NO: 14825 - protein, 10 aa, Homo sapiens
  Table A; HLA-A*33:03; SPOP; R121Q; 0
KAMESQQAYR

SEQ ID NO: 14826 - protein, 10 aa, Homo sapiens
  Table A; HLA-A*68:01; SPOP; R121Q; 0
KAMESQQAYR

SEQ ID NO: 14827 - protein, 11 aa, Homo sapiens
  Table A; HLA-B*57:01; SPOP; R121Q; 0
KAMESQQAYRF

SEQ ID NO: 14828 - protein, 10 aa, Homo sapiens
  Table A; HLA-A*03:01; MAX; R60Q; 1
KASQAQILDK

SEQ ID NO: 14829 - protein, 10 aa, Homo sapiens
  Table A; HLA-A*03:02; MAX; R60Q; 0
KASQAQILDK

SEQ ID NO: 14830 - protein, 10 aa, Homo sapiens
  Table A; HLA-A*11:01; MAX; R60Q; 1
KASQAQILDK

SEQ ID NO: 14831 - protein, 10 aa, Homo sapiens
  Table A; HLA-B*27:02; MAX; R60Q; 0
KASQAQILDK

SEQ ID NO: 14832 - protein, 11 aa, Homo sapiens
  Table A; HLA-A*02:05; MAX; R60Q; 0
KASQAQILDKA

SEQ ID NO: 14833 - protein, 11 aa, Homo sapiens
  Table A; HLA-A*02:08; MAX; R60Q; 0
KASQAQILDKA

SEQ ID NO: 14834 - protein, 8 aa, Homo sapiens
  Table A; HLA-A*03:02; PIK3CA; E39K; 0
KATLVTIK

SEQ ID NO: 14835 - protein, 9 aa, Homo sapiens
  Table A; HLA-A*03:01; PIK3CA; E39K; 1
KATLVTIKH

SEQ ID NO: 14836 - protein, 9 aa, Homo sapiens
  Table A; HLA-A*03:02; PIK3CA; E39K; 0
KATLVTIKH

SEQ ID NO: 14837 - protein, 9 aa, Homo sapiens
  Table A; HLA-A*11:01; PIK3CA; E39K; 1
KATLVTIKH

SEQ ID NO: 14838 - protein, 9 aa, Homo sapiens
  Table A; HLA-B*57:01; PIK3CA; E39K; 1
KATLVTIKH

SEQ ID NO: 14839 - protein, 9 aa, Homo sapiens
  Table A; HLA-B*58:01; PIK3CA; E39K; 0
KATLVTIKH

SEQ ID NO: 14840 - protein, 9 aa, Homo sapiens
  Table A; HLA-A*30:02; SPOP; M117V; 0
KAVESQRAY

SEQ ID NO: 14841 - protein, 9 aa, Homo sapiens
  Table A; HLA-A*30:04; SPOP; M117V; 0
KAVESQRAY

SEQ ID NO: 14842 - protein, 9 aa, Homo sapiens
  Table A; HLA-A*32:01; SPOP; M117V; 0
KAVESQRAY

SEQ ID NO: 14843 - protein, 9 aa, Homo sapiens
  Table A; HLA-B*15:01; SPOP; M117V; 1
KAVESQRAY

SEQ ID NO: 14844 - protein, 9 aa, Homo sapiens
  Table A; HLA-B*15:03; SPOP; M117V; 0
KAVESQRAY

SEQ ID NO: 14845 - protein, 9 aa, Homo sapiens
  Table A; HLA-B*35:01; SPOP; M117V; 0
KAVESQRAY

SEQ ID NO: 14846 - protein, 9 aa, Homo sapiens
  Table A; HLA-B*46:01; SPOP; M117V; 0
KAVESQRAY

SEQ ID NO: 14847 - protein, 9 aa, Homo sapiens
  Table A; HLA-B*57:01; SPOP; M117V; 0
KAVESQRAY

SEQ ID NO: 14848 - protein, 9 aa, Homo sapiens
  Table A; HLA-B*58:01; SPOP; M117V; 0
KAVESQRAY

SEQ ID NO: 14849 - protein, 9 aa, Homo sapiens
  Table A; HLA-C*03:02; SPOP; M117V; 0
KAVESQRAY

SEQ ID NO: 14850 - protein, 9 aa, Homo sapiens
  Table A; HLA-C*12:03; SPOP; M117V; 0
KAVESQRAY

SEQ ID NO: 14851 - protein, 9 aa, Homo sapiens
  Table A; HLA-C*16:01; SPOP; M117V; 0
KAVESQRAY

SEQ ID NO: 14852 - protein, 9 aa, Homo sapiens
  Table A; HLA-C*16:02; SPOP; M117V; 0
KAVESQRAY

SEQ ID NO: 14853 - protein, 9 aa, Homo sapiens
  Table A; HLA-C*16:04; SPOP; M117V; 0
KAVESQRAY

SEQ ID NO: 14854 - protein, 9 aa, Homo sapiens
  Table A; HLA-A*03:01; ESR1; E247K; 1
KCYKVGMMK

SEQ ID NO: 14855 - protein, 9 aa, Homo sapiens
  Table A; HLA-B*37:01; PIK3CA; E726K; 0
KDKTQKVQM

SEQ ID NO: 14856 - protein, 9 aa, Homo sapiens
  Table A; HLA-B*41:02; PIK3CA; E726K; 0
KDKTQKVQM

SEQ ID NO: 14857 - protein, 9 aa, Homo sapiens
  Table A; HLA-A*02:01; PIK3CA; E453K; 1
KDLLNPIGV

SEQ ID NO: 14858 - protein, 9 aa, Homo sapiens
  Table A; HLA-A*30:01; PIK3CA; E453K; 0
KDLLNPIGV

SEQ ID NO: 14859 - protein, 9 aa, Homo sapiens
  Table A; HLA-B*37:01; PIK3CA; E453K; 0
KDLLNPIGV

SEQ ID NO: 14860 - protein, 9 aa, Homo sapiens
  Table A; HLA-B*40:02; PIK3CA; E453K; 0
KDLLNPIGV

SEQ ID NO: 14861 - protein, 9 aa, Homo sapiens
  Table A; HLA-B*40:06; PIK3CA; E453K; 0
KDLLNPIGV

SEQ ID NO: 14862 - protein, 9 aa, Homo sapiens
  Table A; HLA-B*41:02; PIK3CA; E453K; 0
KDLLNPIGV

SEQ ID NO: 14863 - protein, 9 aa, Homo sapiens
  Table A; HLA-B*44:05; PIK3CA; E453K; 0
KDLLNPIGV

SEQ ID NO: 14864 - protein, 10 aa, Homo sapiens
  Table A; HLA-B*40:01; CREB3L1; V414I; 0
KEDPLAADGI

SEQ ID NO: 14865 - protein, 10 aa, Homo sapiens
  Table A; HLA-B*40:02; CREB3L1; V414I; 0
KEDPLAADGI

SEQ ID NO: 14866 - protein, 10 aa, Homo sapiens
  Table A; HLA-B*44:05; CREB3L1; V414I; 0
KEDPLAADGI

SEQ ID NO: 14867 - protein, 10 aa, Homo sapiens
  Table A; HLA-B*49:01; CREB3L1; V414I; 0
KEDPLAADGI

SEQ ID NO: 14868 - protein, 9 aa, Homo sapiens
  Table A; HLA-B*44:02; PIK3CA; C420R; 1
KEEHRPLAW

SEQ ID NO: 14869 - protein, 9 aa, Homo sapiens
  Table A; HLA-B*44:03; PIK3CA; C420R; 1
KEEHRPLAW

SEQ ID NO: 14870 - protein, 9 aa, Homo sapiens
  Table A; HLA-B*50:01; FGFR2; Y375C; 0
KEITASPDC

SEQ ID NO: 14871 - protein, 10 aa, Homo sapiens
  Table A; HLA-B*40:01; FGFR2; Y375C; 1
KEITASPDCL

SEQ ID NO: 14872 - protein, 10 aa, Homo sapiens
  Table A; HLA-B*40:02; FGFR2; Y375C; 0
KEITASPDCL

SEQ ID NO: 14873 - protein, 10 aa, Homo sapiens
  Table A; HLA-B*44:05; FGFR2; Y375C; 0
KEITASPDCL

SEQ ID NO: 14874 - protein, 9 aa, Homo sapiens
  Table A; HLA-C*06:02; PIK3CA; E81K; 0
KFFDETRRL

SEQ ID NO: 14875 - protein, 9 aa, Homo sapiens
  Table A; HLA-C*14:02; PIK3CA; E81K; 0
KFFDETRRL

SEQ ID NO: 14876 - protein, 9 aa, Homo sapiens
  Table A; HLA-A*02:03; PREX2; E553K; 0
KFKDEPLLF

SEQ ID NO: 14877 - protein, 9 aa, Homo sapiens
  Table A; HLA-A*23:01; PREX2; E553K; 0
KFKDEPLLF

SEQ ID NO: 14878 - protein, 9 aa, Homo sapiens
  Table A; HLA-A*24:02; PREX2; E553K; 0
KFKDEPLLF

SEQ ID NO: 14879 - protein, 9 aa, Homo sapiens
  Table A; HLA-A*29:02; PREX2; E553K; 0
KFKDEPLLF

SEQ ID NO: 14880 - protein, 9 aa, Homo sapiens
  Table A; HLA-A*30:01; PREX2; E553K; 0
KFKDEPLLF

SEQ ID NO: 14881 - protein, 9 aa, Homo sapiens
  Table A; HLA-A*31:01; PREX2; E553K; 0
KFKDEPLLF

SEQ ID NO: 14882 - protein, 9 aa, Homo sapiens
  Table A; HLA-B*57:01; PREX2; E553K; 0
KFKDEPLLF

SEQ ID NO: 14883 - protein, 9 aa, Homo sapiens
  Table A; HLA-C*14:02; PREX2; E553K; 0
KFKDEPLLF

SEQ ID NO: 14884 - protein, 10 aa, Homo sapiens
  Table A; HLA-A*31:01; PREX2; E553K; 0
KFKDEPLLFR

SEQ ID NO: 14885 - protein, 11 aa, Homo sapiens
  Table A; HLA-A*23:01; PREX2; E553K; 0
KFKDEPLLFRF

SEQ ID NO: 14886 - protein, 8 aa, Homo sapiens
  Table A; HLA-C*14:02; TP63; E609K; 0
KFSSPSHL

SEQ ID NO: 14887 - protein, 9 aa, Homo sapiens
  Table A; HLA-A*23:01; TP63; E609K; 0
KFSSPSHLL

SEQ ID NO: 14888 - protein, 9 aa, Homo sapiens
  Table A; HLA-A*24:02; TP63; E609K; 1
KFSSPSHLL

SEQ ID NO: 14889 - protein, 9 aa, Homo sapiens
  Table A; HLA-A*31:01; TP63; E609K; 0
KFSSPSHLL

SEQ ID NO: 14890 - protein, 9 aa, Homo sapiens
  Table A; HLA-B*48:01; TP63; E609K; 0
KFSSPSHLL

SEQ ID NO: 14891 - protein, 9 aa, Homo sapiens
  Table A; HLA-B*57:01; TP63; E609K; 0
KFSSPSHLL

SEQ ID NO: 14892 - protein, 9 aa, Homo sapiens
  Table A; HLA-C*14:02; TP63; E609K; 0
KFSSPSHLL

SEQ ID NO: 14893 - protein, 10 aa, Homo sapiens
  Table A; HLA-A*03:01; TP63; E609K; 1
KFSSPSHLLR

SEQ ID NO: 14894 - protein, 10 aa, Homo sapiens
  Table A; HLA-A*31:01; TP63; E609K; 0
KFSSPSHLLR

SEQ ID NO: 14895 - protein, 8 aa, Homo sapiens
  Table A; HLA-B*58:01; PTEN; R130G; 1
KGGTGVMI

SEQ ID NO: 14896 - protein, 9 aa, Homo sapiens
  Table A; HLA-A*31:01; PTEN; S170N; 0
KGVTIPNQR

SEQ ID NO: 14897 - protein, 9 aa, Homo sapiens
  Table A; HLA-A*68:01; PTEN; S170N; 0
KGVTIPNQR

SEQ ID NO: 14898 - protein, 9 aa, Homo sapiens
  Table A; HLA-B*57:01; PTEN; S170N; 0
KGVTIPNQR

SEQ ID NO: 14899 - protein, 10 aa, Homo sapiens
  Table A; HLA-A*02:03; HIST1H3B; E74K; 0
KIAQDFKTDL

SEQ ID NO: 14900 - protein, 10 aa, Homo sapiens
  Table A; HLA-A*02:05; HIST1H3B; E74K; 0
KIAQDFKTDL

SEQ ID NO: 14901 - protein, 10 aa, Homo sapiens
  Table A; HLA-A*02:08; HIST1H3B; E74K; 0
KIAQDFKTDL

SEQ ID NO: 14902 - protein, 10 aa, Homo sapiens
  Table A; HLA-B*07:02; HIST1H3B; E74K; 1
KIAQDFKTDL

SEQ ID NO: 14903 - protein, 10 aa, Homo sapiens
  Table A; HLA-B*40:01; HIST1H3B; E74K; 0
KIAQDFKTDL

SEQ ID NO: 14904 - protein, 10 aa, Homo sapiens
  Table A; HLA-B*48:01; HIST1H3B; E74K; 0
KIAQDFKTDL

SEQ ID NO: 14905 - protein, 11 aa, Homo sapiens
  Table A; HLA-A*03:01; BRAF; V600E; 1
KIGDFGLATEK

SEQ ID NO: 14906 - protein, 11 aa, Homo sapiens
  Table A; HLA-A*03:02; BRAF; V600E; 1
KIGDFGLATEK

SEQ ID NO: 14907 - protein, 11 aa, Homo sapiens
  Table A; HLA-A*11:01; BRAF; V600E; 1
KIGDFGLATEK

SEQ ID NO: 14908 - protein, 11 aa, Homo sapiens
  Table A; HLA-A*31:01; BRAF; V600E; 1
KIGDFGLATEK

SEQ ID NO: 14909 - protein, 11 aa, Homo sapiens
  Table A; HLA-B*27:02; BRAF; V600E; 1
KIGDFGLATEK

SEQ ID NO: 14910 - protein, 9 aa, Homo sapiens
  Table A; HLA-A*03:01; CHD4; R1338I; 1
KIIRKQVNY

SEQ ID NO: 14911 - protein, 9 aa, Homo sapiens
  Table A; HLA-B*15:01; CHD4; R1338I; 1
KIIRKQVNY

SEQ ID NO: 14912 - protein, 9 aa, Homo sapiens
  Table A; HLA-B*57:01; CHD4; R1338I; 0
KIIRKQVNY

SEQ ID NO: 14913 - protein, 9 aa, Homo sapiens
  Table A; HLA-A*03:01; EGFR; L858R; 1
KITDFGRAK

SEQ ID NO: 14914 - protein, 9 aa, Homo sapiens
  Table A; HLA-A*03:02; EGFR; L858R; 0
KITDFGRAK

SEQ ID NO: 14915 - protein, 9 aa, Homo sapiens
  Table A; HLA-A*11:01; EGFR; L858R; 1
KITDFGRAK

SEQ ID NO: 14916 - protein, 11 aa, Homo sapiens
  Table A; HLA-B*57:01; PIK3CA; E542K; 1
KITEQEKDFLW

SEQ ID NO: 14917 - protein, 10 aa, Homo sapiens
  Table A; HLA-A*02:03; PREX2; H1404Y; 0
KIYPVLFAQA

SEQ ID NO: 14918 - protein, 10 aa, Homo sapiens
  Table A; HLA-A*02:07; PREX2; H1404Y; 0
KIYPVLFAQA

SEQ ID NO: 14919 - protein, 10 aa, Homo sapiens
  Table A; HLA-A*02:08; PREX2; H1404Y; 0
KIYPVLFAQA

SEQ ID NO: 14920 - protein, 11 aa, Homo sapiens
  Table A; HLA-A*02:04; PREX2; H1404Y; 0
KIYPVLFAQAL

SEQ ID NO: 14921 - protein, 11 aa, Homo sapiens
  Table A; HLA-A*02:07; PREX2; H1404Y; 0
KIYPVLFAQAL

SEQ ID NO: 14922 - protein, 11 aa, Homo sapiens
  Table A; HLA-A*31:01; PREX2; H1404Y; 0
KIYPVLFAQAL

SEQ ID NO: 14923 - protein, 9 aa, Homo sapiens
  Table A; HLA-A*03:01; AXIN1; R146Q; 1
KLARAIYQK

SEQ ID NO: 14924 - protein, 9 aa, Homo sapiens
  Table A; HLA-A*02:07; STAG2; R370Q; 0
KLELFTSQF

SEQ ID NO: 14925 - protein, 9 aa, Homo sapiens
  Table A; HLA-A*23:01; STAG2; R370Q; 0
KLELFTSQF

SEQ ID NO: 14926 - protein, 9 aa, Homo sapiens
  Table A; HLA-C*05:01; STAG2; R370Q; 0
KLELFTSQF

SEQ ID NO: 14927 - protein, 9 aa, Homo sapiens
  Table A; HLA-C*08:02; STAG2; R370Q; 0
KLELFTSQF

SEQ ID NO: 14928 - protein, 9 aa, Homo sapiens
  Table A; HLA-A*02:04; XPO1; E571K; 0
KLFKFMHET

SEQ ID NO: 14929 - protein, 9 aa, Homo sapiens
  Table A; HLA-A*02:04; PRDM16; E237K; 0
KLFQSKLDL

SEQ ID NO: 14930 - protein, 10 aa, Homo sapiens
  Table A; HLA-A*03:01; HIST1H3B; E74K; 1
KLPFQRLVRK

SEQ ID NO: 14931 - protein, 8 aa, Homo sapiens
  Table A; HLA-A*02:04; SMARCA4; E920K; 0
KLPKLWAL

SEQ ID NO: 14932 - protein, 8 aa, Homo sapiens
  Table A; HLA-A*02:07; SMARCA4; E920K; 0
KLPKLWAL

SEQ ID NO: 14933 - protein, 9 aa, Homo sapiens
  Table A; HLA-A*02:04; SMARCA4; E920K; 0
KLPKLWALL

SEQ ID NO: 14934 - protein, 9 aa, Homo sapiens
  Table A; HLA-A*02:07; SMARCA4; E920K; 0
KLPKLWALL

SEQ ID NO: 14935 - protein, 9 aa, Homo sapiens
  Table A; HLA-A*02:04; CNTNAP2; E149K; 0
KLQHPIIAR

SEQ ID NO: 14936 - protein, 9 aa, Homo sapiens
  Table A; HLA-A*03:01; CNTNAP2; E149K; 1
KLQHPIIAR

SEQ ID NO: 14937 - protein, 9 aa, Homo sapiens
  Table A; HLA-A*03:02; CNTNAP2; E149K; 0
KLQHPIIAR

SEQ ID NO: 14938 - protein, 9 aa, Homo sapiens
  Table A; HLA-A*11:01; CNTNAP2; E149K; 1
KLQHPIIAR

SEQ ID NO: 14939 - protein, 9 aa, Homo sapiens
  Table A; HLA-A*31:01; CNTNAP2; E149K; 0
KLQHPIIAR

SEQ ID NO: 14940 - protein, 9 aa, Homo sapiens
  Table A; HLA-A*33:03; CNTNAP2; E149K; 0
KLQHPIIAR

SEQ ID NO: 14941 - protein, 10 aa, Homo sapiens
  Table A; HLA-A*03:01; CNTNAP2; E149K; 1
KLQHPIIARY

SEQ ID NO: 14942 - protein, 8 aa, Homo sapiens
  Table A; HLA-A*03:01; CTNNB1; N387K; 1
KLSDAATK

SEQ ID NO: 14943 - protein, 8 aa, Homo sapiens
  Table A; HLA-A*03:02; CTNNB1; N387K; 0
KLSDAATK

SEQ ID NO: 14944 - protein, 8 aa, Homo sapiens
  Table A; HLA-A*11:01; CTNNB1; N387K; 1
KLSDAATK

SEQ ID NO: 14945 - protein, 9 aa, Homo sapiens
  Table A; HLA-A*02:03; CTNNB1; N387K; 0
KLSDAATKQ

SEQ ID NO: 14946 - protein, 9 aa, Homo sapiens
  Table A; HLA-A*03:01; CTNNB1; N387K; 1
KLSDAATKQ

SEQ ID NO: 14947 - protein, 9 aa, Homo sapiens
  Table A; HLA-A*02:04; TRRAP; S722F; 0
KLVFGSVFL

SEQ ID NO: 14948 - protein, 9 aa, Homo sapiens
  Table A; HLA-C*17:01; TRRAP; S722F; 0
KLVFGSVFL

SEQ ID NO: 14949 - protein, 10 aa, Homo sapiens
  Table A; HLA-A*02:04; TRRAP; S722F; 0
KLVFGSVFLF

SEQ ID NO: 14950 - protein, 10 aa, Homo sapiens
  Table A; HLA-A*02:01; KRAS; G12A; 1
KLVVVGAAGV

SEQ ID NO: 14951 - protein, 10 aa, Homo sapiens
  Table A; HLA-A*02:03; KRAS; G12A; 0
KLVVVGAAGV

SEQ ID NO: 14952 - protein, 10 aa, Homo sapiens
  Table A; HLA-A*02:04; KRAS; G12A; 0
KLVVVGAAGV

SEQ ID NO: 14953 - protein, 10 aa, Homo sapiens
  Table A; HLA-A*02:08; KRAS; G12A; 0
KLVVVGAAGV

SEQ ID NO: 14954 - protein, 10 aa, Homo sapiens
  Table A; HLA-A*02:01; KRAS; G12C; 1
KLVVVGACGV

SEQ ID NO: 14955 - protein, 10 aa, Homo sapiens
  Table A; HLA-A*02:01; NRAS; G12C; 1
KLVVVGACGV

SEQ ID NO: 14956 - protein, 10 aa, Homo sapiens
  Table A; HLA-A*02:01; KRAS; G12D; 1
KLVVVGADGV

SEQ ID NO: 14957 - protein, 10 aa, Homo sapiens
  Table A; HLA-A*02:04; KRAS; G12D; 0
KLVVVGADGV

SEQ ID NO: 14958 - protein, 10 aa, Homo sapiens
  Table A; HLA-A*02:06; KRAS; G12D; 1
KLVVVGADGV

SEQ ID NO: 14959 - protein, 10 aa, Homo sapiens
  Table A; HLA-A*02:08; KRAS; G12D; 0
KLVVVGADGV

SEQ ID NO: 14960 - protein, 10 aa, Homo sapiens
  Table A; HLA-B*13:02; KRAS; G12D; 1
KLVVVGADGV

SEQ ID NO: 14961 - protein, 10 aa, Homo sapiens
  Table A; HLA-A*02:01; NRAS; G12D; 1
KLVVVGADGV

SEQ ID NO: 14962 - protein, 10 aa, Homo sapiens
  Table A; HLA-A*02:03; NRAS; G12D; 0
KLVVVGADGV

SEQ ID NO: 14963 - protein, 10 aa, Homo sapiens
  Table A; HLA-A*02:04; NRAS; G12D; 0
KLVVVGADGV

SEQ ID NO: 14964 - protein, 10 aa, Homo sapiens
  Table A; HLA-A*02:06; NRAS; G12D; 0
KLVVVGADGV

SEQ ID NO: 14965 - protein, 10 aa, Homo sapiens
  Table A; HLA-A*02:08; NRAS; G12D; 0
KLVVVGADGV

SEQ ID NO: 14966 - protein, 10 aa, Homo sapiens
  Table A; HLA-B*13:02; NRAS; G12D; 0
KLVVVGADGV

SEQ ID NO: 14967 - protein, 9 aa, Homo sapiens
  Table A; HLA-A*02:06; KRAS; G13C; 0
KLVVVGAGC

SEQ ID NO: 14968 - protein, 11 aa, Homo sapiens
  Table A; HLA-C*08:03; KRAS; G13D; 0
KLVVVGAGDVG

SEQ ID NO: 14969 - protein, 9 aa, Homo sapiens
  Table A; HLA-A*31:01; NRAS; G13R; 0
KLVVVGAGR

SEQ ID NO: 14970 - protein, 9 aa, Homo sapiens
  Table A; HLA-B*27:02; NRAS; G13R; 0
KLVVVGAGR

SEQ ID NO: 14971 - protein, 10 aa, Homo sapiens
  Table A; HLA-A*02:03; KRAS; G12R; 0
KLVVVGARGV

SEQ ID NO: 14972 - protein, 10 aa, Homo sapiens
  Table A; HLA-A*02:04; KRAS; G12R; 0
KLVVVGARGV

SEQ ID NO: 14973 - protein, 10 aa, Homo sapiens
  Table A; HLA-A*02:01; KRAS; G12S; 1
KLVVVGASGV

SEQ ID NO: 14974 - protein, 10 aa, Homo sapiens
  Table A; HLA-A*02:03; KRAS; G12S; 0
KLVVVGASGV

SEQ ID NO: 14975 - protein, 10 aa, Homo sapiens
  Table A; HLA-A*02:08; KRAS; G12S; 0
KLVVVGASGV

SEQ ID NO: 14976 - protein, 8 aa, Homo sapiens
  Table A; HLA-A*02:03; KRAS; G12V; 0
KLVVVGAV

SEQ ID NO: 14977 - protein, 8 aa, Homo sapiens
  Table A; HLA-B*13:02; KRAS; G12V; 1
KLVVVGAV

SEQ ID NO: 14978 - protein, 10 aa, Homo sapiens
  Table A; HLA-A*02:01; KRAS; G12V; 1
KLVVVGAVGV

SEQ ID NO: 14979 - protein, 10 aa, Homo sapiens
  Table A; HLA-A*02:03; KRAS; G12V; 0
KLVVVGAVGV

SEQ ID NO: 14980 - protein, 10 aa, Homo sapiens
  Table A; HLA-A*02:04; KRAS; G12V; 0
KLVVVGAVGV

SEQ ID NO: 14981 - protein, 10 aa, Homo sapiens
  Table A; HLA-A*02:06; KRAS; G12V; 1
KLVVVGAVGV

SEQ ID NO: 14982 - protein, 10 aa, Homo sapiens
  Table A; HLA-A*02:07; KRAS; G12V; 0
KLVVVGAVGV

SEQ ID NO: 14983 - protein, 10 aa, Homo sapiens
  Table A; HLA-A*02:08; KRAS; G12V; 0
KLVVVGAVGV

SEQ ID NO: 14984 - protein, 10 aa, Homo sapiens
  Table A; HLA-B*13:02; KRAS; G12V; 1
KLVVVGAVGV

SEQ ID NO: 14985 - protein, 9 aa, Homo sapiens
  Table A; HLA-A*03:01; CNBD1; L396P; 1
KLVYMGKPK

SEQ ID NO: 14986 - protein, 9 aa, Homo sapiens
  Table A; HLA-A*02:04; SMARCA4; E920K; 0
KLWALLNFL

SEQ ID NO: 14987 - protein, 9 aa, Homo sapiens
  Table A; HLA-A*02:07; SMARCA4; E920K; 0
KLWALLNFL

SEQ ID NO: 14988 - protein, 9 aa, Homo sapiens
  Table A; HLA-C*15:02; RGS7; R44C; 0
KNGIPICTV

SEQ ID NO: 14989 - protein, 10 aa, Homo sapiens
  Table A; HLA-B*35:01; MAPK1; E322K; 1
KPIAEAPFKF

SEQ ID NO: 14990 - protein, 10 aa, Homo sapiens
  Table A; HLA-B*35:03; MAPK1; E322K; 1
KPIAEAPFKF

SEQ ID NO: 14991 - protein, 9 aa, Homo sapiens
  Table A; HLA-B*54:01; BAZ1A; R1480C; 0
KPIALNIIC

SEQ ID NO: 14992 - protein, 9 aa, Homo sapiens
  Table A; HLA-B*55:02; IDH1; R132C; 0
KPIIIGCHA

SEQ ID NO: 14993 - protein, 9 aa, Homo sapiens
  Table A; HLA-B*56:01; IDH1; R132C; 0
KPIIIGCHA

SEQ ID NO: 14994 - protein, 10 aa, Homo sapiens
  Table A; HLA-B*27:02; IDH1; R132G; 0
KPIIIGGHAY

SEQ ID NO: 14995 - protein, 10 aa, Homo sapiens
  Table A; HLA-B*35:01; IDH1; R132G; 1
KPIIIGGHAY

SEQ ID NO: 14996 - protein, 10 aa, Homo sapiens
  Table A; HLA-B*35:08; IDH1; R132G; 0
KPIIIGGHAY

SEQ ID NO: 14997 - protein, 9 aa, Homo sapiens
  Table A; HLA-B*54:01; IDH1; R132H; 0
KPIIIGHHA

SEQ ID NO: 14998 - protein, 9 aa, Homo sapiens
  Table A; HLA-B*55:02; IDH1; R132H; 0
KPIIIGHHA

SEQ ID NO: 14999 - protein, 9 aa, Homo sapiens
  Table A; HLA-B*56:01; IDH1; R132H; 0
KPIIIGHHA

SEQ ID NO: 15000 - protein, 9 aa, Homo sapiens
  Table A; HLA-B*54:01; IDH1; R132L; 0
KPIIIGLHA

SEQ ID NO: 15001 - protein, 9 aa, Homo sapiens
  Table A; HLA-B*54:01; IDH1; R132S; 0
KPIIIGSHA

SEQ ID NO: 15002 - protein, 9 aa, Homo sapiens
  Table A; HLA-B*55:01; IDH1; R132S; 0
KPIIIGSHA

SEQ ID NO: 15003 - protein, 9 aa, Homo sapiens
  Table A; HLA-B*55:02; IDH1; R132S; 0
KPIIIGSHA

SEQ ID NO: 15004 - protein, 9 aa, Homo sapiens
  Table A; HLA-B*56:01; IDH1; R132S; 0
KPIIIGSHA

SEQ ID NO: 15005 - protein, 10 aa, Homo sapiens
  Table A; HLA-B*35:01; IDH1; R132S; 0
KPIIIGSHAY

SEQ ID NO: 15006 - protein, 9 aa, Homo sapiens
  Table A; HLA-B*54:01; IDH2; R172K; 0
KPITIGKHA

SEQ ID NO: 15007 - protein, 9 aa, Homo sapiens
  Table A; HLA-B*55:01; IDH2; R172K; 0
KPITIGKHA

SEQ ID NO: 15008 - protein, 9 aa, Homo sapiens
  Table A; HLA-B*55:02; IDH2; R172K; 0
KPITIGKHA

SEQ ID NO: 15009 - protein, 9 aa, Homo sapiens
  Table A; HLA-B*56:01; IDH2; R172K; 0
KPITIGKHA

SEQ ID NO: 15010 - protein, 8 aa, Homo sapiens
  Table A; HLA-B*07:02; CNBD1; L396P; 1
KPKEKESF

SEQ ID NO: 15011 - protein, 8 aa, Homo sapiens
  Table A; HLA-B*08:01; CNBD1; L396P; 1
KPKEKESF

SEQ ID NO: 15012 - protein, 8 aa, Homo sapiens
  Table A; HLA-B*51:01; SALL4; A368T; 1
KPPNISTV

SEQ ID NO: 15013 - protein, 9 aa, Homo sapiens
  Table A; HLA-B*07:02; FKBP9; R161Q; 1
KPPSCPQTI

SEQ ID NO: 15014 - protein, 9 aa, Homo sapiens
  Table A; HLA-B*51:01; FKBP9; R161Q; 1
KPPSCPQTI

SEQ ID NO: 15015 - protein, 8 aa, Homo sapiens
  Table A; HLA-B*13:01; STAG1; A116T; 0
KQDRDITL

SEQ ID NO: 15016 - protein, 8 aa, Homo sapiens
  Table A; HLA-B*38:01; STAG1; A116T; 0
KQDRDITL

SEQ ID NO: 15017 - protein, 8 aa, Homo sapiens
  Table A; HLA-B*48:01; STAG1; A116T; 0
KQDRDITL

SEQ ID NO: 15018 - protein, 8 aa, Homo sapiens
  Table A; HLA-C*05:01; STAG1; A116T; 1
KQDRDITL

SEQ ID NO: 15019 - protein, 8 aa, Homo sapiens
  Table A; HLA-C*08:02; STAG1; A116T; 0
KQDRDITL

SEQ ID NO: 15020 - protein, 8 aa, Homo sapiens
  Table A; HLA-C*08:03; STAG1; A116T; 0
KQDRDITL

SEQ ID NO: 15021 - protein, 9 aa, Homo sapiens
  Table A; HLA-A*02:06; STAG1; A116T; 0
KQDRDITLL

SEQ ID NO: 15022 - protein, 9 aa, Homo sapiens
  Table A; HLA-A*02:08; STAG1; A116T; 0
KQDRDITLL

SEQ ID NO: 15023 - protein, 9 aa, Homo sapiens
  Table A; HLA-B*13:01; STAG1; A116T; 0
KQDRDITLL

SEQ ID NO: 15024 - protein, 9 aa, Homo sapiens
  Table A; HLA-B*38:01; STAG1; A116T; 0
KQDRDITLL

SEQ ID NO: 15025 - protein, 9 aa, Homo sapiens
  Table A; HLA-B*48:01; STAG1; A116T; 0
KQDRDITLL

SEQ ID NO: 15026 - protein, 9 aa, Homo sapiens
  Table A; HLA-C*05:01; STAG1; A116T; 1
KQDRDITLL

SEQ ID NO: 15027 - protein, 9 aa, Homo sapiens
  Table A; HLA-C*08:02; STAG1; A116T; 0
KQDRDITLL

SEQ ID NO: 15028 - protein, 11 aa, Homo sapiens
  Table A; HLA-B*57:01; PIK3CA; M1043I; 1
KQINDAHHGGW

SEQ ID NO: 15029 - protein, 10 aa, Homo sapiens
  Table A; HLA-A*30:02; EGFR; L861Q; 0
KQLGAEEKEY

SEQ ID NO: 15030 - protein, 10 aa, Homo sapiens
  Table A; HLA-A*30:04; EGFR; L861Q; 0
KQLGAEEKEY

SEQ ID NO: 15031 - protein, 10 aa, Homo sapiens
  Table A; HLA-B*13:01; EGFR; L861Q; 0
KQLGAEEKEY

SEQ ID NO: 15032 - protein, 10 aa, Homo sapiens
  Table A; HLA-B*15:01; EGFR; L861Q; 1
KQLGAEEKEY

SEQ ID NO: 15033 - protein, 10 aa, Homo sapiens
  Table A; HLA-B*15:03; EGFR; L861Q; 0
KQLGAEEKEY

SEQ ID NO: 15034 - protein, 10 aa, Homo sapiens
  Table A; HLA-B*27:05; EGFR; L861Q; 0
KQLGAEEKEY

SEQ ID NO: 15035 - protein, 11 aa, Homo sapiens
  Table A; HLA-B*57:01; PIK3CA; H1047L; 1
KQMNDALHGGW

SEQ ID NO: 15036 - protein, 11 aa, Homo sapiens
  Table A; HLA-B*57:01; PIK3CA; H1047Q; 0
KQMNDAQHGGW

SEQ ID NO: 15037 - protein, 11 aa, Homo sapiens
  Table A; HLA-A*02:03; XPO1; R749Q; 0
KQPLIRSMQTV

SEQ ID NO: 15038 - protein, 10 aa, Homo sapiens
  Table A; HLA-A*30:01; MSN; E573K; 0
KQRIDKFESM

SEQ ID NO: 15039 - protein, 10 aa, Homo sapiens
  Table A; HLA-A*31:01; MSN; E573K; 0
KQRIDKFESM

SEQ ID NO: 15040 - protein, 11 aa, Homo sapiens
  Table A; HLA-A*31:01; TP53; V173L; 0
KQSQHMTEVLR

SEQ ID NO: 15041 - protein, 10 aa, Homo sapiens
  Table A; HLA-B*15:01; TP53; V173M; 0
KQSQHMTEVM

SEQ ID NO: 15042 - protein, 9 aa, Homo sapiens
  Table A; HLA-B*27:02; PTPRB; D1560N; 0
KRNPTQQKF

SEQ ID NO: 15043 - protein, 9 aa, Homo sapiens
  Table A; HLA-B*27:05; PTPRB; D1560N; 0
KRNPTQQKF

SEQ ID NO: 15044 - protein, 9 aa, Homo sapiens
  Table A; HLA-C*06:02; PTPRB; D1560N; 1
KRNPTQQKF

SEQ ID NO: 15045 - protein, 9 aa, Homo sapiens
  Table A; HLA-C*07:01; PTPRB; D1560N; 1
KRNPTQQKF

SEQ ID NO: 15046 - protein, 9 aa, Homo sapiens
  Table A; HLA-C*16:04; PTPRB; D1560N; 0
KRNPTQQKF

SEQ ID NO: 15047 - protein, 9 aa, Homo sapiens
  Table A; HLA-A*31:01; PTEN; G165R; 0
KRVTIPSQR

SEQ ID NO: 15048 - protein, 9 aa, Homo sapiens
  Table A; HLA-B*27:02; PTEN; G165R; 0
KRVTIPSQR

SEQ ID NO: 15049 - protein, 9 aa, Homo sapiens
  Table A; HLA-B*27:05; PTEN; G165R; 0
KRVTIPSQR

SEQ ID NO: 15050 - protein, 11 aa, Homo sapiens
  Table A; HLA-B*57:01; PREX2; E553K; 0
KSKFKDEPLLF

SEQ ID NO: 15051 - protein, 9 aa, Homo sapiens
  Table A; HLA-B*39:06; CREBBP; P2094L; 0
KSNLQLMAA

SEQ ID NO: 15052 - protein, 9 aa, Homo sapiens
  Table A; HLA-B*54:01; CREBBP; P2094L; 0
KSNLQLMAA

SEQ ID NO: 15053 - protein, 8 aa, Homo sapiens
  Table A; HLA-B*58:01; TP53; S127F; 0
KSVTCTYF

SEQ ID NO: 15054 - protein, 9 aa, Homo sapiens
  Table A; HLA-B*57:01; PIK3CB; E1051K; 0
KSWTTKVNW

SEQ ID NO: 15055 - protein, 10 aa, Homo sapiens
  Table A; HLA-A*68:02; CHD4; R975H; 0
KTELIVHVEL

SEQ ID NO: 15056 - protein, 10 aa, Homo sapiens
  Table A; HLA-B*57:01; CHD4; R975H; 1
KTELIVHVEL

SEQ ID NO: 15057 - protein, 10 aa, Homo sapiens
  Table A; HLA-B*58:01; CHD4; R975H; 0
KTELIVHVEL

SEQ ID NO: 15058 - protein, 9 aa, Homo sapiens
  Table A; HLA-A*02:04; PTPRT; E548K; 0
KTHHLFVGL

SEQ ID NO: 15059 - protein, 9 aa, Homo sapiens
  Table A; HLA-B*57:01; PTPRT; E548K; 0
KTHHLFVGL

SEQ ID NO: 15060 - protein, 9 aa, Homo sapiens
  Table A; HLA-C*15:02; PTPRT; E548K; 0
KTHHLFVGL

SEQ ID NO: 15061 - protein, 9 aa, Homo sapiens
  Table A; HLA-B*57:01; PIK3CB; R321Q; 0
KTQIISHVW

SEQ ID NO: 15062 - protein, 9 aa, Homo sapiens
  Table A; HLA-B*58:01; PIK3CB; R321Q; 0
KTQIISHVW

SEQ ID NO: 15063 - protein, 9 aa, Homo sapiens
  Table A; HLA-A*30:04; PIK3CA; E726K; 0
KTQKVQMKF

SEQ ID NO: 15064 - protein, 9 aa, Homo sapiens
  Table A; HLA-A*32:01; PIK3CA; E726K; 1
KTQKVQMKF

SEQ ID NO: 15065 - protein, 9 aa, Homo sapiens
  Table A; HLA-B*57:01; PIK3CA; E726K; 1
KTQKVQMKF

SEQ ID NO: 15066 - protein, 9 aa, Homo sapiens
  Table A; HLA-B*58:01; PIK3CA; E726K; 0
KTQKVQMKF

SEQ ID NO: 15067 - protein, 9 aa, Homo sapiens
  Table A; HLA-A*03:01; XPO1; E571K; 1
KTVVNKLFK

SEQ ID NO: 15068 - protein, 9 aa, Homo sapiens
  Table A; HLA-A*11:01; XPO1; E571K; 0
KTVVNKLFK

SEQ ID NO: 15069 - protein, 10 aa, Homo sapiens
  Table A; HLA-B*57:01; XPO1; E571K; 0
KTVVNKLFKF

SEQ ID NO: 15070 - protein, 8 aa, Homo sapiens
  Table A; HLA-B*57:01; TP53; C141Y; 0
KTYPVQLW

SEQ ID NO: 15071 - protein, 8 aa, Homo sapiens
  Table A; HLA-B*58:01; TP53; C141Y; 0
KTYPVQLW

SEQ ID NO: 15072 - protein, 9 aa, Homo sapiens
  Table A; HLA-A*03:01; TP53; C141Y; 1
KTYPVQLWV

SEQ ID NO: 15073 - protein, 9 aa, Homo sapiens
  Table A; HLA-A*68:02; TP53; C141Y; 0
KTYPVQLWV

SEQ ID NO: 15074 - protein, 9 aa, Homo sapiens
  Table A; HLA-B*13:02; TP53; C141Y; 0
KTYPVQLWV

SEQ ID NO: 15075 - protein, 9 aa, Homo sapiens
  Table A; HLA-C*12:03; TP53; C141Y; 0
KTYPVQLWV

SEQ ID NO: 15076 - protein, 9 aa, Homo sapiens
  Table A; HLA-C*15:02; TP53; C141Y; 0
KTYPVQLWV

SEQ ID NO: 15077 - protein, 10 aa, Homo sapiens
  Table A; HLA-A*02:08; TP53; R110L; 0
KTYQGSYGFL

SEQ ID NO: 15078 - protein, 10 aa, Homo sapiens
  Table A; HLA-A*03:01; TP53; R110L; 1
KTYQGSYGFL

SEQ ID NO: 15079 - protein, 11 aa, Homo sapiens
  Table A; HLA-A*02:04; TP53; R110L; 0
KTYQGSYGFLL

SEQ ID NO: 15080 - protein, 11 aa, Homo sapiens
  Table A; HLA-A*02:08; TP53; R110L; 0
KTYQGSYGFLL

SEQ ID NO: 15081 - protein, 11 aa, Homo sapiens
  Table A; HLA-A*03:01; TP53; R110L; 1
KTYQGSYGFLL

SEQ ID NO: 15082 - protein, 11 aa, Homo sapiens
  Table A; HLA-A*31:01; TP53; R110L; 0
KTYQGSYGFLL

SEQ ID NO: 15083 - protein, 11 aa, Homo sapiens
  Table A; HLA-B*57:01; TP53; R110L; 0
KTYQGSYGFLL

SEQ ID NO: 15084 - protein, 11 aa, Homo sapiens
  Table A; HLA-C*15:02; TP53; R110L; 0
KTYQGSYGFLL

SEQ ID NO: 15085 - protein, 9 aa, Homo sapiens
  Table A; HLA-A*02:08; PIK3CA; R108H; 0
KVIEPVGNH

SEQ ID NO: 15086 - protein, 9 aa, Homo sapiens
  Table A; HLA-A*03:01; PIK3CA; R108H; 1
KVIEPVGNH

SEQ ID NO: 15087 - protein, 9 aa, Homo sapiens
  Table A; HLA-A*03:02; PIK3CA; R108H; 0
KVIEPVGNH

SEQ ID NO: 15088 - protein, 9 aa, Homo sapiens
  Table A; HLA-A*11:01; PIK3CA; R108H; 1
KVIEPVGNH

SEQ ID NO: 15089 - protein, 9 aa, Homo sapiens
  Table A; HLA-A*26:01; PIK3CA; R108H; 1
KVIEPVGNH

SEQ ID NO: 15090 - protein, 9 aa, Homo sapiens
  Table A; HLA-A*26:03; PIK3CA; R108H; 0
KVIEPVGNH

SEQ ID NO: 15091 - protein, 9 aa, Homo sapiens
  Table A; HLA-A*30:01; PIK3CA; R108H; 0
KVIEPVGNH

SEQ ID NO: 15092 - protein, 9 aa, Homo sapiens
  Table A; HLA-A*30:02; PIK3CA; R108H; 0
KVIEPVGNH

SEQ ID NO: 15093 - protein, 9 aa, Homo sapiens
  Table A; HLA-A*31:01; PIK3CA; R108H; 0
KVIEPVGNH

SEQ ID NO: 15094 - protein, 9 aa, Homo sapiens
  Table A; HLA-B*15:01; PIK3CA; R108H; 1
KVIEPVGNH

SEQ ID NO: 15095 - protein, 9 aa, Homo sapiens
  Table A; HLA-B*48:01; PIK3CA; R108H; 0
KVIEPVGNH

SEQ ID NO: 15096 - protein, 9 aa, Homo sapiens
  Table A; HLA-B*57:01; PIK3CA; R108H; 1
KVIEPVGNH

SEQ ID NO: 15097 - protein, 9 aa, Homo sapiens
  Table A; HLA-B*58:01; PIK3CA; R108H; 0
KVIEPVGNH

SEQ ID NO: 15098 - protein, 10 aa, Homo sapiens
  Table A; HLA-A*02:05; PIK3CA; R108H; 0
KVIEPVGNHE

SEQ ID NO: 15099 - protein, 10 aa, Homo sapiens
  Table A; HLA-A*02:06; PIK3CA; R108H; 0
KVIEPVGNHE

SEQ ID NO: 15100 - protein, 10 aa, Homo sapiens
  Table A; HLA-A*11:01; PIK3CA; R108H; 1
KVIEPVGNHE

SEQ ID NO: 15101 - protein, 10 aa, Homo sapiens
  Table A; HLA-A*31:01; PIK3CA; R108H; 0
KVIEPVGNHE

SEQ ID NO: 15102 - protein, 9 aa, Homo sapiens
  Table A; HLA-A*02:01; PIK3CA; G106V; 1
KVIEPVVNR

SEQ ID NO: 15103 - protein, 9 aa, Homo sapiens
  Table A; HLA-A*02:04; PIK3CA; G106V; 0
KVIEPVVNR

SEQ ID NO: 15104 - protein, 9 aa, Homo sapiens
  Table A; HLA-A*02:05; PIK3CA; G106V; 0
KVIEPVVNR

SEQ ID NO: 15105 - protein, 9 aa, Homo sapiens
  Table A; HLA-A*02:06; PIK3CA; G106V; 0
KVIEPVVNR

SEQ ID NO: 15106 - protein, 9 aa, Homo sapiens
  Table A; HLA-A*02:07; PIK3CA; G106V; 0
KVIEPVVNR

SEQ ID NO: 15107 - protein, 9 aa, Homo sapiens
  Table A; HLA-A*02:08; PIK3CA; G106V; 0
KVIEPVVNR

SEQ ID NO: 15108 - protein, 9 aa, Homo sapiens
  Table A; HLA-A*03:01; PIK3CA; G106V; 1
KVIEPVVNR

SEQ ID NO: 15109 - protein, 9 aa, Homo sapiens
  Table A; HLA-A*03:02; PIK3CA; G106V; 0
KVIEPVVNR

SEQ ID NO: 15110 - protein, 9 aa, Homo sapiens
  Table A; HLA-A*11:01; PIK3CA; G106V; 0
KVIEPVVNR

SEQ ID NO: 15111 - protein, 9 aa, Homo sapiens
  Table A; HLA-A*26:01; PIK3CA; G106V; 0
KVIEPVVNR

SEQ ID NO: 15112 - protein, 9 aa, Homo sapiens
  Table A; HLA-A*26:03; PIK3CA; G106V; 0
KVIEPVVNR

SEQ ID NO: 15113 - protein, 9 aa, Homo sapiens
  Table A; HLA-A*30:01; PIK3CA; G106V; 0
KVIEPVVNR

SEQ ID NO: 15114 - protein, 9 aa, Homo sapiens
  Table A; HLA-A*31:01; PIK3CA; G106V; 0
KVIEPVVNR

SEQ ID NO: 15115 - protein, 9 aa, Homo sapiens
  Table A; HLA-A*33:01; PIK3CA; G106V; 0
KVIEPVVNR

SEQ ID NO: 15116 - protein, 9 aa, Homo sapiens
  Table A; HLA-A*33:03; PIK3CA; G106V; 0
KVIEPVVNR

SEQ ID NO: 15117 - protein, 9 aa, Homo sapiens
  Table A; HLA-A*68:01; PIK3CA; G106V; 0
KVIEPVVNR

SEQ ID NO: 15118 - protein, 9 aa, Homo sapiens
  Table A; HLA-A*68:02; PIK3CA; G106V; 0
KVIEPVVNR

SEQ ID NO: 15119 - protein, 9 aa, Homo sapiens
  Table A; HLA-B*15:01; PIK3CA; G106V; 0
KVIEPVVNR

SEQ ID NO: 15120 - protein, 9 aa, Homo sapiens
  Table A; HLA-B*27:02; PIK3CA; G106V; 0
KVIEPVVNR

SEQ ID NO: 15121 - protein, 9 aa, Homo sapiens
  Table A; HLA-B*27:05; PIK3CA; G106V; 0
KVIEPVVNR

SEQ ID NO: 15122 - protein, 9 aa, Homo sapiens
  Table A; HLA-B*50:01; PIK3CA; G106V; 0
KVIEPVVNR

SEQ ID NO: 15123 - protein, 9 aa, Homo sapiens
  Table A; HLA-B*57:01; PIK3CA; G106V; 0
KVIEPVVNR

SEQ ID NO: 15124 - protein, 9 aa, Homo sapiens
  Table A; HLA-B*58:01; PIK3CA; G106V; 0
KVIEPVVNR

SEQ ID NO: 15125 - protein, 8 aa, Homo sapiens
  Table A; HLA-A*23:01; SPOP; E50K; 0
KVIKSSTF

SEQ ID NO: 15126 - protein, 8 aa, Homo sapiens
  Table A; HLA-B*15:01; SPOP; E50K; 1
KVIKSSTF

SEQ ID NO: 15127 - protein, 8 aa, Homo sapiens
  Table A; HLA-B*58:01; SPOP; E50K; 0
KVIKSSTF

SEQ ID NO: 15128 - protein, 8 aa, Homo sapiens
  Table A; HLA-B*15:01; SMARCA4; G1232S; 0
KVIQASMF

SEQ ID NO: 15129 - protein, 8 aa, Homo sapiens
  Table A; HLA-B*57:01; SMARCA4; G1232S; 0
KVIQASMF

SEQ ID NO: 15130 - protein, 8 aa, Homo sapiens
  Table A; HLA-B*58:01; SMARCA4; G1232S; 0
KVIQASMF

SEQ ID NO: 15131 - protein, 11 aa, Homo sapiens
  Table A; HLA-A*03:01; SMARCA4; G1232S; 1
KVIQASMFDQK

SEQ ID NO: 15132 - protein, 11 aa, Homo sapiens
  Table A; HLA-A*03:02; SMARCA4; G1232S; 0
KVIQASMFDQK

SEQ ID NO: 15133 - protein, 11 aa, Homo sapiens
  Table A; HLA-A*11:01; SMARCA4; G1232S; 0
KVIQASMFDQK

SEQ ID NO: 15134 - protein, 11 aa, Homo sapiens
  Table A; HLA-B*27:02; SMARCA4; G1232S; 0
KVIQASMFDQK

SEQ ID NO: 15135 - protein, 10 aa, Homo sapiens
  Table A; HLA-A*03:01; EZH2; M667T; 1
KVYDKYTCSF

SEQ ID NO: 15136 - protein, 9 aa, Homo sapiens
  Table A; HLA-A*23:01; ZNRF3; R207W; 0
KYIDGEELW

SEQ ID NO: 15137 - protein, 8 aa, Homo sapiens
  Table A; HLA-A*23:01; RAC1; A159V; 0
KYLECSVL

SEQ ID NO: 15138 - protein, 8 aa, Homo sapiens
  Table A; HLA-B*41:02; RAC1; A159V; 0
KYLECSVL

SEQ ID NO: 15139 - protein, 8 aa, Homo sapiens
  Table A; HLA-B*48:01; RAC1; A159V; 0
KYLECSVL

SEQ ID NO: 15140 - protein, 8 aa, Homo sapiens
  Table A; HLA-C*14:02; RAC1; A159V; 0
KYLECSVL

SEQ ID NO: 15141 - protein, 8 aa, Homo sapiens
  Table A; HLA-C*14:03; RAC1; A159V; 0
KYLECSVL

SEQ ID NO: 15142 - protein, 9 aa, Homo sapiens
  Table A; HLA-A*23:01; RAC1; A159V; 0
KYLECSVLT

SEQ ID NO: 15143 - protein, 11 aa, Homo sapiens
  Table A; HLA-A*31:01; RAC1; A159V; 0
KYLECSVLTQR

SEQ ID NO: 15144 - protein, 11 aa, Homo sapiens
  Table A; HLA-A*33:03; RAC1; A159V; 0
KYLECSVLTQR

SEQ ID NO: 15145 - protein, 9 aa, Homo sapiens
  Table A; HLA-C*06:02; EGFR; A289V; 1
KYSFGVTCV

SEQ ID NO: 15146 - protein, 9 aa, Homo sapiens
  Table A; HLA-A*23:01; ATM; R337C; 0
KYSSGFCNI

SEQ ID NO: 15147 - protein, 9 aa, Homo sapiens
  Table A; HLA-A*24:02; ATM; R337C; 1
KYSSGFCNI

SEQ ID NO: 15148 - protein, 9 aa, Homo sapiens
  Table A; HLA-C*14:02; EZH2; E745K; 0
KYVGIKREM

SEQ ID NO: 15149 - protein, 9 aa, Homo sapiens
  Table A; HLA-A*02:01; CREB3L1; V414I; 1
LAADGIYTA

SEQ ID NO: 15150 - protein, 9 aa, Homo sapiens
  Table A; HLA-A*02:03; CREB3L1; V414I; 0
LAADGIYTA

SEQ ID NO: 15151 - protein, 9 aa, Homo sapiens
  Table A; HLA-A*02:04; CREB3L1; V414I; 0
LAADGIYTA

SEQ ID NO: 15152 - protein, 9 aa, Homo sapiens
  Table A; HLA-A*02:05; CREB3L1; V414I; 0
LAADGIYTA

SEQ ID NO: 15153 - protein, 9 aa, Homo sapiens
  Table A; HLA-A*02:06; CREB3L1; V414I; 0
LAADGIYTA

SEQ ID NO: 15154 - protein, 9 aa, Homo sapiens
  Table A; HLA-A*02:08; CREB3L1; V414I; 0
LAADGIYTA

SEQ ID NO: 15155 - protein, 9 aa, Homo sapiens
  Table A; HLA-A*30:01; CREB3L1; V414I; 0
LAADGIYTA

SEQ ID NO: 15156 - protein, 9 aa, Homo sapiens
  Table A; HLA-A*68:02; CREB3L1; V414I; 0
LAADGIYTA

SEQ ID NO: 15157 - protein, 9 aa, Homo sapiens
  Table A; HLA-B*15:02; CREB3L1; V414I; 0
LAADGIYTA

SEQ ID NO: 15158 - protein, 9 aa, Homo sapiens
  Table A; HLA-B*35:01; CREB3L1; V414I; 0
LAADGIYTA

SEQ ID NO: 15159 - protein, 9 aa, Homo sapiens
  Table A; HLA-B*35:03; CREB3L1; V414I; 0
LAADGIYTA

SEQ ID NO: 15160 - protein, 9 aa, Homo sapiens
  Table A; HLA-B*39:01; CREB3L1; V414I; 0
LAADGIYTA

SEQ ID NO: 15161 - protein, 9 aa, Homo sapiens
  Table A; HLA-B*39:06; CREB3L1; V414I; 0
LAADGIYTA

SEQ ID NO: 15162 - protein, 9 aa, Homo sapiens
  Table A; HLA-B*50:01; CREB3L1; V414I; 0
LAADGIYTA

SEQ ID NO: 15163 - protein, 9 aa, Homo sapiens
  Table A; HLA-B*54:01; CREB3L1; V414I; 0
LAADGIYTA

SEQ ID NO: 15164 - protein, 9 aa, Homo sapiens
  Table A; HLA-B*55:02; CREB3L1; V414I; 0
LAADGIYTA

SEQ ID NO: 15165 - protein, 9 aa, Homo sapiens
  Table A; HLA-B*56:01; CREB3L1; V414I; 0
LAADGIYTA

SEQ ID NO: 15166 - protein, 9 aa, Homo sapiens
  Table A; HLA-C*08:01; CREB3L1; V414I; 0
LAADGIYTA

SEQ ID NO: 15167 - protein, 9 aa, Homo sapiens
  Table A; HLA-C*12:03; CREB3L1; V414I; 0
LAADGIYTA

SEQ ID NO: 15168 - protein, 9 aa, Homo sapiens
  Table A; HLA-C*16:04; CREB3L1; V414I; 0
LAADGIYTA

SEQ ID NO: 15169 - protein, 8 aa, Homo sapiens
  Table A; HLA-C*17:01; KDR; R1032Q; 0
LAAQNILL

SEQ ID NO: 15170 - protein, 11 aa, Homo sapiens
  Table A; HLA-B*27:02; KDR; R1032Q; 0
LAAQNILLSEK

SEQ ID NO: 15171 - protein, 9 aa, Homo sapiens
  Table A; HLA-A*33:03; CCND1; T286I; 0
LACIPTDVR

SEQ ID NO: 15172 - protein, 9 aa, Homo sapiens
  Table A; HLA-A*68:01; CCND1; T286I; 0
LACIPTDVR

SEQ ID NO: 15173 - protein, 9 aa, Homo sapiens
  Table A; HLA-B*35:01; CCND1; T286I; 1
LACIPTDVR

SEQ ID NO: 15174 - protein, 9 aa, Homo sapiens
  Table A; HLA-A*30:01; TP53; C141Y; 0
LAKTYPVQL

SEQ ID NO: 15175 - protein, 9 aa, Homo sapiens
  Table A; HLA-B*08:01; TP53; C141Y; 0
LAKTYPVQL

SEQ ID NO: 15176 - protein, 9 aa, Homo sapiens
  Table A; HLA-C*02:02; TP53; C141Y; 0
LAKTYPVQL

SEQ ID NO: 15177 - protein, 9 aa, Homo sapiens
  Table A; HLA-C*12:03; TP53; C141Y; 0
LAKTYPVQL

SEQ ID NO: 15178 - protein, 9 aa, Homo sapiens
  Table A; HLA-C*16:01; TP53; C141Y; 0
LAKTYPVQL

SEQ ID NO: 15179 - protein, 9 aa, Homo sapiens
  Table A; HLA-C*16:02; TP53; C141Y; 0
LAKTYPVQL

SEQ ID NO: 15180 - protein, 9 aa, Homo sapiens
  Table A; HLA-C*17:01; TP53; C141Y; 0
LAKTYPVQL

SEQ ID NO: 15181 - protein, 10 aa, Homo sapiens
  Table A; HLA-B*57:01; TP53; C141Y; 0
LAKTYPVQLW

SEQ ID NO: 15182 - protein, 8 aa, Homo sapiens
  Table A; HLA-B*39:01; MTOR; S2215Y; 0
LANDPTYL

SEQ ID NO: 15183 - protein, 8 aa, Homo sapiens
  Table A; HLA-C*02:02; MTOR; S2215Y; 1
LANDPTYL

SEQ ID NO: 15184 - protein, 8 aa, Homo sapiens
  Table A; HLA-C*03:03; MTOR; S2215Y; 1
LANDPTYL

SEQ ID NO: 15185 - protein, 8 aa, Homo sapiens
  Table A; HLA-C*03:04; MTOR; S2215Y; 1
LANDPTYL

SEQ ID NO: 15186 - protein, 8 aa, Homo sapiens
  Table A; HLA-C*05:01; MTOR; S2215Y; 1
LANDPTYL

SEQ ID NO: 15187 - protein, 8 aa, Homo sapiens
  Table A; HLA-C*07:04; MTOR; S2215Y; 0
LANDPTYL

SEQ ID NO: 15188 - protein, 8 aa, Homo sapiens
  Table A; HLA-C*08:01; MTOR; S2215Y; 0
LANDPTYL

SEQ ID NO: 15189 - protein, 8 aa, Homo sapiens
  Table A; HLA-C*08:02; MTOR; S2215Y; 1
LANDPTYL

SEQ ID NO: 15190 - protein, 8 aa, Homo sapiens
  Table A; HLA-C*12:03; MTOR; S2215Y; 1
LANDPTYL

SEQ ID NO: 15191 - protein, 8 aa, Homo sapiens
  Table A; HLA-C*15:02; MTOR; S2215Y; 0
LANDPTYL

SEQ ID NO: 15192 - protein, 8 aa, Homo sapiens
  Table A; HLA-C*16:01; MTOR; S2215Y; 1
LANDPTYL

SEQ ID NO: 15193 - protein, 8 aa, Homo sapiens
  Table A; HLA-C*17:01; MTOR; S2215Y; 0
LANDPTYL

SEQ ID NO: 15194 - protein, 9 aa, Homo sapiens
  Table A; HLA-A*31:01; MTOR; S2215Y; 0
LANDPTYLR

SEQ ID NO: 15195 - protein, 9 aa, Homo sapiens
  Table A; HLA-A*33:01; MTOR; S2215Y; 0
LANDPTYLR

SEQ ID NO: 15196 - protein, 9 aa, Homo sapiens
  Table A; HLA-A*33:03; MTOR; S2215Y; 0
LANDPTYLR

SEQ ID NO: 15197 - protein, 9 aa, Homo sapiens
  Table A; HLA-A*68:01; MTOR; S2215Y; 0
LANDPTYLR

SEQ ID NO: 15198 - protein, 9 aa, Homo sapiens
  Table A; HLA-B*27:02; MTOR; S2215Y; 0
LANDPTYLR

SEQ ID NO: 15199 - protein, 9 aa, Homo sapiens
  Table A; HLA-B*54:01; MTOR; S2215Y; 0
LANDPTYLR

SEQ ID NO: 15200 - protein, 10 aa, Homo sapiens
  Table A; HLA-A*03:01; MTOR; S2215Y; 1
LANDPTYLRK

SEQ ID NO: 15201 - protein, 10 aa, Homo sapiens
  Table A; HLA-A*03:02; MTOR; S2215Y; 0
LANDPTYLRK

SEQ ID NO: 15202 - protein, 10 aa, Homo sapiens
  Table A; HLA-A*11:01; MTOR; S2215Y; 1
LANDPTYLRK

SEQ ID NO: 15203 - protein, 10 aa, Homo sapiens
  Table A; HLA-A*33:03; MTOR; S2215Y; 0
LANDPTYLRK

SEQ ID NO: 15204 - protein, 10 aa, Homo sapiens
  Table A; HLA-A*68:01; MTOR; S2215Y; 0
LANDPTYLRK

SEQ ID NO: 15205 - protein, 10 aa, Homo sapiens
  Table A; HLA-A*68:02; MTOR; S2215Y; 0
LANDPTYLRK

SEQ ID NO: 15206 - protein, 10 aa, Homo sapiens
  Table A; HLA-B*27:02; MTOR; S2215Y; 0
LANDPTYLRK

SEQ ID NO: 15207 - protein, 9 aa, Homo sapiens
  Table A; HLA-A*33:03; TP53; I195N; 0
LAPPQHLNR

SEQ ID NO: 15208 - protein, 9 aa, Homo sapiens
  Table A; HLA-A*68:01; TP53; I195N; 0
LAPPQHLNR

SEQ ID NO: 15209 - protein, 9 aa, Homo sapiens
  Table A; HLA-B*51:01; TP53; I195N; 0
LAPPQHLNR

SEQ ID NO: 15210 - protein, 9 aa, Homo sapiens
  Table A; HLA-A*68:01; TP53; I195T; 0
LAPPQHLTR

SEQ ID NO: 15211 - protein, 9 aa, Homo sapiens
  Table A; HLA-B*51:01; TP53; I195T; 1
LAPPQHLTR

SEQ ID NO: 15212 - protein, 10 aa, Homo sapiens
  Table A; HLA-A*02:07; TP53; I195T; 0
LAPPQHLTRV

SEQ ID NO: 15213 - protein, 8 aa, Homo sapiens
  Table A; HLA-B*51:01; TP53; H193L; 0
LAPPQLLI

SEQ ID NO: 15214 - protein, 10 aa, Homo sapiens
  Table A; HLA-A*02:07; TP53; H193L; 0
LAPPQLLIRV

SEQ ID NO: 15215 - protein, 10 aa, Homo sapiens
  Table A; HLA-A*68:02; TP53; H193L; 0
LAPPQLLIRV

SEQ ID NO: 15216 - protein, 8 aa, Homo sapiens
  Table A; HLA-B*51:01; TP53; H193R; 0
LAPPQRLI

SEQ ID NO: 15217 - protein, 8 aa, Homo sapiens
  Table A; HLA-B*51:01; TP53; H193Y; 0
LAPPQYLI

SEQ ID NO: 15218 - protein, 9 aa, Homo sapiens
  Table A; HLA-B*51:01; TP53; H193Y; 0
LAPPQYLIR

SEQ ID NO: 15219 - protein, 10 aa, Homo sapiens
  Table A; HLA-A*02:07; TP53; H193Y; 0
LAPPQYLIRV

SEQ ID NO: 15220 - protein, 10 aa, Homo sapiens
  Table A; HLA-A*68:02; TP53; H193Y; 0
LAPPQYLIRV

SEQ ID NO: 15221 - protein, 9 aa, Homo sapiens
  Table A; HLA-B*46:01; AXIN1; R146Q; 0
LARAIYQKY

SEQ ID NO: 15222 - protein, 9 aa, Homo sapiens
  Table A; HLA-C*02:02; AXIN1; R146Q; 0
LARAIYQKY

SEQ ID NO: 15223 - protein, 9 aa, Homo sapiens
  Table A; HLA-C*16:04; AXIN1; R146Q; 0
LARAIYQKY

SEQ ID NO: 15224 - protein, 8 aa, Homo sapiens
  Table A; HLA-B*57:01; BRAF; K601E; 1
LATVESRW

SEQ ID NO: 15225 - protein, 8 aa, Homo sapiens
  Table A; HLA-B*58:01; BRAF; K601E; 0
LATVESRW

SEQ ID NO: 15226 - protein, 10 aa, Homo sapiens
  Table A; HLA-B*35:01; ROBO2; D1014N; 1
LAVNLPDPQW

SEQ ID NO: 15227 - protein, 10 aa, Homo sapiens
  Table A; HLA-B*57:01; ROBO2; D1014N; 0
LAVNLPDPQW

SEQ ID NO: 15228 - protein, 10 aa, Homo sapiens
  Table A; HLA-B*58:01; ROBO2; D1014N; 0
LAVNLPDPQW

SEQ ID NO: 15229 - protein, 10 aa, Homo sapiens
  Table A; HLA-A*02:01; CTNNB1; S33C; 1
LDCGIHSGAT

SEQ ID NO: 15230 - protein, 9 aa, Homo sapiens
  Table A; HLA-C*08:02; NFE2L2; T80P; 0
LDEEPGEFL

SEQ ID NO: 15231 - protein, 8 aa, Homo sapiens
  Table A; HLA-A*02:01; CTNNB1; S33F; 1
LDFGIHSG

SEQ ID NO: 15232 - protein, 8 aa, Homo sapiens
  Table A; HLA-A*11:01; CTNNB1; S33F; 1
LDFGIHSG

SEQ ID NO: 15233 - protein, 8 aa, Homo sapiens
  Table A; HLA-B*08:01; CTNNB1; S33F; 1
LDFGIHSG

SEQ ID NO: 15234 - protein, 8 aa, Homo sapiens
  Table A; HLA-B*27:05; CTNNB1; S33F; 1
LDFGIHSG

SEQ ID NO: 15235 - protein, 8 aa, Homo sapiens
  Table A; HLA-B*40:02; CTNNB1; S33F; 0
LDFGIHSG

SEQ ID NO: 15236 - protein, 8 aa, Homo sapiens
  Table A; HLA-B*48:01; CTNNB1; S33F; 0
LDFGIHSG

SEQ ID NO: 15237 - protein, 8 aa, Homo sapiens
  Table A; HLA-B*54:01; CTNNB1; S33F; 0
LDFGIHSG

SEQ ID NO: 15238 - protein, 8 aa, Homo sapiens
  Table A; HLA-C*08:03; CTNNB1; S33F; 0
LDFGIHSG

SEQ ID NO: 15239 - protein, 9 aa, Homo sapiens
  Table A; HLA-A*02:03; CTNNB1; S33F; 0
LDFGIHSGA

SEQ ID NO: 15240 - protein, 9 aa, Homo sapiens
  Table A; HLA-A*02:05; CTNNB1; S33F; 0
LDFGIHSGA

SEQ ID NO: 15241 - protein, 9 aa, Homo sapiens
  Table A; HLA-A*68:02; CTNNB1; S33F; 0
LDFGIHSGA

SEQ ID NO: 15242 - protein, 9 aa, Homo sapiens
  Table A; HLA-B*39:06; CTNNB1; S33F; 0
LDFGIHSGA

SEQ ID NO: 15243 - protein, 9 aa, Homo sapiens
  Table A; HLA-B*40:02; CTNNB1; S33F; 0
LDFGIHSGA

SEQ ID NO: 15244 - protein, 9 aa, Homo sapiens
  Table A; HLA-B*40:06; CTNNB1; S33F; 0
LDFGIHSGA

SEQ ID NO: 15245 - protein, 9 aa, Homo sapiens
  Table A; HLA-B*48:01; CTNNB1; S33F; 0
LDFGIHSGA

SEQ ID NO: 15246 - protein, 9 aa, Homo sapiens
  Table A; HLA-B*50:01; CTNNB1; S33F; 0
LDFGIHSGA

SEQ ID NO: 15247 - protein, 9 aa, Homo sapiens
  Table A; HLA-B*54:01; CTNNB1; S33F; 0
LDFGIHSGA

SEQ ID NO: 15248 - protein, 10 aa, Homo sapiens
  Table A; HLA-A*02:01; CTNNB1; S33F; 1
LDFGIHSGAT

SEQ ID NO: 15249 - protein, 10 aa, Homo sapiens
  Table A; HLA-A*68:02; CTNNB1; S33F; 0
LDFGIHSGAT

SEQ ID NO: 15250 - protein, 10 aa, Homo sapiens
  Table A; HLA-B*40:02; CTNNB1; S33F; 0
LDFGIHSGAT

SEQ ID NO: 15251 - protein, 10 aa, Homo sapiens
  Table A; HLA-B*48:01; CTNNB1; S33F; 0
LDFGIHSGAT

SEQ ID NO: 15252 - protein, 10 aa, Homo sapiens
  Table A; HLA-C*07:04; CTNNB1; S33F; 0
LDFGIHSGAT

SEQ ID NO: 15253 - protein, 10 aa, Homo sapiens
  Table A; HLA-C*08:03; CTNNB1; S33F; 0
LDFGIHSGAT

SEQ ID NO: 15254 - protein, 8 aa, Homo sapiens
  Table A; HLA-B*40:02; ARHGEF12; R705H; 0
LDGTPHTL

SEQ ID NO: 15255 - protein, 8 aa, Homo sapiens
  Table A; HLA-B*48:01; ARHGEF12; R705H; 0
LDGTPHTL

SEQ ID NO: 15256 - protein, 8 aa, Homo sapiens
  Table A; HLA-C*08:03; ARHGEF12; R705H; 0
LDGTPHTL

SEQ ID NO: 15257 - protein, 9 aa, Homo sapiens
  Table A; HLA-B*27:02; HRAS; Q61K; 0
LDILDTAGK

SEQ ID NO: 15258 - protein, 9 aa, Homo sapiens
  Table A; HLA-B*27:02; NRAS; Q61K; 0
LDILDTAGK

SEQ ID NO: 15259 - protein, 9 aa, Homo sapiens
  Table A; HLA-B*40:02; KRAS; Q61L; 0
LDILDTAGL

SEQ ID NO: 15260 - protein, 9 aa, Homo sapiens
  Table A; HLA-B*40:02; NRAS; Q61L; 0
LDILDTAGL

SEQ ID NO: 15261 - protein, 9 aa, Homo sapiens
  Table A; HLA-B*44:05; NRAS; Q61L; 0
LDILDTAGL

SEQ ID NO: 15262 - protein, 9 aa, Homo sapiens
  Table A; HLA-B*27:02; KRAS; Q61R; 0
LDILDTAGR

SEQ ID NO: 15263 - protein, 9 aa, Homo sapiens
  Table A; HLA-B*27:02; NRAS; Q61R; 0
LDILDTAGR

SEQ ID NO: 15264 - protein, 8 aa, Homo sapiens
  Table A; HLA-B*37:01; CTNNB1; G34E; 0
LDSEIHSG

SEQ ID NO: 15265 - protein, 9 aa, Homo sapiens
  Table A; HLA-A*02:01; CTNNB1; G34E; 1
LDSEIHSGA

SEQ ID NO: 15266 - protein, 9 aa, Homo sapiens
  Table A; HLA-A*02:03; CTNNB1; G34E; 0
LDSEIHSGA

SEQ ID NO: 15267 - protein, 9 aa, Homo sapiens
  Table A; HLA-A*02:05; CTNNB1; G34E; 0
LDSEIHSGA

SEQ ID NO: 15268 - protein, 9 aa, Homo sapiens
  Table A; HLA-A*30:01; CTNNB1; G34E; 0
LDSEIHSGA

SEQ ID NO: 15269 - protein, 9 aa, Homo sapiens
  Table A; HLA-A*68:02; CTNNB1; G34E; 0
LDSEIHSGA

SEQ ID NO: 15270 - protein, 9 aa, Homo sapiens
  Table A; HLA-B*37:01; CTNNB1; G34E; 0
LDSEIHSGA

SEQ ID NO: 15271 - protein, 9 aa, Homo sapiens
  Table A; HLA-B*39:06; CTNNB1; G34E; 0
LDSEIHSGA

SEQ ID NO: 15272 - protein, 9 aa, Homo sapiens
  Table A; HLA-B*40:02; CTNNB1; G34E; 0
LDSEIHSGA

SEQ ID NO: 15273 - protein, 9 aa, Homo sapiens
  Table A; HLA-B*40:06; CTNNB1; G34E; 0
LDSEIHSGA

SEQ ID NO: 15274 - protein, 9 aa, Homo sapiens
  Table A; HLA-B*48:01; CTNNB1; G34E; 0
LDSEIHSGA

SEQ ID NO: 15275 - protein, 9 aa, Homo sapiens
  Table A; HLA-B*50:01; CTNNB1; G34E; 0
LDSEIHSGA

SEQ ID NO: 15276 - protein, 9 aa, Homo sapiens
  Table A; HLA-B*54:01; CTNNB1; G34E; 0
LDSEIHSGA

SEQ ID NO: 15277 - protein, 9 aa, Homo sapiens
  Table A; HLA-C*08:01; CTNNB1; G34E; 0
LDSEIHSGA

SEQ ID NO: 15278 - protein, 10 aa, Homo sapiens
  Table A; HLA-A*68:01; CTNNB1; G34E; 0
LDSEIHSGAT

SEQ ID NO: 15279 - protein, 10 aa, Homo sapiens
  Table A; HLA-A*68:02; CTNNB1; G34E; 0
LDSEIHSGAT

SEQ ID NO: 15280 - protein, 10 aa, Homo sapiens
  Table A; HLA-B*48:01; CTNNB1; G34E; 0
LDSEIHSGAT

SEQ ID NO: 15281 - protein, 8 aa, Homo sapiens
  Table A; HLA-A*02:01; CTNNB1; S37A; 1
LDSGIHAG

SEQ ID NO: 15282 - protein, 8 aa, Homo sapiens
  Table A; HLA-A*11:01; CTNNB1; S37A; 1
LDSGIHAG

SEQ ID NO: 15283 - protein, 8 aa, Homo sapiens
  Table A; HLA-B*37:01; CTNNB1; S37A; 0
LDSGIHAG

SEQ ID NO: 15284 - protein, 8 aa, Homo sapiens
  Table A; HLA-C*08:03; CTNNB1; S37A; 0
LDSGIHAG

SEQ ID NO: 15285 - protein, 9 aa, Homo sapiens
  Table A; HLA-A*02:01; CTNNB1; S37A; 1
LDSGIHAGA

SEQ ID NO: 15286 - protein, 9 aa, Homo sapiens
  Table A; HLA-A*02:03; CTNNB1; S37A; 0
LDSGIHAGA

SEQ ID NO: 15287 - protein, 9 aa, Homo sapiens
  Table A; HLA-A*02:05; CTNNB1; S37A; 0
LDSGIHAGA

SEQ ID NO: 15288 - protein, 9 aa, Homo sapiens
  Table A; HLA-A*02:08; CTNNB1; S37A; 0
LDSGIHAGA

SEQ ID NO: 15289 - protein, 9 aa, Homo sapiens
  Table A; HLA-A*30:01; CTNNB1; S37A; 0
LDSGIHAGA

SEQ ID NO: 15290 - protein, 9 aa, Homo sapiens
  Table A; HLA-A*31:01; CTNNB1; S37A; 0
LDSGIHAGA

SEQ ID NO: 15291 - protein, 9 aa, Homo sapiens
  Table A; HLA-A*68:01; CTNNB1; S37A; 0
LDSGIHAGA

SEQ ID NO: 15292 - protein, 9 aa, Homo sapiens
  Table A; HLA-A*68:02; CTNNB1; S37A; 0
LDSGIHAGA

SEQ ID NO: 15293 - protein, 9 aa, Homo sapiens
  Table A; HLA-B*08:01; CTNNB1; S37A; 1
LDSGIHAGA

SEQ ID NO: 15294 - protein, 9 aa, Homo sapiens
  Table A; HLA-B*15:10; CTNNB1; S37A; 0
LDSGIHAGA

SEQ ID NO: 15295 - protein, 9 aa, Homo sapiens
  Table A; HLA-B*27:05; CTNNB1; S37A; 0
LDSGIHAGA

SEQ ID NO: 15296 - protein, 9 aa, Homo sapiens
  Table A; HLA-B*37:01; CTNNB1; S37A; 0
LDSGIHAGA

SEQ ID NO: 15297 - protein, 9 aa, Homo sapiens
  Table A; HLA-B*39:06; CTNNB1; S37A; 0
LDSGIHAGA

SEQ ID NO: 15298 - protein, 9 aa, Homo sapiens
  Table A; HLA-B*40:02; CTNNB1; S37A; 0
LDSGIHAGA

SEQ ID NO: 15299 - protein, 9 aa, Homo sapiens
  Table A; HLA-B*40:06; CTNNB1; S37A; 0
LDSGIHAGA

SEQ ID NO: 15300 - protein, 9 aa, Homo sapiens
  Table A; HLA-B*41:02; CTNNB1; S37A; 0
LDSGIHAGA

SEQ ID NO: 15301 - protein, 9 aa, Homo sapiens
  Table A; HLA-B*48:01; CTNNB1; S37A; 0
LDSGIHAGA

SEQ ID NO: 15302 - protein, 9 aa, Homo sapiens
  Table A; HLA-B*50:01; CTNNB1; S37A; 0
LDSGIHAGA

SEQ ID NO: 15303 - protein, 9 aa, Homo sapiens
  Table A; HLA-B*54:01; CTNNB1; S37A; 0
LDSGIHAGA

SEQ ID NO: 15304 - protein, 9 aa, Homo sapiens
  Table A; HLA-B*55:01; CTNNB1; S37A; 0
LDSGIHAGA

SEQ ID NO: 15305 - protein, 9 aa, Homo sapiens
  Table A; HLA-B*56:01; CTNNB1; S37A; 0
LDSGIHAGA

SEQ ID NO: 15306 - protein, 9 aa, Homo sapiens
  Table A; HLA-C*08:03; CTNNB1; S37A; 0
LDSGIHAGA

SEQ ID NO: 15307 - protein, 10 aa, Homo sapiens
  Table A; HLA-A*68:02; CTNNB1; S37A; 0
LDSGIHAGAT

SEQ ID NO: 15308 - protein, 10 aa, Homo sapiens
  Table A; HLA-B*27:05; CTNNB1; S37A; 0
LDSGIHAGAT

SEQ ID NO: 15309 - protein, 10 aa, Homo sapiens
  Table A; HLA-B*48:01; CTNNB1; S37A; 0
LDSGIHAGAT

SEQ ID NO: 15310 - protein, 10 aa, Homo sapiens
  Table A; HLA-C*08:03; CTNNB1; S37A; 0
LDSGIHAGAT

SEQ ID NO: 15311 - protein, 8 aa, Homo sapiens
  Table A; HLA-A*02:01; CTNNB1; S37C; 1
LDSGIHCG

SEQ ID NO: 15312 - protein, 8 aa, Homo sapiens
  Table A; HLA-C*08:03; CTNNB1; S37C; 0
LDSGIHCG

SEQ ID NO: 15313 - protein, 9 aa, Homo sapiens
  Table A; HLA-A*02:01; CTNNB1; S37C; 1
LDSGIHCGA

SEQ ID NO: 15314 - protein, 9 aa, Homo sapiens
  Table A; HLA-A*68:01; CTNNB1; S37C; 1
LDSGIHCGA

SEQ ID NO: 15315 - protein, 9 aa, Homo sapiens
  Table A; HLA-A*68:02; CTNNB1; S37C; 0
LDSGIHCGA

SEQ ID NO: 15316 - protein, 9 aa, Homo sapiens
  Table A; HLA-B*27:05; CTNNB1; S37C; 1
LDSGIHCGA

SEQ ID NO: 15317 - protein, 9 aa, Homo sapiens
  Table A; HLA-B*37:01; CTNNB1; S37C; 0
LDSGIHCGA

SEQ ID NO: 15318 - protein, 9 aa, Homo sapiens
  Table A; HLA-B*40:06; CTNNB1; S37C; 0
LDSGIHCGA

SEQ ID NO: 15319 - protein, 9 aa, Homo sapiens
  Table A; HLA-B*50:01; CTNNB1; S37C; 0
LDSGIHCGA

SEQ ID NO: 15320 - protein, 9 aa, Homo sapiens
  Table A; HLA-B*54:01; CTNNB1; S37C; 0
LDSGIHCGA

SEQ ID NO: 15321 - protein, 9 aa, Homo sapiens
  Table A; HLA-A*02:01; CTNNB1; S37F; 1
LDSGIHFGA

SEQ ID NO: 15322 - protein, 9 aa, Homo sapiens
  Table A; HLA-A*30:01; CTNNB1; S37F; 0
LDSGIHFGA

SEQ ID NO: 15323 - protein, 9 aa, Homo sapiens
  Table A; HLA-A*68:01; CTNNB1; S37F; 1
LDSGIHFGA

SEQ ID NO: 15324 - protein, 9 aa, Homo sapiens
  Table A; HLA-A*68:02; CTNNB1; S37F; 0
LDSGIHFGA

SEQ ID NO: 15325 - protein, 9 aa, Homo sapiens
  Table A; HLA-B*27:05; CTNNB1; S37F; 1
LDSGIHFGA

SEQ ID NO: 15326 - protein, 9 aa, Homo sapiens
  Table A; HLA-B*37:01; CTNNB1; S37F; 0
LDSGIHFGA

SEQ ID NO: 15327 - protein, 9 aa, Homo sapiens
  Table A; HLA-B*39:06; CTNNB1; S37F; 0
LDSGIHFGA

SEQ ID NO: 15328 - protein, 9 aa, Homo sapiens
  Table A; HLA-B*40:02; CTNNB1; S37F; 0
LDSGIHFGA

SEQ ID NO: 15329 - protein, 9 aa, Homo sapiens
  Table A; HLA-B*40:06; CTNNB1; S37F; 0
LDSGIHFGA

SEQ ID NO: 15330 - protein, 9 aa, Homo sapiens
  Table A; HLA-B*48:01; CTNNB1; S37F; 0
LDSGIHFGA

SEQ ID NO: 15331 - protein, 9 aa, Homo sapiens
  Table A; HLA-B*50:01; CTNNB1; S37F; 0
LDSGIHFGA

SEQ ID NO: 15332 - protein, 9 aa, Homo sapiens
  Table A; HLA-B*54:01; CTNNB1; S37F; 0
LDSGIHFGA

SEQ ID NO: 15333 - protein, 10 aa, Homo sapiens
  Table A; HLA-A*68:01; CTNNB1; S37F; 1
LDSGIHFGAT

SEQ ID NO: 15334 - protein, 10 aa, Homo sapiens
  Table A; HLA-A*68:02; CTNNB1; S37F; 0
LDSGIHFGAT

SEQ ID NO: 15335 - protein, 10 aa, Homo sapiens
  Table A; HLA-B*48:01; CTNNB1; S37F; 0
LDSGIHFGAT

SEQ ID NO: 15336 - protein, 8 aa, Homo sapiens
  Table A; HLA-C*08:03; CTNNB1; S37P; 0
LDSGIHPG

SEQ ID NO: 15337 - protein, 9 aa, Homo sapiens
  Table A; HLA-A*02:01; CTNNB1; S37P; 1
LDSGIHPGA

SEQ ID NO: 15338 - protein, 9 aa, Homo sapiens
  Table A; HLA-A*02:03; CTNNB1; S37P; 0
LDSGIHPGA

SEQ ID NO: 15339 - protein, 9 aa, Homo sapiens
  Table A; HLA-A*02:05; CTNNB1; S37P; 0
LDSGIHPGA

SEQ ID NO: 15340 - protein, 9 aa, Homo sapiens
  Table A; HLA-A*30:01; CTNNB1; S37P; 0
LDSGIHPGA

SEQ ID NO: 15341 - protein, 9 aa, Homo sapiens
  Table A; HLA-A*68:01; CTNNB1; S37P; 0
LDSGIHPGA

SEQ ID NO: 15342 - protein, 9 aa, Homo sapiens
  Table A; HLA-A*68:02; CTNNB1; S37P; 0
LDSGIHPGA

SEQ ID NO: 15343 - protein, 9 aa, Homo sapiens
  Table A; HLA-B*08:01; CTNNB1; S37P; 1
LDSGIHPGA

SEQ ID NO: 15344 - protein, 9 aa, Homo sapiens
  Table A; HLA-B*15:10; CTNNB1; S37P; 0
LDSGIHPGA

SEQ ID NO: 15345 - protein, 9 aa, Homo sapiens
  Table A; HLA-B*27:05; CTNNB1; S37P; 0
LDSGIHPGA

SEQ ID NO: 15346 - protein, 9 aa, Homo sapiens
  Table A; HLA-B*37:01; CTNNB1; S37P; 0
LDSGIHPGA

SEQ ID NO: 15347 - protein, 9 aa, Homo sapiens
  Table A; HLA-B*39:06; CTNNB1; S37P; 0
LDSGIHPGA

SEQ ID NO: 15348 - protein, 9 aa, Homo sapiens
  Table A; HLA-B*40:02; CTNNB1; S37P; 0
LDSGIHPGA

SEQ ID NO: 15349 - protein, 9 aa, Homo sapiens
  Table A; HLA-B*40:06; CTNNB1; S37P; 0
LDSGIHPGA

SEQ ID NO: 15350 - protein, 9 aa, Homo sapiens
  Table A; HLA-B*41:02; CTNNB1; S37P; 0
LDSGIHPGA

SEQ ID NO: 15351 - protein, 9 aa, Homo sapiens
  Table A; HLA-B*44:05; CTNNB1; S37P; 0
LDSGIHPGA

SEQ ID NO: 15352 - protein, 9 aa, Homo sapiens
  Table A; HLA-B*48:01; CTNNB1; S37P; 0
LDSGIHPGA

SEQ ID NO: 15353 - protein, 9 aa, Homo sapiens
  Table A; HLA-B*50:01; CTNNB1; S37P; 0
LDSGIHPGA

SEQ ID NO: 15354 - protein, 9 aa, Homo sapiens
  Table A; HLA-B*54:01; CTNNB1; S37P; 0
LDSGIHPGA

SEQ ID NO: 15355 - protein, 9 aa, Homo sapiens
  Table A; HLA-B*55:01; CTNNB1; S37P; 0
LDSGIHPGA

SEQ ID NO: 15356 - protein, 9 aa, Homo sapiens
  Table A; HLA-B*55:02; CTNNB1; S37P; 0
LDSGIHPGA

SEQ ID NO: 15357 - protein, 9 aa, Homo sapiens
  Table A; HLA-B*56:01; CTNNB1; S37P; 0
LDSGIHPGA

SEQ ID NO: 15358 - protein, 9 aa, Homo sapiens
  Table A; HLA-C*08:03; CTNNB1; S37P; 0
LDSGIHPGA

SEQ ID NO: 15359 - protein, 10 aa, Homo sapiens
  Table A; HLA-A*02:01; CTNNB1; S37P; 1
LDSGIHPGAT

SEQ ID NO: 15360 - protein, 10 aa, Homo sapiens
  Table A; HLA-A*68:01; CTNNB1; S37P; 0
LDSGIHPGAT

SEQ ID NO: 15361 - protein, 10 aa, Homo sapiens
  Table A; HLA-A*68:02; CTNNB1; S37P; 0
LDSGIHPGAT

SEQ ID NO: 15362 - protein, 10 aa, Homo sapiens
  Table A; HLA-B*48:01; CTNNB1; S37P; 0
LDSGIHPGAT

SEQ ID NO: 15363 - protein, 10 aa, Homo sapiens
  Table A; HLA-C*08:03; CTNNB1; S37P; 0
LDSGIHPGAT

SEQ ID NO: 15364 - protein, 9 aa, Homo sapiens
  Table A; HLA-B*50:01; CTNNB1; G34R; 0
LDSRIHSGA

SEQ ID NO: 15365 - protein, 8 aa, Homo sapiens
  Table A; HLA-B*37:01; CTNNB1; G34V; 0
LDSVIHSG

SEQ ID NO: 15366 - protein, 9 aa, Homo sapiens
  Table A; HLA-A*02:01; CTNNB1; G34V; 1
LDSVIHSGA

SEQ ID NO: 15367 - protein, 9 aa, Homo sapiens
  Table A; HLA-A*02:05; CTNNB1; G34V; 0
LDSVIHSGA

SEQ ID NO: 15368 - protein, 9 aa, Homo sapiens
  Table A; HLA-A*31:01; CTNNB1; G34V; 0
LDSVIHSGA

SEQ ID NO: 15369 - protein, 9 aa, Homo sapiens
  Table A; HLA-A*68:01; CTNNB1; G34V; 0
LDSVIHSGA

SEQ ID NO: 15370 - protein, 9 aa, Homo sapiens
  Table A; HLA-A*68:02; CTNNB1; G34V; 0
LDSVIHSGA

SEQ ID NO: 15371 - protein, 9 aa, Homo sapiens
  Table A; HLA-B*37:01; CTNNB1; G34V; 0
LDSVIHSGA

SEQ ID NO: 15372 - protein, 9 aa, Homo sapiens
  Table A; HLA-B*40:02; CTNNB1; G34V; 0
LDSVIHSGA

SEQ ID NO: 15373 - protein, 9 aa, Homo sapiens
  Table A; HLA-B*40:06; CTNNB1; G34V; 0
LDSVIHSGA

SEQ ID NO: 15374 - protein, 9 aa, Homo sapiens
  Table A; HLA-B*48:01; CTNNB1; G34V; 0
LDSVIHSGA

SEQ ID NO: 15375 - protein, 9 aa, Homo sapiens
  Table A; HLA-B*50:01; CTNNB1; G34V; 0
LDSVIHSGA

SEQ ID NO: 15376 - protein, 9 aa, Homo sapiens
  Table A; HLA-B*54:01; CTNNB1; G34V; 0
LDSVIHSGA

SEQ ID NO: 15377 - protein, 10 aa, Homo sapiens
  Table A; HLA-A*68:01; CTNNB1; G34V; 0
LDSVIHSGAT

SEQ ID NO: 15378 - protein, 9 aa, Homo sapiens
  Table A; HLA-A*01:01; KRAS; Q61H; 1
LDTAGHEEY

SEQ ID NO: 15379 - protein, 9 aa, Homo sapiens
  Table A; HLA-B*15:01; KRAS; Q61H; 1
LDTAGHEEY

SEQ ID NO: 15380 - protein, 9 aa, Homo sapiens
  Table A; HLA-B*15:02; KRAS; Q61H; 0
LDTAGHEEY

SEQ ID NO: 15381 - protein, 9 aa, Homo sapiens
  Table A; HLA-B*18:01; KRAS; Q61H; 1
LDTAGHEEY

SEQ ID NO: 15382 - protein, 9 aa, Homo sapiens
  Table A; HLA-B*27:02; KRAS; Q61H; 0
LDTAGHEEY

SEQ ID NO: 15383 - protein, 9 aa, Homo sapiens
  Table A; HLA-B*35:01; KRAS; Q61H; 1
LDTAGHEEY

SEQ ID NO: 15384 - protein, 9 aa, Homo sapiens
  Table A; HLA-B*35:08; KRAS; Q61H; 0
LDTAGHEEY

SEQ ID NO: 15385 - protein, 9 aa, Homo sapiens
  Table A; HLA-B*48:01; KRAS; Q61H; 0
LDTAGHEEY

SEQ ID NO: 15386 - protein, 9 aa, Homo sapiens
  Table A; HLA-B*58:01; KRAS; Q61H; 0
LDTAGHEEY

SEQ ID NO: 15387 - protein, 9 aa, Homo sapiens
  Table A; HLA-C*03:02; KRAS; Q61H; 0
LDTAGHEEY

SEQ ID NO: 15388 - protein, 9 aa, Homo sapiens
  Table A; HLA-A*01:01; NRAS; Q61H; 1
LDTAGHEEY

SEQ ID NO: 15389 - protein, 9 aa, Homo sapiens
  Table A; HLA-B*15:01; NRAS; Q61H; 1
LDTAGHEEY

SEQ ID NO: 15390 - protein, 9 aa, Homo sapiens
  Table A; HLA-B*15:02; NRAS; Q61H; 0
LDTAGHEEY

SEQ ID NO: 15391 - protein, 9 aa, Homo sapiens
  Table A; HLA-B*18:01; NRAS; Q61H; 1
LDTAGHEEY

SEQ ID NO: 15392 - protein, 9 aa, Homo sapiens
  Table A; HLA-B*27:02; NRAS; Q61H; 0
LDTAGHEEY

SEQ ID NO: 15393 - protein, 9 aa, Homo sapiens
  Table A; HLA-B*35:01; NRAS; Q61H; 1
LDTAGHEEY

SEQ ID NO: 15394 - protein, 9 aa, Homo sapiens
  Table A; HLA-B*35:08; NRAS; Q61H; 0
LDTAGHEEY

SEQ ID NO: 15395 - protein, 9 aa, Homo sapiens
  Table A; HLA-B*39:01; NRAS; Q61H; 0
LDTAGHEEY

SEQ ID NO: 15396 - protein, 9 aa, Homo sapiens
  Table A; HLA-B*48:01; NRAS; Q61H; 0
LDTAGHEEY

SEQ ID NO: 15397 - protein, 9 aa, Homo sapiens
  Table A; HLA-B*58:01; NRAS; Q61H; 0
LDTAGHEEY

SEQ ID NO: 15398 - protein, 9 aa, Homo sapiens
  Table A; HLA-C*03:02; NRAS; Q61H; 0
LDTAGHEEY

SEQ ID NO: 15399 - protein, 9 aa, Homo sapiens
  Table A; HLA-C*16:04; NRAS; Q61H; 0
LDTAGHEEY

SEQ ID NO: 15400 - protein, 9 aa, Homo sapiens
  Table A; HLA-B*35:01; HRAS; Q61K; 0
LDTAGKEEY

SEQ ID NO: 15401 - protein, 9 aa, Homo sapiens
  Table A; HLA-B*35:08; HRAS; Q61K; 0
LDTAGKEEY

SEQ ID NO: 15402 - protein, 9 aa, Homo sapiens
  Table A; HLA-B*15:01; NRAS; Q61K; 1
LDTAGKEEY

SEQ ID NO: 15403 - protein, 9 aa, Homo sapiens
  Table A; HLA-B*18:01; NRAS; Q61K; 1
LDTAGKEEY

SEQ ID NO: 15404 - protein, 9 aa, Homo sapiens
  Table A; HLA-B*35:01; NRAS; Q61K; 1
LDTAGKEEY

SEQ ID NO: 15405 - protein, 9 aa, Homo sapiens
  Table A; HLA-B*35:08; NRAS; Q61K; 0
LDTAGKEEY

SEQ ID NO: 15406 - protein, 9 aa, Homo sapiens
  Table A; HLA-B*58:01; NRAS; Q61K; 0
LDTAGKEEY

SEQ ID NO: 15407 - protein, 9 aa, Homo sapiens
  Table A; HLA-B*18:01; KRAS; Q61L; 0
LDTAGLEEY

SEQ ID NO: 15408 - protein, 9 aa, Homo sapiens
  Table A; HLA-B*35:01; KRAS; Q61L; 0
LDTAGLEEY

SEQ ID NO: 15409 - protein, 9 aa, Homo sapiens
  Table A; HLA-B*35:08; KRAS; Q61L; 0
LDTAGLEEY

SEQ ID NO: 15410 - protein, 9 aa, Homo sapiens
  Table A; HLA-B*18:01; NRAS; Q61L; 1
LDTAGLEEY

SEQ ID NO: 15411 - protein, 9 aa, Homo sapiens
  Table A; HLA-B*35:01; NRAS; Q61L; 1
LDTAGLEEY

SEQ ID NO: 15412 - protein, 9 aa, Homo sapiens
  Table A; HLA-B*35:08; NRAS; Q61L; 0
LDTAGLEEY

SEQ ID NO: 15413 - protein, 9 aa, Homo sapiens
  Table A; HLA-B*15:01; KRAS; Q61R; 0
LDTAGREEY

SEQ ID NO: 15414 - protein, 9 aa, Homo sapiens
  Table A; HLA-B*35:01; KRAS; Q61R; 0
LDTAGREEY

SEQ ID NO: 15415 - protein, 9 aa, Homo sapiens
  Table A; HLA-B*35:08; KRAS; Q61R; 0
LDTAGREEY

SEQ ID NO: 15416 - protein, 9 aa, Homo sapiens
  Table A; HLA-C*03:02; KRAS; Q61R; 0
LDTAGREEY

SEQ ID NO: 15417 - protein, 9 aa, Homo sapiens
  Table A; HLA-B*15:01; NRAS; Q61R; 1
LDTAGREEY

SEQ ID NO: 15418 - protein, 9 aa, Homo sapiens
  Table A; HLA-B*18:01; NRAS; Q61R; 1
LDTAGREEY

SEQ ID NO: 15419 - protein, 9 aa, Homo sapiens
  Table A; HLA-B*35:01; NRAS; Q61R; 1
LDTAGREEY

SEQ ID NO: 15420 - protein, 9 aa, Homo sapiens
  Table A; HLA-B*35:08; NRAS; Q61R; 0
LDTAGREEY

SEQ ID NO: 15421 - protein, 9 aa, Homo sapiens
  Table A; HLA-C*03:02; NRAS; Q61R; 0
LDTAGREEY

SEQ ID NO: 15422 - protein, 8 aa, Homo sapiens
  Table A; HLA-A*02:01; CTNNB1; S33Y; 1
LDYGIHSG

SEQ ID NO: 15423 - protein, 8 aa, Homo sapiens
  Table A; HLA-A*11:01; CTNNB1; S33Y; 1
LDYGIHSG

SEQ ID NO: 15424 - protein, 8 aa, Homo sapiens
  Table A; HLA-A*31:01; CTNNB1; S33Y; 0
LDYGIHSG

SEQ ID NO: 15425 - protein, 8 aa, Homo sapiens
  Table A; HLA-A*68:01; CTNNB1; S33Y; 0
LDYGIHSG

SEQ ID NO: 15426 - protein, 8 aa, Homo sapiens
  Table A; HLA-B*08:01; CTNNB1; S33Y; 1
LDYGIHSG

SEQ ID NO: 15427 - protein, 8 aa, Homo sapiens
  Table A; HLA-B*27:05; CTNNB1; S33Y; 1
LDYGIHSG

SEQ ID NO: 15428 - protein, 8 aa, Homo sapiens
  Table A; HLA-B*40:02; CTNNB1; S33Y; 0
LDYGIHSG

SEQ ID NO: 15429 - protein, 8 aa, Homo sapiens
  Table A; HLA-B*48:01; CTNNB1; S33Y; 0
LDYGIHSG

SEQ ID NO: 15430 - protein, 8 aa, Homo sapiens
  Table A; HLA-B*54:01; CTNNB1; S33Y; 0
LDYGIHSG

SEQ ID NO: 15431 - protein, 8 aa, Homo sapiens
  Table A; HLA-C*08:03; CTNNB1; S33Y; 0
LDYGIHSG

SEQ ID NO: 15432 - protein, 9 aa, Homo sapiens
  Table A; HLA-A*02:03; CTNNB1; S33Y; 0
LDYGIHSGA

SEQ ID NO: 15433 - protein, 9 aa, Homo sapiens
  Table A; HLA-A*02:05; CTNNB1; S33Y; 0
LDYGIHSGA

SEQ ID NO: 15434 - protein, 9 aa, Homo sapiens
  Table A; HLA-A*02:07; CTNNB1; S33Y; 0
LDYGIHSGA

SEQ ID NO: 15435 - protein, 9 aa, Homo sapiens
  Table A; HLA-A*30:01; CTNNB1; S33Y; 0
LDYGIHSGA

SEQ ID NO: 15436 - protein, 9 aa, Homo sapiens
  Table A; HLA-A*68:01; CTNNB1; S33Y; 0
LDYGIHSGA

SEQ ID NO: 15437 - protein, 9 aa, Homo sapiens
  Table A; HLA-A*68:02; CTNNB1; S33Y; 0
LDYGIHSGA

SEQ ID NO: 15438 - protein, 9 aa, Homo sapiens
  Table A; HLA-B*08:01; CTNNB1; S33Y; 1
LDYGIHSGA

SEQ ID NO: 15439 - protein, 9 aa, Homo sapiens
  Table A; HLA-B*14:02; CTNNB1; S33Y; 0
LDYGIHSGA

SEQ ID NO: 15440 - protein, 9 aa, Homo sapiens
  Table A; HLA-B*18:01; CTNNB1; S33Y; 1
LDYGIHSGA

SEQ ID NO: 15441 - protein, 9 aa, Homo sapiens
  Table A; HLA-B*37:01; CTNNB1; S33Y; 0
LDYGIHSGA

SEQ ID NO: 15442 - protein, 9 aa, Homo sapiens
  Table A; HLA-B*39:06; CTNNB1; S33Y; 0
LDYGIHSGA

SEQ ID NO: 15443 - protein, 9 aa, Homo sapiens
  Table A; HLA-B*40:02; CTNNB1; S33Y; 0
LDYGIHSGA

SEQ ID NO: 15444 - protein, 9 aa, Homo sapiens
  Table A; HLA-B*40:06; CTNNB1; S33Y; 0
LDYGIHSGA

SEQ ID NO: 15445 - protein, 9 aa, Homo sapiens
  Table A; HLA-B*48:01; CTNNB1; S33Y; 0
LDYGIHSGA

SEQ ID NO: 15446 - protein, 9 aa, Homo sapiens
  Table A; HLA-B*49:01; CTNNB1; S33Y; 0
LDYGIHSGA

SEQ ID NO: 15447 - protein, 9 aa, Homo sapiens
  Table A; HLA-B*50:01; CTNNB1; S33Y; 0
LDYGIHSGA

SEQ ID NO: 15448 - protein, 9 aa, Homo sapiens
  Table A; HLA-B*54:01; CTNNB1; S33Y; 0
LDYGIHSGA

SEQ ID NO: 15449 - protein, 10 aa, Homo sapiens
  Table A; HLA-A*02:03; CTNNB1; S33Y; 0
LDYGIHSGAT

SEQ ID NO: 15450 - protein, 10 aa, Homo sapiens
  Table A; HLA-A*68:01; CTNNB1; S33Y; 0
LDYGIHSGAT

SEQ ID NO: 15451 - protein, 10 aa, Homo sapiens
  Table A; HLA-A*68:02; CTNNB1; S33Y; 0
LDYGIHSGAT

SEQ ID NO: 15452 - protein, 10 aa, Homo sapiens
  Table A; HLA-B*08:01; CTNNB1; S33Y; 1
LDYGIHSGAT

SEQ ID NO: 15453 - protein, 10 aa, Homo sapiens
  Table A; HLA-B*40:02; CTNNB1; S33Y; 0
LDYGIHSGAT

SEQ ID NO: 15454 - protein, 10 aa, Homo sapiens
  Table A; HLA-B*48:01; CTNNB1; S33Y; 0
LDYGIHSGAT

SEQ ID NO: 15455 - protein, 10 aa, Homo sapiens
  Table A; HLA-B*50:01; CTNNB1; S33Y; 0
LDYGIHSGAT

SEQ ID NO: 15456 - protein, 10 aa, Homo sapiens
  Table A; HLA-C*07:04; CTNNB1; S33Y; 0
LDYGIHSGAT

SEQ ID NO: 15457 - protein, 10 aa, Homo sapiens
  Table A; HLA-C*08:03; CTNNB1; S33Y; 0
LDYGIHSGAT

SEQ ID NO: 15458 - protein, 10 aa, Homo sapiens
  Table A; HLA-A*11:01; MAP2K1; K57N; 0
LEAFLTQNQK

SEQ ID NO: 15459 - protein, 10 aa, Homo sapiens
  Table A; HLA-A*68:02; MAP2K1; K57N; 0
LEAFLTQNQK

SEQ ID NO: 15460 - protein, 10 aa, Homo sapiens
  Table A; HLA-B*27:02; MAP2K1; K57N; 0
LEAFLTQNQK

SEQ ID NO: 15461 - protein, 11 aa, Homo sapiens
  Table A; HLA-B*49:01; MAP2K1; K57N; 0
LEAFLTQNQKV

SEQ ID NO: 15462 - protein, 9 aa, Homo sapiens
  Table A; HLA-A*30:01; PIK3CA; R38H; 0
LECLHEATL

SEQ ID NO: 15463 - protein, 9 aa, Homo sapiens
  Table A; HLA-B*40:01; PIK3CA; R38H; 1
LECLHEATL

SEQ ID NO: 15464 - protein, 9 aa, Homo sapiens
  Table A; HLA-B*40:02; PIK3CA; R38H; 0
LECLHEATL

SEQ ID NO: 15465 - protein, 9 aa, Homo sapiens
  Table A; HLA-B*41:02; PIK3CA; R38H; 0
LECLHEATL

SEQ ID NO: 15466 - protein, 9 aa, Homo sapiens
  Table A; HLA-B*44:05; PIK3CA; R38H; 0
LECLHEATL

SEQ ID NO: 15467 - protein, 9 aa, Homo sapiens
  Table A; HLA-B*49:01; PIK3CA; R38H; 0
LECLHEATL

SEQ ID NO: 15468 - protein, 9 aa, Homo sapiens
  Table A; HLA-A*23:01; RAC1; A159V; 0
LECSVLTQR

SEQ ID NO: 15469 - protein, 9 aa, Homo sapiens
  Table A; HLA-A*31:01; RAC1; A159V; 0
LECSVLTQR

SEQ ID NO: 15470 - protein, 9 aa, Homo sapiens
  Table A; HLA-A*33:01; RAC1; A159V; 0
LECSVLTQR

SEQ ID NO: 15471 - protein, 9 aa, Homo sapiens
  Table A; HLA-A*33:03; RAC1; A159V; 0
LECSVLTQR

SEQ ID NO: 15472 - protein, 9 aa, Homo sapiens
  Table A; HLA-A*68:01; RAC1; A159V; 0
LECSVLTQR

SEQ ID NO: 15473 - protein, 9 aa, Homo sapiens
  Table A; HLA-A*68:02; RAC1; A159V; 0
LECSVLTQR

SEQ ID NO: 15474 - protein, 9 aa, Homo sapiens
  Table A; HLA-B*27:02; RAC1; A159V; 0
LECSVLTQR

SEQ ID NO: 15475 - protein, 9 aa, Homo sapiens
  Table A; HLA-B*27:05; RAC1; A159V; 0
LECSVLTQR

SEQ ID NO: 15476 - protein, 11 aa, Homo sapiens
  Table A; HLA-A*68:01; TP53; G266E; 0
LEDSSGNLLER

SEQ ID NO: 15477 - protein, 11 aa, Homo sapiens
  Table A; HLA-B*27:02; TP53; G266E; 0
LEDSSGNLLER

SEQ ID NO: 15478 - protein, 10 aa, Homo sapiens
  Table A; HLA-B*27:02; TP53; G266R; 0
LEDSSGNLLR

SEQ ID NO: 15479 - protein, 10 aa, Homo sapiens
  Table A; HLA-B*40:01; TP53; G266V; 0
LEDSSGNLLV

SEQ ID NO: 15480 - protein, 10 aa, Homo sapiens
  Table A; HLA-B*49:01; TP53; G266V; 0
LEDSSGNLLV

SEQ ID NO: 15481 - protein, 11 aa, Homo sapiens
  Table A; HLA-A*68:01; TP53; G266V; 0
LEDSSGNLLVR

SEQ ID NO: 15482 - protein, 11 aa, Homo sapiens
  Table A; HLA-B*27:02; TP53; G266V; 0
LEDSSGNLLVR

SEQ ID NO: 15483 - protein, 8 aa, Homo sapiens
  Table A; HLA-B*40:01; TP53; G262V; 0
LEDSSVNL

SEQ ID NO: 15484 - protein, 8 aa, Homo sapiens
  Table A; HLA-B*40:02; TP53; G262V; 0
LEDSSVNL

SEQ ID NO: 15485 - protein, 8 aa, Homo sapiens
  Table A; HLA-B*44:05; TP53; G262V; 0
LEDSSVNL

SEQ ID NO: 15486 - protein, 8 aa, Homo sapiens
  Table A; HLA-B*49:01; TP53; G262V; 0
LEDSSVNL

SEQ ID NO: 15487 - protein, 8 aa, Homo sapiens
  Table A; HLA-C*08:02; TP53; G262V; 0
LEDSSVNL

SEQ ID NO: 15488 - protein, 9 aa, Homo sapiens
  Table A; HLA-A*02:07; TP53; G262V; 0
LEDSSVNLL

SEQ ID NO: 15489 - protein, 9 aa, Homo sapiens
  Table A; HLA-A*30:01; TP53; G262V; 0
LEDSSVNLL

SEQ ID NO: 15490 - protein, 9 aa, Homo sapiens
  Table A; HLA-B*38:01; TP53; G262V; 0
LEDSSVNLL

SEQ ID NO: 15491 - protein, 9 aa, Homo sapiens
  Table A; HLA-B*40:01; TP53; G262V; 0
LEDSSVNLL

SEQ ID NO: 15492 - protein, 9 aa, Homo sapiens
  Table A; HLA-B*40:02; TP53; G262V; 0
LEDSSVNLL

SEQ ID NO: 15493 - protein, 9 aa, Homo sapiens
  Table A; HLA-B*41:02; TP53; G262V; 0
LEDSSVNLL

SEQ ID NO: 15494 - protein, 9 aa, Homo sapiens
  Table A; HLA-B*44:05; TP53; G262V; 0
LEDSSVNLL

SEQ ID NO: 15495 - protein, 9 aa, Homo sapiens
  Table A; HLA-B*49:01; TP53; G262V; 0
LEDSSVNLL

SEQ ID NO: 15496 - protein, 9 aa, Homo sapiens
  Table A; HLA-B*58:01; TP53; G262V; 0
LEDSSVNLL

SEQ ID NO: 15497 - protein, 9 aa, Homo sapiens
  Table A; HLA-C*05:01; TP53; G262V; 1
LEDSSVNLL

SEQ ID NO: 15498 - protein, 9 aa, Homo sapiens
  Table A; HLA-C*08:02; TP53; G262V; 0
LEDSSVNLL

SEQ ID NO: 15499 - protein, 11 aa, Homo sapiens
  Table A; HLA-B*27:02; TP53; G262V; 0
LEDSSVNLLGR

SEQ ID NO: 15500 - protein, 9 aa, Homo sapiens
  Table A; HLA-B*50:01; FAT1; D3120N; 0
LEDVNNNAP

SEQ ID NO: 15501 - protein, 11 aa, Homo sapiens
  Table A; HLA-B*44:05; FAT1; D3120N; 0
LEDVNNNAPEF

SEQ ID NO: 15502 - protein, 10 aa, Homo sapiens
  Table A; HLA-B*40:01; RGPD3; N756D; 1
LEDYSEGGPL

SEQ ID NO: 15503 - protein, 8 aa, Homo sapiens
  Table A; HLA-A*02:05; GRIN2A; S1425L; 0
LEHVMPYA

SEQ ID NO: 15504 - protein, 8 aa, Homo sapiens
  Table A; HLA-B*40:06; GRIN2A; S1425L; 0
LEHVMPYA

SEQ ID NO: 15505 - protein, 8 aa, Homo sapiens
  Table A; HLA-B*50:01; GRIN2A; S1425L; 0
LEHVMPYA

SEQ ID NO: 15506 - protein, 9 aa, Homo sapiens
  Table A; HLA-A*02:05; GRIN2A; S1425L; 0
LEHVMPYAA

SEQ ID NO: 15507 - protein, 9 aa, Homo sapiens
  Table A; HLA-A*02:08; GRIN2A; S1425L; 0
LEHVMPYAA

SEQ ID NO: 15508 - protein, 9 aa, Homo sapiens
  Table A; HLA-B*18:01; GRIN2A; S1425L; 0
LEHVMPYAA

SEQ ID NO: 15509 - protein, 9 aa, Homo sapiens
  Table A; HLA-B*39:06; GRIN2A; S1425L; 0
LEHVMPYAA

SEQ ID NO: 15510 - protein, 9 aa, Homo sapiens
  Table A; HLA-B*40:02; GRIN2A; S1425L; 0
LEHVMPYAA

SEQ ID NO: 15511 - protein, 9 aa, Homo sapiens
  Table A; HLA-B*40:06; GRIN2A; S1425L; 0
LEHVMPYAA

SEQ ID NO: 15512 - protein, 9 aa, Homo sapiens
  Table A; HLA-B*50:01; GRIN2A; S1425L; 0
LEHVMPYAA

SEQ ID NO: 15513 - protein, 9 aa, Homo sapiens
  Table A; HLA-B*54:01; GRIN2A; S1425L; 0
LEHVMPYAA

SEQ ID NO: 15514 - protein, 8 aa, Homo sapiens
  Table A; HLA-B*40:06; CSMD3; S300F; 0
LEIEGFEP

SEQ ID NO: 15515 - protein, 8 aa, Homo sapiens
  Table A; HLA-B*50:01; CSMD3; S300F; 0
LEIEGFEP

SEQ ID NO: 15516 - protein, 9 aa, Homo sapiens
  Table A; HLA-A*02:05; CSMD3; S300F; 0
LEIEGFEPP

SEQ ID NO: 15517 - protein, 9 aa, Homo sapiens
  Table A; HLA-A*02:08; CSMD3; S300F; 0
LEIEGFEPP

SEQ ID NO: 15518 - protein, 9 aa, Homo sapiens
  Table A; HLA-B*40:06; CSMD3; S300F; 0
LEIEGFEPP

SEQ ID NO: 15519 - protein, 9 aa, Homo sapiens
  Table A; HLA-B*50:01; CSMD3; S300F; 0
LEIEGFEPP

SEQ ID NO: 15520 - protein, 11 aa, Homo sapiens
  Table A; HLA-B*49:01; CSMD3; S300F; 0
LEIEGFEPPTI

SEQ ID NO: 15521 - protein, 8 aa, Homo sapiens
  Table A; HLA-A*23:01; STAG2; R370Q; 0
LELFTSQF

SEQ ID NO: 15522 - protein, 8 aa, Homo sapiens
  Table A; HLA-B*15:01; STAG2; R370Q; 0
LELFTSQF

SEQ ID NO: 15523 - protein, 8 aa, Homo sapiens
  Table A; HLA-B*18:01; STAG2; R370Q; 0
LELFTSQF

SEQ ID NO: 15524 - protein, 8 aa, Homo sapiens
  Table A; HLA-B*37:01; STAG2; R370Q; 0
LELFTSQF

SEQ ID NO: 15525 - protein, 8 aa, Homo sapiens
  Table A; HLA-B*40:02; STAG2; R370Q; 0
LELFTSQF

SEQ ID NO: 15526 - protein, 8 aa, Homo sapiens
  Table A; HLA-B*44:05; STAG2; R370Q; 0
LELFTSQF

SEQ ID NO: 15527 - protein, 8 aa, Homo sapiens
  Table A; HLA-B*49:01; STAG2; R370Q; 0
LELFTSQF

SEQ ID NO: 15528 - protein, 9 aa, Homo sapiens
  Table A; HLA-A*23:01; BCORL1; K1207N; 0
LENKAKSSF

SEQ ID NO: 15529 - protein, 9 aa, Homo sapiens
  Table A; HLA-A*30:01; BCORL1; K1207N; 0
LENKAKSSF

SEQ ID NO: 15530 - protein, 9 aa, Homo sapiens
  Table A; HLA-B*07:02; BCORL1; K1207N; 1
LENKAKSSF

SEQ ID NO: 15531 - protein, 9 aa, Homo sapiens
  Table A; HLA-B*15:01; BCORL1; K1207N; 1
LENKAKSSF

SEQ ID NO: 15532 - protein, 9 aa, Homo sapiens
  Table A; HLA-B*18:01; BCORL1; K1207N; 1
LENKAKSSF

SEQ ID NO: 15533 - protein, 9 aa, Homo sapiens
  Table A; HLA-B*37:01; BCORL1; K1207N; 0
LENKAKSSF

SEQ ID NO: 15534 - protein, 9 aa, Homo sapiens
  Table A; HLA-B*41:02; BCORL1; K1207N; 0
LENKAKSSF

SEQ ID NO: 15535 - protein, 9 aa, Homo sapiens
  Table A; HLA-B*44:02; BCORL1; K1207N; 1
LENKAKSSF

SEQ ID NO: 15536 - protein, 9 aa, Homo sapiens
  Table A; HLA-B*44:03; BCORL1; K1207N; 1
LENKAKSSF

SEQ ID NO: 15537 - protein, 9 aa, Homo sapiens
  Table A; HLA-B*44:05; BCORL1; K1207N; 0
LENKAKSSF

SEQ ID NO: 15538 - protein, 8 aa, Homo sapiens
  Table A; HLA-B*37:01; MTOR; A2056V; 0
LEPLHVMM

SEQ ID NO: 15539 - protein, 9 aa, Homo sapiens
  Table A; HLA-A*30:01; CNTNAP2; G362E; 0
LEPSNVENL

SEQ ID NO: 15540 - protein, 9 aa, Homo sapiens
  Table A; HLA-B*40:01; CNTNAP2; G362E; 1
LEPSNVENL

SEQ ID NO: 15541 - protein, 9 aa, Homo sapiens
  Table A; HLA-B*40:02; CNTNAP2; G362E; 0
LEPSNVENL

SEQ ID NO: 15542 - protein, 9 aa, Homo sapiens
  Table A; HLA-B*41:02; CNTNAP2; G362E; 0
LEPSNVENL

SEQ ID NO: 15543 - protein, 9 aa, Homo sapiens
  Table A; HLA-B*44:05; CNTNAP2; G362E; 0
LEPSNVENL

SEQ ID NO: 15544 - protein, 11 aa, Homo sapiens
  Table A; HLA-B*44:03; CNTNAP2; G362E; 1
LEPSNVENLSF

SEQ ID NO: 15545 - protein, 11 aa, Homo sapiens
  Table A; HLA-B*44:05; CNTNAP2; G362E; 0
LEPSNVENLSF

SEQ ID NO: 15546 - protein, 8 aa, Homo sapiens
  Table A; HLA-A*30:01; TP53; G266E; 0
LERNSFEV

SEQ ID NO: 15547 - protein, 8 aa, Homo sapiens
  Table A; HLA-B*18:01; TP53; G266E; 0
LERNSFEV

SEQ ID NO: 15548 - protein, 8 aa, Homo sapiens
  Table A; HLA-B*40:02; TP53; G266E; 0
LERNSFEV

SEQ ID NO: 15549 - protein, 8 aa, Homo sapiens
  Table A; HLA-B*41:02; TP53; G266E; 0
LERNSFEV

SEQ ID NO: 15550 - protein, 8 aa, Homo sapiens
  Table A; HLA-B*49:01; TP53; G266E; 0
LERNSFEV

SEQ ID NO: 15551 - protein, 8 aa, Homo sapiens
  Table A; HLA-B*50:01; TP53; G266E; 0
LERNSFEV

SEQ ID NO: 15552 - protein, 9 aa, Homo sapiens
  Table A; HLA-A*30:01; TP53; G266E; 0
LERNSFEVR

SEQ ID NO: 15553 - protein, 9 aa, Homo sapiens
  Table A; HLA-A*31:01; TP53; G266E; 0
LERNSFEVR

SEQ ID NO: 15554 - protein, 8 aa, Homo sapiens
  Table A; HLA-B*49:01; PIK3CA; M1043I; 0
LEYFMKQI

SEQ ID NO: 15555 - protein, 8 aa, Homo sapiens
  Table A; HLA-B*40:02; PIK3CA; M1043V; 0
LEYFMKQV

SEQ ID NO: 15556 - protein, 8 aa, Homo sapiens
  Table A; HLA-B*49:01; PIK3CA; M1043V; 0
LEYFMKQV

SEQ ID NO: 15557 - protein, 8 aa, Homo sapiens
  Table A; HLA-B*50:01; PIK3CA; M1043V; 0
LEYFMKQV

SEQ ID NO: 15558 - protein, 9 aa, Homo sapiens
  Table A; HLA-C*08:01; ARID2; S297F; 0
LFFEEGNVK

SEQ ID NO: 15559 - protein, 10 aa, Homo sapiens
  Table A; HLA-A*02:01; ARID2; S297F; 1
LFFEEGNVKL

SEQ ID NO: 15560 - protein, 10 aa, Homo sapiens
  Table A; HLA-A*02:04; ARID2; S297F; 0
LFFEEGNVKL

SEQ ID NO: 15561 - protein, 10 aa, Homo sapiens
  Table A; HLA-A*02:05; ARID2; S297F; 0
LFFEEGNVKL

SEQ ID NO: 15562 - protein, 11 aa, Homo sapiens
  Table A; HLA-A*02:03; ARID2; S297F; 0
LFFEEGNVKLL

SEQ ID NO: 15563 - protein, 11 aa, Homo sapiens
  Table A; HLA-A*02:04; ARID2; S297F; 0
LFFEEGNVKLL

SEQ ID NO: 15564 - protein, 11 aa, Homo sapiens
  Table A; HLA-C*14:02; ARID2; S297F; 0
LFFEEGNVKLL

SEQ ID NO: 15565 - protein, 9 aa, Homo sapiens
  Table A; HLA-A*33:03; DCAF12L2; R378H; 0
LFYDIHAQK

SEQ ID NO: 15566 - protein, 10 aa, Homo sapiens
  Table A; HLA-A*23:01; DCAF12L2; R378H; 0
LFYDIHAQKF

SEQ ID NO: 15567 - protein, 10 aa, Homo sapiens
  Table A; HLA-A*24:02; DCAF12L2; R378H; 0
LFYDIHAQKF

SEQ ID NO: 15568 - protein, 10 aa, Homo sapiens
  Table A; HLA-A*29:02; DCAF12L2; R378H; 0
LFYDIHAQKF

SEQ ID NO: 15569 - protein, 10 aa, Homo sapiens
  Table A; HLA-C*14:02; DCAF12L2; R378H; 0
LFYDIHAQKF

SEQ ID NO: 15570 - protein, 9 aa, Homo sapiens
  Table A; HLA-C*05:01; NFE2L2; D77G; 1
LGEETGEFL

SEQ ID NO: 15571 - protein, 9 aa, Homo sapiens
  Table A; HLA-C*08:01; NFE2L2; D77G; 0
LGEETGEFL

SEQ ID NO: 15572 - protein, 9 aa, Homo sapiens
  Table A; HLA-C*08:02; NFE2L2; D77G; 0
LGEETGEFL

SEQ ID NO: 15573 - protein, 8 aa, Homo sapiens
  Table A; HLA-B*51:01; RAC1; P29L; 1
LGEYIPTV

SEQ ID NO: 15574 - protein, 9 aa, Homo sapiens
  Table A; HLA-A*23:01; RAC1; P29L; 0
LGEYIPTVF

SEQ ID NO: 15575 - protein, 9 aa, Homo sapiens
  Table A; HLA-B*35:01; RAC1; P29L; 1
LGEYIPTVF

SEQ ID NO: 15576 - protein, 9 aa, Homo sapiens
  Table A; HLA-B*35:02; RAC1; P29L; 0
LGEYIPTVF

SEQ ID NO: 15577 - protein, 9 aa, Homo sapiens
  Table A; HLA-B*35:03; RAC1; P29L; 0
LGEYIPTVF

SEQ ID NO: 15578 - protein, 9 aa, Homo sapiens
  Table A; HLA-B*35:12; RAC1; P29L; 0
LGEYIPTVF

SEQ ID NO: 15579 - protein, 9 aa, Homo sapiens
  Table A; HLA-C*04:01; RAC1; P29L; 1
LGEYIPTVF

SEQ ID NO: 15580 - protein, 9 aa, Homo sapiens
  Table A; HLA-C*05:01; RAC1; P29L; 1
LGEYIPTVF

SEQ ID NO: 15581 - protein, 9 aa, Homo sapiens
  Table A; HLA-C*08:02; RAC1; P29L; 0
LGEYIPTVF

SEQ ID NO: 15582 - protein, 8 aa, Homo sapiens
  Table A; HLA-B*15:02; TP53; V272M; 0
LGRNSFEM

SEQ ID NO: 15583 - protein, 9 aa, Homo sapiens
  Table A; HLA-A*31:01; TP53; V272M; 0
LGRNSFEMR

SEQ ID NO: 15584 - protein, 8 aa, Homo sapiens
  Table A; HLA-B*39:01; IDH1; R132L; 0
LHAYGDQY

SEQ ID NO: 15585 - protein, 9 aa, Homo sapiens
  Table A; HLA-B*15:10; PIK3CA; R38H; 0
LHEATLVTI

SEQ ID NO: 15586 - protein, 9 aa, Homo sapiens
  Table A; HLA-B*38:01; PIK3CA; R38H; 0
LHEATLVTI

SEQ ID NO: 15587 - protein, 9 aa, Homo sapiens
  Table A; HLA-B*39:01; PIK3CA; R38H; 0
LHEATLVTI

SEQ ID NO: 15588 - protein, 9 aa, Homo sapiens
  Table A; HLA-B*39:06; PIK3CA; R38H; 0
LHEATLVTI

SEQ ID NO: 15589 - protein, 9 aa, Homo sapiens
  Table A; HLA-A*68:02; CTNNB1; D32H; 0
LHSGIHSGA

SEQ ID NO: 15590 - protein, 9 aa, Homo sapiens
  Table A; HLA-B*15:10; CTNNB1; D32H; 0
LHSGIHSGA

SEQ ID NO: 15591 - protein, 9 aa, Homo sapiens
  Table A; HLA-B*27:05; CTNNB1; D32H; 0
LHSGIHSGA

SEQ ID NO: 15592 - protein, 9 aa, Homo sapiens
  Table A; HLA-B*39:01; CTNNB1; D32H; 0
LHSGIHSGA

SEQ ID NO: 15593 - protein, 9 aa, Homo sapiens
  Table A; HLA-B*39:06; CTNNB1; D32H; 0
LHSGIHSGA

SEQ ID NO: 15594 - protein, 9 aa, Homo sapiens
  Table A; HLA-B*50:01; CTNNB1; D32H; 0
LHSGIHSGA

SEQ ID NO: 15595 - protein, 9 aa, Homo sapiens
  Table A; HLA-B*54:01; CTNNB1; D32H; 0
LHSGIHSGA

SEQ ID NO: 15596 - protein, 8 aa, Homo sapiens
  Table A; HLA-A*02:04; TP53; P250L; 0
LILTIITL

SEQ ID NO: 15597 - protein, 8 aa, Homo sapiens
  Table A; HLA-C*17:01; TP53; P250L; 0
LILTIITL

SEQ ID NO: 15598 - protein, 8 aa, Homo sapiens
  Table A; HLA-A*02:03; XPO1; R749Q; 0
LIRSMQTV

SEQ ID NO: 15599 - protein, 8 aa, Homo sapiens
  Table A; HLA-B*13:02; XPO1; R749Q; 0
LIRSMQTV

SEQ ID NO: 15600 - protein, 9 aa, Homo sapiens
  Table A; HLA-A*03:01; XPO1; R749Q; 1
LIRSMQTVK

SEQ ID NO: 15601 - protein, 9 aa, Homo sapiens
  Table A; HLA-B*07:02; SF3B1; R957Q; 1
LISQTAVVM

SEQ ID NO: 15602 - protein, 9 aa, Homo sapiens
  Table A; HLA-B*15:01; SF3B1; R957Q; 1
LISQTAVVM

SEQ ID NO: 15603 - protein, 9 aa, Homo sapiens
  Table A; HLA-B*15:02; SF3B1; R957Q; 0
LISQTAVVM

SEQ ID NO: 15604 - protein, 9 aa, Homo sapiens
  Table A; HLA-B*15:10; SF3B1; R957Q; 0
LISQTAVVM

SEQ ID NO: 15605 - protein, 9 aa, Homo sapiens
  Table A; HLA-B*35:01; SF3B1; R957Q; 1
LISQTAVVM

SEQ ID NO: 15606 - protein, 9 aa, Homo sapiens
  Table A; HLA-B*35:02; SF3B1; R957Q; 0
LISQTAVVM

SEQ ID NO: 15607 - protein, 9 aa, Homo sapiens
  Table A; HLA-B*35:03; SF3B1; R957Q; 0
LISQTAVVM

SEQ ID NO: 15608 - protein, 9 aa, Homo sapiens
  Table A; HLA-B*35:08; SF3B1; R957Q; 0
LISQTAVVM

SEQ ID NO: 15609 - protein, 9 aa, Homo sapiens
  Table A; HLA-B*35:12; SF3B1; R957Q; 0
LISQTAVVM

SEQ ID NO: 15610 - protein, 9 aa, Homo sapiens
  Table A; HLA-B*39:01; SF3B1; R957Q; 0
LISQTAVVM

SEQ ID NO: 15611 - protein, 9 aa, Homo sapiens
  Table A; HLA-B*58:01; SF3B1; R957Q; 0
LISQTAVVM

SEQ ID NO: 15612 - protein, 9 aa, Homo sapiens
  Table A; HLA-C*07:04; SF3B1; R957Q; 0
LISQTAVVM

SEQ ID NO: 15613 - protein, 9 aa, Homo sapiens
  Table A; HLA-C*08:01; SF3B1; R957Q; 0
LISQTAVVM

SEQ ID NO: 15614 - protein, 10 aa, Homo sapiens
  Table A; HLA-A*03:01; SF3B1; R957Q; 1
LISQTAVVMK

SEQ ID NO: 15615 - protein, 10 aa, Homo sapiens
  Table A; HLA-A*03:02; SF3B1; R957Q; 0
LISQTAVVMK

SEQ ID NO: 15616 - protein, 10 aa, Homo sapiens
  Table A; HLA-A*11:01; SF3B1; R957Q; 1
LISQTAVVMK

SEQ ID NO: 15617 - protein, 10 aa, Homo sapiens
  Table A; HLA-A*68:01; SF3B1; R957Q; 0
LISQTAVVMK

SEQ ID NO: 15618 - protein, 10 aa, Homo sapiens
  Table A; HLA-A*68:02; SF3B1; R957Q; 0
LISQTAVVMK

SEQ ID NO: 15619 - protein, 10 aa, Homo sapiens
  Table A; HLA-B*27:02; SF3B1; R957Q; 0
LISQTAVVMK

SEQ ID NO: 15620 - protein, 8 aa, Homo sapiens
  Table A; HLA-B*39:06; PIK3CA; G106V; 0
LKVIEPVV

SEQ ID NO: 15621 - protein, 9 aa, Homo sapiens
  Table A; HLA-A*02:01; MTOR; S2215Y; 1
LLANDPTYL

SEQ ID NO: 15622 - protein, 9 aa, Homo sapiens
  Table A; HLA-A*02:03; MTOR; S2215Y; 0
LLANDPTYL

SEQ ID NO: 15623 - protein, 9 aa, Homo sapiens
  Table A; HLA-A*02:04; MTOR; S2215Y; 0
LLANDPTYL

SEQ ID NO: 15624 - protein, 9 aa, Homo sapiens
  Table A; HLA-A*02:05; MTOR; S2215Y; 0
LLANDPTYL

SEQ ID NO: 15625 - protein, 9 aa, Homo sapiens
  Table A; HLA-A*02:06; MTOR; S2215Y; 0
LLANDPTYL

SEQ ID NO: 15626 - protein, 9 aa, Homo sapiens
  Table A; HLA-A*02:07; MTOR; S2215Y; 0
LLANDPTYL

SEQ ID NO: 15627 - protein, 9 aa, Homo sapiens
  Table A; HLA-A*02:08; MTOR; S2215Y; 0
LLANDPTYL

SEQ ID NO: 15628 - protein, 9 aa, Homo sapiens
  Table A; HLA-B*13:02; MTOR; S2215Y; 0
LLANDPTYL

SEQ ID NO: 15629 - protein, 9 aa, Homo sapiens
  Table A; HLA-B*38:01; MTOR; S2215Y; 0
LLANDPTYL

SEQ ID NO: 15630 - protein, 9 aa, Homo sapiens
  Table A; HLA-B*39:01; MTOR; S2215Y; 0
LLANDPTYL

SEQ ID NO: 15631 - protein, 9 aa, Homo sapiens
  Table A; HLA-C*17:01; MTOR; S2215Y; 0
LLANDPTYL

SEQ ID NO: 15632 - protein, 10 aa, Homo sapiens
  Table A; HLA-B*27:02; MTOR; S2215Y; 0
LLANDPTYLR

SEQ ID NO: 15633 - protein, 10 aa, Homo sapiens
  Table A; HLA-B*27:02; HRAS; Q61K; 0
LLDILDTAGK

SEQ ID NO: 15634 - protein, 10 aa, Homo sapiens
  Table A; HLA-A*03:02; NRAS; Q61K; 0
LLDILDTAGK

SEQ ID NO: 15635 - protein, 10 aa, Homo sapiens
  Table A; HLA-B*27:02; NRAS; Q61K; 0
LLDILDTAGK

SEQ ID NO: 15636 - protein, 10 aa, Homo sapiens
  Table A; HLA-A*02:07; KRAS; Q61L; 0
LLDILDTAGL

SEQ ID NO: 15637 - protein, 10 aa, Homo sapiens
  Table A; HLA-A*02:07; NRAS; Q61L; 0
LLDILDTAGL

SEQ ID NO: 15638 - protein, 10 aa, Homo sapiens
  Table A; HLA-B*27:02; KRAS; Q61R; 0
LLDILDTAGR

SEQ ID NO: 15639 - protein, 10 aa, Homo sapiens
  Table A; HLA-B*27:02; NRAS; Q61R; 0
LLDILDTAGR

SEQ ID NO: 15640 - protein, 9 aa, Homo sapiens
  Table A; HLA-A*02:01; TP53; G266E; 1
LLERNSFEV

SEQ ID NO: 15641 - protein, 9 aa, Homo sapiens
  Table A; HLA-A*02:04; TP53; G266E; 0
LLERNSFEV

SEQ ID NO: 15642 - protein, 9 aa, Homo sapiens
  Table A; HLA-A*02:07; TP53; G266E; 0
LLERNSFEV

SEQ ID NO: 15643 - protein, 9 aa, Homo sapiens
  Table A; HLA-A*02:04; TP53; V272M; 0
LLGRNSFEM

SEQ ID NO: 15644 - protein, 11 aa, Homo sapiens
  Table A; HLA-A*02:04; RAC1; P29L; 0
LLISYTTNAFL

SEQ ID NO: 15645 - protein, 9 aa, Homo sapiens
  Table A; HLA-A*02:03; RGPD3; R816C; 0
LLKMICQEV

SEQ ID NO: 15646 - protein, 9 aa, Homo sapiens
  Table A; HLA-A*02:01; AR; F814V; 1
LLLVSIIPV

SEQ ID NO: 15647 - protein, 9 aa, Homo sapiens
  Table A; HLA-A*02:04; AR; F814V; 0
LLLVSIIPV

SEQ ID NO: 15648 - protein, 11 aa, Homo sapiens
  Table A; HLA-A*02:07; BIRC6; G271R; 0
LLPSARPELRV

SEQ ID NO: 15649 - protein, 8 aa, Homo sapiens
  Table A; HLA-A*02:03; PTPRT; M903I; 0
LLQHITQI

SEQ ID NO: 15650 - protein, 8 aa, Homo sapiens
  Table A; HLA-A*02:04; PTPRT; M903I; 0
LLQHITQI

SEQ ID NO: 15651 - protein, 9 aa, Homo sapiens
  Table A; HLA-A*03:02; PTPRT; M903I; 0
LLQHITQIK

SEQ ID NO: 15652 - protein, 9 aa, Homo sapiens
  Table A; HLA-A*02:01; CDKN2A; P114L; 1
LLVDLAEEL

SEQ ID NO: 15653 - protein, 9 aa, Homo sapiens
  Table A; HLA-A*02:03; CDKN2A; P114L; 0
LLVDLAEEL

SEQ ID NO: 15654 - protein, 9 aa, Homo sapiens
  Table A; HLA-A*02:04; CDKN2A; P114L; 0
LLVDLAEEL

SEQ ID NO: 15655 - protein, 9 aa, Homo sapiens
  Table A; HLA-A*02:05; CDKN2A; P114L; 0
LLVDLAEEL

SEQ ID NO: 15656 - protein, 9 aa, Homo sapiens
  Table A; HLA-A*02:06; CDKN2A; P114L; 0
LLVDLAEEL

SEQ ID NO: 15657 - protein, 9 aa, Homo sapiens
  Table A; HLA-A*02:07; CDKN2A; P114L; 0
LLVDLAEEL

SEQ ID NO: 15658 - protein, 9 aa, Homo sapiens
  Table A; HLA-A*02:08; CDKN2A; P114L; 0
LLVDLAEEL

SEQ ID NO: 15659 - protein, 9 aa, Homo sapiens
  Table A; HLA-A*68:02; CDKN2A; P114L; 0
LLVDLAEEL

SEQ ID NO: 15660 - protein, 9 aa, Homo sapiens
  Table A; HLA-B*13:01; CDKN2A; P114L; 0
LLVDLAEEL

SEQ ID NO: 15661 - protein, 9 aa, Homo sapiens
  Table A; HLA-B*13:02; CDKN2A; P114L; 1
LLVDLAEEL

SEQ ID NO: 15662 - protein, 9 aa, Homo sapiens
  Table A; HLA-B*15:01; CDKN2A; P114L; 1
LLVDLAEEL

SEQ ID NO: 15663 - protein, 9 aa, Homo sapiens
  Table A; HLA-B*15:02; CDKN2A; P114L; 0
LLVDLAEEL

SEQ ID NO: 15664 - protein, 9 aa, Homo sapiens
  Table A; HLA-B*15:13; CDKN2A; P114L; 0
LLVDLAEEL

SEQ ID NO: 15665 - protein, 9 aa, Homo sapiens
  Table A; HLA-B*35:01; CDKN2A; P114L; 1
LLVDLAEEL

SEQ ID NO: 15666 - protein, 9 aa, Homo sapiens
  Table A; HLA-B*35:02; CDKN2A; P114L; 0
LLVDLAEEL

SEQ ID NO: 15667 - protein, 9 aa, Homo sapiens
  Table A; HLA-B*35:03; CDKN2A; P114L; 0
LLVDLAEEL

SEQ ID NO: 15668 - protein, 9 aa, Homo sapiens
  Table A; HLA-B*38:01; CDKN2A; P114L; 0
LLVDLAEEL

SEQ ID NO: 15669 - protein, 9 aa, Homo sapiens
  Table A; HLA-B*39:01; CDKN2A; P114L; 0
LLVDLAEEL

SEQ ID NO: 15670 - protein, 9 aa, Homo sapiens
  Table A; HLA-B*40:01; CDKN2A; P114L; 1
LLVDLAEEL

SEQ ID NO: 15671 - protein, 9 aa, Homo sapiens
  Table A; HLA-B*40:02; CDKN2A; P114L; 0
LLVDLAEEL

SEQ ID NO: 15672 - protein, 9 aa, Homo sapiens
  Table A; HLA-B*48:01; CDKN2A; P114L; 0
LLVDLAEEL

SEQ ID NO: 15673 - protein, 9 aa, Homo sapiens
  Table A; HLA-B*50:01; CDKN2A; P114L; 0
LLVDLAEEL

SEQ ID NO: 15674 - protein, 9 aa, Homo sapiens
  Table A; HLA-C*08:01; CDKN2A; P114L; 0
LLVDLAEEL

SEQ ID NO: 15675 - protein, 9 aa, Homo sapiens
  Table A; HLA-C*08:03; CDKN2A; P114L; 0
LLVDLAEEL

SEQ ID NO: 15676 - protein, 9 aa, Homo sapiens
  Table A; HLA-C*17:01; CDKN2A; P114L; 0
LLVDLAEEL

SEQ ID NO: 15677 - protein, 9 aa, Homo sapiens
  Table A; HLA-A*02:01; TP53; G266V; 1
LLVRNSFEV

SEQ ID NO: 15678 - protein, 9 aa, Homo sapiens
  Table A; HLA-A*02:04; TP53; G266V; 0
LLVRNSFEV

SEQ ID NO: 15679 - protein, 11 aa, Homo sapiens
  Table A; HLA-A*02:04; AR; F814V; 0
LLVSIIPVDGL

SEQ ID NO: 15680 - protein, 11 aa, Homo sapiens
  Table A; HLA-A*02:07; AR; F814V; 0
LLVSIIPVDGL

SEQ ID NO: 15681 - protein, 8 aa, Homo sapiens
  Table A; HLA-A*02:04; KDR; S1100F; 0
LLWEIFFL

SEQ ID NO: 15682 - protein, 8 aa, Homo sapiens
  Table A; HLA-A*02:07; KDR; S1100F; 0
LLWEIFFL

SEQ ID NO: 15683 - protein, 10 aa, Homo sapiens
  Table A; HLA-B*57:01; KEAP1; G480W; 0
LLYAVGGFDW

SEQ ID NO: 15684 - protein, 9 aa, Homo sapiens
  Table A; HLA-A*02:01; EP300; A1629V; 1
LMDGRDVFL

SEQ ID NO: 15685 - protein, 9 aa, Homo sapiens
  Table A; HLA-A*02:06; EP300; A1629V; 0
LMDGRDVFL

SEQ ID NO: 15686 - protein, 9 aa, Homo sapiens
  Table A; HLA-A*02:07; EP300; A1629V; 0
LMDGRDVFL

SEQ ID NO: 15687 - protein, 9 aa, Homo sapiens
  Table A; HLA-C*04:01; EP300; A1629V; 1
LMDGRDVFL

SEQ ID NO: 15688 - protein, 9 aa, Homo sapiens
  Table A; HLA-C*05:01; EP300; A1629V; 1
LMDGRDVFL

SEQ ID NO: 15689 - protein, 9 aa, Homo sapiens
  Table A; HLA-C*08:02; EP300; A1629V; 0
LMDGRDVFL

SEQ ID NO: 15690 - protein, 9 aa, Homo sapiens
  Table A; HLA-C*17:01; EP300; A1629V; 0
LMDGRDVFL

SEQ ID NO: 15691 - protein, 11 aa, Homo sapiens
  Table A; HLA-A*02:07; EP300; A1629V; 0
LMDGRDVFLTL

SEQ ID NO: 15692 - protein, 9 aa, Homo sapiens
  Table A; HLA-A*29:01; PTPRC; Q895H; 0
LMVHVEAQY

SEQ ID NO: 15693 - protein, 9 aa, Homo sapiens
  Table A; HLA-A*29:02; PTPRC; Q895H; 0
LMVHVEAQY

SEQ ID NO: 15694 - protein, 9 aa, Homo sapiens
  Table A; HLA-A*30:02; PTPRC; Q895H; 0
LMVHVEAQY

SEQ ID NO: 15695 - protein, 9 aa, Homo sapiens
  Table A; HLA-A*30:04; PTPRC; Q895H; 0
LMVHVEAQY

SEQ ID NO: 15696 - protein, 9 aa, Homo sapiens
  Table A; HLA-B*15:01; PTPRC; Q895H; 1
LMVHVEAQY

SEQ ID NO: 15697 - protein, 9 aa, Homo sapiens
  Table A; HLA-B*15:02; PTPRC; Q895H; 0
LMVHVEAQY

SEQ ID NO: 15698 - protein, 9 aa, Homo sapiens
  Table A; HLA-B*27:02; PTPRC; Q895H; 0
LMVHVEAQY

SEQ ID NO: 15699 - protein, 9 aa, Homo sapiens
  Table A; HLA-B*46:01; PTPRC; Q895H; 0
LMVHVEAQY

SEQ ID NO: 15700 - protein, 9 aa, Homo sapiens
  Table A; HLA-B*58:01; PTPRC; Q895H; 0
LMVHVEAQY

SEQ ID NO: 15701 - protein, 9 aa, Homo sapiens
  Table A; HLA-C*08:01; PTPRC; Q895H; 0
LMVHVEAQY

SEQ ID NO: 15702 - protein, 10 aa, Homo sapiens
  Table A; HLA-A*02:01; PTPRC; Q895H; 1
LMVHVEAQYI

SEQ ID NO: 15703 - protein, 8 aa, Homo sapiens
  Table A; HLA-B*08:01; CREBBP; P2094L; 1
LNILKSNL

SEQ ID NO: 15704 - protein, 9 aa, Homo sapiens
  Table A; HLA-A*02:03; CTNNB1; D32N; 0
LNSGIHSGA

SEQ ID NO: 15705 - protein, 9 aa, Homo sapiens
  Table A; HLA-A*02:05; CTNNB1; D32N; 0
LNSGIHSGA

SEQ ID NO: 15706 - protein, 9 aa, Homo sapiens
  Table A; HLA-A*30:01; CTNNB1; D32N; 0
LNSGIHSGA

SEQ ID NO: 15707 - protein, 9 aa, Homo sapiens
  Table A; HLA-A*31:01; CTNNB1; D32N; 1
LNSGIHSGA

SEQ ID NO: 15708 - protein, 9 aa, Homo sapiens
  Table A; HLA-A*33:03; CTNNB1; D32N; 0
LNSGIHSGA

SEQ ID NO: 15709 - protein, 9 aa, Homo sapiens
  Table A; HLA-A*68:02; CTNNB1; D32N; 0
LNSGIHSGA

SEQ ID NO: 15710 - protein, 9 aa, Homo sapiens
  Table A; HLA-B*13:02; CTNNB1; D32N; 1
LNSGIHSGA

SEQ ID NO: 15711 - protein, 9 aa, Homo sapiens
  Table A; HLA-B*27:05; CTNNB1; D32N; 1
LNSGIHSGA

SEQ ID NO: 15712 - protein, 9 aa, Homo sapiens
  Table A; HLA-B*39:06; CTNNB1; D32N; 0
LNSGIHSGA

SEQ ID NO: 15713 - protein, 9 aa, Homo sapiens
  Table A; HLA-B*48:01; CTNNB1; D32N; 0
LNSGIHSGA

SEQ ID NO: 15714 - protein, 9 aa, Homo sapiens
  Table A; HLA-B*50:01; CTNNB1; D32N; 0
LNSGIHSGA

SEQ ID NO: 15715 - protein, 9 aa, Homo sapiens
  Table A; HLA-B*54:01; CTNNB1; D32N; 0
LNSGIHSGA

SEQ ID NO: 15716 - protein, 10 aa, Homo sapiens
  Table A; HLA-A*68:02; CTNNB1; D32N; 0
LNSGIHSGAT

SEQ ID NO: 15717 - protein, 10 aa, Homo sapiens
  Table A; HLA-B*48:01; CTNNB1; D32N; 0
LNSGIHSGAT

SEQ ID NO: 15718 - protein, 8 aa, Homo sapiens
  Table A; HLA-B*54:01; POLE; P286R; 0
LPLKFRDA

SEQ ID NO: 15719 - protein, 9 aa, Homo sapiens
  Table A; HLA-B*51:01; ERBB3; V104M; 1
LPLPNLRMV

SEQ ID NO: 15720 - protein, 9 aa, Homo sapiens
  Table A; HLA-B*54:01; ERBB3; V104M; 0
LPLPNLRMV

SEQ ID NO: 15721 - protein, 9 aa, Homo sapiens
  Table A; HLA-B*55:01; ERBB3; V104M; 0
LPLPNLRMV

SEQ ID NO: 15722 - protein, 9 aa, Homo sapiens
  Table A; HLA-B*56:01; ERBB3; V104M; 0
LPLPNLRMV

SEQ ID NO: 15723 - protein, 9 aa, Homo sapiens
  Table A; HLA-A*31:01; TPR; S2155L; 0
LPQVAGVPR

SEQ ID NO: 15724 - protein, 9 aa, Homo sapiens
  Table A; HLA-A*33:01; TPR; S2155L; 0
LPQVAGVPR

SEQ ID NO: 15725 - protein, 9 aa, Homo sapiens
  Table A; HLA-A*33:03; TPR; S2155L; 0
LPQVAGVPR

SEQ ID NO: 15726 - protein, 9 aa, Homo sapiens
  Table A; HLA-A*68:01; TPR; S2155L; 0
LPQVAGVPR

SEQ ID NO: 15727 - protein, 9 aa, Homo sapiens
  Table A; HLA-B*27:02; TPR; S2155L; 0
LPQVAGVPR

SEQ ID NO: 15728 - protein, 9 aa, Homo sapiens
  Table A; HLA-B*35:01; TPR; S2155L; 0
LPQVAGVPR

SEQ ID NO: 15729 - protein, 9 aa, Homo sapiens
  Table A; HLA-B*35:03; TPR; S2155L; 0
LPQVAGVPR

SEQ ID NO: 15730 - protein, 9 aa, Homo sapiens
  Table A; HLA-B*54:01; TPR; S2155L; 0
LPQVAGVPR

SEQ ID NO: 15731 - protein, 9 aa, Homo sapiens
  Table A; HLA-B*55:02; TPR; S2155L; 0
LPQVAGVPR

SEQ ID NO: 15732 - protein, 9 aa, Homo sapiens
  Table A; HLA-B*56:01; TPR; S2155L; 0
LPQVAGVPR

SEQ ID NO: 15733 - protein, 10 aa, Homo sapiens
  Table A; HLA-B*35:01; TPR; S2155L; 0
LPQVAGVPRF

SEQ ID NO: 15734 - protein, 10 aa, Homo sapiens
  Table A; HLA-B*51:01; BIRC6; G271R; 1
LPSARPELRV

SEQ ID NO: 15735 - protein, 10 aa, Homo sapiens
  Table A; HLA-B*54:01; BIRC6; G271R; 0
LPSARPELRV

SEQ ID NO: 15736 - protein, 10 aa, Homo sapiens
  Table A; HLA-A*02:01; PIK3CA; E453Q; 1
LQDLLNPIGV

SEQ ID NO: 15737 - protein, 9 aa, Homo sapiens
  Table A; HLA-B*15:01; EGFR; R108K; 1
LQIIKGNMY

SEQ ID NO: 15738 - protein, 9 aa, Homo sapiens
  Table A; HLA-B*15:03; EGFR; R108K; 0
LQIIKGNMY

SEQ ID NO: 15739 - protein, 8 aa, Homo sapiens
  Table A; HLA-B*15:10; TP53; R337L; 0
LQIRGREL

SEQ ID NO: 15740 - protein, 11 aa, Homo sapiens
  Table A; HLA-A*02:05; NFE2L2; E82D; 0
LQLDEETGDFL

SEQ ID NO: 15741 - protein, 11 aa, Homo sapiens
  Table A; HLA-A*02:06; NFE2L2; E82D; 0
LQLDEETGDFL

SEQ ID NO: 15742 - protein, 11 aa, Homo sapiens
  Table A; HLA-B*50:01; NFE2L2; E82D; 0
LQLDEETGDFL

SEQ ID NO: 15743 - protein, 10 aa, Homo sapiens
  Table A; HLA-B*15:01; NFE2L2; E79Q; 1
LQLDEQTGEF

SEQ ID NO: 15744 - protein, 10 aa, Homo sapiens
  Table A; HLA-B*39:01; NFE2L2; E79Q; 0
LQLDEQTGEF

SEQ ID NO: 15745 - protein, 11 aa, Homo sapiens
  Table A; HLA-A*02:05; NFE2L2; E79Q; 0
LQLDEQTGEFL

SEQ ID NO: 15746 - protein, 11 aa, Homo sapiens
  Table A; HLA-A*02:06; NFE2L2; E79Q; 0
LQLDEQTGEFL

SEQ ID NO: 15747 - protein, 11 aa, Homo sapiens
  Table A; HLA-B*50:01; NFE2L2; E79Q; 0
LQLDEQTGEFL

SEQ ID NO: 15748 - protein, 8 aa, Homo sapiens
  Table A; HLA-A*02:04; PIK3CA; R93Q; 0
LQLFQPFL

SEQ ID NO: 15749 - protein, 10 aa, Homo sapiens
  Table A; HLA-B*13:01; NFE2L2; D77G; 0
LQLGEETGEF

SEQ ID NO: 15750 - protein, 10 aa, Homo sapiens
  Table A; HLA-B*15:01; NFE2L2; D77G; 0
LQLGEETGEF

SEQ ID NO: 15751 - protein, 10 aa, Homo sapiens
  Table A; HLA-B*27:02; NFE2L2; D77G; 0
LQLGEETGEF

SEQ ID NO: 15752 - protein, 11 aa, Homo sapiens
  Table A; HLA-A*02:06; NFE2L2; D77G; 0
LQLGEETGEFL

SEQ ID NO: 15753 - protein, 11 aa, Homo sapiens
  Table A; HLA-B*50:01; NFE2L2; D77G; 0
LQLGEETGEFL

SEQ ID NO: 15754 - protein, 8 aa, Homo sapiens
  Table A; HLA-B*13:02; CREBBP; P2094L; 0
LQLMAAFI

SEQ ID NO: 15755 - protein, 9 aa, Homo sapiens
  Table A; HLA-B*57:01; SMARCA4; E920K; 0
LQNKLPKLW

SEQ ID NO: 15756 - protein, 9 aa, Homo sapiens
  Table A; HLA-B*15:01; RSPO2; R64Q; 0
LQREGMRQY

SEQ ID NO: 15757 - protein, 9 aa, Homo sapiens
  Table A; HLA-B*15:02; RSPO2; R64Q; 0
LQREGMRQY

SEQ ID NO: 15758 - protein, 9 aa, Homo sapiens
  Table A; HLA-B*15:03; RSPO2; R64Q; 0
LQREGMRQY

SEQ ID NO: 15759 - protein, 9 aa, Homo sapiens
  Table A; HLA-B*46:01; RSPO2; R64Q; 0
LQREGMRQY

SEQ ID NO: 15760 - protein, 9 aa, Homo sapiens
  Table A; HLA-C*08:01; RSPO2; R64Q; 0
LQREGMRQY

SEQ ID NO: 15761 - protein, 9 aa, Homo sapiens
  Table A; HLA-C*06:02; PIK3CA; E39K; 1
LRKATLVTI

SEQ ID NO: 15762 - protein, 8 aa, Homo sapiens
  Table A; HLA-B*39:06; CTNNB1; N387K; 0
LRKLSDAA

SEQ ID NO: 15763 - protein, 9 aa, Homo sapiens
  Table A; HLA-B*39:06; CTNNB1; N387K; 0
LRKLSDAAT

SEQ ID NO: 15764 - protein, 9 aa, Homo sapiens
  Table A; HLA-A*31:01; TP53; G266R; 0
LRRNSFEVR

SEQ ID NO: 15765 - protein, 8 aa, Homo sapiens
  Table A; HLA-B*27:05; PIK3CA; G1007R; 0
LRSGMPEL

SEQ ID NO: 15766 - protein, 8 aa, Homo sapiens
  Table A; HLA-C*07:02; PIK3CA; G1007R; 1
LRSGMPEL

SEQ ID NO: 15767 - protein, 9 aa, Homo sapiens
  Table A; HLA-B*14:01; BIRC6; G271R; 0
LRVGPGRSV

SEQ ID NO: 15768 - protein, 9 aa, Homo sapiens
  Table A; HLA-B*14:02; BIRC6; G271R; 0
LRVGPGRSV

SEQ ID NO: 15769 - protein, 9 aa, Homo sapiens
  Table A; HLA-B*15:10; BIRC6; G271R; 0
LRVGPGRSV

SEQ ID NO: 15770 - protein, 10 aa, Homo sapiens
  Table A; HLA-B*57:01; PTPRD; S431L; 0
LSLTTILVQW

SEQ ID NO: 15771 - protein, 10 aa, Homo sapiens
  Table A; HLA-C*03:04; SMARCA4; G1162S; 0
LSTRAGGLSL

SEQ ID NO: 15772 - protein, 9 aa, Homo sapiens
  Table A; HLA-A*02:01; CDKN2A; H83Y; 1
LTRPVYDAA

SEQ ID NO: 15773 - protein, 9 aa, Homo sapiens
  Table A; HLA-A*02:05; CDKN2A; H83Y; 0
LTRPVYDAA

SEQ ID NO: 15774 - protein, 9 aa, Homo sapiens
  Table A; HLA-A*02:08; CDKN2A; H83Y; 0
LTRPVYDAA

SEQ ID NO: 15775 - protein, 9 aa, Homo sapiens
  Table A; HLA-A*30:01; CDKN2A; H83Y; 0
LTRPVYDAA

SEQ ID NO: 15776 - protein, 9 aa, Homo sapiens
  Table A; HLA-A*68:02; CDKN2A; H83Y; 0
LTRPVYDAA

SEQ ID NO: 15777 - protein, 9 aa, Homo sapiens
  Table A; HLA-B*50:01; CDKN2A; H83Y; 0
LTRPVYDAA

SEQ ID NO: 15778 - protein, 9 aa, Homo sapiens
  Table A; HLA-B*54:01; CDKN2A; H83Y; 0
LTRPVYDAA

SEQ ID NO: 15779 - protein, 9 aa, Homo sapiens
  Table A; HLA-B*56:01; CDKN2A; H83Y; 0
LTRPVYDAA

SEQ ID NO: 15780 - protein, 9 aa, Homo sapiens
  Table A; HLA-B*57:01; CDKN2A; H83Y; 0
LTRPVYDAA

SEQ ID NO: 15781 - protein, 9 aa, Homo sapiens
  Table A; HLA-C*03:02; CDKN2A; H83Y; 0
LTRPVYDAA

SEQ ID NO: 15782 - protein, 10 aa, Homo sapiens
  Table A; HLA-A*31:01; CDKN2A; H83Y; 0
LTRPVYDAAR

SEQ ID NO: 15783 - protein, 9 aa, Homo sapiens
  Table A; HLA-A*31:01; TP53; I195T; 0
LTRVEGNLR

SEQ ID NO: 15784 - protein, 9 aa, Homo sapiens
  Table A; HLA-A*33:03; TP53; I195T; 0
LTRVEGNLR

SEQ ID NO: 15785 - protein, 9 aa, Homo sapiens
  Table A; HLA-A*68:02; RAF1; S257L; 0
LTSTPNVHM

SEQ ID NO: 15786 - protein, 9 aa, Homo sapiens
  Table A; HLA-B*58:01; RAF1; S257L; 0
LTSTPNVHM

SEQ ID NO: 15787 - protein, 10 aa, Homo sapiens
  Table A; HLA-A*02:08; RAF1; S257L; 0
LTSTPNVHMV

SEQ ID NO: 15788 - protein, 10 aa, Homo sapiens
  Table A; HLA-A*68:02; RAF1; S257L; 0
LTSTPNVHMV

SEQ ID NO: 15789 - protein, 8 aa, Homo sapiens
  Table A; HLA-B*57:01; PTPRD; S431L; 0
LTTILVQW

SEQ ID NO: 15790 - protein, 8 aa, Homo sapiens
  Table A; HLA-B*58:01; PTPRD; S431L; 0
LTTILVQW

SEQ ID NO: 15791 - protein, 8 aa, Homo sapiens
  Table A; HLA-A*02:01; SF3B1; K700E; 1
LVDEQQEV

SEQ ID NO: 15792 - protein, 8 aa, Homo sapiens
  Table A; HLA-A*02:06; SF3B1; K700E; 0
LVDEQQEV

SEQ ID NO: 15793 - protein, 8 aa, Homo sapiens
  Table A; HLA-A*02:07; SF3B1; K700E; 0
LVDEQQEV

SEQ ID NO: 15794 - protein, 8 aa, Homo sapiens
  Table A; HLA-B*13:02; SF3B1; K700E; 0
LVDEQQEV

SEQ ID NO: 15795 - protein, 8 aa, Homo sapiens
  Table A; HLA-B*48:01; SF3B1; K700E; 0
LVDEQQEV

SEQ ID NO: 15796 - protein, 8 aa, Homo sapiens
  Table A; HLA-C*05:01; SF3B1; K700E; 1
LVDEQQEV

SEQ ID NO: 15797 - protein, 8 aa, Homo sapiens
  Table A; HLA-C*08:02; SF3B1; K700E; 0
LVDEQQEV

SEQ ID NO: 15798 - protein, 9 aa, Homo sapiens
  Table A; HLA-A*02:07; SF3B1; K700E; 0
LVDEQQEVR

SEQ ID NO: 15799 - protein, 9 aa, Homo sapiens
  Table A; HLA-A*11:01; SF3B1; K700E; 1
LVDEQQEVR

SEQ ID NO: 15800 - protein, 9 aa, Homo sapiens
  Table A; HLA-A*26:03; SF3B1; K700E; 0
LVDEQQEVR

SEQ ID NO: 15801 - protein, 9 aa, Homo sapiens
  Table A; HLA-A*31:01; SF3B1; K700E; 0
LVDEQQEVR

SEQ ID NO: 15802 - protein, 9 aa, Homo sapiens
  Table A; HLA-A*33:03; SF3B1; K700E; 0
LVDEQQEVR

SEQ ID NO: 15803 - protein, 9 aa, Homo sapiens
  Table A; HLA-A*68:01; SF3B1; K700E; 0
LVDEQQEVR

SEQ ID NO: 15804 - protein, 9 aa, Homo sapiens
  Table A; HLA-A*68:02; SF3B1; K700E; 0
LVDEQQEVR

SEQ ID NO: 15805 - protein, 9 aa, Homo sapiens
  Table A; HLA-B*27:02; SF3B1; K700E; 0
LVDEQQEVR

SEQ ID NO: 15806 - protein, 9 aa, Homo sapiens
  Table A; HLA-B*35:01; SF3B1; K700E; 1
LVDEQQEVR

SEQ ID NO: 15807 - protein, 9 aa, Homo sapiens
  Table A; HLA-B*35:02; SF3B1; K700E; 0
LVDEQQEVR

SEQ ID NO: 15808 - protein, 9 aa, Homo sapiens
  Table A; HLA-B*35:08; SF3B1; K700E; 0
LVDEQQEVR

SEQ ID NO: 15809 - protein, 9 aa, Homo sapiens
  Table A; HLA-B*35:12; SF3B1; K700E; 0
LVDEQQEVR

SEQ ID NO: 15810 - protein, 9 aa, Homo sapiens
  Table A; HLA-B*48:01; SF3B1; K700E; 0
LVDEQQEVR

SEQ ID NO: 15811 - protein, 9 aa, Homo sapiens
  Table A; HLA-C*08:02; SF3B1; K700E; 0
LVDEQQEVR

SEQ ID NO: 15812 - protein, 10 aa, Homo sapiens
  Table A; HLA-C*08:03; SF3B1; K700E; 0
LVDEQQEVRT

SEQ ID NO: 15813 - protein, 11 aa, Homo sapiens
  Table A; HLA-A*02:07; SF3B1; K700E; 0
LVDEQQEVRTI

SEQ ID NO: 15814 - protein, 11 aa, Homo sapiens
  Table A; HLA-B*38:01; SF3B1; K700E; 0
LVDEQQEVRTI

SEQ ID NO: 15815 - protein, 8 aa, Homo sapiens
  Table A; HLA-A*02:07; CDKN2A; P114L; 0
LVDLAEEL

SEQ ID NO: 15816 - protein, 8 aa, Homo sapiens
  Table A; HLA-B*15:02; CDKN2A; P114L; 0
LVDLAEEL

SEQ ID NO: 15817 - protein, 8 aa, Homo sapiens
  Table A; HLA-B*35:02; CDKN2A; P114L; 0
LVDLAEEL

SEQ ID NO: 15818 - protein, 8 aa, Homo sapiens
  Table A; HLA-B*35:03; CDKN2A; P114L; 0
LVDLAEEL

SEQ ID NO: 15819 - protein, 8 aa, Homo sapiens
  Table A; HLA-B*35:08; CDKN2A; P114L; 0
LVDLAEEL

SEQ ID NO: 15820 - protein, 8 aa, Homo sapiens
  Table A; HLA-B*35:12; CDKN2A; P114L; 0
LVDLAEEL

SEQ ID NO: 15821 - protein, 8 aa, Homo sapiens
  Table A; HLA-B*39:01; CDKN2A; P114L; 0
LVDLAEEL

SEQ ID NO: 15822 - protein, 8 aa, Homo sapiens
  Table A; HLA-C*03:04; CDKN2A; P114L; 1
LVDLAEEL

SEQ ID NO: 15823 - protein, 8 aa, Homo sapiens
  Table A; HLA-C*04:01; CDKN2A; P114L; 1
LVDLAEEL

SEQ ID NO: 15824 - protein, 8 aa, Homo sapiens
  Table A; HLA-C*05:01; CDKN2A; P114L; 1
LVDLAEEL

SEQ ID NO: 15825 - protein, 8 aa, Homo sapiens
  Table A; HLA-C*08:01; CDKN2A; P114L; 0
LVDLAEEL

SEQ ID NO: 15826 - protein, 8 aa, Homo sapiens
  Table A; HLA-C*08:02; CDKN2A; P114L; 1
LVDLAEEL

SEQ ID NO: 15827 - protein, 8 aa, Homo sapiens
  Table A; HLA-C*17:01; CDKN2A; P114L; 0
LVDLAEEL

SEQ ID NO: 15828 - protein, 8 aa, Homo sapiens
  Table A; HLA-C*17:01; TRRAP; S722F; 0
LVFGSVFL

SEQ ID NO: 15829 - protein, 9 aa, Homo sapiens
  Table A; HLA-A*02:04; TRRAP; S722F; 0
LVFGSVFLF

SEQ ID NO: 15830 - protein, 9 aa, Homo sapiens
  Table A; HLA-A*29:02; TRRAP; S722F; 0
LVFGSVFLF

SEQ ID NO: 15831 - protein, 9 aa, Homo sapiens
  Table A; HLA-B*57:01; TRRAP; S722F; 0
LVFGSVFLF

SEQ ID NO: 15832 - protein, 9 aa, Homo sapiens
  Table A; HLA-C*02:02; TRRAP; S722F; 0
LVFGSVFLF

SEQ ID NO: 15833 - protein, 9 aa, Homo sapiens
  Table A; HLA-C*17:01; TRRAP; S722F; 0
LVFGSVFLF

SEQ ID NO: 15834 - protein, 10 aa, Homo sapiens
  Table A; HLA-A*02:03; TRRAP; S722F; 0
LVFGSVFLFA

SEQ ID NO: 15835 - protein, 10 aa, Homo sapiens
  Table A; HLA-A*68:02; TRRAP; S722F; 0
LVFGSVFLFA

SEQ ID NO: 15836 - protein, 10 aa, Homo sapiens
  Table A; HLA-B*54:01; TRRAP; S722F; 0
LVFGSVFLFA

SEQ ID NO: 15837 - protein, 11 aa, Homo sapiens
  Table A; HLA-B*54:01; TRRAP; S722F; 0
LVFGSVFLFAA

SEQ ID NO: 15838 - protein, 11 aa, Homo sapiens
  Table A; HLA-A*68:02; ACSL3; R232Q; 0
LVPRLQHIITV

SEQ ID NO: 15839 - protein, 9 aa, Homo sapiens
  Table A; HLA-B*07:02; HIST1H3B; E74K; 1
LVRKIAQDF

SEQ ID NO: 15840 - protein, 9 aa, Homo sapiens
  Table A; HLA-B*15:01; HIST1H3B; E74K; 0
LVRKIAQDF

SEQ ID NO: 15841 - protein, 9 aa, Homo sapiens
  Table A; HLA-B*15:02; HIST1H3B; E74K; 0
LVRKIAQDF

SEQ ID NO: 15842 - protein, 9 aa, Homo sapiens
  Table A; HLA-B*57:01; HIST1H3B; E74K; 0
LVRKIAQDF

SEQ ID NO: 15843 - protein, 9 aa, Homo sapiens
  Table A; HLA-C*02:02; HIST1H3B; E74K; 0
LVRKIAQDF

SEQ ID NO: 15844 - protein, 10 aa, Homo sapiens
  Table A; HLA-A*03:01; HIST1H3B; E74K; 1
LVRKIAQDFK

SEQ ID NO: 15845 - protein, 8 aa, Homo sapiens
  Table A; HLA-A*02:03; TP53; G266V; 0
LVRNSFEV

SEQ ID NO: 15846 - protein, 8 aa, Homo sapiens
  Table A; HLA-B*54:01; TP53; G266V; 0
LVRNSFEV

SEQ ID NO: 15847 - protein, 9 aa, Homo sapiens
  Table A; HLA-A*31:01; TP53; G266V; 0
LVRNSFEVR

SEQ ID NO: 15848 - protein, 9 aa, Homo sapiens
  Table A; HLA-A*33:01; TP53; G266V; 0
LVRNSFEVR

SEQ ID NO: 15849 - protein, 9 aa, Homo sapiens
  Table A; HLA-A*33:03; TP53; G266V; 0
LVRNSFEVR

SEQ ID NO: 15850 - protein, 8 aa, Homo sapiens
  Table A; HLA-A*26:01; CTNNB1; D32V; 1
LVSGIHSG

SEQ ID NO: 15851 - protein, 9 aa, Homo sapiens
  Table A; HLA-A*02:03; CTNNB1; D32V; 0
LVSGIHSGA

SEQ ID NO: 15852 - protein, 9 aa, Homo sapiens
  Table A; HLA-A*02:05; CTNNB1; D32V; 0
LVSGIHSGA

SEQ ID NO: 15853 - protein, 9 aa, Homo sapiens
  Table A; HLA-A*02:06; CTNNB1; D32V; 0
LVSGIHSGA

SEQ ID NO: 15854 - protein, 9 aa, Homo sapiens
  Table A; HLA-A*02:07; CTNNB1; D32V; 0
LVSGIHSGA

SEQ ID NO: 15855 - protein, 9 aa, Homo sapiens
  Table A; HLA-A*02:08; CTNNB1; D32V; 0
LVSGIHSGA

SEQ ID NO: 15856 - protein, 9 aa, Homo sapiens
  Table A; HLA-A*26:03; CTNNB1; D32V; 0
LVSGIHSGA

SEQ ID NO: 15857 - protein, 9 aa, Homo sapiens
  Table A; HLA-A*30:01; CTNNB1; D32V; 0
LVSGIHSGA

SEQ ID NO: 15858 - protein, 9 aa, Homo sapiens
  Table A; HLA-A*31:01; CTNNB1; D32V; 1
LVSGIHSGA

SEQ ID NO: 15859 - protein, 9 aa, Homo sapiens
  Table A; HLA-A*33:03; CTNNB1; D32V; 0
LVSGIHSGA

SEQ ID NO: 15860 - protein, 9 aa, Homo sapiens
  Table A; HLA-A*68:01; CTNNB1; D32V; 1
LVSGIHSGA

SEQ ID NO: 15861 - protein, 9 aa, Homo sapiens
  Table A; HLA-A*68:02; CTNNB1; D32V; 0
LVSGIHSGA

SEQ ID NO: 15862 - protein, 9 aa, Homo sapiens
  Table A; HLA-B*13:02; CTNNB1; D32V; 1
LVSGIHSGA

SEQ ID NO: 15863 - protein, 9 aa, Homo sapiens
  Table A; HLA-B*15:01; CTNNB1; D32V; 1
LVSGIHSGA

SEQ ID NO: 15864 - protein, 9 aa, Homo sapiens
  Table A; HLA-B*39:06; CTNNB1; D32V; 0
LVSGIHSGA

SEQ ID NO: 15865 - protein, 9 aa, Homo sapiens
  Table A; HLA-B*50:01; CTNNB1; D32V; 0
LVSGIHSGA

SEQ ID NO: 15866 - protein, 9 aa, Homo sapiens
  Table A; HLA-B*54:01; CTNNB1; D32V; 0
LVSGIHSGA

SEQ ID NO: 15867 - protein, 9 aa, Homo sapiens
  Table A; HLA-B*55:01; CTNNB1; D32V; 0
LVSGIHSGA

SEQ ID NO: 15868 - protein, 9 aa, Homo sapiens
  Table A; HLA-B*56:01; CTNNB1; D32V; 0
LVSGIHSGA

SEQ ID NO: 15869 - protein, 10 aa, Homo sapiens
  Table A; HLA-A*02:03; CTNNB1; D32V; 0
LVSGIHSGAT

SEQ ID NO: 15870 - protein, 10 aa, Homo sapiens
  Table A; HLA-A*03:02; CTNNB1; D32V; 0
LVSGIHSGAT

SEQ ID NO: 15871 - protein, 10 aa, Homo sapiens
  Table A; HLA-A*26:01; CTNNB1; D32V; 1
LVSGIHSGAT

SEQ ID NO: 15872 - protein, 10 aa, Homo sapiens
  Table A; HLA-A*68:01; CTNNB1; D32V; 1
LVSGIHSGAT

SEQ ID NO: 15873 - protein, 10 aa, Homo sapiens
  Table A; HLA-A*68:02; CTNNB1; D32V; 0
LVSGIHSGAT

SEQ ID NO: 15874 - protein, 10 aa, Homo sapiens
  Table A; HLA-B*39:01; CTNNB1; D32V; 0
LVSGIHSGAT

SEQ ID NO: 15875 - protein, 10 aa, Homo sapiens
  Table A; HLA-B*48:01; CTNNB1; D32V; 0
LVSGIHSGAT

SEQ ID NO: 15876 - protein, 10 aa, Homo sapiens
  Table A; HLA-C*08:03; CTNNB1; D32V; 0
LVSGIHSGAT

SEQ ID NO: 15877 - protein, 11 aa, Homo sapiens
  Table A; HLA-A*68:02; CTNNB1; D32V; 0
LVSGIHSGATT

SEQ ID NO: 15878 - protein, 10 aa, Homo sapiens
  Table A; HLA-A*02:08; AR; F814V; 0
LVSIIPVDGL

SEQ ID NO: 15879 - protein, 10 aa, Homo sapiens
  Table A; HLA-A*68:02; AR; F814V; 0
LVSIIPVDGL

SEQ ID NO: 15880 - protein, 9 aa, Homo sapiens
  Table A; HLA-A*02:01; KRAS; G12A; 1
LVVVGAAGV

SEQ ID NO: 15881 - protein, 9 aa, Homo sapiens
  Table A; HLA-A*02:03; KRAS; G12A; 0
LVVVGAAGV

SEQ ID NO: 15882 - protein, 9 aa, Homo sapiens
  Table A; HLA-A*02:05; KRAS; G12A; 0
LVVVGAAGV

SEQ ID NO: 15883 - protein, 9 aa, Homo sapiens
  Table A; HLA-A*02:06; KRAS; G12A; 0
LVVVGAAGV

SEQ ID NO: 15884 - protein, 9 aa, Homo sapiens
  Table A; HLA-A*68:02; KRAS; G12A; 0
LVVVGAAGV

SEQ ID NO: 15885 - protein, 9 aa, Homo sapiens
  Table A; HLA-B*50:01; KRAS; G12A; 0
LVVVGAAGV

SEQ ID NO: 15886 - protein, 11 aa, Homo sapiens
  Table A; HLA-A*03:01; KRAS; G12A; 1
LVVVGAAGVGK

SEQ ID NO: 15887 - protein, 11 aa, Homo sapiens
  Table A; HLA-A*03:02; KRAS; G12A; 0
LVVVGAAGVGK

SEQ ID NO: 15888 - protein, 11 aa, Homo sapiens
  Table A; HLA-A*11:01; KRAS; G12A; 1
LVVVGAAGVGK

SEQ ID NO: 15889 - protein, 11 aa, Homo sapiens
  Table A; HLA-A*68:01; KRAS; G12A; 1
LVVVGAAGVGK

SEQ ID NO: 15890 - protein, 11 aa, Homo sapiens
  Table A; HLA-B*27:02; KRAS; G12A; 0
LVVVGAAGVGK

SEQ ID NO: 15891 - protein, 9 aa, Homo sapiens
  Table A; HLA-A*02:06; KRAS; G12C; 0
LVVVGACGV

SEQ ID NO: 15892 - protein, 9 aa, Homo sapiens
  Table A; HLA-A*02:01; NRAS; G12C; 1
LVVVGACGV

SEQ ID NO: 15893 - protein, 9 aa, Homo sapiens
  Table A; HLA-A*02:06; NRAS; G12C; 0
LVVVGACGV

SEQ ID NO: 15894 - protein, 11 aa, Homo sapiens
  Table A; HLA-A*03:01; KRAS; G12C; 1
LVVVGACGVGK

SEQ ID NO: 15895 - protein, 11 aa, Homo sapiens
  Table A; HLA-A*03:02; KRAS; G12C; 0
LVVVGACGVGK

SEQ ID NO: 15896 - protein, 11 aa, Homo sapiens
  Table A; HLA-A*11:01; KRAS; G12C; 1
LVVVGACGVGK

SEQ ID NO: 15897 - protein, 11 aa, Homo sapiens
  Table A; HLA-B*27:02; KRAS; G12C; 0
LVVVGACGVGK

SEQ ID NO: 15898 - protein, 11 aa, Homo sapiens
  Table A; HLA-A*03:01; NRAS; G12C; 1
LVVVGACGVGK

SEQ ID NO: 15899 - protein, 11 aa, Homo sapiens
  Table A; HLA-A*03:02; NRAS; G12C; 0
LVVVGACGVGK

SEQ ID NO: 15900 - protein, 11 aa, Homo sapiens
  Table A; HLA-A*11:01; NRAS; G12C; 0
LVVVGACGVGK

SEQ ID NO: 15901 - protein, 11 aa, Homo sapiens
  Table A; HLA-B*27:02; NRAS; G12C; 0
LVVVGACGVGK

SEQ ID NO: 15902 - protein, 9 aa, Homo sapiens
  Table A; HLA-A*02:05; KRAS; G12D; 1
LVVVGADGV

SEQ ID NO: 15903 - protein, 9 aa, Homo sapiens
  Table A; HLA-A*02:06; KRAS; G12D; 1
LVVVGADGV

SEQ ID NO: 15904 - protein, 9 aa, Homo sapiens
  Table A; HLA-A*02:05; NRAS; G12D; 0
LVVVGADGV

SEQ ID NO: 15905 - protein, 9 aa, Homo sapiens
  Table A; HLA-A*02:06; NRAS; G12D; 0
LVVVGADGV

SEQ ID NO: 15906 - protein, 9 aa, Homo sapiens
  Table A; HLA-A*02:08; NRAS; G12D; 0
LVVVGADGV

SEQ ID NO: 15907 - protein, 11 aa, Homo sapiens
  Table A; HLA-A*03:02; KRAS; G12D; 1
LVVVGADGVGK

SEQ ID NO: 15908 - protein, 11 aa, Homo sapiens
  Table A; HLA-A*11:01; KRAS; G12D; 1
LVVVGADGVGK

SEQ ID NO: 15909 - protein, 11 aa, Homo sapiens
  Table A; HLA-A*68:01; KRAS; G12D; 1
LVVVGADGVGK

SEQ ID NO: 15910 - protein, 11 aa, Homo sapiens
  Table A; HLA-B*27:02; KRAS; G12D; 1
LVVVGADGVGK

SEQ ID NO: 15911 - protein, 11 aa, Homo sapiens
  Table A; HLA-A*03:01; NRAS; G12D; 1
LVVVGADGVGK

SEQ ID NO: 15912 - protein, 11 aa, Homo sapiens
  Table A; HLA-A*03:02; NRAS; G12D; 0
LVVVGADGVGK

SEQ ID NO: 15913 - protein, 11 aa, Homo sapiens
  Table A; HLA-A*11:01; NRAS; G12D; 1
LVVVGADGVGK

SEQ ID NO: 15914 - protein, 11 aa, Homo sapiens
  Table A; HLA-A*68:01; NRAS; G12D; 0
LVVVGADGVGK

SEQ ID NO: 15915 - protein, 11 aa, Homo sapiens
  Table A; HLA-B*27:02; NRAS; G12D; 0
LVVVGADGVGK

SEQ ID NO: 15916 - protein, 11 aa, Homo sapiens
  Table A; HLA-A*03:02; KRAS; G13D; 0
LVVVGAGDVGK

SEQ ID NO: 15917 - protein, 11 aa, Homo sapiens
  Table A; HLA-A*11:01; KRAS; G13D; 1
LVVVGAGDVGK

SEQ ID NO: 15918 - protein, 11 aa, Homo sapiens
  Table A; HLA-A*68:01; KRAS; G13D; 1
LVVVGAGDVGK

SEQ ID NO: 15919 - protein, 11 aa, Homo sapiens
  Table A; HLA-B*27:02; KRAS; G13D; 0
LVVVGAGDVGK

SEQ ID NO: 15920 - protein, 8 aa, Homo sapiens
  Table A; HLA-A*68:01; NRAS; G13R; 0
LVVVGAGR

SEQ ID NO: 15921 - protein, 11 aa, Homo sapiens
  Table A; HLA-A*03:02; NRAS; G13R; 0
LVVVGAGRVGK

SEQ ID NO: 15922 - protein, 11 aa, Homo sapiens
  Table A; HLA-A*11:01; NRAS; G13R; 0
LVVVGAGRVGK

SEQ ID NO: 15923 - protein, 11 aa, Homo sapiens
  Table A; HLA-A*68:01; NRAS; G13R; 0
LVVVGAGRVGK

SEQ ID NO: 15924 - protein, 9 aa, Homo sapiens
  Table A; HLA-A*02:03; KRAS; G12R; 0
LVVVGARGV

SEQ ID NO: 15925 - protein, 9 aa, Homo sapiens
  Table A; HLA-A*02:08; KRAS; G12R; 0
LVVVGARGV

SEQ ID NO: 15926 - protein, 9 aa, Homo sapiens
  Table A; HLA-A*02:03; KRAS; G12S; 0
LVVVGASGV

SEQ ID NO: 15927 - protein, 9 aa, Homo sapiens
  Table A; HLA-A*02:05; KRAS; G12S; 0
LVVVGASGV

SEQ ID NO: 15928 - protein, 9 aa, Homo sapiens
  Table A; HLA-A*02:06; KRAS; G12S; 0
LVVVGASGV

SEQ ID NO: 15929 - protein, 11 aa, Homo sapiens
  Table A; HLA-A*03:01; KRAS; G12S; 1
LVVVGASGVGK

SEQ ID NO: 15930 - protein, 11 aa, Homo sapiens
  Table A; HLA-A*03:02; KRAS; G12S; 0
LVVVGASGVGK

SEQ ID NO: 15931 - protein, 11 aa, Homo sapiens
  Table A; HLA-A*11:01; KRAS; G12S; 1
LVVVGASGVGK

SEQ ID NO: 15932 - protein, 11 aa, Homo sapiens
  Table A; HLA-A*68:01; KRAS; G12S; 0
LVVVGASGVGK

SEQ ID NO: 15933 - protein, 11 aa, Homo sapiens
  Table A; HLA-B*27:02; KRAS; G12S; 0
LVVVGASGVGK

SEQ ID NO: 15934 - protein, 9 aa, Homo sapiens
  Table A; HLA-A*02:01; KRAS; G12V; 1
LVVVGAVGV

SEQ ID NO: 15935 - protein, 9 aa, Homo sapiens
  Table A; HLA-A*02:03; KRAS; G12V; 0
LVVVGAVGV

SEQ ID NO: 15936 - protein, 9 aa, Homo sapiens
  Table A; HLA-A*02:05; KRAS; G12V; 1
LVVVGAVGV

SEQ ID NO: 15937 - protein, 9 aa, Homo sapiens
  Table A; HLA-A*02:06; KRAS; G12V; 1
LVVVGAVGV

SEQ ID NO: 15938 - protein, 9 aa, Homo sapiens
  Table A; HLA-A*68:02; KRAS; G12V; 1
LVVVGAVGV

SEQ ID NO: 15939 - protein, 9 aa, Homo sapiens
  Table A; HLA-B*13:02; KRAS; G12V; 1
LVVVGAVGV

SEQ ID NO: 15940 - protein, 11 aa, Homo sapiens
  Table A; HLA-A*03:01; KRAS; G12V; 1
LVVVGAVGVGK

SEQ ID NO: 15941 - protein, 11 aa, Homo sapiens
  Table A; HLA-A*03:02; KRAS; G12V; 1
LVVVGAVGVGK

SEQ ID NO: 15942 - protein, 11 aa, Homo sapiens
  Table A; HLA-A*11:01; KRAS; G12V; 1
LVVVGAVGVGK

SEQ ID NO: 15943 - protein, 11 aa, Homo sapiens
  Table A; HLA-A*68:01; KRAS; G12V; 1
LVVVGAVGVGK

SEQ ID NO: 15944 - protein, 11 aa, Homo sapiens
  Table A; HLA-B*27:02; KRAS; G12V; 1
LVVVGAVGVGK

SEQ ID NO: 15945 - protein, 8 aa, Homo sapiens
  Table A; HLA-A*03:01; CNBD1; L396P; 1
LVYMGKPK

SEQ ID NO: 15946 - protein, 10 aa, Homo sapiens
  Table A; HLA-A*03:01; CNBD1; L396P; 1
LVYMGKPKEK

SEQ ID NO: 15947 - protein, 10 aa, Homo sapiens
  Table A; HLA-A*03:02; CNBD1; L396P; 0
LVYMGKPKEK

SEQ ID NO: 15948 - protein, 10 aa, Homo sapiens
  Table A; HLA-A*11:01; CNBD1; L396P; 1
LVYMGKPKEK

SEQ ID NO: 15949 - protein, 10 aa, Homo sapiens
  Table A; HLA-A*68:01; CNBD1; L396P; 0
LVYMGKPKEK

SEQ ID NO: 15950 - protein, 9 aa, Homo sapiens
  Table A; HLA-A*23:01; KEAP1; G480W; 0
LYAVGGFDW

SEQ ID NO: 15951 - protein, 9 aa, Homo sapiens
  Table A; HLA-A*24:02; KEAP1; G480W; 1
LYAVGGFDW

SEQ ID NO: 15952 - protein, 8 aa, Homo sapiens
  Table A; HLA-A*31:01; CTNNB1; D32Y; 0
LYSGIHSG

SEQ ID NO: 15953 - protein, 8 aa, Homo sapiens
  Table A; HLA-A*33:03; CTNNB1; D32Y; 0
LYSGIHSG

SEQ ID NO: 15954 - protein, 9 aa, Homo sapiens
  Table A; HLA-A*02:03; CTNNB1; D32Y; 0
LYSGIHSGA

SEQ ID NO: 15955 - protein, 9 aa, Homo sapiens
  Table A; HLA-A*02:05; CTNNB1; D32Y; 0
LYSGIHSGA

SEQ ID NO: 15956 - protein, 9 aa, Homo sapiens
  Table A; HLA-A*29:02; CTNNB1; D32Y; 1
LYSGIHSGA

SEQ ID NO: 15957 - protein, 9 aa, Homo sapiens
  Table A; HLA-A*30:01; CTNNB1; D32Y; 0
LYSGIHSGA

SEQ ID NO: 15958 - protein, 9 aa, Homo sapiens
  Table A; HLA-A*31:01; CTNNB1; D32Y; 0
LYSGIHSGA

SEQ ID NO: 15959 - protein, 9 aa, Homo sapiens
  Table A; HLA-A*33:03; CTNNB1; D32Y; 0
LYSGIHSGA

SEQ ID NO: 15960 - protein, 9 aa, Homo sapiens
  Table A; HLA-A*68:02; CTNNB1; D32Y; 0
LYSGIHSGA

SEQ ID NO: 15961 - protein, 9 aa, Homo sapiens
  Table A; HLA-B*07:02; CTNNB1; D32Y; 1
LYSGIHSGA

SEQ ID NO: 15962 - protein, 9 aa, Homo sapiens
  Table A; HLA-B*39:06; CTNNB1; D32Y; 0
LYSGIHSGA

SEQ ID NO: 15963 - protein, 9 aa, Homo sapiens
  Table A; HLA-B*48:01; CTNNB1; D32Y; 0
LYSGIHSGA

SEQ ID NO: 15964 - protein, 9 aa, Homo sapiens
  Table A; HLA-B*50:01; CTNNB1; D32Y; 0
LYSGIHSGA

SEQ ID NO: 15965 - protein, 9 aa, Homo sapiens
  Table A; HLA-B*54:01; CTNNB1; D32Y; 0
LYSGIHSGA

SEQ ID NO: 15966 - protein, 9 aa, Homo sapiens
  Table A; HLA-C*14:02; CTNNB1; D32Y; 0
LYSGIHSGA

SEQ ID NO: 15967 - protein, 9 aa, Homo sapiens
  Table A; HLA-C*14:03; CTNNB1; D32Y; 0
LYSGIHSGA

SEQ ID NO: 15968 - protein, 10 aa, Homo sapiens
  Table A; HLA-A*02:01; CTNNB1; D32Y; 1
LYSGIHSGAT

SEQ ID NO: 15969 - protein, 10 aa, Homo sapiens
  Table A; HLA-A*29:02; CTNNB1; D32Y; 1
LYSGIHSGAT

SEQ ID NO: 15970 - protein, 10 aa, Homo sapiens
  Table A; HLA-A*68:02; CTNNB1; D32Y; 0
LYSGIHSGAT

SEQ ID NO: 15971 - protein, 10 aa, Homo sapiens
  Table A; HLA-B*08:01; CTNNB1; D32Y; 1
LYSGIHSGAT

SEQ ID NO: 15972 - protein, 10 aa, Homo sapiens
  Table A; HLA-B*27:05; CTNNB1; D32Y; 1
LYSGIHSGAT

SEQ ID NO: 15973 - protein, 10 aa, Homo sapiens
  Table A; HLA-B*48:01; CTNNB1; D32Y; 0
LYSGIHSGAT

SEQ ID NO: 15974 - protein, 8 aa, Homo sapiens
  Table A; HLA-B*37:01; PIK3R1; N564D; 0
MDSIKPDL

SEQ ID NO: 15975 - protein, 8 aa, Homo sapiens
  Table A; HLA-B*40:02; PIK3R1; N564D; 0
MDSIKPDL

SEQ ID NO: 15976 - protein, 8 aa, Homo sapiens
  Table A; HLA-B*41:02; PIK3R1; N564D; 0
MDSIKPDL

SEQ ID NO: 15977 - protein, 9 aa, Homo sapiens
  Table A; HLA-A*23:01; CDH1; D254Y; 0
MEILITVTY

SEQ ID NO: 15978 - protein, 9 aa, Homo sapiens
  Table A; HLA-B*15:01; CDH1; D254Y; 1
MEILITVTY

SEQ ID NO: 15979 - protein, 9 aa, Homo sapiens
  Table A; HLA-B*15:02; CDH1; D254Y; 0
MEILITVTY

SEQ ID NO: 15980 - protein, 9 aa, Homo sapiens
  Table A; HLA-B*18:01; CDH1; D254Y; 0
MEILITVTY

SEQ ID NO: 15981 - protein, 9 aa, Homo sapiens
  Table A; HLA-B*41:02; CDH1; D254Y; 0
MEILITVTY

SEQ ID NO: 15982 - protein, 9 aa, Homo sapiens
  Table A; HLA-B*44:02; CDH1; D254Y; 1
MEILITVTY

SEQ ID NO: 15983 - protein, 9 aa, Homo sapiens
  Table A; HLA-B*44:03; CDH1; D254Y; 0
MEILITVTY

SEQ ID NO: 15984 - protein, 9 aa, Homo sapiens
  Table A; HLA-B*44:05; CDH1; D254Y; 0
MEILITVTY

SEQ ID NO: 15985 - protein, 9 aa, Homo sapiens
  Table A; HLA-C*03:02; CDH1; D254Y; 0
MEILITVTY

SEQ ID NO: 15986 - protein, 9 aa, Homo sapiens
  Table A; HLA-C*08:01; CDH1; D254Y; 0
MEILITVTY

SEQ ID NO: 15987 - protein, 9 aa, Homo sapiens
  Table A; HLA-A*23:01; SPOP; R121Q; 0
MESQQAYRF

SEQ ID NO: 15988 - protein, 9 aa, Homo sapiens
  Table A; HLA-A*30:01; SPOP; R121Q; 0
MESQQAYRF

SEQ ID NO: 15989 - protein, 9 aa, Homo sapiens
  Table A; HLA-B*18:01; SPOP; R121Q; 1
MESQQAYRF

SEQ ID NO: 15990 - protein, 9 aa, Homo sapiens
  Table A; HLA-B*37:01; SPOP; R121Q; 0
MESQQAYRF

SEQ ID NO: 15991 - protein, 9 aa, Homo sapiens
  Table A; HLA-B*40:01; SPOP; R121Q; 1
MESQQAYRF

SEQ ID NO: 15992 - protein, 9 aa, Homo sapiens
  Table A; HLA-B*40:02; SPOP; R121Q; 0
MESQQAYRF

SEQ ID NO: 15993 - protein, 9 aa, Homo sapiens
  Table A; HLA-B*41:02; SPOP; R121Q; 0
MESQQAYRF

SEQ ID NO: 15994 - protein, 9 aa, Homo sapiens
  Table A; HLA-B*44:02; SPOP; R121Q; 1
MESQQAYRF

SEQ ID NO: 15995 - protein, 9 aa, Homo sapiens
  Table A; HLA-B*44:03; SPOP; R121Q; 1
MESQQAYRF

SEQ ID NO: 15996 - protein, 9 aa, Homo sapiens
  Table A; HLA-B*44:05; SPOP; R121Q; 0
MESQQAYRF

SEQ ID NO: 15997 - protein, 9 aa, Homo sapiens
  Table A; HLA-B*58:01; SPOP; R121Q; 0
MESQQAYRF

SEQ ID NO: 15998 - protein, 9 aa, Homo sapiens
  Table A; HLA-C*16:04; SPOP; R121Q; 0
MESQQAYRF

SEQ ID NO: 15999 - protein, 9 aa, Homo sapiens
  Table A; HLA-A*29:02; TP53; C141Y; 0
MFCQLAKTY

SEQ ID NO: 16000 - protein, 8 aa, Homo sapiens
  Table A; HLA-B*39:01; PIK3CA; H1047L; 0
MKQMNDAL

SEQ ID NO: 16001 - protein, 8 aa, Homo sapiens
  Table A; HLA-B*48:01; PIK3CA; H1047L; 0
MKQMNDAL

SEQ ID NO: 16002 - protein, 8 aa, Homo sapiens
  Table A; HLA-B*39:01; PIK3CA; H1047Y; 0
MKQMNDAY

SEQ ID NO: 16003 - protein, 9 aa, Homo sapiens
  Table A; HLA-A*02:01; PIK3CA; G1007R; 1
MLRSGMPEL

SEQ ID NO: 16004 - protein, 9 aa, Homo sapiens
  Table A; HLA-A*02:03; PIK3CA; G1007R; 0
MLRSGMPEL

SEQ ID NO: 16005 - protein, 9 aa, Homo sapiens
  Table A; HLA-A*02:04; PIK3CA; G1007R; 0
MLRSGMPEL

SEQ ID NO: 16006 - protein, 9 aa, Homo sapiens
  Table A; HLA-A*30:01; PIK3CA; G1007R; 0
MLRSGMPEL

SEQ ID NO: 16007 - protein, 9 aa, Homo sapiens
  Table A; HLA-B*07:02; PIK3CA; G1007R; 1
MLRSGMPEL

SEQ ID NO: 16008 - protein, 9 aa, Homo sapiens
  Table A; HLA-B*15:02; PIK3CA; G1007R; 0
MLRSGMPEL

SEQ ID NO: 16009 - protein, 9 aa, Homo sapiens
  Table A; HLA-B*15:10; PIK3CA; G1007R; 0
MLRSGMPEL

SEQ ID NO: 16010 - protein, 9 aa, Homo sapiens
  Table A; HLA-C*08:01; PIK3CA; G1007R; 0
MLRSGMPEL

SEQ ID NO: 16011 - protein, 10 aa, Homo sapiens
  Table A; HLA-A*02:04; PIK3CA; G1007R; 0
MMLRSGMPEL

SEQ ID NO: 16012 - protein, 9 aa, Homo sapiens
  Table A; HLA-A*29:01; MTOR; E1799K; 0
MNFKAVLHY

SEQ ID NO: 16013 - protein, 9 aa, Homo sapiens
  Table A; HLA-A*29:02; MTOR; E1799K; 1
MNFKAVLHY

SEQ ID NO: 16014 - protein, 9 aa, Homo sapiens
  Table A; HLA-C*15:02; TP53; R248Q; 0
MNQRPILTI

SEQ ID NO: 16015 - protein, 8 aa, Homo sapiens
  Table A; HLA-B*54:01; TP53; R249M; 0
MPILTIIT

SEQ ID NO: 16016 - protein, 9 aa, Homo sapiens
  Table A; HLA-A*68:02; TP53; R249M; 0
MPILTIITL

SEQ ID NO: 16017 - protein, 9 aa, Homo sapiens
  Table A; HLA-B*07:02; TP53; R249M; 1
MPILTIITL

SEQ ID NO: 16018 - protein, 9 aa, Homo sapiens
  Table A; HLA-B*08:01; TP53; R249M; 1
MPILTIITL

SEQ ID NO: 16019 - protein, 9 aa, Homo sapiens
  Table A; HLA-B*15:02; TP53; R249M; 0
MPILTIITL

SEQ ID NO: 16020 - protein, 9 aa, Homo sapiens
  Table A; HLA-B*15:10; TP53; R249M; 0
MPILTIITL

SEQ ID NO: 16021 - protein, 9 aa, Homo sapiens
  Table A; HLA-B*35:01; TP53; R249M; 1
MPILTIITL

SEQ ID NO: 16022 - protein, 9 aa, Homo sapiens
  Table A; HLA-B*35:02; TP53; R249M; 0
MPILTIITL

SEQ ID NO: 16023 - protein, 9 aa, Homo sapiens
  Table A; HLA-B*35:03; TP53; R249M; 0
MPILTIITL

SEQ ID NO: 16024 - protein, 9 aa, Homo sapiens
  Table A; HLA-B*35:08; TP53; R249M; 0
MPILTIITL

SEQ ID NO: 16025 - protein, 9 aa, Homo sapiens
  Table A; HLA-B*35:12; TP53; R249M; 0
MPILTIITL

SEQ ID NO: 16026 - protein, 9 aa, Homo sapiens
  Table A; HLA-B*51:01; TP53; R249M; 0
MPILTIITL

SEQ ID NO: 16027 - protein, 9 aa, Homo sapiens
  Table A; HLA-B*54:01; TP53; R249M; 0
MPILTIITL

SEQ ID NO: 16028 - protein, 9 aa, Homo sapiens
  Table A; HLA-B*55:01; TP53; R249M; 0
MPILTIITL

SEQ ID NO: 16029 - protein, 9 aa, Homo sapiens
  Table A; HLA-B*55:02; TP53; R249M; 0
MPILTIITL

SEQ ID NO: 16030 - protein, 9 aa, Homo sapiens
  Table A; HLA-B*56:01; TP53; R249M; 0
MPILTIITL

SEQ ID NO: 16031 - protein, 9 aa, Homo sapiens
  Table A; HLA-C*08:01; TP53; R249M; 0
MPILTIITL

SEQ ID NO: 16032 - protein, 10 aa, Homo sapiens
  Table A; HLA-B*35:01; CHD4; R975H; 1
MPSKTELIVH

SEQ ID NO: 16033 - protein, 10 aa, Homo sapiens
  Table A; HLA-B*35:03; CHD4; R975H; 0
MPSKTELIVH

SEQ ID NO: 16034 - protein, 10 aa, Homo sapiens
  Table A; HLA-B*35:08; CHD4; R975H; 0
MPSKTELIVH

SEQ ID NO: 16035 - protein, 10 aa, Homo sapiens
  Table A; HLA-B*35:12; CHD4; R975H; 0
MPSKTELIVH

SEQ ID NO: 16036 - protein, 10 aa, Homo sapiens
  Table A; HLA-B*54:01; CHD4; R975H; 0
MPSKTELIVH

SEQ ID NO: 16037 - protein, 11 aa, Homo sapiens
  Table A; HLA-A*68:02; CHD4; R975H; 0
MPSKTELIVHV

SEQ ID NO: 16038 - protein, 11 aa, Homo sapiens
  Table A; HLA-B*54:01; CHD4; R975H; 0
MPSKTELIVHV

SEQ ID NO: 16039 - protein, 9 aa, Homo sapiens
  Table A; HLA-A*31:01; POLQ; R995Q; 0
MQTIWVTGR

SEQ ID NO: 16040 - protein, 9 aa, Homo sapiens
  Table A; HLA-B*08:01; XPO1; R749Q; 1
MQTVKRETL

SEQ ID NO: 16041 - protein, 9 aa, Homo sapiens
  Table A; HLA-B*14:02; XPO1; R749Q; 0
MQTVKRETL

SEQ ID NO: 16042 - protein, 9 aa, Homo sapiens
  Table A; HLA-B*15:01; XPO1; R749Q; 1
MQTVKRETL

SEQ ID NO: 16043 - protein, 9 aa, Homo sapiens
  Table A; HLA-B*15:10; XPO1; R749Q; 0
MQTVKRETL

SEQ ID NO: 16044 - protein, 11 aa, Homo sapiens
  Table A; HLA-B*38:01; ARHGEF12; R113Q; 0
MRAGVQTGDQI

SEQ ID NO: 16045 - protein, 8 aa, Homo sapiens
  Table A; HLA-B*14:02; CTNNB1; K335I; 1
MRTYTYEI

SEQ ID NO: 16046 - protein, 8 aa, Homo sapiens
  Table A; HLA-B*38:01; CTNNB1; K335I; 0
MRTYTYEI

SEQ ID NO: 16047 - protein, 8 aa, Homo sapiens
  Table A; HLA-B*39:06; CTNNB1; K335I; 0
MRTYTYEI

SEQ ID NO: 16048 - protein, 8 aa, Homo sapiens
  Table A; HLA-A*11:01; ARID2; S990L; 0
MSLSSTPQ

SEQ ID NO: 16049 - protein, 8 aa, Homo sapiens
  Table A; HLA-B*57:01; TP53; C176F; 1
MTEVVRRF

SEQ ID NO: 16050 - protein, 8 aa, Homo sapiens
  Table A; HLA-B*58:01; TP53; C176Y; 0
MTEVVRRY

SEQ ID NO: 16051 - protein, 8 aa, Homo sapiens
  Table A; HLA-B*15:01; PTPRC; Q895H; 1
MVHVEAQY

SEQ ID NO: 16052 - protein, 8 aa, Homo sapiens
  Table A; HLA-B*15:02; PTPRC; Q895H; 0
MVHVEAQY

SEQ ID NO: 16053 - protein, 8 aa, Homo sapiens
  Table A; HLA-B*35:01; PTPRC; Q895H; 1
MVHVEAQY

SEQ ID NO: 16054 - protein, 8 aa, Homo sapiens
  Table A; HLA-B*35:08; PTPRC; Q895H; 0
MVHVEAQY

SEQ ID NO: 16055 - protein, 8 aa, Homo sapiens
  Table A; HLA-B*39:01; PTPRC; Q895H; 0
MVHVEAQY

SEQ ID NO: 16056 - protein, 8 aa, Homo sapiens
  Table A; HLA-B*46:01; PTPRC; Q895H; 0
MVHVEAQY

SEQ ID NO: 16057 - protein, 8 aa, Homo sapiens
  Table A; HLA-B*58:01; PTPRC; Q895H; 0
MVHVEAQY

SEQ ID NO: 16058 - protein, 8 aa, Homo sapiens
  Table A; HLA-C*08:01; PTPRC; Q895H; 0
MVHVEAQY

SEQ ID NO: 16059 - protein, 9 aa, Homo sapiens
  Table A; HLA-A*02:05; PTPRC; Q895H; 0
MVHVEAQYI

SEQ ID NO: 16060 - protein, 9 aa, Homo sapiens
  Table A; HLA-A*02:06; PTPRC; Q895H; 0
MVHVEAQYI

SEQ ID NO: 16061 - protein, 9 aa, Homo sapiens
  Table A; HLA-A*68:02; PTPRC; Q895H; 0
MVHVEAQYI

SEQ ID NO: 16062 - protein, 9 aa, Homo sapiens
  Table A; HLA-B*13:02; PTPRC; Q895H; 0
MVHVEAQYI

SEQ ID NO: 16063 - protein, 9 aa, Homo sapiens
  Table A; HLA-B*38:01; PTPRC; Q895H; 0
MVHVEAQYI

SEQ ID NO: 16064 - protein, 9 aa, Homo sapiens
  Table A; HLA-B*51:01; PTPRC; Q895H; 0
MVHVEAQYI

SEQ ID NO: 16065 - protein, 9 aa, Homo sapiens
  Table A; HLA-C*08:03; PTPRC; Q895H; 0
MVHVEAQYI

SEQ ID NO: 16066 - protein, 9 aa, Homo sapiens
  Table A; HLA-B*54:01; CNTNAP2; T373M; 0
MVPVFFNAT

SEQ ID NO: 16067 - protein, 8 aa, Homo sapiens
  Table A; HLA-A*26:01; ERBB3; V104M; 1
MVRGTQVY

SEQ ID NO: 16068 - protein, 8 aa, Homo sapiens
  Table A; HLA-B*15:01; ERBB3; V104M; 1
MVRGTQVY

SEQ ID NO: 16069 - protein, 8 aa, Homo sapiens
  Table A; HLA-B*15:02; ERBB3; V104M; 0
MVRGTQVY

SEQ ID NO: 16070 - protein, 8 aa, Homo sapiens
  Table A; HLA-C*08:01; ERBB3; V104M; 0
MVRGTQVY

SEQ ID NO: 16071 - protein, 10 aa, Homo sapiens
  Table A; HLA-A*02:01; TP53; V216M; 1
MVVPYEPPEV

SEQ ID NO: 16072 - protein, 10 aa, Homo sapiens
  Table A; HLA-A*02:03; TP53; V216M; 0
MVVPYEPPEV

SEQ ID NO: 16073 - protein, 10 aa, Homo sapiens
  Table A; HLA-A*02:04; TP53; V216M; 0
MVVPYEPPEV

SEQ ID NO: 16074 - protein, 10 aa, Homo sapiens
  Table A; HLA-A*02:05; TP53; V216M; 0
MVVPYEPPEV

SEQ ID NO: 16075 - protein, 10 aa, Homo sapiens
  Table A; HLA-A*02:06; TP53; V216M; 0
MVVPYEPPEV

SEQ ID NO: 16076 - protein, 10 aa, Homo sapiens
  Table A; HLA-A*02:07; TP53; V216M; 0
MVVPYEPPEV

SEQ ID NO: 16077 - protein, 10 aa, Homo sapiens
  Table A; HLA-A*02:08; TP53; V216M; 0
MVVPYEPPEV

SEQ ID NO: 16078 - protein, 10 aa, Homo sapiens
  Table A; HLA-A*26:01; TP53; V216M; 0
MVVPYEPPEV

SEQ ID NO: 16079 - protein, 10 aa, Homo sapiens
  Table A; HLA-A*26:02; TP53; V216M; 0
MVVPYEPPEV

SEQ ID NO: 16080 - protein, 10 aa, Homo sapiens
  Table A; HLA-A*30:01; TP53; V216M; 0
MVVPYEPPEV

SEQ ID NO: 16081 - protein, 10 aa, Homo sapiens
  Table A; HLA-A*68:01; TP53; V216M; 0
MVVPYEPPEV

SEQ ID NO: 16082 - protein, 10 aa, Homo sapiens
  Table A; HLA-A*68:02; TP53; V216M; 0
MVVPYEPPEV

SEQ ID NO: 16083 - protein, 10 aa, Homo sapiens
  Table A; HLA-B*35:01; TP53; V216M; 0
MVVPYEPPEV

SEQ ID NO: 16084 - protein, 10 aa, Homo sapiens
  Table A; HLA-B*35:02; TP53; V216M; 0
MVVPYEPPEV

SEQ ID NO: 16085 - protein, 10 aa, Homo sapiens
  Table A; HLA-B*35:03; TP53; V216M; 0
MVVPYEPPEV

SEQ ID NO: 16086 - protein, 10 aa, Homo sapiens
  Table A; HLA-B*35:12; TP53; V216M; 0
MVVPYEPPEV

SEQ ID NO: 16087 - protein, 10 aa, Homo sapiens
  Table A; HLA-B*39:01; TP53; V216M; 0
MVVPYEPPEV

SEQ ID NO: 16088 - protein, 10 aa, Homo sapiens
  Table A; HLA-B*40:02; TP53; V216M; 0
MVVPYEPPEV

SEQ ID NO: 16089 - protein, 10 aa, Homo sapiens
  Table A; HLA-B*50:01; TP53; V216M; 0
MVVPYEPPEV

SEQ ID NO: 16090 - protein, 10 aa, Homo sapiens
  Table A; HLA-B*51:01; TP53; V216M; 0
MVVPYEPPEV

SEQ ID NO: 16091 - protein, 10 aa, Homo sapiens
  Table A; HLA-B*54:01; TP53; V216M; 0
MVVPYEPPEV

SEQ ID NO: 16092 - protein, 8 aa, Homo sapiens
  Table A; HLA-B*51:01; RAC1; P29L; 1
NAFLGEYI

SEQ ID NO: 16093 - protein, 9 aa, Homo sapiens
  Table A; HLA-B*35:01; RAC1; P29L; 1
NAFLGEYIP

SEQ ID NO: 16094 - protein, 9 aa, Homo sapiens
  Table A; HLA-B*35:03; RAC1; P29L; 0
NAFLGEYIP

SEQ ID NO: 16095 - protein, 9 aa, Homo sapiens
  Table A; HLA-B*54:01; RAC1; P29L; 0
NAFLGEYIP

SEQ ID NO: 16096 - protein, 10 aa, Homo sapiens
  Table A; HLA-A*68:02; RAC1; P29L; 0
NAFLGEYIPT

SEQ ID NO: 16097 - protein, 10 aa, Homo sapiens
  Table A; HLA-B*27:02; RAC1; P29L; 0
NAFLGEYIPT

SEQ ID NO: 16098 - protein, 10 aa, Homo sapiens
  Table A; HLA-B*35:01; RAC1; P29L; 1
NAFLGEYIPT

SEQ ID NO: 16099 - protein, 10 aa, Homo sapiens
  Table A; HLA-B*48:01; RAC1; P29L; 0
NAFLGEYIPT

SEQ ID NO: 16100 - protein, 10 aa, Homo sapiens
  Table A; HLA-B*54:01; RAC1; P29L; 0
NAFLGEYIPT

SEQ ID NO: 16101 - protein, 10 aa, Homo sapiens
  Table A; HLA-C*08:03; RAC1; P29L; 0
NAFLGEYIPT

SEQ ID NO: 16102 - protein, 11 aa, Homo sapiens
  Table A; HLA-A*02:01; RAC1; P29L; 1
NAFLGEYIPTV

SEQ ID NO: 16103 - protein, 11 aa, Homo sapiens
  Table A; HLA-A*02:03; RAC1; P29L; 0
NAFLGEYIPTV

SEQ ID NO: 16104 - protein, 11 aa, Homo sapiens
  Table A; HLA-A*02:04; RAC1; P29L; 0
NAFLGEYIPTV

SEQ ID NO: 16105 - protein, 11 aa, Homo sapiens
  Table A; HLA-A*68:02; RAC1; P29L; 0
NAFLGEYIPTV

SEQ ID NO: 16106 - protein, 11 aa, Homo sapiens
  Table A; HLA-B*54:01; RAC1; P29L; 0
NAFLGEYIPTV

SEQ ID NO: 16107 - protein, 11 aa, Homo sapiens
  Table A; HLA-C*12:03; RAC1; P29L; 1
NAFLGEYIPTV

SEQ ID NO: 16108 - protein, 8 aa, Homo sapiens
  Table A; HLA-B*51:01; RAC1; P29S; 1
NAFSGEYI

SEQ ID NO: 16109 - protein, 9 aa, Homo sapiens
  Table A; HLA-B*35:01; RAC1; P29S; 1
NAFSGEYIP

SEQ ID NO: 16110 - protein, 9 aa, Homo sapiens
  Table A; HLA-B*35:02; RAC1; P29S; 0
NAFSGEYIP

SEQ ID NO: 16111 - protein, 9 aa, Homo sapiens
  Table A; HLA-B*35:03; RAC1; P29S; 0
NAFSGEYIP

SEQ ID NO: 16112 - protein, 9 aa, Homo sapiens
  Table A; HLA-B*39:06; RAC1; P29S; 0
NAFSGEYIP

SEQ ID NO: 16113 - protein, 9 aa, Homo sapiens
  Table A; HLA-B*54:01; RAC1; P29S; 0
NAFSGEYIP

SEQ ID NO: 16114 - protein, 9 aa, Homo sapiens
  Table A; HLA-C*12:03; RAC1; P29S; 1
NAFSGEYIP

SEQ ID NO: 16115 - protein, 9 aa, Homo sapiens
  Table A; HLA-C*16:04; RAC1; P29S; 0
NAFSGEYIP

SEQ ID NO: 16116 - protein, 10 aa, Homo sapiens
  Table A; HLA-A*02:05; RAC1; P29S; 0
NAFSGEYIPT

SEQ ID NO: 16117 - protein, 10 aa, Homo sapiens
  Table A; HLA-A*33:03; RAC1; P29S; 0
NAFSGEYIPT

SEQ ID NO: 16118 - protein, 10 aa, Homo sapiens
  Table A; HLA-A*68:01; RAC1; P29S; 1
NAFSGEYIPT

SEQ ID NO: 16119 - protein, 10 aa, Homo sapiens
  Table A; HLA-A*68:02; RAC1; P29S; 0
NAFSGEYIPT

SEQ ID NO: 16120 - protein, 10 aa, Homo sapiens
  Table A; HLA-B*08:01; RAC1; P29S; 1
NAFSGEYIPT

SEQ ID NO: 16121 - protein, 10 aa, Homo sapiens
  Table A; HLA-B*27:02; RAC1; P29S; 0
NAFSGEYIPT

SEQ ID NO: 16122 - protein, 10 aa, Homo sapiens
  Table A; HLA-B*35:01; RAC1; P29S; 1
NAFSGEYIPT

SEQ ID NO: 16123 - protein, 10 aa, Homo sapiens
  Table A; HLA-B*35:03; RAC1; P29S; 0
NAFSGEYIPT

SEQ ID NO: 16124 - protein, 10 aa, Homo sapiens
  Table A; HLA-B*48:01; RAC1; P29S; 0
NAFSGEYIPT

SEQ ID NO: 16125 - protein, 10 aa, Homo sapiens
  Table A; HLA-B*54:01; RAC1; P29S; 0
NAFSGEYIPT

SEQ ID NO: 16126 - protein, 10 aa, Homo sapiens
  Table A; HLA-C*07:04; RAC1; P29S; 0
NAFSGEYIPT

SEQ ID NO: 16127 - protein, 10 aa, Homo sapiens
  Table A; HLA-C*08:01; RAC1; P29S; 0
NAFSGEYIPT

SEQ ID NO: 16128 - protein, 10 aa, Homo sapiens
  Table A; HLA-C*08:03; RAC1; P29S; 0
NAFSGEYIPT

SEQ ID NO: 16129 - protein, 10 aa, Homo sapiens
  Table A; HLA-C*16:04; RAC1; P29S; 0
NAFSGEYIPT

SEQ ID NO: 16130 - protein, 11 aa, Homo sapiens
  Table A; HLA-A*02:01; RAC1; P29S; 1
NAFSGEYIPTV

SEQ ID NO: 16131 - protein, 11 aa, Homo sapiens
  Table A; HLA-A*02:03; RAC1; P29S; 0
NAFSGEYIPTV

SEQ ID NO: 16132 - protein, 11 aa, Homo sapiens
  Table A; HLA-A*02:04; RAC1; P29S; 0
NAFSGEYIPTV

SEQ ID NO: 16133 - protein, 11 aa, Homo sapiens
  Table A; HLA-A*02:05; RAC1; P29S; 0
NAFSGEYIPTV

SEQ ID NO: 16134 - protein, 11 aa, Homo sapiens
  Table A; HLA-A*02:07; RAC1; P29S; 0
NAFSGEYIPTV

SEQ ID NO: 16135 - protein, 11 aa, Homo sapiens
  Table A; HLA-A*30:01; RAC1; P29S; 0
NAFSGEYIPTV

SEQ ID NO: 16136 - protein, 11 aa, Homo sapiens
  Table A; HLA-A*68:02; RAC1; P29S; 0
NAFSGEYIPTV

SEQ ID NO: 16137 - protein, 11 aa, Homo sapiens
  Table A; HLA-B*50:01; RAC1; P29S; 0
NAFSGEYIPTV

SEQ ID NO: 16138 - protein, 11 aa, Homo sapiens
  Table A; HLA-B*51:01; RAC1; P29S; 1
NAFSGEYIPTV

SEQ ID NO: 16139 - protein, 11 aa, Homo sapiens
  Table A; HLA-B*54:01; RAC1; P29S; 0
NAFSGEYIPTV

SEQ ID NO: 16140 - protein, 11 aa, Homo sapiens
  Table A; HLA-C*12:03; RAC1; P29S; 1
NAFSGEYIPTV

SEQ ID NO: 16141 - protein, 11 aa, Homo sapiens
  Table A; HLA-C*16:02; RAC1; P29S; 0
NAFSGEYIPTV

SEQ ID NO: 16142 - protein, 8 aa, Homo sapiens
  Table A; HLA-B*14:02; PIK3CA; H1047L; 1
NDALHGGW

SEQ ID NO: 16143 - protein, 8 aa, Homo sapiens
  Table A; HLA-B*44:02; PIK3CA; H1047L; 1
NDALHGGW

SEQ ID NO: 16144 - protein, 8 aa, Homo sapiens
  Table A; HLA-B*44:03; PIK3CA; H1047L; 1
NDALHGGW

SEQ ID NO: 16145 - protein, 8 aa, Homo sapiens
  Table A; HLA-B*44:05; PIK3CA; H1047L; 0
NDALHGGW

SEQ ID NO: 16146 - protein, 8 aa, Homo sapiens
  Table A; HLA-B*44:05; PIK3CA; H1047Q; 0
NDAQHGGW

SEQ ID NO: 16147 - protein, 8 aa, Homo sapiens
  Table A; HLA-B*44:05; PIK3CA; H1047Y; 0
NDAYHGGW

SEQ ID NO: 16148 - protein, 9 aa, Homo sapiens
  Table A; HLA-A*68:02; GRIN2A; S1425L; 0
NDVYILEHV

SEQ ID NO: 16149 - protein, 9 aa, Homo sapiens
  Table A; HLA-A*23:01; CHST11; A159T; 0
NEAHVSTNL

SEQ ID NO: 16150 - protein, 9 aa, Homo sapiens
  Table A; HLA-A*30:01; CHST11; A159T; 0
NEAHVSTNL

SEQ ID NO: 16151 - protein, 9 aa, Homo sapiens
  Table A; HLA-A*68:02; CHST11; A159T; 0
NEAHVSTNL

SEQ ID NO: 16152 - protein, 9 aa, Homo sapiens
  Table A; HLA-B*18:01; CHST11; A159T; 1
NEAHVSTNL

SEQ ID NO: 16153 - protein, 9 aa, Homo sapiens
  Table A; HLA-B*38:01; CHST11; A159T; 0
NEAHVSTNL

SEQ ID NO: 16154 - protein, 9 aa, Homo sapiens
  Table A; HLA-B*39:01; CHST11; A159T; 0
NEAHVSTNL

SEQ ID NO: 16155 - protein, 9 aa, Homo sapiens
  Table A; HLA-B*40:01; CHST11; A159T; 1
NEAHVSTNL

SEQ ID NO: 16156 - protein, 9 aa, Homo sapiens
  Table A; HLA-B*40:02; CHST11; A159T; 0
NEAHVSTNL

SEQ ID NO: 16157 - protein, 9 aa, Homo sapiens
  Table A; HLA-B*41:02; CHST11; A159T; 0
NEAHVSTNL

SEQ ID NO: 16158 - protein, 9 aa, Homo sapiens
  Table A; HLA-B*44:02; CHST11; A159T; 1
NEAHVSTNL

SEQ ID NO: 16159 - protein, 9 aa, Homo sapiens
  Table A; HLA-B*44:03; CHST11; A159T; 1
NEAHVSTNL

SEQ ID NO: 16160 - protein, 9 aa, Homo sapiens
  Table A; HLA-B*44:05; CHST11; A159T; 0
NEAHVSTNL

SEQ ID NO: 16161 - protein, 9 aa, Homo sapiens
  Table A; HLA-B*49:01; CHST11; A159T; 0
NEAHVSTNL

SEQ ID NO: 16162 - protein, 9 aa, Homo sapiens
  Table A; HLA-B*58:01; CHST11; A159T; 0
NEAHVSTNL

SEQ ID NO: 16163 - protein, 10 aa, Homo sapiens
  Table A; HLA-A*68:01; CHST11; A159T; 0
NEAHVSTNLK

SEQ ID NO: 16164 - protein, 8 aa, Homo sapiens
  Table A; HLA-B*40:01; PPP2R1A; R28C; 1
NEDVQLCL

SEQ ID NO: 16165 - protein, 8 aa, Homo sapiens
  Table A; HLA-B*40:02; PPP2R1A; R28C; 0
NEDVQLCL

SEQ ID NO: 16166 - protein, 8 aa, Homo sapiens
  Table A; HLA-B*44:05; PPP2R1A; R28C; 0
NEDVQLCL

SEQ ID NO: 16167 - protein, 11 aa, Homo sapiens
  Table A; HLA-B*44:05; PPP2R1A; R28C; 0
NEDVQLCLNSI

SEQ ID NO: 16168 - protein, 8 aa, Homo sapiens
  Table A; HLA-A*23:01; CTNND1; A781T; 0
NEVITENL

SEQ ID NO: 16169 - protein, 8 aa, Homo sapiens
  Table A; HLA-A*30:01; CTNND1; A781T; 0
NEVITENL

SEQ ID NO: 16170 - protein, 8 aa, Homo sapiens
  Table A; HLA-B*18:01; CTNND1; A781T; 0
NEVITENL

SEQ ID NO: 16171 - protein, 8 aa, Homo sapiens
  Table A; HLA-B*37:01; CTNND1; A781T; 0
NEVITENL

SEQ ID NO: 16172 - protein, 8 aa, Homo sapiens
  Table A; HLA-B*40:01; CTNND1; A781T; 0
NEVITENL

SEQ ID NO: 16173 - protein, 8 aa, Homo sapiens
  Table A; HLA-B*40:02; CTNND1; A781T; 0
NEVITENL

SEQ ID NO: 16174 - protein, 8 aa, Homo sapiens
  Table A; HLA-B*41:02; CTNND1; A781T; 0
NEVITENL

SEQ ID NO: 16175 - protein, 8 aa, Homo sapiens
  Table A; HLA-B*44:05; CTNND1; A781T; 0
NEVITENL

SEQ ID NO: 16176 - protein, 8 aa, Homo sapiens
  Table A; HLA-B*49:01; CTNND1; A781T; 0
NEVITENL

SEQ ID NO: 16177 - protein, 8 aa, Homo sapiens
  Table A; HLA-B*58:01; CTNND1; A781T; 0
NEVITENL

SEQ ID NO: 16178 - protein, 10 aa, Homo sapiens
  Table A; HLA-A*02:05; CTNND1; A781T; 0
NEVITENLEA

SEQ ID NO: 16179 - protein, 10 aa, Homo sapiens
  Table A; HLA-B*40:02; CTNND1; A781T; 0
NEVITENLEA

SEQ ID NO: 16180 - protein, 10 aa, Homo sapiens
  Table A; HLA-B*50:01; CTNND1; A781T; 0
NEVITENLEA

SEQ ID NO: 16181 - protein, 11 aa, Homo sapiens
  Table A; HLA-B*40:02; CTNND1; A781T; 0
NEVITENLEAA

SEQ ID NO: 16182 - protein, 11 aa, Homo sapiens
  Table A; HLA-B*40:06; CTNND1; A781T; 0
NEVITENLEAA

SEQ ID NO: 16183 - protein, 11 aa, Homo sapiens
  Table A; HLA-B*50:01; CTNND1; A781T; 0
NEVITENLEAA

SEQ ID NO: 16184 - protein, 8 aa, Homo sapiens
  Table A; HLA-C*14:02; MTOR; E1799K; 0
NFKAVLHY

SEQ ID NO: 16185 - protein, 8 aa, Homo sapiens
  Table A; HLA-A*02:05; RGS7; R44C; 0
NGIPICTV

SEQ ID NO: 16186 - protein, 8 aa, Homo sapiens
  Table A; HLA-B*39:06; RGS7; R44C; 0
NGIPICTV

SEQ ID NO: 16187 - protein, 8 aa, Homo sapiens
  Table A; HLA-B*51:01; RGS7; R44C; 1
NGIPICTV

SEQ ID NO: 16188 - protein, 9 aa, Homo sapiens
  Table A; HLA-A*33:03; PIK3CA; R108H; 0
NHEEKILNR

SEQ ID NO: 16189 - protein, 9 aa, Homo sapiens
  Table A; HLA-A*68:01; PIK3CA; R108H; 0
NHEEKILNR

SEQ ID NO: 16190 - protein, 9 aa, Homo sapiens
  Table A; HLA-B*15:02; PIK3CA; K111N; 0
NILNREIGF

SEQ ID NO: 16191 - protein, 10 aa, Homo sapiens
  Table A; HLA-A*68:02; CTNNB1; K335I; 0
NIMRTYTYEI

SEQ ID NO: 16192 - protein, 9 aa, Homo sapiens
  Table A; HLA-A*02:04; SMARCA4; E920K; 0
NKLPKLWAL

SEQ ID NO: 16193 - protein, 10 aa, Homo sapiens
  Table A; HLA-B*27:02; ARID2; S297F; 0
NLFFEEGNVK

SEQ ID NO: 16194 - protein, 11 aa, Homo sapiens
  Table A; HLA-A*02:01; ARID2; S297F; 1
NLFFEEGNVKL

SEQ ID NO: 16195 - protein, 11 aa, Homo sapiens
  Table A; HLA-A*02:04; ARID2; S297F; 0
NLFFEEGNVKL

SEQ ID NO: 16196 - protein, 11 aa, Homo sapiens
  Table A; HLA-A*02:05; ARID2; S297F; 0
NLFFEEGNVKL

SEQ ID NO: 16197 - protein, 8 aa, Homo sapiens
  Table A; HLA-B*08:01; TP53; G266E; 1
NLLERNSF

SEQ ID NO: 16198 - protein, 10 aa, Homo sapiens
  Table A; HLA-A*02:01; TP53; G266E; 1
NLLERNSFEV

SEQ ID NO: 16199 - protein, 10 aa, Homo sapiens
  Table A; HLA-A*02:04; TP53; G266E; 0
NLLERNSFEV

SEQ ID NO: 16200 - protein, 11 aa, Homo sapiens
  Table A; HLA-A*33:01; TP53; G266E; 0
NLLERNSFEVR

SEQ ID NO: 16201 - protein, 11 aa, Homo sapiens
  Table A; HLA-A*33:01; TP53; E271K; 0
NLLGRNSFKVR

SEQ ID NO: 16202 - protein, 11 aa, Homo sapiens
  Table A; HLA-A*02:07; ROBO2; D1014N; 0
NLPDPQWKSSI

SEQ ID NO: 16203 - protein, 8 aa, Homo sapiens
  Table A; HLA-A*02:03; TP53; R248L; 0
NLRPILTI

SEQ ID NO: 16204 - protein, 8 aa, Homo sapiens
  Table A; HLA-B*13:02; TP53; R248L; 0
NLRPILTI

SEQ ID NO: 16205 - protein, 9 aa, Homo sapiens
  Table A; HLA-A*02:03; TP53; R248L; 0
NLRPILTII

SEQ ID NO: 16206 - protein, 9 aa, Homo sapiens
  Table A; HLA-A*02:04; TP53; R248L; 0
NLRPILTII

SEQ ID NO: 16207 - protein, 11 aa, Homo sapiens
  Table A; HLA-A*02:03; TP53; R248L; 0
NLRPILTIITL

SEQ ID NO: 16208 - protein, 11 aa, Homo sapiens
  Table A; HLA-A*02:04; TP53; R248L; 0
NLRPILTIITL

SEQ ID NO: 16209 - protein, 9 aa, Homo sapiens
  Table A; HLA-A*02:01; SF3B1; R625H; 1
NMDEYVHNT

SEQ ID NO: 16210 - protein, 9 aa, Homo sapiens
  Table A; HLA-A*02:07; SF3B1; R625H; 0
NMDEYVHNT

SEQ ID NO: 16211 - protein, 9 aa, Homo sapiens
  Table A; HLA-C*08:03; SF3B1; R625H; 0
NMDEYVHNT

SEQ ID NO: 16212 - protein, 10 aa, Homo sapiens
  Table A; HLA-B*48:01; SF3B1; R625H; 0
NMDEYVHNTT

SEQ ID NO: 16213 - protein, 9 aa, Homo sapiens
  Table A; HLA-B*39:06; ABI1; K445N; 0
NNYIEKVVA

SEQ ID NO: 16214 - protein, 9 aa, Homo sapiens
  Table A; HLA-A*33:01; GLI1; R637Q; 0
NPNAGVTQR

SEQ ID NO: 16215 - protein, 9 aa, Homo sapiens
  Table A; HLA-A*33:03; GLI1; R637Q; 0
NPNAGVTQR

SEQ ID NO: 16216 - protein, 9 aa, Homo sapiens
  Table A; HLA-A*68:01; GLI1; R637Q; 0
NPNAGVTQR

SEQ ID NO: 16217 - protein, 10 aa, Homo sapiens
  Table A; HLA-B*54:01; GLI1; R637Q; 0
NPNAGVTQRA

SEQ ID NO: 16218 - protein, 10 aa, Homo sapiens
  Table A; HLA-B*55:02; GLI1; R637Q; 0
NPNAGVTQRA

SEQ ID NO: 16219 - protein, 10 aa, Homo sapiens
  Table A; HLA-B*56:01; GLI1; R637Q; 0
NPNAGVTQRA

SEQ ID NO: 16220 - protein, 10 aa, Homo sapiens
  Table A; HLA-B*35:01; PTPRT; L695F; 1
NPPFSPLKSY

SEQ ID NO: 16221 - protein, 8 aa, Homo sapiens
  Table A; HLA-A*02:05; BMP5; R208Q; 0
NQFENETI

SEQ ID NO: 16222 - protein, 8 aa, Homo sapiens
  Table A; HLA-B*13:02; BMP5; R208Q; 0
NQFENETI

SEQ ID NO: 16223 - protein, 8 aa, Homo sapiens
  Table A; HLA-B*39:06; BMP5; R208Q; 0
NQFENETI

SEQ ID NO: 16224 - protein, 10 aa, Homo sapiens
  Table A; HLA-A*02:04; BMP5; R208Q; 0
NQFENETIKI

SEQ ID NO: 16225 - protein, 10 aa, Homo sapiens
  Table A; HLA-A*02:05; BMP5; R208Q; 0
NQFENETIKI

SEQ ID NO: 16226 - protein, 10 aa, Homo sapiens
  Table A; HLA-A*02:06; BMP5; R208Q; 0
NQFENETIKI

SEQ ID NO: 16227 - protein, 10 aa, Homo sapiens
  Table A; HLA-A*02:08; BMP5; R208Q; 0
NQFENETIKI

SEQ ID NO: 16228 - protein, 10 aa, Homo sapiens
  Table A; HLA-B*13:02; BMP5; R208Q; 0
NQFENETIKI

SEQ ID NO: 16229 - protein, 10 aa, Homo sapiens
  Table A; HLA-B*38:01; BMP5; R208Q; 0
NQFENETIKI

SEQ ID NO: 16230 - protein, 10 aa, Homo sapiens
  Table A; HLA-B*50:01; BMP5; R208Q; 0
NQFENETIKI

SEQ ID NO: 16231 - protein, 8 aa, Homo sapiens
  Table A; HLA-B*13:02; TP53; R248Q; 1
NQRPILTI

SEQ ID NO: 16232 - protein, 8 aa, Homo sapiens
  Table A; HLA-B*14:02; TP53; R248Q; 1
NQRPILTI

SEQ ID NO: 16233 - protein, 8 aa, Homo sapiens
  Table A; HLA-B*15:01; TP53; R248Q; 1
NQRPILTI

SEQ ID NO: 16234 - protein, 8 aa, Homo sapiens
  Table A; HLA-B*15:10; TP53; R248Q; 0
NQRPILTI

SEQ ID NO: 16235 - protein, 8 aa, Homo sapiens
  Table A; HLA-B*39:06; TP53; R248Q; 0
NQRPILTI

SEQ ID NO: 16236 - protein, 8 aa, Homo sapiens
  Table A; HLA-B*51:01; TP53; R248Q; 1
NQRPILTI

SEQ ID NO: 16237 - protein, 9 aa, Homo sapiens
  Table A; HLA-A*02:03; TP53; R248Q; 0
NQRPILTII

SEQ ID NO: 16238 - protein, 9 aa, Homo sapiens
  Table A; HLA-A*02:04; TP53; R248Q; 0
NQRPILTII

SEQ ID NO: 16239 - protein, 9 aa, Homo sapiens
  Table A; HLA-A*30:01; TP53; R248Q; 0
NQRPILTII

SEQ ID NO: 16240 - protein, 9 aa, Homo sapiens
  Table A; HLA-B*13:02; TP53; R248Q; 1
NQRPILTII

SEQ ID NO: 16241 - protein, 9 aa, Homo sapiens
  Table A; HLA-B*15:10; TP53; R248Q; 0
NQRPILTII

SEQ ID NO: 16242 - protein, 9 aa, Homo sapiens
  Table A; HLA-B*39:06; TP53; R248Q; 0
NQRPILTII

SEQ ID NO: 16243 - protein, 9 aa, Homo sapiens
  Table A; HLA-B*48:01; TP53; R248Q; 0
NQRPILTII

SEQ ID NO: 16244 - protein, 9 aa, Homo sapiens
  Table A; HLA-C*12:03; TP53; R248Q; 1
NQRPILTII

SEQ ID NO: 16245 - protein, 9 aa, Homo sapiens
  Table A; HLA-A*02:05; ARID2; S990L; 0
NQVPTAMSL

SEQ ID NO: 16246 - protein, 9 aa, Homo sapiens
  Table A; HLA-A*02:06; ARID2; S990L; 0
NQVPTAMSL

SEQ ID NO: 16247 - protein, 9 aa, Homo sapiens
  Table A; HLA-A*30:01; ARID2; S990L; 0
NQVPTAMSL

SEQ ID NO: 16248 - protein, 9 aa, Homo sapiens
  Table A; HLA-B*13:02; ARID2; S990L; 0
NQVPTAMSL

SEQ ID NO: 16249 - protein, 9 aa, Homo sapiens
  Table A; HLA-B*14:01; ARID2; S990L; 0
NQVPTAMSL

SEQ ID NO: 16250 - protein, 9 aa, Homo sapiens
  Table A; HLA-B*14:02; ARID2; S990L; 0
NQVPTAMSL

SEQ ID NO: 16251 - protein, 9 aa, Homo sapiens
  Table A; HLA-B*15:01; ARID2; S990L; 0
NQVPTAMSL

SEQ ID NO: 16252 - protein, 9 aa, Homo sapiens
  Table A; HLA-B*15:02; ARID2; S990L; 0
NQVPTAMSL

SEQ ID NO: 16253 - protein, 9 aa, Homo sapiens
  Table A; HLA-B*15:03; ARID2; S990L; 0
NQVPTAMSL

SEQ ID NO: 16254 - protein, 9 aa, Homo sapiens
  Table A; HLA-B*15:10; ARID2; S990L; 0
NQVPTAMSL

SEQ ID NO: 16255 - protein, 9 aa, Homo sapiens
  Table A; HLA-B*15:13; ARID2; S990L; 0
NQVPTAMSL

SEQ ID NO: 16256 - protein, 9 aa, Homo sapiens
  Table A; HLA-B*35:01; ARID2; S990L; 0
NQVPTAMSL

SEQ ID NO: 16257 - protein, 9 aa, Homo sapiens
  Table A; HLA-B*35:03; ARID2; S990L; 0
NQVPTAMSL

SEQ ID NO: 16258 - protein, 9 aa, Homo sapiens
  Table A; HLA-B*38:01; ARID2; S990L; 0
NQVPTAMSL

SEQ ID NO: 16259 - protein, 9 aa, Homo sapiens
  Table A; HLA-B*39:01; ARID2; S990L; 0
NQVPTAMSL

SEQ ID NO: 16260 - protein, 9 aa, Homo sapiens
  Table A; HLA-B*39:06; ARID2; S990L; 0
NQVPTAMSL

SEQ ID NO: 16261 - protein, 9 aa, Homo sapiens
  Table A; HLA-B*40:01; ARID2; S990L; 0
NQVPTAMSL

SEQ ID NO: 16262 - protein, 9 aa, Homo sapiens
  Table A; HLA-B*40:02; ARID2; S990L; 0
NQVPTAMSL

SEQ ID NO: 16263 - protein, 9 aa, Homo sapiens
  Table A; HLA-B*44:05; ARID2; S990L; 0
NQVPTAMSL

SEQ ID NO: 16264 - protein, 9 aa, Homo sapiens
  Table A; HLA-B*48:01; ARID2; S990L; 0
NQVPTAMSL

SEQ ID NO: 16265 - protein, 9 aa, Homo sapiens
  Table A; HLA-B*50:01; ARID2; S990L; 0
NQVPTAMSL

SEQ ID NO: 16266 - protein, 9 aa, Homo sapiens
  Table A; HLA-C*03:03; ARID2; S990L; 0
NQVPTAMSL

SEQ ID NO: 16267 - protein, 9 aa, Homo sapiens
  Table A; HLA-C*03:04; ARID2; S990L; 0
NQVPTAMSL

SEQ ID NO: 16268 - protein, 9 aa, Homo sapiens
  Table A; HLA-C*08:01; ARID2; S990L; 0
NQVPTAMSL

SEQ ID NO: 16269 - protein, 9 aa, Homo sapiens
  Table A; HLA-C*08:03; ARID2; S990L; 0
NQVPTAMSL

SEQ ID NO: 16270 - protein, 9 aa, Homo sapiens
  Table A; HLA-A*33:03; PIK3CA; K111N; 0
NREENILNR

SEQ ID NO: 16271 - protein, 9 aa, Homo sapiens
  Table A; HLA-B*27:02; PIK3CA; K111N; 0
NREENILNR

SEQ ID NO: 16272 - protein, 9 aa, Homo sapiens
  Table A; HLA-B*27:05; PIK3CA; K111N; 0
NREENILNR

SEQ ID NO: 16273 - protein, 10 aa, Homo sapiens
  Table A; HLA-B*27:05; KEAP1; D422N; 0
NRIGVGVING

SEQ ID NO: 16274 - protein, 10 aa, Homo sapiens
  Table A; HLA-B*39:01; KEAP1; D422N; 0
NRIGVGVING

SEQ ID NO: 16275 - protein, 8 aa, Homo sapiens
  Table A; HLA-B*14:01; TP53; R249M; 0
NRMPILTI

SEQ ID NO: 16276 - protein, 8 aa, Homo sapiens
  Table A; HLA-B*39:06; TP53; R249M; 0
NRMPILTI

SEQ ID NO: 16277 - protein, 8 aa, Homo sapiens
  Table A; HLA-C*06:02; TP53; R249M; 1
NRMPILTI

SEQ ID NO: 16278 - protein, 9 aa, Homo sapiens
  Table A; HLA-B*27:05; TP53; R249M; 0
NRMPILTII

SEQ ID NO: 16279 - protein, 9 aa, Homo sapiens
  Table A; HLA-B*38:01; TP53; R249M; 0
NRMPILTII

SEQ ID NO: 16280 - protein, 9 aa, Homo sapiens
  Table A; HLA-B*39:06; TP53; R249M; 0
NRMPILTII

SEQ ID NO: 16281 - protein, 9 aa, Homo sapiens
  Table A; HLA-C*06:02; TP53; R249M; 1
NRMPILTII

SEQ ID NO: 16282 - protein, 8 aa, Homo sapiens
  Table A; HLA-B*14:02; TP53; R249S; 1
NRSPILTI

SEQ ID NO: 16283 - protein, 8 aa, Homo sapiens
  Table A; HLA-B*38:01; TP53; R249S; 1
NRSPILTI

SEQ ID NO: 16284 - protein, 8 aa, Homo sapiens
  Table A; HLA-B*39:01; TP53; R249S; 0
NRSPILTI

SEQ ID NO: 16285 - protein, 8 aa, Homo sapiens
  Table A; HLA-C*06:02; TP53; R249S; 1
NRSPILTI

SEQ ID NO: 16286 - protein, 9 aa, Homo sapiens
  Table A; HLA-A*68:02; TP53; R249S; 0
NRSPILTII

SEQ ID NO: 16287 - protein, 9 aa, Homo sapiens
  Table A; HLA-B*27:05; TP53; R249S; 1
NRSPILTII

SEQ ID NO: 16288 - protein, 9 aa, Homo sapiens
  Table A; HLA-B*38:01; TP53; R249S; 1
NRSPILTII

SEQ ID NO: 16289 - protein, 9 aa, Homo sapiens
  Table A; HLA-C*06:02; TP53; R249S; 1
NRSPILTII

SEQ ID NO: 16290 - protein, 8 aa, Homo sapiens
  Table A; HLA-B*27:02; TP53; I195N; 0
NRVEGNLR

SEQ ID NO: 16291 - protein, 8 aa, Homo sapiens
  Table A; HLA-B*27:05; TP53; I195N; 0
NRVEGNLR

SEQ ID NO: 16292 - protein, 9 aa, Homo sapiens
  Table A; HLA-B*15:10; TP53; I195N; 0
NRVEGNLRV

SEQ ID NO: 16293 - protein, 9 aa, Homo sapiens
  Table A; HLA-B*27:05; TP53; I195N; 0
NRVEGNLRV

SEQ ID NO: 16294 - protein, 9 aa, Homo sapiens
  Table A; HLA-B*39:01; TP53; I195N; 0
NRVEGNLRV

SEQ ID NO: 16295 - protein, 9 aa, Homo sapiens
  Table A; HLA-B*39:06; TP53; I195N; 0
NRVEGNLRV

SEQ ID NO: 16296 - protein, 9 aa, Homo sapiens
  Table A; HLA-C*06:02; TP53; R249W; 1
NRWPILTII

SEQ ID NO: 16297 - protein, 9 aa, Homo sapiens
  Table A; HLA-A*11:01; CNTNAP2; E149K; 1
NSDGVVRHK

SEQ ID NO: 16298 - protein, 10 aa, Homo sapiens
  Table A; HLA-A*68:01; TP53; S241F; 0
NSFCMGGMNR

SEQ ID NO: 16299 - protein, 9 aa, Homo sapiens
  Table A; HLA-A*02:05; TP53; V272M; 0
NSFEMRVCA

SEQ ID NO: 16300 - protein, 9 aa, Homo sapiens
  Table A; HLA-B*39:06; TP53; V272M; 0
NSFEMRVCA

SEQ ID NO: 16301 - protein, 9 aa, Homo sapiens
  Table A; HLA-B*50:01; TP53; V272M; 0
NSFEMRVCA

SEQ ID NO: 16302 - protein, 9 aa, Homo sapiens
  Table A; HLA-B*54:01; TP53; V272M; 0
NSFEMRVCA

SEQ ID NO: 16303 - protein, 8 aa, Homo sapiens
  Table A; HLA-B*39:06; TP53; R273C; 0
NSFEVCVC

SEQ ID NO: 16304 - protein, 9 aa, Homo sapiens
  Table A; HLA-A*02:05; TP53; R273C; 0
NSFEVCVCA

SEQ ID NO: 16305 - protein, 9 aa, Homo sapiens
  Table A; HLA-A*68:02; TP53; R273C; 0
NSFEVCVCA

SEQ ID NO: 16306 - protein, 9 aa, Homo sapiens
  Table A; HLA-B*39:06; TP53; R273C; 0
NSFEVCVCA

SEQ ID NO: 16307 - protein, 9 aa, Homo sapiens
  Table A; HLA-B*54:01; TP53; R273C; 0
NSFEVCVCA

SEQ ID NO: 16308 - protein, 8 aa, Homo sapiens
  Table A; HLA-B*08:01; TP53; R273H; 1
NSFEVHVC

SEQ ID NO: 16309 - protein, 8 aa, Homo sapiens
  Table A; HLA-B*39:06; TP53; R273H; 0
NSFEVHVC

SEQ ID NO: 16310 - protein, 8 aa, Homo sapiens
  Table A; HLA-B*40:02; TP53; R273H; 0
NSFEVHVC

SEQ ID NO: 16311 - protein, 8 aa, Homo sapiens
  Table A; HLA-B*48:01; TP53; R273H; 0
NSFEVHVC

SEQ ID NO: 16312 - protein, 8 aa, Homo sapiens
  Table A; HLA-B*54:01; TP53; R273H; 0
NSFEVHVC

SEQ ID NO: 16313 - protein, 8 aa, Homo sapiens
  Table A; HLA-C*12:03; TP53; R273H; 1
NSFEVHVC

SEQ ID NO: 16314 - protein, 9 aa, Homo sapiens
  Table A; HLA-A*02:05; TP53; R273H; 0
NSFEVHVCA

SEQ ID NO: 16315 - protein, 9 aa, Homo sapiens
  Table A; HLA-A*02:06; TP53; R273H; 0
NSFEVHVCA

SEQ ID NO: 16316 - protein, 9 aa, Homo sapiens
  Table A; HLA-A*30:01; TP53; R273H; 0
NSFEVHVCA

SEQ ID NO: 16317 - protein, 9 aa, Homo sapiens
  Table A; HLA-A*68:01; TP53; R273H; 1
NSFEVHVCA

SEQ ID NO: 16318 - protein, 9 aa, Homo sapiens
  Table A; HLA-A*68:02; TP53; R273H; 0
NSFEVHVCA

SEQ ID NO: 16319 - protein, 9 aa, Homo sapiens
  Table A; HLA-B*39:06; TP53; R273H; 0
NSFEVHVCA

SEQ ID NO: 16320 - protein, 9 aa, Homo sapiens
  Table A; HLA-B*50:01; TP53; R273H; 0
NSFEVHVCA

SEQ ID NO: 16321 - protein, 9 aa, Homo sapiens
  Table A; HLA-B*54:01; TP53; R273H; 0
NSFEVHVCA

SEQ ID NO: 16322 - protein, 9 aa, Homo sapiens
  Table A; HLA-B*55:02; TP53; R273H; 0
NSFEVHVCA

SEQ ID NO: 16323 - protein, 9 aa, Homo sapiens
  Table A; HLA-C*08:01; TP53; R273H; 0
NSFEVHVCA

SEQ ID NO: 16324 - protein, 9 aa, Homo sapiens
  Table A; HLA-C*16:04; TP53; R273H; 0
NSFEVHVCA

SEQ ID NO: 16325 - protein, 8 aa, Homo sapiens
  Table A; HLA-B*39:06; TP53; R273L; 0
NSFEVLVC

SEQ ID NO: 16326 - protein, 8 aa, Homo sapiens
  Table A; HLA-B*54:01; TP53; R273L; 0
NSFEVLVC

SEQ ID NO: 16327 - protein, 8 aa, Homo sapiens
  Table A; HLA-C*12:03; TP53; R273L; 0
NSFEVLVC

SEQ ID NO: 16328 - protein, 9 aa, Homo sapiens
  Table A; HLA-A*02:05; TP53; R273L; 0
NSFEVLVCA

SEQ ID NO: 16329 - protein, 9 aa, Homo sapiens
  Table A; HLA-A*02:06; TP53; R273L; 0
NSFEVLVCA

SEQ ID NO: 16330 - protein, 9 aa, Homo sapiens
  Table A; HLA-A*68:01; TP53; R273L; 0
NSFEVLVCA

SEQ ID NO: 16331 - protein, 9 aa, Homo sapiens
  Table A; HLA-A*68:02; TP53; R273L; 0
NSFEVLVCA

SEQ ID NO: 16332 - protein, 9 aa, Homo sapiens
  Table A; HLA-B*39:06; TP53; R273L; 0
NSFEVLVCA

SEQ ID NO: 16333 - protein, 9 aa, Homo sapiens
  Table A; HLA-B*50:01; TP53; R273L; 0
NSFEVLVCA

SEQ ID NO: 16334 - protein, 9 aa, Homo sapiens
  Table A; HLA-B*54:01; TP53; R273L; 0
NSFEVLVCA

SEQ ID NO: 16335 - protein, 9 aa, Homo sapiens
  Table A; HLA-B*55:02; TP53; R273L; 0
NSFEVLVCA

SEQ ID NO: 16336 - protein, 9 aa, Homo sapiens
  Table A; HLA-B*56:01; TP53; R273L; 0
NSFEVLVCA

SEQ ID NO: 16337 - protein, 8 aa, Homo sapiens
  Table A; HLA-A*23:01; TP53; C275Y; 0
NSFEVRVY

SEQ ID NO: 16338 - protein, 8 aa, Homo sapiens
  Table A; HLA-B*08:01; TP53; C275Y; 0
NSFEVRVY

SEQ ID NO: 16339 - protein, 8 aa, Homo sapiens
  Table A; HLA-B*15:01; TP53; C275Y; 0
NSFEVRVY

SEQ ID NO: 16340 - protein, 8 aa, Homo sapiens
  Table A; HLA-B*15:02; TP53; C275Y; 0
NSFEVRVY

SEQ ID NO: 16341 - protein, 8 aa, Homo sapiens
  Table A; HLA-B*15:03; TP53; C275Y; 0
NSFEVRVY

SEQ ID NO: 16342 - protein, 8 aa, Homo sapiens
  Table A; HLA-B*18:01; TP53; C275Y; 0
NSFEVRVY

SEQ ID NO: 16343 - protein, 8 aa, Homo sapiens
  Table A; HLA-B*35:01; TP53; C275Y; 0
NSFEVRVY

SEQ ID NO: 16344 - protein, 8 aa, Homo sapiens
  Table A; HLA-B*46:01; TP53; C275Y; 0
NSFEVRVY

SEQ ID NO: 16345 - protein, 8 aa, Homo sapiens
  Table A; HLA-B*57:01; TP53; C275Y; 0
NSFEVRVY

SEQ ID NO: 16346 - protein, 8 aa, Homo sapiens
  Table A; HLA-B*58:01; TP53; C275Y; 0
NSFEVRVY

SEQ ID NO: 16347 - protein, 8 aa, Homo sapiens
  Table A; HLA-C*03:02; TP53; C275Y; 0
NSFEVRVY

SEQ ID NO: 16348 - protein, 8 aa, Homo sapiens
  Table A; HLA-C*07:01; TP53; C275Y; 1
NSFEVRVY

SEQ ID NO: 16349 - protein, 8 aa, Homo sapiens
  Table A; HLA-C*08:01; TP53; C275Y; 0
NSFEVRVY

SEQ ID NO: 16350 - protein, 8 aa, Homo sapiens
  Table A; HLA-C*12:03; TP53; C275Y; 0
NSFEVRVY

SEQ ID NO: 16351 - protein, 8 aa, Homo sapiens
  Table A; HLA-C*16:01; TP53; C275Y; 0
NSFEVRVY

SEQ ID NO: 16352 - protein, 8 aa, Homo sapiens
  Table A; HLA-C*16:02; TP53; C275Y; 0
NSFEVRVY

SEQ ID NO: 16353 - protein, 8 aa, Homo sapiens
  Table A; HLA-C*16:04; TP53; C275Y; 0
NSFEVRVY

SEQ ID NO: 16354 - protein, 9 aa, Homo sapiens
  Table A; HLA-A*02:05; TP53; C275Y; 0
NSFEVRVYA

SEQ ID NO: 16355 - protein, 9 aa, Homo sapiens
  Table A; HLA-A*33:03; TP53; C275Y; 0
NSFEVRVYA

SEQ ID NO: 16356 - protein, 9 aa, Homo sapiens
  Table A; HLA-A*68:02; TP53; C275Y; 0
NSFEVRVYA

SEQ ID NO: 16357 - protein, 9 aa, Homo sapiens
  Table A; HLA-B*39:06; TP53; C275Y; 0
NSFEVRVYA

SEQ ID NO: 16358 - protein, 9 aa, Homo sapiens
  Table A; HLA-B*54:01; TP53; C275Y; 0
NSFEVRVYA

SEQ ID NO: 16359 - protein, 9 aa, Homo sapiens
  Table A; HLA-B*56:01; TP53; C275Y; 0
NSFEVRVYA

SEQ ID NO: 16360 - protein, 8 aa, Homo sapiens
  Table A; HLA-B*14:01; TP53; R273S; 0
NSFEVSVC

SEQ ID NO: 16361 - protein, 8 aa, Homo sapiens
  Table A; HLA-B*39:06; TP53; R273S; 0
NSFEVSVC

SEQ ID NO: 16362 - protein, 8 aa, Homo sapiens
  Table A; HLA-B*40:02; TP53; R273S; 0
NSFEVSVC

SEQ ID NO: 16363 - protein, 8 aa, Homo sapiens
  Table A; HLA-B*48:01; TP53; R273S; 0
NSFEVSVC

SEQ ID NO: 16364 - protein, 8 aa, Homo sapiens
  Table A; HLA-B*54:01; TP53; R273S; 0
NSFEVSVC

SEQ ID NO: 16365 - protein, 8 aa, Homo sapiens
  Table A; HLA-C*12:03; TP53; R273S; 0
NSFEVSVC

SEQ ID NO: 16366 - protein, 9 aa, Homo sapiens
  Table A; HLA-A*02:05; TP53; R273S; 0
NSFEVSVCA

SEQ ID NO: 16367 - protein, 9 aa, Homo sapiens
  Table A; HLA-A*02:06; TP53; R273S; 0
NSFEVSVCA

SEQ ID NO: 16368 - protein, 9 aa, Homo sapiens
  Table A; HLA-A*68:01; TP53; R273S; 0
NSFEVSVCA

SEQ ID NO: 16369 - protein, 9 aa, Homo sapiens
  Table A; HLA-A*68:02; TP53; R273S; 0
NSFEVSVCA

SEQ ID NO: 16370 - protein, 9 aa, Homo sapiens
  Table A; HLA-B*39:06; TP53; R273S; 0
NSFEVSVCA

SEQ ID NO: 16371 - protein, 9 aa, Homo sapiens
  Table A; HLA-B*50:01; TP53; R273S; 0
NSFEVSVCA

SEQ ID NO: 16372 - protein, 9 aa, Homo sapiens
  Table A; HLA-B*54:01; TP53; R273S; 0
NSFEVSVCA

SEQ ID NO: 16373 - protein, 9 aa, Homo sapiens
  Table A; HLA-B*55:02; TP53; R273S; 0
NSFEVSVCA

SEQ ID NO: 16374 - protein, 9 aa, Homo sapiens
  Table A; HLA-B*56:01; TP53; R273S; 0
NSFEVSVCA

SEQ ID NO: 16375 - protein, 9 aa, Homo sapiens
  Table A; HLA-C*08:01; TP53; R273S; 0
NSFEVSVCA

SEQ ID NO: 16376 - protein, 9 aa, Homo sapiens
  Table A; HLA-B*39:06; TP53; E271K; 0
NSFKVRVCA

SEQ ID NO: 16377 - protein, 9 aa, Homo sapiens
  Table A; HLA-B*54:01; TP53; E271K; 0
NSFKVRVCA

SEQ ID NO: 16378 - protein, 8 aa, Homo sapiens
  Table A; HLA-C*08:03; CTNNB1; D32N; 0
NSGIHSGA

SEQ ID NO: 16379 - protein, 9 aa, Homo sapiens
  Table A; HLA-B*08:01; CTNNB1; D32N; 1
NSGIHSGAT

SEQ ID NO: 16380 - protein, 9 aa, Homo sapiens
  Table A; HLA-B*48:01; CTNNB1; D32N; 0
NSGIHSGAT

SEQ ID NO: 16381 - protein, 9 aa, Homo sapiens
  Table A; HLA-C*08:03; CTNNB1; D32N; 0
NSGIHSGAT

SEQ ID NO: 16382 - protein, 10 aa, Homo sapiens
  Table A; HLA-A*02:04; PIK3R1; K567E; 0
NSIEPDLIQL

SEQ ID NO: 16383 - protein, 10 aa, Homo sapiens
  Table A; HLA-A*02:05; PIK3R1; K567E; 0
NSIEPDLIQL

SEQ ID NO: 16384 - protein, 10 aa, Homo sapiens
  Table A; HLA-A*02:06; PIK3R1; K567E; 0
NSIEPDLIQL

SEQ ID NO: 16385 - protein, 10 aa, Homo sapiens
  Table A; HLA-A*02:07; PIK3R1; K567E; 0
NSIEPDLIQL

SEQ ID NO: 16386 - protein, 10 aa, Homo sapiens
  Table A; HLA-A*68:01; PIK3R1; K567E; 0
NSIEPDLIQL

SEQ ID NO: 16387 - protein, 10 aa, Homo sapiens
  Table A; HLA-A*68:02; PIK3R1; K567E; 0
NSIEPDLIQL

SEQ ID NO: 16388 - protein, 10 aa, Homo sapiens
  Table A; HLA-B*15:02; PIK3R1; K567E; 0
NSIEPDLIQL

SEQ ID NO: 16389 - protein, 10 aa, Homo sapiens
  Table A; HLA-B*35:03; PIK3R1; K567E; 0
NSIEPDLIQL

SEQ ID NO: 16390 - protein, 10 aa, Homo sapiens
  Table A; HLA-B*35:12; PIK3R1; K567E; 0
NSIEPDLIQL

SEQ ID NO: 16391 - protein, 10 aa, Homo sapiens
  Table A; HLA-B*50:01; PIK3R1; K567E; 0
NSIEPDLIQL

SEQ ID NO: 16392 - protein, 10 aa, Homo sapiens
  Table A; HLA-C*08:01; PIK3R1; K567E; 0
NSIEPDLIQL

SEQ ID NO: 16393 - protein, 11 aa, Homo sapiens
  Table A; HLA-A*11:01; PIK3R1; K567E; 1
NSIEPDLIQLR

SEQ ID NO: 16394 - protein, 11 aa, Homo sapiens
  Table A; HLA-A*26:03; PIK3R1; K567E; 0
NSIEPDLIQLR

SEQ ID NO: 16395 - protein, 11 aa, Homo sapiens
  Table A; HLA-A*31:01; PIK3R1; K567E; 0
NSIEPDLIQLR

SEQ ID NO: 16396 - protein, 11 aa, Homo sapiens
  Table A; HLA-A*33:01; PIK3R1; K567E; 0
NSIEPDLIQLR

SEQ ID NO: 16397 - protein, 11 aa, Homo sapiens
  Table A; HLA-A*33:03; PIK3R1; K567E; 0
NSIEPDLIQLR

SEQ ID NO: 16398 - protein, 11 aa, Homo sapiens
  Table A; HLA-A*68:01; PIK3R1; K567E; 0
NSIEPDLIQLR

SEQ ID NO: 16399 - protein, 11 aa, Homo sapiens
  Table A; HLA-A*68:02; PIK3R1; K567E; 0
NSIEPDLIQLR

SEQ ID NO: 16400 - protein, 11 aa, Homo sapiens
  Table A; HLA-B*57:01; PIK3R1; K567E; 0
NSIEPDLIQLR

SEQ ID NO: 16401 - protein, 11 aa, Homo sapiens
  Table A; HLA-A*11:01; PIK3R1; L573P; 0
NSIKPDLIQPR

SEQ ID NO: 16402 - protein, 11 aa, Homo sapiens
  Table A; HLA-A*26:03; PIK3R1; L573P; 0
NSIKPDLIQPR

SEQ ID NO: 16403 - protein, 11 aa, Homo sapiens
  Table A; HLA-A*31:01; PIK3R1; L573P; 0
NSIKPDLIQPR

SEQ ID NO: 16404 - protein, 11 aa, Homo sapiens
  Table A; HLA-A*33:01; PIK3R1; L573P; 0
NSIKPDLIQPR

SEQ ID NO: 16405 - protein, 11 aa, Homo sapiens
  Table A; HLA-A*33:03; PIK3R1; L573P; 0
NSIKPDLIQPR

SEQ ID NO: 16406 - protein, 11 aa, Homo sapiens
  Table A; HLA-A*68:01; PIK3R1; L573P; 0
NSIKPDLIQPR

SEQ ID NO: 16407 - protein, 11 aa, Homo sapiens
  Table A; HLA-A*68:02; PIK3R1; L573P; 0
NSIKPDLIQPR

SEQ ID NO: 16408 - protein, 11 aa, Homo sapiens
  Table A; HLA-B*27:02; PIK3R1; L573P; 0
NSIKPDLIQPR

SEQ ID NO: 16409 - protein, 11 aa, Homo sapiens
  Table A; HLA-B*54:01; PIK3R1; L573P; 0
NSIKPDLIQPR

SEQ ID NO: 16410 - protein, 11 aa, Homo sapiens
  Table A; HLA-B*57:01; PIK3R1; L573P; 0
NSIKPDLIQPR

SEQ ID NO: 16411 - protein, 10 aa, Homo sapiens
  Table A; HLA-A*68:01; TP53; G245V; 0
NSSCMGVMNR

SEQ ID NO: 16412 - protein, 10 aa, Homo sapiens
  Table A; HLA-A*68:01; TP53; G244S; 0
NSSCMSGMNR

SEQ ID NO: 16413 - protein, 10 aa, Homo sapiens
  Table A; HLA-A*33:01; TP53; C242F; 0
NSSFMGGMNR

SEQ ID NO: 16414 - protein, 10 aa, Homo sapiens
  Table A; HLA-A*33:03; TP53; C242F; 0
NSSFMGGMNR

SEQ ID NO: 16415 - protein, 10 aa, Homo sapiens
  Table A; HLA-A*68:01; TP53; C242F; 0
NSSFMGGMNR

SEQ ID NO: 16416 - protein, 8 aa, Homo sapiens
  Table A; HLA-B*37:01; MAP2K1; P124S; 0
NSSYIVGF

SEQ ID NO: 16417 - protein, 8 aa, Homo sapiens
  Table A; HLA-B*58:01; MAP2K1; P124S; 0
NSSYIVGF

SEQ ID NO: 16418 - protein, 9 aa, Homo sapiens
  Table A; HLA-A*01:01; MAP2K1; P124S; 1
NSSYIVGFY

SEQ ID NO: 16419 - protein, 9 aa, Homo sapiens
  Table A; HLA-A*26:01; MAP2K1; P124S; 1
NSSYIVGFY

SEQ ID NO: 16420 - protein, 9 aa, Homo sapiens
  Table A; HLA-A*29:01; MAP2K1; P124S; 0
NSSYIVGFY

SEQ ID NO: 16421 - protein, 9 aa, Homo sapiens
  Table A; HLA-A*29:02; MAP2K1; P124S; 1
NSSYIVGFY

SEQ ID NO: 16422 - protein, 9 aa, Homo sapiens
  Table A; HLA-A*30:02; MAP2K1; P124S; 0
NSSYIVGFY

SEQ ID NO: 16423 - protein, 9 aa, Homo sapiens
  Table A; HLA-A*30:04; MAP2K1; P124S; 0
NSSYIVGFY

SEQ ID NO: 16424 - protein, 9 aa, Homo sapiens
  Table A; HLA-A*68:02; MAP2K1; P124S; 0
NSSYIVGFY

SEQ ID NO: 16425 - protein, 9 aa, Homo sapiens
  Table A; HLA-B*58:01; MAP2K1; P124S; 0
NSSYIVGFY

SEQ ID NO: 16426 - protein, 10 aa, Homo sapiens
  Table A; HLA-A*68:02; MAP2K1; P124S; 0
NSSYIVGFYG

SEQ ID NO: 16427 - protein, 10 aa, Homo sapiens
  Table A; HLA-A*02:03; CDKN2A; P48L; 0
NSYGRRLIQV

SEQ ID NO: 16428 - protein, 8 aa, Homo sapiens
  Table A; HLA-A*68:02; TP53; R213Q; 0
NTFQHSVV

SEQ ID NO: 16429 - protein, 8 aa, Homo sapiens
  Table A; HLA-B*08:01; TP53; R213Q; 1
NTFQHSVV

SEQ ID NO: 16430 - protein, 8 aa, Homo sapiens
  Table A; HLA-B*14:01; TP53; R213Q; 0
NTFQHSVV

SEQ ID NO: 16431 - protein, 8 aa, Homo sapiens
  Table A; HLA-B*14:02; TP53; R213Q; 0
NTFQHSVV

SEQ ID NO: 16432 - protein, 8 aa, Homo sapiens
  Table A; HLA-C*08:03; TP53; R213Q; 0
NTFQHSVV

SEQ ID NO: 16433 - protein, 8 aa, Homo sapiens
  Table A; HLA-C*12:03; TP53; R213Q; 0
NTFQHSVV

SEQ ID NO: 16434 - protein, 8 aa, Homo sapiens
  Table A; HLA-C*16:01; TP53; R213Q; 0
NTFQHSVV

SEQ ID NO: 16435 - protein, 9 aa, Homo sapiens
  Table A; HLA-A*02:01; TP53; R213Q; 1
NTFQHSVVV

SEQ ID NO: 16436 - protein, 9 aa, Homo sapiens
  Table A; HLA-A*02:03; TP53; R213Q; 0
NTFQHSVVV

SEQ ID NO: 16437 - protein, 9 aa, Homo sapiens
  Table A; HLA-A*02:05; TP53; R213Q; 0
NTFQHSVVV

SEQ ID NO: 16438 - protein, 9 aa, Homo sapiens
  Table A; HLA-A*02:06; TP53; R213Q; 0
NTFQHSVVV

SEQ ID NO: 16439 - protein, 9 aa, Homo sapiens
  Table A; HLA-A*02:08; TP53; R213Q; 0
NTFQHSVVV

SEQ ID NO: 16440 - protein, 9 aa, Homo sapiens
  Table A; HLA-A*30:01; TP53; R213Q; 0
NTFQHSVVV

SEQ ID NO: 16441 - protein, 9 aa, Homo sapiens
  Table A; HLA-A*68:01; TP53; R213Q; 0
NTFQHSVVV

SEQ ID NO: 16442 - protein, 9 aa, Homo sapiens
  Table A; HLA-A*68:02; TP53; R213Q; 0
NTFQHSVVV

SEQ ID NO: 16443 - protein, 9 aa, Homo sapiens
  Table A; HLA-B*13:02; TP53; R213Q; 0
NTFQHSVVV

SEQ ID NO: 16444 - protein, 9 aa, Homo sapiens
  Table A; HLA-B*15:02; TP53; R213Q; 0
NTFQHSVVV

SEQ ID NO: 16445 - protein, 9 aa, Homo sapiens
  Table A; HLA-B*15:10; TP53; R213Q; 0
NTFQHSVVV

SEQ ID NO: 16446 - protein, 9 aa, Homo sapiens
  Table A; HLA-B*35:01; TP53; R213Q; 0
NTFQHSVVV

SEQ ID NO: 16447 - protein, 9 aa, Homo sapiens
  Table A; HLA-B*35:03; TP53; R213Q; 0
NTFQHSVVV

SEQ ID NO: 16448 - protein, 9 aa, Homo sapiens
  Table A; HLA-B*50:01; TP53; R213Q; 0
NTFQHSVVV

SEQ ID NO: 16449 - protein, 9 aa, Homo sapiens
  Table A; HLA-B*51:01; TP53; R213Q; 0
NTFQHSVVV

SEQ ID NO: 16450 - protein, 9 aa, Homo sapiens
  Table A; HLA-B*54:01; TP53; R213Q; 0
NTFQHSVVV

SEQ ID NO: 16451 - protein, 9 aa, Homo sapiens
  Table A; HLA-C*02:02; TP53; R213Q; 0
NTFQHSVVV

SEQ ID NO: 16452 - protein, 9 aa, Homo sapiens
  Table A; HLA-C*08:01; TP53; R213Q; 0
NTFQHSVVV

SEQ ID NO: 16453 - protein, 9 aa, Homo sapiens
  Table A; HLA-C*12:03; TP53; R213Q; 0
NTFQHSVVV

SEQ ID NO: 16454 - protein, 9 aa, Homo sapiens
  Table A; HLA-C*15:02; TP53; R213Q; 0
NTFQHSVVV

SEQ ID NO: 16455 - protein, 9 aa, Homo sapiens
  Table A; HLA-C*16:01; TP53; R213Q; 0
NTFQHSVVV

SEQ ID NO: 16456 - protein, 9 aa, Homo sapiens
  Table A; HLA-C*16:04; TP53; R213Q; 0
NTFQHSVVV

SEQ ID NO: 16457 - protein, 11 aa, Homo sapiens
  Table A; HLA-B*35:01; TP53; R213Q; 0
NTFQHSVVVPY

SEQ ID NO: 16458 - protein, 9 aa, Homo sapiens
  Table A; HLA-A*68:02; TP53; S215G; 0
NTFRHGVVV

SEQ ID NO: 16459 - protein, 9 aa, Homo sapiens
  Table A; HLA-B*54:01; TP53; S215G; 0
NTFRHGVVV

SEQ ID NO: 16460 - protein, 9 aa, Homo sapiens
  Table A; HLA-C*12:03; TP53; S215G; 0
NTFRHGVVV

SEQ ID NO: 16461 - protein, 9 aa, Homo sapiens
  Table A; HLA-C*15:02; TP53; S215G; 0
NTFRHGVVV

SEQ ID NO: 16462 - protein, 9 aa, Homo sapiens
  Table A; HLA-A*68:02; TP53; V216M; 0
NTFRHSMVV

SEQ ID NO: 16463 - protein, 9 aa, Homo sapiens
  Table A; HLA-C*12:03; TP53; V216M; 0
NTFRHSMVV

SEQ ID NO: 16464 - protein, 9 aa, Homo sapiens
  Table A; HLA-C*15:02; TP53; V216M; 0
NTFRHSMVV

SEQ ID NO: 16465 - protein, 9 aa, Homo sapiens
  Table A; HLA-A*68:02; TP53; H214R; 0
NTFRRSVVV

SEQ ID NO: 16466 - protein, 9 aa, Homo sapiens
  Table A; HLA-A*68:01; CTNND1; A781T; 0
NTINEVITE

SEQ ID NO: 16467 - protein, 9 aa, Homo sapiens
  Table A; HLA-A*68:02; CTNND1; A781T; 0
NTINEVITE

SEQ ID NO: 16468 - protein, 10 aa, Homo sapiens
  Table A; HLA-A*68:01; CTNND1; A781T; 0
NTINEVITEN

SEQ ID NO: 16469 - protein, 10 aa, Homo sapiens
  Table A; HLA-A*68:02; CTNND1; A781T; 0
NTINEVITEN

SEQ ID NO: 16470 - protein, 11 aa, Homo sapiens
  Table A; HLA-A*02:05; CTNND1; A781T; 0
NTINEVITENL

SEQ ID NO: 16471 - protein, 11 aa, Homo sapiens
  Table A; HLA-A*68:01; CTNND1; A781T; 0
NTINEVITENL

SEQ ID NO: 16472 - protein, 11 aa, Homo sapiens
  Table A; HLA-A*68:02; CTNND1; A781T; 0
NTINEVITENL

SEQ ID NO: 16473 - protein, 9 aa, Homo sapiens
  Table A; HLA-A*26:01; MSN; E573K; 0
NTKQRIDKF

SEQ ID NO: 16474 - protein, 9 aa, Homo sapiens
  Table A; HLA-A*26:02; MSN; E573K; 0
NTKQRIDKF

SEQ ID NO: 16475 - protein, 9 aa, Homo sapiens
  Table A; HLA-B*57:01; MSN; E573K; 0
NTKQRIDKF

SEQ ID NO: 16476 - protein, 10 aa, Homo sapiens
  Table A; HLA-B*58:01; MTOR; S2215Y; 0
NTLLANDPTY

SEQ ID NO: 16477 - protein, 8 aa, Homo sapiens
  Table A; HLA-B*15:02; CDH11; K357T; 0
NVHIDPTF

SEQ ID NO: 16478 - protein, 8 aa, Homo sapiens
  Table A; HLA-B*35:01; CDH11; K357T; 1
NVHIDPTF

SEQ ID NO: 16479 - protein, 8 aa, Homo sapiens
  Table A; HLA-B*35:02; CDH11; K357T; 0
NVHIDPTF

SEQ ID NO: 16480 - protein, 8 aa, Homo sapiens
  Table A; HLA-B*35:03; CDH11; K357T; 0
NVHIDPTF

SEQ ID NO: 16481 - protein, 8 aa, Homo sapiens
  Table A; HLA-B*35:12; CDH11; K357T; 0
NVHIDPTF

SEQ ID NO: 16482 - protein, 9 aa, Homo sapiens
  Table A; HLA-A*68:02; CDH11; K357T; 0
NVHIDPTFI

SEQ ID NO: 16483 - protein, 9 aa, Homo sapiens
  Table A; HLA-A*03:02; PIK3CA; C378R; 0
NVNTQRVPR

SEQ ID NO: 16484 - protein, 9 aa, Homo sapiens
  Table A; HLA-A*11:01; PIK3CA; C378R; 0
NVNTQRVPR

SEQ ID NO: 16485 - protein, 9 aa, Homo sapiens
  Table A; HLA-A*26:03; PIK3CA; C378R; 0
NVNTQRVPR

SEQ ID NO: 16486 - protein, 9 aa, Homo sapiens
  Table A; HLA-A*31:01; PIK3CA; C378R; 0
NVNTQRVPR

SEQ ID NO: 16487 - protein, 9 aa, Homo sapiens
  Table A; HLA-A*33:01; PIK3CA; C378R; 0
NVNTQRVPR

SEQ ID NO: 16488 - protein, 9 aa, Homo sapiens
  Table A; HLA-A*33:03; PIK3CA; C378R; 0
NVNTQRVPR

SEQ ID NO: 16489 - protein, 9 aa, Homo sapiens
  Table A; HLA-A*68:01; PIK3CA; C378R; 0
NVNTQRVPR

SEQ ID NO: 16490 - protein, 9 aa, Homo sapiens
  Table A; HLA-C*14:02; TP53; M237I; 0
NYICNSSCM

SEQ ID NO: 16491 - protein, 9 aa, Homo sapiens
  Table A; HLA-A*23:01; ERBB2; S310F; 0
NYLSTDVGF

SEQ ID NO: 16492 - protein, 9 aa, Homo sapiens
  Table A; HLA-A*24:02; ERBB2; S310F; 1
NYLSTDVGF

SEQ ID NO: 16493 - protein, 9 aa, Homo sapiens
  Table A; HLA-C*04:01; ERBB2; S310F; 1
NYLSTDVGF

SEQ ID NO: 16494 - protein, 9 aa, Homo sapiens
  Table A; HLA-C*14:02; ERBB2; S310F; 0
NYLSTDVGF

SEQ ID NO: 16495 - protein, 9 aa, Homo sapiens
  Table A; HLA-C*14:03; ERBB2; S310F; 0
NYLSTDVGF

SEQ ID NO: 16496 - protein, 9 aa, Homo sapiens
  Table A; HLA-A*29:01; ERBB2; S310Y; 0
NYLSTDVGY

SEQ ID NO: 16497 - protein, 9 aa, Homo sapiens
  Table A; HLA-A*29:02; ERBB2; S310Y; 0
NYLSTDVGY

SEQ ID NO: 16498 - protein, 9 aa, Homo sapiens
  Table A; HLA-C*14:02; ERBB2; S310Y; 0
NYLSTDVGY

SEQ ID NO: 16499 - protein, 9 aa, Homo sapiens
  Table A; HLA-C*14:03; ERBB2; S310Y; 0
NYLSTDVGY

SEQ ID NO: 16500 - protein, 8 aa, Homo sapiens
  Table A; HLA-C*14:02; TP53; C242F; 0
NYMCNSSF

SEQ ID NO: 16501 - protein, 8 aa, Homo sapiens
  Table A; HLA-C*14:03; TP53; C242F; 0
NYMCNSSF

SEQ ID NO: 16502 - protein, 9 aa, Homo sapiens
  Table A; HLA-C*14:02; TP53; C242F; 0
NYMCNSSFM

SEQ ID NO: 16503 - protein, 9 aa, Homo sapiens
  Table A; HLA-C*14:03; TP53; C242F; 0
NYMCNSSFM

SEQ ID NO: 16504 - protein, 9 aa, Homo sapiens
  Table A; HLA-C*14:02; TP53; N239S; 0
NYMCSSSCM

SEQ ID NO: 16505 - protein, 9 aa, Homo sapiens
  Table A; HLA-C*14:03; TP53; N239S; 0
NYMCSSSCM

SEQ ID NO: 16506 - protein, 9 aa, Homo sapiens
  Table A; HLA-A*23:01; TP53; C238F; 0
NYMFNSSCM

SEQ ID NO: 16507 - protein, 9 aa, Homo sapiens
  Table A; HLA-A*24:02; TP53; C238F; 0
NYMFNSSCM

SEQ ID NO: 16508 - protein, 9 aa, Homo sapiens
  Table A; HLA-C*14:02; TP53; C238F; 0
NYMFNSSCM

SEQ ID NO: 16509 - protein, 9 aa, Homo sapiens
  Table A; HLA-C*14:03; TP53; C238F; 0
NYMFNSSCM

SEQ ID NO: 16510 - protein, 9 aa, Homo sapiens
  Table A; HLA-A*24:02; TP53; C238Y; 1
NYMYNSSCM

SEQ ID NO: 16511 - protein, 9 aa, Homo sapiens
  Table A; HLA-C*14:02; TP53; C238Y; 0
NYMYNSSCM

SEQ ID NO: 16512 - protein, 9 aa, Homo sapiens
  Table A; HLA-C*14:03; TP53; C238Y; 0
NYMYNSSCM

SEQ ID NO: 16513 - protein, 9 aa, Homo sapiens
  Table A; HLA-A*23:01; VHL; S111N; 0
NYRGHLWLF

SEQ ID NO: 16514 - protein, 9 aa, Homo sapiens
  Table A; HLA-A*24:02; VHL; S111N; 1
NYRGHLWLF

SEQ ID NO: 16515 - protein, 9 aa, Homo sapiens
  Table A; HLA-C*06:02; VHL; S111N; 1
NYRGHLWLF

SEQ ID NO: 16516 - protein, 9 aa, Homo sapiens
  Table A; HLA-C*07:02; VHL; S111N; 1
NYRGHLWLF

SEQ ID NO: 16517 - protein, 9 aa, Homo sapiens
  Table A; HLA-B*35:01; CDKN2A; H83Y; 0
PATLTRPVY

SEQ ID NO: 16518 - protein, 9 aa, Homo sapiens
  Table A; HLA-C*16:01; CDKN2A; H83Y; 0
PATLTRPVY

SEQ ID NO: 16519 - protein, 9 aa, Homo sapiens
  Table A; HLA-A*30:01; PDE4DIP; C1297R; 0
PEREEHNSL

SEQ ID NO: 16520 - protein, 9 aa, Homo sapiens
  Table A; HLA-B*07:02; PDE4DIP; C1297R; 1
PEREEHNSL

SEQ ID NO: 16521 - protein, 9 aa, Homo sapiens
  Table A; HLA-B*14:02; PDE4DIP; C1297R; 0
PEREEHNSL

SEQ ID NO: 16522 - protein, 9 aa, Homo sapiens
  Table A; HLA-B*40:02; PDE4DIP; C1297R; 0
PEREEHNSL

SEQ ID NO: 16523 - protein, 9 aa, Homo sapiens
  Table A; HLA-B*41:02; PDE4DIP; C1297R; 0
PEREEHNSL

SEQ ID NO: 16524 - protein, 9 aa, Homo sapiens
  Table A; HLA-A*29:02; KRAS; A146T; 1
PFIETSTKT

SEQ ID NO: 16525 - protein, 9 aa, Homo sapiens
  Table A; HLA-B*15:01; IDH1; R132G; 1
PIIIGGHAY

SEQ ID NO: 16526 - protein, 9 aa, Homo sapiens
  Table A; HLA-B*15:01; IDH1; R132S; 1
PIIIGSHAY

SEQ ID NO: 16527 - protein, 8 aa, Homo sapiens
  Table A; HLA-B*15:02; SMAD4; G352V; 0
PIVTVDVY

SEQ ID NO: 16528 - protein, 8 aa, Homo sapiens
  Table A; HLA-B*35:01; SMAD4; G352V; 1
PIVTVDVY

SEQ ID NO: 16529 - protein, 10 aa, Homo sapiens
  Table A; HLA-A*02:01; CREB3L1; V414I; 1
PLAADGIYTA

SEQ ID NO: 16530 - protein, 9 aa, Homo sapiens
  Table A; HLA-A*02:03; XPO1; R749Q; 0
PLIRSMQTV

SEQ ID NO: 16531 - protein, 9 aa, Homo sapiens
  Table A; HLA-A*02:04; SMARCA4; E920K; 0
PLQNKLPKL

SEQ ID NO: 16532 - protein, 10 aa, Homo sapiens
  Table A; HLA-B*27:02; PIK3CA; E545D; 0
PLSEITDQEK

SEQ ID NO: 16533 - protein, 8 aa, Homo sapiens
  Table A; HLA-A*03:02; PIK3CA; Q546K; 0
PLSEITEK

SEQ ID NO: 16534 - protein, 8 aa, Homo sapiens
  Table A; HLA-A*11:01; PIK3CA; Q546K; 1
PLSEITEK

SEQ ID NO: 16535 - protein, 8 aa, Homo sapiens
  Table A; HLA-A*11:01; PIK3CA; Q546R; 1
PLSEITER

SEQ ID NO: 16536 - protein, 8 aa, Homo sapiens
  Table A; HLA-A*68:01; PIK3CA; Q546R; 0
PLSEITER

SEQ ID NO: 16537 - protein, 10 aa, Homo sapiens
  Table A; HLA-B*27:02; PIK3CA; E545G; 0
PLSEITGQEK

SEQ ID NO: 16538 - protein, 8 aa, Homo sapiens
  Table A; HLA-A*68:01; GLI1; R637Q; 0
PNAGVTQR

SEQ ID NO: 16539 - protein, 9 aa, Homo sapiens
  Table A; HLA-B*15:02; PTPRT; L695F; 0
PPFSPLKSY

SEQ ID NO: 16540 - protein, 9 aa, Homo sapiens
  Table A; HLA-B*35:01; PTPRT; L695F; 1
PPFSPLKSY

SEQ ID NO: 16541 - protein, 10 aa, Homo sapiens
  Table A; HLA-B*07:02; TP53; R158H; 1
PPPGTRVHAM

SEQ ID NO: 16542 - protein, 8 aa, Homo sapiens
  Table A; HLA-B*51:01; PCBP1; L100Q; 1
PPVTQRLV

SEQ ID NO: 16543 - protein, 8 aa, Homo sapiens
  Table A; HLA-C*08:03; PCBP1; L100Q; 0
PPVTQRLV

SEQ ID NO: 16544 - protein, 9 aa, Homo sapiens
  Table A; HLA-B*07:02; PCBP1; L100Q; 1
PPVTQRLVV

SEQ ID NO: 16545 - protein, 9 aa, Homo sapiens
  Table A; HLA-B*51:01; PCBP1; L100Q; 1
PPVTQRLVV

SEQ ID NO: 16546 - protein, 9 aa, Homo sapiens
  Table A; HLA-B*54:01; PCBP1; L100Q; 0
PPVTQRLVV

SEQ ID NO: 16547 - protein, 9 aa, Homo sapiens
  Table A; HLA-B*56:01; PCBP1; L100Q; 0
PPVTQRLVV

SEQ ID NO: 16548 - protein, 11 aa, Homo sapiens
  Table A; HLA-B*54:01; PCBP1; L100Q; 0
PPVTQRLVVPA

SEQ ID NO: 16549 - protein, 11 aa, Homo sapiens
  Table A; HLA-B*56:01; PCBP1; L100Q; 0
PPVTQRLVVPA

SEQ ID NO: 16550 - protein, 9 aa, Homo sapiens
  Table A; HLA-B*15:01; FKBP9; R161Q; 1
PQTIQVSDF

SEQ ID NO: 16551 - protein, 9 aa, Homo sapiens
  Table A; HLA-B*39:01; FKBP9; R161Q; 0
PQTIQVSDF

SEQ ID NO: 16552 - protein, 8 aa, Homo sapiens
  Table A; HLA-B*13:02; SFRP4; R232Q; 0
PQTQVPLI

SEQ ID NO: 16553 - protein, 8 aa, Homo sapiens
  Table A; HLA-A*68:01; TP53; R283P; 0
PTEEENLR

SEQ ID NO: 16554 - protein, 9 aa, Homo sapiens
  Table A; HLA-A*01:01; TP53; R283P; 1
PTEEENLRK

SEQ ID NO: 16555 - protein, 9 aa, Homo sapiens
  Table A; HLA-A*23:01; ARID1A; G2087R; 0
PVLDRLLHW

SEQ ID NO: 16556 - protein, 9 aa, Homo sapiens
  Table A; HLA-A*24:02; ARID1A; G2087R; 0
PVLDRLLHW

SEQ ID NO: 16557 - protein, 9 aa, Homo sapiens
  Table A; HLA-B*57:01; ARID1A; G2087R; 0
PVLDRLLHW

SEQ ID NO: 16558 - protein, 8 aa, Homo sapiens
  Table A; HLA-B*07:02; PCBP1; L100Q; 1
PVTQRLVV

SEQ ID NO: 16559 - protein, 10 aa, Homo sapiens
  Table A; HLA-A*25:01; CDKN2A; H83Y; 0
PVYDAAREGF

SEQ ID NO: 16560 - protein, 10 aa, Homo sapiens
  Table A; HLA-A*26:01; CDKN2A; H83Y; 0
PVYDAAREGF

SEQ ID NO: 16561 - protein, 8 aa, Homo sapiens
  Table A; HLA-A*24:02; CNTNAP2; T373M; 1
PYMVPVFF

SEQ ID NO: 16562 - protein, 9 aa, Homo sapiens
  Table A; HLA-A*02:05; SF3B1; R957Q; 0
QAADLISQT

SEQ ID NO: 16563 - protein, 9 aa, Homo sapiens
  Table A; HLA-A*30:01; SF3B1; R957Q; 0
QAADLISQT

SEQ ID NO: 16564 - protein, 9 aa, Homo sapiens
  Table A; HLA-A*33:03; SF3B1; R957Q; 0
QAADLISQT

SEQ ID NO: 16565 - protein, 9 aa, Homo sapiens
  Table A; HLA-A*68:01; SF3B1; R957Q; 0
QAADLISQT

SEQ ID NO: 16566 - protein, 9 aa, Homo sapiens
  Table A; HLA-A*68:02; SF3B1; R957Q; 0
QAADLISQT

SEQ ID NO: 16567 - protein, 9 aa, Homo sapiens
  Table A; HLA-C*12:03; SF3B1; R957Q; 1
QAADLISQT

SEQ ID NO: 16568 - protein, 10 aa, Homo sapiens
  Table A; HLA-A*02:05; SF3B1; R957Q; 0
QAADLISQTA

SEQ ID NO: 16569 - protein, 10 aa, Homo sapiens
  Table A; HLA-A*02:08; SF3B1; R957Q; 0
QAADLISQTA

SEQ ID NO: 16570 - protein, 10 aa, Homo sapiens
  Table A; HLA-A*30:01; SF3B1; R957Q; 0
QAADLISQTA

SEQ ID NO: 16571 - protein, 10 aa, Homo sapiens
  Table A; HLA-A*68:01; SF3B1; R957Q; 0
QAADLISQTA

SEQ ID NO: 16572 - protein, 10 aa, Homo sapiens
  Table A; HLA-A*68:02; SF3B1; R957Q; 0
QAADLISQTA

SEQ ID NO: 16573 - protein, 10 aa, Homo sapiens
  Table A; HLA-B*13:02; SF3B1; R957Q; 0
QAADLISQTA

SEQ ID NO: 16574 - protein, 10 aa, Homo sapiens
  Table A; HLA-B*35:01; SF3B1; R957Q; 1
QAADLISQTA

SEQ ID NO: 16575 - protein, 10 aa, Homo sapiens
  Table A; HLA-B*35:03; SF3B1; R957Q; 0
QAADLISQTA

SEQ ID NO: 16576 - protein, 10 aa, Homo sapiens
  Table A; HLA-B*39:06; SF3B1; R957Q; 0
QAADLISQTA

SEQ ID NO: 16577 - protein, 10 aa, Homo sapiens
  Table A; HLA-B*48:01; SF3B1; R957Q; 0
QAADLISQTA

SEQ ID NO: 16578 - protein, 10 aa, Homo sapiens
  Table A; HLA-B*50:01; SF3B1; R957Q; 0
QAADLISQTA

SEQ ID NO: 16579 - protein, 10 aa, Homo sapiens
  Table A; HLA-B*54:01; SF3B1; R957Q; 0
QAADLISQTA

SEQ ID NO: 16580 - protein, 10 aa, Homo sapiens
  Table A; HLA-B*55:01; SF3B1; R957Q; 0
QAADLISQTA

SEQ ID NO: 16581 - protein, 10 aa, Homo sapiens
  Table A; HLA-B*55:02; SF3B1; R957Q; 0
QAADLISQTA

SEQ ID NO: 16582 - protein, 10 aa, Homo sapiens
  Table A; HLA-B*56:01; SF3B1; R957Q; 0
QAADLISQTA

SEQ ID NO: 16583 - protein, 10 aa, Homo sapiens
  Table A; HLA-C*08:01; SF3B1; R957Q; 0
QAADLISQTA

SEQ ID NO: 16584 - protein, 10 aa, Homo sapiens
  Table A; HLA-C*12:03; SF3B1; R957Q; 1
QAADLISQTA

SEQ ID NO: 16585 - protein, 10 aa, Homo sapiens
  Table A; HLA-C*16:04; SF3B1; R957Q; 0
QAADLISQTA

SEQ ID NO: 16586 - protein, 11 aa, Homo sapiens
  Table A; HLA-A*02:01; SF3B1; R957Q; 1
QAADLISQTAV

SEQ ID NO: 16587 - protein, 11 aa, Homo sapiens
  Table A; HLA-A*02:03; SF3B1; R957Q; 0
QAADLISQTAV

SEQ ID NO: 16588 - protein, 11 aa, Homo sapiens
  Table A; HLA-A*02:05; SF3B1; R957Q; 0
QAADLISQTAV

SEQ ID NO: 16589 - protein, 11 aa, Homo sapiens
  Table A; HLA-A*02:06; SF3B1; R957Q; 0
QAADLISQTAV

SEQ ID NO: 16590 - protein, 11 aa, Homo sapiens
  Table A; HLA-A*30:01; SF3B1; R957Q; 0
QAADLISQTAV

SEQ ID NO: 16591 - protein, 11 aa, Homo sapiens
  Table A; HLA-A*68:01; SF3B1; R957Q; 0
QAADLISQTAV

SEQ ID NO: 16592 - protein, 11 aa, Homo sapiens
  Table A; HLA-A*68:02; SF3B1; R957Q; 0
QAADLISQTAV

SEQ ID NO: 16593 - protein, 11 aa, Homo sapiens
  Table A; HLA-B*13:02; SF3B1; R957Q; 0
QAADLISQTAV

SEQ ID NO: 16594 - protein, 11 aa, Homo sapiens
  Table A; HLA-B*35:01; SF3B1; R957Q; 1
QAADLISQTAV

SEQ ID NO: 16595 - protein, 11 aa, Homo sapiens
  Table A; HLA-B*35:03; SF3B1; R957Q; 0
QAADLISQTAV

SEQ ID NO: 16596 - protein, 11 aa, Homo sapiens
  Table A; HLA-B*48:01; SF3B1; R957Q; 0
QAADLISQTAV

SEQ ID NO: 16597 - protein, 11 aa, Homo sapiens
  Table A; HLA-B*54:01; SF3B1; R957Q; 0
QAADLISQTAV

SEQ ID NO: 16598 - protein, 11 aa, Homo sapiens
  Table A; HLA-C*16:04; SF3B1; R957Q; 0
QAADLISQTAV

SEQ ID NO: 16599 - protein, 10 aa, Homo sapiens
  Table A; HLA-A*02:06; PPP2R1A; S256F; 0
QAAEDKFWRV

SEQ ID NO: 16600 - protein, 10 aa, Homo sapiens
  Table A; HLA-A*68:02; PPP2R1A; S256F; 0
QAAEDKFWRV

SEQ ID NO: 16601 - protein, 11 aa, Homo sapiens
  Table A; HLA-A*30:02; MAX; R60Q; 0
QAQILDKATEY

SEQ ID NO: 16602 - protein, 11 aa, Homo sapiens
  Table A; HLA-B*35:01; MAX; R60Q; 1
QAQILDKATEY

SEQ ID NO: 16603 - protein, 8 aa, Homo sapiens
  Table A; HLA-A*03:02; SMARCA4; G1232S; 0
QASMFDQK

SEQ ID NO: 16604 - protein, 8 aa, Homo sapiens
  Table A; HLA-A*11:01; SMARCA4; G1232S; 0
QASMFDQK

SEQ ID NO: 16605 - protein, 9 aa, Homo sapiens
  Table A; HLA-B*57:01; PTK6; H126P; 1
QAVRPYKIW

SEQ ID NO: 16606 - protein, 9 aa, Homo sapiens
  Table A; HLA-B*51:01; MB21D2; Q311E; 0
QAYEACKAI

SEQ ID NO: 16607 - protein, 11 aa, Homo sapiens
  Table A; HLA-B*40:02; NFE2L2; R34G; 0
QDIDLGVSGEV

SEQ ID NO: 16608 - protein, 11 aa, Homo sapiens
  Table A; HLA-B*48:01; NFE2L2; R34G; 0
QDIDLGVSGEV

SEQ ID NO: 16609 - protein, 11 aa, Homo sapiens
  Table A; HLA-C*08:03; NFE2L2; R34G; 0
QDIDLGVSGEV

SEQ ID NO: 16610 - protein, 11 aa, Homo sapiens
  Table A; HLA-B*40:02; NFE2L2; R34Q; 0
QDIDLGVSQEV

SEQ ID NO: 16611 - protein, 11 aa, Homo sapiens
  Table A; HLA-B*44:05; NFE2L2; R34Q; 0
QDIDLGVSQEV

SEQ ID NO: 16612 - protein, 11 aa, Homo sapiens
  Table A; HLA-C*08:03; NFE2L2; R34Q; 0
QDIDLGVSQEV

SEQ ID NO: 16613 - protein, 9 aa, Homo sapiens
  Table A; HLA-A*11:01; NFE2L2; D29G; 0
QDIGLGVSR

SEQ ID NO: 16614 - protein, 9 aa, Homo sapiens
  Table A; HLA-A*31:01; NFE2L2; D29G; 0
QDIGLGVSR

SEQ ID NO: 16615 - protein, 9 aa, Homo sapiens
  Table A; HLA-A*33:01; NFE2L2; D29G; 0
QDIGLGVSR

SEQ ID NO: 16616 - protein, 9 aa, Homo sapiens
  Table A; HLA-A*33:03; NFE2L2; D29G; 0
QDIGLGVSR

SEQ ID NO: 16617 - protein, 9 aa, Homo sapiens
  Table A; HLA-A*68:01; NFE2L2; D29G; 0
QDIGLGVSR

SEQ ID NO: 16618 - protein, 9 aa, Homo sapiens
  Table A; HLA-A*68:02; NFE2L2; D29G; 0
QDIGLGVSR

SEQ ID NO: 16619 - protein, 9 aa, Homo sapiens
  Table A; HLA-B*27:02; NFE2L2; D29G; 0
QDIGLGVSR

SEQ ID NO: 16620 - protein, 9 aa, Homo sapiens
  Table A; HLA-B*27:05; NFE2L2; D29G; 0
QDIGLGVSR

SEQ ID NO: 16621 - protein, 11 aa, Homo sapiens
  Table A; HLA-B*40:02; NFE2L2; D29G; 0
QDIGLGVSREV

SEQ ID NO: 16622 - protein, 9 aa, Homo sapiens
  Table A; HLA-A*31:01; NFE2L2; D29H; 0
QDIHLGVSR

SEQ ID NO: 16623 - protein, 9 aa, Homo sapiens
  Table A; HLA-A*33:01; NFE2L2; D29H; 0
QDIHLGVSR

SEQ ID NO: 16624 - protein, 9 aa, Homo sapiens
  Table A; HLA-A*33:03; NFE2L2; D29H; 0
QDIHLGVSR

SEQ ID NO: 16625 - protein, 9 aa, Homo sapiens
  Table A; HLA-A*68:01; NFE2L2; D29H; 0
QDIHLGVSR

SEQ ID NO: 16626 - protein, 9 aa, Homo sapiens
  Table A; HLA-A*68:02; NFE2L2; D29H; 0
QDIHLGVSR

SEQ ID NO: 16627 - protein, 9 aa, Homo sapiens
  Table A; HLA-B*27:02; NFE2L2; D29H; 0
QDIHLGVSR

SEQ ID NO: 16628 - protein, 9 aa, Homo sapiens
  Table A; HLA-A*30:01; PIK3CA; E453Q; 0
QDLLNPIGV

SEQ ID NO: 16629 - protein, 9 aa, Homo sapiens
  Table A; HLA-B*37:01; PIK3CA; E453Q; 0
QDLLNPIGV

SEQ ID NO: 16630 - protein, 9 aa, Homo sapiens
  Table A; HLA-B*39:06; PIK3CA; E453Q; 0
QDLLNPIGV

SEQ ID NO: 16631 - protein, 9 aa, Homo sapiens
  Table A; HLA-B*40:02; PIK3CA; E453Q; 0
QDLLNPIGV

SEQ ID NO: 16632 - protein, 9 aa, Homo sapiens
  Table A; HLA-B*41:02; PIK3CA; E453Q; 0
QDLLNPIGV

SEQ ID NO: 16633 - protein, 9 aa, Homo sapiens
  Table A; HLA-B*37:01; GNAS; R201H; 0
QDLLRCHVL

SEQ ID NO: 16634 - protein, 8 aa, Homo sapiens
  Table A; HLA-B*41:02; STAG1; A116T; 0
QDRDITLL

SEQ ID NO: 16635 - protein, 8 aa, Homo sapiens
  Table A; HLA-B*41:02; PIK3CA; E81K; 0
QEAEREKF

SEQ ID NO: 16636 - protein, 8 aa, Homo sapiens
  Table A; HLA-B*44:05; PIK3CA; E81K; 0
QEAEREKF

SEQ ID NO: 16637 - protein, 9 aa, Homo sapiens
  Table A; HLA-B*37:01; PIK3CA; E81K; 0
QEAEREKFF

SEQ ID NO: 16638 - protein, 9 aa, Homo sapiens
  Table A; HLA-B*44:02; PIK3CA; E81K; 0
QEAEREKFF

SEQ ID NO: 16639 - protein, 9 aa, Homo sapiens
  Table A; HLA-B*44:03; PIK3CA; E81K; 0
QEAEREKFF

SEQ ID NO: 16640 - protein, 10 aa, Homo sapiens
  Table A; HLA-B*40:02; DDIT3; R147H; 0
QEIEHLTREV

SEQ ID NO: 16641 - protein, 10 aa, Homo sapiens
  Table A; HLA-B*44:05; DDIT3; R147H; 0
QEIEHLTREV

SEQ ID NO: 16642 - protein, 10 aa, Homo sapiens
  Table A; HLA-B*49:01; DDIT3; R147H; 0
QEIEHLTREV

SEQ ID NO: 16643 - protein, 10 aa, Homo sapiens
  Table A; HLA-B*50:01; DDIT3; R147H; 0
QEIEHLTREV

SEQ ID NO: 16644 - protein, 9 aa, Homo sapiens
  Table A; HLA-B*27:02; NFE2L2; R34Q; 0
QEVFDFSQR

SEQ ID NO: 16645 - protein, 9 aa, Homo sapiens
  Table A; HLA-B*49:01; NFE2L2; R34Q; 0
QEVFDFSQR

SEQ ID NO: 16646 - protein, 8 aa, Homo sapiens
  Table A; HLA-A*02:05; SF3B1; K700E; 0
QEVRTISA

SEQ ID NO: 16647 - protein, 8 aa, Homo sapiens
  Table A; HLA-A*02:08; SF3B1; K700E; 0
QEVRTISA

SEQ ID NO: 16648 - protein, 8 aa, Homo sapiens
  Table A; HLA-B*18:01; SF3B1; K700E; 1
QEVRTISA

SEQ ID NO: 16649 - protein, 8 aa, Homo sapiens
  Table A; HLA-B*39:06; SF3B1; K700E; 0
QEVRTISA

SEQ ID NO: 16650 - protein, 8 aa, Homo sapiens
  Table A; HLA-B*40:02; SF3B1; K700E; 0
QEVRTISA

SEQ ID NO: 16651 - protein, 8 aa, Homo sapiens
  Table A; HLA-B*40:06; SF3B1; K700E; 0
QEVRTISA

SEQ ID NO: 16652 - protein, 8 aa, Homo sapiens
  Table A; HLA-B*41:02; SF3B1; K700E; 0
QEVRTISA

SEQ ID NO: 16653 - protein, 8 aa, Homo sapiens
  Table A; HLA-B*49:01; SF3B1; K700E; 0
QEVRTISA

SEQ ID NO: 16654 - protein, 8 aa, Homo sapiens
  Table A; HLA-B*50:01; SF3B1; K700E; 0
QEVRTISA

SEQ ID NO: 16655 - protein, 9 aa, Homo sapiens
  Table A; HLA-A*02:05; SF3B1; K700E; 0
QEVRTISAL

SEQ ID NO: 16656 - protein, 9 aa, Homo sapiens
  Table A; HLA-A*02:06; SF3B1; K700E; 0
QEVRTISAL

SEQ ID NO: 16657 - protein, 9 aa, Homo sapiens
  Table A; HLA-A*23:01; SF3B1; K700E; 0
QEVRTISAL

SEQ ID NO: 16658 - protein, 9 aa, Homo sapiens
  Table A; HLA-A*30:01; SF3B1; K700E; 0
QEVRTISAL

SEQ ID NO: 16659 - protein, 9 aa, Homo sapiens
  Table A; HLA-A*68:02; SF3B1; K700E; 0
QEVRTISAL

SEQ ID NO: 16660 - protein, 9 aa, Homo sapiens
  Table A; HLA-B*07:02; SF3B1; K700E; 1
QEVRTISAL

SEQ ID NO: 16661 - protein, 9 aa, Homo sapiens
  Table A; HLA-B*13:02; SF3B1; K700E; 0
QEVRTISAL

SEQ ID NO: 16662 - protein, 9 aa, Homo sapiens
  Table A; HLA-B*14:02; SF3B1; K700E; 0
QEVRTISAL

SEQ ID NO: 16663 - protein, 9 aa, Homo sapiens
  Table A; HLA-B*15:01; SF3B1; K700E; 1
QEVRTISAL

SEQ ID NO: 16664 - protein, 9 aa, Homo sapiens
  Table A; HLA-B*15:10; SF3B1; K700E; 0
QEVRTISAL

SEQ ID NO: 16665 - protein, 9 aa, Homo sapiens
  Table A; HLA-B*18:01; SF3B1; K700E; 1
QEVRTISAL

SEQ ID NO: 16666 - protein, 9 aa, Homo sapiens
  Table A; HLA-B*37:01; SF3B1; K700E; 0
QEVRTISAL

SEQ ID NO: 16667 - protein, 9 aa, Homo sapiens
  Table A; HLA-B*38:01; SF3B1; K700E; 0
QEVRTISAL

SEQ ID NO: 16668 - protein, 9 aa, Homo sapiens
  Table A; HLA-B*39:01; SF3B1; K700E; 0
QEVRTISAL

SEQ ID NO: 16669 - protein, 9 aa, Homo sapiens
  Table A; HLA-B*40:01; SF3B1; K700E; 1
QEVRTISAL

SEQ ID NO: 16670 - protein, 9 aa, Homo sapiens
  Table A; HLA-B*40:02; SF3B1; K700E; 0
QEVRTISAL

SEQ ID NO: 16671 - protein, 9 aa, Homo sapiens
  Table A; HLA-B*40:06; SF3B1; K700E; 0
QEVRTISAL

SEQ ID NO: 16672 - protein, 9 aa, Homo sapiens
  Table A; HLA-B*41:02; SF3B1; K700E; 0
QEVRTISAL

SEQ ID NO: 16673 - protein, 9 aa, Homo sapiens
  Table A; HLA-B*44:02; SF3B1; K700E; 1
QEVRTISAL

SEQ ID NO: 16674 - protein, 9 aa, Homo sapiens
  Table A; HLA-B*44:03; SF3B1; K700E; 1
QEVRTISAL

SEQ ID NO: 16675 - protein, 9 aa, Homo sapiens
  Table A; HLA-B*44:05; SF3B1; K700E; 0
QEVRTISAL

SEQ ID NO: 16676 - protein, 9 aa, Homo sapiens
  Table A; HLA-B*48:01; SF3B1; K700E; 0
QEVRTISAL

SEQ ID NO: 16677 - protein, 9 aa, Homo sapiens
  Table A; HLA-B*49:01; SF3B1; K700E; 0
QEVRTISAL

SEQ ID NO: 16678 - protein, 9 aa, Homo sapiens
  Table A; HLA-B*50:01; SF3B1; K700E; 0
QEVRTISAL

SEQ ID NO: 16679 - protein, 9 aa, Homo sapiens
  Table A; HLA-B*58:01; SF3B1; K700E; 0
QEVRTISAL

SEQ ID NO: 16680 - protein, 9 aa, Homo sapiens
  Table A; HLA-C*03:02; SF3B1; K700E; 0
QEVRTISAL

SEQ ID NO: 16681 - protein, 9 aa, Homo sapiens
  Table A; HLA-C*08:01; SF3B1; K700E; 0
QEVRTISAL

SEQ ID NO: 16682 - protein, 9 aa, Homo sapiens
  Table A; HLA-C*08:03; SF3B1; K700E; 0
QEVRTISAL

SEQ ID NO: 16683 - protein, 9 aa, Homo sapiens
  Table A; HLA-C*16:04; SF3B1; K700E; 0
QEVRTISAL

SEQ ID NO: 16684 - protein, 11 aa, Homo sapiens
  Table A; HLA-B*40:02; SF3B1; K700E; 0
QEVRTISALAI

SEQ ID NO: 16685 - protein, 11 aa, Homo sapiens
  Table A; HLA-B*44:03; SF3B1; K700E; 1
QEVRTISALAI

SEQ ID NO: 16686 - protein, 11 aa, Homo sapiens
  Table A; HLA-B*44:05; SF3B1; K700E; 0
QEVRTISALAI

SEQ ID NO: 16687 - protein, 11 aa, Homo sapiens
  Table A; HLA-B*49:01; SF3B1; K700E; 0
QEVRTISALAI

SEQ ID NO: 16688 - protein, 9 aa, Homo sapiens
  Table A; HLA-A*23:01; STAG2; R370Q; 0
QFKDRIVSM

SEQ ID NO: 16689 - protein, 9 aa, Homo sapiens
  Table A; HLA-A*30:01; STAG2; R370Q; 0
QFKDRIVSM

SEQ ID NO: 16690 - protein, 9 aa, Homo sapiens
  Table A; HLA-A*33:03; STAG2; R370Q; 0
QFKDRIVSM

SEQ ID NO: 16691 - protein, 9 aa, Homo sapiens
  Table A; HLA-B*07:02; STAG2; R370Q; 1
QFKDRIVSM

SEQ ID NO: 16692 - protein, 9 aa, Homo sapiens
  Table A; HLA-B*08:01; STAG2; R370Q; 0
QFKDRIVSM

SEQ ID NO: 16693 - protein, 9 aa, Homo sapiens
  Table A; HLA-B*15:01; STAG2; R370Q; 0
QFKDRIVSM

SEQ ID NO: 16694 - protein, 9 aa, Homo sapiens
  Table A; HLA-B*15:02; STAG2; R370Q; 0
QFKDRIVSM

SEQ ID NO: 16695 - protein, 9 aa, Homo sapiens
  Table A; HLA-C*08:01; STAG2; R370Q; 0
QFKDRIVSM

SEQ ID NO: 16696 - protein, 9 aa, Homo sapiens
  Table A; HLA-C*14:02; STAG2; R370Q; 0
QFKDRIVSM

SEQ ID NO: 16697 - protein, 9 aa, Homo sapiens
  Table A; HLA-C*14:03; STAG2; R370Q; 0
QFKDRIVSM

SEQ ID NO: 16698 - protein, 9 aa, Homo sapiens
  Table A; HLA-B*15:10; PIK3CA; H1047Q; 0
QHGGWTTKM

SEQ ID NO: 16699 - protein, 9 aa, Homo sapiens
  Table A; HLA-B*38:01; PIK3CA; H1047Q; 0
QHGGWTTKM

SEQ ID NO: 16700 - protein, 8 aa, Homo sapiens
  Table A; HLA-B*39:06; ACSL3; R232Q; 0
QHIITVDG

SEQ ID NO: 16701 - protein, 9 aa, Homo sapiens
  Table A; HLA-B*27:02; ACSL3; R232Q; 0
QHIITVDGK

SEQ ID NO: 16702 - protein, 9 aa, Homo sapiens
  Table A; HLA-A*31:01; TP53; V173M; 0
QHMTEVMRR

SEQ ID NO: 16703 - protein, 9 aa, Homo sapiens
  Table A; HLA-B*15:10; TP53; R175H; 0
QHMTEVVRH

SEQ ID NO: 16704 - protein, 9 aa, Homo sapiens
  Table A; HLA-B*38:01; TP53; R175H; 1
QHMTEVVRH

SEQ ID NO: 16705 - protein, 8 aa, Homo sapiens
  Table A; HLA-B*15:01; EGFR; R108K; 1
QIIKGNMY

SEQ ID NO: 16706 - protein, 8 aa, Homo sapiens
  Table A; HLA-B*15:02; EGFR; R108K; 0
QIIKGNMY

SEQ ID NO: 16707 - protein, 9 aa, Homo sapiens
  Table A; HLA-A*01:01; EGFR; R108K; 1
QIIKGNMYY

SEQ ID NO: 16708 - protein, 9 aa, Homo sapiens
  Table A; HLA-A*26:01; EGFR; R108K; 0
QIIKGNMYY

SEQ ID NO: 16709 - protein, 9 aa, Homo sapiens
  Table A; HLA-A*29:02; EGFR; R108K; 0
QIIKGNMYY

SEQ ID NO: 16710 - protein, 9 aa, Homo sapiens
  Table A; HLA-A*30:04; EGFR; R108K; 0
QIIKGNMYY

SEQ ID NO: 16711 - protein, 9 aa, Homo sapiens
  Table A; HLA-B*15:01; EGFR; R108K; 1
QIIKGNMYY

SEQ ID NO: 16712 - protein, 9 aa, Homo sapiens
  Table A; HLA-B*15:02; EGFR; R108K; 0
QIIKGNMYY

SEQ ID NO: 16713 - protein, 9 aa, Homo sapiens
  Table A; HLA-B*57:01; EGFR; R108K; 0
QIIKGNMYY

SEQ ID NO: 16714 - protein, 9 aa, Homo sapiens
  Table A; HLA-B*58:01; EGFR; R108K; 0
QIIKGNMYY

SEQ ID NO: 16715 - protein, 9 aa, Homo sapiens
  Table A; HLA-B*07:02; ARHGEF12; R113Q; 1
QIIKVNGTL

SEQ ID NO: 16716 - protein, 9 aa, Homo sapiens
  Table A; HLA-B*15:01; ARHGEF12; R113Q; 1
QIIKVNGTL

SEQ ID NO: 16717 - protein, 9 aa, Homo sapiens
  Table A; HLA-B*58:01; ARHGEF12; R113Q; 0
QIIKVNGTL

SEQ ID NO: 16718 - protein, 10 aa, Homo sapiens
  Table A; HLA-A*02:03; ARHGEF12; R113Q; 0
QIIKVNGTLV

SEQ ID NO: 16719 - protein, 10 aa, Homo sapiens
  Table A; HLA-A*02:08; ARHGEF12; R113Q; 0
QIIKVNGTLV

SEQ ID NO: 16720 - protein, 10 aa, Homo sapiens
  Table A; HLA-A*25:01; PIK3CA; M1043I; 0
QINDAHHGGW

SEQ ID NO: 16721 - protein, 10 aa, Homo sapiens
  Table A; HLA-B*15:01; PTPRD; R561Q; 1
QITIEPGTSY

SEQ ID NO: 16722 - protein, 10 aa, Homo sapiens
  Table A; HLA-B*15:02; PTPRD; R561Q; 0
QITIEPGTSY

SEQ ID NO: 16723 - protein, 10 aa, Homo sapiens
  Table A; HLA-C*08:01; PTPRD; R561Q; 0
QITIEPGTSY

SEQ ID NO: 16724 - protein, 8 aa, Homo sapiens
  Table A; HLA-B*15:03; SMARCA4; G1232S; 0
QKVIQASM

SEQ ID NO: 16725 - protein, 9 aa, Homo sapiens
  Table A; HLA-B*15:03; SMARCA4; G1232S; 0
QKVIQASMF

SEQ ID NO: 16726 - protein, 10 aa, Homo sapiens
  Table A; HLA-A*02:03; TP53; C141Y; 0
QLAKTYPVQL

SEQ ID NO: 16727 - protein, 10 aa, Homo sapiens
  Table A; HLA-A*02:04; TP53; C141Y; 0
QLAKTYPVQL

SEQ ID NO: 16728 - protein, 9 aa, Homo sapiens
  Table A; HLA-B*35:08; NFE2L2; T80P; 0
QLDEEPGEF

SEQ ID NO: 16729 - protein, 9 aa, Homo sapiens
  Table A; HLA-B*39:01; NFE2L2; T80P; 0
QLDEEPGEF

SEQ ID NO: 16730 - protein, 9 aa, Homo sapiens
  Table A; HLA-C*05:01; NFE2L2; T80P; 1
QLDEEPGEF

SEQ ID NO: 16731 - protein, 9 aa, Homo sapiens
  Table A; HLA-C*08:02; NFE2L2; T80P; 0
QLDEEPGEF

SEQ ID NO: 16732 - protein, 10 aa, Homo sapiens
  Table A; HLA-A*02:01; NFE2L2; T80P; 1
QLDEEPGEFL

SEQ ID NO: 16733 - protein, 10 aa, Homo sapiens
  Table A; HLA-A*02:06; NFE2L2; T80P; 0
QLDEEPGEFL

SEQ ID NO: 16734 - protein, 10 aa, Homo sapiens
  Table A; HLA-A*02:07; NFE2L2; T80P; 0
QLDEEPGEFL

SEQ ID NO: 16735 - protein, 10 aa, Homo sapiens
  Table A; HLA-B*13:01; NFE2L2; T80P; 0
QLDEEPGEFL

SEQ ID NO: 16736 - protein, 10 aa, Homo sapiens
  Table A; HLA-B*38:01; NFE2L2; T80P; 0
QLDEEPGEFL

SEQ ID NO: 16737 - protein, 10 aa, Homo sapiens
  Table A; HLA-B*39:01; NFE2L2; T80P; 0
QLDEEPGEFL

SEQ ID NO: 16738 - protein, 10 aa, Homo sapiens
  Table A; HLA-B*48:01; NFE2L2; T80P; 0
QLDEEPGEFL

SEQ ID NO: 16739 - protein, 10 aa, Homo sapiens
  Table A; HLA-C*05:01; NFE2L2; T80P; 1
QLDEEPGEFL

SEQ ID NO: 16740 - protein, 10 aa, Homo sapiens
  Table A; HLA-C*08:02; NFE2L2; T80P; 0
QLDEEPGEFL

SEQ ID NO: 16741 - protein, 9 aa, Homo sapiens
  Table A; HLA-B*39:01; NFE2L2; E82D; 0
QLDEETGDF

SEQ ID NO: 16742 - protein, 9 aa, Homo sapiens
  Table A; HLA-C*08:02; NFE2L2; E82D; 0
QLDEETGDF

SEQ ID NO: 16743 - protein, 10 aa, Homo sapiens
  Table A; HLA-A*02:07; NFE2L2; E82D; 0
QLDEETGDFL

SEQ ID NO: 16744 - protein, 10 aa, Homo sapiens
  Table A; HLA-B*13:01; NFE2L2; E82D; 0
QLDEETGDFL

SEQ ID NO: 16745 - protein, 10 aa, Homo sapiens
  Table A; HLA-B*38:01; NFE2L2; E82D; 0
QLDEETGDFL

SEQ ID NO: 16746 - protein, 10 aa, Homo sapiens
  Table A; HLA-B*48:01; NFE2L2; E82D; 0
QLDEETGDFL

SEQ ID NO: 16747 - protein, 10 aa, Homo sapiens
  Table A; HLA-C*05:01; NFE2L2; E82D; 1
QLDEETGDFL

SEQ ID NO: 16748 - protein, 10 aa, Homo sapiens
  Table A; HLA-C*08:02; NFE2L2; E82D; 0
QLDEETGDFL

SEQ ID NO: 16749 - protein, 10 aa, Homo sapiens
  Table A; HLA-C*08:03; NFE2L2; E82D; 0
QLDEETGDFL

SEQ ID NO: 16750 - protein, 9 aa, Homo sapiens
  Table A; HLA-A*01:01; NFE2L2; E79Q; 1
QLDEQTGEF

SEQ ID NO: 16751 - protein, 9 aa, Homo sapiens
  Table A; HLA-A*02:07; NFE2L2; E79Q; 0
QLDEQTGEF

SEQ ID NO: 16752 - protein, 9 aa, Homo sapiens
  Table A; HLA-B*13:01; NFE2L2; E79Q; 0
QLDEQTGEF

SEQ ID NO: 16753 - protein, 9 aa, Homo sapiens
  Table A; HLA-B*15:01; NFE2L2; E79Q; 1
QLDEQTGEF

SEQ ID NO: 16754 - protein, 9 aa, Homo sapiens
  Table A; HLA-B*15:02; NFE2L2; E79Q; 0
QLDEQTGEF

SEQ ID NO: 16755 - protein, 9 aa, Homo sapiens
  Table A; HLA-B*35:08; NFE2L2; E79Q; 0
QLDEQTGEF

SEQ ID NO: 16756 - protein, 9 aa, Homo sapiens
  Table A; HLA-B*38:01; NFE2L2; E79Q; 0
QLDEQTGEF

SEQ ID NO: 16757 - protein, 9 aa, Homo sapiens
  Table A; HLA-B*39:01; NFE2L2; E79Q; 0
QLDEQTGEF

SEQ ID NO: 16758 - protein, 9 aa, Homo sapiens
  Table A; HLA-C*04:01; NFE2L2; E79Q; 1
QLDEQTGEF

SEQ ID NO: 16759 - protein, 9 aa, Homo sapiens
  Table A; HLA-C*05:01; NFE2L2; E79Q; 1
QLDEQTGEF

SEQ ID NO: 16760 - protein, 9 aa, Homo sapiens
  Table A; HLA-C*08:02; NFE2L2; E79Q; 1
QLDEQTGEF

SEQ ID NO: 16761 - protein, 10 aa, Homo sapiens
  Table A; HLA-A*02:01; NFE2L2; E79Q; 1
QLDEQTGEFL

SEQ ID NO: 16762 - protein, 10 aa, Homo sapiens
  Table A; HLA-A*02:06; NFE2L2; E79Q; 0
QLDEQTGEFL

SEQ ID NO: 16763 - protein, 10 aa, Homo sapiens
  Table A; HLA-A*02:07; NFE2L2; E79Q; 0
QLDEQTGEFL

SEQ ID NO: 16764 - protein, 10 aa, Homo sapiens
  Table A; HLA-B*13:01; NFE2L2; E79Q; 0
QLDEQTGEFL

SEQ ID NO: 16765 - protein, 10 aa, Homo sapiens
  Table A; HLA-B*38:01; NFE2L2; E79Q; 0
QLDEQTGEFL

SEQ ID NO: 16766 - protein, 10 aa, Homo sapiens
  Table A; HLA-B*39:01; NFE2L2; E79Q; 0
QLDEQTGEFL

SEQ ID NO: 16767 - protein, 10 aa, Homo sapiens
  Table A; HLA-B*48:01; NFE2L2; E79Q; 0
QLDEQTGEFL

SEQ ID NO: 16768 - protein, 10 aa, Homo sapiens
  Table A; HLA-C*05:01; NFE2L2; E79Q; 1
QLDEQTGEFL

SEQ ID NO: 16769 - protein, 10 aa, Homo sapiens
  Table A; HLA-C*08:02; NFE2L2; E79Q; 1
QLDEQTGEFL

SEQ ID NO: 16770 - protein, 9 aa, Homo sapiens
  Table A; HLA-A*02:03; PIK3CA; R93Q; 0
QLFQPFLKV

SEQ ID NO: 16771 - protein, 9 aa, Homo sapiens
  Table A; HLA-A*02:04; PIK3CA; R93Q; 0
QLFQPFLKV

SEQ ID NO: 16772 - protein, 9 aa, Homo sapiens
  Table A; HLA-A*02:07; PIK3CA; R93Q; 0
QLFQPFLKV

SEQ ID NO: 16773 - protein, 9 aa, Homo sapiens
  Table A; HLA-A*68:02; PIK3CA; R93Q; 0
QLFQPFLKV

SEQ ID NO: 16774 - protein, 9 aa, Homo sapiens
  Table A; HLA-B*13:02; PIK3CA; R93Q; 1
QLFQPFLKV

SEQ ID NO: 16775 - protein, 9 aa, Homo sapiens
  Table A; HLA-C*15:02; PIK3CA; R93Q; 0
QLFQPFLKV

SEQ ID NO: 16776 - protein, 9 aa, Homo sapiens
  Table A; HLA-B*13:01; NFE2L2; D77G; 0
QLGEETGEF

SEQ ID NO: 16777 - protein, 9 aa, Homo sapiens
  Table A; HLA-B*15:01; NFE2L2; D77G; 0
QLGEETGEF

SEQ ID NO: 16778 - protein, 9 aa, Homo sapiens
  Table A; HLA-B*15:02; NFE2L2; D77G; 0
QLGEETGEF

SEQ ID NO: 16779 - protein, 9 aa, Homo sapiens
  Table A; HLA-B*39:01; NFE2L2; D77G; 0
QLGEETGEF

SEQ ID NO: 16780 - protein, 10 aa, Homo sapiens
  Table A; HLA-A*02:05; NFE2L2; D77G; 0
QLGEETGEFL

SEQ ID NO: 16781 - protein, 9 aa, Homo sapiens
  Table A; HLA-A*02:01; CSMD3; R2601Q; 1
QLVGKSSAV

SEQ ID NO: 16782 - protein, 9 aa, Homo sapiens
  Table A; HLA-A*02:03; CSMD3; R2601Q; 0
QLVGKSSAV

SEQ ID NO: 16783 - protein, 9 aa, Homo sapiens
  Table A; HLA-B*08:01; CSMD3; R2601Q; 1
QLVGKSSAV

SEQ ID NO: 16784 - protein, 10 aa, Homo sapiens
  Table A; HLA-A*30:02; PIK3CA; H1047L; 0
QMNDALHGGW

SEQ ID NO: 16785 - protein, 10 aa, Homo sapiens
  Table A; HLA-B*15:13; PIK3CA; H1047L; 0
QMNDALHGGW

SEQ ID NO: 16786 - protein, 10 aa, Homo sapiens
  Table A; HLA-B*44:03; PIK3CA; H1047L; 1
QMNDALHGGW

SEQ ID NO: 16787 - protein, 10 aa, Homo sapiens
  Table A; HLA-A*25:01; PIK3CA; H1047Q; 0
QMNDAQHGGW

SEQ ID NO: 16788 - protein, 10 aa, Homo sapiens
  Table A; HLA-A*30:02; PIK3CA; H1047Q; 0
QMNDAQHGGW

SEQ ID NO: 16789 - protein, 10 aa, Homo sapiens
  Table A; HLA-A*32:01; PIK3CA; H1047Q; 0
QMNDAQHGGW

SEQ ID NO: 16790 - protein, 10 aa, Homo sapiens
  Table A; HLA-B*15:13; PIK3CA; H1047Q; 0
QMNDAQHGGW

SEQ ID NO: 16791 - protein, 10 aa, Homo sapiens
  Table A; HLA-B*44:03; PIK3CA; H1047Q; 0
QMNDAQHGGW

SEQ ID NO: 16792 - protein, 10 aa, Homo sapiens
  Table A; HLA-B*44:05; PIK3CA; H1047Q; 0
QMNDAQHGGW

SEQ ID NO: 16793 - protein, 9 aa, Homo sapiens
  Table A; HLA-A*03:02; MAP2K1; K57N; 0
QNQKVGELK

SEQ ID NO: 16794 - protein, 11 aa, Homo sapiens
  Table A; HLA-B*54:01; PIK3CA; G106V; 0
QPFLKVIEPVV

SEQ ID NO: 16795 - protein, 9 aa, Homo sapiens
  Table A; HLA-B*08:01; XPO1; R749Q; 1
QPLIRSMQT

SEQ ID NO: 16796 - protein, 10 aa, Homo sapiens
  Table A; HLA-B*07:02; XPO1; R749Q; 1
QPLIRSMQTV

SEQ ID NO: 16797 - protein, 10 aa, Homo sapiens
  Table A; HLA-B*51:01; XPO1; R749Q; 0
QPLIRSMQTV

SEQ ID NO: 16798 - protein, 10 aa, Homo sapiens
  Table A; HLA-B*54:01; XPO1; R749Q; 0
QPLIRSMQTV

SEQ ID NO: 16799 - protein, 10 aa, Homo sapiens
  Table A; HLA-B*55:01; XPO1; R749Q; 0
QPLIRSMQTV

SEQ ID NO: 16800 - protein, 10 aa, Homo sapiens
  Table A; HLA-B*55:02; XPO1; R749Q; 0
QPLIRSMQTV

SEQ ID NO: 16801 - protein, 10 aa, Homo sapiens
  Table A; HLA-B*56:01; XPO1; R749Q; 0
QPLIRSMQTV

SEQ ID NO: 16802 - protein, 10 aa, Homo sapiens
  Table A; HLA-B*50:01; SF3B1; R957Q; 0
QQAADLISQT

SEQ ID NO: 16803 - protein, 11 aa, Homo sapiens
  Table A; HLA-A*02:05; SF3B1; R957Q; 0
QQAADLISQTA

SEQ ID NO: 16804 - protein, 11 aa, Homo sapiens
  Table A; HLA-A*02:08; SF3B1; R957Q; 0
QQAADLISQTA

SEQ ID NO: 16805 - protein, 11 aa, Homo sapiens
  Table A; HLA-B*13:02; SF3B1; R957Q; 0
QQAADLISQTA

SEQ ID NO: 16806 - protein, 11 aa, Homo sapiens
  Table A; HLA-B*39:01; SF3B1; R957Q; 0
QQAADLISQTA

SEQ ID NO: 16807 - protein, 11 aa, Homo sapiens
  Table A; HLA-B*39:06; SF3B1; R957Q; 0
QQAADLISQTA

SEQ ID NO: 16808 - protein, 11 aa, Homo sapiens
  Table A; HLA-B*50:01; SF3B1; R957Q; 0
QQAADLISQTA

SEQ ID NO: 16809 - protein, 9 aa, Homo sapiens
  Table A; HLA-A*02:05; SF3B1; K700E; 0
QQEVRTISA

SEQ ID NO: 16810 - protein, 9 aa, Homo sapiens
  Table A; HLA-A*02:06; SF3B1; K700E; 0
QQEVRTISA

SEQ ID NO: 16811 - protein, 9 aa, Homo sapiens
  Table A; HLA-B*08:01; SF3B1; K700E; 1
QQEVRTISA

SEQ ID NO: 16812 - protein, 9 aa, Homo sapiens
  Table A; HLA-B*13:02; SF3B1; K700E; 0
QQEVRTISA

SEQ ID NO: 16813 - protein, 9 aa, Homo sapiens
  Table A; HLA-B*14:02; SF3B1; K700E; 0
QQEVRTISA

SEQ ID NO: 16814 - protein, 9 aa, Homo sapiens
  Table A; HLA-B*15:01; SF3B1; K700E; 1
QQEVRTISA

SEQ ID NO: 16815 - protein, 9 aa, Homo sapiens
  Table A; HLA-B*15:10; SF3B1; K700E; 0
QQEVRTISA

SEQ ID NO: 16816 - protein, 9 aa, Homo sapiens
  Table A; HLA-B*39:01; SF3B1; K700E; 0
QQEVRTISA

SEQ ID NO: 16817 - protein, 9 aa, Homo sapiens
  Table A; HLA-B*39:06; SF3B1; K700E; 0
QQEVRTISA

SEQ ID NO: 16818 - protein, 9 aa, Homo sapiens
  Table A; HLA-B*50:01; SF3B1; K700E; 0
QQEVRTISA

SEQ ID NO: 16819 - protein, 9 aa, Homo sapiens
  Table A; HLA-B*54:01; SF3B1; K700E; 0
QQEVRTISA

SEQ ID NO: 16820 - protein, 10 aa, Homo sapiens
  Table A; HLA-B*15:01; SF3B1; K700E; 1
QQEVRTISAL

SEQ ID NO: 16821 - protein, 10 aa, Homo sapiens
  Table A; HLA-B*15:10; SF3B1; K700E; 0
QQEVRTISAL

SEQ ID NO: 16822 - protein, 10 aa, Homo sapiens
  Table A; HLA-B*39:01; SF3B1; K700E; 0
QQEVRTISAL

SEQ ID NO: 16823 - protein, 10 aa, Homo sapiens
  Table A; HLA-B*48:01; SF3B1; K700E; 0
QQEVRTISAL

SEQ ID NO: 16824 - protein, 11 aa, Homo sapiens
  Table A; HLA-A*26:01; PTPRD; R561Q; 0
QQITIEPGTSY

SEQ ID NO: 16825 - protein, 11 aa, Homo sapiens
  Table A; HLA-B*15:01; PTPRD; R561Q; 1
QQITIEPGTSY

SEQ ID NO: 16826 - protein, 11 aa, Homo sapiens
  Table A; HLA-B*15:02; PTPRD; R561Q; 0
QQITIEPGTSY

SEQ ID NO: 16827 - protein, 11 aa, Homo sapiens
  Table A; HLA-B*15:03; PTPRD; R561Q; 0
QQITIEPGTSY

SEQ ID NO: 16828 - protein, 8 aa, Homo sapiens
  Table A; HLA-B*13:02; CDH10; R638Q; 0
QQKKEPLI

SEQ ID NO: 16829 - protein, 9 aa, Homo sapiens
  Table A; HLA-B*13:02; CDH10; R638Q; 0
QQKKEPLIL

SEQ ID NO: 16830 - protein, 8 aa, Homo sapiens
  Table A; HLA-B*15:01; ERBB2; R678Q; 0
QQQKIRKY

SEQ ID NO: 16831 - protein, 9 aa, Homo sapiens
  Table A; HLA-A*02:06; CTNNB1; S33C; 0
QQQSYLDCG

SEQ ID NO: 16832 - protein, 8 aa, Homo sapiens
  Table A; HLA-B*15:01; CTNNB1; S33F; 1
QQQSYLDF

SEQ ID NO: 16833 - protein, 10 aa, Homo sapiens
  Table A; HLA-B*38:01; CTNNB1; G34E; 0
QQQSYLDSEI

SEQ ID NO: 16834 - protein, 9 aa, Homo sapiens
  Table A; HLA-A*11:01; CTNNB1; G34R; 1
QQQSYLDSR

SEQ ID NO: 16835 - protein, 9 aa, Homo sapiens
  Table A; HLA-A*31:01; CTNNB1; G34R; 1
QQQSYLDSR

SEQ ID NO: 16836 - protein, 9 aa, Homo sapiens
  Table A; HLA-A*33:03; CTNNB1; G34R; 0
QQQSYLDSR

SEQ ID NO: 16837 - protein, 9 aa, Homo sapiens
  Table A; HLA-A*68:01; CTNNB1; G34R; 1
QQQSYLDSR

SEQ ID NO: 16838 - protein, 9 aa, Homo sapiens
  Table A; HLA-B*27:02; CTNNB1; G34R; 0
QQQSYLDSR

SEQ ID NO: 16839 - protein, 9 aa, Homo sapiens
  Table A; HLA-B*27:05; CTNNB1; G34R; 1
QQQSYLDSR

SEQ ID NO: 16840 - protein, 10 aa, Homo sapiens
  Table A; HLA-B*13:02; CTNNB1; G34R; 1
QQQSYLDSRI

SEQ ID NO: 16841 - protein, 10 aa, Homo sapiens
  Table A; HLA-B*38:01; CTNNB1; G34R; 1
QQQSYLDSRI

SEQ ID NO: 16842 - protein, 10 aa, Homo sapiens
  Table A; HLA-B*44:05; CTNNB1; G34R; 0
QQQSYLDSRI

SEQ ID NO: 16843 - protein, 9 aa, Homo sapiens
  Table A; HLA-A*02:01; CTNNB1; G34V; 1
QQQSYLDSV

SEQ ID NO: 16844 - protein, 9 aa, Homo sapiens
  Table A; HLA-A*02:03; CTNNB1; G34V; 0
QQQSYLDSV

SEQ ID NO: 16845 - protein, 9 aa, Homo sapiens
  Table A; HLA-A*02:04; CTNNB1; G34V; 0
QQQSYLDSV

SEQ ID NO: 16846 - protein, 9 aa, Homo sapiens
  Table A; HLA-A*02:05; CTNNB1; G34V; 0
QQQSYLDSV

SEQ ID NO: 16847 - protein, 9 aa, Homo sapiens
  Table A; HLA-A*02:06; CTNNB1; G34V; 0
QQQSYLDSV

SEQ ID NO: 16848 - protein, 9 aa, Homo sapiens
  Table A; HLA-A*02:08; CTNNB1; G34V; 0
QQQSYLDSV

SEQ ID NO: 16849 - protein, 9 aa, Homo sapiens
  Table A; HLA-A*31:01; CTNNB1; G34V; 0
QQQSYLDSV

SEQ ID NO: 16850 - protein, 9 aa, Homo sapiens
  Table A; HLA-B*13:02; CTNNB1; G34V; 0
QQQSYLDSV

SEQ ID NO: 16851 - protein, 9 aa, Homo sapiens
  Table A; HLA-B*27:05; CTNNB1; G34V; 1
QQQSYLDSV

SEQ ID NO: 16852 - protein, 9 aa, Homo sapiens
  Table A; HLA-B*38:01; CTNNB1; G34V; 0
QQQSYLDSV

SEQ ID NO: 16853 - protein, 9 aa, Homo sapiens
  Table A; HLA-B*39:01; CTNNB1; G34V; 0
QQQSYLDSV

SEQ ID NO: 16854 - protein, 9 aa, Homo sapiens
  Table A; HLA-B*39:06; CTNNB1; G34V; 0
QQQSYLDSV

SEQ ID NO: 16855 - protein, 9 aa, Homo sapiens
  Table A; HLA-B*48:01; CTNNB1; G34V; 0
QQQSYLDSV

SEQ ID NO: 16856 - protein, 9 aa, Homo sapiens
  Table A; HLA-B*50:01; CTNNB1; G34V; 0
QQQSYLDSV

SEQ ID NO: 16857 - protein, 10 aa, Homo sapiens
  Table A; HLA-B*38:01; CTNNB1; G34V; 0
QQQSYLDSVI

SEQ ID NO: 16858 - protein, 8 aa, Homo sapiens
  Table A; HLA-B*13:02; CTNNB1; S33Y; 0
QQQSYLDY

SEQ ID NO: 16859 - protein, 8 aa, Homo sapiens
  Table A; HLA-B*15:01; CTNNB1; S33Y; 1
QQQSYLDY

SEQ ID NO: 16860 - protein, 8 aa, Homo sapiens
  Table A; HLA-B*15:03; CTNNB1; S33Y; 0
QQQSYLDY

SEQ ID NO: 16861 - protein, 8 aa, Homo sapiens
  Table A; HLA-B*39:01; CTNNB1; S33Y; 0
QQQSYLDY

SEQ ID NO: 16862 - protein, 10 aa, Homo sapiens
  Table A; HLA-B*13:02; CTNNB1; S33Y; 0
QQQSYLDYGI

SEQ ID NO: 16863 - protein, 10 aa, Homo sapiens
  Table A; HLA-B*38:01; CTNNB1; S33Y; 0
QQQSYLDYGI

SEQ ID NO: 16864 - protein, 10 aa, Homo sapiens
  Table A; HLA-B*13:02; CTNNB1; D32H; 0
QQQSYLHSGI

SEQ ID NO: 16865 - protein, 10 aa, Homo sapiens
  Table A; HLA-B*13:02; CTNNB1; D32N; 1
QQQSYLNSGI

SEQ ID NO: 16866 - protein, 8 aa, Homo sapiens
  Table A; HLA-B*39:06; CTNNB1; D32V; 0
QQQSYLVS

SEQ ID NO: 16867 - protein, 9 aa, Homo sapiens
  Table A; HLA-A*31:01; CTNNB1; D32V; 1
QQQSYLVSG

SEQ ID NO: 16868 - protein, 10 aa, Homo sapiens
  Table A; HLA-B*13:02; CTNNB1; D32V; 1
QQQSYLVSGI

SEQ ID NO: 16869 - protein, 10 aa, Homo sapiens
  Table A; HLA-B*38:01; CTNNB1; D32V; 1
QQQSYLVSGI

SEQ ID NO: 16870 - protein, 10 aa, Homo sapiens
  Table A; HLA-B*13:02; CTNNB1; D32Y; 0
QQQSYLYSGI

SEQ ID NO: 16871 - protein, 10 aa, Homo sapiens
  Table A; HLA-B*38:01; CTNNB1; D32Y; 0
QQQSYLYSGI

SEQ ID NO: 16872 - protein, 9 aa, Homo sapiens
  Table A; HLA-A*02:05; CTNNB1; S33C; 0
QQSYLDCGI

SEQ ID NO: 16873 - protein, 9 aa, Homo sapiens
  Table A; HLA-B*13:01; CTNNB1; S33C; 0
QQSYLDCGI

SEQ ID NO: 16874 - protein, 9 aa, Homo sapiens
  Table A; HLA-B*13:02; CTNNB1; S33C; 1
QQSYLDCGI

SEQ ID NO: 16875 - protein, 9 aa, Homo sapiens
  Table A; HLA-B*38:01; CTNNB1; S33C; 0
QQSYLDCGI

SEQ ID NO: 16876 - protein, 9 aa, Homo sapiens
  Table A; HLA-A*02:05; CTNNB1; S33F; 0
QQSYLDFGI

SEQ ID NO: 16877 - protein, 9 aa, Homo sapiens
  Table A; HLA-A*68:02; CTNNB1; S33F; 0
QQSYLDFGI

SEQ ID NO: 16878 - protein, 9 aa, Homo sapiens
  Table A; HLA-B*13:02; CTNNB1; S33F; 1
QQSYLDFGI

SEQ ID NO: 16879 - protein, 9 aa, Homo sapiens
  Table A; HLA-B*38:01; CTNNB1; S33F; 1
QQSYLDFGI

SEQ ID NO: 16880 - protein, 9 aa, Homo sapiens
  Table A; HLA-A*02:05; CTNNB1; G34E; 0
QQSYLDSEI

SEQ ID NO: 16881 - protein, 9 aa, Homo sapiens
  Table A; HLA-A*68:02; CTNNB1; G34E; 0
QQSYLDSEI

SEQ ID NO: 16882 - protein, 9 aa, Homo sapiens
  Table A; HLA-B*13:01; CTNNB1; G34E; 0
QQSYLDSEI

SEQ ID NO: 16883 - protein, 9 aa, Homo sapiens
  Table A; HLA-B*13:02; CTNNB1; G34E; 0
QQSYLDSEI

SEQ ID NO: 16884 - protein, 9 aa, Homo sapiens
  Table A; HLA-B*38:01; CTNNB1; G34E; 0
QQSYLDSEI

SEQ ID NO: 16885 - protein, 9 aa, Homo sapiens
  Table A; HLA-B*39:01; CTNNB1; G34E; 0
QQSYLDSEI

SEQ ID NO: 16886 - protein, 9 aa, Homo sapiens
  Table A; HLA-A*02:05; CTNNB1; G34R; 0
QQSYLDSRI

SEQ ID NO: 16887 - protein, 9 aa, Homo sapiens
  Table A; HLA-A*02:06; CTNNB1; G34R; 0
QQSYLDSRI

SEQ ID NO: 16888 - protein, 9 aa, Homo sapiens
  Table A; HLA-A*68:02; CTNNB1; G34R; 0
QQSYLDSRI

SEQ ID NO: 16889 - protein, 9 aa, Homo sapiens
  Table A; HLA-B*13:01; CTNNB1; G34R; 0
QQSYLDSRI

SEQ ID NO: 16890 - protein, 9 aa, Homo sapiens
  Table A; HLA-B*13:02; CTNNB1; G34R; 1
QQSYLDSRI

SEQ ID NO: 16891 - protein, 9 aa, Homo sapiens
  Table A; HLA-B*38:01; CTNNB1; G34R; 1
QQSYLDSRI

SEQ ID NO: 16892 - protein, 8 aa, Homo sapiens
  Table A; HLA-B*13:02; CTNNB1; G34V; 0
QQSYLDSV

SEQ ID NO: 16893 - protein, 8 aa, Homo sapiens
  Table A; HLA-B*39:06; CTNNB1; G34V; 0
QQSYLDSV

SEQ ID NO: 16894 - protein, 9 aa, Homo sapiens
  Table A; HLA-A*02:05; CTNNB1; G34V; 0
QQSYLDSVI

SEQ ID NO: 16895 - protein, 9 aa, Homo sapiens
  Table A; HLA-A*68:02; CTNNB1; G34V; 0
QQSYLDSVI

SEQ ID NO: 16896 - protein, 9 aa, Homo sapiens
  Table A; HLA-B*13:01; CTNNB1; G34V; 0
QQSYLDSVI

SEQ ID NO: 16897 - protein, 9 aa, Homo sapiens
  Table A; HLA-B*13:02; CTNNB1; G34V; 0
QQSYLDSVI

SEQ ID NO: 16898 - protein, 9 aa, Homo sapiens
  Table A; HLA-B*15:10; CTNNB1; G34V; 0
QQSYLDSVI

SEQ ID NO: 16899 - protein, 9 aa, Homo sapiens
  Table A; HLA-B*38:01; CTNNB1; G34V; 0
QQSYLDSVI

SEQ ID NO: 16900 - protein, 9 aa, Homo sapiens
  Table A; HLA-B*39:01; CTNNB1; G34V; 0
QQSYLDSVI

SEQ ID NO: 16901 - protein, 10 aa, Homo sapiens
  Table A; HLA-C*08:03; CTNNB1; G34V; 0
QQSYLDSVIH

SEQ ID NO: 16902 - protein, 9 aa, Homo sapiens
  Table A; HLA-A*02:05; CTNNB1; S33Y; 0
QQSYLDYGI

SEQ ID NO: 16903 - protein, 9 aa, Homo sapiens
  Table A; HLA-A*02:06; CTNNB1; S33Y; 0
QQSYLDYGI

SEQ ID NO: 16904 - protein, 9 aa, Homo sapiens
  Table A; HLA-A*68:02; CTNNB1; S33Y; 0
QQSYLDYGI

SEQ ID NO: 16905 - protein, 9 aa, Homo sapiens
  Table A; HLA-B*13:01; CTNNB1; S33Y; 0
QQSYLDYGI

SEQ ID NO: 16906 - protein, 9 aa, Homo sapiens
  Table A; HLA-B*13:02; CTNNB1; S33Y; 0
QQSYLDYGI

SEQ ID NO: 16907 - protein, 9 aa, Homo sapiens
  Table A; HLA-B*38:01; CTNNB1; S33Y; 0
QQSYLDYGI

SEQ ID NO: 16908 - protein, 9 aa, Homo sapiens
  Table A; HLA-A*02:05; CTNNB1; D32H; 0
QQSYLHSGI

SEQ ID NO: 16909 - protein, 9 aa, Homo sapiens
  Table A; HLA-A*68:02; CTNNB1; D32H; 0
QQSYLHSGI

SEQ ID NO: 16910 - protein, 9 aa, Homo sapiens
  Table A; HLA-B*13:02; CTNNB1; D32H; 0
QQSYLHSGI

SEQ ID NO: 16911 - protein, 9 aa, Homo sapiens
  Table A; HLA-B*38:01; CTNNB1; D32H; 0
QQSYLHSGI

SEQ ID NO: 16912 - protein, 9 aa, Homo sapiens
  Table A; HLA-A*02:05; CTNNB1; D32N; 0
QQSYLNSGI

SEQ ID NO: 16913 - protein, 9 aa, Homo sapiens
  Table A; HLA-B*13:02; CTNNB1; D32N; 1
QQSYLNSGI

SEQ ID NO: 16914 - protein, 9 aa, Homo sapiens
  Table A; HLA-B*38:01; CTNNB1; D32N; 1
QQSYLNSGI

SEQ ID NO: 16915 - protein, 9 aa, Homo sapiens
  Table A; HLA-A*02:03; CTNNB1; D32V; 0
QQSYLVSGI

SEQ ID NO: 16916 - protein, 9 aa, Homo sapiens
  Table A; HLA-A*02:05; CTNNB1; D32V; 0
QQSYLVSGI

SEQ ID NO: 16917 - protein, 9 aa, Homo sapiens
  Table A; HLA-A*02:06; CTNNB1; D32V; 0
QQSYLVSGI

SEQ ID NO: 16918 - protein, 9 aa, Homo sapiens
  Table A; HLA-A*68:02; CTNNB1; D32V; 0
QQSYLVSGI

SEQ ID NO: 16919 - protein, 9 aa, Homo sapiens
  Table A; HLA-B*13:02; CTNNB1; D32V; 1
QQSYLVSGI

SEQ ID NO: 16920 - protein, 9 aa, Homo sapiens
  Table A; HLA-B*38:01; CTNNB1; D32V; 1
QQSYLVSGI

SEQ ID NO: 16921 - protein, 9 aa, Homo sapiens
  Table A; HLA-A*02:05; CTNNB1; D32Y; 0
QQSYLYSGI

SEQ ID NO: 16922 - protein, 9 aa, Homo sapiens
  Table A; HLA-B*13:02; CTNNB1; D32Y; 0
QQSYLYSGI

SEQ ID NO: 16923 - protein, 9 aa, Homo sapiens
  Table A; HLA-B*38:01; CTNNB1; D32Y; 0
QQSYLYSGI

SEQ ID NO: 16924 - protein, 8 aa, Homo sapiens
  Table A; HLA-B*27:05; RSPO2; R64Q; 0
QREGMRQY

SEQ ID NO: 16925 - protein, 9 aa, Homo sapiens
  Table A; HLA-A*02:05; MSN; E573K; 0
QRIDKFESM

SEQ ID NO: 16926 - protein, 9 aa, Homo sapiens
  Table A; HLA-A*02:06; MSN; E573K; 0
QRIDKFESM

SEQ ID NO: 16927 - protein, 9 aa, Homo sapiens
  Table A; HLA-A*02:07; MSN; E573K; 0
QRIDKFESM

SEQ ID NO: 16928 - protein, 9 aa, Homo sapiens
  Table A; HLA-A*23:01; MSN; E573K; 0
QRIDKFESM

SEQ ID NO: 16929 - protein, 9 aa, Homo sapiens
  Table A; HLA-A*24:02; MSN; E573K; 1
QRIDKFESM

SEQ ID NO: 16930 - protein, 9 aa, Homo sapiens
  Table A; HLA-A*26:01; MSN; E573K; 0
QRIDKFESM

SEQ ID NO: 16931 - protein, 9 aa, Homo sapiens
  Table A; HLA-A*26:03; MSN; E573K; 0
QRIDKFESM

SEQ ID NO: 16932 - protein, 9 aa, Homo sapiens
  Table A; HLA-A*30:01; MSN; E573K; 0
QRIDKFESM

SEQ ID NO: 16933 - protein, 9 aa, Homo sapiens
  Table A; HLA-A*31:01; MSN; E573K; 0
QRIDKFESM

SEQ ID NO: 16934 - protein, 9 aa, Homo sapiens
  Table A; HLA-A*33:03; MSN; E573K; 0
QRIDKFESM

SEQ ID NO: 16935 - protein, 9 aa, Homo sapiens
  Table A; HLA-A*68:01; MSN; E573K; 0
QRIDKFESM

SEQ ID NO: 16936 - protein, 9 aa, Homo sapiens
  Table A; HLA-A*68:02; MSN; E573K; 0
QRIDKFESM

SEQ ID NO: 16937 - protein, 9 aa, Homo sapiens
  Table A; HLA-B*07:02; MSN; E573K; 1
QRIDKFESM

SEQ ID NO: 16938 - protein, 9 aa, Homo sapiens
  Table A; HLA-B*08:01; MSN; E573K; 1
QRIDKFESM

SEQ ID NO: 16939 - protein, 9 aa, Homo sapiens
  Table A; HLA-B*14:01; MSN; E573K; 0
QRIDKFESM

SEQ ID NO: 16940 - protein, 9 aa, Homo sapiens
  Table A; HLA-B*14:02; MSN; E573K; 0
QRIDKFESM

SEQ ID NO: 16941 - protein, 9 aa, Homo sapiens
  Table A; HLA-B*15:01; MSN; E573K; 1
QRIDKFESM

SEQ ID NO: 16942 - protein, 9 aa, Homo sapiens
  Table A; HLA-B*15:02; MSN; E573K; 0
QRIDKFESM

SEQ ID NO: 16943 - protein, 9 aa, Homo sapiens
  Table A; HLA-B*15:03; MSN; E573K; 0
QRIDKFESM

SEQ ID NO: 16944 - protein, 9 aa, Homo sapiens
  Table A; HLA-B*15:10; MSN; E573K; 0
QRIDKFESM

SEQ ID NO: 16945 - protein, 9 aa, Homo sapiens
  Table A; HLA-B*15:13; MSN; E573K; 0
QRIDKFESM

SEQ ID NO: 16946 - protein, 9 aa, Homo sapiens
  Table A; HLA-B*18:01; MSN; E573K; 1
QRIDKFESM

SEQ ID NO: 16947 - protein, 9 aa, Homo sapiens
  Table A; HLA-B*27:02; MSN; E573K; 0
QRIDKFESM

SEQ ID NO: 16948 - protein, 9 aa, Homo sapiens
  Table A; HLA-B*27:05; MSN; E573K; 0
QRIDKFESM

SEQ ID NO: 16949 - protein, 9 aa, Homo sapiens
  Table A; HLA-B*35:01; MSN; E573K; 1
QRIDKFESM

SEQ ID NO: 16950 - protein, 9 aa, Homo sapiens
  Table A; HLA-B*35:02; MSN; E573K; 0
QRIDKFESM

SEQ ID NO: 16951 - protein, 9 aa, Homo sapiens
  Table A; HLA-B*35:03; MSN; E573K; 0
QRIDKFESM

SEQ ID NO: 16952 - protein, 9 aa, Homo sapiens
  Table A; HLA-B*35:12; MSN; E573K; 0
QRIDKFESM

SEQ ID NO: 16953 - protein, 9 aa, Homo sapiens
  Table A; HLA-B*38:01; MSN; E573K; 0
QRIDKFESM

SEQ ID NO: 16954 - protein, 9 aa, Homo sapiens
  Table A; HLA-B*39:01; MSN; E573K; 0
QRIDKFESM

SEQ ID NO: 16955 - protein, 9 aa, Homo sapiens
  Table A; HLA-B*39:06; MSN; E573K; 0
QRIDKFESM

SEQ ID NO: 16956 - protein, 9 aa, Homo sapiens
  Table A; HLA-B*40:01; MSN; E573K; 1
QRIDKFESM

SEQ ID NO: 16957 - protein, 9 aa, Homo sapiens
  Table A; HLA-B*40:02; MSN; E573K; 0
QRIDKFESM

SEQ ID NO: 16958 - protein, 9 aa, Homo sapiens
  Table A; HLA-B*41:02; MSN; E573K; 0
QRIDKFESM

SEQ ID NO: 16959 - protein, 9 aa, Homo sapiens
  Table A; HLA-B*44:03; MSN; E573K; 1
QRIDKFESM

SEQ ID NO: 16960 - protein, 9 aa, Homo sapiens
  Table A; HLA-B*44:05; MSN; E573K; 0
QRIDKFESM

SEQ ID NO: 16961 - protein, 9 aa, Homo sapiens
  Table A; HLA-B*48:01; MSN; E573K; 0
QRIDKFESM

SEQ ID NO: 16962 - protein, 9 aa, Homo sapiens
  Table A; HLA-B*50:01; MSN; E573K; 0
QRIDKFESM

SEQ ID NO: 16963 - protein, 9 aa, Homo sapiens
  Table A; HLA-B*58:01; MSN; E573K; 0
QRIDKFESM

SEQ ID NO: 16964 - protein, 9 aa, Homo sapiens
  Table A; HLA-C*06:02; MSN; E573K; 1
QRIDKFESM

SEQ ID NO: 16965 - protein, 9 aa, Homo sapiens
  Table A; HLA-C*07:01; MSN; E573K; 1
QRIDKFESM

SEQ ID NO: 16966 - protein, 9 aa, Homo sapiens
  Table A; HLA-C*07:02; MSN; E573K; 1
QRIDKFESM

SEQ ID NO: 16967 - protein, 9 aa, Homo sapiens
  Table A; HLA-C*08:01; MSN; E573K; 0
QRIDKFESM

SEQ ID NO: 16968 - protein, 9 aa, Homo sapiens
  Table A; HLA-C*08:03; MSN; E573K; 0
QRIDKFESM

SEQ ID NO: 16969 - protein, 9 aa, Homo sapiens
  Table A; HLA-C*16:04; MSN; E573K; 0
QRIDKFESM

SEQ ID NO: 16970 - protein, 11 aa, Homo sapiens
  Table A; HLA-B*27:05; BRAF; G469V; 1
QRIGSGSFVTV

SEQ ID NO: 16971 - protein, 11 aa, Homo sapiens
  Table A; HLA-B*39:01; BRAF; G469V; 0
QRIGSGSFVTV

SEQ ID NO: 16972 - protein, 8 aa, Homo sapiens
  Table A; HLA-B*27:02; BRAF; G466V; 0
QRIGSVSF

SEQ ID NO: 16973 - protein, 9 aa, Homo sapiens
  Table A; HLA-B*15:10; RAF1; S257L; 0
QRLTSTPNV

SEQ ID NO: 16974 - protein, 9 aa, Homo sapiens
  Table A; HLA-B*27:05; RAF1; S257L; 0
QRLTSTPNV

SEQ ID NO: 16975 - protein, 9 aa, Homo sapiens
  Table A; HLA-B*39:06; RAF1; S257L; 0
QRLTSTPNV

SEQ ID NO: 16976 - protein, 8 aa, Homo sapiens
  Table A; HLA-B*27:05; PCBP1; L100Q; 0
QRLVVPAT

SEQ ID NO: 16977 - protein, 8 aa, Homo sapiens
  Table A; HLA-B*39:06; PCBP1; L100Q; 0
QRLVVPAT

SEQ ID NO: 16978 - protein, 9 aa, Homo sapiens
  Table A; HLA-B*08:01; PCBP1; L100Q; 1
QRLVVPATQ

SEQ ID NO: 16979 - protein, 9 aa, Homo sapiens
  Table A; HLA-B*27:02; PCBP1; L100Q; 0
QRLVVPATQ

SEQ ID NO: 16980 - protein, 9 aa, Homo sapiens
  Table A; HLA-B*27:05; PCBP1; L100Q; 0
QRLVVPATQ

SEQ ID NO: 16981 - protein, 9 aa, Homo sapiens
  Table A; HLA-B*39:06; PCBP1; L100Q; 0
QRLVVPATQ

SEQ ID NO: 16982 - protein, 10 aa, Homo sapiens
  Table A; HLA-B*27:02; A1CF; E34K; 0
QRTGYSLVQK

SEQ ID NO: 16983 - protein, 10 aa, Homo sapiens
  Table A; HLA-B*27:05; A1CF; E34K; 1
QRTGYSLVQK

SEQ ID NO: 16984 - protein, 8 aa, Homo sapiens
  Table A; HLA-B*27:05; ACVR1; R206H; 0
QRTVAHQI

SEQ ID NO: 16985 - protein, 8 aa, Homo sapiens
  Table A; HLA-B*39:06; ACVR1; R206H; 0
QRTVAHQI

SEQ ID NO: 16986 - protein, 9 aa, Homo sapiens
  Table A; HLA-A*02:05; PIK3CA; Y1021C; 0
QSFDDIACI

SEQ ID NO: 16987 - protein, 9 aa, Homo sapiens
  Table A; HLA-A*02:06; PIK3CA; Y1021C; 0
QSFDDIACI

SEQ ID NO: 16988 - protein, 9 aa, Homo sapiens
  Table A; HLA-A*68:02; PIK3CA; Y1021C; 0
QSFDDIACI

SEQ ID NO: 16989 - protein, 9 aa, Homo sapiens
  Table A; HLA-B*13:02; PIK3CA; Y1021C; 0
QSFDDIACI

SEQ ID NO: 16990 - protein, 9 aa, Homo sapiens
  Table A; HLA-B*50:01; PIK3CA; Y1021C; 0
QSFDDIACI

SEQ ID NO: 16991 - protein, 9 aa, Homo sapiens
  Table A; HLA-B*58:01; PIK3CA; Y1021C; 0
QSFDDIACI

SEQ ID NO: 16992 - protein, 10 aa, Homo sapiens
  Table A; HLA-A*68:01; PIK3CA; Y1021C; 0
QSFDDIACIR

SEQ ID NO: 16993 - protein, 11 aa, Homo sapiens
  Table A; HLA-A*11:01; PIK3CA; Y1021C; 1
QSFDDIACIRK

SEQ ID NO: 16994 - protein, 9 aa, Homo sapiens
  Table A; HLA-B*57:01; ATM; R2691C; 0
QSFKAEFCL

SEQ ID NO: 16995 - protein, 10 aa, Homo sapiens
  Table A; HLA-A*11:01; TP53; V173L; 0
QSQHMTEVLR

SEQ ID NO: 16996 - protein, 10 aa, Homo sapiens
  Table A; HLA-A*31:01; TP53; V173L; 0
QSQHMTEVLR

SEQ ID NO: 16997 - protein, 10 aa, Homo sapiens
  Table A; HLA-A*33:03; TP53; V173L; 0
QSQHMTEVLR

SEQ ID NO: 16998 - protein, 10 aa, Homo sapiens
  Table A; HLA-A*68:01; TP53; V173L; 0
QSQHMTEVLR

SEQ ID NO: 16999 - protein, 9 aa, Homo sapiens
  Table A; HLA-B*15:01; TP53; V173M; 0
QSQHMTEVM

SEQ ID NO: 17000 - protein, 9 aa, Homo sapiens
  Table A; HLA-B*39:01; TP53; V173M; 0
QSQHMTEVM

SEQ ID NO: 17001 - protein, 10 aa, Homo sapiens
  Table A; HLA-A*31:01; TP53; V173M; 0
QSQHMTEVMR

SEQ ID NO: 17002 - protein, 10 aa, Homo sapiens
  Table A; HLA-A*68:01; TP53; V173M; 0
QSQHMTEVMR

SEQ ID NO: 17003 - protein, 8 aa, Homo sapiens
  Table A; HLA-B*13:02; CTNNB1; S33F; 1
QSYLDFGI

SEQ ID NO: 17004 - protein, 9 aa, Homo sapiens
  Table A; HLA-C*08:03; CTNNB1; S33F; 0
QSYLDFGIH

SEQ ID NO: 17005 - protein, 8 aa, Homo sapiens
  Table A; HLA-B*13:02; CTNNB1; G34E; 0
QSYLDSEI

SEQ ID NO: 17006 - protein, 8 aa, Homo sapiens
  Table A; HLA-B*51:01; CTNNB1; G34E; 0
QSYLDSEI

SEQ ID NO: 17007 - protein, 9 aa, Homo sapiens
  Table A; HLA-B*48:01; CTNNB1; G34E; 0
QSYLDSEIH

SEQ ID NO: 17008 - protein, 9 aa, Homo sapiens
  Table A; HLA-C*08:03; CTNNB1; G34E; 0
QSYLDSEIH

SEQ ID NO: 17009 - protein, 10 aa, Homo sapiens
  Table A; HLA-A*68:01; CTNNB1; S37A; 0
QSYLDSGIHA

SEQ ID NO: 17010 - protein, 10 aa, Homo sapiens
  Table A; HLA-A*68:02; CTNNB1; S37A; 0
QSYLDSGIHA

SEQ ID NO: 17011 - protein, 10 aa, Homo sapiens
  Table A; HLA-B*50:01; CTNNB1; S37A; 0
QSYLDSGIHA

SEQ ID NO: 17012 - protein, 10 aa, Homo sapiens
  Table A; HLA-B*54:01; CTNNB1; S37A; 0
QSYLDSGIHA

SEQ ID NO: 17013 - protein, 10 aa, Homo sapiens
  Table A; HLA-B*55:02; CTNNB1; S37A; 0
QSYLDSGIHA

SEQ ID NO: 17014 - protein, 11 aa, Homo sapiens
  Table A; HLA-A*31:01; CTNNB1; S37A; 0
QSYLDSGIHAG

SEQ ID NO: 17015 - protein, 11 aa, Homo sapiens
  Table A; HLA-A*68:02; CTNNB1; S37C; 0
QSYLDSGIHCG

SEQ ID NO: 17016 - protein, 10 aa, Homo sapiens
  Table A; HLA-A*01:01; CTNNB1; S37F; 1
QSYLDSGIHF

SEQ ID NO: 17017 - protein, 10 aa, Homo sapiens
  Table A; HLA-A*11:01; CTNNB1; S37F; 1
QSYLDSGIHF

SEQ ID NO: 17018 - protein, 10 aa, Homo sapiens
  Table A; HLA-A*26:01; CTNNB1; S37F; 1
QSYLDSGIHF

SEQ ID NO: 17019 - protein, 10 aa, Homo sapiens
  Table A; HLA-A*68:01; CTNNB1; S37F; 1
QSYLDSGIHF

SEQ ID NO: 17020 - protein, 10 aa, Homo sapiens
  Table A; HLA-A*68:02; CTNNB1; S37F; 0
QSYLDSGIHF

SEQ ID NO: 17021 - protein, 10 aa, Homo sapiens
  Table A; HLA-B*15:01; CTNNB1; S37F; 1
QSYLDSGIHF

SEQ ID NO: 17022 - protein, 10 aa, Homo sapiens
  Table A; HLA-B*15:02; CTNNB1; S37F; 0
QSYLDSGIHF

SEQ ID NO: 17023 - protein, 10 aa, Homo sapiens
  Table A; HLA-B*35:01; CTNNB1; S37F; 1
QSYLDSGIHF

SEQ ID NO: 17024 - protein, 10 aa, Homo sapiens
  Table A; HLA-B*57:01; CTNNB1; S37F; 1
QSYLDSGIHF

SEQ ID NO: 17025 - protein, 10 aa, Homo sapiens
  Table A; HLA-B*58:01; CTNNB1; S37F; 0
QSYLDSGIHF

SEQ ID NO: 17026 - protein, 10 aa, Homo sapiens
  Table A; HLA-C*03:04; CTNNB1; S37F; 1
QSYLDSGIHF

SEQ ID NO: 17027 - protein, 10 aa, Homo sapiens
  Table A; HLA-C*12:03; CTNNB1; S37F; 1
QSYLDSGIHF

SEQ ID NO: 17028 - protein, 11 aa, Homo sapiens
  Table A; HLA-A*31:01; CTNNB1; S37P; 0
QSYLDSGIHPG

SEQ ID NO: 17029 - protein, 11 aa, Homo sapiens
  Table A; HLA-A*68:01; CTNNB1; S37P; 0
QSYLDSGIHPG

SEQ ID NO: 17030 - protein, 11 aa, Homo sapiens
  Table A; HLA-A*68:02; CTNNB1; S37P; 0
QSYLDSGIHPG

SEQ ID NO: 17031 - protein, 8 aa, Homo sapiens
  Table A; HLA-B*13:02; CTNNB1; G34R; 1
QSYLDSRI

SEQ ID NO: 17032 - protein, 8 aa, Homo sapiens
  Table A; HLA-B*51:01; CTNNB1; G34R; 1
QSYLDSRI

SEQ ID NO: 17033 - protein, 9 aa, Homo sapiens
  Table A; HLA-A*03:01; CTNNB1; G34R; 1
QSYLDSRIH

SEQ ID NO: 17034 - protein, 9 aa, Homo sapiens
  Table A; HLA-B*48:01; CTNNB1; G34R; 0
QSYLDSRIH

SEQ ID NO: 17035 - protein, 8 aa, Homo sapiens
  Table A; HLA-B*13:02; CTNNB1; G34V; 0
QSYLDSVI

SEQ ID NO: 17036 - protein, 8 aa, Homo sapiens
  Table A; HLA-B*48:01; CTNNB1; G34V; 0
QSYLDSVI

SEQ ID NO: 17037 - protein, 8 aa, Homo sapiens
  Table A; HLA-B*51:01; CTNNB1; G34V; 1
QSYLDSVI

SEQ ID NO: 17038 - protein, 9 aa, Homo sapiens
  Table A; HLA-A*11:01; CTNNB1; G34V; 1
QSYLDSVIH

SEQ ID NO: 17039 - protein, 9 aa, Homo sapiens
  Table A; HLA-B*15:01; CTNNB1; G34V; 1
QSYLDSVIH

SEQ ID NO: 17040 - protein, 9 aa, Homo sapiens
  Table A; HLA-B*27:02; CTNNB1; G34V; 0
QSYLDSVIH

SEQ ID NO: 17041 - protein, 9 aa, Homo sapiens
  Table A; HLA-B*48:01; CTNNB1; G34V; 0
QSYLDSVIH

SEQ ID NO: 17042 - protein, 9 aa, Homo sapiens
  Table A; HLA-C*08:03; CTNNB1; G34V; 0
QSYLDSVIH

SEQ ID NO: 17043 - protein, 11 aa, Homo sapiens
  Table A; HLA-A*68:01; CTNNB1; G34V; 0
QSYLDSVIHSG

SEQ ID NO: 17044 - protein, 11 aa, Homo sapiens
  Table A; HLA-A*68:02; CTNNB1; G34V; 0
QSYLDSVIHSG

SEQ ID NO: 17045 - protein, 11 aa, Homo sapiens
  Table A; HLA-C*08:03; CTNNB1; G34V; 0
QSYLDSVIHSG

SEQ ID NO: 17046 - protein, 8 aa, Homo sapiens
  Table A; HLA-B*13:02; CTNNB1; S33Y; 0
QSYLDYGI

SEQ ID NO: 17047 - protein, 8 aa, Homo sapiens
  Table A; HLA-B*39:06; CTNNB1; S33Y; 0
QSYLDYGI

SEQ ID NO: 17048 - protein, 8 aa, Homo sapiens
  Table A; HLA-B*08:01; CTNNB1; D32H; 1
QSYLHSGI

SEQ ID NO: 17049 - protein, 8 aa, Homo sapiens
  Table A; HLA-B*13:02; CTNNB1; D32H; 0
QSYLHSGI

SEQ ID NO: 17050 - protein, 8 aa, Homo sapiens
  Table A; HLA-B*14:02; CTNNB1; D32H; 0
QSYLHSGI

SEQ ID NO: 17051 - protein, 8 aa, Homo sapiens
  Table A; HLA-B*51:01; CTNNB1; D32H; 0
QSYLHSGI

SEQ ID NO: 17052 - protein, 9 aa, Homo sapiens
  Table A; HLA-A*03:01; CTNNB1; D32H; 1
QSYLHSGIH

SEQ ID NO: 17053 - protein, 9 aa, Homo sapiens
  Table A; HLA-A*11:01; CTNNB1; D32H; 0
QSYLHSGIH

SEQ ID NO: 17054 - protein, 8 aa, Homo sapiens
  Table A; HLA-B*13:02; CTNNB1; D32N; 1
QSYLNSGI

SEQ ID NO: 17055 - protein, 8 aa, Homo sapiens
  Table A; HLA-B*51:01; CTNNB1; D32N; 1
QSYLNSGI

SEQ ID NO: 17056 - protein, 9 aa, Homo sapiens
  Table A; HLA-A*03:01; CTNNB1; D32N; 1
QSYLNSGIH

SEQ ID NO: 17057 - protein, 9 aa, Homo sapiens
  Table A; HLA-A*11:01; CTNNB1; D32N; 1
QSYLNSGIH

SEQ ID NO: 17058 - protein, 9 aa, Homo sapiens
  Table A; HLA-B*48:01; CTNNB1; D32N; 0
QSYLNSGIH

SEQ ID NO: 17059 - protein, 8 aa, Homo sapiens
  Table A; HLA-B*08:01; CTNNB1; D32V; 1
QSYLVSGI

SEQ ID NO: 17060 - protein, 8 aa, Homo sapiens
  Table A; HLA-B*13:02; CTNNB1; D32V; 1
QSYLVSGI

SEQ ID NO: 17061 - protein, 8 aa, Homo sapiens
  Table A; HLA-B*39:06; CTNNB1; D32V; 0
QSYLVSGI

SEQ ID NO: 17062 - protein, 8 aa, Homo sapiens
  Table A; HLA-B*40:02; CTNNB1; D32V; 0
QSYLVSGI

SEQ ID NO: 17063 - protein, 8 aa, Homo sapiens
  Table A; HLA-B*49:01; CTNNB1; D32V; 0
QSYLVSGI

SEQ ID NO: 17064 - protein, 8 aa, Homo sapiens
  Table A; HLA-B*51:01; CTNNB1; D32V; 1
QSYLVSGI

SEQ ID NO: 17065 - protein, 9 aa, Homo sapiens
  Table A; HLA-A*03:01; CTNNB1; D32V; 1
QSYLVSGIH

SEQ ID NO: 17066 - protein, 9 aa, Homo sapiens
  Table A; HLA-A*11:01; CTNNB1; D32V; 1
QSYLVSGIH

SEQ ID NO: 17067 - protein, 9 aa, Homo sapiens
  Table A; HLA-A*33:03; CTNNB1; D32V; 0
QSYLVSGIH

SEQ ID NO: 17068 - protein, 11 aa, Homo sapiens
  Table A; HLA-A*68:02; CTNNB1; D32V; 0
QSYLVSGIHSG

SEQ ID NO: 17069 - protein, 11 aa, Homo sapiens
  Table A; HLA-B*54:01; CTNNB1; D32V; 0
QSYLVSGIHSG

SEQ ID NO: 17070 - protein, 8 aa, Homo sapiens
  Table A; HLA-B*13:02; CTNNB1; D32Y; 0
QSYLYSGI

SEQ ID NO: 17071 - protein, 8 aa, Homo sapiens
  Table A; HLA-B*51:01; CTNNB1; D32Y; 1
QSYLYSGI

SEQ ID NO: 17072 - protein, 9 aa, Homo sapiens
  Table A; HLA-A*11:01; CTNNB1; D32Y; 1
QSYLYSGIH

SEQ ID NO: 17073 - protein, 8 aa, Homo sapiens
  Table A; HLA-B*48:01; SF3B1; R957Q; 0
QTAVVMKT

SEQ ID NO: 17074 - protein, 8 aa, Homo sapiens
  Table A; HLA-C*08:03; SF3B1; R957Q; 0
QTAVVMKT

SEQ ID NO: 17075 - protein, 9 aa, Homo sapiens
  Table A; HLA-A*02:05; SF3B1; R957Q; 0
QTAVVMKTC

SEQ ID NO: 17076 - protein, 9 aa, Homo sapiens
  Table A; HLA-A*68:02; SF3B1; R957Q; 0
QTAVVMKTC

SEQ ID NO: 17077 - protein, 9 aa, Homo sapiens
  Table A; HLA-B*50:01; SF3B1; R957Q; 0
QTAVVMKTC

SEQ ID NO: 17078 - protein, 9 aa, Homo sapiens
  Table A; HLA-A*02:03; ARHGEF12; R113Q; 0
QTGDQIIKV

SEQ ID NO: 17079 - protein, 9 aa, Homo sapiens
  Table A; HLA-A*02:04; ARHGEF12; R113Q; 0
QTGDQIIKV

SEQ ID NO: 17080 - protein, 9 aa, Homo sapiens
  Table A; HLA-A*02:05; ARHGEF12; R113Q; 0
QTGDQIIKV

SEQ ID NO: 17081 - protein, 9 aa, Homo sapiens
  Table A; HLA-A*02:06; ARHGEF12; R113Q; 0
QTGDQIIKV

SEQ ID NO: 17082 - protein, 9 aa, Homo sapiens
  Table A; HLA-A*02:08; ARHGEF12; R113Q; 0
QTGDQIIKV

SEQ ID NO: 17083 - protein, 9 aa, Homo sapiens
  Table A; HLA-A*68:01; ARHGEF12; R113Q; 0
QTGDQIIKV

SEQ ID NO: 17084 - protein, 9 aa, Homo sapiens
  Table A; HLA-A*68:02; ARHGEF12; R113Q; 0
QTGDQIIKV

SEQ ID NO: 17085 - protein, 9 aa, Homo sapiens
  Table A; HLA-B*13:02; ARHGEF12; R113Q; 0
QTGDQIIKV

SEQ ID NO: 17086 - protein, 9 aa, Homo sapiens
  Table A; HLA-B*50:01; ARHGEF12; R113Q; 0
QTGDQIIKV

SEQ ID NO: 17087 - protein, 9 aa, Homo sapiens
  Table A; HLA-C*15:02; ARHGEF12; R113Q; 0
QTGDQIIKV

SEQ ID NO: 17088 - protein, 8 aa, Homo sapiens
  Table A; HLA-A*26:01; FKBP9; R161Q; 1
QTIQVSDF

SEQ ID NO: 17089 - protein, 8 aa, Homo sapiens
  Table A; HLA-B*15:01; FKBP9; R161Q; 1
QTIQVSDF

SEQ ID NO: 17090 - protein, 9 aa, Homo sapiens
  Table A; HLA-A*02:05; FKBP9; R161Q; 0
QTIQVSDFV

SEQ ID NO: 17091 - protein, 9 aa, Homo sapiens
  Table A; HLA-A*02:06; FKBP9; R161Q; 0
QTIQVSDFV

SEQ ID NO: 17092 - protein, 9 aa, Homo sapiens
  Table A; HLA-A*02:08; FKBP9; R161Q; 0
QTIQVSDFV

SEQ ID NO: 17093 - protein, 9 aa, Homo sapiens
  Table A; HLA-A*68:02; FKBP9; R161Q; 0
QTIQVSDFV

SEQ ID NO: 17094 - protein, 9 aa, Homo sapiens
  Table A; HLA-B*13:02; FKBP9; R161Q; 0
QTIQVSDFV

SEQ ID NO: 17095 - protein, 10 aa, Homo sapiens
  Table A; HLA-A*68:01; FKBP9; R161Q; 0
QTIQVSDFVR

SEQ ID NO: 17096 - protein, 10 aa, Homo sapiens
  Table A; HLA-A*68:02; FKBP9; R161Q; 0
QTIQVSDFVR

SEQ ID NO: 17097 - protein, 10 aa, Homo sapiens
  Table A; HLA-B*27:02; FKBP9; R161Q; 0
QTIQVSDFVR

SEQ ID NO: 17098 - protein, 11 aa, Homo sapiens
  Table A; HLA-A*01:01; FKBP9; R161Q; 1
QTIQVSDFVRY

SEQ ID NO: 17099 - protein, 11 aa, Homo sapiens
  Table A; HLA-A*26:01; FKBP9; R161Q; 1
QTIQVSDFVRY

SEQ ID NO: 17100 - protein, 11 aa, Homo sapiens
  Table A; HLA-A*29:02; FKBP9; R161Q; 1
QTIQVSDFVRY

SEQ ID NO: 17101 - protein, 11 aa, Homo sapiens
  Table A; HLA-A*30:02; FKBP9; R161Q; 0
QTIQVSDFVRY

SEQ ID NO: 17102 - protein, 11 aa, Homo sapiens
  Table A; HLA-A*30:04; FKBP9; R161Q; 0
QTIQVSDFVRY

SEQ ID NO: 17103 - protein, 11 aa, Homo sapiens
  Table A; HLA-A*68:01; FKBP9; R161Q; 0
QTIQVSDFVRY

SEQ ID NO: 17104 - protein, 11 aa, Homo sapiens
  Table A; HLA-B*15:01; FKBP9; R161Q; 1
QTIQVSDFVRY

SEQ ID NO: 17105 - protein, 11 aa, Homo sapiens
  Table A; HLA-B*57:01; FKBP9; R161Q; 1
QTIQVSDFVRY

SEQ ID NO: 17106 - protein, 11 aa, Homo sapiens
  Table A; HLA-B*58:01; FKBP9; R161Q; 0
QTIQVSDFVRY

SEQ ID NO: 17107 - protein, 8 aa, Homo sapiens
  Table A; HLA-B*13:02; CNTNAP2; R483Q; 0
QTNSPLQV

SEQ ID NO: 17108 - protein, 8 aa, Homo sapiens
  Table A; HLA-C*15:02; CNTNAP2; R483Q; 0
QTNSPLQV

SEQ ID NO: 17109 - protein, 9 aa, Homo sapiens
  Table A; HLA-A*03:01; CNTNAP2; R483Q; 1
QTNSPLQVK

SEQ ID NO: 17110 - protein, 9 aa, Homo sapiens
  Table A; HLA-A*03:02; CNTNAP2; R483Q; 0
QTNSPLQVK

SEQ ID NO: 17111 - protein, 9 aa, Homo sapiens
  Table A; HLA-A*11:01; CNTNAP2; R483Q; 1
QTNSPLQVK

SEQ ID NO: 17112 - protein, 9 aa, Homo sapiens
  Table A; HLA-A*30:01; CNTNAP2; R483Q; 0
QTNSPLQVK

SEQ ID NO: 17113 - protein, 9 aa, Homo sapiens
  Table A; HLA-A*31:01; CNTNAP2; R483Q; 0
QTNSPLQVK

SEQ ID NO: 17114 - protein, 9 aa, Homo sapiens
  Table A; HLA-A*33:01; CNTNAP2; R483Q; 0
QTNSPLQVK

SEQ ID NO: 17115 - protein, 9 aa, Homo sapiens
  Table A; HLA-A*33:03; CNTNAP2; R483Q; 0
QTNSPLQVK

SEQ ID NO: 17116 - protein, 9 aa, Homo sapiens
  Table A; HLA-A*68:01; CNTNAP2; R483Q; 0
QTNSPLQVK

SEQ ID NO: 17117 - protein, 10 aa, Homo sapiens
  Table A; HLA-A*11:01; CNTNAP2; R483Q; 1
QTNSPLQVKT

SEQ ID NO: 17118 - protein, 10 aa, Homo sapiens
  Table A; HLA-C*08:03; CNTNAP2; R483Q; 0
QTNSPLQVKT

SEQ ID NO: 17119 - protein, 8 aa, Homo sapiens
  Table A; HLA-B*08:01; XPO1; R749Q; 1
QTVKRETL

SEQ ID NO: 17120 - protein, 8 aa, Homo sapiens
  Table A; HLA-B*14:02; XPO1; R749Q; 0
QTVKRETL

SEQ ID NO: 17121 - protein, 9 aa, Homo sapiens
  Table A; HLA-A*03:01; XPO1; R749Q; 1
QTVKRETLK

SEQ ID NO: 17122 - protein, 9 aa, Homo sapiens
  Table A; HLA-A*11:01; XPO1; R749Q; 0
QTVKRETLK

SEQ ID NO: 17123 - protein, 9 aa, Homo sapiens
  Table A; HLA-A*68:01; XPO1; R749Q; 0
QTVKRETLK

SEQ ID NO: 17124 - protein, 9 aa, Homo sapiens
  Table A; HLA-A*02:05; SIRPA; V233I; 0
QVICEVAHI

SEQ ID NO: 17125 - protein, 9 aa, Homo sapiens
  Table A; HLA-A*02:06; SIRPA; V233I; 0
QVICEVAHI

SEQ ID NO: 17126 - protein, 9 aa, Homo sapiens
  Table A; HLA-A*02:08; SIRPA; V233I; 0
QVICEVAHI

SEQ ID NO: 17127 - protein, 9 aa, Homo sapiens
  Table A; HLA-A*68:02; SIRPA; V233I; 0
QVICEVAHI

SEQ ID NO: 17128 - protein, 10 aa, Homo sapiens
  Table A; HLA-A*30:02; MAP2K1; P124S; 0
QVLHECNSSY

SEQ ID NO: 17129 - protein, 10 aa, Homo sapiens
  Table A; HLA-A*25:01; PIK3CA; M1043V; 0
QVNDAHHGGW

SEQ ID NO: 17130 - protein, 10 aa, Homo sapiens
  Table A; HLA-A*26:01; PIK3CA; M1043V; 0
QVNDAHHGGW

SEQ ID NO: 17131 - protein, 10 aa, Homo sapiens
  Table A; HLA-A*30:02; PIK3CA; M1043V; 0
QVNDAHHGGW

SEQ ID NO: 17132 - protein, 10 aa, Homo sapiens
  Table A; HLA-A*32:01; PIK3CA; M1043V; 0
QVNDAHHGGW

SEQ ID NO: 17133 - protein, 10 aa, Homo sapiens
  Table A; HLA-B*15:13; PIK3CA; M1043V; 0
QVNDAHHGGW

SEQ ID NO: 17134 - protein, 10 aa, Homo sapiens
  Table A; HLA-B*44:05; PIK3CA; M1043V; 0
QVNDAHHGGW

SEQ ID NO: 17135 - protein, 10 aa, Homo sapiens
  Table A; HLA-B*57:01; PIK3CA; M1043V; 0
QVNDAHHGGW

SEQ ID NO: 17136 - protein, 10 aa, Homo sapiens
  Table A; HLA-B*58:01; PIK3CA; M1043V; 0
QVNDAHHGGW

SEQ ID NO: 17137 - protein, 9 aa, Homo sapiens
  Table A; HLA-A*02:07; CRNKL1; S128F; 0
QVPLPVPRF

SEQ ID NO: 17138 - protein, 9 aa, Homo sapiens
  Table A; HLA-A*11:01; CRNKL1; S128F; 1
QVPLPVPRF

SEQ ID NO: 17139 - protein, 9 aa, Homo sapiens
  Table A; HLA-A*23:01; CRNKL1; S128F; 0
QVPLPVPRF

SEQ ID NO: 17140 - protein, 9 aa, Homo sapiens
  Table A; HLA-A*24:02; CRNKL1; S128F; 1
QVPLPVPRF

SEQ ID NO: 17141 - protein, 9 aa, Homo sapiens
  Table A; HLA-A*25:01; CRNKL1; S128F; 0
QVPLPVPRF

SEQ ID NO: 17142 - protein, 9 aa, Homo sapiens
  Table A; HLA-A*26:01; CRNKL1; S128F; 0
QVPLPVPRF

SEQ ID NO: 17143 - protein, 9 aa, Homo sapiens
  Table A; HLA-A*26:02; CRNKL1; S128F; 0
QVPLPVPRF

SEQ ID NO: 17144 - protein, 9 aa, Homo sapiens
  Table A; HLA-B*35:01; CRNKL1; S128F; 1
QVPLPVPRF

SEQ ID NO: 17145 - protein, 9 aa, Homo sapiens
  Table A; HLA-B*57:01; CRNKL1; S128F; 1
QVPLPVPRF

SEQ ID NO: 17146 - protein, 8 aa, Homo sapiens
  Table A; HLA-B*51:01; ARID2; S990L; 0
QVPTAMSL

SEQ ID NO: 17147 - protein, 8 aa, Homo sapiens
  Table A; HLA-C*01:02; ARID2; S990L; 0
QVPTAMSL

SEQ ID NO: 17148 - protein, 10 aa, Homo sapiens
  Table A; HLA-A*33:03; MAPK1; E322K; 0
QYYDPSDKPI

SEQ ID NO: 17149 - protein, 10 aa, Homo sapiens
  Table A; HLA-C*08:01; MAPK1; E322K; 0
QYYDPSDKPI

SEQ ID NO: 17150 - protein, 10 aa, Homo sapiens
  Table A; HLA-B*57:01; CDKN2A; D108Y; 0
RAGARLDVRY

SEQ ID NO: 17151 - protein, 9 aa, Homo sapiens
  Table A; HLA-B*58:01; SMARCA4; G1162S; 0
RAGGLSLNL

SEQ ID NO: 17152 - protein, 9 aa, Homo sapiens
  Table A; HLA-C*15:02; SMARCA4; G1162S; 0
RAGGLSLNL

SEQ ID NO: 17153 - protein, 9 aa, Homo sapiens
  Table A; HLA-C*17:01; SMARCA4; G1162S; 0
RAGGLSLNL

SEQ ID NO: 17154 - protein, 11 aa, Homo sapiens
  Table A; HLA-C*08:03; ARHGEF12; R113Q; 0
RAGVQTGDQII

SEQ ID NO: 17155 - protein, 9 aa, Homo sapiens
  Table A; HLA-A*03:01; CHD4; R1162W; 1
RAHWIGQNK

SEQ ID NO: 17156 - protein, 9 aa, Homo sapiens
  Table A; HLA-A*03:02; CHD4; R1162W; 0
RAHWIGQNK

SEQ ID NO: 17157 - protein, 9 aa, Homo sapiens
  Table A; HLA-A*11:01; CHD4; R1162W; 1
RAHWIGQNK

SEQ ID NO: 17158 - protein, 9 aa, Homo sapiens
  Table A; HLA-A*31:01; CHD4; R1162W; 0
RAHWIGQNK

SEQ ID NO: 17159 - protein, 9 aa, Homo sapiens
  Table A; HLA-A*33:03; CHD4; R1162W; 0
RAHWIGQNK

SEQ ID NO: 17160 - protein, 8 aa, Homo sapiens
  Table A; HLA-B*40:02; STAG1; A116T; 0
RDITLLDL

SEQ ID NO: 17161 - protein, 8 aa, Homo sapiens
  Table A; HLA-B*37:01; KDR; R1032Q; 0
RDLAAQNI

SEQ ID NO: 17162 - protein, 9 aa, Homo sapiens
  Table A; HLA-B*41:02; KDR; R1032Q; 0
RDLAAQNIL

SEQ ID NO: 17163 - protein, 9 aa, Homo sapiens
  Table A; HLA-B*39:06; PIK3CA; E545A; 0
RDPLSEITA

SEQ ID NO: 17164 - protein, 10 aa, Homo sapiens
  Table A; HLA-A*30:01; TP53; R283P; 0
RDRPTEEENL

SEQ ID NO: 17165 - protein, 10 aa, Homo sapiens
  Table A; HLA-B*40:02; TP53; R283P; 0
RDRPTEEENL

SEQ ID NO: 17166 - protein, 11 aa, Homo sapiens
  Table A; HLA-A*31:01; TP53; R283P; 0
RDRPTEEENLR

SEQ ID NO: 17167 - protein, 8 aa, Homo sapiens
  Table A; HLA-C*08:03; PTK6; H126P; 0
RDTQAVRP

SEQ ID NO: 17168 - protein, 10 aa, Homo sapiens
  Table A; HLA-B*40:01; PIK3CA; K111E; 1
REEEILNREI

SEQ ID NO: 17169 - protein, 10 aa, Homo sapiens
  Table A; HLA-B*40:02; PIK3CA; K111E; 0
REEEILNREI

SEQ ID NO: 17170 - protein, 10 aa, Homo sapiens
  Table A; HLA-B*41:02; PIK3CA; K111E; 0
REEEILNREI

SEQ ID NO: 17171 - protein, 10 aa, Homo sapiens
  Table A; HLA-B*44:03; PIK3CA; K111E; 1
REEEILNREI

SEQ ID NO: 17172 - protein, 10 aa, Homo sapiens
  Table A; HLA-B*44:05; PIK3CA; K111E; 0
REEEILNREI

SEQ ID NO: 17173 - protein, 10 aa, Homo sapiens
  Table A; HLA-B*49:01; PIK3CA; K111E; 0
REEEILNREI

SEQ ID NO: 17174 - protein, 10 aa, Homo sapiens
  Table A; HLA-B*40:01; PIK3CA; K111N; 0
REENILNREI

SEQ ID NO: 17175 - protein, 10 aa, Homo sapiens
  Table A; HLA-B*40:02; PIK3CA; K111N; 0
REENILNREI

SEQ ID NO: 17176 - protein, 10 aa, Homo sapiens
  Table A; HLA-B*41:02; PIK3CA; K111N; 0
REENILNREI

SEQ ID NO: 17177 - protein, 10 aa, Homo sapiens
  Table A; HLA-B*44:03; PIK3CA; K111N; 0
REENILNREI

SEQ ID NO: 17178 - protein, 10 aa, Homo sapiens
  Table A; HLA-B*44:05; PIK3CA; K111N; 0
REENILNREI

SEQ ID NO: 17179 - protein, 10 aa, Homo sapiens
  Table A; HLA-B*49:01; PIK3CA; K111N; 0
REENILNREI

SEQ ID NO: 17180 - protein, 9 aa, Homo sapiens
  Table A; HLA-A*23:01; PIK3CA; G118D; 0
REIDFAIGM

SEQ ID NO: 17181 - protein, 9 aa, Homo sapiens
  Table A; HLA-A*30:01; PIK3CA; G118D; 0
REIDFAIGM

SEQ ID NO: 17182 - protein, 9 aa, Homo sapiens
  Table A; HLA-B*18:01; PIK3CA; G118D; 1
REIDFAIGM

SEQ ID NO: 17183 - protein, 9 aa, Homo sapiens
  Table A; HLA-B*37:01; PIK3CA; G118D; 0
REIDFAIGM

SEQ ID NO: 17184 - protein, 9 aa, Homo sapiens
  Table A; HLA-B*40:01; PIK3CA; G118D; 1
REIDFAIGM

SEQ ID NO: 17185 - protein, 9 aa, Homo sapiens
  Table A; HLA-B*40:02; PIK3CA; G118D; 0
REIDFAIGM

SEQ ID NO: 17186 - protein, 9 aa, Homo sapiens
  Table A; HLA-B*40:06; PIK3CA; G118D; 0
REIDFAIGM

SEQ ID NO: 17187 - protein, 9 aa, Homo sapiens
  Table A; HLA-B*41:02; PIK3CA; G118D; 0
REIDFAIGM

SEQ ID NO: 17188 - protein, 9 aa, Homo sapiens
  Table A; HLA-B*44:02; PIK3CA; G118D; 1
REIDFAIGM

SEQ ID NO: 17189 - protein, 9 aa, Homo sapiens
  Table A; HLA-B*44:03; PIK3CA; G118D; 1
REIDFAIGM

SEQ ID NO: 17190 - protein, 9 aa, Homo sapiens
  Table A; HLA-B*44:05; PIK3CA; G118D; 0
REIDFAIGM

SEQ ID NO: 17191 - protein, 9 aa, Homo sapiens
  Table A; HLA-B*49:01; PIK3CA; G118D; 0
REIDFAIGM

SEQ ID NO: 17192 - protein, 9 aa, Homo sapiens
  Table A; HLA-B*50:01; PIK3CA; G118D; 0
REIDFAIGM

SEQ ID NO: 17193 - protein, 10 aa, Homo sapiens
  Table A; HLA-B*40:06; PIK3CA; G118D; 0
REIDFAIGMP

SEQ ID NO: 17194 - protein, 10 aa, Homo sapiens
  Table A; HLA-B*50:01; PIK3CA; G118D; 0
REIDFAIGMP

SEQ ID NO: 17195 - protein, 10 aa, Homo sapiens
  Table A; HLA-B*40:02; PIK3R1; N564D; 0
REIDKRMDSI

SEQ ID NO: 17196 - protein, 10 aa, Homo sapiens
  Table A; HLA-B*44:03; PIK3R1; N564D; 0
REIDKRMDSI

SEQ ID NO: 17197 - protein, 10 aa, Homo sapiens
  Table A; HLA-B*44:05; PIK3R1; N564D; 0
REIDKRMDSI

SEQ ID NO: 17198 - protein, 10 aa, Homo sapiens
  Table A; HLA-B*49:01; PIK3R1; N564D; 0
REIDKRMDSI

SEQ ID NO: 17199 - protein, 9 aa, Homo sapiens
  Table A; HLA-B*57:01; TP53; R337L; 0
RGRELFEMF

SEQ ID NO: 17200 - protein, 8 aa, Homo sapiens
  Table A; HLA-B*07:02; KRAS; G12R; 1
RGVGKSAL

SEQ ID NO: 17201 - protein, 8 aa, Homo sapiens
  Table A; HLA-B*08:01; KRAS; G12R; 1
RGVGKSAL

SEQ ID NO: 17202 - protein, 8 aa, Homo sapiens
  Table A; HLA-B*14:02; KRAS; G12R; 1
RGVGKSAL

SEQ ID NO: 17203 - protein, 10 aa, Homo sapiens
  Table A; HLA-B*13:02; KRAS; G12R; 1
RGVGKSALTI

SEQ ID NO: 17204 - protein, 8 aa, Homo sapiens
  Table A; HLA-C*05:01; MSN; E573K; 1
RIDKFESM

SEQ ID NO: 17205 - protein, 8 aa, Homo sapiens
  Table A; HLA-C*08:02; MSN; E573K; 0
RIDKFESM

SEQ ID NO: 17206 - protein, 10 aa, Homo sapiens
  Table A; HLA-A*02:08; BRAF; G469V; 0
RIGSGSFVTV

SEQ ID NO: 17207 - protein, 11 aa, Homo sapiens
  Table A; HLA-B*15:01; BRAF; G469V; 1
RIGSGSFVTVY

SEQ ID NO: 17208 - protein, 9 aa, Homo sapiens
  Table A; HLA-A*02:03; CTNNB1; G34R; 0
RIHSGATTT

SEQ ID NO: 17209 - protein, 9 aa, Homo sapiens
  Table A; HLA-A*02:08; CTNNB1; G34R; 0
RIHSGATTT

SEQ ID NO: 17210 - protein, 9 aa, Homo sapiens
  Table A; HLA-A*03:01; CTNNB1; G34R; 1
RIHSGATTT

SEQ ID NO: 17211 - protein, 9 aa, Homo sapiens
  Table A; HLA-B*13:02; CTNNB1; G34R; 1
RIHSGATTT

SEQ ID NO: 17212 - protein, 9 aa, Homo sapiens
  Table A; HLA-B*15:01; CTNNB1; G34R; 1
RIHSGATTT

SEQ ID NO: 17213 - protein, 9 aa, Homo sapiens
  Table A; HLA-B*48:01; CTNNB1; G34R; 0
RIHSGATTT

SEQ ID NO: 17214 - protein, 9 aa, Homo sapiens
  Table A; HLA-C*08:03; CTNNB1; G34R; 0
RIHSGATTT

SEQ ID NO: 17215 - protein, 10 aa, Homo sapiens
  Table A; HLA-A*02:03; CTNNB1; G34R; 0
RIHSGATTTA

SEQ ID NO: 17216 - protein, 10 aa, Homo sapiens
  Table A; HLA-A*02:05; CTNNB1; G34R; 0
RIHSGATTTA

SEQ ID NO: 17217 - protein, 10 aa, Homo sapiens
  Table A; HLA-A*02:08; CTNNB1; G34R; 0
RIHSGATTTA

SEQ ID NO: 17218 - protein, 10 aa, Homo sapiens
  Table A; HLA-A*03:01; CTNNB1; G34R; 1
RIHSGATTTA

SEQ ID NO: 17219 - protein, 10 aa, Homo sapiens
  Table A; HLA-A*30:01; CTNNB1; G34R; 0
RIHSGATTTA

SEQ ID NO: 17220 - protein, 10 aa, Homo sapiens
  Table A; HLA-B*07:02; CTNNB1; G34R; 1
RIHSGATTTA

SEQ ID NO: 17221 - protein, 10 aa, Homo sapiens
  Table A; HLA-B*13:02; CTNNB1; G34R; 1
RIHSGATTTA

SEQ ID NO: 17222 - protein, 10 aa, Homo sapiens
  Table A; HLA-B*15:01; CTNNB1; G34R; 1
RIHSGATTTA

SEQ ID NO: 17223 - protein, 10 aa, Homo sapiens
  Table A; HLA-B*39:06; CTNNB1; G34R; 0
RIHSGATTTA

SEQ ID NO: 17224 - protein, 10 aa, Homo sapiens
  Table A; HLA-B*48:01; CTNNB1; G34R; 0
RIHSGATTTA

SEQ ID NO: 17225 - protein, 10 aa, Homo sapiens
  Table A; HLA-B*50:01; CTNNB1; G34R; 0
RIHSGATTTA

SEQ ID NO: 17226 - protein, 10 aa, Homo sapiens
  Table A; HLA-B*55:01; CTNNB1; G34R; 0
RIHSGATTTA

SEQ ID NO: 17227 - protein, 10 aa, Homo sapiens
  Table A; HLA-B*56:01; CTNNB1; G34R; 0
RIHSGATTTA

SEQ ID NO: 17228 - protein, 9 aa, Homo sapiens
  Table A; HLA-A*31:01; TP53; L194R; 0
RIRVEGNLR

SEQ ID NO: 17229 - protein, 8 aa, Homo sapiens
  Table A; HLA-B*57:01; CDKN2A; D108Y; 0
RLDVRYAW

SEQ ID NO: 17230 - protein, 11 aa, Homo sapiens
  Table A; HLA-B*27:02; MAP2K1; K57N; 0
RLEAFLTQNQK

SEQ ID NO: 17231 - protein, 9 aa, Homo sapiens
  Table A; HLA-A*02:01; TP53; P250L; 1
RLILTIITL

SEQ ID NO: 17232 - protein, 9 aa, Homo sapiens
  Table A; HLA-A*02:03; TP53; P250L; 0
RLILTIITL

SEQ ID NO: 17233 - protein, 9 aa, Homo sapiens
  Table A; HLA-A*02:04; TP53; P250L; 0
RLILTIITL

SEQ ID NO: 17234 - protein, 9 aa, Homo sapiens
  Table A; HLA-A*02:07; TP53; P250L; 0
RLILTIITL

SEQ ID NO: 17235 - protein, 9 aa, Homo sapiens
  Table A; HLA-A*02:08; TP53; P250L; 0
RLILTIITL

SEQ ID NO: 17236 - protein, 9 aa, Homo sapiens
  Table A; HLA-B*48:01; TP53; P250L; 0
RLILTIITL

SEQ ID NO: 17237 - protein, 9 aa, Homo sapiens
  Table A; HLA-C*08:03; TP53; P250L; 0
RLILTIITL

SEQ ID NO: 17238 - protein, 9 aa, Homo sapiens
  Table A; HLA-C*17:01; TP53; P250L; 0
RLILTIITL

SEQ ID NO: 17239 - protein, 9 aa, Homo sapiens
  Table A; HLA-A*02:03; DDIT3; R147H; 0
RLKQEIEHL

SEQ ID NO: 17240 - protein, 9 aa, Homo sapiens
  Table A; HLA-A*02:04; DDIT3; R147H; 0
RLKQEIEHL

SEQ ID NO: 17241 - protein, 9 aa, Homo sapiens
  Table A; HLA-A*02:08; DDIT3; R147H; 0
RLKQEIEHL

SEQ ID NO: 17242 - protein, 10 aa, Homo sapiens
  Table A; HLA-A*02:04; CDKN2A; P114L; 0
RLLVDLAEEL

SEQ ID NO: 17243 - protein, 8 aa, Homo sapiens
  Table A; HLA-A*02:04; ACSL3; R232Q; 0
RLQHIITV

SEQ ID NO: 17244 - protein, 11 aa, Homo sapiens
  Table A; HLA-A*03:02; ACSL3; R232Q; 0
RLQHIITVDGK

SEQ ID NO: 17245 - protein, 8 aa, Homo sapiens
  Table A; HLA-B*13:02; RAF1; S257L; 0
RLTSTPNV

SEQ ID NO: 17246 - protein, 11 aa, Homo sapiens
  Table A; HLA-A*02:04; RAF1; S257L; 0
RLTSTPNVHMV

SEQ ID NO: 17247 - protein, 9 aa, Homo sapiens
  Table A; HLA-A*02:07; PIK3R1; N564D; 0
RMDSIKPDL

SEQ ID NO: 17248 - protein, 9 aa, Homo sapiens
  Table A; HLA-B*13:01; PIK3R1; N564D; 0
RMDSIKPDL

SEQ ID NO: 17249 - protein, 9 aa, Homo sapiens
  Table A; HLA-B*13:01; PIK3R1; K567E; 0
RMNSIEPDL

SEQ ID NO: 17250 - protein, 9 aa, Homo sapiens
  Table A; HLA-B*48:01; PIK3R1; K567E; 0
RMNSIEPDL

SEQ ID NO: 17251 - protein, 10 aa, Homo sapiens
  Table A; HLA-A*02:04; TP53; R249M; 0
RMPILTIITL

SEQ ID NO: 17252 - protein, 10 aa, Homo sapiens
  Table A; HLA-A*02:07; TP53; R249M; 0
RMPILTIITL

SEQ ID NO: 17253 - protein, 9 aa, Homo sapiens
  Table A; HLA-B*15:01; ERBB3; V104M; 1
RMVRGTQVY

SEQ ID NO: 17254 - protein, 9 aa, Homo sapiens
  Table A; HLA-C*08:02; PPP2R1A; R28C; 0
RNEDVQLCL

SEQ ID NO: 17255 - protein, 9 aa, Homo sapiens
  Table A; HLA-C*15:02; PPP2R1A; R28C; 0
RNEDVQLCL

SEQ ID NO: 17256 - protein, 9 aa, Homo sapiens
  Table A; HLA-C*15:02; PTPRT; E548K; 0
RNKTHHLFV

SEQ ID NO: 17257 - protein, 9 aa, Homo sapiens
  Table A; HLA-B*57:01; TP53; C275Y; 0
RNSFEVRVY

SEQ ID NO: 17258 - protein, 9 aa, Homo sapiens
  Table A; HLA-C*07:01; TP53; C275Y; 1
RNSFEVRVY

SEQ ID NO: 17259 - protein, 9 aa, Homo sapiens
  Table A; HLA-C*12:03; TP53; C275Y; 0
RNSFEVRVY

SEQ ID NO: 17260 - protein, 9 aa, Homo sapiens
  Table A; HLA-C*16:01; TP53; C275Y; 0
RNSFEVRVY

SEQ ID NO: 17261 - protein, 10 aa, Homo sapiens
  Table A; HLA-A*68:02; TP53; C275Y; 0
RNSFEVRVYA

SEQ ID NO: 17262 - protein, 9 aa, Homo sapiens
  Table A; HLA-C*15:02; TP53; R213Q; 0
RNTFQHSVV

SEQ ID NO: 17263 - protein, 9 aa, Homo sapiens
  Table A; HLA-C*15:02; TP53; V216M; 0
RNTFRHSMV

SEQ ID NO: 17264 - protein, 10 aa, Homo sapiens
  Table A; HLA-B*07:02; PIK3CA; C420R; 1
RPLAWGNINL

SEQ ID NO: 17265 - protein, 11 aa, Homo sapiens
  Table A; HLA-B*56:01; NRG1; L397P; 0
RPNGTGGPREC

SEQ ID NO: 17266 - protein, 8 aa, Homo sapiens
  Table A; HLA-B*07:02; PCBP1; L100Q; 1
RPPVTQRL

SEQ ID NO: 17267 - protein, 8 aa, Homo sapiens
  Table A; HLA-B*08:01; PCBP1; L100Q; 1
RPPVTQRL

SEQ ID NO: 17268 - protein, 8 aa, Homo sapiens
  Table A; HLA-B*51:01; PCBP1; L100Q; 1
RPPVTQRL

SEQ ID NO: 17269 - protein, 9 aa, Homo sapiens
  Table A; HLA-B*07:02; PCBP1; L100Q; 1
RPPVTQRLV

SEQ ID NO: 17270 - protein, 9 aa, Homo sapiens
  Table A; HLA-B*51:01; PCBP1; L100Q; 1
RPPVTQRLV

SEQ ID NO: 17271 - protein, 9 aa, Homo sapiens
  Table A; HLA-C*01:02; PCBP1; L100Q; 0
RPPVTQRLV

SEQ ID NO: 17272 - protein, 10 aa, Homo sapiens
  Table A; HLA-B*07:02; PCBP1; L100Q; 1
RPPVTQRLVV

SEQ ID NO: 17273 - protein, 10 aa, Homo sapiens
  Table A; HLA-B*51:01; PCBP1; L100Q; 1
RPPVTQRLVV

SEQ ID NO: 17274 - protein, 10 aa, Homo sapiens
  Table A; HLA-B*54:01; PCBP1; L100Q; 0
RPPVTQRLVV

SEQ ID NO: 17275 - protein, 10 aa, Homo sapiens
  Table A; HLA-B*55:02; PCBP1; L100Q; 0
RPPVTQRLVV

SEQ ID NO: 17276 - protein, 10 aa, Homo sapiens
  Table A; HLA-B*56:01; PCBP1; L100Q; 0
RPPVTQRLVV

SEQ ID NO: 17277 - protein, 8 aa, Homo sapiens
  Table A; HLA-B*35:02; TP53; R283P; 0
RPTEEENL

SEQ ID NO: 17278 - protein, 8 aa, Homo sapiens
  Table A; HLA-B*35:03; TP53; R283P; 0
RPTEEENL

SEQ ID NO: 17279 - protein, 8 aa, Homo sapiens
  Table A; HLA-B*35:12; TP53; R283P; 0
RPTEEENL

SEQ ID NO: 17280 - protein, 9 aa, Homo sapiens
  Table A; HLA-B*35:12; TP53; R283P; 0
RPTEEENLR

SEQ ID NO: 17281 - protein, 11 aa, Homo sapiens
  Table A; HLA-B*07:02; CDKN2A; H83Y; 1
RPVYDAAREGF

SEQ ID NO: 17282 - protein, 8 aa, Homo sapiens
  Table A; HLA-B*13:01; PPP2R1A; S256F; 0
RQAAEDKF

SEQ ID NO: 17283 - protein, 8 aa, Homo sapiens
  Table A; HLA-A*02:06; NFE2L2; D29G; 0
RQDIGLGV

SEQ ID NO: 17284 - protein, 8 aa, Homo sapiens
  Table A; HLA-B*13:02; NFE2L2; D29G; 0
RQDIGLGV

SEQ ID NO: 17285 - protein, 8 aa, Homo sapiens
  Table A; HLA-C*05:01; NFE2L2; D29G; 1
RQDIGLGV

SEQ ID NO: 17286 - protein, 8 aa, Homo sapiens
  Table A; HLA-C*08:02; NFE2L2; D29G; 0
RQDIGLGV

SEQ ID NO: 17287 - protein, 10 aa, Homo sapiens
  Table A; HLA-A*31:01; NFE2L2; D29G; 0
RQDIGLGVSR

SEQ ID NO: 17288 - protein, 10 aa, Homo sapiens
  Table A; HLA-B*27:02; NFE2L2; D29G; 0
RQDIGLGVSR

SEQ ID NO: 17289 - protein, 8 aa, Homo sapiens
  Table A; HLA-A*02:06; NFE2L2; D29H; 0
RQDIHLGV

SEQ ID NO: 17290 - protein, 8 aa, Homo sapiens
  Table A; HLA-B*13:02; NFE2L2; D29H; 0
RQDIHLGV

SEQ ID NO: 17291 - protein, 8 aa, Homo sapiens
  Table A; HLA-B*14:02; NFE2L2; D29H; 0
RQDIHLGV

SEQ ID NO: 17292 - protein, 8 aa, Homo sapiens
  Table A; HLA-B*39:06; NFE2L2; D29H; 0
RQDIHLGV

SEQ ID NO: 17293 - protein, 8 aa, Homo sapiens
  Table A; HLA-C*05:01; NFE2L2; D29H; 1
RQDIHLGV

SEQ ID NO: 17294 - protein, 8 aa, Homo sapiens
  Table A; HLA-C*08:02; NFE2L2; D29H; 0
RQDIHLGV

SEQ ID NO: 17295 - protein, 10 aa, Homo sapiens
  Table A; HLA-A*31:01; NFE2L2; D29H; 0
RQDIHLGVSR

SEQ ID NO: 17296 - protein, 11 aa, Homo sapiens
  Table A; HLA-A*31:01; SF3B1; R957Q; 0
RQQAADLISQT

SEQ ID NO: 17297 - protein, 9 aa, Homo sapiens
  Table A; HLA-B*15:01; ERBB2; R678Q; 0
RQQQKIRKY

SEQ ID NO: 17298 - protein, 9 aa, Homo sapiens
  Table A; HLA-C*06:02; CDKN2A; P48L; 1
RRLIQVMMM

SEQ ID NO: 17299 - protein, 9 aa, Homo sapiens
  Table A; HLA-B*27:05; TP53; G266R; 0
RRNSFEVRV

SEQ ID NO: 17300 - protein, 9 aa, Homo sapiens
  Table A; HLA-C*06:02; TP53; G266R; 0
RRNSFEVRV

SEQ ID NO: 17301 - protein, 9 aa, Homo sapiens
  Table A; HLA-B*27:05; TP53; E286K; 0
RRTEKENLR

SEQ ID NO: 17302 - protein, 9 aa, Homo sapiens
  Table A; HLA-A*02:05; MECOM; R750Q; 0
RSANLTQHL

SEQ ID NO: 17303 - protein, 9 aa, Homo sapiens
  Table A; HLA-A*02:08; MECOM; R750Q; 0
RSANLTQHL

SEQ ID NO: 17304 - protein, 9 aa, Homo sapiens
  Table A; HLA-B*58:01; MECOM; R750Q; 0
RSANLTQHL

SEQ ID NO: 17305 - protein, 9 aa, Homo sapiens
  Table A; HLA-C*15:02; MECOM; R750Q; 0
RSANLTQHL

SEQ ID NO: 17306 - protein, 9 aa, Homo sapiens
  Table A; HLA-B*15:01; CTCF; R377H; 1
RSHTGEHPF

SEQ ID NO: 17307 - protein, 9 aa, Homo sapiens
  Table A; HLA-B*57:01; CTCF; R377H; 0
RSHTGEHPF

SEQ ID NO: 17308 - protein, 9 aa, Homo sapiens
  Table A; HLA-B*58:01; CTCF; R377H; 0
RSHTGEHPF

SEQ ID NO: 17309 - protein, 9 aa, Homo sapiens
  Table A; HLA-C*07:01; CTCF; R377H; 1
RSHTGEHPF

SEQ ID NO: 17310 - protein, 9 aa, Homo sapiens
  Table A; HLA-C*15:02; CTCF; R377H; 0
RSHTGEHPF

SEQ ID NO: 17311 - protein, 9 aa, Homo sapiens
  Table A; HLA-C*16:01; CTCF; R377H; 0
RSHTGEHPF

SEQ ID NO: 17312 - protein, 8 aa, Homo sapiens
  Table A; HLA-A*11:01; XPO1; R749Q; 0
RSMQTVKR

SEQ ID NO: 17313 - protein, 8 aa, Homo sapiens
  Table A; HLA-A*31:01; XPO1; R749Q; 0
RSMQTVKR

SEQ ID NO: 17314 - protein, 11 aa, Homo sapiens
  Table A; HLA-B*07:02; XPO1; R749Q; 1
RSMQTVKRETL

SEQ ID NO: 17315 - protein, 9 aa, Homo sapiens
  Table A; HLA-B*57:01; PIK3CA; C378R; 0
RSNPRWNEW

SEQ ID NO: 17316 - protein, 10 aa, Homo sapiens
  Table A; HLA-C*01:02; TP53; R249S; 1
RSPILTIITL

SEQ ID NO: 17317 - protein, 10 aa, Homo sapiens
  Table A; HLA-A*03:01; TP53; E286K; 1
RTEKENLRKK

SEQ ID NO: 17318 - protein, 10 aa, Homo sapiens
  Table A; HLA-A*11:01; TP53; E286K; 1
RTEKENLRKK

SEQ ID NO: 17319 - protein, 9 aa, Homo sapiens
  Table A; HLA-A*03:01; A1CF; E34K; 1
RTGYSLVQK

SEQ ID NO: 17320 - protein, 9 aa, Homo sapiens
  Table A; HLA-A*03:02; A1CF; E34K; 0
RTGYSLVQK

SEQ ID NO: 17321 - protein, 9 aa, Homo sapiens
  Table A; HLA-A*11:01; A1CF; E34K; 1
RTGYSLVQK

SEQ ID NO: 17322 - protein, 9 aa, Homo sapiens
  Table A; HLA-A*31:01; A1CF; E34K; 0
RTGYSLVQK

SEQ ID NO: 17323 - protein, 9 aa, Homo sapiens
  Table A; HLA-A*68:01; A1CF; E34K; 0
RTGYSLVQK

SEQ ID NO: 17324 - protein, 8 aa, Homo sapiens
  Table A; HLA-A*31:01; TP53; E285K; 0
RTKEENLR

SEQ ID NO: 17325 - protein, 8 aa, Homo sapiens
  Table A; HLA-B*57:01; TP53; E285K; 0
RTKEENLR

SEQ ID NO: 17326 - protein, 9 aa, Homo sapiens
  Table A; HLA-A*03:01; TP53; E285K; 1
RTKEENLRK

SEQ ID NO: 17327 - protein, 9 aa, Homo sapiens
  Table A; HLA-A*11:01; TP53; E285K; 1
RTKEENLRK

SEQ ID NO: 17328 - protein, 10 aa, Homo sapiens
  Table A; HLA-A*03:01; TP53; E285K; 1
RTKEENLRKK

SEQ ID NO: 17329 - protein, 9 aa, Homo sapiens
  Table A; HLA-A*02:08; FBXW7; G423V; 0
RTLVGHTGV

SEQ ID NO: 17330 - protein, 11 aa, Homo sapiens
  Table A; HLA-B*57:01; FBXW7; G423V; 1
RTLVGHTGVVW

SEQ ID NO: 17331 - protein, 9 aa, Homo sapiens
  Table A; HLA-A*02:08; ACVR1; R206H; 0
RTVAHQITL

SEQ ID NO: 17332 - protein, 9 aa, Homo sapiens
  Table A; HLA-B*58:01; ACVR1; R206H; 0
RTVAHQITL

SEQ ID NO: 17333 - protein, 9 aa, Homo sapiens
  Table A; HLA-C*15:02; ACVR1; R206H; 0
RTVAHQITL

SEQ ID NO: 17334 - protein, 10 aa, Homo sapiens
  Table A; HLA-A*02:08; ACVR1; R206H; 0
RTVAHQITLL

SEQ ID NO: 17335 - protein, 9 aa, Homo sapiens
  Table A; HLA-A*02:04; CTNNB1; K335I; 0
RTYTYEILL

SEQ ID NO: 17336 - protein, 9 aa, Homo sapiens
  Table A; HLA-A*68:02; CTNNB1; K335I; 0
RTYTYEILL

SEQ ID NO: 17337 - protein, 9 aa, Homo sapiens
  Table A; HLA-B*57:01; CTNNB1; K335I; 1
RTYTYEILL

SEQ ID NO: 17338 - protein, 9 aa, Homo sapiens
  Table A; HLA-C*02:02; CTNNB1; K335I; 1
RTYTYEILL

SEQ ID NO: 17339 - protein, 9 aa, Homo sapiens
  Table A; HLA-C*07:01; CTNNB1; K335I; 1
RTYTYEILL

SEQ ID NO: 17340 - protein, 9 aa, Homo sapiens
  Table A; HLA-C*12:03; CTNNB1; K335I; 1
RTYTYEILL

SEQ ID NO: 17341 - protein, 9 aa, Homo sapiens
  Table A; HLA-C*15:02; CTNNB1; K335I; 0
RTYTYEILL

SEQ ID NO: 17342 - protein, 9 aa, Homo sapiens
  Table A; HLA-C*16:01; CTNNB1; K335I; 1
RTYTYEILL

SEQ ID NO: 17343 - protein, 9 aa, Homo sapiens
  Table A; HLA-C*17:01; CTNNB1; K335I; 0
RTYTYEILL

SEQ ID NO: 17344 - protein, 10 aa, Homo sapiens
  Table A; HLA-B*57:01; CTNNB1; K335I; 1
RTYTYEILLW

SEQ ID NO: 17345 - protein, 9 aa, Homo sapiens
  Table A; HLA-A*03:01; RUNX1T1; L265V; 1
RVDDMAIAH

SEQ ID NO: 17346 - protein, 9 aa, Homo sapiens
  Table A; HLA-A*03:02; RUNX1T1; L265V; 0
RVDDMAIAH

SEQ ID NO: 17347 - protein, 9 aa, Homo sapiens
  Table A; HLA-A*11:01; RUNX1T1; L265V; 1
RVDDMAIAH

SEQ ID NO: 17348 - protein, 11 aa, Homo sapiens
  Table A; HLA-A*01:01; RUNX1T1; L265V; 1
RVDDMAIAHHY

SEQ ID NO: 17349 - protein, 11 aa, Homo sapiens
  Table A; HLA-A*29:02; RUNX1T1; L265V; 0
RVDDMAIAHHY

SEQ ID NO: 17350 - protein, 11 aa, Homo sapiens
  Table A; HLA-A*30:02; RUNX1T1; L265V; 0
RVDDMAIAHHY

SEQ ID NO: 17351 - protein, 9 aa, Homo sapiens
  Table A; HLA-B*13:02; NRAS; G13R; 0
RVGKSALTI

SEQ ID NO: 17352 - protein, 9 aa, Homo sapiens
  Table A; HLA-C*15:02; NRAS; G13R; 0
RVGKSALTI

SEQ ID NO: 17353 - protein, 8 aa, Homo sapiens
  Table A; HLA-A*02:03; BIRC6; G271R; 0
RVGPGRSV

SEQ ID NO: 17354 - protein, 8 aa, Homo sapiens
  Table A; HLA-C*15:02; BIRC6; G271R; 0
RVGPGRSV

SEQ ID NO: 17355 - protein, 10 aa, Homo sapiens
  Table A; HLA-A*31:01; BIRC6; G271R; 0
RVGPGRSVDR

SEQ ID NO: 17356 - protein, 9 aa, Homo sapiens
  Table A; HLA-A*03:01; TP53; R158H; 1
RVHAMAIYK

SEQ ID NO: 17357 - protein, 9 aa, Homo sapiens
  Table A; HLA-A*03:02; TP53; R158H; 0
RVHAMAIYK

SEQ ID NO: 17358 - protein, 9 aa, Homo sapiens
  Table A; HLA-A*11:01; TP53; R158H; 0
RVHAMAIYK

SEQ ID NO: 17359 - protein, 9 aa, Homo sapiens
  Table A; HLA-B*57:01; PIK3CA; C378R; 0
RVPRSNPRW

SEQ ID NO: 17360 - protein, 9 aa, Homo sapiens
  Table A; HLA-A*03:01; TP53; Y163C; 1
RVRAMAICK

SEQ ID NO: 17361 - protein, 9 aa, Homo sapiens
  Table A; HLA-A*03:01; TP53; Y163H; 1
RVRAMAIHK

SEQ ID NO: 17362 - protein, 9 aa, Homo sapiens
  Table A; HLA-A*03:01; TP53; A159P; 1
RVRPMAIYK

SEQ ID NO: 17363 - protein, 9 aa, Homo sapiens
  Table A; HLA-A*03:02; TP53; A159P; 0
RVRPMAIYK

SEQ ID NO: 17364 - protein, 9 aa, Homo sapiens
  Table A; HLA-A*11:01; TP53; A159P; 1
RVRPMAIYK

SEQ ID NO: 17365 - protein, 9 aa, Homo sapiens
  Table A; HLA-A*31:01; TP53; A159P; 0
RVRPMAIYK

SEQ ID NO: 17366 - protein, 9 aa, Homo sapiens
  Table A; HLA-A*03:01; TP53; A159V; 1
RVRVMAIYK

SEQ ID NO: 17367 - protein, 8 aa, Homo sapiens
  Table A; HLA-A*31:01; PTEN; G165R; 0
RVTIPSQR

SEQ ID NO: 17368 - protein, 9 aa, Homo sapiens
  Table A; HLA-A*03:01; PTEN; G165R; 1
RVTIPSQRR

SEQ ID NO: 17369 - protein, 9 aa, Homo sapiens
  Table A; HLA-A*11:01; PTEN; G165R; 1
RVTIPSQRR

SEQ ID NO: 17370 - protein, 9 aa, Homo sapiens
  Table A; HLA-A*31:01; PTEN; G165R; 0
RVTIPSQRR

SEQ ID NO: 17371 - protein, 11 aa, Homo sapiens
  Table A; HLA-A*02:05; FBXW7; R479Q; 0
RVVSGSQDATL

SEQ ID NO: 17372 - protein, 11 aa, Homo sapiens
  Table A; HLA-A*02:06; FBXW7; R479Q; 0
RVVSGSQDATL

SEQ ID NO: 17373 - protein, 11 aa, Homo sapiens
  Table A; HLA-A*02:08; FBXW7; R479Q; 0
RVVSGSQDATL

SEQ ID NO: 17374 - protein, 11 aa, Homo sapiens
  Table A; HLA-B*13:01; FBXW7; R479Q; 0
RVVSGSQDATL

SEQ ID NO: 17375 - protein, 11 aa, Homo sapiens
  Table A; HLA-B*58:01; FBXW7; R479Q; 0
RVVSGSQDATL

SEQ ID NO: 17376 - protein, 10 aa, Homo sapiens
  Table A; HLA-A*02:03; EP300; D1399N; 0
RVYISYLNSV

SEQ ID NO: 17377 - protein, 10 aa, Homo sapiens
  Table A; HLA-A*02:04; EP300; D1399N; 0
RVYISYLNSV

SEQ ID NO: 17378 - protein, 10 aa, Homo sapiens
  Table A; HLA-A*02:08; EP300; D1399N; 0
RVYISYLNSV

SEQ ID NO: 17379 - protein, 11 aa, Homo sapiens
  Table A; HLA-A*31:01; TP53; D281Y; 0
RYRRTEEENLR

SEQ ID NO: 17380 - protein, 9 aa, Homo sapiens
  Table A; HLA-B*07:02; PTPN11; T468M; 1
SAGIGRTGM

SEQ ID NO: 17381 - protein, 9 aa, Homo sapiens
  Table A; HLA-A*31:01; MECOM; R750Q; 0
SANLTQHLR

SEQ ID NO: 17382 - protein, 9 aa, Homo sapiens
  Table A; HLA-A*33:01; MECOM; R750Q; 0
SANLTQHLR

SEQ ID NO: 17383 - protein, 9 aa, Homo sapiens
  Table A; HLA-A*33:03; MECOM; R750Q; 0
SANLTQHLR

SEQ ID NO: 17384 - protein, 9 aa, Homo sapiens
  Table A; HLA-A*68:01; MECOM; R750Q; 0
SANLTQHLR

SEQ ID NO: 17385 - protein, 9 aa, Homo sapiens
  Table A; HLA-B*07:02; CNTNAP2; R483Q; 1
SAVQTNSPL

SEQ ID NO: 17386 - protein, 9 aa, Homo sapiens
  Table A; HLA-B*15:02; CNTNAP2; R483Q; 0
SAVQTNSPL

SEQ ID NO: 17387 - protein, 9 aa, Homo sapiens
  Table A; HLA-B*35:01; CNTNAP2; R483Q; 1
SAVQTNSPL

SEQ ID NO: 17388 - protein, 9 aa, Homo sapiens
  Table A; HLA-B*35:02; CNTNAP2; R483Q; 0
SAVQTNSPL

SEQ ID NO: 17389 - protein, 9 aa, Homo sapiens
  Table A; HLA-B*35:03; CNTNAP2; R483Q; 0
SAVQTNSPL

SEQ ID NO: 17390 - protein, 9 aa, Homo sapiens
  Table A; HLA-B*35:12; CNTNAP2; R483Q; 0
SAVQTNSPL

SEQ ID NO: 17391 - protein, 9 aa, Homo sapiens
  Table A; HLA-B*48:01; CNTNAP2; R483Q; 0
SAVQTNSPL

SEQ ID NO: 17392 - protein, 9 aa, Homo sapiens
  Table A; HLA-C*03:03; CNTNAP2; R483Q; 1
SAVQTNSPL

SEQ ID NO: 17393 - protein, 9 aa, Homo sapiens
  Table A; HLA-C*03:04; CNTNAP2; R483Q; 1
SAVQTNSPL

SEQ ID NO: 17394 - protein, 9 aa, Homo sapiens
  Table A; HLA-C*08:01; CNTNAP2; R483Q; 0
SAVQTNSPL

SEQ ID NO: 17395 - protein, 9 aa, Homo sapiens
  Table A; HLA-A*31:01; TP53; R248L; 0
SCMGGMNLR

SEQ ID NO: 17396 - protein, 9 aa, Homo sapiens
  Table A; HLA-A*33:03; TP53; R248L; 0
SCMGGMNLR

SEQ ID NO: 17397 - protein, 9 aa, Homo sapiens
  Table A; HLA-A*68:01; TP53; R248L; 0
SCMGGMNLR

SEQ ID NO: 17398 - protein, 10 aa, Homo sapiens
  Table A; HLA-A*11:01; TP53; R248L; 0
SCMGGMNLRP

SEQ ID NO: 17399 - protein, 9 aa, Homo sapiens
  Table A; HLA-A*11:01; TP53; R248Q; 1
SCMGGMNQR

SEQ ID NO: 17400 - protein, 9 aa, Homo sapiens
  Table A; HLA-A*26:03; TP53; R248Q; 0
SCMGGMNQR

SEQ ID NO: 17401 - protein, 9 aa, Homo sapiens
  Table A; HLA-A*31:01; TP53; R248Q; 1
SCMGGMNQR

SEQ ID NO: 17402 - protein, 9 aa, Homo sapiens
  Table A; HLA-A*33:01; TP53; R248Q; 0
SCMGGMNQR

SEQ ID NO: 17403 - protein, 9 aa, Homo sapiens
  Table A; HLA-A*33:03; TP53; R248Q; 0
SCMGGMNQR

SEQ ID NO: 17404 - protein, 9 aa, Homo sapiens
  Table A; HLA-A*68:01; TP53; R248Q; 1
SCMGGMNQR

SEQ ID NO: 17405 - protein, 10 aa, Homo sapiens
  Table A; HLA-A*11:01; TP53; R248Q; 1
SCMGGMNQRP

SEQ ID NO: 17406 - protein, 9 aa, Homo sapiens
  Table A; HLA-B*15:01; TP53; R249M; 1
SCMGGMNRM

SEQ ID NO: 17407 - protein, 8 aa, Homo sapiens
  Table A; HLA-A*11:01; TP53; G245S; 1
SCMGSMNR

SEQ ID NO: 17408 - protein, 8 aa, Homo sapiens
  Table A; HLA-A*31:01; TP53; G245S; 0
SCMGSMNR

SEQ ID NO: 17409 - protein, 8 aa, Homo sapiens
  Table A; HLA-A*33:03; TP53; G245S; 0
SCMGSMNR

SEQ ID NO: 17410 - protein, 8 aa, Homo sapiens
  Table A; HLA-A*68:01; TP53; G245S; 0
SCMGSMNR

SEQ ID NO: 17411 - protein, 8 aa, Homo sapiens
  Table A; HLA-A*11:01; TP53; G245V; 1
SCMGVMNR

SEQ ID NO: 17412 - protein, 8 aa, Homo sapiens
  Table A; HLA-A*31:01; TP53; G245V; 0
SCMGVMNR

SEQ ID NO: 17413 - protein, 8 aa, Homo sapiens
  Table A; HLA-A*33:03; TP53; G245V; 0
SCMGVMNR

SEQ ID NO: 17414 - protein, 8 aa, Homo sapiens
  Table A; HLA-A*68:01; TP53; G245V; 0
SCMGVMNR

SEQ ID NO: 17415 - protein, 9 aa, Homo sapiens
  Table A; HLA-A*31:01; TP53; G245V; 0
SCMGVMNRR

SEQ ID NO: 17416 - protein, 9 aa, Homo sapiens
  Table A; HLA-A*33:03; TP53; G245V; 0
SCMGVMNRR

SEQ ID NO: 17417 - protein, 8 aa, Homo sapiens
  Table A; HLA-A*11:01; TP53; G244S; 1
SCMSGMNR

SEQ ID NO: 17418 - protein, 8 aa, Homo sapiens
  Table A; HLA-A*31:01; TP53; G244S; 0
SCMSGMNR

SEQ ID NO: 17419 - protein, 8 aa, Homo sapiens
  Table A; HLA-A*33:03; TP53; G244S; 0
SCMSGMNR

SEQ ID NO: 17420 - protein, 9 aa, Homo sapiens
  Table A; HLA-B*44:02; PPP2R1A; R183W; 1
SDDTPMVRW

SEQ ID NO: 17421 - protein, 9 aa, Homo sapiens
  Table A; HLA-B*44:03; PPP2R1A; R183W; 1
SDDTPMVRW

SEQ ID NO: 17422 - protein, 9 aa, Homo sapiens
  Table A; HLA-B*44:05; PPP2R1A; R183W; 0
SDDTPMVRW

SEQ ID NO: 17423 - protein, 8 aa, Homo sapiens
  Table A; HLA-A*03:01; PPP2R1A; P179R; 1
SDDTRMVR

SEQ ID NO: 17424 - protein, 8 aa, Homo sapiens
  Table A; HLA-A*11:01; PPP2R1A; P179R; 1
SDDTRMVR

SEQ ID NO: 17425 - protein, 8 aa, Homo sapiens
  Table A; HLA-A*31:01; PPP2R1A; P179R; 1
SDDTRMVR

SEQ ID NO: 17426 - protein, 8 aa, Homo sapiens
  Table A; HLA-A*33:03; PPP2R1A; P179R; 0
SDDTRMVR

SEQ ID NO: 17427 - protein, 9 aa, Homo sapiens
  Table A; HLA-A*30:01; TP53; H193L; 0
SDGLAPPQL

SEQ ID NO: 17428 - protein, 9 aa, Homo sapiens
  Table A; HLA-B*40:02; TP53; H193L; 0
SDGLAPPQL

SEQ ID NO: 17429 - protein, 9 aa, Homo sapiens
  Table A; HLA-B*41:02; TP53; H193L; 0
SDGLAPPQL

SEQ ID NO: 17430 - protein, 9 aa, Homo sapiens
  Table A; HLA-B*44:05; TP53; H193L; 0
SDGLAPPQL

SEQ ID NO: 17431 - protein, 9 aa, Homo sapiens
  Table A; HLA-B*48:01; TP53; H193L; 0
SDGLAPPQL

SEQ ID NO: 17432 - protein, 9 aa, Homo sapiens
  Table A; HLA-C*08:03; TP53; H193L; 0
SDGLAPPQL

SEQ ID NO: 17433 - protein, 9 aa, Homo sapiens
  Table A; HLA-A*68:01; TP53; H193R; 0
SDGLAPPQR

SEQ ID NO: 17434 - protein, 10 aa, Homo sapiens
  Table A; HLA-B*44:05; TP53; H193R; 0
SDGLAPPQRL

SEQ ID NO: 17435 - protein, 9 aa, Homo sapiens
  Table A; HLA-A*29:02; TP53; H193Y; 0
SDGLAPPQY

SEQ ID NO: 17436 - protein, 9 aa, Homo sapiens
  Table A; HLA-B*18:01; TP53; H193Y; 0
SDGLAPPQY

SEQ ID NO: 17437 - protein, 9 aa, Homo sapiens
  Table A; HLA-B*44:03; TP53; H193Y; 0
SDGLAPPQY

SEQ ID NO: 17438 - protein, 9 aa, Homo sapiens
  Table A; HLA-B*48:01; TP53; H193Y; 0
SDGLAPPQY

SEQ ID NO: 17439 - protein, 9 aa, Homo sapiens
  Table A; HLA-A*25:01; GRIN2A; R1067W; 0
SDISETSNW

SEQ ID NO: 17440 - protein, 9 aa, Homo sapiens
  Table A; HLA-B*15:13; GRIN2A; R1067W; 0
SDISETSNW

SEQ ID NO: 17441 - protein, 9 aa, Homo sapiens
  Table A; HLA-B*27:02; GRIN2A; R1067W; 0
SDISETSNW

SEQ ID NO: 17442 - protein, 9 aa, Homo sapiens
  Table A; HLA-B*44:02; GRIN2A; R1067W; 1
SDISETSNW

SEQ ID NO: 17443 - protein, 9 aa, Homo sapiens
  Table A; HLA-B*44:03; GRIN2A; R1067W; 0
SDISETSNW

SEQ ID NO: 17444 - protein, 9 aa, Homo sapiens
  Table A; HLA-B*44:05; GRIN2A; R1067W; 0
SDISETSNW

SEQ ID NO: 17445 - protein, 9 aa, Homo sapiens
  Table A; HLA-B*58:01; GRIN2A; R1067W; 0
SDISETSNW

SEQ ID NO: 17446 - protein, 9 aa, Homo sapiens
  Table A; HLA-C*16:04; GRIN2A; R1067W; 0
SDISETSNW

SEQ ID NO: 17447 - protein, 11 aa, Homo sapiens
  Table A; HLA-B*40:02; TP53; H193L; 0
SDSDGLAPPQL

SEQ ID NO: 17448 - protein, 11 aa, Homo sapiens
  Table A; HLA-A*68:01; TP53; H193R; 0
SDSDGLAPPQR

SEQ ID NO: 17449 - protein, 8 aa, Homo sapiens
  Table A; HLA-B*40:02; CTNNB1; G34E; 0
SEIHSGAT

SEQ ID NO: 17450 - protein, 9 aa, Homo sapiens
  Table A; HLA-A*02:05; CTNNB1; G34E; 0
SEIHSGATT

SEQ ID NO: 17451 - protein, 9 aa, Homo sapiens
  Table A; HLA-A*02:08; CTNNB1; G34E; 0
SEIHSGATT

SEQ ID NO: 17452 - protein, 9 aa, Homo sapiens
  Table A; HLA-A*30:01; CTNNB1; G34E; 0
SEIHSGATT

SEQ ID NO: 17453 - protein, 9 aa, Homo sapiens
  Table A; HLA-B*40:01; CTNNB1; G34E; 0
SEIHSGATT

SEQ ID NO: 17454 - protein, 9 aa, Homo sapiens
  Table A; HLA-B*40:02; CTNNB1; G34E; 0
SEIHSGATT

SEQ ID NO: 17455 - protein, 9 aa, Homo sapiens
  Table A; HLA-B*40:06; CTNNB1; G34E; 0
SEIHSGATT

SEQ ID NO: 17456 - protein, 9 aa, Homo sapiens
  Table A; HLA-B*41:02; CTNNB1; G34E; 0
SEIHSGATT

SEQ ID NO: 17457 - protein, 9 aa, Homo sapiens
  Table A; HLA-B*44:02; CTNNB1; G34E; 1
SEIHSGATT

SEQ ID NO: 17458 - protein, 9 aa, Homo sapiens
  Table A; HLA-B*44:03; CTNNB1; G34E; 0
SEIHSGATT

SEQ ID NO: 17459 - protein, 9 aa, Homo sapiens
  Table A; HLA-B*44:05; CTNNB1; G34E; 0
SEIHSGATT

SEQ ID NO: 17460 - protein, 9 aa, Homo sapiens
  Table A; HLA-B*49:01; CTNNB1; G34E; 0
SEIHSGATT

SEQ ID NO: 17461 - protein, 9 aa, Homo sapiens
  Table A; HLA-B*50:01; CTNNB1; G34E; 0
SEIHSGATT

SEQ ID NO: 17462 - protein, 10 aa, Homo sapiens
  Table A; HLA-A*30:01; CTNNB1; G34E; 0
SEIHSGATTT

SEQ ID NO: 17463 - protein, 10 aa, Homo sapiens
  Table A; HLA-A*31:01; CTNNB1; G34E; 0
SEIHSGATTT

SEQ ID NO: 17464 - protein, 10 aa, Homo sapiens
  Table A; HLA-B*40:01; CTNNB1; G34E; 0
SEIHSGATTT

SEQ ID NO: 17465 - protein, 10 aa, Homo sapiens
  Table A; HLA-B*40:02; CTNNB1; G34E; 0
SEIHSGATTT

SEQ ID NO: 17466 - protein, 10 aa, Homo sapiens
  Table A; HLA-B*40:06; CTNNB1; G34E; 0
SEIHSGATTT

SEQ ID NO: 17467 - protein, 10 aa, Homo sapiens
  Table A; HLA-B*41:02; CTNNB1; G34E; 0
SEIHSGATTT

SEQ ID NO: 17468 - protein, 10 aa, Homo sapiens
  Table A; HLA-B*44:03; CTNNB1; G34E; 0
SEIHSGATTT

SEQ ID NO: 17469 - protein, 10 aa, Homo sapiens
  Table A; HLA-B*44:05; CTNNB1; G34E; 0
SEIHSGATTT

SEQ ID NO: 17470 - protein, 10 aa, Homo sapiens
  Table A; HLA-B*49:01; CTNNB1; G34E; 0
SEIHSGATTT

SEQ ID NO: 17471 - protein, 10 aa, Homo sapiens
  Table A; HLA-B*50:01; CTNNB1; G34E; 0
SEIHSGATTT

SEQ ID NO: 17472 - protein, 10 aa, Homo sapiens
  Table A; HLA-C*08:03; CTNNB1; G34E; 0
SEIHSGATTT

SEQ ID NO: 17473 - protein, 11 aa, Homo sapiens
  Table A; HLA-A*02:05; CTNNB1; G34E; 0
SEIHSGATTTA

SEQ ID NO: 17474 - protein, 11 aa, Homo sapiens
  Table A; HLA-A*02:08; CTNNB1; G34E; 0
SEIHSGATTTA

SEQ ID NO: 17475 - protein, 11 aa, Homo sapiens
  Table A; HLA-A*11:01; CTNNB1; G34E; 0
SEIHSGATTTA

SEQ ID NO: 17476 - protein, 11 aa, Homo sapiens
  Table A; HLA-A*30:01; CTNNB1; G34E; 0
SEIHSGATTTA

SEQ ID NO: 17477 - protein, 11 aa, Homo sapiens
  Table A; HLA-B*07:02; CTNNB1; G34E; 1
SEIHSGATTTA

SEQ ID NO: 17478 - protein, 11 aa, Homo sapiens
  Table A; HLA-B*15:01; CTNNB1; G34E; 1
SEIHSGATTTA

SEQ ID NO: 17479 - protein, 11 aa, Homo sapiens
  Table A; HLA-B*40:01; CTNNB1; G34E; 0
SEIHSGATTTA

SEQ ID NO: 17480 - protein, 11 aa, Homo sapiens
  Table A; HLA-B*40:02; CTNNB1; G34E; 0
SEIHSGATTTA

SEQ ID NO: 17481 - protein, 11 aa, Homo sapiens
  Table A; HLA-B*40:06; CTNNB1; G34E; 0
SEIHSGATTTA

SEQ ID NO: 17482 - protein, 11 aa, Homo sapiens
  Table A; HLA-B*41:02; CTNNB1; G34E; 0
SEIHSGATTTA

SEQ ID NO: 17483 - protein, 11 aa, Homo sapiens
  Table A; HLA-B*44:03; CTNNB1; G34E; 0
SEIHSGATTTA

SEQ ID NO: 17484 - protein, 11 aa, Homo sapiens
  Table A; HLA-B*44:05; CTNNB1; G34E; 0
SEIHSGATTTA

SEQ ID NO: 17485 - protein, 11 aa, Homo sapiens
  Table A; HLA-B*49:01; CTNNB1; G34E; 0
SEIHSGATTTA

SEQ ID NO: 17486 - protein, 11 aa, Homo sapiens
  Table A; HLA-B*50:01; CTNNB1; G34E; 0
SEIHSGATTTA

SEQ ID NO: 17487 - protein, 11 aa, Homo sapiens
  Table A; HLA-B*55:02; CTNNB1; G34E; 0
SEIHSGATTTA

SEQ ID NO: 17488 - protein, 10 aa, Homo sapiens
  Table A; HLA-A*30:01; FAM135B; S11L; 0
SEIQGTVEFL

SEQ ID NO: 17489 - protein, 10 aa, Homo sapiens
  Table A; HLA-B*40:01; FAM135B; S11L; 0
SEIQGTVEFL

SEQ ID NO: 17490 - protein, 10 aa, Homo sapiens
  Table A; HLA-B*40:02; FAM135B; S11L; 0
SEIQGTVEFL

SEQ ID NO: 17491 - protein, 10 aa, Homo sapiens
  Table A; HLA-B*41:02; FAM135B; S11L; 0
SEIQGTVEFL

SEQ ID NO: 17492 - protein, 10 aa, Homo sapiens
  Table A; HLA-B*44:03; FAM135B; S11L; 0
SEIQGTVEFL

SEQ ID NO: 17493 - protein, 10 aa, Homo sapiens
  Table A; HLA-B*44:05; FAM135B; S11L; 0
SEIQGTVEFL

SEQ ID NO: 17494 - protein, 10 aa, Homo sapiens
  Table A; HLA-B*49:01; FAM135B; S11L; 0
SEIQGTVEFL

SEQ ID NO: 17495 - protein, 10 aa, Homo sapiens
  Table A; HLA-B*40:02; PIK3CA; E545A; 0
SEITAQEKDF

SEQ ID NO: 17496 - protein, 10 aa, Homo sapiens
  Table A; HLA-B*41:02; PIK3CA; E545A; 0
SEITAQEKDF

SEQ ID NO: 17497 - protein, 10 aa, Homo sapiens
  Table A; HLA-B*44:02; PIK3CA; E545A; 0
SEITAQEKDF

SEQ ID NO: 17498 - protein, 10 aa, Homo sapiens
  Table A; HLA-B*44:03; PIK3CA; E545A; 0
SEITAQEKDF

SEQ ID NO: 17499 - protein, 10 aa, Homo sapiens
  Table A; HLA-B*44:05; PIK3CA; E545A; 0
SEITAQEKDF

SEQ ID NO: 17500 - protein, 10 aa, Homo sapiens
  Table A; HLA-C*16:04; PIK3CA; E545A; 0
SEITAQEKDF

SEQ ID NO: 17501 - protein, 11 aa, Homo sapiens
  Table A; HLA-B*40:01; PIK3CA; E545A; 0
SEITAQEKDFL

SEQ ID NO: 17502 - protein, 11 aa, Homo sapiens
  Table A; HLA-B*40:02; PIK3CA; E545A; 0
SEITAQEKDFL

SEQ ID NO: 17503 - protein, 11 aa, Homo sapiens
  Table A; HLA-B*44:05; PIK3CA; E545A; 0
SEITAQEKDFL

SEQ ID NO: 17504 - protein, 10 aa, Homo sapiens
  Table A; HLA-B*40:02; PIK3CA; E545D; 0
SEITDQEKDF

SEQ ID NO: 17505 - protein, 10 aa, Homo sapiens
  Table A; HLA-B*44:02; PIK3CA; E545D; 1
SEITDQEKDF

SEQ ID NO: 17506 - protein, 10 aa, Homo sapiens
  Table A; HLA-B*44:03; PIK3CA; E545D; 0
SEITDQEKDF

SEQ ID NO: 17507 - protein, 10 aa, Homo sapiens
  Table A; HLA-B*44:05; PIK3CA; E545D; 0
SEITDQEKDF

SEQ ID NO: 17508 - protein, 10 aa, Homo sapiens
  Table A; HLA-C*16:04; PIK3CA; E545D; 0
SEITDQEKDF

SEQ ID NO: 17509 - protein, 11 aa, Homo sapiens
  Table A; HLA-B*40:01; PIK3CA; E545D; 0
SEITDQEKDFL

SEQ ID NO: 17510 - protein, 11 aa, Homo sapiens
  Table A; HLA-B*40:02; PIK3CA; E545D; 0
SEITDQEKDFL

SEQ ID NO: 17511 - protein, 11 aa, Homo sapiens
  Table A; HLA-B*44:05; PIK3CA; E545D; 0
SEITDQEKDFL

SEQ ID NO: 17512 - protein, 10 aa, Homo sapiens
  Table A; HLA-B*44:02; PIK3CA; Q546K; 1
SEITEKEKDF

SEQ ID NO: 17513 - protein, 10 aa, Homo sapiens
  Table A; HLA-B*44:03; PIK3CA; Q546K; 1
SEITEKEKDF

SEQ ID NO: 17514 - protein, 10 aa, Homo sapiens
  Table A; HLA-B*44:05; PIK3CA; Q546K; 0
SEITEKEKDF

SEQ ID NO: 17515 - protein, 11 aa, Homo sapiens
  Table A; HLA-B*40:01; PIK3CA; Q546K; 1
SEITEKEKDFL

SEQ ID NO: 17516 - protein, 11 aa, Homo sapiens
  Table A; HLA-B*40:02; PIK3CA; Q546K; 0
SEITEKEKDFL

SEQ ID NO: 17517 - protein, 11 aa, Homo sapiens
  Table A; HLA-B*44:05; PIK3CA; Q546K; 0
SEITEKEKDFL

SEQ ID NO: 17518 - protein, 10 aa, Homo sapiens
  Table A; HLA-B*44:02; PIK3CA; Q546P; 1
SEITEPEKDF

SEQ ID NO: 17519 - protein, 10 aa, Homo sapiens
  Table A; HLA-B*44:03; PIK3CA; Q546P; 1
SEITEPEKDF

SEQ ID NO: 17520 - protein, 10 aa, Homo sapiens
  Table A; HLA-B*44:05; PIK3CA; Q546P; 0
SEITEPEKDF

SEQ ID NO: 17521 - protein, 11 aa, Homo sapiens
  Table A; HLA-B*40:01; PIK3CA; Q546P; 1
SEITEPEKDFL

SEQ ID NO: 17522 - protein, 11 aa, Homo sapiens
  Table A; HLA-B*40:02; PIK3CA; Q546P; 0
SEITEPEKDFL

SEQ ID NO: 17523 - protein, 11 aa, Homo sapiens
  Table A; HLA-B*44:05; PIK3CA; Q546P; 0
SEITEPEKDFL

SEQ ID NO: 17524 - protein, 10 aa, Homo sapiens
  Table A; HLA-B*44:02; PIK3CA; Q546R; 1
SEITEREKDF

SEQ ID NO: 17525 - protein, 10 aa, Homo sapiens
  Table A; HLA-B*44:03; PIK3CA; Q546R; 1
SEITEREKDF

SEQ ID NO: 17526 - protein, 10 aa, Homo sapiens
  Table A; HLA-B*44:05; PIK3CA; Q546R; 0
SEITEREKDF

SEQ ID NO: 17527 - protein, 10 aa, Homo sapiens
  Table A; HLA-B*40:02; PIK3CA; E545G; 0
SEITGQEKDF

SEQ ID NO: 17528 - protein, 10 aa, Homo sapiens
  Table A; HLA-B*41:02; PIK3CA; E545G; 0
SEITGQEKDF

SEQ ID NO: 17529 - protein, 10 aa, Homo sapiens
  Table A; HLA-B*44:02; PIK3CA; E545G; 1
SEITGQEKDF

SEQ ID NO: 17530 - protein, 10 aa, Homo sapiens
  Table A; HLA-B*44:03; PIK3CA; E545G; 0
SEITGQEKDF

SEQ ID NO: 17531 - protein, 10 aa, Homo sapiens
  Table A; HLA-B*44:05; PIK3CA; E545G; 0
SEITGQEKDF

SEQ ID NO: 17532 - protein, 10 aa, Homo sapiens
  Table A; HLA-C*16:04; PIK3CA; E545G; 0
SEITGQEKDF

SEQ ID NO: 17533 - protein, 11 aa, Homo sapiens
  Table A; HLA-B*40:01; PIK3CA; E545G; 0
SEITGQEKDFL

SEQ ID NO: 17534 - protein, 11 aa, Homo sapiens
  Table A; HLA-B*40:02; PIK3CA; E545G; 0
SEITGQEKDFL

SEQ ID NO: 17535 - protein, 11 aa, Homo sapiens
  Table A; HLA-B*44:05; PIK3CA; E545G; 0
SEITGQEKDFL

SEQ ID NO: 17536 - protein, 10 aa, Homo sapiens
  Table A; HLA-B*44:02; PIK3CA; E545K; 1
SEITKQEKDF

SEQ ID NO: 17537 - protein, 10 aa, Homo sapiens
  Table A; HLA-B*44:03; PIK3CA; E545K; 1
SEITKQEKDF

SEQ ID NO: 17538 - protein, 10 aa, Homo sapiens
  Table A; HLA-B*44:05; PIK3CA; E545K; 0
SEITKQEKDF

SEQ ID NO: 17539 - protein, 9 aa, Homo sapiens
  Table A; HLA-B*50:01; GRIN2A; R1067W; 0
SETSNWATC

SEQ ID NO: 17540 - protein, 9 aa, Homo sapiens
  Table A; HLA-A*33:03; TP53; S241F; 0
SFCMGGMNR

SEQ ID NO: 17541 - protein, 8 aa, Homo sapiens
  Table A; HLA-C*04:01; PIK3CA; Y1021C; 1
SFDDIACI

SEQ ID NO: 17542 - protein, 9 aa, Homo sapiens
  Table A; HLA-A*33:03; PIK3CA; Y1021C; 0
SFDDIACIR

SEQ ID NO: 17543 - protein, 8 aa, Homo sapiens
  Table A; HLA-A*11:01; TP53; C242F; 1
SFMGGMNR

SEQ ID NO: 17544 - protein, 8 aa, Homo sapiens
  Table A; HLA-A*31:01; TP53; C242F; 0
SFMGGMNR

SEQ ID NO: 17545 - protein, 8 aa, Homo sapiens
  Table A; HLA-A*33:01; TP53; C242F; 0
SFMGGMNR

SEQ ID NO: 17546 - protein, 8 aa, Homo sapiens
  Table A; HLA-A*33:03; TP53; C242F; 0
SFMGGMNR

SEQ ID NO: 17547 - protein, 9 aa, Homo sapiens
  Table A; HLA-A*31:01; TP53; C242F; 0
SFMGGMNRR

SEQ ID NO: 17548 - protein, 9 aa, Homo sapiens
  Table A; HLA-A*33:03; TP53; C242F; 0
SFMGGMNRR

SEQ ID NO: 17549 - protein, 10 aa, Homo sapiens
  Table A; HLA-A*30:01; CTNNB1; T41A; 1
SGATATAPSL

SEQ ID NO: 17550 - protein, 10 aa, Homo sapiens
  Table A; HLA-B*40:02; CTNNB1; T41A; 1
SGATATAPSL

SEQ ID NO: 17551 - protein, 10 aa, Homo sapiens
  Table A; HLA-B*44:05; CTNNB1; T41A; 0
SGATATAPSL

SEQ ID NO: 17552 - protein, 10 aa, Homo sapiens
  Table A; HLA-B*48:01; CTNNB1; T41A; 0
SGATATAPSL

SEQ ID NO: 17553 - protein, 11 aa, Homo sapiens
  Table A; HLA-B*48:01; CTNNB1; T41A; 0
SGATATAPSLS

SEQ ID NO: 17554 - protein, 11 aa, Homo sapiens
  Table A; HLA-C*08:03; CTNNB1; T41A; 0
SGATATAPSLS

SEQ ID NO: 17555 - protein, 10 aa, Homo sapiens
  Table A; HLA-A*02:04; CTNNB1; T41I; 0
SGATITAPSL

SEQ ID NO: 17556 - protein, 10 aa, Homo sapiens
  Table A; HLA-A*11:01; CTNNB1; T41I; 1
SGATITAPSL

SEQ ID NO: 17557 - protein, 10 aa, Homo sapiens
  Table A; HLA-A*68:01; CTNNB1; T41I; 0
SGATITAPSL

SEQ ID NO: 17558 - protein, 10 aa, Homo sapiens
  Table A; HLA-B*35:03; CTNNB1; T41I; 0
SGATITAPSL

SEQ ID NO: 17559 - protein, 10 aa, Homo sapiens
  Table A; HLA-B*40:02; CTNNB1; T41I; 0
SGATITAPSL

SEQ ID NO: 17560 - protein, 10 aa, Homo sapiens
  Table A; HLA-B*44:05; CTNNB1; T41I; 0
SGATITAPSL

SEQ ID NO: 17561 - protein, 11 aa, Homo sapiens
  Table A; HLA-B*48:01; CTNNB1; T41I; 0
SGATITAPSLS

SEQ ID NO: 17562 - protein, 11 aa, Homo sapiens
  Table A; HLA-C*08:03; CTNNB1; T41I; 0
SGATITAPSLS

SEQ ID NO: 17563 - protein, 9 aa, Homo sapiens
  Table A; HLA-B*07:02; CTNNB1; S45F; 1
SGATTTAPF

SEQ ID NO: 17564 - protein, 9 aa, Homo sapiens
  Table A; HLA-B*15:01; CTNNB1; S45F; 1
SGATTTAPF

SEQ ID NO: 17565 - protein, 9 aa, Homo sapiens
  Table A; HLA-B*15:02; CTNNB1; S45F; 0
SGATTTAPF

SEQ ID NO: 17566 - protein, 9 aa, Homo sapiens
  Table A; HLA-B*35:01; CTNNB1; S45F; 1
SGATTTAPF

SEQ ID NO: 17567 - protein, 9 aa, Homo sapiens
  Table A; HLA-B*35:03; CTNNB1; S45F; 0
SGATTTAPF

SEQ ID NO: 17568 - protein, 9 aa, Homo sapiens
  Table A; HLA-B*35:08; CTNNB1; S45F; 0
SGATTTAPF

SEQ ID NO: 17569 - protein, 9 aa, Homo sapiens
  Table A; HLA-B*35:12; CTNNB1; S45F; 0
SGATTTAPF

SEQ ID NO: 17570 - protein, 9 aa, Homo sapiens
  Table A; HLA-B*39:01; CTNNB1; S45F; 0
SGATTTAPF

SEQ ID NO: 17571 - protein, 9 aa, Homo sapiens
  Table A; HLA-B*44:05; CTNNB1; S45F; 0
SGATTTAPF

SEQ ID NO: 17572 - protein, 9 aa, Homo sapiens
  Table A; HLA-B*46:01; CTNNB1; S45F; 0
SGATTTAPF

SEQ ID NO: 17573 - protein, 9 aa, Homo sapiens
  Table A; HLA-B*58:01; CTNNB1; S45F; 0
SGATTTAPF

SEQ ID NO: 17574 - protein, 9 aa, Homo sapiens
  Table A; HLA-C*08:01; CTNNB1; S45F; 0
SGATTTAPF

SEQ ID NO: 17575 - protein, 10 aa, Homo sapiens
  Table A; HLA-A*03:01; CTNNB1; S45F; 1
SGATTTAPFL

SEQ ID NO: 17576 - protein, 10 aa, Homo sapiens
  Table A; HLA-A*11:01; CTNNB1; S45F; 1
SGATTTAPFL

SEQ ID NO: 17577 - protein, 10 aa, Homo sapiens
  Table A; HLA-A*68:01; CTNNB1; S45F; 0
SGATTTAPFL

SEQ ID NO: 17578 - protein, 10 aa, Homo sapiens
  Table A; HLA-A*68:02; CTNNB1; S45F; 0
SGATTTAPFL

SEQ ID NO: 17579 - protein, 10 aa, Homo sapiens
  Table A; HLA-B*40:02; CTNNB1; S45F; 0
SGATTTAPFL

SEQ ID NO: 17580 - protein, 10 aa, Homo sapiens
  Table A; HLA-B*44:05; CTNNB1; S45F; 0
SGATTTAPFL

SEQ ID NO: 17581 - protein, 11 aa, Homo sapiens
  Table A; HLA-A*11:01; CTNNB1; S45F; 1
SGATTTAPFLS

SEQ ID NO: 17582 - protein, 10 aa, Homo sapiens
  Table A; HLA-A*11:01; CTNNB1; S45P; 1
SGATTTAPPL

SEQ ID NO: 17583 - protein, 10 aa, Homo sapiens
  Table A; HLA-A*68:01; CTNNB1; S45P; 1
SGATTTAPPL

SEQ ID NO: 17584 - protein, 10 aa, Homo sapiens
  Table A; HLA-B*35:03; CTNNB1; S45P; 1
SGATTTAPPL

SEQ ID NO: 17585 - protein, 10 aa, Homo sapiens
  Table A; HLA-B*40:02; CTNNB1; S45P; 0
SGATTTAPPL

SEQ ID NO: 17586 - protein, 11 aa, Homo sapiens
  Table A; HLA-A*11:01; CTNNB1; S45P; 1
SGATTTAPPLS

SEQ ID NO: 17587 - protein, 8 aa, Homo sapiens
  Table A; HLA-B*13:02; RAC1; P29S; 1
SGEYIPTV

SEQ ID NO: 17588 - protein, 8 aa, Homo sapiens
  Table A; HLA-B*39:06; RAC1; P29S; 0
SGEYIPTV

SEQ ID NO: 17589 - protein, 8 aa, Homo sapiens
  Table A; HLA-B*40:02; RAC1; P29S; 0
SGEYIPTV

SEQ ID NO: 17590 - protein, 8 aa, Homo sapiens
  Table A; HLA-B*51:01; RAC1; P29S; 1
SGEYIPTV

SEQ ID NO: 17591 - protein, 9 aa, Homo sapiens
  Table A; HLA-A*23:01; RAC1; P29S; 0
SGEYIPTVF

SEQ ID NO: 17592 - protein, 9 aa, Homo sapiens
  Table A; HLA-B*15:01; RAC1; P29S; 1
SGEYIPTVF

SEQ ID NO: 17593 - protein, 9 aa, Homo sapiens
  Table A; HLA-B*18:01; RAC1; P29S; 1
SGEYIPTVF

SEQ ID NO: 17594 - protein, 9 aa, Homo sapiens
  Table A; HLA-B*35:01; RAC1; P29S; 1
SGEYIPTVF

SEQ ID NO: 17595 - protein, 9 aa, Homo sapiens
  Table A; HLA-B*35:02; RAC1; P29S; 0
SGEYIPTVF

SEQ ID NO: 17596 - protein, 9 aa, Homo sapiens
  Table A; HLA-B*35:03; RAC1; P29S; 0
SGEYIPTVF

SEQ ID NO: 17597 - protein, 9 aa, Homo sapiens
  Table A; HLA-B*35:08; RAC1; P29S; 0
SGEYIPTVF

SEQ ID NO: 17598 - protein, 9 aa, Homo sapiens
  Table A; HLA-B*35:12; RAC1; P29S; 0
SGEYIPTVF

SEQ ID NO: 17599 - protein, 9 aa, Homo sapiens
  Table A; HLA-B*38:01; RAC1; P29S; 1
SGEYIPTVF

SEQ ID NO: 17600 - protein, 9 aa, Homo sapiens
  Table A; HLA-B*39:01; RAC1; P29S; 0
SGEYIPTVF

SEQ ID NO: 17601 - protein, 9 aa, Homo sapiens
  Table A; HLA-B*44:05; RAC1; P29S; 0
SGEYIPTVF

SEQ ID NO: 17602 - protein, 9 aa, Homo sapiens
  Table A; HLA-C*04:01; RAC1; P29S; 1
SGEYIPTVF

SEQ ID NO: 17603 - protein, 9 aa, Homo sapiens
  Table A; HLA-C*05:01; RAC1; P29S; 1
SGEYIPTVF

SEQ ID NO: 17604 - protein, 9 aa, Homo sapiens
  Table A; HLA-C*08:01; RAC1; P29S; 0
SGEYIPTVF

SEQ ID NO: 17605 - protein, 9 aa, Homo sapiens
  Table A; HLA-C*08:02; RAC1; P29S; 1
SGEYIPTVF

SEQ ID NO: 17606 - protein, 9 aa, Homo sapiens
  Table A; HLA-A*11:01; ATM; R337C; 0
SGFCNIAVK

SEQ ID NO: 17607 - protein, 10 aa, Homo sapiens
  Table A; HLA-B*48:01; CTNNB1; S37A; 0
SGIHAGATTT

SEQ ID NO: 17608 - protein, 10 aa, Homo sapiens
  Table A; HLA-C*08:03; CTNNB1; S37A; 0
SGIHAGATTT

SEQ ID NO: 17609 - protein, 11 aa, Homo sapiens
  Table A; HLA-A*02:05; CTNNB1; S37A; 0
SGIHAGATTTA

SEQ ID NO: 17610 - protein, 11 aa, Homo sapiens
  Table A; HLA-A*11:01; CTNNB1; S37A; 1
SGIHAGATTTA

SEQ ID NO: 17611 - protein, 11 aa, Homo sapiens
  Table A; HLA-B*15:01; CTNNB1; S37A; 1
SGIHAGATTTA

SEQ ID NO: 17612 - protein, 11 aa, Homo sapiens
  Table A; HLA-B*39:06; CTNNB1; S37A; 0
SGIHAGATTTA

SEQ ID NO: 17613 - protein, 11 aa, Homo sapiens
  Table A; HLA-B*46:01; CTNNB1; S37A; 0
SGIHAGATTTA

SEQ ID NO: 17614 - protein, 11 aa, Homo sapiens
  Table A; HLA-B*48:01; CTNNB1; S37A; 0
SGIHAGATTTA

SEQ ID NO: 17615 - protein, 11 aa, Homo sapiens
  Table A; HLA-B*50:01; CTNNB1; S37A; 0
SGIHAGATTTA

SEQ ID NO: 17616 - protein, 11 aa, Homo sapiens
  Table A; HLA-B*54:01; CTNNB1; S37A; 0
SGIHAGATTTA

SEQ ID NO: 17617 - protein, 10 aa, Homo sapiens
  Table A; HLA-C*08:03; CTNNB1; S37P; 0
SGIHPGATTT

SEQ ID NO: 17618 - protein, 11 aa, Homo sapiens
  Table A; HLA-B*39:06; CTNNB1; S37P; 0
SGIHPGATTTA

SEQ ID NO: 17619 - protein, 11 aa, Homo sapiens
  Table A; HLA-B*54:01; CTNNB1; S37P; 0
SGIHPGATTTA

SEQ ID NO: 17620 - protein, 9 aa, Homo sapiens
  Table A; HLA-A*02:05; CTNNB1; T41A; 0
SGIHSGATA

SEQ ID NO: 17621 - protein, 9 aa, Homo sapiens
  Table A; HLA-A*02:06; CTNNB1; T41A; 0
SGIHSGATA

SEQ ID NO: 17622 - protein, 9 aa, Homo sapiens
  Table A; HLA-B*07:02; CTNNB1; T41A; 1
SGIHSGATA

SEQ ID NO: 17623 - protein, 9 aa, Homo sapiens
  Table A; HLA-B*15:10; CTNNB1; T41A; 0
SGIHSGATA

SEQ ID NO: 17624 - protein, 9 aa, Homo sapiens
  Table A; HLA-B*39:06; CTNNB1; T41A; 0
SGIHSGATA

SEQ ID NO: 17625 - protein, 9 aa, Homo sapiens
  Table A; HLA-B*50:01; CTNNB1; T41A; 0
SGIHSGATA

SEQ ID NO: 17626 - protein, 9 aa, Homo sapiens
  Table A; HLA-B*54:01; CTNNB1; T41A; 0
SGIHSGATA

SEQ ID NO: 17627 - protein, 9 aa, Homo sapiens
  Table A; HLA-B*55:02; CTNNB1; T41A; 0
SGIHSGATA

SEQ ID NO: 17628 - protein, 9 aa, Homo sapiens
  Table A; HLA-B*56:01; CTNNB1; T41A; 0
SGIHSGATA

SEQ ID NO: 17629 - protein, 9 aa, Homo sapiens
  Table A; HLA-C*08:01; CTNNB1; T41A; 0
SGIHSGATA

SEQ ID NO: 17630 - protein, 10 aa, Homo sapiens
  Table A; HLA-B*48:01; CTNNB1; T41A; 0
SGIHSGATAT

SEQ ID NO: 17631 - protein, 10 aa, Homo sapiens
  Table A; HLA-C*08:03; CTNNB1; T41A; 0
SGIHSGATAT

SEQ ID NO: 17632 - protein, 11 aa, Homo sapiens
  Table A; HLA-A*02:05; CTNNB1; T41A; 0
SGIHSGATATA

SEQ ID NO: 17633 - protein, 11 aa, Homo sapiens
  Table A; HLA-A*68:01; CTNNB1; T41A; 1
SGIHSGATATA

SEQ ID NO: 17634 - protein, 11 aa, Homo sapiens
  Table A; HLA-B*48:01; CTNNB1; T41A; 0
SGIHSGATATA

SEQ ID NO: 17635 - protein, 11 aa, Homo sapiens
  Table A; HLA-B*50:01; CTNNB1; T41A; 0
SGIHSGATATA

SEQ ID NO: 17636 - protein, 9 aa, Homo sapiens
  Table A; HLA-A*02:05; CTNNB1; T41I; 0
SGIHSGATI

SEQ ID NO: 17637 - protein, 9 aa, Homo sapiens
  Table A; HLA-A*02:06; CTNNB1; T41I; 0
SGIHSGATI

SEQ ID NO: 17638 - protein, 9 aa, Homo sapiens
  Table A; HLA-A*30:01; CTNNB1; T41I; 0
SGIHSGATI

SEQ ID NO: 17639 - protein, 9 aa, Homo sapiens
  Table A; HLA-B*07:02; CTNNB1; T41I; 1
SGIHSGATI

SEQ ID NO: 17640 - protein, 9 aa, Homo sapiens
  Table A; HLA-B*13:02; CTNNB1; T41I; 0
SGIHSGATI

SEQ ID NO: 17641 - protein, 9 aa, Homo sapiens
  Table A; HLA-B*15:01; CTNNB1; T41I; 1
SGIHSGATI

SEQ ID NO: 17642 - protein, 9 aa, Homo sapiens
  Table A; HLA-B*15:02; CTNNB1; T41I; 0
SGIHSGATI

SEQ ID NO: 17643 - protein, 9 aa, Homo sapiens
  Table A; HLA-B*15:10; CTNNB1; T41I; 0
SGIHSGATI

SEQ ID NO: 17644 - protein, 9 aa, Homo sapiens
  Table A; HLA-B*15:13; CTNNB1; T41I; 0
SGIHSGATI

SEQ ID NO: 17645 - protein, 9 aa, Homo sapiens
  Table A; HLA-B*35:03; CTNNB1; T41I; 0
SGIHSGATI

SEQ ID NO: 17646 - protein, 9 aa, Homo sapiens
  Table A; HLA-B*38:01; CTNNB1; T41I; 0
SGIHSGATI

SEQ ID NO: 17647 - protein, 9 aa, Homo sapiens
  Table A; HLA-B*39:01; CTNNB1; T41I; 0
SGIHSGATI

SEQ ID NO: 17648 - protein, 9 aa, Homo sapiens
  Table A; HLA-B*40:01; CTNNB1; T41I; 1
SGIHSGATI

SEQ ID NO: 17649 - protein, 9 aa, Homo sapiens
  Table A; HLA-B*40:02; CTNNB1; T41I; 0
SGIHSGATI

SEQ ID NO: 17650 - protein, 9 aa, Homo sapiens
  Table A; HLA-B*44:05; CTNNB1; T41I; 0
SGIHSGATI

SEQ ID NO: 17651 - protein, 9 aa, Homo sapiens
  Table A; HLA-B*48:01; CTNNB1; T41I; 0
SGIHSGATI

SEQ ID NO: 17652 - protein, 9 aa, Homo sapiens
  Table A; HLA-B*51:01; CTNNB1; T41I; 1
SGIHSGATI

SEQ ID NO: 17653 - protein, 9 aa, Homo sapiens
  Table A; HLA-B*58:01; CTNNB1; T41I; 0
SGIHSGATI

SEQ ID NO: 17654 - protein, 9 aa, Homo sapiens
  Table A; HLA-C*03:03; CTNNB1; T41I; 1
SGIHSGATI

SEQ ID NO: 17655 - protein, 9 aa, Homo sapiens
  Table A; HLA-C*03:04; CTNNB1; T41I; 1
SGIHSGATI

SEQ ID NO: 17656 - protein, 9 aa, Homo sapiens
  Table A; HLA-C*08:01; CTNNB1; T41I; 0
SGIHSGATI

SEQ ID NO: 17657 - protein, 11 aa, Homo sapiens
  Table A; HLA-A*02:05; CTNNB1; T41I; 0
SGIHSGATITA

SEQ ID NO: 17658 - protein, 11 aa, Homo sapiens
  Table A; HLA-A*11:01; CTNNB1; T41I; 1
SGIHSGATITA

SEQ ID NO: 17659 - protein, 11 aa, Homo sapiens
  Table A; HLA-A*68:01; CTNNB1; T41I; 0
SGIHSGATITA

SEQ ID NO: 17660 - protein, 11 aa, Homo sapiens
  Table A; HLA-A*68:02; CTNNB1; T41I; 0
SGIHSGATITA

SEQ ID NO: 17661 - protein, 11 aa, Homo sapiens
  Table A; HLA-B*48:01; CTNNB1; T41I; 0
SGIHSGATITA

SEQ ID NO: 17662 - protein, 11 aa, Homo sapiens
  Table A; HLA-B*54:01; CTNNB1; T41I; 0
SGIHSGATITA

SEQ ID NO: 17663 - protein, 11 aa, Homo sapiens
  Table A; HLA-B*55:02; CTNNB1; T41I; 0
SGIHSGATITA

SEQ ID NO: 17664 - protein, 9 aa, Homo sapiens
  Table A; HLA-B*41:02; TP53; G244S; 0
SGMNRRPIL

SEQ ID NO: 17665 - protein, 10 aa, Homo sapiens
  Table A; HLA-B*15:01; TP53; G266E; 0
SGNLLERNSF

SEQ ID NO: 17666 - protein, 8 aa, Homo sapiens
  Table A; HLA-B*15:01; BRAF; G469V; 1
SGSFVTVY

SEQ ID NO: 17667 - protein, 8 aa, Homo sapiens
  Table A; HLA-B*18:01; BRAF; G469V; 1
SGSFVTVY

SEQ ID NO: 17668 - protein, 9 aa, Homo sapiens
  Table A; HLA-A*03:01; BRAF; G469V; 1
SGSFVTVYK

SEQ ID NO: 17669 - protein, 9 aa, Homo sapiens
  Table A; HLA-A*03:02; BRAF; G469V; 0
SGSFVTVYK

SEQ ID NO: 17670 - protein, 9 aa, Homo sapiens
  Table A; HLA-A*11:01; BRAF; G469V; 1
SGSFVTVYK

SEQ ID NO: 17671 - protein, 9 aa, Homo sapiens
  Table A; HLA-A*68:01; BRAF; G469V; 0
SGSFVTVYK

SEQ ID NO: 17672 - protein, 9 aa, Homo sapiens
  Table A; HLA-A*68:02; BRAF; G469V; 0
SGSFVTVYK

SEQ ID NO: 17673 - protein, 11 aa, Homo sapiens
  Table A; HLA-B*57:01; FBXW7; R479Q; 0
SGSQDATLRVW

SEQ ID NO: 17674 - protein, 8 aa, Homo sapiens
  Table A; HLA-B*07:02; KRAS; G12S; 1
SGVGKSAL

SEQ ID NO: 17675 - protein, 8 aa, Homo sapiens
  Table A; HLA-B*08:01; KRAS; G12S; 1
SGVGKSAL

SEQ ID NO: 17676 - protein, 8 aa, Homo sapiens
  Table A; HLA-B*14:02; KRAS; G12S; 0
SGVGKSAL

SEQ ID NO: 17677 - protein, 8 aa, Homo sapiens
  Table A; HLA-B*41:02; KRAS; G12S; 0
SGVGKSAL

SEQ ID NO: 17678 - protein, 10 aa, Homo sapiens
  Table A; HLA-B*13:02; KRAS; G12S; 0
SGVGKSALTI

SEQ ID NO: 17679 - protein, 8 aa, Homo sapiens
  Table A; HLA-B*39:01; IDH1; R132S; 0
SHAYGDQY

SEQ ID NO: 17680 - protein, 10 aa, Homo sapiens
  Table A; HLA-A*03:02; BCORL1; K1207N; 0
SHEEGSLENK

SEQ ID NO: 17681 - protein, 11 aa, Homo sapiens
  Table A; HLA-B*38:01; BCORL1; K1207N; 0
SHEEGSLENKA

SEQ ID NO: 17682 - protein, 11 aa, Homo sapiens
  Table A; HLA-B*39:06; BCORL1; K1207N; 0
SHEEGSLENKA

SEQ ID NO: 17683 - protein, 10 aa, Homo sapiens
  Table A; HLA-A*29:02; CTNNB1; D32Y; 1
SHWQQQSYLY

SEQ ID NO: 17684 - protein, 9 aa, Homo sapiens
  Table A; HLA-A*02:04; PIK3R1; K567E; 0
SIEPDLIQL

SEQ ID NO: 17685 - protein, 9 aa, Homo sapiens
  Table A; HLA-A*02:06; PIK3R1; K567E; 0
SIEPDLIQL

SEQ ID NO: 17686 - protein, 9 aa, Homo sapiens
  Table A; HLA-A*02:07; PIK3R1; K567E; 0
SIEPDLIQL

SEQ ID NO: 17687 - protein, 9 aa, Homo sapiens
  Table A; HLA-B*35:02; PIK3R1; K567E; 0
SIEPDLIQL

SEQ ID NO: 17688 - protein, 9 aa, Homo sapiens
  Table A; HLA-B*35:03; PIK3R1; K567E; 0
SIEPDLIQL

SEQ ID NO: 17689 - protein, 9 aa, Homo sapiens
  Table A; HLA-B*35:12; PIK3R1; K567E; 0
SIEPDLIQL

SEQ ID NO: 17690 - protein, 9 aa, Homo sapiens
  Table A; HLA-B*38:01; PIK3R1; K567E; 0
SIEPDLIQL

SEQ ID NO: 17691 - protein, 9 aa, Homo sapiens
  Table A; HLA-C*05:01; PIK3R1; K567E; 1
SIEPDLIQL

SEQ ID NO: 17692 - protein, 9 aa, Homo sapiens
  Table A; HLA-C*08:01; PIK3R1; K567E; 0
SIEPDLIQL

SEQ ID NO: 17693 - protein, 9 aa, Homo sapiens
  Table A; HLA-C*08:02; PIK3R1; K567E; 0
SIEPDLIQL

SEQ ID NO: 17694 - protein, 10 aa, Homo sapiens
  Table A; HLA-A*33:03; PIK3R1; K567E; 0
SIEPDLIQLR

SEQ ID NO: 17695 - protein, 10 aa, Homo sapiens
  Table A; HLA-A*68:01; PIK3R1; K567E; 0
SIEPDLIQLR

SEQ ID NO: 17696 - protein, 10 aa, Homo sapiens
  Table A; HLA-B*27:02; PIK3R1; K567E; 0
SIEPDLIQLR

SEQ ID NO: 17697 - protein, 11 aa, Homo sapiens
  Table A; HLA-A*11:01; PIK3R1; K567E; 1
SIEPDLIQLRK

SEQ ID NO: 17698 - protein, 10 aa, Homo sapiens
  Table A; HLA-A*02:03; BRAF; N581S; 0
SIFLHEDLTV

SEQ ID NO: 17699 - protein, 9 aa, Homo sapiens
  Table A; HLA-A*02:04; ROBO2; D1014N; 0
SIHELAVNL

SEQ ID NO: 17700 - protein, 9 aa, Homo sapiens
  Table A; HLA-A*02:05; ROBO2; D1014N; 0
SIHELAVNL

SEQ ID NO: 17701 - protein, 10 aa, Homo sapiens
  Table A; HLA-A*11:01; PIK3R1; L573P; 0
SIKPDLIQPR

SEQ ID NO: 17702 - protein, 10 aa, Homo sapiens
  Table A; HLA-A*26:03; PIK3R1; L573P; 0
SIKPDLIQPR

SEQ ID NO: 17703 - protein, 10 aa, Homo sapiens
  Table A; HLA-A*30:01; PIK3R1; L573P; 0
SIKPDLIQPR

SEQ ID NO: 17704 - protein, 10 aa, Homo sapiens
  Table A; HLA-A*31:01; PIK3R1; L573P; 0
SIKPDLIQPR

SEQ ID NO: 17705 - protein, 10 aa, Homo sapiens
  Table A; HLA-A*33:01; PIK3R1; L573P; 0
SIKPDLIQPR

SEQ ID NO: 17706 - protein, 10 aa, Homo sapiens
  Table A; HLA-A*33:03; PIK3R1; L573P; 0
SIKPDLIQPR

SEQ ID NO: 17707 - protein, 10 aa, Homo sapiens
  Table A; HLA-A*68:01; PIK3R1; L573P; 0
SIKPDLIQPR

SEQ ID NO: 17708 - protein, 11 aa, Homo sapiens
  Table A; HLA-A*11:01; PIK3R1; L573P; 0
SIKPDLIQPRK

SEQ ID NO: 17709 - protein, 9 aa, Homo sapiens
  Table A; HLA-A*31:01; KLK2; E161K; 0
SIKPEEFLR

SEQ ID NO: 17710 - protein, 11 aa, Homo sapiens
  Table A; HLA-A*31:01; KLK2; E161K; 0
SIKPEEFLRPR

SEQ ID NO: 17711 - protein, 9 aa, Homo sapiens
  Table A; HLA-B*48:01; PREX2; E553K; 0
SKFKDEPLL

SEQ ID NO: 17712 - protein, 9 aa, Homo sapiens
  Table A; HLA-C*06:02; PREX2; E553K; 0
SKFKDEPLL

SEQ ID NO: 17713 - protein, 9 aa, Homo sapiens
  Table A; HLA-B*15:03; BCOR; N1425S; 0
SKNAGETLL

SEQ ID NO: 17714 - protein, 9 aa, Homo sapiens
  Table A; HLA-B*39:01; BCOR; N1425S; 0
SKNAGETLL

SEQ ID NO: 17715 - protein, 9 aa, Homo sapiens
  Table A; HLA-B*48:01; BCOR; N1425S; 0
SKNAGETLL

SEQ ID NO: 17716 - protein, 9 aa, Homo sapiens
  Table A; HLA-C*08:03; BCOR; N1425S; 0
SKNAGETLL

SEQ ID NO: 17717 - protein, 11 aa, Homo sapiens
  Table A; HLA-A*31:01; BCOR; N1425S; 1
SKNAGETLLQR

SEQ ID NO: 17718 - protein, 8 aa, Homo sapiens
  Table A; HLA-C*08:03; CHD4; R975H; 0
SKTELIVH

SEQ ID NO: 17719 - protein, 9 aa, Homo sapiens
  Table A; HLA-A*02:01; CHD4; R975H; 1
SKTELIVHV

SEQ ID NO: 17720 - protein, 9 aa, Homo sapiens
  Table A; HLA-A*02:04; CHD4; R975H; 0
SKTELIVHV

SEQ ID NO: 17721 - protein, 9 aa, Homo sapiens
  Table A; HLA-A*02:05; CHD4; R975H; 0
SKTELIVHV

SEQ ID NO: 17722 - protein, 9 aa, Homo sapiens
  Table A; HLA-A*02:06; CHD4; R975H; 0
SKTELIVHV

SEQ ID NO: 17723 - protein, 9 aa, Homo sapiens
  Table A; HLA-A*68:02; CHD4; R975H; 0
SKTELIVHV

SEQ ID NO: 17724 - protein, 9 aa, Homo sapiens
  Table A; HLA-B*13:02; CHD4; R975H; 0
SKTELIVHV

SEQ ID NO: 17725 - protein, 9 aa, Homo sapiens
  Table A; HLA-B*39:06; CHD4; R975H; 0
SKTELIVHV

SEQ ID NO: 17726 - protein, 9 aa, Homo sapiens
  Table A; HLA-C*06:02; CHD4; R975H; 1
SKTELIVHV

SEQ ID NO: 17727 - protein, 9 aa, Homo sapiens
  Table A; HLA-A*02:01; DCAF12L2; R378H; 1
SLLFYDIHA

SEQ ID NO: 17728 - protein, 9 aa, Homo sapiens
  Table A; HLA-A*02:04; DCAF12L2; R378H; 0
SLLFYDIHA

SEQ ID NO: 17729 - protein, 8 aa, Homo sapiens
  Table A; HLA-B*13:02; MB21D2; Q311E; 0
SLMQAYEA

SEQ ID NO: 17730 - protein, 8 aa, Homo sapiens
  Table A; HLA-B*39:06; MB21D2; Q311E; 0
SLMQAYEA

SEQ ID NO: 17731 - protein, 9 aa, Homo sapiens
  Table A; HLA-A*02:01; MB21D2; Q311E; 1
SLMQAYEAC

SEQ ID NO: 17732 - protein, 10 aa, Homo sapiens
  Table A; HLA-A*03:02; MB21D2; Q311E; 0
SLMQAYEACK

SEQ ID NO: 17733 - protein, 10 aa, Homo sapiens
  Table A; HLA-B*27:02; MB21D2; Q311E; 0
SLMQAYEACK

SEQ ID NO: 17734 - protein, 9 aa, Homo sapiens
  Table A; HLA-A*02:04; PTPRD; S431L; 0
SLTTILVQW

SEQ ID NO: 17735 - protein, 9 aa, Homo sapiens
  Table A; HLA-B*15:13; PTPRD; S431L; 0
SLTTILVQW

SEQ ID NO: 17736 - protein, 9 aa, Homo sapiens
  Table A; HLA-B*57:01; PTPRD; S431L; 0
SLTTILVQW

SEQ ID NO: 17737 - protein, 9 aa, Homo sapiens
  Table A; HLA-B*58:01; PTPRD; S431L; 0
SLTTILVQW

SEQ ID NO: 17738 - protein, 9 aa, Homo sapiens
  Table A; HLA-A*02:03; ACSL3; R232Q; 0
SLVPRLQHI

SEQ ID NO: 17739 - protein, 9 aa, Homo sapiens
  Table A; HLA-A*02:04; ACSL3; R232Q; 0
SLVPRLQHI

SEQ ID NO: 17740 - protein, 9 aa, Homo sapiens
  Table A; HLA-A*26:03; A1CF; E34K; 0
SLVQKNGQR

SEQ ID NO: 17741 - protein, 10 aa, Homo sapiens
  Table A; HLA-A*02:01; SMARCA4; G1232S; 1
SMFDQKSSSH

SEQ ID NO: 17742 - protein, 10 aa, Homo sapiens
  Table A; HLA-A*02:03; SMARCA4; G1232S; 0
SMFDQKSSSH

SEQ ID NO: 17743 - protein, 10 aa, Homo sapiens
  Table A; HLA-A*03:01; SMARCA4; G1232S; 1
SMFDQKSSSH

SEQ ID NO: 17744 - protein, 10 aa, Homo sapiens
  Table A; HLA-A*03:02; SMARCA4; G1232S; 0
SMFDQKSSSH

SEQ ID NO: 17745 - protein, 10 aa, Homo sapiens
  Table A; HLA-B*15:01; SMARCA4; G1232S; 0
SMFDQKSSSH

SEQ ID NO: 17746 - protein, 10 aa, Homo sapiens
  Table A; HLA-B*48:01; SMARCA4; G1232S; 0
SMFDQKSSSH

SEQ ID NO: 17747 - protein, 10 aa, Homo sapiens
  Table A; HLA-C*08:03; SMARCA4; G1232S; 0
SMFDQKSSSH

SEQ ID NO: 17748 - protein, 8 aa, Homo sapiens
  Table A; HLA-B*07:02; PIK3CA; G1007R; 1
SMMLRSGM

SEQ ID NO: 17749 - protein, 8 aa, Homo sapiens
  Table A; HLA-B*08:01; PIK3CA; G1007R; 1
SMMLRSGM

SEQ ID NO: 17750 - protein, 10 aa, Homo sapiens
  Table A; HLA-B*07:02; XPO1; R749Q; 1
SMQTVKRETL

SEQ ID NO: 17751 - protein, 11 aa, Homo sapiens
  Table A; HLA-A*03:02; XPO1; R749Q; 0
SMQTVKRETLK

SEQ ID NO: 17752 - protein, 8 aa, Homo sapiens
  Table A; HLA-B*39:06; CREBBP; P2094L; 0
SNLQLMAA

SEQ ID NO: 17753 - protein, 8 aa, Homo sapiens
  Table A; HLA-B*07:02; TP53; L130F; 1
SPAFNKMF

SEQ ID NO: 17754 - protein, 9 aa, Homo sapiens
  Table A; HLA-B*07:02; TP53; C135F; 1
SPALNKMFF

SEQ ID NO: 17755 - protein, 8 aa, Homo sapiens
  Table A; HLA-B*07:02; TP53; F134L; 1
SPALNKML

SEQ ID NO: 17756 - protein, 8 aa, Homo sapiens
  Table A; HLA-B*08:01; TP53; F134L; 1
SPALNKML

SEQ ID NO: 17757 - protein, 9 aa, Homo sapiens
  Table A; HLA-B*07:02; TP53; F134L; 1
SPALNKMLC

SEQ ID NO: 17758 - protein, 9 aa, Homo sapiens
  Table A; HLA-B*56:01; TP53; F134L; 0
SPALNKMLC

SEQ ID NO: 17759 - protein, 11 aa, Homo sapiens
  Table A; HLA-B*07:02; TP53; F134L; 1
SPALNKMLCQL

SEQ ID NO: 17760 - protein, 8 aa, Homo sapiens
  Table A; HLA-B*07:02; TP53; K132N; 1
SPALNNMF

SEQ ID NO: 17761 - protein, 8 aa, Homo sapiens
  Table A; HLA-B*08:01; TP53; K132N; 1
SPALNNMF

SEQ ID NO: 17762 - protein, 8 aa, Homo sapiens
  Table A; HLA-B*35:01; TP53; K132N; 0
SPALNNMF

SEQ ID NO: 17763 - protein, 8 aa, Homo sapiens
  Table A; HLA-B*35:03; TP53; K132N; 0
SPALNNMF

SEQ ID NO: 17764 - protein, 9 aa, Homo sapiens
  Table A; HLA-B*56:01; TP53; K132N; 0
SPALNNMFC

SEQ ID NO: 17765 - protein, 8 aa, Homo sapiens
  Table A; HLA-B*07:02; TP53; K132R; 1
SPALNRMF

SEQ ID NO: 17766 - protein, 11 aa, Homo sapiens
  Table A; HLA-B*07:02; TP53; K132R; 1
SPALNRMFCQL

SEQ ID NO: 17767 - protein, 10 aa, Homo sapiens
  Table A; HLA-B*07:02; PDE4DIP; C1297R; 1
SPEREEHNSL

SEQ ID NO: 17768 - protein, 10 aa, Homo sapiens
  Table A; HLA-B*35:02; PDE4DIP; C1297R; 0
SPEREEHNSL

SEQ ID NO: 17769 - protein, 10 aa, Homo sapiens
  Table A; HLA-B*35:03; PDE4DIP; C1297R; 0
SPEREEHNSL

SEQ ID NO: 17770 - protein, 10 aa, Homo sapiens
  Table A; HLA-B*35:08; PDE4DIP; C1297R; 0
SPEREEHNSL

SEQ ID NO: 17771 - protein, 10 aa, Homo sapiens
  Table A; HLA-B*35:12; PDE4DIP; C1297R; 0
SPEREEHNSL

SEQ ID NO: 17772 - protein, 9 aa, Homo sapiens
  Table A; HLA-B*07:02; TP53; R249S; 1
SPILTIITL

SEQ ID NO: 17773 - protein, 9 aa, Homo sapiens
  Table A; HLA-B*08:01; TP53; R249S; 1
SPILTIITL

SEQ ID NO: 17774 - protein, 9 aa, Homo sapiens
  Table A; HLA-B*15:02; TP53; R249S; 0
SPILTIITL

SEQ ID NO: 17775 - protein, 9 aa, Homo sapiens
  Table A; HLA-B*15:10; TP53; R249S; 0
SPILTIITL

SEQ ID NO: 17776 - protein, 9 aa, Homo sapiens
  Table A; HLA-B*35:01; TP53; R249S; 1
SPILTIITL

SEQ ID NO: 17777 - protein, 9 aa, Homo sapiens
  Table A; HLA-B*35:02; TP53; R249S; 0
SPILTIITL

SEQ ID NO: 17778 - protein, 9 aa, Homo sapiens
  Table A; HLA-B*35:03; TP53; R249S; 1
SPILTIITL

SEQ ID NO: 17779 - protein, 9 aa, Homo sapiens
  Table A; HLA-B*35:08; TP53; R249S; 0
SPILTIITL

SEQ ID NO: 17780 - protein, 9 aa, Homo sapiens
  Table A; HLA-B*35:12; TP53; R249S; 0
SPILTIITL

SEQ ID NO: 17781 - protein, 9 aa, Homo sapiens
  Table A; HLA-B*40:02; TP53; R249S; 0
SPILTIITL

SEQ ID NO: 17782 - protein, 9 aa, Homo sapiens
  Table A; HLA-B*51:01; TP53; R249S; 1
SPILTIITL

SEQ ID NO: 17783 - protein, 9 aa, Homo sapiens
  Table A; HLA-B*54:01; TP53; R249S; 0
SPILTIITL

SEQ ID NO: 17784 - protein, 9 aa, Homo sapiens
  Table A; HLA-B*55:01; TP53; R249S; 1
SPILTIITL

SEQ ID NO: 17785 - protein, 9 aa, Homo sapiens
  Table A; HLA-B*55:02; TP53; R249S; 0
SPILTIITL

SEQ ID NO: 17786 - protein, 9 aa, Homo sapiens
  Table A; HLA-B*56:01; TP53; R249S; 0
SPILTIITL

SEQ ID NO: 17787 - protein, 9 aa, Homo sapiens
  Table A; HLA-C*08:01; TP53; R249S; 0
SPILTIITL

SEQ ID NO: 17788 - protein, 8 aa, Homo sapiens
  Table A; HLA-B*39:06; SFRP4; R232Q; 0
SPIPQTQV

SEQ ID NO: 17789 - protein, 8 aa, Homo sapiens
  Table A; HLA-B*51:01; SFRP4; R232Q; 1
SPIPQTQV

SEQ ID NO: 17790 - protein, 8 aa, Homo sapiens
  Table A; HLA-B*54:01; SFRP4; R232Q; 0
SPIPQTQV

SEQ ID NO: 17791 - protein, 8 aa, Homo sapiens
  Table A; HLA-B*55:01; SFRP4; R232Q; 0
SPIPQTQV

SEQ ID NO: 17792 - protein, 8 aa, Homo sapiens
  Table A; HLA-B*55:02; SFRP4; R232Q; 0
SPIPQTQV

SEQ ID NO: 17793 - protein, 8 aa, Homo sapiens
  Table A; HLA-B*56:01; SFRP4; R232Q; 0
SPIPQTQV

SEQ ID NO: 17794 - protein, 9 aa, Homo sapiens
  Table A; HLA-B*35:03; SFRP4; R232Q; 0
SPIPQTQVP

SEQ ID NO: 17795 - protein, 9 aa, Homo sapiens
  Table A; HLA-B*39:06; SFRP4; R232Q; 0
SPIPQTQVP

SEQ ID NO: 17796 - protein, 9 aa, Homo sapiens
  Table A; HLA-B*54:01; SFRP4; R232Q; 0
SPIPQTQVP

SEQ ID NO: 17797 - protein, 9 aa, Homo sapiens
  Table A; HLA-B*55:01; SFRP4; R232Q; 0
SPIPQTQVP

SEQ ID NO: 17798 - protein, 9 aa, Homo sapiens
  Table A; HLA-B*55:02; SFRP4; R232Q; 0
SPIPQTQVP

SEQ ID NO: 17799 - protein, 9 aa, Homo sapiens
  Table A; HLA-B*56:01; SFRP4; R232Q; 0
SPIPQTQVP

SEQ ID NO: 17800 - protein, 10 aa, Homo sapiens
  Table A; HLA-B*07:02; SFRP4; R232Q; 1
SPIPQTQVPL

SEQ ID NO: 17801 - protein, 10 aa, Homo sapiens
  Table A; HLA-B*35:03; SFRP4; R232Q; 0
SPIPQTQVPL

SEQ ID NO: 17802 - protein, 10 aa, Homo sapiens
  Table A; HLA-B*35:12; SFRP4; R232Q; 0
SPIPQTQVPL

SEQ ID NO: 17803 - protein, 10 aa, Homo sapiens
  Table A; HLA-B*55:01; SFRP4; R232Q; 0
SPIPQTQVPL

SEQ ID NO: 17804 - protein, 10 aa, Homo sapiens
  Table A; HLA-B*55:02; SFRP4; R232Q; 0
SPIPQTQVPL

SEQ ID NO: 17805 - protein, 10 aa, Homo sapiens
  Table A; HLA-B*56:01; SFRP4; R232Q; 0
SPIPQTQVPL

SEQ ID NO: 17806 - protein, 11 aa, Homo sapiens
  Table A; HLA-B*55:02; SFRP4; R232Q; 0
SPIPQTQVPLI

SEQ ID NO: 17807 - protein, 9 aa, Homo sapiens
  Table A; HLA-B*55:02; TP53; P151S; 0
SPPGTRVRA

SEQ ID NO: 17808 - protein, 9 aa, Homo sapiens
  Table A; HLA-B*56:01; TP53; P151S; 0
SPPGTRVRA

SEQ ID NO: 17809 - protein, 10 aa, Homo sapiens
  Table A; HLA-B*07:02; TP53; P151S; 1
SPPGTRVRAM

SEQ ID NO: 17810 - protein, 10 aa, Homo sapiens
  Table A; HLA-C*01:02; TP53; P151S; 0
SPPGTRVRAM

SEQ ID NO: 17811 - protein, 11 aa, Homo sapiens
  Table A; HLA-B*07:02; TP53; P151S; 1
SPPGTRVRAMA

SEQ ID NO: 17812 - protein, 8 aa, Homo sapiens
  Table A; HLA-A*03:02; MAX; R60Q; 0
SQAQILDK

SEQ ID NO: 17813 - protein, 8 aa, Homo sapiens
  Table A; HLA-A*11:01; MAX; R60Q; 1
SQAQILDK

SEQ ID NO: 17814 - protein, 8 aa, Homo sapiens
  Table A; HLA-B*13:02; MAX; R60Q; 0
SQAQILDK

SEQ ID NO: 17815 - protein, 9 aa, Homo sapiens
  Table A; HLA-A*02:03; MAX; R60Q; 0
SQAQILDKA

SEQ ID NO: 17816 - protein, 9 aa, Homo sapiens
  Table A; HLA-A*02:05; MAX; R60Q; 0
SQAQILDKA

SEQ ID NO: 17817 - protein, 9 aa, Homo sapiens
  Table A; HLA-A*02:06; MAX; R60Q; 0
SQAQILDKA

SEQ ID NO: 17818 - protein, 9 aa, Homo sapiens
  Table A; HLA-A*02:08; MAX; R60Q; 0
SQAQILDKA

SEQ ID NO: 17819 - protein, 9 aa, Homo sapiens
  Table A; HLA-A*68:02; MAX; R60Q; 0
SQAQILDKA

SEQ ID NO: 17820 - protein, 9 aa, Homo sapiens
  Table A; HLA-B*13:01; MAX; R60Q; 0
SQAQILDKA

SEQ ID NO: 17821 - protein, 9 aa, Homo sapiens
  Table A; HLA-B*13:02; MAX; R60Q; 0
SQAQILDKA

SEQ ID NO: 17822 - protein, 9 aa, Homo sapiens
  Table A; HLA-B*39:06; MAX; R60Q; 0
SQAQILDKA

SEQ ID NO: 17823 - protein, 9 aa, Homo sapiens
  Table A; HLA-B*48:01; MAX; R60Q; 0
SQAQILDKA

SEQ ID NO: 17824 - protein, 9 aa, Homo sapiens
  Table A; HLA-B*50:01; MAX; R60Q; 0
SQAQILDKA

SEQ ID NO: 17825 - protein, 8 aa, Homo sapiens
  Table A; HLA-B*13:02; FBXW7; R479Q; 0
SQDATLRV

SEQ ID NO: 17826 - protein, 9 aa, Homo sapiens
  Table A; HLA-B*44:03; FBXW7; R479Q; 0
SQDATLRVW

SEQ ID NO: 17827 - protein, 9 aa, Homo sapiens
  Table A; HLA-B*57:01; FBXW7; R479Q; 0
SQDATLRVW

SEQ ID NO: 17828 - protein, 10 aa, Homo sapiens
  Table A; HLA-B*27:02; NFE2L2; R34Q; 0
SQEVFDFSQR

SEQ ID NO: 17829 - protein, 8 aa, Homo sapiens
  Table A; HLA-B*13:02; STAG2; R370Q; 0
SQFKDRIV

SEQ ID NO: 17830 - protein, 8 aa, Homo sapiens
  Table A; HLA-B*39:06; STAG2; R370Q; 0
SQFKDRIV

SEQ ID NO: 17831 - protein, 10 aa, Homo sapiens
  Table A; HLA-A*02:03; STAG2; R370Q; 0
SQFKDRIVSM

SEQ ID NO: 17832 - protein, 10 aa, Homo sapiens
  Table A; HLA-A*02:04; STAG2; R370Q; 0
SQFKDRIVSM

SEQ ID NO: 17833 - protein, 10 aa, Homo sapiens
  Table A; HLA-A*02:05; STAG2; R370Q; 0
SQFKDRIVSM

SEQ ID NO: 17834 - protein, 10 aa, Homo sapiens
  Table A; HLA-A*02:06; STAG2; R370Q; 0
SQFKDRIVSM

SEQ ID NO: 17835 - protein, 10 aa, Homo sapiens
  Table A; HLA-A*02:08; STAG2; R370Q; 0
SQFKDRIVSM

SEQ ID NO: 17836 - protein, 10 aa, Homo sapiens
  Table A; HLA-A*11:01; STAG2; R370Q; 0
SQFKDRIVSM

SEQ ID NO: 17837 - protein, 10 aa, Homo sapiens
  Table A; HLA-A*30:01; STAG2; R370Q; 0
SQFKDRIVSM

SEQ ID NO: 17838 - protein, 10 aa, Homo sapiens
  Table A; HLA-B*13:01; STAG2; R370Q; 0
SQFKDRIVSM

SEQ ID NO: 17839 - protein, 10 aa, Homo sapiens
  Table A; HLA-B*13:02; STAG2; R370Q; 0
SQFKDRIVSM

SEQ ID NO: 17840 - protein, 10 aa, Homo sapiens
  Table A; HLA-B*14:02; STAG2; R370Q; 0
SQFKDRIVSM

SEQ ID NO: 17841 - protein, 10 aa, Homo sapiens
  Table A; HLA-B*15:01; STAG2; R370Q; 0
SQFKDRIVSM

SEQ ID NO: 17842 - protein, 10 aa, Homo sapiens
  Table A; HLA-B*15:02; STAG2; R370Q; 0
SQFKDRIVSM

SEQ ID NO: 17843 - protein, 10 aa, Homo sapiens
  Table A; HLA-B*15:03; STAG2; R370Q; 0
SQFKDRIVSM

SEQ ID NO: 17844 - protein, 10 aa, Homo sapiens
  Table A; HLA-B*40:02; STAG2; R370Q; 0
SQFKDRIVSM

SEQ ID NO: 17845 - protein, 10 aa, Homo sapiens
  Table A; HLA-B*48:01; STAG2; R370Q; 0
SQFKDRIVSM

SEQ ID NO: 17846 - protein, 10 aa, Homo sapiens
  Table A; HLA-B*50:01; STAG2; R370Q; 0
SQFKDRIVSM

SEQ ID NO: 17847 - protein, 10 aa, Homo sapiens
  Table A; HLA-C*02:02; STAG2; R370Q; 0
SQFKDRIVSM

SEQ ID NO: 17848 - protein, 8 aa, Homo sapiens
  Table A; HLA-A*02:05; TP53; V173L; 0
SQHMTEVL

SEQ ID NO: 17849 - protein, 8 aa, Homo sapiens
  Table A; HLA-B*13:01; TP53; V173L; 0
SQHMTEVL

SEQ ID NO: 17850 - protein, 8 aa, Homo sapiens
  Table A; HLA-B*13:02; TP53; V173L; 0
SQHMTEVL

SEQ ID NO: 17851 - protein, 8 aa, Homo sapiens
  Table A; HLA-B*14:02; TP53; V173L; 0
SQHMTEVL

SEQ ID NO: 17852 - protein, 8 aa, Homo sapiens
  Table A; HLA-B*15:01; TP53; V173L; 0
SQHMTEVL

SEQ ID NO: 17853 - protein, 8 aa, Homo sapiens
  Table A; HLA-B*15:02; TP53; V173L; 0
SQHMTEVL

SEQ ID NO: 17854 - protein, 8 aa, Homo sapiens
  Table A; HLA-B*15:03; TP53; V173L; 0
SQHMTEVL

SEQ ID NO: 17855 - protein, 8 aa, Homo sapiens
  Table A; HLA-B*15:10; TP53; V173L; 0
SQHMTEVL

SEQ ID NO: 17856 - protein, 8 aa, Homo sapiens
  Table A; HLA-B*38:01; TP53; V173L; 0
SQHMTEVL

SEQ ID NO: 17857 - protein, 8 aa, Homo sapiens
  Table A; HLA-B*39:01; TP53; V173L; 0
SQHMTEVL

SEQ ID NO: 17858 - protein, 8 aa, Homo sapiens
  Table A; HLA-B*39:06; TP53; V173L; 0
SQHMTEVL

SEQ ID NO: 17859 - protein, 8 aa, Homo sapiens
  Table A; HLA-B*40:02; TP53; V173L; 0
SQHMTEVL

SEQ ID NO: 17860 - protein, 8 aa, Homo sapiens
  Table A; HLA-B*41:02; TP53; V173L; 0
SQHMTEVL

SEQ ID NO: 17861 - protein, 8 aa, Homo sapiens
  Table A; HLA-B*48:01; TP53; V173L; 0
SQHMTEVL

SEQ ID NO: 17862 - protein, 8 aa, Homo sapiens
  Table A; HLA-C*08:03; TP53; V173L; 0
SQHMTEVL

SEQ ID NO: 17863 - protein, 9 aa, Homo sapiens
  Table A; HLA-A*31:01; TP53; V173L; 0
SQHMTEVLR

SEQ ID NO: 17864 - protein, 9 aa, Homo sapiens
  Table A; HLA-A*68:01; TP53; V173L; 0
SQHMTEVLR

SEQ ID NO: 17865 - protein, 9 aa, Homo sapiens
  Table A; HLA-B*27:02; TP53; V173L; 0
SQHMTEVLR

SEQ ID NO: 17866 - protein, 8 aa, Homo sapiens
  Table A; HLA-B*08:01; TP53; V173M; 1
SQHMTEVM

SEQ ID NO: 17867 - protein, 8 aa, Homo sapiens
  Table A; HLA-B*13:01; TP53; V173M; 0
SQHMTEVM

SEQ ID NO: 17868 - protein, 8 aa, Homo sapiens
  Table A; HLA-B*13:02; TP53; V173M; 0
SQHMTEVM

SEQ ID NO: 17869 - protein, 8 aa, Homo sapiens
  Table A; HLA-B*14:02; TP53; V173M; 0
SQHMTEVM

SEQ ID NO: 17870 - protein, 8 aa, Homo sapiens
  Table A; HLA-B*15:01; TP53; V173M; 0
SQHMTEVM

SEQ ID NO: 17871 - protein, 8 aa, Homo sapiens
  Table A; HLA-B*15:02; TP53; V173M; 0
SQHMTEVM

SEQ ID NO: 17872 - protein, 8 aa, Homo sapiens
  Table A; HLA-B*15:03; TP53; V173M; 0
SQHMTEVM

SEQ ID NO: 17873 - protein, 8 aa, Homo sapiens
  Table A; HLA-B*15:10; TP53; V173M; 0
SQHMTEVM

SEQ ID NO: 17874 - protein, 8 aa, Homo sapiens
  Table A; HLA-B*35:01; TP53; V173M; 0
SQHMTEVM

SEQ ID NO: 17875 - protein, 8 aa, Homo sapiens
  Table A; HLA-B*35:08; TP53; V173M; 0
SQHMTEVM

SEQ ID NO: 17876 - protein, 8 aa, Homo sapiens
  Table A; HLA-B*38:01; TP53; V173M; 0
SQHMTEVM

SEQ ID NO: 17877 - protein, 8 aa, Homo sapiens
  Table A; HLA-B*39:01; TP53; V173M; 0
SQHMTEVM

SEQ ID NO: 17878 - protein, 8 aa, Homo sapiens
  Table A; HLA-B*39:06; TP53; V173M; 0
SQHMTEVM

SEQ ID NO: 17879 - protein, 8 aa, Homo sapiens
  Table A; HLA-B*40:02; TP53; V173M; 0
SQHMTEVM

SEQ ID NO: 17880 - protein, 8 aa, Homo sapiens
  Table A; HLA-B*46:01; TP53; V173M; 0
SQHMTEVM

SEQ ID NO: 17881 - protein, 8 aa, Homo sapiens
  Table A; HLA-B*48:01; TP53; V173M; 0
SQHMTEVM

SEQ ID NO: 17882 - protein, 8 aa, Homo sapiens
  Table A; HLA-C*08:01; TP53; V173M; 0
SQHMTEVM

SEQ ID NO: 17883 - protein, 8 aa, Homo sapiens
  Table A; HLA-C*08:03; TP53; V173M; 0
SQHMTEVM

SEQ ID NO: 17884 - protein, 9 aa, Homo sapiens
  Table A; HLA-A*31:01; TP53; V173M; 0
SQHMTEVMR

SEQ ID NO: 17885 - protein, 9 aa, Homo sapiens
  Table A; HLA-B*15:01; TP53; V173M; 0
SQHMTEVMR

SEQ ID NO: 17886 - protein, 9 aa, Homo sapiens
  Table A; HLA-B*27:02; TP53; V173M; 0
SQHMTEVMR

SEQ ID NO: 17887 - protein, 8 aa, Homo sapiens
  Table A; HLA-A*03:01; SF3B1; R957Q; 1
SQTAVVMK

SEQ ID NO: 17888 - protein, 8 aa, Homo sapiens
  Table A; HLA-A*03:02; SF3B1; R957Q; 0
SQTAVVMK

SEQ ID NO: 17889 - protein, 8 aa, Homo sapiens
  Table A; HLA-A*11:01; SF3B1; R957Q; 1
SQTAVVMK

SEQ ID NO: 17890 - protein, 8 aa, Homo sapiens
  Table A; HLA-B*13:02; SF3B1; R957Q; 0
SQTAVVMK

SEQ ID NO: 17891 - protein, 8 aa, Homo sapiens
  Table A; HLA-B*27:05; SF3B1; R957Q; 1
SQTAVVMK

SEQ ID NO: 17892 - protein, 8 aa, Homo sapiens
  Table A; HLA-B*39:06; SF3B1; R957Q; 0
SQTAVVMK

SEQ ID NO: 17893 - protein, 8 aa, Homo sapiens
  Table A; HLA-B*48:01; SF3B1; R957Q; 0
SQTAVVMK

SEQ ID NO: 17894 - protein, 9 aa, Homo sapiens
  Table A; HLA-A*02:01; SF3B1; R957Q; 1
SQTAVVMKT

SEQ ID NO: 17895 - protein, 9 aa, Homo sapiens
  Table A; HLA-A*02:03; SF3B1; R957Q; 0
SQTAVVMKT

SEQ ID NO: 17896 - protein, 9 aa, Homo sapiens
  Table A; HLA-A*02:04; SF3B1; R957Q; 0
SQTAVVMKT

SEQ ID NO: 17897 - protein, 9 aa, Homo sapiens
  Table A; HLA-A*02:05; SF3B1; R957Q; 0
SQTAVVMKT

SEQ ID NO: 17898 - protein, 9 aa, Homo sapiens
  Table A; HLA-A*02:06; SF3B1; R957Q; 0
SQTAVVMKT

SEQ ID NO: 17899 - protein, 9 aa, Homo sapiens
  Table A; HLA-A*02:08; SF3B1; R957Q; 0
SQTAVVMKT

SEQ ID NO: 17900 - protein, 9 aa, Homo sapiens
  Table A; HLA-A*11:01; SF3B1; R957Q; 1
SQTAVVMKT

SEQ ID NO: 17901 - protein, 9 aa, Homo sapiens
  Table A; HLA-A*30:01; SF3B1; R957Q; 0
SQTAVVMKT

SEQ ID NO: 17902 - protein, 9 aa, Homo sapiens
  Table A; HLA-A*31:01; SF3B1; R957Q; 0
SQTAVVMKT

SEQ ID NO: 17903 - protein, 9 aa, Homo sapiens
  Table A; HLA-A*68:02; SF3B1; R957Q; 0
SQTAVVMKT

SEQ ID NO: 17904 - protein, 9 aa, Homo sapiens
  Table A; HLA-B*13:01; SF3B1; R957Q; 0
SQTAVVMKT

SEQ ID NO: 17905 - protein, 9 aa, Homo sapiens
  Table A; HLA-B*13:02; SF3B1; R957Q; 0
SQTAVVMKT

SEQ ID NO: 17906 - protein, 9 aa, Homo sapiens
  Table A; HLA-B*15:01; SF3B1; R957Q; 1
SQTAVVMKT

SEQ ID NO: 17907 - protein, 9 aa, Homo sapiens
  Table A; HLA-B*15:10; SF3B1; R957Q; 0
SQTAVVMKT

SEQ ID NO: 17908 - protein, 9 aa, Homo sapiens
  Table A; HLA-B*27:05; SF3B1; R957Q; 1
SQTAVVMKT

SEQ ID NO: 17909 - protein, 9 aa, Homo sapiens
  Table A; HLA-B*38:01; SF3B1; R957Q; 0
SQTAVVMKT

SEQ ID NO: 17910 - protein, 9 aa, Homo sapiens
  Table A; HLA-B*39:01; SF3B1; R957Q; 0
SQTAVVMKT

SEQ ID NO: 17911 - protein, 9 aa, Homo sapiens
  Table A; HLA-B*39:06; SF3B1; R957Q; 0
SQTAVVMKT

SEQ ID NO: 17912 - protein, 9 aa, Homo sapiens
  Table A; HLA-B*48:01; SF3B1; R957Q; 0
SQTAVVMKT

SEQ ID NO: 17913 - protein, 9 aa, Homo sapiens
  Table A; HLA-B*50:01; SF3B1; R957Q; 0
SQTAVVMKT

SEQ ID NO: 17914 - protein, 9 aa, Homo sapiens
  Table A; HLA-C*08:01; SF3B1; R957Q; 0
SQTAVVMKT

SEQ ID NO: 17915 - protein, 9 aa, Homo sapiens
  Table A; HLA-C*08:03; SF3B1; R957Q; 0
SQTAVVMKT

SEQ ID NO: 17916 - protein, 9 aa, Homo sapiens
  Table A; HLA-C*16:02; SF3B1; R957Q; 0
SQTAVVMKT

SEQ ID NO: 17917 - protein, 10 aa, Homo sapiens
  Table A; HLA-B*27:05; CHD4; R1162W; 0
SRAHWIGQNK

SEQ ID NO: 17918 - protein, 9 aa, Homo sapiens
  Table A; HLA-B*27:05; CTNNB1; G34R; 1
SRIHSGATT

SEQ ID NO: 17919 - protein, 9 aa, Homo sapiens
  Table A; HLA-B*39:06; CTNNB1; G34R; 0
SRIHSGATT

SEQ ID NO: 17920 - protein, 10 aa, Homo sapiens
  Table A; HLA-B*27:02; CTNNB1; G34R; 0
SRIHSGATTT

SEQ ID NO: 17921 - protein, 10 aa, Homo sapiens
  Table A; HLA-B*27:05; CTNNB1; G34R; 1
SRIHSGATTT

SEQ ID NO: 17922 - protein, 11 aa, Homo sapiens
  Table A; HLA-A*02:05; CTNNB1; G34R; 0
SRIHSGATTTA

SEQ ID NO: 17923 - protein, 11 aa, Homo sapiens
  Table A; HLA-B*27:02; CTNNB1; G34R; 0
SRIHSGATTTA

SEQ ID NO: 17924 - protein, 11 aa, Homo sapiens
  Table A; HLA-B*27:05; CTNNB1; G34R; 1
SRIHSGATTTA

SEQ ID NO: 17925 - protein, 11 aa, Homo sapiens
  Table A; HLA-B*39:01; CTNNB1; G34R; 0
SRIHSGATTTA

SEQ ID NO: 17926 - protein, 11 aa, Homo sapiens
  Table A; HLA-B*39:06; CTNNB1; G34R; 0
SRIHSGATTTA

SEQ ID NO: 17927 - protein, 11 aa, Homo sapiens
  Table A; HLA-B*55:02; CTNNB1; G34R; 0
SRIHSGATTTA

SEQ ID NO: 17928 - protein, 8 aa, Homo sapiens
  Table A; HLA-B*27:02; PCBP1; L100Q; 0
SRPPVTQR

SEQ ID NO: 17929 - protein, 8 aa, Homo sapiens
  Table A; HLA-B*27:05; PCBP1; L100Q; 0
SRPPVTQR

SEQ ID NO: 17930 - protein, 8 aa, Homo sapiens
  Table A; HLA-B*39:06; PCBP1; L100Q; 0
SRPPVTQR

SEQ ID NO: 17931 - protein, 9 aa, Homo sapiens
  Table A; HLA-A*02:05; PCBP1; L100Q; 0
SRPPVTQRL

SEQ ID NO: 17932 - protein, 9 aa, Homo sapiens
  Table A; HLA-A*02:07; PCBP1; L100Q; 0
SRPPVTQRL

SEQ ID NO: 17933 - protein, 9 aa, Homo sapiens
  Table A; HLA-A*11:01; PCBP1; L100Q; 1
SRPPVTQRL

SEQ ID NO: 17934 - protein, 9 aa, Homo sapiens
  Table A; HLA-A*23:01; PCBP1; L100Q; 0
SRPPVTQRL

SEQ ID NO: 17935 - protein, 9 aa, Homo sapiens
  Table A; HLA-A*24:02; PCBP1; L100Q; 1
SRPPVTQRL

SEQ ID NO: 17936 - protein, 9 aa, Homo sapiens
  Table A; HLA-A*68:01; PCBP1; L100Q; 0
SRPPVTQRL

SEQ ID NO: 17937 - protein, 9 aa, Homo sapiens
  Table A; HLA-A*68:02; PCBP1; L100Q; 0
SRPPVTQRL

SEQ ID NO: 17938 - protein, 9 aa, Homo sapiens
  Table A; HLA-B*07:02; PCBP1; L100Q; 1
SRPPVTQRL

SEQ ID NO: 17939 - protein, 9 aa, Homo sapiens
  Table A; HLA-B*13:02; PCBP1; L100Q; 0
SRPPVTQRL

SEQ ID NO: 17940 - protein, 9 aa, Homo sapiens
  Table A; HLA-B*14:01; PCBP1; L100Q; 0
SRPPVTQRL

SEQ ID NO: 17941 - protein, 9 aa, Homo sapiens
  Table A; HLA-B*14:02; PCBP1; L100Q; 0
SRPPVTQRL

SEQ ID NO: 17942 - protein, 9 aa, Homo sapiens
  Table A; HLA-B*15:10; PCBP1; L100Q; 0
SRPPVTQRL

SEQ ID NO: 17943 - protein, 9 aa, Homo sapiens
  Table A; HLA-B*27:05; PCBP1; L100Q; 0
SRPPVTQRL

SEQ ID NO: 17944 - protein, 9 aa, Homo sapiens
  Table A; HLA-B*38:01; PCBP1; L100Q; 0
SRPPVTQRL

SEQ ID NO: 17945 - protein, 9 aa, Homo sapiens
  Table A; HLA-B*39:01; PCBP1; L100Q; 0
SRPPVTQRL

SEQ ID NO: 17946 - protein, 9 aa, Homo sapiens
  Table A; HLA-B*39:06; PCBP1; L100Q; 0
SRPPVTQRL

SEQ ID NO: 17947 - protein, 9 aa, Homo sapiens
  Table A; HLA-B*40:01; PCBP1; L100Q; 1
SRPPVTQRL

SEQ ID NO: 17948 - protein, 9 aa, Homo sapiens
  Table A; HLA-B*40:02; PCBP1; L100Q; 0
SRPPVTQRL

SEQ ID NO: 17949 - protein, 9 aa, Homo sapiens
  Table A; HLA-B*44:03; PCBP1; L100Q; 1
SRPPVTQRL

SEQ ID NO: 17950 - protein, 9 aa, Homo sapiens
  Table A; HLA-B*44:05; PCBP1; L100Q; 0
SRPPVTQRL

SEQ ID NO: 17951 - protein, 9 aa, Homo sapiens
  Table A; HLA-B*48:01; PCBP1; L100Q; 0
SRPPVTQRL

SEQ ID NO: 17952 - protein, 9 aa, Homo sapiens
  Table A; HLA-C*06:02; PCBP1; L100Q; 1
SRPPVTQRL

SEQ ID NO: 17953 - protein, 9 aa, Homo sapiens
  Table A; HLA-C*07:01; PCBP1; L100Q; 1
SRPPVTQRL

SEQ ID NO: 17954 - protein, 9 aa, Homo sapiens
  Table A; HLA-C*07:02; PCBP1; L100Q; 1
SRPPVTQRL

SEQ ID NO: 17955 - protein, 9 aa, Homo sapiens
  Table A; HLA-C*08:03; PCBP1; L100Q; 0
SRPPVTQRL

SEQ ID NO: 17956 - protein, 9 aa, Homo sapiens
  Table A; HLA-C*16:04; PCBP1; L100Q; 0
SRPPVTQRL

SEQ ID NO: 17957 - protein, 10 aa, Homo sapiens
  Table A; HLA-C*06:02; PCBP1; L100Q; 1
SRPPVTQRLV

SEQ ID NO: 17958 - protein, 10 aa, Homo sapiens
  Table A; HLA-A*68:01; TP53; R248Q; 1
SSCMGGMNQR

SEQ ID NO: 17959 - protein, 9 aa, Homo sapiens
  Table A; HLA-A*68:01; TP53; G245S; 0
SSCMGSMNR

SEQ ID NO: 17960 - protein, 9 aa, Homo sapiens
  Table A; HLA-A*11:01; TP53; G245V; 1
SSCMGVMNR

SEQ ID NO: 17961 - protein, 9 aa, Homo sapiens
  Table A; HLA-A*31:01; TP53; G245V; 0
SSCMGVMNR

SEQ ID NO: 17962 - protein, 9 aa, Homo sapiens
  Table A; HLA-A*33:03; TP53; G245V; 0
SSCMGVMNR

SEQ ID NO: 17963 - protein, 9 aa, Homo sapiens
  Table A; HLA-A*68:01; TP53; G245V; 0
SSCMGVMNR

SEQ ID NO: 17964 - protein, 9 aa, Homo sapiens
  Table A; HLA-A*33:03; TP53; G244S; 0
SSCMSGMNR

SEQ ID NO: 17965 - protein, 10 aa, Homo sapiens
  Table A; HLA-A*68:02; SMAD4; G352V; 0
SSCPIVTVDV

SEQ ID NO: 17966 - protein, 9 aa, Homo sapiens
  Table A; HLA-A*03:01; TP53; C242F; 1
SSFMGGMNR

SEQ ID NO: 17967 - protein, 9 aa, Homo sapiens
  Table A; HLA-A*03:02; TP53; C242F; 0
SSFMGGMNR

SEQ ID NO: 17968 - protein, 9 aa, Homo sapiens
  Table A; HLA-A*11:01; TP53; C242F; 1
SSFMGGMNR

SEQ ID NO: 17969 - protein, 9 aa, Homo sapiens
  Table A; HLA-A*26:03; TP53; C242F; 0
SSFMGGMNR

SEQ ID NO: 17970 - protein, 9 aa, Homo sapiens
  Table A; HLA-A*30:01; TP53; C242F; 0
SSFMGGMNR

SEQ ID NO: 17971 - protein, 9 aa, Homo sapiens
  Table A; HLA-A*31:01; TP53; C242F; 0
SSFMGGMNR

SEQ ID NO: 17972 - protein, 9 aa, Homo sapiens
  Table A; HLA-A*33:01; TP53; C242F; 0
SSFMGGMNR

SEQ ID NO: 17973 - protein, 9 aa, Homo sapiens
  Table A; HLA-A*33:03; TP53; C242F; 0
SSFMGGMNR

SEQ ID NO: 17974 - protein, 9 aa, Homo sapiens
  Table A; HLA-A*68:01; TP53; C242F; 0
SSFMGGMNR

SEQ ID NO: 17975 - protein, 9 aa, Homo sapiens
  Table A; HLA-B*27:02; TP53; C242F; 0
SSFMGGMNR

SEQ ID NO: 17976 - protein, 9 aa, Homo sapiens
  Table A; HLA-B*27:05; TP53; C242F; 0
SSFMGGMNR

SEQ ID NO: 17977 - protein, 10 aa, Homo sapiens
  Table A; HLA-A*11:01; TP53; C242F; 1
SSFMGGMNRR

SEQ ID NO: 17978 - protein, 10 aa, Homo sapiens
  Table A; HLA-A*31:01; TP53; C242F; 0
SSFMGGMNRR

SEQ ID NO: 17979 - protein, 10 aa, Homo sapiens
  Table A; HLA-A*68:01; TP53; C242F; 0
SSFMGGMNRR

SEQ ID NO: 17980 - protein, 8 aa, Homo sapiens
  Table A; HLA-A*11:01; TP53; G266E; 0
SSGNLLER

SEQ ID NO: 17981 - protein, 8 aa, Homo sapiens
  Table A; HLA-A*33:03; TP53; G266E; 0
SSGNLLER

SEQ ID NO: 17982 - protein, 8 aa, Homo sapiens
  Table A; HLA-A*68:01; TP53; G266E; 0
SSGNLLER

SEQ ID NO: 17983 - protein, 8 aa, Homo sapiens
  Table A; HLA-A*11:01; TP53; G266V; 0
SSGNLLVR

SEQ ID NO: 17984 - protein, 8 aa, Homo sapiens
  Table A; HLA-A*33:03; TP53; G266V; 0
SSGNLLVR

SEQ ID NO: 17985 - protein, 8 aa, Homo sapiens
  Table A; HLA-A*68:01; TP53; G266V; 0
SSGNLLVR

SEQ ID NO: 17986 - protein, 11 aa, Homo sapiens
  Table A; HLA-A*03:02; LIFR; E319K; 0
SSGTNVVFTTK

SEQ ID NO: 17987 - protein, 11 aa, Homo sapiens
  Table A; HLA-A*11:01; LIFR; E319K; 0
SSGTNVVFTTK

SEQ ID NO: 17988 - protein, 9 aa, Homo sapiens
  Table A; HLA-B*39:06; MB21D2; Q311E; 0
SSLMQAYEA

SEQ ID NO: 17989 - protein, 9 aa, Homo sapiens
  Table A; HLA-B*54:01; MB21D2; Q311E; 0
SSLMQAYEA

SEQ ID NO: 17990 - protein, 9 aa, Homo sapiens
  Table A; HLA-B*55:02; MB21D2; Q311E; 0
SSLMQAYEA

SEQ ID NO: 17991 - protein, 9 aa, Homo sapiens
  Table A; HLA-B*57:01; DCC; R446H; 0
SSRFVHLSW

SEQ ID NO: 17992 - protein, 10 aa, Homo sapiens
  Table A; HLA-A*68:01; TP53; N239S; 0
SSSCMGGMNR

SEQ ID NO: 17993 - protein, 10 aa, Homo sapiens
  Table A; HLA-A*68:02; SFRP4; R232Q; 0
SSSPIPQTQV

SEQ ID NO: 17994 - protein, 8 aa, Homo sapiens
  Table A; HLA-B*15:01; MAP2K1; P124S; 1
SSYIVGFY

SEQ ID NO: 17995 - protein, 8 aa, Homo sapiens
  Table A; HLA-B*15:02; MAP2K1; P124S; 0
SSYIVGFY

SEQ ID NO: 17996 - protein, 9 aa, Homo sapiens
  Table A; HLA-A*02:06; ERBB2; S310F; 0
STDVGFCTL

SEQ ID NO: 17997 - protein, 9 aa, Homo sapiens
  Table A; HLA-A*02:07; ERBB2; S310F; 0
STDVGFCTL

SEQ ID NO: 17998 - protein, 9 aa, Homo sapiens
  Table A; HLA-B*15:02; ERBB2; S310F; 0
STDVGFCTL

SEQ ID NO: 17999 - protein, 9 aa, Homo sapiens
  Table A; HLA-B*58:01; ERBB2; S310F; 0
STDVGFCTL

SEQ ID NO: 18000 - protein, 9 aa, Homo sapiens
  Table A; HLA-C*03:03; ERBB2; S310F; 1
STDVGFCTL

SEQ ID NO: 18001 - protein, 9 aa, Homo sapiens
  Table A; HLA-C*03:04; ERBB2; S310F; 1
STDVGFCTL

SEQ ID NO: 18002 - protein, 9 aa, Homo sapiens
  Table A; HLA-C*05:01; ERBB2; S310F; 1
STDVGFCTL

SEQ ID NO: 18003 - protein, 9 aa, Homo sapiens
  Table A; HLA-C*08:01; ERBB2; S310F; 0
STDVGFCTL

SEQ ID NO: 18004 - protein, 9 aa, Homo sapiens
  Table A; HLA-C*08:02; ERBB2; S310F; 1
STDVGFCTL

SEQ ID NO: 18005 - protein, 9 aa, Homo sapiens
  Table A; HLA-A*02:07; ERBB2; S310Y; 0
STDVGYCTL

SEQ ID NO: 18006 - protein, 9 aa, Homo sapiens
  Table A; HLA-B*15:02; ERBB2; S310Y; 0
STDVGYCTL

SEQ ID NO: 18007 - protein, 9 aa, Homo sapiens
  Table A; HLA-B*35:02; ERBB2; S310Y; 0
STDVGYCTL

SEQ ID NO: 18008 - protein, 9 aa, Homo sapiens
  Table A; HLA-B*35:12; ERBB2; S310Y; 0
STDVGYCTL

SEQ ID NO: 18009 - protein, 9 aa, Homo sapiens
  Table A; HLA-B*58:01; ERBB2; S310Y; 0
STDVGYCTL

SEQ ID NO: 18010 - protein, 9 aa, Homo sapiens
  Table A; HLA-C*03:04; ERBB2; S310Y; 1
STDVGYCTL

SEQ ID NO: 18011 - protein, 9 aa, Homo sapiens
  Table A; HLA-C*05:01; ERBB2; S310Y; 1
STDVGYCTL

SEQ ID NO: 18012 - protein, 9 aa, Homo sapiens
  Table A; HLA-C*08:01; ERBB2; S310Y; 0
STDVGYCTL

SEQ ID NO: 18013 - protein, 9 aa, Homo sapiens
  Table A; HLA-C*08:02; ERBB2; S310Y; 0
STDVGYCTL

SEQ ID NO: 18014 - protein, 9 aa, Homo sapiens
  Table A; HLA-B*57:01; MYCN; P44L; 1
STLPGEDIW

SEQ ID NO: 18015 - protein, 11 aa, Homo sapiens
  Table A; HLA-A*11:01; MYCN; P44L; 1
STLPGEDIWKK

SEQ ID NO: 18016 - protein, 10 aa, Homo sapiens
  Table A; HLA-A*03:01; CHST11; A159T; 1
STNLKTLNQY

SEQ ID NO: 18017 - protein, 10 aa, Homo sapiens
  Table A; HLA-A*11:01; CHST11; A159T; 1
STNLKTLNQY

SEQ ID NO: 18018 - protein, 10 aa, Homo sapiens
  Table A; HLA-A*26:01; CHST11; A159T; 0
STNLKTLNQY

SEQ ID NO: 18019 - protein, 10 aa, Homo sapiens
  Table A; HLA-A*29:02; CHST11; A159T; 0
STNLKTLNQY

SEQ ID NO: 18020 - protein, 10 aa, Homo sapiens
  Table A; HLA-A*30:02; CHST11; A159T; 0
STNLKTLNQY

SEQ ID NO: 18021 - protein, 10 aa, Homo sapiens
  Table A; HLA-A*30:04; CHST11; A159T; 0
STNLKTLNQY

SEQ ID NO: 18022 - protein, 10 aa, Homo sapiens
  Table A; HLA-B*15:01; CHST11; A159T; 1
STNLKTLNQY

SEQ ID NO: 18023 - protein, 10 aa, Homo sapiens
  Table A; HLA-B*58:01; CHST11; A159T; 0
STNLKTLNQY

SEQ ID NO: 18024 - protein, 9 aa, Homo sapiens
  Table A; HLA-A*11:01; TP53; V157F; 1
STPPPGTRF

SEQ ID NO: 18025 - protein, 9 aa, Homo sapiens
  Table A; HLA-A*25:01; TP53; V157F; 0
STPPPGTRF

SEQ ID NO: 18026 - protein, 9 aa, Homo sapiens
  Table A; HLA-A*26:01; TP53; V157F; 0
STPPPGTRF

SEQ ID NO: 18027 - protein, 9 aa, Homo sapiens
  Table A; HLA-A*26:02; TP53; V157F; 0
STPPPGTRF

SEQ ID NO: 18028 - protein, 9 aa, Homo sapiens
  Table A; HLA-A*26:03; TP53; V157F; 0
STPPPGTRF

SEQ ID NO: 18029 - protein, 9 aa, Homo sapiens
  Table A; HLA-B*07:02; TP53; V157F; 1
STPPPGTRF

SEQ ID NO: 18030 - protein, 9 aa, Homo sapiens
  Table A; HLA-B*15:01; TP53; V157F; 1
STPPPGTRF

SEQ ID NO: 18031 - protein, 9 aa, Homo sapiens
  Table A; HLA-B*15:02; TP53; V157F; 0
STPPPGTRF

SEQ ID NO: 18032 - protein, 9 aa, Homo sapiens
  Table A; HLA-B*15:13; TP53; V157F; 0
STPPPGTRF

SEQ ID NO: 18033 - protein, 9 aa, Homo sapiens
  Table A; HLA-B*35:01; TP53; V157F; 1
STPPPGTRF

SEQ ID NO: 18034 - protein, 9 aa, Homo sapiens
  Table A; HLA-B*35:08; TP53; V157F; 0
STPPPGTRF

SEQ ID NO: 18035 - protein, 9 aa, Homo sapiens
  Table A; HLA-B*39:01; TP53; V157F; 0
STPPPGTRF

SEQ ID NO: 18036 - protein, 9 aa, Homo sapiens
  Table A; HLA-B*44:03; TP53; V157F; 1
STPPPGTRF

SEQ ID NO: 18037 - protein, 9 aa, Homo sapiens
  Table A; HLA-B*44:05; TP53; V157F; 0
STPPPGTRF

SEQ ID NO: 18038 - protein, 9 aa, Homo sapiens
  Table A; HLA-B*57:01; TP53; V157F; 0
STPPPGTRF

SEQ ID NO: 18039 - protein, 9 aa, Homo sapiens
  Table A; HLA-B*58:01; TP53; V157F; 0
STPPPGTRF

SEQ ID NO: 18040 - protein, 9 aa, Homo sapiens
  Table A; HLA-C*01:02; TP53; V157F; 0
STPPPGTRF

SEQ ID NO: 18041 - protein, 9 aa, Homo sapiens
  Table A; HLA-C*02:02; TP53; V157F; 0
STPPPGTRF

SEQ ID NO: 18042 - protein, 9 aa, Homo sapiens
  Table A; HLA-C*03:04; TP53; V157F; 1
STPPPGTRF

SEQ ID NO: 18043 - protein, 10 aa, Homo sapiens
  Table A; HLA-A*11:01; TP53; V157F; 1
STPPPGTRFR

SEQ ID NO: 18044 - protein, 10 aa, Homo sapiens
  Table A; HLA-A*31:01; TP53; V157F; 0
STPPPGTRFR

SEQ ID NO: 18045 - protein, 10 aa, Homo sapiens
  Table A; HLA-A*33:03; TP53; V157F; 0
STPPPGTRFR

SEQ ID NO: 18046 - protein, 10 aa, Homo sapiens
  Table A; HLA-A*68:01; TP53; V157F; 0
STPPPGTRFR

SEQ ID NO: 18047 - protein, 11 aa, Homo sapiens
  Table A; HLA-A*68:02; TP53; R158H; 0
STPPPGTRVHA

SEQ ID NO: 18048 - protein, 11 aa, Homo sapiens
  Table A; HLA-A*68:02; TP53; A159V; 0
STPPPGTRVRV

SEQ ID NO: 18049 - protein, 9 aa, Homo sapiens
  Table A; HLA-A*02:03; SMARCA4; G1162S; 0
STRAGGLSL

SEQ ID NO: 18050 - protein, 9 aa, Homo sapiens
  Table A; HLA-A*03:01; SMARCA4; G1162S; 1
STRAGGLSL

SEQ ID NO: 18051 - protein, 9 aa, Homo sapiens
  Table A; HLA-A*25:01; SMARCA4; G1162S; 0
STRAGGLSL

SEQ ID NO: 18052 - protein, 9 aa, Homo sapiens
  Table A; HLA-A*30:01; SMARCA4; G1162S; 0
STRAGGLSL

SEQ ID NO: 18053 - protein, 9 aa, Homo sapiens
  Table A; HLA-B*07:02; SMARCA4; G1162S; 1
STRAGGLSL

SEQ ID NO: 18054 - protein, 9 aa, Homo sapiens
  Table A; HLA-B*08:01; SMARCA4; G1162S; 1
STRAGGLSL

SEQ ID NO: 18055 - protein, 9 aa, Homo sapiens
  Table A; HLA-B*13:02; SMARCA4; G1162S; 0
STRAGGLSL

SEQ ID NO: 18056 - protein, 9 aa, Homo sapiens
  Table A; HLA-B*15:01; SMARCA4; G1162S; 0
STRAGGLSL

SEQ ID NO: 18057 - protein, 9 aa, Homo sapiens
  Table A; HLA-B*15:02; SMARCA4; G1162S; 0
STRAGGLSL

SEQ ID NO: 18058 - protein, 9 aa, Homo sapiens
  Table A; HLA-B*39:01; SMARCA4; G1162S; 0
STRAGGLSL

SEQ ID NO: 18059 - protein, 9 aa, Homo sapiens
  Table A; HLA-B*46:01; SMARCA4; G1162S; 0
STRAGGLSL

SEQ ID NO: 18060 - protein, 9 aa, Homo sapiens
  Table A; HLA-B*58:01; SMARCA4; G1162S; 0
STRAGGLSL

SEQ ID NO: 18061 - protein, 9 aa, Homo sapiens
  Table A; HLA-C*01:02; SMARCA4; G1162S; 0
STRAGGLSL

SEQ ID NO: 18062 - protein, 9 aa, Homo sapiens
  Table A; HLA-C*03:02; SMARCA4; G1162S; 0
STRAGGLSL

SEQ ID NO: 18063 - protein, 9 aa, Homo sapiens
  Table A; HLA-C*03:03; SMARCA4; G1162S; 0
STRAGGLSL

SEQ ID NO: 18064 - protein, 9 aa, Homo sapiens
  Table A; HLA-C*03:04; SMARCA4; G1162S; 0
STRAGGLSL

SEQ ID NO: 18065 - protein, 9 aa, Homo sapiens
  Table A; HLA-C*15:02; SMARCA4; G1162S; 0
STRAGGLSL

SEQ ID NO: 18066 - protein, 9 aa, Homo sapiens
  Table A; HLA-C*16:01; SMARCA4; G1162S; 0
STRAGGLSL

SEQ ID NO: 18067 - protein, 11 aa, Homo sapiens
  Table A; HLA-A*30:01; SMARCA4; G1162S; 0
STRAGGLSLNL

SEQ ID NO: 18068 - protein, 11 aa, Homo sapiens
  Table A; HLA-A*31:01; SMARCA4; G1162S; 0
STRAGGLSLNL

SEQ ID NO: 18069 - protein, 11 aa, Homo sapiens
  Table A; HLA-B*54:01; PIK3CA; E545A; 0
STRDPLSEITA

SEQ ID NO: 18070 - protein, 11 aa, Homo sapiens
  Table A; HLA-A*03:01; PIK3CA; E545K; 1
STRDPLSEITK

SEQ ID NO: 18071 - protein, 11 aa, Homo sapiens
  Table A; HLA-A*03:02; PIK3CA; E545K; 0
STRDPLSEITK

SEQ ID NO: 18072 - protein, 11 aa, Homo sapiens
  Table A; HLA-A*11:01; PIK3CA; E545K; 1
STRDPLSEITK

SEQ ID NO: 18073 - protein, 11 aa, Homo sapiens
  Table A; HLA-A*30:01; PIK3CA; E545K; 1
STRDPLSEITK

SEQ ID NO: 18074 - protein, 11 aa, Homo sapiens
  Table A; HLA-A*31:01; PIK3CA; E545K; 1
STRDPLSEITK

SEQ ID NO: 18075 - protein, 11 aa, Homo sapiens
  Table A; HLA-A*33:03; PIK3CA; E545K; 0
STRDPLSEITK

SEQ ID NO: 18076 - protein, 11 aa, Homo sapiens
  Table A; HLA-A*68:01; PIK3CA; E545K; 1
STRDPLSEITK

SEQ ID NO: 18077 - protein, 8 aa, Homo sapiens
  Table A; HLA-A*03:01; PIK3CA; E542K; 1
STRDPLSK

SEQ ID NO: 18078 - protein, 8 aa, Homo sapiens
  Table A; HLA-A*03:02; PIK3CA; E542K; 0
STRDPLSK

SEQ ID NO: 18079 - protein, 8 aa, Homo sapiens
  Table A; HLA-A*11:01; PIK3CA; E542K; 1
STRDPLSK

SEQ ID NO: 18080 - protein, 9 aa, Homo sapiens
  Table A; HLA-A*02:03; PIK3CA; E542K; 0
STRDPLSKI

SEQ ID NO: 18081 - protein, 9 aa, Homo sapiens
  Table A; HLA-A*02:08; PIK3CA; E542K; 0
STRDPLSKI

SEQ ID NO: 18082 - protein, 9 aa, Homo sapiens
  Table A; HLA-A*25:01; PIK3CA; E542K; 1
STRDPLSKI

SEQ ID NO: 18083 - protein, 9 aa, Homo sapiens
  Table A; HLA-A*30:01; PIK3CA; E542K; 1
STRDPLSKI

SEQ ID NO: 18084 - protein, 9 aa, Homo sapiens
  Table A; HLA-A*68:02; PIK3CA; E542K; 1
STRDPLSKI

SEQ ID NO: 18085 - protein, 9 aa, Homo sapiens
  Table A; HLA-B*07:02; PIK3CA; E542K; 1
STRDPLSKI

SEQ ID NO: 18086 - protein, 9 aa, Homo sapiens
  Table A; HLA-B*57:01; PIK3CA; E542K; 1
STRDPLSKI

SEQ ID NO: 18087 - protein, 9 aa, Homo sapiens
  Table A; HLA-B*58:01; PIK3CA; E542K; 0
STRDPLSKI

SEQ ID NO: 18088 - protein, 11 aa, Homo sapiens
  Table A; HLA-A*31:01; PIK3CA; E542K; 1
STRDPLSKITE

SEQ ID NO: 18089 - protein, 8 aa, Homo sapiens
  Table A; HLA-C*15:02; PIK3CA; E542V; 0
STRDPLSV

SEQ ID NO: 18090 - protein, 9 aa, Homo sapiens
  Table A; HLA-A*02:03; PIK3CA; E542V; 0
STRDPLSVI

SEQ ID NO: 18091 - protein, 9 aa, Homo sapiens
  Table A; HLA-A*02:08; PIK3CA; E542V; 0
STRDPLSVI

SEQ ID NO: 18092 - protein, 9 aa, Homo sapiens
  Table A; HLA-A*25:01; PIK3CA; E542V; 0
STRDPLSVI

SEQ ID NO: 18093 - protein, 9 aa, Homo sapiens
  Table A; HLA-A*26:03; PIK3CA; E542V; 0
STRDPLSVI

SEQ ID NO: 18094 - protein, 9 aa, Homo sapiens
  Table A; HLA-A*30:01; PIK3CA; E542V; 0
STRDPLSVI

SEQ ID NO: 18095 - protein, 9 aa, Homo sapiens
  Table A; HLA-A*68:02; PIK3CA; E542V; 0
STRDPLSVI

SEQ ID NO: 18096 - protein, 9 aa, Homo sapiens
  Table A; HLA-B*07:02; PIK3CA; E542V; 1
STRDPLSVI

SEQ ID NO: 18097 - protein, 9 aa, Homo sapiens
  Table A; HLA-B*46:01; PIK3CA; E542V; 0
STRDPLSVI

SEQ ID NO: 18098 - protein, 9 aa, Homo sapiens
  Table A; HLA-B*57:01; PIK3CA; E542V; 0
STRDPLSVI

SEQ ID NO: 18099 - protein, 9 aa, Homo sapiens
  Table A; HLA-B*58:01; PIK3CA; E542V; 0
STRDPLSVI

SEQ ID NO: 18100 - protein, 9 aa, Homo sapiens
  Table A; HLA-C*02:02; PIK3CA; E542V; 0
STRDPLSVI

SEQ ID NO: 18101 - protein, 9 aa, Homo sapiens
  Table A; HLA-C*03:02; PIK3CA; E542V; 0
STRDPLSVI

SEQ ID NO: 18102 - protein, 9 aa, Homo sapiens
  Table A; HLA-C*12:03; PIK3CA; E542V; 0
STRDPLSVI

SEQ ID NO: 18103 - protein, 11 aa, Homo sapiens
  Table A; HLA-A*31:01; PIK3CA; E542V; 0
STRDPLSVITE

SEQ ID NO: 18104 - protein, 8 aa, Homo sapiens
  Table A; HLA-A*33:03; TP53; P151S; 0
STSPPGTR

SEQ ID NO: 18105 - protein, 8 aa, Homo sapiens
  Table A; HLA-C*08:03; TP53; P151S; 0
STSPPGTR

SEQ ID NO: 18106 - protein, 9 aa, Homo sapiens
  Table A; HLA-A*01:01; TP53; P151S; 1
STSPPGTRV

SEQ ID NO: 18107 - protein, 9 aa, Homo sapiens
  Table A; HLA-A*02:03; TP53; P151S; 0
STSPPGTRV

SEQ ID NO: 18108 - protein, 9 aa, Homo sapiens
  Table A; HLA-A*02:05; TP53; P151S; 0
STSPPGTRV

SEQ ID NO: 18109 - protein, 9 aa, Homo sapiens
  Table A; HLA-A*02:06; TP53; P151S; 0
STSPPGTRV

SEQ ID NO: 18110 - protein, 9 aa, Homo sapiens
  Table A; HLA-A*02:08; TP53; P151S; 0
STSPPGTRV

SEQ ID NO: 18111 - protein, 9 aa, Homo sapiens
  Table A; HLA-A*11:01; TP53; P151S; 0
STSPPGTRV

SEQ ID NO: 18112 - protein, 9 aa, Homo sapiens
  Table A; HLA-A*30:01; TP53; P151S; 0
STSPPGTRV

SEQ ID NO: 18113 - protein, 9 aa, Homo sapiens
  Table A; HLA-A*68:01; TP53; P151S; 0
STSPPGTRV

SEQ ID NO: 18114 - protein, 9 aa, Homo sapiens
  Table A; HLA-A*68:02; TP53; P151S; 0
STSPPGTRV

SEQ ID NO: 18115 - protein, 9 aa, Homo sapiens
  Table A; HLA-B*13:02; TP53; P151S; 0
STSPPGTRV

SEQ ID NO: 18116 - protein, 9 aa, Homo sapiens
  Table A; HLA-B*15:01; TP53; P151S; 1
STSPPGTRV

SEQ ID NO: 18117 - protein, 9 aa, Homo sapiens
  Table A; HLA-B*15:10; TP53; P151S; 0
STSPPGTRV

SEQ ID NO: 18118 - protein, 9 aa, Homo sapiens
  Table A; HLA-B*58:01; TP53; P151S; 0
STSPPGTRV

SEQ ID NO: 18119 - protein, 9 aa, Homo sapiens
  Table A; HLA-C*15:02; TP53; P151S; 0
STSPPGTRV

SEQ ID NO: 18120 - protein, 10 aa, Homo sapiens
  Table A; HLA-A*03:01; TP53; P151S; 1
STSPPGTRVR

SEQ ID NO: 18121 - protein, 10 aa, Homo sapiens
  Table A; HLA-A*03:02; TP53; P151S; 0
STSPPGTRVR

SEQ ID NO: 18122 - protein, 10 aa, Homo sapiens
  Table A; HLA-A*11:01; TP53; P151S; 0
STSPPGTRVR

SEQ ID NO: 18123 - protein, 10 aa, Homo sapiens
  Table A; HLA-A*26:03; TP53; P151S; 0
STSPPGTRVR

SEQ ID NO: 18124 - protein, 10 aa, Homo sapiens
  Table A; HLA-A*31:01; TP53; P151S; 0
STSPPGTRVR

SEQ ID NO: 18125 - protein, 10 aa, Homo sapiens
  Table A; HLA-A*33:03; TP53; P151S; 0
STSPPGTRVR

SEQ ID NO: 18126 - protein, 10 aa, Homo sapiens
  Table A; HLA-A*68:01; TP53; P151S; 0
STSPPGTRVR

SEQ ID NO: 18127 - protein, 10 aa, Homo sapiens
  Table A; HLA-A*68:02; TP53; P151S; 0
STSPPGTRVR

SEQ ID NO: 18128 - protein, 10 aa, Homo sapiens
  Table A; HLA-B*57:01; TP53; P151S; 0
STSPPGTRVR

SEQ ID NO: 18129 - protein, 11 aa, Homo sapiens
  Table A; HLA-A*11:01; TP53; P151S; 0
STSPPGTRVRA

SEQ ID NO: 18130 - protein, 11 aa, Homo sapiens
  Table A; HLA-A*68:02; TP53; P151S; 0
STSPPGTRVRA

SEQ ID NO: 18131 - protein, 8 aa, Homo sapiens
  Table A; HLA-A*03:01; CTCF; K365T; 1
SVEVSTLK

SEQ ID NO: 18132 - protein, 8 aa, Homo sapiens
  Table A; HLA-A*03:02; CTCF; K365T; 0
SVEVSTLK

SEQ ID NO: 18133 - protein, 8 aa, Homo sapiens
  Table A; HLA-A*11:01; CTCF; K365T; 1
SVEVSTLK

SEQ ID NO: 18134 - protein, 9 aa, Homo sapiens
  Table A; HLA-A*03:01; CTCF; K365T; 1
SVEVSTLKR

SEQ ID NO: 18135 - protein, 9 aa, Homo sapiens
  Table A; HLA-A*03:02; CTCF; K365T; 0
SVEVSTLKR

SEQ ID NO: 18136 - protein, 9 aa, Homo sapiens
  Table A; HLA-A*11:01; CTCF; K365T; 1
SVEVSTLKR

SEQ ID NO: 18137 - protein, 9 aa, Homo sapiens
  Table A; HLA-A*26:03; CTCF; K365T; 0
SVEVSTLKR

SEQ ID NO: 18138 - protein, 9 aa, Homo sapiens
  Table A; HLA-A*31:01; CTCF; K365T; 0
SVEVSTLKR

SEQ ID NO: 18139 - protein, 9 aa, Homo sapiens
  Table A; HLA-A*33:01; CTCF; K365T; 0
SVEVSTLKR

SEQ ID NO: 18140 - protein, 9 aa, Homo sapiens
  Table A; HLA-A*33:03; CTCF; K365T; 0
SVEVSTLKR

SEQ ID NO: 18141 - protein, 9 aa, Homo sapiens
  Table A; HLA-A*68:01; CTCF; K365T; 0
SVEVSTLKR

SEQ ID NO: 18142 - protein, 9 aa, Homo sapiens
  Table A; HLA-B*27:02; CTCF; K365T; 0
SVEVSTLKR

SEQ ID NO: 18143 - protein, 8 aa, Homo sapiens
  Table A; HLA-B*15:01; CTNNB1; G34V; 1
SVIHSGAT

SEQ ID NO: 18144 - protein, 8 aa, Homo sapiens
  Table A; HLA-C*08:03; CTNNB1; G34V; 0
SVIHSGAT

SEQ ID NO: 18145 - protein, 9 aa, Homo sapiens
  Table A; HLA-A*02:03; CTNNB1; G34V; 0
SVIHSGATT

SEQ ID NO: 18146 - protein, 9 aa, Homo sapiens
  Table A; HLA-A*02:05; CTNNB1; G34V; 0
SVIHSGATT

SEQ ID NO: 18147 - protein, 9 aa, Homo sapiens
  Table A; HLA-A*02:06; CTNNB1; G34V; 0
SVIHSGATT

SEQ ID NO: 18148 - protein, 9 aa, Homo sapiens
  Table A; HLA-A*02:08; CTNNB1; G34V; 0
SVIHSGATT

SEQ ID NO: 18149 - protein, 9 aa, Homo sapiens
  Table A; HLA-A*26:03; CTNNB1; G34V; 0
SVIHSGATT

SEQ ID NO: 18150 - protein, 9 aa, Homo sapiens
  Table A; HLA-A*30:01; CTNNB1; G34V; 0
SVIHSGATT

SEQ ID NO: 18151 - protein, 9 aa, Homo sapiens
  Table A; HLA-A*68:02; CTNNB1; G34V; 0
SVIHSGATT

SEQ ID NO: 18152 - protein, 9 aa, Homo sapiens
  Table A; HLA-B*07:02; CTNNB1; G34V; 1
SVIHSGATT

SEQ ID NO: 18153 - protein, 9 aa, Homo sapiens
  Table A; HLA-B*15:01; CTNNB1; G34V; 1
SVIHSGATT

SEQ ID NO: 18154 - protein, 9 aa, Homo sapiens
  Table A; HLA-B*48:01; CTNNB1; G34V; 0
SVIHSGATT

SEQ ID NO: 18155 - protein, 9 aa, Homo sapiens
  Table A; HLA-C*08:01; CTNNB1; G34V; 0
SVIHSGATT

SEQ ID NO: 18156 - protein, 10 aa, Homo sapiens
  Table A; HLA-A*02:03; CTNNB1; G34V; 0
SVIHSGATTT

SEQ ID NO: 18157 - protein, 10 aa, Homo sapiens
  Table A; HLA-A*02:05; CTNNB1; G34V; 0
SVIHSGATTT

SEQ ID NO: 18158 - protein, 10 aa, Homo sapiens
  Table A; HLA-A*02:06; CTNNB1; G34V; 0
SVIHSGATTT

SEQ ID NO: 18159 - protein, 10 aa, Homo sapiens
  Table A; HLA-A*02:08; CTNNB1; G34V; 0
SVIHSGATTT

SEQ ID NO: 18160 - protein, 10 aa, Homo sapiens
  Table A; HLA-A*11:01; CTNNB1; G34V; 1
SVIHSGATTT

SEQ ID NO: 18161 - protein, 10 aa, Homo sapiens
  Table A; HLA-A*26:03; CTNNB1; G34V; 0
SVIHSGATTT

SEQ ID NO: 18162 - protein, 10 aa, Homo sapiens
  Table A; HLA-A*31:01; CTNNB1; G34V; 0
SVIHSGATTT

SEQ ID NO: 18163 - protein, 10 aa, Homo sapiens
  Table A; HLA-A*68:01; CTNNB1; G34V; 0
SVIHSGATTT

SEQ ID NO: 18164 - protein, 10 aa, Homo sapiens
  Table A; HLA-A*68:02; CTNNB1; G34V; 0
SVIHSGATTT

SEQ ID NO: 18165 - protein, 10 aa, Homo sapiens
  Table A; HLA-B*15:01; CTNNB1; G34V; 1
SVIHSGATTT

SEQ ID NO: 18166 - protein, 10 aa, Homo sapiens
  Table A; HLA-B*48:01; CTNNB1; G34V; 0
SVIHSGATTT

SEQ ID NO: 18167 - protein, 10 aa, Homo sapiens
  Table A; HLA-C*08:03; CTNNB1; G34V; 0
SVIHSGATTT

SEQ ID NO: 18168 - protein, 11 aa, Homo sapiens
  Table A; HLA-A*02:03; CTNNB1; G34V; 0
SVIHSGATTTA

SEQ ID NO: 18169 - protein, 11 aa, Homo sapiens
  Table A; HLA-A*02:05; CTNNB1; G34V; 0
SVIHSGATTTA

SEQ ID NO: 18170 - protein, 11 aa, Homo sapiens
  Table A; HLA-A*02:06; CTNNB1; G34V; 0
SVIHSGATTTA

SEQ ID NO: 18171 - protein, 11 aa, Homo sapiens
  Table A; HLA-A*02:08; CTNNB1; G34V; 0
SVIHSGATTTA

SEQ ID NO: 18172 - protein, 11 aa, Homo sapiens
  Table A; HLA-A*11:01; CTNNB1; G34V; 1
SVIHSGATTTA

SEQ ID NO: 18173 - protein, 11 aa, Homo sapiens
  Table A; HLA-A*26:01; CTNNB1; G34V; 0
SVIHSGATTTA

SEQ ID NO: 18174 - protein, 11 aa, Homo sapiens
  Table A; HLA-A*26:03; CTNNB1; G34V; 0
SVIHSGATTTA

SEQ ID NO: 18175 - protein, 11 aa, Homo sapiens
  Table A; HLA-A*68:01; CTNNB1; G34V; 0
SVIHSGATTTA

SEQ ID NO: 18176 - protein, 11 aa, Homo sapiens
  Table A; HLA-A*68:02; CTNNB1; G34V; 0
SVIHSGATTTA

SEQ ID NO: 18177 - protein, 11 aa, Homo sapiens
  Table A; HLA-B*07:02; CTNNB1; G34V; 1
SVIHSGATTTA

SEQ ID NO: 18178 - protein, 11 aa, Homo sapiens
  Table A; HLA-B*15:01; CTNNB1; G34V; 1
SVIHSGATTTA

SEQ ID NO: 18179 - protein, 11 aa, Homo sapiens
  Table A; HLA-B*35:01; CTNNB1; G34V; 1
SVIHSGATTTA

SEQ ID NO: 18180 - protein, 11 aa, Homo sapiens
  Table A; HLA-B*39:06; CTNNB1; G34V; 0
SVIHSGATTTA

SEQ ID NO: 18181 - protein, 11 aa, Homo sapiens
  Table A; HLA-B*46:01; CTNNB1; G34V; 0
SVIHSGATTTA

SEQ ID NO: 18182 - protein, 11 aa, Homo sapiens
  Table A; HLA-B*48:01; CTNNB1; G34V; 0
SVIHSGATTTA

SEQ ID NO: 18183 - protein, 11 aa, Homo sapiens
  Table A; HLA-B*50:01; CTNNB1; G34V; 0
SVIHSGATTTA

SEQ ID NO: 18184 - protein, 11 aa, Homo sapiens
  Table A; HLA-B*54:01; CTNNB1; G34V; 0
SVIHSGATTTA

SEQ ID NO: 18185 - protein, 11 aa, Homo sapiens
  Table A; HLA-B*55:02; CTNNB1; G34V; 0
SVIHSGATTTA

SEQ ID NO: 18186 - protein, 11 aa, Homo sapiens
  Table A; HLA-B*56:01; CTNNB1; G34V; 0
SVIHSGATTTA

SEQ ID NO: 18187 - protein, 11 aa, Homo sapiens
  Table A; HLA-C*08:01; CTNNB1; G34V; 0
SVIHSGATTTA

SEQ ID NO: 18188 - protein, 11 aa, Homo sapiens
  Table A; HLA-A*02:05; PIK3CA; E542V; 0
SVITEQEKDFL

SEQ ID NO: 18189 - protein, 8 aa, Homo sapiens
  Table A; HLA-B*07:02; RAC1; A159V; 1
SVLTQRGL

SEQ ID NO: 18190 - protein, 8 aa, Homo sapiens
  Table A; HLA-B*08:01; RAC1; A159V; 1
SVLTQRGL

SEQ ID NO: 18191 - protein, 8 aa, Homo sapiens
  Table A; HLA-B*13:02; RAC1; A159V; 0
SVLTQRGL

SEQ ID NO: 18192 - protein, 8 aa, Homo sapiens
  Table A; HLA-B*15:01; RAC1; A159V; 0
SVLTQRGL

SEQ ID NO: 18193 - protein, 8 aa, Homo sapiens
  Table A; HLA-B*27:05; RAC1; A159V; 0
SVLTQRGL

SEQ ID NO: 18194 - protein, 8 aa, Homo sapiens
  Table A; HLA-B*40:02; RAC1; A159V; 0
SVLTQRGL

SEQ ID NO: 18195 - protein, 8 aa, Homo sapiens
  Table A; HLA-B*48:01; RAC1; A159V; 0
SVLTQRGL

SEQ ID NO: 18196 - protein, 9 aa, Homo sapiens
  Table A; HLA-A*03:01; RAC1; A159V; 1
SVLTQRGLK

SEQ ID NO: 18197 - protein, 9 aa, Homo sapiens
  Table A; HLA-A*03:02; RAC1; A159V; 0
SVLTQRGLK

SEQ ID NO: 18198 - protein, 9 aa, Homo sapiens
  Table A; HLA-A*11:01; RAC1; A159V; 0
SVLTQRGLK

SEQ ID NO: 18199 - protein, 9 aa, Homo sapiens
  Table A; HLA-A*31:01; RAC1; A159V; 0
SVLTQRGLK

SEQ ID NO: 18200 - protein, 10 aa, Homo sapiens
  Table A; HLA-A*31:01; RAC1; A159V; 0
SVLTQRGLKT

SEQ ID NO: 18201 - protein, 11 aa, Homo sapiens
  Table A; HLA-A*02:01; RAC1; A159V; 1
SVLTQRGLKTV

SEQ ID NO: 18202 - protein, 11 aa, Homo sapiens
  Table A; HLA-A*02:03; RAC1; A159V; 0
SVLTQRGLKTV

SEQ ID NO: 18203 - protein, 11 aa, Homo sapiens
  Table A; HLA-A*02:04; RAC1; A159V; 0
SVLTQRGLKTV

SEQ ID NO: 18204 - protein, 11 aa, Homo sapiens
  Table A; HLA-A*02:06; RAC1; A159V; 0
SVLTQRGLKTV

SEQ ID NO: 18205 - protein, 11 aa, Homo sapiens
  Table A; HLA-A*02:08; RAC1; A159V; 0
SVLTQRGLKTV

SEQ ID NO: 18206 - protein, 9 aa, Homo sapiens
  Table A; HLA-A*25:01; RGPD3; N756D; 0
SVMQELEDY

SEQ ID NO: 18207 - protein, 9 aa, Homo sapiens
  Table A; HLA-A*26:01; RGPD3; N756D; 0
SVMQELEDY

SEQ ID NO: 18208 - protein, 9 aa, Homo sapiens
  Table A; HLA-A*29:01; RGPD3; N756D; 0
SVMQELEDY

SEQ ID NO: 18209 - protein, 9 aa, Homo sapiens
  Table A; HLA-A*30:02; RGPD3; N756D; 0
SVMQELEDY

SEQ ID NO: 18210 - protein, 9 aa, Homo sapiens
  Table A; HLA-B*15:01; RGPD3; N756D; 1
SVMQELEDY

SEQ ID NO: 18211 - protein, 9 aa, Homo sapiens
  Table A; HLA-B*15:02; RGPD3; N756D; 0
SVMQELEDY

SEQ ID NO: 18212 - protein, 9 aa, Homo sapiens
  Table A; HLA-B*35:01; RGPD3; N756D; 1
SVMQELEDY

SEQ ID NO: 18213 - protein, 9 aa, Homo sapiens
  Table A; HLA-B*35:08; RGPD3; N756D; 0
SVMQELEDY

SEQ ID NO: 18214 - protein, 10 aa, Homo sapiens
  Table A; HLA-A*25:01; TP53; G262V; 0
SVNLLGRNSF

SEQ ID NO: 18215 - protein, 10 aa, Homo sapiens
  Table A; HLA-A*32:01; TP53; G262V; 0
SVNLLGRNSF

SEQ ID NO: 18216 - protein, 10 aa, Homo sapiens
  Table A; HLA-B*07:02; TP53; G262V; 1
SVNLLGRNSF

SEQ ID NO: 18217 - protein, 10 aa, Homo sapiens
  Table A; HLA-B*15:01; TP53; G262V; 0
SVNLLGRNSF

SEQ ID NO: 18218 - protein, 10 aa, Homo sapiens
  Table A; HLA-B*57:01; TP53; G262V; 0
SVNLLGRNSF

SEQ ID NO: 18219 - protein, 8 aa, Homo sapiens
  Table A; HLA-B*15:01; BRAF; G466V; 1
SVSFGTVY

SEQ ID NO: 18220 - protein, 8 aa, Homo sapiens
  Table A; HLA-B*15:02; BRAF; G466V; 0
SVSFGTVY

SEQ ID NO: 18221 - protein, 9 aa, Homo sapiens
  Table A; HLA-A*03:01; BRAF; G466V; 1
SVSFGTVYK

SEQ ID NO: 18222 - protein, 9 aa, Homo sapiens
  Table A; HLA-A*03:02; BRAF; G466V; 0
SVSFGTVYK

SEQ ID NO: 18223 - protein, 9 aa, Homo sapiens
  Table A; HLA-A*11:01; BRAF; G466V; 1
SVSFGTVYK

SEQ ID NO: 18224 - protein, 9 aa, Homo sapiens
  Table A; HLA-A*68:01; BRAF; G466V; 0
SVSFGTVYK

SEQ ID NO: 18225 - protein, 9 aa, Homo sapiens
  Table A; HLA-A*26:03; CNTNAP2; R283H; 0
SVVIEHQGR

SEQ ID NO: 18226 - protein, 9 aa, Homo sapiens
  Table A; HLA-A*31:01; CNTNAP2; R283H; 0
SVVIEHQGR

SEQ ID NO: 18227 - protein, 9 aa, Homo sapiens
  Table A; HLA-A*33:03; CNTNAP2; R283H; 0
SVVIEHQGR

SEQ ID NO: 18228 - protein, 9 aa, Homo sapiens
  Table A; HLA-A*68:01; CNTNAP2; R283H; 0
SVVIEHQGR

SEQ ID NO: 18229 - protein, 9 aa, Homo sapiens
  Table A; HLA-B*27:02; CNTNAP2; R283H; 0
SVVIEHQGR

SEQ ID NO: 18230 - protein, 8 aa, Homo sapiens
  Table A; HLA-A*23:01; TP53; R110L; 0
SYGFLLGF

SEQ ID NO: 18231 - protein, 8 aa, Homo sapiens
  Table A; HLA-C*14:02; TP53; R110L; 0
SYGFLLGF

SEQ ID NO: 18232 - protein, 9 aa, Homo sapiens
  Table A; HLA-A*02:04; TP53; R110L; 0
SYGFLLGFL

SEQ ID NO: 18233 - protein, 10 aa, Homo sapiens
  Table A; HLA-A*23:01; MAP2K1; P124S; 0
SYIVGFYGAF

SEQ ID NO: 18234 - protein, 10 aa, Homo sapiens
  Table A; HLA-A*24:02; MAP2K1; P124S; 1
SYIVGFYGAF

SEQ ID NO: 18235 - protein, 10 aa, Homo sapiens
  Table A; HLA-A*29:02; MAP2K1; P124S; 1
SYIVGFYGAF

SEQ ID NO: 18236 - protein, 10 aa, Homo sapiens
  Table A; HLA-C*14:02; MAP2K1; P124S; 0
SYIVGFYGAF

SEQ ID NO: 18237 - protein, 9 aa, Homo sapiens
  Table A; HLA-A*23:01; CTNNB1; S33F; 0
SYLDFGIHS

SEQ ID NO: 18238 - protein, 9 aa, Homo sapiens
  Table A; HLA-A*31:01; CTNNB1; S33F; 1
SYLDFGIHS

SEQ ID NO: 18239 - protein, 9 aa, Homo sapiens
  Table A; HLA-A*33:03; CTNNB1; S33F; 0
SYLDFGIHS

SEQ ID NO: 18240 - protein, 10 aa, Homo sapiens
  Table A; HLA-A*02:04; CTNNB1; S33F; 0
SYLDFGIHSG

SEQ ID NO: 18241 - protein, 10 aa, Homo sapiens
  Table A; HLA-A*11:01; CTNNB1; S33F; 1
SYLDFGIHSG

SEQ ID NO: 18242 - protein, 10 aa, Homo sapiens
  Table A; HLA-A*23:01; CTNNB1; S33F; 0
SYLDFGIHSG

SEQ ID NO: 18243 - protein, 10 aa, Homo sapiens
  Table A; HLA-A*30:01; CTNNB1; S33F; 0
SYLDFGIHSG

SEQ ID NO: 18244 - protein, 10 aa, Homo sapiens
  Table A; HLA-A*31:01; CTNNB1; S33F; 1
SYLDFGIHSG

SEQ ID NO: 18245 - protein, 10 aa, Homo sapiens
  Table A; HLA-A*33:01; CTNNB1; S33F; 0
SYLDFGIHSG

SEQ ID NO: 18246 - protein, 10 aa, Homo sapiens
  Table A; HLA-A*33:03; CTNNB1; S33F; 0
SYLDFGIHSG

SEQ ID NO: 18247 - protein, 10 aa, Homo sapiens
  Table A; HLA-A*68:02; CTNNB1; S33F; 0
SYLDFGIHSG

SEQ ID NO: 18248 - protein, 10 aa, Homo sapiens
  Table A; HLA-B*39:01; CTNNB1; S33F; 0
SYLDFGIHSG

SEQ ID NO: 18249 - protein, 10 aa, Homo sapiens
  Table A; HLA-C*14:02; CTNNB1; S33F; 0
SYLDFGIHSG

SEQ ID NO: 18250 - protein, 10 aa, Homo sapiens
  Table A; HLA-C*14:03; CTNNB1; S33F; 0
SYLDFGIHSG

SEQ ID NO: 18251 - protein, 11 aa, Homo sapiens
  Table A; HLA-A*31:01; CTNNB1; S33F; 1
SYLDFGIHSGA

SEQ ID NO: 18252 - protein, 10 aa, Homo sapiens
  Table A; HLA-A*23:01; CTNNB1; G34E; 0
SYLDSEIHSG

SEQ ID NO: 18253 - protein, 10 aa, Homo sapiens
  Table A; HLA-A*29:02; CTNNB1; G34E; 0
SYLDSEIHSG

SEQ ID NO: 18254 - protein, 10 aa, Homo sapiens
  Table A; HLA-A*31:01; CTNNB1; G34E; 0
SYLDSEIHSG

SEQ ID NO: 18255 - protein, 10 aa, Homo sapiens
  Table A; HLA-A*33:01; CTNNB1; G34E; 0
SYLDSEIHSG

SEQ ID NO: 18256 - protein, 10 aa, Homo sapiens
  Table A; HLA-A*33:03; CTNNB1; G34E; 0
SYLDSEIHSG

SEQ ID NO: 18257 - protein, 10 aa, Homo sapiens
  Table A; HLA-B*39:01; CTNNB1; G34E; 0
SYLDSEIHSG

SEQ ID NO: 18258 - protein, 10 aa, Homo sapiens
  Table A; HLA-B*48:01; CTNNB1; G34E; 0
SYLDSEIHSG

SEQ ID NO: 18259 - protein, 10 aa, Homo sapiens
  Table A; HLA-C*08:03; CTNNB1; G34E; 0
SYLDSEIHSG

SEQ ID NO: 18260 - protein, 11 aa, Homo sapiens
  Table A; HLA-A*02:01; CTNNB1; G34E; 1
SYLDSEIHSGA

SEQ ID NO: 18261 - protein, 11 aa, Homo sapiens
  Table A; HLA-A*29:02; CTNNB1; G34E; 0
SYLDSEIHSGA

SEQ ID NO: 18262 - protein, 11 aa, Homo sapiens
  Table A; HLA-A*30:01; CTNNB1; G34E; 0
SYLDSEIHSGA

SEQ ID NO: 18263 - protein, 11 aa, Homo sapiens
  Table A; HLA-A*31:01; CTNNB1; G34E; 0
SYLDSEIHSGA

SEQ ID NO: 18264 - protein, 11 aa, Homo sapiens
  Table A; HLA-A*33:01; CTNNB1; G34E; 0
SYLDSEIHSGA

SEQ ID NO: 18265 - protein, 11 aa, Homo sapiens
  Table A; HLA-A*33:03; CTNNB1; G34E; 0
SYLDSEIHSGA

SEQ ID NO: 18266 - protein, 11 aa, Homo sapiens
  Table A; HLA-B*27:02; CTNNB1; G34E; 0
SYLDSEIHSGA

SEQ ID NO: 18267 - protein, 11 aa, Homo sapiens
  Table A; HLA-B*39:01; CTNNB1; G34E; 0
SYLDSEIHSGA

SEQ ID NO: 18268 - protein, 11 aa, Homo sapiens
  Table A; HLA-B*39:06; CTNNB1; G34E; 0
SYLDSEIHSGA

SEQ ID NO: 18269 - protein, 11 aa, Homo sapiens
  Table A; HLA-B*48:01; CTNNB1; G34E; 0
SYLDSEIHSGA

SEQ ID NO: 18270 - protein, 11 aa, Homo sapiens
  Table A; HLA-C*08:03; CTNNB1; G34E; 0
SYLDSEIHSGA

SEQ ID NO: 18271 - protein, 9 aa, Homo sapiens
  Table A; HLA-A*23:01; CTNNB1; S37A; 0
SYLDSGIHA

SEQ ID NO: 18272 - protein, 9 aa, Homo sapiens
  Table A; HLA-A*30:01; CTNNB1; S37A; 0
SYLDSGIHA

SEQ ID NO: 18273 - protein, 9 aa, Homo sapiens
  Table A; HLA-A*31:01; CTNNB1; S37A; 0
SYLDSGIHA

SEQ ID NO: 18274 - protein, 9 aa, Homo sapiens
  Table A; HLA-A*33:03; CTNNB1; S37A; 0
SYLDSGIHA

SEQ ID NO: 18275 - protein, 9 aa, Homo sapiens
  Table A; HLA-B*15:02; CTNNB1; S37A; 0
SYLDSGIHA

SEQ ID NO: 18276 - protein, 9 aa, Homo sapiens
  Table A; HLA-B*15:10; CTNNB1; S37A; 0
SYLDSGIHA

SEQ ID NO: 18277 - protein, 9 aa, Homo sapiens
  Table A; HLA-B*39:01; CTNNB1; S37A; 0
SYLDSGIHA

SEQ ID NO: 18278 - protein, 9 aa, Homo sapiens
  Table A; HLA-B*39:06; CTNNB1; S37A; 0
SYLDSGIHA

SEQ ID NO: 18279 - protein, 9 aa, Homo sapiens
  Table A; HLA-B*48:01; CTNNB1; S37A; 0
SYLDSGIHA

SEQ ID NO: 18280 - protein, 9 aa, Homo sapiens
  Table A; HLA-B*54:01; CTNNB1; S37A; 0
SYLDSGIHA

SEQ ID NO: 18281 - protein, 9 aa, Homo sapiens
  Table A; HLA-C*14:02; CTNNB1; S37A; 0
SYLDSGIHA

SEQ ID NO: 18282 - protein, 9 aa, Homo sapiens
  Table A; HLA-C*14:03; CTNNB1; S37A; 0
SYLDSGIHA

SEQ ID NO: 18283 - protein, 10 aa, Homo sapiens
  Table A; HLA-A*02:01; CTNNB1; S37A; 1
SYLDSGIHAG

SEQ ID NO: 18284 - protein, 10 aa, Homo sapiens
  Table A; HLA-A*02:04; CTNNB1; S37A; 0
SYLDSGIHAG

SEQ ID NO: 18285 - protein, 10 aa, Homo sapiens
  Table A; HLA-A*02:06; CTNNB1; S37A; 0
SYLDSGIHAG

SEQ ID NO: 18286 - protein, 10 aa, Homo sapiens
  Table A; HLA-A*11:01; CTNNB1; S37A; 1
SYLDSGIHAG

SEQ ID NO: 18287 - protein, 10 aa, Homo sapiens
  Table A; HLA-A*23:01; CTNNB1; S37A; 0
SYLDSGIHAG

SEQ ID NO: 18288 - protein, 10 aa, Homo sapiens
  Table A; HLA-A*26:01; CTNNB1; S37A; 0
SYLDSGIHAG

SEQ ID NO: 18289 - protein, 10 aa, Homo sapiens
  Table A; HLA-A*29:02; CTNNB1; S37A; 0
SYLDSGIHAG

SEQ ID NO: 18290 - protein, 10 aa, Homo sapiens
  Table A; HLA-A*30:01; CTNNB1; S37A; 0
SYLDSGIHAG

SEQ ID NO: 18291 - protein, 10 aa, Homo sapiens
  Table A; HLA-A*31:01; CTNNB1; S37A; 0
SYLDSGIHAG

SEQ ID NO: 18292 - protein, 10 aa, Homo sapiens
  Table A; HLA-A*33:01; CTNNB1; S37A; 0
SYLDSGIHAG

SEQ ID NO: 18293 - protein, 10 aa, Homo sapiens
  Table A; HLA-A*33:03; CTNNB1; S37A; 0
SYLDSGIHAG

SEQ ID NO: 18294 - protein, 10 aa, Homo sapiens
  Table A; HLA-A*68:01; CTNNB1; S37A; 0
SYLDSGIHAG

SEQ ID NO: 18295 - protein, 10 aa, Homo sapiens
  Table A; HLA-A*68:02; CTNNB1; S37A; 0
SYLDSGIHAG

SEQ ID NO: 18296 - protein, 10 aa, Homo sapiens
  Table A; HLA-B*27:02; CTNNB1; S37A; 0
SYLDSGIHAG

SEQ ID NO: 18297 - protein, 10 aa, Homo sapiens
  Table A; HLA-B*27:05; CTNNB1; S37A; 0
SYLDSGIHAG

SEQ ID NO: 18298 - protein, 10 aa, Homo sapiens
  Table A; HLA-B*39:01; CTNNB1; S37A; 0
SYLDSGIHAG

SEQ ID NO: 18299 - protein, 10 aa, Homo sapiens
  Table A; HLA-B*39:06; CTNNB1; S37A; 0
SYLDSGIHAG

SEQ ID NO: 18300 - protein, 10 aa, Homo sapiens
  Table A; HLA-B*48:01; CTNNB1; S37A; 0
SYLDSGIHAG

SEQ ID NO: 18301 - protein, 10 aa, Homo sapiens
  Table A; HLA-C*14:02; CTNNB1; S37A; 0
SYLDSGIHAG

SEQ ID NO: 18302 - protein, 10 aa, Homo sapiens
  Table A; HLA-C*14:03; CTNNB1; S37A; 0
SYLDSGIHAG

SEQ ID NO: 18303 - protein, 11 aa, Homo sapiens
  Table A; HLA-A*02:01; CTNNB1; S37A; 1
SYLDSGIHAGA

SEQ ID NO: 18304 - protein, 11 aa, Homo sapiens
  Table A; HLA-A*11:01; CTNNB1; S37A; 1
SYLDSGIHAGA

SEQ ID NO: 18305 - protein, 11 aa, Homo sapiens
  Table A; HLA-A*23:01; CTNNB1; S37A; 0
SYLDSGIHAGA

SEQ ID NO: 18306 - protein, 11 aa, Homo sapiens
  Table A; HLA-A*29:02; CTNNB1; S37A; 0
SYLDSGIHAGA

SEQ ID NO: 18307 - protein, 11 aa, Homo sapiens
  Table A; HLA-A*30:01; CTNNB1; S37A; 0
SYLDSGIHAGA

SEQ ID NO: 18308 - protein, 11 aa, Homo sapiens
  Table A; HLA-A*31:01; CTNNB1; S37A; 0
SYLDSGIHAGA

SEQ ID NO: 18309 - protein, 11 aa, Homo sapiens
  Table A; HLA-A*33:01; CTNNB1; S37A; 0
SYLDSGIHAGA

SEQ ID NO: 18310 - protein, 11 aa, Homo sapiens
  Table A; HLA-A*33:03; CTNNB1; S37A; 0
SYLDSGIHAGA

SEQ ID NO: 18311 - protein, 11 aa, Homo sapiens
  Table A; HLA-B*27:02; CTNNB1; S37A; 0
SYLDSGIHAGA

SEQ ID NO: 18312 - protein, 11 aa, Homo sapiens
  Table A; HLA-B*27:05; CTNNB1; S37A; 0
SYLDSGIHAGA

SEQ ID NO: 18313 - protein, 11 aa, Homo sapiens
  Table A; HLA-B*39:01; CTNNB1; S37A; 0
SYLDSGIHAGA

SEQ ID NO: 18314 - protein, 11 aa, Homo sapiens
  Table A; HLA-B*39:06; CTNNB1; S37A; 0
SYLDSGIHAGA

SEQ ID NO: 18315 - protein, 11 aa, Homo sapiens
  Table A; HLA-B*48:01; CTNNB1; S37A; 0
SYLDSGIHAGA

SEQ ID NO: 18316 - protein, 9 aa, Homo sapiens
  Table A; HLA-A*23:01; CTNNB1; S37C; 1
SYLDSGIHC

SEQ ID NO: 18317 - protein, 9 aa, Homo sapiens
  Table A; HLA-A*33:03; CTNNB1; S37C; 0
SYLDSGIHC

SEQ ID NO: 18318 - protein, 9 aa, Homo sapiens
  Table A; HLA-B*39:01; CTNNB1; S37C; 0
SYLDSGIHC

SEQ ID NO: 18319 - protein, 9 aa, Homo sapiens
  Table A; HLA-C*14:02; CTNNB1; S37C; 0
SYLDSGIHC

SEQ ID NO: 18320 - protein, 9 aa, Homo sapiens
  Table A; HLA-C*14:03; CTNNB1; S37C; 0
SYLDSGIHC

SEQ ID NO: 18321 - protein, 10 aa, Homo sapiens
  Table A; HLA-A*02:01; CTNNB1; S37C; 1
SYLDSGIHCG

SEQ ID NO: 18322 - protein, 10 aa, Homo sapiens
  Table A; HLA-A*02:04; CTNNB1; S37C; 0
SYLDSGIHCG

SEQ ID NO: 18323 - protein, 10 aa, Homo sapiens
  Table A; HLA-A*02:06; CTNNB1; S37C; 0
SYLDSGIHCG

SEQ ID NO: 18324 - protein, 10 aa, Homo sapiens
  Table A; HLA-A*11:01; CTNNB1; S37C; 1
SYLDSGIHCG

SEQ ID NO: 18325 - protein, 10 aa, Homo sapiens
  Table A; HLA-A*23:01; CTNNB1; S37C; 1
SYLDSGIHCG

SEQ ID NO: 18326 - protein, 10 aa, Homo sapiens
  Table A; HLA-A*30:01; CTNNB1; S37C; 0
SYLDSGIHCG

SEQ ID NO: 18327 - protein, 10 aa, Homo sapiens
  Table A; HLA-A*31:01; CTNNB1; S37C; 1
SYLDSGIHCG

SEQ ID NO: 18328 - protein, 10 aa, Homo sapiens
  Table A; HLA-A*33:01; CTNNB1; S37C; 0
SYLDSGIHCG

SEQ ID NO: 18329 - protein, 10 aa, Homo sapiens
  Table A; HLA-A*33:03; CTNNB1; S37C; 0
SYLDSGIHCG

SEQ ID NO: 18330 - protein, 10 aa, Homo sapiens
  Table A; HLA-A*68:01; CTNNB1; S37C; 1
SYLDSGIHCG

SEQ ID NO: 18331 - protein, 10 aa, Homo sapiens
  Table A; HLA-A*68:02; CTNNB1; S37C; 0
SYLDSGIHCG

SEQ ID NO: 18332 - protein, 10 aa, Homo sapiens
  Table A; HLA-B*27:05; CTNNB1; S37C; 1
SYLDSGIHCG

SEQ ID NO: 18333 - protein, 10 aa, Homo sapiens
  Table A; HLA-B*39:01; CTNNB1; S37C; 0
SYLDSGIHCG

SEQ ID NO: 18334 - protein, 10 aa, Homo sapiens
  Table A; HLA-B*48:01; CTNNB1; S37C; 0
SYLDSGIHCG

SEQ ID NO: 18335 - protein, 10 aa, Homo sapiens
  Table A; HLA-C*08:03; CTNNB1; S37C; 0
SYLDSGIHCG

SEQ ID NO: 18336 - protein, 10 aa, Homo sapiens
  Table A; HLA-C*14:03; CTNNB1; S37C; 0
SYLDSGIHCG

SEQ ID NO: 18337 - protein, 11 aa, Homo sapiens
  Table A; HLA-A*02:01; CTNNB1; S37C; 1
SYLDSGIHCGA

SEQ ID NO: 18338 - protein, 11 aa, Homo sapiens
  Table A; HLA-A*31:01; CTNNB1; S37C; 1
SYLDSGIHCGA

SEQ ID NO: 18339 - protein, 11 aa, Homo sapiens
  Table A; HLA-A*33:01; CTNNB1; S37C; 0
SYLDSGIHCGA

SEQ ID NO: 18340 - protein, 11 aa, Homo sapiens
  Table A; HLA-A*33:03; CTNNB1; S37C; 0
SYLDSGIHCGA

SEQ ID NO: 18341 - protein, 11 aa, Homo sapiens
  Table A; HLA-B*27:05; CTNNB1; S37C; 1
SYLDSGIHCGA

SEQ ID NO: 18342 - protein, 11 aa, Homo sapiens
  Table A; HLA-B*48:01; CTNNB1; S37C; 0
SYLDSGIHCGA

SEQ ID NO: 18343 - protein, 9 aa, Homo sapiens
  Table A; HLA-A*02:04; CTNNB1; S37F; 0
SYLDSGIHF

SEQ ID NO: 18344 - protein, 9 aa, Homo sapiens
  Table A; HLA-A*23:01; CTNNB1; S37F; 1
SYLDSGIHF

SEQ ID NO: 18345 - protein, 9 aa, Homo sapiens
  Table A; HLA-A*24:02; CTNNB1; S37F; 1
SYLDSGIHF

SEQ ID NO: 18346 - protein, 9 aa, Homo sapiens
  Table A; HLA-A*29:02; CTNNB1; S37F; 1
SYLDSGIHF

SEQ ID NO: 18347 - protein, 9 aa, Homo sapiens
  Table A; HLA-A*30:01; CTNNB1; S37F; 0
SYLDSGIHF

SEQ ID NO: 18348 - protein, 9 aa, Homo sapiens
  Table A; HLA-A*31:01; CTNNB1; S37F; 1
SYLDSGIHF

SEQ ID NO: 18349 - protein, 9 aa, Homo sapiens
  Table A; HLA-A*33:03; CTNNB1; S37F; 0
SYLDSGIHF

SEQ ID NO: 18350 - protein, 9 aa, Homo sapiens
  Table A; HLA-B*15:01; CTNNB1; S37F; 1
SYLDSGIHF

SEQ ID NO: 18351 - protein, 9 aa, Homo sapiens
  Table A; HLA-B*15:02; CTNNB1; S37F; 0
SYLDSGIHF

SEQ ID NO: 18352 - protein, 9 aa, Homo sapiens
  Table A; HLA-B*15:03; CTNNB1; S37F; 0
SYLDSGIHF

SEQ ID NO: 18353 - protein, 9 aa, Homo sapiens
  Table A; HLA-B*35:01; CTNNB1; S37F; 1
SYLDSGIHF

SEQ ID NO: 18354 - protein, 9 aa, Homo sapiens
  Table A; HLA-B*38:01; CTNNB1; S37F; 1
SYLDSGIHF

SEQ ID NO: 18355 - protein, 9 aa, Homo sapiens
  Table A; HLA-B*39:01; CTNNB1; S37F; 0
SYLDSGIHF

SEQ ID NO: 18356 - protein, 9 aa, Homo sapiens
  Table A; HLA-B*44:05; CTNNB1; S37F; 0
SYLDSGIHF

SEQ ID NO: 18357 - protein, 9 aa, Homo sapiens
  Table A; HLA-B*48:01; CTNNB1; S37F; 0
SYLDSGIHF

SEQ ID NO: 18358 - protein, 9 aa, Homo sapiens
  Table A; HLA-C*04:01; CTNNB1; S37F; 1
SYLDSGIHF

SEQ ID NO: 18359 - protein, 9 aa, Homo sapiens
  Table A; HLA-C*07:02; CTNNB1; S37F; 1
SYLDSGIHF

SEQ ID NO: 18360 - protein, 9 aa, Homo sapiens
  Table A; HLA-C*14:02; CTNNB1; S37F; 0
SYLDSGIHF

SEQ ID NO: 18361 - protein, 9 aa, Homo sapiens
  Table A; HLA-C*14:03; CTNNB1; S37F; 0
SYLDSGIHF

SEQ ID NO: 18362 - protein, 10 aa, Homo sapiens
  Table A; HLA-A*23:01; CTNNB1; S37F; 1
SYLDSGIHFG

SEQ ID NO: 18363 - protein, 10 aa, Homo sapiens
  Table A; HLA-A*29:02; CTNNB1; S37F; 1
SYLDSGIHFG

SEQ ID NO: 18364 - protein, 10 aa, Homo sapiens
  Table A; HLA-A*31:01; CTNNB1; S37F; 1
SYLDSGIHFG

SEQ ID NO: 18365 - protein, 10 aa, Homo sapiens
  Table A; HLA-A*33:01; CTNNB1; S37F; 0
SYLDSGIHFG

SEQ ID NO: 18366 - protein, 10 aa, Homo sapiens
  Table A; HLA-A*33:03; CTNNB1; S37F; 0
SYLDSGIHFG

SEQ ID NO: 18367 - protein, 10 aa, Homo sapiens
  Table A; HLA-A*68:02; CTNNB1; S37F; 0
SYLDSGIHFG

SEQ ID NO: 18368 - protein, 11 aa, Homo sapiens
  Table A; HLA-A*02:01; CTNNB1; S37F; 1
SYLDSGIHFGA

SEQ ID NO: 18369 - protein, 11 aa, Homo sapiens
  Table A; HLA-A*23:01; CTNNB1; S37F; 1
SYLDSGIHFGA

SEQ ID NO: 18370 - protein, 11 aa, Homo sapiens
  Table A; HLA-A*29:02; CTNNB1; S37F; 1
SYLDSGIHFGA

SEQ ID NO: 18371 - protein, 11 aa, Homo sapiens
  Table A; HLA-A*30:01; CTNNB1; S37F; 0
SYLDSGIHFGA

SEQ ID NO: 18372 - protein, 11 aa, Homo sapiens
  Table A; HLA-A*31:01; CTNNB1; S37F; 1
SYLDSGIHFGA

SEQ ID NO: 18373 - protein, 11 aa, Homo sapiens
  Table A; HLA-A*33:01; CTNNB1; S37F; 0
SYLDSGIHFGA

SEQ ID NO: 18374 - protein, 11 aa, Homo sapiens
  Table A; HLA-A*33:03; CTNNB1; S37F; 0
SYLDSGIHFGA

SEQ ID NO: 18375 - protein, 11 aa, Homo sapiens
  Table A; HLA-B*48:01; CTNNB1; S37F; 0
SYLDSGIHFGA

SEQ ID NO: 18376 - protein, 9 aa, Homo sapiens
  Table A; HLA-A*31:01; CTNNB1; S37P; 0
SYLDSGIHP

SEQ ID NO: 18377 - protein, 9 aa, Homo sapiens
  Table A; HLA-A*33:01; CTNNB1; S37P; 0
SYLDSGIHP

SEQ ID NO: 18378 - protein, 9 aa, Homo sapiens
  Table A; HLA-A*33:03; CTNNB1; S37P; 0
SYLDSGIHP

SEQ ID NO: 18379 - protein, 9 aa, Homo sapiens
  Table A; HLA-C*14:02; CTNNB1; S37P; 0
SYLDSGIHP

SEQ ID NO: 18380 - protein, 10 aa, Homo sapiens
  Table A; HLA-A*02:01; CTNNB1; S37P; 1
SYLDSGIHPG

SEQ ID NO: 18381 - protein, 10 aa, Homo sapiens
  Table A; HLA-A*02:06; CTNNB1; S37P; 0
SYLDSGIHPG

SEQ ID NO: 18382 - protein, 10 aa, Homo sapiens
  Table A; HLA-A*11:01; CTNNB1; S37P; 0
SYLDSGIHPG

SEQ ID NO: 18383 - protein, 10 aa, Homo sapiens
  Table A; HLA-A*29:02; CTNNB1; S37P; 0
SYLDSGIHPG

SEQ ID NO: 18384 - protein, 10 aa, Homo sapiens
  Table A; HLA-A*30:01; CTNNB1; S37P; 0
SYLDSGIHPG

SEQ ID NO: 18385 - protein, 10 aa, Homo sapiens
  Table A; HLA-A*31:01; CTNNB1; S37P; 0
SYLDSGIHPG

SEQ ID NO: 18386 - protein, 10 aa, Homo sapiens
  Table A; HLA-A*33:01; CTNNB1; S37P; 0
SYLDSGIHPG

SEQ ID NO: 18387 - protein, 10 aa, Homo sapiens
  Table A; HLA-A*33:03; CTNNB1; S37P; 0
SYLDSGIHPG

SEQ ID NO: 18388 - protein, 10 aa, Homo sapiens
  Table A; HLA-A*68:01; CTNNB1; S37P; 0
SYLDSGIHPG

SEQ ID NO: 18389 - protein, 10 aa, Homo sapiens
  Table A; HLA-A*68:02; CTNNB1; S37P; 0
SYLDSGIHPG

SEQ ID NO: 18390 - protein, 10 aa, Homo sapiens
  Table A; HLA-B*27:02; CTNNB1; S37P; 0
SYLDSGIHPG

SEQ ID NO: 18391 - protein, 10 aa, Homo sapiens
  Table A; HLA-B*39:01; CTNNB1; S37P; 0
SYLDSGIHPG

SEQ ID NO: 18392 - protein, 10 aa, Homo sapiens
  Table A; HLA-B*48:01; CTNNB1; S37P; 0
SYLDSGIHPG

SEQ ID NO: 18393 - protein, 10 aa, Homo sapiens
  Table A; HLA-C*08:03; CTNNB1; S37P; 0
SYLDSGIHPG

SEQ ID NO: 18394 - protein, 11 aa, Homo sapiens
  Table A; HLA-A*23:01; CTNNB1; S37P; 0
SYLDSGIHPGA

SEQ ID NO: 18395 - protein, 11 aa, Homo sapiens
  Table A; HLA-A*29:02; CTNNB1; S37P; 0
SYLDSGIHPGA

SEQ ID NO: 18396 - protein, 11 aa, Homo sapiens
  Table A; HLA-A*30:01; CTNNB1; S37P; 0
SYLDSGIHPGA

SEQ ID NO: 18397 - protein, 11 aa, Homo sapiens
  Table A; HLA-A*31:01; CTNNB1; S37P; 0
SYLDSGIHPGA

SEQ ID NO: 18398 - protein, 11 aa, Homo sapiens
  Table A; HLA-A*33:01; CTNNB1; S37P; 0
SYLDSGIHPGA

SEQ ID NO: 18399 - protein, 11 aa, Homo sapiens
  Table A; HLA-A*33:03; CTNNB1; S37P; 0
SYLDSGIHPGA

SEQ ID NO: 18400 - protein, 11 aa, Homo sapiens
  Table A; HLA-B*27:05; CTNNB1; S37P; 0
SYLDSGIHPGA

SEQ ID NO: 18401 - protein, 11 aa, Homo sapiens
  Table A; HLA-B*48:01; CTNNB1; S37P; 0
SYLDSGIHPGA

SEQ ID NO: 18402 - protein, 8 aa, Homo sapiens
  Table A; HLA-C*14:02; CTNNB1; G34R; 0
SYLDSRIH

SEQ ID NO: 18403 - protein, 9 aa, Homo sapiens
  Table A; HLA-A*23:01; CTNNB1; G34R; 0
SYLDSRIHS

SEQ ID NO: 18404 - protein, 9 aa, Homo sapiens
  Table A; HLA-A*31:01; CTNNB1; G34R; 1
SYLDSRIHS

SEQ ID NO: 18405 - protein, 9 aa, Homo sapiens
  Table A; HLA-A*33:01; CTNNB1; G34R; 0
SYLDSRIHS

SEQ ID NO: 18406 - protein, 9 aa, Homo sapiens
  Table A; HLA-A*33:03; CTNNB1; G34R; 0
SYLDSRIHS

SEQ ID NO: 18407 - protein, 9 aa, Homo sapiens
  Table A; HLA-C*14:02; CTNNB1; G34R; 0
SYLDSRIHS

SEQ ID NO: 18408 - protein, 10 aa, Homo sapiens
  Table A; HLA-A*23:01; CTNNB1; G34R; 0
SYLDSRIHSG

SEQ ID NO: 18409 - protein, 10 aa, Homo sapiens
  Table A; HLA-A*24:02; CTNNB1; G34R; 1
SYLDSRIHSG

SEQ ID NO: 18410 - protein, 10 aa, Homo sapiens
  Table A; HLA-A*29:02; CTNNB1; G34R; 1
SYLDSRIHSG

SEQ ID NO: 18411 - protein, 10 aa, Homo sapiens
  Table A; HLA-A*31:01; CTNNB1; G34R; 1
SYLDSRIHSG

SEQ ID NO: 18412 - protein, 10 aa, Homo sapiens
  Table A; HLA-A*33:01; CTNNB1; G34R; 0
SYLDSRIHSG

SEQ ID NO: 18413 - protein, 10 aa, Homo sapiens
  Table A; HLA-A*33:03; CTNNB1; G34R; 0
SYLDSRIHSG

SEQ ID NO: 18414 - protein, 10 aa, Homo sapiens
  Table A; HLA-C*14:02; CTNNB1; G34R; 0
SYLDSRIHSG

SEQ ID NO: 18415 - protein, 11 aa, Homo sapiens
  Table A; HLA-A*30:01; CTNNB1; G34R; 0
SYLDSRIHSGA

SEQ ID NO: 18416 - protein, 11 aa, Homo sapiens
  Table A; HLA-A*31:01; CTNNB1; G34R; 1
SYLDSRIHSGA

SEQ ID NO: 18417 - protein, 11 aa, Homo sapiens
  Table A; HLA-A*33:03; CTNNB1; G34R; 0
SYLDSRIHSGA

SEQ ID NO: 18418 - protein, 11 aa, Homo sapiens
  Table A; HLA-C*08:03; CTNNB1; G34R; 0
SYLDSRIHSGA

SEQ ID NO: 18419 - protein, 8 aa, Homo sapiens
  Table A; HLA-A*33:03; CTNNB1; G34V; 0
SYLDSVIH

SEQ ID NO: 18420 - protein, 8 aa, Homo sapiens
  Table A; HLA-B*48:01; CTNNB1; G34V; 0
SYLDSVIH

SEQ ID NO: 18421 - protein, 8 aa, Homo sapiens
  Table A; HLA-C*08:03; CTNNB1; G34V; 0
SYLDSVIH

SEQ ID NO: 18422 - protein, 8 aa, Homo sapiens
  Table A; HLA-C*14:02; CTNNB1; G34V; 0
SYLDSVIH

SEQ ID NO: 18423 - protein, 9 aa, Homo sapiens
  Table A; HLA-A*11:01; CTNNB1; G34V; 1
SYLDSVIHS

SEQ ID NO: 18424 - protein, 9 aa, Homo sapiens
  Table A; HLA-A*23:01; CTNNB1; G34V; 0
SYLDSVIHS

SEQ ID NO: 18425 - protein, 9 aa, Homo sapiens
  Table A; HLA-A*24:02; CTNNB1; G34V; 1
SYLDSVIHS

SEQ ID NO: 18426 - protein, 9 aa, Homo sapiens
  Table A; HLA-A*31:01; CTNNB1; G34V; 0
SYLDSVIHS

SEQ ID NO: 18427 - protein, 9 aa, Homo sapiens
  Table A; HLA-A*33:01; CTNNB1; G34V; 0
SYLDSVIHS

SEQ ID NO: 18428 - protein, 9 aa, Homo sapiens
  Table A; HLA-A*33:03; CTNNB1; G34V; 0
SYLDSVIHS

SEQ ID NO: 18429 - protein, 9 aa, Homo sapiens
  Table A; HLA-B*48:01; CTNNB1; G34V; 0
SYLDSVIHS

SEQ ID NO: 18430 - protein, 9 aa, Homo sapiens
  Table A; HLA-C*14:03; CTNNB1; G34V; 0
SYLDSVIHS

SEQ ID NO: 18431 - protein, 10 aa, Homo sapiens
  Table A; HLA-A*02:01; CTNNB1; G34V; 1
SYLDSVIHSG

SEQ ID NO: 18432 - protein, 10 aa, Homo sapiens
  Table A; HLA-A*02:04; CTNNB1; G34V; 0
SYLDSVIHSG

SEQ ID NO: 18433 - protein, 10 aa, Homo sapiens
  Table A; HLA-A*11:01; CTNNB1; G34V; 1
SYLDSVIHSG

SEQ ID NO: 18434 - protein, 10 aa, Homo sapiens
  Table A; HLA-A*23:01; CTNNB1; G34V; 0
SYLDSVIHSG

SEQ ID NO: 18435 - protein, 10 aa, Homo sapiens
  Table A; HLA-A*24:02; CTNNB1; G34V; 1
SYLDSVIHSG

SEQ ID NO: 18436 - protein, 10 aa, Homo sapiens
  Table A; HLA-A*29:02; CTNNB1; G34V; 1
SYLDSVIHSG

SEQ ID NO: 18437 - protein, 10 aa, Homo sapiens
  Table A; HLA-A*30:01; CTNNB1; G34V; 0
SYLDSVIHSG

SEQ ID NO: 18438 - protein, 10 aa, Homo sapiens
  Table A; HLA-A*31:01; CTNNB1; G34V; 0
SYLDSVIHSG

SEQ ID NO: 18439 - protein, 10 aa, Homo sapiens
  Table A; HLA-A*33:01; CTNNB1; G34V; 0
SYLDSVIHSG

SEQ ID NO: 18440 - protein, 10 aa, Homo sapiens
  Table A; HLA-A*33:03; CTNNB1; G34V; 0
SYLDSVIHSG

SEQ ID NO: 18441 - protein, 10 aa, Homo sapiens
  Table A; HLA-A*68:02; CTNNB1; G34V; 0
SYLDSVIHSG

SEQ ID NO: 18442 - protein, 10 aa, Homo sapiens
  Table A; HLA-B*27:02; CTNNB1; G34V; 0
SYLDSVIHSG

SEQ ID NO: 18443 - protein, 10 aa, Homo sapiens
  Table A; HLA-B*27:05; CTNNB1; G34V; 1
SYLDSVIHSG

SEQ ID NO: 18444 - protein, 10 aa, Homo sapiens
  Table A; HLA-B*39:01; CTNNB1; G34V; 0
SYLDSVIHSG

SEQ ID NO: 18445 - protein, 10 aa, Homo sapiens
  Table A; HLA-B*48:01; CTNNB1; G34V; 0
SYLDSVIHSG

SEQ ID NO: 18446 - protein, 10 aa, Homo sapiens
  Table A; HLA-C*08:03; CTNNB1; G34V; 0
SYLDSVIHSG

SEQ ID NO: 18447 - protein, 10 aa, Homo sapiens
  Table A; HLA-C*14:02; CTNNB1; G34V; 0
SYLDSVIHSG

SEQ ID NO: 18448 - protein, 10 aa, Homo sapiens
  Table A; HLA-C*14:03; CTNNB1; G34V; 0
SYLDSVIHSG

SEQ ID NO: 18449 - protein, 11 aa, Homo sapiens
  Table A; HLA-A*02:01; CTNNB1; G34V; 1
SYLDSVIHSGA

SEQ ID NO: 18450 - protein, 11 aa, Homo sapiens
  Table A; HLA-A*30:01; CTNNB1; G34V; 0
SYLDSVIHSGA

SEQ ID NO: 18451 - protein, 11 aa, Homo sapiens
  Table A; HLA-A*31:01; CTNNB1; G34V; 0
SYLDSVIHSGA

SEQ ID NO: 18452 - protein, 11 aa, Homo sapiens
  Table A; HLA-A*33:03; CTNNB1; G34V; 0
SYLDSVIHSGA

SEQ ID NO: 18453 - protein, 11 aa, Homo sapiens
  Table A; HLA-B*39:06; CTNNB1; G34V; 0
SYLDSVIHSGA

SEQ ID NO: 18454 - protein, 11 aa, Homo sapiens
  Table A; HLA-B*48:01; CTNNB1; G34V; 0
SYLDSVIHSGA

SEQ ID NO: 18455 - protein, 11 aa, Homo sapiens
  Table A; HLA-B*54:01; CTNNB1; G34V; 0
SYLDSVIHSGA

SEQ ID NO: 18456 - protein, 11 aa, Homo sapiens
  Table A; HLA-C*08:03; CTNNB1; G34V; 0
SYLDSVIHSGA

SEQ ID NO: 18457 - protein, 9 aa, Homo sapiens
  Table A; HLA-A*23:01; CTNNB1; S33Y; 0
SYLDYGIHS

SEQ ID NO: 18458 - protein, 9 aa, Homo sapiens
  Table A; HLA-A*31:01; CTNNB1; S33Y; 0
SYLDYGIHS

SEQ ID NO: 18459 - protein, 9 aa, Homo sapiens
  Table A; HLA-A*33:03; CTNNB1; S33Y; 0
SYLDYGIHS

SEQ ID NO: 18460 - protein, 10 aa, Homo sapiens
  Table A; HLA-A*02:01; CTNNB1; S33Y; 1
SYLDYGIHSG

SEQ ID NO: 18461 - protein, 10 aa, Homo sapiens
  Table A; HLA-A*02:04; CTNNB1; S33Y; 0
SYLDYGIHSG

SEQ ID NO: 18462 - protein, 10 aa, Homo sapiens
  Table A; HLA-A*11:01; CTNNB1; S33Y; 1
SYLDYGIHSG

SEQ ID NO: 18463 - protein, 10 aa, Homo sapiens
  Table A; HLA-A*23:01; CTNNB1; S33Y; 0
SYLDYGIHSG

SEQ ID NO: 18464 - protein, 10 aa, Homo sapiens
  Table A; HLA-A*31:01; CTNNB1; S33Y; 0
SYLDYGIHSG

SEQ ID NO: 18465 - protein, 10 aa, Homo sapiens
  Table A; HLA-A*33:01; CTNNB1; S33Y; 0
SYLDYGIHSG

SEQ ID NO: 18466 - protein, 10 aa, Homo sapiens
  Table A; HLA-A*33:03; CTNNB1; S33Y; 0
SYLDYGIHSG

SEQ ID NO: 18467 - protein, 10 aa, Homo sapiens
  Table A; HLA-B*39:01; CTNNB1; S33Y; 0
SYLDYGIHSG

SEQ ID NO: 18468 - protein, 10 aa, Homo sapiens
  Table A; HLA-C*08:03; CTNNB1; S33Y; 0
SYLDYGIHSG

SEQ ID NO: 18469 - protein, 10 aa, Homo sapiens
  Table A; HLA-C*14:03; CTNNB1; S33Y; 0
SYLDYGIHSG

SEQ ID NO: 18470 - protein, 11 aa, Homo sapiens
  Table A; HLA-A*29:02; CTNNB1; S33Y; 1
SYLDYGIHSGA

SEQ ID NO: 18471 - protein, 11 aa, Homo sapiens
  Table A; HLA-A*31:01; CTNNB1; S33Y; 0
SYLDYGIHSGA

SEQ ID NO: 18472 - protein, 11 aa, Homo sapiens
  Table A; HLA-A*33:01; CTNNB1; S33Y; 0
SYLDYGIHSGA

SEQ ID NO: 18473 - protein, 11 aa, Homo sapiens
  Table A; HLA-A*33:03; CTNNB1; S33Y; 0
SYLDYGIHSGA

SEQ ID NO: 18474 - protein, 11 aa, Homo sapiens
  Table A; HLA-B*48:01; CTNNB1; S33Y; 0
SYLDYGIHSGA

SEQ ID NO: 18475 - protein, 9 aa, Homo sapiens
  Table A; HLA-A*02:04; ERBB2; V842I; 0
SYLEDVRLI

SEQ ID NO: 18476 - protein, 9 aa, Homo sapiens
  Table A; HLA-A*23:01; ERBB2; V842I; 0
SYLEDVRLI

SEQ ID NO: 18477 - protein, 9 aa, Homo sapiens
  Table A; HLA-A*24:02; ERBB2; V842I; 1
SYLEDVRLI

SEQ ID NO: 18478 - protein, 9 aa, Homo sapiens
  Table A; HLA-B*44:05; ERBB2; V842I; 0
SYLEDVRLI

SEQ ID NO: 18479 - protein, 9 aa, Homo sapiens
  Table A; HLA-B*50:01; ERBB2; V842I; 0
SYLEDVRLI

SEQ ID NO: 18480 - protein, 9 aa, Homo sapiens
  Table A; HLA-B*57:01; ERBB2; V842I; 0
SYLEDVRLI

SEQ ID NO: 18481 - protein, 9 aa, Homo sapiens
  Table A; HLA-C*06:02; ERBB2; V842I; 1
SYLEDVRLI

SEQ ID NO: 18482 - protein, 9 aa, Homo sapiens
  Table A; HLA-C*14:02; ERBB2; V842I; 0
SYLEDVRLI

SEQ ID NO: 18483 - protein, 9 aa, Homo sapiens
  Table A; HLA-C*14:03; ERBB2; V842I; 0
SYLEDVRLI

SEQ ID NO: 18484 - protein, 11 aa, Homo sapiens
  Table A; HLA-A*31:01; ERBB2; V842I; 0
SYLEDVRLIHR

SEQ ID NO: 18485 - protein, 11 aa, Homo sapiens
  Table A; HLA-A*33:01; ERBB2; V842I; 0
SYLEDVRLIHR

SEQ ID NO: 18486 - protein, 11 aa, Homo sapiens
  Table A; HLA-A*33:03; ERBB2; V842I; 0
SYLEDVRLIHR

SEQ ID NO: 18487 - protein, 9 aa, Homo sapiens
  Table A; HLA-A*31:01; CTNNB1; D32H; 0
SYLHSGIHS

SEQ ID NO: 18488 - protein, 9 aa, Homo sapiens
  Table A; HLA-A*33:03; CTNNB1; D32H; 0
SYLHSGIHS

SEQ ID NO: 18489 - protein, 10 aa, Homo sapiens
  Table A; HLA-A*02:01; CTNNB1; D32H; 1
SYLHSGIHSG

SEQ ID NO: 18490 - protein, 10 aa, Homo sapiens
  Table A; HLA-A*31:01; CTNNB1; D32H; 0
SYLHSGIHSG

SEQ ID NO: 18491 - protein, 10 aa, Homo sapiens
  Table A; HLA-A*33:01; CTNNB1; D32H; 0
SYLHSGIHSG

SEQ ID NO: 18492 - protein, 10 aa, Homo sapiens
  Table A; HLA-A*33:03; CTNNB1; D32H; 0
SYLHSGIHSG

SEQ ID NO: 18493 - protein, 11 aa, Homo sapiens
  Table A; HLA-A*31:01; CTNNB1; D32H; 0
SYLHSGIHSGA

SEQ ID NO: 18494 - protein, 11 aa, Homo sapiens
  Table A; HLA-A*33:03; CTNNB1; D32H; 0
SYLHSGIHSGA

SEQ ID NO: 18495 - protein, 9 aa, Homo sapiens
  Table A; HLA-A*23:01; CTNNB1; D32N; 0
SYLNSGIHS

SEQ ID NO: 18496 - protein, 9 aa, Homo sapiens
  Table A; HLA-A*31:01; CTNNB1; D32N; 1
SYLNSGIHS

SEQ ID NO: 18497 - protein, 9 aa, Homo sapiens
  Table A; HLA-A*33:03; CTNNB1; D32N; 0
SYLNSGIHS

SEQ ID NO: 18498 - protein, 9 aa, Homo sapiens
  Table A; HLA-C*14:02; CTNNB1; D32N; 0
SYLNSGIHS

SEQ ID NO: 18499 - protein, 10 aa, Homo sapiens
  Table A; HLA-A*11:01; CTNNB1; D32N; 1
SYLNSGIHSG

SEQ ID NO: 18500 - protein, 10 aa, Homo sapiens
  Table A; HLA-A*23:01; CTNNB1; D32N; 0
SYLNSGIHSG

SEQ ID NO: 18501 - protein, 10 aa, Homo sapiens
  Table A; HLA-A*29:02; CTNNB1; D32N; 1
SYLNSGIHSG

SEQ ID NO: 18502 - protein, 10 aa, Homo sapiens
  Table A; HLA-A*30:01; CTNNB1; D32N; 0
SYLNSGIHSG

SEQ ID NO: 18503 - protein, 10 aa, Homo sapiens
  Table A; HLA-A*31:01; CTNNB1; D32N; 1
SYLNSGIHSG

SEQ ID NO: 18504 - protein, 10 aa, Homo sapiens
  Table A; HLA-A*33:01; CTNNB1; D32N; 0
SYLNSGIHSG

SEQ ID NO: 18505 - protein, 10 aa, Homo sapiens
  Table A; HLA-A*33:03; CTNNB1; D32N; 0
SYLNSGIHSG

SEQ ID NO: 18506 - protein, 10 aa, Homo sapiens
  Table A; HLA-B*39:01; CTNNB1; D32N; 0
SYLNSGIHSG

SEQ ID NO: 18507 - protein, 10 aa, Homo sapiens
  Table A; HLA-B*48:01; CTNNB1; D32N; 0
SYLNSGIHSG

SEQ ID NO: 18508 - protein, 11 aa, Homo sapiens
  Table A; HLA-A*30:01; CTNNB1; D32N; 0
SYLNSGIHSGA

SEQ ID NO: 18509 - protein, 11 aa, Homo sapiens
  Table A; HLA-A*31:01; CTNNB1; D32N; 1
SYLNSGIHSGA

SEQ ID NO: 18510 - protein, 11 aa, Homo sapiens
  Table A; HLA-A*33:03; CTNNB1; D32N; 0
SYLNSGIHSGA

SEQ ID NO: 18511 - protein, 11 aa, Homo sapiens
  Table A; HLA-B*48:01; CTNNB1; D32N; 0
SYLNSGIHSGA

SEQ ID NO: 18512 - protein, 8 aa, Homo sapiens
  Table A; HLA-A*23:01; EP300; D1399N; 0
SYLNSVHF

SEQ ID NO: 18513 - protein, 8 aa, Homo sapiens
  Table A; HLA-A*24:02; EP300; D1399N; 1
SYLNSVHF

SEQ ID NO: 18514 - protein, 8 aa, Homo sapiens
  Table A; HLA-C*14:02; EP300; D1399N; 0
SYLNSVHF

SEQ ID NO: 18515 - protein, 8 aa, Homo sapiens
  Table A; HLA-C*14:03; EP300; D1399N; 0
SYLNSVHF

SEQ ID NO: 18516 - protein, 9 aa, Homo sapiens
  Table A; HLA-A*02:04; EP300; D1399N; 0
SYLNSVHFF

SEQ ID NO: 18517 - protein, 9 aa, Homo sapiens
  Table A; HLA-A*23:01; EP300; D1399N; 0
SYLNSVHFF

SEQ ID NO: 18518 - protein, 9 aa, Homo sapiens
  Table A; HLA-A*24:02; EP300; D1399N; 1
SYLNSVHFF

SEQ ID NO: 18519 - protein, 9 aa, Homo sapiens
  Table A; HLA-A*29:02; EP300; D1399N; 1
SYLNSVHFF

SEQ ID NO: 18520 - protein, 9 aa, Homo sapiens
  Table A; HLA-C*07:02; EP300; D1399N; 1
SYLNSVHFF

SEQ ID NO: 18521 - protein, 9 aa, Homo sapiens
  Table A; HLA-C*14:02; EP300; D1399N; 0
SYLNSVHFF

SEQ ID NO: 18522 - protein, 9 aa, Homo sapiens
  Table A; HLA-C*14:03; EP300; D1399N; 0
SYLNSVHFF

SEQ ID NO: 18523 - protein, 10 aa, Homo sapiens
  Table A; HLA-A*31:01; EP300; D1399N; 1
SYLNSVHFFR

SEQ ID NO: 18524 - protein, 9 aa, Homo sapiens
  Table A; HLA-A*31:01; CTNNB1; D32V; 1
SYLVSGIHS

SEQ ID NO: 18525 - protein, 9 aa, Homo sapiens
  Table A; HLA-A*33:03; CTNNB1; D32V; 0
SYLVSGIHS

SEQ ID NO: 18526 - protein, 9 aa, Homo sapiens
  Table A; HLA-C*14:02; CTNNB1; D32V; 0
SYLVSGIHS

SEQ ID NO: 18527 - protein, 10 aa, Homo sapiens
  Table A; HLA-A*02:01; CTNNB1; D32V; 1
SYLVSGIHSG

SEQ ID NO: 18528 - protein, 10 aa, Homo sapiens
  Table A; HLA-A*31:01; CTNNB1; D32V; 1
SYLVSGIHSG

SEQ ID NO: 18529 - protein, 10 aa, Homo sapiens
  Table A; HLA-A*33:01; CTNNB1; D32V; 0
SYLVSGIHSG

SEQ ID NO: 18530 - protein, 10 aa, Homo sapiens
  Table A; HLA-A*33:03; CTNNB1; D32V; 0
SYLVSGIHSG

SEQ ID NO: 18531 - protein, 10 aa, Homo sapiens
  Table A; HLA-B*39:01; CTNNB1; D32V; 0
SYLVSGIHSG

SEQ ID NO: 18532 - protein, 10 aa, Homo sapiens
  Table A; HLA-B*39:06; CTNNB1; D32V; 0
SYLVSGIHSG

SEQ ID NO: 18533 - protein, 10 aa, Homo sapiens
  Table A; HLA-B*48:01; CTNNB1; D32V; 0
SYLVSGIHSG

SEQ ID NO: 18534 - protein, 11 aa, Homo sapiens
  Table A; HLA-A*30:01; CTNNB1; D32V; 0
SYLVSGIHSGA

SEQ ID NO: 18535 - protein, 11 aa, Homo sapiens
  Table A; HLA-A*31:01; CTNNB1; D32V; 1
SYLVSGIHSGA

SEQ ID NO: 18536 - protein, 11 aa, Homo sapiens
  Table A; HLA-A*33:01; CTNNB1; D32V; 0
SYLVSGIHSGA

SEQ ID NO: 18537 - protein, 11 aa, Homo sapiens
  Table A; HLA-A*33:03; CTNNB1; D32V; 0
SYLVSGIHSGA

SEQ ID NO: 18538 - protein, 11 aa, Homo sapiens
  Table A; HLA-B*48:01; CTNNB1; D32V; 0
SYLVSGIHSGA

SEQ ID NO: 18539 - protein, 9 aa, Homo sapiens
  Table A; HLA-A*31:01; CTNNB1; D32Y; 0
SYLYSGIHS

SEQ ID NO: 18540 - protein, 9 aa, Homo sapiens
  Table A; HLA-A*33:03; CTNNB1; D32Y; 0
SYLYSGIHS

SEQ ID NO: 18541 - protein, 10 aa, Homo sapiens
  Table A; HLA-A*31:01; CTNNB1; D32Y; 0
SYLYSGIHSG

SEQ ID NO: 18542 - protein, 10 aa, Homo sapiens
  Table A; HLA-A*33:03; CTNNB1; D32Y; 0
SYLYSGIHSG

SEQ ID NO: 18543 - protein, 11 aa, Homo sapiens
  Table A; HLA-A*30:01; CTNNB1; D32Y; 0
SYLYSGIHSGA

SEQ ID NO: 18544 - protein, 11 aa, Homo sapiens
  Table A; HLA-A*31:01; CTNNB1; D32Y; 0
SYLYSGIHSGA

SEQ ID NO: 18545 - protein, 11 aa, Homo sapiens
  Table A; HLA-A*33:01; CTNNB1; D32Y; 0
SYLYSGIHSGA

SEQ ID NO: 18546 - protein, 11 aa, Homo sapiens
  Table A; HLA-A*33:03; CTNNB1; D32Y; 0
SYLYSGIHSGA

SEQ ID NO: 18547 - protein, 8 aa, Homo sapiens
  Table A; HLA-A*23:01; RAC1; P29L; 0
SYTTNAFL

SEQ ID NO: 18548 - protein, 8 aa, Homo sapiens
  Table A; HLA-A*24:02; RAC1; P29L; 1
SYTTNAFL

SEQ ID NO: 18549 - protein, 8 aa, Homo sapiens
  Table A; HLA-C*14:02; RAC1; P29L; 0
SYTTNAFL

SEQ ID NO: 18550 - protein, 8 aa, Homo sapiens
  Table A; HLA-C*14:03; RAC1; P29L; 0
SYTTNAFL

SEQ ID NO: 18551 - protein, 11 aa, Homo sapiens
  Table A; HLA-A*29:02; RAC1; P29L; 0
SYTTNAFLGEY

SEQ ID NO: 18552 - protein, 11 aa, Homo sapiens
  Table A; HLA-A*29:01; RAC1; P29S; 0
SYTTNAFSGEY

SEQ ID NO: 18553 - protein, 11 aa, Homo sapiens
  Table A; HLA-A*29:02; RAC1; P29S; 1
SYTTNAFSGEY

SEQ ID NO: 18554 - protein, 10 aa, Homo sapiens
  Table A; HLA-A*31:01; PCBP1; L100Q; 0
TAASRPPVTQ

SEQ ID NO: 18555 - protein, 10 aa, Homo sapiens
  Table A; HLA-A*33:01; PCBP1; L100Q; 0
TAASRPPVTQ

SEQ ID NO: 18556 - protein, 10 aa, Homo sapiens
  Table A; HLA-A*33:03; PCBP1; L100Q; 0
TAASRPPVTQ

SEQ ID NO: 18557 - protein, 10 aa, Homo sapiens
  Table A; HLA-A*68:01; PCBP1; L100Q; 0
TAASRPPVTQ

SEQ ID NO: 18558 - protein, 10 aa, Homo sapiens
  Table A; HLA-A*68:02; PCBP1; L100Q; 0
TAASRPPVTQ

SEQ ID NO: 18559 - protein, 10 aa, Homo sapiens
  Table A; HLA-B*07:02; PCBP1; L100Q; 1
TAASRPPVTQ

SEQ ID NO: 18560 - protein, 10 aa, Homo sapiens
  Table A; HLA-B*08:01; PCBP1; L100Q; 1
TAASRPPVTQ

SEQ ID NO: 18561 - protein, 10 aa, Homo sapiens
  Table A; HLA-B*27:05; PCBP1; L100Q; 0
TAASRPPVTQ

SEQ ID NO: 18562 - protein, 10 aa, Homo sapiens
  Table A; HLA-B*54:01; PCBP1; L100Q; 0
TAASRPPVTQ

SEQ ID NO: 18563 - protein, 10 aa, Homo sapiens
  Table A; HLA-C*08:03; PCBP1; L100Q; 0
TAASRPPVTQ

SEQ ID NO: 18564 - protein, 11 aa, Homo sapiens
  Table A; HLA-A*03:01; PCBP1; L100Q; 1
TAASRPPVTQR

SEQ ID NO: 18565 - protein, 11 aa, Homo sapiens
  Table A; HLA-A*03:02; PCBP1; L100Q; 0
TAASRPPVTQR

SEQ ID NO: 18566 - protein, 11 aa, Homo sapiens
  Table A; HLA-A*11:01; PCBP1; L100Q; 1
TAASRPPVTQR

SEQ ID NO: 18567 - protein, 11 aa, Homo sapiens
  Table A; HLA-A*26:03; PCBP1; L100Q; 0
TAASRPPVTQR

SEQ ID NO: 18568 - protein, 11 aa, Homo sapiens
  Table A; HLA-A*31:01; PCBP1; L100Q; 0
TAASRPPVTQR

SEQ ID NO: 18569 - protein, 11 aa, Homo sapiens
  Table A; HLA-A*33:01; PCBP1; L100Q; 0
TAASRPPVTQR

SEQ ID NO: 18570 - protein, 11 aa, Homo sapiens
  Table A; HLA-A*33:03; PCBP1; L100Q; 0
TAASRPPVTQR

SEQ ID NO: 18571 - protein, 11 aa, Homo sapiens
  Table A; HLA-A*68:01; PCBP1; L100Q; 0
TAASRPPVTQR

SEQ ID NO: 18572 - protein, 11 aa, Homo sapiens
  Table A; HLA-A*68:02; PCBP1; L100Q; 0
TAASRPPVTQR

SEQ ID NO: 18573 - protein, 11 aa, Homo sapiens
  Table A; HLA-B*35:01; PCBP1; L100Q; 1
TAASRPPVTQR

SEQ ID NO: 18574 - protein, 11 aa, Homo sapiens
  Table A; HLA-C*03:02; PCBP1; L100Q; 0
TAASRPPVTQR

SEQ ID NO: 18575 - protein, 10 aa, Homo sapiens
  Table A; HLA-B*35:03; CSMD3; R1529H; 0
TACHDPGVPM

SEQ ID NO: 18576 - protein, 9 aa, Homo sapiens
  Table A; HLA-B*35:02; KRAS; Q61H; 0
TAGHEEYSA

SEQ ID NO: 18577 - protein, 9 aa, Homo sapiens
  Table A; HLA-B*54:01; KRAS; Q61H; 0
TAGHEEYSA

SEQ ID NO: 18578 - protein, 9 aa, Homo sapiens
  Table A; HLA-B*35:02; NRAS; Q61H; 0
TAGHEEYSA

SEQ ID NO: 18579 - protein, 9 aa, Homo sapiens
  Table A; HLA-B*35:03; NRAS; Q61H; 0
TAGHEEYSA

SEQ ID NO: 18580 - protein, 9 aa, Homo sapiens
  Table A; HLA-B*54:01; NRAS; Q61H; 0
TAGHEEYSA

SEQ ID NO: 18581 - protein, 10 aa, Homo sapiens
  Table A; HLA-B*35:01; KRAS; Q61H; 1
TAGHEEYSAM

SEQ ID NO: 18582 - protein, 10 aa, Homo sapiens
  Table A; HLA-B*35:03; KRAS; Q61H; 1
TAGHEEYSAM

SEQ ID NO: 18583 - protein, 10 aa, Homo sapiens
  Table A; HLA-B*35:08; KRAS; Q61H; 0
TAGHEEYSAM

SEQ ID NO: 18584 - protein, 10 aa, Homo sapiens
  Table A; HLA-B*35:01; NRAS; Q61H; 1
TAGHEEYSAM

SEQ ID NO: 18585 - protein, 10 aa, Homo sapiens
  Table A; HLA-B*35:03; NRAS; Q61H; 0
TAGHEEYSAM

SEQ ID NO: 18586 - protein, 10 aa, Homo sapiens
  Table A; HLA-B*35:08; NRAS; Q61H; 0
TAGHEEYSAM

SEQ ID NO: 18587 - protein, 9 aa, Homo sapiens
  Table A; HLA-B*35:02; HRAS; Q61K; 0
TAGKEEYSA

SEQ ID NO: 18588 - protein, 9 aa, Homo sapiens
  Table A; HLA-B*54:01; HRAS; Q61K; 0
TAGKEEYSA

SEQ ID NO: 18589 - protein, 9 aa, Homo sapiens
  Table A; HLA-B*35:02; NRAS; Q61K; 1
TAGKEEYSA

SEQ ID NO: 18590 - protein, 9 aa, Homo sapiens
  Table A; HLA-B*35:12; NRAS; Q61K; 0
TAGKEEYSA

SEQ ID NO: 18591 - protein, 9 aa, Homo sapiens
  Table A; HLA-B*54:01; NRAS; Q61K; 0
TAGKEEYSA

SEQ ID NO: 18592 - protein, 10 aa, Homo sapiens
  Table A; HLA-B*35:01; HRAS; Q61K; 0
TAGKEEYSAM

SEQ ID NO: 18593 - protein, 10 aa, Homo sapiens
  Table A; HLA-B*35:02; HRAS; Q61K; 0
TAGKEEYSAM

SEQ ID NO: 18594 - protein, 10 aa, Homo sapiens
  Table A; HLA-B*35:03; HRAS; Q61K; 0
TAGKEEYSAM

SEQ ID NO: 18595 - protein, 10 aa, Homo sapiens
  Table A; HLA-B*35:08; HRAS; Q61K; 0
TAGKEEYSAM

SEQ ID NO: 18596 - protein, 10 aa, Homo sapiens
  Table A; HLA-B*35:12; HRAS; Q61K; 0
TAGKEEYSAM

SEQ ID NO: 18597 - protein, 10 aa, Homo sapiens
  Table A; HLA-B*35:01; NRAS; Q61K; 1
TAGKEEYSAM

SEQ ID NO: 18598 - protein, 10 aa, Homo sapiens
  Table A; HLA-B*35:02; NRAS; Q61K; 1
TAGKEEYSAM

SEQ ID NO: 18599 - protein, 10 aa, Homo sapiens
  Table A; HLA-B*35:03; NRAS; Q61K; 1
TAGKEEYSAM

SEQ ID NO: 18600 - protein, 10 aa, Homo sapiens
  Table A; HLA-B*35:08; NRAS; Q61K; 0
TAGKEEYSAM

SEQ ID NO: 18601 - protein, 10 aa, Homo sapiens
  Table A; HLA-B*35:12; NRAS; Q61K; 0
TAGKEEYSAM

SEQ ID NO: 18602 - protein, 9 aa, Homo sapiens
  Table A; HLA-B*35:02; KRAS; Q61L; 0
TAGLEEYSA

SEQ ID NO: 18603 - protein, 9 aa, Homo sapiens
  Table A; HLA-B*35:03; KRAS; Q61L; 0
TAGLEEYSA

SEQ ID NO: 18604 - protein, 9 aa, Homo sapiens
  Table A; HLA-B*35:12; KRAS; Q61L; 0
TAGLEEYSA

SEQ ID NO: 18605 - protein, 9 aa, Homo sapiens
  Table A; HLA-B*54:01; KRAS; Q61L; 0
TAGLEEYSA

SEQ ID NO: 18606 - protein, 9 aa, Homo sapiens
  Table A; HLA-B*35:02; NRAS; Q61L; 0
TAGLEEYSA

SEQ ID NO: 18607 - protein, 9 aa, Homo sapiens
  Table A; HLA-B*35:03; NRAS; Q61L; 0
TAGLEEYSA

SEQ ID NO: 18608 - protein, 9 aa, Homo sapiens
  Table A; HLA-B*35:12; NRAS; Q61L; 0
TAGLEEYSA

SEQ ID NO: 18609 - protein, 9 aa, Homo sapiens
  Table A; HLA-B*54:01; NRAS; Q61L; 0
TAGLEEYSA

SEQ ID NO: 18610 - protein, 10 aa, Homo sapiens
  Table A; HLA-B*35:01; KRAS; Q61L; 0
TAGLEEYSAM

SEQ ID NO: 18611 - protein, 10 aa, Homo sapiens
  Table A; HLA-B*35:03; KRAS; Q61L; 0
TAGLEEYSAM

SEQ ID NO: 18612 - protein, 10 aa, Homo sapiens
  Table A; HLA-B*35:08; KRAS; Q61L; 0
TAGLEEYSAM

SEQ ID NO: 18613 - protein, 10 aa, Homo sapiens
  Table A; HLA-B*35:01; NRAS; Q61L; 1
TAGLEEYSAM

SEQ ID NO: 18614 - protein, 10 aa, Homo sapiens
  Table A; HLA-B*35:03; NRAS; Q61L; 0
TAGLEEYSAM

SEQ ID NO: 18615 - protein, 10 aa, Homo sapiens
  Table A; HLA-B*35:08; NRAS; Q61L; 0
TAGLEEYSAM

SEQ ID NO: 18616 - protein, 10 aa, Homo sapiens
  Table A; HLA-B*35:12; NRAS; Q61L; 0
TAGLEEYSAM

SEQ ID NO: 18617 - protein, 9 aa, Homo sapiens
  Table A; HLA-B*54:01; KRAS; Q61R; 0
TAGREEYSA

SEQ ID NO: 18618 - protein, 9 aa, Homo sapiens
  Table A; HLA-B*54:01; NRAS; Q61R; 0
TAGREEYSA

SEQ ID NO: 18619 - protein, 10 aa, Homo sapiens
  Table A; HLA-B*35:01; KRAS; Q61R; 0
TAGREEYSAM

SEQ ID NO: 18620 - protein, 10 aa, Homo sapiens
  Table A; HLA-B*35:02; KRAS; Q61R; 0
TAGREEYSAM

SEQ ID NO: 18621 - protein, 10 aa, Homo sapiens
  Table A; HLA-B*35:03; KRAS; Q61R; 0
TAGREEYSAM

SEQ ID NO: 18622 - protein, 10 aa, Homo sapiens
  Table A; HLA-B*35:08; KRAS; Q61R; 0
TAGREEYSAM

SEQ ID NO: 18623 - protein, 10 aa, Homo sapiens
  Table A; HLA-B*35:12; KRAS; Q61R; 0
TAGREEYSAM

SEQ ID NO: 18624 - protein, 10 aa, Homo sapiens
  Table A; HLA-B*35:01; NRAS; Q61R; 1
TAGREEYSAM

SEQ ID NO: 18625 - protein, 10 aa, Homo sapiens
  Table A; HLA-B*35:02; NRAS; Q61R; 1
TAGREEYSAM

SEQ ID NO: 18626 - protein, 10 aa, Homo sapiens
  Table A; HLA-B*35:03; NRAS; Q61R; 1
TAGREEYSAM

SEQ ID NO: 18627 - protein, 10 aa, Homo sapiens
  Table A; HLA-B*35:08; NRAS; Q61R; 0
TAGREEYSAM

SEQ ID NO: 18628 - protein, 10 aa, Homo sapiens
  Table A; HLA-B*35:12; NRAS; Q61R; 0
TAGREEYSAM

SEQ ID NO: 18629 - protein, 10 aa, Homo sapiens
  Table A; HLA-A*31:01; TP53; S127F; 0
TAKSVTCTYF

SEQ ID NO: 18630 - protein, 10 aa, Homo sapiens
  Table A; HLA-B*57:01; TP53; S127F; 0
TAKSVTCTYF

SEQ ID NO: 18631 - protein, 10 aa, Homo sapiens
  Table A; HLA-C*02:02; TP53; S127F; 0
TAKSVTCTYF

SEQ ID NO: 18632 - protein, 8 aa, Homo sapiens
  Table A; HLA-A*11:01; CTNNB1; S45F; 1
TAPFLSGK

SEQ ID NO: 18633 - protein, 8 aa, Homo sapiens
  Table A; HLA-B*51:01; CTNNB1; S45F; 1
TAPFLSGK

SEQ ID NO: 18634 - protein, 8 aa, Homo sapiens
  Table A; HLA-A*03:02; CTNNB1; S45P; 0
TAPPLSGK

SEQ ID NO: 18635 - protein, 8 aa, Homo sapiens
  Table A; HLA-A*11:01; CTNNB1; S45P; 1
TAPPLSGK

SEQ ID NO: 18636 - protein, 8 aa, Homo sapiens
  Table A; HLA-A*68:01; CTNNB1; S45P; 1
TAPPLSGK

SEQ ID NO: 18637 - protein, 8 aa, Homo sapiens
  Table A; HLA-B*51:01; CTNNB1; S45P; 1
TAPPLSGK

SEQ ID NO: 18638 - protein, 9 aa, Homo sapiens
  Table A; HLA-B*57:01; PIK3CA; E545A; 0
TAQEKDFLW

SEQ ID NO: 18639 - protein, 9 aa, Homo sapiens
  Table A; HLA-B*58:01; PIK3CA; E545A; 0
TAQEKDFLW

SEQ ID NO: 18640 - protein, 9 aa, Homo sapiens
  Table A; HLA-B*35:03; FGFR2; Y375C; 0
TASPDCLEI

SEQ ID NO: 18641 - protein, 9 aa, Homo sapiens
  Table A; HLA-A*30:01; CTNNB1; T41A; 1
TATAPSLSG

SEQ ID NO: 18642 - protein, 9 aa, Homo sapiens
  Table A; HLA-A*33:03; CTNNB1; T41A; 0
TATAPSLSG

SEQ ID NO: 18643 - protein, 9 aa, Homo sapiens
  Table A; HLA-A*68:01; CTNNB1; T41A; 1
TATAPSLSG

SEQ ID NO: 18644 - protein, 9 aa, Homo sapiens
  Table A; HLA-B*07:02; CTNNB1; T41A; 1
TATAPSLSG

SEQ ID NO: 18645 - protein, 9 aa, Homo sapiens
  Table A; HLA-B*35:01; CTNNB1; T41A; 1
TATAPSLSG

SEQ ID NO: 18646 - protein, 9 aa, Homo sapiens
  Table A; HLA-B*39:01; CTNNB1; T41A; 1
TATAPSLSG

SEQ ID NO: 18647 - protein, 9 aa, Homo sapiens
  Table A; HLA-B*54:01; CTNNB1; T41A; 0
TATAPSLSG

SEQ ID NO: 18648 - protein, 9 aa, Homo sapiens
  Table A; HLA-B*55:02; CTNNB1; T41A; 0
TATAPSLSG

SEQ ID NO: 18649 - protein, 9 aa, Homo sapiens
  Table A; HLA-B*56:01; CTNNB1; T41A; 0
TATAPSLSG

SEQ ID NO: 18650 - protein, 9 aa, Homo sapiens
  Table A; HLA-B*58:01; CTNNB1; T41A; 0
TATAPSLSG

SEQ ID NO: 18651 - protein, 9 aa, Homo sapiens
  Table A; HLA-C*08:01; CTNNB1; T41A; 0
TATAPSLSG

SEQ ID NO: 18652 - protein, 10 aa, Homo sapiens
  Table A; HLA-A*03:01; CTNNB1; T41A; 1
TATAPSLSGK

SEQ ID NO: 18653 - protein, 10 aa, Homo sapiens
  Table A; HLA-A*03:02; CTNNB1; T41A; 0
TATAPSLSGK

SEQ ID NO: 18654 - protein, 10 aa, Homo sapiens
  Table A; HLA-A*11:01; CTNNB1; T41A; 1
TATAPSLSGK

SEQ ID NO: 18655 - protein, 10 aa, Homo sapiens
  Table A; HLA-A*26:03; CTNNB1; T41A; 0
TATAPSLSGK

SEQ ID NO: 18656 - protein, 10 aa, Homo sapiens
  Table A; HLA-A*33:03; CTNNB1; T41A; 0
TATAPSLSGK

SEQ ID NO: 18657 - protein, 10 aa, Homo sapiens
  Table A; HLA-A*68:01; CTNNB1; T41A; 1
TATAPSLSGK

SEQ ID NO: 18658 - protein, 10 aa, Homo sapiens
  Table A; HLA-A*68:02; CTNNB1; T41A; 0
TATAPSLSGK

SEQ ID NO: 18659 - protein, 10 aa, Homo sapiens
  Table A; HLA-B*27:02; CTNNB1; T41A; 0
TATAPSLSGK

SEQ ID NO: 18660 - protein, 11 aa, Homo sapiens
  Table A; HLA-A*68:01; CTNNB1; T41A; 1
TATAPSLSGKG

SEQ ID NO: 18661 - protein, 10 aa, Homo sapiens
  Table A; HLA-A*03:02; TP53; L130F; 0
TCTYSPAFNK

SEQ ID NO: 18662 - protein, 10 aa, Homo sapiens
  Table A; HLA-A*11:01; TP53; L130F; 0
TCTYSPAFNK

SEQ ID NO: 18663 - protein, 10 aa, Homo sapiens
  Table A; HLA-A*33:03; TP53; K132R; 0
TCTYSPALNR

SEQ ID NO: 18664 - protein, 10 aa, Homo sapiens
  Table A; HLA-A*68:01; TP53; K132R; 0
TCTYSPALNR

SEQ ID NO: 18665 - protein, 9 aa, Homo sapiens
  Table A; HLA-B*18:01; EGFR; L861Q; 0
TDFGLAKQL

SEQ ID NO: 18666 - protein, 9 aa, Homo sapiens
  Table A; HLA-B*37:01; EGFR; L861Q; 0
TDFGLAKQL

SEQ ID NO: 18667 - protein, 9 aa, Homo sapiens
  Table A; HLA-B*40:01; EGFR; L861Q; 1
TDFGLAKQL

SEQ ID NO: 18668 - protein, 9 aa, Homo sapiens
  Table A; HLA-B*40:02; EGFR; L861Q; 0
TDFGLAKQL

SEQ ID NO: 18669 - protein, 9 aa, Homo sapiens
  Table A; HLA-B*41:02; EGFR; L861Q; 0
TDFGLAKQL

SEQ ID NO: 18670 - protein, 9 aa, Homo sapiens
  Table A; HLA-B*44:02; EGFR; L861Q; 1
TDFGLAKQL

SEQ ID NO: 18671 - protein, 9 aa, Homo sapiens
  Table A; HLA-B*44:03; EGFR; L861Q; 0
TDFGLAKQL

SEQ ID NO: 18672 - protein, 9 aa, Homo sapiens
  Table A; HLA-B*44:05; EGFR; L861Q; 0
TDFGLAKQL

SEQ ID NO: 18673 - protein, 10 aa, Homo sapiens
  Table A; HLA-C*08:03; EGFR; L861Q; 0
TDFGLAKQLG

SEQ ID NO: 18674 - protein, 8 aa, Homo sapiens
  Table A; HLA-B*40:02; EGFR; L858R; 0
TDFGRAKL

SEQ ID NO: 18675 - protein, 8 aa, Homo sapiens
  Table A; HLA-B*41:02; EGFR; L858R; 0
TDFGRAKL

SEQ ID NO: 18676 - protein, 9 aa, Homo sapiens
  Table A; HLA-B*37:01; EGFR; L858R; 0
TDFGRAKLL

SEQ ID NO: 18677 - protein, 9 aa, Homo sapiens
  Table A; HLA-C*03:02; PTPRB; R529Q; 0
TDLVPGQKY

SEQ ID NO: 18678 - protein, 9 aa, Homo sapiens
  Table A; HLA-B*44:02; PIK3CA; E545D; 1
TDQEKDFLW

SEQ ID NO: 18679 - protein, 9 aa, Homo sapiens
  Table A; HLA-B*44:03; PIK3CA; E545D; 0
TDQEKDFLW

SEQ ID NO: 18680 - protein, 8 aa, Homo sapiens
  Table A; HLA-B*40:02; ERBB2; S310F; 0
TDVGFCTL

SEQ ID NO: 18681 - protein, 8 aa, Homo sapiens
  Table A; HLA-B*41:02; ERBB2; S310F; 0
TDVGFCTL

SEQ ID NO: 18682 - protein, 8 aa, Homo sapiens
  Table A; HLA-B*40:02; ERBB2; S310Y; 0
TDVGYCTL

SEQ ID NO: 18683 - protein, 9 aa, Homo sapiens
  Table A; HLA-B*15:01; ARHGAP5; V474A; 1
TEADSKEAY

SEQ ID NO: 18684 - protein, 9 aa, Homo sapiens
  Table A; HLA-B*15:02; ARHGAP5; V474A; 0
TEADSKEAY

SEQ ID NO: 18685 - protein, 9 aa, Homo sapiens
  Table A; HLA-B*18:01; ARHGAP5; V474A; 1
TEADSKEAY

SEQ ID NO: 18686 - protein, 9 aa, Homo sapiens
  Table A; HLA-B*35:01; ARHGAP5; V474A; 1
TEADSKEAY

SEQ ID NO: 18687 - protein, 9 aa, Homo sapiens
  Table A; HLA-B*41:02; ARHGAP5; V474A; 0
TEADSKEAY

SEQ ID NO: 18688 - protein, 9 aa, Homo sapiens
  Table A; HLA-B*44:02; ARHGAP5; V474A; 1
TEADSKEAY

SEQ ID NO: 18689 - protein, 9 aa, Homo sapiens
  Table A; HLA-B*44:03; ARHGAP5; V474A; 1
TEADSKEAY

SEQ ID NO: 18690 - protein, 9 aa, Homo sapiens
  Table A; HLA-B*44:05; ARHGAP5; V474A; 0
TEADSKEAY

SEQ ID NO: 18691 - protein, 9 aa, Homo sapiens
  Table A; HLA-B*58:01; ARHGAP5; V474A; 0
TEADSKEAY

SEQ ID NO: 18692 - protein, 9 aa, Homo sapiens
  Table A; HLA-C*03:02; ARHGAP5; V474A; 0
TEADSKEAY

SEQ ID NO: 18693 - protein, 9 aa, Homo sapiens
  Table A; HLA-C*08:01; ARHGAP5; V474A; 0
TEADSKEAY

SEQ ID NO: 18694 - protein, 9 aa, Homo sapiens
  Table A; HLA-C*16:04; ARHGAP5; V474A; 0
TEADSKEAY

SEQ ID NO: 18695 - protein, 10 aa, Homo sapiens
  Table A; HLA-B*49:01; TNC; L1626I; 0
TEAEPEVDNI

SEQ ID NO: 18696 - protein, 11 aa, Homo sapiens
  Table A; HLA-A*30:01; TNC; L1626I; 0
TEAEPEVDNIL

SEQ ID NO: 18697 - protein, 11 aa, Homo sapiens
  Table A; HLA-B*40:01; TNC; L1626I; 1
TEAEPEVDNIL

SEQ ID NO: 18698 - protein, 11 aa, Homo sapiens
  Table A; HLA-B*40:02; TNC; L1626I; 0
TEAEPEVDNIL

SEQ ID NO: 18699 - protein, 11 aa, Homo sapiens
  Table A; HLA-B*41:02; TNC; L1626I; 0
TEAEPEVDNIL

SEQ ID NO: 18700 - protein, 11 aa, Homo sapiens
  Table A; HLA-B*44:05; TNC; L1626I; 0
TEAEPEVDNIL

SEQ ID NO: 18701 - protein, 9 aa, Homo sapiens
  Table A; HLA-B*50:01; KNSTRN; S24F; 0
TECDFHPLP

SEQ ID NO: 18702 - protein, 8 aa, Homo sapiens
  Table A; HLA-B*08:01; PIK3CA; Q546K; 1
TEKEKDFL

SEQ ID NO: 18703 - protein, 8 aa, Homo sapiens
  Table A; HLA-B*41:02; PIK3CA; Q546K; 0
TEKEKDFL

SEQ ID NO: 18704 - protein, 9 aa, Homo sapiens
  Table A; HLA-A*23:01; PIK3CA; Q546K; 0
TEKEKDFLW

SEQ ID NO: 18705 - protein, 9 aa, Homo sapiens
  Table A; HLA-B*44:02; PIK3CA; Q546K; 1
TEKEKDFLW

SEQ ID NO: 18706 - protein, 9 aa, Homo sapiens
  Table A; HLA-B*44:03; PIK3CA; Q546K; 1
TEKEKDFLW

SEQ ID NO: 18707 - protein, 9 aa, Homo sapiens
  Table A; HLA-B*57:01; PIK3CA; Q546K; 0
TEKEKDFLW

SEQ ID NO: 18708 - protein, 8 aa, Homo sapiens
  Table A; HLA-B*18:01; CHD4; R975H; 1
TELIVHVE

SEQ ID NO: 18709 - protein, 9 aa, Homo sapiens
  Table A; HLA-A*23:01; CHD4; R975H; 0
TELIVHVEL

SEQ ID NO: 18710 - protein, 9 aa, Homo sapiens
  Table A; HLA-A*30:01; CHD4; R975H; 0
TELIVHVEL

SEQ ID NO: 18711 - protein, 9 aa, Homo sapiens
  Table A; HLA-B*07:02; CHD4; R975H; 1
TELIVHVEL

SEQ ID NO: 18712 - protein, 9 aa, Homo sapiens
  Table A; HLA-B*08:01; CHD4; R975H; 1
TELIVHVEL

SEQ ID NO: 18713 - protein, 9 aa, Homo sapiens
  Table A; HLA-B*14:02; CHD4; R975H; 0
TELIVHVEL

SEQ ID NO: 18714 - protein, 9 aa, Homo sapiens
  Table A; HLA-B*15:01; CHD4; R975H; 1
TELIVHVEL

SEQ ID NO: 18715 - protein, 9 aa, Homo sapiens
  Table A; HLA-B*18:01; CHD4; R975H; 1
TELIVHVEL

SEQ ID NO: 18716 - protein, 9 aa, Homo sapiens
  Table A; HLA-B*35:01; CHD4; R975H; 1
TELIVHVEL

SEQ ID NO: 18717 - protein, 9 aa, Homo sapiens
  Table A; HLA-B*35:03; CHD4; R975H; 0
TELIVHVEL

SEQ ID NO: 18718 - protein, 9 aa, Homo sapiens
  Table A; HLA-B*37:01; CHD4; R975H; 0
TELIVHVEL

SEQ ID NO: 18719 - protein, 9 aa, Homo sapiens
  Table A; HLA-B*38:01; CHD4; R975H; 0
TELIVHVEL

SEQ ID NO: 18720 - protein, 9 aa, Homo sapiens
  Table A; HLA-B*39:01; CHD4; R975H; 0
TELIVHVEL

SEQ ID NO: 18721 - protein, 9 aa, Homo sapiens
  Table A; HLA-B*40:01; CHD4; R975H; 1
TELIVHVEL

SEQ ID NO: 18722 - protein, 9 aa, Homo sapiens
  Table A; HLA-B*40:02; CHD4; R975H; 0
TELIVHVEL

SEQ ID NO: 18723 - protein, 9 aa, Homo sapiens
  Table A; HLA-B*41:02; CHD4; R975H; 0
TELIVHVEL

SEQ ID NO: 18724 - protein, 9 aa, Homo sapiens
  Table A; HLA-B*44:02; CHD4; R975H; 1
TELIVHVEL

SEQ ID NO: 18725 - protein, 9 aa, Homo sapiens
  Table A; HLA-B*44:03; CHD4; R975H; 1
TELIVHVEL

SEQ ID NO: 18726 - protein, 9 aa, Homo sapiens
  Table A; HLA-B*44:05; CHD4; R975H; 0
TELIVHVEL

SEQ ID NO: 18727 - protein, 9 aa, Homo sapiens
  Table A; HLA-B*48:01; CHD4; R975H; 0
TELIVHVEL

SEQ ID NO: 18728 - protein, 9 aa, Homo sapiens
  Table A; HLA-B*49:01; CHD4; R975H; 0
TELIVHVEL

SEQ ID NO: 18729 - protein, 9 aa, Homo sapiens
  Table A; HLA-B*58:01; CHD4; R975H; 0
TELIVHVEL

SEQ ID NO: 18730 - protein, 9 aa, Homo sapiens
  Table A; HLA-C*03:02; CHD4; R975H; 0
TELIVHVEL

SEQ ID NO: 18731 - protein, 9 aa, Homo sapiens
  Table A; HLA-C*08:01; CHD4; R975H; 0
TELIVHVEL

SEQ ID NO: 18732 - protein, 9 aa, Homo sapiens
  Table A; HLA-C*16:04; CHD4; R975H; 0
TELIVHVEL

SEQ ID NO: 18733 - protein, 9 aa, Homo sapiens
  Table A; HLA-A*03:02; CTNND1; A781T; 0
TENLEAAKK

SEQ ID NO: 18734 - protein, 9 aa, Homo sapiens
  Table A; HLA-B*44:05; CTNND1; A781T; 0
TENLEAAKK

SEQ ID NO: 18735 - protein, 10 aa, Homo sapiens
  Table A; HLA-A*30:01; CTNND1; A781T; 0
TENLEAAKKL

SEQ ID NO: 18736 - protein, 10 aa, Homo sapiens
  Table A; HLA-B*40:01; CTNND1; A781T; 0
TENLEAAKKL

SEQ ID NO: 18737 - protein, 10 aa, Homo sapiens
  Table A; HLA-B*40:02; CTNND1; A781T; 0
TENLEAAKKL

SEQ ID NO: 18738 - protein, 10 aa, Homo sapiens
  Table A; HLA-B*41:02; CTNND1; A781T; 0
TENLEAAKKL

SEQ ID NO: 18739 - protein, 10 aa, Homo sapiens
  Table A; HLA-B*44:02; CTNND1; A781T; 0
TENLEAAKKL

SEQ ID NO: 18740 - protein, 10 aa, Homo sapiens
  Table A; HLA-B*44:03; CTNND1; A781T; 0
TENLEAAKKL

SEQ ID NO: 18741 - protein, 10 aa, Homo sapiens
  Table A; HLA-B*44:05; CTNND1; A781T; 0
TENLEAAKKL

SEQ ID NO: 18742 - protein, 9 aa, Homo sapiens
  Table A; HLA-A*23:01; PIK3CA; Q546P; 0
TEPEKDFLW

SEQ ID NO: 18743 - protein, 9 aa, Homo sapiens
  Table A; HLA-B*44:02; PIK3CA; Q546P; 1
TEPEKDFLW

SEQ ID NO: 18744 - protein, 9 aa, Homo sapiens
  Table A; HLA-B*44:03; PIK3CA; Q546P; 1
TEPEKDFLW

SEQ ID NO: 18745 - protein, 9 aa, Homo sapiens
  Table A; HLA-B*44:05; PIK3CA; Q546P; 0
TEPEKDFLW

SEQ ID NO: 18746 - protein, 9 aa, Homo sapiens
  Table A; HLA-B*57:01; PIK3CA; Q546P; 1
TEPEKDFLW

SEQ ID NO: 18747 - protein, 8 aa, Homo sapiens
  Table A; HLA-B*41:02; PIK3CA; Q546R; 0
TEREKDFL

SEQ ID NO: 18748 - protein, 9 aa, Homo sapiens
  Table A; HLA-A*23:01; PIK3CA; Q546R; 0
TEREKDFLW

SEQ ID NO: 18749 - protein, 9 aa, Homo sapiens
  Table A; HLA-B*44:02; PIK3CA; Q546R; 1
TEREKDFLW

(The sequence listing continues in the following parts.)
